United States Patent Application Publication US 2024/0093182 A1 - sequence listing, part 18

SEQ ID NO: 38134 - DNA, 1066 bp, Artificial sequence
  DNA replication origin
tccgccagcccgccctgccacaagggtcgctggcttgccgcggggtcttgggcttgcggcaagacggccactctggcccagagccgtcgcgacaccaaggtcccgcgggcaggaggcgcgcggggcggccgaaggcgcactcacctcacctcagtgctgcgcagcctcgggcacgaacagccgcctagcgcaccctcatggcgcccggcgcccggcggcgccaccagcccagggtggacatctcccgcgcctcccaaacctctcctcccgcagctgcccagacttctgcaccgaggtgcagctcgacgcctccttgtcagggcttctccgcagaggcggggcttctgtgctagccaatcagcagcctcaccgccctctccgggccccctcaccacagccctgtgacgtgccaatcaggctgcggttgccacagcaacagtttggcgcgaaggctgggggctgacgtcagggagtggccgtgagggaccccaaagccaggtctggaaaaggggggtgggttgggtggtgggggtgcagcccccaaagaaatgggggtcgaaatggaggaaaccccactgagatgctcaaatgtaaaaccgctgaagaataaagggacaaatgtacacatctgtctaaatgaaaaaaatgaaaatcctggccgcaaaaacacatacattaacgtctaaagacctgcagggaagacaagacttttccgcctgggacacatgaaagacatcgagctaatttccttaataaatgaagagctcttggaaaccaacgagataaagaccaaaccaagacagaaaaatgggcaaaagggataaaactggcaattcgcaagaaaatccaaacggctggccgacctgcgaaggaaacatcacgacctgtttgcataaagaaatgcaaacctgaaacaccgggcacgtgcggtttaggggagcgggcagtctcacacactactgagttgtttcccagcagccgtcaatacagaccttccactgcgtaagcccactgcattgccatttaataaaacagcaagaaaatgagagagaaaaataatgaggta

SEQ ID NO: 38135 - DNA, 901 bp, Artificial sequence
  DNA replication origin
gttttgtctaggaccacttttgtgctataaaggcagagttgagttgctgtaacctagactgcggggaatcccttttgccacatcaggtgacactcacagattctggaaactaagacgtggggggtcatcattcagctcaccacagatggatgagtagataggttaatggatggaaggatggtgggtggaagtatggatagtagagtagatggattaatagtaaggtggatgattgtatggaagagtgaatggatagatgtgtatacagattgatgggtggtgggtggatggctgtatggaatgatgggtgggtggataggtatagggtggatgattggatggaagggtgaatggatagatgtgtatacagattgatgggtaggtagatggatgtatggaatgatgggtggatggataggtgtagggtggatgattggatggaagggtgaatggatgggggtatgtggatggatgggtggtgggtggatggataggtgtagggtggatgattggatggaagggtgaatggatgggggtatgtggatggatgggtggtgggtggatggatggggatatgtggatggatgggtggtgggtggatgggtgtatgaagtgatgggtggggggacaggtgtagggtgcatgattggatggaagcatggatggatgggggtatgtggatggatgggtggtgggtggatgggtgtatgaagtgatgggtgggtggtgataattggaagaatgacagaattaatgcattaggtgggttgttgcatgggtggctgaatggatggacagttggatagttgtgtgcattagatggaagtgtggatacatggatgggtggatggatgggtgggtaggtggagggatggtagggattgaagagatacttgtctct

SEQ ID NO: 38136 - DNA, 2267 bp, Artificial sequence
  DNA replication origin
tccactcaccttggcctcccaaaatgctgggattacaggtgtgagccactgtgcccggccagcatattgttgtaattagttttcacaatacccttatgaggtatgtcctaagatgcccaacatcaatgactgatgaaacacagagtttctgggagtttactaacttgccctcagtggggcaggttgatgatgaagagcctggaatcaagctcagggaacagtgttcaaggcaggggaacaatatgtgcaaaggcccagaggacaacggagcctcataaggaccctggaacgagggaggtggcacacggaaggctgagaccaggcatcatggaggagctccatgtaaactggagtctcccactcactgtttcctctagtgagttcctttggtaaattgggccgtagatttctcatctgtaaaatgggcgttacagctgttgaaggaattaaatatgttaacaactgtaaaacaattagaagagtgcttggtgcatatacaaactcagggaatattagttgagtttgggaaagctatgagatgctcgggaaggggaggcagcagattcaggtgagtgtcagggctgggaaggggaggtggtggattcaggtgagtgtcaggactgggaaggggagggagaagattcaggtgagcgtcaggactgggaaggggagggagaagattcaggtgagtgtcaggactgggaaggggagggagaagattcaggtgagtgagaagattcaggtgagtgtcaggactgggaaggggaggtggtggattcaggtgagtgtcaggactgggaaggggagggagaagattcaggtgagtcaggactgggaaggggaggcagtggattcaggtgagtgtcaggactctgcaggtacagattttagagtcatcagtgtatggactccatttaaacctgtgagattggataacagcaccaaggagtgtggatgtagaagaggagatgagatggagggaaggggagggagaagaggggatgagagggagggaagaggaaggagaagaggagatgagacggagggaaggggagggagaagaggggatgagagggagggaagtggagggataagaggggatcagagggagggaaggggagggagaagaggaggtgagagggagggaagtggagggataagaggggatgaaagggagggaaggggggagatggggggatgagaggggagagaaggggagggagaacaggggatgaggaggggagggaaggggagggagatgggggatgaggaggggagggaaggagagggagaacaggggatgaggaggggagggaaggggagggagatgggggatgagggggagagaaggggagggagatgggggatgaggaggggagggaaggagagggagaagaggggacgaggaggggagggaggtggagggggaagagatgagaggagggaaggggagggagatgaggggatgagagaggagggaagcagagggagaagggggatgaggggagggaagaggagggagatgaggggataaagaggggagggaggtggagggagaagagatgagaggggaagaaggggagggagaagaggggctgagaggggagggaaggggacggagaagagaggatgaggagaggaggagggagacgagaggacgaggagagaaggggaaagaagagacaaaggaggggaggagaagggaacagaagggaggagagggaaggagagaagagaagtggtccaagggctaccacaatattttaagcgtctttctgtttgaatggattacccgactcaacttcaagcttgaatgatgtgggtgcaccacgtttatgctctgaaggtgtcagatttggggttaaatccagctccgtgttttccagtcctctgatttagggcagttgccttcacctctttcagactcagtttccttattcgttctgtggtggtgactaccatgccgcactcagccgtggggagttgtgaggatgcatggagatcatctgtgtggcaggactagcacgcggcactcaaggctgagtagtgattagcttctgctcttctgggttcaaataaaattcaaataataaaacaggacaggctggcgctgcgtggccaggatgtctctcttttctgcctcggcataactatttccatccacaattttcatatcactctgtccatcctcctcatcctcaacggcatccaagtcactctggctttttcctgggtgtccgcagaagcctcagcctctgttctcagca

SEQ ID NO: 38137 - DNA, 1470 bp, Artificial sequence
  DNA replication origin
atcaccggtacctcttttaagcttcacctctctgtgcggctccgcaagtatgttggtctccctgagagagtggggcctgcaacctgctgggcgcaggcgccttgagctgccacgtctgcccttttaccggcttgggtgcaggcaagggaaatgcgtccccgggccggggggcgcgagcgggggtccggggccgcgagctggggtccggggagcgcgagcgggggtccggggggcgggggccgcgggccgcgaggggggcgggggccgcgagggggcggggcgtgcgagggggcgggggcgtgcgagggggcgggggcgcgcgagggggcggggcgcgcgagggggcggggcgcgcgagggggcggggcgcgcgagggggcggggcgcgcgagggggcggggcgcgcgagggggcggggcgcgcgagggggcggggcgcgcgagggggcggggcgcgcgagggggcggggcgcgccgggctcgtcctctccgcggcgctcagtggcagcagggagggccggtgagatgccagagcaaggtagggtcctgtatttggggaccgctgacgtttgggtccccctcccgcggctgttagcgctgcgtggcccgagacctgcggtcgggcggggattaaggctgctttccggagggccccggccgcgtggtcgccctgccagagcggttgatgtcaggcagtgctgggaggcgttgctctccgggttcgcttctctcctgttgtcctaactctgcatctctcccgggtgaatcacagagctgtaaactaaaaatcaaattctaagctcccagccaactgaatggacccctcctctcagctaagagcatggcaaacttaaccggaaacactagttcggccgcgataggaaggagatgggacatgcctcattttaccctcctctctttgaaattcaggcacaggtcgggcgcggtggctcatgcctgtaatcccagcactttcggaggccgaggtgggtggatcacatgaggtcaggagttcgagaccagcctggccaacatggagaaaccccgtctctactaaaaatacaaaaattagccaggcgtggtggcgggcgcctgtatcccaactactcaggaggctgaggcaggagaattgctttaacccgggaggtggaggttgcagtgagccgagatcgcgccactgccactccagcctcagcaccagagcaagactacgcctcaaaaaaaaaaaaaaaaaaaaaaggaattcaggcacagctgaccagtattaacattaaaacaatttttttttagtatcttcatgctaaaggggtaagtagaaattgcatgtagcctcccatcagtttattccaaatagcaaacatttaccaagccctgagttattaactacgtattttctttttgtaaaccttacaattgagcaggcaagtaataacattatctccatatttttaatgtgaggaaactgaggccc

SEQ ID NO: 38138 - DNA, 1160 bp, Artificial sequence
  DNA replication origin
ggcgcgctcggggccgccgcctcctcggtggcaacggcgttccagacgcagggccgccgcctcctcggtggcaaccgcgttccagacccagggcgccgcccctggagaccgcggggctgaagggcgggggaggagagaccgcagcttgacggcgacccaggaacaaacccacggaaggggtcaggctcgtacaaaggtgcggcggggattcctatcctactcccctgctcggtcctgactagggacctgcaaagcggccccgaccggggccctcagtggctacagacctctccagacagaagtgcagaagaaaatggcgtccgcagcgagcaacccggaagtcccgcccccaccggcgtgagccgtcggaaacgtccccgtcctaggccgtcgttggcccagctcccgccgtacgcataatgcacagccttctaagtagtgtagttttcctcatgtgttcaacaacgggaggaacgcttcacggcgcaagttttcctcccagggaaaggcactccaggacccgaggagacgctccagacccacctctttacggtgggcacaactcgaggggaaggatggagggagggaaccgaggggcaagggttacattgcattcttctctcgggaaaatcggagctcgggagacagggactttccttcaggtcagggcacaggcaaaggcgcagaactgggtcctcagctcgcctggcgactgaccccctttcacatccctcctccccggatcatcatcttggaagacacaaaaaagccgaatgatcatctggaagccctgccccgacacgttgtgtgcgcaaactgccctcttttgagccttctttggaccagcacagcctctacgtgatgcagggagtcatgtatttggcccagaccacacaaaaagtggatttgcccacttctgaggtggggaggctgcaagtggaggaggttcggaggctcaggatggttagtttgaaatgtctacagaaccacaaagtatctctgtcacaggcaattcgacttacgactgaatgttggaagaaggtttgagcatgaatatatgaatttaggagttaccttacactgttatttcaagtcatgatattgagtgagaccatcaaggcaatgcatgtagatggagaagaaaatacacagagcatgag

SEQ ID NO: 38139 - DNA, 727 bp, Artificial sequence
  DNA replication origin
gaggcggcggccccgagcgcgcctggaagccccgggcaaccggccagggtcgggcacaggtggggtccgtcaggccgcccggggctcctctgtcccagctctgcggcccagggggtgacgtgatggcggcagcggtgctgacggaccgggcccaggtgagtggacggtggcttcgcggttgccgcttccttgccagcgctgaggcggtttccgaagtgggtgggagcccaggtatcccctggatttgtcttcgcagtcgtcgttcgctttggtgtgtggagctggtttgccacttaatttatacctggccgtaaggagtgttgggcctactggaaggagctccgtaggttgttgagtgaatgatgcttcctctggggactcccatcatccttggcctgcaagcattctctggtggaccaggtctcattccagcatgaattgggggcctgaggggggaaggggagggcagggcagtagcaagccgacaaatgcgcgagcagagacaaggtatgttgtatgtttaaggaggctcaggagggtgtgtaaggttgccatggttttcctgcggccgctgagacgtggagggcaacagtgtgtggtcttttcctggatgttctagccatccgcaactactgcagacattgtggccagtcagatgcccttactctcatcgctacagcctgcattatccttggccgctcgtgttccgtggccccaaagtatcctg

SEQ ID NO: 38140 - DNA, 2150 bp, Artificial sequence
  DNA replication origin
cagtggaatctttttggtccagtaactccatttcctccttttaaattgcaccagttactggtgtgtggggtgtggttttcctctcctttttatgtggtcttataggatggatggtaacatggacacagatcctccctgttgtcctagcacagcaagtagccagacatagaacctacattgagccactcagatgatctctcacaggacttgaggcccgaggaagtgaaacagaaacaggaggaaagatggaagaccactcatcctgacacagcaagctgattggaccattgctcctgggaaaatcattgccatggttccctttccggaaccctctagaaatctctttgtacctatctctaagccagttctagctatttattcagtgaactccttcagagcctttcaatatgtttctttacataaggcagtggagttagattctgttgcttataaccaaagaatccaaacctatacgcagtacttattaatattctggagatacaatgaggttaattagggtatccaaggataaagctgtagaacatacgtgccattatattaaatttacacaataacattcagaagtaaacttctcagaaggcaatgcggaccctcctgacagccacaaacagagctcccaccagcccacagtaaactcagagaccccagagcctccagacccgcacctcaccgtggctgtgcgctgttcatctaatttctcgcttttctgcagctccttgtagagctcaccccttggagcatattccagaatcaggtacacccggcgtgcatcatggaaatagttatacaggcgcaggatattggggtgtctgaaggattaatgttggaagagtcagatttctccctgaggcctatcatatgatgccaccgtcactgcctggtcacacaagtggcaaattatgctgggaccagaataacaacagccctatctgggagcaagtgaggggagaacggagaacaggaaccaggattcgagtgtctgacccagggtaggaggtagtgtaaatggaatgaactgcagagaagtcttcaaggtacaagtgcagggtttacttggggttagtatttggggaaaatgctgggctcagacgtcaaagatgaaagaggaagcagagactgtccttactgtagatgagcctggatctcaatttcccggcgcagctggtgctccagtccttccttctctatctgcgacttgaagagaaccttcagggccacaatgaaatggctttccttgagccgagccaggtacacattcccaaatttccccttgcccaggggacgcccgatttcaaagtcatcgactgtgaggcgccgcctgacaggagaggaagaaaaaagcctcagcttgggaggtagggtaggcggagggaaagtcagggatgccaatgctccccttcctctttcattgtatccttcctctgccgctttcccttctcacacagacccagccctatcagtagttctcgttcccaggagccagcaccccacacacccagtctgttcttcatccccacgtcccaccttccttccttttccagataccaatcccaagggactcacatggctgggctgctgggctgctgggctgtttggtttgctgtagccactgaaagagaggaggaggagggagataggaagggagaggggagggaaggagaaggggagagaaagagaggagaggagaacagtagagaagggaatagggagcgagaggtgaggggaagaaggggaggagagaaagagagggaaggggaaggcagggagagggggagggagaggtaaggggaagaagaaagagtaaggtaaggtagggaggggaggaggaggtgaagaagaggcagagagaaaggaaggggaggagagagtaggggagggagaggtgaaagaaagaattggagggaagggagggagtggggagaaaagaagagcgttggggaggaggagagggaggggagatgtcaacacatgtgtcttctgtgcacccgacccctggcccagtccccagccttccctgcgtcctttctctggcgctggctctcacactcttcgcctgcaggttgagctttgcccagctgcaccacagctctgggggagctcatggggagaagaggtgagggcgcggacgc

SEQ ID NO: 38141 - DNA, 1076 bp, Artificial sequence
  DNA replication origin
tccaagccaaaacaaaaacaaaaatacacaaaaaatgtttcagagactttgagtggaggtgccaggctggcagttgtacacacaggaatggagttcattggaggtgttcaggaaggagacatccactacatgatagctgaactgttgtgaaactgggtcagatttaggaagcaatggtgttagtaggaaggaaggagaaggaacagactgaggactgggtgtctccactgggcacctggatggtgttggtgggtgtcacaaagacagatgagagagtggatcgactgagggtatgtgtgtgtatgtttgtgtgttatgttgggggcagcctgtggagtataaggaagggcttttgaggggagagtggccatgagatggatggtgaggcatctccacaaactcaccagggtttcatggtgagtcttgcttggacctgggtagtttcatgcaaactgtgagactactttaggggaagatgggatcagcaaggagcattgctaggcctggggtggggatagcattggggaggtcagtgtatctgggctttggattaggattagggggatagagaatgttgtgactgcttatgggaaaacatgtacattgcaaaagggggagacagccaagatctggaactcagaggaggtatgcaagaactgtgaggttgtcacttgggttttgggggggctgaggttaaaccagaaaacaggactgggaagggagaccttcagaacagggctcggtgctgccccaggcgctagggaacattatattctgggcagcccaggagcaaatagggttctggtgcactgcaggactccatgtacagagtggcatcttgggaggccatggaaatgctcctggttgggccagggctgctgttagtattgcaagagtggaggcattagatacatgagagaggtactgtccaaagcgagatgcgaaggtgaggaggagcatgaatgcgtggtcccagccctggcaatgggcacgtaagggagaagagtgagcctgagtttgggtgtctgggaggcaagatctggagaccccaaggaaatggggtgacaaaagaaggt

SEQ ID NO: 38142 - DNA, 1099 bp, Artificial sequence
  DNA replication origin
gcccgttctcaatgagctgttgggtacacctcccagacggggtggtggccgggcagaggggctcctcacttcccagtaggggcggccgggcagaggcgcccctcacctcccggatggggtggctggccgggcggggggctgaccccccaacctccctcccggacagggcggctggccgggcggggtgctgatccccccacctccctcccggacggggcggctggccgggcggggggctgaccccaccacctccctcccggacggggcggctggcccggcagaggggctcctcacttcccagtaggggtggctgggcagaggtgcccctcacctcccggacggggcggctggccggggcgggggctgacccccccacctccctcccggacggggcggctgccgggcggagacgctcctcacttcccagacggggtggctgccgggcagaggggctcctcacttctcagacggggcggctgggcagaggcgctcctcacatcccagacggggcggcggggcagaggcgctccccacatctcagacgatgggcggccgggcagagacgctcctcacttcccagatgggatggctgccgggaagaggcgctcctcacttcctagatgggatggcggccgggcagagacgctcctcactttccagactgggcagccaggcagaggggctcctcacgtcccagacgatgggcggccaggcagagacgctcctcacttcccagacggggtggcggccgggcagaggctgcaatctcagcactttgggaggccaaggcaggcggctgggagatggaggttgtagcgagctgagatcatgccactgcactccagcctgggcaacattgagcactgagtgaaccagactccgtctgcaatcccggcacctcgggaggccgaggctggcagatcactcgcggttaggagctggagaccagcccggccaacacagcgaaaccccgtctccaccaaaaaagtacgaaaaccagtcaggcgcggtggcgcgcgcctgcaatcgcaggcactcggcaggctgaggcaggagaatcaggcagggaggttgcagtgagccgagatggcagcagtac

SEQ ID NO: 38143 - DNA, 1154 bp, Artificial sequence
  DNA replication origin
acaggatgggaaaatataaccatttcctcaacgaggaaggagactaatatttcagaagagcagttctgctctacaacaggtaagcagccctatgtcctgttattgcccaaacatagtcttatgctcaaagacaccatcccagcagatgttggcttggtgattataaactcttcggaagctccagtggaactgaggaaccacgatcaccaactactcaagagtacagctattcctaaccactacaatcatctactcttccatagataccacatctttgagacttacctggatgtccttgctctgctgaacactgactcaccagaaaatgactgaaaatactgagaaaaagttttttcctctgctcataccacccaaatacaccattctctcctcccaggtcaagccttgaaaatattggtctggttttgtagaatttgccaagtccacattctacctggaaactgaacctagaatggtaaaaaaacagacaaacataaataacaaatgccagaagttgttctaagtagtgatgaaaataataggggatatgaaggggagaatgtgagggaatggcagttgtattgaggacagagttggaaatgtttaaactgaaggctgaggacactgcccattcagatgagttggatgtgggtggctttcttgaaggtgataattgagttgacaccaaaaaaaaaaaaaaaaatgagaaggaggcagctatgaaagaaccaagtttaacatattcaggtaaaaggtagagcaagtgccaaagagatgtggtgggagaaaacttagtgagctgcagtaacaggaaggaagacacagtggctggaccagggcatgcggaaagcagtgatgtgagaaactggacatgattgtgctcagtggtcagtttgcagctctctcctcctctctcatgccactttgaggttaattcgttcccctactcctggccccaggatcatggatgtgatttctgtcttcttggagttttaggaacgtacacatttccagggttacatacgtggaatccaacagcacgtagcttttgcagtctggcctcattcacttagtgtaatgcatttgtgattcacccttgttttgtgtagcaatgctttatttatactgctgagtagtatcccattgtctgtata

SEQ ID NO: 38144 - DNA, 1456 bp, Artificial sequence
  DNA replication origin
ctctgggcgggacttccggtatcttcctcgcggtggacatcttgtcggctcttaggtggaaccatcggagcagaagctcggggttgctgggcggttccgaggtgacggaagcgggagggtgcgggagaagtcgctgttcgctctgcggagtggctcgccagcgaagaccccgcctgcgcccccggggacggacgaccgcggtgccagggtcccgcgacctgggaccccctcgcggctccgggtggtctacgaactgtgatggcggcggccgcggtgatgggcccggcgcaggtgggtgctgcctttcccagactttcgcccgccccaaatcctgaagttccaaatgaggagcgcctgtctgagtccctgcagcgcaggccccagtgtccaaggcagcggggcgctggtgggtgggggcgagtgtgactggcagaggggcagcctgagcataggtttggagctggactgagcccgtagcagtcgggagcgtgtgtgaaccgtagtcaggcctgcaatgtcgaggggagaagttgctccttcattgcgaggacgataggagccatggcgggttttgaatggtggagggaagggatccgaaaaaggatttttaaagtattccaatgtttgctgaggaggaaaccgactacagtgaggtagaaacgatgaggatggaggcaaggagacgtttgaggaggtccctgcaacaaactccagaagtgttgcggtggtggctgggccagagcagtggcaggaggggttgggtggggaagtcatgagattctgggtagatttttaaagatggaaccaatggggtttcctgccgcatcagatgtggtcgtgagtgaatgtagggaggaaagggctatccagggtttttttggcctgttttccttcctgaacgtgtgaaagaatggaaattggtaagtcacagcagggagcacgtttcaggggcatcaggaattgggttttggacttggtgaatctaaggtgttctgcactggaggttcatcacgggtagctgaacatgcaggtctggggttctagagagggagttgtgctagagacttcaatgggtgaggcataaggtcaaagcctgtagtagatcagatttagagggtggaatttcaaggaagttattttgtgtggtctctgaagtgagaggtgggtttagggtggaaggccagggatgaaggggtggacacttaagattccttccagaaaggaggggtcctggcatgtgaaagcattctagatggtgttgttggaagtcaatgcttggtgctgcaaagtgaaaccagcactcaggcaaaagttttctcagcaaggcaatttacttctgtgcaagtgtgctgcctgtgttaatcacgatcccaagagcacactgaacaaaggagggaaggggtttttatctctaacccatagtccctaccttcctctgtgtcactcccccatgggc

SEQ ID NO: 38145 - DNA, 905 bp, Artificial sequence
  DNA replication origin
acactctacccacaaacctatacgttgcatacccaatgagggcccaggagaggggtgtttcagtgcctgcggggggtgcgtgggcgggacttccggctcctccttgtagcggacattttgtttctgtcaggctgtccctggccggggttctgtaacgcttgtgtgggccgcaggtggaggtgttgggaaagcgcggaggagatgttgtccccagtgtcccgagacgcgtctgatgctctgcagggacggaagtgcctgcgtccccgatcgagacgcctgccgctcccggcagctgtccgcgcccacggtcctatggcggagctaacggactccgcgcgggtgggtgctgcgtcctccgggccctcagtcaccctttctccgactccgaatcgtaaagtgcctgcagcccctgtgtcccaggacagcgacgcactcttggggcggggtcctatctcggtgtgggtgggtgtgggagagttacgggcggaggggacggcgcaggtaaaggctcgggggtgctgctgacccccaaacatttgggagacagggttctcatcaacacagagcagagtttgaggaactgtgactggaatggcaggctgagaagttgtcgcttcattctgagggcgttgagattaactgagggttttgaatagaaggacgtgatcttagctgggattttaagtgtctcgaaatttgctcaggggagaacattagtttggggtggggactgcgaggatggatacgaggagaccggtaaggaggctactgcagtggattccaggaatgctttggtggtggatgtaccaagagtaatggcaggtgagtgggtagaagtgatcatattctgggtaggttttaaatttgaaaccaacaggattttctgctccatcatatgcagctat

SEQ ID NO: 38146 - DNA, 1063 bp, Artificial sequence
  DNA replication origin
ggcgcatgcctgtaatcccagctactcgggaggctgaggcaggagaatcgcttgaaccggggaggtggagcttgcagtgagccgagatcgcgccactgcactccagcctgggcgacagagtgagactccgtctcaaaaaaaaaaaaaaaaagaaataactccgtatcacacttctttcccagtagacacacgatgtccccgtgttccgcatcctcctgcctcagtcgcgcctgcaggcctttgccctccgccagtctcgctctgccgaccgcatcaactgggtgtcggaaacagggatcccacccgccggcgcctctccgtccctgacagaggcctgggctgcagggacgcgaggaggcggccctcacgatcaggggcctcagggtctgggtgggtagggtgggtaaggcccggaggtcgcagcgctcacctgagcaggcgccctcagagcggctgctgccgccatgactctgggcggggggggaacgcgggctcggcggtgttcctgtcgttgtcctgtcccgggtcgcgaccagcggcgtcgccgaacctcagatccgcctgtgtgcaatggccacaaccactcctcccgagctcgtccagacccagcatcgccggatggacctgacaggccaaaatggctgccacggctaggacgccggaagtcctggcttgactttacgtgccccggcaatggcacggcttctctgaagcttcattggctcagccacgttaccatttcgcagggcggattctgggtaatgtagttcccagacatgggcagcgcttaaggtggctttcttccgactttccgaagaaaggggcaagctccactgcgaggggcgctaggaaatggcgactccaggtccagatgcggaggagggtctcccatcttagaagaggccatacgcacatttctgggggtactgtgtgcaactgattgcccgcgtgtttggagacttcttatttcagaatttgtgatgctcggcttcttccttttttttttttttttgtcttttttttaagacatagttctctctgtcactcaggctggggtgcagtg

SEQ ID NO: 38147 - DNA, 1044 bp, Artificial sequence
  DNA replication origin
cagagaagagcatctatggcggtattagatgggctcaagccaccccgtagccccatgcctggccttggagccgggtgccctcgcaatggctgtgtcacctctgtgccccagggctcagtggcgcctctcatcaggggctccttgccagtcgcgccctcccttccctagcacaccaggtgttggaaacgggagcccctccggcgagcccccgtgtcctgtcctgggcagcagggccgcgagcaagcgccctcgggggtgctaggactagcgtggggagggcggggaaggcccagaggacgcggcacatacctgggccggggccgtcagctcggccgccgccatctgactctgtgagcggagcggggccagagaggatgtccttattccgggccgggcctgggtaccctgggcgccgccgagcctcagccacgcctctgtgcagcggggaagactcctctcgcgccttctcagtcagtcacggatgatgctgacccagcgctccggggctttctaccaagtaatcagtccagacaaatgccaaaacgaccgccacaaggaggacaacggaagtcccgccgcgaccgcgcgtgcgcttacggaaacaccacctttcggaggcctcattggctgaaggtcgccgtcgcccaacgcaggccattctgggtaatgttcccacaggcgcacggcgggagagtgagggtcgcctccacctccttccggaagtaaaggccaaacccctgtagggggcgctgggaaatggacactccaggttggggcggaggcgaggcttcgttctttcttaaaggagacgtacccaggtttctaccgattgctgtctgccagtgtttgtttggagacgtgtcatttcatgtgttcccagaggcacatatccagatgcacatattattacatacagtcagtcagtcacaaaatatatccactggttgagaaagcaaataaatatgactatgttgcggccgggcgcggtggctcacgcctgtaattccagcactttgggaggtcgaggcgggcggatcacgaggt

SEQ ID NO: 38148 - DNA, 1021 bp, Artificial sequence
  DNA replication origin
ccttccccttccctcccctacggcgacctcaggactcccgatgggctctggaaccccggcccggcccgccccctcccgggcccgggcccgcctcccccgacgcgcgcccctggaccgcgatcccgggccagctcccgccgacgcggcgccgagaccctcccgggtgggcgtcccgatggacgctctggcgggcggagggacggatgggccgcggcggactcaccgcgcgcgggcttcgctcgggcctgggccactcggtcatggcgacccctgggctggcgagcgcgcccaacgccgcgggcggaccccatccccgcaccctgcgcgccgcgggcggccgccattggtccgctggatcacgccgggcgtcggtgacaagtcaccgctgcgggactcccgggcaggggcggggctgtgacgcacgaggcggccgaggccaatcagaagccgcctgggatgagcgccccgcccccgccgtgccctccagttacctcgggccgcggttccagtcgccttggcaacgggtcgcgcagcgtcagggacgctgctgcggaaagtggagacggtggcggctgcggggatgcgcatgtacgatggggccgcggggcaaaacgacggcattccagacacgcaaccgttttatacagtgtccaagagtagtatgttaaaacattgtttttaatataaatatgtttagtacaagtatgtcccagactaggatcgccactcttagcaaataaaaatacaggacgtcggccgggcgcggtgacacgcctgtaatcccagcactttgggaggccaaggcaggcggatcacgaggtcatgagttcgagaccagcctgaccaatatggtgaaacccccgtctctactaaaaatacaaaaattacctgggcgtggtggcgcatgcctgtaatcccagtttctcaggaggctgagacaggagaatcactggaaccggggaggcggaggttgcagtgagccgagattgctccattgcactccagttttccagcgtgggtg

SEQ ID NO: 38149 - DNA, 1602 bp, Artificial sequence
  DNA replication origin
gaaaaacaaaacaaaacaagacatctttaggaaggatttttgaccatatgggaaatgcttatgacaagtgaaaaggagggattccatgggatttttccctcttcatcctctgctgcatttttcatacactctgcagttctcgtgcatctggttttacaatccaggagaaaggagaggtgcagggtggcagaaaggcaactcacggggactgtgcccagccagccatcttcgagtcagcgtacccggccacctgcaccctgattgggaaactaccagcttggtcttccctgccaaggccacaggcaaaaatgctctcttatgttgtattcacacttttatatatgtagttttgaataagaaaaaagggcctattttgaagctccacaggttcaagaaatccctttgccctggggcctcagaccttatactctctcaggtgctcatggcagctcaccctggagactctagggaggggggctgtagcccctcagcatcctccagggtcctgggctgaggtctgtgggaggagatgctaagtttatcagggatgagggtaaagaggaggtcttagcagaaggcaccagaggtccatgggtgtgtctggggtctatatgggggctgatgtggaacacctaggccaatgtgggggtacctgagctgatgagagtcctggactgatgggtggctgtttctggaagatgaagagggcctgggatgatgtgaaggggactgaggtctacatggctggtgaggaggatctgggcccccccatgggcaatgctgtggtggccctggggtcctagaagtctactttggtaggggtctctgattaatgttggggatgtgtgtgtgtgagagagtgtcacttggagggctcagtgcctgtggaagggccaggttcacctggcatgggcactgagatctgcagcccgagccccaaattctattgcggggatgggcagaagggctttgccgctgatgccggatgcttagtgacatagaagacgtgttcactgcgccagtcagtgaatggttctggctttgagaagggggcttacagtggggagggcgttgggagcttaggatgccacacggaggagttccataataaacgagctggggaagtgtgcaagggcagcgcactgggaatacaggggaggggcagcgacgacggctgtggacggctggttggggggaggatggtggggtgattgggtgggggatgggtcgggggcggctgttcaggagggagatgggcctggggcggggagggggagcttgtagggagagagacgggtcgggggctgctgttccagtgggggatgggcccaaggggccgggtagggagggagatgggtccgggggcggctgttcaggagggagataggtcccgggatgctgatcaggtgtggaagggagaacttggacgcggccgagcggtgtttgggcgggcaatgggggtacgtagaggggcttcggcctcaaacggacaggcggatgccaacaggggtcggggtccctgcggaaggggcggccccagcccccccagtccccgccccgcgtggcctctagccttccccttccctcccctacggcgacctc

SEQ ID NO: 38150 - DNA, 892 bp, Artificial sequence
  DNA replication origin
tgtatttttactgtaccttttctatgtttaaatccacaaacaacattgtgttaccgttgcccacagtattcagtgcagccccgtgctgtgcaggtctgtagcctaggagccatgggctgtgcgtgtaggtgtgtgagtgccctctgcgatgtatgcacggtgacgaaaccgcctaaggaagcatttctcaaaaggcttccgatggtaggcggttgtatgcgctcagcgatcgccagtcgtgcccactccacagcgcctcctggcgagccgggctgccccgcgcagagcagctccacctgtccctcacctacgctcccgctaatccccggcgacttcaaaagcagaggtgcctcaggcagtgttagcaccctggcagcggcaatgcctggggccgcgctcaccagcgccccgatcccggagctgccgtctctccacgcgggcgccaggcctcaggcctaaggcctctccctccacaagtgcagctcgctcagggacgttggggcaccctgctgtggctgagccccacagcctaaaccagcgccaacgaggatcctctcagccacagcggccctggtgggagaggggtgggaggacctcagcagccttccccacctacgacccccgcaaaaagagagtccttggagttgccgtgtggtgaggggatggcctgtgagcgcggctgtggtttccacgtggcgtctgggatgggagagggagtcagataagcacatctgccggcagcggctgaggaagcccgtggccaacaactgtggtctacccaggttagatgcctccgttagatgcagaaacagaaaccacggcccacgaaactttgttttggtgcaggagaggggctctcatgatgatctttaaatctattttagggccgggc

SEQ ID NO: 38151 - DNA, 1240 bp, Artificial sequence
  DNA replication origin
cagcctgggaaggccccggacccgcaggacccccaggacgcggagtccgactctgccaccggatcgcagaggcagtccgtcatccagcagcctgccccggacaggggcacggcgaaactgggaaccaagaggccgcaccccgaggatggggacgggcagagcctcgagggcgtctctagctccggcgacagcgcagggctggaggccgggcagggccctggggctgacgagccgggcttgtcccgcgggaagccctatgcctgcggcgagtgcggggaggccttcgcgtggctctcgcacctgatggagcaccacagcagccatggcggccggaagcgctacgcctgtcagggctgctggaagaccttccacttcagcctggccctagccgagcaccagaagacccacgagaaggagaaaagctacgcgctggggggcgcccggggcccccaaccgtccacccgcgaagcccaggcgggggctagggcgggcggtcccccagagagcgtggagggcgaggctccccccgcacccccagaggcgcagaggtgagccgctgtgctgtcccgttccggaggggccgctttgccggccgtgaatcccagacgaggcattgggcctttccacgcccctgggtggcggcttcctgtggtgtttgtggacgtcctctgcctgtgccctgaatccgctcctgaggctaagcgctcccaacgagaagggtccacgggaagccctcacctctgtaaacacaccctgggccagcgctcgcatccgaggggagccgccggatgtggaagaagactcggctttcctgcagccatttagtgccgccccatgctaggttatttgacattgtgcagtgtagagttgccttaaagtgcgtgatctgccagtgctttcttcaagtcacccttgccccgattcctcctgtttgcgctccccagggttgctcaagtggaaattttgtcagctgtttagccttttcgtacttggcgtgatgtcaacttcacttctaatctgcaaaagcagaagctgtttcctagtttacctcgcgtgtgtttacctatatggagtagctcgcagagatcacagaaatgcttgcagcctaaggcagggttttcagaccgtgggtcccagcccatttagtaaaatgggaaatcaattagcaagtggtcaccagcattacacagcaatgaagcagaataaagtaggccagaatgcatcatgtagtaaaggcaaa

SEQ ID NO: 38152 - DNA, 1285 bp, Artificial sequence
  DNA replication origin
cgccggagctagagacgccctcgaggctctgcccgtccccatcctcggggtgcggcctcttggttcccagtttcgccgtgcccctgtccggggcaggctgctggatgacggactgcctctgcgatccggtggcagagtcggactccgcgtcctgggggtcctgcgggtccggggccttcccaggctgctcttcctcctcctcagtggtgcccgacgggggatcggcaagggcgtccccagggggcgcctccgtaggcagctcaggcagcacccccgcgggggcggcctcctcgcaggcgcacccagcgctctcctgccgcctcccgccttctggaacaaggtcagagccctagcgtgagcgccccgcccagggccagggagaggaggacccagccgagcctcagctgccggaacagcgcacagggctccgggctctggatccccgcggggctcacggctgtttggaagcagcgctgtccctcccaggcagccctgcagcgcatgccccgcgcctgctgctgcagatgtgggacctggaggcctccaacaacggaggccaccgacaggacaggaaggacagccccactgagcccgggttctggaaaccgcgcctttggaggtctccacctggccactagcttggccacaagatgcacgatgcaaggagagcctgctcagagcgcaccctcctggagggaggggcccggctgccagcgaagagagtggggtcaatagctaaggccaaaccccccagcgacaagccccctggcgacaggcacccagggccctccagcccaagtccgcctctaggtgttcttgttggtgtgctggcacagagcctccaatggggcagaacggccacccccgggaccagtcatacacagatcctggcaactaacaccactgccgtttccaccgaccaagtcttggggtggtctgtcatgcagcaagagaccatggacgtaactggattcctgcctcactcagacacggtggtgggagaatggtgaagcagtcaatgctgaggtctttgctggggctgatggcgctgggaggggccccctcagcctctgaagaaaaagcaaaccccacccggccctaacaccaattcaacccaacctcacctgggaggctgcttccttgtggatctctttccaccaaccggagttcctcagtgtccagcctggaggcagcgtcaggctgggaaagctgataccctgagtggggttaaaaaccaaagaaataaaaggcatcaacacagagtggctgatgggtgttgtgtgtc

SEQ ID NO: 38153 - DNA, 1072 bp, Artificial sequence
  DNA replication origin
cgcagcaggtgggtcggtcccggggatgcagcgcgggggtcagagagcgaccccaacagggtagacggtgaggacgcctcagtgggcagcgttagggaaaggggccagggtgttcccggggttggggtgcgagcccccgctgtgcgtccaggaggccgagggtctggcatcccttcgcgtggagtgcggggcaggggccgggtccccccggaggtggctgagatccagatcggtgaggggccctgcaggcaggtagggaactagtgcaacccccaccccgtgtaggctcgtggaggggaggcgcttagggcaccctgtgggtgggagaacaggaaggggcggctcctgatgggggagagatgagggagggggaggctcctgatgggggagaaaggggggaggggaaggctcctgaggggggcgaaaagggggagggggaggctcctgagtggggaagagaagggagggggaggctcctgaagggaagaggaggggaggaagtgggggctgagggtgtgaggatgtgagggtgtccgtggtggggggacgctgggcaggctgtggccccaggggctggagcagggaagggatggagggtgcggggaccaaaggggtgcctagaatgggcattgtctctgctgcccccacccttggaatatctcgcctctccccagtcacctgggggtgggttctgtttgagttaggtgtctgcgcccaccccggagacctctctcgtggaagaggcaagagtgggtgtactggcttcggtcctgacccagggggttggggtgggggcctgactcaccctcccatcactccttccccatttcctttctctcaccctcctgggctccttccttttcccaatccccctctacccccgtccagactatctggctttccctgctcttgctccttcctctcctgtcttctctctccctgctaccttccctccccgcttcccccatttctgtctgccctccttccactttcccatatattcgcctgtgtccttgctgactcctgggcgaggctgagtggcacagtcacttggttccatgtcacctcctcg

SEQ ID NO: 38154 - DNA, 1294 bp, Artificial sequence
  DNA replication origin
gcagaggcgcccctcacctcccggacggggcggctggccgggtgggggggctgaccccccccacctccctcccggacggggcggctggccgggcagagggtctcctcacttcccagtggggcagccgggcagaggcgcccctcatctcccagacagggcggctggccgggcggggggctggccccccacctccctcctggacggggcgtctggccaggcggagggctgacccccccacctccctcccggacggggcggctggccgggcggggggctgacccccccacctccctcccgggcggggcggctggccgggcagaggggctcctcacttcccagtaggggcggctgggcagaggcgcccctcacctcccggacggggcggctggccgggcggggggctggccccccacctccctcctggacggggtggctgccaggcggagacgctcctcacttcccagacggggtggctgccgggcggaggggctcctcacttctcagacggggcggctgcctggcggaggggctcctcacttctcagacggggcggttgccaggcggagggtctcctcacttctcagacggggcggctgggcagagacgctcctcacctcccagacggggtcgcggccgggcagaggcgctcctcacatcccagatggggcggcggggcagaggcgctccccacatctcagacgatgggcggccgggcagagacgctcctcacttcctagatgggatggcggccgggcagagacgctcctcactttccagactgggcagccaggcagaggggctcctcacgtcccagatgatgggcggccaggcagagatgctcctcacttcccagacagggtggcggccgggcagaggctgcactctcggcactttgggaggccaaggcaggtggctgggaggtggaggttgtagcaagccaagatcacgccactgcactccagcctgggcaccattgagcactgagtgaaccagactccgtctgcaatcccggcacctcgggaggccgaggctggcggatcactcgtggttaggagctggagaccagcctggccaacacagcgaaaccccgtctccaccaaaaaaatacgaaaaccagtcaggcgtggcggcgcgtgcctgcaattgcaggcactcggcaggctgaggcgggagaatcaggcagggaggttgcagtgagccgagatggcagcagtaccgtccagcttcggctcggcatcagagggagaccgtggaaagagagggagagggagaccgtggggagagggagaggggg

SEQ ID NO: 38155 - DNA, 969 bp, Artificial sequence
  DNA replication origin
cgtctccgcctggcagccaccccgtccaggagggaggtggggggccagccccccgcccggccagccgccccgtccgggaggtgaggggcgcctctgcccagccgcccctactgggaagtgaggagcccctctgcccggccagccgccccgcccgggagggaggtgggggggtcagccccccgcccggccagccgccccgtccgggagggaggtgggggggtcagccctccgcctggccagacgccccgtccaggagggaggtggggggccagccccccgcccggccagccgccctgtctgggagatgaggggcgcctctgcccggctgccccactgggaagtgaggagaccctctgcccggccagccgccccgtccgggagggaggtggggggggtcagcccccccacccggccagccgccccgtccgggaggtgaggggcgcctctgcccagccgcccctactgggaagtgaggagcccctatgcccagccaccaccccgtctgggaggtgtacccaacagctcaatgagaacgggccatgatgacaatggcggttttgtggaatagaaaggggggaaaggtggggaaaagattgagaaatcggatggttgccgtgtctgtgcagaaagtagacatgggagacttttcattttgttctgtactaagaaaaattcttctgccttgggatcctgttgatctgtgaccttacccccaaccctgtgctctctgaaacatgtgctgtgtccactcagggttaaatggattaagggcggtgcaagatgtgctttgttaaacagatgcttgaaggcagcatgctccttaagagtcatcaccactccctaatctcaagtacccagggacacaaacactgcgcggaaggccgcagggtcctctgcctaggaaaaccagagacctttgttcacttatttatctgctgacctcccctccactattgtcctatgaccctg

SEQ ID NO: 38156 - DNA, 1345 bp, Artificial sequence
  DNA replication origin
tggaagcacactcatgcgcagcaacggcgccgcagtgggcgctcatgcgcaatggagggtccggcgtccgccttggcgggtgggagtgatgacctgcactccccaaaccactgcgggatagaacggggccgagtgctctcaggggtggccgctaccggggcggcccgagacacggctgcgggttccagccaacaggcccggagtcgcggcctcggctccgccgtgggtgcacgggctagggctgcggggactcctgtgggctccgcgtctgcggctgggaggaatggggatcgtccccagatcccgccttccgggcagggcctccgctgcctgcgatcctgcccacagtccaaggatcctcctcgcctctcgcggactgcggtgtcagccgcccgagccgttccccggacacctggccaggtgacggcccccgacctccgcctggggcgggggggggggtggtctgcgagtccccctcacccccagcagacgttcccgagctcagaaggaaaaaaaggacgaggaaggggctgcttatgagtgtgtcggtgttgatttagtagttgtggaatgtgagccctggggaaataagtggaagaggcatggaccgtgtggctccactggggcgttcgcgaatgcctcctggaggaggagaccaaccagaaagaagaggcagcgtccagcaactggacaaaggccagagggcctttctggcaagaggactggggtgagcagaagctgatccggctctttatccctgggcgcaagtgctgtgtggcataggtcagtgaaggcctgaaagggatgttgagccagcagcaaaaggccttgagtgccccattaaataagttacagctgtggctgacgcctgtaatcccggcactttgggtggcccaagcgggcggattgcctgagctcaggggttgtagaccagcctggccaacatggtgaaaccccgtctctactaaaaatacaaaaattagccgcgcgtggtggcacgtgcctgtaatccctgctacttgggaggctgaaacaggagaatcgcttgaaccggggatgcagagtttggaggctgcagtgagctgagatcacgccactgcaccccagcctgggcgatagagcaagactgtctcaaaaaaaaaaaaaaatcacatatgttggccaggcagggtggatcacgcctgtaacgccagcactttgggaggctgaggattacttgagccctggagtttgagagcagcctgggtaaaatagtgagaccccatctgtactaaaaaaattagccaggcatggtggtgtacacctgtagtcccagcaactggggaggtcgagatgggaggattgc

SEQ ID NO: 38157 - DNA, 868 bp, Artificial sequence
  DNA replication origin
aggccgccatgcctgagcctccccgcaacccccgccctgggctcctgcgcggccggagcctccccgacgagcgtcgccccctgctccacagcgccaggtcccatcaactgcccaagagctgcggaatgcgggcgcaaggcgcgagactggcaggcagctccacctgcggccctgtgcgggatccactgggtgaagccagctgggctcctgagtctagtagggacttggagaacctttatgtctagctaagggattgtaaatacaccagtcagcactctgtatctagctcaaggtttgtaaacacaccaatcagcactgtgtgtctagctcaggagtttgtggatgcaccaatcagtgctctgtgtttagctaatctagtggggacttggagaatttttgtgtctagctcagggattgtaaatgcaccaatcagcaccctgtcaaaatggaccaatcagctctctgtaaaatggaccaatcagcaggatgtgggtggggccagataagggaataaaagcaggctgcccgagcccccagtggtaacgtgttggggtctgcatccacatggttgaggctttgttgtttggctgtttgcaatatatcttgctgctgcttgctctttgggtccgcattgcatttatgagctgtaacagtcaataccaaggtttgcagcttcactcctaagccaaggagaccatgaagccaccagaaggaagagactccgaacacatccaaacatcagaagaaacaaattccagagacgctgcttttaagaactgtaacactcactgcaagggtctgtgggttcattcttgaagtcagtgagactaagaacccaccatttccagacacgcacaatctcagctca

SEQ ID NO: 38158 - DNA, 1782 bp, Artificial sequence
  DNA replication origin
ctgtcccgcgcatcggaggggatcgcctccctggcccagaccccacgcttccggaggcgatctgttctctccaccgcggcgccccgaaagcactgtctcccctcggggttccgggtcaccgaccccatcccacagagcggcgggaggactgcaggcacggccggctcagggtacccgagctcggcggaaaatgcagaggccgcgctcgcccccaactaacggttctggacccgcccagcgcagcccccgacggacgcaggtttcgcgcggcactcacccggcgcgcgccgcacaatggcgcccgtcggccggcggcgaagtgcgtcagcccgccgtcccgaactacaactcccagacgcccccgcggcgcgccagcttgcctcacccagcggcggccatcttgactggccggttaggggcggcaggcgaagccggggacagcaggaggaggatactcgtcgatgtccctcggcggtccagctaggcaaggggaggcctctggtgagggacgctaggccgcagggccccacactaatgtgggcggcgacccgagctgggagagagtcgtgccctgccacgaaggcgaccactcttggggcagagcagaagctggagaaaggaaaggcgctggacaggggtcaggccggaagtgctggaatgggtgatgcttggttgggtggcggtgggggcgggattaattatgacgtcccttgggaagaggaagggcgggtagggccggaagtgcagggggcgggcctaactggccgtccatctgggtggaggggcggggacagggagggcggggagaatgtaggaggcggggctagagtccacgcaacttttggggaaggagggggactggaagacggaagtcgcggggggagtggggagaggtactgaagttccaccagtttcaaagtcgagaaagaaggggaggactgggagagccggaagtgtgcaggagttgggactgacggcacttatgtttctgggagatgggtcctgcctgaaagtgagggtggacagggccaagtgtccactcaaggtcagggaggggagggaaactcggaggaccggaagtgtgatgggaacgtggccaaacgtccaccctagttctggggattagaggaagggagtaggaaggtcaggggtgtgcaaggggaaggagggaagactaggtggaccacaagtgtgatgggaatgaggccaaacgtctaccctagttctggagagatgatcagggctaactgtaccccaggcattggggaggaggagcaggatcctctgcctagtgtccccctgtggtccagtttgctcctggaagctgaggtgctcatgtctagggagaggaaacctaagtctgtagctgtccaggacctggtgtgtgccacccatccttgggcccagggtgctctcatcttccttgggagctcaggacaaggaggtattctcttggcttcctcaaggaccgacatctggtgttttcttatcttccttaggtcccaggtcccagtatggtcttgtcttcttgggacctgagggccctaatgatctctctcagtgctcaggaccctgtgtcctctttcttgatatttcctggcaggtctcagcagccctctgcctccctctggtggtcgtgtacactgcctgctaaacttgttccacgggttgttggtttttttggtcactgtggaggatccaacctcaggctacacattgtttaattgttgctgttagtgtgttgattttggcataggagtatttactcagagactgtgcaga

SEQ ID NO: 38159 - DNA, 1328 bp, Artificial sequence
  DNA replication origin
ttggccggtgcgtgcaggtgagtctggcggcctcaaggttggctcggaggtttcactgttagccgggtgcggccggagcgcaggaccaggccagagccgccccaagtgatctgggcgtgccggagaaacgagcagggcctgcgggggtccctcatgcggcgaggccgagcaagggcaggggcctgatgggatcgggatctctccggcctcagggacggggaaggccggtccagtcaggtttcccctgcaggagcgcccggctgggtctgagcttgtcgggaggctctcctgctgcagagctgggagggaacttatagtacctcgcaggtacgggcaggggtggaactgggtgggactgggtgggactgggtgggactgggtgggactgggtgggccctcccgacagagggtgcctgggtcgagggctgcaggggcgggggattcaggctggcgtctggagctctggggctgccgacccagcgggcctctcccggctcctttttcctccctcaactcatcttctgcggcttatccacaggtggcagccaagagcctcctggcacagcggcaccaggcaggtgacgcctattggaccccagaggtcatcccagctccagacgtggacacattttcttccaatggtacgtgaagcttgaaccttgcagagaacatgtgtattttccaagtgaacagaagattaaggccagtccacgcagggcaggggtaactggggtgttgggggcctgcactggttaagcgatgctggtgcaccccatagagagactacagaggtgaacaggatgggatgtgtatgtaacgcctgtaagttagggatcggggttccatttgtgttgggtgatatttgatggggaccgtacaaggcagtgctaatgaggaaggcatggggttggatttcaagagtctaagggagtagggaaacatctgattgtggaaatgactccgtgtaaggagggatgccaaaagacaggaaggagtggaggaagactgtgtttctgtttccagcgtggagccagggtagaagtcacagtgcaaggaagatgtggtatgcctggtcagtctctgcatgggagttgaggagcatgtgggtgacatggctgaatgtggaggagggaatggcagtggcaggaagcccaggaggtttgggctggacacgtaacctggagcagattggaaacgtcaccccacaagcagggaaggagaaaactggaaaaggaaagagaaagcaactccctccccagccctgcagccagagggacttctgccagatcagccaccatacaggtccagtatgaggaacagatggggaa

SEQ ID NO: 38160 - DNA, 920 bp, Artificial sequence
  DNA replication origin
ggtccgtgagtctgtccacaccgggtccgtcagtccgtgcacacacggtccgtccacgcctggtccgtcagtccgtcacatcctctgcgcgtgtgtccggcactcgcagtccgtctactcacgtcccctagtcagcctctcactctctacccgctgggcggtaccccgcatctcgctctggccgccccagaggttcgcggcttctggacctgctgtgcccctctccagcctggatcaggacggagaacacccccgaaacccacctcaccagcacagccggcggacccttccggaggtggccgcagagactagccaacttgcgcgcccgccgacccggaccacagctcccagcacacctcaagggcccacgcccgccaggactacaattcccggcgtcctccggaagctcaagtgtacccaggcgcggtgcctgctgggaattgtagttgacgttggtcagcacggaggccacaggatcccagcccggcctttgtgggactgaggtggcgctgagtgggagagcagcaggcgatgcgcgaaaggcgggacttggaggtgagggaaatgtgaaggctgagggtgagagtgcctgtgtgaggctgagggtgcctgtgtgagggtgagggtgagggcggctgtgtgagggctgagggctgagggtgcctgtgtgagagctgagggtgcctgtgtgaggctgagggtgcctgtgtgaggctgagggtgagggcggctgtgtgagggctgagggtgcctgtgtgagagctgagggtgcctgtgtgaggctgagggtgagggcggctgtgtgaggctgagggtggctttgggagggctgagggtgtttgtgtgaggggtgaggggtaagggtgaggcaagaaaatcgggtctggaggcagggaacctaaggacttcctagaagtaaa

SEQ ID NO: 38161 - DNA, 955 bp, Artificial sequence
  DNA replication origin
ctgggatcctgtggcctccgtgctgaccaacgtcaactacaattcccagcaggcaccgcgcctgggtacacttgagcttccggaggacgccgggaattgtagtcctggcgggcgtgggcccttgaggtgtgctgggagctgtggtccgggtcggcgggcgcgcaagttggctagtctctgcggccacctccggaagggtccgccggctgtgctggtgaggtgggtttcgggggtgttctccgtcctgatccaggctggagaggggcacagcaggtccagaagccgcgaacctctggggcggccagagcgagatgcggggtaccgcccagcgggtagagagtgagaggctgactaggggacgtgagtagacggactgcgagtgccggacacacgcgcagaggatgtgacggactgacggaccaggcgtggacggaccgtgtgtgcacggactgacggacccggtgtggacagactcacggaccgaatgtggtgcggaatgacacactgagtgccggacggaccgacggagaatgtgtcggactgacggagtgtgtgtcggatggactgattgaccgggtgtggggcggacgaagtgtggagcgggcggacagataacagataaaatgtaggaccagtggcctgggagggtgtggggcggacccgtttatgtgtctgataggcggttctgtgtctgacacctcttgggtgtgtgtatctgacgggttggagtgtgtgattctgataggttgagtgtaacactaaccatggagtgtgtgactgacagagatggttgccgtttgagacttcctacgtgggttgtgagatactgtgagagggtgagcgtgtgacggtgggatttcaagtgtgactgattttctttgtgtgtccttgagatggtgactaagattatgaatgactgtgatcagaataatactgtgtgatggaaatgctgcga

SEQ ID NO: 38162 - DNA, 2355 bp, Artificial sequence
  DNA replication origin
gcccgcccctgtcctcgcgcaccagggcgaagcgcgcgccctccaggggcgccaggcaccgcagccgcaaggccctgccggactccggctccggggagaactccggcgcgggcagcgtctctgcggagcagcacacgggctgacccgggcgcccagcggctggctcggccctaacgcgtggtctggcctcgcgctctttgccttggctgagtcttctgcccgcaatgacctggccagcttcctccctcgcctcctccgggcccgccccacctttgcatcccagtccttggatatctcacacgcaccctttcactgtttcttagtaatttgtttgtctacagacacagacgggaagcggggacggggacatgttttgtgcatggcttgatgcctggtgcacgatgccgctcagtagtggatttgctccacgagcgtcttctgagcaccgccccaatgcccgccccacggaggggcccctgtggtccgctgggcatggggttcgctgtccggtgctcagagtttgctaaataccatcaggtccaaggcaagcgagcggaggagctgcctcagcagaggccctcagtgctcacctagacctggcagctgggatgggacctgccaggtggtgccccctgtggcctgggccagacctgttcacccagttattccctgtggggcctgaaggttgtcacgctcatcatcatatttgcagtttaggaccctgaatcggcgggtgggcggataaagttggtattggaccctggcccagagcactgcacttccccagactctacacctggtactgctcctgctccccagggacccagccgcgtccctgtccctgctggccccggctcaccatcgctcagaatcagctcgaccggcgcgctgtccccggaccagccgttttggttgtcatgcagccggtagcggcaggtgtagtgacctccatcccccagggccaccgcgttcaggtgaaagaagatgcgatctgggctggtgctgctcctgggtaccagcagctctttctccccgcgccgtagctggaagtccactccactcaggggagccacgcaggtgagggtcaccttgttgccagggtgcaggacctgggaggactctccatggtgcatcagcacaggcggtggtggtgcagctgcaatgcaggcagcattactaggctgccccatccctggagctgccctctgcccagtccccagacctctgccctccgggtggcaatcccaggaacacccttccattcttttttttttttttttttgaaacggagtttcgctcttgttgcccaggctggagtgcagtggcgccactcagctcactgcaagctctgcctcccaggttcaagggattctcctgcctcagcctcctgagtagctggtactacaggcacctgccaccacacctggctaatttttgtatttttagtagagacggggtttcgtcatgttgggtagactggtctcgatctcttgacctcatgatccgctggcctcagcctcccaaagtgctgggattataggcgtgagccaccgcacccggcctcacccttccattctttgggcatcctctgcccaaactcctttgcaaccatcagacccaggcaaccgtgtggccagcttcctggacctggtcctgggcaaggacattcagcatggaggtcaggatgaatgtggtcatgccccctgtatcctcctcccccagcagcccccagagatggttcccacagtcaccgagctcctcaatggtcacagtagcgctgggctcagagagggcgccttccccatcggtccggtagctgcagctgtagttgccaggctgatggactggaaaggtggcctccacatcctcctgggcctcaggcacctccagaaactcatggtcgccctcccgcctcagcagaaaagtcacaccccgcagcacacctcggcacactgctgttgttttcaggccgggggtgatccaggacactggcgccatcgagagccagggagcaggcaaggactctgtgggtggggtggagttgaagagtgcttctgcataacaggagacgtgggaagcccagcagaacctgggccccacactcataagactgtgaaggagacagggatggagggcattgctgggaaaaggcaggcaggcaccagtggaaacaaggcatacggcaagagaaaaagagtgtgtgggagctgtacggcatgccgggcctgctggggacacaaccatgtattccttacaacacagacatcatccccatttgacagatgggaagattggggcttggggctcagagacatcgggtgacttggaggaagggagaccccccagtcaacaacc

SEQ ID NO: 38163 - DNA, 1602 bp, Artificial sequence
  DNA replication origin
tcctagaacctgttctagaaggagacgctgagttctccccactctacctggagctgctgaggtcaagtggagagtgccggggctgaagcccagcgagcccctccctgtcacaccacactgcacatgtgacaccaaaggtggggttcacctcttttcagactttctgcggttgccctcacatgggctgtctggaggtgcaccctcactcttcctgaggactgtggttccttctccatcactggttcattctgcatggtgtgacccaccacggctctggagtcggatttccacccaggtcattcagctgagacctgcgcttcccaggcctacccgtgacatgtgctcagttacctgagctgctggtggtcactcatgtggctatagcctgctgcctggaggccaggcctcccgcttcccctgcctccccctctcctcaccacagcctgttgggatggaacaggacaggggtgagaccgtggtgctttcacactcagcctccatggacatcctgtcattcccacccggggaggtctggtccccaccctgggtgtcccagcctagctccgctacgagtgtgagggcccagggcaaccgcctagccctcatctgccccctgcactgcatcctccccactcattcattccacaggcatttattgagcatctactgtgtgccagatgcaaagaagacagtgggataactgggcaaggagcattccaggcagagggaacagccagtgcaaacatgggagatgcgggtgcagtgagaaggagcagaggagaccaggagttgaggcgactgcagagcgattgcagagctcatagacgtgatgaagaccagctgggcactgcagcggctctggcttctgctgtgagggacggggagctgtggagactccctctgtttggtcccatttccatattgctgagcacctgctgcatgctctctgtcctgctcagagccagtacctggatggaggctgtgtgttctgggtggactgggggagaatgcattctttgcagaagagacaaccaggtgctgaggcctgaagtcataaccagacctggggcactcagacaaggactggtggccaggccagaggagcagagctcagggtgtgcacagaactcagaagtcagaccactgaacagtgacagaacctttcagcccattggcaatgaggctgcccaggcagccagaggcctggtcaaatctgaggtctgcagagatggagctgtcattctgtgtttcctttggcagtcccaacaccagcctcgttgcaccctcctcttagcttccctgggttctccagccctaagggtggtagcagcttcctgcaagtatccagctctgagattctgcaacatccacttttgctctctgagccttgcaaaacctgcacaatcagtccctaacttatatcccctctgtttgaaatacctagtgtggtttctatttcctgacttgactctgactggtgtggtacttggtataaagaaggttccctggccaggtgcggtggctcacgcctataatcccaacgctttgggaggctgaggcaggaggatcacttgagcccaggagttttgagacccgcctagg

SEQ ID NO: 38164 - DNA, 1186 bp, Artificial sequence
  DNA replication origin
gggcgagaagcctcatgcgtgcgcccagtgcggcaaggccttcagccagcgctccaacctactgagccaccggcgcacgcactcgggcgccaagcccttcgcctgcgccgactgcggcaaggccttccgcggcagttccggcctggcgcaccaccggctttcgcacacgggagagcgacccttcgcctgcgcagaatgcggcaaggccttccgcggcagctccgagctgcgccagcaccagcgcctgcactctggcgagaggccgttcgtctgcgcccactgcagcaaggccttcgtgcgcaagtcggagctcttaagccaccggcgcacgcacacgggcgagaggccctacgcttgcggcgagtgcgggaagcctttcagccaccgttgcaacctcaacgagcaccagaagcggcacgggggccgcgctgcgccctgacccgaggacgccctgagcgggaggtcgcggacacacggcattgcggggtctcgggcgtgagtgcgctgtctgctggcccagactttttcgggccgccggtgcgggcgccctcctgctgggagtgcaggggcggccttgggtgtggagaaccctggctgcacagtccctttgacgatagtccaccggccacccaggcctgtctggggacatgtaggatgggctcttaccccagggagggcggcaggctccacttcggcgagaggttcgtccatgcagaggtgggcaagaactggggtctccgacaggtgtggctatttctttgagttctctggcactgtcaaaagcagccaacccaccccccagtccacatggtcaccactgctgctaccagctgctcagtgcagtggccactgtgtctcctaaggtgctcgcttcagtcagcacttcatctcaggcaaccacaggtgacagttaaacatgatgaaaccgcatgctatggctttctagtgtctcatattctgttggcaagaagctcagcactgcattcctgaccgaggtcagaaccagatcaatctcagaatctcacctgtgtaggtctgtttcatgggacttttcttttttgggggagggggcagggtttcactctgtcacccaggctggagtgcagtggtgcaatcactgtttattgcagccgcgacttcttaggctcaggtgatcctcccacctcagcctcccaagcagctggga

SEQ ID NO: 38165 - DNA, 1957 bp, Artificial sequence
  DNA replication origin
ggtcccaaggaggggaccttcgtggccttgctgtgctcacaggctcacctttgtgtttccagctgcagagaaagtaccctgggccatgcagctgcactcccctcccaggaaaggggcaggatggctgcccagatgagtgaggcatcagccctggccccccaggtcttcccgagtccactggaactgatggtgggtgagcccagctccaagagccctggccagtgcttctgggggttctgctatgagaaggcagcagggccccgaggggccctggctcagctgcgtgagctgtgttgccagtggctgatgcctgaggcctgctccaaggagcagatgctggagctcttggtgctggagcagttattgggcacactgctcccagagatccaggcctacacgcaggagcagtggctaggcagccctgaggaggccactgccctggcagagcggctacagcaggagtcagctgggccaggactccagatgagtgggggctggtctgggggctgggtgtgcttcccctgctcacgaccccagctgagccagcactggggccagtcgtgggttggtggctgagagggcctgggggctgtgggaaagtgatggtgacaggtgggagtttggtggtcttggcttggacggcagagtcagagatctccagtccacacctgtgtgctccgcattgtgtcctgagaactgaaggtgcagagaagggtgggtcatgccaccgcatgccccttgttttctcagatctgctaggctgaacacctcaccctgccctgctgccttcctgtccccaggtgccagcccccaggccccaagaggagctggtccccaggacagaggagggagaggagcaagaggctcccctgggccccttccaggccccacctccaggtatggcaccatctacacacttgtccctgccctgccttggcagcggggctggagactacacaaggatgataaggtgctcagggcaaatgaggatgggttttgctcgctgtagagacttcgctgtgggaaggatcggctggacaggcaggcatggccttaggaccaaggaggccctcccacccttggcctctctctctctcagggatctgggctgcacagccaccccatgccttggaccacctggtctgacctgcacagaggcctggtgtggacattgcctgggtaacagccactgagatcctccagcctggacatgctgcccatactgtgtggaggggactacccagggatccggccagggtggagtgggtgaggcagacatagctgtgtttgggtcaggcggtgtcctccagccttcaggaatggagacgggtccatcgtgttcctcacaaactggagtctccaccttcttgacacttggggccccaccctgtgaagcaaggagaggagagtggtgccacagtagggccagtgcaggtgcgtgggcaactttgagtccttctgcgatgctggcgccccctcccctcctgctgggccgggccgggtgtggggatgtgcacgtggccctgtcaggcaggcccagagtgctggcccatcccccgagtgtctagcccgcctgctggccttcctgctccaggctccagagggcattgggcatccagggacctggaggagaagagtgggggatgacagcccacccaccgtcgtgtccccctcaggccctctgtctggtgttctttgtattctctaaggtacttgccttttctctcctgttttaggtcacaggcgcgagatggagtccccaagagggtggaccctgcaggtggccccagaggaaggccaggtcctctgcaatgtgaagactgccacgaggggcctctctgagggggctgtgtctggaggctggggggcctgggaaaactccacggaggttccgagggaggcaggggacggccagcggcagcaagccacactgggggcggcggacgaacagggaggc

SEQ ID NO: 38166 - DNA, 1099 bp, Artificial sequence
  DNA replication origin
ggacacaatgcggagcacacaggtgtggactggagatctctgactctgccgtccaagccaagaccaccaaactcccacctgtcaccatcactttcccacagcccccaggccctctcagccaccaacccacgactggccccagtgctggctcagctggggtcgtgagcaggggaagcacacccagcccccagaccagcccccactcatctggagtcctggcccagctgactcctgctgtagccgctctgccagggcagtggcctcctcagggctgcctagccactgctcctgcgtgtaggcctggatctctgggagcagtgtgcccaataactgctccagcaccaagagctccagcatctgctccttggagcaggcctcaggcatcagccactggcaacacagctcacgcagctgagccagggcccctcggggccctgctgccttctcatagcagaacccccagaagcactggccagggctcttggagctgggctcacccaccatcagttccagtggactcgggaagacctggggggccagggctgatgcctcactcatctgggcagccatcctgcccctttcctgggaggggagtgcagctgcatggcccagggtactttctctgcagctggaaacacaaaggtgagcctgtgagcacagcaaggccacgaaggtcccctccttgggaccacctgagactgagtaaaaatggaagaatgggggtatcggcgtttctggcccccagtgtcagcatctttgcccacctgtgtgtccaggtgcctgagggacacactgaggtgccatggctgcttgtaccatcccttccccccgcctccccgcttttcttgagggtccctgccctgccctgtctccttggcacccttcatcccacacacagaacaactaagacagagactgtgaacaggacacccagagtcagaccagcagatgggtcctgtttgtcccctccaggaagtgttttaaaaatttaagttaggccaagtgcggtggctgacggctgtagtcctagcactttgggaggccgaggtgggtggatcacgaggtcagcaattccaagaccagcctggccaacatggtg

SEQ ID NO: 38167 - DNA, 2052 bp, Artificial sequence
  DNA replication origin
gcctgagccaccacgcttggcctggagcatgcccttgatgtgcaaactaaccaatccagagcctcacccctctacctggtccacacaccgcaggagacagtattcctctgtcttaatcatccccggaacaggagccaagcagctggggaacactcccacagctgaaagcccacaggaattactccagctagccagtcctgtgctgtaggctctgctctgccttgcttttcccttggaaaccccagtaaaggctctggcttagagctcccccttggtcctgcccctgctgcctctgacagatgctggtgcttttctcatgtgtccttccttgtgggccgtgcctcctgtttccaggatctgtgagcatgatgaactttgttttcctgagcttgtcctgtgtctcctcttctggccacacctgactgagcagaacataaaagcgacagaacaccaggagggctgctgcttggggaaattgtgtgagaagagtcctgggggactaggggcagggcaagcactgctctccctctcctggaggctggggagagcatcaaggagactaccaggtaggaggaaccatgggcagggcctccctcatcaggatgctttccccacaacagagggatttaagcccctggtgggtgagtcctggattaaccaagacctgagccttttggggggtgcagaggacagaggacactgtgaggtgagtttctcctgggtggattccccaggggcctctgaggctggtttcaggccctgccctttggctgccccactggaagctctgagcatctacccttcagggacgctttccctggtctgaccttggcaagggcaaataagaggtactccatggagggtcaccaaggtctggggcgtaaacggtgcccatctgcacagtagcatgagggccacagagtgtggtaaatgtcagtgaccatcacatgcggtccccagtgtggctgcaggggccacttaggattcttctgttcggggtcccaggccacacttggggaaccctattggaagcaacaaggtctaggccctgagggcccagggctctgccctctccagggctctagctgagccacgtgcaagcatcctcccggccctcccagctggtgtgaggaggaaaccacagccaaagggcaaggtgctccacacagatatgtccctagtcagcctgccccattcggcctctggagtgggagccttgggtctgtctggaaccagtgtggatgaaatgcagggagaaactggaatcatagccatggacagccactcacatagctgggaagaggcatgctgtggtagatcccggtggactctcacctctgcggtgctggggacgttgtgccgacacctcaggcacccacttccactcacaccgcggaggcttggggagatgcggttcagtctggagtccagcggggggcgacaataaaggcgaccccgctcgtcagtcagaccagggcaagcttgccagggcttcacacttcaccaaagggaaccctttctgccgcgactaccgagctgccagggccgggacaggcagaagcctgccccgaggtctcacctctggagggttacgagctgtgccaggccggctacggtagagggtgtgcaaataccccgcggtcccaaggctcctgaagctgcctaagggatatgagagaccctaggttcgaatcctgcctccatcgtcttatgttcgtgcctcaggagagtcactttgccccgtttcctcgcataccagagagcccagtaacacgctccgcggctctgcggagaaaaagaccctagagatcgtggacacagcgtctgggccgtatcagcgcccactcgagattattactgcttatgcctgcaaccggatgctgtgcgcccggttagaaaaggtcaaataaaactcgagttaggggaagcctgtggacgccatgtgtacaaagtgaagtttaatcaaagttacaaacgttggtgggttttccgggacaaaggcccctcctcgacgcagggttcgcttgggcgacgcgtcgactctcggctccc

SEQ ID NO: 38168 - DNA, 1076 bp, Artificial sequence
  DNA replication origin
gcacggccaacagtccgtgtggacctcacacagttgagtccgggggtggttctggatccgctccggacaggggtcacacacgggtggcgtctccccagcgggcgccccgcgatgccacgccaggcaggagttcctgctgcagtccccgccacgcgctgggctcctacaggggccctcccgggcttgcagcccctcggggataaccagctcagggttctgagaagaggtggggccgcacggctcccgcacgaggggtctggtcccggcgctgtgccgggtccccgggccggggctcaccccgaggctgcagccccgggagcccccgcctgggggagtcgtcctaccgcccgccgctccacgcaggtcccccttttgagtggggcggctcccagctcggtcctcttcgaggggcctcggctcctcgggcctcttctcccgggccccggaggcaccctgggcatcggccttggggagtcctccctgcccagccttctgggctggagcctccatcctggggcgcagagttctggttgtaggatctggaagagcagagaagaaatggaggttggcggttcccaggaggagagaagtggagaactgggccaacgagcgaccaccccacagctggcacctactgggcggcccccagctctctgcagatgcgaaagggtaaatggagtgacataggcagcccgtcctgcccctcttcaaattgtcaccacccagaccccagagaacagcttcccaggctctgcctgcccgccatcaccgttcctccccaacactagctcctaaaacactgtgcccctggctaaggccctccctggtcccccttccccaagcaacagggactcccccgttgctcagctgccagctccccaaaatctcacttactcctgccctccgtttctcagtggcaagccgacactccgggtcctcctggctccattcactgccattgtccatgtcttctgagaggtgtgaggtgagactcacctgacagctgagagcctggccgggagatccacgctgcagaggccaatgctggacttcccctcccctcttcaaccaggtaa

SEQ ID NO: 38169 - DNA, 1084 bp, Artificial sequence
  DNA replication origin
gactacgtttcccagcagtccccgcgcgggttcccgcctgcgcttgctgtggcccgggtccctcagtgccgcggcggcccggaggtggcgggaggacggctccgcgctgcatgcggggcggggaccagggacccgtgcgggccgcctccagagagtaagtggcattctgcgcggacccgcaacctcggcctgcgaggcggggacctcccggcgcatagcgcggccaccaccccagtcccctctccacctccgcgcgcggggtccggggcagaggcgtgacgccgcgcacttccggtcctcgcgctccgggtccggaccggccacacagcactcgcgaccttgagttccgggcgggacgggcttctgtagttctggcccccgcgtttccgtgctgggtgtcattgaagcccgcgaggggaggctccaggcccgggacccatcctggcggcctgcggctctcggagtcaagcccacctgctagccgaggccgacgccggcctccctaccgtctctgcccccgcatcctggcctttgcactttgctctttccttgtctgcagaccggtttcatgccccctcttcacagaggcccgaagaatccgctgcctccctccctggcgccctcgcgctgctccctgtctgatgttcttcacgtctttttctctcttaaacggtctcttgttcatttcttcttgtctgcggtcccctccttcactcactattagagcaggatgcagcaccgtttggccctgacacagtggatgtcctgcgagggttgaagcttgctaatccttgagggtggaggcactgtcgggaggacagacacagaagggagctgtgcctgcactcagaggacatttcttctgctgtacagtgcatgatgcactgttcttcccattgcgtgcacagtgtagaattggacataggggctagagtctgtgtcccctgggactgtcagtgtgggtgaggttggtctgtggctcagagaggtggagccacgctgagctgggcactagcctgtgtcctccacacctcagagccaccaacgttgacttccctgcacattctgtttttgttgttgttgt

SEQ ID NO: 38170 - DNA, 1241 bp, Artificial sequence
  DNA replication origin
ggcatgagccaccacacctggccgccttttttgttgtcgtcggtttttttgtttgtagaggtggggtttcaccaagttgctcaggctggtctcaaactccctgccaaagtgttcctcctgcctcagcatcccgaagtgttacaggcgcaagccaccgtgcccggccgtctagcagtttgctgttgaggcaggtctcaatctcctgtcactggggacgcaacttcagcctgtgtgtgtgtgtgtctggacacttgctcttgtgaccctctatctgattgcaaatcaggcatgatgccaccacctcttgtctcagtgggcctatgggtgacaacgtggctggcagcatcagttgggagtggccccagggtgctggaggaccgcagtctgtccttctagcctgacccctgctgtcttcctaggccatctggctgctgtgcacaggcgctcgtgaggctgccttccggaacattaagaccattgctgagtgcctggcagatgagctcatcaatgctgccaaggtgggtgagggcactccggttggggggtcttaagttgggcatttgtgggggtccttcagaattcagagctgtgtgtctccttgcagggctcctcgaactcctatgccattaagaagaaggacgagctggagcgtgtggccaagtccaaccgctgattttcccagctgctgcccaataaacctgtctgccctttggggcagtcccagccacctgtgctgttgtctgtcttcggtggggggatgtgggtggcatagccctggtggccttgggagctgctcaccttcctgacctgttggcctgtggggacctggaagtattgctgactcagaaccatggcaccccagggctagcaggtggggcactggatgcaggccaggctgcctggagtgtcccagcaggtactggaaatgagatggggttatccataacttctgagggcgtggcacatgagatgttgctgtggtctgggtggatgggtggcttgggtgcctgtgaggtctgggtagtcacaagaccatcctgagaggcttgtcaccttgaagtagcactggggagaggaggaaagctcagctgtttagggcacacgatttcagacccctagcttcacccccctcttggagtgtggggtggtttcacactggcgaggttgtgctcctggttacctccccggctacactggttgtggctgcaccctgggcctgcacacccagtttctgtgggctg

SEQ ID NO: 38171 - DNA, 1102 bp, Artificial sequence
  DNA replication origin
gcgacagcgggcggcccaggcgcagaggcggcgggggcggcggggcgcgggccttgcgcggcccgggcgggggcggcggcggccgcaggtagagaaggccgcggcgccggtcgaagcgcacggagccctggcgagagggcggtgcgcgcgcgtcgcggggcaggagaccggactgcgtgggcaacgcggggagtccgcggcggggggccaggcgcgtgggcgcgcggcacaccggacaggccaccgcgttgccgccgcccgccgtggccaacgataggcgcgccaggcactcgagacagaagacgtggccgcagtccaggcgcttgggcagcttgaacacgccgtcgaaggacgacacgcagatgaggcactccaccggggaggcggggggcaggatagggccggagcctgggctgccgtccccttcctcctcctcctcctcctcctggtcttcccctctgcttggggagcggggcgcagagagcgagcctggggagctgggacccgagccctggggggcccgggaatggcggagccagaacggccgagggcagggcatccggatggacctgggaggagaggaggtcaggcagggaaggaggcggtggagcctggagcgggttctgagaccagcagggaatccagggaagactggggactgtactttagagaggatcccccagtacagagcaccccatcccgagaagggtgtagctagcgtcgaggagcaggggagatggggaggcccgaggcggagactggggataggaatggacccacggggtaccagttcctgaattggaaacggagagacagaccgcagttgaacacggagatggggaggaccccagacagggatggaaaggacctgacccacagaggagcagagataggcaccccccacagagtaatgacagaccgcagccagcctgtgggcgccttcctacctgtggaagcctcctccctctggccagtggcgtgtccctgtctgttcctggcctgccagcagctgggctcaaaagtaccctcccagggggagggtgctcaaccggcaccacccctccaggtcccaggtacccgctggacccgtttgactgcctgc

SEQ ID NO: 38172 - DNA, 1834 bp, Artificial sequence
  DNA replication origin
ataaattaaaaaaaataaacgcgtgttctaaataattaagttgggggtattttgtcacagcagccacagaaaatgaatagaccaccaactctgcggctgtctgaccaggtttcttccctatgaggctgggctgtggctgcccagtgacccagtacactggtcccagcccctgtgggtgacatcggcatgtgggtgtgggcaagaactggtctgggaagacacactgtggactccctagtgttcctcctctggctcccacctggaagcagcagctcacaccagagctagctctagacagtcctgggcccagggtgcattcccaggctgcctgggtcacctgcaattctgtcactcccttgtttggcacctactgtatgctggtgctgaggacacacgttaacaaatcaaacaggagcctccagccacatagaagtcacgtttcgctttggaacatgctgggtgcccattcccaaaacacagcactccatcccagagtgaggtgaggcaggattgggggggtggtgtgcagggcctgggaggaaacagaagccccaggttcagtctgcacagagaatagctgccatctacccccataactaacccaggaagacttctgggaggaagaggacaggagcccatatgccaccttccctggaggctgctgtctattgggaaggctcagggttcacctcgaggtacaagaaaggaggctgggcaggacagatggagccctggaggaagaagtgcagtaactggcatcaagatattaatcgggggtgatggggactctggtggccagggaaagggactaggatccctctggctaaccaaggaggtccaggactcccacccccaccattgtctgcctctgtctgacccctggggtgatgttggcctctgagccatgataagcacagctgcaccacagcatattgggaggatcctagaagccacgacccagggggaagtggaggctcccagagcagtttgggacttaggattggggcgggagccagtctttaaggctcaagttcctccccagccctggccaggacaccctgttacttcaagcctgagccccagccccaaccaggtgtacaggatggcaactctacacccgggaccagcatgtagacagctggagcccacccaggcccagcctgcaggcagtagaaaacaaactccacagatgggtggagtggtgggacgtcccctgcaatgagccagttggggaggaggtgaccaaggaagaatagcagcagcagctctgccctccaaagataggcgggcccctgcaacctatggccaatccgaaggatgagtgctttggcctccagtgctggcaaggacgctcccccaggaatctgtggtgaggatgactgggggcactcccagcaagacccgttcaaggatccgtgtggggctgcccctggctgggcacctgcatggatgtcagtcgggggcgtccacagctggactcctacaagggatgaggatcagggatgcttccaactgcacccccacggagtaggggttgcggagcaggagcaagccccagcaggacccttatagaggtcacggtcagggcaccctccgctggacagccacaagaatgggggtcaggggtgttcccagaggatccttgtgggacgactgcggtgcctgctccttgagagggtccagccccatggtgacaatgccaaggatgcttgccctaagccccaatctggagaaacaggtaagtgctgcgcgccctactaagggccccagataacacggaggtgccaggcctggaggcaggactgcagtactggcgcacttattgtgagcccca

SEQ ID NO: 38173 - DNA, 945 bp, Artificial sequence
  DNA replication origin
cgccctgtccggaagggaggtgggggggtcagccccccgcgcggccagccgacccgtccgggagggaggtgggggggtcagccccctgcccggccagccgccccgtccgggaggtgcggggcgcctctgcccggccgcccctactgggaagtgaggagcccctctgcccggccagccgccccatctgggagggaggtgggggggtcagccccccgccctgccagccgccctgtccgggagggaggtgggggggtcagccccccgcctggccagccaccccgtccgggaggtgaggggcgcctctgcccggccgcccctactgggaagtgaggagcccctctgcctggccagccgccccgtccaggagggaggtgggggggggggtcagccccccgcctggcgagccgccctgtccgggaggtgaggggcgcctctgcccggccgcccctactgggaaatgaggagcccctctgcccggccaccaccccatctgggaggtgtacccaacagctcgttgagaacgggccatgatgacaatggcggttttgtggaatagaaaggggggaaagatggggaaaagattgagaaatcggatggttgccgtgtctgtgtagaaagaggtagacgtgggagacttttcattttgttctgtactaagaaaaattcttctgccttgggatcctgttgatctgtgaccttacccccaaccctgtgctctctgaaacatgtgctgtatccactcagggttgaatggattaagggcggtgcaagatgtgctttgttaaacagatgcttgaaggcagcatgctccttaagagtcatcaccactccctaatctcaagtacccagggacacaaacactgcggaaggccgcagggtcctctgcctaggaaaaccagagacctttgttcacttgtttatctgctgaccttccctcccctattg

SEQ ID NO: 38174 - DNA, 1105 bp, Artificial sequence
  DNA replication origin
gcagaggggctcctcacttcccagtaggggcggccgggcagaggcgccccgcacctcccggacggggcggctggccgggcagggggctgacccccccacctccctcccggacgggtcggctggccgcgcggggggctgacccccccacctcccttccggacagggcggctggccgggcggggggctgacccccccacctccctcccggacggagcggctggccgggcagaagggctcctcacttcccagtaggggcggccgggcagaggcgcccctcatctcccggacagggcggctggccgggtgggggactgatccccccacctccctcccggacggggcggctggccgggcggggggctgacccccccacctccctcccggacgaggtggctgctgggcggagaggctcctcacttctcagacggggcggctgccgggcggagatgctcctcacttcccagacggggtggctgctgggcggaggggctcctcacttctcagacggggcggctgccgggcggaggggctcctcacttctcagacggggcagttgccaggcagagggtctcctcacttctcagacggggcggccgggcagagacgctcctcacatcccggacggggcggcagggcagagatgctccccacatctcagacgatgggcggccgggcagagacgctcctcacttcccagatgtgatggcggccgggaagaggcgctcctcacttcctagatgggatggcggccgggcagagacgctcctcactttccagactgggcagccaggcagaggggctcctcacatcccagatgatgggcggccaggcggagacgctcctcacttcccagacggggtggccgccgggcagaggctgcaatctcggcactttgggaggccaaggcgggttgctgggaggtggaggttgtagcgagccgagatcacgccactgcactccagcctggacaccattgagcactgaatgaacgagactccgtctgcaatcccggcacctcgggaggccgaggctggcggatcactcgtggttaggagctggagaccagcccggccaacacagcgaaaccccgtctccaccaaaaaaa

SEQ ID NO: 38175 - DNA, 1485 bp, Artificial sequence
  DNA replication origin
gggctcctcacatcccagatgatgggcggccaggcggagacgctcctcacttcccagacggggtggccgccgggcagaggctgcaatctcggcactttgggaggccaaggcgggttgctgggaggtggaggttgtagcgagccgagatcacgccactgcactccagcctggacaccattgagcactgaatgaacgagactccgtctgcaatcccggcacctcgggaggccgaggctggcggatcactcgtggttaggagctggagaccagcccggccaacacagcgaaaccccgtctccaccaaaaaaaatacgaaaaccagtcaggcgtggcggcacgcgcctgcaatcgcaggcactcggcaggctgaggcaagagaatcaggcagggaggttgcagtgagccgagatggcagcagtaccgtccagcttcggctcggcatcagagggagaccgtggaaagagcggggggggggggagggggagggggaggagggaagaggaacagattttcaagaacgatttgaggatatgtattagcccaggacatgttatgggatgaccagtgtcttcaaactaggcagaaagaggggacagggtacaggagtcaggggaagtaggcgaaaaggtggactgtttagtaggggatcaggaacatagaaaagtggcaaggctagtgaccttggtacccagacaccaggggtataactcaggtaccaggtgtgagaacagctcaattccagggatacttccatccccagcttgcaatctccatggctgagcctctttgataacttttgtgctattcctggtttcaagtctacctggtccatcaatcagtgctcttgtctgcactccagttgggggaactcatgaactgtaaagggcaatcctgtgggggaatgaacaggttggtcagtccagcctagggcagactgacccaccatgacagtccaggggtactgatgacaggcatgtaccatgagcttgggggtgtcccacctgtgtctccactggagagaatacacaggtgtcactgaggaacagggttgcaaggactgaggatatggggtcagctgaggacatgttaaggagaggcaaacattgcacagctaggcactaaggagagagaaagggacacagcggggcatggccagaaaactggaattgagctgagtggaggcaccaagacctgcgagggcacaggctgggcaccaggtgtgagaacagcccactcctgggggcattcaccaggggtagatctcttcagggtccctctgccacaactagttttgagttcatatggtccacctgctggtgggaatgtagaagccttcagacctatgaaggatgatgagtttttgagagtccaggccaggagaggccaaaacaccatgaccccagcaagcgagaataatccttactccaagacaaacacagacctgcaaaaaatgaacattcagggaaggctcccaggcaggaccca

SEQ ID NO: 38176 - DNA, 1001 bp, Artificial sequence
  DNA replication origin
agacttggccaatggcggcccaggaacgggaacgttcgggcgggccctgcgtggggcggggcttccggcgtcggctttcggcgctggctttggggcggtttgcggcagtgggatcattgggcggtgggcggtgtggaggagtctccgctggtccgcagaaacgaacgaaggcgcgagaatcgggaagttctgcctcagtgacctgtacgcgtcctagccgcagtgaatgttgctgaaccccggtgacctcacagtggaggggcggccccatggggccatcggaccgcgccgcgcgggggcgttcgccagggcctccgcagaagcccgcctgtgcccgcaaccgccccgaaattctctccctggcaccgtgtccgctttacggagcccggagcaaggctcagaaaaatgtcccagccaaaaacatggtacatgcctgtcatcaggcaagtcttcaaagagcggctgggaccaggggccgagggacctcgtttagaggcggcttagggggaaggtcagcagttgtgtttcagttgtgttgggttttcggcgccccacaatgcgggcgacgtatgggccacaggtgtggatgccagggacaggtcgccctgcacatggctgaggcacggtaggcttgtagtctaccccatatcaggccatggtgatctcaggtatgggggcctgggagaggagagtgagtacatggctgagtacgtcagagcacggggtcagggacacatcaggggaggacgctggcaggagaataaccgggctcctgggtgtcctccgctgaattcagacgcgttcatgttagagcaggtgggcctgcgtcctcccggacgaacggagttcttaggcaaggtccagaggagcttctacctgaagtggtgctggagaactttgcactcagtgctgggtgagaccactggcaccataactctccccagcctcaactctggtttttttcctctgttctttccatgttccccttggaagtcgctgtt

SEQ ID NO: 38177 - DNA, 1492 bp, Artificial sequence
  DNA replication origin
ggcaacgacccagccgcgccgcgaggagagccgggaatggaggtcgtggcgtgaggggcgccgagcgaggggaggcgcgggccacgggagttccgggagttccggcgttgcccggcagtccgcagtcctcggcgggaaggctgtcccggcgcctcaggcagctctgcgtgggccggggtgacttcctcgcgatcccctgcgcgaggtgaagggcagggacctttgccgcgccttccacgcgccgtgccccaccggcgagtggctccatcttcctcagacttatcgctcgcggacaggcgccgtgggtctcccgggcctccgtaccgtcctccttcccagcggctccgggaagcggttccctgtcttcggacgcatttcacccgcgcggggagagcttcccgggaaggttccacggcggccgagggtttccgcgcccgggacgcgtttcggctgaggccgtgggtccagtccacgggttctgcccgcacggtccaatggccggggaggcggaggtgagcagaggatgcctccgaggaatgagggggcccaccaggtggggggcggcgtgtgccagggcagagttggaggagggcaggagatctgcgtatgattccagggggaggtctttgatgcacggctggggcatgcccttggcagtgggagccattggagatgtgccgcaggactgggacaggatggggtcgtagttgctgtgccaggccctctggagacgcatgtgcagaacggcgtgtggaaggccaggcaattgcctatagggtaaactggggacgttgtgctgggggtgtacagttttaggcattctgttgtccagttttgtgcctgttgagcaggaggcaaactggaccctgggaccaggtacttgagacctaagggagaaggatgagcataggtttggttgcgtctgagaggtatgatctctgggactggaattggcaggcaggagatagagtggagcctgtgcccttggccctgcacatagatggcatcagtctggtcaccaacctgatgtcgctttgggctggacacagtttccagtagtaacaccagaagcatcaataacaccagcagctctgatattcctctgggataggagaaggaaggtataagggtatgtgtagggagtaaggtggggaagagtttagagctcatagggaaagataatgtcagggggagatgtgataggaccctgagatacaggtcaagggcctgaatgtgtccatctgtccatattttggttgtttttttctgcccatcattgaccccaaggctcagttggacccatcattgcagggcttggtgatgtttgaggatgtgacggtatatttctccagggaggagtgggggctccttaatgtgacccagaagggcctataccgggatgtgatgctggagaactttgcactcgttagctcactgggtaagtctcttacactgtcccccagcacactgactaccccctcattttccccat

SEQ ID NO: 38178 - DNA, 1432 bp, Artificial sequence
  DNA replication origin
aggctgtgcgcaagcgtctgcgcgcgtattggggcaatgtgagctctgggggctggacttccggcgttgggactgtcacttggctgctcgcgtcaggccacaccggtggtctgggctgtggcgcgcgggtcggggcccgaggcgggcggccaggaaggtacggaccacgagcagccggccgcgcccccaagcctcggtatcttcgagtatgacgtggtcggcccgggggcggtcgggccccggcgggaaccacgcgttctcccgccccgcggaagcccaggaggcagcgcattgggcattctgcgcccatgactgccgggcaggctgaggcgcggggcagccgcgggaggctgctggcggggatggcggtcccgggtggtccatgcctttcttccctcccagttgcgggttccgctggcggcggtggcgctgacaagcccgcgccgggggggcgggggagtccctgctcacacagactgcgcccccacggagtgaggccgcttcctagacctcgcctagtcgtctttcctctccctgccctgggggggttgcgggggtcagtgcaaactcctgcgtccagggcactggtgagctcccgacttccggcagccagggggctgaggtcccgaaggaggctccgaggggagagtcctgcgtgtgcaaaacctgggaggggagccgaagcccagatgcttctgggactgagcgctctcgatgtggagctggagtagaggggatgtgtgcggctgcagtagcaggcgagggagtgggctttatctcgagggcgtcgggagacatagaagttttgaacagaatcaggacatcctctgagttgggactttaaaacggttccaccgtttgttgcgtggagaacagacatgcaggggtgtcggcatgaagggaagaaccgactgccacagtctgggcagcagtggaggtgggcgaccaggtgaattctggtggatctgcggatgcatcaggtgtgggctgtttgaagaactaagtaccccatgttgttcagcctgagcgcctggaagaagagagctgctgtagatagaaaggagaattgaaaggaaagcaggtttccttcaggggaaagatcaagagtctgggatgtcccaggttggtcatgtcactggacctgacgttgttggtgtcctgggctgaggacagggcctataaactggactgaagaaggcgatgagcagtcaggcgtgcggagttacagcttgagggtaaagaaaaccggctggggtgcctgaggctatcaggggaggagttcggcaggtggctgaataggagagggtggcagcaatgtgggaaagaaattgcgggagcgctgagatcgagaccatcctggctcacacagtgaaacccggtctctactaaaaatccaaaaaaattagccaggtgtggtggcgggaggctgagg

SEQ ID NO: 38179 - DNA, 1881 bp, Artificial sequence
  DNA replication origin
actgggcttggcttccctccccggcgcaccttccgatgatgtccctgaaggaaacctggccccggggtgcagtctggtgctgcggcattggtcttctctgtggtgtggatcctctggtggtgcaagagggcagggcgctcacggaaggcgcggccacactgcgtgcacacgaagggcttctcgcccgtgtgaatgcgccggtggctgagcagcacggcgcccttggcgaaacccttgccacagtccacgcagcggaagggccgctcgcccgtgtgcaggagctggtgctgggtgaggttggagctgcggctaaaggagcggccgcactgggcgcaggcgaagggcttctcgcctgtgtgcacgcgctggtgcaaaaagagcgaggagccctggctgaaggcagcaccgcagagcgcgcatacgaagggcttctcgcctgtgtgcgtacgctcgtgctggatcaggtgcgagttgcggcagaagcggcggccacactgtgcgcaagcataaggacgcccacccgcgtggatcttgcggtgctggctgaggttggagccgtggctgaaggccttgccgcactcggagcagcggaaggacttctcggccgtgtggatgcgctggtgccgcaccagcgaggagctatgccggaaggccttgccgcacacggggcacgcgtagggcgtctcgccgctgtggatgcgctggtgctgcgtcaagtgcgacgtctggctgaaggccttgccgcactgggtgcactcgtagggccgctccccggtgtgggtgcgtaggtgcttgaggaggtcggagctcttcacgaacactttgctgcacgccctgcattcgaaggacttctccccagcgtgaagagcctcgcccagctcgtcccaggtcgagggctcctggccaccgaggagtctatgaggctcctgccaagctgcgcccattctgcgatccctgccaccactggcggccttcaggtccgaggcattcccgaaggctctcccagggacctcctgtgcacatggcttctgccgctcaggcgtcctgggctgcctcccaggcacccggtactctgtgaaggtcttttccctgggccggctgctcttggggggcctgagtggggaggtcagtcgcaggctgatgctggcctggtcactgcgcgagcctagcaggagcctctcccagtagatcaccgacacccccgtgggttttctctcctgagatggggaggcacccggttgtcgctgcaggctttttacactgtggcaggcatcggcaactgggaagacgctagtagtcatcccaggtggggtatctgggaaagctcgtggccattctccagaaacatctctatcctctgtcaaactccaggaacctaaacgcagagaaacggtggttgcctggggcatcctggttaggagaggaccagggcaggctgagtggacaggcaagggggagcccaggagccgggacaaaagcttagggaaaaagaagaggtgaggctggctctgcaggaggggctggggtttggaggaagcatctgccctgacaggtgtggcactgactgcagtggggactcccatgatcaaggcggcagcccccagacacccaggatgtgaagctgaggaaaacagcagctgctgcgtgccacccacgtctccacactggctgttccaccccctccctttccatagctcactcccttctcccctggtgccccgtcttgggcacccactcccaaacctgctcttgcaatgacctccaaccaatgctcaagactgcactcctgaatcctacgtactcactgcgtctcccctagcaccatcagccccacaaaggcaggaccatgagtgtcctggtcaaggctgtgtctacaatgcc

SEQ ID NO: 38180 - DNA, 1225 bp, Artificial sequence
  DNA replication origin
ccttcagccacggctccaacctcagccagcaccgcaagatccacgcgggtgggcgtccttatgcttgcgcacagtgtggccgccgcttctgccgcaactcgcacctgatccagcacgagcgtacgcacacaggcgagaagcccttcgtatgcgcgctctgcggtgctgccttcagccagggctcctcgctctttttgcaccagcgcgtgcacacaggcgagaagcccttcgcctgcgcccagtgcggccgctcctttagccgcagctccaacctcacccagcaccagctcctgcacacgggcgagcggcccttccgctgcgtggactgtggcaagggtttcgccaagggcgccgtgctgctcagccaccggcgcattcacacgggcgagaagcccttcgtgtgcacgcagtgtggccgcgccttccgtgagcgccctgccctcttgcaccaccagaggatccacaccacagagaagaccaatgccgcagcaccagactgcaccccggggccaggtttccttcagggacatcatcggaaggtgcgccggggagggaagccaagcccagtcctgaagccagcgaaggtctgaggtcacaggtcgcagcccaaccctttcttggccttctgtgaatcccttccacagctaaagggtccgagtgctcttcagatccacgatggggaaaagctctgtgcctgagagtcagggacgagggagaccctttggctgtggttccatttgcaggtggggacaggatttgccagtttagtcatagctcacacctccatcctcaaagaggtaacactgcagaaacatcagagggaggacatgtcagctggaactctggtggggctgaggctgtagttggggccataggacgccgacaaaggcagcgctgcatggtggtgctacttcatgtgttatgagagtggatgctgaggtgagggggatgcggacatggggtaggatgacctagagaaacttatgatgtctgcacacaaactggccgctagacggacgctgaggacattttccccctgaggcctctattcaaggcttcctgggggccatctcagcaaacaggagactacaggggactggggatcagggtgtggcctgtgagtgtcagcctcctcctcggaaaaagaaaagctttgggtcaactcagcatcatgtttgcagatgctgacagacgggatcctaatgagagtcaatgtgtgctcact

SEQ ID NO: 38181 - DNA, 1362 bp, Artificial sequence
  DNA replication origin
tcaggccacaccggtggtctgggctggggaccgcgggtcgggtccggtttccagggggttcctggtgctcgaggctggcggcgaggaaggtactggctgagggcccgcgtcgggcccgccctgcgcacgcgtcgtgatcaagggcgccggccgccggccgcgcccccaagcctctgtttctcagagtgcgtcgtgggcgtccaggggactgtcgggccgcggcgggagccatgcgctctcccaccgtgcggcagcccaggaggctgcgcgctgggcgttccacgtccatgatggccggggagactgaggcgcggggcggccccgggacgctgctggcggggaaaggctgggtggtccacgcctttcttccctcccagctgcgggttccgctggcggcggtggcgctgacaagcccgcgtcggggaagcaggggagtccctgctcacacagaccgcgccctcacggagggaggccgcttcctagacctcgcctagtcgtctttcctctccctgccctgggggggttgcgggggtcagtgcaaactcctgcgtccagggcactggtgagctcccgagttcgggcagccagggggctgaggtcccgaaggaggctccgaggggagagtcctgcgtgtgcaaaacctgggaggggagccgaagcccaggtgcttctgggactgagctctctcgatgtggagctggagtagaggggatgtgtgcggctgcagtatcaggcgagggagtgggctttatctcgagggcgtcgggagacatagaagttttgaacagaatcaggacatcctctgaggactttaaaacggttccaccgtttgttgcgtggagaacagacatgcaggggtgtcggcatgaagggaagaaccgactgccacagtctgggcagcagtggaggtgggcgaccaggtgaattctggtggatctgcggatgcatcaggtgtgggctgtttgaagaactaagtaccccatgttgttcagcctgagcgcctggaagaagagagctgctgtagatagaaaggagaattgaaaggaaagcaggtttccttcaggggaaagatcaagagtctgggatgtcccaggttggtcatgtcactggacctgacgttgttggcgtcctgggctgtggacagggcctatgaattggactgaggaatgggcagggactcagccaggtgtgggcagttatggcttgagggtaaagaagaccagctgggatgcctggggctattgggaagagcctagcacctaactgaggaggggagggtggcaacagagaggggaagaaaggggacaccgggtgaaaggaggaagggattgagttcctctgtgttcacaggttgttgaggct

SEQ ID NO: 38182 - DNA, 1842 bp, Artificial sequence
  DNA replication origin
tgggttatcttgagctggggctggactctaacctgcacctcctcctcacaggactctccacctctcgacctcgtgtggtcatccaactggagcgtggcgaggagccctgggttcccagtggaacggacacaaccctgtccaggaccacctacaggaggcgcaaccctggtgagagggagctcagggtggggtgaattcaggaccaacctgtggtcatgcctctgtccctggttcccagactccccagaagcaccctcctcccctccctcccacccgattcccttcccttccatcatcagcccctcctggaggctgcagccttagctgcccttgaaggtggagctccaagggcacaggagcggggttgacacagaagggcactcaggctatggtgagaccatctcagagtcctgctatcagctgggctggcctcaaaccctccatggctagtcactgccataattgatgggtcatttttttcacccttcatctttgtgttcagcaaacatttcctgagtgctcacagtggtcaggcccagtccaggcaatgtagacacagcctcaatcaggacgaccctggtcctgcttttctggggctcatggtgtggtgggagaggcagtcggtaagcaggattcaggagtatagtctagagcactggatggaggtcattgcaggagcaggttggggagtgggtgcctgagaagggggacaggggcggggggaagggggtaagcaatggaaagagtgtgggtggaatagccagtgtggagatgtatgcagcatacagcagccgctagttttcctcagcttcacatcctgggtgtcggggggctgccaccttgatcatgggagtgcccagtgtagtcagtgccatacctatcagggcagattgttcctccaaaccccagcccctcctgcagggccagcctcacctctacttttcccctaagcttttgtgccagctccggggttccttcttgcctgtccactcagcctgccctggtcctctcctaaccaggatgccccaggcaaccactgtttctctgcctttaggttcctggagtttgacagaggatagagatgtttctggagaatggccacgagctttcccagataccccacctgggatgactactagcgtcttccctgttgccggtgcctgccacagtgtaaaaagcctgcagagacaacggggtgcctccccatctcgggagagaaaacccacgggggtgtcggtgatctactgggagaggctcctgctaggctcaggcagtgggcaagccagcgtcagcctgcgactgacctccccgcttaggcctcccgagggcgtccggcttagagaaaagacactcacagagcatgcgttgctggggaggcagcccaggacgcctgagcggcagaaaccatgtgcacaggaggtccctgggagaacctttgggagcgcccaggacctggaggctgccggcggtcggggacatcaccgaatgggtgcagtttggcaggagcctcatagactcctcggtggccaggagccctcgacctgggacgagctgggcgaggctcttcacgctggggagaagtccttcgaatgcagggcgtgcagcaaagtgttcgtgaagagctccgacctcctcaagcacctacgcacccacaccggggagcggccctacgagtgcgcccagtgcggcaaggccttcagccagacgtcgcacttgacgcagcaccagcgcatccacagcggcgagacgccctacgcgtgccccgtgtgcggcaaggccttccggcatagctcctcgctggtgcggcaccagcgcatccacacggccgagaagtccttccgc

SEQ ID NO: 38183 - DNA, 727 bp, Artificial sequence
  DNA replication origin
tcgagggatggccacagcatcccggccctgaaggtctgcagtgaaagacgcccacctggacgggcctgagagaccaggcctgacacccggcctatccgagggatgctcgaacttcgggatctgtccccaaaaggggaaggcaagagggaggcgttccaagaggacttgccaggcccggccccccggaacggcgttgagggtaggaaaggcctgagcgaaggctgaggtgacgcgcgcggcctgtcgggaagtgggcgggccctccagggcgccgacagcaggagccgttcaggccccagagggcgaccccaagccctcccacggggtggaaaggctgcgcccactctggcagcctgcgctcacctcaacccggagcggttgcttggaggccgcttcccggatgtggcgccgcacaacgcggggcgcctcagccgggtgttgccccggcgacgccgcgctgaccaatctctcgcctgcaccgaaggcaccgcccatgccctttgaactacatttcccatgagcatcagcaagacaggcgcgaccgtgacccgctgacccgcatttgcagcagcctctgacgcctgagaggcgctctgttcctctaggaggtacggcagagtcccagggttatatggtctccctccgctctgagagcagctcttcccgggttataaacttgcgcgtctgtacagtgggccggtttctattggcaggtgaggggaggggg

SEQ ID NO: 38184 - DNA, 1132 bp, Artificial sequence
  DNA replication origin
tgtggggagcccagggggatctttggggccaggttgcactgagggtatataagcccccatatatctgcccttggtgctgggggcaaagttcagggagggctccgatggccgtgttgggggcaggaaacagtgaggggtgggatcctggggctgactgctgggcggttggggacaccacccctactggccagccagtgtcccaggcccctgcatccagcggagagagcagccactctttgcccctctcctcttcagcacaatagtggctcctagcctaggtgccctgccataaggatttggagctggtggagtggggtatggccccaggccataccccagcctgacctgccaggctcctaggccaatggcagctcctctgggttcaccttctgagactgcttcctcaaggtgagaggccagggctttcatgatccaactgtgtgcatcatgggctgacttcagtctcctgaaccccaggactccatcgtcgtcaaagccagaggtggagcagagagtcagagcaagcacatgggtggggggcagagctgggtttgaatccaggcgatgccagtgttcctgtatttactgagcacttgctgtatgcctggcaggagggtacgattcctcggatcatgggacaaggggcttagcctggctgagcccctctcctcagggtttcagtgggtgtcacaggaggacctcccaatgaggtccaccttgctgtcctgttgcttttctgtttggcctgattggagtgttcccaagggcagggatttctgtgctctgagtgtctggtacccagcagggatgggaggggaggcaagggagttagatgccagccctggagggtggatggggcaagcaggacagcaggaaggaggctagtggtgcccaaggggcagagacctgggaacccagaggccagtgatggaaagggttagcgccaggcagagaggggctggacccacacacaagaccaggcagagcaaacaaacgtagaggagaagggctgggggcaaagtcctggggagaggaccagccactgtcagcagtgccagggccaccacccctggggaggagccattgggctactcttgaggggccagaggtgagcctgaacactccacagctg

SEQ ID NO: 38185 - DNA, 1179 bp, Artificial sequence
  DNA replication origin
cgcgcgctgctggagcgccacctggcggcgcaccctgcgccctgatggcgctggggcctggcctcgcccacggtggatccggggcctcccgcacagtcggccacgcccgctgcgggacccgtggttcccgccactagaccacgctccctcctgagcgcaggtcctctctctcccttcaccctttctccataccagggcctaagtccgccttactcctctcctccatgtacttgaaccctccaggtggtgccgggctggggctggggctggttagaccacttctgagaactggactatttcctgcgtaaaccgggcgctcaggcgcttggacccggcccaagatttgactccggttctcaccccgccctctcctggggtggtggtgggggctggggggccgcttgcctgccccagggtcaggctgggcaaggtccctagctctctacccaagctgttactccctcatggggcgcctaaggagactcaagtggacccatcatatatgggggctgggcctcgggactctcgctctaataaaggactgtaggccatggggcctaaaccacgaagctgtgagcacctggatcagtgcgtgccttgccctcatagacaagatgtgagtgtcagggttcagcgtccctgttcttgggtggcatccatgcggcccacaggctgtcctgggcaggaacaggatggtccactttgccatctaggacctctattctgtaggggctaaggtgggctgcatatataaccagcacttggttctcttggatccctcagtcctgtggggagtaggataggcaggccacatctgaggtgggtctccgagagggaggccacgtgaaagccccatcatactcctggttgctgctgtccacgacctttaaggcccctcccatagatcttccagtcaggctctaagggtcttttggacttaagacttcccctccccgaccttgatggacatggctgagcaccttacttgtggggagcccagggggatctttggggccaggttgcactgagggtatataagcccccatatatctgcccttggtgctgggggcaaagttcagggagggctccgatggccgtgttgggggcaggaaacagtgaggggtgggatcctggggctgactgctgggcggttggggacaccacccctactggccagcc

SEQ ID NO: 38186 - DNA, 2187 bp, Artificial sequence
  DNA replication origin
ccttcctgcaggaagccccagttgcccagaacccctgcccgctggccactataatgtccttggtgtgatagagagagctcctcattctgggttaggggaggggaggcagtctgagtccacccctagattcatcagatgttaacaaaatgcctgtctcagccaggcgtggtggctcacacctgtaatcccagcactttgggaggccaaggcaggcagatcgcttgaggccaggagttcgagaccaacgtggtgaaaccccatctctactaaaaatacaaaaaatagccgggtgtggtggtgcacgcctgtaatcccagctacttgggagactgaggcacaagaatcacttgaacccaggaggcagaggttgcagtgagccgagatcacaccactgcactccagcctgggcaacagagggagactcggtctcaaaaaaaattaaaaaaaaaaaaaccctatctcagtggcagtggactgaaaggcagtgcctgccagagggtaccccagaataacctggcccaggcacctggctcagatcacacacttcacacagccagcactaccctggggcctctggcagttccctggagactaatcacccaactcccttattcccaggcccctggcttctcccagggcagccagaggtgattttaaactgacatctcagtcactccccagcttagaacaccatggcttccccaccactcacagtcaaatcccaagttccagcccctgcagaaaccccctcactatcactgtggccttccagccaaatttttgctttttctgacaatgctcagcaggcttctgctttccattcctttgtcctccatctcagagcccccagggagcatcctcaccacattccccagtaccaccctcccactctttacctctcctgcagcactgcagagccgcctccctgacacggccaaggtccgagggaacctccccacagcttttcggggtcctctgcagctgtggagtccccacactacctatgttttcctactcatgccccagtctcaggagttcctggggccttcatcccaccacctctgagggctttctacccctgggcctgtaaacccatcctcccttgctgccagcctataacgggacagctggaaaccagagagacacaggaggctccctggagcatagtttcccaacctgccaggacctcctgccaaggctccatacccatcatgtgcatcccaggctgctcaagtttccaccaccacccttccaaaggccaggacaggctcctgcttccctacccagcctcaggatccccctccacagaagccagtgcctgctgctccacagagtggggctttcccctcccccacataccttgcacttgggggaaggctcaatttctaggccccctgctaaccaaaagtaacagaacagtgccagtgccctgtaactagtgctcaattccccctcaggtttaactctccgatgagagattgctccctctcctcccccgccctggctcacccgagtggatgaacatgtgcttggtgtagtttttccgggagctgaacgtcttgcgacagtggctgcactcatacgtaggtggctcagcacctggggtgcgagcaggggtgcctgagggggccgtggtgggagcagcagagggagccgggacctcccccagctgagtactgggggctgcctcgggctggagtgtggggtagaaggcgggtgggggcgcaggggctggccccgatggtgctgaagggggtggtgcgggtggcccaggggcacccaagtgaaaggggaagagtgcaacgggcggccctggggtcttcacaccaggcgggcgggatccagacagtatgcagtcgggctggacaggggtctcagtgggacagccttcggggacagcgccatcctcgtcgtgccaagtggatacatagctgtctggaaatacgtcctcagctgacccagctccccgaagaaaatctctcccggcaccactgtagtcagcgaggccagtgggtgcagggggctcctcgcacgcgctgtcagcagcagcagtgaggaagccagcagcacagtctgggaaggaaggaggtgcctggccctcgcctgggccgccaccttcgccatcctcgccatcggtctcatcgtcactttcctcgtcatcctcgtcacctcggtcatcaggggccg

SEQ ID NO: 38187 - DNA, 1578 bp, Artificial sequence
  DNA replication origin
gcagcatcaagccgagcccaccctggggctttgtgactccaagggagagacaggctggtggagcctatacggatgtcagagtccagagctcctaccctcctcccttagactggaggtgtgtgcagtctgggtgcgggatgagccgagtatctcatcccttgtttgatagaaggggaaacaggccgaaggatcacggtttacctgcttgatggatggagtagcagaactcctcagattccagagtcctctgaggactaccccctcccctttctggtgcctgatgttgggccgtgtccccgattactccatgggcagctatccagtcacacacccctgctcaatccacacttcccctctctgtgccacacccacaccctgggccccacaggccccatcgagatggcaagaagctggggctgcaggagccacctccctgctcgctatgctaggggctgccagggagcatgtactggtttccctggggcatctcccaaggtactgcccaaccttttaccctcagcccttagtgactaggcacacccagaaccaccctgcccaggaagcaggtcatgccaccccactcctgcgagagcctctgtatatactagttaaggtgacctggttctgaggcagcaatcctgcctatgcacagggtctcatactggggggatgtggctaaaggaaaccaaaaggagctgtcagcaggggtggaggaggagtggaagctagctgggtagagagcaaggtctactcggggtgaggcaggttagccagttgggatgggggtccctggcctcttctacacaccgggctgccctcttggaggggcacatggggaggcttagggttattggagttggggtggggtgggtgggtgagtcaacatagagtaggccaaggcctgaaccttttcgggagcagtgattgaggccaacaccctctcctaggggtgtgctagggtttgcagcgttaatggggggctgtagacggcctggccaggtctgaggtagggggaggagggagtgctggagtgtcctgtgttgggaatggggactgtgaagggcagctggggagggatgggttagcgcgccttggagtgtggtgcactcgagccctgtcctgcaacaaggggtgaggggacagggacgttgggacagatgggggtcctcagttgacctctccctgccctcctcttgttctgtgcagatggcggctgcagaggctgtgcatcacatacacctgcagaacttctcacgctctctgcttgagaccctcaatgggcagaggcttgggggacacttctgtgacgtgactgtgcgcattcgtgaagcttcgctgcgtgcccaccgctgcgtgctggcggccggctcacccttcttccaagacaagctgctgctcggccactctgagatccgtgtgcctccggtggtgcccgcgcagacagtgcgacagctggtagagttcctgtacagcggttcgctcgttgtggcgcagggtgaagccctgcaggtgctcacggccgcgtcagtgcttcgcatacagacagttatcgacgaatgcacgcagattatcgcccgc

SEQ ID NO: 38188 - DNA, 1027 bp, Artificial sequence
  DNA replication origin
ccgcgaccgcaggcctccgttccgccggggtaacggcccggaagtgcggccttgtagtcggtcaggaggaagcggccacggcagagcctggtgcctgaagaggagtcggaggtggggtcgaatgggcatccccctgccgcagggcgggcgaggaggctggggcgtgccaggggaggggcacctgcgctccgctagaagcgcacgctgagaacgcgagggggcgctgcaggaccggggtacggcgggggccagagtgcggggtggcagcggcgggtcagaggggtgctttgggcgtagggtggggcgcgggcaatggagcagagtatgggagaacgcgctcggagtaaagcacacggcgcggcgaaggcgtggcgggagtgtgcggcgccggacccgggaagctggcctgggcgccgggtctcgagtgcaggcctttgttctgaagtgtccaggccggccttgcggcgtcgggactgaggaatggagcccgtcgcggggcggggcgggaaaggaaggttcaagtctctcgggttgatgcgcaagtttccgtccccatcggccggacagattagaatcctttcaggtgctaggtgaatacagatggggcggtgctgcttgctgagttagcctttgcgcgggcacaggcctggcttttttgaggcattgcacagaaggctcagaacagggccagggagcggggtggtgtatccggatccgtagtctggaaaagctccctctggctgccgtgtggggaacagaaggggaggcgaggggcgcagagacaccagccaggtttcttcatccgtccaggacagcgggaacggggcagtggaggtgctcgaagtggtctgagggtcaaatgtggggcatgcaaaaaagggaggcgtctggctgagcaaagggacggcggattgggcataaggagtcggaggggttgaatcttgagaccccagtagagcccgagggtgtaggggcagcatcaagccgagcccaccctggggctttgtgactccaagggagagacagg

SEQ ID NO: 38189 - DNA, 4705 bp, Artificial sequence
  DNA replication origin
gcagtggcacgatctcggctcgctgcaacctccgcctcccgggttcaagcgattcttctgcctcagcctcccgagtagctgggattacaggggcctgccatcacgcctggctaatttttgtatttttaatagagacggggtttcaccacgttggccaggctggtctcgaactcccgacgtcagatgatagacccactttggcctcccaaagtgctggaattacaggtgtgagccaccacgccgggccccccaaccccccatcaagaaaaaaaatatatatatatatatacacatatatataaatcacaagaggctaaagagcaatgagtctgtgaaatcccacccagccccccaaggcatcccctccccatgttttcgtcagcagctaccctgactttgatgcttttccagatggggaaactgaacctcaacagtggggaatcccaaggagggaaggaagcaggtccatgtggggagaatcctgtctgaggtggaaagtagggtttgtgtggggaaaatcctgtctgagggaaagagggtgtgtgtgcggaggggaaccctgtctgaggagggaagcagggtctgtgtggggagaatcctgtctgaggagggaagcagcgtctgtgtggggagaatcctgtctgaggagggaagcagggtgtgtgtggggagaatcctgtctgaggagggaagcagggtgtgtgtggggagaatcctgtctgaggagggaagcaggttctgtgtggggagaatcctgcctgaggagggaagcagggtctgagtggggagaatcctgtctgagggaagcagggtctgtgtggggagaatcctgtctgaggaggaaagtagggtgtgtgtggggaaaatcctgtctgagggaaagagggtctgtgtggggaggggagccctgtctgaggagggaagcagggtctgtgtggggagaatcctgtctgaggagggaagcagggtgtgtgtggggagaatcctgtctgaggagggaagcagggtgtatgtggggagaatcctgtctgaggagggaagcagggtgtgtggggggaaaatcctgtctgagggaaagagggtctgtgtggggaggggaatccctgtctgaggagggaagcagggtctgtgtggggagaatcctgtctgaggagggaagcagggtgtgtgtggggagaatcctgtctgaggagggaagcagggtgtgtggggtgagaatcctgtctgaggagggaagcagggtctgtgtggggagaatcctgtctgaggagggaagcagggtctgtgtggggagaatcctgtctgaggagggaagcagggtctgtgtggggagaatcctgcctgaggagggaagcagggtctgtgtggggagaatcctgtctgagggaagcagggtctgtgtggggagaatcctgtctgaggaggaaagtagggtttgtgtggggaaaatcctgtctgagggaaagagggtctgtgtggggaggggagccctgtctgaggagggaagcagggtctgtgtggggagaatcctgtctgaggagggaagcagggtgtgtgtggggaaaatcctgtctgaggagggaagcagggtctgtgtggggagaatcctgtctgagggaagcggggtgtgtgtggggagaatcctgtctgaggagggaagcagggtgtgtgtggggagaatcctgtctgaggagggaagcagggtgtgtgtggggagaatcctgtctgaggagggaagcagggtgtgtgtgaggagaatcctgtctgaggagggaagcagggtctctgtggggagaatcctgtctgaggagggaagcagggtgtgtgtggggagaatcctgtctgaggagggaagcagggtgtgtgtggagagaatcctgtctgaggagggaagcagggtgtgtggggggagaatcctgtctgaggagggaagcagggtgtgtggggggagccctgtctgaggagggaagcagggtgtgtgtggggagaatcctgtctgaggagggaagcagggtgtgtggggggagaatcctgtctgaggagggaagcagggtgtggggggagaatcctgtctgaggagggaagcagggtctgtgtggggagaatcctgtctgaggagggaagcagggtgtgtgtggggagaatcctgtatgaggagggaagcagggtgtgtggggggagcttcctgtctgaggagggaagcagggtgtgtggggggagaatcctgtctgaggagggaagcagggtgtgtggggggagaatcctgtctgaggaaggaagcagggtgtgtgtggggagcatcctgtctgaggagggaagcagggtgtgtggggggagaatcctgtctgaggagggaagcagggtgtgtgtggggagaatcctgtctgaggagggaagcagggtgtgtggggtgagaatcctgtctgaggagggaagcagggtctgtgtggggagaatcctgtctgaggagggaagcagggtctgtgtggggagaatcctgtctgaggagggaagcagggtctgtgtggggagaatcctgcctgaggagggaagcagggtctgtgtggggagaatcctgtctgagggaagcagggtctgtgtggagagaatcctgtctgaggaggaaagtagggtttgtgtggggaaaatcctgtctgaggagggaagcaggatgtgtggggggagaatcctgtctgaggagggaagcagggtgtgtgtggggagaatcctgtatgaggagggaagcagggtgtgtggggggagaatcctgtctgaggtgggaagcagggtgtgtggggggagaatcctgtctgaggagggaagcagggtgtgtggggggagcatcctgtctgaggagggaagtagggtctgtgtggggagaatcctgtctgaggagggaagcagggtgtgtggggggagccctgtctgaggagggaagcagggtgtgtgtggggagaatcctgtctgaggagggaagcagggtgtgtggggggagaatcctgtctgaggagggaagcagggtgtggggggagaatcctgtctgaggagggaagcagggtctgtgtggggagaatcctgtctgaggagggaagcagggtgtgtgtggggagaatcctgtatgaggagggaagcagggtgtgtgtgagaagaatcctgtctgaggagggaagcagggtgtgtggggggagaatcctgtctgaggagggaagcagggtgtgtggggggagaatcctgtctgaggaaggaagcagggtgtgtgtggggagaatcctgtctgaggagggaagcagggtgtgtggggtgagaatcctgtctgaggagggaagcagggtgtgtgtggggagaatcctgtctgaggagggaagcagggtgtgtgtggggagaatcctgtctcagggaagcagagtctgtgtggggagaatcctgtctgaggaggaaagtagggtttgtgtggggaaaatcctgtctgagggaaagagggtctgtgtggggaggggaactctgtctgaggagggaagcagggtgtgtggggaggggagccctgtctgaggagggaagcagggtctgtgtggggagaatcctgtctgaggagggaagcagggtctgtgtggggaaaatcctgtctgaggagggaagcagggtctgtgtggggagaatcctgtctgagggaagtggggtgtgtgtggggagaatcctgtctgaggagggaagcagggtgtgtgtggggagaatcctgtctgaggagggaagcagggtgtgtgtgagaagaatcctgtctgaggagggaagcagggtgtgtgtggggagcatcctgtctgaggagggaagcagggtctctgtggggagaatcctgtctgaggagggaagcagggtgtttgtggggagaatcctgtctgaggagggaagcaggttctgtgtggggagaatcctgtctgaggagggaagcagagtgtgtgtggggagaatcctgtctgagggaagcagggtgtgtgtgagaagaatcatgtctgaggagggaagcagggtgtgtgtggggagaatcctgtctgaggagggaagcaggttctgtgtggggagaatcctgtctgaggagggaagcagggtgtgtgtggggagaatcctgtctgaggagggaagcaggttctgtgtggggagaatcctgtctgaggagggaagcagggtgtgtgtggggagaatcctgtctgaggagggaagcagggtgtgtgtgagaagaatcctgtctgaggagggaagcagggtgtgtgtggggagaatcctgtctgaggagggaagcagggtgtgtggggggagaatcccgtctgaggagggaagcagggtgtgtgagagaagaactctgtctgagggacgcaggatctgggggagaggaatcatgtctaaggggagaagcagggtctgtaggtagaggcgaacccgcctagggactatcagcgcgttgaaaacgtggtgggtgggtgcattgaggctggccccgggggggtgggcctcagccccctgtgcggtgcccctggggtcgtgaggtctccggtccaggtgacaacggctgggggcggggtaggtggcagcttccggaggatgtttggaggccgcgaggactggcgcgaacaaccatgaaacccattcgccactcccaaggcgcgcacaggtaaaggtggctagccgggcggggcgtgagggtaacggggca

SEQ ID NO: 38190 - DNA, 977 bp, Artificial sequence
  DNA replication origin
cgcccgggcccgggctgccagaggcggccgaggccgctgctgccgaggctgccgccgcggaggccgccattcacacgccgccgggggcgcccagggggggaggaggggcgcggggcccgccgcgcaggcgcagacgcgctcgccgccaactgctgggccgctgccgccgccgccgccgcgaggccgagcgccgccacgcgcctcctgggccgctgcccgccgcgcgcgggacgctgctacggcacggccaactgctgcctgctcgcctcccgaaggcgccgcccgcgcttcttcctcagccgccgccgaaacccgcaccacgcgccacaagcacaagcacaaccgctcgcccgcgcgcccgctcgcagaaagagccgaggccggggggcgggacagaaataactggcgccgacgccgccgcgcacgcgcattgggcgcctcacgcccgggggcggggcccaggccggtcggtgcgggagaggccgccagtacgcacgcgccaactcctagtccttccaccaccgccaaccccacgtcggtggggctcttgtgggggcggggcggggcctctgtgacgtcactgccgcaattgaatccgccagtggggtatgcgaacctttatagagtgtgattcccctctcagctccacctccagaccacacagaagcgggccgctgtgcgcccaagcgcatgggcaatccgtccctcttcctcaacccgcgtctcttcgccgccgtagagtcgtctccagcctctgcgtcactaagagttcgggatagggggcagggccgatggagaagtaggcggggccaagaccgagtgaagggctgtgtccagggagaggggaggagagtctccatcccaagagggaggaagctcctgtgtgagctcgggtgctgacttttggattttaaccacgctatagttaaacttgagaaacacagaaacttgactgaatcaaatgtagatcacagccg

SEQ ID NO: 38191 - DNA, 1692 bp, Artificial sequence
  DNA replication origin
gctcggcctcgcggcggcggcggcggcagcggcccagcagttggcggcgagcgcgtctgcgcctgcgcggcgggccccgcgcccctcctccccccctgggcgcccccggcggcgtgtgaatggcggcctccgcggcggcagcctcggcagcagcggcctcggccgcctctggcagcccgggcccgggcgagggctccgctggcggcgaaaagcgctccaccgccccttcggccgcagcctcggcctctgcctcagccgcggcgtcgtcgcccgcggggggcggcgccgaggcgctggagctgctggagcactgcggcgtgtgcagagagcgcctgcgacccgagagggagccccgcctgctgccctgtttgcactcggcctgtagtgcctgcttagggcccgcggcccccgccgccgccaacagctcgggggacggcggggcggcgggcgacggcaccggtaagtacgaagtgatcggtgccacccctccccctactctctgcctttgattccgactgggtgcagagatgaggatgccacctgggcgagaggatgggggcccggacagggcacgggaaatactttctgggtcctgcatacgaacgtgggtttgtgctggccgctgagatgggacatctgactaaagttggagaaaagaaggctcggggaggggaggggctggttcgctgcgggataatggtcgggggcccacccagcaggggaatggtgggggccataacctgggtgggaacttgtaacagtctcccacatccctgcttctcgaagtggtggactgtcccgtgtgcaagcaacagtgcttctccaaagacatcgtggagaattatttcatgcgtgatagtggcagcaaggctgccaccgacgcccaggatgcgaaccaggtgcgtcctatctcagcaaccacaaggaggtttctggggagggggcatctgcgcaggaggagcttggcaccagctccaggctgttactccactttcccaaggctctgggtgggctgcctaggttgggtcaagggaccaatcttaaatctccggttgtattttctgggatgtaaacgtggatctatcaagttgtcttgccttctctgaccctgcctttgtctggcagtgctgcactagctgtgaggataatgccccagccaccagctactgtgtggagtgctcggagcctctgtgtgagacctgtgtagaggcgcaccagcgggtgaagtacaccaaggaccatactgtgcgctctactggtacatgaggctgaggggggctgttggagttgttctcccatgtgtgccctcagttgcttttatgatgttggttgcatctggtggatgggtcctagagttctctagggggtgccgcccgaagggcccgagggcagaactccagaagcagaaaaactggggttgtggtgtgtagtctctagggcctaggtgggagagggtgggaaggggaaataagggagaccttaatgtgctgcagggaggtacaaagggtttgagaaggcttatcagggagttgtcagacctggtggtgaagggctcagcatatgcaaacagggaaaggcatggtgtgaagggctttctgggtttgtggttccctggcacacatctggtataagatgctgctagggaaagtagactgtgggtccatggattataagtgatgatgatttttggaa

SEQ ID NO: 38192 - DNA, 2610 bp, Artificial sequence
  DNA replication origin
agtacccgcccgccgtcaccgcagctgccgtgtcctcctcccacccctagccgcaccccctcgcggagggatcagctgagcggccaaacggcacggtcgggggagccccgagtccgcagctgcagcggggcctgagaccagagttggcgagggcaaggaaggagcggccccgggcagtgggggcggggccgggcgggcccgagaacagccgaatttggccgagcgctgccgagcgagtccgaggcgctgggccaggccggagccggactacgggagccgaggcgggccgcgcggtgggcgcggagaggagcggagcggcgcggcaggccgggcgggtggcggcagcagcggaggaggccgcagctgcgggtccgaggagcggaggcgacgcgggcggcggcggggggccgggtggccggggtcccgggccccgcggcggcggcagcggcggcggcggcggcaggatgatcaagctgttctcgctgaagcagcagaagaaggaggaggagtcggcgggcggcaccaagggcagcagcaagaaggcgtcggcggcgcagctgcggatccagaagggtagggggtcaggggatggggttggagccggaggtcggaggtcagggcctgaggcagggtgatgtgggagtcaggaaggggtaatgcggttgctgagggtcagaggtgaagggccccgagcgtggggggggtcggaggtcaagtcttgagggttgggatcatgcagtcacggggagggggtcagagataggggcccggtatgtggtggtttaggatattaggaaggcctggtgtctgctactagggactcggaatctcagagtcaggcagtggagtggaggaactgacgactcgagagtctgggggttagacgggaacttgggtttggggtgacaggcggagaagagagggatagtagaggccaggggttggggatatgagtggaagaggatttagtttattatgctggggtctctgggaatctctgagtcaaacgggtgaagtaggttggaggaccagggactcatgggcctgcctgagtcacagcaatttggggtttggggtgacaggtggaggagggaaggttaatgagtaccagggattggagacaggggtgaggggaaatttaggctattgtgctgtgaacctcagagtcagagggggtggggtagggtggcgggggttggggacttgagagtgtgggggtcacatggaaagctgggtctgagagacagagaagaggaaggacagtgaggactgagggttggtgggggtgggcaggatctttgagtttgggtgaacaggtagatactgtagagtggaggtcatggatggggagcctggggtttagggcggtcagaggatgtttgggagtgggggcatttgggagctgtggatacagaaaagttgggggtcaccctgggccaggagttgggacacgcatacacagctgaacatgcatgtttggggtatgctgtgtatccacaagagccaagctggggagcagggagagggctggaggtgtggagcacagcccaggagaggcgcctgggggtccaggaggagacgatgggggctctgctaacaaacacccgccctaagtgtcctgctggctccctctctctctctcttcccctccctctttctgttcccgactctctgctacccaaacccagacataaacgagctgaacctgcccaagacgtgtgatatcagcttctcagatccagacgacctcctcaacttcaagctggtcatctgtcctgatgaggtgagggtgcatatggctgaattcccaggagcaaaccaagggtgtccccactgagaggagggagacatgttctgcccatcgggccccacaggatggaaccctaaaattttcttctcccccttttcctcccagggcttctacaagagtgggaagtttgtgttcagttttaaggtgagtcccaggcgggcagggatggctccctggacagaggaggcagcagctgaggcccttccaggcacctacccatctctcttttcttttcctggagccaggtgggccagggttacccgcatgatccccccaaggtgaagtgtgagacaatggtctatcaccccaacattgacctcgagggcaacgtctgcctcaacatcctcaggtgaggacactggccctctaatgccctcctcagcgctgcctgccaggcctccctcatggtcttgtgggcactacatcagactctgtcccttcccacccctttgttgtctgtggtttcttgatttcccagtcatcttcctcatggcctgaccttggttttctccttggcctgtcctgctccacaccctccctcccagcctctcacatgctcactctcctatgccctggatctgacctgcccaacaccagaggggcctgtggcagtctcccactcaccaagccctgaccctgatgctctctgtccacagagaggactggaagccagtccttacgataaactccataatttatggcctgcagtatctcttcttggtgagtaggaataggtggttgggtctggggagattggccttctgtccctctggcctgttgaccccccctacctgtactgg

SEQ ID NO: 38193 - DNA, 1684 bp, Artificial sequence
  DNA replication origin
acggaaaggggccgggaggctcgggcgcaccaggaggggccgggggcttagcgccagggcccgggggatcgccgtggatgcgctggtgctgcagcagattggagcgctgccggaagctctggccgcactcagcgcaacggaaaggctgttcgcccgtgtgcactctccgatgctcttccaggcgcgcgctgcgcacgaagccctggccacagtcgccgcacacgaacggccgctcctcggtgtgcgtaagctggtggcgcagcaggtgcgagctgcggctgaagctgcggccgcactcgctgcacacgaatggtcgctcacccgtgtggatcttctggtgcctcagcaggttgctgcgttggctgaacaccttgccacatacatcgcaacggccgcccctaaccaccccgcccccagtgctggggcggccccggctccggcccctgggggagcgccagcgggtggtgatcagagcagggcccacaccccggcagggatcctcgtccgtggggtcctgttcactcctcagatcgctggggagcagaagcgcatgcgcaaagccaccttcgcgggagggtgattggatctggccagaaaggccagccatgccgaggtcccaggggacgtggaggtgagggcttacactacctggacctgcggagatgctgcctagctgcagcgcgaaccctgcatacacaaggggaccattcattcatgacagaatgcccaccgtgccgggacccacttcatccctggggacacagtgtgaactacagggacctgaaactgaccaaagaggcagacggaggcgacaaatgcaggggtagggattctatctgtacagacttccctgatgaggtgataatgagacagaacccagcacaaggaggaagactgggctatgtgaaaaagctttctaggtctgatttaggttggaaaaaatcgtttttggaagggctgtagggcaagcgtgggggcattgtctaggtggaaaatgatggtctcagcaaatgcagggaagtgggtgggtctcggaggctggaggtggagccaacagaaagagggtgcaggctcctggatagtggtctggggtttggatgtgccttgcttgtgatgtctgtggggcatctgaggaacacagacttcatgaaggctgtggggaaacgtgagcaagggctctagggcatacacatggcacacagaacccgggcctgcaagtgatcaacacaggggtgggtatctacagaggagagaagtgggtcccagccacactgtgagcactccagcgtcagacgctgggtgaaggaggaggcaccagcaactccaactgagaatcagggcctggagaaggcggaagcctggaggaggttaaatcaagaagactgagagagcagtgagggcttttagtggtgagagaaagtccataagtcgccaaagaaaagtcagataaactagaatacatcaaaggaaatcagcaaaaaccacatcagagtcaaaagacaaatggccaaaaaacaaaaaaaattaaaaaaggacaaatggcaaaccaaaaaactctccacaggcaaaaggctaattaacctcctaagtaaagagctacaataaatcagtaagaaagatcaataacctcatagacacatgggcaaaggatgtgaacaggacaggaaatgtagctaatgcttat

SEQ ID NO: 38194 - DNA, 1363 bp, Artificial sequence
  DNA replication origin
gtggagtggagtgcagtggaatggagtggagtggaatggaatggagtggaatggaatggagtggaatggagtggaatggagtagagtggaatgaatgagaggggaaagtaatggagtggaatggaatggagtggagtgggtggagtacagtggagtggagtggaatgaagtggagtgcagtggcatggggtggaatagaatgaagtgtagtgaaatggagtggagtggagtagaatgcagtggaatggagtggaactgagtggagtggagtggaatggaatggagtggagtggaatggaatgtagtgaagtggagtggagtggaatggaatggagtggagtggaatggactgcaataaagtggggtggactggaatggaatggtgtggattggagtagagtggagtgcattggagaggagtggagaggaaaaaagtgtagtggagtggagtggagtggaatgtaaaggaatggagtggaatcaaatgtagtggaatagagtgcaatggaatggagtggtgtaaaatggagtggagtggagtggaatggagtggagtggagtgcagtgcaatggactggaatggaatggagtggagtggagtggaatggaatggaatggaatcaaatcgagtggaatggaatggaatggaatggaagggaatggaatggaatggagtagaatggaatgaagtggagtggagtcgagtggagtggagtggaggggaatggaattcaggggaatggagagcaggggaatggaatggagtggcttggaatggagtggattggagtggaatggaatggaatggaatggaggggaatggaatggagtcgaatgcaatggaatcggaggcagtggagtggaatacaatggagtgtatggaatggaatagaatggagtggaatcgaatggagtggagtggagcagattggagtgcagtggaatggagtgtaatggaatggactggagagtaatgcagtggaatggaatggagtggtgtggaatggaatggagtggaatggaaaaaagtggaatggaatggagtggaatagaaaggagtggagtggaatggaatggagcgaaattgaacggaatggagtggggaggaatggtatggagtgtagaggaatggagaggagaggagtggaatggagtcaaatgaactgaactggagaagaatggaatggagtagagtggaaaggagtggattggagtggaagggagtgaaatggaatggagtggagtggagtggaatggaatggagtgtagtggaatggaatggaatggaatggaaaggaatggaatgtagtggaatggaatggagtggagtggaatggaatggagtggagccgattggagagga

SEQ ID NO: 38195 - DNA, 1110 bp, Artificial sequence
  DNA replication origin
taaaggaagtttggaggtgtaaggagataggagatgttgcctagtctgcatgtaaggtggggacaactgtgtaggtgctggaagaaagggaaatgcaaagccagcggttgttcactaaggagggattagaaacggctaggagagaatgggtaaggttgatagtgtggtggagatagctggggagaggtagagggtggcataagaatgggaatgagaataagagtgagtataaaagtaaagaatagaacttcatcagggtgaaaagattggagggtcccctgccagcaaagagcatctatccactctaagagggagttaagagttgccagtcctgggcaggggaaaatccctgagcttgatgtgtagggaagggagggggcctgaataatccctgaggagtagtagaatagcagatggaacactgagaagttatttccttgaggacagatttccatgatggaaaggaaatgagaggttctaagaggtgggctggtggcttgtactatagcatagcctgcctttgctggtgtgtagcgattaggcctagtggaactgccatcaataaactaaatgtgatcagggtgaggaacagggaagagggaaataatgggggaaatgcggtgtacgtcaggtggatcagagagatacagtcatgagggtcaggtgtggtatccagaataacgtgggaggccggattgaagtctgagccaggaacaagggtaattgtgggagactcaaaaaagagtgagtacagctgaaggagctggggagcagaaagtatatgtgtcaggtatgaggaagaaaatagattttggaagttatgagaactgtagagagtgagttgagcatagtttgtgattttgagggcctctaaaagtattagggcggcggcagccgctgcacgcagacatgagagccaggctaaaagagtaaggtcaagttgtttggacagaaaggctacagggcatgttcctggctcttgtgtaagaattctgactgcactaaccatgcctagaaggaagggagttgttgttttgtagaagggattggggtttgggagattagtcggacacgatcagcagggagagcacctgtgtttttatgagaatt

SEQ ID NO: 38196 - DNA, 1174 bp, Artificial sequence
  DNA replication origin
tgcctgctattctagtactgagagcaatagtggaggcagaaagtcctaaaccgacaagcaagggaattagtggaataactcttttttgtcgtgtcagtgtcgtgaggggaacagggagctcttcggtcccatttgcaaattgaattttgggagtaaggaaaactagtgtgcatgtgcctgtccaattagcaggtagacacatgtaggtagaggatccacagaggaagaagagaccttgtgtgaggcaaaaccggagatgcaaagtaaaaagatgagaaggaatgctgaaaggagtgtcttgtacctagactcttagggatccagctggggtggcagccatcagaggttgtaatggggactgatggggtaactgcatagagggggaggtttgattttcatggtgtatgagaaaacgtcaagtgtctacaagcaaactttcactgttatttacagggctgggtataagtaaacaagaagagggcctgggaggagagtctgatgagcaaggggaaggcagccaaagatggagtgaaatacagggtaagtgtcttcctaagcaataattacagctaatgtttttaagtttgccagtattgatagagggcttgtctgtaatatgtagctggaaggctcctattgtttcagtgatgtgtgtagttgggctttggagatgaagaataaaggaacatcgagaaggtgaaaggttacctaggggaattccagtgggtctttgccgagagatacataaaggagcggccacaggaatagtagtttgtgttgtgagaggtccaaatattgggggagtagagttgatataaggagaaaggttttttaattaagtgcggaggagggcggcagcttgctgatgtgagatgtctcaggaggtgttgctggacctgtctagaaagtaaatgagttcttcaggagggtaaaggtgagggctgttaaaggaagtttggaggtgtaaggagataggagatgttgcctagtctgcatgtaaggtggggacaactgtgtaggtgctggaagaaagggaaatgcaaagccagcggttgttcactaaggagggattagaaacggctaggagagaatgggtaaggttgatagtgtggtggagatagctggggagaggtagagggtggcataagaatgggaatgagaataagagtgagta

SEQ ID NO: 38197 - DNA, 1876 bp, Artificial sequence
  DNA replication origin
cggggcggcgggtccacgggctttcgggggctcaggccgggcagggcgcagcgccgcctctctgctcttccctccgcccgcagacctcgctcaggagcgggagggccgctctgcgagagctccgaagccgtgagaacttcctcagcaagctcaaccgggagctgatcgagaccatccaggagatggagaacagcacgaccctgcacgtgcgggccctgctgcagcagcaggacaccctggcggtgagacccgcggcatccgcccgccctccgtccctccgtcccaacctccgtccctccctccctccctccgtccctccgtcccgccctccgtccctccctccctccctccctccgtcccgccctcccgccctccgtcccgccctccctccgtccctccgtcccgccctcccgccgtcccgccctccgtccctccctccctccctccgtcccgccctccctccctccgtcccgccctccctccgcgcactcgcgcgccctctcctgcctttccccgcccactgcacgtggtgcttcctccacctggaagacgcatttcttcacccttcactcccctcacctgggctttgcaagaggaccgagatgggtttcatcccagcgcgccagcactcactggccgggagacttttagttaactttgcctccccgagctctgtgaaatgcggcaccatagcacccgtcccagagggggttcaccgggcacatactgtaccggtgcgacagaggtcgctgctaccaccaacagcatttgcaaacacctctacgtgtaatagcaagcgatctgtatgtctttatatagtccttacaacaaccctatgggtggacactgttactgtcccgattagcctctggtcaggtttctgggagtgaggttgggactggggactcctctgaggaagtgctgggtggccgcctctgagagccagcagagcctgtgggtgagttgactccacccctcccgcagaccatcatcgacatcttggagtactcaaacaagaagaggctgcagcaattgaaatctgagcttcaggagtgggaagaaaagaagaaatgcaagatgagctgtaagaatccctggcaaattccttgaccctcccccctggcaccttggggaggtcagcagcagagcattcaccttgtacttgccattcagaaaccctcagccccattggctctcttcttggcagatgggaatgctaagatacagagcgaatagcatagttacccaacacttagctctttccaggccccgtatctgggtctctaccaatgtctgcattgttacaggcacacactcagtcattgcaactacttggaggcagggaagctgtcctcccattttacagatgaggaaaccgaggctaagagaggtgcagtagcttgtggaaggttatatagctaggagccagaatccaatcctagcctggctctgtttcctgccaaggtccttctgggagtcagtggctgggctagaacctgggtctcctggcttccatcctgcctggcctgtggttccttttccctgagcagactacacacctgctgagcagaggggtggtggatcagtcaaccccagacattgggggtctctctggaggaagacaggatagactttgtcttaatcctgccatgggttgtgtcttgggagccactgtcaccccatctgcctggtctcacttccttgagtgtgtctctgaggagactgaagtctggagagggacagtcttggcgagagccacccggcaagtcagtggcagagtggggactagtctagggatcatgcaccaattcccttcctttttcctacccagcattgcctcttctcctgcaggggtggaaaaccgtctagagcctta

SEQ ID NO: 38198 - DNA, 1031 bp, Artificial sequence
  DNA replication origin
cgcagagcggccctcccgctcctgagcgaggtctgcgggcggagggaagagcagagaggcggcgctgcgccctgcccggcctgagcccccgaaagcccgtggacccgccgccccggccccgccagacgcccgcccccgtgcggcctcctgctggtaaacgcggcccaagctgggcggttccccattgtctgcgccgcccgggagctccgggactctcatccgttcggaaacgcacgtgtacccatcatctcacatccctgaggtgcgggtgcatctacagttggtggcgtgtcaccaactaatcaacaaatatattattagtgggtaaataaagatgtgccttcatatcaatggcttctcagaatcaatgaaatatagaaataatagtaagggccgggcggggtggctcacgtctataatcccagcactttgggaggccaaggtgggccgatcacgaggtcaagagttcgagaccagcctgaccaacatggtgaaaccccgtctccactaaaaatacaaaaattagccgagcgtggtggcgcgtgcctgtaatgccagctactggggaggctgaggcaggagaatcgcttgaacctgggaggcggaggttgcagtgagcgagatggcgccactgctctccagcctgggcgacagaggaagattcctgtcccaataataataataataataaacgccccaggtaggttaagaaggtggcagagcgaccgccatgtctggaggagaagcaggggaggcaaaatggatgataaacgtcagcatttccgggcaggccgcggagtcaatgagtactctcatttcacacaacagcccccagtggaacaaggagggtctgagggttaagtgactcgcctaaggttacacccagcaggtgcataaaacctacagtaacaacaacaacaacaattgtacttccctaaggttacacccagcaggtgcataaaacctacagtaacaataacaacaacaattgtactcccctaaggttacacccagcaggtgcataaaaccta

SEQ ID NO: 38199 - DNA, 1744 bp, Artificial sequence
  DNA replication origin
gaaacgggggcggccgcagcttctgccccccgcgcggcccgcggcccggggcgaggaggccgacggcggccgcgagaagatgggctgggcccaggtggtgaagaatctagccgagaagaagggcgaattccgcgagccgcggccgccgcggcgggaggaggaaagcggcggcggtggagggagcgccgggctcggcggccccgcgggcctggcggcgccggacctcggcgacttcccaccggctggccgcggggatccgaagggccgtcggagagatccggccggcgaggcggtggacccccgcaaaaagaagggcgctgcggaggcgggcaggaggaagaaggccgaggcggcggcggccgccatggcgaccccggccaggcccggcgaggccgaggacgcggccgagcggcccctccaggatgagccggcggcggcggcaggcccgggcaagggtcgcttcctcgtccgcatctgtttccagggagacgagggcgcctgcccgacccgggacttcgtggtaggagcgcttatcctgcgctccatcggcatggacccgagcgacatctacgcggtcatccagatcccgggcagccgcgaattcgacgtgagcttccgctcagcggagaagctggccctgttcctacgcgtctacgaggagaagcgggagcaggaggactgctgggagaactttgtggtgctggggcggagcaagtccagcttgaagacgctcttcatcctcttccggaacgagacggtggacgtggaggacattgtgacttggctcaagcgccactgcgacgtgctggccgtgccggtgaaagtgaccgacaggtttgggatctggaccggggagtacaaatgcgagatcgagctgcgccagggggagggcggggtcaggcacttgccaggggccttcttcctgggggccgagaggggctacagctggtacaaggggcagcccaagacatgctttaaatgtggttcccggacccacatgagcggcagctgcacgcaggacaggtgcttcaggtgcggggaggaggggcacctgagcccttactgccggaagggcatcgtgtgcaacctctgtggcaagcgaggacacgcctttgcccagtgtcccaaagcagtgcacaattccgtggcagctcagctaaccggcgtggccgggcactaaacacccgcctgcctgccagggtgaacacacagccagcttatccctcttaagtgccaaaacttttttttaaaccattttttatcgtttttgaaggagatctttttaaaacctacaagagacatctctctatgccttcttaaaccgagtttactccatttcagcctgttctgaattggtgactctgtcaccaataacgactgcggagaactgtagcgtgcagatgtgttgcccctcccttttaaaattttattttcgtttttctattgggtatttgttttgtttcttgtactttttctctctctccttgcccccctcccgccctccccgccccataccttttcttcccctggattttcaccctttgggctgccttgctcatctttatgccccagcactaggtacggggcccaacacgtggtaggcactccatcagtgtttgctgaattgaaaacattgttgactgtggcttctatcagagtgtctaccttttgcagctcttcccctccctcatttaatttgctgcttttaatctacgtggtctgagaatttgtgaaaccagtgttg

SEQ ID NO: 38200 - DNA, 1328 bp, Artificial sequence
  DNA replication origin
atccctttctcatatatatgtatatttaatctcgttcgaagctccataagaatccggagggagaagggaatatgataatatgatgcccagtttccaaataggaagcaccgaggacacgcagactaggattcgattcccaggctcgcggtcccagctgtctctcccctgctcagcaccaagggccgcggggcacctcgcctgccagccaaaggtcctgagctgggcggacttcccgcttttcacaaaccgcaggcgacattcgaggatgcgtgggtgcgccattcccaggtcctaccccaccccgtagcctgcccggtgcccgacttgggcgcgtcgccccacccaagcctggagaagcgtgcaggggcacggggcggagccagtcctgggggcgtggccgggtggccggcacgaggcgcgtggcggggaggggccgcgcgctcccggctcaccacgtgtgagccagttcgggcaccactgggcgtgtgccgcccctgggggaggtcaccttcacggcgtcgtgagcatgggcgatgggagggggcgctgaggcctcgcccttgggaagcaggagctgggaggtgcccggattagggtctttaaggtggcattccgctggggcgtagcgggcatggtttggggctaggagaatgcgcctctggcggtacagctcacccacttctggacgagcgaaggccaagagccgagcttgagggtgtggggcggggaggaaggaccgaggtgcggctccgcggcgcggggggcggggtgggggtggtggggagaaagaaattggagcatccctggagggagggggcgactcttaaaggcacagggtgcttggaagaggaggccctgctcccgtccaaacggtccctccgcctttcagaagctgagatctggaaaagcctacgtgtaaaacctttacatctgcagcctgagcagtctacccgatggagtcacacttcctgagttcacattcccagtccctccttttccttatcctgaaaatggggataattcagtttctccctcacatggtggttttacagattaaatgagataatgcatgtaaacacatcctgatacctaggcaatgttcaataaaacttatgatagacgggacgcggtggctcacacctgtaatcccagcactttgggaagccaaggcgggcggatcatttgaggtcagaagttcgagatccgcctggccgatatggtgaaaccttgtctctactaaaagtacaaaataatgagtcaggcttggtgacgcgtacctgtaatcccagctactcaggagactgaggtatgagaatcgcttgaaccta

SEQ ID NO: 38201 - DNA, 983 bp, Artificial sequence
  DNA replication origin
gcccccgcgaactggggagcgaggagctgggcgctcgggcccaacggacggcggggggagaaggtcagcgcggtctcaggcgggctcggcgcgcccccgccgcctccggcaagttgcgtcctggctcacaacacacattgttttgcgggggccgaggaatcgcaccctccgggcccccgcgggctcttcctgcagcctctggctccgccgcggcccgcgcgcgccgctccccgcccggccgccgacgcctttcagtgtctttctccccgcgcggccccgccggcgcgcgcaccacccctccccctcgccgtctgcgggccgctgcggcgcgcgcggggccgccccgtgtaaacaccgaggtgcccgcttgggctgcggccgggccccgcctcgcgctcgggcgccgcgtcacccgttgctgggcagagaagccggtatttgcatctcccaatcgctggccgccggagcggggcggggctcgggctgcggggctgggcggtctcgcggctaggattgggggagaccggcgagatcggtttcttttcttaggttaggggttggaggaagggtaggggacgcgagcctgcttccatctgacgctggacgcttgtccctgccccgcgttgccttttaaattttagctcattccgagacacctgccgtcaggtaggatttccgccctttcctctttcagggacgtcttttcggaccatcccagaagagaatttggggggcccaagactcaggaaagcttcttaaggggacgaactcaggttgtcgtagatgttgccccccgcctactacacacagggtccgaccacatatgggaccagcaaatgcttttggacctagtgaacaaatccctttctcatatatatgtatatttaatctcgttcgaagctccataagaatccggagggagaagggaatatgataatatgatgcccagtttccaaataggaagcaccgaggacacgcagact

SEQ ID NO: 38202 - DNA, 1192 bp, Artificial sequence
  DNA replication origin
tggtcccttcctctactgctggatttccagagaaagaccttacctctcaattcccagttggggggaaaaagggacgtataggtaggctgtagaggcagccacgcgaccggagaggtggtgcgcgtgggtgtaggagaccccataccggaaaaggggctatgccacttgggagagtttcaggcccaaaccaacccttccgagtgctcctcccattaaggcagcgacgccccgttggctggagaggaaacctagggctcccggatcaaaggatttcccaggatcgctctacactcgcccccgcttttgcccggagcgggcgaagagtgcggctccgctgggaccagccccctcctccccagaagcattaagcatgcgcacgaagggggtgggccccagcggaggggcgggccctagcgctccggggataaaaggggtgcgcccctccccccagggaagggaggggcgcaggaggcgcgtgcgttgccacccggccgcatcgcccccctaacccagagaaggcgggccgggcgagggaggagagattccggagcaaaggagggggcgggtcctccggccacgaggaggggcgtgtgcaaaaggggggaggggtgcaggtctgtaggagaggacgggaggtgtatcggagggggctggctgctggtggctgtgcaggagggggcgacgtggggaggggcttgggtgtcggggaaggggtgggggttgggctgccttggggtgtgtctgcgggggaggggcatgtctggatctgaggggggatgggcacgtccaggagggggcaggctgcgcgggagatggggtgccagcctcggcctccgaggggccccaatacctgattcctgtatgtaaacagctggtttgggggcgtgcgcgccccgctgacggtgggctcagtaggtgaaaaccaggtctgcgatgctagacgggcgccagtcccccgcgatcatctcggtaacctcgggggtgcagtagtccgggaactcgaagtgcgacgtgcccgagggaggctgcaggtccgggtcgcgatccagggcgctgcagtccaggccggccgggccagggggcagcctggacagaaagcccagcgactcctcccccgacgccaccgtctcctcttcaccttcctcagccgctgccgcctcctcctcctcttcctccggctcctcgtcctccg

SEQ ID NO: 38203 - DNA, 903 bp, Artificial sequence
  DNA replication origin
ctattcttcatgaaggccagggagtcctgacatagaggcctagacaggcaaggtggcttgccctgggacacccagctcgggcccaaatcacacggacttgaatctggcaaactgtttagggagggttgaggaagagcacagacatgcagaaccacagggcaaggtcggggcaaatacactttattcagtcctggcatcagactggcggagtcctgctgtgggtgccagtgccccagacagagggaccccacccctcagctacgagactagttctccaagaccacagacagtgacatctcttcactcacatgacgttttttttttcattgtctttttttgttgttgttgtttttcttaaaaaaaaaaaaaaaaaaaatagagcgcaagaaaggcccagagccggagcaccaagcttaaaggaggcagctggtggctttgtcagcgacgggaacgcgtggggcagagacctgcagagaccctgggcaggggtccggaggactctgggaccgtttgttcctgagatttgtgtgtgtgaatgagagtgtgtgagccacccgggagggtgaacacacgccggtgagatacaggtagtgagggcaaggggggtgtggggaggccggaggggcggggcggggcagagagatggcggcgtgagaggggccacagcaacagggacagggctcccgagggcaccctgaactggacacaacttcctcctaacagcagcgttctccccatttctcacgtggaaaaaccgaggtgcaaacggcccatcactactcggaatccattctcagtctcactggccaagtcgatggtctctcccaaaccagatgtttaaaagcgagagtcttcctgccatcacatctgctctccacgcctcagtcccaaacccctagcacc

SEQ ID NO: 38204 - DNA, 1152 bp, Artificial sequence
  DNA replication origin
tggccttggccagacgcggtggctcacgcttacaatcccagcactttgggaggccgaggcaggtggatcacttgagctcaggagttcaagaccagcctgggcatcatggcaaaaccctgtctctattaaaaatacaaaaaattagctaggcatggtagtgcgtgcctgtagtcccagctcctcaggcgactgaggtgggaggatcacctgagccttgggagatcgaggctgcagtgagccgtgatcatgccaccgcactccagcctggacaacagagtgagacgctgtctcaaaaaaataaaaattaaaaaaaaagaaaaagaaaaactaaaaaggaagatgtggccctatcttgccgagctcattcttctgtgtgtccccagcccctagcacaaggagaaacagaatagatgctcaagacacaaaggcatgtctgtgcaagggtgcttgatgacggttggaggggcacaatgactttcccaagatcacacagcaaatgtgggacaaaatcaaggctgacagctcatgacagggtgggaggcagatgcagctgcctggcacaggctggctctccagggagatgggcagtgggcacgcattgcccagggcagaactggggctaggggaggaaacaacaagggaggctgtcattagctccttccaaagtggaggtcacttctctcccaaccccgagtcctccacccaaactcccttctcaaggtacaagggctgatcccgtaccagggatgggtagggactcaaagaggaaaagaggatgaaaagaggatggggactgagtgagatgtgaggactccagagggattagcggctctcaaggcaagtgggaggggacttcccggtaggagcccggagacagatgggagcctgtgaagagggcgggggcccggcgaggagaagcggtttctacgctggggtggggctccatgagggggatggagacctggaaaagggactgacggtgcagcgaggagaggaaggctcggttaagggatgggtcttccacgggaggggtggggaactgcgggagtgacggcagcttcggtgaggagtctgaggggctgcgtgaggggctggggcccagggagtccgaggggtctctgtgagggcgctggggtgtccgagcgagcaggg

SEQ ID NO: 38205 - DNA, 902 bp, Artificial sequence
  DNA replication origin
cttccgcccgtgcctgccgcccctcgcctcctccctccgccgcagtctccccacgtcggacagcgcagccccctccgcctcccgctcccctcccaccgagctcctcccggctcccgggctggggacgcctccctagcggttcccatggcaaccctcgtcccgggtgcctgcgccccgccccccgcccgccagacctactccgtgcagccctgaaacgccaggcggaggggccaggccgagcgggaggcagcgtcaaggtcaccttccctctccagtagcagcaggactgagtgattccatctatttggagtcgcggaagcggtgaattggaggggaggagctgacccaggtcaacagccccgaagccccctccacacctcctcacctgtggccttgaacagtggtctccgcacggaggctcctaccgtcccccaggccccatttcttctccccacccgggcctccccagcgcctcgccggggcgggtaccgcgctggccgcaccctccgcacagcccgccccgcccgcctcctccggcgagccctcctctccagacctctcgccctcctcctccgacggtccttcgctttcagtctctgccttttcccgttctctgtcgtggcttttgttgttgttgtttttcctcctttccttccccgctcttcttttccctgaattgtaagtgaggagggtgtacagccactatttatggacaggctttcttgacagcaatcttgtgtgccgtgtgactccaagcagaacctccaaccgtgtgtgtgtgtgtgtgtgtgtgtgtgtgtgtgtgtgtgtgtgtcgtacctatctgggtatgtctctgtatgctttgtgagtatgtctgtgtgtttctctgtgctgtttcggtgagtttctctatgcaggga

SEQ ID NO: 38206 - DNA, 1251 bp, Artificial sequence
  DNA replication origin
cgggatcgcaccatcccccgcgccgcgcccgggcctctctcctctgcatccgctgcacctgggacccgccctcgctggccccctaggggcgtctggtcagtgcagacatcagccacggactctccctatcaccttggaaaaaaaatttgctctttttttttttttttttgagacagagtcttgctctgtcgcccaggctggagggcggtggcgcgatctcggctcactgcaagctccgcctcccgggttcacgccattctcctgcctcagcctcccgagtagctgggactacaggcgcccgcaccacgcccggctaattttttgtatttttagtagagacggggtttcaccttgttagccaggatggtctcgatctcctgacctcgtgatccacccgcctcggcctcccaaagtgctgggattacaggcgtgagccaccgcgcccggccaaaaatttgctcttctgagcctcggtttccccacctatgaaatgggaagaacattcctccttctcaggatggtgcttaaaagagcaaacagtgactgttgtcggggtgcttccccttttttataaagcacattcccagcactgccttataaaacctttaggagaagtggacatgcgggaatctccattctccacattctactgagagccagcctgaggcccagctatgggcaagtggttcagaagcttcaggaaggcctatggacttaagagctgactctgggctcaaaggaaccaccgtggcgcccttgggaggcctaaggtctgctgagcttccccgcgtccctttgctagaggcagtgcggcctagtggtgaagagcccctagagccagctggcctaagagtgcactccacctccgctccaacccacagtgctaccccagaaaagctacctaaaaccctgcctcaacttcctgctccataaaatgggctcataattgcgctcacttcataaagttgttgtgaggattaaataatttaatatgtgtaagacgcttagaacagtgtgtggcacattgcggatgctcagtggagtgtaaacaatggagacagagagggaaagaggcctttaatatgcttgcacccaaggcctgggagggcttggtgctacttgatttggggtgaaacacccctctgcgtcctaggcgtccagcacctttctttttttttctttttttgaggcagagtttcactcgttgcccaggattgagtgcgatggcacgatctcggctcactgcaacct

SEQ ID NO: 38207 - DNA, 1468 bp, Artificial sequence
  DNA replication origin
cggctgattagctccggtttgcatcacccggaccgggggattagctccggtttgcatcacccggaccgggggattagctccggtttgcatcacccggaccgggggccgggcgcgcacgagactcgcagcggaagtggaggcggctccgcgcgcgtccgctgctaggacccgggcagggctggagctgggctgggatcccgagctcggcagcagcgcagcgggccggcccacctgctggtgccctggaggctctgagccccggcggcgcccgggcccacgcggaacgacggggcgaggtactcggcggggtgcggcctgcggactcgcccggaggccggggggcgggagggggcggccggggaagggggcgccggaagcctctgggcgtctgcgtgttgccgcgtgttacacgcacgcacgccccttacacaccttttcacagaccccgccgtcggggcgcggccaggtcagatcccttttgatccgggcctgggctgagtgctccccccgggcttcaggtgacgcggccccgcggagcgtggggtcgcccgagttgggctggggaagccagggacggaggtgtccggccgtcacccctagaggagggcgtgcgggggtctgttttgcgtgagtgcgggataggggagtcgtgtggtgcggtgaggggcttgtggggggcactggaggactctgggggtggcgggggatccgagggggtcctcgtgaacccgcaggggagagtcctgggtgagggtgggtcccgagcacctgtgtctcaggagatggtgagagctgtctggagggctgggcacttggtggcaggggttggcggtgcaggggacaccgccgggacagggctggggtgccctggagcgggggagccgagggagtgggagcgggggcgcagcgcgcgatctctggcccggcagggccgctggttctccccagtgcgcggctccgggtttgcaggtggacggtgcgcgcgtgtctgcggtgtgtgctgtgcctgcagaccggggagggcgggggacgacagccacctccttccctctgcctcacccccctcctgtcccagggccgcgcttcaatttccgctgaaacttctgactcggacacccgccgcctttcgcttgggctcccacgggaggggcctggctgcggggggcggggcggggtgggggtgcggccttgctcgggtagaccatgggtgtgacagctgggagggctgtgtgtgtgtgtgtgtgtgtgtgtgtgcgtgcgcgcgcgcgcttgcgcttgatgtaacccgccctcatttccctgggtcccgagtgtggcagggaacagcaagaggtagatattaggggctgctttcattccacatcacagattctattctgcagtgtggtctgcaaaatgccttgcccaagatgtatagactcagttaccgcatctgtccccatctgggtggagcttatcccaggcccca

SEQ ID NO: 38208 - DNA, 1392 bp, Artificial sequence
  DNA replication origin
aagaacagcagttagattgacaggtgatgatatctcaacagcaaccatttcccagcattttgggaggccgaggtgggcagatcatttgagcccaggagttcaagaccagcctgggcaacatgaccaaaccctgtctctacaaaaattagccagctgtggtggcacgtgcccgtggtttgcagctactcgggaagctgagcccaggagttggaggctgtagtgagccatgatcacgccactgcactccagcctgggcaacaagagtgaaactccatctcaaaaaaaaaaaaaaaaaaaaaaaaggcttccccaggccattcaaatgtacagccaaagttaagaaacattgtctaaagggatgtgtttccggcaaaagaaaaattatcccagatgaaggtctgaggttcattccttcattcaacatatggagcctccattatgtgtttggaactgttctagacaccaggaacacagcagtgagcaaaacaaaccaaagtccctgccctctaggagaggaaaacagacccagaataacataaataagtaaaacatgctccgttagacagtaatagatgctgagaagaaaaaatgaagccaggaaagcggatgtgaaatgctggatacgtgtgtctgtgaaatttcagatggagtaactagggaagatttttgggtaaagaccaaaataaagggaaggagggagccatgcagacgtttgggttatggcaggtgcaaaggccttagggcgggagtgtgtctgacttactccaggacccagcaggtcaatgggacttgagtggaatgaggcaggggcagggcagtcagctacgaagacagagatcgggaggcaatttgcgagccctgggacagatctcggattttgctttaagtgagatgggagtacttgggtcggggagtggcatgggtttgatttacattttaacaggactctccggcagctaggtggaaatggacggtagggggcaaaaagagaagcaaggaggcccaggaggaggctggttcaagacccctgagatgatggagcactgatggagctggagcgggatggggccggaggaggtgagggatgagattctgcaagtggagcccgcaggatctgctgatcgatgggacgaggaacgggagaaaaattaaagcggcgcatgaggcagacgaatgcaaacttcaccaatagctcaacgaaaagacagacggtgaccgctgagaggcagcgtcggatctgggtaagggcgggttcctgagcctgccaggcctggattcaaacctcggctgagtggccttggacaggtcatcaacaaacagagccttcgtttattcatgtgcaaacggggccaaggaccgggcctgccccgaggtatgcctgaggcttgggtg

SEQ ID NO: 38209 - DNA, 1414 bp, Artificial sequence
  DNA replication origin
ggtatcagagcacagggccccacccacgtccagccctgcgtaattggcggctttgattaagctgcattgccgggggtgggactgggggccgcacctgcagaaggtgtgcagacactcacgcagcaccacggcctcgccgggcgccagcaccgagtagcacacggggcactcggcgggctccgtgttcagcaccaggctcctctggtccagctggacgtgctgcaggtagttcccctcctgctgctgctgcttccgctgggcacacggggcggggccacggggcgggtcagggcctcgggggcgggtcagaccccgaagggggaagggccagggggcgtggtcagggctgggtcagaccagccacaggcaaagctgggagccagtagggatgggggatgggggacgggggtgggggatgggggtggggctgggggatggggggtggggggtgggggatgggcaggagcaggcaggttgggaggggcggggctgggagtgaggccaggtggaggtggggaagccaagggaggggaggccggccaggtagccacggaaggcgccaggtgagacagcaatggcagcaaggtaaggaagggggccggggtctgagtggtgagtcaggtagcagggcagggcccgggccagggctggtggagccactcaacgtcaggggtggggaagtgacgaagccgaggagctgagacgggaacaggagtggggtggccaggggcagcaccgggtccaaggggaatgcaggtggggccaggggtgagatcagaatggggagcactcggggatcaatgtctgtgtcattagtgcgtgtgtcacgatgggggcggggtagggctaaggcgtaggaccggggtcgggggtcatccccctagggcgcagcgagggtccaggccaggctctcaggaagtcaggggtgggcccagcccgagagggaagaggtcaggagtaggagagtccagggtgaggtcacggcgaggtggagcaggcttaggtcacagacgggtgggggtgaggtccgagctgaggtgtggtcatggctagggtgctggggtcatggctagggtgctggggtcatggccagccatactcgtgtggtgtgtcaaagctggggatggagccacagcccacgtgggagtggggcatgtgaacctggatgtgcgccacagccagggagcgggtctcagccacagggtgacctttgagagagggcaggtcacagccaggtgcagggtcacagccaggtgcagggtcactgccagcagcatggttgggaggggcaaggcagtaacggagaggcgcggcagtgcgcaggtgtctcccttcctggcctacacctcccccgtgcggtctgcaggtgtctgtccagggactttcccgcccacctgctggtactgacgcagcg

SEQ ID NO: 38210 - DNA, 1086 bp, Artificial sequence
  DNA replication origin
tgggtggggccctgtgctctgatacctcattggacgcccgcgaaaacctacgaggtaggctccgtctccccatgttgcggacgaggaacctgagggaaagagaggcccagcgccttaccccaggcccacggctcatgagagaagcagcctagacgtgagcgcaggcgtggggggagactcccttcccctctacctttcgccgcccgggctcctgcagccacgctgctctcagcctcgctgtgggcatctgccagtttctgagtctcctgtcatggcccccccacccctgaatgtggggaacacagacccgctcaccacagcggacccttgtggagccgcccctgggtgacaggctccgtgcctgcctcctgcagcttacattccagcagagaggctgatgagaatcggataatcgctggttgatgtctttgtgaattgtgtcaaatgctacatacagtacattaagagacaacaggagtccttcccagagagggtggtctggaagcttccaaggaggtagccccagagcagggaccggaaggcctgctgtaggtgtggggtgtgggcctggcctgttggaggagactgaggaggtctcttggtggctggagcagagggatgaagggggtaatcagagcaggatagagaggtgttgggtacgtgagcagcagtgaggagttgggatttgttctgggtaggatgggagtcactggggagacatggctgctgttctgagatagactctaggggccagatggatgcagggagcccagcgaggaggctcctggagtcacccaggtgggggatgtggggcctggaccagagaatcagagcggcagtatggaggcagggtggaggccttggtgatgggttggtgagagggatgggaaggaaggagatattgaggagaagtccacctggggtgactgagtgaggcccctggggtcaggccttgccatgtgagggatggagtccccagtgaagggggttcctatgatcctaactcttttcccctcccctcccctagggagtgcctgcagggcaccatccgcaacagccaggaggcggaggtctcctgccccttca

SEQ ID NO: 38211 - DNA, 1040 bp, Artificial sequence
  DNA replication origin
gctattgcactccagtctgggtgatagagtgagactctgtctcaaaaaaaaaaaaaagataattttgagaattctaacagattattcttgtactaattacaaatatgtatttgaatagatttagacttttgattttaagatgaaatctcgtttgtattgacacatttgaaagcactcatgactcagtattcttataaatgtattacatttacaagaattacacaaggacttgaaaggctttgttagaaacctgtgatacttagaaaaacgaattgaatttataaatgcagtttcaaatgttcaaaggattttaattagcttagtttattaatgggaccaaataactgatataatttactagatttatgaatagaactgtaaaacttggctgtgcgcggtggctcacgcctgtaatcccagcactttgagaggctgaggcgggcggatcacgaggtcaggagtttcatgggctggaggtctcaggataataaagaactgttgtggttgggggtgggaggtggaagagagtcatcaagcaactggaattatgggaacttcagcatgaagacctagcactagaaattcgggaggccacaatcacaatatcagggatataaccaagggaatggatgtctaattggaaagaaaggaatatcactgaagacgagaaggaaatcagacctgataagccagagcgctgctttagatgagtggccactatttcgcacaacttaagggggcacggttcacgtgaacgtctacgtaaatggcgctcccaggccttgtgcagtgcataacctgcggacccgtatgacatgaacctgctagatccccaagtacccaagaactgatgacaggagttcgtgtggggagacgagacaggaggtaaaaaaataatccttggtaagcaaaaattggtcataattgtggagtatttactatatgcttggtgatgttctaaacactctcaataaccttgtgagttcaatatttttattatcatcaatactattttacagatgaaagaagcaaaggaaacg

SEQ ID NO: 38212 - DNA, 1129 bp, Artificial sequence
  DNA replication origin
cagcagcggctgcagcctcgctctggtccctgcggctggcggccgagccgtgtgtctcctcctccatcgccgccatattgtctgtgtgagcagaggggagagcggccgccgccgctgccgcttccaccacaggtacctagggagcagccaggcgaggtcgttggcgggtggggtgggcccaggatagggcagcggagcgcggccgaccctcacgcttccagcagactcctgagcggcccgtcgccttcccctgcccccaccttcacacataaaccaagcgaggcccctgcagcccatcggggaggcccaggggccacccctcagggcggagggcgaggtttgggggcagaggccgatgtgagggtgggaaccggctgccggagtccagcttattgcagaggagaggactgaactgggtggggactaggggacaacttggaggagggggtcgtcagagggggaagggaacttgaggggtggggccgcaggggggtgctgggggagggtgcggagggagtggtgcctgctgggtagtgtgcagtgaaccctcccgcgaaactgggcagctggagtaggggccttcttagggtccctctgggcggggctgagcttcccacctgcagagtgggtgcgaggtggagagaaccccaggcggggttgctggggcgaaagggggaagggaccaagacgtggggcagaacgtctggagttggagttaaggactagttaggagcctggatagaaaaagaggtatggagagaaagcttggctaagggtatacatatgttggtgaccttttgaaagagtaggacttttcaattttgtttttcgttgtgtgttttttgcagtgttggaacattgctagattaagcaggtgatgggtggagcttctgtagtttgttttggggaagcagagtcagggtcaggagaagttgcatcttggctattgctttgtgtggaggaaagagttttgaaaagaaggtggcaaattatttgggaagacttgattacttttcagctgtttaattctacgagaatgggacatggggagaggaaatgaaaactaagaagagaggccgggcgtgtggctcacgcctgtaatcccagcactctgggaggccgaggcggg

SEQ ID NO: 38213 - DNA, 1579 bp, Artificial sequence
  DNA replication origin
ggacgaggagaaccgcagcgagagcgacgcgtcggaccagtcgttcggctgctgcgagggcccggaggcggcgcggcgcggcccgggccccgggggcgggcggcgggcgggcggcggcggcggcgcgggccccgtggtggtggtgcgacagcggcaggcggccaacgcgcgggagcgggaccgcactcagagcgtgaacacggccttcacggcgctgcgcacgctcatccccaccgagccggtggaccgcaagctgtccaagatcgagaccgtgcgcctggcgtccagctacatcgcgcacctggccaacgtgctgctgctgggcgactcggccgacgacgggcagccgtgcttccgtgccgcgggcagtgccaagggcgccgtccccgccgccgccgacggcggccgccagccgcgctccatctgcaccttctgcctcagcaaccagcgcaagggggtgagtgtgctgcgtccctcgctgcggccgccaggtcggggtaggcggggggcagcgcctctgcgggaaccggagaggtgcaggggtccccaacgaggccagggggaagcgacgtggaattcgtgctgggtgcggcaccccaagcccagaaccactgacttaatgcccaggcccccaaacagaaggatgcgggaaaacccagagttcgggtctgatttaactgctcagtgtgggatatcccctccaacgaaaggtgtgctggaacttccttcctgctgggaagacggcatgaggactgagtaacaaagacccatcttttatggagtcttcctctgtgccgatgcgctccacatccacttttttgccttcacaagaatcccttcaggcaggtagtttttctgcccattttatcctgatgaggatctgagcatcagagatgggatcacctgcccacatttactcagctgggaagccggggcgctggccctgggcttgcccggtgtgtgttgcccccaccttgaaataattgtcccctgtcctaagatctaacccaagagcaggagactgagaagaaaggaggccacaaaccgccaaccgagagcctgaggtacccagcggatgagcagtaggagtgaagaaggggccctctgagagtccccagcccccaaaaggacgtggtgttgggagagggcactcttgggtcagctggagggagctggtgtgcagctcctgcaatgtgtcctgggcaagaaagtggatcaggctggtaggggtgggcgggggctgtgtggcagcagaggtggcctcttggctgaaaccttgcccaggctccaaggaacctgcttcatcccccgaccgtgtgcctttctggcctgggcttttcctacagtaaagaagcctgtctaacaacttgtattccagcagctaccatttacatccggggaaactgaggctgagagagtactgacttttggtggccaagtggaagggcatggggaattggagttaggcccctgactccctgctgtttggttctcacagctgccgttggtcccttgctccaccctgttctgcggaggcctctgcatcttggcctgagaccaccctctgtctggctcatca

SEQ ID NO: 38214 - DNA, 2029 bp, Artificial sequence
  DNA replication origin
ccctccgcactcccagggacaagacctagaaaagtcaatgctgctcagccctttcccaggcagttggctggggccagcccctaaaaacagtagcacaaactcctctcaggtactgagcactcctgtgtgccaagcccagctctactggcacaaactcatggaaccatcaccagccctgggaatgggtactattattatctcattttcagagcaggcaactgagactctgggaagcagctaaccttggaaccggaactgggtctctctgataccagaccctggcttgctcctaccacattgtcttgaaatcctttgtttacagctcgccttcccctctcggctgcagaaggcctgtctcagtctcattcatggttttcttctactcccagggtcccaagtgtcaaaatatgcctaaggagcaaataaatgaatgagcctacaaggcaagcccctcttcgccttccgggcccagttcacgccttggttggcatctccagttggaggtggaattgggagggggctggacagaggaatttcaagctgcctgagggtcagaagcagagaggagggggagaagggggagaaagcgaaagtgaagtgagctgggagcccctgtgaggaggcgcagacagggaaggaaatctcccggtaataattcatcggctcaggaagcagcagcctggtctggggctgtgtgtgggaccagccctgcggggagggggcccatgctggctgtttccctcctccccaaagcccagcctggctggggtcacggtcaaatgctggcggtggggggatccaggtgtgggaacagactctcccgcagaccctgggtcctaaggggctcctcccccggcagtcatgggaaatccctcgctccctcttcttcccctaattctggcctggatcagggaagccaggaaagcacagcatggcagagctgcaggcatcgtcaggaaaacagacgcccagaggagccaaaatgcacctagaagcctttcaactccactccctgcgctctgtctgctacaccggctgccactcgggcttattttcaaggccaagtggatgctggtttagctagtgcctggagagagctgagcagcaggcacgagtgagatcgagaccccggcaaccacctttggctcagcaattctctgaagaggacacgtcaggctgaacaatctaaggtttctagaaggcaagcaggcattgaggaaagatagcccgtgtgtgtgtgatgggatggtggtggtaggattccaagaggtagtgaaaccggacaggctggagctagcgccgccactcccacctgtacgactgaaggccggagctctctgacctgtaactcagggctgccatcctgcagcctcagctgggcgcaatagagtatatagcaccgagtctggtacacagtagttccttaaccaaaacgtcagttccgtgagggtgaagaatttattttgttaatggctgtatcctcagacctaaaaccatgtctgacacatagtagggacccaacgaatatttgttgaaaaaacgaacgaactactggtgtttgtgtattgtggttttgttttgcttttttttttcttcttctttttaagtttgtcttcagggacaagacactgtcgaatcctcatttggaaagattatagcttttctccaagtgttctccacggacaccaccactatcaccaatggcttgttacaaaatgtaggttcctgggcccgttccagaactgctcaatcagaatgggagcaatttgggactctgtaatagcaaaagccccttccccagttcttacgcacgtgaaagctgcagaactacaggattagaattggagggcaggcagacactagctgtttctctgcaatctgaacgttccgaacgaggaaactgaggcccagagaggagaaagggatctgcccgcgtctcccaggtggtccaggctggagacaaaaagttcggatctgggcccaccccggccgaccctcccagacctccagcatctgccgggctagccag

SEQ ID NO: 38215 - DNA, 1289 bp, Artificial sequence
  DNA replication origin
ccccaccaattcctgcccttcttggggcttctgttcctcccgcctcctcttgccaggcgtgggcaggccagaggggctggggcagggcctgggaggcctgggggtgtagcagagagaagtcgggatggggagtgagccttgcttggtttgatctcagctcaggccctcttgtgagactcaggcagatgacatctcttgagcctccgtctcctcggggcaataagaaggaaataaacttcatacagcgtccagcagccagtgaggcatggccagtaaaggtctccatgtccttcattggcctcttaaggctcccactgcattgttcctgtctgattatggaagcccccaagccaaggcggcccctcggctctgcctgcggaaagttttcccttcacctgcgcagaccaggccgatgtggcctccagaatggaggggtcagcctaggttgcctgtgacaactctgaaaggccttaggaggcacagcatctcaagtgcacacccgagtatggcgtgatctgcaaggggaataggggctggggggagacataggctttgaagatgaatcaggctggagcagggtggaagtgggctcagggagatggagcaggaggggttggtcagggaagagggagctcaagggaggagacataagcgcagagagtgagatagatagggacccagcagcaagtgggctcagagaggggctgtggtgcagagagaatgagactcagatgggggctgtagactcagagagagagatggggacaaaaggggagtgggggctcaggcaaagggatgaaggcagagatgggaaaattgggagggaggggagcatccgttttgggagggaagtgtcagttttgagcacacacagtcctctgcagcttgaggaggaggaaggctgggtctgtggagggtggggagcgggtggcaccagaacaaagccccgggggtagcagcctgggccctgcagctccttcgcagctgacagtccctgagctaattaccattaatgagcagctgggcccagtttcccgggatttgcattcactgtgctagtcagcgccactgtggatggaagccagcgccagccttctggggtgggggtgactcagggagccgaggtaagatcgctggcttcatgtggggctgaagaaggtgtggctttgcctttcctgcaggttaggagatggccgaggtacaatcgtgcctggaggcagggcactggcatcatccacctgtcctcagccagggccggggtaagggtcttggggaaggaacaggtcttg

SEQ ID NO: 38216 - DNA, 983 bp, Artificial sequence
  DNA replication origin
ccaggtaagcccaactggagctgccctctcgtggagggtactccaaggatgaagggccttaggggaagagccaccctgaatgtctctgggcagccaggaacctgctcacagcctccgcgacctcatcgggaaagaggcaagactcatgagagtgaatggcccacggggagttactatgcttgtccccttttacagatgagaaaactgaggctcagagaggtgaatctgtctctagggcagctggagcctctgtcccctcctctgtaaaatgaggagaataactcctccctcctaaggttaccttgaggattaaatgagctaaataaagcctttaaacacagagctgtgtctggcacataggaggtgctcaataaatgttgggtactcttgttgttctgacaggtgaactaactttccaaggtctcacagttagtaagtaacacaaacaaattcaaacccagatctgtctgaatctaaagtgattcccagagggggggcagtggctcacaccagcactttgggaggtcgaggcaggaggatcacttgtgcccaggggttcgggactagcctgggcaacgtgacaagacattgtttgtctccgcaaaaaacttacaaaattagccaggcatggtggtacgtgcctgtggtcccagttacttgggaggctgaggctggaggatggtttgagcctgggagttggagactgcaatgagctgtgatcacaccactgcactccatcctgggtcagagagctagacctggtttcgaaaaaaagtcaaataaataaagaaagtgactcctgtgcacaaccacaaaataataacaataacagcgacgacaacagcaacaacacctccgagcagtaacagcattttccactgcagacggcggcgctgagggtacagggataagatcatccggtgacagggatcatcatccctgcctggcatagaaacccggacatcggaccctgccctcccgct

SEQ ID NO: 38217 - DNA, 1081 bp, Artificial sequence
  DNA replication origin
gggtggagttgcctgtggtggggggccagcgggggtgaagttgcctggggggggccagcgggggtggagttgcctgggggggggccagcgggggtggagttgcctgtgggggggggccagcgggggtggagttgcctggggggggccagcgggggtggagttgcctggggggggccagcgggggtggagcaccctggacggccccgcggagccccctgcgggaggcgagggcggccctcgggctctggaaggggccgcgcggcctggaagacattacacggctgtcgggcggggggcggcgctcgcagttccggaggggggtcccggcggcggacgcgcggggtgaggggaccgcccggccacagagcgcgctttgttctgcgccgcccccgggagctggaaccaatggattggcggcagctgaggtcatctgtcaggcggagccggggggtcaggcccggggaaggggccgcgagggagggcggcgcgcgtgggccggcggggtgcgggtggacgagccgggggccctgcggcaggtggctacgctgcttcggtcctcagtttacccgtctgtccaacaggaaagatcatttctgccctgtccacctctgggggctaatgtgagagttaaagtaggggagctacagtgatgatgatgatgacgacggaggatgacagccttcccctaatcgcagtctctacttcgggtaccatagaagtgctaagtcaggggctggacgcaaatgtgctttgtagcctatagtgcgtgcctgtgtgggaagcgggatggatgtttcaccccaccctctttcagcccagggaagtcagtggctccccctgattgcctgccttgaccctgggtgccaggcttggtctgccttctccaggggtgataggtgcagctgcccaagcctgagcccaggaacccattgcagcctgtccttggagccttctggtccagggtagggcgggactggagtgacccagataggtggggtttttttttctgactgggggtaggtcagggtctcaaggctctcctttgcctcctacaaaaggacagccctttctttcatcaatt

SEQ ID NO: 38218 - DNA, 1716 bp, Artificial sequence
  DNA replication origin
ttgttttaagccatcaactttgtggtaacttacagtggccccagaaaactaatacaggtgtatgtaagcaaaggcagagctggttctggccctcagagcctacggttctagcacggaaggcaggtgtctagacaggacgttaaaagccagtgggctgtaatcccagcactttgggaggccgaggtgggcagatcgcttgaggtctggagtttcagaccagcctggccaacagggtgaaaccccatctctactaaaaatacaaaaattagccaggcgtggtggtgggcgcctgtaatcccagctacttgggaggctgaggcaggagaatggcttgaacccgggaggcggaggttgcagtgagccaagatcgtgccactgcactccagccagggtgacagacccagacaacgtcttaaaaaaaaaaaaaaaaagccagtgagatcagagctatgcaggtgggcacacaggtggctgcaggcccacagaagctcctaacccggtagggatggtcagggaagatcctgacactgagacaggaagaccgagaaagagtgagaaacgacaaggcagagatagaagaggttctcaacgggagaaaaagcccagtggtgggacagggcatgcatggcagatcccttcccatctcagccaggcgccgtgctactattgtggcaacagataagatgggacgaggtcctcgcccttgtggagtgcacgtgaggtcaggaagacagaaaataaaatgcaacacaaatagatgtataatataatttctggtggacataagtggtatcctgaaaaacatctcgggctaaggggagagctagagaggccagtgactctgaccaagggtgatcaaggaggcagagagctgaaccaggcaggggagcaggccctgtggttgtctggggaagtggctccaggcagtgaggacactagtgtaaatactaggactgaaagttatcgggggtggctgtagaggtgctgggtggggcttagggatctcatgtgctcaccttccaagggtcgggggaaggggacacaacgttatgtaggcctaacctgacacctgttcttgcggggcccccaagttcctgccagaatcactccggtattcttaacacccttcctcagtggtggagctgacccttgacctctcccacttcccattcagacaagggcctcccagcagatatgacacacctagtcccactgtcactgactgtcacagccatgagagcccacggcttatctccgggtagtgcggtggccatgtgctgggcagtggggcccaggctgcctgggtgtgaattccagccgtgtcactttttaagcgcctgatcttagtcaagccgctgaaatcttccctgcctcagttctcgtctgcaaaagagccactatctacctcctagggttggcataggaaactgagggacttcctgcagttcctggaccactgcaagcactagcgttataagcgttatcatcactactttaattatctcgcccaattccctccttgctcaagtgaggaaacagaggcccagagaggcccagctacttgctcaaggtcacacagcagaggctgagctccggctgggcccggaaccagtccgtctcgcgtccatcgcagcgacctccctcctccggcaacctccctcctccgaagccctccctccggttggctggactccccgaggcctcacccggatcgtg

SEQ ID NO: 38219 - DNA, 1387 bp, Artificial sequence
  DNA replication origin
gcgccgccgctcggcccgggcccctcgggcgccccccgacccgcgccggccctgcccagcgttcctcctgcacgcagccccatcgtcgccgccgccgcgggactcgccgcctccccccggccttaactccggccgggccataccattccgcgcggccgggggggggggcccgtgccagggcagcgcgcgtttctcccccgaccccgccgcggtccggcctcgaccccgcggtccccagcccgactccggctccgctcgccaggtgccgccagactcgcgcggggctcaggctctccaccggggggcgcctctcgcctcccctgcgccgcgcggcgtccggggagtggaaacgcccgggcgggctgactcagggtgagtttgcaggtcgcggggcgggaggggcgcgggtgacgcaccggccgggccgacttaggccgcgggggcgggggcgggggagagcgcggcggacctgcccagccagggtgagtcggcaaagcccgcggtgcgctgctgccccgctgctggggttcctagccagcgaggttatgatccccaccagcggttccacttccagtctggcgccggctgtgtctggagtcgttccgaacattttgcacgtgtattaacgtatctgaacctcaaaacaaccctgcaaggaaggtatgactgttattcccattttacagaagaggagactgagacacaggtttaagtgatgtacccaagatcacggaactagtaagtggccgaatccgcgttcaaatccagacggtctggctccagagtccgccttctaccccaccgttggctgccttggttcagcaacagtgactgtcacacggagccctcaggagtcgcgctgacaatgggtgggccctgccttcaagttccacactgtctgtttgtgtcattacaacactactggaagtaggtgcagttatagacccgctgttcaaggtcagctgaaatgaaagtcaggtcacacgagtccaaactgtggggccacttaaccaccaactccaagcaggaaggtggacgatcccagactcggtcgaagacaagcatgtctggtttgcttgtcttccttctcaacctgaatggcacgaacatggagaaatgcatacttaccctgccagctggagaaaactggagacgaaggagggagccaggagtttctactttgccttccaccagttgctgacactttctgaaccccgtctgtaaaatgaagtcatgctgcccatcactcaaagttgtgtgaattgagagagtgctcatagtgctctgtgaattgcataacatccattttgctgttgaagatcatttattttgggttcttagtctctcacaaaaccttagaacactgacaccaagactccagcctttc

SEQ ID NO: 38220 - DNA, 887 bp, Artificial sequence
  DNA replication origin
atcaggaggtccaggcgtggggcaggtccccaccttcctgaaccttcccctgccactccaggcggcccggagagaggagcctcttcgatttgtttcctgtttattcttcttcccgagggaccccaggttccagggaccgactgagccccggacccgctggggcctctggcctgctccccgggaggggcgctctctcccggccatgtctatgcaactctcccggacagaggggccgggctgccagccacccgcccgttggccgccactacctcctccgctgcgcttttgcatgcccgggcgaggaccgaagcacacacctccacgcgcacgggccctggccccctccgctttaagcacacgcctctgccccattgctctgcagccagcttgggggcaggagtcctggactctcagatcctcctctcccctcctcttagccacaaaagaggggggagactggaggcacccctgcagcaggggcacttccctagggctccagaggggtgaatgggcctttgctcagctccaggcccagcgggaagggaggctgcagggatggtgggagggagaggggtagcagaagcaattatggaggcgttgaccctgtaaatagcaacttctgacagcaataattttccatgcatgctaagccttttggccatattttgtatgagcgcttggcgctcctcctccgtcctatcccaactcacccccaaacccccatcccttccccacctccagcagtattacttgtaacgcaattcagggatattaaagggactttggccactcaccatcgcctctagaccttctgattggagcaaggggtggggatgaagggggggaatgagacgaaggggagggcatctgagagatactacttttcc

SEQ ID NO: 38221 - DNA, 1334 bp, Artificial sequence
  DNA replication origin
ccagcgggtccggggctcagtcggtccctggaacctggggtccctcgggaagaagaataaacaggaaacaaatcgaagaggctcctctctccgggccgcctggagtggcaggggaaggttcaggaaggtggggacctgccccacgcctggacctcctgatgctccctcacccccccagttgagggtcagcaagctgcccccccattctcgagtccccttccttagcgagtgcaggctctgaagagggtgggtttctcccgagacgcgggggtgtgtgtggtgggggcagccctctgtggcctgtgctgtccctctccttgcctggcttcctgacctcccagtccagctggggaagccagacggtccctgggtgaggccaagagattaaatagaataataaatagataaataaataaatacacaaataaataactggaaggacccagccggatgggggaagggcattggcgaggtgctccagacctccccccaacaagtaaggaaggggatctgtggccctggggatgggggaaagtgctcagagaatctgggggtagggcagctccagactgtggaagcccaggttgtgccggggtgagagaggggttacattagggggcagggccctgaagtgcccctcaagccccctccaggttaggtagactcagaggggtgagagctgctagagaggtgagggcagctggagctggggctgggagtgggtgatgagatccccatggactgaagacagtaggaactgtgtgtgggagtggggtgtgggggtgtgtgtgtgtgtgaatggccagacctaaggcctgagcatggatgggatcagggacagatcggagacttcaagaagggtgaagattagatccccagatggacacactctgggagattcagcagaggccagagggatggtctggggttggactgtggtctcagggcggcagggcctgcgtccaggtgtggatggggaaactgaggcaggtatgggcgtcaagggtataggtttgcggctttcattgggggctccagtagaggaatggtcagagagattcagctgagaagcgagagaaaagatctagaagttagaagagcagcgcggggtctgggagggagaaatttccggctctggggcgcgggagaggtgcggacctggtgcctgagttgggagccttgaaggcgcggacaggggggtcaaggtccgagggatggccggaaaggatgaagtgggtcgggggacgctggggaagacggtgtggaagtgagtcgtgggtttgggggttggggagaaaagttccgggccgggccgggggtccccacgagagggt

SEQ ID NO: 38222 - DNA, 1496 bp, Artificial sequence
  DNA replication origin
agacgccgcacttgtggcgcaggttgtgcgtgagcaggtgcatggcgagcgcgggcatggacacgtaggccttgccgcacgtcgggcatttgcgcgccagctggctgtccaggctgcggtgcgtctgcttgtggcggctcaggttcgacgacgtggcgtaggtcttgccgcactcggcgcacgcgtgccggtgcccgccgcccgcctgcgcccccgcgcgccccgcgcgccccccggcgccccccgcgtctcccgagccccccgcgtccccgccgcccccgccccgccgccgccgcgagcgcccgtccgagatgaagaaggcgtccatggagtagctgtcggtcactgccgcctcccctcggaagtagcgcgccgacaggctcgactgcgggctttcggggtcgctgtactcctccggcgccgccggcgggtacgcgggctcggccggggccagctccaggcccggcttctggtccgcatcgtagctgctcgggggcaggcggtgcggggcgtaccctggagggggcgagaagtggaggggcggtgagaggaggcgccgaagagggtttcccgctttgagcgcgtcaccctttgcgccttccagcttggcgcccctgtggcagctccgacagtggtggtctccgacctgcacctcagctcttcctgtcaggcagcctgggttcaattccttcctccatcgacggcagtgcaaatagccgccaccccaacccacggagcatggggccagcacggttgtacagagcgtaccttcactatccagtgctcacaaccgcggagtgatggtcttataatacccacgctacaggtagagaaactgaggcgcagagagatgcagcagtctaaccttacagtcaggaagtgatggagcccttgccagtgtgaccctgaagcccatgctgtctctattccaacaacatgctgccgttgcagccctgtaacttctctggatctcagttttctcatctgcaaaatggagcttgtgattggacacctccttccagggtcgttggaaggactgagtaaagtgacgataataagcgtgtgttaagctcttactgtttgccagactctgcctcggtgctttacgcatgttaactctaatcgtcacagacccaaggaagtcggcactattgtaatccccatttgatgtgtaaggaaatgaacaaaggtgggggagcatacagtaattgctatataaatgttagctattataattatgctttttacttgcttggagatagtttcctcccccaccacactgtgagctccccatggttggatctgtgtgcccagcacatgcctggctcaaagtaggtgtgcgatgaatagatgttgcatgaaggaatcacaatccagttagacccacctgccagggttgctgaagcatttaacaggggtcaagtgtgtggcatgtaataggtgctacagaaaggggacttcctcgcacctgctcccaagcctgctctagaagtcgt

SEQ ID NO: 38223 - DNA, 2160 bp, Artificial sequence
  DNA replication origin
gaacgtgtgcggagcgattgtcctgggggacatttgatggattagagcgccgagcggttccattgctaggggaccacctgatctccagcctgcgtcccatataaagccggcagccggagtgctgagcgcagctcccgcgatcccctgtctgcgcgccgccgccgccaagcccgagcccgagccggggccgccgccaccggtgccggctccgagcggcctcccgcgctccagcccgctgggagctgtccagtgctgaaaacccgcgcggacacagccgatcgcgcccggccggccgcctccccgcaccgagccccgcgccggccgcgccatgccgcgctccttcctggtaaagaagatcaaaggggacggcttccagtgcagcggggtgccggcccccacctaccaccccttggagacagcctacgtgctgcctggcgcccgggggcctcccggggacaacggtgagtgggacccggcgggggcggggggttgggagaagaggcgaggggagctggggccctccccagcttgggccacgaggaggggcgcgtgcgacaggaaacccccgggaggagatctctctggccgtgggctcctcccgggctttccaagggccgtgcgggcggggcaggggctaggtcgtacaaagggaaagtcgcggggtcggcccatcccgcagccacgcgccagccgggactttgaaagttgtggccctcaaatagggctagagtgagggggtggcaagagaacacagacggggctgctcgtgaaaggccagcgctgggcactgaggcacaaggcactttgagggttccctctcccccgttgaggaagagaagctggctgcccgggaagggggaaggtaaagagccctggatgttcagtccctggagagacagggttggttccctgggggtggctgggggcgccctccctcccttcaaacctgctcccctgccgatgtcacacaagtgctctcagaccccctctctcaataactcttttgttaccctcagccacatgcctgccaaaggctgggcctgtcctggggactgcaagaaagagaggatttctgggaggggttcccccaaagtggctcctggtcccctggattgcactccttccccatccccagcttctcaaccccctccagaaccaaccctgctgctcctcgtaagccccctcctcactacacatacacacacacacacacacacacacacacacacacacacacacactccatctcttctcagaacaagttcctgcagggacaagggtttgaggaacaagagaagtcattcaggtgcagaagggggtgatctctggaaggcaggggaaagtggagactgcttctgtggatcccatcctccaccaaggggatcacaaaggggttctcccctgatggcccccaccagggcaggtgtctgaagaggaggtgtccctttggtagtgagagatctgacatcacatgtggcagctttgggttgtgtgtgtgtgtgtgtgtgtgtgtgtgtgtgtgtgtgtgtgagagagagagagagagagagatgggggtggggaaagagagagagagaaagagggagattgagagaggagaaaagaaaggactgaggatgaggggggaactgagatggcaaagacaggagcctgggaggatgggggcttccacctctgggatttccaagcacttcacccacattccatcactctgccacaccaggtagagagagagagagtgctgggcaaagggctttgtgacctcatcaaggtcaaagaagttacagagtgatcagggatacagctacagcccctcatccactggcatcccccagacccttaacagaaaccccttctcctctgcccacatgtcccttattctactgtcctcttttcttgatcacagggcctcttgaggtggaggtcagaagcccagggacatggctgagcagggctgagggctggcaggacagagggtggacctggggccatgccaaagctggagagtgtgcgctcaaagctggtagaaactgaaatatctgcaagcttgggatatggatctcttaagggactgacactgacacaaagctctgggattccaccccctgaagccccgttggtcctgtccccaggccagctgaggaaacccagagaagccca

SEQ ID NO: 38224 - DNA, 1428 bp, Artificial sequence
  DNA replication origin
ccgcccgcacggcccttggaaagcccgggaggagcccacggccagagagatctcctcccgggggtttcctgtcgcacgcgcccctcctcgtggcccaagctggggagggccccagctcccctcgcctcttctcccaaccccccgcccccgccgggtcccactcaccgttgtccccgggaggcccccgggcgccaggcagcacgtaggctgtctccaaggggtggtaggtgggggccggcaccccgctgcactggaagccgtcccctttgatcttctttaccaggaaggagcgcggcatggcgcggccggcgcggggctcggtgcggggaggcggccggccgggcgcgatcggctgtgtccgcgcgggttttcagcactggacagctcccagcgggctggagcgcgggaggccgctcggagccggcaccggtggcggcggccccggctcgggctcgggcttggcggcggcggcgcgcagacaggggatcgcgggagctgcgctcagcactccggctgccggctttatatgggacgcaggctggagatcaggtggtcccctagcaatggaaccgctcggcgctctaatccatcaaatgtcccccaggacaatcgctccgcacacgttcccctgaaccggcggcggtgggggcaggcccggagcaggcaggaggggagaaagtgagggcgagaaaggcgcagagacagagagggacggagaaaggggagtgaggggggcggggagaagaagagagactcggagaaagacagagacatacagggaaagagagacgcacacgctgagagaggtagaaatagaagcagagagaccaagataaggacaaaaagacacaagagagaaacagagagagaagaaagacagagatggagagaagtagcaacacacacacacccacgggaggaaaagagaaatccaggcacacaaaaaggaaacccccccagggatgcaaagaaagggaaagaaaagtgcaaaagagagggggaagccgaggggaacggagggaaagcggtcccgagcaggcggggttcaggcacatggggccgcagggaaggggatgcagaggaaagagtgcgcactggccagcggccaccctcccgcctccagtcctctccctctcccccagttctgaagtggccagggtggacgctcagctttcactagagtaagtctcccctcccccctgctcgggctcccactggagccccctgttgggtttggggttcaactttcttcttccagaactggtggggggagcaagtcccccacgccgatgcctggccttgctcggttggtcctgttccggtgcctagctcaggcgggcgctgcaagaggaagtgaaaatcgtccagtaattaattttcctgctgccggggggtggtggttttgacacatccgaggcagtgtctttc

SEQ ID NO: 38225 - DNA, 1604 bp, Artificial sequence
  DNA replication origin
tttctggacaccgctgggaaccctccgccccacaattcttcaaactgctgctgtgcttcccccccaccttcttaattaataccgcactgcttgacagggcggccccgcgtgcgagtgggcgtgcgcgcgcgtgtctgggggctgggtgggggggccggggggagggggtgctggctgcctgcccaagagcgagaccccgcccccagcccccggccgctggaggattgtgaagctcaaacagatggaccgagccaaggggcgggggcgcgcggatggggtgcgagacggcagcgcggcggccgggcctgcgggcgccctgacaaaggcggggccgcgcggcgaggggcgccttatctgcgccagcagaccgggcggcccggggggcgcccacggcccacgctcgggcgcacaaaggcccggggccgggagggggtgtggggggcgcgaagattaattgcccaatcaagttgtcggcgcggggcgggggcgcgggcctcggccccgggggacgcgggacggcgcataatgaagtgtgcgaaaagttaatttgctccgcgactcgctgctcaccacaatcaaaggcgggcggaggggagcggaggaccgagcagtgtcccccccaccatcccctcccccgaccccagctcgtgatccaaaggcaggatgagggggtcacagggcacacggagtggaggaccgagcagtgtcccccccaccatcccctcccccgaccccagctcgtgatccaaaggcaggatgagggggtcacagggcacactcccacagctgggggcggaggtcaccagacgtgcgccctactcccccttcctcccgctgtgagtctcccggcaggtcccgttccctctctgagcgccactctcctctcctggactcacaatggttgacatttctggagcactcacgctgctgggcacagtgccaagcgaccgagcgtttccctggcgtcgtctccttttatctcacaacctgaggacataacgcctgtgcgcatccgttttaaacctaaggtacagagaagcccgagaagtactccaaggtcacagggctcttacctagctcagagccttaggtggaaaacagcacggtggaaagggtcaaagacaaaatacacggaagaattggggttgatggtattattcatgctattgcaacagggagagcatcccagatcccaaaatcagagtgtctggacaggatggatttgcctttgacttttgtaggggtgaggagacaggttacagcaggagggatttaaagtggggattgtcttacaaataggggatatctccatcagtccattgaagaggaaatgttcatctctgtgtctagctagtttcagagaggacacacagttctcatctcagctaatcaaccatgagacaaagaatgggaagtgggagggtccttggccttggccttgtcagcaggttccagcaaaaggggaaagatcacaggccagcaagggagtcatcctccagtcttacaggatacactagaaagaggggactacgtcttatctgagtcatatggggaagggtggctcgttttgctaagccatttccctgaacagaaaaggtagggag

SEQ ID NO: 38226 - DNA, 1281 bp, Artificial sequence
  DNA replication origin
acacttcattatgcgccgtcccgcgtcccccggggccgaggcccgcgcccccgccccgcgccgacaacttgattgggcaattaatcttcgcgccccccacaccccctcccggccccgggcctttgtgcgcccgagcgtgggccgtgggcgccccccgggccgcccggtctgctggcgcagataaggcgcccctcgccgcgcggccccgcctttgtcagggcgcccgcaggcccggccgccgcgctgccgtctcgcaccccatccgcgcgcccccgccccttggctcggtccatctgtttgagcttcacaatcctccagcggccgggggctgggggcggggtctcgctcttgggcaggcagccagcaccccctccccccggcccccccacccagcccccagacacgcgcgcgcacgcccactcgcacgcggggccgccctgtcaagcagtgcggtattaattaagaaggtgggggggaagcacagcagcagtttgaagaattgtggggcggagggttcccagcggtgtccagaaaagagggggaccctgccacccatctcgtaccgcaggtgcttaacgcctggttattggcttggggatctacaggctcccatggctgggggtgggggttaggggaggtgggaggtgggagggagaggcctgggaatttgcctgacagtgtctctttgtgcatttttctggggttttgccagcagttgacccagcctcagaaaggtagcctgtgattcaggtagtgttgaaaaccagaggcccaaaggcaggataaatctgggcctattttagaggccaatagcgtggtggttcagaaaggggttccaacagttctccctactcgccgttgaggatttgcgtcaggtaaccaccctgcgcccggggcggtggaggtgatgggctgagaccgtgttggcgcagtgctgggtacacggtgagtgctcacaagtgctggttcttgctgttttctgtgattttccttggaggggcacagggaaaaccaaaaatggctggtgctggaaagaggcccttgagtttcatctcacagctggcggtagggtgaagcttggcaaaaaacctgtggtctgtgctgagcttggggctgggtgtgtgtgtgtgtgtgtgtgtgtctatggtctttgagaagtgtcttcatcagcatatgacttgtgtgagtttttgggtagagaaggcacagccttcactagtttctacaagaagggtgtgatccagtgtgcgaagaatccctgtgtgcagggctgggaaatca

SEQ ID NO: 38227 - DNA, 1646 bp, Artificial sequence
  DNA replication origin
ctggtgcttgcgtgcggggcttttccactggttcccttccgtactcgggcttcccccgctgttgttactccctcaacgggaacacaactccaccgccgcctccgggacacacccccgccgcgtgggccggggtccgggacgcgcgctcagctcggccccgcgggggcggcgcaggagggaagggggtgcggaccccggaggcgccgcaggaagccctcgcccacccttcccggccgggccgggtccgcagctgacggtgggggtggggagcagacgggcggggcgccggccggcttgggggtcccctggtcccgtccagggggctcgggccgactccgggccagctgcggaggcgggggaggggaccccgctttccatggcagtgccgaggcggcgcgcacaaaggcgccgcgatcagcgcttcatcggttcgagtcaattatctgaggcgcggaggcggcgggcggggcgaggcgattccccggtggggctgcggagcgcggcgccgagactcagaggagggggcgctggggaagcggcttctccgtctcctgctccgccccgggcttcgtggcgaggcgccgtcgccccctggtggggcctcatccattcctcgctcactcgctcgttcacctttttctcaaccttacagcgggtggctctacggtacgagctgagggtgaagtgctgagaacagggcaagcgggccgtacctttaaatgccctgtcgggagctgggcccctctgagtggccaacctcaccaggaaagggcgctcagcctcgcgctgcagatggacttggaagcagaccgtcagaatgcagccctccctgcacgtgatagagtaagggccgcacaggggatgagggcccggggaggcccttcgggagaggaagagtcccagatggctctctggaggaagtctggcctaagatgaccaggtgaaggggtgggggtccagggagatgagggcgttgcaggtagaggtttcagctattgcaaaggggttgcagtacgggcaagtaaggtgcactctggggagagtaacctgtacttactgtgcgaggggaagggaggtgatcagtgaggtaggtaagtgggccagggccagatggcacagggccacctgcaagcgtgggctgagggtgggttgtcaggtcgtttcatcatttccagtttatccttctcccctttagatttggagaggatttggctgccctcacccttgtaagggtttaggcatcattcgcccttgactcctgtccagttgtctcactggtctccctgtatcccttattttgcccttcaatctgcctgcacccatcctccaaaatgacctttttaaaagcaaagctcggtggcactacttttcaaaatcacaaatgcacaggatctgtaacctgctggttgcacatgacagaaaccgcataataatcatgggttaggccgggtgtggtggctcaagcctgtaatcccagcactttgggagcctgaggcaagcggatcacttgagatcaggagttcgagaccaggctggccaatatggtgaaaccctgtctctactaaaatacaaaactttgctgggcgtggtggtgtacaccagctactcaggaggctgaagcacgaggagaatcgcttgaacccagg

SEQ ID NO: 38228 - DNA, 1507 bp, Artificial sequence
  DNA replication origin
cagcctcggctttcttgtcagcaccagggggcacagaacaccgtctgtaggtatctctgtcagcttcccgtcttgtgagtcttgcaggtcgcttaccctccagacctttaggccgaggcctgccagtctctggacggctgcggtgtagggtggcaggaacaatctccgggggcagatgtagggtggcaggaacaatctctgggggcagatgaaggtaatcacggagatactggctaccctcattggtaaggtaccagtagaaatgtctccaggcaaactgttccttcacgcagccccgggacttgagagactgcatggccttcatgacgtgaaggttgggcacattcttgtctgccagctccgggtgcttaggcatgtggacatccttcttggccaccatgactccctccttaaaaaggagttcatgaatggcaatccggttcttcttaggcatcagcatcttggcagctgtagggtccggggctggggctggaaaggaaggactgttcttttctttgctattacgaaaatcattattgttgctttgctgttactactattagcgcctgaaggagccttccctccccatcccccatttctgcctccgtggagggctaggcagggctcagcaggccatttggaggatgaaggacttgttgccccgtcccctgtaaagtcagggactggaggaggctgcagtgctgagggggaaggaaagctgatgtgcatcactgccggtctcctcatgccctgtaccctagtcctggcccagctcccacaggcacagacatggaacaggagcctcttcagcctgagtgtggcagagggctggggctgaggcctgggggacagctccttctctgggcctcaggattcccatgaaaaaatggcctatcaaatgttcctacctgcagtgagttataggacttggggtggaagaggtgacagtcacctccctctgggaattccttcctgcagggctgcagtctcatgggattaaatgagggggctctggggatttaaatgagtatggtgcctggcaccccaaaattctagttattgttgttactatgacggctgttgttgccgatgttaaccgttttcacaaggcagctgaggcatgctcaggctcagcctgttccagagggatggactctacacgtgacagcatggagcaccaggagggtcccgcagcctggtcagggacacacagctagaaagtggtggcgttaagccttggtctggagggaaagtgcgcaggctggactccccagagtgattttgggctagtgactcagcctctctcagcctcagtttaccattagtcaaatggggtaacaatagaactcaccagatagtgattgttgggaagattaaaatgggttacccgataccaagaaaaacactttcccgtgcctggcacagtgaacatcacctggcggtcgttctgagtgtcagggagcggggctcagtttgtccatctctaaggtgggtgcgcttgcctgcc

SEQ ID NO: 38229 - DNA, 1007 bp, Artificial sequence
  DNA replication origin
cggccggggctcgggttctggcccctgcctggctttccttacccttttcgggtagtacctggaccagcgggttcacttgcccgcggccgccggaagttgcgcaaactcagcttgccggagccccaggtgggccgggccggaggagcgcaggccagcggcgcgggcgcagccgggtacgtgcggaccgcggcggggggcgcccagccggggtagggggcggcccgagcacccctccaccccaggacggcgggaacggggcagggatctacctttcggcttcaagaggaccgcggggatggtgccgctctctccctcatttgagagccaggaggggcggcgaggggcaagggtcacacagcgccctgctagccgaccccccatcccccgccaccgggagtcctcaagcttttccggaattgagggagagcaaaagccagcctggggatctgagttccccccagccctgccccgcggcctctggaggctgacgctggggagctagtggggagggggccaggtggggatgcgcgcccccgggatgcaagccagaagggccggcggttgggggcatccgtgggaggcatttgaatccgtgggtggggcattgggcggtgagaggaggcctcagaggggacattgagtcgcgcttggggacttgggaccctggcttcacctggcgggagccgctgcacctccgtttgcccacccgtgacgtggggctgttgaggtcagctcaccgatcagcctctgtcttgggcctgctttgtccgcggtgtgggctgggacagaccctcgtggggcttgcttagagacccctgcgtgggggtggtctgtggacttggttagtcgaaatcttcttgaagaccaggagcctggttcgtggctccgcctttttgccagatgccgaggaaagccctcgacctgtttgatctctccatccttatcgtgacctggaggctcaggaaggtctatttttaacctcgtttcacggataaggtaaccgagtc

SEQ ID NO: 38230 - DNA, 2108 bp, Artificial sequence
  DNA replication origin
ccatacaaccacttgatcacgcgggcattgcgctccaccaccgacacgccatagggaacgcgctcccgggcccgctcctcaacagtcaccgagctgcggcgggagcagcccccttcagagctgcccggcccagcactgggccctgccagggacacgatatccgagctggcccgtgccaggtgggccacacccaaccctctcgcctcctccgggtccaggccgcagaagttaaaaaagcgctcgagatcagcggctgccctagaaaagcgctcgctcaagtccgacttggagcgttgcaaacccggcggccgggctgggctggaggcggcggcagggccgggtgatgggcagggccgggcaggcgaggcgggcagggggcggacgtccacccggcggaccgcagaggtactgggcggcggtcgcggaggggtggctgggggaggacggccggctccctcggcccgtccaggagtgcggctggcctcggcaggggacacggggctgtcacacaagtcgatgaggctgctgaggatgtccaggtccagctggggccgtcggcaggggccaggcagggctcggcggctgggcgtgagcactgtgcggcgagtctcagggctaaagagcggctgtttggacagcaggggctgcacaggctcctggcgggtgttggccacgtgcaggctcttgacgtacttggccttgtcggcctccaggcgctccacagcgctcggtttccgggctccaccatctgccggcccccgtagcaggtagccagggaccctggtccgcaggcggcaaggtagggcgggggcggacggggctccggggctcagcgtgtgcacaggcatggctgctgcatatcccgagggctttagtctgcggagaccggagagatgaggagccagagatccgggcagaaagtaggcagctggacaccggccactgctgcagggaaggagagagaaaaaaaaaaaaaagccgagcgcgctcagacaaagaggctcagccgcggctgagaggataagacgccctccctattataaggtagagaccacgcccctccacaaggagccaatcagcaggcacaaggcagcagctgcggggcctcaggccccacccacaccccctccctcctgccccgggagaaccaggcccagctgagaccaagagaggaaaaaaggtgctagagaaaaaagacctgggcgacctgggcaacctgagcagaaaagacagggcaaggcacgcgctaaagggagcaagggaggctccaggctctgtgctacgcaccagtcaactcaacctcaggtcctctcaacagccccgttttttggatggagaaactgaagcccagagaggcaaacaacttgcttaagttaacccagcgagtaggtggctctgcccctgaccaccaaaaaggaaggtgctggcaccggggcgtagggttaaatgaccaagaaaaagggctccagccccacaccccacctggactccccacagggagcctggtaccacctctacccctcacccatccaggcaggaagctgccctgtgccatccacccgcctagacatgccaggccccaggcaaagggcagagcttatagggaaggagcaaagaaaatctccacccgcgccccagtggagtccagacatccgtcagcttcctgcatggaactggatggcccacggtgatccacaaatgcctgtcacgtggaaacatcagccctgagctatgctgtgctgagagaagctggaaatgtccaaaatcacacagccctgcatggaggcatccggcagaccctcgatctgcctgcagccatggaatgggtactcacctgggaggagggcatacacctggatgcacaagtgtctacgtggtcacccaagtgtcaggacctgatgccccagacatcaagccaaccctgaccctgtttccaaggaagggccaagcccacagagtcaccccacaaggccccttggagatgggacagaagaaaacccacataccaagtcccaaacattctcatctgtaaaatggagggggcgggtacttaatctgggtgttccccaagaaggcttacagttcaagccatctagacccgtgctgtc

SEQ ID NO: 38231 - DNA, 2066 bp, Artificial sequence
  DNA replication origin
gactgactctccaagggttttgttcttggctttggacacctgagaaccccctcctcccctcccccaatacaaggtttttgacatgagtgtactcctgcttagttcctcttgtggggctgcatttgcggtgctttgccctccccactgtgagtgaggggccaagggatctcctcaatcctgtctccccagcggctctgtttcctccttccttccttggcctctgtcctttgctgacttcctcttccttacccagcagaactcaccctggggtcggggcagtggggaggggcctatccactgctcttcctagtccttggcagctggcctaggtgggcagactataggagggactggttaggagtctgcattgctttgacttccctctccttggttaataaacacaaatgcttgtttctcaagggctgggccttcagactcttctgtgttcacaagagaaagggtgagagaagtcttggggtggggccatcaaaacagtaattgttcaccccgaggtctagtggtggggcatgatgatagcggctggcctggctggagacatgtccccgtggtgggttctcataactctcctggaaggctagcaggcctgcctcatcgaggaggaaactgagatccagccatgagtgagctggaatagagctgggagtaggaatggggtctttcccctgcaccagaaagggagcctgcaggggaaaggccgatggggtgcatagactctccccaaccaggagtgttccatccaagccctgcccagttcccaagggggcaggaagctcggagagggcaaatcctgaacttgaggtcacacagaccatagagtgaggatgagaagtgggagttttggaggaagagagacttggggtggacggcacaaaatgagtggcctccctggcgatcttggacaagccagtttccctctgggcctcagtgggagagttaggcagcacagtcctccttgggttggggcactggtgcattctgggcccttcatgctatattccaatacctggggagaggggaaggaaggggctggcactgggcttcgaggcctcagcttcttccagtctccctccaggtcagttacctactaggacaccccaccttggctagtggagcagctagggctagagctgggcctacaaagggcgaaagcgggggtggcctctctggtgccccacggtgggcgtggagagggggtgggtggcgcttcctttcacaggctgccttggctgcagcactcagaaacaggaagctctaatgggggccctggtgacaggtttgatgtaggttttattttaagcataaagaggagatttccgttggactgttgacaaacatccacatcagcccagctgtccatctctctgtctgtctgcctgtctacaactagcccccaggggcctgggatgggcctgggcagtttggggaaggaagggaaaattgggttctagaagaagatggtgttccagctcatgagactggagctcatgatactggtggggagacaagcatgaggagggtggtgacctacccacaaccccccatggtgcccagcagttttgacaatgcaggagctgggcctccagggtccccatgctgaaggagtgatggtgtcaggagagagaatccaggcaggatctgcagacgtggtgccctttgaggtgtcaaagactagatttcctaggcaaccctgctagaattcagggctagtcattgccccttgctgtgacctggcagcctccgagtaacccaagaaggtggatgggctggctgcattttacatgtgaagaaattgaggttcaggtcacaggactggtgggtgacaccttgtttctgaaggagggtacagtgcttgaatcctcaaggtagccttttgaggaccagatatattgtcagagcaggaggttgagctcagggaaggatagcgacttgtatactgtcacatagcaggtctgcaggacagcctggggtcacactcttgcctgccagacacatcgcagtctggattcctggttctcccagcatgtaccccaccactcttcctcatc

SEQ ID NO: 38232 - DNA, 1529 bp, Artificial sequence
  DNA replication origin
atatatatatactttgattattttaaaagtccatgagaagtaggcacagaatatgggtagctatgaatactcctattttgtagatttggacactgagacctagagcagaggtttgctaagggaacgcagcaagaggctcacacagcagacacagcaagctcaagacacagtgggacccagaccttgctagatacacacatttgacaagtaaagactgagcacccagtgtatgccaggtgctattctgggtgctgagggagcagcagcagacaagacagcccagggtctgcaggcctcctggaattcaccatctggacaccgccgtgatgagggaagtgcaggcaccgtgggagcccagaagcagcatgggttgggttgtaggggaggaaacccctggactgggtcttgaagtgggggtgggatggcggggaaggggagcctagccaggctcagggagggacgggaggtgctccaagtgagggcataaccccagcagagtccccaggatgatttggcctggaactgggcaagccggagaataagctcaaactgaggaggaaaaaaatgatgggggtggaaaggctggcagatgggacagattgcccagggcctgggtgggctccgcccaagggcagtgggagccactgaagggtcctgggaggaaaagaaattgagcagactatcattgtgaaatactccctctgctgttgagtggagactgggctggagggactgagaaccaaggcgggagacgggcaggagctgtggccagaaccctggcgataggcagggggtggcaagagggtgggaagagggcggcacagaggacagaaacaaatgggtggggagaaagggatgagctgaatggtgtgggtttgggagcttcgtgctgcttcattttcaccccaaagttcttcctaccacccaaaatattatgcatttgttctcaggtgtcgcttctgtctctccactgaaatgtcatgtccttgagtgcagaggctttgtctgttttgttctgtaatgtgtctccagcacctaggaaagtgcctggccatagcagatgctctagtagatattttcagagtgaataaatgaacagattggattgaatatagggtgagggagagagaagagtcaacagcgatgtctgcatctcgcgcatgccacccagggatcagggagctggttattgaaacccagaggaaacccagagggagcgttaggtgggggatggtggcagtgggagtggaaagaaggcacccagagggcagtggaggtgaggatcagctgctcagggaggctggagacacggagtcaggggccatcagcagctggaatgaccatgaatgtgagcccggagggaatgcgtgggcagagaggcacagtgtagatgagaatgccaaggagcagcctagtgcaggaacgggagggctcacaggcaggagtgtgacaaggagctgttaggaaataatcagagcagtaataacactgatactgacacgtactgagcatctactgtgtgctggctg

SEQ ID NO: 38233 - DNA, 1870 bp, Artificial sequence
  DNA replication origin
cgggaaagacgcaagaccgccggctgcgggacagatcgaactcgagggccccgacccgggtgacccccgccccctccccgcgcgcgctcccgggccccgagctggttaacgcgccgcccccgccgcgccggctcctccccgccagggcagtgccccggctccgccaacgccctcactagacctggcggccggaccgacccgcgcctggcggatgcgcccggcgcgcccacagcagcccccgcgcccgccgtgccgccgccgggacgtggggcccttgggccgtcgggccgcctggggagcgccagcccggatccggctgcccagatgcgggcgccactctgcctgctcctgctcgtcgcccacgccgtggacatgctcgccctgaaccgaaggaagaagcaaggtacaaggggtggctgggcagggcggccgggcaggcgctgcggggcagaccgggggccggaggaccgggggcggcggctctgggggcatctgcctggtgcctggcgccctgggtccttcgctcctccagacgagtctcaacctcacttaagatggggagattgaggctccagggcacccagtgagcgagccattgagtagggtgggccaaggagactcacccagaagggagagggtagcagggctctctgtagtagccgcatggtcagcagaaaggaggatggcttcgtgcagagacagaagactcaagagccagcctgcggggcacagggactaggagacagactcagtggcgtagaagccattccaagcatccatgctcggccaggaagtgacatagagagccttgggctgggcgtccagaggccccagtcccagcctcatcactcaccctgactcctggtgtcacctcccagagggcagtgatcctccatggcccccctatgttgagttcagccagacctgagacctgagttcaggttcacttattctaataggggatgacctagaagaagtccagcccctcagagagcctcagcttttccatcttcacctctcaggccactaggaagatgagccaaggttcagattataaatgtaccaggggccgcatgcgctctcacctgggagtcctatgccacagcctcgctgtgagagtcagaacatcctcagaaggtgggttggaggctgtccctgcagagcaggagttggtagagcctgtgcctcagagaagggtaagcgggtgagcaagtgagcaaatcgcctgcctgagctgggcagccctttggcctccaggtgccactcttaagatcagcagccgaatgccagccactatgccacgggtttttcatgtcctagctcatcaaatcccaactatatgctcatgacataggggtcgtccagttttaataaagcctgggattccaaggctcagactggtttaaataactgctgaattgtccagctggtgtcttctctctttccagccctggcatcgggtctgagcaaggataaaggggaaggaaaatgagagaggatgggttgccctctggggccttccatttgtgtgaaagccctacagcgacacagtcactcctggaacggagcaggaagcagacagaggctgtgggagaattgggaggtgggattggatggggttggggagactgtggcccaagaggctccagttcttgctgtgacagtgggacaagggactagagaggcgtgtggttttcagctgagctggggtgagtttgggactctatggggacactcctttgtgaatggcctttgtttagtagttaggggcatgggctctggagccaggtcaactgagttcaaatcccagcttccccagttaccaactgagtgactttggataagtcactttgcctgtccaatcctcact

SEQ ID NO: 38234 - DNA, 1522 bp, Artificial sequence
  DNA replication origin
ggggccccacagaaagaatggccaggccagggctgtaccttcagctgccacactctctgtgtgtttcccctgcccctgccatgccttcaagtgtccctcattgcactgggagaaggagctggaggagataccagcatttaccttccatttcttttggagcaagctccacatgtaggaaaaaagaggacaggctgggtggggtggctcacgtctgtagtcccagcactttgggaggctgaggcaggtggatcacttgaggtcaggagttcaagaccagcctggccaacatggtgaaaccccgtctctactaaaaactacaaaaattagctgggtgtggtggcaggtgcctgtaatcccagctacttgggaggctgaggcaggagaatcacttgaacccaggaggcagaggttgcagtgagccgagatggcgccattgcactccagcctgggtgacagagtgaaaacccatctcaaaaaaaagaaaaaaaaaagaaaagaaaaaggaaggacaattgttcagcaagagagtgtcaactgtaagtttctctaggcctccctccaaggcctcttccattctgatgagtctgtgcctgagaagtggctaagaggggcaggcactggaccagaatggccactgacctgctgtgtggccttgggcaagtcacttggcctctctgagcttccctttgctccccagaaaagtggaattactcagaatacaaacccaaaccattgggttgttttgaagactctagtatatgtcaagttcttagcaatgcccaccatatatgcctcacaaatgatagctagcatgattgttgttgtttttggtggttatagtgacaggagaggtgagcatgctgtcgggttgaaggaggaattttgctctgaaagggttaaacttgaaccagctgctcccagtcctggtgataaggttggaggaaacacagtccaggtccccagccctgtcacaagtggatttatgaggtgctggtcactttgagtcggagtagatgatccccgcagactgcacaggaaacattcagggttagtggccagaaggggctcaggcctctgttaaaagaatgagacagagtagagagaaaaagagaaagccaggcagcaggagccccgcaaacaccccaccctgcaggaggggagaaggggagagatggggttgaagggagagacagagaaaagggagaaccagaggcccagccaggaggacacagacagtgagcctgagagagagacggccggcaagagtaaaggatgcaggaacagccaggcagggtcgggggcagagcaggggagcgcgggccgcggaaagaccgagaaagcaggagacaaggagttgtccttaagggccagaaggaggaacagacagagaaaggggactggggggagggaaagaaaatcacaggcgctgagagggcgcgggggaccgtacgggtctccgggtgtccgcgcatctgtacctgcgcgcgcgtgcgtacctgtggctggcggtgggcacgtgcac

SEQ ID NO: 38235 - DNA, 855 bp, Artificial sequence
  DNA replication origin
aggtaaagtggcttcatagatggactttagagagaagggctgtgacttccataaaattatgtggcccagagacaatgaagacactgcagtaaaccactgaagccactgatgcataataagtgaattgctaatatgggcaacgggagctcagccccattgaggtcctcttgagacagtgaagagcacacctcaggtctcccaactcagggcagggggctggtatttatccaccacctcccatcggtcattggctgagggctgcttggggactctctcttagttctccagcaccttggcttcagacagttgcagatgtttgcagaagactccttggacatggaaaggtgagtgctgagaggacatgggcaggacaatgaccaggtggggtgacacaatgcagtatgtgaggactagcaattgagcaactgtatgtgcattggggtggggaagggtggggaagtggggaaggaggctggggccaggggaagagaggaggggcctgagaggaaggcctggctcacagacccagcgggtaggtggttgggccctttccagagttggaagcctgcaggggaagaggctgagttctattttagacaccctgggtttgagatgtccacaggacttcaagtggaggtgtccagccaggtagatgaagtgtggcaacatgtcagagctgggaaaaggatttgggagagctggctggatgtggtatctcatgcctgtaatcccagcactttgggaagctgaggcgagtggatcacctgaggttaggagttagagaccagcctggccaacatgatgaaaccctgtctctactaaaaatacagtaattagctgagcagggtggtgtgc

SEQ ID NO: 38236 - DNA, 1498 bp, Artificial sequence
  DNA replication origin
ttggccaactcacttgaaataaagtctggttactcacagtgactgacaaagcctgccatgatcaagcccgagctggcttgggtttcctccctcattctgcttcatccataatgacctttttgttgattcttaatcccatcaagctgtttctattcctaccactgggcctttgtacaactgttctctctgcctgaaattctcttctcccaagttgtcagggagctcacttccttcaggcttctgctcaaatgtcccgtttcagagacgacctccctgactaccatcctgccttagttactcctgacatcactcccctgctttattttttctttgcagtacctcacgtaaactacgtatttatttgtctgttgctgccattcacagccaaaatgtgagctccatgaagcaagactttgtctagctcaaagtcatatctcagtgcctggaatagtgattggtggttagtaggctctcagcaactgtcaaataaatgggtggagggtggatggtggatgggaggatgggaggatgagtgaatgaaagaaagggtgagtggtggataggtgggtagatggtggatggttgggacagtggatgattggatgggagggtgggtggagggtggatggtggatgggaggatgggaggatgagtgaatgaaagaaagggtgagtggtggatagatgggtagatggtggatggttgggacagtggatgattggatgggagggtgggtggatggttgaatggatggataggagggtgggggtgaatagcagatgggaaaatgagtaggtgatagacagtagatggatggatgggagggtgggtgaatatgtggatgggtaaatgaatggatgggaaggtctgtgggtggtggattggagggttgatggatgggaggatgggtgaatggaaatgtggttggatggtagatgggagtgtaggtacgtggtggatggtagatggatggaaggtgggtgaatgggtgaatgcatgaatgggaaggtgggtggatgggagtatgggtgtatgatgcgtgagaggatgggtcagtgggtagagcagaaagagcactgggttcttgttccagttctctcccacctgctgtgtgacctgagctgagttactcatgctctcacctactgttcccgtatctgcaaaacacacaaaattaattctgcctcatggagctgctgtgaaaacaaataataagatgaactttttctttggttattcctggattgttcactatttgattagaagaagagctttccattggaccatcttggggccatgttagccatgcattctataatgctgaacatctttgcttcccttataagcatgcggactgactgctctttgcatcatggttctagcaagtattatgtaccaagtgtgaaaacaagcaaattacaatgcaatgtcctttaaccccctctagcaatcctgagatgaggaggctgaggccaaaggaaagactaagacctgccca

SEQ ID NO: 38237 - DNA, 962 bp, Artificial sequence
  DNA replication origin
aatgggggtgctgtctctacctggtcccaaggtctgaaatgctggaagacatttggaaggtatgtggaatgaagagcagcacaaagagaaaggtcagggacagatgtgtttgggaaggtgaaatgattcctgcttccaggtatgtgtgtgtgaaaggctagctgttcttttccatcctcatatctagtcttagagcccatttgagagatgaagtatgtgtgagtttggaggtgggaatggggatcctgagtgtgtacctggggtcccagtgagataattgaggtctggggaaaaaaagagccagaaatccctgacggttcttgtgttctgattcctgctggagggggtaaagtgtgagaggggtatggtggtcttggtctttagttctaagagacagagaggaatagggacagcagtgaggggtgggggaaaggggatacttgtctaagtgctcagaatgtacaaagcaagtttgaagagaggtccctaaagctatgtcaggaggggagaattaagactctatttgagaagctaaaaaaaatgattagaggagttgagaactgaagcagtcaaaaaggagaggaagggtgaaatctcatggcaagatgcaataggtggggtggtctgtttcccatggctagtcttggttctgagagtgagagaacagtgacagtgaggggcaggcatggaggcaggcccacttctcccaggaagcagatgtctaggatgatgtggatgttggggatgagggtcacagggaagagacaggaaagaaagaagaatgccagagcaaagaattagtgaggtgggttgggtccagcagtcctagaactctgtggggatgacaacgacgtccctagctgtaagaggtggagcctggggatgggagaagaggggctggccctatggggacaactatgaggagaaaatcttatatgaccctcacacccagggtgtatgtg

SEQ ID NO: 38238 - DNA, 950 bp, Artificial sequence
  DNA replication origin
tgtaggagcagatccacagtgattgatatttatttgtggaatggcaaggagagaagggtatcagacacgccctctagaacaagttcctcagcagaggtggatggggttctgacagtgtggcagagtctaagtagctagctaggagtaggtaaggggagtgaggtacatgaggagggacagagtgcaaagcagagctgttccatctgaaggacaagacaaagggcagggggagctgagggccaatggaggagatcccaggtcaaaatcaaatcttactcctcttctcagccccactgtcccctgcaccatcccacataccagtttctttgaagaatctaggaaaagttgaaataaaatgactggggcaagtgaagagctgcttaagattaaaaagctggagtaagacaagtggggagacaagatttctgttaggggaactatgcattgaaagaggggcctgacgctgaaatgggggtgctgtctctacctggtcccaaggtctgaaatgctggaagacatttggaaggtatgtggaatgaagagcagcacaaagagaaaggtcagggacagatgtgtttgggaaggtgaaatgattcctgcttccaggtatgtgtgtgtgaaaggctagctgttcttttccatcctcatatctagtcttagagcccatttgagagatgaagtatgtgtgagtttggaggtgggaatggggatcctgagtgtgtacctggggtcccagtgagataattgaggtctggggaaaaaaagagccagaaatccctgacggttcttgtgttctgattcctgctggagggggtaaagtgtgagaggggtatggtggtcttggtctttagttctaagagacagagaggaatagggacagcagtgaggggtgggggaaaggggatacttgtctaagtgctcagaatgtacaaagcaagtttgaagagagg

SEQ ID NO: 38239 - DNA, 1119 bp, Artificial sequence
  DNA replication origin
ccagcggccgccaccgccgccgtacagctccgcgcggcgcgagtaggtacgtgcgcctcggcagtggctccgggccgggccgggaagggggcgggagaccgggagggcgaggcggtggcggccgggcccgcgccctccgggctgcgccgcaggagagagacccccgcaggcgagacccccgcaggcgtacgccggctgcaggaaggcggacgggcaccggagaggacgcaccctcgcccgccggcggccgggcgcccttcgccccagcgtggtgaggcggggagggaggcccggcacaggtacgcacgcggagaggggaccgctgggggcggcaggaggccgagggccgggggcggggagtggcggcgaaggacggcgagcctgacctcgcggcccgccgaaggacatgcgaccaggggacccggcctccccgggcctccgcctggtccggttcggccttccgggtcccgcgtctgtgggcaagggcaggagcagggggtgtggactgggccggcgggagcgggcgcggtgggcagccggcgtgctggggctttctgcgcgcaactttgggtacaacagcgtggacctgcgtgtgcgtatctgcgcgccccaaggctttgtgtacaactcgtgcgtgtgtctatcgactgggttttgtgaagcttcacccacagccgctgtgcgtccctctctccgggtgtcagtgcgcgcggcgggtggggtattgggcccctgcgggtcttggtggatctggcttgggtctcactcccaggggcactttgtgtgtgtgtgtgtgtgtgtgtgtgtgtgtgtgtacgcgcgtgtgcgtgtgacggggtactcgcgtggcccgaagatccgagggtcacactacgtgacttctgggtgtctgtgggtactgctgtgggaacagctgctgggggagtgtgtgtggaactggagtgttcctttcaggacctgtctgactgcagatgaaattagtaactggtggggtcgtggggtgtgaatggtgggcgggagcagctatgtcagttggtgtgtttctgcttatgttagggtaattgggcacggcctttgtgtaactggtgaatatctctgaacctgggcatgaaacagaga

SEQ ID NO: 38240 - DNA, 921 bp, Artificial sequence
  DNA replication origin
gccggcctctcaggctgcgccctactttcaaagcctcgtctgaggtgtggcgtgccagagcaggggctgcgaggagtcgccaagtcagcttggccgggttcttggcgccgctgggcgtctgcaatgcgcggcaggcgcggggcggggaggggcggggcgtggagaaggcggggcagtgggcgagggcggggcgtgcaggggacggggcggagcagtgggcgaggggcggggcgtgcaggggacggggcggggcagtgggcgagggcggggcgtgcaggggacggggcggggcgtgcaggagacggggcggggcagtgggcgatggacgggactgacaggggatggggcggggcagtgggcgaggggcggggcgtgcaggggatggagagggacgggcaggacatggggaggggcgtggaggggtatggacgggcggggcggggcagtggctgagggaccgggggcagggggcggggaagggcgggccagcgaccgagggactgggcgcggcggcggcggcggcggctgggggtacggacagagtagggcagtgcgctagagtggagaggaccgggactgagagggacgagggcgcagggcgttggtggggacagtggacggggcaggagggatagagtcagacagtgagcaaggcgcaccggtcctagtgcgcagtctccggctttgtcctggcgctcggacctgagacacctgagcaggggcatgacagggatggggcctgggccccatagtcctgttgtgaaaggtgatctttctggctgatctctgaacatccctatgatgcagtccagtctcttctcttccacttatagctggaggtcactggagaaattctttaatcccttgaacctcagattttctcatctgtaaagtgaaaataataaaagtactcgcgccgta

SEQ ID NO: 38241 - DNA, 840 bp, Artificial sequence
  DNA replication origin
tgtgggaggctgaggcgggcggatcactttgatgccaggaactggagaccagcctggccaacatggtgaaaccccgtctctactaaaagtacaaaaagtagccaggcacggtggcgggcgtctgtaatcccagctacttgggaggctgaggcaggagaatcgctcgaacccgggagacggaggctgcaatgagccgcgatcgccctactgcactccagcctgggcgacagagggcgactccgtctcaaaaaaatcaaatgtactttttaagtgatggacttcttaaaagagaaaacaaacaaagaaaaaacccaaaccctgagatttgctattcctgagacattgattttcccgagcacatattacctaacctttttcccctccccacaaaatacgcacacaaactccccccgcaccctcccgccccacgtcccggaggctttttcagtctccagattgaactgacttcgtgcaacgtgaagccaccgggatggggccactccgtggaaaccggcccgcaaagggcagggtggcggcggtggcggggagggagcgaagggagggaggaaggggtcggaaggggaccgggcggggaccctgggagaggggcgtggggagagagggctgagccgggcagggcgagacccttccgggcgtgagggaggggaaagcaaagtgcaggggctgggaagagctgacggccacgctcaggggcagggggacgccaaaggctcctccacagacgactcctcagagttccgggccgggtgctcacagagggaaactgaggccacagcgcccattttcttccgcgtgcgggcgaggagaccccgggtcgcg

SEQ ID NO: 38242 - DNA, 1826 bp, Artificial sequence
  DNA replication origin
cctgtctgaagagccaaggggacagaggggccgggttggccctcgctccctcccctccctgcaatttgtccagctggtgtacctcctgccttgggtcccccttccctgctctccatcgaagctttgggatgcctttctccaacccctgctccttccacgggactgttttaacatcttgaaaaaaagaaacagttccacacccaaaactaaataaataagatgatgcccatgggagaagggaggggggaacggcatccctacaatcagtggtcaggccgcaggcgccgctgccagaatgggccccctcagagctgggagccgccgcccgctgggctgggactcggctggctcagcgagcggcagctgatcctgcggatggagtgcaaggccacagtgcagcagccccgcagcagggagctgatgttgtagatgggctggccctggcgccgctgggagcggcaaagccaggccaccgtgggcacggccggcaccaccacagccagcagatccacgatgtagtggcggctccagtagctcttgggctccttctcagccacggcagcctcctcctcctcttccatggggcacaccacgctcaccgactggccagggttggggttggcaccaggccgctgtggggtgggtccacgggtgatgggctctggggcctctagctcatcacccactgtcaccaccactgctgagttggggtctctgggccctgaagggtgggcatccagctctgggcacctgtcccctgactcagggtctgtcccacagacctgggcctgggtcactttctccaggatggtgtcaaggtcaggctggtactgcacgaagtctgtctggatggcacgctcctgcatgcagctggcctgcacaccagcctccatgccacacagcagcttctcataggtgttgctggcagggaagcgggggcccaggccgaaggagctgtgcagcgaggtctcctcggtgccacagtccacccccgacgacagcaggctgctggcttccagcgcgtccgtccggctcagtgtgtcatcggctgctgcaaagccactgtctgccccatcctcagcagagccgctggagggatcacccggctggcggtcaccacagacagccgggtcactcagcttggtgtaggtggagctgcgggtgagggagcgggcaggggacccaccggctgactccccagtgccatcctccttggccatgccattctgggccacctccatgctgtgcagcagcgtctccagcttcttgttctggatgttgatgtccacgaagtacttctgcagccccttgtccttgtcaatcaggttgttcttgacagtgtcgatgacctgcttgagctgcttgatctcctttcgggcctccttcagggccagctgggcctccacgcggtggcactcctcctcaatccagtcctcctgcatgcgtgacagctgcgtcttcaggtcatcaatctctgtgtccctgcgagccgaggagacacacacacgctcactgcctgcctgcctggtctgtcaccgccaaggagaggcagggagaggacactgttgccaaggatgaagggccctgtgctgctgtggctcagaacccaaaacagaaggacaaactcaatgccttcttattatagtggggagtgagagtggctggggagaggggctgaggggtgaagacaggagaagcctctgcctggagagagaagaaaggttgggaggagacaccactcgcattccctcccccaccccaccacccccagaatgccgacaactctcaacattcaaatccatcatctagagaagagactagacaac

SEQ ID NO: 38243 - DNA, 1991 bp, Artificial sequence
  DNA replication origin
ctgggtttccgggacgtcgcgcgccgtgtggggcgcgcacgcagggctgggcgtgagggggcgtgcgcgtgcgcaggcgacgcgccgaggtactaggcagagccgtggaaccgccgccaggtcgctgttggtccacgccgcccgtcgcgccgcccgcccgctcagcgtccgccgccgccatgggagtgcaggtggaaaccatctccccaggagacggtgagtagtggcgcgcggcggctcggagtacctctgccgccgcgcgcatcggctcagcatgcccgtctctgtctcctcagggcgcaccttccccaagcgcggccagacctgcgtggtgcactacaccggtgagtcgggggcccagcggggagggggcccgggccgcagtccgcagcccgggtgcggctggccgtcgaggcctgggggcccggggcctggggtccggggcgtggcggcggcgaggtccgcatggcccgaggctgaggcctgggcggtggctcaggggcagcctggggcttgcggaacccgggcgggtctgaatcggcggctgtgagcgtcggctgcgggctaggtgttatctgacccgtcagaagcatttctgcaccttagatgctgcccttatgcccgctgcacagatgaggaaactgaggcttggcgaggcgaagtcactttcccaaggtctcactttcccaaggtcacactttcaggaatgggcagagctctggccagggaccattaggaaggatttgtaccatttctgtgcccctgcccccacttccatccctcccttcactggagatgaggacgaggtaattccgagtctgcagagctgctgcttcctccggggaactcggaattcgcccctttgcctagggtggggaaacatcccacttcctaagtcattgctttggcccttcctggccttgggggaagtagagctgcacggccttcttccgtctttttacttttgagccacttacaaatccaaggctcagtgacagcgctggctcaggctgaccgaaagctgcacgtgtaatttagtcccccagctcttctagaagtagagacttttctcgtcctcattttaaagataagcatctggaggctaatacatagtgataatacaagccaaaggaaattttagacacctccccctccccagccagaattcagacatcagagtcgtgtgccttggggctgtcttactccttctccttacaagcttgtcctggtttgtatgggggcgggggagggggagagctgagttggcggagactcagtggctgtgggtcccacaagggtggcagtgattggtgtagccacagttgttgatacgaataaccttccctccccctcctccttcccctttctcaaccttcccaccctttcctctgttccccctcctcctccctctttttttcccactccctctcctcctcttcctcctcctgggtagtaggctgtgggcagttctggccaagttgctcacgaataagctccacctttctcttccaaatcatggaaacatggagggatccctctattgagggaaatgactttcactggaaagaggaaaaggcaactaacatcccccctcccatgcccttttatttctgtggcccttccccgtgggtagaaatgggggcaggaggtagaagttaaggactagaactttaaaaattctgccaaaggaggagttactgaaacccatctttctggggagcaggcagtctcatgtccgtgaaggaagctggaaagtgcttttgatgttttagatagctgtccttgtaggccacagtcagcacctgagcctgggaggtctggtagatgaaagcgcatccttttggtgatttgtcatcggaaggatgaggagagtaaccatttacagtgctggggtgagtgggcagttcattcagttccgcagccaactggggcaaagattgggactcaagccgtgaggagctgccttctgccgcaccccctccccaccctag

SEQ ID NO: 38244 - DNA, 961 bp, Artificial sequence
  DNA replication origin
ccgcacccgggctgcggactgcggcccgggccccctccccgctgggcccccgactcaccggtgtagtgcaccacgcaggtctggccgcgcttggggaaggtgcgccctgaggagacagagacgggcatgctgagccgatgcgcgcggcggcagaggtactccgagccgccgcgcgccactactcaccgtctcctggggagatggtttccacctgcactcccatggcggcggcggacgctgagcgggcgggcggcgcgacgggcggcgtggaccaacagcgacctggcggcggttccacggctctgcctagtacctcggcgcgtcgcctgcgcacgcgcacgccccctcacgcccagccctgcgtgcgcgccccacacggcgcgcgacgtcccggaaacccaggcctccggaagagggaccggaagcccagaagccccgagacctccggaagcccggaggcctccggatacagctgtgtttgccgggtgacttgcttcgttctcctgcccttcctctgtgcttccagccggttaagcatctccctgcccaaagaatgggagtaataatagggggtccgccagtcactgactgggtgactgtcatcaggtttccacttagaagcacacagttactcatcctgggaagagcatggttctgagaagacagcgcacaggtggtggtagtatgttagtattttataagtggctcaaggttgtaagttctgcttttcttcactggaggaggagttgtccaaattcattcactcacccatagcttacatgcatacattcttattgagcatgtgaaagttgataatacgaattgggtcactcttcttatgcccaacggaatcagaatccaggggccaggggaaaagcactggaggcacgcagcgcctgctccaagaaccaatatttccactaactgctgcggaaatggcctgctgtccccctgagaccag

SEQ ID NO: 38245 - DNA, 872 bp, Artificial sequence
  DNA replication origin
caccggctggcagtactgttattttattattattgtcattagttgaagatgttgtgaaaagagagacaaatagtcccaactttgctgaggcagtggtagtgttgttattattattattatttttttttgagacagagtctcgctctgtcaccttttgtgaagaagagtggtagaagaaggcagtgctgaggctgaggtagtagagaagggtgagtggtaccggcagcttccatgtataggggcctctggaaggtctgaatgtcagctgagaaatcaatcatttgctccacctagcagctcccctggccccctaagctatagagggtttagcgcttaggggactggagtagggggtcagaggagacaccagtcctgggtacacacagctcctgcccaaagtgaagtcaccaccagtgaggacacggcagagggggtgccaaaggaaggctggggtggggcgggaggtggtggaagataggattaaagggaggggctggggtgagactggagtgggaaggaagatggagatgagcccggagggggctgggggtgaaatggagtgaaagtgggctttggagggtggggtgcatttagtactgagggtggagttagaagggaaagtggggcggggtgggtcaggtgctggtggcggatctgtgaggtagaggtgaggctggaggtggtcgtggtggtagaatttggggatggggcttgggtgggatggggctggaggttgggggctggtgtggttggacataggagagtggagctaaagctgagcctgcagcacctccttctctagttttgttaaggacacttagataagtgttatgtaaatgtagtttcaagttcatgccctcacatcccctgcc

SEQ ID NO: 38246 - DNA, 1376 bp, Artificial sequence
  DNA replication origin
aaattatataatcttgcctagctatacctggggaatctgcctgatagttccattggggatcctctcggggaactgctctaatgccttcctggaggtctggctcttgaagccggcagttatcagcgtgagattgggctggagaaaaaactctttcccattcatctggggatagggtagaagttaggatgacatttcagtcactccaggttaaattgtaggacagagttagatattggaattcctgtatatatttagtggggtctgatgagaaagagcctaaacactggctgatctgagagaggtctgatagagaaaaaggcacatgtaccctgactatgccttcagttccagccaccgctctaagaggaaattgttgggcaggtgggggagggctagtctcagaatgaaactgtaagctgaaccaggtgtgcacaggggaggtgatagaaggattatagggtggaggagcagaggccaaggaagaatcggagcctgatttagcttggcggggagcgacctgaagaggagcagtctggggaggaggggagaggtcacatgggtcagtaggaaaggaagattgaaaagactcagcgatgcttggggttgggactgagggaacaggtgggggggaaagaaggaggatttggggtgagtcacattgggaacagagactagggagggaccgatgtgtaaaagaatgcctggatgtcaggcacctcagaccatttgcccattttatgacaagaattatctagatcttgtaggatggagaaattgaaagtgccgttttctggctatttggaaccatcgtcgagtttgttttggagtcaaacagcattgcagaagaaaataaggtgtttaggttttaggtcaggtgtgagctgaagaggttttaagtctttgagaacacaggctaagggagaagagggaggaatggagggtggatggttgcccatagtgaaggaggcaagcccagagaaaagagagggtagagacatggagagaaggggtggggggtatttgtgccccagcaaagtggtacttgccactaaggtgaaggatcaaggcaggcgtccctgcggtgatcagacacctctgaaacgtgggtgaataatcaggcaggcatcccgcagtgattaaacaccaagggaagactgtcttcccgagcctgtgactggtgccggagttttgggttcatggataaaacgcatctcctctgtctctaccagaaaaggaaaggaactgaaattaagggaagagagagattgaagggtggcgccaagattgaaaggagaaagaggttaagggatagtgagagaggttggagaagagagtaaaaagaggccactcacccgatttaaaattggtgagatgtt

SEQ ID NO: 38247 - DNA, 1226 bp, Artificial sequence
  DNA replication origin
gcccgcgtcagctgcagttccgtccccctggttcccggtgcgctaacaaaggcatttgcatgaaaacaggaaccccgtctgcagaaaggactcgttggcggggtgcatcgtgcgctccagtgcccctaccgcggcgccccgctccccaggtggggaagaagcggggtgcggggactggccccaaacacggctcggccggcggggaccggcacgctgcggcccgggcgacccccttctccgcccctttcccaggccggcggaaacggccgtctcgggcgtgggcgcgcttctgcggactcctcgggaccttttacccaggcgtgcggccggggcgcccggggcctcggggagccggcgccagcgtgcggagcgcagcggagcggagggagcggcgggagcggcgtccgtggctggtccaggtctggggcgcagcctccaggctcgccctgcgccgctctgggcctcggcctcttcgcctgttcgaccggggcgcaagcgtgtcacagcgcctgtctgcagggggaagcgggcttcccagaggggcgcgtggctcgcagaggggctccgggaatatccgctccgttggccctttccagagcttttccttagctgcttctcctttgaaatccgcctttttcccagcagcccttggaggcaggataaattaagtggtaaaagcagaggattaggaaccgggaaccctggattcaaatcctgcccgccgctgaccagctttgtaaccatgagcaggttactccgcctctggaggcctcagcttccccgtctgtaaaatggggcctaacacagtccagaaagtgcttagtgccgcagtgtcacacaccgagtgcttaattcattcttaaaattatcacttccagctgtgggacaggcgcagggtagaaaggggttttcttaaggtcacaggcggggtcaaaggcaaaccctccgggtcctcacaagtaagacttgcgaagcagcaagttccccaaagggtcttatccagccgggtaaggagcgccggggcatctcccccctctctctccgcgaagacgcacaagcaatggctggcgaacctactgcctggaatggggttcttgggtcgagacctttaaaaaaataaagaagaggaagaagaaagaaagaaaacaaacaaacatgcacgcaaaaacggaatgccagagcctttgatctaggagccagcttgctattcagggccgaccaccgtc

SEQ ID NO: 38248 - DNA, 1599 bp, Artificial sequence
  DNA replication origin
gccccgggcgccccggccgcacgcctgggtaaaaggtcccgaggagtccgcagaagcgcgcccacgcccgagacggccgtttccgccggcctgggaaaggggcggagaagggggtcgcccgggccgcagcgtgccggtccccgccggccgagccgtgtttggggccagtccccgcaccccgcttcttccccacctggggagcggggcgccgcggtaggggcactggagcgcacgatgcaccccgccaacgagtcctttctgcagacggggttcctgttttcatgcaaatgcctttgttagcgcaccgggaaccagggggacggaactgcagctgacgcgggctgcgcgccgcttttccgccttcgcttgattcggcctcaacgacttaaacgcgccgggaacaaaaacgccggcgccgcggaaaccctcaggagcggcacgagaagcgcggctccgctggggtccgcgagaagcggtgcgggcggccgggctggtgcctgcaggccctctcaccgcatcaccaagggcaaggaacctccaactgtccctcagtttctctacctgcactgggatgtcctacataaggagtcagctcagtgcccgcatcttgctgtaattattttgtccaagcactgtgggaggcagcgttgaggaggctgttgtggggagtttgcctgtcagagagaagagggaaataaacaagaaacatacagacaaaataatttcaaatagcaacaagtgttaatatcgtagcaaacaccaatgcagcgcttatgccaggctctgctctatgctatatgcacattaggtcatgtaatcctcactcccttgtacagataggaaaatgctggttgaataatctattgaagggaaataggaagttgaacaatatgtggagaaacaggttgcacgataggtggagaaacaacaggttgcacgatatgtggggaaccaggttgaacaatagcctcaagtgcgcagtaggtaggctcggcacttgagaatattgggcccagcctgggtttcgacccagccagtccagccccaagtggaagcttttgcacactccattacaccagttttggctgtactaggaaggatgtaaagtggtgacacgcccaagagagagctggggctagacaggagctgctcctaaaaggatgtcaatggacgtctctgtgcaagagagtaagctgaggcctgcacagtgagaggaactagccatgcaaagagctgggcgtgtccagcagagaaaacagcaagggcaaaggccttgaggtgggagagtagatgtggggtttcatgaacataaggatggaactcagtgagcagtagtaaggagactggagatggtcagcagctgggggtagcaggctttgcaggtctcggcaaggagctggacttttattctaggtgtgatgggaagttgtgttgttatggccactgaaggagttgcgtggatggagttggaccagagggtgggtgcccttcctgccttgccagccttaggttcaaggaggaagttgattgcttaggccttaagcttgcccctcctcatctgacctcctggcttctaggacattcctgaggacgtacacc

SEQ ID NO: 38249 - DNA, 1681 bp, Artificial sequence
  DNA replication origin
gaggagacaggcgaaggagaggaggtggggcaggtatgccggctgctgctctctttggcctcagccctgggacaagcttgtccatctcctctgctgccctccccctcttctcctcatcttacttccttctggctcttacttagctgcgtcattttagggaacttggaaaccaggcctggtgtctttaacttacaaaattatacactccaatgagccggaaaggggcttttggaataattctattgaaaatatgtgggttttcgccttgaaatgatcttcctgaaattatcccctttctctctttataaatattaaaaagaaggaatctgagcttactgctttaaatctctattcagggactttttttcttctgcctcccaggaaagcaaccagtcatttctgaggaagaaaaggacaaggctggcgccgtttcctttaacataacaatcccacctcacttctgaaatccactttttggaatacccctgaccaatccctccttgttcccccctacagctaagccgggatttgctggaatattgtgtgtcagtgtgggggtgcgacagaggagccactccaggaagggtggcaaggggaaggtgaggaaggctagagagacaggcagagagagaaggggagaagcagggacacggatgaaggggagacagagacagcaacagcgacagagagacagaaacgagagatatgcagagagatacgaagagacagagaaagagacagagggacagaaagagagagaaaaacagagaggaagacagaaagagacagagaagcagaaagagacagagacaaggacaaagggagggagatagagtgacagagggatggagagaggcagggagaaagagagagagagagagagaaagagggagagagagagacaaggcacatacacacccacacacacccagaaagagaggcaggagggaaagcaagggaggatagagcagagacagagggagagggagataatgctagggagaaagggagagatgtgtaagaatagagagggagagatgggctgggggaagagacatggagacactgaaaccctggatattgaggattaaaggagagacagaatattgtggggggagaggtgggagggagagacagagacagagagagagagagagagagagagggagagagagagacagaacaagcatgctgaggagagagaaagtagcacacagatgcagagagacaaaaagggaagacataggaatagagaaatggggagggctggggaagagacagagctagaggcagaaaatgataaagagagagaggcccacagaatggagacgatgcagattgacagatggggtagaaaagagccagagaaattgcaagtcaggaaggaggcaggggagagaggctgacatggaggggtggatgaggagacctgatgggctctgcagcctgcgtgcaggtgcgagtgtgtggcttgtgagcacaatggcctccaatggagggaagccccttgttcccagcccggcccctctgctgccttcctcagtgcctgagagtggggtgaagcattgcctgcctttgatgcacagagggtggggcagagcagaccagttaacagagtgtggtttagaagacaggcaaccccgagttcaagcatcagctctgccaatccctgccaaccccc

SEQ ID NO: 38250 - DNA, 1567 bp, Artificial sequence
  DNA replication origin
aagcccgggcagtgtctgctctcagacagcaggtcagcacagcctcagacatgttctgatgatgcccgctgtgtaccaggctaggggcgggatacttagaaccagcctcccagatgccttagagacctctccaatgggctgccaggggcctcacaggccatggtaatgcagaagccctggctagattgagcccttgcatgcttgttaactctggttggccctagtcaagagccttggctggggaaacaactgacaaaacaaagcctctaccctcctgcaacttactttctcacgtggggaggtgggggtcaaagctgtgacagtgcgggggagaaaaataaagtggggatggatacagggggatggatacaggggggatggacacggggatggacacagggggatggacacaggggggatggatacaggggggtggatacaggggggtggatacaggggatggacacaggggatggatacaggggatggacacagggggatggacacggggggatggacacggggatggacacgggggatggacacggggctggatacagggtggtggacacacaggggtggtgtgggggtgatttctgccaaggggtcggggaaggtctctctgaaaaggtgacatatgagcggagatatgtagctatgtggaggaagagtgttcaggcagaaggaacagcatgtgcaaagctgctgagcagggacagggcctgacatgtttgagaaaggctgggaggcgggtgtgactggagcagacggagggagagggggaggggaggcaaggaggcctaagcagagaaactcctccccaccaccattgtcccatcttacagacaggaaactgagcccagagaggttaagcaacttgcccgaggccatgcacctggtcagtggaggtacctggctggatgcccactgtgatgtcagagccacttagcaccatgtgactaacatgctctgttgtaaagcacaagtggcaccttgtaatccgtgacctggggtctctgagtgctagtggtttcccttttaactgtaagcccatttggcaaggttgtgtgctgggcacccaggagccgggccatctttaaggaccttcctgagatctggagtctgacaggcctgggttcgaatccctcttctatactcactaatcactggggttttctaggccttggtttgcttctctgtaaaatgggcctaatgctgcctacctcagtggcctggcaggagtgaatcagcccgagatctggtggatacttagaaaacatttaccaccttcagaccccctcacccaggcctctaaagctgtggtcctcaaacctcacagtgtccttccctgggaagaaacagccctccccagaagtgctgggtctgcatgcctgggggctttaaacgggattctgatgggaggtgctgcaggaccaccactgcggtaaggtttctgcaaaccttgtacaaatgggagatgttggcatcccccactgtctcttcccagggcccttgctgcttttcctttgtggcatccatcacacttgtaattacttgtttagcatct

SEQ ID NO: 38251 - DNA, 1320 bp, Artificial sequence
  DNA replication origin
ggggagggcagcgtcctcccccgcgccggcgcccgggccccggctgctgtcccgggaaggcggccccgcgagccgccgcggcccgctggggctcgggactagacgagcctccggctccgacagcgtgcccgttcagaagcccgcgcggctggtccccagccccgaccggtcccgctctgcccctccccgtccctgccgggcccggacctgcgccgcccgcgagggctggaaggcactggaagcgccgccggggctgcccagaggccgggtccccgctccactttgcgcaaacttgtttttctaaggtcagcgctgcgagctggctacatcgtcctcttaaggtggaccggggaagttgcggccgacctcccctcgcctccggactccggccgcgcggctgctccccgcttcccactggcgagaggctggaggcggcgaaggagtcggggcgcgggggcgcggggggcgggggggcgtctgccttttaaccctccccaggaggtcgtgcctctgagccccaaagctgaaggcccctcttgggggtgggtgcgggccggaggggcccgatcctttcagagccgggccgaggtgaaggaaaagaaggaagtaagtgaacgcagggggaaggggagaggaagaagagatgatggtacaaaaatagcgtgtgtgtaggaaggacttcggtgccgcctggaaaagaggcgcggggaggagagggagcgagaagggggctgtggcgcgcaaccagaggggaagggtcggggccttcccagggaggtggaggccccctggccaggtgtctcggtggtggagggcggactgggcgggtgggaggcccaggccggggcgtgtgtgggagagcggggccctgaaggcctgggttccgggagaaggacaagccctgaggaagatgaggggaaggggagccggggccagaggcctggagttggagaggacagaaccccggttttcccggagggaacgccgttcctgtagtagccaggtcagtgatggggagtgccagtgtcgtggtcacctggcagaaggctccgcactgtgggaggaacacaagttcaagaccccgctgctaatgggagagaattttggttcacacagtggcggttaagaggacaggaatgacacaaggtgagagaaggcccaaccctgtaaatggacagaaagttgaggcccggagagggaataggtttgcttaaggccacacagcaaagcttggggtagaaacaagatttgaattcctgattcccaggttaaagacctgtgcaaagtaacaccactgcctcccctcctgccccgagcctc

SEQ ID NO: 38252 - DNA, 1245 bp, Artificial sequence
  DNA replication origin
cggtcctctctcccgcgcggtctgtcggtctgcgcgccgcctcgctcctcgctcctcgctctccccctctttctccccctctcgcctctccgtgtctctggctctctgcctggctcccttgggtctgtttctctctcctgccgcctctctctggccgcccctggctttatttctcgcgcgcttggggtctctcccagtctccgtctctccatttctcctggggggcggggagggggggtctccaaaaaccgcggcggcggcggcggccgctccaggcgcccgttccggagtcggggggaggcccagccgggaggggggaagggggggagccttagtcatttccccgctccagcctgctcccgcccgagcgcgcactcacggccgctctccctcctcgctccgcagccgcggcccatggagcccgccggcccggcccccggccgcctcgggccgctgctctgcctgctgctcgccgcgtcctgcgcctggtcaggtaagcacccccccgctccccaccgctgcactccccaaactgcgggctcaggcctctcagactggcactgggaccccttcggctaatgccgagcagtaatagggggagagacgcctgtaaccagggttatagatgcagaaactgaggcccagagagggccagcgacatgcccaaggtcacacagccaagggtagaacccaagtctcttctatgagagtttgtctctgtggactctgactctgtgcactgtgctgggcactgagacaaaagagccgagttgcttcactcagcccctgcccggtccaatggggaaggctgactgacagtggctttcagagcagggccgtccggcttccccagaatctgtccccatggacatacgactttccacatgtttgacttcagggtgtgaggggaggaggtgagggcagaggtcctcccgatgctgcctggaatggaacagagacaagctgttgcaattagggaagagtgagccctccctctggtgcgcagagtaaaccggtgttagtgtgtgcctgggagagagggagccgggaggccgcggtaaccccagagcgagctgctgcgagcaacagatccttatgtaaaaacacggtggattgtccctgtggttgccaaagcctctccctggtggtcttgctccttgaggcgctcccagctcccccttcctcctgccttccccgagcttccaggcagctccctgcagttcaggtgctccgcggggatgttac

SEQ ID NO: 38253 - DNA, 958 bp, Artificial sequence
  DNA replication origin
cccaggctttctgactccagaacgtttcccgcttcactaactggcgatctcgttcttatactgcccctgttctctgtctccctgtccccagctttgccctgagtgaaggtgaaattattgccatccactcatatattcattcaatatggatcagacttcttatgtgccagccttggtttctgaatcataacaaatgcccagtgaatatttgtggaataaacgcatacattaatgaatgtccccacacgtaccaccatcagcagcacctcctcaggcccccaaacagacatggtcctgggtagcgggccctgtgatggaaaacaaacatgggctgaggaagcacaaagaaggaacatggaccctgccaggagaggggagagccagggagggtcttagtatgagccatgcttcatctgaaatttacatggtggattgggatttgttacaaggagaagcaggacagacaccctcgagggatgaacatgagaaatgggtgaagactgcaggtggttcaggctaggaggaggcaggaacgggaggaggtgacactgaggcggggctgtgaggagactgcactgtgcgggtcagaaagacccttcaggcagggtgaggaggagggcagatgggaaggggcaaggctggaggcaagtaacgttggcaagagatgaggggaacatgacttatggctgagccagtgtgggccgagaggacacagaagcatccagacttggtattcagtttgagtgagtgggccaggggctatagaatgaccttctcatgactttctctttgggtatcttaaatccaggacacaaatgatatcacatatgcagacctgaacctgcccaaggggaagaagcctgctccccaggctgcggagcccaacaaccacacggagtatgccagcattcagaccagcccgcagcccgcgtcggaggacaccctcacctatgctgac

SEQ ID NO: 38254 - DNA, 942 bp, Artificial sequence
  DNA replication origin
gggtggtttggggaaagctttctaaggaggtgaccattgagcagggacctgatttaagttaaagaataggtcaattgcatctctactggaagagcatttcagatcagagggaagagcaaaggccctaggtgggagggagcaggcaaggaggccagtgtggcctgagctgagtgaatgggggaagagtggtgggaaacacaggaagagggatgtgtggggccccataacgaggcagggactcaggggccatggaaagaatggtggagttactgagtgcttgctatatgccaagcacttacggtcggtgatgtggctggaccccattggccctcctttcacacgagagtgctgaagctcggataggtaagaaccgtcccaagtgagaaggcagaatagtaaggctgaggctggtgatccatctctgtacttcagggggctgaggacacccgaggggcagccagccctgggggtggtgccatgggaaagcagggagcttcgtcctgggagggaagggtggatggagtaaaggagtgtgggggaatggaaggtaggagacagggggctgagactgctccagggggctggaagagggattatgcggagtgaggaggaaggattggggctgaggattaaggacagaggtggcatgggggtaggggctaggaatgaggtggtgtggtggttgtagaagggggagccgagcgtgggagagggttaaaggcagagaggctggcacaggggtataggaggaggatcttgggagcaggaggtgctgaagactgaagcttgaggtggctgcctcaatgaaggagatcccctgagcagggagtactagggaggcctggaggagtgtgtgcagtcgccttggagagctcccctcccataatggctctggattttcagagggctccaggaaggctgtctccaggaaacgctagagct

SEQ ID NO: 38255 - DNA, 1152 bp, Artificial sequence
  DNA replication origin
gtgcgactggccgaggacccgatttcccttcccaagcgcggaggcagtggcagtaactccagcctcggcgctggccttcagtcctccaacggcgcccttacctggcccgcgcacctccacttccgggcggcccgtttcccccctggagcccctgcctggggatggtccgctccgggcccgggctgcctccgggaccgagcagcgcgggaggtggcggcccgagcccggcgtgtagcggatccttctgctgccgcggcgctcgctggggaagcctgggctcctaggctcccgtggctttccacgtgttcgcgccagctgagccctttacataacctctttacataagctgcacctcccgccggcgcccgggccagcggagactcctggtggcccatcccccgggacgccagccgagtgagccctgcaccgcccggtcctgcaaaggtcgacggagcagccgcagccgagcgcaccggcacgccttgccgggacccaatcactggcgagaacacccagccaacaaaaaataggcgcgaaattcccgtgatccgcggcgggctccgggtctccgcagcggcccgcgcatcactatcccttctcgcctgatctgcgtgaagaccaaccgtccgcagtaggcgcctaataaatactgactgggtgattgtcttggtcgtttgattcatagctctgtcctgggaacctcagggactgggttggaatcccgaccttcccttctaccagcccagtgatcttgtgcaaatcattgacccaccctgagcatccgtttatctaatgatcctctgcaaaatggatagaatgggctttaattcccaggaatgatagacccaaatgaaatacctagatggaggctaattgggtgtggggctgttagtacccaaagctcccatttaggcacagatttttgaatattttgttctgtattttgtattccagtgtaggcctagtgggtgcccagtgtttgttaactgaatctacagatgtttattgaacacccgtaatgtgctaggcaccattccaagtcgctggggaaagagcaatagacaaggcagtttctgccttggttgaggttctgtgccactgcaggagacaaaccacatgggtggccttgggcaagttagtcaaccttcttgt

SEQ ID NO: 38256 - DNA, 1123 bp, Artificial sequence
  DNA replication origin
gggctaacccattgcgctgcaggacgcactcctcaaactgcacgacgttctggtggcgccgcttgaggctggtgagggcccagaattcagccagcgccagctccacgttctcgggggcgtcgcagcggatcttcttgaccgccacccgggccccgctgcgcccggccactgcctcataaaccacgccgtagctgccgcgcccgatctccgccaacaggctgtaacgcggccgcgcggacccgccaccgccctcaggccgtcgccgcgccaggaaggcctcgcccggggcctcggccgccaccggatccatggcccgggccgccgccgccggcctcagcttcgtgctgggcgcccgcggcactgggcttcgccttttccgctccgggctttgtgtacctctgcgggcgccgtccttccccgtttccatggctgcgggcggcggggggagcagcaacggcgctgcccgggccccccctgcctcatccctccgtccggccctgggacgcggaggagccggaccttggattgtgacctgcgggcgaaagaatcggttaaacggccaggccaaggcggggaggccaggagcgtaggccgcggggcgtcccacctcctcctcccccggccgccgcggcccctttaagacggaagccaccgccgctgattgaacgggggaggggaggggaaagcgggaaagaccgaaccactgggcagcagctcagagggggaaccggaaagaaaagcacaaactctccgctctctctgttagcttgtcatgtagcgataggaaaaagaagagccagcaagcttcacgccttctgaaaaccgcttagagacgcgatttggccggcggaaatatttttctttgcttggccccctctgtgacgctcctccccgcgccccgccttgtgttcgcccgggtgtaaacagtccattgaattaagccctagcggagcccagcggaccgacccaagtccccgagggcgacgggtagaagggattggctgaaaagttcggcttctcggagtgcgactggccgaggacccgatttcccttcccaagcgcggaggcagtggcagtaactccagcctcggcgctggccttcagtcctccaacggcgccctta

SEQ ID NO: 38257 - DNA, 1625 bp, Artificial sequence
  DNA replication origin
gcccagtggttcggtctttcccgctttcccctcccctcccccgttcaatcagcggcggtggcttccgtcttaaaggggccgcggcggccgggggaggaggaggtgggacgccccgcggcctacgctcctggcctccccgccttggcctggccgtttaaccgattctttcgcccgcaggtcacaatccaaggtccggctcctccgcgtcccagggccggacggagggatgaggcagggggggcccgggcagcgccgttgctgctccccccgccgcccgcagccatggaaacggggaaggacggcgcccgcagaggtacacaaagcccggagcggaaaaggcgaagcccagtgccgcgggcgcccagcacgaagctgaggccggcggcggcggcccgggccatggatccggtggcggccgaggccccgggcgaggccttcctggcgcggcgacggcctgagggcggtggcgggtccgcgcggccgcgttacagcctgttggcggagatcgggcgcggcagctacggcgtggtttatgaggcagtggccgggcgcagcggggcccgggtggcggtcaagaagatccgctgcgacgcccccgagaacgtggagctggcgctggctgaattctgggccctcaccagcctcaagcggcgccaccagaacgtcgtgcagtttgaggagtgcgtcctgcagcgcaatgggttagcccagcgcatgagtcacggcaacaagagctcgcagctttacctgcgcctggtggagacctcgctgaaaggtaggagcaccgcgggcctttccacccacgcagggcctggaccccctgctctccggacggcttggcccacactgttcctggccttcctaggcctcagacctggtccctgtcaccctgtgccctgacacaccctcctttcctgggcccaggcattcggccctctcttctcaggtcctaagatcagtccctgggcctaaagttggctggtgtttccataacaagagctcgtttaagtgctaaccattaacttaataagtgctcaagaattgcgagctatggttattaaacgtcttctatttttaagatcggttgggggagtggaggaggggtcgggttcagttagtagcagaactgcggagcctcctcacccccgagggcctctctctttccctcccaaaacaaacaaaaagaaaaaacttgactggacccacccacaccctctccctgtctggttccaagtttcctgacaccctccagctccaacccccaaactcctgtggcttcctcgtctgccttttcctctgaggcccccggcccttcatcccaggcagccgagcaaactgactgtcttctggcttggtcctctgaggggtgcaggctgacaaccctcacaggtggcctgagagctgtcacataacaaagcatccggcatcttttccctccgttttacattcttaatctttttcttaacctcagaggctggctgggaagtggttttacttaaaaggaaaatggggtacattgaggcaagaggtcttgcagtcctggaggaactaattatcttagtttccgggttttaactgcagttagggaatgtattcatcctaactactcagtactcacaagcctt

SEQ ID NO: 38258 - DNA, 1002 bp, Artificial sequence
  DNA replication origin
cgtcggtcggtggccgagatcccgggcacgctggctctggtgagcgcggcctccgcggctccttggccccaggatgccctctctcgtggggaaaggagggtcgggaaaggccgagcgtaggttaggacgcggggtagagtgtggccaatggggagtgcgggttggagatatttggtttttggaggagagggcgcagctcgcggtgctcattggggcgaggcgatggggtgagcccctgcttgcccggacctccgcggaccttttttccccccggggggacgagagtgacctagaactctaatgcctgtcttgaaccaggcgggattattctgggtcaaccagttttcgaatacggagggcggccccagtcgtgcgtcctggggtttatttgggctgtggggttgagttctgccagggccaaatggaccaacatccccgcggctggggtggggacgtggctaggtccgcacatccctgggtggtttttggctggggagcgtcttgagtcctgcatcaccgagtttttctgttttttgggtggggctggatatgtcccgagtggtgaccggggtggttagggggaggccgtctcaggccttgatgcttgatggaccttggtttattaggggttggggggttggaagtggaggtgagcttgacgtggtcaaaatatcctgagagggcctgggcgagtgtcttgggtcaggagtccctggggtttttagggaggtgagggaggtttcgtcctctgatagtggtgggctgtatcactctgacaggcatctaggcagctcttttgaatgggggcaggtcttttctctgggacctgttgtctcaaggtgtgtcatgtgggaggtgccccctgtgctttgtggcaaagttcctgggtttggtcgtcatctgggtggcccgtctggctgactcctttcctggactgcttttccctcacatgttagggccaaacatctggtttggggctgtgaagggttaggtctggtgggg

SEQ ID NO: 38259 - DNA, 1364 bp, Artificial sequence
  DNA replication origin
tcttaaaaaatattccaaaaaatattccaaaagcattcaaaagtactccaactctaacttcttttttgaactactactgctaaatagataactagtgataacttgagacacatgtatgtcctggagcttctcttttacatactgtagttattctaattatgtctagttacctagttagtatgggttatcttgttatctctacttgtcagtagttcttactagttatatgaacaagaaataagctgtagttaacagaaatgtatggttgagggtctttgcttaacccttacccttgactttgatcttgggcatgaacttcaaccttagacttcgaggttcaacatgagagtgagagacaggctcaggtgatggtaccagagtgagcgtcacacagtcagggcgatgatccgtatctgcatcatcaggaggattggagtaaggatgagtgtcagggtcagcggctgtgaaaggaggaggggagtcagactcagagtgagattgagggtcaaggtcagagtcagaaaggggtgaatgtgagggtgaatgtcagggccagattgaaagtgagagtgatggtcagattgaggtgatgaagtgagaatgggggctagggtgagggtgaggttgagaattagggtgatgatcaaggttggggtttgggagagagcaggctgagtgtttggttcaggtcggaatcaaggtgaggatgagagtcggggtcacagagatgttaaggatgtgatttagaagccaaatgtcctggtgcatgcctgtaatcccaactactcaggaggctgaggattgcttgagtccaacaattagaggccagcctgggcaatggagcgagaccctgtcttcaaaaagggaggggattgtgatttagggtaaaggtggggccagagtgatgctgtgagggtcagagtcactgttaatgtcaggctgagggtgagggttagtgtttgatttaggatcagagtaggtcccagtgaggattaaagtcagagtgagagcaagtgcacagtgagtgtgagcgtgggcatgagagtgagatcaaggtcagtgtcaaagtaagagtccatctgaggaataaactcagagtgaggatgagtgagcagggtagggtcaggacaacagtgatgatgagggtctggtttagcgtcaagggcaagtgtcaagatgaaactgagggtcagggtgaaggtgagagtgagggagagtgaggtctagctgaggatgaaagggagattgagaaagagagagtcaagtgcaattcaggtccagtgtatgaggcttaggtcaggtttaaggcaagggttgggataagggttatgatcacattgagggtcaggttgaggataaaggtc

SEQ ID NO: 38260 - DNA, 1092 bp, Artificial sequence
  DNA replication origin
cccaagcccggggtctccccggaggaagcaaacagggcgcaggagacacagagaagagctgggggagcaggagcggggcgaggcagagaggacctgcgagggcaggagaaagcgcgacgagagggcctccttccaggagcggacagcagccccaaagagggaaaaggagattccgaggagggaggagaagtcgaagcggcagaagaaacccaggtgtgttgtggctccgattctgggcattcgctccgcgcgctcccgctccttcgcggcccttccccttcccccgtgagggactgatgcccccctccccggggagaggcagcccgtgccctcgctctggcttccgtgcctcccagcccttaccactgccccactctgcggtgggttcttcatcccagaaccgggatgaagatcgcgggtccgcgcgggggagtggccgcgggctctccactccagcgcctcgtggcacccggtgaggcggggcgcgggtggagaggtggcggggcgcgggtggagaggtgacagggcagcgggtgggacacgatcccgcgtcccctgaactccagctggtgactcaccccggctctcgaagaggaggagctgagcgacatgaacaaaatcggactcaggaaccatctgagggcttaagcacacctcgttccggcttccggatctgggccagtttcctctgctggaaatgtggcactggtccaggagaccttcaaggatgctaccagctctgaaattctggagcttggaggttttatttgttttgcctcctttgttccattaccattggcaccaactagcacgtgtgggttagtggacagggccagcttatggcatcagaaagtgaagatttggggttcatgtttttgttatcaattttaataggtgtctctctctttgcctccctttttcagtcattgaggataacagatgccttattcgttgctcatattgttttaagaattctttgtgatagaataggaattcttttgcaacagttgggaatattaggattatggtgaagagttgatgttctttcccggtggtttgtagcaaatcctttttgcccacagcctcagttgg

SEQ ID NO: 38261 - DNA, 1446 bp, Artificial sequence
  DNA replication origin
gggccttcccaagtcgtttcgccgcctgcagtgcccgaccgggggccgcgcgtccccggcaaccacgcccgcccgcgcagctgcagaggccggaaaaggcccgctcgcccgcgctcggcaccacccagcccgcgctccgggcgataccaccctgggcggcccctccaaaggccggagatggtgtcgtccccggcctccgattggtcgggggggcgggggcgtggcctctggagcctggttccgcgcgccggagcgcgctagccgcattgcgagccgaacccgggagctggcgccatggtgaggagtggttgcggggcgcgggcgacgcgacggtgggggtttcggcctgcgttcgggccgcagacagggcctgggcctgggcctgggcctgcgcctgcgcctgcgcctgccctgggaacgggttccggcagacgctgaggttgcgttgacgctcgcgccccggctcccgttccaggtgctgttgcacgtgctgtttgagcacgcggtcggctacgcgctgctggcgctgaaggaagtggaggagatcagtctgctgcagccgcaggtgggtgagatccgtgggctcctttggcggccccgcagaccctcatcgcgcgggtcccagcatgcacagcgcgctcccacgtggccggccgagcggttcggggcggggggacgggcctggaaagctctagatccgggggtctttaccttgacccatgggtagaatcgctctagcaattagaaataagcctcccggacgccgcccccgaacgattaaagcagaagctgggatgtggggcccaggtatcagcatattttaagagcttccaaggctgagaaccgctgcttgactgcgccgcagaggcaggagggagggaaggaaaccacttagcctctttctccccccaggtggaggagtctgtgctcaacctgggcaaattccacagcatcgttcgtctggtggccttttgtccctttgcctcatcccaggttgccttggaaaatgccaacgccgtgtctgaaggtaagtcggccaccgccaagtgtcacagagagatgtggttcctttcggtatcctctcgggcagcttgtgatagtatttgccgtccttggctggctctgagtctgataggcgtgaggcagtatttgagccatacaatgtgtaatttgaaataattgtcttcacagagctcaaggtctgggaactgtgctagaccaaactgtttaagcagacgatgtggaatgtgtgttaacgtttccttgtgggcactgtagtgacaaactattttttatttttattttttttgagatggagtctgtcccccaggctggagtgcagtggcaagatctgggctcactgcaacctctgcctccctggttcaggcgattctcctgcctcagcctcccgagtaactgggattacaggcctgtgccagccaccac

SEQ ID NO: 38262 - DNA, 2074 bp, Artificial sequence
  DNA replication origin
cagcccggccgactccccccggggcccggttcccgcgccgccccgccgcggccgccgccgcccgccgctccccggggcctggcctcgggcccgggccatcccgccgccgccgccgccgccgccgccgctcccgggggagcggtagccgaagggagggagcgcaggcgggaggagggatgtcgggagcgggcgggcccaggggacgggggcccgggggaggcgggggcggggcggcgcggccggccgaggggcggccggggacgtgacatcatcgggggaggagcggccgggcccgggccgcggcggcggggcggaccctggcgagtcggtcgcctgggctgggggctgcggcctggtcgaggccgcgggagggaacggaagagcccggcgggggccacggaaacccgcgcagggaggatccggggccgcgcggcgagggagcccggcccgagcgggaggtgcgcgccccgctgcgctcgggaacctccgcggcctccccgtcgccgccggacgaagccccggcgtcttcgcggcctcatctccctcccccggcacccgccgtactctccgcgcccgacgccttgtgcctggacttgctgctcattttgacgcctccgagctttcgctcttgacgtctttctcccgcgtgactgtactcccgcatttccccggcgaccctgacctcactttcaccccagctaaggactgaaacgtccctgccgtaggctgcggccccagacaagctgggcgaggtccctgcatccaaccatcccgattcctgatgctgggttacctaagcctaaagcattttcagtttccatctgtgcctttcaggaacctcctgatttctgattgcgagttggacaggtaggctcagagcccagctcacctcctgtttctccccagccgcgtcccgtctcagatcccattcctttttttttattagttcctggcacagaagtcgtctggcccttgaccgtggggcagagacatttctgcccctctccccacgttgtcctggccaggcttcgagcaagcccagactgagtccagcactttcctgcagaacagcatgggggccacctgccctgcctgccatgttcacgctcagacacccctgcaataacaccttcctgctccaactcactcccatcctcttctggggggcctccaagtgtgagttagcgttctgtcacacattggcccagatgaggcgtcctgggggcactgctggttctcctgccatcacagaggccctctcacctcctttcctggtctctttaccaccccttctctctatgcctctccccatcacccacagggggctgccattcccaccaggactccttcaggtctcagcttttaccctaggtgggattatcaaacatgggtttctccttaagacaattcttaagccagtctctttctccatctcctgatctgcctctctaaatcttgcttctcacagtgtggtccccggaccagcagcattgacatcacctgggagctggtgaggaatccagactcttaggccctgccgggacctgctgaatcggaacctgcaatttaccaagacctgtacacacattacatgtgagaagcccccccagagctgttccacacttgctccactcctctccccaacattcagacccacctctggctctctcatttccagcagacacccttcctcttacccagtggagaggactcagggaatcttggcagaaccctgctggcaccatcagcggcgtatgctcctcctcgtttctgtcttttcacccgttctcttctctcggtcttccactgtggagatggatgtggaacctttttgcttagtcctgtcttctgcctttcctgagattaccccaccgatctcctgtttgtgtctcaatatgttcttttctctgctcagatctccccattcttaaaagaactgtcccctcctcctcgcctccttcttcaatttctgcccctcctgtgtctgagaccgttcacaggaacgctctgccaaggatgcctgactggcccccagcaagccactcctggggcccttgtgtgctggctcccttcc

SEQ ID NO: 38263 - DNA, 1357 bp, Artificial sequence
  DNA replication origin
gaggcgagcgcgcactgagccacccggactcggcgctgcgctgctggaggcgcctggtgccgtcgggtcgggctgagctagacgcccgcagcctcagcgggaccggatccggggcggcgggggcgctcactcaccgcgcgccctcatgttccctgcgcaggacgctctgccccgcagcgggctgaacctgaaggaggagccgctgctgcccgccggcctgggctcagtgcgctcctggatgcagggcgcgggcatcctggacgccagcaccgcggcgcagaggtaagcgctcggaccggacccggtgcgctcgggttggacggctgcgcgccgcctcagctcagcttgctggagctgctggagccaggggcggaaggagccctaactctggacggtcccggcgagctccccggcccaccccgtccggagtgcctgtgctgcctcctgaggctgtggggcgggctggggcggggcttctgcctccactccgggctgccccggtagatttctgacggccgctcgcgggtgcggcggtgaacgccaccccagccgggctgtctatggctctgagagaagaggcagagctcccagccatgacccacagccaccggccgtctaggaacgtccagcccctccttcctgggcagtcccagtgactctccttgtccaattccgcagctctctgtcaggaaaggcacgaaacccagccccctttttcctttcccacgcccctcagagttggcggatgggggtgtgcagagccagagaagcggctgggggctggacggtggcgaagagatgaggtgggcagtcggcctggctggactgattggcctgggaactgggcagggcccctgcctttccctcgggtgtttttctggtaggtcctttggaaggcagagagtccctgggaacccagcacccgcgccggtctcctctgactcctttgcaggggtctgggagtctcagtagggggttgactccaggatttgaaagcgaactttaaaagtttattgacctgcccccaaagcccctgcaccccctggctttttgcaccttcagctgtgaccatggagggaggcatttaggtatcctatggggagtcacagtggttaggattagggaggtgccagctctgctgacagctgggacagggtgggcacttggcttcccagaagtctgagctgttgcagcagcccgaagggattctgaatggggggcttaatgcagaccgggcctgacacaggagcccacattcacactccgcaggacgcctcaacctcaccgtgtaacagacacacaccgcgcttcatgtgcaaactgaagccgtttctgcacgccggtcctttcctggctg

SEQ ID NO: 38264 - DNA, 1139 bp, Artificial sequence
  DNA replication origin
aggcctgcaggtcccgcaccggcgaggggagggcccagcccctaggcccagagggagactggcggggttggcccacctcgctccacacgagcacgtttccgaacacgacctgcaacccgtcgaagaagttgtcgccgatgacaatgacggtggcgccgcccgtggtccagccctccccggggctgatggccttgatgcagggggtggcagctgggaggcaggagaggacccaggtcaggggaccgcgctgaggtggggcctggggggctggctgggcccgcggcggccggggctgggccgggggtcctgaccttcggaggggtccaggcggcgcgccctgcggccatgcttggagttgttgtgcacaaacatgttgtcggacacggccagcacgtgtccgtccacgctcaccgtcgtggacaccaccacctgcggggagagccgaggccagcctggctggggccctcgggggctcccgggaggggaatgtggtggggaaccagcaccttgaggctggtggttggatgctggaatttagggtcactggtgggaggaggagggcttcaatcctgcagtgtctgagctggtggaagggggccagctggatcaggtgatacccccagatgaactgactccccaggcgctacaaaaataaagacccctgaaaaaactggctccttaggcaaagaatggctactgtttttgcatacacagaatgctgggttgtatccacggacctccaagccaggaatggggtcttaggcaagtggaggtgggcagcatcagccggagaactcagcagcaggagcccctgccctattctggggagaaaactggggctgccttcttcccccgccctgcactgagaggggtgtgcagcttggggatgtgctaagggcagctgctctccgcttcacgctatgcaaattgcctgggtcgttaatcatgtaaaaatgtcacaattagcatcttcttaagtgggactctaatgaagcctcccttggcagccagcacaagttgagaaggagctgccccacccccagcaggcaccaaccaggctggggaggcacagggctgggcagagatctgccttggaggcctttcccagggtggcagggtcacagccttcccttccccct

SEQ ID NO: 38265 - DNA, 831 bp, Artificial sequence
  DNA replication origin
tgcaaccacccttccttccccaggtcaacctccccactcagccctcgggtttcggttgagccgggctcagcaggcactccctaccaaaggttttccttgattgtcagccccttgaccgcgtgaccccacccaccccatgcggttctctgctcagcctttccgcgttagactggagctccggggaggctaagtagggtcactaccgagtgtccctcgaagggctcgatgagcatcggtgcggggggctgcgcgatggtggggactgcggtggggtggagaggagaagtgggtggctcagctggggcggggcgggaggatggaaatggagaagactcggccagcggccaaatagagccaggctggggggttctacactgcctctccacgtgtgttcactgctcgccctggcgtcgtgcaaggggtgtgtatgtacgcacgtgtgtgtgcgtgtacatgcagagtgaggcctggggtagcgtgggggaaccaagagacccagagaagattcggggagcagcgaccccattggcatctttggaataaacatccctttggagaggctctaaaccctggagagtgcgggcgggagacacaatgttcaggaggtgagatggctgagggagtaagaatgttggttgtgggggggactttgccccggggaagggactaaggagccagaggccagggagggaaacacacagagccagggaaagacggtcctgcgagcggagcgatcacaggcataggtggttaaaggggcccggggccgtctaggggtcgtggccacagcgtagagctcggctaactcctatcaccaagaacggagaccag

SEQ ID NO: 38266 - DNA, 927 bp, Artificial sequence
  DNA replication origin
ccgaggccgccgccgtagccgctctgctgcgagccggggctgggcgcgaacccgcggggggacgcgctgctgcagctgcgcgcgtagcctgcgagagagagcgcggccgtcagggggcggtgccggccggggaggggcggtggcggcgcccgaggacggcggggaggcgcggcccacgcacccggctcgggccccggggtggcgtccccgacggcgatggccagcgggctgctgaaggcgttgatgcccacgacggcggggtgtgggtggctcggggccaggggtgcgagcggcccgggtgcgcggggggtgctgtacagagcctcggccacgtccgccgcgcgcttcaggagcagctcctgcgaagacaagagcggggcacggccggggcagccgcgggcgccgcgtgctggggggccccggtcccggcggcgctgggagggcggaggcgccatacctggttactgccgggcactccgtacagggcttctgccaagtcggccgcccgcttcagcagcacttcctggggacagggggagagacagcgggacggaggggcagcccctgggggcgaccaaggggccctcgggagcccctcctcacccccttgcccacaggacaccctcagccccgccccgccccgcccctctgagtaccttgggcagcctctcggggtctccggggtgtctgggaatgactttctgtagcctctggaatccgtagtcaatggtgggctcgttcagagctggggaagggggcggcgtttggaggacgtctcccccgcagccccccactcccagggtgagacgcagggcgccaaaagcaggccagcgcccagtccgagagcctcgctgcagccccctccaccaggcccagcccaagtcccccggaaaactccaggcacccccggcagcgagattcagggaa

SEQ ID NO: 38267 - DNA, 1112 bp, Artificial sequence
  DNA replication origin
ggtacctgggtaagcctcggtcaagacaatatcatgaaatgggaccaaccctccctcaagtccagtgtgtctccagctgatgctgggtttaagcagctctagaattcttgatcttcttgctgaatcagaagaccccagctgggctgggttctgcacactggggcagagtgttcctctactgttgaccacagtgtatgtgatgttccatacccccaccagtgttggcccaagggggtgcccacagagaggctgtgagggtactgccccagaactgaagggaaggaggagcagtcaatcctggcctgagcaaagagccaggagaggcaggggccttgggagggacaccagaaggccatggcctatgtggactctggcttatggggccttgggtcccagaagttgagcccaggccagaggacagggccaggctcaagccttcagccagaaagcaggcaggacacacgccctgcaaggaaagccaggctggtggacagacagtgcagtctcggcaatggcaaatatgggacagggagaggagagggcaccacgggcaaagccatgaccagttccttctgggacagccttcaccacctctccagctcggcagagtcgcctgggacttcagggacaatctctcttatgattgatagggaggcttcttgcaggtgacaggagtggggggatcccccaagccctgggctttgcatacagtgggcgctttataaatgcctgctgaatagctaagctaaaaagagctgtgaacatgctgatctggaacttgatgatggaagagtcttgagggcagtgtaaaatgacaaggcatcaaagccgttcggaaggtcactcactcatgacatgcagacattgcctgtccacccagctctgagctccccactctaagaagccagatgggatgtggtcagcgcccacagtcagggctgggactccgaaatcacacactggccctttaggcacagtggcacattcagatccgagatcaaccttaagcagggggtggaattgaccctatttgactgcgaggaaacaagttcaaataagtaacttgctgaatgcccggcagctcctgatttggacactgaaactcaaattct

SEQ ID NO: 38268 - DNA, 2010 bp, Artificial sequence
  DNA replication origin
ggcgggttggccccagacggcggagaggaagggcagagtcggcggtcctgagacttggggcggccccttggaggtcagccccgctcgctcctcccggccctctcctcctctccgaggtccgaggcgggcagcgggctgtgggcgggcaggaggctgcggaggggcggggggcaggaaggggcggggggctcggcgcactcggcaggaagagaccgacccgccacccgccgtagcccgcgcgcccctggcactcaatccccgccatgtgggggctcctgctcgccctggccgccttcgcgccggccgtcggcccggctctgggggcgcccaggaactcggtgctgggcctcgcgcagcccgggaccaccaaggtcccaggctcgaccccggccctgcatagcagcccggcacagccgccggcggagacagctaacggtgagttccccgaccgacggtccgctcccccgcaagccgactgcccggctctcctgccccgtggggcgatccctccctaacacgcgggcacacgcacacccacgcacactcacagtcatgcacactcaccccgcacgcacactcgcactcacgcgcacacacgcgcgcgcactcacacacattcacacacgcgcacacttgcactcacacgcgcgcgcattcacacgcatgcacacacacgcacactcacacgcgcgtgcgcgcacacacagtgcacgcgcgcgcacactcacactcacagtgcacacacacatatacacactcacactccctcaactccctgctgggagcaatggctgctgactcggcagccccagttccctgccagacctagtcagcagtcccaggacaggcgccagtgggatgctgcctcttccaagccccaaaccttcccttttcaccaaagacaaaacaggccagaactggcaggaggggagacagaggggcagaagctctcaaggtgcagagcaagactgcgtaggagagagtttgaaggcgagggctggagagaaagaacaaaaggaaagaagggagagcccctcgctgaggctgccgggaggatggggcagagcgggagaggaaggcagcccgacctcccagctttccagatgtggaataggagaggaggagcgcaagcggagggcactcaggggcttctagaggaggcaagtggaggagggtcttgaagggtgatgtccccgagtcaggggagtctggagagagagagagagagagggctgccaagaaggaagcggcgggcaaaggcacaggggcaccagatgcggaaatgggcagcctgttctggaggcagctgtggagcttcgatgggtacccccagcacctgcctgggcagagccttgtgctgaagggccggcgggcaggcccagccctgaaagcctcgacacccaggcagacatggattccaggacaggccatctgagcccagagagcagacacaacaatggaagcggcacaggggttttggggcatgatgctgagtctggagctaagaaagcctccttggaaaggcatctgggctgagatgcaaaggaagaatgggaattaggtgaaaaaatcagaggcgaggggtagcattacaggggaggggatagctagtgcagaggcccggaggtaaagtgccagactcagctctttggagcaaccgaacagtttctagaggctgggtgcagctctccattggattagaggttcacaggggaggctggccaagcatgtagttacatcagggaggagaaggaggagccaaggaagtgactggagaggcaggttggggtcagattgcaggcctttgatgtcctgtgaaggctgttagatcctggtggtgtggcctgctgtgggctcacatgtcttcttgggctggcagacctttccatccggggtttcaccattcttcctttcccccatgctgtgcctctcggaccccaagggacctcagaacagcatgtccggattcgagtcatcaagaagaaaaaggtcattatgaagaagcggaag

SEQ ID NO: 38269 - DNA, 794 bp, Artificial sequence
  DNA replication origin
tcccgccactgcattccagcctgggtgacagagtgagactcgtctcaaaaaaaaaaagaataaaagaaaaaagaggtggagcatcctgcagccctggcccctaaaagattggtgggagagtgccagctgctccaccctagtcactttgggaactggtctttcagttcacggcctgccatgtcctctcctgcaaatcctggcactgttgaggaggtcctttcagccctggtttgtccactctaaccttgaatatattatacacacactttatgagagctgacgagggaccaggtgctgttctaggctctgaggtgcagctgtggacatttgggtacaaagttcttctggcagggtacttacctcctgctgggggtgggggaacctgaacagccaacacataagtaaagcaagatcatctcggtgttgagtgccttgaagacaataatttaaacgggtgggaggatagagtgtgtgaagtgaaaaagtttgctttagtcagggtagtcagggaaagcctttgggagcaggtgatattgaaaggaaatctgactgagaaggcaaattccatgcacaaattaaaaggccaggaggctagttgggctgttgcgtgggaggagcagctagaatgccggagtgactggggggatgggagccaggggatagggaggcagatggaatgggaaaggcgtgggcaggaagaacttggtcatgaagaccttgcaggtgaacccactggggccttaagcctggaggaacttgacagaatttgcctactgtgtggggaacggcttgga

SEQ ID NO: 38270 - DNA, 1050 bp, Artificial sequence
  DNA replication origin
ggcgcgcgctagaccaaggcccgggggcagggacaaggccatcgaagccgtggtcacagacgcgccgggagggagggggccacgtcgggcggcatgcgttgaggcgacaggagcgcctggtcagacagcagctgctctgaggcgggggaaggcgtggtggggggtcccctgcggtgggaaccctgcgaggacacccgggcccaggcgcgcggagcggggcgagggcggcagctggagggcgtcgaggccggagcgatgaccctcgggcagagggggacaggccagggtctgaggctgggagagaaatcccaagcccggcccggttgggaggccgtgggcatccacacggggcatgtgctggcggccctgaagcgccgatgtccccggactcgccgcacgcggactggggaccgacagcgcgcaaggagagccctctggctctggcaacgaaggggcgggcttggcgggggtgggaggagagagcgcggggaggggtgtcccacaggctaagactccagcactcggggaggggcgggagggtaagaagagggatcttagggccactgtcatcacagtggcagcttcgttgactctcaccccttgccccaaatcgccggcctgccgccacttcccctcactagagacccctaggcgtcgacggcagagttcctgagaaccctggagaaggaacggcctgatactgagctgggactccgactcctggaacagcctgagcctgatattatccgatgcccctgaggtaaagagctgtcatttgtgaggatctgacagggtctggatgcagccacctttggacaagttttttggtttgtttgtttttgttttttttctgctgagcattttcatctatattctggagctcatacttgcatcctttgtactgattctgttaccgaccctcaagggggtatttgatcccagtggggttttttccctgcttggtgccgttcatgccaatagactgagaccaggttcggttaagcagagcagaaactttatcattgatcaaggaatggagaaggggagcct

SEQ ID NO: 38271 - DNA, 1315 bp, Artificial sequence
  DNA replication origin
cctcccggatggggcggctggccaggcggggggctgacccccccacctccctcctgggcggggcggctggccgggcagaggggctcctcacttcccagtaggggcggccgggcagaggcgcccctcacctcccggacggggcggctggccaggcggggggctgaccccccacctccctcccggactgggcggctggccgggcggggggttgacccccccacctccctcctggacggggcgactggccgggcagaggggtcctcacttcccagtaggggcggccgggcagaggcgcccctcacctcccggacggggcggccggccgggcggggggctgacccccccacctccctcccggacggggcggctggccgggcagaggggctcctcacttcccagtaggggcggccgggcagaggagcccctcacctcccggacggggcggctggccgggcggggggctgaccccccccacctccctcccggacggggtggctgccgggcggagacgctcctcacttcccagacggggtggttgccggacggaggggctcctcacttctcagacggggcggttgccaggcagagggtttcctcacttctcagacggagcggcggggcagagacgctcctcacctcccagacagggttgcggcccagcagaggcgctcctcacatcccagacagggcggtggggcagaggtgctccccacatctcagacgatgggcggccgggcagagacgctcctcacttcctagatgggatggcagccgggaagaggcgctcctcgcttcctagatgggatggcggccgggcagagacgctcctcactttccagactgggcagccaggcagaggggctcctcatatcccagacgatgggtggccaagcagagacgctcctcacttcccagacggggtggcggccgggcagaggctgcaatctcggctctttgggaggccaaggcaggcggctgggaggtggaggttgtagcgagcggagatcacgccactgcactccagcctggacaccactgagcactgagtgaacgagactccgtctgcaatcccggcacctcaggatgccgaggctggcagatcactcgcggttaggagctggagagcagcccggccaacacagcgaaaccccgtctccaccaaaaaaaaaccgaaaaccagtcaggtgtggcggcgcgcgcctgcaatcgcaggcactcggcaggctgaggcaggagaatcaggcagggaggttgcagtgagccgagatggcagcagtaccgtccagctttggctcggcatcagagggagaccgtg

SEQ ID NO: 38272 - DNA, 946 bp, Artificial sequence
  DNA replication origin
gatcagccccctgcctggccagccgccccgtccgggaggtgaggggcgcctctgcccggccgcccctactgggaagtgaggaaacctctgcccggccagccgccccgtccgggagggaggtggggggggtcagcaccccgcccggccagccgccccgtccgggagggaggtggggggatcagccccctgcctggccagccgccccgtccgggaggtgaggggcgcctctgcccggccgcccctactgggaagtgaggacccctctgcccggccagccgccctgtccgggagggaggtggggggaacagccccccgcccggccagccgccctatccaggaggtgaggggcgcctctgcccggccgcccctactgggaagtgaggagcccctctgcctggccagccgccccgtccgggagggcggtgggggggtcagccccccgcccggccagccgccccatctgggaggtgaggggcacttctgccgggccgcccctactgggaagtgaggagcccctctgcccggccacgaccccgtctgggaggtgtgcccagcggctcattggggatgggccatgatgacaatggcggttttgtggaatagaaaggcgggaagggtggggaaaaaattgagaaatcggatggttgctgggtctgtgtggatagaagtagacatgggagacttttcattttgttctgtactaagaaaaattcttctgccttgggatcctgttgatctgtgaccttatccccaaccctgtgctctctgagacatgtgctgtgtccactcagggttagatggattaagggcggtgcaagatgtgctttgttgaacagatgcttgagggcagcatgctcgttgagagtcatcaccactccctaatcttaagtacccagggacacaaacgctgcggaaggccgcagggtcctctgcctaggaaaaccag

SEQ ID NO: 38273 - DNA, 1245 bp, Artificial sequence
  DNA replication origin
aggcaggagttgatgatcaccaggtccggggcaggtccatatgtcagctcttccagaacatcctcaaggtactcggagtaaacacgagtgaggaagtagaagcgcacaaggtggtggccagagcccgagcagaactggcggacctcacgatactgtgtcccgttgtgcagctcgcccagctggcccccagccaccagctggtcctgttcaaagctcagctccccctacccaccccccccaccctactggtcagacccatgccagggaggagaaccctgccaggccagggtctgtgcccacccaccactgacatggccaccaagcttccctcaccttggctttcagctgggcagctgtgagcagtgagtctttctggagcaagagcaccaggtccttgtacacagccctctgaactgggaggagacagagatcccaaggctgaggcagacctcagcctgccccagctccttccaagtccaggaccccattttcccagggctgaggtgcccgacaccagctctgtggttgacttagacgcaggagaaaagatgaggttaaaaagtcctggcattgcctctgttctgtgtgcctcctggccagcagtatacagtgacccaagatcacctggcagaaattaagtcggccaagtcacccaggagacacactacacaatgcaacgctttcgtgatggaaattatggggagctgtcagggcgagaaatgctgagcaaggatgggctaaaaagtgcacaggttattacacctgtcaggactcctgtggaagatgtgtgggacataaaaagagaaaacctactggacggaacagaccagaagacagacaagagatgtgagatggaaacaaatggtccagacacactgaacgggctgcaaggtgtgggactggaagcgtcaccctagaagaggcactcactggagtcccccaagatgaccacgaacttgttgtgtagcagctgctggacttccgaggcctggaagtggaccatgtcgcttcgcagcgggcggcgcggctcctcgctcgacagacagaagaccatgccgccaccagcaacgacaggctgcagggagaggccactaagcagcgcgatggtggggactctgggcaggtcagcctcagggctagcccctccggggctgctcaatgctaaagggaggaggtgacggcagcagagccatggtggcgccagccttggtcacacttggtaccagaggcagggggtcgtccagc

SEQ ID NO: 38274 - DNA, 1793 bp, Artificial sequence
  DNA replication origin
tctagggtaatacaaataaaaagtaaaaaaaaactaatcaacaaaaagaaacatattaagaaataatagtgtaaattagatataaggcaaaagtaagctggtggggtttggttctagagcatagggctgctatcccagctactgaggtacctcctgcgtttgcagtcattacttgttaggggttttcacactttgacttcctgcttttcacttttccattcggtgttgcgggatagattgagtttggacttaaggggatatgtgaatgttgggcgtggggaaggatccaccctcactggggtctgagcgttaggagagtaggcgtgtggactctgggcctttgggctggagtgtctattggtcagaggtgtcgggttcggccatttcaccctcacctctaggctggccctgctgagagggagagagagtcacaactcccactcaaggagagacttccctgctggggaggggacggcctgaggcccgccccacccatattcccaggccctggctctggttagcatggactaacttattccacaatacggaggagtggggcacagagtccctaactggcgccccaacagaaggcggtggtggggaccggagatggtaggactggagatggtaggggctgctgatgtgagcccacaatacggaggagtggggcacagagtccctaactggcgccccaacagaaggcggtggtggggaccggagatggtaggactggagatggtgggggctgctgggagccccttttgcgccgcagtgtttcctgccatgaagagttgccgccggtcacaacccttccccgggggcgccccgaatgtgggactccttccggcctggggtgcgtgagggggactcaggggttgcccggtctggaggagagactcgccgccacctaccccgggaaccgcagactctgggtctgggataaagcgtcccctacccgcaagctcggtttgtgcgctactgtgcaatctgtcttttgcctgcagacgcccagccgctcgccctgcgcgggtctcggaatgtccaggggtccctactggggatcacaacccggcgaaatgtcgcatttgccaccacctatctcgactgcgtaatcggctttcagccgcagacgctcaggtcctgcagcacccgcggggatccgtgtaggaacctgctgccgctggatggactgagcgattgcttcgcgggtgtcacgcaccagacgccgtgccgggagcgccgggaagggggtacgcgccccaaccccggccgggggagggcgcactctggctcctctctgcgttttgagcctcccctcccccgccaggcgtatcgcaaaaggcacctccatcgcagagcaccatgtgttgtgcttctactcagctcggtggcgagcggggccccagcatgcgcatctggaaagcgggggagattaccctggagctcgggtggggacggcgtgggctgacttgatataagacgacacccacggagccagatccgttctagggacttggcaggttcctctccctccccagtgagatccgtcgttctttgcagcaattaggggagggaaaaaaaagacccacagtatcacgtttggagagggttaggaagatggctctcgagttgcaggccgccctggtggctagacattggtgtagtttgtgcctggcctcggtttcctgatctgtaaactgggaagaaggcccaagtcatgaggcctgtgactgtagaatggctgaaggcactggtgcactcgcagccggtccttccggggtccagcttcccga

SEQ ID NO: 38275 - DNA, 1430 bp, Artificial sequence
  DNA replication origin
gtccgggagggaggttgggggatcagccccccgcccggccagccgccccgtccaggaggtgaggggcgcctctgcccggccgcccctactgggaagtgaggagcccctctgcccggccagccgccccgtccgggaggtgggggggtcagcccccccgcccggccagctgccctgtccgggagggaggttgggggatcagccccctgcccggccagccgccccgtccgggaggtgaggggcgcctctgcccggccgcccctactgggaagtgaggagcccctctgcccggccagccaccccgtccgggagggaggtggggggatcagccccccgcccggccagccgccctgtccgggaggtgaggggcgcctctgcccggccgcccctactgggaagtgaggagcccctctgcccggccaccaccccgtctgggaggtgtgcccagcagctcattgagaacgggccatgatgacaatggcggttttgtggaatagaaaggggggaaaggtggggaaaagattgagaaatcggatggttgccgtgtctgtgtggaaagaagtagacatgggagacttttcattttgttctatactaagaaaaaatcttctgccttgggatcctgtagatctgtgaccttacccccaaccctgtgctctctgaaacatgtgctgtatccactcagggttgaatggattaagggcggtgcaagatgtgctttgttaaacagatgcttgaaggcagcaggctcgttaagagtcatcaccactccctaatctcaagtacccagggacacaaacactgcagaaggccgcagggtcctctgcctaggaaaaccagagacctttgttcacttgtttatctgctgaccttccctccactattgtcctgtgaccctgccaaatccccctctatgagaaacacccaagaatgatcaataaaaaaacaaaacaaaacaaaacaaaacaacaacaaaaaaaacccctctgtggcttttccttagctgatggcccaagtcagtctctttcaggctgttctggaaccagggtgagttgtttgactaccaaatacagggaatgtgctctaggcacacacctgaggttcatatctggggcttccaggccatagcaaagtctgatagacttcagcctgtgtctttctggatgaactactggtacagcacccacaaaggatagacagccaggcttaaactcagagcttatatgcagagtgatccttctgctgttcacatccaatttttccacttacctcctttctctccttcaggttggtaaccatgacgatggtggctgtgttttgttcccagatcatccgccagaaatcattcaccgtttcttcttttggtcctaaagtagccaacagcaaaaatgaagagaatatacaccaagaagaaagatgctgggaggctggga

SEQ ID NO: 38276 - DNA, 2606 bp, Artificial sequence
  DNA replication origin
cccacctccctcccggacggggtggctggccgggcagaggggctcctcacttcccagtaggggcggccgggcagaggcgcccctcacctcccggacggggcggctggccgggcagggggctgatcccccaacctccctcccggacagggcagctggccgggcgggggggctgacccccccacctcccggacggggcggctggccgggcagaggggctcctcacttcccagtaggggcggccgggcagaggcgcccctcacctcctggacggggcggctggccgggcggggggctgatcccccaacctccctcccggacggggcggccggccgggcgtggggctgacccccccacctccctcccggacggggcggctggccgggcggggggctgacccccccacctccctcccggacgaggtggctgccgggcagagacgctcctcacttcccagacggggtggctgctgggcggaggggctcctcacttctcagaccgggcggctgctgggcggaggggctcctcacttctcagacggggcggttgccaggcagagggtctcctcacttctcagacggggcggccaggcagagatgctcctcacatcccggacggggcggcagggcagaggtgctccccacatctcagacgatgggcggccgggcagagacgctcctcacttcctagatgggatggcggccgggcagagactctcctcactttccagactgggcagccaggcagaggggctcctcacatcccagacgatgggcggccgggcagagacgctcctcacttcccagacggggtggcggctgggcagaggctgcaatctcggcgctttgggaggccaaagcaggctgctgggaggtggaggttgtagcgagccaagatcacgccactgcactccagcctgggcaccattgagcactgagtgaacgagactccgtctgcaatcccggcacctcgggaggccgaggctggcagatcacttgcggttaggagctggagaccagcccggccaacacagcgaaaccccgtctccaccaaaaaaatacgaaaaccagtcaggcgtggcggcgcgcgcctgcaatcgcaggcactcggcaggctgaggcaggagaatcaggcagggaggttgcagtgagccgagatggcagcagtaccgtccagcttcggctcggcatcggagggagaccgtggaaagagagggagagggagaccgtggggagagggagagggagagctgttttgttttgttttttgagacggagtctcgctctgtcgcccaggctgaagggcagtggtgccatctcggctcactgcaagctccgcctcccgggttcacaccattcttctgcctcagcctcccgagtaccacccgccaccacgcccagctaattttttgtgttttttttagtagagacggggtttcactgtgttaggcaggatggtctcgatctcctgacctcgtgatccacccacctcggcctcccaaagtgctgggattataggcgtgagccaccacgcccggcccacagaggagcttttttcccctggtttctctagttccttatttccctggttttctgccccacctgctgaggcctttggtatatcctggatcagcagagggagctttatgaactgagaccctgcaagccaaagggaatttgaggccttggcctaatcctggaggcagcctcctaactgggccttttccttttgtggctaccaagtgcatgcctggcctaaccagctctatcactgggccacagccagagccaattctgggtcctggggtcgagccccagcgaggaatacctatttgttaccgtgtttctcaaggatggcccttgagtcaccttgatcctagggtatcgggtgtcatgatcaacagctccacagtggcatgggaagacagtgctagggctgggctttaggttagtttcctccaaccaaacctcttgctcttggaagctatccaaagctcaggcaacagaaaaagctctaggcctctcatggcaggtttacagtctgcatcagtctaccctggtggccccctcatagcagactgctggttcgaggggttcaaacaggctttctcctagagcatgacctgaaatgttgtgaaagtgcagattttgtaggtaagatggcttcagattcgccctgaaccaagggagtgtgggtgggaaacattgagaagtatggggctagggctgtgtgtaagttaggagactgtgctcaataggatggcggctaaggaacttgagaaaagggcaaatttgaataagtaagtgtgcaactgactgagatagagaagaggtcaaagggccttctgggggactttaatctgggctttgtgggctcttccttccaggccctttgcatctgccatgggcaggaggtctaaggtcagggaatgtatgtctttttctttccagtgcaagtgcgcccagtactggccagaccaaggctgctggacctatgggaatattcgggtgtctgtagaggatgtgactgtcctggtggactacacagtacggaagttctgcatccagcaggtagtgtctcctctgtcctttctcagttcttatgttgga

SEQ ID NO: 38277 - DNA, 1067 bp, Artificial sequence
  DNA replication origin
ctccccccggccgcacacctgagggcgcgcacggtctggcggtagtgctggtaacgctccatcagcacgaagaactccgcagggtccaccgcgggcggcatgttcactcgctcgatcttggatttggccagcgggtcgtggcgggtcttgcggccgcgcgctggcagcaccagaggggcccggggcctgcacggggtccccgcgcccaggcggctcagcgcgcgtagcatggccgagtctcctcactgcggccgcggtgccgggacgccaccgtgccccggaagcggcgcggggaaccttgggacctgtagtcctcgggctgtccctcacgccccgcccggccgtgtggcctctggaaccgaagcggcgaccctgcggacgtccgcatcccgcccccaggctctggcccggccttcccgccagggcccggggccatcccttagttactcccgcccgcggggccggacccgcgtccctccagcccccacgcagggaagggtctcagcggggaagacagggaggggacgaaggacagaactcgacgcaacagcttcggagaacctcacactttattggaggatggcggggcggggcggggctctcgggctgcggtctgcggagggagaggtggcggtcatgtctcaggacactggtctcgtaaccgccgagctgccatcttcctggttctctcccctctcgtcccccccagtccccatgtggcctcccacagcaggacgccccccgcctcccgtagaagcctgaggatccagctagtgtggggatctccagctcccttgggcatgccctcttgtccaccctaaacaagcctgacgcatagaaacctcagcacatacacacaaatcaggcggtaagacattgcctcataggaactaaccactttcttctttagttaccgggctctcctgatgcactgtaaatgtttgatttgcaaaacagtagcaaaccatttccccacgcctgtcttctgctatggtcttggggagctctgcagtccctgagatgttcctagtgcacatgtcagtcaccacctggtcctcttggccctg

SEQ ID NO: 38278 - DNA, 994 bp, Artificial sequence
  DNA replication origin
gggaggtggccgcccgcgcgcgctggtgacggtgggagtgggcggagagggtgctgattcctggcgcgtctgcacccaggatggagttcgtgtccgaggtgcagaggaaggtgcacgaggcccgagccggggttctggcggagcgcaaggccctgaaggacgccgccgagcaccgcgagctgatggcctggaaccaggcggagaaccggcggctgcacgagctgcggtgcgtggggcgggaggcggggcggggcggcgcggcctggccggcctgggagaagcccgggccccgctcagcctcggccctttgaccctcacaggatagcgaggctgcggcaggaggagcgggagcaggagcagcggcaggcgttggagcaggcccgcaaggccgaagaggtgcaggcctgggcgcagcgcaaggagcgggaagtgctgcagctgcaggtgggcaacgtctccggagggtgggactccagccggggacgcggcttgcggggcactgggaattctgggcaccgcgacgcgggcgctggctatgtgcagagacttacagttggcaggtccggatttggagaggagagtgccagtcaggcgcaaagacccggaggtgagcggagtaattggacagtgttcaggtacctagcaggtctgtgggagggaccctgcgttccacaaagaggttgtattttgcataacaggtgatgaagccatgaagggttaagtatttcaggctaggattagcaggtgtgcgacttaaaagcagggagaccacttaggagtaatgcagtgagaatggatgaggcttgatttaaagtatagaagggtggctgggagcggtggttcacgcctgtaatcccagtactatgggaggccgaagcgggcgtatcacttgaggtcgggagttcgagtccagcctggccaagccccgtctctcctaaaaatacaaaaattagccgggcgtggtgtgcgccagtaatcgcagctactcgggagg

SEQ ID NO: 38279 - DNA, 1264 bp, Artificial sequence
  DNA replication origin
actggcagggcgacggcaggtagttctcctcctggcagcgcagcgcttcggcggtgcccacgaagcagcccagctcttccgcgcagcagatattgggcccgaagcagcggcctttgcccccggggccgcaggggaggcactgcggggacgggcggggtgagcgggagccggggcggcgctggggactcgctcggaggaccctgcgaggccggccggggtgcgccgggcaaggatgctggggtccggggttcggagttcgggcgggacagcggggctgagacgcgctggggcgccgtgggggcctcgaccgcggtcaagggcggggcgtcaaaatccgctcagctcctggagttctcaggcgaggccggagcggggcgcgcccctgtggctgcgggtccctccctccccggagcgccgcgggaccagggctggggactcaccttgcgcacgtcgaggtccggcgcggccctcttgcctcccagggggcagttctggatgtagcaggcggaggtcagcgccaggaggccgagcagacagcaagcgaggctggggccggccatggtgcgggtgcgctgggtccagggtccgtgactggtggcggtctctccggcctggcctttttatgcctgggcattgcgtcggtggagctctgtttaagaggttggtagtatgattggtcacagagggtcgccgtgggtcaggccgagtgcgtacgggctttcctcttcattagcagggcctgggccggggtcaaggtcaccgcgttggctaatggtctgggcacagaaggtgaggtgccttgcggaagggagcaggccggggtggcctgggccactagggtgggacagggagaatttggggtggggtgtggcccagccgaagactttatccagcctcccagtacctcgaggaggggggctggggcagggaaggtggacgctgggacccctccaggtgggaggaggctctggcaggatccgcccaccctcttggcccaccacgcatgtggatcattgtcccctcttttaggaacatttcctcttcctaaacccaaatttccagaaaacctcttcaccctcaccacacagcaacacccacttccctgcacctgaaacttggataggaagagatcacatctgtctctaatctgtaactgatattccacctttcctttcactataaattaggcaacaaaccacagcagaattagcaatacctgtggctttgtcacaaatcaaaatagaagataacttcctatcacagc

SEQ ID NO: 38280 - DNA, 1722 bp, Artificial sequence
  DNA replication origin
ccgcagccacaggggcgcgccccgctccggcctcgcctgagaactccaggagctgagcggattttgacgccccgcccttgaccgcggtcgaggcccccacggcgccccagcgcgtctcagccccgctgtcccgcccgaactccgaaccccggaccccagcatccttgcccggcgcaccccggccggcctcgcagggtcctccgagcgagtccccagcgccgccccggctcccgctcaccccgcccgtccccgcagtgcctcccctgcggccccgggggcaaaggccgctgcttcgggcccaatatctgctgcgcggaagagctgggctgcttcgtgggcaccgccgaagcgctgcgctgccaggaggagaactacctgccgtcgccctgccagtccggccagaaggcgtgcgggagcgggggccgctgcgcggtcttgggcctctgctgcagcccgggtgagcggggcaaggcgctccggggccagggggaggcgggcgggggtgcggccgggattcccctgactccacctcttcctccagacggctgccacgccgaccctgcctgcgacgcggaagccaccttctcccagcgctgaaacttgatggctccgaacaccctcgaagcgcgccactcgcttcccccatagccaccccagaaatggtgaaaataaaataaagcaggtttttctcctctaccttgactcgtgtctaagtgccagaaatgggacggggagggggcattgtgggactggaagatcgcgcgcgttggacctgtggcttgttgcgctcagagctggcccaggaagacgtgtcccggctacccgaggggacagagcgggtgctgttctggctgccaccaccctggaggggctggaagagggaggggcacaaaggctctgaggacgtggaaacagccccagcttcccgctcccagcctgggctgaggcctacagcaggctgcacctcaggggatctttcaaaattcaaaaagacgaggatgagggagcaaatacagacaagggtctgagcgggatgaccacaggaagcgggcagtgcacactgaatggcttcctgacccctgaaaggaggtttgagccacacttagaagttgagggagcggagcgggcctggggggagggggccctggggagcagctgaagggccaacatgtttccaaggagctggcccccaggaggccactggcacgctcagaagaggagcccaagctgccgggactgggcttgaatgccagcatgaccgtccctggtgtccccagggctgggtctgacccagcagctctactcctgcctgtgcaataaaacatgtcagggctggggaccccacaagcggacaggggatcttgagagcccagggccacagaaatgacatgaacaaagagaagctcttaacctctatctcctatcggtgaagcaaaagtatctgagacaggtctcaaacaacttaatcttttttttttttgagatcgagtttcgctcttgttgcccaggctggagtacaatgatgcaatctcacctcactgcaacctctgcctcccgggttcaagcgattcacctgcctcagcctcctgagtggctgggactacaggcacccaacaccacatcttgctaatttttgtattttcagtagagatggggtttcaccacgtagaccaggctggtctcaaactcctgatgtcaggtgatccacccacctcggcctcc

SEQ ID NO: 38281 - DNA, 1490 bp, Artificial sequence
  DNA replication origin
ggcctggggctggggggggcgcagaccgcttgggtgggggggacgcgggcctgcggcggggtgggggctgcgtcgggcccggcagggagggtgtgggccccccgcaccccgagctgcgcccgccccagggcgcccgtgctcacacgtcctcccggcagagagctgcgtgaccgagcccgagtgccgcgagggctttcaccgccgcgcccgcgccagcgaccggagcaacgccacgcagctggacgggccggccggggccttgctgctgcggctggtgcagctggccggggcgcccgagcccttcgagcccgcccagcccgacgcctactgagccccgcgctcgccccaccggcgcgctcttcgcgcccgcccctgcagcacggacaataaacctccgccaatgcacggcctcgcgtctgtctcagtctctggcgggaagagggaaagggagagaggtgggagcgcggacccccgccaccacgcccaccggccagtccccggacctgaggtcgtgggcagatccaccccagagaagcaacaggtcccgtagaggaagcgatctgggacccgcagaggtgtcgctagaccgagggacagggcgaattgggaggcaggggagggggagaccagaggccgagagtggccttggagggggtgggttgaggatcctccggcagagggaaagaagtaaaggcagagagggaaaggcctggaggacaagacagcaagagacccagagacagagacagcagaatgttggagagagatgcagagacattgacagtgacggagagaagagtgagagaggcagaggggacaggccgaggggtgaccattctgtccccattttcatcccaggagactgaaacacaaaccgctcagggacccaccctggtcccgggattcccagtgcaatgtctgattcacccaaggcagtgctcgtgtgtagtggcggtggggacatcactgtctgtccagtgcacccaccattagggcccctcagccagagtgggggacccctaacagatacagccccacacaaccccaagcacgcttggacagaaacagacaagaaaataactgctaagaacgtgtccgcaacccttgaccacaaccacagagaccctgagccccacattcagagccacagacacccagagaaacacagacacagccgacacgaggatgggcaggagcatgtatgtacaggctcacacaagcaggagtgcactcacattagctcccagacatgaagaccttccgccctttgacatgagcccctttggcgaaaagacgtccagcagtgctcggcctcttcctctgcatcccttgggttctctcacccccttcttgaacctgaggcctttctggtcccatctgcccctttctctcctttgtctctcactctgctctcgcctccctgttctgccagctcctgggccccctcttgcctctctccttggcccctccacccctccccttctgtcccc

SEQ ID NO: 38282 - DNA, 2799 bp, Artificial sequence
  DNA replication origin
tctctgccgggaggacgtgtgagcacgggcgccctggggcgggcgcagctcggggtgcggggggcccacaccctccctgccgggcccgacgcagcccccaccccgccgcaggcccgcgtcccccccacccaagcggtctgcgccccccccagccccaggcccgcccccgccgcgcaccgtcgttgcagcaaacgccgaaggcggcgcagcggcccccgctcccgcacgccttctggccggactggcagggcgacggcaggtagttctcctcctggcagcgcagcgcctcagccgtgcccacgaagcagcccagctcgtccgcgcagcagatgctgggcccgaagcagcggcctttgcccccggggccgcaggggaggcactgcggggacgggcggggtgagcgggaggaggggagccgggagtcgaggggttggaggggaacgcagcgaggcggggatgctggggtccagggctcggagtgcgggcgggacaccggggctgcggctgcaggcacgctcgggcgccactgggcctcgaccgcggtcacgggcggggcgtccagatctgctcggcaccttggtttcttggatgacctctcggtgacagccctcagcgtcctcaccctcagctagggacgggtctcccgtggactacagcgtggggaacccttcctcgagcctcggggtcatcgctggtgggcgccactgttgcagctgccccaccctccaccactccagacccttcctccttcctcctcgccctgctgcggcttgagcccgggcccacccccttccccactacaccatgcggagaggccctacccatccagaaccccggcccttcccatttcctgtctcctctcttgccttgcccctggcccccgccaagcttgtcggcctcagctggagccctgacccctgctcagccacctatgacctatcaggtgggtggcaggggcctgagacctagaggcgagcacggacacccaggtgcctcaggaccctaaaggagcctagcaggaggaagagaggctgcgggggttgccgagcggccactctcatctgctcaacagccggttctctggcgcaatggatagcgcattagacttttagctgagcctggtgtggtctaatttgctcaagggctcatcattgagcctggacagaattgcatgcacatcgtgattggatttccttcagctctgctggaaatggaggaaacgtccagcactatagaattaggccaggttcccagcagaacttccccacaggatgccccactcaagcgcgctcagaccagtggccatcttctgtgtgggggcctgggcgcctgtggctgggaggctggggctggatgaggaaagcctccaatgctaggtaggatggagcctctgctgccccagccagtccagatgcaagaacgccatgggcacaggggaggccatgatgccccgttctccctatccagccccaagcccagtcaccggggaagcatccctcatttccctgcatccctgtctggatggcgacagtgaccaggagcgccttcagcctctcccagcctcctccaaagcctggtcccctctggcccaccccattggctcctctgcccagccatgccatgcctccctcttcctcccccgaacttcccctaaaggctaccaccacccatgacttccctctttcctagcccctgacccagggtgtcagcactgcccgctatggcagccctgagatggcccacagtgggaagtacctgtctcagctccaggtcggacatggccctcttgccgcccctcgggcagttctggaagtagcacgcggaggagaaggccagtaggccgaggaagcaggcgggcagcatggtgtcaggcatcctggtgcacacaggtggaccccgtatgcagcactgcttggtggctctgtgctgctgcctctgctggctgcctatttatgtccgcaggtgttcccgtggaggcgagacgcggccgccaccccctccccagtggctccccaggagcccacggccgccaggtccccagccgtcagcagtgattcaggcatctggggacacacgtgggcctgtctgtgcaggggatcataggggaggggtacgggccgccaggctgtcatgggccgcggaatgacagcaattgcctctactgtgactgcagcgctctggattcagggagagggacagactggggggtcacctggagaccatctctgagctttctgattacccagaaatggcgtagggtccaagaagagggtaagaggaaccgaggggctgcgtgttaggggcagggacaggccctggcctaggagctgtggggcaggggacagccaggtgtgtggggagggttagccctgtgacaacaagataagggaccaagaacagcacaagcccagagtggtgaggacaggggctgcaccagagatgagaatccctgcctcgtggacaaggcagccgccgtcgtggagtcaagggacacagaatgagaggggcttgttctcacagggtaggggggtggcaggttgctggggaaagtgcaagacatgacacccccgcacccccatagagcagggcatggggactcaggccctgaaactgggggccttggggacacattggcacatgacccgtcaccccctcccaggtagaaacatgagtgtggagagctactatggggagaaagaactccatgccaagtaaggttcaaaggcggggggagccccaggaaacctgacaacagtttgtcccaattcctacccccaccaggaccttagtatgtggcaa

SEQ ID NO: 38283 - DNA, 1412 bp, Artificial sequence
  DNA replication origin
cacccgcgggtgctgagatgaagagtgaagtcaccaggagagacaggaaacagcgcgggcctcggggacccgagggcgcggaagctcgggggccggggtcgagcacagattgggaggcgcagcgctgggcgcacgtccccgtcggcccggcggcccctaatgaggcgcgctgtgcgcagactgctaagagcagcatgagcacggctccggcggcccccagggccccgcgggtcggcgccaccccggagcgcggtgcccggaatcacttagcgccatcagccgggcggctgggagggggaagcggccgatccgggcggctgggagggggaagcggccgatccaggcggcagcggagggggctgcagcggaggcggccccggcttgcacgctcgcccttccgcctgcccggcagggccccgtctgagccccaggccccaggcccagcggcgccgctcgccggtgaaggaaaccagcgcagagaggccgcgctgccaggcgcgtggtggtccgggggtccacgtgtgagcctcgccctaggctgccaattgagagttccacctccgcccagagagaccccacctcacccctccaacctggggcgcgcgggccggcggaggggtcctggggcgagtgggcaggataggccgccgcgcggggtgggcttctacggggtgtactcgttgcctgtggctggggactgaaattccccggaaaaggagacggggaggacacacctggagggataaacagcttgtgcagggatgtgaaagagagaacccagctgtgtgtgcgtgtgcgcgcgtgtgtgtggtagggacgtcatacaggacgcgtggcctacgaacgtgctaaaccactggcaataaaaacacagagtgtggggccgggagcggtggctcacgcctgtgatcccagcactttgggaggccaaggcgggtggatcacctgagatcaggagttcaagaccagcctggccaacatggtgaaaccccatctctactaaaaatacaaaaattagccggccgttgtggcaggcgcctgtaatcccagctagtcgggaggttgaggcaggagaatcgcttgagccagggaggcggctgttgcagtgagccgagattgcgccactgcactccagcctgggcaacaagagtgaaactctgtctcaaaaaaaaaaaaaaaaaaaaaaggagtgtgtgccagcatcactgttttaagccttttacgtatattttcctccttgaatcacataaaccctgtgaaggaggaagtatttttatctctatttgcagacaggaaactgaggggcagagaggttgaataacttgcccaagttattcaacgaacaagtgataaacagcagacctgggattcaaactcaggctccagggtctgtgcccttcaccacgctactg

SEQ ID NO: 38284 - DNA, 1241 bp, Artificial sequence
  DNA replication origin
catcgtctgggaggtgaggagcacctctgcccggccgcccatcgtctgggaggtgaggagcgcctctgcccggccgcccatcgtctgggaggtgaggagtgcctctgcccggccaccccgtctgagaagtgaggagcgcctctgcccggcagccgccccgtctgggaagtgaggagtgcctctgcctggccgcccatcatctgggaggtgaggagcgcctctgcccggccaccccgtctgggaggtgaggagcgcctctgcccagccgccaccccgtctgggaagtgaggagcgcctctgcccggctgccccgtttgggatgtgaggagcgcctctgcctggccgccaccccgtctgggaagtgaggagcgcctctgcccagccgccccgtctgggaagtgaggagtgcctctgcctggccgctgtgcaatcttccaagtgtgaagtgacagcctttctgcaggtgtacccaatagctccgaagagacagcgaacatcaagaacgggccatgatgacaatggcggttttgtcgaaaagaaaagggaaatgtggggaaaagaaagagagatcagattgttactgtgtctgtgtagaaagtagacataggagactccattttgttctgtactaagaaaaattcttctgccttgggatgctgttaatctataaccttacccccaaccccgtgctctctgaatcatgtgctgtgtcaactcagggttaaatggattaagggcggtgcaagatgtgctttgtcaaacagatgcttgaaggcagcatgctcgttaagagtcatcaccactccctaatctcaagtacccagggacacaaacactgcggaaggccgcagggacctctgcctaggaaaaccaaagacctttgttcacgtgtttatctgctgaccttctctccactattatcctatgaccctgccacatccccctctccgagaaacacccaagaatgatcaataaatactaaaaaaaaaaaaagaaaagaaaaagaaaaaaaaaagaaaggaaggacagaaggaagtaagttgggcagggacagaaagaaagaaaaagacagagaaagagagggagggagggagtgaaggaggaagggagggagggagagaagacagagaaggagggaagagagagagggagggagggaagaaaggaaggaaaagaaagaaagaaaatattagggttggaaagcaccttaaaatgacatctaggcctggcacggtggctca

SEQ ID NO: 38285 - DNA, 1605 bp, Artificial sequence
  DNA replication origin
agctcattaaacagtcaccagtcatgggaggaggctggtcaggggctaggggacttgctcacagtagttgccagctctctccaccttgccccccaaaactcagtcttgggggtgggaggaagagagtgaaaaagagagagatataagggctgagggccaagcctcctccaatttttattgctggtgaattagaaatttgcttttcccttcctgtcttggggagatagactctgagagggccccaagagaagcagctgacattggctgacctaacccctcatgccaggcctaccctgggcaggtgctgagccacctcagggcgccaggaacctctcaggtcagccttgttcttcaagggcaatcacatccaactctccccccgcccccaaaacaagggcctccggctcagacttgggccagtggagctgggaagtgggcagtgcaccaaaggtcaagcggaattttctattggaagaaaaggtgagactttggggaagagactgcctaggaagatgatgtgctgagcatgaaagcagaaagaggctgggggaatagagtgcgggaagacatcgcagacactcgtctgacctcagaaactgggcgaggagagtgcctgagaggcaggtagcacttaatagctgtgttagagccggacagtggtcctgggtgtggggtcagccaagcagatggggctgttgccctgcgggatcctggccagaagggtgagggtagagccgagaagccgtcaggcaacgcttcccaagaacaggaggacagatcttccctgggtgctggacttccagccccagtcctcccctcccgcaacacacacacagggacacacactcacaaccaggccaggctctgaggcctgagtccaagagatcttgttgggggaggggctgggcaggtagccctctcagccaaaggcaggccatctgctcccacttgtcctgccaatctgcccagggagggagagcactgtaggagggagagaggtctggagcccaggctctgtcagtttcagcaaacctggtgcaggccccctcaggctccatggcctaggaggtgagcacagagagcatcactagacacagggtggccaacagtagcagcccaggcctccagaaggactggggcaccttatggcactgcacgtctgctgcctccatctccaacaagggggtgccgagaaagggagcatgactcccccaccacctaggattgcccccactcaccctgccctcctcctattccctccttttaggggggtccaagtgggctgccacgggggcagtgctggagctaggagggcaggtggggagggaggaacctggtcacagctgcttagagaacctctttggtctggggttatggggtctatggggaagagagatggaggggaggggacactggggactctggccttttgacaggacatgtgtcaaaatgccgagtgcccaggtcgatcagatttctgtggactcaatgcgctcgaggcgggagggggtccaggccttcttctcctcgccatgctggggagtgggcgtgcttgcaccccctgcggccccgcgctcccgcagcctgcgctccagctgctggttg

SEQ ID NO: 38286 - DNA, 1114 bp, Artificial sequence
  DNA replication origin
ctgcccacctacagctccagctacagccagcacctggcacccctcagtgcctccaccagccacattaaccgcattggcactgccagctatggtagtggtagtggcggcagcagcggtggggggtcgggctaccaggacctggggacctccgatagtggacgggcctccagcaagagtgggtcgtcgtcatctatggggcggccaggccacctgggctctggggagggcggaggtggaggcctgcctttcgcggcctgctcaccgccctcccccagtgcactcatccaggagctggaggagcggctgtgggagaaggagcaggaggtggcagctctgcggcgcagcctggagcagagcgaggcggctgtggcccaggtactggaggagcggcagaaggcgtgggagcgggagctggccgagctgcggcagggctgcagcgggaagctacagcaggtggcccgacgtgcccagcgcgcccagcagggcctacagctgcaggtgttgcggctgcagcaggacaagaagcagctgcaggaggaggcggcccggctgatgcggcagcgggaagagctggaggacaaggtggccgcctgccagaaggagcaggccgacttcctgccccggatagaggaaactaagtgggaggtgcgggctggggatctgggcctcccctctgcctcccttctgtccctctgggaaaccccagagcagttgcccctcactatcataacggtgggatggggggggggatgaaaggagcaggggggacaaaaatcaattgggagtgtctgtgaggacccgaggccatccgctgggtgagacatgtccatcttgagtccaggcagggaatcgggtgcgtcgctgctgatgaggggctgagcctgcagccccgggaagcttggtgcccctggctccagatctggtagctgggttggggtgagcagagctctgcctttacctggcttctcctctcacctgttcctgcccaggtgtgccagaaggctggcgagatctccctcctgaagcagcagctgaaggactcgcaggcggatgtgtcgcagaagttgagtgagatcgtgggactgcgctcgcagctgcgggagggccgggcttc

SEQ ID NO: 38287 - DNA, 1518 bp, Artificial sequence
  DNA replication origin
gagctgagctgagctgagcaacgctgggggctatgtgcatggagccctgggggttgggctttatcaggtgggcaacaggcagcccccattcccaagttctctcttttatcccagccttattccttcaccttggatgcctgggaactttttgtacccattgtagggaaggggacactgaggggcagagcggtgccgggttgacttggctggggtggtgggaataggagtagggtcttacctatctctgccttcccacctgtgcccacagtgcccccctggcttagtcatggcgaagctggagacgctgcctgtgcgcgctgacccagggcgggatcctctcctggcctttgccccacggccctccgagcttggacccccggacccccgcctggccatgggcagcgtgggcagtggggtggcccatgcccaggagtttgccatgaagagcgtgggtacccgcacagggggtgggggcagccagggcagtttccctggcccccgaggcagtggcagtggggccagcagggagaggccgggccgctacccctcagaggacaagggtctcgccaactccctctacctcaatggtgagctgcggggcagtgaccacaccgatgtctgtggcaacgtggttggcagcagcggaggcagcagcagcagtggtggcagtgacaaagccccaccgcagtatcgtgagcccagccacccacccaagctcctggccacctctggcaagctagaccaggtcagtccgcagggcctgagaccctcacagcctttttctgggggtgggaggcaacccagagaggaaggcaaagtgggccttcttggaggttgggttgtgggggcaggatggaggctgggctggggagtcatggactggggacctggggccaagtctagcgggtagatcaaggacagagatctggtatcagggagccatgaggtagaaccccggatggggaacctcagggtggaaatccagtaggggtgggaggtggggctggacaagtcttggccagagggaagagcctgggccaagcccaaggcctcatcctgacccccagccccctcctgcgtttcctgcagtgctcagaaccactagttcggccgtcggccttcaagcctgtcgtacccaagaatttccactccatgcagaatttgtgccccccgcagaccaatgggactcctgagggacggcagggccctggtggcctcaaaggcggactggacaagtctcggaccatgactccagcgggtgggagtgggagtggcctctcagactcaggccggaactccctcacaagcctgcccacctacagctccagctacagccagcacctggcacccctcagtgcctccaccagccacattaaccgcattggcactgccagctatggtagtggtagtggcggcagcagcggtggggggtcgggctaccaggacctggggacctccgatagtggacgggcctccagcaagagtgggtcgtcgtcatctatggggcggccaggccac

SEQ ID NO: 38288 - DNA, 1160 bp, Artificial sequence
  DNA replication origin
ccactgcgtcccctgccccggcctcagccagccctgggacctctgcggaggactgatcccgggaagggggccctgtcttcccagggccccggtgcggccgagctgggaagaccttggggagggcaggcctgccacctactgcagccgcggcccccgtccatccgggagggacaggctgtgcccttggcggcgcccacccgcgacccagatgtgcgtcgcctacccaccctcccccagacccccgtttcctcaggcgctcgccgcctcggggcgcctggcacgcggcagccccgcaaggtaggtccttcattcctcccatttcgcagaggagaaaactgcagtccgggatggctcagtcggcccctccaaagtcgcgcagctggttcgggccgagccccgactgcgagagtgaggcacatggcccctgcagaccgggcctcggagggtcccaggcttgaggacccgtcggcccctcaaccccttggaaaggcaaggagagaagcctgcgctggtagtgagcttccacttctgccctgactgcaacacttaggttagggggctgggaaggacccccaccctcaatttttggataggggtgtatttctctccctcccctaatttctgaggttggttccctgttggattcaggtactgctctccccttccaaccccatttccccagcccatgaggttgggatattagggtcccagacccaagataaagaaccccaaaattctggggttgcagcaaagagttgagagggtcactgagcctgggaagctcatggcggaggtggggctaaggcagaagtttaggaatggaacgctgagctgagctgagctgagctgagctgagcaacgctgggggctatgtgcatggagccctgggggttgggctttatcaggtgggcaacaggcagcccccattcccaagttctctcttttatcccagccttattccttcaccttggatgcctgggaactttttgtacccattgtagggaaggggacactgaggggcagagcggtgccgggttgacttggctggggtggtgggaataggagtagggtcttacctatctctgccttcccacctgtgcccacagtgcccccctggcttagtcatggcgaagctggagacgctgcctgtgcgcgctgac

SEQ ID NO: 38289 - DNA, 1792 bp, Artificial sequence
  DNA replication origin
gagaccagctcctaaatccgcagcacactctccaaccccagtgttacctggccctgttatttttaacactggaaactgtccccacattcttgaatccccccaatcttggccttcagggcccaccttctcctggccttcttcctgctcccagagtgccttccagacttctggggctttgctccctggctcagtgctggcctacacccccagcacccttgaaaactgatgatctcaatctctctccatctagtgctttttttttttttttttttttttttaaggaaagagtctcgctctgtcacccaggctggagtgcagtggtgcaattacagctcactgcaacctctgcctcctgggttcaagggggttctcgtgcctcagcctcccaagtagctgggattacaggaatgcataccgcacccagctaatttttgtatttttagtagagatggggttccaccaatttggccaggatggtcttgaactcttggcctcaagtaatctgcccaccttgacctcccaaagtgctgggattacaggcatgagccaccttgcttggcctccatttagtgcttgagaggtatcttcctctggtgtttcccaaagcaactattttccccaagcagtctccccctatcatgttaacagtgtcacacgcacgctggtgcccagtccagcattatcccttgtccccaccacctgacctcatctgtatgaaattttgccagttctttcccaaaccctgcccaggccttcctactggttccaagcctcaggcctttcaggcttcatcctcccagtccccagctgctccccacattgcacccagaggtggcaagagaagggtccatacttaaggtaggagggggttgcagggctgaggcatagggggctggagtatgctggggagtagaggcagagcagggactagagtgaggccagagagggacccaaggcacaaagggaaggaggctgtcaccctcagggctgtgtacttgctgtttgtgcccttcatttgtgccctacgtggctctctgtcctcatcctagtcctggcccttgcttatggggacagacgggtccaagggaggagggtggcgaagtgctcttctccacacctgtggggacagatgctgagaatggaattctacagagacagtggacaggcttggtagtgaactttccaacaacctagagctctcattcctggtgtgggggccagaagactcccgaaggacaacagttttgtcaggtgcccttggtctgggccagggactcagcattagaactgggcatctgggtagaagacggtctgtggggccatagggtgccacgtgggccccttaacttgatagggaaggagggctccctgcctggtttatgcagggtgtagtgggaaaaggcctgaagggcgccctctcccatttcccacacacttatttgagggtctaacccgaggcagacactgcctggtgctcctgcccggctgcattatgcagatctctggggcaggtgttcccaggtgcgaacttgagacaaaggaacgaggaagcacggcctccctgagcacaggtaacccgaggcctggctccccctgcgcttgtgggccggccttgggggagggggacgcgcacccacagaaggactcagagggcttcacggtaagctgagcagggtcaaggtccacagggagcgggagagggtagtaatccgggaagtcttcctggtggcagtgaattctttgcggggttcggcaggcgcaggatccttggggccgcgcaccctgcagcggc

SEQ ID NO: 38290 - DNA, 2209 bp, Artificial sequence
  DNA replication origin
gggagccccttcccccaagcaagaggggctcctcctcctcttcctagacgtgggattcagggagggcgcggttccattggatttgttgcagaggaacgactgggcctgagcccaagcccaagggcctggggggtaacgagcgatgagcagaggggctcgcggcggacttgctgcgccctagagagggtgaggctgaggggtcccacgcgcgggcggggcgcagcgacgaaggggttaaggcgcctcaccccgccccagcccgggcattggctgccctggggggcgtggccggagggcgggctcgcgtttgccgcagccgctggtgggcggggctcgggcggggagcaggaggggcgcggagcggagccgggcccgcgcagcgcgccccgccgggcgtgcttcgggctgcgccagcaagcggggccggtggcgcccgtgtcggagaccccgcgccggaccctgaggcagcgagtaagtgaggcaggcccatcgtggcatccctcccggctccgacctgccgccgtgcctgctgcactgcgcggcatgtctgacctgacccggactgggtagggggcgcgtcccgctgctagggtcccaagggggaggggagcggagaggaggcggatgatgtcatggatgcttcgcccggcctggggggaggtggcggccagagggggtgcggctcggattatgtcacctcttccctctgcgccccgccccccggggccacacgcgttggtggggagcctggggaggtgcgggcggggtttcccccatcgcagggactcccaggtcctgtggcctgtggctggggtctctatcagttggctctgcgggccgtgggctgctggtgaatggcgaccccccctcccacccccagcagaagctcgtgtgtgcgcgcgtgtgtgtgctcggggtggagggggcgctctcggccccctcagtcctgaaacactggcttcatcagagccagtagctaggtgatgggcccattccgctgccagtgcttaggccaccgagggaagacggatctcccctcactcatcccaaccaagaagttctggatatctctgcaccccaaaagccctgcagtgcccccagatccctttcctccctcagtcctgcttcctggaaacccctcctgctctccctgcccggattcactgcctctttgcattgcccataactagcattcccacaggcatttgccctgcatttccttggtgcagggcccagagacccccaggactctgccctctgtgctcctgggaaacctataggccagccctggggaggcctcagagtgaaatctccctggggtgtcctcagccaagtgctccaagatgccccctctggggggtggagatcagggatgctgtcctgaggccagcctttgaactggtctagaagcatgtaggatgggcacagagagctggcaagagcttgtgtgtgaagtagagaggggctcaggtcagggtagatagaggaggggcatcaggagagtccttggggaccctgctgcaagctctgctctggttctggggaccaagaggaataccaggcatttcacccatcatacatttacttcttaaaatgcctgcaatgtaggtgtgagaacccgaggtgaaataacctgcatgaggttgcacccctaatcagtcaagctgggatttacacttggagctgatgctgccagaactctgtctactgcacttggtcttgctcatggaaggatttggacagagcaggggcaagatcagctttgccctttagaaggaatcccctggcagctgcctgggggagggagtgcaggagaagaaagtccattgaggagcccccagcaggggtgctggatggaggggctggctagagatttttaggagatagaatgggctggggttggggcctctgagaccccaagtgttcctagctttgggagagacacaggttgaggggtgggttggaggtacctgtacatgtaactgtcaggtagagtccgtttggccccctcatgacgctaatactgtgtataatgccccaggcactgagggctgaggtgacagagatcgaggcagtcaggcaacaggctgtcatctcagggtggtgcactgatgccaggaggctgcctttgcagaccatgctcagttacctggactagttcaggaccgtgacctttcctctcagttcagttcctgcttaccagggaaac

SEQ ID NO: 38291 - DNA, 977 bp, Artificial sequence
  DNA replication origin
actgcaagctctgcctcccaggttcacgccattctcctgcctcagcctcccgagtagctgggactacaggcgcccaccaccacgcccggctaattttttttttgtatttttagtggagacagggtttcaccgtgttagccaggatggtctcgatctcctgacctcgtgatccgcccgccttggcctcccaaagtgctgggattacaggcgtgagccaccacgcccggctagctttccatttaaaaatttttctgagtgctctggaaaatgtgttgggttgagggaggctgttttaccaggcagtagtggtgatggagcaacatagacagaccagggagttttctggaagttagagaaagaaggggtcaataggacctcatttctgaccagttggctgtgttaattcacagagccagggacctaggaggaggtctaaacgtagaagagtaggtcccagggtctgtctgctgcctgtgagatggcccagtagctgtgtcacatggaccgttgtgtgtttgggagaagagattcgggtggggctacaagtgtggtagtcactggcaaggaaggggttgatgctttgggcatgggcgaggtggcccagagaatgtggaggagagagaagaggcagggctgaatgatgaaggaggcgggaagaatggcccaaggagcaggaggaaatccaggagagggtgggatctggaagccaagggaggaaagaaggatcactgagaggacagacatatgagacctgaaggttgtaccttgagtttggtgagtggagggcatgggtgagactgtggcaggagttgtttcatagaactgggaacacagaagccagactggagtgggctgactgggtgagtgggtggtgaggaaatgcagggttcacatttgcttatgaggtgtggacatgacggggtatgcttggtgagttacacaaggagaggatggggcaggtgattggagggtattgt

SEQ ID NO: 38292 - DNA, 1502 bp, Artificial sequence
  DNA replication origin
acaggtggtgttaggcgagaaatcagtggattcctgcagggggtactcgatgagagctggggacatcaggataggggcctcctgacaggccagctggaaaggtggagccgggaggggagaggagtattcacacaggcccgagggaagggctgagcccccgcctgggaccaagctgtgggcctggtggaaaaggccttgccagtcagactgagaagtcggggccttgtgctgtgggcagcaggccgctaagcagaggaggtgaggcttccgggctgccgctcctcctgccatgggccgggctgggcttataggcagcattgtcatttctgtcttccctacagccggccaagagccactgcacaatgaggagctggcaggagcaggccgggtggcccagcctgggcccctggagcctgaggagccgagagctggaggcaggcctcggcgccggagggacctgggcagccgcctacaggcccagcgtcgagcccagcgggtggcctgggcagaagcagatgagaacgaggaggaagctgtcatcctaggtgagaggggcccagcctggtggggagagggtttgggttggagggggggataaaagggcccccaaagctaagtgggggagtagggtatgaagcctcagggtaggagggacgtctgggagccacacggtagagtagggggggacttgggacctggcatttgttccactgggtcaaccccccctaccttcatcttggctctcagtgtccaagcagagggcaagggtcttcagtttgattcagaatgttcctcaattcaccccttctatcctcgcacccttcctgttatgggcacacttattccctgaggatttcaccctagaggcagagtgcctggccaagagtttctgcagttcctggagtggggtcacccacaaccccaggaaaacagtttaaagatagagacattctgttgacacagaggcctccatatccctgcttccaggagaccaggagagccctcaggattgtcttctccagtacttggcagctggcttgagcctgaggagggggcgtctgggcgtttctcagaaactgggggcatttgaggcttttgccttgtacctttggggattatccctttagctcaagaagaggccctttctttgccgtaccttctggctcagacttgggttcagagacccttgctgcacaggcatcagtgggtctttaacttgcagctggccctgaggtagtcatagtgttgggactgtcatttcagccagggtttgatgggcaaagggataatcctggccagggactaagcccagaatcctcagcaactcctgacgattgtgaggaggatttcagatttgaggcgggataaatttcctcatgggacttcccttgcctgggggtttggcaccagagacagaagccagagaactctggagttcattagccaggatatttaaggtacattaggtgagaccagcattcagaaaggtaaaaaaccctctc

SEQ ID NO: 38293 - DNA, 760 bp, Artificial sequence
  DNA replication origin
aaacgggtgagaagtttgggcttgttttaggctatgccgagtttaagttcacagtcgagtggatcatagctggcgggtaaggctgaaggtgagatcaggatgagggtttggaagcccttgcctagaaggaggcagttttttgagacagcataggagagcgcaaacctccagggtcacagggctgcagtcttctcctttcggagaccccattgcagagaagagcgaaagcaggggcggggtgggggtgggagtggtctcttccggttcttgaagatagcgtcccttaggcaggaggggtgggtcactcagtctccaggctcgggaggcccccagcaaatcggacgctgtgggctaggccgccaccgcgagcccactcgcccgatacgcgccttggggtccgggtcggctttccccgggacccctggccggaaactgagccgttcacttccgccaccagccggaagttttctgtcactggacgccaaggagttttcggtggctcagctgggtaaccggggatcaccatggcggcctcattggtggggaagaagatcgtgtttgtaacggggaacgccaagaagctggaggaggtgccgggagggtgttgggggctaactgggaggcggctgggaatagggcggagaaggggcttccgggaggagggaagcacgtgggaggaggcatggagagagaacagaattcagcccggaagaatgggtcctgacccggctgtgtggaaaagctggggcgcaagaaggga

SEQ ID NO: 38294 - DNA, 1140 bp, Artificial sequence
  DNA replication origin
tgggcattgtaggggtgcagtggtatgtgcccacccctctcccattatcctttagctttaggccaagagcgttgctcagggcagcttctgcccagggtgggtgggactgagcaggatggattttcttttgataaaagagtcgatgcctgaaagagaaaccatttccttgattgtgtaaggaacttgctggacgcacattagagaataaagctcctgtttctaggctcctatgtgccacctgtgtccctgctactgccactccacccccactctggggaggggaagccctccctggggaagtggaatgcaagggacagagtttgtggagtgccacctgtggtctgtcacctccaacgtcgcacagtgggtgctggcccaacagtgaaacatggaagatccaggaggccttcgcatggccatttctccagggacctgcagggaaagcgttctgggaacagcatgtgcaagggtccagaggagcgagggcttggggccactgaggcgctgtggctggtgaagagcagtggggcgggagggaccatcagggtgacagcaaagggccctgtgactctcagatgaaagctgcctgccgggaggccgaggcttcgtgtggagcacttgtgaaccatcccatctgttgtgcggatcctggattttacagggcaggggcagcactggtggcgatggagggaggtgggaggactgccgacggcaggacacggggtgggaatggtttgacggagggagaaggtgcagtgtttctggcttgctcatttgttggtgggtcagggtctcccaatggcagccgacaacagggaatatggctctgaggctcaggggagtgccgggtgcgcagcatcagtggtcagcaggaacacctggggctcacatcacctcctggactggcttgacacatgccccatggactaagttggccgacagaagagattggctgcatctaaaactgaaaatatatctgaaatatgcaaagaattcctgcaaaccagcaaaggacagcagccccaacagaagaggcagaggccgtgaacaggggaagaaggaggcccaaccgtaacaggagtagcgagaggtgctcagaccccttggtaattagagaaacgtaagcccacatgagacgcc

SEQ ID NO: 38295 - DNA, 1011 bp, Artificial sequence
  DNA replication origin
tgggtggggacacagccccatgcctgcccacacccggtccctgccgcccacagactgcgtaccccccgacacactacatccggagggtgccccagaggaagatccactacttcacgggcctgcaggtgcttcagctgctgctgctgtgtgccttcggcatgagctccctgccctacatgaagatgatctttcccctcatcatgatcgccatgatccccatccggtacaggcgggtgggcagtgggcaggaggggcccagtctaggtgtggagaatgggcgggctggggcagcggctgggaggaggggtcccacctaggggcggagaatgggcgggttggggtgggtgcccaggaggaggggtcctgcctaggggtggagagtgggcgggctggggaggctggcgggcaggaggagcccagcctagaggtggagagtgggcgggctggggtgggtggtgggcaggaggggctccagtctaggagtggagagtgggtgggctgggggtaggcgggcggggaggagaggcctagcctggccctgtgggtgggctggggtgggctgggatgggtgtccactgccttctctctgacccaggctcatcctcctgtccctccctccccacagctatatcctgctgccccgaatcattgaagccaagtacttggatgtcatggacgctgagcacaggccttgactggcagaccctgcccacgccccattcgccagccctccacgtcctcccaggctggctctggagctgtgaggggaggtgtaggtgtgtgggtgactgctctgtgctgcgccttctcatggctgactcaggcctggggcatctgggcattgtaggggtgcagtggtatgtgcccacccctctcccattatcctttagctttaggccaagagcgttgctcagggcagcttctgcccagggtgggtgggactgagcaggatggattttcttttgataaaagagtcgatgcctgaaagagaaaccatttccttgattgtgt

SEQ ID NO: 38296 - DNA, 2042 bp, Artificial sequence
  DNA replication origin
cttgctctgacacgggagggccagccctgggtccccgccaggacccaggtttgtacgaccctttacctgcacgtgggccgccgggacggaagcggagtgtgcaccggcccaaccctcccagaccctcgtcgcccacggcctgggacgcgccccagcgcccccgccccccacttcaggatgcagccccggctcccgccccgcgcctgcattcacatcctgcgccccgacccccggggtctccgagtctggaggcgctttcctctcgtgcacgcggcccctcctgtcgcttccttcctccgacagcgaggcacaaacagccgggaccatccggggaccggcccagggagggcgcagcctcccccgacccatgtgtccctcagatactcctcccacccccaattgttctcccttttggaccaacggctctggcttccaggcggccgggacgcggtcccaggactggagaccgttgcctgtcggcccccgtgtgacccggggcgcgtgacgggggtcgggggaactgcgcctgcaatgggcgtttatggcccccaggaccggtctgagagtgagaagagggatgtgcagagagatcccccgccttggcatccgaggagagagggggagaggcccgctcgggcccggtcccttcctctcgctgcagcggggcagggttttctcaggaaaacctggattagcgaacatggtactggtactaactcggtgggaagacatccctggaacgtctctcctcctcgcctctggcccgcctgggcagcccctagcagatgggctaagcaattgaatttctgagattaaggctggcttcccctgctatggggccccctcccgagcactgtcccctgcttccctttctccctagggtggcgtgggttgcatccctcggaagagcgaaggaatgagccaggtcggggggcggggagacaggtgcacacaggaggtccagggcttggtccatggggctggtgacctttctgcttcccttgcagaaaactctcccaccatgtcgcagaatggatacttcgaggattcaagtgagtacctctcggggagtgtgtgtgtgcagagagagcttgtcgggcaaaagcctccagggtgcatagcctacccaccagagtcctgtggctttgctcgcctatctgggccactctagtgctggaatgcttttggcttccactcttcgggaagctagacatgggcggatcccccgtggacctgagagggcaggctgcccattctcctgggctacttggaccaggtgaaccctctgggattcttacccaaggttttctgtgacaatggcctgttatctgactagccttgggccaagaattctgtgtgcccctgtccctctgtcctcacccagccctggagggaatatctgtcgttgtctctttaaagaaatataaggcctctgtgctgcagtccctcgggcaccttcctgctgtccctgcttgtaccagtccagctgtcttcctcctcatgtctctgggctggcttcaggctgtgtcctgtgcctagccccatgagtgacctgaccattcgagggttgtttgtagagcagtgcgtagacacagggctgatgttcccttacccagagccctcaggacatggggctctgtgtgctaggctgctggtgggcaggttacgtatggggctgggactaggacttggcattgcaggagccccccaggaacctggtagtgtcagctgggcaggtccttaatctaggggacctgagcactaagtctaaggtagagctgagggcatcaggggaagaatgggggaagaacggggctgtgtgaagggcagtggaggggactagtgggtgctggttgaggggcagaggggaggctgggacaagttcgggccaggggaaccagacagtttaaacaaggcaagcctgacccggggaggaaggagtttatcatgagctccagaaccaaagcagtgaggacgtcttttgttttgttttgttttgttttgttttgttttgagtctcgctctgtcgcccaggctggagt

SEQ ID NO: 38297 - DNA, 1231 bp, Artificial sequence
  DNA replication origin
tccgggggcgacatccgcctgtgtccttcagctcttcctcagcctccacccgccacccgggagtcagtgcctggactggagctctagctggagggcgtctaggaaaggtcccaaggggtgcgcaggatgacctggtgtctctccagagtcacccctgctaaaatactatgtggccagccccaagtcagttgcaggtcatggtgttgggatcttccacaaggcctcctggagtcgcgctgggggagggtggggtactcagtctgtcgcagagccccaggccatccgtcgccaagaggagcactccagcgcttccctcctaatgcgttcttatcttgccgggaggagaactgggccagccttactcacccaatctatgcatgaggcttccccaacgcgccagaagcccttccttcgcagaggtgggcttgccccggcctgtccccgttcctctaccatggttagggcacagtggccgaggactccgtcccagcgcggctgagccggaaagcgatggcggccggaggggtcgggaggttggttagcgctttacggagctgcgtgttccgtttccaagggctgtagagccttctactgggagccaccgtggatcaggccaggggttcgtcagctgcatttgccggatcgcatcgcagcacgcgcacccacacgcgcacacgccctactcgcaggagactaagcgccccgaaaaggcgcgtccccgggcgggtcgcagccggtccaggaaaggggacagggcgcaagggccatttggggaaggaaaaagggggcgaaccatgaccttgacctcatagaaggccgaggacgtgaagaggctggcagataagttggcgaggctcgcagcgaaaacccaaagcagccgagctcggagagcgccgtctcagcgggcgagggcgtagcccggggaatgcacggaggtccgtctagtcagtcggggcgcgcttcctggaggaggaggagaaggacttgcggccggagctaccgggataaatgcaggaggcggggcagccagcgggcgtggccctgcggaggtccccggtcgaaaggaggagacaggggccggccgcgtacttaaagcggacgcgggggaagccctcccggggtctgcctcagtcgcacagctcggtgggctcgtggcgcagtcgaacgttttcccagaagctccccggccccgtccagcccctaaactcgcgacgctgggtctgctgggtcc

SEQ ID NO: 38298 - DNA, 1741 bp, Artificial sequence
  DNA replication origin
aacttccacctgccgggttcaagcaactctcctgcctcagcttcccgagtagctgggactacaggcatgcgcctctatgcccagctaatttttttgtatttttagtagagagggggttttagcatgttggtttgccaggatgatctccatctctggactttgtgatctgcccacttcggcctcccaaagtgctgggattacaggcgtgagccaccgcgcccggccggggaatgttttgtttttaaaatgagcccttttttttttgagatagggtttctctctgtcaccacggctggagtgcagtgatgcagtcttggctcactgcagccttgacctccctggctcaaacaattctcccacaccagcctgctgagtggctgggaccacaggcgtatgccaccatgcctggctaagtttttgtaattttagtagagacggggtttcaccgtgttgcccaggctggtctcgaattcctgagcttgagcaatcctctcacttctgcctcccgaagtgctgggattacaggtgtgagccaccaagcccggcctaaaaatgagatgttatacatttacttcagaccccagattctacaatccacaggcaagataagtggcatcaggggaggacagcagaaaactgttaagtgcgccttgtggaacccagcggttacagtttcaagtccacagcccagtaaagtctgagaccccaagggagggaatgagagggaaagtgggtgcctgcgtctgggtccctcaacctgcctgcctatgtaaggacccagtggggcacaggacaggagatctggggcaccagtatttgccttcagcgtcagacgatctacacaggacaggaggcaggtgggaggactgaaggaaacagcctctgaaacggtcagtctggaggcagcaggcgtgtgggcctcaggggttccctccaggaaggccgagggaacagaaccgcaggggcagagcacaggtgtagcagagaagggctcagtgccagttcctttgagagacggtcagggagcggacagagggggcccatagccgactaggggcggcttggtcatgggctcctctttcctcagtgggctgaggggttaggtcctttgaggagcgctgaggagactgtggtaaggggaagcgccctccatcccagaggctttcctggaacaagtgggttggaaggaccaggtgtttgggagctgctgggagcaggtgcagaagccaaggcattcccagatgggggagactgggggtggcaaggtggcttttcagggatccagcctgcatgccacctatgcagccatgctccgggggcgacatccgcctgtgtccttcagctcttcctcagcctccacccgccacccgggagtcagtgcctggactggagctctagctggagggcgtctaggaaaggtcccaaggggtgcgcaggatgacctggtgtctctccagagtcacccctgctaaaatactatgtggccagccccaagtcagttgcaggtcatggtgttgggatcttccacaaggcctcctggagtcgcgctgggggagggtggggtactcagtctgtcgcagagccccaggccatccgtcgccaagaggagcactccagcgcttccctcctaatgcgttcttatcttgccgggaggagaactgggccagccttactcacccaatctatgcatgaggcttccccaacgcgccagaagcccttccttcgcagaggtgggcttgcc

SEQ ID NO: 38299 - DNA, 1010 bp, Artificial sequence
  DNA replication origin
aaaaagcaaacaacaacaaaaccctctcctgttttaatgacagtttagcagtaccaaagctcatcgctcgcattccccctctccctctccttctcaaaggtctctgctgcaacccctccatcattccaacctccacactgcgccggcgccccacaccagctccatcacaaacaatgcccagaccaacaagatcagcaccaaacgcatagggcacagaaatcggaaacggatcttcctatatctaaagggggcggggaacgctccccacgatcaccccctccccatactgaggtagcttgggactgtgtctctacggtaaggggcctggcgtccgccgctttcggaggttctaggcctctttcccctatttatccagtttttcctcctgcgtccctaatacctctacttcctcccaacccgagctccctattgtggagtgagggggcgtcgcgatgcaggctgaggcagggggagctggggaaacgcgcgacaggggagatgctgtcattatgtacgtagggggcgggggacactctttaaggaagccgttgtcaagggcaaaggctctagagacccacgggagggggctttctaggtaatccatttgggggttctacacgagggagctattgtgtgtgtggaggtgtgaggtctgtagagtagcagtttctgagggaaacattccctggggaaggcgagtgagttattcatagggaagcctctgtggggttctgtgtagaagaatccttcctgggagaaacgttctatgggggtgaggacgtcataacagtgtcttcacagggaatcgctgtccctagggaagccattgtggggaaaccgttgcagggttgtctgtgggggagccattgtggggaaaccgttgcggggttgtccaaaggggagccattgtggggcctctacagagggcgccgttcctgggaaaaattcctccctgagccgttcagcaaagaaccgtcccgaggaagccatgtcggaccacgccctgcggc

SEQ ID NO: 38300 - DNA, 1034 bp, Artificial sequence
  DNA replication origin
gaggtggggggtcagccccccgcccggccagccgccccggccagccaccccgtccgggaggtgaggggcgcctctgcccggccgcccctactgggaagtgaggagcccctctgcccggccagccgccccgtccgggagggaggtgggggagtcagccccccgccaggcgagacgccccgtccgggagggaggtggggggggtcagccccccgcgcggccagctgctcagtccgggagggaggtgggggggtcagccccccgcccggccagccgccccgtccgggagggaggtggggggtcagccccccgcgcggccagctgctcagtccgggagggaggtgggggggtcagccccccgcccggccagccgccccgtccgggaggtgaggggcgcctctgcccagccgcccctactgggaagtgaggaccccctctgcccggccaccaccccgtctgggaggtgtacccaacagctcattgagaacgggccatgatgacaatggcggttttgtggaatagaaaagggggaaaggtggggaaaagattgagaaatcggatggttgccgtgtctgtgtagaaagaagtagacatgggagacttttcattttgttctgtactaggaaaaattcttctgccttgggatcctgttgatctatgaccttacccccaaccccgtgctctctgaaacatgtgctgtgtccactcagggttaaatggattaagggcggtgcaagatgtgctttgttaaacagatgcttgaaggcagcatgctggttaagagtcatcaccattccctaatctcaagtacccagggacacacacactctgcctaggaaaaccagagacctttgttcacttgtttatctgctgaccttccctccgctattgtcctgtgaccctgccaaatccccctctgtgagaaacacccaagaatgatcaattaaaaaaaaaaaaaaaaagaaaccattatgatccatcatgtggactctgcagtggtatcttaactggactgtttgctttctttttgccttccc

SEQ ID NO: 38301 - DNA, 1094 bp, Artificial sequence
  DNA replication origin
gggcagagggggtcctcacttcccagtaggggcggctgggcagaggcgcccctcacctcccggacggggcggctggccgggcggggggctgacccccccacctccctcccggactgagcagctggccgcgcggggggctgaccccccacctccctcccggacggggcggctggccgggcggggggctgacccccccacctccctcccggactgagcagctggccgcgcggggggctgaccccccccacctccctcccggacggggcgtctcgcctggcggggggctgactcccccacctccctcccggacggggcggctggccgggcagaggggctcctcacttcccagtaggggcggccgggcagaggcgcccctcacctcccggacggggtggctggccggggcggctggccgggcggggggctgaccccccacctcccttccggacggggtggctgccgggcggagacgctcctcacttcccagacagggtggcagccaggcggagggtctcctcacttctcagacggggcggccgggcagagacgctcctcacctcccagacggggcggcggggcagaggcgctccccacatctcagacgatgggcggccgggcagagacgctcctcacttcccagatgggatggcggccgggaagaggcgctcctcacttcctatgtgggatggcggccgggcagagacgctcctcactttccagactgggcagccaggcagaggggctcctcacatcccagacgatgggcggccaggcagatacgcacctcacttcccagatggggtagcggccgggcagaggctgcaatctcggcactttggggggccaaggcaggcggctgggaggtggaggttgtagctgagatcacgccactgcactccagcctggctaatttaaaaaattttttttgtagagacgaggtttcaccatgttgatcagactggtctgggactcctgggcttaagggatcctcctgcagcactcaatttttttttttaaatagaggcagtatctcactctgtcacccaggctggagtgcagtggtgccatcatagctcactgcagcctccatctcc

SEQ ID NO: 38302 - DNA, 1391 bp, Artificial sequence
  DNA replication origin
cacagggcagcagcagcagcagcagcggcggcgagagcaacaacagcagcagcagcagccgtggccgcagcggtggagacagcagccgcgggaggcgcagcccggcccccagccccggcctcccagccctggtcacgtcccagtcccagtgcggcccgccgctcctgcccgcgagcgctgccgtcgccgccgtcctcctcctcagccttgcctcagttgccgccgctgcagccaccatcttcccggggctgagacggcgccccgcgaacacatacacacacaccgcacggccggctccgcttcgcctggccgtgcggggcggggctgtgcggacggtggctcgtgcggtccaaaggggccacagcggggcggtgggcggggccggcgcgcgcgtgcgcgagtacgtgggtgcgtgcgtgcgggggcgcagacagtggtctccggcgtccgcggcgccggaggcgatcttctgacgtggaccgtagaacgagctgaaacccggctgcgctgtcccggccggcgaaagctctagttttcccccttcgcctttcgtccccggcggcggggttgcagccccactggatgcctaggagccgactgcgttgagtgttgccctcctagagacccggcactctgccctaactccagctgccggacggaaagggtacaggaggctgcatcgcagcgaggtgctgggtgcggtactgtagaagccaggcttcattcgagcctctgtaacacaagagtcaagaaagaacacatgtagaacctggcataggccgggcgcggaggcttacgcctgtaatcccagcactttgggaaactgaggcaggcggatcacttgatctctgggatccgagaccagcctggccaacagggtgagacactgtctctactaaaaatacaaaaattagccgagcatggtggtgcgcgcctgtatccccagctactccagaggctgaggcaggaggatcgcttgagtctggagaggtcaaggctgcagtgagccgcagtcgcagcactgcactccagcctgggcaacacaagaccctgtgtcaaaaaatgaagaacctggcatgtaggctgtgctcagtaaatgcctaataaactgaatgaagacacacagccaggcctcttgataacagatggactgtagctgaccagaccccctacctttaattctgtaaaagtttggagttaccttgctccccacaatttgccctccaaccatcttctctgaagagtgggcaatatagaattaggaaatggcgctcacacagacctgccccttcttgtctggtagttgttactctggtgtccctcaatgagacatgtcttccatcaatgtagccttttatggtccttgaccctggaatctgggctgggtcatg

SEQ ID NO: 38303 - DNA, 1517 bp, Artificial sequence
  DNA replication origin
gcacgagccaccgtccgcacagccccgccccgcacggccaggcgaagcggagccggccgtgcggtgtgtgtgtatgtgttcgcggggcgccgtctcagccccgggaagatggtggctgcagcggcggcaactgaggcaaggctgaggaggaggacggcggcgacggcagcgctcgcgggcaggagcggcgggccgcactgggactgggacgtgaccagggctgggaggccggggctgggggccgggctgcgcctcccgcggctgctgtctccaccgctgcggccacggctgctgctgctgctgttgttgctctcgccgccgctgctgctgctgctgctgccctgtgaggccgaggccgcggcggcggcggcggcggtgtcgggctcagccgcagccgaggccaaggaatgtgaccggccctgtgtcaacggcggtcgctgcaaccctggcaccggccagtgcgtctgccccgccggctgggtgggcgagcaatgccagcactgcgggggccgcttcaggtgagtggcgggtggtgtcggagggtcgggtccaaccagaggctggggctgaggggcgttcgagacggctccaggtcagagggagatgctggacagaaagtggagagggtagggccgccctatggggtttgagggccatttgcttccggggagatcatcgtctctggcctggggtctttctctgttggaaggtgaaaaggtgtggggcaagggtgggggcaccccgacggtatttgggtgcttaggttagttagatgggaagaatgctgagggacccaaagagcatcaaagccgatcgctctaaaactcggcgtgtttcagctaaacgaggtatccaaggaaaggtggtcgagccaggtttgcttgaacacttccttttaacatccacatgtgccctaggacccgatgagttccccgatgcactggagatgtggggtgctctgaagaaacagggccctggaaatgctttgttggctggagataaaagggaaagggtagcattgtaagatattagggatagaaggaccagtggtccttctaaaggaaagtgaggaaactagccttttggcaaaagctccctggaggtggcaaattggaatagggtctgtggtgaagagggaatggaaggagattcctatttgccttggtttctggacaatatgaagttctgaattggcttagtttggggcagttcctcttggagaaatcaataaattaattagcagttatcgttatttgcttcagttgtgcaatgattttccagataatacagacagattagccagactttggccttgtccacagggagtttggaatatagcaagagaaagataatgtgcgcacataaccctagtcataagggttacagagtcattcacgcctttgacaggtatttagcttactgaacacatgtctgatgtgggggagtggggaaatgtgaacaagacagacagggcctctgctctcattgaccttaacattctagtgggagcaacaggc

SEQ ID NO: 38304 - DNA, 1071 bp, Artificial sequence
  DNA replication origin
gagtacaattccctagagaaggggacagctctgagctgtgttaccagccaccatttccaggggctgggggatgcgctgcactggcccagagaggtctctgagcaaggcccccacaacctccacttcaacctcctgccaaacctcaagcagattgagaaggagccgctagagacacaggaaccctttcctcatcagaagtctccaagctttggaggaagaaggaggcaggcaggaggcgggaggatcgtttcaccccaggggttcagggctgcagtggactatgatcatgccactgcactactgcctggtgacagagtgagaccctgtctcaaaaacaaacagacaaaaaaaatcaatgctcttagcatctgctgggtccacattgggcagtgtgtgtgacgtggtccagctgcaagggaggctgggaaatgcagtttcattatctgagtactagtggagaaagaagagacgaaagcaatgagaatccctgccatgaggaagtgagagctgattcatttcagcttccttaggtgaggtgatggggcccagacaggttctgaggccactggaggtcacacaggccagcagggatacacccagtggtagaccctggtctccaggctcccaggacacagaccacataaaagcaaggtcagtctcagcacacagatttaataagcactgtatgttattcctacagctgcaggaaaccagggggaagatggccacagggccaatgccaggcagggcacagggtggggcccctcaagcagcatatggggaacaggaaagactctgccagcatggtcatggcgcacaggtggctacaatggtgggtaatgcccagttgggaggatgcagtgttagacggggtcttgtccgatggattccttagggggttatatgcttgggaggctgatacaatttcctagaattctgggattctggatggtctctgacctgctctaggggatctgggtctccagagaggtctcagctacaaaagtgaccctctcctgaccccaccttgtgggagaccccagtggtctcaaggtctgtgaataaagggac

SEQ ID NO: 38305 - DNA, 1141 bp, Artificial sequence
  DNA replication origin
gcccggccccgcgccgccctcctgccttgagcccttaaacttctgcgagcgcagccgggtctgcaggtgcgcgcgggcggcggcggggccgtggcgagggtggggacggggcctctctccggctcaccgccctcccgccgcgcaggcctcgcctcctggcctttcaggtctcgtgcaccccagcgcccagcgcccccgacggctgcctgctggaccagggcgcccgctgcctgcgcgcctacgcgggcctcgtgggtacgcgcggccgggatccgggcgagggcgggggttctccaggggatatctccgcccgggtgggccgatgacttcgccctcagggtccccgcaggcaccgccgtcacccctaactacgtggacaacgtgagcgcgcgcgtggcgccctggtgcgactgcggagccagcgggaaccggcgtgaggactgcgaagccttccgggggctctttaccaggaaccgctgcttgggtgaggggcccgggggggagtggagggggagtgggggcggcgcttactgccccctcccaagccgcctggctgggagccattttagaggggagaatggaagactgtacagttgagtcactctgtcacagctgtgcttattattttgttattcctcaccacacaccttctgtccaaggagccagtctttgcagcagggggtctctcactttgtcccctgtgctgagccctgtgctagggtttcccagctaagtccaccctggacccctccctccatagatggtgccattcaggcctttgccagcgggtggcccccagtcctgctggaccagctgaacccccagggagacccggagcacagcctcctgcaggtaggtgcagggaggggagggtgagctggcacctcccccactgtcaccttcacacccttccgtccctggtgggcctgggtggaggcatgaagggcctggggtgggggtgcaggcagagggcagagacaggcttttgcctcaagtctgcacttggctcccacccccaaggtgtcctccacaggcagggccctggagagacgctccctgctctccatacttcctgtcctggctctcccggccctgctctgattaggacagcgacctcggatagcacagccagctactccac

SEQ ID NO: 38306 - DNA, 1171 bp, Artificial sequence
  DNA replication origin
ccagagaggcaccctgctcccagccctgggggggggataccaccccgtagcccctgtgcacaaacacacagggagatggatgaggggccaggctgtgcacgtccactcaggctgggcaccagaaaggcttctagtctgaatgagatgctccagactggagaacttgtggaggctgggggggattcgattagcctggtttttgtgactcaaatcctgggaaggggctgccaagtcccaacttccagttatcctggctctatttagacacagcctgtgggcatgtgggcagagctcaccctctgtctacccaacccctggtgtgtgactggggtgccaggcaccttctctgtctccagcagggtgtcacctatcatggggcctggtcactaaaaccactgatgaacccttgggtcctgtggctcaggacaaagcccggcggtgtgtcgtcagggacttctctgaatccacaccctggcagccaggactcagtgggttcttcagtggccagagctcttgcatgaatccgctctcccctggctgatgaagggtggaggggctggaggaagccagtgcagatggggcaggatgacctcgactcaagggagcatcaggaagggctggagaggggagacacccatgcagggggcaggaggaggagcaggaggtcaggaaggagggagaaacagaaatcaatagacccacccaaagggtctccatggtggaggataagcggcgaggtggagggggtagaggaggaaaggtatggcgtcacagcctgtcattaagagactaggagcagccactgtcttctatgccatctctggttttaaagtctccattggccagatccccagaaagcctcattgttcccccgtcaggtagtgccattgagtgtaggaggagcccctggacccgtctttggacgtgtgtggccgttctggagaaatggtggcgatgcttgggaaggaggggcttcagcttttggggaaggcctggctcagcctccatgctccctctccatccctgacgtgttgcagagccctccagagcccgccgctgcccatccccacgacggagagccgatcagtgccagtcggccccgcctttgggccacactctatgctttctcgggttttcagtgtcccccaccttccaggggcgtggatgggct

SEQ ID NO: 38307 - DNA, 1461 bp, Artificial sequence
  DNA replication origin
aaatgcttacattttccaacttttctgcaagtctaaaattagtcaacaataagaagtttaaaataggccaggcatggtggctcacacctgtcatcctagcactttgagaggccgaggtgggaggatggtttgagcccaggagttcaagaccagcctgcgcaatagagcgagaccccaactctattcaaaaaaatttttttaagtttaaaatagaattatataaaaaaggaaaagaaaaatgctgtttcatagcgttcctagtttagcatgggagagaccaggtctccctgggtggttgtctgtgtgttgctgggtgtgcgtggcagggctagtgtgttggggtccgtctaggcacattcaggcgccgaatcccgtggctcccaggtttacctgacggtgcagcctggggtggagacttaatgagggcggggagttgctgcagcaaaggctcctcccaggggtatcagcgcagacagctgggttttcactgtgctcctgctccagaggcactaggaagggggcgcctatcagactagggctctgccagccatccttctctgttgaaggtccagcatggtccgctgcctggggcctgcgctgctgctgctgctgttactgggtgagcgcccctctcttcccctggaccccgaaccctggcctctctgtccctgctcctcagtgacaaggtgggagggcaagatattccaggaaaagctgaaccacaggaagggttgccagtgagaggcctgtgcgcacggcttggggacccctggcaattgaccccactatgtgctgagcacctcacctcccagccccgtcaagccaccaccgccatccccctcccgagtccagccttggcacccgtgccccaggaacttttgcctattgtctgccatctcccaactctctcaccctcccctcagccccagccctcctacccatcacacagattccttggtgaatcttcggtgttgttcatctgttgttccaccttcttggactgctccgtccctgcatggatgtcgcggagggaggggtcactttaccgagtgtagtgtggaaagtggaatctggtaaaggtttaaggtggaggagatcttgcagctgagatgagctgctgtgagggtggagactgggtaagggtgttctgggcaagggtgacaggtaagcaacaggcagaggtgggttcaaacccttaggcaacatcaggtgctggtgtgtgcagctgagacctgaggatgtgcctggcaaggctgtgagaggaaagcaaagtgtgccctttggggaggggaggaagggaggactcaccccgctgccatctatcccctccactcagggaccattctaagccctcgagctatgttcatccttcctgcagaggcaggtgctgaagtcacagcaggaatcactctcaccacgcggtccaatccacagcctgaaagacacagccattgccagaga

SEQ ID NO: 38308 - DNA, 1054 bp, Artificial sequence
  DNA replication origin
agattgcagtccctgtaccatgctgcccccggaggcctgtccagcctctgtctcaccagttttcggccctttgccacttcctctgcacaaatcacctctgtcacccccttgaagttcccaaatgctgggcccagcacatcttttcactccataccactggtcagctgcggtgctggctgcccctgtgccagggccctgccttaacccagttctctgtgacctgggtggtggcggagtggggagtcacataatactaagcatggctgtcctaggactcaccctgcaccagggccctaggcagggcaggcactctgtggccatgtctgacatagcctggtcttgggagtgctccgggcaagccaagggagatggcatgatttgggccagagatgggggcagagggcataacagacaggggcagggcaccacctgggccccgggtggcagctaagaggaccctgacaaagcgagttgtgattgagggtctgtgggcagaggagcaaggtggccagagcctggcgtgtcagcacggagggggcgctgcagagggtggcggctgcttctcatccccaggcgggagtctcagggcaggggagaatgttttgaaggaacatcacaggaaatgacaaggccttgggggatgggatggggacagtcaaagatggcttggaatcatcaagggcagcagggcacccaggggcaaggagagcagacatagctgccgaaggggcggacatccaaggttctttggaagctgagcgatgccagcatctggagagtgccaggctgctgtcagagcctggaggaaatgttaggactagagagaggaggtgccagccgagggcatgaggctcacttggagcctggatcccaaggctcccctgaagagggagcaggaagggagctgagagggtgacttggagcagatgggtgccccaagaaactcagtaaacgcagaactccctgggctggacaccatgctgcggggaggcaataacccactcaggatcactgtgccaacctcctggactcttatcacgttgctcagccccaa

SEQ ID NO: 38309 - DNA, 889 bp, Artificial sequence
  DNA replication origin
atcccatcccccaaggccttgtcatttcctgtgatgttccttcaaaacattctcccctgccctgagactcccgcctggggatgagaagcagccgccaccctctgcagcgccccctccgtgctgacacgccaggctctggccaccttgctcctctgcccacagaccctcaatcacaactcgctttgtcagggtcctcttagctgccacccggggcccaggtggtgccctgcccctgtctgttatgccctctgcccccatctctggcccaaatcatgccatctcccttggcttgcccggagcactcccaagaccaggctatgtcagacatggccacagagtgcctgccctgcctagggccctggtgcagggtgagtcctaggacagccatgcttagtattatgtgactccccactccgccaccacccaggtcacagagaactgggttaaggcagggccctggcacaggggcagccagcaccgcagctgaccagtggtatggagtgaaaagatgtgctgggcccagcatttgggaacttcaagggggtgacagaggtgatttgtgcagaggaagtggcaaagggccgaaaactggtgagacagaggctggacaggcctccgggggcagcatggtacagggactgcaatctgagccagggaaaaacagggcgaagtcaagggtgaggcagccagctggtgggagaagcaggagagtggacaagaggagctgtactgggaggtagagggccatgccttgcggtgctggtggtggggcagggatccaccccctcgcttgactgggaggccactggaacctcctgttcaaagctacttctttccatggcctctggggctgctctctgcacctgggggcaaggctgagggcctgccc

SEQ ID NO: 38310 - DNA, 2096 bp, Artificial sequence
  DNA replication origin
tatgaggcttaaagggaagaagctcaggcaaagtggattctcaacggtatgaagattattttccgagtaacctggcgaggttactcctacaccgggaggagcaccgtcgggtcgcgattccaccttgggtcccgggctgctcactattggggccgcatcgtcccctgtcccgcttgttgtgtgactttgcgcgggttacttcccctctctgggctctgcgcgtctggcggctgtagccaagcccaggggtggggatcagagaagcgcgggggttgggggactgtccctccatgcccaatgccctccccgtgccggtaggcacccgtttccgcgcgtgttcagcgcctgcagccgccgccagctgcgcgccttcttccgcaaggggggcggcgcttgcctctccaatgccccggaccccggactcccggtgccgccggcgctctgcgggaacggcttcgtggaagcgggcgaggagtgtgactgcggccctggccaggttaagtcggctcgcccggcccccacttgccctctccgctcaggtctggggcgctgcgccctcacctgggcccttcttgcctttctggtcccaggagtgccgcgacctctgctgctttgctcacaactgctcgctgcgcccgggggcccagtgcgcccacggggactgctgcgtgcgctgcctggtgagggcatggaaggttcagggtgagggtttcggggagcttgggagccggcctgttggccttagttaattggtgccctcaggttcccccgttgggtgctgggcttgggtaggcctggctcccccagctccgagccgcgctctcggcatggacctctcactgcacgtggcctctctctgccttccccaccacccgtcacctgcgcagctgaagccggctggagcgctgtgccgccaggccatgggtgactgtgacctccctgagttttgcacgggcacctcctcccactgtcccccagacgtttacctactggacggctcaccctgtgccaggggcagtggctactgctgggatggcgcatgtcccacgctggagcagcagtgccagcagctctgggggcctggtgagaggacacgagcacccttgcaccctgccccccatcctctggtggggccagttttctactgtggggaagatgggcaggggaaactgaggcccgctgagcgcagcccctctccgagctgcccccagcctggcccatgcttcctcaggctcccacccagctcccgaggcctgtttccaggtggtgaactctgcgggagatgctcatggaaactgcggccaggacagcgagggccacttcctgccctgtgcagggaggtagggagtggagctgagtggagggagcagaagctatggagtgggtttggggaaggggggtactgcagctgttgacccccctctacttcctccccagggatgccctgtgtgggaagctgcagtgccagggtggaaagcccagcctgctcgcaccgcacatggtgccagtggactctaccgttcacctagatggccaggaagtgacttgtcggggagccttggcactccccagtgcccagctggacctgcttggcctgggcctggtagagccaggcacccagtgtggacctagaatggtgagctctgcccacccgacccctccttgccgtttgaatcccgcaggccagtgtccccctcactgcctggtgcactgcccgtaggtgtgccagagcaggcgctgcaggaagaatgccttccaggagcttcagcgctgcctgactgcctgccacagccacggggtgagagcccgaggagtgggggtgaccttggggttcctaatcctacgtgaccctcctcttctcttctctgcaggtttgcaatagcaaccataactgccactgtgctccaggctgggctccacccttctgtgacaagccaggctttggtggcagcatggacagtggccctgtgcaggctgaaagtatgccagtggggggcatgtgggcaggagctggggtggtgcacctgctcaggactcagcgccccttcccccaatccccgcagaccatgacaccttcctgctggccatgctcctca

SEQ ID NO: 38311 - DNA, 973 bp, Artificial sequence
  DNA replication origin
cagtgagaggtccatgccgagagcgcggctcggagctgggggagccaggcctacccaagcccagcacccaacgggggaacctgagggcaccaattaactaaggccaacaggccggctcccaagctccccgaaaccctcaccctgaaccttccatgccctcaccaggcagcgcacgcagcagtccccgtgggcgcactgggcccccgggcgcagcgagcagttgtgagcaaagcagcagaggtcgcggcactcctgggaccagaaaggcaagaagggcccaggtgagggcgcagcgccccagacctgagcggagagggcaagtgggggccgggcgagccgacttaacctggccagggccgcagtcacactcctcgcccgcttccacgaagccgttcccgcagagcgccggcggcaccgggagtccggggtccggggcattggagaggcaagcgccgccccccttgcggaagaaggcgcgcagctggcggcggctgcaggcgctgaacacgcgcggaaacgggtgcctaccggcacggggagggcattgggcatggagggacagtcccccaacccccgcgcttctctgatccccacccctgggcttggctacagccgccagacgcgcagagcccagagaggggaagtaacccgcgcaaagtcacacaacaagcgggacaggggacgatgcggccccaatagtgagcagcccgggacccaaggtggaatcgcgacccgacggtgctcctcccggtgtaggagtaacctcgccaggttactcggaaaataatcttcataccgttgagaatccactttgcctgagcttcttccctttaagcctcataaaccaccctgaagcggacactatgatcattatccccattttacagaagaggaaactgagggacgaccaaagaaacgcagcggaggaagtccccaggactagccgccccgccgcagccccgaccccccaccc

SEQ ID NO: 38312 - DNA, 2488 bp, Artificial sequence
  DNA replication origin
ggaaggtctccatctacagggaggggagcaggggggaatgaatttggagagtcccaggagggccagatcacagaaggccattttggtgctcagtgtcctggaccatccagagccaaagattttgagctggggaagggacaggcagacctgtgctcaggaaggtgccttgggctgggtggggtgggtgtccgggctggagcgcaggctcttaaaaccacccagattatgttatcagtatatatcacctactgagtgcttgaccgcaggcgctgttctgagcacttgacacgtattttattctccctcgtggagtcggatggacagggaacaaactctagttccactgtgcccaaccatattttcccgacgtccctaccctttcaatggggtggtcacatcacctacctcctagggtggcgggtgtgtgtggggcaggggtagggggcagagctggggcaggtggtggaatgcctgggaggggggaagcagccatcattagcgggtggtctggaggtaatgaggccaaggtgaggttgggttaaggattttctttaaagaagacagattgacttatgattgatccatccgtgtgggaaagatcctgttgagatggagcctgaagatggaatcattaccggagtgggtgtggagaaggcagggagggtggaagcagcgtgggcaggtggcgattctgttttctctggaggcagggggtgagcatcaatcactgaaggacaggtgggaggtatgtggggtctagaagtctgaggaaaatatttcaaggatctagggcaggtgggggcaagagggtcgaccagatgcccaacaaaggagggcagcaggcaggggaactgggggaggtcaccgcatttccccaactccaagtcccattcttcggcagtgtctcctgactcctcccctcccgatcctgtggatcctgctgcctgctgcaggtcccctgggaaccacaaactcttcccctattcccactcctccccggcgtcctccctggtgcttcccatattcacacctcccacaactaagccatcaccaaggctccttcctctagccccaagagtttctgatctgagcaagtcaccattgctcctgtcccttccctaagacacactgtgagtgtctcactcataaagctgctccattagcatttagggaggaaggctgggagacatcctggaggaggcaggaggaagctgaattcagtgttccctgtaacaccccctctcagcaggctgctggccccaggatacatagaaacccactacggcccagatgggcagccagtggtgctggcccccaaccacacggtgagatgcttccatgggctctgggatgcaccgccagaggtacccccccaccattcctacccctactcctccttgcattcctaaggggcggttggagccagcccctaccacaccctccctcttgcccctcttgctccagccctggctgagatttggggctggccccttcctccctaggatcattgccactaccaagggcgagtaaggggcttccccgactcctgggtagtcctctgcacctgctctgggatgaggtgagctctgggagaggaggctgggcctgggatggggaaagagctccctcacacccgctcctacccctctgcaccctagtggcctgatcaccctcagcaggaatgccagctattatctgcgtccctggccaccccggggctccaaggacttctcaacccacgagatctttcggatggagcagctgctcacctggaaaggaacctgtggccacagggatcctgggaacaaagcgggcatgaccagccttcctggtggtccccagagcagggtcaggggcatcgatcggatgggagtgggaatgctgtatctatagccctccaaatcagaagagacgggaattcacaggcctcgagtcccagtatttttattgaagtctgaagaaacaagttccagaaaacatgttaaacttccttctgggagctgggattggtggtcagggctcaagcccagcagcttccactcagggtccccatttgcacctccgcagggcaggcgagaagcgcgcaggacccggaagtacctggaactgtacattgtggcagaccacaccctggtgaggagagaccccaggggttggcggggtcagggatggggccagctcagcccctcaagccaccgggatttctgccttcccagttcttgactcggcaccgaaacttgaaccacaccaaacagcgtctcctggaagtcgccaactacgtggaccaggttgggggcggcggggagagagcggtgatgggggtggcggcggcaggacaggcaggtgctggtggggtttggggaagaggaagggcgccccacgaaggaccaccggcgcgatggggcgccctgtcccggcttcagccccgcctcgccctcagcttctcaggactctggacattcaggtggcgctgaccggcctggaggtg

SEQ ID NO: 38313 - DNA, 2247 bp, Artificial sequence
  DNA replication origin
ccaccgcctcatcccaccacgccgcggtcctccaagaaccttcccagcggttctctcctcctctcaggagtagaggccctctgagaccgacggggagggacggctcgggccggtcatccgaggggccgcacggattccctcctccgcccagctccaccccctcgaggggcggcggtccgggagtggcgacccggctcccccatggcgcgcgccgtcggggcccctggccaggctccgagcggggttggcggggaggggaggcgggagcgagggcgggcggtgggaggtgggggcgggaaggtccgaaggcggcggcctgaggctgcaccgggcacgggtcggccgcaatccagcctgggcggagccggagttgcgagccgctgcctagaggccgaggagctcacagctatgggctggaggccccggagagctcgggggaccccgttgctgctgctgctactactgctgctgctctggccagtgccaggcgccggggtgcttcaaggtgaggacgcgggcggggtgcgccctgaggggcaggctaggcgcggtggtggtggcggggatgggttctgctcagagctcgggtcagcgcgcggagggtctcacggccccggcaccatacggccagtaggtcagggcgtggggactctttgggggggtctccgtgggacctgcccagggacgctcaagtgtgcttgggctggccccgggcccggacttgcccacactgcccggctgccactccgctggcaaagcagagggcatggctccctccccctcgggggcagcccagcccccagcccatagccgtagccccctcttcctggattctcgctctcacaaccagcttccatccgcaggccaccgtgtgacccgctcctgctcctccaccccttaggactcagcggggctccgtcctctaggaagcccccatgcccaagagtcccccagagtccctgctttgctctcaggctgcagaactagctgtggcctccaccctgctcacccctcgtccctcctcccagggcagcagggcagtgtgtatgttgtttatattgttgccttgtttggtgagatagagaagggcctctccagatagaaggtgtctgtttagcagtgctctgggaagactgcagctgtctcctcggggtaacccctccaaacaaagatgttaagatggggctggaacaacctctgcaagcgggtgggaggattagccagtcctgcacagcaagtgcctggccgggaacagggagggcaaccagggagggggcatgcggggctgggctgtgctatgcagactgggcggtggcttccacagcactgtgtggggaccaaacaggtacaggggcctggtctgttctggccccaggggagggccccaggcggtccactgctccctcccctctgagccctatcctggggtcaggggaggtgatgggacccctgggagaggggcgtctatgtgcccaataccagcctggctccctcgggttccacccccattcacccggtcaccggagctccagctccagctccagctctgcccctctctccctcattggggtcagggtgcccgtggccagcacgtgcgcgcaaggccatgtggacagcacccacacaccacactgcacccacaccacacctgtgcccgggcccaccctacctcttccccaaacccttagaggcctaggagcagcaaagcttggttctctactctcagttaagtgctctctgggctgagagacctcccctccttcccctcccccacatccactcagagccctccctgcactggcccctctagcctcctttccaaggtggcagactcctctcggccctcatctgcctgatggcaattcactcatccaatcaaggagggcttcttggaggaagggtctttgatgtttgtagtctgggagagaaggtggaggagaaaaaaggagttggggtggcctagcaggagctgagtcacttccacaggcagccatcagcccagcaggactgaggccagggctgcgtggaggggggaggctgtctgttctgggagctgggactgggtaccgggggaaggagggctgctgcaggctctgggtgcctggggcctggctcctgcagggcgggcctgtgagagtggttggggccagtggagggctgggagcattccaggggaacattccaggcgccctctgagtaatgcttggctctgggattcctcctagagcccccttaggcacacccggc

SEQ ID NO: 38314 - DNA, 910 bp, Artificial sequence
  DNA replication origin
ggaagaaagggcagaggcagtttccctatggacagctaggcccgggtgtaggattcagtttctgtttcctgacaccaaggcttctccccaacttccccattgggctagagaaggaagaacacagggtgacatggccagctggaggttactggcccacagatagggagtcagggtacggatgggcaattcctggagcagattatggtcaaaatagtggaaatccccaatcacaggccaaatgtttaattctcagagccatagaatccataactaatgcttattggctttgacatgggcagtagaaatttcacacttcattccttaatctggctctaaatgcttctggctggagtgctcactctccaaactgtgctggacagcaccagaagccctcctgtggacggacgaagtggtgatggatgaagtggaattgtgctggggttagagtaaggagagattatcgttgggctgggctggggctgaggtcagggtgatgatcaggttggaattctggaagcaaattaaggctgggattggggtggacattgaggttgagtgatgggtgggggtaagggtgaaggttggagttgggtgcaggtgatggttaagatacggtggaggctgggttgagatgaggatgatagagtcggagttgtggttagggttgggatgatggatggttgggattagatgagatgagtaaatggttagggttggggtgcaagtgaggtgagggtgagataaggttggaataggggctggggctggggctgaggtagggtcagagcagggtgatggtcgggactgggattgggatgcaggttggaaggatttgggggtggtggaagggtttcagttgagtccatctttgattagtgtcttggacttgggttggtttggggtccaccac

SEQ ID NO: 38315 - DNA, 1452 bp, Artificial sequence
  DNA replication origin
ctcccgacagctccagccccgtccagccgccgcgatcccgggcccgcagctcgttggccgtgcccgctgcggcggccgcagccctcgacgtgcgcccggccctgaggcctcccgcctcctcgcgccgcccaccccgcccgccgccccctcccccaggccggatggccgcgccgcctgcgccgccgggtcggcccgcgctcccggcccagatgtgcgaggccggggcggggcctgcctgcgcgggcctccgccgaggggcccagcctggtcccgcgtccagggcccctccctgagcccctcctgcgcctcccccgctcccctagcagcccagggggtgggagaagggagagggggcggcggagggaggggaagaggagttccagaccctggtcggcctcctgcggtccagctgctgaggggctcccccgccccgcccccacaggcccaccttggggctcagcctcggccccttcagcgagggcccaacagcggagggggaagggcccgccctagacccctccacttccctgccccagacccctccagtcccttgacccggaaccctctctcctcccacccctactgcccctacagcttccctagcccggtcctcagtggccagaaaagaggcagaattgcggatgagggcaggccctcgggtccccaggctaggcctagctctgtctttgctcaagttcagacgacggaggcgcggagtctcacagactgaggccccatgcccggcaaggggaccactccgcaccagggggcacccagcctctcctccgaggcacacagcctttttcttgtcctaaccggggcccttctggggatgctgggacttggcctccagacagggggtttgtggggtgaaggtctctttctgggctgggaacccgtggctcatgcctgtaatccagcgctttgggagtctgaggtgggaggatggcttgaagctggctgggcaacaaagaccagcctgggcaacaaagggagaccctgtctctaaaaagttttaaaaattagccaggtgtagtagctcacgtctgtagtcctaggtactcaggaggctggggtggaggattgcttgagcccaagagtttgaggctgcagtaagtgtgatcacaccaccgcactccagcttgggtgacagagagagaacctgtcataaataaatgaatgaacggatgaatgaatgaatttctgctaggtccctcgtggagctttcaaaggcagctgactcgttctgcctgttccccttcccctctgccccatgtgcccccacagaagttccagatgcttctcagtccacctccctttgtgcctgggaaggctgcccgtcagagaagggccccacagccccatcaaatgaggcacagttcttgggacatcccttttgctcttccactccaaacctttgcaagggctattttccctccctgaaatgctctc

SEQ ID NO: 38316 - DNA, 2317 bp, Artificial sequence
  DNA replication origin
ggtctagggcgggcccttccccctccgctgttgggccctcgctgaaggggccgaggctgagccccaaggtgggcctgtgggggcggggcgggggagcccctcagcagctggaccgcaggaggccgaccagggtctggaactcctcttcccctccctccgccgccccctctcccttctcccaccccctgggctgctaggggagcgggggaggcgcaggaggggctcagggaggggccctggacgcgggaccaggctgggcccctcggcggaggcccgcgcaggcaggccccgccccggcctcgcacatctgggccgggagcgcgggccgacccggcggcgcaggcggcgcggccatccggcctgggggagggggcggcgggcggggtgggcggcgcgaggaggcgggaggcctcagggccgggcgcacgtcgagggctgcggccgccgcagcgggcacggccaacgagctgcgggcccgggatcgcggcggctggacggggctggagctgtcgggagggcggaggtgagttctggggcgggggctgccgggcgccccgagtggagaaaggcgaggaggtttgccgtcccgggctgtcggctgagaccccaccaaaaacctccagactttgtctggtggggacagatctgcaagcccctctctgcagcgtggctgcgggctcgggaaggcacttggggcagcgaccttggtctcccacctgggcttcgggggaccacctcccctgtccctcgcacagctgctcagaggcttaggctggagaaactcctgtgtcttaggggctggcaggactggtgtgggctggggcctgctccagggagccaaactgagggacccggtgcctaggtctgaggtggaaacctgggagttgagtgtatgtgtgtgtgttggggggtgcctcaggggtcccaggccctgtggtcccgaagcgcaacagagtactgagtggcccaggtgccagggtctgaggctgggacctggtcttccgggccagcttgaggtccaggtggggtggggtccaggttcccgctagggcagtggagcctatctgtgaggttagcgtgtgttgatgagagagactggaagggagtgatcacgaaactagggaccctccggagagcagacgcagcgcaggaatcccaggccagaggggtaatggggggctgtgggcagagcatgggaggggctctgttgtttgtgaactggctgctcccatgatgaggacccaagggggtgcggcaggatgtatggaaagcaaagatgaggacagggaggggccatgggaggccatttctgtcactccctgccccagcgcaggatggggcagccacctcactcagccacacatggtcccatcttcttaagggctcctctccagaacagagtggggcagccctttgggtgccgtttctgatctgtgctttgggccctggttggcccagtctgtggcttggaagaaacgcctgtggcctcacttagcccgctgacggagtcctgttccattacagggctggctgggtgctgagcagagagcagcaggcggaagaggcagggtcctagtgaggaggggagctggaatgacctgggtgggctctttgtctacacaggcatcgtgtggagccctgaaacccagaacactgcattcccatagtgctcctggggacatgagcgcccagctgaaacaccccacacaggaagagatcctccgaggattctgtcaggcaaagggttgggcccctgcaaggtggctcacgcctgtaatcccagcactttgggaggatgaagtgggaggatcgcttgaggccaggtggtcgaggctgcagtgagccgtgatcgtgccactgcactccagcctaggcaacagagcaagaccctgtctcaaaaaaaggagcgggagtgggggcagggttcgtcctaggctattgtaagaccaggggatactctgggatgggagtctctggttgtgagttcctgctgggccacaccctatcctggtccccagtgactaatcggccctgcctattgggtagaagtcagggccaggggtcagggtgaagctgatgactagaggtcaatatgaagccaagagttaggggtcagtccatgggcagggttagggatcaggctggggccagagtttggcatgtgcttgtagccaggaaatggagttcctttctgtgtaaatcaaactgtcccactcaattactctcaaacccataggcaccaccagtctgaaattagtaggcccctgaagcggggctcagcctcccctcattttcagctgtggactctgcccagacc

SEQ ID NO: 38317 - DNA, 831 bp, Artificial sequence
  DNA replication origin
ctttaaatccacgaagacagaattctgaatggccttctgtgctcttcatgatctcaccttagcattcttgtgttttctcctgctgcctatggagccgacccatagctagttctccctgctctttcacatctgtaagtttttgcacatgctgttccctctgcctggattcccacccaagaagggagggttgcactgactgccctgtgcctccgcaggaaatgggagggcggagacccgggcgtggcccaccagaagaccccgacctgcctgctgctgactccggagggcgccttccacagctttggctacaccgcccgcgattactaccatgacctggaccccgaagaggcgcgggactggctctacttcgagaagttcaagatgaagatccacagcgccacggtgagtcacagggctccagacagggaggcggggccagcatggaaaagggcagggctaatgggggtgggtgggacaaaaccaaaacgtgtgaggaccggcccgatggagtcgtggctgagagggggcggggctaaagggagacgtcggactccggtgtgggcggagctcagaaatgaggtggaggcggggctaatgtgggtggggctaatagtgaagctggggttgcaggaggggtggggctaaggagaggggtcggggcagagctaatgtcacatggggcaagagtgggacggtggtaaagaggaggggaagctccaggaaacggggtgattttaagagcgaggtcgtcaggaaatgagtgccaagctgaggcctcctgcagagccgccctgtgtccctgccaggatctcaccttgaagacccagctag

SEQ ID NO: 38318 - DNA, 1231 bp, Artificial sequence
  DNA replication origin
gtcagtaccccagcagtttcctcctggggtagtctgtgtctcccccaaccctcagactcagggctgggcggagtcctgccctcctcagactttgctcccctagggcaaggtgaaatctccaccctgagattgggctgccctaggtagggcatgtcccaccctgagacgaggttgcccttgggcagggctgtgcctcccttcctcagacaggctccaccagccatgtttctgcctgctcaaattgggctcctccagggtgggtaccctctccccttcatactagacatggctgagcttctggcttcagtgaccctctgaccctccaggggtgggtggtgtccccgggggcagctcaccctgacggaagctggagtcgatggagcggcgctcacccaggcgcccaccacctggggcccggccactcaggtccaggagctggtgcaggcgcagcttgcggcagtataccgaggcggcctcgggctccagggcgatgagtagctgctctgcattctctcgggacactagtccagcctggggatgggtggtgggcagggtcaggcagcactgtgggctgtcacacctaagatggcactgtgaggtggggaaccgcggcctgtggggctcccacctcctcctccatcacaccccacccatgttaggcctctcaggcccctctgtgctgcacaaatttggagctgcctcatagccacgctgtgaccaggctggggagggaatggccctggccaaatatgccaagaagttgcccagcaggaaaagactctagacagaatgcagacctagaacccctgggatctgccccttcaaatttcccaagatagcggggctgcagcaaggttccccttcacaggtacaagcggccagctgagcgctggctgggggtattggcagagactctagcacaatgtgggggtgtgtgatggctcagaggaggtggtggggagcccttttagctcattgaaccctctttctccactaggctggtgtcagacggtagccataggccaccccacttccaggagaactttgttcccagggaatctgatacagcagggaggaagctgaaattccaggcaccaagacaggccagttgggtggagaaaaacacttgagatctggagttatttccttcagggtaggggatccctgtgggaagtatattatggttttgtagggttccccagattctgaccagataggggagagggataag

SEQ ID NO: 38319 - DNA, 1658 bp, Artificial sequence
  DNA replication origin
cgcccctgcacggtgtgggccagcagtgcgcttgcgagcctcgaaggcgatggtcagatctacccaggctgccggccgttgccttttgaaggtggcgatgaagtcctcgccgaagatgcggcacagcagctgctcgaaggccaggtccacgcccaccgcgccataagggccccctggggtggagcagggggcgaagagggcgtcagcgctcgccgggccgccagggggcagtggcggggccggagcccgggtcgcgctgggtaccggggcgccgcctggctactcaccagatgccttgtagagctccttgagggtgccatggggctgctccagctggtgcaccgtcaggtccacggtgcctccgccgcagtcggccaccacgtagcggtctcctgcggcggcgagcgcgggcacacactcgtgggcggcctcgcaccctcagccctgcgccccctccagcctcgcccagcctccagccctgccccgggtcccaaggcctgtctgcagggtcgggggagggacgtgaggggcttcaggtgcttgaacctcagaccaccacatatgggcgcagggtgtggggcagaaatggttccagaggctctgcaactccacccgagcgtccgcggagaatcccctggaggagtgggagttaggggcgccgctgtgagtggggtgggggtgcgggtgactgtgaggggacggccaggttgggtacagcgaatggaggaggaagagacgggctttgcaaacatgcccttccccccatcagtatatggtgcccggtaggggccaaggataacactccgtccccctttccccctacctgcttgcatctctgcccacagctctcctacgcctgactccaccaggaacgtgcggctgtggcgggaccttcgcagctgctcccgagctgggggtcaggagacagcagggagtgagattagaaggaggtgctccagctatggcgttcaactcccatcctcctgcccaggacctccatgggcactgggagcagccagtgctcctgaaactccaacctgctcctgactgggagagggcaatcctgaaccccaaactcccaccctgtatccaacagctgtggggaaatatttatggacacagggccttcctttaacgcaggaggtctcaggtcatggcaaaatcagggttagaggggtttggaggagcggaggcaggtaggtctttggagtctcagaggggactcaggacttagggcttctccctgccctgggagatggcatttgggaggatgaccatagctgtccttggcctgggtgcctggtcctggcagcaggagcttggggctgatgtgtgtcggggaagatgaggggagtgaaggggacagctgatgcagtgggctgacttcctcctttgtcagtaccccagcagtttcctcctggggtagtctgtgtctcccccaaccctcagactcagggctgggcggagtcctgccctcctcagactttgctcccctagggcaaggtgaaatctccaccctgagattgggctgccctaggtagggcatgtcccaccctgagacgaggttgcccttgggcagggctgtgcctcccttcctcagacaggctccaccagccatgtttctgcctgctcaaattgggctcctccagggtgggtac

SEQ ID NO: 38320 - DNA, 1688 bp, Artificial sequence
  DNA replication origin
gccgactgcggcggaggcaccgtggacctgacggtgcaccagctggagcagccccatggcaccctcaaggagctctacaaggcatctggtgagtagccaggcggcgccccggtacccagcgcgacccgggctccggccccgccactgccccctggcggcccggcgagcgctgacgccctcttcgccccctgctccaccccagggggcccttatggcgcggtgggcgtggacctggccttcgagcagctgctgtgccgcatcttcggcgaggacttcatcgccaccttcaaaaggcaacggccggcagcctgggtagatctgaccatcgccttcgaggctcgcaagcgcactgctggcccacaccgtgcaggggcgctcaacatctcgctgcccttctccttcattgacttctaccgcaagcagcggggccacaacgtggagaccgctctgcgcaggagcaggtgggtcctgagcccgcgggctcaggcagggtttgccgacccgggaatgaccgtgcactggagggtcccgggccccaaggaacggtgggggtctgcctgattcatcccacatatacactaagccagcagggcgtcggggtggggcggcggggagcggcgagtgagtgccccagcccagcaggctccacccacggaatccgcagcccgaactggggcaagacagagaatcatagcggggaggcggcaatgcctatctcctcccagccttctctacacccccaccccgggccctgcgggcccatgctcctcggtttccctgcaccaaagcaaggggaggcccctcccaggacctcgtacctggaacctggagcaggctggcaactaaatcctctgagtgagtagggtggagataagggactaacatcccgcaggtccagtcctccagacaccacgtgcagtcggtgcccaggcacttctgcctggaggcagaggtagagaataaggaccacggaccccaaactggggcaagcagctgggccctgaccgatggatatttgcccctttcaccaccaacagcgtgaacttcgtgaagtggtcctcacaggggatgctccgaatgtcttgtgaagccatgaacgagctctttcagcccaccgtcagcgggatcatccagcacataggtgagcacctgagcttggtcccccacccgcccctacatgaacaaacagatgcagaataattcccccccatcagtgcctagatacctccacacatccatacactgtgatgagacctagaatcatctagaacacctgcgggatgaagtgcagtggtgattaagagctagagggttgatatgtagtcttgccaaggcaaaaaacttctggtgcctcagtttccccatttataaaatggggtgatagtattgggttctcaaaacgttatcacagggataaaatgagctgaagtacctagagtgagcacaatgtcttgcacacaatgtctaggtgtttaatacgtgtaaaatgcatatccttatctctcgtcctccacgtcgtggtgggagagaagtggggagcgtgagtgttggggaggcgaagccctcgaggactcccgtgagctctcaaagaaagtgctcaaatggctactttctagtcgccaggtaggtacaggctagggaggggaggcgccggtggccgcctagtggtggcctcagtggctctctct

SEQ ID NO: 38321 - DNA, 2393 bp, Artificial sequence
  DNA replication origin
gggcgtgctcaaccgctttgtgcctgggcgccacccgcccgaaaagctgctggttcgcgacggccgccgctggtgcaccgacgtcttcgagcgcttcgtggccgccgagcagtcggtggccctgggcgaggaggtgcggcgcagctactgcccggcgcgtcccggccagcggcgcgtactcatcaacctgtactgctgcgcggcagaggatgcgcgcttcatcaccgaccccggcgtgcgcaaatgcggcgcgctcagcctcgagcttgagcccgccgactgcggccaggacaccgccggcgcgcctcccggccgccgcgagatccgcgccgccatgcagtttggcgacaccgaaattaaggtcaccgccgtcgacgtcagcaccaatcgctccgtgcgcgcgtccatcgactttctttccaactgagggcgcgccggcgcggtgccagcgccgtctgcccggccccgccctctttcggttcaggggcctgcggagcgggttggggcgggggaaacgatagttctgcagtctgcgcctttccacgccctccagccccgggggagataaggtcatgggagagtgggtggggacacacccagagactggctttgggattgggcactggtccgctgactgccaggctgaagggacccgccaaggactgaacgggtaagagaagaggtttgcaagacagagcgcgcagcccggcaaggggcatgtgaccccgaaggaagaacgcaacagaagagtcctggtctgaacttggccgagtaggggtgggggtgggatggcaggaggagccgcaggaggaaggaggttgtgcagggtctggacctgcagggctgaagttcactcatcgaccgactcagccccaaccgggagccaggcagaaaaaccctgtgccgtaggaaagtgactggaagtggactccagagggacaggtgtggtggcacagtcctggtgtggtgctgaccacccaaatatgactgtgaattgtggaaagggcagtagatctctaatgtggaggtgggaacattattgtggtggaggcaattatgagggtagcatttctttcgagacaaaacacccgtctgggaaggccccaaggtcagcttatgaaggaccccacttgcaccccaccccagccatggaagagcagctggagggtggatggggaggccagagggagcaatgaggggtggtcccagctctgctattgactcggtatgcctttaggacattctcttaccgctcatgggcctcagtttcctaaagtgtgaaatgtcaggcacttccctctaactggcatgcaacagccccacctgcctgagagccctgaggtgacaataaaacatttatgctcaaggggaagccacagcctgctgatatggcgtggagaccctaatagtgggaggaatgcaagggttcccggtgctagagagagaagggagaaagctttcagctgtgcatagggaactgaccagaagggggtgctgctgtctcccatcaagcatcccaaacaactccactgcttaagacctctctggcctacacatgaggtccctctctcctcattcaaattaattgtcttggcagccagcttctggcctaaaatgccaccacctgtgcatacctcttgtggggctaggtgctataataccacgcggtgcccctgcctcctgagtgagtctacccaagtctttccctggcccatctgcaaaggagtaggcattaccccaaccccagagaacaaaaatccacctggcctccggtatccactggaagtttatttctttagggttctatcccaaccagtcgcttaaaaaccaagtaacacagacctgaggggtgggggctggggactgcacctccctcctactcatggtggacagcagtggggactagggaggggcaggagaggtggctgaagcaaggcagcagtaatggggccacgacgccacagagccagctccgtcctctcccagaccctggtgggagtccctgtggcttggggtggggagtgggggacccaccccaggccctccctctcccttcctcagacagcctcctttcgggctcaacccatttcttccggcaggagactgaggcacacagagaggaggaagtgggagaggaggacgagggaggggcagggtggcagcacaaatgaaggcagaggtgagaggcgtgggcaaggccactccacccccacacccaccccagagaggggcgaggaagccacaccatcacgcagcatgtcggggggacaaggcggggtttaaggctgaggggcccggggcaggcggggcctcgggcctcagtcaaagccgtgccagtcgctgtgctctgagtcgtattccagctcggcgcccacacacttgacaccatccag

SEQ ID NO: 38322 - DNA, 2103 bp, Artificial sequence
  DNA replication origin
ctccctcttcgagtggtcggttctggcccctggcctagttgggccgcctgcccgtcttcctcgcgagagctcgcccggcaggcgcggactagcagggcgctgcctcggcgaccctggcacgtgacgtaggcggccctcgccagttggccgttctttggagcccgctcattggtccggagcgtccctcgccccaccctcccagatcaaccaatgggcggaggcgggggcgtgccgacgggagggcggccgcggcgcggggctcccttcctcgtgctcggcgttgagctcctgcagccgccgccgctgcagtggtcgtccctgccctccccggccccggggtgcaccccgcaaggtgaggccacccctctgctccctgcctcccggttccttcccgttcgccgaggtcccctcccggtcccggccctgtcctgagcagtcagtgcctgggaccccagcggccgtgatggcagggctggggtggggggctccgctgtcggggccgggcctggaggactccccagcacctgaactagagtgatgtcaggttcccggggcgcagtgaccgttagctggtgcagctggggtgttttccgcgaagcgattgtccgggggcatgagtgcggtagtgagggcgggggcgtaatggggtcagcgccccctcctccccacgaccctgttcattgccgctgcctcgctgcatgaccttggaccagtagcatctctgagcctccgagcctcagcaccctcaggaaggagggcagtgatgtctgggagtgcgggctccggagactcctgcgtcagccgaggtgagtgaaggtggggagtgcacaggattatctccgagggacagagccgccgcctcgcagctcaggatggattggatgggggggatgtccgattacatttcccccctccccctgagatgacaagaatggggtgtggcgggggtgccacacccacagggatggctgccggagaggataaagggtcctacacctggacccttggggcctcgggggcttgggctgcacctccctcccggtggtatgaaggaggagggactggatttaggttctggacccgtgtttccattagtaagcagggactgagaaagggaagtctccgcttgcctttcttcttgaatcttggcactggaaagtggaggtagggcatttttctgctccggggagttgaagaaagtcggggcagcaccccatccctctcccattctggtcttttgtggagggaaaatgtagctggatatccccccacattctatccatcctgagctacgaggcagcagccctgtccctgggagataatcctgtgtgctcccaccctcaccttggctgaccccctggatccagcctggcctctgcttcttgggacctctggatcacaggcccagggcagggcctaggtggggcatgctatctggaggctaagcacccactagctgagggcaaagtggggagaatgctgggcagaggagggcagcacttgttggggaggcaggaaggtgtgggtggtgagggtcccttctccatattcccccacccccacccccagcacctcactgttagaaggagagagaacagccatacttatctttgcacctttggcccactggagggagaaggaaattaaatcacattaaagctgagttgatgtgaagctgccacaactactgacctccagccttgcctttccaggctttgttctgagtatgtgtggcctctgctgtgtccagtcctgagagtcagcgggtcagtgtggccccatctcaaggcctcaatggctgttcttttcacaggcgtgagctttaatgggaggctacacagtgcttctgctggactgagtgcttgagccaggactgagccccaggctggggtaggagaggaagaggtagggagggtggaaggttgcggagttcctggctcagagagaaagacctcgaaccacaatgagaatggggactgaagaaggaatgagaaatgaggtctcagacgttgggagcatgctgaccagaggtgaatgggtgtagctcctcttcctgcaccctgggctggggcctggaagcttgctgacactccatctcatggg

SEQ ID NO: 38323 - DNA, 1237 bp, Artificial sequence
  DNA replication origin
gcagttagcagccagtttgtgtttgagagagcccacaccagagatggttttgagaagttggctagaaagacttttgaaaaaggcaggcttgggccaggcgcggtggctcatgcctgtaatcccagcactttgggaggctgaggcaggcagatcacttgaggctaggagtttgagacccacctgaccaacatggtgaaaccctgtctccactaaaaatacaaaaattagccctgggtgtggtggcgcgcacctagaatcccagctacttgggaggctgaggcaggagaatggcttgaacccggcgggggagggggtggaggctgtagtcagccgagatggcaccactgaactcaagcctgggcgacagagtgagactctgtctcaaaaataaataaataaataaataggcaaaacttatcttggttgaagagggcttgaattttggctatgagaagagagcggggagggccttccaggttggaaggtgggataatgagggggaggggatcacaaatgtctgcacagacccagaaggtaactaaccgtgagaaacagggattagcggggactatggtaaatttatgtgctcttaaaggggcttgtaatgccaggctggaaagtgagcccatgttgtcagatcttctgatatttcaaaagccacgaaaccagattcctgattccagaaagaggcggaggaggcaggagggggaaggacttcttttaaaaagccccatgtgagctaaacaaaatacacctacgggccactttgggcccaccgtctgccaactttagactttcaagacaaggtctaaaggtagtgtggtgggagtgggtagagtgggcaggagtggatgggctgagatcagaatgtgaaaagctctcaatgtaagcgctgtctctcaaacgcgagggcacatgagtcacccaaagtgctgctgaagtttgtgaagcgctactggaggcagtcccagagggctttggagcaggagagggacgcgatgaaaacaagagctcagaaagattaatttgccaacagtgtgcagactggagatcagcagacaggttatgggccacagggtggcagacttgagggctcctttaaggcagcgaccccggccctgctgaagggaggctggccttcggccgcccaggccgtctctctagttccgttggaagcaaggcgctgcgtgctccggacggcttactgagggcactttggggaatccgtccccacggg

SEQ ID NO: 38324 - DNA, 1483 bp, Artificial sequence
  DNA replication origin
acatgtctcccagaacacagaacacaagagcctaggtttcccttgggtatgtgctgggtatatgcctaggaatggaattgttagatctcaggatgtttgttttgttttgagacagagtgtccttctgttgcctaggctggagtgcagtggtgcgatcttggctcactgcaacctctgccccccagcttcaagcaattctcctgcctcagcttcccaagtagctgggactacaggtgcccgccaccacgcctggctaattgttcgtatttttaatagagatgggttttcaccattggccaggctggtcttgaactcctggcctcaagtgacccacctgccttggcctcccaaagtggtgggattacaggcctgagccaccatgcccagctggatctcaggatttacaaatgttccacattactggtagtcagaaaaccattaaagttagggtcatgccatggctgtagtgtgttggccagggttgggagtaaagcctggcctcaatccatggaagttgggattgtctgtgggcagggttggagtcgtacagagggccgagttaggggtcagtccttacgtagggttgagggtgagtgtgtggccacatttgggaacaatttgaagtctggtttggggttgggtttggacaaggttggagaacactgtgagggtgggtttgggggtcaatctaaggccagggttagaagttaggctgtcatcctgtgcaaaacctgacccctggtgatatcatcaacctaccaagctgtggccgcacaggacccagccacccacaagatgagatccactctgggtccagaaagctctttcactcaaggcgggggtggggagatggaggacaagtgaagaagaaactggctcccctcagatgcaaaaagagaaggcaggcacaggaaatagaacacaacactgactttaatggggcagccctgagccgtaaccttcaaaccttccgcctcagtaccccgtgcgcgaggagggaggggcgactgctacgggcacatcgtcgatgtcctccctactcctggcgatcccacgcctcaccccttcctctccagctgctgcggtctccgtcgccgaggtgggtcccaggtaagctcccaggaggggcaggggagcccctcagcggcccgggacagattcccccatggctgagggcatggggaactagcctggatggagacgccgccgtcctcggagctgggcggggacctgattctgggggtgtggacagagccaagggaccgccccccaaggcccagcgccgggagatgcaaggccgggcccaaggtgttggacactgctttgggggacaggctaggtctctgcacgtggcttctgggctctggaaagcggtccattctcctgacccggatctccggagtggtaggaggcggctcagtcccgggcctgcgctcctagagttcctgtcccatctcctcccacgctcacccatcccaaggaa

SEQ ID NO: 38325 - DNA, 1057 bp, Artificial sequence
  DNA replication origin
ggtggggagggtcaacgcagacagaattcgtccgattacaaaatcaagagactcttctattaggaaggaggcaaggaacctcggaacacccacacaaggaagctcagatgcgatgcgctttcactcccccagggctgtacactcagaacagcaaccaccatgcccccttccctctcccccatcccctcgcttcatttccccaggacccaatctgctatcccaatgtctacccctcaggaaggtactgaagaggctgaacttttcagtaccggatgacgtgatgcgcaagatcgcgcagtgcgccccaggcgtggtggagctggtgctcatcccgctgaggcagcgcctggaggagaggcagaggcgcaggaagcagggcgccggctccttacaggtgccaccccgctccagcttctcccactgctctgggggctgggtggggggcgctccccagaccacagaaaggccagcctgggtgataagtgtgggggaggggtgcttggctaatagagcctggcctgggggcccgtggaagggacatggggctccttggggatgactgagcccgggcttacagcggacccccggggttctttcaggagctggctccccaggatggcagtggctacatggatgtgggtaaggtggccttttccatttctccctcccggttggagctttccttctgtccttcttcctgtcacttgtgagagtggaagtagggagggggaagcaggagaatgagactccagcacagtcattcctccacttgccttgtctcaggtgtatcccagaaggcccgaggtgaaggtgtcccggacccccagggagggggtcagctcaggtaaagaagctgggagttccagacttcaccaggctggtgatctctgcacacagctggggttggggggcacggtacgctgagcctgagacgggaggcaggaaaggggctagagggggagaagggaaggcctggtcgagggccctggaagggtgagtgtagggcccgaggtccaagcctccgctaagctgcttcccaccccagctgggaccggcc

SEQ ID NO: 38326 - DNA, 1352 bp, Artificial sequence
  DNA replication origin
gtacttgaaggccttggacacccgaatggctgcagagtctcgccgggtcctgctgttggccggccgcttggctgcccagtccttggacacctcgggcctgcggcatgtgcagctggccttcttccctcccggcaccgtgcatccgctggagaggggagtggtccagcaggtgaagggccactaccgccaggccatgctgctcaaggccatggccgcgctagagggccaggatccctcaggcctgcagctgggtctcacggaggccctgcactttgtggctgccgcctggcaggcagtggagccttcggacatagccgcctgctttcgtgaggctggctttgggggtggccctaatgccaccatcaccacttccctcaagagtgagggagaggaagaggaggaggaggaggaagaagaggaggaggaagagggtgaaggagaggaagaggaggaggaaggggaggaggaggaggaggaagggggggaaggagaggaattgggggaggaagaggaggtggaggaggagggtgatgttgatagtgatgaagaagaggaggaagatgaggagagctcctcggagggcttggaggctgaggactgggcccagggagtagtggaggccggtggcagcttcggggcttatggtgcccaggaggaagcccagtgccctactctgcatttcctggaaggtggggaggactctgattcagacagtgaggaagaggacgatgaggaagaggatgatgaagatgaagacgacgatgatgatgaggaggatggtgatgaggtgcctgtacccagctttggggaggccatggcttactttgccatggtcaagaggtacctgacctccttccccattgatgaccgcgtgcagagccacatcctccacttggaacacgatctggttcatgtgaccaggaagaaccacgccaggcaggcgggagttcgaggtcttggacatcaaagctgagtcactggacctagctgtgcccccaacctagattggcagcaccaccccagggcagaggactctctgggcacccgctgtgcatggagccagagtgcagagccccagatcctttagtaatgcttcccctggtcctgcaacaggcccggtcacctcggccgggcccggggctgaggtcagcctcactgcctgcttattgcctctttctcagaatcctctttcctccccatttggccctgggctcaggggaccaggtggggcgggtggggagctgtccggtgctaccacaccgtgccctcagtggactaaccacagcagcagccagggatgggccctggaggttcccggccggagagtgcctctcccctctgccatccacgtc

SEQ ID NO: 38327 - DNA, 1553 bp, Artificial sequence
  DNA replication origin
aagggcgtacctctccactgctcaggatgcctccccggactccacctcctggattcgactaccatgcccagttctccaggaggcccaggactccagacctagcctctcacccccatatgcagcctccttggggtgtcctacctgccgagcccggcgaggtcgtgcatggtctgggtgagggtggtgaccggcgaggaagcggccgcccgcaccggggaccccaggaggccatgagatcccagcaggaggcccgggaggtggcccggacgctgggcgccaccgcacacgcctgctggactgagagccgagcctggcgcgggctccggctggggcacctccatcgcggcggggccggcagaaggctggctggagggccgggcgcagggcagccaacaaacgccggcacagctggctgggccgagggaggcagcgggcgaggggtggggggggggggaaggagggagggaggaagagccacagggccaggcgcgagggaggagagggatgcggggagggcggggggcgagggacgccgggctcaggcaccagccagggaagcctctagttgcagctgccacttccacctccttatatattcgaaaaataacagcagccgcgccgccggacgccaccaatggggtagcgggttagatgagggcgggactgagggcggggcccgcagggcaagaggcgcggaggctggatttccaggctttgggtgggccggaggaattaagatttatcccacaccctcgcacatccccctggcgcgaggatcccggcctcccaaaatccgcctctcgcgacatggtttggagctccacactcccaaaggcagcagcaacgccctagggtggcctccgcaggaccccccgcggcatgtcgtcacctgggatcaccgctagggatggggagaggctccaactggctcccggaagtttgctaaacccagctgggctgtacggtctgcgttagacaccccattttacagacctggacgctgaggcgtgaagttcattaactcaatcaaggtcacgcggttgggcaggcggtgggccaggattcgctcgctccaggcgcctctgaccgcgcagcctccccgcctccgcgactggctgcgctgagcagcagcaaaacgtcattcgcaggagaagcgcccagcgtaggaggtgggagggcagtggggcccccaagcggaactgatgggctctttcgcgggaccccaggttagatgttaccccaaccggcccaattttcgcggcagccccaggagaggctctaaacggtggaactaggaatggatttccgcggctgggggtcgaggagggtgtcagcaaccagagaggcgaattaagtatcacgcccattgatgatttggctaacttggtgccaatggcaccatattatttaattggtgtttctttgatgaccagaccagggaggctgaatttgtcattcgttttaagcggagcagcttccaattatctttctttttgttttgttttgttttttttgggatggagtctccctctgtcaacccggctggagtgcag

SEQ ID NO: 38328 - DNA, 883 bp, Artificial sequence
  DNA replication origin
cggctgctgttatttttcgaatatataaggaggtggaagtggcagctgcaactagaggcttccctggctggtgcctgagcccggcgtccctcgccccccgccctccccgcatccctctcctccctcgcgcctggccctgtggctcttcctccctccctccttccccccccccccacccctcgcccgctgcctccctcggcccagccagctgtgccggcgtttgttggctgccctgcgcccggccctccagccagccttctgccggccccgccgcgatggaggtgccccagccggagcccgcgccaggctcggctctcagtccagcaggcgtgtgcggtggcgcccagcgtccgggccacctcccgggcctcctgctgggatctcatggcctcctggggtccccggtgcgggcggccgcttcctcgccggtcaccaccctcacccagaccatgcacgacctcgccgggctcggcaggtaggacaccccaaggaggctgcatatgggggtgagaggctaggtctggagtcctgggcctcctggagaactgggcatggtagtcgaatccaggaggtggagtccggggaggcatcctgagcagtggagaggtacgcccttgttccctcctaggggcccaggacatgggaagtgagacctgggctgtgccccccacacctccaggtgacctgctctcagtctgcacaagcctctccaaatcttctttcccctcactccctcctccctcattgtgcctccaccacgctgcctccgtaatctctgcccggatagccaccattttgccccaggatgggaatctcaagcctggagagggaacttaagggtggcagagccgtggagcactcacacatccatgcccctgctccc

SEQ ID NO: 38329 - DNA, 1011 bp, Artificial sequence
  DNA replication origin
caaagtcttgatcctggaatggagcacacagccccttctccccaggccatgatactgctggtggtgcagaacggagtttagacaaggaggtgcatggccgagagcaatctggaaacgatcagagaggccagttgcgtaatgatggagaagccgctgttttgcagccacgaaaatcatgcctggagagagaatgttccgggatgtgaaattattcacaatctattgttcaaagaagacagttgattatgggacggaaggtaagaagcgttcccaccctccccacacaggaggagtctgtgtgggtgccaaggggcgcagcgagggttgccttggccccacccagcgcttactggcacgcagaaccctgggaggactgccaggctctgagtcagcggggcctggggcagcaggaagggaggggcctcacgtggctgggcctcctctgcctcgtggggcctcctggctctcagccctgcaggcagtgcggctgtttgaaaggacaaatcacacatggcctggtcctcctggggcccagccaagactatgttcctgaaggatggctgaggggagggtgcctcctgggtcgggattgggagcactggggaaggaggtcatccaagcatagggcggggagggagctctcagggttgggtcatggaggatgagcagggatgggtttgcagggatgctatggccttccagagctccaggagaagagagctaagccagcccttgggatgactacaagaggaccgggggagacagggaaacacaaggggagtagaaggcttcagtagaagatttcagtagaggctgaaatctactgatatgtacacctccaaggacacatgtgtcacatcagaatagttgctgaatcccactgggcctctatttcctcatgtgtaaaatgggaataataaagctcctacttcacagggctgtggattagatcaaatgagctgatgtgtgcaaagcactcagaacagggcctgctgatcgggtgcagtggct

SEQ ID NO: 38330 - DNA, 1174 bp, Artificial sequence
  DNA replication origin
agcgtcaccctgggcccgcgggcggcaggaggaggtcagcggccgctgcccgtccccttctggccctacctttcccccagcctgagcagacgcccagcgccacctacccccttttccccggatgctggatgcggcgcctggagccctcagtgttcccgaaactcttgcgacagggcccgctcttccggatccccgcgcgtcctgtcccctcctgggccccccgcgcaccccagacccagggcgtcccggcggactccgtcctgccgctgcagccaccttccctaaaggcgtccgtgcgtgctgagccgaaaggacccaacgcccgggaagcgatcttacctcgggtacccccggccctgagacctggcgaccgccgcccggggcccaggacccttcccgcagcgaggaggcggggcgggcagagcgcgcggccattggccatgtggaggggcggggctactcggccgcgcgtggttggctggcgacgcaggcggctgcgcagcggggacggtcactgggccttggtttgcgggtcgggaagcgctagactgggctcggagaaccgacctgattttttgctgggggcgcgcagtctcgagcaacttccaggggaagtccggtgtccggccagaaaccaggcaggtggccggcctcggagtcatcggggggctgagaattccatccccacgcttcccaagtgaagcagcccctcctccccctgggaactttgaggggtgagggtcttcgtgtcgttctctccggcacccccatggcctggcatacagttagtgcccaataaacgttgggtgccgctgaagtcacaggggcaaggatgcctatcctggagacgtgcacgctgggcctgtgggagtgggagcgggcgggggactgctgggtaggtaggcgcaaggcagggacgccaaggttggctggcgggcaggctgggtatgggttgggtgctgcgtgggagaggcctcttacgcccaagggcctgggacaggtacctcccgcagttcctgccatctgcctcgcccttccccttctggggcagaggccagcacttactgagcacctacgatcttccaggcacagggtcttctattctttttttttttttttttttttgagacagagtcatgctctgtcgcccaggctggagtacaatggcgcgatc

SEQ ID NO: 38331 - DNA, 1168 bp, Artificial sequence
  DNA replication origin
gcgggaagggtcctgggccccgggcggcggtcgccaggtctcagggccgggggtacccgaggtaagatcgcttcccgggcgttgggtcctttcggctcagcacgcacggacgcctttagggaaggtggctgcagcggcaggacggagtccgccgggacgccctgggtctggggtgcgcggggggcccaggaggggacaggacgcgcggggatccggaagagcgggccctgtcgcaagagtttcgggaacactgagggctccaggcgccgcatccagcatccggggaaaagggggtaggtggcgctgggcgtctgctcaggctgggggaaaggtagggccagaaggggacgggcagcggccgctgacctcctcctgccgcccgcgggcccagggtgacgctaaggtggggccgagcctcgaccgggtgcgcctagaggtcgagtgctgccgccctccgctgggtctggacagttctcggcggcgacaccagctcaaaacggcctccccgccctccgcggacctgggtcgcgcccaggaatccgatccaaggctgtgaggcctgtccctttgggaagggtgggtgtttatttccgggatgcactcagagcctctggacagtcaggtcggaaactttgctgtattgggaacactctgtcacctacttccttctcagttgggaaggaagtgccaagaaaacatgaaacaaaccaaaaacacgaaaaagggattctctgtatggaagccgtgaagcctcaaaaatatctaggaggacagccagcgacctgggacctgtggcagccatgtgaaagcagggttaatgtctggactaaatgttgcttccacctaagtgcaccctcagcctccctcccgccaagtgaccttgggtcctctttgggcttgaaggcaggtggctgtgtgggtctcgctgcaggggtctctgtgccctgcaaggtgtatgaccagttgcagtgaggcagcaggttttgggttcaaatcctgtgctagcctctggccagctgtgcaccttggcaacactttccctgtcacgggattggggaaggattaactgaaagaaccttaggatgtgcctgtctacaatgggccctccataaatgtgaacaaatgtgggcttcctttccttttgtttgggccacatcatcccttcccc

SEQ ID NO: 38332 - DNA, 1541 bp, Artificial sequence
  DNA replication origin
cccaaaggcctcgcgtccagtcggctccctaactcgaggaggattgaccgtgcctccgtccaatgagaggctatcgtgacggggcggggagagggtggtggaggaggggatccgggttccgcggaggaagagaaggcggtgtagcccagaagagagtgatggcggcgccgcccaatggacgcgtgggtggaagggcccgagcctcctcatccaccccctccttccgccccccacttgtgcatgcctctgcccccccgggccgcggaactctcctggggcgaccccgagtcccaccccgctgctccgtgccgtcctcgcagctcgagccctcctccagcccagcagtgctcccgcagcgtctggccgctggtcgtcggcagacgaaagggcttgaaccgcggctgaccttagcctttgtccctcggcctagttccgcagctgccgtcgaggccgccagcccctcccccagcatgtttgggctaagccgcctcctttccgcctgcgttggagagagaggtaccagaaggaatgaaaggactggggcttgtctccatggcaactgaaagaaagaggtgggttataaatccttcgccaccctcctgtggcgaaggaggggaagtgggagccgggaagtagagttggccttttgcaggagagtctggagcccctttctgggtgatgcattgggggccatagaaggatttggctgccgctttggagcatggattttttttttaatcatcttcctttctcttttggagagaaaaattggtcacctccaggactgagaccctgacccttccaagcatccccactaccaaaggctgcccaagcccggaaggatcccatcccgttctgtactctgaggtcacttcctcactccgtcaaatttcactggactgtgggctaattaaaagtgcctccgtattagcggggcgtggtggcccatgcctataatcccagctacttgggaagctgaggcaggaaaattgcttgaacccgggtggcggaggctgcagtgacccaacattgtgcaacaagagcgaaactccgtctcaaaaaaaataaaaaataaaaaagagtgcctccctggggagactgtaatgcccactgggcagtgatcctaatgccccttgggcagtgatccttattcccctctcccataatgattggttgtagcaggctgaacaaaaaggttgagcttcgcttgtgcttgctgaatagaattctcacgcccactccacgttagctcccctcactgtaggactagctctgaaaattctagctcctgtaggaagccaacacagacggatctacaagaaccaaaaacagctatagctactcttctaaatctcagtgcctgacattgcctctctttctgcctcctctctccaccccccaaaaaatgtggtcctccttgacctgagggagcttccgtccaagtctgagctctgatcatcctgaagaatcaaagtatcatcatcccttggctggcaagatgaactccaacatcaaaacacttgaaacagtagtatttttac

SEQ ID NO: 38333 - DNA, 792 bp, Artificial sequence
  DNA replication origin
tgtccgcgcgcgggaaaaacggcggcggggccggaaggggacagggtgggccggaagggggggcagggcgggccgggagggcgccccacggaacacttacgcggccgctttttcctcaggctttcgacgcgctggcgggagaccgaggtggggccgctgtaagagcccagtcgatcccgcctcgtgccctcagccgaggccccgaccgcgggcaccgacgcgctgctcgcccggcgccgcagtggctcctgccgccgcccttcggggtccccggccgcctgctccccagccgacgagacggaggtggcggaagccctgccgtggcgctccatgggcgcgccgagccggccccctcccatccgcagcagcagtcgctgccgcccgagcaagccccccagcgtcggattccttctcgcctcctccgcggcagtccagccagagcagaggcgcgccctcggccggccgcctcttccgttgcgccaacgcgcaggaagccaatccgacgaggctggggacggcccaaaggcctcgcgtccagtcggctccctaactcgaggaggattgaccgtgcctccgtccaatgagaggctatcgtgacggggcggggagagggtggtggaggaggggatccgggttccgcggaggaagagaaggcggtgtagcccagaagagagtgatggcggcgccgcccaatggacgcgtgggtggaagggcccgagcctcctcatccaccccctccttccgccccccacttgtgcatgcctctgcccccccgggccgcggaactctcct

SEQ ID NO: 38334 - DNA, 941 bp, Artificial sequence
  DNA replication origin
caacggaagaggcggccggccgagggcgcgcctctgctctggctggactgccgcggaggaggcgagaaggaatccgacgctggggggcttgctcgggcggcagcgactgctgctgcggatgggagggggccggctcggcgcgcccatggagcgccacggcagggcttccgccacctccgtctcgtcggctggggagcaggcggccggggaccccgaagggcggcggcaggagccactgcggcgccgggcgagcagcgcgtcggtgcccgcggtcggggcctcggctgagggcacgaggcgggatcgactgggctcttacagcggccccacctcggtctcccgccagcgcgtcgaaagcctgaggaaaaagcggccgcgtaagtgttccgtggggcgccctcccggcccgccctgcccccccttccggcccaccctgtccccttccggccccgccgccgtttttcccgcgcgcggacactgtccccgcacggtggtccctcgttggtgcgtggcctgacatccggctggaggcctcgggtgctccgaaagcggtaccttcgggggcccccccgcacccattggtatgcacttcccgcttgttggagtggagggcttttccccaggacctgtcctcccttttcttagctccttgggcattctcttcctgagggtcacatgattttatcctcgagaaggcttcttttgactcatttccacctcctttcctcccaaatcctttgaatccccaatgtttgttttccgtgggtttccaaagagctgctctctaatactttaagtcccttttattcgtcaatttcgggcttactggaaaatggtgaactgccccttgagttgcaccaggcctgaaactgtattccgtgcacctctaaggtggctgcccttcttctcgtgagaatccaggtcatctctcacccacatat

SEQ ID NO: 38335 - DNA, 1619 bp, Artificial sequence
  DNA replication origin
cggccagggccgcaccaggcctggccagggagcgccgcgcctgcgcactgcagactctgaagccgccgagccctccgccgaggtgggtggggaaactgcccgggcatccgggtccctcaccccgcccccgctgcatgaatgagaggcgcggcgcccgcccctcccccggcgggcccgcccctcgcgaggggccgccgggcgcagtcagccgccgccacctccgccgcgctctgtccggacggacgctcgccgcccgcagcctgccgcccgccgcagggcgctgacggtcccgcacgtctgccgctgccaccggcgcgcccgagtaagtgagcgagcgagggcgggagcgccgcggccgccgcccccgggctggggtttgggggaccgagccgctccgggttcgggatgctgaggagaccgcgggcccgcgccagcctcccacacacacacactctcccggcgcctcggccggccgggcgcggtgtgcaggggtgaggcggtgtctccaggctgaggagggacgcggaggagggtccggcgcggccccgggactggagggtgagtccctcacaaagggcggagcggggctgtcacctggagatcacggagggaaggtgcgtgggcccccgcacgtcctgctcgcccaagccctggcatcgggtccccgggcgtgggaggcggctgggatgagctgggaggctaggaggaggatggcgaggacgctgcccccgcgttggcggtgggcgcgcgccttggggggtgcggcgtggcagtgttttcctggtccccgtccactcctcccctttctttgtggcgcttgtctcgtgccccgttgtcacagtgtgcatggcagtggtcggggtggagacctcttccctcggcttactcattaatgaaagtcaccatctgtgggcagggggcgtgtgtggttccacaggccggagaattaaggaccctcctttgtttctggagacctaatgatgtgtgtgtgtgtgtgtgtgtgtgtgtgtgtgtgtgtgcgcattcaagtgaaagggacatctatgaaatgagagaatcagagattgtcaaaaagggtatgaggaaaaggggaggggatataacttcatcacacctttacccaattctttacctgatgttatttcaaacagttttttctcactgtaaaaccagtgggttttattcattggaaatgtgcatctaaattctcatatatctgtgtttctagaatactttgcctttttgggcttagttaatggtaagattctcatgtctgtctacataggaatactccaccgtacaggacactgctttctgggtttagttcattgataatttgtccgaatgctcataaacatgtctataggaatactccaatatatctaggacacagttttctccgctcctgaatacaggcagattttgtttctttctgcctccctgtgttaatgagaaggtagtccagcaggttctctctacctccttgcttttttttccccttaatgctttggcagagggttttattgcatattaccctggcatgcgcccttgctttgatgtgaattttcctgtgttctgttgtctggttgtacagcccagctcaatggctcctcttacag

SEQ ID NO: 38336 - DNA, 2135 bp, Artificial sequence
  DNA replication origin
agagttcccaactagcccttcccccctacacatacatagcccccccattataaacattctcccacgggagcatttattactattgttggacctacattggcacatcattatcacccaaaatccatgtttacattagagtttgctgctggtattattcattctatggatttagacaaatgtgtcatgacaggtatccaccattatggtatcatacacagagtattttcactgccctaaaaagcatctgtggattttcagagaaaagagcaacttttgcatgctaggtaagtattgctttcctagtaggggaacagcaggaaacagcagtcaccttggtgactactgaggtgaaacaccatggtgctgttctgtaaatggctggaaaataaggctcaaggagccagatggggcagggaaaaagaaaaagacagaaacacaggcagatttgaataccatgagaatcgatttgcatgagaatggattgagacttctgcaacagcccaggggagagatgagggggctgatttagaacagtgagaggtttgagcaaagcaaagttgaaaagaccctccaggtaactgctatgattgacagcaaggagggcagtgttcccccagcacagccctggcacaggcagctctagaggaagcctgggtctcccactcccttccttttgccacagtctccctagcacatgcctccacccttctctcactttgggggactgtgaccattgggtggcaggtgacttcttgagaaattcactaatgtttccctctttacttcctccctgccttggtggttaatggtttgccaaagcagaaggaacatgcctctaggcgcttgccatgatgacttttgcttcccaaagttaagctactgagctgtttatggtttatgtgatggggcctgagagattaggagaaggaaggagaacttctgggggacacatggagactgaggaagagggggcaatcatttttgcaagctctgagctgcagcgcacacacagtcagctgtggagcttcacagccattccctctgcaggctcctagcctctccagaaacttccgtaccccaggagtggcagacacaaggcgatgggaacaagagagtatctgcagaatacactgcctgctaaagacaagagaggactccccagatccttgccttggtattgcaggaagagctcagcctcccaaaatcggaggtcaatttattgcctgccctgtagaatgggagccggaggttgaggagtggatgtaaataaaggaatgcactgtttcttgcacacacctctctccactatctgggcagagtctaggtctcatccatcaccaaggttctagcactcagctgagaggctgcagcaggaggggcagatggaggagggtgcggtgcataccatctccccatcaaaccaatgggcaccacgtgaccattcttgtgtctctggggactgtcaatctgcatgctaggaaaggggtggcattccaatctttcatttttttgtgtgtgagacggagtcttgctctgtcacccaggctggagtgcaatggtgcgatcttggctcactgcaacctccgctccccgggttcaagagattttcctgccttagcctcccgagtagctgggattacaggcatgagccaccacacccagctaattttgtatttttagtagagacagagtttctctatgttggtcaggctggtctggaactcctgacctcaggtgatccacccgccttggcctcccaaagtgttgggattacaggcgtgagccactgcgcccggccccatgctttcacttttaaaaatgcttgtagggcacgcaaaaatactaaacggtcgatggagaaggtctgtctggagtagttgttttttttttttttttttgagacagagtctcgctctgtcgcccaggctggtgtgcagtggcacgatctcggctcactgcaagctccgcctcccaggttcaggcgattctcctgcctcagcctcccaagtagctgggactacaggcgcccgccaccacacccggctaatttaattttttgtatttttagtagagacggggtttcatcgcgttagccaagatggtctcgatctcctgacctcgtgatctgcccgcct

SEQ ID NO: 38337 - DNA, 1839 bp, Artificial sequence
  DNA replication origin
ggacaggcggcggccggaaagggggctgaccccccccccacctccctcccggacggggcggctggccgggcagggggctgaccccccctcccccctcccggacggggcggctggccgggcggggggctgacccccccacctccctcccggatggggcggctggccaggcggggggctgacccccccacctccctcccgggcggggcagctggccgggcagaggggctcctcacttcccagtaggggcggccgggcagaggcgcccctcacctcccggacggggcagccggccgggcggggggctgacccccccacctccctcccggacggggcggctggccgggcagaggggtcctcacttcccagtaggggcggccgggcagaggcgcccctcacctcccggacggggcggccggccgggcggggggctgacccccccacctccctcccggacggggcggctggccgacccccccccccacctccctcccggacggggtggctgccgggcggagacgctcctcacttcccagacggggtggttgccggacggaggggctcctcacttctcagacggggcggttgccaggcagagggtttcctcacttctcagacggagcggcggggcagagacgctcctcacctcccagacagggttgcggcccagcagaggcgctcctcacatcccagacagggcggtggggcagaggtgctccccacatctcagacgatgggcggccgggcagagacgctcctcagttcctagatgggatggcagccgggaagaggcgctcctcgcttcctagatgggatggcggccgggcagagacgctcctcgcttcctagatgggatggcggccgggcagagacgctcctcactttccagactgggcagccaggcagaggggctcctcatatcccagacgatgggtggccaagcagagacgctcctcacttcccagacggggtggcggccgggcagaggctgcaatctcggctctttgggaggccaaggcaggcggctgggaggtggttgtagcgagccgagatcacgccgctgcactccagcctggacaccactgagcactgagtgaacgagacttcatctgcaatcccggcacctcgggaggccgaggctggcggatcactcgcggttaggagctggagagcagcccggccaacacagcgaaaccccgtctccaccaaaaaaaaaccgaaaaccagtcaggcgtggcggcgcgcgcctgcaatcgcaggcactcggcaggctgaggcaggagaatcaggcagggaggttgcagtgagccgagatggcagcagtaccgtccagctttggctcggcatcagaggggggcgggggagggagagggagctcatttacgatttttaaaaactcagcaagttaggaatacaggggaactatctcaatgtgattaaaaaagcatctacaaaacctataactaacatcatacatattggtgaaagactgaatgcgttccacctaaaatcaggaacaaagcaaggatgtctgctctaaccactcttactcaacatattagtggaaattctagccagtgcagtaagacatgaaaaaatgcatacaggttataaaggaagaaatgaaactgtcattatttgcagaagatatgaggatctacattgaaaatttcaagaaaattcccaccaaaaaaacctcttagaactaataaatgagtttattcacaacgcacaacatcagcatacagttttatatgctggcattgaacatacagaaactgaaatttaaaacccaataacgttttcaatcactcaaaaaaaaaaaaagaaaaacctaggaac

SEQ ID NO: 38338 - DNA, 950 bp, Artificial sequence
  DNA replication origin
ggtgggggggtcagccccccgcctggccagccgccccatccgggagggaggtgggggggtcagccccccgcccggccagccgccccgtccgggaggggggagggggggtcagccccctgcccggccagccgccccgtccgggagggaggtggggggggggtcagccccctttccggccgccgcctgtccgggaggtgaggggcgcctctgcctggccgcccctactgggaagtgaggacccctctgcccggccagccgccccgtccgggagggaggtgggggggacagccccccgcccggccagccgccctatccaggaggtgaggggcgcctctgcccggccgcccctactgggaagtgaggagcccctctgcctggccagccgccccgtccgggagggtagtgggggggtcagccccccgcccggccagccgccccatccgggaggtgaggggcgcttctgcccggccgcccctactgggaagtgaggagcccctctgcccggccacgaccccgtctgggaggtgtgcccagcggctcattggggatgggccatgatgacaatggcggttttgtggaatagaaaggcgggaagggtggggaaaaaattgagaaatcggatggttgccgggtctgtgtggatggaagtagacatgggagacttttcattttgttctgtactaagagaaattcttctgccttgggatcctgttgatctgtgaccttatccccaaccctgtgctctctgaagcatgtgctgtgtccactcagggttaaatggattgggggcggtgcaggatgtgctttgttaaacagatgctttgttaaacagatgcagcgtgctggttgagagtcatcaccactccctaatcttaagtacccagggacacagacactgcggagggccgcggggtcctctgcctaggaaaaccagagacctttgttcactt

SEQ ID NO: 38339 - DNA, 1368 bp, Artificial sequence
  DNA replication origin
cattggggatgggccatgatgacaatggcggttttgtggaatagaaaggcgggaagggtggggaaaaaattgagaaatcggatggttgccgggtctgtgtggatggaagtagacatgggagacttttcattttgttctgtactaagagaaattcttctgccttgggatcctgttgatctgtgaccttatccccaaccctgtgctctctgaagcatgtgctgtgtccactcagggttaaatggattgggggcggtgcaggatgtgctttgttaaacagatgctttgttaaacagatgcagcgtgctggttgagagtcatcaccactccctaatcttaagtacccagggacacagacactgcggagggccgcggggtcctctgcctaggaaaaccagagacctttgttcacttgtttatctgctgaccttccctccactattgtcctatgaccctgccaaatccccctctgcgagaaacacccaagaatgatcaataaaaaaaaaaaaaaaaaaaaaaaaaagaaaaaggggcccaggggacaggcattcagcatatggaggatccacgccagccccggctgctgcgttcccttagtatttattgctcattatcgggcgtgacaggataataggataatggtggggaggtcagaaggtaaacacgtgaacaaatgtctctgcaccataaacaaggtaaagaaaaaagtgctgtgcttttgatgtgcatatacataaacatctcattgccttaaggaacagtattgctgccagcatgtcccacctccagccctaaggcggttttctcctatctcagtagatggaatatacaatcagctttacacccagacattccattgcccagggatgagcaggagacagaagccttcctcttatctcaactgcaaaaaggcgttccttcctcttttactaatcctcctcagcacagaccttttacgggtgtcgggtgtcgggctgggggacggtcaggtctttcccttcccacaaggccatatttcagactctcacatggggagaaaccttggacggtgcctggctttcctgggcagaggtccctgcggccttctgcagtgttttgtgtctctgggtacttgagattggggagtggtttgagattggggagtggtgatgactcttaacaagcatgctgccttcaagcatttgtttaacaaagcacaccctgcacagcccttgatccatttggccctgagttgacacagcgcatgtttcggggagcacagggttgggggaagggttacagattggcagcatctcagggcagaagaatttttcttagtagggaacaaaatggagtctcctatgtctacttctttctacacagacacagtaa

SEQ ID NO: 38340 - DNA, 1845 bp, Artificial sequence
  DNA replication origin
ttgctctagggaaaggggctgctactttgttcctgtcaggtgaggtgaaggtccaggttccccactctgcctctgttgacagtcagggtcagggaaggagcgcctcatcactgttgggcagtgggtagggttcaggcttcctactaggtctccatcgacaacaccctggctgggaggggcagagttcccttgtcactgcttcacatgtgacctccactgatactgtggggaagcaggatagccttgttaccgtttggcagttgcgaaagtcctgagtctccaccaggcttcctctgagaccactggagagggggcgggggagaggaggggggcgggggagaggaggggggcgggggagaggaggggggcgggggagaggaggagggcgggggagaggaggagggcgggggagaggaggaggggtgctccgttaccaccagctgggaatgaaagtccaggcttcccatgtggtctccactgacacccctgggaagggagacctcattgctgcccagcgggataaaagtcctggcttcccacccagctttttctgacactagcctggccagggggaaggagattgaaacctcatgatagcctgaagccgtgaagtccagcctgagcctagccatgaagccgaggctccccactcagcctttgatggtgcgggtgggggtggggtcttacattttttcctatggtatttggctggcacagaacgatcattgtctaaaagttttctgttttgctaggccactccatcttggtcctttggcaagcagagcaggattttcttgggcttttgtggggcatctattcccattgttgtttccagaatgctggcttctttgcacactgtctgggatatatgagccaaaaagataaacccagagaactcattgctgtgtcattccctaggccccaaagtccctagctggtttgccttcttctctctgctttcagatgcttgttttataggcagtatctagggtttttagccatatttactggaaagaataggaaaaaacacatctactccatatttctgagagttgaggtgtcataggttgatttaaccatgccactgatgcctttagctctatctgccatgcagcaggtatcttctaggtccttcatggggaccaggcactagttgaggccaaagaggagacaaagactgactctgacttcaggagctcacagttttgcgggaacacaggactttgccccaggtaagcttggatagtgaagaataagatgctatagaggaaggaattacttgaatggcctggttggggagagcttcctgggagggtgaaagtggagatagagtattttggtaaattttagagaggagctgcaggaagtacaggtgccaggagaggagcagaggtccagaggggtaagtagggatggcaggaggcagcagggagagagcttgcctggttgggccctcaggtgaagcgaatgagcctgaaggacaccatgcacaggggcttgacagtagtatcttcagaacaggaatctggggatcaactgtgacatggcaattgtgtgggtgagcaaagatggtggcctggccagtgcagtggctatggggtggagaggagagaacaggatcaagaggcatttagaaggtagaactgatgggtgtctggattgatctggggaagaaagagagaggaattagatatgaggctgagatttccagctgaggtctctggggaagaatggtgccataaacacgcagagagagaagacagagaggggaaccaatctttggaataagaggatgagattttggccactggtacccagaggcccttcttcagagaatgatgcaat

SEQ ID NO: 38341 - DNA, 1536 bp, Artificial sequence
  DNA replication origin
tgcctgtaatctcagctacttgggaggctgaggcaggagaatcacttgaacgcaggaggtggaggttgcggtgagccaagatcacgtcattgcactccagcctgggcgaaaagagcgaaactccgtctcaaagaaaaaaaaaaaaaaaaaaaagtgagtagatgatgggcgattcactgagatgggaaggcctggggagtgccatcagggttctgtttcatccatattaagttttttgtcatccaggacatcataaatcatcagatggggggttaggtagagaggctggggctggaggtaaaatctgctatttaaaaccatgagaatgatgtacatttaagatctgtatgtttgcaaattgatgcttgatttttaaaatcataagaaagaatgaaacggggaagggtttgtaaatagaccagagagagaagcggctacggacaaagccctggggccctccaacatttggagctgagtgaaggagctgtctgaaaagaagtctaagaaaaagggcagccaaggagggaagaaaaccagaagccaagggaggatactggttcttgaaggagagtgttcaaggagaccaggagaggtggaagaagacttgcttttgggggcgtggagctcactggagagcttggctgaggctgtttcagtgaaggggtgggaccgaagtcagggcaagccagcaaaagaacggaagagctgtgctctgaaggagcgagtgcagaaggctctccagagaagttttgctgtgaagggaagaaggtccgaagctggagggaatgagggattaaggcgaaaagggggctacaaaattggagagacagggtgccaaggcatatttcttataatgctgtggacgatccaggggaatagaagccacttctaacactggagagagaggaggtaactgaagaaagggggacagggagaggaccttggagtccaagcggaggcagggccagcggcaggaattgggatgccctctccgcctaacaagaggccagggggcagtggtggccgaatgcaaatgtgggggcttcactgcacacactttcggatgcatggcaccccggcccgcgtcgctcccggtaaccccagggcacctactgctggctccaatcacggccaagttgcccccacagactggtacgtgatgtgccaccaacagcaggttctgcaaacaacctgtgggcacctctcactatacgtgccgggcaccgagcgtatctcatcgggccaagtccccctggcgcaagctccgcgggcccctcaactgctctaaaggagccctcgcccctaccccagggcagtggcttccctcagcccctcccacaaagtgagccctccaacacacccgaaccctttgcgagcccggctcccgccaagcccgggacaacccgtgagcccctagttggcccttaagagaaagctgctcctcaccctgcccggggccccaaggggaccacccggacgcccggagcccagagggggaagtcagcacagcctctcctggcgttcgggccatcaccc

SEQ ID NO: 38342 - DNA, 783 bp, Artificial sequence
  DNA replication origin
gcaggagcaagaaggcaagtgtctgttgcccgccctcctcctcttccctgcctggctgagccagcacttttttcttctctcctttatctgctcagaaagtacagggtgttctgtttctcctgtgcatacagatcaaggagcggatgttatttctttctttctttccccaaggcgagagaaggacagggcaggcaccgagtaccatttaagtgattctccttcctcagtaaggcagtttctcatacattaaaacaaaacaaaacaaaacccagaagggaaaggaaacgatgacacaaaccaacagaaaacaagttgccccttagtgcccccactccccagcaggcatttagcacacagtaggtgtcctggctatgttctctctctccctttcagttggaccacagggtgtgctggctccatgggatgatatcagggccacaggacggactcatttctctgccctctgtgggctgtgtagggggctcctctggcttcctggaggcattggggattgacaggcttatctgggacagggcctgaggagggacaggaccgtgggattagctgtgagggtcagaatgcaggggactcacgtggcccctgcttacttgcgtgtcattccatgtgcgatgtctgtttgagttcaaagtctctgagaccaggtgcagggagctgggggttctttctgtgctgatcttggaggcagagtggctgcctgcattcattccacggtccattccacagcttgttccaaagacagtctgctcatgatgtagcttctgc

SEQ ID NO: 38343 - DNA, 1284 bp, Artificial sequence
  DNA replication origin
ttagtttgcaggaaggagaacctggggtagggtgggggaggactggagccagccctgatccgtgtcctctcgggagggaggcaggacctagcatctctggggcgagggaggagagggacgggagtcagaggacagaggcggggaggaggaaagggccggagccgccctgctcccggcgtggcctcatccccagcgaaagcgcgacacccgctgtctgggaaggggagcgggagcccttgcctccgaactggacgctgcccggatgtggctccgggtctcgggcgccacctaccggcccttttgggaaccgattctgcacggagttggcgggcctgggtctcagggggacttggagggattttaggggctggagggtgggtgggtgggagggggggtggtggagggaggattcccgtccaggcccaggcatcgcgggggcaggtgcaatgggcgggggaggcacaaagagcagcttctcagcctaagcgtatttcggaaaaagcctcctttgttcacccatgtcacttaagggatgttaaggacgctgcggttccaagtgggatagaaacctcagtggtcagaccctgaaatgcatggagaagaaagtcagtgtggcagcctttgacggattgattggagggcaggaatgactatcttgttagtgaggtctatgtagatacatacagtgaattacacatatctcaactgtgcagctcagcgaatcttcatacgtgcactgggtacccacccttcagattaagatatttattccgtctaccccagaaaggcccctcctgcccccttcagtcatctccctgccttctaacctctcttctgacctctggcttcatagattgggtttgcctcttcctgagcttcgtgtgaatgaagtcatacagtccgtgcccttgtctctggcttcttttgctcagtgcgtgattgaggtgcatctgtgtggttgggagtgtcagtacttgggttctgtctactgctgaagaatagtccgtggtatggatatgctaggtacagcaccgcatatgtctctgttctcctgctgatagacccgtggggtgtttttattttcaggctgttacgaatataggtgctgtgcacactctttaacttgtgtctttggtggaatgtgccctctttctgttgggtgtattcttaagagtgggattgctatgtcatgggaacagttatgcgcagctttattaggtacgggtgacagtgccccttgtttgctgtccggcagccaccttccgcccacatttgttccctgtt

SEQ ID NO: 38344 - DNA, 1236 bp, Artificial sequence
  DNA replication origin
ccagcacactccgcggcctagctctggggtccttaaatatcggtctcccgtaggttgctgtagtcggccaattcgtaggcctggcaggtggcgccctcggccacctcgtgtgggacgcctagggacacagcctccacctctgagcgctgggcgcacgctgcctctgcgcgctgcgcgcccccggcgcggatcttgtgcgacaggctggagactttggcgcgcagctgggtcgtgggtctccggaacggccccagcagcctccactcgcggaaggcgctgggtggctttcgacggctggcgaccggagcctgcatctcgggcgtgcctgggggttcggggtcggggtcggggagcgcggtgagggccagcggcgctccggggggcgcgtcgcccgaactcggggcgcagtcctggcgcaggccgctggtggaggcccgccagtggtggccgtagacacgccagagagggcggcggcgccggcgacgacggcactggcagcgcaggagacggaggaaggcgcgcttgaactcgcggctggaacaggggtagatgagcgggttcacgcagctgttgaagtagccgagccagaagatgaccttgaagacgccctccgatggcttcagctgcgggaacaaggagcctgtagggagcagagaccgatactatttagctgcttggggagggggaggccaggcggctctgggcgcaaaggggagacccttcagtagccttggctgagtcattgactaggagttctcaagggatccgtgctgtaaatcaggaggtccatgaacttggatagagaaaaataataattgttttcactcacctctacctgatattgaggattaccttcaatgaatgtaggcaacaaaccagagtagagttagacaaaaccacgtgcaattgctgtttttgtagctcaaaaccggtgcaatattggcagtttcgtattatgagacaaagtagcaaacatagccatgtttgctcatttctgcgtgccagcataatttcacaaagtccccgactctgtgacaaagtacggctctctggaaagatgctttgaagataaaataggatagaacatacgcccccgcctccctgccacatctcctgtctgagtcactgttttcctgaaatgataaatgaccctagtccttgcctcttcctacacagaagataacgtctgaccaggctagtaattatgctgctatgaacagatatactcttacaccc

SEQ ID NO: 38345 - DNA, 1064 bp, Artificial sequence
  DNA replication origin
gctgtgctgcacggcctccatcctcagcctctgcaccatctccgtggaccggtacgtgggcgtgcgccactcactcaagtacccagccatcatgaccgagcgcaaggcggccgccatcctggccctgctctgggtcgtagccctggtggtgtccgtagggcccctgctgggctggaaggagcccgtgccccctgacgagcgcttctgcggtatcaccgaggaggcgggctacgctgtcttctcctccgtgtgctccttctacctgcccatggcggtcatcgtggtcatgtactgccgcgtgtacgtggtcgcgcgcagcaccacgcgcagcctcgaggcgggcgtcaagcgcgagcgaggcaaggcctccgaggtggtgctgcgcatccactgtcgcggcgcggccacgggcgccgacggggcgcacggcatgcgcagcgccaagggccacaccttccgcagctcgctctccgtgcgcctgctcaagttctcccgtgagaagaaagcggccaagactctggccatcgtcgtgggtgtcttcgtgctctgctggttccctttcttctttgtcctgccgctcggtgagtgacccctctcccaccggcccctcctgttctccctgagcctatggcggtgccctcctggcacccagacttgggcgacccccacctgaacctagaaggttgacttagcaagtcctgagtctcctaagaggcaggtgtgcatgcaccattttgtggagtgccaaggaacggttcttcatcctcgccaggttcgtttcacaggcttctaacttttctgtccttcccttcttcttttccaagccttgggcttatgctgctggcccctctaaaaataaaacgtctgtgaaaatctgggcgggcatctgcccatatgtggtcggcagtgtatgtgtccccctacagatccccctcccgggaggtgggtgcacagagtgggtgggcctacatgtgttcattcatgggtagcaagccctggccagtcagcaggtacatcagcagatgccagaagccacccgcttttccccagcactcattcagttt

SEQ ID NO: 38346 - DNA, 1032 bp, Artificial sequence
  DNA replication origin
agcgccgcgcgcgtagcgggccccggctcttcggtgctactccacggccggcctcggggagcccggccgccgcccgggccaggcagctccgctctcggacagccgcgctccgcgtcacaggaacttgggcaggaccccgacgggacccgtgcgcggagctgcatctggagccccgcggctatgccctgtgctcccctccctgccggccgctcgttctgtgccccggcccggccaccgacggccgcgcgttgagatgactttccgcgatctcctgagcgtcagtttcgagggaccccgcccggacagcagcgcagggggctccagcgcgggcggcggcgggggcagcgcgggcggcgcggccccctcggagggcccggcggtgggcggcgtgccggggggcgcgggcggcggcggcggcgtggtgggcgcaggcagcggcgaggacaaccggagctccgcgggggagccggggagcgcgggcgcgggcggcgacgtgaatggcacggcggccgtcgggggactggtggtgagcgcgcagggcgtgggcgtgggcgtcttcctggcagccttcatccttatggccgtggcaggtaacctgcttgtcatcctctcagtggcctgcaaccgccacctgcagaccgtcaccaactatttcatcgtgaacctggccgtggccgacctgctgctgagcgccaccgtactgcccttctcggccaccatggaggttctgggcttctgggcctttggccgcgccttctgcgacgtatgggccgccgtggacgtgctgtgctgcacggcctccatcctcagcctctgcaccatctccgtggaccggtacgtgggcgtgcgccactcactcaagtacccagccatcatgaccgagcgcaaggcggccgccatcctggccctgctctgggtcgtagccctggtggtgtccgtagggcccctgctgggctggaaggagcccgtgccccctgacgagcgcttctgcggtatcaccgaggaggcgggctacgctgtcttctcctccgt

SEQ ID NO: 38347 - DNA, 1867 bp, Artificial sequence
  DNA replication origin
gcgctgctgtccgggcggggtccctcgaaactgacgctcaggagatcgcggaaagtcatctcaacgcgcggccgtcggtggccgggccggggcacagaacgagcggccggcagggaggggagcacagggcatagccgcggggctccagatgcagctccgcgcacgggtcccgtcggggtcctgcccaagttcctgtgacgcggagcgcggctgtccgagagcggagctgcctggcccgggcggcggccgggctccccgaggccggccgtggagtagcaccgaagagccggggcccgctacgcgcgcggcgctctgagcgtgcccggcaagcgggcaaagcggcggctccggggccgggcggtgcaggcagcggccactgcggcgctcccaactcggcgcggggggcgggaccgaggaggggcagcgccaggaaggaggagggggcgacccgggccgagagacgggcgccacactccagggtagaagggacccttcgctcaggacaagcgattgtgtcggggtccggggggctgcggcgctggcgcgcgctcgggtcccgcagcagccacccacgcctctccgcaggtgcccaagcccgcgctctcccctagcggtgccctttgcgttccttcccgctcctctcccggaccccctcccccttggccctcagcggcgtccctcttcctcccgccctctcccccgagtctctcggtcactcgctggtgcccttgggcgcgcggtgcgttgaaggcgtgagtcccgggtcttcgggatcccggctttggccgccagagagcagcaagcgcctgggatctgcggactgcggaccggacggcgcagtgccgctgcgggttgcctcctgggactgcccgcatggatctgccgcacctcctttttctcacgccactggccagggcagggtttcagacgcctctgtccagtgcgatggcgtgaagagagcccaggaagggtcggaagcctgtgctgggcagaggctgggtacgatgggctcaggagcagcaggctgtggctacagccctcggaccctgcccaagacacgctggtctacatacgccaactttcccactgttacttttccctgtatcagatgcgggaataaacctttctatagctaccctaaataaggggccttgttcttgttctggcctttttaagagggagggtttaagtgccagagggtgggaaagggcacttggcaggatggttaagcggggcgggtgtgagacagtctggctccgcatctgaatccaggctccgccccatattaacagcggaacctctttgtgcctcagttcctcaactgtcaaatgagaataagaagtgatgtctacctcctggcctgagggttaactgagtaaatatgagtgagggccccagagcagtgcctgggcatgtcagcggagtagggcttcttcagggcaggcttttaacagggaggatggaaggcgaggaggtgtggggctggtatggaccccgggtgcagatgtgggagagggtgtgagaagcttcttgagcaatagcaggactgggtagggagaggcacaaggaaatcatacagttagccaacataaaaataccggctgctggcacgtggcaggcaccatgctggatacactaactgtaaggagggtaatgccgtctcatagttgcagaatgaggagggcttgagccctaccagggagatgaaggcctgtttgcagaagtgtctgggaggggacggagaacccatagccctagtgttcactggttatggttgacacaggggcaggatgtctgagttctagatgagaagctgctttggagaaaaagtaaaaaactgcagaaatgtttagagatgggtggcctc

SEQ ID NO: 38348 - DNA, 1352 bp, Artificial sequence
  DNA replication origin
gagcaggggtgtgacatgagccagttgggagtagtggttatgtgcaggcattttggtgttgggctgcctggattcagataccagaactgccacctattagctgtggaatctaggacaagtgaccatgcctctctgagcctcagtttcccacctgcaaaatggggataacaacagtacctacctcctagggttgttgtgaggactgagtgggtaaggcccttgcaatagggcctgccatttcatgttaggtaagagttagcttttatgaattcaatctgagctccagctcatggaaagttacttgacatcgctatgtgagttaggaaaacaggctctaaaaccaaaggcccttgcagtgatggaaataagcggtacccacgcctgacatagccaaatggaggtgggatggaggggaagaaagacatttgagccactgagaggcggaagggaaggaccagtgaggtgtgtgaactgggtgggggtggggagggaaaggtgacccaagggaaagagaggccttgagtctaggtgagcaggaggagagtgatgctggctaggaaagcagggtcttggggcaaggcaggagagaggaggtgaggggctatcttcggacctacaaggctcacgaaggaagaggtgatcatcagaaagctgtaaatatggggatgcgtttggagctcaagcaataaatggaggctgaaggttgagctttgaggggaggtcattcaggcagcagtgcaaagctccaagatccatgagatttccaaagggaagaggactgcaagtggagagaagaggggaggggagtagagggaggaaaagaggagaagaaactggacaggaggagtggggagaggaaaggaggccaaacagcctccagggtggtaatgaacaccacagctatggtgtcatacctgagtttgagccccgctctgtcactaactagctgtgtgaccttgggtagattgctgaatctctctgagccttaatttcttaatctgtaaattgggcataatgatagaaactcccatacagggcaatgatgagaattaaataagattgtgtgtgtaaagccctgatttcaatgcctggcaccagggcagagcccagggaatggcagctagggtcattaggattcttatgaaatccaagttaaatgaacagaagaaggaagaggggttagagaaaaggcaacagagtggagctgcttttaaagagccaggagagcatggtggagtgggaggaaaggcagggagatgtttaggaaagcaggagaggccagcaggtgcctggcaccaatcagtacagaggctagaacttagtgctttgggtttggcaactaacatgtctct

SEQ ID NO: 38349 - DNA, 1344 bp, Artificial sequence
  DNA replication origin
cgctgagacaccccggcgccaccgacctccctaacggggctccgccagctcccccagccccccaacgcgcagtaaagggagctttcctaacctgaaaagcgaagccaagccgcctcacccgagcggagaccagcgcagccgggcaggcccgagacgcgtcacgcgcccgcggggcagcccccggcccctcctcactggggtcccgaccccgcccggccgggcacccttgcgcctgggacccgaggcccggggtcctcactcggcccccgcggctcccctgcccccgcccgcgttcctcccaccccgggcgtttacctgcctcggtcgtgaggagaggagaagctcgcggcgccgcggctgtcagcgactggctcggaggacaggcgacgcgcggggccgagggggagggacgcggggcggggaagggaagcggcggcgctcgcgggcggaggtcggcgcggggaccaattgccgcgcggcccggcgcacactctgtgcccccggcgggcggccggccgaggtttaagttaaagggtgcagcgctgccaagcagggccgggaatgagtcaccggaaaaaacgagttgagattcgcttgaacacttgcatcagttgataccgcctgcgggtgccatcgctccctgacgtggctcattgactgtaaaaatcatctttaattggaaattcggcccaaagctccagctccccgttacataatggagaaatcgagaaaatgaaaggctcaggaatgaggaagcaatttctggaactttggcaaccagaaatttctaaagaggagagcaaaaaattttgcttaacctggattgagattaatatttatgaattttcacataaactcttaaattttgaggcgtagaaaggacactgaccatcacctgttccttccttcattcactttctactccttgttttaggcaagagatgatttaggtggtgatattaacaaatgagaaaaatgcgctccgtttaaaaacccgtgtttgcacattacctgagatatcttctatgaaacagggtggtgtgttcttgcgcaggattcctgctgacaactgtctcattttaaaggagagcgaaggatgaagtgatagaaggacaggatttagagggagggggatcttataaattattacccaaattgggcacttttaaagtgaaatgggcgtaaaccaggcatgccctggggaaaataggacatctagtctcctagttttgggtgagaggtttaggaagcatgtaaggaaagagatttaagaatgttgacagccaggtgcagtggctcaggcctgtaatcccagcactttcagaggccaaggcaggaagattg

SEQ ID NO: 38350 - DNA, 841 bp, Artificial sequence
  DNA replication origin
agaacgtgtttttcgggagagcaaaggctgtgtctacggcagcctggggatatagtaagtaccttgtaaatgatgaatgaatgtatgaaccaatcagctgacaaacaacaatttgtcctggagggggacccagttcctgccacagttgatcttagtacaatgggaggaaagaattagaaacaatgattcttttaaacagccgggaagacagagccaggggccttctttcaggaacatctggatgaggaatctgcagctaggcttattttactaataaatccacatttacttaccaggcactttttctgcaggtggtctgaaggattaaagaagcctcgcatggcgaagatatatcgggttgtttgaggagagttaattttcaaaaaaaccaaaacacttgtgttcaaatatagtgtcccagggacacagtgtgacatctacctgggtggtggccatttgggatcagagacccttgcgtgggggctttgagggtgggcagtagctgtgttttctcctctggacaggtcagcctgatgcctaggctgtggcagtccagcaggcctcacaggggtggaagagggcctcaaatgatggctgagcttggagagggcagtagttttggaaagagcgggtgttcttgccctgggagaagatggaggcatagcgtgcagcctgcctgggcacgtggagtgtggactggtacagcttgggttccctgtgctggggaggctggaaggtgagttccgctcctccttcagcagatggaggagcagaggtggaatatcagggagacatatggtaagtgttggggtgcagcctagacatatcccaagtgctccac

SEQ ID NO: 38351 - DNA, 1069 bp, Artificial sequence
  DNA replication origin
gacccccgccaggggccgtgtaggcgcggagccccagccggcctgccttgggtccgaagaaagttgtggcttggagctagtcctccttctacgacccctgggggcgtccttccttctttttgagcccgcgatgggaaggcgctcccaccccatccccggggtctctgagacttcctggcgaggtggggcggcgcggcaggtgcagggctggggagggcctgacagccctggagagtgcccgaccccagtccgccgccgtcttctaggcggattccccagaggcaggtcccagtccccggcgcggggaggcggcgcgcttcagaggggcgcagggtgcgcgggggccgttggccctccgggcacttcccctttgcggtctccccgccctccttcggagctggtgcctgaggtcgctgggacctcagcctggcgtcttctctcgccccgagcgaggcaggtgccgtgggcggccccggctacttctgcatttcgagcgcttactttgcattcagctctaagtcggagagctctggggacagccgagagtgccagtggcctcatagggagactgagggttctgtttcacctcgggcgccgtgtgggtctgggctgtccacagcacctctgcgcctcagtgataggagaagccaagcgcgaggcctctcaacagctgcgtgcactctatttcccaggtatctggaatcccggcgcctagaacgtgtttttcgggagagcaaaggctgtgtctacggcagcctggggatatagtaagtaccttgtaaatgatgaatgaatgtatgaaccaatcagctgacaaacaacaatttgtcctggagggggacccagttcctgccacagttgatcttagtacaatgggaggaaagaattagaaacaatgattcttttaaacagccgggaagacagagccaggggccttctttcaggaacatctggatgaggaatctgcagctaggcttattttactaataaatccacatttacttaccaggcactttttctgcaggtggtctgaaggattaaagaagcctcgcatggcgaagatatatcg

SEQ ID NO: 38352 - DNA, 1388 bp, Artificial sequence
  DNA replication origin
gccagtctgtgatgaaggagaagaaagaacccctcagggaagactttctgggttacgggaagccctttaggctctggatttgcctcttatactgagctctccatgcagttctgacactgagattagatgagattatcgagaaaccactgcgtctgcaaatgcattcccccaaggttatttctattacctgcaaaggaaagaagcttaacacatagagtagtgggtccatatggggaaacttaatgggagaactttaacttatttaatttatagtgtttatagcccaagaagaaagaaccagaagatatatacatattttttctacaaataaagctgatcagtggcctcctttttcagggtagctgacacagttctcagcaccaccctacagctgcattttgggttcaacagacttttgtggctggcctgggaagcagatcaccatttataacattgtttctaagggagacacattccaagatccaaacaatgaatttagtaaagaatgcttggcttccaggctggatgagctggtctggctgtaccttgggggttggcctgaggctcccttcccctttggtccgcagacactgcagggttggggataggcacgtgagggggagaactctgagtagatagggaacctgcagccgggctgctcaagggcctctgtgtactgggggcgccaggaggtccagggatggaaaagggggaggtgagaaatggacaaagaaacttggcctccttggcattgctgtcacgtctggccggcccgccaagtcgaaggggcctgtttagcccctgtccggctcaaacccttttgggaataagctgggatgttagaaaaaacaaaatcccacaacctctgcctggggaatccaggccgctggaggtgggcttggtagggcagcgtgactgttccctgggagtggctgtcacagctccgggtgaaccgaggagcttgggccaagtctccatccctcttggagagggcagcagcaaggaggtgaggggagccagctcatcctccccaaccctgcactccccccccacctccccacccccagcccggaagaatcgctggcggcgggagcctggacgagctggcggggaaggggacgcagccacagcattgtctgggagggaggggagaagctccgcccctagaggggaggggagaagaggagggggcaggagacaaggggaggaagaaaggcgaaggcaaggcgaaggggtggagagtgatatgaagagcgagagaaaagagaggacagcggacgagcagatccggtaggggctgaaaaaggccaaggggctggagggagggagaggaaggaggaggggagcgaggagggcggggcgcccggtccccagtcgcgcggccaccg

SEQ ID NO: 38353 - DNA, 1142 bp, Artificial sequence
  DNA replication origin
ccccgcgcgctgtcacccaccggccccgcggcgcggcctgcgcgcccccaccccgacccatctcccgggaccccgcgcccgccggccaccctggccccggggcccaagatgcccggcggccctcagctcctgccgttctgccggccgggccgggcccccggggtacccaccccttcccgccacgggagccacagcgcgctcgggccctcaggccgcgcagcggggaggcaaatggggcgcccccagaaccccactggctgccgccgcctcctcccgggctctgcgcccgcgcgtcctggggtcgcttccctcgcccctcccccggtggtgcgcacgggcatcgtctcgccccctggaattcaggggcatcaggaggggcggcaagagggtgccttttacattcttgctttcttcccttctacaaagactgcgcgaagtaattttagaagcagctcctccgaccccggggcctttctggcctgttccctggggggtcgcgagtccccctccttgccacctttcggggggaaaaaatgacatttcgagtgtgactactttaaggcgcaggattttctccttcgtttggtcctagatgcccccccttggatgggtggctgataggatgtcggcctgcaggctgggggtttaagcgtgactgatgggaaattatcgattgtcagggcaaagggtaaatgagggcaactgcaggtggaagaaagtcacccataagggctttctgggtctgcagcgtttgtagtaggtgctacttctattcttgcagtgctgggagacgggcgggggaagatgcagtccctgctgacaattgggtcatctgcgcgcagagaaggccccgggatgtgcgaggacatgggactgggagtccggaggcagtctggtttgagctgtcactaattggccatgtgacctccctcagccggcttcgtcctctctgaagcaaaaggctggaattggggtggctggagcatttttattttatgcttttgtatttgaatgctgttgggtttgggcctcaccgtttctggttgtctacacctgcctttttcaccgttgcaggtgacgttgcctgcctcccctgaaggtgtttgaacctggtgagatgtataaagggcccttttcagctc

SEQ ID NO: 38354 - DNA, 1291 bp, Artificial sequence
  DNA replication origin
cagtcaaattagaaggttcattttgtcaaggttaaggatgggcgcccgtgacgcataaaaccaagcttagctggacctggtggtgtggtcctgtcatcccagctacttaggaggccaaggttgggggatcccttgagcctggaaggttgatgctgcagccttaattgtgccgttgcactccagcctgggtgacagagtgagaccttgtctctaaaaaattaaatataagcaaataaaaatgcagttattagataaataaatgggaagacacattattgtcaagacacagaccacacttgcctatttcataaaattcctttagttgctgctcccccaactgcattaatatgtgtgatgtcactttccaaaactgtgtaaaacacataaataattctgattataaaatcaatttctctccatgtgaggtcagacagacaccgtctacaattctgtttctcaagagttgcccgggaactagtacattatcattcagttagtaaagcaaccatgacaacggtttcaagatggaaggtgttaagaaagtactaattattagaacatttaaaaaattgtattcagatttcagcagtggctcaatacgtgtggtccccagaccagtagcatcagcatcacctgggaacttggcagaaatgcagattctggagcctcacgccagacctccagccttagcaactctgggggtggggcccagccatctgcatcttaatgaagtcctcaaagtgaggctgcccagctctaagaccgagggccagggatttacacttggcctttctgcttagcggtccaagaacctcacccgggggcatcacctggggacaatttagaagtgcagacttttgggctgcaccccagagccactgaatgtgaacccgcccctagcctaacacgacccccagagaattcacgtctgaaaagccttggtctgtattacgatctctgcatgaggtaagaaggacttcttctccagttaggttaaaaaaactggctacctaagtggagaagcggtgaaattgttttaaaacatccaacccactgagcccaatgcaccacaaactgcttgcttatcacgctcgagcaatgacagggctcggtggcaggcggggtaaaaaggggggacctggaccaggacactcagggaccagcgctctgcttgccaggtgggtccccaggaacaggtgtgactggtgggaagggtcgcgaaggggggcgatctttctgcgcaggggagggaaatgaaaggaacgggaaggggacggctgggtgcgaggcc

SEQ ID NO: 38355 - DNA, 1241 bp, Artificial sequence
  DNA replication origin
ttgggcacacctcccagacggggtggtggccgggcagaggggctactcacttcccagtaggggcggccgggcagaggcgcccctcacctcccggacggggcggctggccgggcaggggggctgaccccccccacctccctcccggagggggcggctggccgggcggggggctgacccccccatctccctcccggacggggtggctgccgggcggagacgctcctcacttcccagatggggtggtggccgggctgaggggctcctcacttcccagtaggggcggccgggccgaggcgcccctcacctcccggacggggcggctggccgggcggggggctgaccccccacctccctcccggacggggcggctggccaggcgggggtgctgaccccccacctccctcccggatggggcggctggccgggcgggggctgacccccccccacctccctcccggacggggtggctgccgggcggagacgctcctcacttcccagatggggtggctgccgggcggagaggctcctcacttctcagacggggcagctgccgggcggaggggctcctcacttctcagacggggtggttgccaggcagagggtctcctcacttctcagacggggcggccgggcagagacgctcctcacctcccagacggggtctcggccgggcagaggtgctcctcacatcccagatggggcggcggggcagaggcgctcctcacttcctagatgggatggcggccgggcggagacgctcctcactttccagactgggcagccaggcagaggggctcctcacatcccagacgatggacggccaggcagagacgctcctcacttcccagacggggtggcggccgggcagaggctgcaatctcggcactttgggaggccaaggcaggcagctgggaggtgtaggttgtagtgagccgagatcacgccactgcactccagcctgggcaccattgagcactgagtgaacgagactccgtctgcaatcccggcacctcgggaggccgaggttggcagatcactcgcggttaggggctggagaccggcccggccaacacagcgaaaccccgtctccaccaaaaccagtcaggcgtggcggcgcgtgcctgcaatcgcaggcattcggcagactgaggcaggagaatcaggcagggaggttgcagtgagccgagatggcagcagtacagtccagcttcggctccgcatgagagggagaccgtggggtg

SEQ ID NO: 38356 - DNA, 940 bp, Artificial sequence
  DNA replication origin
agtgaggagcgtctccgcccggcagccaccccgtccgggagggaggtgggggggggtcagcccccgcccggccagccgccccatccgggagggaggtggggggtcagcacccccgcctggccagccgccccgtccgggagggaggtggggggtcagccccccgcccggccagccgccccgtccgggaggtgaggggcgcctcggcccggccgcccctactgggaagtgaggagcccctcagcccggccaccaccccatctgggaagtgaggagcgtctccgcccggcagccaccccgtccgggagggagatgggggggtcagccccccgcccggccagccgccccctccgggagggaggtggggggggtcagcccccctgcccggccagccgccccgtccgggaggtgaggggcgcctctgcccggccgcccctactgggaagtgagtagcccctctgcccggccaccaccccgtctgggaggtgtgcccaacagctcattgagaacgggccaggatgacaatggcggctttgtggaatagaaaggcgggaaaggtggggaaaagattgagaaatcggatggttgccgtgtctgtgtagaaagaagtagacatgggagacttttcattttgttctgcactaagaaaaattcctctgccttgggatcctgttgatctgtgaccttacccccaaccctgtgctctctgaaacatgtgctgtgtccactcagggttaaatggattaagggcggtgcaagatgtgctttgttaaacagatgcttgaaggcagcaggcttgttaagagtcatcaccaatccctaatctcaagtaatcagggacacaaacactgcggaaggcctcagggtcctctgcctaggaaaaccagagacctttgttcacttgtttatctgctgaccttccctccactattgtcccatgacc

SEQ ID NO: 38357 - DNA, 1475 bp, Artificial sequence
  DNA replication origin
ctcagagccgcgcgcctcccgggcggggcggggccggccgtgggagtccgcgcgtgcccgcgccgagctgcctgctccggcggcttcgctgctagctcgcggcgacgtcgggccgattttcccaggatgacagagctgaggcagagggtggcccatgagccggttgcgccacccgaggacaaggtagcggcagcgtcggggtgggcgcggccgggacagcggcgcatccgggaggcctgcgggggacgcgcgcagaggggtcgtcttgttctctgaccctttgtcgcagccgacggcggccccgggcccgggtagcgcgaagggccctcgggtgcccggccttcgcggcgcgcgcgtcaggggtcggcgggtcggggtcccggctcagggtctgactgaagtggctcccccggggcgcaggaaggagcttctcgggagtggcgcacggcctcctgcctcgctgggctggctgcggggactcccctctcccccaactccgtgaggccttcctggaggtgaagatatgcagagccttcttagggaggcggctcctctgagcgcaacttaggctctccgttcccttttacaatgttattattttggggggtgggggaatcaggacaaggccatagcatttgcctcctgggagatgtaaatcccttcttgggcatgaaatcatcggctttgagcaaaggggtgttacccagtgagccagtccgtcatcagcaggtgttggagggcgtcctcccggttgatgggttgtttcctgcaccgtgtgggctctggtgggtaggggaggagagtaggaaggaggccatcttggcggggacagtggcgggggtgacgggtgggggagtggactcctttgggtgaagtgaaagatctgtgtaggggagttaaggaaggtagggattggttttattactgtggaggttgaatggcagtataggactttgtagcagtagttgtgctttccgagatagcagtgatcaggagccctgtgtttgggaaactgatcagacagtgatgtgtagaagggactgagggagcctggaccagactgagggagcctggttcactcgggattgcccatgagtgacctgtagatgttttctttggcccacatattgccttaaaaatcagaaagtttctcctaacaatctaaatttcttgcctgtcttagataattggagggtccaccatcactttgtcacctgctcaatggttggctggagctgaggatcatcggttcccaccaatccctgttgccttacaccaggctcacggcttcccctaatgcagcctgtaactttttgatgactggacgcaacggacattagggagacacccagaaggaagaaagcacaagatttggtgacaggatgtcaacagagcagttacactaggaggaatgtttttggtgaaagataatgagatcatgggttttttttaaacaactttcgtgttattgcagt

SEQ ID NO: 38358 - DNA, 1100 bp, Artificial sequence
  DNA replication origin
aatttttttatatttttagtagagacaggatttcgccatgttggccaggctggtctcaaactcctgacctcaggtgatccacccaccttggcctcccaaagtgctgggattacaggcgtgagccgccgctggctgtgtgttcagccagcacttgtggagtgcctgctctggggtaggccctgtccagacactgcaacaaaaagtccttgtttcatggagctcattttagggaagaacgacaaacctgagaaaggatgttagatggagaaaaatgtagccagaaggagggaagagggattgctggtagggagaggttgccattttaaatagggtgaacagggaaggcctcactgcagaggtggtgtttgggcaaatggacacacctcgaggctgtgggggagggagctgttcaggtatctggggaagtgcaaagacacctgtgctgtggaggaactgcagggtggatggagcagggaagtggggaggagcactggcaggaaacccaggggaattacacagggccaaggccattggcttttactctgagcaagataagaagctgttggggagttcagagcctaggagtgtcaaagtggtgtttgtttgcaaagggctgctatgttgagaacagactacagtgggccaagggtgaaagcagggtgatcagagaggaggcaacagcagcgatccagaagagagagagacagacacacacacacacagacacacacacacagacacacacacacacacacacacacacacacgtggctcagcaggggatatgggagtggggcggtggtgagaaatggtcagattgtcagaatctgcagaaggattaggtatggaggagagggacgaagaggagtcaaggagggctgtgaagttggcttgggcggccggaaggatggtgctgccatttctaaactgtggacggctgtgggaggacaggtgcaggtgggaggtggattagagagggtcagtcaggagtttgggtttggacacgctaggtttgagatgcctgtgagatacccacacagggatgtccagtcctggggagtagtccgagatggaaatagaaatttgagagtgatgagggt

SEQ ID NO: 38359 - DNA, 696 bp, Artificial sequence
  DNA replication origin
gcgccgctgcccggccgccccgtctgggaggtgaggagcgcctctgcccggccgccccgtctgggaggtgaggaatgcctaagcccggccgccccgtctgggaagtgaggtgcgcctctgcccggctgcccgtcgtctgggaagtgaggagcgctgctgcccggccacccatcgtctgggatgtgaggagcgcctctgcccggctgccccgtctgggaagtgtacccaacagctccgaagagacagcgaccatcaagaacgggccatgatgacgatggcggttttgttgaaaagaaaagggggaaatgtggggaaaagaaagagagatcagactgttactgtgtctgtgtagaaagaagtagacataggagactccattttgttctgtactaagaaaaattcttctgccttgggatgctgttaatctataaccttacccccaaccccatgctctctgaaacacgtgctgtgtcaactcagggttaaatggattaagggcggtgcaagatgtgctttgttaaacagacgctagaaggcagcatgctcgttaagagtcatcaccactccctaatctcaagtacccagggacacaaacacggcagaaagccgcagggacctcttcctaggaaaaccagagacctttgttcatgtgtttatctgctgaccttctctccactattgtcctacgaccctgcc

SEQ ID NO: 38360 - DNA, 1243 bp, Artificial sequence
  DNA replication origin
ccgccctcggccgcgtacgtcagccctttccaggaacgcgcgggcccgcaccccccgcacgcggctgccgattggctgggacggcgccgggcgtgacgtcagggcccgccccaccgccctccggccccgccccgcggggtggcctggcagtttggtctggagcagctgaaaccggtttgagcgtggctgcttcctgccgctcgacgccgcggcaggccgcctggggggagcgctggcgaggcacggacggcgggcgcccggtacctctgcccgcggtcctcgctctcgggcggggcggcggcgacgcggacctgcggactagcgaacccggaggtgaggcagcgagccgggtgcgggggccgggcggccactcacgtggcgggctgagctgtcagggcggcccgggacgcggcgggcctggggcgtcggggccgaggcgcgggcggggtcctcgggccgggccgggccggccactgcccgcaggggaacggcggccgggcgttcgctgcgctaaatcggtggctgggacgcactcttcgacttttattgttcactgccgcgcttctgctgggctgcctggggcttagttcccttctaaaaaatacgtggagcatttgaggagtagcagggtgcgtggagcataggactaccgcaaatatgcagagtactgagtcggggaacaaagacaccaaaaatgcagatgaggtcctctggggacatcccctgccccacagcggcccccggctcaccgccgctctctgtccctaagttactcaccgtgttttgacaactgcttattttctgaaattgcccggacacgtagtctagggcatgcttgtataattcagttattccaagaaactaaagtgcctttcctaggaaaaggttccaggaatagtcatgagtgccctcgatacaattttttaggtctgctgccccttctctccaaagctctacttttcccaaagctcttcagactgccttgctgaggtaggagagagagcctcaatcacttaggtgtcctcatcagccctctccccagactccactggctggctggaaaagaaatcgggcatgaattgtagaggattcttccaccttaaggcagctgttagtctgatgtagacctgcatagaggaactgatggaactgagcaggatgtttggacccgatgttttttcttcatactcttctgtcgcctcctcccatttctgcacagttctcacccactactctaccccgt

SEQ ID NO: 38361 - DNA, 877 bp, Artificial sequence
  DNA replication origin
gccgagattgcagcctctgcccggccgccaccccgtctgggaagtgaggagcgtctctgcctggccgccatcgtctgagatgtggggagcgcctctgccccgccaccccgtctgggatgtgaggagcgcctctgcccggccgcgaccccgtctgggaggtgaggagcgtctctgcccggccgccccgtctgagaagtgaggagcccctccacccggcagccgccccgtctgggaagtgaggagcatctccgcctggcagccgccccatcagggaggcgggagacagcccccgccccgccagccaccccgtccgggagggaggtggggggcagccgccccccggccagccgccccgtccgggaggtgggggggcgcctccacccggcctccccttctgggaagtgaggagcccctctgcccggctgccaccccgtctgggaggtgtacccaacagctcattgagaacgggccatgatgacgatggcggttttgtcgaatagaaaagggggaaatgtggggaaaagatagagaaatcagttggttgctgtgtctctgtagaaagaagtagacataggagactccattttgttctgtactaagaaaaatccttctgccttgggatgccgttgatctatgaccttacccccaacctggtgctctctgaaacatgtgctgtgtccactcagggttaaatggattaagggcggtgcaagatgtgctttgttaaacagatgcttgaaggcagcaggctcgttaagagtcatcaccactccctaatctcaagtacccagggacacaaacactgcggaaggccgcagggtcctctgcctaggaaaaccagagacctttgttcacttgtttatctgctgacctcccc

SEQ ID NO: 38362 - DNA, 1304 bp, Artificial sequence
  DNA replication origin
caccaggttgggggtaaggtcatagatcaacggcatcccaaggcagaaggatttttcttagtacagaacaaaatggagtctcctatgtctacttctttctacagagacacagcaaccaactgatttctctatcttttccccacatttcccccttttctattcgacaaaaccgccatcgtcatcatggcccgttctcaatgagctgttgggtacacctcccagacggggtggcagccgggcagaggggctcctcacttcccagaaggggaggccgggtggaggcgcccccccacctcccggacggggcggctggccggggggcggctgccccccacctccctcccggacggggtggctggcggggcgggggctgtctcccgcctccctgatggggcggctgccaggcggagatgctcctcacttcccagacggggcggctgccgggtggaggggctcctcacttctcagacggggcggccgggcagagacgctcctcacctcccagacggggtcgcggccgggcagaggcgctcctcacatcccagacggggtggcggggcagaggcgctccccacatctcagacgatggcggccaggcagagacgctcctcacttcccagacggggtggcggccgggcagaggctgcaatctcggcactttgggaggccaaggcaggcggctgggaggtggaggttgtagcgagccgagatcacgctactgcactccagcctgggcaccattgagcactgagtgaacgagactccgtctgcaatcccggcacctcgggaggccgaggctggcggatcactcgcggtcaggagctggagaccagcccggccaacacagggaaaccctgtctccaccaaaacaatacgaaaaccagtcaggcgtggcggcgcgcgcctgcaatcgcaggcactcggcaggctgaggcaggagaatcaggcagggaggttgcagtgagcagagatggcggcagtacagtccaccttcggctcggcatcagagggagaccgtggaaagagagggaaagggagaccatggggagagggagagggagaccgtggggagagggagagggagaccgtggggagagggagctgcaggtttctttatcggtattgatcagatggcgtctttacttacacgcctggtagctaattggagtggctgaaacagctgaggctggttttctcttttcaagtacttttccacatggctaaattgggcttccttacaacatggtgggttaaagagaatcacacatctcacatggtaactggcttccctagggggttatttt

SEQ ID NO: 38363 - DNA, 1143 bp, Artificial sequence
  DNA replication origin
gctgccttcaagcatctgtttaacaaagcacatcttgcaccacccttaatccatttaaccctgagtggacacagcacatgtttcagagagcacggggttgggggtaaggtcacagatcaacaggatcccaaggcagaagaatttttcttagtacagaacaaaatgaaaagtctcccatgtctacttctttctacacagacacagcaaccatccgatttctcaatcttttccccacctttcccccttttctattccacaaaaccgccattgtcatcatggcccgttctcaatgagctgttgggtacacctcccagacggggtggcggccgggcagaggggctcctcacttcccagtaggggcggccgggcagaggcgcccctcacctcccgtacggggcggctggccgggcctggggctgaccccccacctccctcccggacggggcggctgccgggcggaggggctcctcacttctcagacggggcggccaggcagagacggtcctcacctcccagacggggtcgcggccgggcagaggtgctcctcacatcccagatggggcggcggggcagaggcgctccccacatctcagacaatgggcggctgggcagagacgctcctcacttcctagatgggatggcggccgggaagaggcgctcctcacttcccagactgggcagccaggcagaggggctcctcacatcccagatgatgggcggccaggcagagacgctcctcacttcccagacggggtggcggccgggcagaggctgcaatctcggcactttgggaggccaaggcaggcggctgggaggtgcaggttgtagcgagccgagatcacgccactgcactccagcctgggcaccattgagcactgagtgaacgagactccgtctgcaatcccggcacctcgggaggccgaggctggcggatcactcgcggttaggagctggagaccagcccggccaacacagcgaaaccccgtccccaccaaaaaaatacgaaaaccagtcaggcgtagcggcgcgcgcctgcaatcgcaggcactcggcaggctgaggcgggagaatcaggcagggaggttgcagtgagccgagatggcagcagtacagtccagcctcggctgggcatcagagggagac

SEQ ID NO: 38364 - DNA, 931 bp, Artificial sequence
  DNA replication origin
ttgcagcctctgcccggccgccaccccgtctgggaagtgaggagcgtctctgcctggccgcccatcatctgggatgtgaggagcccctctgcctggctgcccagtctgggaagtgaggagcgcctcttcccggccgccatcccatctaggaagtgaggagcgtctctgcccagccgcccattgtctgagatgtggggagcgcctctgccccgccgccccatctgggatgtgaggagcacctctgcccggccgcgaccccgtctgggaggtgaggaccgtctctgcctggccgccccgtctgagaagtgaggagcccctccgcccggcagccgccccgtccgggagggaggtggggggtcagccccaggcccggccagccgccccgtacgggaggtgaggggcgcctctgcccggccgcccctactgggaagtgaggagcccctctgcccggccgccaccccgtctgggaggtgtacccaacagctcattgagaacgggccatgatgacaatggcggttttgtggaatagaaaagggggaaaggtggggaaaagattgagaaatcggatggttgctgtgtctgtgtagaaagaagtagacatgggagacttttcattttgttctgtactaagaaaaattcttctgccttgggatcctgttgatctgtgaccttacccccaaccccgtgctctctgaaacatgtgctgtgtccactcagggttaaatggattaagggtggtgcaagatgtgctttgttaaacagatgcttgaaggcagcatgctcgttaagagtcataaccactccctaatctcaaatacccagggacacaaacactgcggaaggccgcagggtcctctgcctaggaaaaccagagacctttgttcacttgtttatctgctgaccttccctccactattgtcctgtgaccctg

SEQ ID NO: 38365 - DNA, 745 bp, Artificial sequence
  DNA replication origin
aattaattattcatcattttgcacaaatttcctgagcagctactgtatgccaggcttattctaggtgctggagatacaggagtgaacaagagagacaagctacttgctctgtggagcttatattccagtggtgaaacagaaaataaacaaataaataaggaatttaaccacaggcagtgataaatgccataatgaaagataaaatagaggaaggggatagagagcgaggtgaatggaggcccaggttggatggggaaggcaagaaggcttcttggaagtcacatctgagcagagatctgaagaaagtgagggaacaggtcttgctgtagtggaagaacattccagactaagggaccagcaagtgcaaaatcccggaggtgggagtgagcttatgtgtgaagaccagaaagaaggccagtgcggctgggaagaggtgggagaagcagtcacagccaggcagggagaagccagatcctgtggggcccagagagctgatggagcagcttggattgtgtcctaagcgcactgaaaggttttaagcaggtggaagtgacattctggtgctgctgctggaaaggagaccaaggagggcaagcatgggactggagcccaggtacgaggctactgcaggagttgtggaagatggtggctggggtttgggtagagtggaggaggtggtgagacattactctatttggaacacattctagaggtggcctatggggacagatgcaggcagtggagg

SEQ ID NO: 38366 - DNA, 1081 bp, Artificial sequence
  DNA replication origin
gcaagcacctgcagaccccgtgcgcggagctgcagaggcggtggcggtgccggtgccccggcctcagcggggaagacaccatcccagacccgcccaggctgcagggggtgacggagaccacggacacgtcggcgctggtccactggtgtgcccccaactcggtagtgcatgggtaccagatccgctactctgcggagggctgggcggggaaccagtcggtggtgggggtcatctacgccacggcccggcagcaccctctgtacgggctgtcgccgggcaccacctaccgcgtgtgcgtgctggcggccaacagggcgggcttgagccagccacggtcttcgggctggaggagcccgtgcgccgccttcaccaccaagcccagcttcgcgctcctgctctctgggctgtgcgccgccagcggcctgttgctcgccagcaccgtggtgctgtccgcatgtctctgcaggcggggccagacgctgggcctgcagcgctgcgacacgcacctggtggcctacaaaaacccggcctttgatgattacccgctggggctccagaccgtcagttagcccagcttctgggataacgcgtctcatcgaactggatctgagcgcaaaaaggaagacacagacggtcaaaaacgaccccatccgctcctagggtttctaattcccgtgaagccagaatgccttgagcacacatggaacttgccacactgagtgtctgggtccaaggaactgctgccctcccttccttctacttaactctgttcccagaaacctgatggtcaatgccagatcgctccccactgccgccaggccttcttgtgtgttgttggttcatttgcggttttcagcagtcagtgcctctctatccagtagaatagtgtatggacgtaggaagggatgaaacagagaagttgcataacccagcctctttgatcatgttagaaatcacatcctcaggtctttccagcggaagctccttcatggtcaagctctaagacacaacgagctctgttattcaagaaatcaattccagtggatttccagttccaattcctgagaactagggtaagggg

SEQ ID NO: 38367 - DNA, 1577 bp, Artificial sequence
  DNA replication origin
ttgtaggccaccaggtgcgtgtcgcagcgctgcaggcccagcgtctggccccgcctgcagagacatgcggacagcaccacggtgctggcgagcaacaggccgctggcggcgcacagcccagagagcaggagcgcgaagctgggcttggtggtgaaggcggcgcacgggctcctccagcccgaagaccgtggctggctcaagcccgccctgttggccgccagcacgcacacgcggtaggtggtgcccggcgacagcccgtacagagggtgctgccgggccgtggcgtagatgacccccaccaccgactggttccccgcccagccctccgcagagtagcggatctggtacccatgcactaccgagttgggggcacaccagtggaccagcgccgacgtgtccgtggtctccgtcaccccctgcagcctgggcgggtctgggatggtgtcttccccgctgaggccggggcaccggcaccgccaccgcctctgcagctccgcgcacggggtctgcaggtgcttgcagggatggtaatcacaggggacgtcctggtgaggcgttcccacctcctccttcctcccttcctcctcctcactgtagtcgtccagcagcaagactggaatctcgccctcggaaagactcgggttgggggcttggggtgtggcgtgtgtcctctggccgggctgaggcgagcttatgctgcggtcccacgaggtagggaaggggcccaggagcttgctggccagtggggtggaggcagctgagatatcaggctcaaggacaagctcgggggcatgttctcctcggtgctgggtcctggtggtgctggcagccctggggaaaacgctggagttgctgtgacctgctacagagttggtcgtggagggggcagtcccctcccgtgcatcgctgtgcggccatgcagctatcgtgcgagagcccacgttaggggccttggagacactctgctggtctcccgcaggccgggtggcgggggctgcgctgggcgcgacggtggtaccctgtgcgtaggtggagcggttgaagcaaggtgggtgtgaagccccgagagtggtgctttggtcggactggcacactccgggcagctgggagagtgacagggaggctgagaaggggccgctggatcccgcagctggcgcgcacatagtgtctgctgccctggaggggaggccaaccagttagaagacgtctggcttcagggacacttctgcgcagagctttgaatcctcattgccgacgtcaccccctgccaagcccatcaacgcgtctctgccaggcaccccagggcacacacgccgcacacacacatcacctcattgattctggggaaacctttggaggaagctcctgtcctcactcccactgggcaaagaagcaaacagaagtttagaaggaggaactaattgcccaagacaccatagctagcaatggcagagcctaccccggggcaagcactgagaaggagtccagattctctgagtgtcatttgccattttgttctcacctgtctgcttcctggcaagaaagcactagtaataaaaatcatactcgggccggtg

SEQ ID NO: 38368 - DNA, 1652 bp, Artificial sequence
  DNA replication origin
cgcctcggcgatgcccccctgggctccgcgacccagcgcggtgcaggagaggttgaggagctgcagcgcggggaagcaggcgaaggcccggggctgcagcgcccgcagcggattcccggcgagcgccagggcgcggaggctgctcagcgcgggcccggtgcacggcggcagagcggccagctggttgtagctgaggtccagggtgtgcagccccgccggcccacccgggccccagcgcagcgcggcgatgcggttgtggcgcagggtcagcacctgcagctgctccaggtggccgagctcggaagtgctcagggcgcgcagcaggttgtggctggcgtcgaggctgcgcagtgtgcgcggtaggcagccgggcaggcgctccaggttgcggttcgccagggtcaaggccgtcgcatccgcggcgggcagcccctcgcagggcgagtcggtggcgttgctgccactgctcccccaggggccctgctgagtgacccggaagagcgggaccttctcctggggagggtctgcccagctggggcgcagcaccgtcagcagcagcagcggtagggtttgccgcatggcgtctggggagagaacagcaggacgcccatcaaatccacaggaacccccgcacaaagagtcagatgcgcgtcccaaccctacctccagggctctgaggaggagcacaggcgctggatgttccctgcagggcggggagacgttcccagagtcgcctagtgtgcagtgacctctcccctgtctgcttttgccctgtcgtctcccctaggagcacggtgataccccctgctcttcctcccctcaaggatgccttttcctcttctcgtgagagggaggccttcttcatctgtccaatctgggcctgaatctctcaataactccctccgtttatgtacccccatcctgtgagcttctacaggaaagggatgtcccctttattgctgcaaactctccccaggtaaacagtcactgctccataaacgtgaatgccctcaggaggctagaaacatgaggaagattttgtccgttcagcaactctcagttaccccgcttttccccattagaactgcccagccgcaggggaatcctagtttgcctaaaataagtcttggagtcagtttcttggcagcatgctcagggttgccttcagcagaagaacaaagccctgtgaaccctggagtcaaacatttgctggtcccatgtgggttccaacaaaagccagagcccccagtattagccctgcccaggagggatggctgagagctgctagttgtggaatttctggactacctagggttgcacaggtcagctaggagatcaagcagaggaagatccggcagccatgggctagcttgggagtggcaaagataccgttaaccatgccctggccatgaggtcactgctccatatccctcatcactgcagatgtgtattcctgccccagctctctgtgctgaccagtagatctccgagtcaccacccaggctccaggggaagggtctccctattactagctggggatgaaggcagtgagaaagatcctggaacctgaagccaggagcgtgtgcacccagcagtgtgtcatgcttacctggaagtggtccttttggagtgtggcttctctggatgcacct

SEQ ID NO: 38369 - DNA, 2123 bp, Artificial sequence
  DNA replication origin
acttacatgtaagacttaaaactataaaaatcctagacaaaagccttcgaaatactcttctagacattggcctaggcaaagaatttatgaccaagtcttcacgagcaatcacaacaaaaacaaaaattgatccctccgcagccgctgccagagcggaagggcggggtcttgtgcctcccccacccccaacccaatgggtgaggagcgaggaaggcagcgcggcgtggggactgagcccgcgggtgcgcatcctgaggcctaggctacgtggtcacgtcagcgcgggagagagagagagaggagctgactcagcagggactggggtactgggtcgagagtgcgagcaagcgagccagaaggggaaaggcggctgctcgtgcctgagctaccgcagaggggagtgggaacagtggggtaaagggggggggggcgggaataagaaaggccgagagaaggcagacagagggtggtggtggtgggggtggtggtgggggtggtggtagggggagagggagagggaggagctggaggaggttagaaggaggagctggaggaggctagaaggaggagctggaggaggttaggggctgagggagtgagtgagtgaagcggacgcgagggaggggagggaagggaaaggaaagggggggatcacgcaggggcgcgcgcaagcaccgggagcgcgctcggagacgagtggaactggatagggtttgctgtcagcggcgtgagcttcggccgccattttacaacagctccactcgcgccagacacagggagcagcgagcacgcctttcttgcaacctggtaccatcggacaggattcctccccctcagtccaacggggagatctttggaaacatggctacagaacatgttaatggaaatgatactgaagagcccatggatactacttctgcagttatccattcagaaaattttcagacattgcttgatgctggtttatcacagaaagttgctgaaaaactagatgaaatttacgttgcagggctagttgcacatagtcatttagatgaaagagctattgaagctttaaaagaattcaatgaagacggtgcattggcagttcttcaacagttaaagacagtgatctctctcgtgttcagaacaaaagtgcctttttatgtggagtcatgaaaccttataggcagagagaaaaacaagggaccaaagtagcagattctagtaaaggaccagatgaggcaaaaattaaggcactcttggaaagagcaggctacacacttgatgtgaccactggacagaggaaatatggaggaccacctccagattccgtttattcaggtcagcagccttctgttggcactgagatatttgtgggaaagatcccaagagatctatttgaggatgaacttgttccattatttgagaaagctggtcctatatgggatcttcgtctaatgatggatccactcactggtctcaatagaggttatgtgtttgtcactttttgtacaaaagcagctcgggaggctgttaaaactgtataataatcatgaaattcgttctggaaaacacattggtgtctgcatctcagttgccaacaataggctttttgtgggctctattcctaagagttaaaaccaaggaacagattcttgaagaatttagcaaaagtaacagagggtcttacagacgtcattttataccaccaaccggatgacaagaaaaaaaacaggcttttgctttcttgaatatgaagatcacaaaacagctgcccaggcaaggcgtaggttaatgagtggtaaagtcaaggtctgggggaatgttggaactgttgaatgggctgatcctatggaagatcctgatcctgaggttatggcaaaggtaaaagtgctgtttgtacgcaaccttgccaatactgtaacggaagagattttagaaaaggcatttagtcagtttgggaaactggaatgagtgaagaagttaaaagattatccattcattcattttggtgagtgagatggtgctgtcaaggctatggaagaaatgaatggtaaagacttggagggagaaaatattgaaattgtttttgccaagccaccaaatcagaaaaggaaagaaaaaagctcagaggcaagcag

SEQ ID NO: 38370 - DNA, 1144 bp, Artificial sequence
  DNA replication origin
caacttctgaagccacttatgacttgtgtcccaggcccctaccctcaggggtgtctcgaaaggcagctccatcccgcatccccacagtgcagtcaagatacacatgtatcttcccgggattacgtaaatggtgaatatctattaatgcacgtgtcagctgttaaaaacacagtaccaagtgatccttcagtactgacccctcgcatttctggaaacaagtagggagaaccccaaactcctagtactttcctaaatgggacacggctctgagcaaagaaaccaagtctcccggaaacacttgaagaatggagatcaccatggcagagcggacaggttctcagctaacgggtgaaacccaggggctaccctctcaaagggatttctttgacccaaaaaagtttttaaaaaaattaaaaataaataaataaataaataaaacacctcatctaagtgttaacagctccaaaagtattccagggagaggggaagaaagaggggtggaagagtgcgggccgggagggtgaggcttacggtcgcccggggcagctggaagtgggagcccctgcagggctccgttgcacgtggactggagaggggtctgtttacttctggcctggacgtaaggaagggctctaccgcagtggctgcccaaatccccctcccacccaccacccaccccgggccctggcccgcgtcctctacctttaggagaccgcagtccgtctaagaagcacgcggggacacgtccattgaaagagcgtccacatggaaaaactctggtcaaaggacctggcgcaaggaccgaatgtccgttccttttctttgcctcctccttctcccgggtgccggccgcgcagtctctcttttcacgctgggaacagcgtctcagtgtcgggcaaggccgaggagtggaggggcggtggggctcggagatggcgaagcaggctccgctggggcaaaggcaccggcgcaaagtggggtgcgcaagttattctccctgcaagttcaagaagtccccagccaagtgctgacacacaacaacagcgagcagggggaggagtgcggggcagggaagggaagggagaaaggagaagctggtgctgtcgtcctccttaggaaccagcgcccgagggacgcgtggccc

SEQ ID NO: 38371 - DNA, 1745 bp, Artificial sequence
  DNA replication origin
gcggcggcggcggaggagcagaatccgccgcgactggcagcctcggctgaccggctcggcttctcttcgccttccgaggctcctcatccaccgcgggctccagacctcgcgtcccgcccggggcatggccgggcgctgcgcccccgcgcgctctgcctgctgagcggcgccggagggaggtgcggaggccgggaggccggggaggccggcggggagcagagtcgagcgcctccggagcagagaaaggagcccgcgccccgcgccccgcgccccgcgcacggtccccagtccctgccgcgctcgcccgggccgcccggagcccagatgagcccagatggccggggctcaacccggagtgcacgccttgcaactcaagcccgtgtgcgtgtccgacagcctcaagaagggcaccaaattcgtcaagtgggatgatgtaagtattggggcggcccgagtcggggcgctggctcgggcaccgggcagggcgggcgtcgtgggggtggggcaaggggcgcgttatgcaatgggcgcactgggagcgggcaggggcagcctcgggcgcacaggttggcatctgccaaagcggatgtccaagggcagaagctttgcgcgcgctcctgtttcatcgggcttcagtagttgccatcctttctgggtctggcaggcgccccctgagggtcttacatcttttgggccagtggagagggaggggcaagctttgcctggtgacaggtcctgagagttcggaaagtagggagtgtgaagttgggaccaactggaaagcgcctggtgtgaacaaatcgcgtccctctccgcctgcggacgcaccccctattacctcttttgcccgatttcaagaaggaaggacctgaagttcaaaacactttagtgattgcgaaccctcttggcgcttttgtgggagccaaggcggcggaggacacaacggtccagccaacaggtggtcgttgatgccaaacttcagcgcctggctccggagtgagggtccctgaaaagggctgcggggacacatctggggagggcgtgaacagaatgggggcccttgaggggtcctggagggctcatgggcctgcaggcaagtggggagggctgacttttgagaactgagctgattggagtcttctgcctgaaatagacaggttgagagtttgccccacgatttacctgcaccgtttgccaggtagggcagagcctagcccagcgccggggtctctaatgctttacgagcggcccagaccccaggacttcaaatgacttccccttcccctctaccccagttgtcttcaaaacacgtaaattagttatccagctgaaaacatgcgaatcttcggatggagaacattatggtatcagttttatgtcctgggtgtcattctaaaggttcgataagaaaaacctactgaaataaacccgagttgccaggctctaagcaaatttaagtccaaatgactaatacatctcttaatcagaaggaattataggagaatgaggcgttcttcttgccgaaaagattttccacctagtaaattatagcctgttatcctctagggtatttttctttaatcttcttaagccattttccagtgtctgaaaacaatttaaatattccaggtagtgaatccaattacttagctgagtgcgtctgtgtctatattttgtccagctggaagcgcaaacggaacttggagtatgaaccacagcttccttgaaagctcgtgccaattatt

SEQ ID NO: 38372 - DNA, 1064 bp, Artificial sequence
  DNA replication origin
ggccaaggcaggcggctgggaggtggatgttgtagcgagccgagatcacgccactgcactccagcctgggcaccattgagcactgagtgaaccagactccgtctgcaatcccggcacctcaggatgccgaggctggcagatcactcgcggctaggagctggagaccagcccggccaacacagcgaaaccccgtctccaccaaaaaaatacgaaaaccagtcaggcgtggcggcgcgcgcctgcaatcgcaggcactgggcaggctgaggcaggagaatcaggcagggaggttgcagtgagccgagatggcggcagtacagtccagctttggctcggcatcagagggagaccgtggaaagagagggagagggagaccatggggagagggagagggagaaagagggagagggagagggagagggagagggagagggctattttttgtatttttagtagagacggggtttcaccatgttagccaggatggtctcgatctcccgacctcgtgatccacccgcctcagcctcccaaagtgaaataatgtcttttagtttaattgctttgccacctgtttttttgttgtttctacttttgtttgatttgtcttttttttgcttcctgacttaaggcaccgataatacgctgtcatgtgtacagtaacattcaagatggaactggaggagcagggaacatagagtgatggggaagaaaagagggaatcccgagcagagaaaactgggaaaagaactagaggtgagctaacatggcaggagttagagcaaacaaaaagtagtctaataggaattagaaaagagggagggggttgcgacaacaaactagagttgtggtcagaggataaagagcatttaggtgtctggagataaattagtaaaaaatgtgatgccagggctaggctgcatatcagacagattatctggcagccaggtcaaggatggatttgaggctgagaatccaaagaagggtaactcagttaggaagctgtaatagtccagtagtccaggtgagaaatactgagaccttgaactctatatgttggaggagga

SEQ ID NO: 38373 - DNA, 1208 bp, Artificial sequence
  DNA replication origin
tttaaccctgagtggacacagcacatgtttcagagagcacagggttgggggtaaggttacagatcaacaggataagaatttttcttagtacagaacaaaatgaaaagtctcccatgtctacctctttctacacagacagggcaaccatctgatttctcaatcttttccccacctttcccccctttctattccacaaaaccgccattgtcatcctggcccgttctcaatgagctgttgggtacacctcccagacggggtggtggccgagcagaggggcccctcacttcccagtaggggcggccgggcagaggcgcccctcacctcccgggcggggcggctggcagggcggggggctgacccccccacctccctcccggacggggcggctgccgggcggagacgctcctcacttcccagacaggttggctgccgggcagaggggctcctcacttctcagacagggcagctgccaggcggaggggctcctcacttctcagacggggcggctgccgggcggagggtctcctcacttctcagacggggcggccgggcagagacgctcctcacctcccagacggggtcgcggctgggcagaggcgctcctcacatcccagatggggcggcggggcagaggcgctccccacatctcagacgatgggtggccgggcagagacgctcctcacttcctagatgggatggcggccgggaagaggcgctcctcacttcctagatgggatggcggccgggcagagacgctcctcactttccagactgggcagccaggcagaggggctcctcatgtcccagacgatgggcggccaggcagagacgctcctcacttcccagacggggtggtggccgggcagaggctgcaatctcggcactttgggaggccaaggcaggcggctgggaggtggatgttgtagcgagccgagatcacgccactgcactccagcctgggcaccattgagcactgagtgaaccagactccgtctgcaatcccggcacctcaggatgccgaggctggcagatcactcgcggctaggagctggagaccagcccggccaacacagcgaaaccccgtctccaccaaaaaaatacgaaaaccagtcaggcgtggcggcgcgcgcctgcaatcgcaggcactgggcaggctgaggcaggagaatcaggcagggaggttgcagtgagccgagatggcggcagta

SEQ ID NO: 38374 - DNA, 870 bp, Artificial sequence
  DNA replication origin
agtgaggagcgtctctgcccggccgccatcccatctaggaagtgaggagcgcctcttcccggccgccatcccatctaggaagtgaggagcgtctctgcccggccacccatcgtctgagatgtggggagcgcctctgccccgccgccccatctgggatgtgaggagcgcctctgcccagccgcgaccccgtctgggaggtgaggagcgtctctgcccggccgccccgtctgagaagtgaggagaccctccgcccggcagccgccccgtctgagaagtgaggagcccctccgcctggcagctgccctgtctgagaagtgaggagcccctctgcccggcagccaacctgtctgggaagtgaggagcgtctccgcccggcagccgccccgtccgggagggaggtgggggggtcagccccccgccctgccagccgccccgcccgggaggtgaggggcgcctctgcccggccgcccctactgggaagtgaggggcccctctgctcggccaccaccccgtctgggaggtgtacccaacagctcattgagaacgggccaggatgacaatggcggttttgtggaatagaaaggggggaaaggtggggaaaagattgagaaatcagatggttgccctgtctgtgtagaaagaggtagacatgggagacttttcattttgttctgtactaagaaaaattcttatcctgttgatctgtaaccttacccccaaccctgtgctctctgaaacatgtgctgtgtccactcagggttaaatggattaagggcggtgcaagatgtgctttgttaaacagatgcttgaaggcagcatgctcgttaagagtcatcaccactccctaatctcaagtacccagggacataa

SEQ ID NO: 38375 - DNA, 1002 bp, Artificial sequence
  DNA replication origin
caccgccgggccctgcgcgtcccccgctccgggccccgccgcccctcagcggccagccgcttcctcctcccctgcccccgagcctccctcctcgttctcgcctcccggctccagagcccgagctgtcgcctcgcagccccaacctgcccaggctacggagcatgcccagtgcggcgcgccgggctgggctgggggtgggcaggggccgggccggccgcccagttgccgcgagcccgcagggcgaggagtgggcgccgactgggtcgggggcgcagcctcgcgagccgggggccgagcagccgaggcaggtggtgggcagcgccaagaggaggtgggtggggcatccggggaagccggcccgcggcgcgctcctctggggtctccctggcggctccccgcggcatgtgccccatgcccaagggtcgggggcgcacgggatggcgctgggcgcagaacccagggagcgggggcagaaaagcggcaccctcctcggatgggagacccgcagcccgccgtgggccgtgtggaggggctcaggactggccagaacggggcccccaaagccgttggctgggtgggggacgtgcttatttgtttatattcggtttcataaacccatacagcgcctacaatgcgtcctgcagtgttctaaacgctttttattcatttaatccctaaaacaatcttccaaagagtactactgcctctttttatttcgcgggtcttacacagagccacagagattaagtggttccaaaaagtcttcccacaagtgcaacctcagacatgcaaatcccccagactttggtccctgggatgctggggtgctgctccagccagttcctggcttttcccggccctacaacggcccccaggtgcctccgagtcacactcacacccaggccctaatggtgttcggtctggcatcacccttgtgtggaccctcacaacgtgctgctcccgaactccggagggctccctcctccccactccgcctcctcc

SEQ ID NO: 38376 - DNA, 802 bp, Artificial sequence
  DNA replication origin
ggccggcttccccggatgccccacccacctcctcttggcgctgcccaccacctgcctcggctgctcggcccccggctcgcgaggctgcgcccccgacccagtcggcgcccactcctcgccctgcgggctcgcggcaactgggcggccggcccggcccctgcccacccccagcccagcccggcgcgccgcactgggcatgctccgtagcctgggcaggttggggctgcgaggcgacagctcgggctctggagccgggaggcgagaacgaggagggaggctcgggggcaggggaggaggaagcggctggccgctgaggggcggcggggcccggagcgggggacgcgcagggcccggcggtgggcgggcgggtcggcgctgccccgtgggctcgctggggagccacggcggagacccccgccctcaactgaggtaaggaccgcgcggcgcggagacggggaggcggggaggccagggagggggtgcggaggcaggcgggagggcgggactggggtgcgccgggagggggcttggcggcggctctttatggcgaggagggggtggtggcgccgcgccgggagcagtaagtgagctgcaccgccaacaagatctctcacacacagacacacacacgcacacgcacacacgggcgcgcacacacacgcgcgtacacactgggtctccaggcagcggccgtcgccgcatccccggcagcagctccaggcaaagtgacaggtaggaaaaggcatttcgggtcccgcccgaggatgctcccgcccgccttggccctcagggcttgtttgct

SEQ ID NO: 38377 - DNA, 836 bp, Artificial sequence
  DNA replication origin
tcccggcaaagagagatgctccggttaccagcggcgcgcatccccgcaggcgcctctcctctcgccgatacccacccaggcagtcccgacaggcgcgcctgcctacctggtggccggctgtcagcgaagcggcggtgcctcagccccttctcagctgctacagcgctcccagcgccatgttcccggtctccccgggcgcacgctggggaactactactggctgggtaggggcaaggggggcgggggccagcgggagggggtgagaggcagagccacagctttctactctccacccaaacctcccccagctactgagcatgcccagctgcccggcttcgcccctcggaggactgtccatgagcgtacgcagctgctccgggttttcgtggcagccggcgggaggcaggctgtagcggcggccgggggtggaggtgagggggagggtcggggggcgtgtctacactcagggtgcaggagccaggagccgggagctggagcaggcgaccaatccaatcacgtttactcccagtcgtccccggcgggggcagctcctgcacgccctctcccccaacactcgggatttgcagaaatgttgttcaggaccattgcaggattgagttttgcttaagaggctagcagaggtggggaggaggaggggctgagaagcagaacagtgggctggcctctttgccaccacctggaccggtgattctcaaactttcatgtgcctgtgaattaaaatgcagattcagattcaattggctgggtcctgagattctgcaagcctaacaacctcgcaggtgatgctgctgctgctggccctcccaccactccga

SEQ ID NO: 38378 - DNA, 705 bp, Artificial sequence
  DNA replication origin
ccagcgtgggtttgcaaggactcgaggcttgaagttgagttgtttgccgagggcaaaaacggatgactctgctttcggtggaatttgcagtcggtgctggggtttcatgctgggtgtcttaggggtaccccacggaggcacagacgccccgagggaaccgtccaaacggccgggaggaggtgggggattcagagcaaggacggctgggacacggccgaatctgggggttcactcagtgcgcaaaccccggggtacccgtgcaggctgcctcggggggccctcggatgctcaaatcagggcggggagacaaaggctacttgtgctggtcgtattagagattaaaagtgataattataaagcaacaaccctaactgtcctccctggccgtgcccgggcccgggaagggggtggtgcgcggatcgctcggcggtggcagcctcccggatgattcacaggtgttggggaggctgtcgcggggctctccgcagggagggagggctggggagcgcgtgggaggtgggggacctcgtctgaggaactgtttgtacttttccgggaaggatgcgattagaagtcgtgcctcgcaatgttaaaacttgatggcctcttttaggctatggaaaatccttgtctcgcttaggagaaaccatttagagctgggttcggaaaagcggcgtacaacctctccccttgcaccctcgcccc

SEQ ID NO: 38379 - DNA, 898 bp, Artificial sequence
  DNA replication origin
tgaggagcgcctcttccgggccgccatcccatctaggaagtgaggagcgtctctgcccggccgcccatcgtctgagatgtggggagcgcctctgccccgccaccccgtctgggatgtgaggagcgcctctgcccagccgcgaccccgtctgggaactgaggagtgtctctgcccgaccgccaccccgtctgggaggtgaggagcgtctctgcccggccgccccgtctgagaagtgaggagcccctccgccaggcagccaccccgtctgggaagtgaggagcgtctccgcccggcagccaccccgtccggcagccaccccgtccggtagggaggtggggggcagcccccgcctggccagccgccccgtccgggagggaggtggggatcagcccccgcccggccaggcgccccgtccgggagggaggtggggggcgcctctgcccggccaccaccccatctgggaggtgtacccaacagctcattgagaacgggccatgatgacgatggtggttttgtggaatagaaaagggggaaaggtggggaaaagatagagaactcagattgttgctgtgtctgtgtagaaagaagtagacatgggagacttcattttgttctgtactaagaaaaattcttctgccttgggatgctgttgatctatcaccttacccccaaccctgtgctctctgaaacacgtgctgtgtccactcagggttaaatggattaagggaggtgcaagatgtgctttgttaaacagatgcttggaggcagcatgctcgttaagagtcatcaccactccctaatctcaagtacccagggacataaacactgcggaaggccgcagggtcctctgcctaggaaaaccagagacctttgttcacttgtttatctgctgaccttc

SEQ ID NO: 38380 - DNA, 1055 bp, Artificial sequence
  DNA replication origin
ttttccccacctttcccccttttctattccacaaaaccaccatcgtcatcatggcccgttctcaatgagctgttgggtacacctcccagatggggtggtggccgggcagaggcgccccccacctccctcccggacggggcgcctggccgggcgggggctgatccccacctccctcccggacggggcggctggccaggcgggggctgccccccacctccctaccggacggggtggctgccggacggggtggctgccgggcggagacgctcctcacttcccagacggggtggctgcctggcggaggggctcctcacttctcagacggggcggccgggcagagacgctcctcacctcccagacggggtggcggtcgggcagagacactcctcagttcccagacggggtcgcggctgggcagaggcgctcctcacatcccagacggggtggcggggcagaggcgctccccacatctcagacgatgggcggccgggcagagacgctcctcacttcctagatgggatggcggcccggaagaggcgctcctcacttcccagactgggcagcctggcagaggggctcctcacatcccagacgatgggcggccaggcagagacgctcctcacttcccagacggggtggcggccgggcagaggctgcaatctcggcactttgggaggcctaggcaggcggctgggaggtggaggttgtagcgagccgagatcacgccactgcactccagcctgggcaccattgggcactgagtgaaccagactccgtctgcaatcccggcacctcgggaggccgaggctggcggatcactcgcggttaggagctggagaccagcctggccaacacagcgaaaccccgtccccaccaaaaaaatacgaaaaccagtcaggcgtggcggcgtgcgcctgcaatcgcaggcactcggcaggttgaggcaggagaatcaggcagggaggttgcagtgagcagagatggcggcagtacagtccaggttcggctcggcatcagagggagaccgtggaaagagagggagagggagaccctgg

SEQ ID NO: 38381 - DNA, 1050 bp, Artificial sequence
  DNA replication origin
cagcttccgccttccgaaccgcctgcgtcagctgcggctttcgccccgggaggagggcctgcctgcccgccgggagttcggcccgcttcccgcgagcgagccgcccagagcgctctgctggcggcagaggcggcggcgaggctggcgcgcttgccgccgtctgctcgccccgcggaggcgacctgggcagacgctgctgggaactttgaaaaactttcctggagccaggcttgccgcagattcgaggggaagcctcggccgcgtcccaccccctcccaaatccgagtctgcggagcctgggagggctcccagcttcctatccaaaccgcgccggggcagaggcgcggggaaaccgggggtagaaggcggcgggcacgccggggccctgttcaggctttgggaagggccggcggagatgctggtgggcttggacgccctccccggcccgacgccccggccgcagtgccgggattgcacctgtaggcggcctccgagcagctctctgggtggcaagagatgggcctgggagggaccgtgtccccagcaccgccagccgcggaacttgccttctctggggtggcagtggaaaccgatactgttttccaccttgaggcaagcctcgcaattaacagctacactcctggtcataatcaaggtcgaagaaagcccgtgggctggccgtagcctctgctaacccctctcccacgggcttgctgttgcatttgaggggacctttatatggaaacatcgacttcctttgaagggtggacaaagttttggccctaatagtaggtatgtcctgcagaaaagcgtgactattcagcggccggtttggggcttgagttctcctgggtgtggggcgtgatgggctggcaataggtcaagggaaaatagtttccaacatgctgagttatgagcataaaagggtgggtatttgtggttatctacttattgcatttgatgggaggctcagtatgaacaatattttcagtgccaaatctcatcattctgaggaataaactagggcagctaactgacctctttacatag

SEQ ID NO: 38382 - DNA, 1259 bp, Artificial sequence
  DNA replication origin
tggcttaaataaatgaagagacttatattaactattacacaactagagatttttgatagctccaaacccctgggtgacagatttttctgatctccaaggccagcttgtattgataaggctacctgacacacagtctgagtctgtactggcacaggaggtgaatggtcactcaggagccacatacttctatctctgctcttaacactggttacattccattgtacccttgcagacttgaggagaagtcatactccctcgtttgtaagtactttactcttcagtagaacataggagaatgaaattggaaacctctggcatagagatattgctttactttttcctatctttgtgatttggagcaagtggtatgacttctctgactttcatgtaaaatgggagtaaaaatatccacctcatagagtttctgtgagaattaaataaaggtaatgattatatagcatttaacttagctcttggcttatagatacaatcatgtggtagcagaagtgatgtagtgatggaggtgataatgcgagagctggcgacaatagtggaggaggtggtaagaggcatgaatgtggttctgatgctggtgaatggttgggttagtagtaggactgatgatgaggagttggtacaggacatagtggtggaggtagtggtattggtagcagaagtgaaagtgttgctagaattggtggaggtgatgatagagataatagcgaggtggtgatgatgatggtagaggtggtggtggtggagatagtgaaattggttttggagaaaatgatggaagtgaaagaggtgacaataatggtggaccttgtggaagtggagatggtagtgagtggtactggttgacataaaggggagatggaggtggtgatgatagtggtagagatgatggtggaagtacaatggaggtagagattatggtggaaatagtggtggaggaggtgctagagtgactgctgataatagtagaggtggaagtaaaggtggtggaggtgatggcagtggtggtgggggtgaaggcagtggttggtggtggttgtggtggtgaagacagaggtggtagagatagtggaggtggtggtgatggaagtggtgacagtgaagatggaggtagtggtggtcaaggaggtgagggagggggtagagaaagtggacttggcaaatcaatgtgacaatgtccatagggagcagagaaactggaacccatggtaaatgttctaccctaagaatctgaaaatgaaagg

SEQ ID NO: 38383 - DNA, 816 bp, Artificial sequence
  DNA replication origin
ccacccatcgtctgggatgtgaggagcccctctgcccggctgtccagtctgggaagtgaggagcgcctcttcccggccgacatcccgtctaggaagtgaggagcgtctctgcccggccgcccatcatctgagatgtggggagcgcctctgcccggccgcgaccccgtctgggaggtgaggagcgtctccgcccggcagccgccccatctgagaagtgaggagcccctccgcctggcagccgccccacctgagaagtgaggagcccctccgcccggcagccgccccgtctgggaagtgaggagcgtctccgcccggcagccgccctgtccgggagggaggtggggggtcagcccccgcccggccagccgccccgtccgggagggaggtggggggcgcctctgcccggccaccaccccatctgggaggtgtacccaacagctcattgagaacgggccatgatgacgatggcggttttgtggaatagaaaagggggaaaggtggggagaggatggagaaatcagattgttgctgtgtctgtgtagaaagaagtagacatgggagacttcattttgttctgtactaagaaagattcttctgccttgggatgctgttgatctatgaccttacccccaaccctgtgctctctgaaacatgtgctatgtccactcagggttaaatggattaagggaggtgcaagatgtgctttgttaaacagatgcttgaaggcagcatgctccttaagagtcatcaccactccctaatctcaagtacccagggacacaaacaccgcggaaggccgcagggtcctctgcctag

SEQ ID NO: 38384 - DNA, 1103 bp, Artificial sequence
  DNA replication origin
acatgtttcagagagcacagggttgggggtaaggtcatagatcaacagcatcccaaggcagaagaatctttcttagtacagaacaaaatgaagtctcccatgtctacttctttctacacagacacagcaacaatctgatttctccatcctctccccacctttcccccttttctattccacaaaaccgccatcgtcatcatggcccgttctcaatgagctgttgggtacacctcccagatggggtggtggccgggcagaggcgccccccacctccctcccggacggggcggctggccgggcgggggctgaccccccacctccctcccggacagggcggctgccgggcggagacgctcctcacttcccagacggggcggctgccgggcggaggggctcctcacttctcaggtggggcggctgccaggcggaggggctcctcacttctcagatggggcggctgccgggcggagacgctcctcacctcccagacggggtcgcggccgggcagaggcgctccccacatctcagatgatgggcggccgggcagagacgctcctcacttcctagacgggatgtcggccgggaagaggcgctcctcacttcccagactggacagccgggcagaggggctcctcacatcccagacgatgggtggccaggcagagatgctcctcacttcccagacggggtggcggccgggcagaggctgcaatctcggcactttgggaggccaaggcaggcggctgggaggtggaggttgtagctagccgagatcacgccactgcactccagcctgggcaacattgagcactgagtgaacgagactccgtctgcaatcccagcacctcgggaggccgaggctggcggatcactcgcggttaggagctggagaccagcccggccaacacagcgaaaccccatctccaccaaaaaaatacgaaaaccagtcaggcgtggcggcgcgtgcctgtaatcgcaggcactcggcaggctgaggcaggagaatcaggcagggaggttgcagtgagccgagatggcagcagtacagtccagctttggctcggcatcagagggagaccgtggaaagagaggaggggagaggg

SEQ ID NO: 38385 - DNA, 888 bp, Artificial sequence
  DNA replication origin
tgcggccggccggaggggccgagcgaagcgaggagaggccgggctggtggccgcaggtcggcctcggacccacgggaccagaggatcccatatccgtcccccgggctcgagaggcgctggccgcgcgggctggctttccgagggggggggggtcccagtggggcgcgtcgggcccgcgcggaggtcctggtgccgggggcggaggggcagggccgcctcagccgaaagaccgcggggaggggcgcacgagcccgcctggccgtgcggacgcccgcggggtgcgcgaccccggaggtggcggaggtccaggcagggggcgcggtcgggaagcctcggcgcctagcaggtggcgggggccgcgcccctctcccggggaggcgcgcggtgggaagcggagcaaacttcccctaagtaactttcctgaggcgctgccggcggggactccggggaccgacgctccgggtttgcgcggcctcaggcgccgcgggaacccagcgagtggcggcgggcgatggcgggggcggcttcctcctgaggctggactagtcctccgagttctgagtggcatttgtggcccgtttgctctaaaaatagacgtacaagtttggtgttcgggaagaaggatgtttgctctcttgggaagaaaaggcttttacctcctggccttttcaaagaaagtattgttcgggcctgctggggatccctatttatcaagcaacccattgtcctgtgtgtgcctggtgaaagcgagctaattctattattagtcctcaaaagaccaagggagatcacggtgctttttcttttttaaatattccccgccacctcgccaaatcctgtaatacagtttccccaaacttggctgcacagaggagtcgctggggagtt

SEQ ID NO: 38386 - DNA, 867 bp, Artificial sequence
  DNA replication origin
ggaggggagaggaggggaggggagggggcaggaggggaggggagaggaggggaggggtgaggaggggaggggtgaggagggaaggggtgaggagggaaggggtgaggagggaaggggtgaggagggaaggggaagggaggggaggggtgaggaggggaggggagggcttaggaggggagggaagaggaggggaggaaagaaagagaaagagaaagaaataatttttagaaagtcaggctgagtgtggtggctcatgtctgtaatcccaacaatttggggagcctaggctagtggattgcttgagcccaggagcttaaaactaacctgggcaaattggtgaaaccacatatctcaaaaaaaaaaaaaaaattagctgggcctgttggcatctgcctgtagtcacagctacccaggaggctgaggttggaggatgacctgagctcaggaggttgaggctacggtgagccaggatcccgccaccgcagtaggataccaccactgcactccagcctgggtgacagagaaagaacccgtgttaaaaaaaaaaaaaaaaggcactctgggttgttgaaatggctgtggcaaagcacaaatgccagtttaatagatgagccctcagttcaccactctcagcctattgacatcttttgcatatttttgatacgtccttggttatctatcttgccagctccccgcagattaaaatcaacacattattaaaggcaggagagcttcaggagactagccagtcaccaataaagccataactggaaattggagatcaaagggaaaaacactgcatgacataaaaagtgacatttgcgattatggttgtgaatcatcaagaaaagacagggttagctggca

SEQ ID NO: 38387 - DNA, 1099 bp, Artificial sequence
  DNA replication origin
ggaagattagaaagactcagtgacgcttggggttggtactgaggggacaggtgggagggaaagaaggaagatttgggatgagttgcactggacacagagactaggaagggactcatgtgtaaaagaatgcctggacgtcaggcacctcagaccgtttgcctattttacgacaagaattatttagatcttgcaggatggaaaaattcaaagtgccattttctggctatttggaactactgtcgagtttgtattggggtcaagcagcattgcagaagaaaataaggcatttaggttttaggtcaggtgtgagttgaagaggttttaagtttttgagaacacaggccaagggagtagaaggaggaatggagggtggaaggttgcctatagtgaaggaagcaagcctagagaaaagagagagtatagaaacggagggaaggggttcgggggttcttaccttccagaaaagtgggaaaaggggttggggtgcagagataagaggtcggggggcagaaataagggatggggcacagaagtaaggggtcggggcatggaaataagggattggggcacagagatatgaggttcgggtgtggaaataagggattgggggttcttgccccctagaaaagcaggacttgccactaagggtgaaggagaaggggttgaggggtacttgccactcccccagaaaagtgggacttgccgctaagggtgaaggaccaaggcaggcgtccctgcgtggtctgacacctttgaaatgtgggtgaattatcagagaggcatccctgcaatgattaaacaccaagggaaggctgccttcccagtccgtaactggcaccggagttttgggtccacggacaaaacgtgtctcctttgtctctaccagaaaatgaaaggaattgaaattaagggagagattgaagtgtggcgccaagattgaaaggagaaagaggttgagggatagtgagggaggttggagaagagagtaaaaagaggccgcttaccggatttgaaattggtgagatgtttcttgggctggtcagtctcaggacctgaggtcgtaggtggatctttctcacggagcaaagagcaggaggat

SEQ ID NO: 38388 - DNA, 1033 bp, Artificial sequence
  DNA replication origin
gtccaacaaagcttaagaaacctgtgaattaattaataagaggttatatactttgaagtttacaaagaagtctgtggatcatatgagcagagctttcttagtcttttagagatctaggtatgttaaatgggagttcttgcaaagaacagatttgtaaaaacagatagtctttattcattccataaatatttttcagctcctattacatataggctctggtctaggtactagagattcagcagtgaaaaagatagaaattcctgcccaggtggacctcacagtctaaatgtggagacaggcaacagataggaaataaattaatgtgtgcatgcatgtgtgtttatgtgtgtaggtatatgtgtgactctgtgtgtgtgtgtgtgtgtgtgcacatgtgcagatgtttttaaatgctaaagagaacaattaagcaggaaaggggccaggaagttggggggtgggttgcaattttagaaagcatgtgagcctgagtcccacagagaaggtgctatgtgagtgaagacttcaagtaggagaagggtgagccctgtggatgtctgggtaaagggtgttccaggacgggggatgaggagtgcaaatgcaaatgttgcaggtgggaggacgccatgggtggctggctccaggaacagtgaagaggctgtgcagcatctggggttagagtgagctcagggaaagtagcaggagatgagtcacagatgatctggccaggctgtggggccttatggtcgtggtaagtattttgttttttgctgtgagtgaaatgggagccatgggaaggatttgggcagaagaatgacatctctggattttatttcagcagcactggctgctgtatagagaaagtctagtggattgtggcagaggggaggggagggtggaaacaggacatggtggtttttaaaacatgctcatgaattctttgctactcttcccattaagagacaggctaatctcctccccttgaacctggtgggcttgtttatggctgcatcgatccagttcacagtcctgg

SEQ ID NO: 38389 - DNA, 1129 bp, Artificial sequence
  DNA replication origin
ttaccgaagtgactcggagtagcggacgctcagtccggccgggacttttatactgcgcttcccctcctcctacccgttccctcccttcctcctccccagcgccggcccagcccttccctcccagcgagccaagacctagtccacgcgttcgcacacagccgcgtcgcacatttccaagcctttcccgcgtcccggaccccagtgcctccgggatggagcctccgaattctcccttggtgaatgaaattaaataaataatcaactctttcttgacggcacgcctccctttccccctccccaatttcctaccttccttctccgcgtcctagaaagatttaagattcttaattcaactgctttcgagttctcgcaaggcatctcaaccaagtattaaccaaattaaggcaaacccttgcgcctttgcgaaggttcctccggtcaccgcggtactttgcagaatttaaatagcggtagttaaggtagggtctgctggttgggcttatttgtgcccgggagaggaagggcttgctgcctccttaaagatgcctgaagcatctttaaaattctaactaactccagcatcttattaataaattggcagctgtttatagagtctgctatattttttccttttcattatttttttttgggtggggaacggtgcgagggaggaggggagatgtttggaggggtgcttgctttggatttttaggcagccgggcctgtcagacatcttatttctatctctaggctctaaaatgccaataattgtcactggagtgcgggtcggggggagtggggggaaacgcgaaacaataaccgtccgtatttcagatgggagatcaaagaggggatcccagcagcttttaaatcctggaaggatcctcctgtgtgttttctaattaggatcacttaaaagggaaagggctggagaatcagcgccgaaatagaatgtataaattaagatggcaaactagaatcccacagccaaagagttttaaggattgttctaacctccagttgtgccagattatgatacgggctcgcaggaacaaatgactttcctattgccagaggcaggctggtctgaattaggatccaggggccgctgtgtcctgccctttcatca

SEQ ID NO: 38390 - DNA, 1549 bp, Artificial sequence
  DNA replication origin
ggcagggggctgcggggtcggcggcggggcgggcgcagccgagcccccgagcgcacatgggcgccccagatgtggccgcggcgccgcagctggagcgggagcggccgccagagaagcgcggggaggaggaggaggagaaggagaaggaggaggaggaggaggaggaggaggaggaggaggaggaggagtaggagggcttcagctgcggccgggagttacctccacgcttggcgcccccgccctcgccgccccgagccactcacccggcaagccacctccactactctccgcgctcctcggggccgcctgccgcgccgccccgcactcggagtcccggggagggccggttccagatgggggccccgggcacaccgaggttgtcacggtttggcggtagccggggcgccctcggcggcagcgtcagcctgccgggctgtaccaagtgcccgctgccgaggtcgctgtgacgggcgcgggtagagcccttgtgcacactgaggctcggggctgtgggtgggtggggtggtgcctgggctgctttagaaacctttattggcaaactggagctggagttgcagtgatggaaaacggagggggcgccggacaagccatgcgtctgcctgcgacccctgcctgaagcagtcgggggagaggaggagtgccaaagtgtcgttccgaagggtcttgacacttgctgggccgcccgctagccgggcacggctgttcgcggatccgcggcgccccgtagagcctgggaagggaggggagtccgactctctaggcgttcgtctggtcacgggcgcaggtgttggctggaagctgcagagacgcagtgcccgcggctcaggcgctcaggaactcggagtgaatctcagctctagtgggcttgcctctgtggggggctcatcccgggggtgccgcgcccagaggggatttgggggctggcgtcgcgcagctgtcgatcccgggccaccgcctcatgaccgcgctgcagcctcgggctcccgcgtgcggctcatgccttgcagtgggcggttggcgaatggaagggctctgggatccggctgagggcgcggagtccgagcgtcagatgctagagcgaactgtgtcggtccgtggcaccgcgcacttccctccttgaccttgctcgggctcccgccttaccgaagtgactcggagtagcggacgctcagtccggccgggacttttatactgcgcttcccctcctcctacccgttccctcccttcctcctccccagcgccggcccagcccttccctcccagcgagccaagacctagtccacgcgttcgcacacagccgcgtcgcacatttccaagcctttcccgcgtcccggaccccagtgcctccgggatggagcctccgaattctcccttggtgaatgaaattaaataaataatcaactctttcttgacggcacgcctccctttccccctccccaatttcctaccttccttctccgcgtcctagaaagatttaagattcttaattcaactgctttcgagttctcgcaaggcatctcaaccaagt

SEQ ID NO: 38391 - DNA, 1499 bp, Artificial sequence
  DNA replication origin
gcccgggtcccgggctgtcccgggacccagtctccgtctccgccgccgccgccgccaggcagcgccggggcttgctccgcagccggcttggacacccccggcctcgcggtggctccgccgtggtgcggcggcggcggcggcggcggcgccggcagctcctgctcccccggccccgcacaccccgccgcgcccagcgccagccccgcgggcccgggaagcggagccctggcgggagccgaggcgggagccgcgctgccgggctcccgggctcctactcctcctcccccggcgtcaccgccgccgccgccggccgccgcgccgggtcctaaagccgcgcgtctcaaaaggatggtgcgcctggcggccgagctgctgctgctgctggggctgctgctgctcacgctgcacatcaccgtgctgcgcggctcgggagccgccgacgggcccgacgcggccgcgggcaacgccagccaagcccagctgcaggtgagtgcgccgccggagagggccgtgcgcggctgcggggacggtttgtggggcgggggtgctgagctagtgccgggtggatgcagggaggcaggtcccctgccccacctaagagcaactgttttggcagtagttttgcccgggccacttgacttaggcagaggcggagcgggggcacgtgcctggaggctgcacccggcttccaggtctgcgggctgcgctccttcagttctgtctgtcacgggtcaggtgcggggttggtggggaggtgggaaggagcgaggtttgggatgagcagaggaagtgtggagaatgtgcttgcttgggggtgctaccagtctttcgttgcccttcggaggctgagtaatgttactcgaggctggagggacgcaaggagactttataggatgatatccctgaagtctttgggagaaagaactccgggagtctacccctttaggaagcaatgccaaaggtcaggacataatttcccaaggagaatagccaggcatcccctcctcaccctcagggttcccttgcttccagtgttcctcttcctccgggagcctcgcctgaggttcccccctccccccttgtgcccccttggtcatggggaaggtgcagagtgaaggcaccggtagtgatttgggccagggttacctggggcttttaaacttgtagcaaagtctttctcccaaggatcttccccgttgaaggtcgctttagcaatgggattctgtttatccatttcaacttcagggcaaggagagggcgtagtggacggtcagacataatgtgagttctgacttaggaatagaattgcccagctaggcatttcctgccgctatgttagcgcctttccttgagtctaggggtgggacaactgtaaacttggagcataggcaaaagcaagcagggattttcccaggaggcagaggggattctctggctcctaaaatctgctcaaaccaggcgcggtggctcacgcctgtgatcccagcactttagcaggc

SEQ ID NO: 38392 - DNA, 887 bp, Artificial sequence
  DNA replication origin
ggtgtgaggagcgcctctgcccggccgcgaccccgtctgggaggtgaggagcgtctctgcccggccgccccatctgagaagtgaggagaccctccacccggcagccaccccgtctgagaagtgaggagcccctccgcccggcagccgccccatctgggaagtgaggagcccctccgcccggcagccaccccgtctgggaagtgaggagcgtctccgcccggcagccgccctgtccgggagggaggcggggggtcagcccctgccaggccagccgccccgtctgggagggaggcggggggtcagcccccaccggccagccgccccgtccgggagggaggtgggggggtcagcccccgcccggccagccaccccgtctgggaggtgaggggtgcctctgcccggccgcccctactgggaagtgaggagcccctcttccccggccaccaccccgtctgggaggtgtacccaacagctcattgagaatgggccatgatgacaatggcggttttgtggaatagaaaagggggaaaggtggggaaaagactgagaaatcggatggttgctgtgtctgtgtagaaagaagtagacatgggagacttttcattttgttctgtactaagaaaaattcttctgccttgggatcctgttgatctatgaccttacccccaaccctgtgctctctgaaacatgtgctgtgtccactcagggttaaatggattaaaggcggtgtaagatgtgctttgttaaacagatgcttgaaggcaacatgctcattaagagtcatcaccactccctaatctcaagtacccagggacacaaacactgcggaaggccgcagggtcctctgcctaggaaaaccagagatctttgttcacttgtttatctgc

SEQ ID NO: 38393 - DNA, 1150 bp, Artificial sequence
  DNA replication origin
gttacctttctcctctctccacacctttttcttcttgttgctggggtacatgttgccgtgggggtggctggctttaagctgcaagttccccaggctcacgggcaaacagggtgtgtgtggagtgggaggggtgggagggggcactcagcagggaaaaagtgaaagaggctctgcgtcctgcgctgctcgccgctcgccgctctccagtcgccgccctcctccctcagcccgcgctcggctccggctcccacccgcctcagccccgcggacgccgccacagcagcacctcagagcctgtcaactaggtcacgcctcgcgctaacctaacacccgcgcaggcaccgcctaccagccgctaggcagcgccgcctcccattggctgcactgcccgccgctctccgtgttctagccacggcgcgccccaacttgggccccagggcgcacgcgcaggcgcaggctcgggctcgacgccgacgacgctagggagctggagggggcggagccagggagcgagggggcggagccagggagcgagggggctggagctgtcctcgagacgtgggcgcggcgtgaagccgacgcctagtgggagagggaggtggaccgcgcttaccgctggcctcttggaagacttgagggcgtggcctgtagagccaggtgcgccaagtgacaggcgagctagcggaaagccgcctcagggacttggaggatgtagaagtgggaggagaccgagggtcaacacgaattgtccgtgctcactccaactgccctgttgaggaggattttcaccaggtaatctgatgctttcctctgggtgggcaactaaaaaagaccaaaagaaatgaaagtattggcaaatggttccacatcgtatgcagttggctcctcaaacctgtagtgaaaattacaaatttcattggaatttggtgaagtttagaaagaacaaatgtagactgcgatactcaagacggttttaagaaccaagaagttgcggacaaccaaaatgttatattgaaaacacgtcttacgtcaaaacaaatccagatgcctgttaaccagagccgagtggtcttactttattctaccaattgcttaatgttaagacgcaggtccaaaaagctggcttgattctggataatactcacctggc

SEQ ID NO: 38394 - DNA, 1009 bp, Artificial sequence
  DNA replication origin
cctggccagccgccccgtccgggagggaggtggggtgtcagccctccgcccggccagacgccccgtctgggaggtgaggggctcctctgcccagccgcccctactgggaagtgaggagcccctctgcccggccagccgccccgtccgggagggaggtgggggggtcagccctccgcccggccagccgccccgtctgggaggtgaggggcacctctgcccggccgcccctactgggaagtgaggagcccctctgcccggccagccgccccgtccgggagggaggtgggggggtcggccccccgcccggtcagccgccccgtccgggagggaggtggggggggggtcggcccccctgcccggccagccgccccgtccgggaggtgaggggcgcctctgcccggccgcccctactgggaagtgaggagcccctctgcccggccaccaccccttctgggaggtgtgcccaacagctcattgagaatgggccaggatgacaatggtggctttgtggaatagaaaggcgggaaaggtggggaaaagattgagaaatcggatggttgccgtgtctgtgtagaaagaagtagacatgggagacttttcattttgttctgcactaagaaaaattcctctgccttgggatcctgttgatctgtgaccttacccccaaccctgtgctctctgaaacatgtgctgtgtccactcagggttaaatggattaagggcggtgcaagatgtgctttgttaaacagatgcttgaaggcagcatgctcgttaagagtcatcaccaatccctaatctcaagtaatcagggacacaaacactgcggaaggccgcagggtcctctgcctaggaaaaccagagacctttgttcacttgtttatctgctgaccttccctccactattgtcccatgaccctgccaaatccccctctgtgagaaacacccaagaattatcaataaaaaaataaattaaaaaaaaaaaaaaaaaaaaaagaattggagagaacag

SEQ ID NO: 38395 - DNA, 2989 bp, Artificial sequence
  DNA replication origin
gaaaacatgaaattcacctgagaatgcaaggaggaattcgccagaaagtaacagaggaggggctctccaggcaggagtggaaggtgaaggccacctgggtgcgagagggccagcaggggccacgtggcgaggctgcgggaggggtgaggggtgacctgatatgctggggccagcagggaccacgtggcgaggctgcgggaggggtgaggggtgacctggtgcattggggccagcagggaccacgtggcgaggctgcgggaggggtgaggggtgacctggtgcattggggccagcagggaccacgtggcgaggctgcgggaggggtgaggggtgacctggtgcattggggccagcagggaccacgtggcgaggctgcgggaggggtgaggggtgacctggtgcattggggccagcagggaccacgtggcgaggctgcgggagaggtgaggggtgacctggtgcattggggccagcagggaccacgtggcgaggctgcgggaggggtgaggggtgacctggtgcattggggccagcagggaccacgtggcgaggctgcgggagaggtgaggggtgacctgatatgctggggccatcagggaccacgtggtgaggctgcaggagagtgaaggtgacctggtgcattagggccagcaggggccacatggtgaggctgagggagaggtgaggggtgacctggtgcgctggggccagcaggggacacgtggtaaggctgagggaggggtgagggtgacttgggtgtgttaggaccagcaggggccccgtgatgagactgcaggaggagtgaaggtgacctggtgcattagggccagcaggggccacatggtgaggctgagggagggctgggatgaagctgaggctgctgggtccaagttaggcaagcctgggcctagggagttagattcactccagactcagtgggatatctcatggcgtttagcaactatctggtagccttctgcttccctggctgactcccgtgcagggggtaagttctgggaggacaacaccgtattcctcctgctactttggttctcttagttcagtgcctggcatgttcaaataaactgagttggtgcataggttctgggatggggaaatgggtgagggtgtgtagggatggatgtgtgtattttgggataggggaaggggtgtacatgtttgagatggagtaagggtgggtgtgtttgggatggggaaggtgtgtgtgtgtttgggatggggaaggggtgtgtgtgtttgggatggggaaggggtggttgtgtttgggatggggaatgggtgtgtgtgtttgggatggggaatgggtgtgtgtgtttgggatggggaaggggtgtgtgtgtttgggatggggaaggggtgggtgttcagagttgtggaaggggtggatgtgtctgggatgggaaatgggtgtgtgtgtttgggatgggaaggggtgtgtgtttggaattggggaagggttgtgtgtgtctgggatggggaacgggtgggtgtgtctgggatggggaatgggtgtgtgtttgggatggaaaggggtgtgtgtgtttgggatggggaaggggtgtgtgtgttggcgatggggaaggggtgtatgtgtttgggatggggaaggggtatatgtgtttgggatgcggaggtagtgtgtgtgtttgggatgggaaggggtgtgtgtgtttgggatgcagaatgagtgtgtgtctttgggatgggaaggggtatgtgtgtttgggatggggaaggggtgtgtgtgtgtggaattagggaaggggtttgtgtatttgggatgggaaaggggtgtgtgtttggggatgggaaggggtgggggtgtttgggatggggaaggggtgtgtgtttttggaattggggaagggatgtgtgtgtttgagatgggaaggggtgtgtgtatttgggatgtggaaggtgtgtgtgtgtttgtgatgggaaggggtgtgtgtgtttggaattggagaaggggtgtgtgtgtttacaattggggaaggggtgtgtgtgtttgggatggggaaggggtgcgtgtgtttgtgatggggaatgggtgtgtttgtgtttgggatgagaaggggtgtgtgtgtttctcatgtggaaggggtgtgtgtgtttgggatggggaaggggtgtgtgtgtttggaattggggatggggtgtgtgtttgggatggggaaggggtgtgggtgtttggcatgcaggaaagggtgggtgtgtttgggatggggaaggggtgtttgtgtttgggatggggaagaggtgtgtgtgtttagaattggggaagggttgtgtgtgtttggcatggggaaggggtgtgtgtgtttgggaagtggaaggtgtgtgtgcatgggatagggaaagggtgtgtgtgtttgtgatggggaaggggtgtgtgtgtttgcgaaggcaaggtgtgtgtgtgtttaggatgggcaatgggtgtgtgtgtttgggatgggaaaggggtgtgtgtgtttgggatggggaaggggtgtgtgtgtttgggatggggaaggggtgtgtgtgtttgggatggggaaggggtgtgtctctttgggatggggaaggggtgtgtctctttgggatggggaaggggtgtgtctctttgggatggggaaggagtgtgtgtgttttggggtgtgggtatgatatctgatttcagattataaaaatggatccctcaggctgctgcttagaaacagacttgagggccctcagtgaacggggtgagaaaagtaaggggcaaaggtggcaggaatctcagctcggcagcttcttggggatggaaagaaagggtgggtgtctgcagaggcagaatcaacaggatttcatgggacgggcatcaaatgtgatttcatagctcaccacattctaaaactgtaagctagcctaaatttatggccaatctatatgtaaaagaaaagggaaagtcaagatgttggtgacttgcttcagcttgaacagacta

SEQ ID NO: 38396 - DNA, 2147 bp, Artificial sequence
  DNA replication origin
tctcaggtgatttggatctttattaagatttgagaggtggccgggcgctcggtgtctaaggcctgtaatctcagcactttgggaggccaaggtggccagatcacctgaggtcgggagttcaagaccagcctgaccaacacggagaaaccttatctctactaaaaatacaaaattagccgggtgtggtggcgcatgcctgtaatcccagctactcgggaggttgaggcaggagaatcgcttgaacccgagaggcggaggttgcagtgacccgagatcgcaccattgcactacagtctgggcaacaagagtgaaactcagtctcaaaaaaaaaaaaaaaagatttgagaagtgatgaactctgggattatagaaggaactaggggggtgaaggagttgtaaggggtacggggcacgaaaaaaaaaaaaagaaggaactactattgatccttgggaagtggtaagagaagtcttcagatgcgaagggtgataggaacatcccaggctgaaaaaataagcaggcccatgatcaaggtagttagaactagtaagaggtgttctggaatgagaagtttcgtctgggaggggcagtgggcacttaggaagatatgggagatagggcagaaaaagtaggctgaggccagaggcagacgggccagactgacctgctgagggttatggaggaagccacagcaaattttaagcaagaatgtaacaagaccagtcttatgtttggacctaactctggtggcagagtggaggacgaaatgcaggagaggctggagcaagcaggcaggcatgtatccttaaatgagcaccattcacttttggactagaaaggaagtctgaatattaagaagtgtaagggccacagggtcctaggcaggcagaaaagcaaagggttccagctgcaggaggatacaggggggttccttctcagttcaggagtgtggtctcggactggcatcttcagcatcacctaggagttgttagaaatgcccattctcaagcatcatcttagaagcagtgagggaaccttggggatggggcacacaaatctagctttgaacaacttttccaggtgattctgatgcatgctaaagaaccactgctctagcccgccaaaaatcatgtctcaggtggtaaaggcttagaactgcacaacttactgtcttttttaaaaagaacgagggtaatgagaaatgggttcctatgttgagtggggcagaacaaaagccacatacaacctagattttacgtagtgccggaaaaaaaaatactgaccatcttgtccaaaagtctcatatttggagaattaaaatagttttggtcgaggccatgatgttctcggtaacctaaattaatttataaaattctttgttccctttatttcccacaaaaacacccgcagcaaaaacgctgggattcatctgggccctctgaaaaccgtgtttccgacgcaaccgcccattagaaaaacacaattccaaattaaaaacccggagaactgagcggcggggctggcgccaccgtcccgggacagcgcggcctttcccagccacacccctgcgcgccgccggcctccttccccggcagttcccaaagataaataaatgctccttgtttttccagacctgaaattaacggtgactcacagagcactctgcatggccacggtcgcctcgggaaggaggaaaaatgtgcagacttttttcccctcacgcgagggcaggacaagccagactgggccaatcaggggagggcggcgggaatcgcaccaaagtaggtaaaaaatgcgggaggcgtccccgctgccgcggcccgcgactccgctcccgtgggtcctcccccagtgcgttccccctcctcgggccctgccctcccaacccccaacatctctctccttccaccactgtgtccctctccctcacctctccccttgcccccacctcccccactaagtgccccctcgcccctccccccacatccccctcctctccccacactgtcccctctccctcacctcttccctcccctctccatcctcctcctcccccaactatgtgcccctcgcctctcccctccaaatccccctccttcccacactctgtacccctctcccccggctctcccctccttttcccctccac

SEQ ID NO: 38397 - DNA, 1066 bp, Artificial sequence
  DNA replication origin
ggggtaagctcgcgccgccgcgtcagctcagcgctgggtctctcggtcccgcagccgtgaggaggacggtctgcatactcgctgcccgccggctccctcccccgcgtccctgcgaccgccgcggcgaagatggtgagtaggagggaggccgaggcgtgggccgaggcggccgggagcagtgtgtctctggggcgccgcggagtcggggctaagggggtgagccgtgcctcagcccggggagggacccggtccggctgcagtgtccgggctgcgggtgagggggggtctctgggcctccgtctcccgccgtcctggctgggcccccgcgccccggggtggatccgcggctgttgcgcagctcccagctggggcgaggccgccgccctgagcgtggcctctgcgggtgtctccagacccggccttgcaacaactggctggggtcgagcgcccccacccgctctgtgaaatccatccgggggtctgcacaccgaggccggggagtggggggcggggggcgtcggaatccggccaccgtccttgttggcgtgggtttccccagagctggcgctgaggcgcttggtgacttgtgcgcgttccagcccttgaggtctgtccatctcaataaggaagataaagcctttatggaacagtcctagagcacggaatgatcgctaacgagcaggatcctggcatgatttagaacggggtggccttgcagctcctttgtttttttctttttatctggcaatcggcttccagcagcactctcgtcgtgcttgtcaagcttggcagtgtctgttttaacccttccctgcccgatctgtccgtgtatggttagaattttttttctgacctgtagacagttggactctgccagaacttggtgcgcaaggtgtgggcatgatgctgggatgctgatacaaccaaatttaagagctttaaaaaccattaaaatactggagtcaccagaaagtaaacaggtgctcattagtatattctatatgatggacattttgcttaatttacatattttccccctttacactgtcactctaattagctattt

SEQ ID NO: 38398 - DNA, 1035 bp, Artificial sequence
  DNA replication origin
tgaggggcagtggcctcctcctggactctggctaaaagcctgctccttcaggccacctgctgggagccccaggtctgtgcatgcagaagggaggaagccgaaggcaggtagcacagggtgtaggactcctgtgcggctggcctgggagttcaggaaaatgccacttgggagcttttctcctgcagctcgttctaagggcccatcatctgttgtccccgcctgccccagcagggccagagcagtcctcaggcccggcagtggtacctcccaggtgggcagagggagcctgagtctgccaggccaccggctgggccctgcctcaggtgggccgggcctcctcaactgtcccaggccaggttccatgtcaggctccagggaagccagctgaggcgcagccctcgcaaacttcctgcggaaggggctagcagcacccccccagccccacagcattccccagcgtggcacaggtcactggcctggccattcgcagccctgtcctgcagctgtagccgagctcaggcagcaccagaggactggcttgtgctgttcttggaatgaagttcaccgtggaggcaggactcacccagctgctgcccgacagaggaaccactgctcctccctggcccagcttcacaaagccagaccctgggtttgggccgctgggtgaagatggatcagagcccacagagtagatgtgaagttccaggttaacatggcccatagacagcacaacaagacctgaagcccctcacagacagctgcgccctgaccagcttcctcaggtgtctccatgtgatattctggaacacacaggcaccacgatgctgcgcctgcaggccacacctacggaagcggtgcagtgaaggcaggaagccagcgaggcctgagggacaggtgcggggaaagcgaggttttgttctagaagccactccacgccctccacagatgccatcactacacttccttcagggctgggtctgatgagagctcagagtgcaaaagaaatgctttccttcttggccctttcaaatctca

SEQ ID NO: 38399 - DNA, 1006 bp, Artificial sequence
  DNA replication origin
tagttaggattaatctgaattttcttgcatcatgtagatgtgtctggcagaaattggtgcttttatttccttctcaaacagttgatctgaaagttatgtgtaggctgggccatcctgctctggagtagagaggagcgattcagccccagatattctagaattcgggcagtggctgccaagggtgtgattgtcagtgtgtccttgccactggcctgctgacacctcttcctcggagtctcattcttttggggacgctcttggggtgatttgccggcggaggctgtcacatgatgcagggaaaagctgtgagggccccaggagagctctgagggcagggtcacgattccacctctcctggaaacccagctctccggtgtcaccaactgggactctggtgacagctctggggtcagtgctctggatggcggggggaggggagggtgttgggggctgctcaggcttccctgggagctcacgctgggtgaggtgggggcagccagaagggaccgtccctggccagatggttcagcctcgaaggtactcctccctggatggggcctcaggtgggatctgtaggggctgtagccccttggagcctaggcggtgacctcgttgtgtcccttcagcctcaaggagctggagtcccaggtgtcgggtctggagaaggaggccatcgagctcagggaggccgtcgagcagcagaaagtgaagaacaatgtgagtgcggcaggcacaggcggggacggacgggccagggaagcacaggtggggccgggaaaggttctgctatgtggcacccgccctggactcgggggagggctgagcttgtgtttctacaccccattgtgctgtgggggtccagggtgtggggggtgcttctactcacccctgagttccgccaaagacccagggctgactgcctgtggatcagcctgcgccactcgctcaagcgtggagtcatccctggggtggggacagtgtgctgttggcctggcctgagtcacgt

SEQ ID NO: 38400 - DNA, 1487 bp, Artificial sequence
  DNA replication origin
ggaggccggccgaggggaggagggcgggattgaatgggggcccacgggccgagcgcgccggtcccgggccgcggcccgctggcgcttcgcggggctgggacggcccccgacggggcgggccggggccgcagggctcgcggcgcagggaccgggtctgtccatggcacggacgccgggcggccgcggtggcaacttcccggagtgcgggaggcggctccctgctccccctggcggcggggccggggccaccgtttccccggctgggctgcgcggagcctggctcgagggctcccggcggggggacgagggcgcccggggcccggcccgccccgcccgcggccacgatgaatgggccggcggtgccagccccgggcggaagcggacacctccgggccggccaagcgcgctggcacccggcctggtgcccgccccggcccggccggctctcccgctgcgccctgattaggggaggcaggccggggtctgcgcttccagtggggcgcccgcagtgcttcagggacccctctccgaatgataagtcgcgagttttagctctagagtgccccggctggcgagggtgaccccgaccaagttgtttcgttcggggtctccatttcctggtctgcaaatcggggctcctgttagcttcgatttgcgaggaaagctgtggagacccagcacttgtaggaaggagccacaagtgttggctgttcagttgggatgcttttgttggggggtgctggacacgggaggaaggtggggcctggctccggcactgcggcgggcgcggggctgcagaagttgcacagccggggttctacaccccggaccacgtactggccgcctactcgcaggtcccatagcccctctgaatcctagtttcttatctgtggcctgaagacagcaccacccactcacagggtcgggaaccacgccgggaagtgctgggaccttgtacaaacagaaggcaatttggcaattactctgagaggtcagaggttaggagagactgggaagcaccaaggaaatgaaactctgagggacctgaggagcctcccacgtcactgctcagctattcactctgcgtgctggaaccttcagggtaggggccatctggatggcattttcaggaatttggagaaatgggcctggtagggcctcatatctcacattagatacctcttcagaactgggtgtccccagagacccaggacgtctgtctggcactcccaggaagaacaactgcgaatgttaccccgccctgtgcagctggggggcattctcccactgccccgcctccctcctcacactccttgtttgatttaacttcctgttaatccgacacctagagaaatctgtgaccctgcagcatgtcacttactgtgtgatgtcttgactcgtttacgaacttgccaaaggtcactcccactatcatatgccaacctctttcccttccagaaagaagcttccggttctgaggtcctgga

SEQ ID NO: 38401 - DNA, 1184 bp, Artificial sequence
  DNA replication origin
cgtccgctccggccgctcgctggctgcgtgcgcgcgtgtggagtcgtggcactttctgcctcagagctggcgaacggccccctccgccgggatcgccgcctcctgccttccccacccgggccagccattcatcgagccgcctcttcccattggtccgcaccccgccactctgccggtcgctggccagtcaggacgcgggtggccgagccgcggcggcggccattgggcagagaggagggtctccacctcggccaatgggagaggggaggagctgcggggaggtgaagggggcagggctggggagaggcggggccgagcggcgcggcgctcggccgtgcgcggggcggggcggagcaggaacgccccgcccaccgaggggggggtctccggccagctccgcccactctgggcccgcggcgctcccagcagtctctgactaggatccggctctgcctaggcgggaagcagaaggttcgggtcccggcgaccccgggcctgcgcctctggataccgctgggctgacatggcggtggctgaacagggttgcgcaaccgcgaacagccaaggaagctgctttatttaaacccaactaacttcccccgaagcagcgccccctcgggccgccgggtatgaggacaagctctgctgggggtcagcccagggagagcaagttcttatcatcaaagagattgcaatcagcaccagaaggaatttccttcagtaaatggaggaattggggtggaagagccagaaggtgcacgaggaattgaagcggatgtcatcgccctcgttgttagggagggtacaactgaggcacggtctatttaagatactcaaccaaatcacagccggcagagcaataattacaatccactctgtggcgttttattccatgcgttggggaaggtgagaggttctaacctaagaaaactcatccgtgtcccacaaaacggagcaactggtacttcctcattccctgactttctccccaatatcagccaacactcagtcttcataattagtcaagtctttaaattaaaataattttaggcttgatttttaaccattatgtcagcgtctcttaaagccaaccctttgaacttgagccaaagccagcttctttggaattttggattctgagcgaccaaaggctgcctagactgccccccatcacttccctagct

SEQ ID NO: 38402 - DNA, 827 bp, Artificial sequence
  DNA replication origin
ttttactccagctgagcctgaaatccactggagggccacaaggtcagacacacatttttgaagtatcactctatggtgtttagaacactctggaggagcaagcatgagaagagagaccagttaggaggctacagcatgaacccagggcagaggtgagggtgggttaggccaggatgagagtgatgtcctggtgaaagtgatcagattctgcatctattttgaaggtagggcccctggagtgagtgtaggaagaaaaaagtagaggtcaaggcctgagccctgcacataccaatgtttagaaggcagagagatgaccgaggaggagcgggggttcctaaatgccgtgcgaagaaggtgtttccaggaggagggagtgagcaactgtgtcaaatgctaccgatgggtcagatgaggggagaactaagaatcgatgaaggacagtgtttttggatgctctgcaaaagatcccggggtgggggcagggggaatgaggggggaactttggggatacgggagagagagggaagagctgctgcagcgtgtccttgagtagacaataggtttgggatccaaacagaaggaaagactggccttggctaggaggacacccacagtgggccataggagggaaggcagagcaggcagccctgatgcagagaagaaggtgttgtggtagtgggagtttaaggaatttctcttctggtggcttctgttttctcagtgcaacaggaagcaagatggcaggctatgaatgagaatggggagtaaagatgaagtgtgagctagttgtctaggacagtggaaaggtggatacatttttataaaga

SEQ ID NO: 38403 - DNA, 824 bp, Artificial sequence
  DNA replication origin
taacagcatcccaaggcagaagaatttttcttagtacagaacaaaatggagtctcccatgtctacttctttctacacagacacagcaacaatctgatttctctatcttttccccacatttcccccttttctattcaacaaaaccgccatcgtcatcatggcccgtcctcaatgagctgttgggtacacctcccacacggggtggcggctgggcagaggggctcctcacttcccagaaggggcggctgggcagaggcgccccccacctcccgcacggggcggctgccggacggagacgctcctcacttcccagacggggcggctgccgggcggaggggctcctcacttttcagacggggcggccgggcagagacggtcctcacctcccagacggggtcgcggccaggcagagacgctcctcacttcctagacgggatggcggccgggaagaggcgctcctcacttcccagactgggcagcagggcagaggggtcctcacatcccagacgatgggcggcaagacagagacgctcctcacttcccagacggggtggcggccgggcagaggctgcaatctcggcactttgggaggccaaggcaggcggctgggaggtggaggttgtagcgagccgagatcacgccactgcactccagcctgggcaacattgagcactgagtgaacgagactctgtctgcaatcccggcacctcgggaggccgaggctggcagatcactcgcggttaggagctggagaccagcccggccaacacagcgaaaccctgtctccaccaaaaaaatacgaaaaccagtcaggcgtggcggcgc

SEQ ID NO: 38404 - DNA, 848 bp, Artificial sequence
  DNA replication origin
ggaggtggggggggtcagccccccgcccggccagccgccccgtccgggagggaggtgggggggtcagccccccgcccggccagccgccccgtccgggaggtgaggggcgcctctgcccagccacccctactgggaagtgaggagcccctctgccgggccagccaccccgtccgggagggaggtggggggctcagccccccgcccggccagccgccccgtccgggagggaggtgggggggtcagccccccgcccggccagccgcccggtccgggaggtgaggggcgcctctgcccggccgcccctactaggaagtgaggcgccccgctgcccggccagccgctccgtccgggagggaggtgggggggtcagccccctgcccgtccagccgccccgtccgggagttgaggggcgcctctgcccggccgcccctactgggaagtgaggagcccctctgcccggccaccaccccgtctgggaggtgtacccaacagctcattgagaacgggccgggatgacaatggcggctttgtggaatagaaaggggggaaaggtggggaaaagattgagaaatcggatggttgccgtgtctgtgtagaaagaaatagacatgggagacttttcattttgttctgtactaagataaattcttctgccttgggatcctgtcgatcggtgaccttacccccaaccctgtgctctctgaaacatgtgctgtgtccactcagggttaaatggattaagggcggtgcaagatgtgctttgttaaacagatgcttgaaggcagcatgctcgttaagaatcatcaccactccctaatctcaagtacccagggacacaaacactgctg

SEQ ID NO: 38405 - DNA, 1255 bp, Artificial sequence
  DNA replication origin
ctcatcatcttcagctgcccgcttgacctagcggactcagcttcctcgtcttcatcaccatcctcttcctcaccatcgccttcttcttcctcctcgtcttcctccccaccttcttcctcttcttcatctacttcattgtcagcttcctgctccccattttcctcattagccttcccattagcaggggtgtctcttccattttccgcttcctccacagcttccttcttctttaagtccttggtggtgatttcggagctggtgtctacggctgcgtctgacatggtccggcacaccagtgatccgatgcaggggattaaaaagaaagcgagagttcagggactgtggtgatgaagtgtccggagtccgcagcggtaaaggcggctgcggcgagcaaggagccggacaaggaacaatgcaaagatggcttttcagagcagccagtgggtgatgtcatttttttatacaggagtcagggacctgtgaccagaaaggaatgaaagaagaagccctgtccttatgtgggaagcattccaggcagggggaagagcaaagtcgaaggccaggctgaagtgggagtgtgcttgacttacctggagagcgcgagaactggtgtagcttacgtggagtgagaagagatggggaacatgtgaatgaggtcagagcggttgcaggaaacggactgctgctgtaggccattttaaagacttttgattttcctctgaactgccgagtattttcagcagaggagtaacatgatctcacttatttttaacgggcttactctggctgctgtgaaaacagatttgggggtaaaaggcaagtctagaagtgggggatcaactaggaggccattgcaaagataaaggcaggacacgatgaatgcttggaccaggatgatagtggaggaggtgagaaatggccggatgctggatatgtctcttataatagagctaactggatttgctgatggattggagtgggttaatggatagaccatacaacttatttgtctggggaagttcaggtttatataatgaattatacagtcaccctagtactgagaaaaagagaggagccaagaatgactccagaccggcatggtggttcacaccagtaatcccagcactttgggaggccaagacaggaggattgcttgaggccaagaatttgagaccggcctgggcaatatagcaagaccctgtctctacaaaatagttttaaaattagccaggcaccggctgcccagtctggaaag

SEQ ID NO: 38406 - DNA, 1732 bp, Artificial sequence
  DNA replication origin
agctcactgcccaaaaagggttcatttcctttccttctgaaacaaaagcgcttaattggaagagaagcattgactcaagctataggatatgccacttaaaatgtccagatcttggcacaaggcctggcgcacagtgtgggagagaaggagagaagaaggtggaaggaaaggagggaggggaaagaggaagcagggagggagaaaataagacaagggcctcctcatctggatgcttccctagaccaagaagtggcccaggtggtgcccaggggacagggagtgggcaataaaagacaatggggtgtaggtgatagggtgtagatgatcagggtataggtgatcaggatgtaggtgatggggtgtagatgactggggtatagatgattgaagtgtaggtgatggggtatagatgatcgaggtgtaggtgatggggtatagatgattgaggtgtaggtgatggggtgtaggtgatgggggtcaaggtgatcaaggtgtaggtgatggggtgttggtgattggggtgtaggtgatcagggtgtaagtgatggggtataggtggtggggtgtagatgatcggggtgtaggtgatgggtataggtgatggggtatagatgatcaggttgtaggtgatcggggtataggtgatcaggttgtaggtgatggggtgtagatgattgggatatagatgatcgagatgtaggtgatggggtatagatgatcaaggtgtaggtgatggggtatagatgattgaggtgtaggtgatggggtatagatgatcgaggtgtaggtgatggggtatagatgattgaggtgtaggtgatggggtgtaggtgatgggggtcaaggtgatcaaggtgttggtgatggggtgttggtgatcggggtgtaagtgatgaggtataggtggtggggtgtagatgattggggtgtaggtgatggggtgtaggtgacgggtataggtgatggggtatagatgatcagggtgtaggtgattggggtataggtgagcagggtgtaagtgaaggggtataggtggtggggtatagatgatcaggtgtaggtgactggggtttgggtgatggggtgtaggtgatggggtatagatgattgaggtatcggtgatgggggtcaaggtgatcaaggtgtaggtgatggggtgttggtgattggggtgtaggtgatcagggtgtaagtgatgaggtataggtgatgcagtgtaggtgatcagggtataggtgatgaggtgtaggtgatggagtgtagatgattgaggtgtaggtgatggggtataggtgattggggtgtaggcaatggggtgtaggtgatcggggtcaaggtgatagaggtgtaggtgatggggtgttggtgattggggtgtaggtgatcagggtgtaggtgatggggtataggtgattggggtgtaggcaatggggtgtaggtgattggggtcaaggagatagaggtgtaggtgatggggtgttggtgattggggtgtaggtgatcagggtgtaggtgattggggtgtaggtgatcggggtgtaggtgaccagggtataggtgatcagggtgtaggtgatgggatgtaggtgatcagggtcaaggtgattgaggtgtaggtgatgggatgttggcaaccagggtgtaggtgatcaggatgtaggtgatggggtgtagacgatcagggtgtaggtgatgggctgttgctgaccagggtgtaggtgatcagggtgta

SEQ ID NO: 38407 - DNA, 1069 bp, Artificial sequence
  DNA replication origin
ccctccacagtgggcctaggccgcctgctccacgacccccccgaggactgccgcagcgacggcggcagcagcagcggcagcggcagcagcagcgcgggggagcctggaggagcagagagcagctcgtccccgcacgcccccgagagcgaaacccccgagcccggcgacgccgagggccccgatggacacctggcgaccaagcagcgcccggtcgccagatcgaaaatcaaggtactgtgtcgactctgcccccgccgccacctgcaccacgccctggcgtcgggctcccgaggccggcgcccctccctgccgcgcccgcctgcgcaacccggcacccgcgccccgagcgcgcccgccgcgccgctcctgcacctgcccctgggcggcggccagggcgcctcggcgcgtcctcccgcccgcagggtagctgctgcgcaggggcggccggttcccggagtgggctccgtcctcccggtggccccgcctgatgccgagtgctgcctctggaactgccgaaaaggcacaggcatcactgccttccgccagcagcccgttctgtgcgctaggcctgtagaataaccaaggccgtcggagttcctgaggttggaaaggaagcctcagcgctctcagaaattccaccctctgggacgcagttcctggcgccgcgattctgagagttcaccccccatgcttatgttctggacctgggcggcagcttgacacatagtgggcctctcccaacatgaaccggttcccagtgtctgtcagacaggaggcttgtgcacggcactttagatctgtcatctttccaatcttgaattaaattgatgggtaaaagggttcaactacagatttctcgagcgcccctaccccagtggattggagtgtttcctcccatctatggtcgcgcctcggggccccctcgaacattctggacgcccacctgcgctttcgggcagaacttccatgatggtctgctcaaaggtatccgctacccaccaaggtttaggaatcccattccactgactcagccagctggagctaggaggtggtggtttatgatcacttg

SEQ ID NO: 38408 - DNA, 1171 bp, Artificial sequence
  DNA replication origin
ggcgaacctggggtttacctcgaagagctcgcctcgaggtgcaggtgatgggggaatggggcgggggttgattaaaaaatgttcttcctttcttaaaaagaggagggggaagaacagactttaaattcttttgcaaacattcatgcctaaggaagggctggaacaggcagccccggccgccggaaccggtcggacaggtagcgagcttgttgacaccgttatgttgcagggcgcatgctcagtcccaagtttcctggtgccttttctattccaccttatgaaactttttccccggcgtggtctcactcgcgatttaaggcataggtgtcgccgagccgggaggctgggagtcgccaggcgtgcgggggagaggcctgggccgcgccgcggcggggggtggaggaagagggcaggcgaggcgggaaggtgggctctggccgccgggagccggggacggagccgccgccgttgcccctagcggggagcagccgggaggagggggccgcagtcgggagaggggaccccaccatgcccaaagtcttcctggtgaagaggaggagcctgggggtctcggtccgcagctgggatgagctcccggatgagaaaagggcagacacctacatcccaggtgagcgcgcgcgggggccgggcctgggcgctgggctcccggggtgggggaaggggtggcgggtcttctctgctcatcggcaggggcgggctccccacctcatccccctcttccggggggcacgcgggggtcttctaggcgggttagggcaggcaatgagggactgggatgccccagactctaggcgcccccttccccgtagtgggagcctctaattgcccggcggcgggaccgttggctgcagcgcgggccaaggtggcccaggaaagggattgaaagccagcagaggctacccccaatctcacgtcctcatgggggtgcacaaaggctcgccaacccttctggggctagctggggagaggtcagatccgcctcccccgccctgagaggaaacttggcgcgcggggtcctccgccgctcgtggccgcccggttcctcgtgggcgccttggctgggaccggaaagaggctccgagcaccccaagctagctctgtgggccgattcggggcttactggcctcccccgcgacgttgcccacttggc

SEQ ID NO: 38409 - DNA, 1195 bp, Artificial sequence
  DNA replication origin
agtacatgtttcagagagcacagggttgggggtaaggtcacagatcaacaggatcccaaggcagaagaatttttcttagtacagaacaaaatgaaaagtctcccatgtctacttctttctacacagacagagcaaccatccgatttctcaatcttttccccacccttcccccttttctattccacaaaaccgccgtcgtcatcatggcccgtcctcaatgagctgttgggtacacctcccacacggggtggtggccgggcagaggggctcctcacttcccagaaggggtggccgggcagaggcgccccccacctcccggacagggcggctggccgggcagaggagccccccacctccctcccggacggggcggctggccgggcgggggctgacccccccacctccctcccagacggggtgtttggccgggtgggggctgacccccacctccctcccggacggggtggctgccgggcggagacgctcctcacttcccagacggggcggctgccgggcggaggggctcctcacctcccagatggggtcacggccgggcagaggcgctcctcacctcccagacggggtcgcggccgggcagaggcgctcctcacctcccagacggggtcgcggccgggcagaggcgctcctcacatcccagacggggcggcggggcagaggcgctccccacatctcagatgatgggcggccgggcagagatgctcctcacttcctagatgggatggcggccgggaagaggcgctcctcacttcccagacggggtggcagccgggcagaggctgcaatcttggcactttgggaggccaaggcaggcggctgggaggtgggggttgtagcgagccgagatcacgccactgcactccagcctgggcaccattgagcactgagtgaacgagactccgtctgcaatcccggcacctcgggaggccgaggctggtggatcactcgcagttaggagctggagaccagcccggccaacacagcaaaaccccgtctccaccaaaaaaatatgaaaaccagtcaggcatggcggcgcgggcctgcaatcgcaggcactcggcaggctgaggcaggagaatcaggcagggaggttgcagtgagccgagatggcagcagtacagtccagcttcggctgggcatcagagggagaccgtggaaagagagggagagggagacc

SEQ ID NO: 38410 - DNA, 905 bp, Artificial sequence
  DNA replication origin
ctgagatgtggggagcgcctctgccccgccgccccgtctgggatgtgaggagcgcctctgcccggccgcgaccccgtctgggaggtgaggagcgcctctgcccggccgcgaccccgtctgggaggtgaggagcgcctctgcccggccgtgaccccatctgggaggtgaggagcccctccgcccggcagccgccccgtctgggaagtgaggagcgtctccgcccggcagccaccccgtccgggagggaggtgggggtcagcccccacccggccaaacaccccgtctgggagggaggtgggggggtcagcccccgcccggccagccgccccgtccgggagggaggtggggggctcctctgcccggccagccgccctgtccgggaggtggggggcgcctctgcccggccaccccttctgggaagtgaggagcccctctgcccggccaccaccccgtgtgggaggtgtacccaacagctcattgaggacgggccatgatgacgacggcggttttgtggaatagaaaagggggaagggtggggaaaagattgagaaatcggatggttgctctgtctgtgtagaaagaagtagacatgggagacttttcattttgttctgtactaagaaaaattcttctgccttgggatcctgttgatctgtgaccttacccccaaccctgtgctctctgaaacatgtactgtgtccactcagggttaaatggattaagggcggtgcaagatgtgctttgttaaacagatgcttgaaggcagcatgctcgttaagagtcatcaccactccctaatctcaagtacccagggacacaaacactgcggaaggccgcagggtcctctgcctaggaaaaccagagacctttgttcacttgtttatctgctgaccttccctccacta

SEQ ID NO: 38411 - DNA, 917 bp, Artificial sequence
  DNA replication origin
ggattgcagacggagtctcgttcactcagtgctcaatgttgcccaagctggagtgcagtggcgtgatctcggctcgctacaacctccacctcccagccgcctgccttgacctcccaaagtgccgagattgcagcctctgcccggccgccaccccgtctgggaagtgaggagcgtctctgccttgccgcccatagtctgggatgtgaggagcccctctgcctggctgcccagtctgggaagtgaggagcacctctgcccggccgcgaccccgtctgggaggtgaggagcgtctctgcccggcagctgccccgtccgggagggaggtggggggcagcccccgccgggccagccgccccgtccgggaggtggggggcgcctctgcccggccgccccttctgggaagtgaggagcccctctgccgggccaccaccccgtgtgggaggtgtacccaacagctcattgaggacgggccatgatgacgatggcggttttgtcgaatagaaaagggggaaatgtggggaaaagatagagaaatcagattgttgctgtgtctatgtagaaagaagtagacataggaaattccattttgttctgtactaagaaaaattcttctgccttgggatgctgttaatctacaaccctacccccaaccccgtgctctctgaaacatgtgctgtgtccactcagggttaaatggattaagggcggtgcaagatgtgctttgttaaacagatgctctgaaggcagcatgctcgttaagagtcatcaccactccctaatctcaagtacccagggacgcaaacactgcggaaggccgcagggtcctctgcctaggaaaaccagagacccttgttcacttgtttatctgctgaccttccctccactattgtcctatgaccctgccaaatccccctccg

SEQ ID NO: 38412 - DNA, 1289 bp, Artificial sequence
  DNA replication origin
tttgcgtccctgggtacttgagattagggagtggtgatgactcttaacgagcatgctgccttcagagcatctgtttaacaaagcacatcttgcaccgcccttaatccatttaaccctgagtggacacagcacatgtttcagagagcacggggttgggggtagggttgtagattaacagcatcccaaggcagaagaatttttcttagtacagaacaaaatggaatttcctatgtctacttctttctacatagacacagcaacaatctgatttctctatcttttccccacatttcccccttttctattcgacaaaaccgccatcgtcatcatggcccgtcctcaatgagctgttgggtacacctcccacacggggtggtggcccggcagaggggctcctcacttcccagaaggggcggccgggcagaggcgccccccacctcccggacggggcggctggcccggcgggggctgccccccacctccctcccggacggggcagctgccgggcagagacgctcctcacctcccagacggggtcgcggccgggcagaggtgctcctcacttcccagactgggcagccaggcagaggggctcctcacatcccagactatgggcggcaaggcagagacgctcctcacttcccagacggggtggcggccgggcagaggctgcaatctcggcactttgggaggtcaaggcaggcggctgggaggtggaggttgtagcgagccgagatcacgccactgcactccagcttgggcaacattgagcactgagtgaacgagactccgtctgcaatcccggcacctcgggaggccgaggctggcggatcactcgcggttaggagctggagaccagcccggccaacacagcgaaaccccgtctccaccaaaaaaatacgaaaaccagtcaggcgcagcggcgcgcgcctgcaatcccaggcacccgcaggctgaggcaggagaatcaggcagggaggttgcagtgagccgagatggcggcagtacagtccagcttccgctcggcatcagagggagaccgtggggagacgggagacgggagggggagggggagaggattttttgaagcaggacaataggagtgactactttaaagatatttatagagcattttgcaataatcaggccagacctttgtacacaagagaattcagggtatgctaaataaagatggcctttcaactagtgtggagaagatgagtgaccccaaaactgtattggcacaagggatggttgctcacttgggaaaaagtaaacttcagtccgtg

SEQ ID NO: 38413 - DNA, 684 bp, Artificial sequence
  DNA replication origin
tatctattttccaaaatgtattggtgttttcattggctttgagtgagaggctcatttctgtacttgacccttaactttacatatagaaattggggtggttgcctccatttggttccttttaaataaatatttattaactacttttcatgtgccagatttctgtgtggtgggtgctagaaagagtgataagccatggtttttttcttcaagagcttgtcccttagtgagatggaagtcacattggggcagttccgagaggatgttatttgcctggtgctgagggagtgagtggaatacagggaggtttggtgggggcttggtcgtcagaataggtgtccctgagcacagaacagatgtcttagttgcatctcgaaggttgaggaagaggcagctgggtctgaaagcttggggcaagggtggtgcatgcccagaagatcaggacacgagcatggaggcttgaacctcctggggaatgaaagcaggtgagtctgatggggcaagaaggcagggggtggggaggatgatgaggatggagaggcagccagatgtggcaatgctgtgtcctggtaaggagcttgtacttttgttttttggcggtgggcagtgggcagccactgaggagggatttgcagtgaggggaaggtcagaagtcgtcctcagctgtgaccctcttgtagcaggatg

SEQ ID NO: 38414 - DNA, 935 bp, Artificial sequence
  DNA replication origin
tgtgtagtggcacgcgcctgtagtcccaacaacttgggaggctgaggcaggaagatcacttgagccttgggggttgaggctgaagtgagctatgactgcaccattgcactccagcctggacaacagaacaagaccctgtcagaggaaaaggaaagggaggaagaaacagaaaaagggagggagggcagaaggagagagagagagagaaggaaagaagggaaggggggaggggaggggaggggaggggaggggaggggaatggaggggaagagaagggaagggaagggaagggaaaggaagggaagggaaaggaagggaagggaagggaagggaaaggaaaggaagggaagggaagggaaagaaggggaagggaaagaaggggaaggggaagaaggggaagggggaggcggagggggagggggctggcataggcagagcatttcccttatggaagggatgagattcccagagacctgcattgctttctcctggttttatttaccaaccaataaacgaaattcttacaaccagaggcagatgtgcacctgaacgagagaccttcagtatcaatctcattttctcccaggcaaggactggttgggttctgcggccagctacccagcccactccagctctatgtgtgaatcgttgctgacacttgcacaagggaaaagggattttttcatttctcctgagggcttgatgctaacatggaagcaggatctgatctgaactcttaactgcaagatactgcaggacacattcgcagaacacgcgctgagtatctgtgtcctgatgtttttcatgctggtcatgacctgaagggaatctattggcacatatactatacgtcgggcgtttttaacttgatcatggtggctctgaggtgccactttttcttcacatactgtacatacctgaaaccactcttgggg

SEQ ID NO: 38415 - DNA, 1205 bp, Artificial sequence
  DNA replication origin
atgcagagtccacttgcgctcctgcatctcccttcctgctcttagccactctagcaaagggcactgccatctcagcagcctactttcattgccacctgccccgtgttctgaaatccttcacagtgccccgtgtggcactgtgagtttacttttcctaaaatggcattttattcttattgtggctcactgtagcacggagtccacctccctgcctgaacatcagaggccttgaaaatgtgatgcggccatctgatggcactgtgcctagttcctcccaccagggaacctgtttattttgccaagcactggaccaaatactgggtgcagatttgagggacccaggacctgtcatggggaggtcacaggctcagggagaagcataggaacagttatactacagcacggtgcgtgtggcaggagtgtgaacaggtgtggggtggagatgggaggtcaggagaggcccctcagaggcctgggaccagatctggaaggacaggtggcagtggggaggcagatgaggggcaagggcaggggagagctgcctgagccaagagaagagcagtgcaaatgccatctggaggttggggggcaaggacaggagagtttgggaatggaggaattgcagaagggtgggagtgttgagtgccaagtggagtgggagggcagggagcatctctgaacttagagaaataggaggtctggattgtatagggtctggtatgcaaccctgaggaatttggattttatcctggggcgggagggacctctgaaaggttttaagtgtacaagtgacatcatcagatacaaagtttaaaaagagcactcacttgagcagctttggggagtgaggctggaagcagataggcccattaggaggtgattgcagaagtccagagaaaaaattatagtaggaacagaggggaaagagtgggattgaaagatgtaaaggaaatagaatcatttcaacgtggtgactgattagattggaagaggagacatccagaaggatgagggaggaagatgggggttgctgacggtacctattttgggtgtgttgtgtttgaggtgcctgttggcagccaatggtgatgccagtcgtctgctgagtctgtggctttagagctggggagccaggtctcggacatacaatttggagccttcagctcacagactgtggttaaaaccaagttaggagacagaattca

SEQ ID NO: 38416 - DNA, 1021 bp, Artificial sequence
  DNA replication origin
aactcacctgccactataaagcctgccaccagatgcagcttaattgtcacttgtcactcattgatagggttttgatatgaatctgcaagcaattgatttattatggactctgtgcagccaaacctccctgctaatgtttatctgtatttgcagccacacctggctctagcatcactgcctcagctccatctcagatcatcaggcattagattctcataaggagaacacaacctagattcatcacatgtgcagttcacaatagggtttgtgttcctatgagaatctaatgctgctgctgatctggcaggaggtggagctcaggtggtaatgcaagcaatggggagtggcataaatacagatgaaggtttgcttgcttgcccacctctcacctcctgctgtgcaccctgtttcctaacaggccacaactggaactggtccgtggcctggcagttggggacccctgctgttaatcattttgctctatgctacagaatgtcagatgagtataagtcccacagaggaaaataaagcagggagatgaaaggagtgcaggtggtgaggagaaggggggtgggaggctggattttacactgggtagtaagggaagtccttactgagaagatggcactggaagagagggagtgagccatgggaatactggggaggaactcccccagaaaggagtggcaggagcagaggtcccaaggctggatgtgcttgacattctccaggaatactaaagaggcgagggcagccagaggggaaaggggaagagaacaagggtagggagtaagggggtcagatggtgcagggccttgaggccaggctgaggacttttgatgctgtctgagtgagatgggagttaccagagagttctgagcagggaatgagtatgacctgttatattgggaggactaactcctgattctaagaatagactgtggtgggcggtgggggatagtcacaagggtggaagctagaagagcagtcatcattccaccaaaagttccagatgagagag

SEQ ID NO: 38417 - DNA, 2119 bp, Artificial sequence
  DNA replication origin
cctcgtcgctatcgcccagtccctcctcccctccctcctcctcctcctcgccgctcgcccgcgccgccgcctcccggcgctcggggtcccgctcctcctcgcgcgccatggctcccacgctccgcgcccgcgctcggcctggggcggcggcgcggcgggggcggcgggggcggccgggaggcgggggcggagggggcagaggaggaggagcggggaaggaccgacggtaggagggcccgccgctggccaactccgccggttggcaaagccaccccggactggctctggcctcgccggctgcaggagcgcctcgcggggccgcccgcctattccatggtcggcgcgatgggggccggggccgggccggagcgaacagggagcaccgagcgagctgggagcatgagctagcgcagctcccggcagcctgcagcggcgaggctggtcgggccagggttggcggggggcagtgcctgggacacagcccggcgctggccggcatggcggggagggggcgcgctgggaggagactgggctggggagggatccctgtgtgcagtccttcaacccttctgtgccaggggaagagggacggcgcagggggccccctctcgggaagcacacacgctgcctcccagaggccgatcttcaccaagaaggattcgctggaaactttcggaaaaccgaggggctcttcagcctcctctctacgtgctacctggagtcggggcgccgcgagtgcgcttggctgcccgcgcccagcctctggcctcgcctcttctcgcgggcctcccgggtttccctctgcccccttgcggggatccccctgtgcgcccgactcgggatctggaacaggcctccccagaggctgttagttccataagggtgtccggctcccccctctgtcttgggctcacacttcgctttctgttcgtgctggaccaagtccaatactgtggctgatcgaagtggggacagctggcacggtccctggagaggcggcctgaagaggcttctggccttgtgcaggtaacaccagcctgccctacctccaacgttagaatcttagtcctcccatttcccccattctaggtctcctgcccctccttgctgaaggtgtgggctgccctagagatggctggactcacgacctgccgcaggtgcccatttggaggggatccctggccatcccagacacagcccactctccctcattgggcttccctggactcttcccagatgctagcctggggctgctggctgggctgaggaggagatgccattgttggggcggagggtgggggggcgctgaaaacaaaagaccttgtccagaaagggatcacctgaaaccaggtgtctgtctaggtgactgtctccatggaatccattcagatcagggaatctagcttcataccctaaggaggtgggaaggaagcagagaacctctgtataaggctcccctgtctaggtctgttcaaatgtgtccccacctgtgactgacctaccccccccgacctcctcccagacaatccctgacagcgcccggggacagcaaggtcacagcaaagggcaaaggaagtggttataggtggcctcctttccagagaaaggccatctcacccagggagaccagagacttttcctttgtgggtatatcatttatgactgctgttctcagcctggcatcttccagacactcagagtacctcccccacaatgcctgagtggttttccctttgctttggctgcagatactaaggagggtgtaaaaatacgagttcatccgtgctggagtgtgtggggagaattctctagttgtgttatctccatcaagcttttgcagacacagaaaagaaagtttaggagctgagaagaattcaactaaccaggaaagtcactcaaatagtgttttctagtgaaaacgagggaaaatagaaggtgagagagggaatctggaattaattgagttaggaaatgaacacaagctccaggggaaaataccataggctcaaggaattgtgtaatctggtgatggagggggagttaggaagggagccaggaggaaggagaataaccaggaactggtaatttcttggaaattatctcagcaccaggagtgtat

SEQ ID NO: 38418 - DNA, 1604 bp, Artificial sequence
  DNA replication origin
gaggaggagggaggggaggagggactgggcgatagcgacgaggagggcgacgacgaggagacgggcagcggcgaggaggaggaagaggaggcggaggcggcggccgggtgggagcgcagcgaggacgcgcggctgctgcgcgcagggctgcctcctgccgctgtccccgccgcggccgcccgcgacaggagcggccgccgcccgccgaggccgccgcccggccgcccgaggatgcggccgtccggcgacgaggaccgcgcgcgtcgccgccgccgccgccgccgccggagggaccttctgctgagccagctctgcttcctggcctcggtggcgctgctgctctggtcgctgtcgagcctgcgagagcagaagggtgagtgcacgctgcctgccccgagtgggcgctgcggctccggcggctcggggctcccggggctgggcgcggggctccttcgggcggcccggccggagccccaggataagcgggctgggttggcggggggagtgggatgccaggcacgaggactccccctgccccacgcagaggcatggaggtggggaccctgagcgccagcagccagcaggcttaggcgtctggccgccctgggaacatttacctgtgcccgcctgtgcgctgcttactcgcgagctggaggtactgctggtggcggtggtggggagtcttactctccatcagcccccaaggccagggataaagttgtggtggtagacccggcacctgtgcaggtgaccacctgtatactccttggcttgctgaaggattcaaggggactgcttaacacacagttgtccgtatgttctccatccagagagcaggcgggatggcccgagtagagagctcttcaaccccctttcagaacaggtgccgggaacttcagggagagaaaaagtgttggccctccagctatgggctagtaggggacttgttctcctaaaatgaccactcactgggaagacagggaattcttcctcagaggtcccttttgcagagctgctgctgtggaagaaatggtttgcagtggaccacgcatcacactgtccgctcctctaccggtgctctgcgcaaagtctgccctttaacccacaacttttgtcttgtctttgtccttggcctttcttgagctgaaatagatcttgtgtgctcccaacagttgtctgctgaaacagcttcgatcctgggattcagctgtctataaaatgaaggaaaaacatgggagaataactgttgtaaaatggttttatatcccggccgtggaagtggcacgattagtgggaaaacagccatgtaaagggttgtgagaaagaaacaaaacaaaacaaaacaaacaaacaaaaaaacagttacaagtatgtgctgtggtgttgaggtcgacgtagctctaatgcaagatgtcatgaggtgcagaataaagacattttgatagtcaccgtaaaatattttcaaaggtgccatgaatttaaaaagggatctcccccagcttggctggtctcctgcttggtggggaagtgaaacaggcgtcagtcttcattcagtcttagcagaccgcttgacagacttcatcatttatggtaatagcagagag

SEQ ID NO: 38419 - DNA, 1252 bp, Artificial sequence
  DNA replication origin
cttgtctgctcccagcctcaggacgcctgtggctttcttggtttcccctactttcatggtctgatgcatgggtgcatccttcttgttttgtctccatttccacaagattatgtagaagcgcgttcattcattcaatgtatatttattggacacccactgtgtgtcactcattatgtgttctggaacataaggacaaggaacaaagaaggaaaagtccttccatgcatggagtttccattggggtggtgggggctggtggtgaagacaaacaaaaacatgcacaaataaatgtaaagtatgctcgaaagtgatacagaaaaaaaatgaacaaggtgagagggatgacaagttggggggagtttggagggcttgctttttaaggccaaggttgaggtgacatttgagcagtctctgaaggagggagggagggagccatggagagttctgaggaagagcatccaggcagaggggcagcaaaggccagggatggaagcacgcttggtgtgtccagagaatggcacagagggtcagtgtggctggagcagaatgagggaggaggagaggagttggagggacgtcaaaggtcgtggggaaccaggtctcttagggtcttgggggctggtggaggtcttctgcattcactgtggagtggagagccgcctcttgcttcctgtgaccaggcatacattgttaaaggatcaaccagaatgttggattgataataaaatgtagtgggcaagagtggaaggtgaaagactccagagagtattataataatggtggctcagttcagagcagtaacaggggcagggtgaggcggtatctgattccggacatggtttgccttcttgcaggattgactggacatggtttgaattggtgacaacaccctgaaggagtggatgtgggtgagaaagagcaatagaagactctgcaattcctggcctgagcagttgtaggagaaggtgaggggcgggtggagtgagcttcatgggagaccgggtgtcctgtgttggaagtgctcattttgagatgtgtcctgggtgtcccagttgagatcatgagtaggatgataataagagtgtgtgcatctggagttcaggctgcaggtcaaggctggagataccaaggggggactgggaggaagacagaagcttatattgacagccatgaagtggaggggattccccacaggagcaagcgtaagcagagagaggactaagagcccagcccaggctctgcgaggagccag

SEQ ID NO: 38420 - DNA, 950 bp, Artificial sequence
  DNA replication origin
gtgaggagcgtctccgcccggcagccgccgtgtccgggagggaggtggagggtcagccccccgcccggggccagccgccccgtccgggaggtgaggggcgcctctgcccagccgcccctactgggaagtgaggagcccctctgcccggccagccgccccgtccgggagggaggttggggggtcagccccccgcccggccagccgccccgtccgggagggaggtggggggtcagccccccgcccggccagccgccccgtccgggaggtgaggggcgcctctgcctggccgtccctactgggaagtgaggagcccctctgcccggccagccgccccgtccgggagggaggtggggggggtcagccccccgcccggccagccgccccgtctgggaggtgaggggtgcctctgcccggccgcccctactgggaagtgaggagcccctctgcccggccaccaccccgtctgggaggtgtgcccaacagctcattgagaacgggccaggatgacaatggcggttttgtggaatagaaaggggggaaaggtggggaaaagattgagaaatcgaatggttgccgtgtctgtgtagaaagaagtagacatgggagacttttcattttgttctgtactaagaaaaattcttctgccttgggatcctgttgatctgtgaccttaccccccaaccctgtgctctctgaaacatgtgctgtgtccactcagggttaaatggattaagggcggtgcaagatgtgctttgttaaacagatgcttgaaggcagcatgctcgttaagagtcatcaccactccctaatctcaagtacccagggaggcaaacactgcggaaggcctcagggtcctctccctaggaaaaccagagacctttgttcacttgtttatctgctgaccttccctccactattgtcctacgaccctgccaaatccccctctgtga

SEQ ID NO: 38421 - DNA, 1257 bp, Artificial sequence
  DNA replication origin
gggctcctcacttcccagtaggggcggccgggcagaggcacccctcacctcccagacggggcggctggccgggcggggggctgaccccccccacctccctcccggacggggcggctggccgggcagaggggctcctcacttcccagtagggacggccaggcagaggcgcccctcacctcccggacggggcggctggccgggcggggggctgaccccccacctccctcccggacggggcggctggccgggcggggggctgaccccccaacctccctcccggacggggcggctggccgggcagaggggctcctcacttcccagtaggggcggctgggcagaggcgcccctcacctcccggacggggcggctggccccgggcggggggctgaccctccacctccctcccggacacggcggctgccgggcggagacgctcctcacttcccagacggggtggctgccgggcggaggggctcctcatttctcagacggggcggctgccgggcggaggggctcctcacttctcagacggggcggttgccgggcggagggtctcctcccttctcagatggggcggctgggcagagacgctcctcacctcccagacggggtcgcggccgggcagaggctctcctcacatccgaaacggagcggcggggcaaaggcgctccccacatctcagacgatgggaggccgggcagagacgctcctcacttcctagatgggatggcggccgggcagagacgctcctcactttccagactgggcagccaggcagaggggctcctcacatcccagacgatgggcggccaggcagagacgctcctcacttcctagacagggtggcggccgggcagaggctgcactctgggcactttgggaggccaaggcaggcggctgggaggtggaggttgtagcaagccgagatcacgccactgcactccagcctgggcaccattgagcactgagtgaaccagacaccgtctgcaatcccagcacctccggaggccgaggctggcggatcactcgcggttaggagctggagaccagcccggccaacacagcgaaaccccgtctccaccaaaaaaatacgaaaaccagtcaggcgtggcggcacgcacctgcaatcgcaggcactccgcaggctgaggcaggagaatcaggcagggaggttgcagtgagccgagatggcagcagtacagtccagcttcggctcggcatcagagggagaccgtggaaagagacggagagggagac

SEQ ID NO: 38422 - DNA, 955 bp, Artificial sequence
  DNA replication origin
gtggcggcacgcacctgcaatcgcaggcactccgcaggctgaggcaggagaatcaggcagggaggttgcagtgagccgagatggcagcagtacagtccagcttcggctcggcatcagagggagaccgtggaaagagacggagagggagaccgtggggagagggagaccgtggggagggggagagggagagggagagggagagggagacggagacggagaccgtggggagagggagagggagagggagactcactcttttaggattctaaaaggactattttctttaacataaccacattatcgtcatacgtaaaattaatactaattccttaatatcataaaatacctaatgttcaaattttcagtggcctcacaaatgtctttttcattgttttcttttagtttcataaatatcataaatattttaaaaatgagaattcaaataaattccactcattagaattggtggcccatgacttgctgctgtgtctgtatgtgtgtgcatgtgtgtgtgtgcattttccttgcactttgttctttaatgaagtttggctgtttgctctgcagagttgcccacggttggaaagcgttgattatatcccatgatgtggcacagtctgttcccttggcctctgtgtctgtgtgttgtctgtgtgtgtatgtgtgtgcatgactgggcatctgtgtgtgtctgtgtgctgtgtgtctgtgtgtgtgtctgtatgtgtctgtgtgtgcgagtgtgtgtctgtgtctgtgtgtgtgtctgtgtgtgtctctgtgtgtgtctgtgtgtgtctgtgtgtctctgtgtgtctgtatgtgcatgtgtgtgtgtgtgcattttccttgcactttgttctttgatgaagtttggctgtttgctctgcagagttgcccatggttggaaactgttgattatatcccatgctgtggtgcaatctgttcccttggc

SEQ ID NO: 38423 - DNA, 787 bp, Artificial sequence
  DNA replication origin
tgatgaaaaagagcctaaacgctatgtgatttgggataatgaaaaaggagcattaaccctgactatgcctttggctccagccacctttttaagagtaaactgctgggcaggtgggggagggctagtcacagaatgaaactataagtcggaccaggtgtgggatgaagggaggggaggcgcggaggctgaggaagaattgggacctagcttgggctggcgcggaggggagaggtcagatgggtctgtagaagaggaagattagaaagactcagcgccgcttggggttgggactgaggggacaggagggagggaaagaaggaagatttgggacgagttgcacggggcacagagactaggaagggactgatgtgtaaaagaatgcctggacgtcaggcacctcagaccatttgcccattttacgacaagaattatttagatcttgtaggatggaaaaattgaaagcgccgttttccagctatttggaactactgtcgagtttgtattggggtcaagcggcattgcagaagaaaataaggcatttaggttttaggtcaggtgtgagttgaagaggttttaagtttttgagaacacaggctaagggagaacaaggaggaatggaaggtggaagcctacccatagtgaaggaggcaagcccagagaaaagagtagagacatggagaaggggtggggagttcttgccctccagaaaagcagagaaagggttggggcacggaaataagggattggggcacagagataagaggttggggtgcggaaataagcgatt

SEQ ID NO: 38424 - DNA, 796 bp, Artificial sequence
  DNA replication origin
cggcgcgatgaccacgctacgggcctttacctgcgacgacctgttccgcttcaacaacatgtgagtgacacgcgcctagggccagccgctcttggccgggcctcgcttcccggccccgccagctccggccccagccgcgccttcccggccggaccccaagcccggacggggacccgcgagaaccaccccccgccggccaacgtgggcgcctccctggggccacagggtccagggagaggtgggcctggagtcgacgcacgccggccttggcgaccttggccgaggtgctcaaactttgtctctggaccctgcgagctggcaggttctggggcagcgctcgggcctccgctcgtggtcgctgtcaggaggcgctggggtgatggggcgagctggagacgcggcctggagcccacgacctgggcttctcgccctgccctactgcttgctggttcgtggccgggccgcgcctcttctgggcagagggcaccgccgacggccaggccgcagagggggcttgcgaggatcggaagctggtcagcagctgttgggatgtgtacatcgtgaagcccacctggtggccgtggttaaattgtatccaaatgaaatgacactgatcactgcgtcccctgcagcagatgctgtctcagtcatggttagtgtttgcaagtttagttactgtagctgcgcaccccggtgtacacacctttcctctgtgaggagtcacggcagatcttaggggaggctcgctgtgcccagagccctggatgcagtttctttggattcgagttaaggccag

SEQ ID NO: 38425 - DNA, 1060 bp, Artificial sequence
  DNA replication origin
tggagacgcggcctggagcccacgacctgggcttctcgccctgccctactgcttgctggttcgtggccgggccgcgcctcttctgggcagagggcaccgccgacggccaggccgcagagggggcttgcgaggatcggaagctggtcagcagctgttgggatgtgtacatcgtgaagcccacctggtggccgtggttaaattgtatccaaatgaaatgacactgatcactgcgtcccctgcagcagatgctgtctcagtcatggttagtgtttgcaagtttagttactgtagctgcgcaccccggtgtacacacctttcctctgtgaggagtcacggcagatcttaggggaggctcgctgtgcccagagccctggatgcagtttctttggattcgagttaaggccagacctctgatttgcaggtaccaattttttttttttaagaaaacattttattatgaagattcccacacatttagaaaagttggaggaatttcaccatgtgcttttatagacacttttcctggattctgcagttaacattttgctacgctggtatctctccttccttcccatctatcagtcctggatccactttaaaaaaacaacagggcggtatgtgaaaactaaggacaaagtggttccgattcaagtgtcaggaagatggaaagaactatgggataagatggctgggaacatttcaaagagggggtgagccttgaagatggataacacattggtaagtgaggaagacggaagttccggagaaggagcggggcatgaaaatggggaaacttgaagtgcggtcagacaactgggatcagtgcgaatctagtggctggtttctgccactgagcagtcaggaagaaatgggtgaaacaggaggggtttagacttgatcctgtggaaagaattttctgttgggccagtctggtagctacggtgacttgtgttgaactcactgttccctgcattgttctgagtgcccacgtaataatccagttaatcctcacgattctttgaggtgctgtcacccccattttgtgtatgagtaaaccaag

SEQ ID NO: 38426 - DNA, 4549 bp, Artificial sequence
  DNA replication origin
tcatttgaggtcaggagttcaagagcagcctcgcaaacatggtgaaacctcgtctgtactaaaaatacaaaaattagccaggcagtagtggtatgcacctgtaatcccagctactcaggaggctgaggcaggagaattgcttgcacccaggaggcagaggttgtggtgagccaagatcataccactgcactccagtctgggtgacagagagagaccttgtctcaaaaaaaaaaaaaaaaaatcaggtacagaaaggtaaatactgcacgatctcacttacatgtggaatctaaagaagttgaattcataagggtaatgaggggaggaaggggtggtcatactgtgtgaagggagatagtcacactgagggaaggtggtcacactgtgagaagggaggtagtcacattgtgagagaaaaagtgatcacactgtgtgaggggaggtggtcacactgtgagagaaaaagtaatcatactgtgaaagggaggtggtcacgctgagaggggaggtggtcacactgtgtcaggggaggtggtcacactgtgagagaaaaagtaatcacactgtgaggggatgtggtcacactgagaggggaggtggtcagactgtgtcagaggaggtggtcacactgaggggaggtggtcacactgtgagaggggaggtggtcacactgaggggaagtggtcacactgtgagaggggaggtggtcacactgaggggagatggtcacactgcaagaggggaggtgatcacactgaggggaggtggtcacactgtgagagggaaggtggtcacactgtgagagggaaggtggtcacactgtgtgaggggaggtggtcacactgtgaggggaggtggtcacattgtgagagggaagggggtcactgtgagaggggagaaggtcacactaaggggaggtagtcacactgtgaggggaggtgatcacactaaggggaggtggtcacactgtgagaggaggtggtcacactgtgaggggtggtcacactgtgaggggaggtcacactgaggggaggtagtgacactatgagcagagatggtcacactgtgaggggaggtggtcacactgaggggaggtagtgacactgtgagcagagatggtcacactgtgaggggaggtggtcacactgaggggaggtggtcacactgtgaggggaggtggtcacactgaggggaggtggtcacactgtgaggggaggtggtcacactgtgaggggaggtggtcacactgaggggaggtagtgacactgtgagcagagatggtcacactgtgaggggagggggtcacactgtgagggggaaggtggtcacactgtgagaggggagaaggtcacactaaggggaggtagtcacactgtgaggggaggtgatcacactaaggggaggtggtcacactgtgagaggaggtggtcacactgtgaggggaggtcacactgaggggaggtagtgacactatgagcagagatggtcacactgtgaggggaggtggtcacactgaggggaggtagtgacactgtgagcagagatggtcacactgtgaggggaggtggtcacactgaggggaggtagtcacactgtgaggggaggtggtcacactgtgaggggaggtggtcacactgaggggaggtagtgacactgtgagcagagatggtcacactgtaaggggaggtgatcacactgtgaggggacgtcacactgtgaggggaggtggtcacactgtgagaggggaggtgaccacacaggggaggtggtcacactgaggggaggtagtgacactgtgagcagagatggtcacactgtgaggggaggtggtcacactgaggggaggtagtcacactgagaggaggtggtcacactgaggggaagtggtcacactgagggggggtggtcacactgaggggaggtggtcatactgtgagtgaggagctagtcacactgaggggaggggtcatactgcgagtggaggtagtcacactgtgaagggtggtagtcacactgagaggaggtggtcacactgaggggaagtggtcacactgaggggaggtggtcatactgtgaggggaagtggtcacactgaggggaggtggtcatagtgtgaggggaggtggtcacactgaggggaggtggtcacactgaggggaggtggtcacagtgtgaggggaggtggtcacactgaggggaggtggtcacagtgtgaggggagatggtcacactgaggggaggtggtcacagtgtgaggggaggtggtcacactgaggggaggtggtcatagtgtgaggggaggtggtcacactggggaggtggtcacactgtgaggggaggtggtcacactgagaggaggtggtcacactgaggggaagtggtcacactgaggggaggtggtcatagtgtgaggggaggtggtcacactggggaggtggtcacactgtgaggggaggtggtcacactgagaggaggtggtcacactgaggggaagtggtcacactgaggggaggtggtcacactgaggggaggtggtcatagtgtgaggggaggtggtcacactggggaggtggtcacactgtgaggggaggtggtcacactgagaggaggtggtcacactgaggggaagtggtcacactgaggggaggtggtcacactgaggggaggtggtcatagtgtgaggggaggtggtcacactggggaggtggtcacactgtgaggggaggtggtcacactgtgaggggaggtggtcacactgagaggaggtggtcacactgaggggaagtggtcacactgagaggaggtggtcacactgaggggaggtggtcatactgtgagtgaggaggtagtcacactgaggggaagtggtcacactgaggggaggtggtcacactgaggggaggtggtcatactgtgagtgaggaggtagtcacactgaggggagggggtcatactgcgagtggaggtagtcacactgtgaagggtggtagtcacactgagaggaggtggtcacactgaggggaagtggtcacactgaggggaggtggtcatactgtgaggggaagtggtcacactgaggggaggtggtcatagtgtgaggggaggtggtcacactgaggggaggtggtcacagtgtgaggggaggtggtcacactgaggggaggtggtcacagtgtgcggggaggtggtcatactgaggggaggtggtcacactgaggggaggtggtcacactgaggggaggtggtcatactgtgagtgaggaggtagtcacactgaggggagggggtcatactgcgagtggaggtagtcacactgtgaagggtggtagtcacactgagaggaggtggtcacactgaggggaagtggtcacactgaggggaggtggtcatactgtgaggggaagtggtcacactgaggggaggtggtcatagtgtgaggggaggtggtcacactgaggggaggtggtcacagtgtgaggggaggtggtcacactgaggggaggtggtcacagtgtgcggggaggtggtcatactgaggggaggtggtcacagtgtgaggggaggtggtcacagtgtgaggggaggtggtcacactgaggggaggtggtcatagtgtgaggggaggtggtcacactgaggggaggtggtcacactgagggaaggtggtcacactgaggggaggtggtcatagtgtgaggggaggtggtcatagtgtgaggggaggtggtcacagtgtgaggggaggtggtcacactgaggagaggtggtcatagtgtgaggggaggtggtcacactgaggggaggtggtcacactgtgaggggaggtgggcacactgtgaggggtggtagtcacactgagaggaggtggtcacactgaggggaggtggtcacactgaggggaagtggtcacactgaggggaatggtcatactgtgaggggaggtggtcacactgaggggaagtggtcacactgaggggaatggtcatactgtgaggggaggtggtcacactgtgaaagaagatgatcacagtatgagaggtcatccttcaagaggcaagtgcccaaaaatctgtttataatctagagcaatatttgcctgaaataaactttaaaagtggttttacgctatttaacccagtgtcagaacagcagcatacaatatgagctcaaaatcttgtataattttagtaaggtaattgtttttggttggtttgatacaattctccagaaaaattaaggaagaaagagccaacctcatacacattgcagaatatatccacgaggccttactggtggcacccaaagttttcagaacctcccagtacttagttgtgagaatcagttgctttttccctatcactgcctttattgctctagtttaaatctgaattcctgcaaccctcactgactgctctttccaatgtgtgcataatctccagcaccccgttgtgtcttgcttagccaagtggcaatgactttatgcctccatatagcttgagtctgttttcctatctataagctcttatcactagtaagttaataatccaac

SEQ ID NO: 38427 - DNA, 1920 bp, Artificial sequence
  DNA replication origin
gttttaagcaaagaatattaatcagaaaataccaaagttaattttccaaagttttattcccccaaatcacatgcaacaaccccgccttctgatgcctctaattgctctcccaacagatgtcagtttttaataaagagtgtaaccaccgcctttccaaaaatggcttattatggttttactacactcaaacatcacaggagggcaagagaaaaatcaacgatgaagtgagggagggaaggaaatatggcatggagcataaaatgtaaagccagccaatcaatatttaccctttcaagagggagagagagagaggagggagggagggagggagggagagagagagagagagggtgcgcatccgagtgagccagtgttagccaagaagcagggagcagggctcgaaagtcgctgagcgccgagtgcgaggagctgttgattgttttctggttgaaagaagaagtgatgataaggctgggataaagtgagcgccggcaggggcgcagagcccgcagctgtatgctaatgctcacagaaaccaagcctccgcgtcccccattaaagcaggcgaccaggaggccacacatcactgaacaaataggctctctctagacaaataaaataacacacgttggcctgtggggagtggggggagagtaagagcagggagaagagtggggggagagtaaaggaggggggagagagagaaggaaagagagaaggggagaggaatgggagactgggagagaggtgggggggaagagagggagagaagacagaaacaagcgagggaagagacaggagagagggacgagaggagagaggggagcagaaagacagcaaagagggctgggggaactggatggggagggagggacagtgggaagaaggggctgggagagaagaagggggccagttatgggggggacaccacaggtcgggggggggattaggagtgaaagagatgggagagagaggagaaggagggagaggtgacaccgtggggagcaagaaaggaggggaaagaaaagaaaggaagagacagaaggagagagaaggacaggaggagggagaggaggcggatgacacaaggagggaaccagagggcgagggaggagagcagggacgggagaagagggaaaggcggaggagagaggaacggcggtggggggggaggagcacccgccaaccccatagcaagaacgctcgccagggtagaaagtatgcccttgtggaccccaggagtctggctgcctcttcgtcctcctgcggcaggcgaggcggggtgcaggtgtgagtggggtgggaggaaggggaaaggatcggggtcgccgcagcctttctggtcagtttcgctgggttttgtcagttccgtttgagaccgaggcgcacggactagcggccgccagcacctcacaggtggaggacacctcttgcgccccaaggtcaatgtcatcccgatgggtcccgtgccgtcctgactctccctgacctaattctttggttatgactttctcaccttctgggcttcgcctctgccagctttcgccgacgtcgcccttcccgccgcccgcccgggccttcctacccgctctcctccctccctggcccgacggtcccactgaggcaaaaacaaacagccctgagggcacttcaaggagcgtgcagtggccccgacggtactctcggggggataaaagaggtggccagccacgccgtcggcccccggccgaataatgggcgcgcagcagattgccagggggcacttgaaactcgaggggagggaaatacttgagcgcggtccctccccgcgaggacgcacgacgcagcctcgcggatcgtcccttgttcgctctctttcatgcactctccttttgtgtggaattatctaaacgggagatccctggcagctttatgctaatg

SEQ ID NO: 38428 - DNA, 1586 bp, Artificial sequence
  DNA replication origin
ggacttcttgctgcgcttcaccaggaagccgcggggcatgttggcgcggcccgagggcacggcactggctcggtcccccctccgcgctcggccccggcggccctcagtgcccccggcccattgcccgggcgcggcggctgcgggactcgcgtggcgccggcgacggctcggcccagctctgcgccctgcacgcgcgtccctgtccccgggcccggcagccgctcccttttaacggggggagggggccattgttctcgcctcccgcttcccctggagccaatcagcgcgtccgcagctcctcagcctggcagggtgggagggcgatggggcggccaaaagggggccgggactcgggggtcgcccggtaggtgcggcagatgtacctgagggcgcggggcccccgcgcgcgcccctggtcgccccgcccggcgccgccgccccgcccggtccaggcacacgcccggccccgcctcccttcacggtctgctgcttctctatggggaggcgcacgtgcctgggctttgtgtctctcctccggggggcgcggagccgccaaatgggcccgtccatcagcgcgacaatgcacgcccccctcccgcgcggggattacccgcgggtcgctagcaaaatagcaacaaaggagaagaatggccccaaatatgtcaggagggttcaatccgcgagccggagccgagggggaagttgtgcgcgctgattgggtgggggcgggggcgcgccggggcggtgcgggggagatcgttgcggaggcgcagtggctccgcgtggtgtttgggaaataaacaagaatccgagagagcagcagggtccggacggcctccgcccggaccttggacggatgggccgctggacccaagaggccaagcaaaagggttccccggggttccaagtgtggacagggggcccggccttctggcagtggccgagggcgatgtttgtgctcgcagcctccgcgcgcccacggggctagagaaggtttctttcgagtttgagaaggaattggcacggccttctcagtctcccgaaagcgcgggattggagcgcgggcgggctgggctgggttcccagaggaacgtgaatttctgaacttttgggttcttggaggcttgggaatggcatctttggcggggcccgacccaggccgcccggagcttccgcgtggtccaaggctcggttaatccgggtcgagttggccgaagcccgaaacgcgcggtcggcctcgtgcgccccagtgaagttggctttctcctccccgcgcggcctcatgcattttcattccgagcgggcattttgtttgccggttgacatcagatgctaaatcaagggctccaatcaaggcgctgcgaaataaaggggctgcctgtctgggcgcagcccccacggagccgtgcccccttcacctttgtgaaggaaattaacctcctgctattgagctccggtcgcggccaatctggacgcaaaagagacgcgtgctggacggggggagggggggcaatctgtactctgaggcaggctgaggcctccgagaggacaagccgcctcccctgtgccaccaggaagagacaaca

SEQ ID NO: 38429 - DNA, 1393 bp, Artificial sequence
  DNA replication origin
ccgctgggcgagttcatctgccagctgtgcaaggaggagtacgccgacccgttcgcgctggcgcagcacaaatgctcgcgcatcgtgcgtgtggagtaccgctgtcccgagtgcgccaaggtcttcagctgcccggccaacctggcctcgcaccgccgctggcacaaaccgcggcccgcgcccgccgccgcccgcgcgccggagccagaagcagcagccagggctgaggcgcgggaggcacccggcggcggcagcgaccgggacacgccgagccccggcggcgtgtccgagtcgggctccgaggacgggctctacgagtgccatcactgcgccaagaagttccgccgccaggcctacctacgcaagcacctgctggcgcaccaccaggcgctgcaggccaagggcgcgccgctagcgcccccggccgaggacctactggccttgtaccccgggcccgacgagaaggcgccccaggaggcggccggcgacggcgagggggccggcgtgctgggcctgagtgcgtccgccgagtgccacctgtgcccagtgtgcggagagtcgttcgccagcaagggcgctcaggagcgccacctgcgcctgctgcacgccgcccaggtgttcccctgcaagtactgcccggccaccttctacagctcgcccggccttacgcggcacatcaacaagtgccacccatccgaaaacagacaggtgatcctcctgcaggtgcccgtgcgcccggcctgctagagcgcgccctccaccccggcccccgaactgtgccttcgcttggagacccacaaagagagtgcgccctgcactccccgaacccgagtccgcgctgggggagcctcgcccccgcccccaccgggtgaaagtgtcgtctccgcttctctcggtgtggcgtgacggtaaccccatactctccttttgactccttttggaacccccacttttacgttgtgtccctccgcctcccccatggcgcaacaggagtcagtctctttctgtacaagggagaaaagctgtacgcgtttgtctcgtggttggaagcctccccttggcggggagaagctttttttcttgctagtattcgctgtgttcatggtctagaaatgcggtctggtctcgcctcgcctaccaatctctgctctctatgtatgtagcgtacgggttgttttgggtgaatcttgaggaataaatgcctttatatttcacaggctgtaaattgaacttcccacacgattagctttattatggcttgtgaactgctggagtctggctttacctttttgtatgtgaacaaatcaaattgcttaaaaaagagttttctttagtatagccacaaatgccttgaactgttgtctgggattgttttgtggggggagggaaggga

SEQ ID NO: 38430 - DNA, 1833 bp, Artificial sequence
  DNA replication origin
caagcccagatccagggaagggggtcggacgcccacccatccccctccccagcctcccagccaccgacccctgcacagaggagcgccctcccggcaggtgcccctaacccggcgccccgacccccgcgcccggcgcgcgcctcacccagcagcgcccgcaggtgcttcaggcgggtcagcacgtccttcttcgggtccagcaccttctgggtggacttcttcacatccccgtggctccttcgggagaacatcccgcggcaggaagcccgggccccgccggcggggcagtaggcgcctgcgccacgcgaatcaaagcatagggtcgaggccggcgcgtgtcgcgcgggccactcgccgcccccagccccgctgctgccgccgccgccgccgccgccgccgcctcagctgtgtctccaggaaggaggggcgggccggtcacggcgaggggcggggcaggaaggcggtgtcgacggggaaccgaaggccccgccccgcgggaggtgccggccggccccttgggcgctacgcacgcgcacacaggccgaactctcctggcgggacactagcccgtccgcgccaaaacctagcggggacgcgctcagagggccgagaaggcgcctcgaatcacaaaggagcttctctcacgcacacgttgtactacaagtcccgagatgcaccgcgagacagtcctccaatcaggctggcggtcttcggcacgatgggagtcagtgggccggcattgggcacgtcgccccgccctgccgcgggccgcaagtgctcctgggaaatgaagttctccagcaggcgacgcgctgcgacctcttttccagggtcgcagaagcgcagggcggcctctgtccgtcccctgccccggcagcctagatcgcccgtggtttcactctccctcctgcgcgcccaccccattttcctctagtgcaacgtgaaccacacacgcccaaaaatctcagtaagaaaagtgtcaaggcttttcaaatgcaaactatttttaggtttagcttctggattcacacaagggagcgagtcgaagcccctctgaccgtgccgaaatcgcagctctaatttcacactaaaatgagttgctttggcactagggaagagcgtgccccggtgaggagttcagccggcccctaggttcctggaacccaacctcacttggggtatggaggtcgctcgctcagagggctccttgggatcttgcctctttgtaggaagggtgcgttctctgttgtgcaagccacatggcgatccagtagcagaaccagaaatagaacctgagggatctgactcaggcctgtatactttttaaagccaggcgcttattccctggggcaagactttgagctgaaagatggtcaggagatttcttacactgtaggattgtatagtggcatccgaatcctgcaagttttgacatcctttcagctttttcagcaagtacttaaggtagaatcacgtggtttccatccaaattgggacaacacaactgtctttttctcctctagctgaactgtaacttgagggaagagacaaggatttacacgcctttgtatccccatccctcagcacagtatttggcccatagggtcactcaataaaagtttattaaatgaaatacaataaaaagctaaagtagtcctacatatttcaaccaggcaggcgaaaaggaaaaaataaataaataaactcacagttttagagcgtctctctatttttagatttgtgtaatattcctttgtatagacacattcatacaaaggaatattactcagcaataaaaaagaacagactactgataaacccaataacatggat

SEQ ID NO: 38431 - DNA, 1045 bp, Artificial sequence
  DNA replication origin
tgcactcctcagcccttgggcgtcaatgggaccaggtgccgtggagcagggggcagcacccgtgggggaggctccggccgcgcgggagcccaccaaggtgggggctcgtgcatggtgggctgcaggtccccaaggggtctcaggcatggcaggctgcaggtccccagccctgccccgtggggaggcggctgaggcccagtgagaattccagcctggcgcgggcgggccggcagtgctatgggaccctgtgccccctctgtggctgctggcccaggtactaagcccctcactgcctggccggtggcgccgaccggctgctccgagtgccggcagctgagcccatgcccacccagaacttgggctagccagtgagcaccgtgcacagccccggttcccgcctgcgcttctccctccacacctccccgcaagcagagggagccacctccagccttggccagtccagaggggggctcccacagtgcagcagcaggccgaagggctcctcaagcatggccagagcagacgctgaggccgaggaggcactgagagcgagcgagggccgccagcacattgtcacctctcaggaggtaccatggagaaggacaaagcagggccaagaacaaggcagaataagtttgggggctgcactttcaacagtgtggacaggacagggaacccttgagcggaatgtggaaggaggttggggaggacaccattaacacctgtggaagagccttccaggcagagggaacagccagtgtgtagtaagcctgaggtgggaatctgcctacttgttagagcaagaggctgggtggggctttgaaaaaggtagggcacaatctgaattcagggcagtttcaatgtgaatggaaaccaaaaataaaattctaagccgcccccccacccccactgcaccatcatctgaatggacccctcctcttggccaagggaactccaaagttaacctgaaaaagtagttgaggccatgatggaagtgggagttgggcatgcctcattatatttttctccctttttaaattcagca

SEQ ID NO: 38432 - DNA, 1367 bp, Artificial sequence
  DNA replication origin
gctcagcagccccagatcctttctttcttgcaatttcacagccttggggacctcaagtcctgtacatctaggcagaagggagaaagagagagtggaagagccccacccacttcttgacaaccttgaccaggaagacacacacgtcacttccattgtcataggtgagaactgggcatgtggcctgctcagttgcaaggtcatcagcttggaaatgtagtcttgactggctgctgcttcctggcagcaaccccaaactatgaatgggaaagtttgaagtttggagggcgggtagatgtctctgcaacagatggagtggaaggatcaatggatagagagggggtggtgaggatagagaggggatggtggggatagagaggggatgatggggatagagagggcatggtggggatagggaggggatggtggggatagggaggggatggtggggatagggaggggatggtggggatagggaggggatggtggggatagggaggggatggtggggataaggaggggatggtgaggatagggaggggttgtattgtcaggatctggggagcatttccatgtggctgaaagtagcaggtaaatggggaaggggagaacttcttcttttctgccttaggcaatagtgataccagtggagagctgaaatataaaagaaggaactatattttttttcattttgtggggagatgatgtattttgcttggtatatatgttgggccaggttagtagaaatggaacttaagatgaggtttgtgtacaggcgacttattaaggaagtgctcccaggggagactaataaggacatggaggaagcgggacagggaagggaataagcccagcagggatgagctctcgggtaaagtcccaccctcagcctgacccaagaggggaactctggcccttctggctctctgtattatgtggagagcccaggttcattcacccaagagagtgacaggtgcaggcaggtagaagcaaagccgcagagaagctggagaaggagaacacagacatgacacacgggaccccggaacatttggacggaactgcaaacagcatctgctacaaagtcccttaagaaatacagtagggaatatgagcagatgatgggacacctgagtctgaagcctgagagagggcaggaaagaagacacagatccaggatcctgcacatgggtggaggttaagaccacagcagtgaatgagaccatcatgggagagagtgcaagataaaaaagatgagaagactagaacgttagagaacactaatgcgtaagcattaggagaaagaagagacaatgaagaaaactgagaatgagtgtccacagaagcagaagaagcaggaaaataggggg

SEQ ID NO: 38433 - DNA, 1305 bp, Artificial sequence
  DNA replication origin
cctctgagtctctctctggatcccatccccccgaccccgccccgcgccttgactttgtggggtttccccgcaggccgggccgaggtggcggtcgggttgggccaccccaagccccttcttttccccagcccgcagagcccggccttgcctagtgctcggcggggttcaggcaggtccgggggaagagggagtggatgaagcctgcgagagccggaagctgcggggaggcagagagacgcccgcaaaactctaggcgcagagtctccggggtttccagccggattcctaggggaggcgcgaaaacccgatctaaactgaggttactggagggactcctggccggcactcttttctcctgaagaggtcgtttaggggggctcaggcgtggccactccttcccctggaagaagtgtgagcgcagggccctcgccgggtgagggggccggcggcgctcacactgtccctgccgccgcggcacagtcctgccccggcccaggtaggcggttgcttttgctgctatgcagagccaggtctgctccgggggctgcagcctcagaggggtacctcgagaaaccacttgcgggacacagggagagtcgcctcttattccatggctctgtcgaagggctgaacttttagcccgaggagggcaggccctcgacaggtagggatgtccccagaagaccctaggaaacaacaccttggggtggggggcgggggacgggggggttgttcagacccagagcgggagggtgaaaattaaagcgtcctgaccagggctccagagggctcggcgtccaggctgtgctggctggattttcagctgggaaatggcattcgaaaggggacccggtgggctgaacccaggctgcccgctttccttcacccagagaggccctgcagagcgccagaacggcgcgcctggtgtccggtgcttcgggctccaggtgcagtggccgaaccttcctcctagacaaagatggaagcttcctaggttgggctccttggatatgcagccatgaccatttctctcccagcttctccagatatttggaggtaacaccaaggaaggggaaaatcatgaacaaccaaatgggcttgtaaacagaggtcacagtatagaaaaaatatatgagtgtgtgtgtacgcgcctgtgtgtctgtgtgtctgtctgtgtgtgtcctctcaaaacacccagagagaatatgtaaacaaaacctgcctagctagagcagaaacaagccacaaattggttctaggaggctcagcctgaaatgccccaaattagcagaggatgtaggttgt

SEQ ID NO: 38434 - DNA, 898 bp, Artificial sequence
  DNA replication origin
ccccactgggagcctggggggcgttgcgcgcgggcctgggccccggggaacctcggacgggggagcgggaaggaaaatggggcagggcacgcggaagacccccggcgcgggccgactccccacccccgccccagtgcccttacctgtcccgcagcccgtgctggagttggcccagcctctcgtagtagtcgggactcgacaggggcacggccgatgcgagggtccggctcatgctgctgccgctgcgccagctcagcacagcctctgggtggccgttcggccggggttgccgaaggagaccgccccaccatgcaccgcgggtaaacaccgcgccgggccgcctgcaggaggcggggcaagacgccgtgggggcggggcgccgctgagggacggggcggaagccggctttgtggggggcgggacgaagacctgcatggggcggggaagaggcgtggcagaggcggggcgtcgtgaggccggggcggaccacgtcggaggggcgggcgctcggtgccctctcctctctcccttgacgcggtgtctcctttcccctcaccttccaggattcgcacaagctacgttaatgttacaaggcgcattccctccctttctttcgtctctcgcttgcttcttttcctcgatctcctttcttgccaggatttgttgagtgccaggcactgtactaagcttgttctattatatcagcactcaaaagcgacacaaaacaccaagtaaaaaaagacaaaccctcaaatgctaaacagccgtgctcagccccgacagtggaccaaccccttactcgaaaatccgtgctgaatctaaggattgttccaggtgccagtatcgttggcgagagggaaaagttgataactagttgcttgggaagcagacgtttgtg

SEQ ID NO: 38435 - DNA, 1328 bp, Artificial sequence
  DNA replication origin
ccacggcgtcttgccccgcctcctgcaggcggcccggcgcggtgtttacccgcggtgcatggtggggcggtctccttcggcaaccccggccgaacggccacccagaggctgtgctgagctggcgcagcggcagcagcatgagccggaccctcgcatcggccgtgcccctgtcgagtcccgactactacgagaggctgggccaactccagcacgggctgcgggacaggtaagggcactggggcgggggtggggagtcggcccgcgccgggggtcttccgcgtgccctgccccattttccttcccgctcccccgtccgaggttccccggggcccaggcccgcgcgcaacgccccccaggctcccagtggggcctggaggacagtgtttactagagccaccccctgtattgggggtgggagcggagagaggtgagagaccgcccccgccccgtcaatagcagctaaagcctggtctacggtttgaggatgcggccgcgtcacagaatttgcccagaagtgaaggtgggagttcttctgcctgtcactctccatcaagccttgtgagtttctcttgtccccttttacacgccccctccccactctcttcaaattgccatcccgccgtgacagctgcactgcatcaatgatgacaagtcctggaacgcagacggttgtgtgtgtgtgtgtcaaacatgtgcccccgtttaaactcaggagacttttaggggtagcgagggctggctagatttccagcgaagggatgaaatttccagctagagaagtccagcttccagagggttcatgatgcctttgattaagatatgaaagatgggaaccactgaaaacagctagatctaagagtgcatatagagagaaaattataccgcaatgtactatgaataaccacgtaaaagataaattgctggacctcttatttagctgctaagttaattggagttgtaactctcattagttgacaagaaaggaaatacatttttggatctcttgataaacaaaacatttaatgagtgttaaaagttacaaaatcattctagtgaacaggagagctgtgtgcgtgacagtgctaaaatgataacaataattacatggaaaataaaggcagaagtgagcgattttgaaaaggaattacatttatcttacgctagatttaattcttgtcagatatttatagagcatctacaacaggcttccttaattgtcgttagcattttttttaccttgtactccttttctacgtcctattttctttctgacatgtcaccgctcacccatatcagtgacctcttaatttctgactttaaaaagaaat

SEQ ID NO: 38436 - DNA, 1304 bp, Artificial sequence
  DNA replication origin
cgctctcggcgcctcctctgcctgggctcccactttggcggcacttgaggagcccttcagcccaccgctgcactgtgggagcccctttctgggctggccaaggccggagcccactccctcagcttgcagggaggtgtggagggagaggcgcgagcgggaaccggggctgcgcgcgcttgcgggccatctggagttcccggtgagcgtgggcttggcgggccccgcactcggagcagccggccggccctgctggccccgggcaatgagggacttagcacccgggccagcagctgcggagggtgtactgggtcccccagcagtgccagcccaccggcgctgcgctctatttctcatggggccttagctgccttcccgcggggcagggctcgggacctgcagcccgccatgcctgagcctcccacccgctccatgggctcctgtgcggcctgagcctccccgacgagtgccaccccctgctccagggcacccagtcccatctaccacccaagggctgaggagtgcgagcacacggcgggggactgggggactagcaggcagctccacctgcagccccggtgcgggatccactgggtgaagccagctgggctcctgagtctggcgggaggtggagaacttttatgtctagctcagggattgtaaatacaccgatcggcactctgtatctagcccaaggtttgtaaacacaccaatcagcaccctgtgtctagctcagggtttgtgaatgcaccaatcgacactctgtatctagctgctctggtggggccttggagaacctttgtgtctatactctgtatctaactgatctgatggggatgtggagaacctttatgtctatctcagggattgtaaacgcaccaatcagcgccctgtcaaaacagaccactgggctctaccaatcagcaggacgtgggtggggccagataagagaataaaagcaggctgcgagccagcagtggcaacccactcgggttcccttccacagtgtggaagcgttgttcttttgctctttgcaataaatcttgctactgctcactctttgggtccaccgtgcttttatgagctgtaacactcaccgccaaggtctgcagcttcactcctgaagccagcgagaccacgagcccaccagaaggaagaaactccgaacacatccgaacatcagaaggaacaaactccagatgcgccaccttaagagctgtaacactcaccgtgagggtccgcggcttcagtcttgaagtcagtgagaccaagaacccacccattccggacaaactgggttcacgcca

SEQ ID NO: 38437 - DNA, 1181 bp, Artificial sequence
  DNA replication origin
aagcgccgcgtgctcttctcgcaggcgcaggtctacgagctggagcggcgcttcaagcagcagaagtacctgtcggcgcccgagcgcgagcacctggccagcatgatccacctgacgcccacgcaggtcaagatctggttccagaaccaccggtacaagatgaaacggcaggccaaggacaaggcggcgcagcagctgcagcaggagggcggcctgggcccgccgccgcctccgccgccgtccccgcgccgcgtggcggtgcctgtgctggtcaaggacggcaagccgtgccagaacggcgccagcacgcccacccccggccaggccggtccgcagccgccggccccgacgccagcacctgagctggaggagctgtcgcccagcccacccgcgctgcacggcccggggggcggcctggcggccctggacgcggccgccggggagtacagcggcggcgtcctgggcgccaacctgctctatggcaggacgtggtgacagcgagggcgccccggggctaggtcctggtgcacccgaagggtctgcaagaaactgctagaacggatgggggaggcatgcgaaaaccgactcgcgcgtgtaaactgcgattcaaaacgaaccggtctcagagaggagcaggctgtgaacctcttgctgggggcgggggacagcgacagcccggaaaccgagtagtgtaacattatgccacgaggctttgaggtggtgattttctcctcctagaagttcttaaatgacgcgaaaaggtggagaagttcacacggcattcttaactacagctctcaaagttggaaactttgttggcgtttgtaactataaaaatcaacccagctttaacaatcagtcctttttgaagtggaatttatcttgggagattaattttcgaagggccccctaagtgcaatttcattaatgtttgattgaaagtaaattgaagtgtagctcaaggtggatcatacacatagcaacattattgcagaggaattattgccatttaggtaatagagcaatggaatcaaaataaaatactgattatatggattgatggagctttttaaatttaatgctgatttcaaaatgttttgatgattatttggcaagtgagtgtttgtatgttacgctaaaagaggattttcccccctaagatgcagctcaccataagaaag

SEQ ID NO: 38438 - DNA, 1290 bp, Artificial sequence
  DNA replication origin
tggccgcgccgccccgcatgccgtccgtgtaggcgggcagctcgcccatgttgcccaggccgccgttgcagtagctgcccatggcgccgtgcgggaactgcgagacgccgggcggcatgtggtaggtggcggccgccgccgccgcagctgctgccgccgccgccgcggccgccgcgttgtgacccgccatggcgtgagaaggctgcatgcccgccacggtcgccgcctgcgaggagggcccaggtggcggcgcgcggtaggcggccgcggcccccaggggcgcccccaggccgggtggcgcgccgtccatggcgccgctgaacttcttgtaggtctcctcgatggggctcaggatgtcggacacggagaagggcgtcgtgtgctttgggctcaacgacatggctcggcgggcagccaggtaggggggcctggggcgcgcgccggcaggacgcggcggccgctcgtcgccgccacctcggccgcggcagctgagcctgtgacgaggagtcggcggctcggcgagccccccgggctgcgggatctggggtttattttagtccggcgccaggtttacgacagactcggggggcggagcaacatcccaaacgagcaaacaatggtcattgacatctttttctctcgcccccccaacccccgccccataatggaggcaaaaaaaggtaaaaggggcagttgggtgtttcttggaaagatcactccccgttgcttttcccatctttgcttttcccatcctttgcttttcccatccttcgctcctccatccgcggccgttaccccagccctcgagcaccagaaatagaaactcggaggctggcgtcgaggctagacatggactccgcgcctggccccttccagatcccagttttctaaagtgacttcgcaccaaagtccggtataattgcggaatggggaacgtgctgctaagtttggggggagggtgttgcgggggcttgcttcgtcctctccagttatcagcccctcattcgctccatcacctaaagtgttaaaaaaaaaaaaaaaggctcttgggtcccaccgtaagagcgcataaagagaggaggtacaatgaccgtcctttgccattgtagggctccctaatttatgcgtttttagacccttaagcatcattttgtgggcaaccaaacgggcacttccaaattagctcaaagtatccaagcccagagaagagagaaaacacacatacactgataaatacgcagatgctaacttgtaagtattctgtttttcctctgtggggatggaaattga

SEQ ID NO: 38439 - DNA, 1632 bp, Artificial sequence
  DNA replication origin
gcgcgcgggtccgggcagagcccgggagccgccggaggcagctgcgcatcagcggactcgcggcccgggtcggagcccggtgagtggtgccaagaggtggcggcgagtcggaaccttggggagagccgcgagtcagacggcggcgggtgcctgggaggtgcgagtcgacctgtgttcggctgtggttttcccgccatgcctcttctcctccacgtgcgtaccaccgcccgtcccagccccggtttccatcgtgtttgggcacagaccacagccgactggtccaggagcgctctggccactgggagggccccaccaggcgccagggcgcgctgtctccgcgatctcagggcccctggcggcgtcggccgcgcgggtggacgcggagagggcggtgctgcgagggcccggagagtgggtgcccgcgtggggaggcggcccgggagcgcgggagcgatgcggaggagggacccggtttggttgcaggtttccggggcgggggttccgggaaggagagaccctcgccttccgcccgccctggatccgggtcccgccggacccccggctcctgccgttcgtcgcctggaagcggggcaggcgcacagtccagacgccagggagagacgcctcgccgacccagaccgtggggtcagggcccgggaggcaagaacgccccacacacagcagggcaccccaggcaaccctcactccgtgctgaggcctcggctagggtgcaaaggtgtccgggaatggaagggacacgagggtgtggacgcctcgcactctactcacgcctggtgccttctgagaggctgggcgtggggcagagggtaggggacaagggggtgacattccttaaggtcctccccccaacaaaagtagggcctgcagttccagcttgattcgttgattgttgggtggaaccgcctcacatcaaaggcatcgtggctccaaacactgtcccctttacttttctaagcccccgcttcaaaaccagctgtcggtgggccggtgagggcgtctgcagtacccaggctttccgcggggcggcgcggttggataagaaaaggcttcccggctggggcgcgcagcgcagctcagacacctgcgggactcgagatgtctccgcgaggtgtcctctacaccagggctgcattccctaaataatgaaaactccctgcccttgcacttggtgcctggagtgcgatgaagaggctgaaggtatccagcccggcccttctcccctccctcctcagactgctgatgtgacatgcgtgtaactgtcaccccacacaggacgtggaacacttccaccaccccaaaatgttctcttctaatggaataacgtgttctgtcctaacaaaagaatagctcaatacttaaaggtatcaattcaaagctgcagatgaaaaatctcatccgccctttgctgcttgttctcgcctgtggtatttttacctttcttcataaaatgatacaaagaaagccccaggtcgctgaccccagcctctctcgcacctgaagacgatgaccatcaccgctgccacgtactgagcaccttctaggccaggctgcttctcctcgtcgtctaatcagatcatcatagccaatctgtccttctgcagaggagcctgt

SEQ ID NO: 38440 - DNA, 1011 bp, Artificial sequence
  DNA replication origin
gccctcccagtggccagagcgctcctggaccagtcggctgtggtctgtgcccaaacacgatggaaaccggggctgggacgggcggtggtacgcacgtggaggagaagaggcatggcgggaaaaccacagccgaacacaggtcgactcgcacctcccaggcacccgccgccgtctgactcgcggctctccccaaggttccgactcgccgccacctcttggcaccactcaccgggctccgacccgggccgcgagtccgctgatgcgcagctgcctccggcggctcccgggctctgcccggacccgcgcgcagagacgctcgggaacgctgggctcgggcgcctcctggcggcggcagcacgcggcacacgctcggttctccggcccgagggggcgcgtggagcgtacgcgggatccgcgcgcgggcctgggctgctggcccacatttccccgcttgctcggatggcggcgctgaggcctattcgcctctttattaataacgatgcctcgggagggaaaaaatagagcctttaaaaatcagagtgcgagagaggagtgtgtgtgtgtgtgtgtgtgtgtgtgtgtgtgtgtgtctcggggcgttggtgaaagcaataaaactcagatcgcttccttggcgagatagcggcggctataatgcgccggggggatcaggggtttatttgcagatcctggataaaagatgatatatcgacacggtttagagtgtcactgcgcttggcctctcagggagccacaagtacatatttcctgaaataccgcccagcacagtatctaatccgcccgccacttaacaccgggaggggaacttcagcagcgcacaagcgcgctcccggtttcctggttctgggtggggagagcccaaatgagaaggatctggtatgcctagacgccccctcccctggcctttgtcttcagtccaagtaatcacttagcgatgggccttaataaatacgtctgagaactgtccttatgctcggtaaatattggatt

SEQ ID NO: 38441 - DNA, 1620 bp, Artificial sequence
  DNA replication origin
gggccttcagccccgaacttggagctcagctattcggcgcggttccccaacagcgccgggcgcagaaagctttcgattttttaaataagaattttaataaaaatcctgtgtttaaaaaagaaaaaaagaaaaaatccctgccctcccgtttgtcctactgcgccgggccggaggcctgggcctgggagccgggcccggccgcccgcggggctcccacaggcggttcctctcgggcggggaggccgggggtaccggggccctggggcgggcggggctcccggtgcaggcccctccgaccacaggctgcaccccgcgcctaggattggggcggggaggagaacgctcggcctccggcctgcgagcggtcggccggaagcccagggccgcccaccctcccccgcatctcccctggtctcgcgcgctgtctgaaccccgggcggcagcgtccggctacgggaggaaaagtgacttcgggagccgcaaaggcgaggagagcaaacccccctcgctggcccaaatctatgagtggctccttcagcctgagaagctgttgaagccactacactcgatgactttcactttgttacatttgacttacctcacgctaagaaagtgggtgggtgggggtctgaggttaagactggctgccttctccccactccccactccttttcaaaatctgcgggctggtgctgacctaggagaccgctaaggctgggggtgggaacggtcagggcgcgcgaggctttggcttagggggcttgggggaagtacgcggggttctgggctcgggggagggaggggatactgcagccctccctaggatctttggccccaggaagccagggagcgagaatctttggcaatcccagcaaaccatgcctctcccttcccttacgctcccatcctttccgggcttccaggcctctctccggggactggatcccgggcctccttccctccagcgttcggcggtccgaaccagggtgtgcggtccccccaggtcagcccttgagcgtggaactgggtggattgctaggaagtagaggtttgggggtggggtgagctccccggatgggaagtgggcacacagccccgggcacgcccgggaagggcgcatccatctttccggcggggaacggattccgtcccacccttgttgctggaggaagatctccttggcagatgctggcgcacacttggccacgcgggggagcgtcttaggaagcctggccaactggaggatgagcctttctcctctatctcgcgggtttctaaaaatacttgggactctagctcagagcccagcgggtgctgcagacgctgagggactgaacgtcggcgcatttggaaattgtatctctgttctctccgaagctgcaccatcaaggctggggggttgggtggcagtgaggaggccgggcaaaaggagcggtcccagctgactttctcgctccctgtagttgatgatcaggtttaattcaatatctaaagcaaacatgattatccgtgcgaccaaatctgtgcgtcgatagcactctgcgcagcagcccagggacgcgatgacactttattcccgcgttccacaccgcccctggataattgagggctcggaagtct

SEQ ID NO: 38442 - DNA, 1043 bp, Artificial sequence
  DNA replication origin
ttggctggctcgggcccctcgttctcttcctccggaccttcggccacagagccctcctcatcgttggtgtccggcaggtctaagatgtccttgaccgaaaaccccgtctttgtgttggtcagcgacatggttcgagaccccaaaatttatgtcgcaaagttgtagcttcacttggtcaattcgtggcgctcccctgccccggcgggcgggggaggggggagttggggggagggactgggggaggggaggggggaattggctttaattattgggataattattatttttaaaaagagaaagaaactggggatggggaggaaaaaaatgaagcccaacccagtgcctctctctgtcttctttgaaagcacgcggaaatggacgcaggaagccgggcggcctgcgcgccgagcgccgcgggccccggccttagtttctaactccaggaggggtgccaaggcggcgtcagctcgggctccggcggccgctcggcgcgcggtggcggctggtggcgaggaaaaaatgggccattgcccgagcgatcagtccatataaggctgggctccactcacgaacctggggaggcggggagagggggagaaagagagggagggagggaaagaaagagggagggagggggagcgagagagggagcgggagaagggtggaaaaaagggggaagagacattaaaaacgcaaaggttggccacgtgtgggcgggtcttgggagtcaagtggatgaagacagtatttgcagatgtgaaattgtgggttttggggagctccgcgctcccagccaacggccctctagagcaagatgagaggtgtaacgtgtcaattaattgcaaagacggggcgagcctttttttttttaaacccagtatttacatacaaagggccaccgcgtcgctcgcgagtccacacacttgaaagggccgttttaacaaattgcatcttaaaaaaggtgggggtggggaggaggaggggagaaaacaaaacagaaaccaggaggagggaaaaaatcctctttaacattcaccggttcc

SEQ ID NO: 38443 - DNA, 747 bp, Artificial sequence
  DNA replication origin
gcgtccaaaaagagaccacactaaagaactcgcgtgggagaagaaaactggggagaaaacgaggcatcgtcgggccacccagcgacccccctcccccgcagctttctgggtcttcacccaggctggagacacaacccccacccccacccccgcaatcccgccccgccgccttcccgctgctccacctctagccagaggctggagagggagggggccggagagggagggataatagagggcaggaaagagcagggccgtctgccctttcctccacccggggaaagaggcccgcagagcccagaggcagcagggccagggtccgaccccagacgaagttggagctcctcactcttaccccgccctccccgggaccgcccgcaaagcagaaagtgaactgcgcgtcctccttggccgcagagaggtggaggcggggggttgggggtgggaggtggggggaggcggagtgaaggaaataaatgagtctttagcaaataaagggcggctggaagggggcgggtcgcttggtggtggctctggccggcccggagcggagctctctcctgggttttgggctctctcgcggttaactggaatcaattacttgccttgtcatttctagcactcatccttaagcctcaaccaaaatattgacctaggaggcttacagaagttgggctcttgccatttgaaccggatcttgtttaggcaaccaccaacgatggaaaggagagatttccgcagctcggc

SEQ ID NO: 38444 - DNA, 757 bp, Artificial sequence
  DNA replication origin
gggaactgaactttcccgggacttgcacttcctcctcggcgctggggttggaaaagaccacgccgcatttgccaccccttcttctagttaaaacttttttggggggggggtgcaggggtgtagattggctacctgatgctcgttcgccccagaggagtgtcaggaaggagctttgtctgggggcggggaggggcacagaaggccacccctgcggggtccaggtctagtcttcccacaacctgggctcctccgcgcgggccaagctgagcgcgcgggcaccgggtcctcctcgcgcgcagctgcagcggacgccgccgcgccccagctgcccccgggttgccagcgctgggtgagggcacctctccccgagccgctcggcggctttctgcagccctagctgcctcgcccccagtatgtgacgtgggtgacaatggcccaggttagagcaagcccctcgtcggcgcgtcctgggtggtcggacccgggcaaacacaaatacaaaccgattgctaagctgcggacaatgagcgaaatgtagacaaatgtcccgctcccgttggaagcctttgtcccggctcggtttttgcatttatttcagtggcgaaataatacatgattgacgctctctttcaatgtgtcctaactgtttggaataaatctaaggttgttcctagttgtcatggcattcaacccttttcaatggactatctcttcattcatttctgaatccgtccacaatattaaggaaaccccttca

SEQ ID NO: 38445 - DNA, 1525 bp, Artificial sequence
  DNA replication origin
actcgcttgggtgcaagacggtacctggaaagaatttactaaagaatgccgagtgggggagaccaggagctgaaactggtgcaggcagacgctgacagggtgggagtggtgggcccttactgaagaaccctccggagggggaagggagcggggcagggcctctcagcctgcgggtgtgcgggatcgcagagaaccaaagctcctgggctctagaaggcctagctgtggtactctcggggaggcctcttggggagtcctcaggatgcaatcacctgtttaattgggacagaaaaggtgcgtttggcgcctggcccctaggctctttgggcgcaagccgggcccaagaaattgaggagacactggactgtgctctgggcaccggacttgccctggccgccagctgggcctgcgcaggcctcccggcgtccacaggccgctcctgggggacttgcattttatgatcttccactaacaagcccagtttctccccttcaattacggacctcccagcggtctcccagcgccttttcaattgcaaatgttaacgctctggaaatggacgcgggaaccacacggacgagaagtgatggggaaatgagtctcgaggtcccgggagaggctgagtgctgtggacccggaagcaccgatcgcggaggaggcaaggccgaagctctctccaattctctccctccctgcccagctgcccccaggccaggggaaataaaaactggaagactcgctggggtgaaagtgtaggaggggccggagtccaggaggcgtcctgcgagggcaggggaagtgggcgcctcaggtgctccgacaagaggacaccgcaagctgagacccagaaggattcggctggtcattgaggctaaggggcaggcgcaaaggcaaacccgacctttgagaactgggctgagggcctccttctctaggcgcctatggcagcactccctccccgtgattaattccaggagccaggattcccctaggaaagcaatcctctctcaggcgctctgcggaccttgcaggctcccacgggtgaggggaggggacttgatcaatagcagcggtgctgatttagatcctgagaagaaagggtcactatgctggggaagggggagagaagttgggaactacatggaacttcagcgaggtggttcccagctgaagaaatgaacacgctttgggaggcctctgcgggcactcccccacctaagagggctctggggatatgcgagaaacgacacttgctgccaaagacccctttgccacctgacccaagaatttgcctggcccaaccagatcctattctgggtccccaacctagtggctgccctggaccccaagacagcctccacccccttaggactgaggaataagaggaggaacaaaaggagggtctttgctgcaacgcttgggttgaggaactttttttctctccagttatttatttagcagctgagtaacaatagcagtggcaggcccactcccgcccctggatccaaactcgacgcttccccga

SEQ ID NO: 38446 - DNA, 1329 bp, Artificial sequence
  DNA replication origin
ttctccccgactttgcggatcacggcaggagtggcgagcactcgaggacgggcagggcccctctgtcgcgcctgcagtcaggaaaagttttaccagccgccgaggccaggtgatcccgccgctgcgcactttccggtgcggtcagggaaagcgggactgtcccaggggctgggaaggtgcggggctgggaggcggaggaggagggaggggcgcggcacccgcggcggtccccgcctgcggtcccctgagccccgcctggtagggcgcgcggtgggggaagggcgcagagcgaggggggtccgggtaggtggagtactagataaagacgcgccttgaaatgcggcggggctgtcgccgcagctccgggagtagaaggcggagcgggcgcgcggagcgcctggctagctccctcccgattgcccggggccggttgcgcctcggctggcggggccgcggtgaggaaggggcggccgctgcacccacctccaccgggtaagtcgccccctgtgcgtcgcagggagctcgggatcggggattgaaacagaggcagaagtcccgaaggtaatttggagatggcgcccagtggagacaggggcttctcctcagacggaactgggacgtgaggggacggtggtgatgagcacgagggcaagtggtgggagtcgcagacaggaggagccggggctgagggcccgcgcagtggactgaggtctctggagaggcgactgaagactggagtttgggaggcgagtgtcgcctgggccgcgcccggcgccggacagttctcgtttgtgtcagtagagatcgccagaggatcagaaatgaacctcggtggggtccttgtctccgaggggcgccccctccgccccaacctcctcccacaacacacacgcacacactaccaggaggccctttggagctcctctggcgccttctcgactttagtggctcttgggggtggaaaggggacgttgcgtctaggggaaggttgtgaacctctggggctcacattggagagagagagacagagccctaggaaccccctctctgtgcccgagggcccaagggtgcattccctgtccttcccggaaccagcccttagctccagctaagagcgtgccttctccgcgccaccgacaactacttttcacatcagcctgcccgacccagctttaagtgctgaatgcaacccgttaggagagccgcttgttttccaaagtcttgtggtaatgattttgtcacgtgttaagaagtaaattcagataagagagtgctttcagcgcgtgtttcctggagaaacccagatctcccgtattgaaatcgccctca

SEQ ID NO: 38447 - DNA, 1401 bp, Artificial sequence
  DNA replication origin
gccgctcggcggcgacgacggtgccccgagacccctctctgctggcaggccgcggtgaccgtgcccggagcgcgttcccgcgccgggcggctgtggcaggaggaccagacagtcagcgcctggcagcgagggcgacgccgggcttcctccatcgccaccgccgggctccgctgcggctcccgggctccgccgggtgccccgcgccatccccatcccgcgttcaccggaaacgcgtgcgagctggaggctcacctggagcgcgactgcgccgctggagcctcggctgggcgagcgcgcaggtcccggccgctctttatcccgagtcgcgggcggctgcggagtcgcgggcggtcgggcggcggctcgacgcggccggcgagcgctccccctcccggctccgggctcctggctccaggctcccggcccagcggccccaccctcctagctccggccccgcggccaccgcgcagccccagcggagggggcagctcccccgcgccgcgcgcgctctgtttgttttccttgccggactgacgtgagtcaaaatattggccatatgttcagcggtaataaattgggtatgagcgcaaacacacttgggcttcgatggctctttcagctgccacatggtaggctttgcggggagggggcttccaccccgcctcggccccctgcccccaaacgcgcgggtagattccctccctcctgcgcccctctgagcaggagatctgggaccccaggtttctcctgaccctcgcccctcctccgtccccagcagtgccttggactccgcagctcctggcgagcccggactgctggttaacaaggtcgccatctataaattgctcggtcgctaagacgccataaaaccaaagggccagatgtggcacgttatttatgtgtgaaaccgcgtttacactagatacgcggatccaaggccgatagcacgacttcgcgggaggtcacagacctctcgccccggctccaggctcctcccccagcacgatctcctctccaggttgaggggtgtcggtcttgccgggaaagggattcacccctgcagcccaggaggaaagtgatttcagtgcgcttgtgccaaaatgccacctgtccaggattaaaggcagtctctggggtttatttccgtagctttcctctttcccctgctcttggcttccttttattacgggcccctgggaggctgttttattttccaggcagttgatacgtttcatgggacctagatctgacacagcaagggtagtgtgctagagatgcccaactctgtgggtgggcgggatttgagggtggggtctcctgagccctgagggaaggattttgggaagcggagcagttcacctggctgagggagcacctgaaattattcttgcctcgggcggt

SEQ ID NO: 38448 - DNA, 1764 bp, Artificial sequence
  DNA replication origin
gcgtgcttagtcctctcttcgctgccttcgcggaactcctggcttaggcgtgcccactttaatccaaaccattccctttccctgttccttactccaaacctacgctgtcatggacaggcctaatcttctacatagcttcccctgctcccactctcgcaccctcctgccagtgcactgaccctcaaacctcctccaggtctccaggacctcccagagccagagactgtactgtgttcatgccgccggagaggaagagttcacttcttttaaacctgatttttctttttccaggagtaattcttgtctgtggccccaccgcgtgctctctctagagagtccaggaattatgagccagtcactcctgacagatacatttagacaggtggattaggagccagggatgctctctggccctacagcggaggcaaaggggtcggggcctccgcagccatggctccccagggtgggctgatagggtccatgtgctcctcagccactgtcaccgcgctggcgccatactcaactctgggtggctaaggagagctagacccttggggtgggcaggagggaggggaagagggttctctcctccaggggagcgctgggagtctcagaaacctcggctgttcctactctctcccctatgccctcttcctggtctagcacattcagcccaatgcctttggtgcttactgggctcaacctcagagctctcagatcctgaccccctcaaatcagttcatgttcaaaaccacgagtttcctcctcttggccctcaccgcatggctcccggacacagttagctgcacaggttggggagttcagaactgctttggtgcagggtagaaacagagaaattgttgatgttcaatctcaggggtgaataattcagggctgcgcaaaacctcatttaaatgaaggagaaatgaccattctgtggtttaacagagacttcctgaagctgcaggtgctgggagaaagacgaggccaggccacctgggatagagtggtgcgagattccaccgccagggagaaaggaacttgtccttcagacctagagctggagctatgcatttggcctcccgccggtcgcgcttggggacaggagggcgccggatctatgcgccccttagcagcagatcgggatccttttgcctcctgccccttctgtcactgcttggagagggatgagttctggtggctgggcctggctgtaggagacaggatttggaccgtgcccctctcgcatcaccgaaatcacccccactattccaagagtggttggctattaaacgtgaagatttcctgagagaaggattgaggacctggccaggaatgggacacaagttccgccttgtgtcttcctgacaggagccctgcaccgcgctggacgctcaccttgacactcccagccagctggggtactgatcccacccttccccggccgctgccccgggagtggggaggtagagagagccacacccgaaacacctttccacgataaacttttattctctatcttattattaatggtggcggaaataaaactaaaaccaaaacgaaaacgagtactagtactaacacactaatcaatttgagatgacttccccctcattcccaaagctagaggaggaagggggctgaaaggggctcagagcagtggaaggtcccaggcccagctggggttgggacgtgtgtgtgtgtgtgtgtgtgtgtgtgtgtgtgtgtgtgtgtgtagaggggtgggttccgggggggtggtgg

SEQ ID NO: 38449 - DNA, 1432 bp, Artificial sequence
  DNA replication origin
tggaaggtagggaggaagggaaagagaaagggaagggagggagagtgagaaagaaagaggggggaaggaaacagggagagaggcgagacggagacggacaagggagtgacaaaaaagaaatttgaagctggcagagcgaaggaggccacgtcagagcaaggattgtgaggagggtacggcagtctaaaacccaagttcagagaagcctaaaaacccagaccaataaaggaagtgtggtgggtccggccagaggcagggctgggcctgggggctggctgggcgtgcaccccgcgggccggcactggcttcctcctccgcgagtcctccgatcctgcccgtgccgattgccggggccgccgcgcagacctgtgcgcccgggtccgcctgccgttccctccgggctcgggtccggggagagctgcccctaggaggtcgaggccgggatgggcagtccgtgtaagctactgagggcgtccggggccttgctgccggagctgggaggcttcctgtcagccactgcgggaggaagcacagaggcgtcggatcactacctagcgccgcgcagtgcgagaggcactgggactcaggacgcctgcagagcgaggtcgtgagcgctcaacccttgaaggctctggaagagtgaagcagagactcgcgctctccagagaccccaagcttccgtgggcgaccagcccttcctctcccgctaggagagccacttgcaaggagagccttggcaagcgggactcctcgcaaggccatttgcaaacactgaccgctggccaggtgcaattcccgttgccgtccaaccccctcaccacctgctcagtaaaggaagtgaagggcgcagagggctgggaaggtttcaggtctgatggcgacttccgcagaagggaacaggactctaacgttgcgcggaccctcaccctttccaaaccccaggcgcccgcacaagtgcgaagagcagccaatgcgtcgagtccgctgacacccgcggctcggagctcgctgtgggcagggggaaatcttgcgggaaatgagccaccagagatttccctggagcggcctggattcctccgacgtaggaggcagttgcgctttaagtgagcggcagactacgttgtgcccacgaggtccggggatccagatgcgctcaccactgtgggcacagcacgtcctgggacctgtgggcctccggattaagtgacagtgggattgccagatcgggcagtattctgcgccttactctattatttaggggcttgggaaggggcccaagttttgccaccggaagccagaaagtgacgccacgattgcgcaagcctgtttttcctttcccaaccttgagccactctgcttctcctacactaggatccacagtttgtttatacctacaggggcctattttcaattttcttttttccccaagtcc

SEQ ID NO: 38450 - DNA, 979 bp, Artificial sequence
  DNA replication origin
ccttgcaaaccagaagtccaaatgaacctttgtacctggaagcagtctgtggtttaaattaacaaatgtgctgacccctgaacaccaaaaagtgctgatgtgtttaccactggtcggattccctagcaagtgttgcgagtggaggggtgggaggagacacctgcaggacaacccagttttctaagcactgaaaacaccaacaacccctgtgctccctactcctaccccagtcttctttggggtgacatcatctcagaagggaagagaagcccggcggccactgggctctgagaaagaaaacagatttccagacaatatgctgcggggatcgacgggagaggacagttcatggagggttttttagggtttgttattacaaaaaaaatacaaaataaaggctgtggcttttctgtccacttcctaggtttgagcccccctccattagggctggtgggctcagaggagtgaaggctacaaagtcccaggtgccagagaagggactgtcaccgagatggctctagggctctcagggactgagggagggttggggaagcagtaaaacaaagggaactagggcccttgacagtagaaccagagacagagagagaaggaacgacagggatggaccaggaaaaagggctgatagcatatagaggactagaaagaggagacgggggaagaagcgggactggagcagaggtcggagcaaggaaaagagagtggaagggcagagggagccctggaaggtcggggaaagccggggtggaaggtagggaggaagggaaagagaaagggaagggagggagagtgagaaagaaagaggggggaaggaaacagggagagaggcgagacggagacggacaagggagtgacaaaaaagaaatttgaagctggcagagcgaaggaggccacgtcagagcaaggattgtgaggagggtacggcagtctaaaacccaagttcagagaagcctaaaaaccc

SEQ ID NO: 38451 - DNA, 1322 bp, Artificial sequence
  DNA replication origin
gcgccaaacgcggaacccgggttggccctccggggggttcttctcgtcccctcccaacgctcacttcgctgacataggacttccaagggtcttagtggagaaggccacgaaaggaaaatgcctgctaaatgtcactgggggtcgggggagagatcgaaaagagcacgaggcagagggacggtcattcttgcttttcccccacaaattctagaaagcgcagggaaccgaccctaggcagccagttcacaccggacccgacctatcccaccccagtcgccatgggctctgtcagctgtattcctctcccgccctccccatcgctctcccgtctccggtaacactggcgagtccagggtttctcctgcaggtgccaaggtcggccccgtccggatgagcccgctgggcaccgcgcagaggagggccgggcgaacaggcagacggccttgggtcaagactgggagcgcgaccccgctgcggtgggagcgggacccaggcagccacgcccaccagtcttaatgggggacaacagagggggctagaatggggggcgggatgctggtgacaccagtggtggctaggatgtgctggcacggccctggagacacttttatctcatttagtgacctcaggattttcgtttcgctcccccagcctgcactttctcctcttcgaacactcgtccaccctgctccagcccgagctgcaccttctccgacccggtatctcaaaaggagctcgaactccttttcctctggggaggagaaagaatgggtggcctccgcgtcactctgtttcccttcctcctcctcagtcctgatagaatcgaagggctgcccttgttccagaaacataataactgcattccagctgactccgatgggggcggggggcggagtagtggaagcccatttttatttgaaacctgtccctatattttccttcccaggaatccctggataaagaccagctcaaccatcgctgagaaaacagacctaggcttcccagggcggttaacccgccggcctctgggcagagactgtaagttggggtcgtgtttgggagactcgggaccctatttccaaggagaactgtgggggacatgtttatgtttgttgttttcaaaatcaagcaaaggaaacaacagccaattaaaatgaaatatttttattcccctcgcacgtcgtcagtgatttgcccccagggattcacaattttcccaagcctgttaacgggtgacaatgagtgagtgcctcctgtaatttaattttcctgtcacactaaatagagctacattgtaaaccttagatctactcttactgata

SEQ ID NO: 38452 - DNA, 1582 bp, Artificial sequence
  DNA replication origin
cagcaaatttgcacagatattatattgcctcccccctcctttattattcttttttttttttttttgccaggatcccattgtacttaactgaattttataacgctgatcgatatcttggtaaaatattcatttttaaactagcgggcagtgaaatctttgctttgtgtgctaaagtcaacagtcgcttggtttgagctcaaataaatgcggggatgcctcggctcggagcagtcggcctcctccctccgcgagctggacgctccgcagcccgcccgccagccggcccgccggccgccgcaggtagggagcgcgcccacccggggaccgcgcccggctcccctcctcagcgtccgcaccccactcctgtccgctcaccgcccctcccccagccagtccttctcccttccagggctcggacgcccgggcgggcttggctggtggtaagctcagccaactgagactcaaggcgttgggtttttttgcagggggttcggaaagtgcatgacttggaaggatgaggggtcgtagagttgcaaactcagaccgcttaggctctgagctcagttagaggagtttggtagggccccgaggaagccacacaggcccctcgagcggctcgggtctggggattcgatctgagagcagcatgtttccagagaacagtggagggtggggtgtggggaacccccttggccccagaatctagtgtgggggtcagcagaaaatgatgtgcgtggtgcatgggagtttgaagaggctgaggccggagcatggtgacgccctccccttggcgcgcaggggttcgagtccagtctcaactctttctcggacacaggcaggccgaggagacgatggggatcgtcatcaagcagcagcaggggaggggccgcgcctttctaagaggcgagtgaaccttagctctggctgcaggaagcggctggtggccttttgcgcacagccgtgcttggcggcaggcaggttggggagcctctggggttacgagctgggtccaggagagaaagtcagaaagcagacgcagggccatttatcatcgcattctccctgcaacccagtcgccgatttccccccttccacgggcaggagcacgctcgcgcgtgccgggcttgccctcgggaattccggaggacgcgagtttgtaggacccaacagaaccagccgcgtctttccgccgcctgcggaaaggcgtggacctcggaaaaatagtagttctgctgctgccccttgaaacctcataaagttgtatttccccaggtgtctaccagcgcccccccccaatccctgcccccacgccagatccacattctctctggggtcttttctttaaacgcctgggtagcaggcactgtgagaggcccgtgcctggctgggttactttgggtctttggtctgatgcgacagggaactggcacatggaaattgcccaccacccccgaccggaaagcttttcccatctgcgccgcagtcaccagacttcgaacccaagtgggcagaaatctgtttcgttgttcagcagggtcagtgttatgtagtcaccttcctgtgtggggacccttggtggccc

SEQ ID NO: 38453 - DNA, 1750 bp, Artificial sequence
  DNA replication origin
tggggccaagggggttccccacaccccaccctccactgttctctggaaacatgctgctctcagatcgaatccccagacccgagccgctcgaggggcctgtgtggcttcctcggggccctaccaaactcctctaactgagctcagagcctaagcggtctgagtttgcaactctacgacccctcatccttccaagtcatgcactttccgaaccccctgcaaaaaaacccaacgccttgagtctcagttggctgagcttaccaccagccaagcccgcccgggcgtccgagccctggaagggagaaggactggctgggggaggggcggtgagcggacaggagtggggtgcggacgctgaggaggggagccgggcgcggtccccgggtgggcgcgctccctacctgcggcggccggcgggccggctggcgggcgggctgcggagcgtccagctcgcggagggaggaggccgactgctccgagccgaggcatccccgcatttatttgagctcaaaccaagcgactgttgactttagcacacaaagcaaagatttcactgcccgctagtttaaaaatgaatattttaccaagatatcgatcagcgttataaaattcagttaagtacaatgggatcctggcaaaaaaaaaaaaaaaagaataataaaggaggggggaggcaatataatatctgtgcaaatttgctgaagtgtgacgtggcatggaaagtttaccctcctggaattcggatctagaatgtttttttcggttgtttacagactttgtttattcacagatcatggttgcttaaaccggcgcgcggaaagcgtggggaaaaaaggaaaaaaaggaggggggagagtctctgcaccccacaatgagtagagttggggaaagcgcgcagtggcgatttgtgagctcgttatctcggaacccgggctaggggagggatttaagcgggaggggggcgtgaaagacacaagaagcacagaaaagcctccgaaagcgcctgctccccgacatcctttttatgtattcggacagaactatatcttatcggccgggatcagtgaaggggggcgcgctaagtagtttaaaacgaccctcgcacaatgggcgtgccatacgaaacatagcaggttagggcagcgctttcagcctccattgtcccccactcggcccccggccctgcctctcggctccttcgccacgggagccttttatgtgataatgaaacacatttcaggccgggctcacgacgtgtgtgtccttgctaggaggagagacggcctgattgctggctgtggcctccggatccccccctccccaatttctcttccttgtgttcttcgggacaatgtggcatgttaagaaagggatttggtggcgggaggggggcagtggcgggtgggaggcggaggcgatgccaaacccccctcaagcgcgtgggaaggccaggcttgttggggaaggcggcggggtgggggatggggtggcagagaccccagcaaggtagcactcaaagacagtctccaggtctggggcgtagctggaacactccaggttaggatggtcaagaagcccaaagatctaatcttgaaaaaaggagcctgagcttagaaacctgaggcaaaaagtcctagcctccaggctttcggagtgtttttacccaccgcaagccactgcgcgcgggagtggctcccaagtctgcctgacccgcgacgacactgatcctgccctcgcccagccagcagatgtc

SEQ ID NO: 38454 - DNA, 1111 bp, Artificial sequence
  DNA replication origin
agtggatcatggacctcttccccttctaccggcagaaccagcagcgctggcagaactccatccgccactcgctctccttcaacgactgtttcctgaaggtgccccgctcgcccgacaagcccggcaagggctccttctggaccctgcaccctgactcgggcaacatgttcgagaacggctgctacctgcgccgccagaagcgcttcaagtgcgagaagcagctggcgctgaaggaggccgcaggcgccgccggcagcggcaagaaggcggccgccggagcccaggcctcacaggctcaactcggggaggccgccgggccggcctccgagactccggcgggcaccgagtcgcctcactcgagcgcctccccgtgccaggagcacaagcgagggggcctgggagagctgaaggggacgccggctgcggcgctgagccccccagagccggcgccctctcccgggcagcagcagcaggccgcggcccacctgctgggcccgccccaccacccgggcctgccgcctgaggcccacctgaagccggaacaccactacgccttcaaccacccgttctccatcaacaacctcatgtcctcggagcagcagcaccaccacagccaccaccaccaccaaccccacaaaatggacctcaaggcctacgaacaggtgatgcactaccccggctacggttcccccatgcctggcagcttggccatgggcccggtcacgaacaaaacgggcctggacgcctcgcccctggccgcagatacctcctactaccagggggtgtactcccggcccattatgaactcctcttaagaagacgacggcttcaggcccggctaactctggcaccccggatcgaggacaagtgagagagcaagtgggggtcgagactttggggagacggtgttgcagagacgcaagggagaagaaatccataacacccccaccccaacacccccaagacagcagtcttcttcacccgctgcagccgttccgtcccaaacagagggccacacagataccccacgttctatataaggaggaaaacgggaaagaatataaagttaaaaaaaagcctccggtttccactactgtgtagactcctgctt

SEQ ID NO: 38455 - DNA, 773 bp, Artificial sequence
  DNA replication origin
gttggtggtggtggtggctgtggtggtgctgctgctccgaggacatgaggttgttgatggagaacgggtggttgaaggcgtagtggtgttccggcttcaggtgggcctcaggcggcaggcccgggtggtggggcgggcccagcaggtgggccgcggcctgctgctgctgcccgggagagggcgccggctctggggggctcagcgccgcagccggcgtccccttcagctctcccaggccccctcgcttgtgctcctggcacggggaggcgctcgagtgaggcgactcggtgcccgccggagtctcggaggccggcccggcggcctccccgagttgagcctgtgaggcctgggctccggcggccgccttcttgccgctgccggcggcgcctgcggcctccttcagcgccagctgcttctcgcacttgaagcgcttctggcggcgcaggtagcagccgttctcgaacatgttgcccgagtcagggtgcagggtccagaaggagcccttgccgggcttgtcgggcgagcggggcaccttcaggaaacagtcgttgaaggagagcgagtggcggatggagttctgccagcgctgctggttctgccggtagaaggggaagaggtccatgatccactggtagatctcgctcagcgtcagcatcttgttggggctctgctggatggccatggtgatgagcgagatgtacgagtagggcggctttgcgtgcgtgtagctgcgcctgtaggtcttggggtcgcgggcgcggctcaggcccgcc

SEQ ID NO: 38456 - DNA, 765 bp, Artificial sequence
  DNA replication origin
gtctcttttttatacgacacactgttagccttgagataatattaactttgtgatcaaatattgacttgcggcgcctccaaatcctcttcgtggccgagccacgcactatcctaacagagttatgtttggcagcgcgcggctggggaggggtgggaggtcggccggcgagggggtggggagctgaggaggagaagatgggtaggagttgggggctgaagtggaggcagagtcaaagactagtggacaaagagaaagaaagtttttgcctgcaaagctcagccgcgtgtggttcaggtctcggttctttccctattgccccgttcagtgcctccagccgcccccgcactccgcacaggcactgccttgcagtttccctgggacaagggagggggtccctggagggagaccggacagagggggcccgggacagtcttcgctggaggcagcccgaggcgccccgcgcgttgtcccgcaggttgcttgctgcgaccggaggtggcgtccggggacttcgggcctcggcgccagctcagtatgctggtgggagagtttggggagactctggggtaggggaatgtatttggggtgctggcttgggagtactccatgggacccctgttctagaatctgggcgaggtggagaagggctaggaacgggccacatgcccaagcagcaatccgctcgccaccttcccaagggcgatcgatcatgactctccctgaatgaaacagactcggagtccggagactgggccatcggggacg

SEQ ID NO: 38457 - DNA, 1295 bp, Artificial sequence
  DNA replication origin
caggagtgcggggcgccgcggcggtggggcggacggcaggcgctgaggggcaggtgcggagcgccggctgcggctacctctcacctaggtgtgagctgattattcaaatgggctgccccgggtctggggattggaggcccgcgccagcgcgccgcgctatatcaccagcctcccacgtcactgcggcacttgtccgctccgcggtccacacctcctcctcctcctcctcctcctcctcctcctcctcctcctccaccaccaccaccgcctcctcctcctccttcctcctcctcctccccacccccccactagcccccgcgccgcgcgcttcccgccgcctcggggcagctcggcactgccaacctcagccgccacccggcagcccgtgagcgcggcggcggcgggtgctccctaccgcggggcgctggcctgggcctcctccgctcctcgcccccccccacctcccgcccacttccaactaccgcctccggcctgcccagggagagagagggagtggagcccagggagagggagcgcgagagagggagggaggaggggacggtgctttggctgacttttttttaaaagagggtgggggtggggggtgattgctggtcgtttgttgtggctgttaaattttaaactgccatgcactcggcttccagtatgctgggagcggtgaagatggaagggcacgagccgtccgactggagcagctactatgcagagcccgaggtaagcgctcgtcttttccagggggaagtggagcggcggcgctcgctccttccccaacctcaggaccgcttccctcgctggcacccccccaccccgccccacaaccccagcctttctgggcagccgccttttccgccctccttggaatcaaatgggtctcttttttatacgacacactgttagccttgagataatattaactttgtgatcaaatattgacttgcggcgcctccaaatcctcttcgtggccgagccacgcactatcctaacagagttatgtttggcagcgcgcggctggggaggggtgggaggtcggccggcgagggggtggggagctgaggaggagaagatgggtaggagttgggggctgaagtggaggcagagtcaaagactagtggacaaagagaaagaaagtttttgcctgcaaagctcagccgcgtgtggttcaggtctcggttctttccctattgccccgttcagtgcctccagccgcccccgcactccgcacaggcactgccttgcagtttccctgggacaagggagggggtccctggagggag

SEQ ID NO: 38458 - DNA, 1271 bp, Artificial sequence
  DNA replication origin
gggcacgcgggatccctggtcgagccccctttcctcccgggtccacagcgagtcccctgaggaaggagggacctgggaggaaaccaccctctggggcggctccggcctccagcccccgccccgtctcatcgcgccgggcgcccggtgcgcctgtcggagggcgcgtccagcctcagtgcccggcagatccctatgaaagccggatttatttatgccgggtttcttcgctctcagtgctcattctctgtcaaaacagcaagtccatgacagccaatttgcaaagcgctgtcctatttagaaaaactacgtacacacctttaactcgcccgctgctgctcctgcgaggcccctccctgttacagttcagacccggaacggcctcgggagaagcgcggggcgcacggtctggccgcctcggctctccgactcctcagacaccggccgccagggacccgcagtggggcggccggcgcctggcgcaagcagcccctctagcagcggccgacggttgggaggctgagatttgtctctgatattcaggccggcgtgtttcaaggttacttttcagtcacaaccgaggtgcccacagcatttcgtaactaaaacaaacagggcaggaggtggggagggaggggtgaggagagaagaatccaggaatcaatgatggggcatatggagttgacttcaagagcgtctctgtcctctctgtcttccagagggactgcttaatagaaattagaaactccagcaatcgtatacttttatttccccagcagctcttgggttcaaaaattgtcttctgttctgggttagcctgtgagcccagatttggagtggggggatattgcaggtgtttggatgtggaggctctttcttggttctgaaaacctggctggaccttggggatccagccctgtacccaccccctcagacacagagaatgcataggaactagtgggcatccagcccacctgtccaaaattgggggcgatggtggcagaagacaggcgagatggcagacacggagcttcgcattgaagcttgagtaagggtgaggctggaaggcaagcgaggaggtagcagtaggcacaggggaaccacttccctaaccccaggactctcaggtctgcacggtttgggacacagaaggaagccgccggcagcatcttttgctgctgaaatgcagatggtttggacacttcataaagagggcattaataagcccgccgagtgagcgccagggcgggattctcccacaaattcaaggtctg

SEQ ID NO: 38459 - DNA, 891 bp, Artificial sequence
  DNA replication origin
ttctgttctgggttagcctgtgagcccagatttggagtggggggatattgcaggtgtttggatgtggaggctctttcttggttctgaaaacctggctggaccttggggatccagccctgtacccaccccctcagacacagagaatgcataggaactagtgggcatccagcccacctgtccaaaattgggggcgatggtggcagaagacaggcgagatggcagacacggagcttcgcattgaagcttgagtaagggtgaggctggaaggcaagcgaggaggtagcagtaggcacaggggaaccacttccctaaccccaggactctcaggtctgcacggtttgggacacagaaggaagccgccggcagcatcttttgctgctgaaatgcagatggtttggacacttcataaagagggcattaataagcccgccgagtgagcgccagggcgggattctcccacaaattcaaggtctgtatctccgcggaagccgtgcctatcggtcccccgagtgctgaaggctcccacgaggggcaggccagcccggtgcgccagggaaggagcttgatggtgtgtacggctacgtagtgaacgtggaggtgtgcgcagcggagtcagaggggctagatccccagcatttcccacggggtcccacctagcgcgtggatgggagcaacttcatcactccaccgagggcagggaaagaggagtaagcattggagctcaaagaatgagcaatttttcaaagctttctccgcaggcctgggcagacacacacgcacacacacacacaccgcacccccaaaactcaaaagaatgttatggttgacctagtctgtgcgtgtgctgtatgagagtatttgtgagcttatgtgggtgcccacttccctttc

SEQ ID NO: 38460 - DNA, 1270 bp, Artificial sequence
  DNA replication origin
tttgagtagcagagactggagacagtggttgaggtcaactatggggctgcactggtgctgatcatgcccgtgctcccatcccacacctggataaacagcagtgggcagcttcccccaccccccagtcttagaaaggcctcctccagttgcaacaggactccctcctccccatcgctgtcccagccacccagcggaaagctgagaccccaccccccaggtggccaattttagacccactaaaggcctttctgggctgtactgggggctaaagggggccaccatcccacagagaaggggccaaagacagccaggatcctaaaagtcagagctactttaagaataactttcccaggccaatccccagttcaggaacgttcctgtgccctgtgccagctagagggactagggctggagccggcggctgctcctgggtgtccagtccaggagccagtgaactcactatctctggagtttagcagaagaagggtaattccaggccggaacccctttctttcccgacctctcgaccacagtcctccccaggcacattttagtggccagggatggagacccgcggataatgactgaaccaggtcacagggtgaaggttctgagatgtccggctcccgtagcttctgccagttcccgagggagctagcacaggcttggccttctttggtggcatctctgcctccacctgtccgtctccattccttgtgcccatagcacctcagctgctcggacacagaagttaaaaggtccggcatctgcacttgtccagagtgggttggggagcagagaaaggagtggtgagctgtggggaaaactggacatcctgacagacctgaaattcaccaagccgccagtggaagcctcaggttccgcctctataaaagggactcagccatgtgcaaggatgggtcgtcgcgaggattaaagggcagggtgaggggatgtcaagtgcaaggcaagtggtccaagcttccaggtggtccctgaccagttccgggcacatctttacccaaagggaggactccgggacccccagccccgccgccgcagaccccctgtagcaaagcagggaactggacctcaaagggctgctggggaagacgggatctgaatagaggtctgaaggaaagaagccaggcgggggaccccgggagggccggacggggctgggggtgctgttgacactggagccggactggagacctgggaacctggggcagagtcggcagcggggagggggcgaccgaggtgggaaaac

SEQ ID NO: 38461 - DNA, 1455 bp, Artificial sequence
  DNA replication origin
ctttccctttgggaaagataatttatcctttggttaacacatcaggcaacaaagatacggccttttattgtgttcaacttacatgttaatatctaatgtggctgatgttttactgaaagatgacattctaaaatagggggtggtgatgaagctgcttcctctatccaaaacctgggctggttcccatccctcgctgctctctggtcagcttttcccgcccatggctcctctctcactcaccaccacagtataaattgctgccttaatgagttctcatgttcccacatcaaaggatcagggaaaaaaaattacatcataggagctagatgaagtttttatcatctgctttgttattactgacctggttttatgccttgcaataaaccccatgtcatgtctctccaaaccttttctactcacaggaagactgctcccagctcagggcaactcagggagacacctgtgacagcaagcagatgttattcccaggccgggggtgagtggggagggaagtaagtgccccaggctgttaacataagtctcacttaacaagagctcaggaagagacataaagggcaggtgcctgggggcatcttccttcctcctctctcctgtacaagctgtgctcccaccacaaggcagagcgtctgcagagaggaagggtgctacctccctccaccttcttgagtcctctcccaagcagtggctgtaaggagtcacacacagggaccattcatttctcaccacctcctgcttcccagcccttgaagaacagccagaggttcaggaatgattaatatcctagcccagtttccagaggagtcctacccatatggaagcatccttttgaaagccagagtgcaggggagaggagagcagcagaagagttctgacactctccggcaggtacatgggctgctggaaggaacaggtggtggagcttaggtgagcattcaggagatgcagtcttcggggctgtaggaatggtgcccaccccttgggaggtggccacgcagggtgggtaggggaagggctcctcagaaggtggtggtcctggtgagggggatgcgcttgcggccgggttctggttgcagggcttcctgctggcaggggagtggggggcacatgcaccctgccccacctttgctcttgagagcagtggcatagtagtccaggggctcctcctcagcacctccagcaccttccaggaggcagcagcgcaggcagagaacccgctggaagaatcggcggaagttgtcggagaggaagccatagagaatggggttggcgcagctgttggcatagctaaggataagggacacgtggttgacggtggcatcaaggctggtcacgaagaggttcagcagctgcaccacgtagaaaggcatccagcagagcacaaagacgaccacgaccatcagcaccagcctggtgattttcttctccgagcgcctg

SEQ ID NO: 38462 - DNA, 1032 bp, Artificial sequence
  DNA replication origin
agtggtccagtgacgtcacggaagaggccgaggctcattctcctccctctaatcaccccctcgccagttagccatggaatagaagaaaacagcttggggggtgcggggagggtcttctccagctgtaatgccagctaaggtgctttggtagcaaagctgggggtgaggaggcacaggctcctggacggagccaggctcctggacggaggccgctcagagtctctgcggcgtccgctcggtccgcacgtgctgcagcactacctccttggaaggggccgcgcacttgtactccatcttggccctggcggcgccctgcttcttgcgcaggtggcagaggagcgccaaaagcgccaccaccaggcacaggctcgcgatggagatgcctatgagcaagcccgaatgcacgagccccacggccggaggagtcaaggtggagccgggcgtcgggctgggcgggggctcgccagagccgctgtcgccaccgtccaccttgccggagtcacagtcggtgccaatgtggcgggcaagggccgagtcgggcccgcagatgcactcgaaggtaccggggaggttgtggcacaccccggagcagaagccgccgttttcgcactcgtcgatgtccgtgcagatgaaaccgtcgtccaggatgtagccttcagggcactcacagctagcctgggtgttggggtcgcagtcggctggacaggcagtctggttgcaaaacatctggcacctgtgcggctcgtggggaatgggcgcgaagccctcggcgcagacgcagaggtagctagtttggttcaggggctggcactggtactcgcagttggctctgaagcacgggtccacgggctccacacactcgccgtccaccaggtcgtagttagggtagcagtggcactcgaagccaccctgtgtgttgacacagcgctgcggacacggactgggctccagtatgcagtcatccacgtcctcgcaccggtgttggtcggccgccagccggtagccggtctcgcacatgcacgagtaggagcc

SEQ ID NO: 38463 - DNA, 1153 bp, Artificial sequence
  DNA replication origin
gtcgagccgtgcccacctgctatagctggtgttgttgtctcccgtaacccactggaagccgcgcaggggcccgaggcgcttggggtcgccgcagccgggtggcagctgcaggccgatccagaggcgccggcggccaacgccgccgtcgccgttcagtagcaaggaaatgacatcggcagccaccgaggagcgcactgtcattaggtggccccgcagtccgtcgcagatctgactggcattgaggaaggtcgcggggcccgggtagagcgcgaagcagtcgtgctcgacgcactggctgccacccggctgcggctctgcgggtgcggggaaccccaggccggccagggccagcgcgccaaggaccaggaccccaagcatgttacccaggcgcgccgcgtgcaggcgccggggaaagcgcgggcactgcgacagggccgtgccggagcagaggggcacaggacgccgatggcgacagcctctcctgtccgtcccagcccagacacttcttgccgctgcgcgcagcccctgcgaggcagcctctgacatgcggatcggccagggctcgagtttataagtgcccggccctccctccctggacgttcgggaaaaggaaggaagtgcctggtgggaagggctgatgccgcatactcggattgctgggttctctggccgcccttgcgcccgccctcgcgcatgggatcacctcgccgggatgagtaaaccctgccctggcgcagggaggttctcgggcggggccgacaggggcaggcgccagggaaggccagcacccctgtaacaagacgactgtccccgcccaccactcgggcccccacgcgtgcagccctctttcatctcttggtcctcctttctttcttttcatacatgttacagccacttccaaggaaagcctggattgcaagagctctgggaaccggagacttcagagaagagggctttgaatggggagtgggggaggtggtgcacaggacctgcaagacgctgggaggggtgatcggcaccaagggcactttgggaggacctgcctaggacgtggacttccccgaagacaggatcgcaaggagagacagctggatcctgtccgcggccaaggtgcctggctcaggaaaccagcggagcgcgcttggcctcacag

SEQ ID NO: 38464 - DNA, 1977 bp, Artificial sequence
  DNA replication origin
ttcatacatgttacagccacttccaaggaaagcctggattgcaagagctctgggaaccggagacttcagagaagagggctttgaatggggagtgggggaggtggtgcacaggacctgcaagacgctgggaggggtgatcggcaccaagggcactttgggaggacctgcctaggacgtggacttccccgaagacaggatcgcaaggagagacagctggatcctgtccgcggccaaggtgcctggctcaggaaaccagcggagcgcgcttggcctcacaggacagtgggtgtggctggggtgacggggcagggtggggaagactggcctaacaccagcgccctctgccccatggctggccagggacccgcgagtccctggacacgcactggccaacgccagaccccatctcatcgggtggggaagtcgcggggacactgtcagggcgccgaagtccggacccggctcagaggcggtggcaggtgaattgctgcggcgccgggtaggggcgggcgcgtgggagcgagtcagcctggccagtttcggcccagcttccgaaggatggtgcttcttgcaccccaacagagtggctggcaaccccccaggggagcgcgcaggatcccagctgatcccacccgggtcggctaaggaggtttccatttcgtccagagtccgaattgatacccacgtgcatagaaacgccacttgctcggcaaagggcactgaagagccaccgtcctgtggatgggcagggtggggggggggctggaggaggacatgggaatccgtcactttcgacctcttccggtggttcacttaccgggaatgcggaagagtgggtctccccctcgggtcgcccccataatggtgagaggcaaactgtttaaaaacacccttgcctctctcctctactgtcctcacaacgagcgccagggggcggcgctgtcgagctctaaacaaagccaaggaagttggagaagtttcgggctaaaaagggttaaggtgtaggagcacagagtcctccttctggggttggaagctccgttcccgggcagctcagcgtggattccgctgcgttcacctcttgcctccagggcccagtagatcctgggctttaaacaagaacagagagtatggcgtctgccacgtgcgacagacacgcaccggtggggtgggccgggctggactggactgacctgcagtgaccaaacgggtggggcgtggacactctgaaagtgaaaaaggcaagcacgactgtcccgccgcacactccccagcgccttggggcagagagcctccaaacgtcccgctgagttgagctcttcgctgggaaggccgccccagcacccaggaaacgaaggagctgctggacacgggggtctgaagctcccggaatgcacacagctgcgcctcccctgacgcggaccccctgggaagaggaagggaagagcggcagatagcacagtagggcttgtccggcgggagcagtcaagctgtggctgcctaggctgaatcagggggtcgtgactccggtgcacagcctgcctacgcgggacgcaaaagcagggctgcctgcggtgccgccatgggggtgagggtggagcttcagataagggcaggaacctcgttggggcactgctgaaaggtctcagaatgtggggacaattcccagagtgaatgagacaagagagggggacaggatcggttacagaatcagaaaccagtgcaaagtgaaaatgtggggtccattgttcaattacaaggattcaagactgtgatagcaaagtgttaaacaaggaatgaggccctgggggggtgatgagagggcccttctgaacctgccagccctaaaagccactgagggacattcaaggatcagatctcaccccacaccaggctggctgagttcttggatggattctagctgattcaccaacacaatgtttcactggacgtcctacacaggtccacttgcaccca

SEQ ID NO: 38465 - DNA, 1446 bp, Artificial sequence
  DNA replication origin
gggaaaaactacacgtgccgctgcccccaagggtaccagctggactcgagtcagctggactgtgtggacgtggatgaatgccaggactccccctgtgcccaggagtgtgtcaacacccctgggggcttccgctgcgaatgctgggttggctatgagccgggcggtcctggagagggggcctgtcaggatgtggatgagtgtgctctgggtcgctcgccttgcgcccagggctgcaccaacacagatggctcatttcactgctcctgtgaggagggctacgtcctggccggggaggacgggactcagtgccaggacgtggatgagtgtgtgggcccggggggccccctctgcgacagcttgtgcttcaacacacaagggtccttccactgtggctgcctgccaggctgggtgctggccccaaatggggtctcttgcaccatggggcctgtgtctctgggaccaccatctgggccccccgatgaggaggacaaaggagagaaagaagggagcaccgtgccccgtgctgcaacagccagtcccacaaggggccccgagggcacccccaaggctacacccaccacaagtagaccttcgctgtcatctgacgcccccatcacatctgccccactcaagatgctggcccccagtgggtccccaggcgtctggagggagcccagcatccatcacgccacagctgcctctggcccccaggagcctgcaggtggggactcctccgtggccacacaaaacaacgatggcactgacgggcaaaagctgcttttattctacatcctaggcaccgtggtggccatcctactcctgctggccctggctctggggctactggtctatcgcaagcggagagcgaagagggaggagaagaaggagaagaagccccagaatgcggcagacagttactcctgggttccagagcgagctgagagcagggccatggagaaccagtacaggtaaagggggccctgagtgaccgggggaggggatgggcaggcatgggggcactgactacagtacaaagaggtggcagcaagagcaggcccaggtttcctgtgggcagacacaccctggtccttgcagctgacccctcaacctccccccacgccaggcactcgggcccccttagagcatactgcccatctgcagcacggccgcacgtggggctctctcccaaggtggggacgtgcaggcacagaggcgccatggcttccaacgctgtctgttttgtttcccatagtccgacacctgggacagactgctgaaagtgaggtggccctagagacactagagtcaccagccaccatcctcagagctttgaactccccattccaaaggggcacccacatttttttgaaagactggactggaatcttagcaaacaattgtaagtctcctccttaaaggccccttggaacatgcaggtattttcta

SEQ ID NO: 38466 - DNA, 834 bp, Artificial sequence
  DNA replication origin
gtctcagcagcagtgctctccgctggaagtcggctcctgcttctcgggaggcctgagctcagagatgcaggatacagaaggcttcaaactcctgcctttctgttaagaaaaaggctcttatctcttgaggagtcacaattcagataagaggcatccagcagcaggttccagagctgggaggcccgaggaagtgcagcttcttgctcaggcatgggacgcacaggggcgctgggcaagcatctttttgtggatacacatgcctggtgacagcagtcctgggggtggggcggggcatgcggggggcaggaggggaggaacccaggagccatctgcccgacagaaacaaggcctgccgcacaacatccaggcgcagggggctagttccgagaggaaagtctgctttcttggatttggggcaagtttctcatgtatctacttcttcatctgctgatttctgtggtgaacctcctcatctggcaagataaggggcagcttgagagatggagggggggatggggtgcagggtaggaggaaaccagaagcaggtcctgaaagctgcaagaagtcggtgctctaggaaggtgcttgaggtctaggctgcttgtgctgggagacagagtgaggcaggacagagcccagactgtggctttggtggaatccaaacaaagttagcgggttttggctgggggcggggggtggtggctgagaagagagtgtgccctaaggagttgggagtgtcatgggagtcaattatttaatcagcaaatgtctcctgagggtctctcctgtgccagccctgcaatagctgtgctgtgcagaaggtgagcaaaacca

SEQ ID NO: 38467 - DNA, 689 bp, Artificial sequence
  DNA replication origin
ggttgccttggtggggttcggggaggggactgagctggggtcagggacaatcaagaattcctggagggcagcaaagtaaagaggttaagctgagaggcaaggaggcatcaaaggaagcgaagaggtggggaccaaggggaccccaaggagtcaggactgagggggctgcctgagtgggagaagaaaggagtctgggccacaggattctgaggaatctcactcctgagttgggaccagtgggagccatgagcctgggaagaaaaggggccctgatgcggggccaggcctgggctggagatcagagccagcaggcctcacggagcaggatgtgagcagggggcacaaaacgcagggaaacccaggggctgtgggccactaagggctggggacagcacatcagggcccttggcctggccgaagcacagccaggaggtttaactccaggtggagtgggcagaggttggtactcgggtcacatgggcatggcagttagtacatggacccggagatgcctggactggggcctgggcactggaagttagaatgggggactttggtaatggggattggccagggaggagctggcatcgaggggccacaggagacagaaactaggcaaggcagcttgacctcggcccgctgggaatcaggggtctaggaaaaggaggagtttggcgtgaaggtgagag

SEQ ID NO: 38468 - DNA, 1303 bp, Artificial sequence
  DNA replication origin
cacagactgtgcgaaatccatcatttcctgccacgtaattctccagttagctttgtttctttcgtcttcagaaacacattgcatgggtcttctccacatgcagggctacggggtgtggtgtggtgaggttgtgtgtgagggtatgtgggtgtgggtgtgtatgtgtatgtgcacgtgtgtgtatttgtgtatgtgtgcatgtgcatgtgtgtatataatgtgtgctcatgtgtctgtgtatgtgtttatgtgtatatatgtatgtgtgttcatgtctgtgtgtgtttatgtgtgtgtatgagtttttgtgtgtatgtgcgtgtgtgtgtttagcaacttcatcctctgtgagagttaagattatgaggacacaatctccgtctaccaggagggaaagggggatgaaaggaacatctgtaaagtacaacacaaggcacagtgcccgcagggaggggtgggcaaaagtgctgtgagacctgcagcattgagagggactgttcagtgtggcaggtcagagaatggcaggttctcacggtgtggggagcaggggctggtggccatttgtaggacaaggacgggcacagctgcctctgtggaggcagggaggttccggagcatccagggaagtgtgaggtcttaaaagggaagaggttccatgtgagcagtgctttgaggaacggatctagcatcagtggttggaagaagttgaggctggggaccaggagaccagataggaggctgctacagcccaggaagtcctgggtcaaggagaggaagtggcaggagcgggacaggactctggtcaaggtcaggtgggcacagtgcagccgcaagtgggactgagagagaggggctgtaagaaatgaagtttccttctccagaagcagatgccatgggtttgggttgggacccctggagtctgagatgtggctctgacgcctacagagatgtgtgggaaggggcggggatgtgtgcgaagaggggccctgggagagtgacaggaggggtggaagggaagctgtagagacctttacattgagggaagagagtcaaggaaattcaaggtagttacctctgcttttctccaaaacagcaggatgttatgtgcaggcagaggtttccagaagccagtttggagtgtaaagcgattgaaaaagggcacacccaatggaacacccaatgtatttaaggcttttccagcaagagggagctcctgggagaggttagagaggagcgtttattactgagtggcccagcctgcacagatgcttgattttctctggacacgcaccctgtcttccaa

SEQ ID NO: 38469 - DNA, 1147 bp, Artificial sequence
  DNA replication origin
ttcctatccctgtgaggggctccctggcttttatgtgagcaagctacagcattatgtttggaccagtgcatcagttaagctgctactgcggataaaaatccaggctttgtgcatcacatggagatcccattaaaaacacaatggataagcaatcagctcccttgagactccttgggtgaatttggatttttgtatatttcatcttttgtacattataactcaatgatggtgactgtccttgggctctggttctggtttgaaagcacagagttgggcatacagtgctgtgtgcaccgttcccagaggtctgcaaacttggcatgaaagaggctcctaggttggctggaaacttatctcagccacacacagtttgtggaaggaggcaggctctggcagtccctgcctgctggaatgagtaactgtgaacaagaagttcatagagttctgtggtttggtagatattttcagttggccaagtgtttccacccaagacagcatgagtagagagcagacagtgatgacttcagggccttgtcagtggcacaccctcagcaacagctagttctggctgcggttagtgtcttgagaggagagtgtcggtgggagatagatgcttcatcttgaggcctgtagcatgagcccagagagggatggagggaatctcaaggctgaaatctgaaagtaaattctaggggaatcacaggtaaggctccagatgagaacagcagcaaaggagatgcccagaatcacacctgtggtcttaaagaagggagatgggatgctgccgggaatgtgggatgctgtcggggaggcaggatgctcttgagaatgtgggatgctgttggggaggcaggatgctggtggggaggcaggcaaggcgggatgccattgggaaggcgggatgccgtcggggaggcgggatgccgtcggggagggtggatgccgtcggggaggcgggatgctgtcagggaggcgggatgccattggggaggtgggatgctgtcggggaggtgggatgctgttggggaagcgagatgattttgcagaggcaggatgctgttggggaggcgggatgcttttctcactctggctgtccctgtacaccagggcactgtctctgcccagtgctcctgcagactgccttccc

SEQ ID NO: 38470 - DNA, 1329 bp, Artificial sequence
  DNA replication origin
gggtgaggaaagggaggaaccgcctttcctgccttgacctaccgtgtgtggaggaaaccagagcacatgtgagcccttctgtgtataaagttcatgaggcatccacatggggtaaaccctggaaaatcaaaactggagctgaggggagaaatgggtctggatttataacagggagtcattaggcttatagggttatttgagtttatgggaatgggtgaacgtgtctatagtgagaacttccacgggtaagaaaagagcatttagggcgagagagaagtggagagcaggccagactctgatgggatagccagggccagggaaggggcacagccccagagaagctgtgggtgggtgtgagtccccgaggccagtggaaccctcggcttaccagcaactgggggcagcagaggcagccaggcctaagggtagagccagcccctgtttctacttttttggggtgaaataggagcaaaggtcgtgagcaggggtaggaccaagtatggggggaagatgaggaatgcacagtcctaggcctggagggagagtccggcccagggcaggtgggatgcacccatgtcgtgggggctggtgggctccctgcagggtcttgcaacccaggctggtgcaggagggactgttgcagggtgaggaagtgggggtggggtgggatggtgtctgggtgaagctctggatggatagcaggaggtgtcagagtggatgagctgaaggagaaaggaggtagtggctgcagacaggtgtgaaattagaatttagatgctgtcaaatgtcatgttcacatgtatttctggggtgaagatgatcccaattaatgaattctttctagcagtcactttgttatctctgtgattattcacagtgcgtctttgtgcggaggctgcggctcctgggttgactcgtctgaaatgtcacctctaattgggaagccacatctctcacagatggccaggctgtacgcaactcttggctgctggatctgtggccttgcagagacggctgaagcaggaacacctggcggcgatgactgcagatgggtccacaggaactggtagcagaaacaagagagcagccttaccaggcatgagaagtggggccttccgtgagagagtgagcaggagagacaggcagagcatgagaagctggcgggtggcctgggcagaggtgagggggcaggagaaggagggtgtggagctttgacccactggcatatcatctccatctccacttggattggttgtcctttactgcataacatatgtcctctaaacatgggggcttccaactacagtgatcattttactatctcccaca

SEQ ID NO: 38471 - DNA, 1073 bp, Artificial sequence
  DNA replication origin
cagaacctagaaccctgcatgatctatttataaataaaggaattgcaaagaaggagtgactagcaagtaagaaagggaagactgggtgtagacaggattgtcaagagaaggcctctaagagtaggcttttagccaagtccgtgaagatcgggggaaagatcattgtaggcaaagagaatagctaatgcaaaggccctgtggtagactagatttgggagtgttcaaggagcagaaggaggaccccatggctggtgcacaaggttggtgggaaggcattcctgccacagagtggcataggatgaggctggaggagcctctggagacaggtcacgcctagcctggtgtggcaaggaacagggaggaatgctgttcatacctaatgggagctgtcaaaatagttgcaggtgcagcagtgatgtaatgcatgcacattaaagggcacccccctccccgggctctgtgggaaatgggttggagagctggagtgggaggggagggggacagggcgggtggtggtgggtaggaatggatgggcgcaatctgaagcacttgaagagaggtcgtggtggtcagggaaggtgacaggagtgaaaaacggagcaaaggggccatgggtgagatgcattttggggatttcataatctggcattgctgttggggtgaggaaagggaggaaccgcctttcctgccttgacctaccgtgtgtggaggaaaccagagcacatgtgagcccttctgtgtataaagttcatgaggcatccacatggggtaaaccctggaaaatcaaaactggagctgaggggagaaatgggtctggatttataacagggagtcattaggcttatagggttatttgagtttatgggaatgggtgaacgtgtctatagtgagaacttccacgggtaagaaaagagcatttagggcgagagagaagtggagagcaggccagactctgatgggatagccagggccagggaaggggcacagccccagagaagctgtgggtgggtgtgagtccccgaggccagtggaaccctcggcttaccagcaactgggggcagcagaggcagcca

SEQ ID NO: 38472 - DNA, 1044 bp, Artificial sequence
  DNA replication origin
cggctctggggccccggtgacccagagtaagcctccaagaaggaggaggaggagagaaaggcggctcttcccgtgcccctaccagaggcttcggtgggcccaccttgtgacctccgcggccggcccctcagtggaactgcgtcccacgcggggggcgtcccgaccgtgggggccgcggcccgcgctgaccctggacgtcgccgcgcaggtacgttgccgtcccccggcggtctgacccccgagacagcccctagtgcataccccacgccctcctccattgtcgagaatgagacacggctgtgcctttgtccacgtggtagagttgccgccgcggtgaggctctcgcctgtgcaaaaagcgtggcagcgaattctcatcaacgaggggaggcgcgtcccctcacagcgcagctctcgggtctgaggagggccgggcagggcgtgcgtctgtctaggtttgaattaaaggcgactcacaggaaataaggccatgccactgtggtagcttttcccgtccatctccggacactcgacggtgtgggtcgtgcgaggaggcggcagtcttcacagcctcttactctagtcctcacggtcaggttctttttctgatttgacacagacagcgggactgacgacctcataggtagctgaaaaccgtaagtggagatggtccttctatggtgtgtgggggcgtggccagttgttagattgtgtttggaaagacagccaggggcggagaagaggggcatttctgagatgatggggggactggtgccatggagggaggaggagtgaggtggagatcgggaattccagccaaagagaaatggggtccctgggagaaaattcccactctagcagtcctggagttgtgctcatggagacttgcttacgcgagtacaaggacagcgttgtattgacaaaatttcagccctcagtctagtcttgtaaacgatagatcaggagtgtacttaaccgtcgttactttgatccagccctaggtttcccttttctcatttgtaaaattgttatagtaatacctttt

SEQ ID NO: 38473 - DNA, 953 bp, Artificial sequence
  DNA replication origin
gacgcaatccggcgtcgccagtcagtcgcgcggccagatcaggtaactgcccgaaccgctccgccgcccgacgtgtggctcagccccttcctcagccccgccaggggcggggccggccgcgggaggggaggggcctgcagcgaccaatcggcggtgcccgcgcagggtgctacgccacgcccagccgggccggccgttcctaccggcctggtccagcggacagcggctgcagcgggggcgccggctgggaggtgagtgcgcggcccgtaggcctggctccggcccctcgccgcccgccgccgcctctttgtccgcgcgccccggctgctctgtggacctgcgcgtctcggggatgcgggagcgggggcagggggcggcccgagggcctgatccacgcggccccggatgcccgcgtcgggaggcggcgcgtcgggccgaggaggggcttctctgtggctgcagtagtttgttctctgggtcgtctttggagtggccgagcggcgtccgggcgctggggcggccaagtggcgcgggaagggtgggaggtgccgtgagggcggcgaggacagcggcggatttaagccccactggaaaccccggcccttgtggccgtggactgggctgcgggtagcagcgtctcctggaagggctctggccccgtgagcctcggggattcaggggccgccgacgttggtgcagatgccgggcgcactgggaggcggccggaatgccaatgagattcggcggatacgcagctgtcaccggccgcagactgccctgtcgccacctccagtgcctgcactccagtagccaagcaacataggaaatcgcgctcagaacccactttgttgattgagaaatcaggtctcctcgagggccctgttggcagaggtctggggaagtcagggcatcaggctgagagagccctctgcagtcttgtttccccaggctgg

SEQ ID NO: 38474 - DNA, 1068 bp, Artificial sequence
  DNA replication origin
tgcgggtagcagcgtctcctggaagggctctggccccgtgagcctcggggattcaggggccgccgacgttggtgcagatgccgggcgcactgggaggcggccggaatgccaatgagattcggcggatacgcagctgtcaccggccgcagactgccctgtcgccacctccagtgcctgcactccagtagccaagcaacataggaaatcgcgctcagaacccactttgttgattgagaaatcaggtctcctcgagggccctgttggcagaggtctggggaagtcagggcatcaggctgagagagccctctgcagtcttgtttccccaggctggggctgggaccactgaaaccccagtggctctataagagccccactcttatagatcccttccttaggctttgtcagtgttctcacagttttactggggcgtctccttcaggcgacattgatcaagcctcataggtacctgtttacagcggaactcccagagggcagtcttttccatgtttgagggactgctagttgtggggagcggtctcattgatgagactggagaaggggagaggggtgggactagtttatcagggaagatgatgacaactttttttctagacacgttgaatccgaggtgacatctgtggtctggccgaaggaggctagaaggaaggcatgtgctttggatggatggaaacaggaatcaaagaggaaggtagattcaggagctgaagggcagggagaaaacacattcagggagtttgtggcaaagcagcagaaatgacgatggggtgacggtatctggaggccttaggtggggttggtgaaatttgcatgcccgctgcagtggaaagatttaggggctaaagatagccctttgcctttggcaaggctgaggggaagagtgtgttgagtagtctgagttgaatccgggcaccaggccctggctcatgtcccaaccagccattgactgttaccttgataggtcctcatctatgaaatggggatcactgtagcaccttggcctatgtgtgggaaaccaataaactagccaacaagtttcaggctcatgga

SEQ ID NO: 38475 - DNA, 1132 bp, Artificial sequence
  DNA replication origin
aacagcagcagcgttaccgttaatcaaacaggaggctctggctatcaatcaatctccggagaaggaaaaatactatgctgagaaaatatattcgttcattagtcaagtatttactaaaggtgtactcggcgcaaggcccctggagagaggccaacaagcacaccagctctggatccctcgccggaccgccccctccccggcggggcccacctgcaggcgggacgcccccaggtgcgcgttccaggcgccgggggcggcccccgcacccacccctccggctccaccccggcgcgcctcacccggaccggtctcaggagcgatacgggcttcagcgtggcgaaatgcaccaatacgactcgctacgcactgagaagggggccccacgcgcgccccgagctaccgcgcccgcgggcctcagggagccgctgaccttctaggtcgtgggacccccgcaccaacccgggccagggcgaggggggcgatctggggtctccagagggcgcgtgaggctgacagccccccccccagagtgttctaggggcttcgtggggcgcttggggagctctgggggtcctaggggttctctgaaaggcgcgtgggggctgagggtccctgtgagactctggggattctaagggggcgtgttaggggatccggagagcgtgtgggggctgaggaaccctggggagttctgccggccctagggggtctctaaagtgcgcgtgggggctgagagcccctgggaggatgcggggtttccagggaccctgggggggcctgtggggtctctggagggcgcgtgcggactgagggcccctgggcgtcctgggggctccagggggcgctgggggaccctacaggatttctggagggcgcctgcaggctgagggcccctagacgtggtctgagggccccagaggttgcgtgggggactcggggggtcagcctgaaaggaagggggccaagtacggagaccccccccccccagggcacgcacggtctggcgctcacccaaacagccctcggaggaaggagtgggaggccttgactcgcttctcggcctccgccatcagctgtactgcctcacgctccttccccgcgttgtccatgtcgcccgccgcggccgccacag

SEQ ID NO: 38476 - DNA, 861 bp, Artificial sequence
  DNA replication origin
ctgcaggctgagggcccctagacgtggtctgagggccccagaggttgcgtgggggactcggggggtcagcctgaaaggaagggggccaagtacggagaccccccccccccagggcacgcacggtctggcgctcacccaaacagccctcggaggaaggagtgggaggccttgactcgcttctcggcctccgccatcagctgtactgcctcacgctccttccccgcgttgtccatgtcgcccgccgcggccgccacagccccctcagccggctcgctgtgcgcccaggcgccttaaccctccctctggcggccgcagggacgcaggcgcaggcgcgacgcgcgaggcctttcgggagctgtagtccgggtcctgtcatggcggcggggattcgcgagccgcctactacagttcccaggaggccccggggcggggtgtgtgtgagccgagcttgcgcaccgctagctcccaggacgtcggcgcagggggcgtgacccccccaaaggggtcctgggccaaggtgaactttaattttgtatgtatgcagaaatggaaaaatgatccgtggcctctagtaaagatcacctcctcagtaagactcgcatggcaatgggatggatgaaggaacaggggataacagattggatggaacccacacccttcatgcaagttctgcaaaagagaatctggtgtagccaccaaagcatcacatgcttgataccgcccaccaaaaaacgagcaacagctggcaataagagccatttttatctccaagagcaagacgtccccaatataagttcagttatttttaaatctccccaaactgtaactttctgttggtcctctcttccttggttataaatg

SEQ ID NO: 38477 - DNA, 1609 bp, Artificial sequence
  DNA replication origin
ctgtgcagtgccacagccaccagccacatgtggccacagggtgcttgaaatggggccagtacaattgacacccacatacacagggaatttcaaagactcagtacacacacccaaaataaaataacctatgttattaatgattcttcttatgtgttgaaataatattttggatatattaggttaagtaagaaatattataaacattaccttcacctgtttcttttttactttttgaaatgtgtctcccagaaagttttaaattgctcctgggttcgtgtcacatttctgtctggcagcagccctgcaatgtagtgtccatggctcggtcacccaggctccgtctctagctcctagactacctggtgcagggggaagctggtgaaaagtctgtttactgaataatgagttgtgaaaggagaacccagagttttttactcaaataaaggttaattcttctgtttgaaaagttccctagcacagggcatggcctgagtctcctgtggcctctggaatcacacctctgccttagtgatttctagaccttgaccaaatgctcacggatactcaggacctctgaagactccggaaggccgagacctctatctttcccttttctgaggaaatgaagctagggggtcgtatgcttttagggcccagggggccttgacacctctctggagggcagggtgacctaagcttgggaggagggacaggtctttgggaagagatggagctgagggggtggagtgggtagaaggggggcataggtgtggaaggggtgggggaagaggggccaggagtggggtgagaagaggggaaagaagaggataggagggacagggacagggagaggccaggaatgggtaggaagggaagacagaggaggggcgggacgagggaggggcgatgaagaggggccgagctggggtgggggcgaagtgggagcaaggacaggagtggaggagggagatgaggggcatgggaggcggtgtctgggggttgaaaggggaaagggacagaggagaaggagcctgaagagtggcggcatggaggggcccgaagtggggaggtgggaatggtcggatggatggggaggaatggggaggataggagaggcaggggaggctggaagacagtaggagaggagggggaggggaggggaggggatggatgggaatggatagggaaggccagggagactggggggccaggggaggaggggagggagaggggaggcgggaagggagaggagaggccgggaggggctgggaggggagggaaggggatggatggggaaggacagggaagcctggaggggcaggggaggctgggatgggaggagactgatagggagggacctggaggcggggagaggcaggggaggcggggagaggcaggggaggcggggagggagaagggaggtgggagggacgaggcgttccggaaaagggagtgcaggccgcggtggggtggggcggcgaaggccggaagggataaaaccgcagtcgccggcctcgcggggctcacggcctcgcctcggtatcgcagcgggtcctctctatctagctccagcctctcgcctgcgccccactccccgcgtcccgcgtcc

SEQ ID NO: 38478 - DNA, 1096 bp, Artificial sequence
  DNA replication origin
aggttgataaagggcagaacacaatgtccaatgcagagtaactgctgacacctggcagtgacagtgaaaatgatgatggtgatgatgacggtattgtggagatggagatggtgatcgtggtgaagatgctaatgatgatgctatagcagcagtggtgattgtggtgatgatgatagtaatggtggtgatagtgacggtgatgatggggattgtagtggtcacgttgctgataatggtcatagcgtgatgatggtagtgatgatggtggtgataatgttggtgatggtggtggtagtggttatgatgtggcaaaagtgagaatggtgacagcagtggcagtaatggtgatggcggtgatgataatggagaaggtgatgctgacgataatgatgatggcggtgaaagcggtggtgattatggtgatgatgatggtaatgaagatagtgatgtggtgatgatggtggttatggtggtcatgttgatactggtaatggtagtcatgatgatgatggtgttacggatgaggattaccatggtgattgtggtggtgatggtgatggcaatggtggtggtgatggtagtgatggtggtgatggtaatggtggtggttgtggtgatagtggtgatggtgatgttagtagtaatagtgatggcaatggcaatagtgttgataatgatggtgatggtggtgatggtaatggtggttgacagtgatggtactagtggtgatgggggtgttgatgataatggggataatggtgcttatgttgctgagtatgttaatggtgaggttggtggagatagtgatggtgacactagtgatgatgtttacaacagtggtgataacagtgatgctgatgggacagtggtgattgtggtgatgataatgatgattgcttggatggagatggtggtgatattatgttttatgggagaggatgaagctatttggagcggaatgtaagcaccaggcctgagcaggtaccagtaagagagttccactgtctagagatttatcagatcgggactaaggtgaatcttctccctagacacctcatcgtggatggaaaactgtgtctgtcacaaatggatcacg

SEQ ID NO: 38479 - DNA, 1376 bp, Artificial sequence
  DNA replication origin
aagcatgttatatttgaagaggcaaagatctagggtgggtggggagctacaggtgcactttccagaagggcaaattcatataagcttggacaggatgtgtctgagaacatcaaggaagtccagcttctctaaaggccaagctatgtgatgggcaaaggctggagggcagccacagagggcaagtttccagggcctcatgtggcaggggatgtggctttcagaacatttgagaaccagagaaacagaatctaagggtggagactagtggaccagtgaggagttcactgtggatgtccagaccagacctatctagacagcatccagcaatgtgggagatgagaaataaaataagtcttcttttttattgatgtcaaaatagttctgagaatagaaggcagttataatgttacaaagccaattaccaccttctttttctgtataaaatatagaatcagagtgactgtataatcacatgaggttgataaagggcagaaaacagtgcccaatgcagagtaactgcttacacccagcagtgacgatgataatgatgatggtgatgatgatggtattgtggaggtggagatggtgatggtggtgaagatgctaatgatgatgctatagcagcagtggtgattctggtgatgatagtaatggtggtgatagtgacagtgatgatggggattgcagtggtcatgttggtaataatggtcatagcgtggtgatggtagtgatgatggtggtgataatattggtgatggtggtggtagtggttatgatgtggcaaaagtgctgatggtgatggtggtggcagtaatggtgatggtggtgataagggagaagatggtggtgatgataatgatgatggtggtgagagtggcggtgattatggtgatgatgatggtaatgaagatagtgatgtggtgatgatggtggttatggtggtcatgttgatactggtaatggtagttatgaagatgatggtgttactgatgaggattaccatggtgactgtggtggtgatggtgatggcaatggtggtggtgatggtagtgatgatggtaatggtggtggttgtggtgatggtggtgatggtgatgttagtagtaataattatggcaatggcaatggtgttgataatgatggtgatggcggtgatggtgatggtggttgatagtgatggtaatagtggtgatggggtgttgatgataatggggataaatgtgctgatggtactgagattgatggtgatgttggtggagataatgatggtgacactagtgatgatggttacaacagtggtgataacggtgatggtgatgggacagtggtgattgtcgtgatgataatggtgatggcttggatggagatggtggtga

SEQ ID NO: 38480 - DNA, 985 bp, Artificial sequence
  DNA replication origin
ctttcattgattgcagatagttctgagaagaaaaagcaggttctcacactcttctatcatgtttcaaagccaattaccaccttatttttttctataaaatacagaatcagcatgactatgtaatcacatgaggtttataaagggtgtggcacaatgtccaatgcagaacagctgctgacagacacctggcagtggtgctgaagatgatgatggtgatgagaatgatatgctggggatgaaaatggtgatggtggtggtggttttgaagatgatgatgatggtatggtggtaatgctggtaatggtaatgatggtgatggtgttgatgatgatagtggtgctcatgatgtgtataatgatgatgagtatactgatggtgatggtggtaatggagatggtgatgttgatgacagcagtaatgctggtattgttaatggtgatggtgattgtgataatagtgatgatgttggtggtggtggtggtggttataatggtggtgatgatggtagctcttgtagtaatagtagtggtgatggtaatagtggtgaagttggtaatagtgatggtagtaatagtggtggtggtgatggtgatgatggcagagatggtggtattgataatgatggtggtggtgatgatagtgatgatgttgataatagtgttggtggtaatgatggtagtgatggtgggtattatggtggtactggtgttgatggtgatggtcttggtggtggcagtaatggtgacggtgatgataatagtgatggtgatggtagtgatgattatgatgatggtggtgatgatggtgatgaccatgatgttgaggttatggtgatggtgatgatgatggtgatggtgatgatgctggtgatgatgatagtgatcatgggagtggtattgatggtgatagtgttaaagataatggtgatggtggtagtgatgattgtggggatggtggtggtgatgctggtgatagtgatggtggt

SEQ ID NO: 38481 - DNA, 1229 bp, Artificial sequence
  DNA replication origin
tggggagctacaggtgccctttccagaagggcaaattcatataagcttggacaggatgtgtctgagcacatcaaggaagtccagcttctctaaaggccaagctatgtgatggggaaaagctggaaggcagccacagagggcaagtttccaggacctcatgtggcaggggatatggctttcagaacatttgaggaccagagaaatggaatctaagggtggagaccagtggactagtgaggacttcactgtggatgtccagaccagacctatctagacagcatccagcaatgtgggagatgaaaaataaaataagtcttcttttttattgatttcaaactagttctgagactagaaggcagttataatgttacaaagccaattaccaccttctttttctgtataaaatatagaatcagagtgactgtataatcacaagaggttgataaagggcataacacaatatccaatgcagagtaactgctgacacctggcagtgacagtgaaaatgatgatggtgatgatgacagtattgtggagatggagatggtgatggtggtgaagatgctgatgatgatgctatagcagcagtggtgattctggtgatgatgatagtaatggtggtgatagtgatggtgatgatggggattgtagtggtcatgttggtgataatggtcatagcatggtgatggtagtgatgatggtggtgataatgttggtgatggtggtgatagtggttatgatgtggcaaaagtggggatggtgatggtggtggcagtaatggtgctggcggtgatgataacggagatgatggtgctgatgatagtgatgatggtggtgagagtggcggtgattatggtgatgatggtaatgaagacagtgatgtggtgatgatggtggttatggtggtcatgttgatattggtaatggtagtcatgatgatgatggtgttactgatgaggattaccatggtgattgtggtggtaatggtgatggcaatggtgttggtgatggtagtgatgatgatggtgatggtaatggtggtggttgtggtgatagtggtgatggtgatgttagtagtaatactgatggcaatggcaatggtgttgataatgatggtgatggtggttgatagtgatagtaatagtggtgatggggtgttgatgataatggggataaatgtgctgatggtactgagagtgatgatggtgatgttggagataataatggtg

SEQ ID NO: 38482 - DNA, 1344 bp, Artificial sequence
  DNA replication origin
aggcaggaccagttaatacaggatcttatgtcagaaacttaacttctttaagcttcatatgctcattatatcatacgtctgggaatattttctgtcatgggttatagtgagaaatgtaaaaatacatatatatatacatatacacctgtggaaacacctacaacaatatctggcaccaagaaaaaagagctcagtgaatgttatacactctagttcccttcccaaagcattaaaaaacaacaacaacaacaacaacaaaaacgggcagaatgaaggaaagggttaaagagcaaacttcagattttgaaggtcaacttgggccctgggtttggtagtaagccaaaatcactatcttagttaagatagaagtgatatgggttgtgtgtttgtgtgtgtgtgcaagcataggcatgtgtgtgtaatctcctgtgtgtgtgtatgtgtgcgtgcgtgtgtatgtgtaatctcctgtgtgtgtgtgcgtgcgtgtgtatgcaatctcccgtgcgtgcgtgcgtgtgtgtaatcgcctgtgtgtgtgcatatgtgtgtgtgtaatctcgtgtgtgtgtgcatgtgtgtgtgtaatctcctgtgtgtgtgtgcgcgtgcgtgtgtgtgtaatctcccatgtgtgtgcacgcacgtgtgtgtaatctcctgtgtgtgtgcccgtgcgtgtgtgtaatctcccgtgtgtgcgtgcgtgtgtgtgcaatcgcctgtgtgtgtgcatgcgtgtgtgtgtaatctcgtgtgtgtgcgtgcttgcgtgtgtaatctcctgtgtgtgcgtgtaatttcctgtgtgtgtaatctcctgtgtgtgtgtgcgtgcatgtgtgtaatttcctgtgtgtgtgtatgtgtgtgcgcgtgtgtatgtgtaatctcctgtgtgtgtgtgtgcgcgcaagtgtgtgtaatctcctgtgtgtgcccgtgcgtgtgtgtaatctcccgtgtgtgcatgcgtgtgtgtgtgtaatctcgtgtgtgtgcgtgcgtgcgtgtaatctcctgtgtgcgtgcgtgtgtgtttgtgtgtgtaatctcctgtgtgtgcgtgtaatttcctgtgtgtgtaatctcctgtgtgtgtgtgcgtgcatgtgtgtaatctcctgtgtgtgtgtgcgcgtgcatgtgtgtgtgtaatctcctgtgtgtgtgtatgtaatctcctgtgtgtgtgtgcgtgcgtgcgtgtgtgtaatctcctgtgtgtgtgtggtgtgtgtgtgcgcgtgcgtgtgtgtgtgtgtaatctaaggcaaggcttgcgcctgggtaatttatttgggaactggaccctagagggcagaagtacaggacaaggagctg

SEQ ID NO: 38483 - DNA, 2023 bp, Artificial sequence
  DNA replication origin
tttttctaataacagggcctcccttttgggaacaagacacattctgcatctcttcctttgttctagggcgttctgtaaaggcgtttgtgtaacagctctgtgtgggtatggatatctaaaccttcaggctgtgcgtttcctaatttctttgttcctgggtattcatttcatcacattgttactctttttactgagatttcctttttcctgatcattgctggtgaatagaagaacgaccgattcttacagactgagttgttatcaagtgccctgttccattcccttattagttctagtacttggttggttaattctactggagtttttaagtagataaatatttggagttacaatttccgaaacacaaattaaggttgttaatcatttcctttccattaaacagttttttcctaaggctctttcacagtgagttggaaaagcaaagttaaacaatttttttgaaggcctgtggatttactccgttcccaatttattaaaaaaatgaaagaagaaagggtgcggagtttggctggcaggctgggaaggggactttggactgggaggatgtagtttgtctggaaggctgtgggggcagtttggtctggaaggttgtaggtggagttttggctggaaggctgttggggagttttagctggcaggctgggaagggactttggactagaaggctgtgggggagtttgggctagaaggctgtggggggattctggctggaaggctgtggggggagtttgcctggtagcctatagggggagtttggtctagatggttgttgaggggagtctgggaggctgtgggggagtttgatctgggaggctaggggggcagttctcctgggaggctgtcgggggagtttgggctggaaggctgtggggggagttttgtctgggaggctgtgggggtagtttggtctggaaagctgtgggggagttttggctggaaggctgtggggggagtttttgctggaaggctgtgggagcagttatgtttgggaggctattggggggagtttgtctggaaggctgtgtggggaggctgtctggaagtttgtgggggagtttgtctggatggctgttgggggagttcggtctggaaggctgtgaggggagttttgtctgggaggctgtagggggtggtttggaaggctgtggggggagtttgtcaggaaagctgtggggggagtttgtctggaaggctgtggggggagtgtgtctggaaggctgtggagggaatttgggaggctgtggggggagtttttctgggaggctgtcggcggggaggagtttgtctggaaggctgtgtggggagtttgtctggaaggctgcggagggaatttgggactctgtagggggagtttgtctggaaggctgtggggggactttgggctggaaggctgtcgggggactttgggctggaaggttgtgggggaattctgtctgggaggctgttgggagagtttgtctgggaggctgtgggggtagtttgggctgtggtgggagtttggaaggctgttgggggagtttgtctggaaggctgtggggggaatttgggctggaaggctgtgggagagtgtctggaaggctgttgggggagtttgggctgggagcctgtgggggtgtttgggctggaaggctgtggggggaatttgggttggaaggctgtgggagagtttgtctggaaggctgttgggagaatttgggctggaaggctgtgggggaatttgggctggaaggctgtggggaatttgggctggaaggctgttgggggagtttgtctggaaggctgttgggggaatttgggcttggaaggctgtggggggagtttgtctggaaggctgttgggggaatttgggctggaaggctgtgggggaatttgggctggaaggctatggggtgagtttgtctggaaggctgtgtgggagtttgtctggaaggctgtgggggagtttgtctggaaggctgtctgggagtttgtctggaaggctgtggggggagtttgggctgga

SEQ ID NO: 38484 - DNA, 1843 bp, Artificial sequence
  DNA replication origin
cacagagtccctcttcttggaacgtaaggctcaactcaagagtcttctcaccaacacctcatttaagaccctccctttgctgtgccctttaatcctaaactctgttgtcagactctgccagttccaatcaattcctcacttttcaagacttgccttaacaatcactgagctcaggccctgaaaccaatgcatagggtcccctgactttgcccttctgagaactactaataccatcaaggtggaggtttttctttttgcagtaggtctttttctggggtcctttcaaggagtggagtggacagtatccggacgacgacaacttttctccaggctgtaacctacattccagttgattcccagccttggaagcacatttgattcacattagtagttttaacaaatcctgatacccaggctcttccccagaacaattaagtcagaaattcaaggttttgtgggtggggggtggggtggtggtgggccttggcatttgtatttgtaaagctcatttgtgaatcttatgtgcctccaaggttgagaaccacagatggagaaggtggacattcgtcactcaattatgtaatcactcacttttaacaaatgttttttgactgccttatccatggcaggcacttcttggcactggaagtaaaatatgtacaagactggctggtccctgtactcaaggaacttatgttccactgggggaagaaagaaaggaatcccaagatgacgccaagtgttgtgagaccataaagtcagggagatgtgcaggtgcagttcctggggatgtcggggagtgtcccactgcatgggggacctgccacctgaaaccccaggatgggaaggagtagctgtgggagcatccaggagagaacacaccaggtagaaggaagggcaggagttcagaccctaagtccgagtggcctgggattatttgaagaacagaaagcaggtcagtgcagccagaccgcattgggactagaagagagtggcctcaaaccaagctggagagtgagtgctggcggctgatgctgagctttgcaggccgtggtcagcgtttgaatgctcctgtgagcacacagggagccttggctggggtgtgggctcagggaaggccctcaacaggcagggcaggctgatctgacctatccaacaataccaccctgggctgggctgctgctgagagaatggcctgcagggagcagggcaggacctaggcaagcggtccagagatgactacacagtccaagagtgaggtgatggtaatggactgagggtggggagaacaggacatatctggcacgggtcagaggcagagccaggagaactttctggtgggtgaaggagggctggagggaaagggggccaccaagagtggctccacggtgtgtggcagaagctgcccggtgccacctgtggctctggccatcagccctggggcagagggaactgtggcatggcgggcagagatcaatggaggtggagcaggagttccagtggctgttccatggcagaagaatgaggcaggggttggagccagagattgggatctgggagatctgggagtctttggcatttggacccattgacagatgtacagcttgatgacattgcttggtttaggagtaaagagagaacagaaaacggcctggccaggtgctgcaacacagccacatgttccttgggagacagtgaagtagagatcctcaaaggagacggaaagccaatggccatagagcaggatatggagggggtgccgtcctaacaaccaggggccagacatgtaggacacctgaacaccttaaggcagagaggaggccctgcactacagggatacagc

SEQ ID NO: 38485 - DNA, 1775 bp, Artificial sequence
  DNA replication origin
ccccgcccactgcgggcccctccgcccgcccccgcggccgggaggtctggacttacctccgggacaaggtgacccggcaagtgcgcccaagcggccgcccgcgactctcccgagcgagcgagcgtgcggggcggtgcggcgcccgcctctgctcctccgctgccaggctctctcctcctctgccctcccctcagcgccgctctgctccccacgcctctccccgccctgcgctctccgcctgcgcccccggctgccccgagcgccgggcgcggggcagcggcggcagcccgagcggcggggagtcgggagctgcggcgccggggcggagcccaaccctctcggcccccgggagaggaaggggtgcggggagactctcgtcgcgctcgcctggccggcaggctgggcgaggggcgccctggggcgagccgctcctcttcgcttgccgagcctgccgacgcgcgtgctggaggcagcgggcgcgggccccgggggaggagggcagggaagagaaggagggcgcagcccgcgcgaaggtggccaccaactttggcccagaccagggaggccctagcgggggatcgcgtccagatggtggcccgcggccagtgtctgacaatgtgagggccacagaggctgggggcgggggatagctgcgggggactaggaggacaggaatttgctgcccgactagaggaagggatggctcccctcggtcctaaaggcctccccaggctgcggttcggttttgaggttaaaaatgacccaatttatggatccggcgaatgttcaagtcctgaccagctaagccctggaggagcaagcgggcgcggagttcagactccagagaccccctcagccctgagccagcctgttgttggcccatggcgggcccgccccagttggaattggaaggaaactagggcggtggtaagacagtctgcgttctaggagcggaggaggtggtgtttgcagtgtagatttcatagagaatcaactctgaaaaaaagatttaccagaaagggggtcaaaagttatttagaaaagcatctgtgcgcccccgtttcaacactaggcagaggccccagtcctgccacccgcaggctggtacactggtggtcagagaaggttaagctccagagttccatggctcccaaccttcctagagccctccctcctgcctggtaacccaccattgcgctgcgtcttgcccaggtgtcctggtgggcaggggcaggagttaaaggtggtgccaggaacaagaggtccttcctatattcctttcaggggacgtggcttctagggagcctccgcagcccaaagagaatgctgaaatgcagagtgccagaaggaggcatttgaaggaggcgcggatgagtggaaccagtactatcacctgaattccatccccgtcttcatgtctgcagccccgcgagacacacctgatgtttcttcctttaggtccccagagctgcaaggctgtggtctggaacactcagaaacgggcactgttcatttctcccatctagcagaacttctcaacttggaagaacatgccaccacactttaataaagcagcttacctttccggagtcctttcctgaataaagcagtttcccatctaagccattaggttgagcagatactattagacccatttgaggtggagagtcattgatcccatttatcaaatgaagaaattgaagtttaaaaagggtaattgagattgtgtagccacccaatgtgcaggagtagcctgaagctcgggttccctgcct

SEQ ID NO: 38486 - DNA, 950 bp, Artificial sequence
  DNA replication origin
gagcacatacgcttttttggttccaatttgaatctcgctttttcctagtcgtgatttctgcctcttcatgtgcactctctgggcagtgaggaggaaggaatggctcactggatgagttgggcacttttcttagggaaggggctttgtccctatgcgctttttgcaagaccctactagagtggctctggcagccgagctttgaggaggcggccagaggggccgcttggcgtttctgaaagacgagaggaaggggtcttctggtagtcctgttttcctttgggggtttcgttgcacgcagaggcttgggcgcttggcacccagacttcaggtgcgcacagtcctcctgcgacgtcagatgcgctggcgccgcggcgctcctggctcggaccgatgcctgcgccttccctggccacgtcctggtgtttagtgcagcagacaccggccgaaggcttggctgattgggggtgtcgaggggaggggggctgggcgttacacagtggctccgttttctggttggaatcagttggtgaggcgtgcgcgcgcgagtccgtgtatctgtccgtctccctcctacagcccagcgtgtttggtctgagtccaaagaaggaggtggtgtgtgtgctgcgtagacctgcgcctgtggggtgagcagcctcatagcccccagagccggccaacttctccgtgctaggctgcgacctcaagggctgccgcgtcggggatcggaagtggtcttcaaagaggggtctaggtcgcgaaatcctggcagcagccgaagtgaaaaggagctgctaggaggcgggcggggggcagtctgatgtccgttctggcgcggacaggaagaaactgaagtcgaatttttagttgaattgcgtgctctgtgtttggcggtggtgtggcccgttcttttggaggtccacaccacaggtatgaggcctgtgggccctgag

SEQ ID NO: 38487 - DNA, 1610 bp, Artificial sequence
  DNA replication origin
ctgtgcagccagccgcagggctgcagtgagacctgaggctccctggtacggcatattttcatgggatcagtccaacaataaggacgtcccaggtggcctctcgtggaacttgggctcactgtttactcgccccccaacaagcctgcagggcagggacctgaagtgccactccaccaacagggcaagcaacttgctcaggctacagtgccagctcctggcctcgcccctcctgctgggcacaggtcaaggagtcgctgcctctgctgtggtggctgcttcatgtgtctggggctgcgaagcctctgtccacggagccaggcttgtgagatttctcttctctttattctgcacattggcccccatatggtctccaaacagtaaggagatatgaaaattgccatcattatggctaagggggaaaaaaagtggaacagcccacagggatgcataattcacgggggagttgtgaggccccagcctgtccaggtggagatgctcacttcccagcctcaggtgctggagtctggaatctgcaaaaaggacgtgcggtgggaaggacaagcagtggggagggtgtgccacttggaggatatgcaggggggaggatgtgcaggggtgaggacatgcagggggaagcacgtgcagggggaaggatgtgaaggggtgaggatgtgcagggtaaaggatgtgcagcggggaggacatgcagaagggaggacatatggggggaggccatgcaaggggaaggccatgcaggggggaggccgtgccgtggggacagcatgagaggggagggcgtgcaatggggaggacgtcaaggggggagaccgtgcagtgggaagtatgtgaaggggggaaggatgtgcagtggggaggatataaagtggggaggaagtgcagggggcaggatgtgcagcggggaggacttgcaatcgggagggagtgcagtggggagggagtgcagcagggaggacgtgaagggggaggacgtacatgggggaggacatgctgtgggaaggccatgcaggggggaggacatgaaggagggaggccatgcagcggagaggatgtgcggggggaggacatgcagggggtgggacatgcaatatggagactgtgcagaggggaggatgtgcagtggggaggacgtgcagcagggaggatgtgcaggtgggaggacgtacagtgcagaggatgtgaagggaggaggctgtgcagttggaaggacttgcaggggtgaggacctgcagtagggaggatgtgcaggggtgaggacgtgcagtggggaggaagtccagttgggaggacatgcagcggggaggatgtgcaacatggagcacatgcaacatggaggaaatgcagtggggaggatgtgcagtatgaatggcatgtaacatggaggctgtgcagtgtggaaggcttgccccatggaatctgggtatctgccccgctgcacctcatcacacacggccctgtcgactccactctccatccctcactgaaaacatgtggcttcgggggtgtcagagagctggttttggaactgctgagcttcagaaggggctatctctgcaggagatgctcgggaggtccaatctctgacaaaccaa

SEQ ID NO: 38488 - DNA, 1221 bp, Artificial sequence
  DNA replication origin
aaatcccgcttgtcagagctaacgtgctcgtcgcctgcctctcttccttgcaatgtcagctttacttttctccgttttactcactggctattagctgcggatggacatggggagcgtggaactgggagaaacgtttttaacagggtggccgtggcggggctcgcggagaggatggtgtcttctgataaagccgccagttgagccagggggagcccttggggaggagcttccagacagagaggcctgcagtgccgaggccctggggggagcacgtggggcaggtggggccggcgcggcggggctgggggccgcgggtgtggagtggggaatgggggtaggggtaactaacaaggcggggccaacaggggcagaccccgagactctttaggctgtgaccgagcggggcttccactttgggataagaagcctcgggggtttgagcggaggagaagcccctgtggccacatgctcccgggagccttcagagaacagggcggagggggaggcgcagggcgacgacggcagtggtcaaacgcagaaccgtggagtcctgtgctgcaggagtggctgggaatttcataagcagtggggagctgcggggtgtcttctgggtgaatgacccctgggcttaggttgcagtgtgaaaggaagagggaagggagggatgccctggaccaggggtttcctgcagccggataggcagcacctgcagcggggcctctcaactccaggagctgtcggcctctgcgtggaggcactgaaccatgggggctccagggagacgtctgggccgagggtaggagtgtaaggcctgagctggggatcaagcaccggcgcggtgatgaggggcccgtgggagcattgaccgctgatgagcagcttcaggcatgcagggagggacagcaccgaggagcggactccagagcaagaggaagggaaccatccagcgatgcagagctgcactgctgggacttggatcagcaggcacagcagaggggcgcggagggacttgtgggtgctggggacattctctttcctgacctgggtactggctgtatgcttgtggaaactcattgagctttatttacaccttcgtgtgtgtgtgtgtgtgtgtgtgtgtgtgcacttttctgtaagaatactatacttcaattaaaacatttagaaaatgcacgtatttgggaggcctagggagaagaactgcttgaagccagcctgtgc

SEQ ID NO: 38489 - DNA, 920 bp, Artificial sequence
  DNA replication origin
tctgagaagtgaggagaccctctgcctggcaaccgccccctctgagaagtgaggagcccctccgcccggctgccaccccatctgggaagtgaggagcatctccgcccggcagccaccctgtccgggagggaggtgggggtcagcccccgccaggccagccgccccgtccgggagggaggtggggggtcagccccctgcccggccagccgccccgtccgggaggtgaggggcacctctgcccggctgcccctactgggaagtgaggagcccctctgcccagccagccaccctgtccgggagggaggtgggggagtcagccccccacctggccagccaccccgtccgggagggaggtgggggggccagccccccgcctggccagccgccccatccgggaggtgaggggcgcctctgcccggccacccctactgggaagtgaggagcccctctgcccggccaccacctcgtctgggaggtgtacccaacagctcattgagaacaggccatgatgacaatggcggttttgtggaatagaaaagggggaaaggtggggaaaagattgagaaattggatggttgctgtgtctgtgtagaaagaagtagacatgggagacttttcattttgttctgtactaagaaaaattcttctgccttgggatcctgttgatctatgaccttacccccaaccctgtgctctctgaaacatgtgctgtgtccactcagggttaaatggattaagggcggtgcaagatgtgctttgttaaacagatgcttgaaggcagcatgctcgttaagagtcatcatcactccctaatctcaagtacccagggacacaaacactctgcctaggaaaaccagagacctttgttcacttgtttatctgctgaccttccctccactattgtcctatgaccctgccaa

SEQ ID NO: 38490 - DNA, 1207 bp, Artificial sequence
  DNA replication origin
ccccacctttcccccttttctattccacaaaaccgccattgtcatcatggcctgttctcaatgagctgttgggtacacctcccagacgaggtggtggccgggcagaggggctcctcacttcccagtaggggtggccgggcagaggcgcccctcacctcccggatggggcggctggccaggcggggggctggcccccccacctccctcccggacggggtggctggccaggtggggggctgactcccccacctccctcccggacagggtggctggctgggcagaggggctcctcacttcccagtaggggcagccgggcagaggtgcccctcacctcccggacggggcggctggccgggcagggggctgaccccccacctccctcccggacggggcggctggcctggcgggggctgacccccacctccctcccggacagggtggctgccgggcggagatgctcctcacttcccagatggggtggcagccgggcggaggggctcctcacttctcagagggggcggttgccaggcagagggtctcctcacttctcagacaggacggccgggcagagacgctcctcacctcccagacagggtcgtggccgggccgaggcgctcctcacatcctagacggggcagcagggcagaggcgctccccacatctcagacgatgggcggccgggcagagacgcttctcacttcctagatggaatggcggccgggaagaggcactcctcacttcctaggtgggatggcggccgggcagagacgctcctcactttccagactgggcagccaggcagaggggctcctcacatcccagacgatgggcggccaggcagagacgctcctcacttcccagatggggtagcggccgggcagaggctgcaatctcggcactttggggggccaaggcaggcggctgggaggtggaggttgtagcgagccgagatcacgccactgcactccagcctgggcaccattgagcactgagttaacgagactccgtctgcaatcccggcacctcgggaggccgaggctggcggatcactcacggttaggagctggagaccagcccggccatcacagcgaaaccccgtctccaccaaaaaaatacgaaaaccagtcaggcgtggcggcgcgcgcctgcaatcgcaggcactcggcaggctgaggcaggagaatcaggcagggaggttgcagtgagc

SEQ ID NO: 38491 - DNA, 956 bp, Artificial sequence
  DNA replication origin
cccagacgatgggcggccaggcagagacgctcctcacttcccagatggggtagcggccgggcagaggctgcaatctcggcactttggggggccaaggcaggcggctgggaggtggaggttgtagcgagccgagatcacgccactgcactccagcctgggcaccattgagcactgagttaacgagactccgtctgcaatcccggcacctcgggaggccgaggctggcggatcactcacggttaggagctggagaccagcccggccatcacagcgaaaccccgtctccaccaaaaaaatacgaaaaccagtcaggcgtggcggcgcgcgcctgcaatcgcaggcactcggcaggctgaggcaggagaatcaggcagggaggttgcagtgagccgagatggcagcagcacagtccagcttcggctcggcatgagagggagaccgtggaaagagagggagagggagaccgtggggagagggggaccgtggggagagggggaccgtggggagagggagagggagagggagagggagagcgagagcgagagcgagagcgagagcgagagctgcctgggacattgaaaggagaataagagaatgctgtgagcaactctgtacctgtaaatccagtaacttagatgaaattgaccagtcccttgaaaatacaaatgacaaagctcactggaggagcaagggataacctgattgctctacttcaatgaaaacagtggttctcagtcttatctacctaaggaatctggaaaacttgaatgaaaaactgttgatgcctgggcccttctgctggtgaattttgtgtgactggtctagggtgaggcctgggtgcttgggttttgagaactcctcccctgattctgatgacctaccaaaaggatcatgctgcagtctccgcattccgatgtccgttgaacaaaaggatatttttcctgcacttcagaaaa

SEQ ID NO: 38492 - DNA, 1496 bp, Artificial sequence
  DNA replication origin
atttgtggaggcacaggccttgaggcatctaaatttgttctgctctcttgtttagaaaataggcaaaggctgctgggggtgggggcggggaggtccccgtcaccatcctagggtgtgtctcttgtgatgtggagcctgggatggagcttccagctggaccttctgttacagagcaagtgagcagaagaaagaaggagggagggaggaaaggggagggagggaagagagggggaggaaggagggagagaggagggagggaaaaccgagggaagagggagggaggaaagagggaggaggtaggaaagaaggaggagttaggaaggagggaggaaggaaggaggaaagagggaggaagtaggaaggagggagggaagagggaggaagaagggagggagggaagagggaggaaggagggagggaggaaaaaaggaggaaggagggagggaggaaaaaagagaggaaggagggagggaggagggagatgggaataaaaagtaaggaagggaggagggagggaggagggagggagggactggccttcagcatgccagcatatgccaagatacattattggataaaccagggacctcaggtgggcatgagaaggggagacacgaggggactgggcaagggcagcctggccactcccccaactagagcaagacctggatccaccaggagcgtcagaaggaagcagggcctagaacccactcccagacctctctgccaccttcacaagaagccactcccttcagatagaaccattccccaaaatgtgaccaatgggcagggtggggggttccaccagagagaattgctggtgggtttcagcattaaacactaccacccatggaatgcaaattgactttgtccctccacaaactggtcatttctcatcacgaagccatgaccagcatgacctttacatgtggatcaacagctctcggtcctttgacagccagttcctttgacttggccacttgatagtgaccattcaacctaaggaggtgtgacccagcggtggtacgaggtggctggacctcagttctaacggtgacaacttcagctaaagcacgtttgttctggctgtccgtcctctgcttgtgtaacttttatttcctcagtgtgaacagcgctgcacttgagggacaggaagggggtgcttccatagctgtcattgctatggcgcaagtttacttttactcttcaatttaaaaatcgggtcttctacatatctttgcaactagggaagagaaagcaggtcttttaattccagaaccgcagtgcacaaatcatgttccagtgtgggctgtgcaggagctcagtgcctggtgggtttcaggttgcaggacatctcccttgggggctacgtctgatgccctgcagccagccctgccgatggagcccagctgcttcctgcgttctcaatgatgagtccttgtgccctgggctgttaaggctgtgcctctgctgtgagctgaaacgctttctctgaa

SEQ ID NO: 38493 - DNA, 2042 bp, Artificial sequence
  DNA replication origin
gtgatagttatatgcagtggtagttatctggggtggtagttacataaggtggtagttatgtggggtggtatttacacggggcggtagtaacatgcggtggtagttacaaggggtggtagtgtgaacccagaaaatctgagacaggtctcagttaatttacaaagtttattttgccaaggctgaggatgcgcacctgtgacacagccccaggaggtcctaatgacatgtgcctaaagtggtcacagcacagtttggttttatacattctagggagacatgagacatcagttaatatatgcaagatgaacactggttcggtctggaaaggcgggacaacttggaggaaagatgggaagactcaaagtgaggagtgggctcccaggttgtaggtagataagagacaaattgttgcattcttttgagtttctgattagcctcttcaaaggaggcaatcagatgagcatttatctcagtgagcaggggcgactttggagagaatgggaggcaggttggctctaagcagttcccagcttgacttttccctttagcttagcgatttgaaggccccaagattgattttcctttcacagtagttacatggggtggtaattacaaagggtggtagttacatgggatggtaataactcaggatggtagttacatggggtggtagttacatggggtggtagttacatagggtggtagttgtcagagttgtaattatgtggattggtagttattcagggtgataattaaaatgggtggtagttatgcaggatgttagttacacggcgtggtggttattgtgggtattacttacacagggtggtagttattcggggtggtagttacactgggtggtagcgatacagggtggtggtcattcagggtggcaattattgaaggtgatagttattcggggtggtagtgacacagggtggtatttaggtgggttggtggttattctgggtgatagttattcagggtggtagttacactgggctgtagttaaaagggttggtgattatttgaggtggtagtgacacagggtggtagttattcaaagtggtagttatttggagtgatagtgatgcagggtggtagttaggcggattggtggttatacagggtggtagttattcagggtggtagtcacatgggtggtggttatatgggtgatacacagggtggtggatatgcagggtggtagtcacatggtgtggtagttattcaaggtggtagttatttggggtggtagtgatacagggtggtagttaggcgggttggtagttattcgaagtggtggttacacagggtggtagtcacatgaggtggtgattattgcatggtactcacacgcggtggtggatatacgggtggtagtcacacggggtggtagtgacacagggtggtagttattcaaaggggtagttatttggggtggtagtgacacaggatggtagttaggcgggttggtggttatacaaagtggtagttattcagggtggtagtcacacagggtggtggttataggggtggtactcacacagggtggtgcatatacggggtggcagtcacacagggtggtagttattcgaggtggtagtttttcggagtggtagttattcagagggtggtagttaggcaggttggtggctattcggggtggtagtcagttattggggtggtactcacacagggtggtggctatgcagggtggcagtcacatggggtggtagttattggggtggtggctatgcggggtggcagtcacacagggtggtagttattggggtggtggctatgcggggtggcaggtggggtggcagtcacacagggtggtagtcagttattggggtggtactcacacagggtggtggctatgcggggtggcagtcacacggggtggtagttattgggatagtgactatgtggggtggcaggcggggtggcagtcacatggggtggtagttattggggtggtggctatgcggggtggcaggccggttggcagttgcgtgggtgcagctctccagttttgt

SEQ ID NO: 38494 - DNA, 1241 bp, Artificial sequence
  DNA replication origin
cctcccaggttgacgccattctcctgcctctgcctcctgagtagctgggactacaggtgcccgccacaatgcccgactaattttttgtatttttagtagagacggggtttcactgtgttagccaggatgatctcgatctcctgacctcgtgatccgcccgcctcggcctcccaaagtgctgggattacaggcgtgagccaccgcgcccagctcactctggttttaaaatgcaagttttgccatgagttgaaggtagattagctcttgtggtttcttctgctgtgtaacaaacctcctaaaccttaggggcttgaaacaaatcactcattatccttctcacagacttgcagtttggacaaggtatggccgctctgtgttccttaaaataggagtccagtgagtttggagaccatgaacaattaattctgaggctggctggtctcagtgggcagtgtgctggttgtgggggctgcaggctgtgagatcgcatgggagacatgggctgtgtgatcatgtgaggactgtgggctgtgagatcacatgggggctacgggctgtgagatcacgtgggggctgcgggttgtgagatcctgtgggggctgctggctgtgagatcgcatggggactgtgggctgtgagatcgcgtgggggccgtgggctgtgagatcatgtgggggctgtgggctgtgtgatcatgtgggggctgcgggctgtgagatcacgtgagggctgcagggcacagtgcaaggcaagctcctcaggaggcccagggcagggctctggggacagggtggggtgagggtcactaaggttgagggagtacactgatacacctgggttgacatggctgtcacagccctgctgatgagagctgagaggaaaatggaagggggagagatgaggggcagagctttggcaaattagacaagctgggcctgcacacacttcgtggggccaggaggacgtggccctacttctgatctgcagggctgcagggcaatgggcctctaggggcaaagccaagacttgggcaccccataaaagaggcaggagcatcctgggaaacgttgagggtgtcagggatcatgttcatggtgtcacaggagctacccaggactcgggaccctttagctggggtacagaagggctttcacctcgggcgggcactgaggtcagcagaaacatgagatgtcggggtgaacgagcactgtgcttccagctgagcctccggtgctaggctc

SEQ ID NO: 38495 - DNA, 2014 bp, Artificial sequence
  DNA replication origin
agaatttgcatttttagtaagtaagccagtggttctgatgtagacagtccacatattacagtgatgtctggacacaccgtttagagatgtttccgactgttgaagtccatgacttgtcacgttttcatgctgcatccactgacaggagctgactacttaaggaacaaatgtaaatcttgtcttacaactaggtggtttgggtatgctgagtgatagacatgtcccactttaagcaaaacacaaacacaaaaacctaagtctaccaaacaaataccggagttatttgtttgtacactttgtaaaacaaaactcatcgcagcagagaggggagtggaggaagccttgctgagagctgcccttccctcggaaagctgagatccgggctggctgggtcggcactcatccctgatgctctgcccggtggtggagggtggaggcttgatttctgccccagacaaaggtcactgtgacccaggcaagagggtggggtggcatgggagctgctgggtggggaggtgggcacctaagagggcagggacccctcccaaatagctctggctcaagtattcctcccaatcaccctctaatgagccttcttgagaaatcagcctgggggcaaaaggcagggagcaccacccacctcccgagtcttgtgcactgggggttctaggaaggagaaggtttgagcaccccagcctggggtatggggcaggcagcatcaggagggtggaatatggggcaggcagcatcaagagggtgggttatagggcagacagtgtcaggagggtggggtatgaggtagacagtgtcaggtgggggcaggcatgggacagacagtgtcaggagggttgggtatgggtcagacaatgtcaggagggtggggtatggggtagacagtgtcaggagggtggggtatgggtcagacaatgtcaggagggtggggcatggggtagacagtgtcaggagggtggggaataggtcagacaatgtcagtagggtggggtatggggtagacggtgtcaggggggtggggtatggggtagacagtgtcaggggggtggggtatgggacagacagtgtcaggggggtgggttatggggtagacagtgtcaggagggtaggttatggggtaggcattgtcaggagggtggggtattgggtaggcagcgtcaggggggtggggtatggcacaggcagcatcaggagggtggaatatggggcaggcagcgtcaggagggtgggatgtgaagcagacagtgtcaggagggtaggttatggggtagacagtgtcaggagggtggggtatgaagcagacagtgtcaggtgggtgcaggcatgggacagtgtcaggagggtggggtatggggtaggcagtgtcaggagggtggggtatggggcaggcagtgtcaggagggtggggtatggggcagacagtgtcaggaaggtggggtatggggcagacagtgtcaggagggtggggtattgggtagacagtgtcaggagggtggggtattgggtagacagtgacaggagggtggggtattgggtaggcagtgtcaggagggtggggtaggggtgggcagtgtcaggagggtgtggtatggggcaggtagtgtcaggcaggtgcagacacatggaggccccctttcccaaccccacttccactgactccttccccttgttggcttaaccaacccaccaggttcagagttcaagccatgtgggctgggtagggcggttcccctaagcatgtgaccctgcatgcccaaacagagtgcctctctgcactagcagccacacggattggttccgccatagcccaatccagagtccctgagaatcttgctataatattgagggagaggctcctctggtcacaagtcacagtggggccttgagatcacatttgcccacctatgggttctgcctagattcagcctccagaaagcctcagcccagaggagcaggaatgagacagattcccgaagctgggcttggagatcccttggcctgc

SEQ ID NO: 38496 - DNA, 979 bp, Artificial sequence
  DNA replication origin
agtgctgcaggctgccaggaggggtgccctcctgggggctgggcctgagactgagagccaggcgggcaaaaggtcttgagacgaggacggcgccatctccttccggtgggaggcactacctccatctaccgcccagagggccaggctggggttgactttccctacatcctaaggctacatcccgtactgaggatctcacctgtgggacatgttccgcttttaacacttacgttggaaataaccctgggttctgaaagtgggggacaggttcattgcaccccctggcacctggtcctcagctctgaaaatggagcaataaatgcactgcaggggtgtcgggggggacaggtgagggggcaggtgaggggggcaggtgaggggagcaggtgagagggggcaggtgagggagaacaggtgagggggcaggtgaggggggcaggttaggggtgggtagggtgggggcaggtaagcagggacaggtgacaggggtaggtaagagggggagcaggtgaggggtgggtagggccaggacacacacgccagcagagaactgagcatcacagaggcatgaggcgtgacacctggactgaaggccccactaacatcagtgttcttgtctggctctttgtctctttcagatacttgttcccaggaccttaactcacgtgtgaagccaggatttcctaaaacaataaagaccaatgacccaggagtcctccaagcagccagatacagtgttgaaaagttcaacaactgcacgaacgacatgttcttgttcaaggagtcccgcatcacaagggccctagttcaggtaacggtctgggttctggtcacatatcacggacacccctaggaagccgagctgctacaacgcgacacctaggagagcagggcggatataatgtgaagtccctgctgagtgcagagctctgagcagaaagcagatgcacaaggggtgggagtggacagcagcagctga

SEQ ID NO: 38497 - DNA, 1166 bp, Artificial sequence
  DNA replication origin
gccgagcatggcctcttgactatggtgaccccatgctgcccggcgtgttgaggtgaccgaggccgagcgaagctggcagctctgcttgtcatcgtagcatggcaccaattgccccaggtggggtttcccttccttcctcttttgctgtgaagagagctttaaagaagctctttttgctgttgtcataaacttttccccaacgcttagctccttcctgttcttgaattctctgccttgctggaggcaggggacaggggataatcggaagatattcctctctactttggtttcctccagcagtgctcgttgggagccttctgtgtgccatgttgggtgccagatgctgggaatacagtagagaaaaacacagaaagaaatccctgatctcatggagcgtatgttctagtggggacaaacagaccataaacataacagaagcagatcacacagtgcatgagaagctggtgtgtgctatgaggagcatggagtagggcaggggcctgggttcgggggaggtatcggatatttagttgggtggtcagagtgggcctcctgggtgggggatggttgctgttccaagtggagcaaagagctggtgtgaaggccctggatagggagatgctggtgtggttaggacccagcagggaggggctggtgtgagggatgcagaaggcacaagggagagagggggcaagaaggtgctgtggccaggttgcggtgctcagaggctgctgccaggacttggctctaggtgagagggggccattgtggggctctgaatagaggaaggtcatgatccggcatggctgctggattgagaatagactacaggggtcaagggagggagcaggggcgaggcgagaggatggtggccccagccagggttgtaaggaggacatggggagacgggttcaatggtgtcttttcaaagtggcctcagcagaacttgatggtgggttgggaggcgtgacatactggcatgtggatgggaaggacgagtagaggcaggagtttctggagccgtgtctgtgagtagaagggctccagggcccagctcaggctcctgcttcaggaagagcctggtgggcctcgagaatatcagcgggaggtggcgtgccctgtgctggaccatgggacggtggctccagtcccaggaaggtctcccc

SEQ ID NO: 38498 - DNA, 863 bp, Artificial sequence
  DNA replication origin
agcgccccggagtcgggactttcccgttcccataccggggtggagggaaaaacaaagcggtggcggttgtcactgcgggctgcggtgcccggggatcagcctggggacaagccctgcccacgtaaacaaacagagctgtggcgggcgacctggggaggaggaaactcggcgtggcagctggaaccagttatttcttcgctgcgggcctggggcctggggcctgtggacgggaaggaagtaacggcggcctccccgttctcgttctcggcctcagagaactgcaccccagcgacctggggcctgctttggacccgcggggtctgacgtcggccccaaacagttgactggtggtcagttgtttggaacttgctgagcagaggccctgctgctctgctaagatttggggctgggggtcgtacacagcaccctcgcccccacctaaggcgctgactgggcaccgagggggaggccctgaactgcaggcagggctggccacgcagggtgggtgccaagtgcgaggtgggctccggatgcagggtgggcctgggtgtggggcctgcggggaggggctggcagacacggtgttgatcagagggatgcagaccagaagggtggtcataaccagcttgctggatttgggagtgtttaagaaaggacctgcgggtctttatggcagggtcaccagggccccattttctccaactcctccctcagttgtccttgttgttctgcccccccagccctcagtctcctcattgtgaggatgggggcagtcatgctcagaggttaggctgagtgctgcaaggtgtgcagcagacccagcgcttactggtgacccataagcagtagcgattttagataac

SEQ ID NO: 38499 - DNA, 1485 bp, Artificial sequence
  DNA replication origin
gcccagcagcctcccgacgccgcggcccagggtgcgcgccgccatctaggcaggctacctgagctctctgtgctcccagagtgggtgcctcacgcccggggcgccccgtggagtctccgcgggccccgcccctgctccgcccttccgccaccatccattcctccagggccccctcccggagcccgcccgggtcccaccccttcttctgctgcccgggagagggggggccgcttaggaagaggggagcagcgtggggaaggggtgcaggggagcgcggggcggagcagggtcccaggccctggcccaggcgctgcgctccggtgagtctgcggtcccacccggatgttcctcgagtcggcctgttttggtttcagtttgcacgctctcctgcaagccccgacagcttcttcgagctgccagaggcacgtgcggcccaggaccccaggacgcaggctcagggcctggggcgaggggaccctctgggatggggaggagccgggagggagccggcaccaacgttaagggggctggtgcacccaagcgcactggtgggtcccaagacaataggtcggtcagttccgcatctcagaggctgaagccaaggttttcatgcctttgtgcgcccctgagagtgaaccccacccctggagtctcagcagcacgcgaaaggggctggcgcctttctaggctcccgcctagaagccaggaggctgcgcaagcctgagtccgtgttctgggtcccatgctccagccccccagctgccggcctccgtcctggcgggggtcacgtcctgctgggggtcggtggtgggtgatatggggcgatgaggactttctccagttgctgcagcatctgtagcctgagttcaaactctgtgaccttgagcaagttccttaacttctcggtgcctcgttttccttttggggaagacggaagtaatgtctccctggggggcggggacggcgggggtgggcagctgcagtaaggaatacattggacaatgtctgtcaagcgtctacccttgcgtggccccatagtaagctcagtagtggggatgatgtttttgcagctgtggagccaggaaggacagaaggaaacgtataaaactggtctccaccgagttcttaaatattctgacacccaagaagtaaattcataacaaacgggtaaacacagggaagagagattttggaaaactggtttattgagttctctgtgatgggaaagtttctttcccttgagctgtagggcttgcagaggggaggagcctgccattggaggagcctctgcgtgggctagccaccagcccctgctggggaatgctgctgtctgccagagaagacaggagtgtacctagagctggagaatcagtgacatctactagcataacacatgccctgcacagtgctagcgcttgacctgcattttctcctttatttatttatgatacttttttagagatagggcctgtagcccaggctgga

SEQ ID NO: 38500 - DNA, 1064 bp, Artificial sequence
  DNA replication origin
acggcacgtccgctaggagcaggcagggtgctcgagcggccgccggcggctgcgtgccgaagccacagaggaggccgagtcccagcggtagggccccacgcgccaggctggagccgtcaagccccgggcccgggcacggcgcgactgccggaccctcgcagccagatccctgtcctgggccagcgggcgccggcagctcggcctccaagcccagcaggtccgtgatggcgaagccccgggggcgcgagcccctaggggaaccgccaggcaccagcgccctgctgctagtgcgcccgtcggaaagcgagtcccggccggtcatggttccttagcaagcaaggcgcgagcctctctggatcccgtttgcggagggcccagcttagaggaagctttataggattgggctgccggtcgggcgcgggaggcctgaagggctccaatcagctgggcgcgggcgcgtcgccgttccggaccccgcgagatggggacgccaccagttcccctcccctcggttaccgcccacccagctgcagtcccctcagtcacctccttctcctcctctcttctgtccagcccaccccaccccaccccacccccattctaggagggaggggaggaaagaaggtaagggacagtgactccgctgtctgcctgtccctcgaaaagtcgcaagttctacatcctggcgtggccttctccttccttccagactctctgggtggaggccccactcccagctgccctgaagcttctttgatgcgacccaactgcctattaagacctaggaccccattcccaaccacaccccgatggctaccccatatatgtccccagccagccctccacctccgccgccggtgccacgaaggccttcctgtaagaaggccttctctgaaaatccccaaggggaaaggaatgaaaaccgtgtatttaatccatggtcatcctacctccatccctttaatccatggtcattctacctccatccaaatccacccccaggtccatccccaacactccacgggctgaactgtagggggtggcagactcacaagagctgggga

SEQ ID NO: 38501 - DNA, 1580 bp, Artificial sequence
  DNA replication origin
ctcgtcctccagtgccttccctccccaactgaggggcttggctgcacccgcacgcggttttccaggaacagcgatcccggagtggactctcccgcatccagggggacgtcagcactctcggcttccccatggggacacactcactgaggtcacgcgacccaaaaccaaatgacccaccaccacgacagccgcatcgtttttagtggtttgtccgggaggttttagagtgagagaatgaagggggtgaggcctgagggagggaggcgcatggaagccgccgcatctgactgtcccagggtgtgcccaggcccagagatgatgtccagacccctgaagggagtgaagcggaggccctgctggaggcaaaggtcagcgcggcctgattagcctcccacggtgacttgggaggtgactcgggaatccgggccctcttctacctgtggcgccgtccagccctggtcccccaggctgtggctgcagccagtgcgtgtaaatggaagaaccccgtgatgatttttccttgggggagataaacccatggatggggtctggagccacagggacggtgagtagcatgcaggatctaaagctgcagagcagagaggtgaagacagtctccctcctccgtggtccctggatctggagaagcatgaaatgtgcccggagtctctggtgcccatgaggcgttgttggggcaggaggtagaaaggtggcatcagtggatgggtggcgtcccatgtcctgtagccgtcacaggggccagtatccaaatggaacccacaagtaacccaacattcccaacaactgagggtattagcattgtgtttaaacgttttgggcctgaatcagacagtgcagggttccaacgcccacttggtcagttttaaatggattctctgcaaagcagtcccgatgggtaggactgggtgcaagtggtgaatgtggtcctgggaggcagctgcggggaggggatgtgagagggagggaagccagaccgggagtgtgcattgacacaggtttccactgtgggcaacaggggctcacacctgctggggaccccccaggaccttgtgcggatcacgcctcagcattgtcttggctggcaggtggggaagctggggtcttgatccactagcactaagcggctgagtctgccccggtggtgttagccccttggcactcccacctgccctcatgtgggcttggttgggttcctgggcagagtatgcctcagagactcgcaattgcacggttgggaggatggggcagctgccctggaccctgcctcccccactgcccatcctctcagtttctccttgcatgctggcaggattctgagagctttgcccaggggtaatgtggcctggcgtggcctctgccttcctgcgtggggctccctggtcgtggagtgtgcattgccggtggtgagccagcgcgtaggggcctggaccagtgatgcatgggggccaatgagggaatgctccccttcctccccgggaccattctcagacacactcccaaaggcacacagaggggctgactcaatatcccaccccagctttgtcagctctgcctcccca

SEQ ID NO: 38502 - DNA, 1863 bp, Artificial sequence
  DNA replication origin
gaaaaccgcaaggccacctgcagaaagaaaagaaggccatcgcgcctacgcagctgagcacccatactccgcccgcgcctgcgcaactgggtcccccgacccccacctcctctcccgcctgcgcatgcgcggctgggtgcgcccccccgcccagcctgtgacgccacgtgcatggggcggagcccaggccctagggaatcgtggggtcgtatcccgcgggtggaggccggggtggcgccggccggggcgggggagcccaaaagaccggctgccgcctgctccccggaaaagggcactcgtctccgtgggtgtggcggagcgcgcggtgcatggtaagcggcgggccggggcgctggcgggggcggccggggatcaccgactgtaggcgggcctcccccacgcgggcgcgctgcgctccggaggacggcctcggggtcactcgcaccccgggtcccacctcctgctgccttcctgtccaggctccattagggctccctggatgtctgggctccgctgaccggtggggggcaagtccagtgttttgggccacagggcgggccaaatagcaggggcctgtagccccagggggccccagccctgctgcgttcattcattcagcccgcttttgcggacccgcccccagtctgcgtcagggacagacccctccgccctggatgagcccggcggggaagcttcgcgtagcagtttctgggaaacaggtaggatcaggccgctcggacaggactgagggtgtaaggacgattcaccctggcattggggtggtgtcccgaggagctcataggtggtcagggcggttctgcccgagctgacctgtgagccgcgaatgccctggaccgagggagggagagccccctaggtggacagactagactccttcagtggaaaacattcaacagccaggagagcgtggaagaggaaggagagatgggagggcccaggggagcgtggaagggagggtgtttttattataagtgcacctgtaagtgcaaagtgcaaaggaagcagccgccgggaagtgcctgggcagctctgggtgtccctccaggcacctgtattccagccttacctgcgcgaagccacacatcccacgtcacacaggatacggggaagtcagccatagcctgcaggcggggaatctgaaacctcgcgcaggagttccttgggagaggtggattacaaggactcttcctcccacccgctgtgcaagagccatgggcggccggtagtcatttttgaaggacctggcaagcactgtacaaatctcaaaattgctttttgtccccctccccttgccttggagagagtggctggctagtgtgtgtgtcgtctgcctcctgaaggttcgggtaaaggaccagggaggtgggcagccctttgtgtcaggagatctggaagcgcctcccctcccaccgcctcctgtgtaaaggaaacagcaggtggtgttgacgggcggttcacgcaccggtttttgccaaggagagaaaaacctactgaaacccaccaggaggatgagtggaagtttctaatgtgcttcattttttgatacagcgtgcatggcaggcatttgcattcatgacccttccgtgtacttgaactgaaaacctgaagaaactggccaacagattaggcagccatcaatccacatcagatggcccctgtatttccaagaggtgacctgccatccccatctagaaagccaaccaggggacagggtagctcctaccaccaacaacactgctctaccctcagattctcttctctgactcctgcctccacctgctggagggtggcctcagcaggagccacacctctctgtttgcctgtgtgcaccctacttcctac

SEQ ID NO: 38503 - DNA, 1794 bp, Artificial sequence
  DNA replication origin
gcgccggcggaggcggaggaaaagagatggaggaggaaagcggcggcacacgcgaacgccgggatggtgcagctgctctggcgccgctgctctggcgcccggcactgcggctctgcgggcgggatggaccgcgcctgcgcgccgcgccggggcggggcctcggggggcggggcggggcctcgggagggcggggcgggcgtccaggctcatagctgagatctctggtgtagtccgaggcggcagcgacctgtccacgccacctgagcgtggtgtttgccccctcgttgggcaagcccggcagaaagtgggagcgactggagggggcaagggacccggggcctcggagcgtgccgtcgtggccgctcctgccagcccggggacggtgcgggaagggggccctgccctccggccctcgggttcctgggaccggccctcccgccctgcaccgggtcaccaggtgccccgcgggagcgcgctgggctcgggctgtggccgagacctggtacacgttcggggaaactgattacagcttgaaaggcatccaccaacgcctgctgggcccggtcttctctgtccggggcagggcggctctgaaaataccagctatttgcttgccactccaggccgatgacagacgtggagaaaaccagctgccagcgagctggagacgcccgttcccgagggcgcgaggcagccacagccaaatgccaccacgaccccgcctcggagggaccgcagccccctagccctcggagaaaccctgttcccgaaaccacctggcagacgctgtccgctttgagattacagcagggagaaggaaacatgcccgtctggccggggagctcagccactaaccgagacttagcctctgtcatcccaatccaggctgcagctccagatagggggcgtctgcacacagcttcccacacttggccccgcggaacacagtcctgctggcctcagcctgtgggaaccctgcttcatgtaaaggtcacctaaactctgccttccctcaaccccttcaaactctgcctttcccttcgttcttgggaggcgctccctcattgcagtgggtcagtacacccgattttgtggaccacaggtttgctcctggtggtcttgggctgaaggggctgcaaaggttactgaatttcgtggaggtaaaaattgcccgcaggaaatgtcatgaaagtccaggtgcagtaggtttcctggtgtgatgcttcaaagttatcttcttacctggagccccttccagctgcagacttcagaggtcggaggttaatcaatctggaatgaccccacagcccacccagctccagctcgggattcactcctgcactatgtcctagggattctggagccaacaagatcgaacttcgggcacagatggcagggctgtggggtcgagcttggctgcaagctccgaacactgatgcaatctctctgagggtgatctggcaattcagaagtcataaaaatgatagtgccctatgaccacttctaccactctggggaattgagttcaaggaaagcttaagaagacaaaaagcaagttatgcaaatatgttatctgctgtggtgtggtaaagtttaatcccccagctgtggtgcacacctggcaaagaatggaggcgctgacacttattgatcattacttgcagtgtacacgtattaactcctgatccctgcaaatagcctgctattacccccgcttgacaatggagaaggtgagccacagagaagttaactcttccctaagcccacacagctaataagggaaacagccaaggt

SEQ ID NO: 38504 - DNA, 1620 bp, Artificial sequence
  DNA replication origin
tacactttgatgggagcttcccaaacagtggaagcgctgagcacagcagcgagactccatgggggaagccccgctgggcaggagctgtgtgttggggctaagaatgcagctgggcgtccactcacagccagatgctcacgagaaccccgctgcttaagggcaggcaggagggtgttctgatgggatgggggcacggacccccagggtgggcgaaaacagctcccactatctctgtggagcacacgacaagctcgcttggcctcctggcgccatacgtggcccatggctctcaaagcgtcaactgtcagagcccctggagtgtgtgcgaggcctgggtgacatccggggatggggccaggccctcctgcccagcagggtgctgatggggaatcagggcaagagcctagagtgctcggcagcgacgggtgccaggcacgcagaggccacgtgagggagcacccagtccaggctccgggcagctgtaagccgggatgactggggcagggcaggggctggcaggagaggctgcaggagaacgtgggggcatcggtgagactcagccacctgtgatggagaaggacgggcaataacaggagagcctggaggctgggtggtcactggtgtgcagagggagttgtcttgactttgtaggacacagttttaaatcaaatacatgggcttcgagtggctggggccatgccatggaggctgaaaatgccctgaaaagttgtatttaacttgcaagagcagggtaggggaccggcgctgtagatgtgtttgtggatgagcatgtcagtgtgagtggggatgctggagaaccgggacattccaggcaggctgtgaagatgggcttagccccgaggcctggccaggatggaaggggctagaatgccttggcggggacttgtcgctcacttgggtgtcgccttgtggggcaggggcaagggttgacaggagagaggaagggaaagggatactggggttttagtcttggtggccccggtgcgccgcctgtgtggctgtcagagctgactggcagtgccacaggcacgtgtgtgccgggatgaacccaagcatccctgagtgcgcctgccggggagctgggaccacaggtgagcctcagctttgtgagccccctcctgcccttggtggtagcggagctgatgtctctggatgcaggggaacctgggggcttgtcaaggagagagggagccaggctggggtggagggagcgcagctgggcttgtgctggggggctgggaacatggagggtagcaggcaaggcagctgcaggagcaaccttcccgcaggtggagctgagagaggtgatctgcggggcaagcatctgcgtgttggagttgctagagcagagttgactgaggaggggaggcgcggagggcagagggtaaggagggaggtgggggttggtgctgcagcacctcagggagtcgggatggggatgattcttcagtcaaagccattcctgaggaaggtcaagtgagaagataggtctggtctggggagggtggtgggacgggtggtcctctcaggatgacaatgtgggcaccacaggggagggcgtggacggagactgtggtgccgagcatgggctgggtggat

SEQ ID NO: 38505 - DNA, 1026 bp, Artificial sequence
  DNA replication origin
ccatcgtggaggtgagtcccgggccccacccgtgcctgtggagatgcctgggctgagaaccgcgggccatgtcatcagcccctgctgagcggttgctgagtaggcaggagtctgtccctcacgtgttgacctgcaggcttctggacatgagggctgagcccctgaacatgggcgctgagctgggcagtcacccattgggcctggcgggtcctgtgtgcgagttcagaagccgagctttagggagggctggggtgtggctgagtgcagccacggggccactgcaaaagagtcaagaggcagctgactgccagctaggctgggcacctatttcctgtttgtatgttggctcctatgcaagctccctgaggaaatgagtgctgaggtgtcaggccctgcgctacaggcaaggaccagccgctgggagggtgggaccgcccacctggggctatggtcagggaagccttcccaggaaagctgaggtctgaagagggaatgaagagagagtgagcagtgctctggggcaaactggttcaatgccctgtgctgggggacgggcccctgggacctggaaagcagcgtggctcctgtgcagtctgagatgggcctgggtacagtgaggagaggtggccgagtgtttgcaggcagcacctgggtgaggtgctggctttgaggggaccgcctgcttcaggcagggaaggtgctggtggagggcagcgggaggatggctttgggttttgggtggtgatgggatgttcaatgtcagagaaccctgggatcggtggctgagggagggtcgtgtgtttcctgtggacgtttgaactggtgggactgggccatctcgcagagccctctcagaagaggaaggaggggctgctggggtaaccctgtggcctgagaggtgggatgcccggaggggccggacaagcagatcccaggggaaagcaggggcgtgggcaacaatgggaggagggcaggtggctagggggcccagcctcaggaggctgaggcccacagtgagcggaacct

SEQ ID NO: 38506 - DNA, 1079 bp, Artificial sequence
  DNA replication origin
atgttcacgatgtccttgaagcagtctggctccttgggagaaaaaaagccactgctgatctggtccacggcctgcttcagctcgggcaggtggtcgtagtactccctggcattgtacctgtgaggcgatgggccaggagtcagcagccagcgccccaggtgggccaccttggagaacaagccatgttggtgcctggcacagcccctgccccaggatggccctgggagctcaaggcctgcacggtccagggcagcagccagtggccatgggtggttacgaggcccttgagcagggacctgctcgagcagagatgtgaagtcagtctaaagccaatcccacctgctcctttgactgttaaagaaatgtcatcactagcagatctgctaggacatagtggctgatgccacattcctagtggagagggccactcagaacttggctcactgtgaaatcctgggcagagcttttgaaaaacagacggccggaggggcaggaagtgaaatggagcaccttggctgggacctcgaagatggaaaaggaaaaacgcaagcaagaccagacaggacaaggcagagctaagtgggagagggacggacgggcagacatgggcatcccaggacggggcccgggcagaagaagctgtgtgagggcgcagaaagggagcacaggcctctgtgctcgggccagcaaggcacagctctgacttcagatggcatgtgtggtttcacctgaccctacttaaggcctcacaggctccccagtgcttcaaggcaatcaggcaacactgccttttctttgtaattatcgcttggaatcaggcccgtgctggattcctcatgacgtccagatcatgaagaacaaggaaaaactgagaagctgtcacagaccaaatgacactggggagacctgacggccacacacagtggagtgccctgatgggatcctgggatgggaaagacagtaacagaaccccggtggagttggaatggagtgtgggctgcaggagggccagtgctctgagctcagtgcagccaacggaggggcgcggggataaggtggatgaagctctgggtgctgtc

SEQ ID NO: 38507 - DNA, 1097 bp, Artificial sequence
  DNA replication origin
ttttcttagtacagaacaaaatggagtctcctatgtctacttctttctacacagacacagcaacaatctgatttctctatcttttccccacatttcccccttttctattcgacaaaaccgccatcgtcatcatggcccgttctcaatgagctgttgggtacacctcccagacggggtggcagccgggcagaggggctcctcacttcccagaaggggcagccgggcagaggcgccccccacctcccagacggggtggctggccggtcgggggctggcccccacctccctcccggatggggcgggtggagacgctcctcacttcccagatggggcggctgccgggcggaggggctccgcacttctcagacggggcggctgccgggcggagacgctcctcacctcccagacggggtcgcggccgggcagaggcgctcctcacatcccagacggggcggcggggcagaggcgctccccacatctcagacgatgggcggccgggcagagacgcttctcacttcctagatgggatggcggccgggaagaggcgctcctcacttcccagactgggcagccaggcagaggggctcctcacatcccagacgatgggcggccaggcggagacgctcctcacttcccagacggggtggcggccgggcagaggctgcaatctcggcactttgggaggccaaagcaggcggctgggaggtggaggttgtagtgagccgagatcacgccactgcactccagcctgggcaacattgagcactgagtgaacgagactccgtctgcaatcccggcacctgtggaggccgatgctggcagatcactcgcggttaggagctgaagaccagcctggccaacacagcgaaaccccgtctccaccaaaaaaatacgaaaaccagtcaggcatggcagcgcgctgctgcaatcacaggcactcggcaggctgaggcaggagaatcaggcagggaggttgcagtgagccgagatggcggcagtacagtccagcttcggcttggcatcagagagagaccgtggaaagagagggagagggagaccgtggggagagggagagctattttattttttttaagaga

SEQ ID NO: 38508 - DNA, 993 bp, Artificial sequence
  DNA replication origin
gtccgcccgatccgcggccgcccccgtccgcgcctgtgtcccgcatttggcccgcggcagccccacccccgctcccttccccaggcaccgcggcgggagcgccctgccctgccgctgaccccctgtgtcctgctccggccctctcgccaggcactcctggcctagccttgcaccccgaccctttcccggggaagccggggggacccttacgctgggggcttggcgccgcccgaagtcatgaccccgcgtgggagagcagggtagggggtggggagtccttggaagatccctggacgccaggcacagcagaggcgggaggcagaggggccggcgccagaccctgagagcgctggggcccactcggacctcctcctcctgctctgcatcaggccccacaccgagcgcccgggcgggcgcccctcgggctgggctgcgtgcgcggagccttactggcgccttgggccctcggcggctctccccggtaactagggtcgggggcgtgcgtcgctcagaactcggggacctttggggaagggctcagtgggcggcggggtgctaggggaaggagggactcggagcatcgcagccgtcggagggaaacctgcccttcgctctgctggtgatggttcgtggtacttgaaatctgtccgcacaagttcgcctccttgggaatcatctcgcagtcctgagtcgtttggttattggcgttcaataacctttgggttattgggtagaagatgaatgcgtttatataaagccactttcaaaactgagatgggaacgtgtttcatagggacagatttctcctcccatctgctggtttcctaattatctggctgttgtagaacgtagcattcctgacagctttgaagccttgctacttcgtggtggtttgaagaagttactatatgatgatctcaggcgttgtagcagaggcacttcttttttgaccatctggaatgcccttagttgacgctggccacttgagtgtaa

SEQ ID NO: 38509 - DNA, 2176 bp, Artificial sequence
  DNA replication origin
tgggggtgcgttttgccctccgtagagtgaccttatgcagtctccatatagacagtgggaagtgttctcagattagccctgcattccagaaaaccctaaaccatgagccttgttaacttctgaacgactcggcagatgtgggaggctctggcctccttcctcgtgtgggcggcacctgaacgccccagctccttggtgtgggaagtgaggcagagtgcccacagcatggtcgggactgcgagcagagccctagcacaggcgccgttcaccccacagagatgatgcacgtcgcacttaggggttgggggaggccacaacagtgtctgtaggggtcagaggtgctcctaggatcctctcctgataacagcttcagctctgccttcctcagagggtcattgctggtttatcagtttcagtgaacaagagctgggggaggggatgggcgtggggagggtcaggaacctgagcactgaggcaagagaggatgggggtgggggcaccagtgagagtcaggggacagggcagtgggccgcccaccaatgagagtcaagacagggcagggggccaccagtgagagtcaggggggcagggcagggcggccaccagtgaaagtcgggggacagggcaagggggtactcaccagtgagagtcgggggacagggcagtggggcgcccaccagtgagagttgggacagggtaggggggtgcccaccaatgagagtcagggggacagggcaggcgggcgcccaccagtgagagtcgggggacagggcaaggggacactcaccagtgagagtcgagggacagggcagtggggcacccaccagtgagagtcaggggacagggcagtggggcacccaccagtgagagtcaggggacagggcagtggggcacccaccagtgagagttgggggacagggcagtggggcacccaccagtgagagtcgggagacagggcaaggggggactcaccagtgagagtcaggggacagggcagtggggcacccaccagtgagagtcaagggacaggacagtggggcacccaccagtgagagtcaagggacaggacagtggggcacccaccagtgagagtcgggggacagggcggtggggcgcccaccagtgagagttgggacagggtaggggggtgcccaccagtgagagtcagggggacagggcaagcgggcgcccaccagtgagagtcgggggacagggcaggggggcgcctaccagtgacagtcaggggacagggcagagaggcgcccaccagtgacaggggacagggcagaggggcacccaccagtgagaattgggggacagggcaggggggcgcccaccagtgagagtcaggggacaggacagaggggcacagaccagtgacaggggacagggcaggggggtgcgcaccagtgagagtcgggggacagggcagggcagtgccaaccagtgagagtcgggggacagggcaggggggtgccccccagtgacagtcgggggacagggcaggggggtgcccaccagtgagagtcaggggacaggacaggggggcacccaccagtgagagtcgggggacagagcagggaggccaccagtgagagtcagtggggacagggaggccaccagtgagagttgggggaccagacggggggccacccatcagtgagagtcaagggactgagcaggggggtgcctgtcagtgagagttggcggggacagagcagggggcatccatcagcgagagtcaggggacagagcaggagtgtcccctcagtgcaagctggggaagggctgggactgaggaagggagaatgtgtgttctggggagggtggctttctgctgtcactactgtagccatatccaaggacaattgtttggcctttttttttcccaattatgcatctcaaggtgagcttagttctcatagacagtaattctgaaatgatggaattgccatggtgattaaagtagcgagtcccaagcaggtacccagggattgcccttccatgacagcacttccgaaatctcaaagctagttttcctttagaaaccattttttctctggttttcttgagtctgtgaggaccctgctgatggcatacctccggagatgcaggctgtttcggtctctattcactctgctgagtgtgaagtgttatgtgttttacaaaagaaata

SEQ ID NO: 38510 - DNA, 1026 bp, Artificial sequence
  DNA replication origin
gcaggaagtggccaggagggcacacgtggcctcctaccactgcgtccgggctgtggggagcggccactggcctggctggccccaggtgatggcagagagtctgaggaggcggcaggagccgggcctcgccgcaggcaagcccaggacacagaagctacgcagagcccggcccccgcccctgccccggcatcccacggcccctcagagaggtggtcacgcatgcagccctgtggagtggatggggatattgtcccaaaggagccagagcctttcggcgcgagcgcagcggggctggagcagcctggagcccgggagctgcctctgctgggaacagagagagacgcctcgcaaacccagccacggatgtgggagccacccctgaggccggccgcttcgtgcaggggacaggctgagaggctacaggccattcaggaagagcgagcacgaagctggagcaggggcacccaggagcaggcctcggagcagcaggcccgggccgagggcgccctggagcctgggtgtcacaagcacagtgtggaggttgccaggagagggtccttgccatcccacctccagctcgcagacccgcagggttcctggcaggagcagcttgctgccccagaagagggggagaccaaaatagcgctggagagagagaaggatgacatggaaaccaaacttctacatctggaagacgtcgtccgggctctggagaaacatgtagatttgagagagaacgacaggtttgccttctactcattcttaaaactaaacacttcaaactaaaaatgcagaactaacccactgacccctgttgctaatggtgctatgtggcccttcctgccgacaagctcgcagcccctgatgggggctgtgtagcccttcagcctgagtaggggttgtgagcccagccccgtcccggaatgccacggtcatctggtgctctaccactgggcagagggagggcaggactgcctttcggggtcctgaacccaccttccgggttcaagatattcttgtgcatca

SEQ ID NO: 38511 - DNA, 1325 bp, Artificial sequence
  DNA replication origin
caggtctcccttctcctggccttacactgtttctgggtcagccgaaggccactggtcagctttctggggagcaagagcctcaggtgggagaagcatgagggcagagcccagccactctccttcaggccttccagagccaggcacagtccggggccagctctaaggccagtgggcgccccccatctccataacccatgtcctcagggtttccacggatctgtgctgggcagaagggggtccccgctgcacctcctgcagccgccacctccacatggttcagtccatagggggtggctgggacagggcggggcctcaccccgcctctgttcgcctgcacctcccaagtgccctttccttccagggctggctggggacggctgtacacagcaggtccagatctacatgtgcctctacatggtgtggggagttagtgtgagtgcatggggcctgtggagtgcaagggcatgtgggatgcaatgagggtgctgtgagcgttcatgggacctcaggtatgtggggtacagcggtggtgcagtacgtgtacatggggcccatggggtgccatgtgggtgctgtgagtgtatgtgggactcatgtggtgccatgtcagtgctttgagcatgcttggggcctgtagggtgcagtgggggtgctgtgagtgttccgggactagaggggtgcagtggaaagtgctgtgtgcatgtatggggcctgtggggtgcattgggggtgctgagtggggttgctgagtgtgcgtggggcctgtgtggtgctatgtgggtgctgtgagtgtgtgtggggcctgtggggtgtagtgggggtactgtgtgcatgggacccatggggtgcagtggggggtgctgtgtacatgcatggggcctgtgcggcctgtgggccccctggagtgtacgttcttggtgccactggctcctgtggctgtggtggtggtgggaagcccctgtgggactgtggtcattttcagggaagctaaaagtcaagtctcctttaaccaaacatgaggaggtgtctggtgaggcgaaaagccaggtacagggacaggtgcaggcagtggctggggcccttgccctccacatggaggtgctgggccaggcctcaaggcccgagttccctgccctgagcctggaaggcattttgttaggaagcggtatccctgctcctgtgggcagggagggtctctgtggtctccgtcagctgaactattctgggccagccttgtagcgttatcattcccacctggctggggaattcctagaggagggaccaaaagatgccccccggcccctgggggaggtgaccttgacttt

SEQ ID NO: 38512 - DNA, 1882 bp, Artificial sequence
  DNA replication origin
tcccacctcagcctcccaagtaggtgggaatacaggcacatgccaccatgcccggctaatttttctgttttctagacagtctcgctatgttgctcaggctgttcccgaactcctggcctcaggtggtcttcctacagcagcttcccaaagtcctgggattacaggcatgagccactgtatccacccccttttttctttaagtaaacgtaatgtgagccaaagtgtttggaaagagagacaaattccttttgatacacagatgccaagtgtttcatgtgttcttttcactgtcctctcagtgttgaatttacttctgatccactttatttcattcttgtggctctaaaagttttccccttttagaaggatgtttgcagacgtgtgtatggcaggtttagctagaaccttgtaaatattctacctggagttctgagattttcctgacttttgacttttcctgtgtggaaacattttttaaaaaacatgttagggacattgtggagttggttggaaagagtggctcaaaccgggctgaatgggcgtgtctggagatccaaggtccgagtgggctttccgtgctgacactgctcagctgagtgcattgtgctgcacgacctcaggccacgacattgatttagttccactcgtgcatgatgagctgccagcttttgtttggatgtaaaataaaaactcacattgcctttttcctagcacagagcaggagagggagaggggaagtgagactcagcagacattgatggagggtccattaagagccaggtccatgctgagcaacggccagagagacagtgtctgggacgagcttggattctggatgaggctgggtgtgggagctgtggccatgggtgccggggccagccctgggtgaggctgggtgtgggagctgtggccatgggtgccggggtcagccctggatgaagctgggtatgggagctgtggccatgtgtgctggggtcagccctgggtgaggctgggtgtgggaggtgtggctgtgggtcccggggtcagccctgggtgaggctgggtgtgggaggtttggccgtgggtgccggggtcaggcctgggtgaggctgggtgtgggaggtgtggccgtgggtgccggggtcaggcctgggtgaggctgggtgtgggaggtgtggccgtgggtgccggggtcaggcctgggtgaggctgggtgtgggaggtgtggccgtgggtgccggggtcaggcctgggtgaggctgggtgtgggaggtgtggctgtgggtactggggtcagccctgggtgaggctgggcgtaggaggtttggccgtgggtgctggggtcaggcctgggtgaggctgggtgtgggaggtgtggccgtgggtgctggggtcagccttgggtgaggctgggtgtgggacctgtggccgtgggtgctggggtcagccctggatgaagctggatgtgggaggtgtggccatgggtgctggggccagccttgggtgagtctctgtgtgggagctgtggccgtgggtgctggggtcagccctgggtgaggccgggtgtgggagatgtggccgtgggtactggggtcagccccgggtggggctgggtgtgggaggtgtggtcgtgggtgccggggtcagccctaggtgaggctgggtgtgggacgtgtggccgtaggtgctcggggtcaggcctgactgaggctgggtgtgggagctgtggccacgggtgccggggtcagccgtgggtgaggctgggtgtgggagctgtggccatgggtgccgaggtcagccctgtgtaaggttgggtgtgggagctgtggctgtgggtgctcagggccagcccataggccagcacgctcaggtaatggccatctgcagaacaccctgtcca

SEQ ID NO: 38513 - DNA, 917 bp, Artificial sequence
  DNA replication origin
ccagacgatgggcggccaggcagagacgctcctcatttcccagacggggtagcggccgggcagaggctgcaatctcggcactttggggggccaaggcagacggctgggaggtggaggttgtagccgagatcacaccactgcactccagcctgggcaccattgagcactgagttaacgagactccgtctgcaatcccggcacctcgggaggccgaggctggcggatcactcgcgcttaggagctggagaccagcccggccaacacagcgaaaccccctctccaccaaaaaaataggaaaacccgtcaggcgtggcggcgcgcgcctgcaatcgcaggcactcggcaggctgaggcaggagaatcaggcagggaggttgcagtgagccgagatggcagcagcacagtccagcttcggctcggcatgagagggagaccgtggaaagagagagagagggagagggagaggaggggagagggagagggagaccgtggaaagagagggagagggagaggagggagagagagagggagagggagagggagagctgaagaactttgtttagcatttcttttagagcaggtctgttggtggcaaattttcttgttttttttcatctgagaatgtctttctttcaccttaattcgtgaaagatatttttactatctttgttgttgttgttgtggctgtcatttacttctcagagccctcagatgctgcctccttccttgtctttcgttgtagggctcttaggttcctttgaggggttgtggttagaaagaggagacagtgaataccttgcaaggagacattaaactccatgagagagatccccccaaaaccagcagaggtacagggggctatagattcctggagaaaaagagatcttcagcccactccttgaagatcctggggaagt

SEQ ID NO: 38514 - DNA, 1071 bp, Artificial sequence
  DNA replication origin
ggggcgtctcgcctggcggggggctgacacccccacctccctcccggacggggcggctggctgggcggggggctgacccccccacctgcctcccggacggggcggctggccgggcagaggggctcctcacttcccagtaggggcggccgggcagaggcgcctctcacctcccggatggggtggctggccgggtggggggctgaccccccacctccctcccggacggggcggctggcctggcgggggctgacccccacctcccttccggacggggtggctgctgggcggagacgctcctcacttcccagacggggtggcagccgggcggaggggctcctcacttctcagatggggcggttgccaggcggagggtctcctcacttctcagacggggcggctgggcagagacgctcctaacctcccagacggggtcgcggccgggccgaggcgctcctcacatcccagacggggcggcggggcagaggcgctccccacatctcagacgatgggcggctgggcagagacgctcctcacttcctagatgggatggtggccgggaagaggtgctcctcacttcctaggtgggatggcggccgggcagagacgcttctcactttccagactgggcagccaggcagaggggctcctcacatcccagacgatgggcggccaggcagagacgctcctcatttcccagacggggtagcggccgggcagaggctgcaatctcggcactttggggggccaaggcagacggctgggaggtggaggttgtagccgagatcacaccactgcactccagcctgggcaccattgagcactgagttaacgagactccgtctgcaatcccggcacctcgggaggccgaggctggcggatcactcgcgcttaggagctggagaccagcccggccaacacagcgaaaccccctctccaccaaaaaaataggaaaacccgtcaggcgtggcggcgcgcgcctgcaatcgcaggcactcggcaggctgaggcaggagaatcaggcagggaggttgcagtgagccgagatggcagcagcacagtccagcttcggct

SEQ ID NO: 38515 - DNA, 1096 bp, Artificial sequence
  DNA replication origin
ggagcgtctccgcccagcagccaccccgtccggaagggaggtgggggtcagcccccgccaggccagccgccccgtccgggagggaggtggggggtcagccccccacccggccagccaccccatccgggaggtgagaggcgcctctgcccggccgcccctactgggaagtgaggagcccctctgcccggccagccgccccgtccgggaggcaggtgggggggtcagccccccgcccagccagccgccccgtccgggagggaggtgggggtgtcagccccccgccaggcgagacgccccgtccgggagggaggtggggggtcagccccctgcccggccagccgccccgtccgggaggtgaggggcgcctctgcccggccgcccctactgggaagtgaggagcccctctgcccggccaccaccccgtctgggaggtgtacccaacagctcattgagaacgggccatgatgacaatggcggttttgtggaatagaaaagggggaaaggtggggaaaagattgagaaatcggatggttgctgtgtctgtgtagaaagaagtagacatgggagacttttcattttgttctgtactaagaaaaattcttctgccttgggatcctgttgatctgtgaccttacccccaaccctgtgctctctgaaacatgtgctgtgtccactcagggttaaatggattaagggcggtgctagatgtgctttgttaaacagatgcttgaaggcagcatgctccttaagagtcatcaccactccctaatctcaagtacccagggacacacacactctgcctaggaaaaccagagacctttgttcacttgtttatctgctgaccttccctccactattgtcctatgaccctgccaaatccccctctgcgagaaacacccaagaatgatcaataaaaaaaaaaaaacaaaaacaaaaacaaagttcttcagacagaagggaagtaataccagagggaaaactggagtttcaggaataaaggaagagcaacagaaatgacaaagagcaggctgggcatgatggctcacacctgtaatcccagcactttgggaggctaaggcgggcagatcacgaggtc

SEQ ID NO: 38516 - DNA, 1206 bp, Artificial sequence
  DNA replication origin
gcccgggcgtccggcgggacattcaggcggctggtggggtcgagagtccggggccgcccctgcgtcgcgacccgcgccttagtcaccagacccggctccgggagcgcggcctcgggtgctcctcgcggtgcggggcgcagactcggcgcatctgctgtggtgcctgctcttccggtcgccctcgagggcggggcgggggtcacgccctaaaatacagcgcccgctgggccgaacgcttgaaaacccggtttcccgacggcggcggcgcgggcgccgtgcgaacgagggcccgggtccagcacagccccaaggctcggcctgaggcgggcggccttggccggggccccccgtggtaatgagctacgcggtgcccgccgcctgcccagcgcgggccgtttctcctgacgccgccggcgtctggtcgaggcccaggattccctcctgccagtgtggctgcggccccccacggagcgggacccgcgttcgtggcgcttgggacggttgattgaaagggtgtagaagtctgttgcgaattttatctgttgtactcgttttgcagattcgcccctttcctcccgcctgtgcgcgcagtcacacacaccatgtgggagtctctgatcgcgttgggttcataatcatcgatcgtgcctgggtactgatgccccattgttaggagctctgtgtggggctgtatgtttgcacaggactcacgtgaggaagggtggccacgtttctttctgctctgtgagacttaggccaagccctggaactagggaggaggttcaggaagagacccatgaagctggcggggccttggagaagggcaagtgattttcaaggtcagtagtaagaggggtcatgagtaatggtaagtttcttagcggcctttgctgtgacttctaggtttttcacactggacttaaaatacttttaaaagcagagtttttgttcttcttgttgttgttcttgttgttgttgctgtttttgaaacgaagtttcactcttgttgcccaggctggagtgcaatggcgccatctcggctcactgcaacctctgcctcccggattcaagcgattctcctgcctcagcctcccgagtagctgggattacacgcccagctaattttttgtgtttttagtggagatgggggtttcaccatgttggccaggctggtctcgaacttctgaccttcaggtgatccagctg

SEQ ID NO: 38517 - DNA, 1452 bp, Artificial sequence
  DNA replication origin
gagatccgccagagcacgtgtgtcctgtgagatccgccagagcacgtgtgtcctgtgatccgccagagcacgtgtggcctgtgatccgccagagcacgtgtggcctgtgatccgcctgagcacgtgtgcctgaatggcaattccttgccattcctgaatcaaccctttgttttggaggagaaaaagttccaattttgataccctggtacataaacaagaaggaatacggtacaatatagatgaacacctcctgaaacaaagtctcataagggagctactgtgcagtggcttgactggggatatgaatctaagctgaggattgaaggaaatgaaacatttgattggggcaaagaagggagagaattcattcagttcaacacaagcatagagggctcctcctgagtgccaggagctgagtaccaagcaaccaggagtttacaatctccacagagagggatctgagtaggggggtgagaagtgaaatttggatgggtaggatggactgtcaaaagtgggctgtggacataggcctggagtcagagagcactgtcctctgcattttaggaaggtggggaagcctgtgtgcatgtgtctgtgggtctgtgtggaacaggatgtgcagtgtggaggtgtgtgaatagtgaaggcaaaggagggtttgtggagaggtgtgtgtgagatagttgtgtgcatgtatgtaggtgtgtggagaggtgtgagatggttgtgtgtgtatgtaggtgtgtggagaggtgtgtgtgagatggttgtgtgcgtatatgtaggtgcgtggagaggtttgtgtgagatggttgtgtgtgtgtatgtaggtgtgtggagaggtgtgtgtgagatggctgtgtgcatgtatgtacgttcgtggagaggtgtgtgtgagatggttgtgtatgtgtgtggagaggtgtgtgtagggggtgtgcatgtcacactgggtgtgtctagaagggttgtgtgtgtgtgcttagtgggtgtagtagtgaggttgtggtgaatgtgagttatacagttgtgtttgtgtacattgtgtgtatgacagtggtatgtgtagcagtgttgtgttaggggtgtgtgtgtagtggttactgaataagaactatgtgaaggacagatgctttctttattgaattaaaacctgcctgggtgagagagagacagagcagcagagagacagaggcagagacagacagggagacagaggcagagacagagagacggggaaagacagagacagtggcagagagacagacagaggcagagtatcatgaagagatgagacagagacagtggcagagaggcagacagagtcagagacagagaagcagagagagatgaagagagacacgaagagagacacagagaggcctggaatgtcctgtgtgatgccggccaggggtgcctgttgtctctcctgcagtcaattcctctaaagtc

SEQ ID NO: 38518 - DNA, 1808 bp, Artificial sequence
  DNA replication origin
gccttgcgcatgcgcaggcggcggtggcaaggctacggttcgcgccagcggccggcgctatggggctgagccgcgtgcgggcggttttctttgacttggacaacactctcatcgacacggccggggcgagcaggagaggcatgttggaggtaacgtccccacccatggcgctcctctgggcggggtcagtgcgccccgccccgtcctgcacgctcacctccccttgaccccacttccaccccggcgccgcgggccgctcttgctggttgaaacctgtggagcgtgcgggtgcggaggtggctggaggcgcgcgggccctgcgggtctgctttccctggcctggcggccgcttgtcacccaatctcgagccctggagcggctgctcgcaggtgccttggcgctcgggacgcggaagggctccgtgacggctgccacggtggcggaggtgcccgtgggcgcgggaggcgacagcaaagccgcgagaccaggcgctggtcccgcccccggtcagactgtcggtgtggagctcgacagagggtcgtgtcccccatgcgactttcggggttgctgggaggagacatggtagagttagccccagtgttgacccaagaagggacacggctgtcagtaccgagcctggacttaagccctgctttagagaattgtcgccgcagaacttcttctggcctccctggcggggtggtggtcaccgtggctttctgacacgtgacacagcaaaagcccgtgctgcgagggcatgcccttcctgaggcgctcctccgcggcactgcccctctacacgcgcggaggcgctttcagaccttcccgtgttccagccccagtccaccccggcttccctttctctaccttcagcttcaaggggaaagggaaggatttatcagatgtggaaaactcactttcaaaagctaattcatccaaacctgagcgccccgtcctcttcatgcttcatcagttagtttttgtgtccctggatcttccactacctcatccgttttctttttagctgcattccactcctgccgcatattcatgtttgccctatagttttaaaaaagctgtaaaaaggatgcctccctttgggctattcttcctgctgtagatgttgcctgtctctcttgacagccatgttttcccggagaaatctatacccgttatctccttgtctctacctcctatttattactaaatccatcgtaatgtcgctttatcttcaccgctagactgaaatagacttgctggatcactaggcattcccaaaatgccggaatcagtagacatttttaaagtctgtcttcatgactttactgaggcattccacacttttaacttgttggcctccacctcaggggtgccaccctgtgccatattgcctccagtatctctcgctgcagatgttacatatttacctgtgtgttattagtaagctgagtcctgtgcatttcaattaaattattgctttaggccaattcttgctgtaggcccagagtttgggctttaaaatcagacatttgaatatgaatcacagctctcccaaaacctagctgaaagtgcctcaaggaattaaccactcggagccttatatcttcataaaatgtgaattatattagtcctcaataaccctgtaatacttgggaagcccatggttgcagtgtccactcagcgaactatagcaccttccaccctcgtacgctgtctgtccaccactgcacatgccccgtgcatgtctcagttacagctgaactcatctctcacctagactgttgctgtgggcttgtctccaggtttac

SEQ ID NO: 38519 - DNA, 816 bp, Artificial sequence
  DNA replication origin
gccactcagtctccgttcccggttgcgtgtagtggcggctcgggcggtgaacagcccggatttcacaggggcgccgagcaacccaggtcctcttgtgccagggtcgccgctcctcgggtggggacgggccagcggcctagcgagctgccacgggggtcttttggccggaggtggagggggactcggccacagccagggtccactggtggggtgggggttacagccatgagacggatgggctaggtccgactcgggttccctccgactctgatgctccagactttattgtgggaggcgggacaggggaggacttcgcccgcgtgttttggggaagggccgctgctttgggttgggagcaccccgccttgggacgatcttccgcggataggagtgtaggccgggaccaaatgtcctcgcacgggcacgtctagacgtgttttggtggggggggggggggatctgcgtggggcagcgtccgcgggaggtgaggtggctgtggggacccaggtggcctcttccctggggccttgctaatgacggcaaaatccgggttctgccaaaatatatttaaaaaggtttattcctagtcagtatgagtgactgtggcccaggttattcagcctcaagaggtcctgtgaaagtgcccgagatggtcaggcttgcaggttaattttatacaattcagggagacaggaatttcaggtaaagtcataaatcaggctgagcagtgtggctcatgcctgtagtcccagcactttgggaggccaggagttccagagcagcctgggcagcacagcaagaccctgtctctacatg

SEQ ID NO: 38520 - DNA, 779 bp, Artificial sequence
  DNA replication origin
ccggccgcgctgaggattctgggtagtgtagtcccgggcggcgcagagcgttccagatccctgggcgtcagcgagccgtgagatgcgtggtccaccatcggtgacctcaccgcctcggttcgccctcagccgccccggtgagctgcgctcctgcgggtccctctctgcagcgcgcccttccggcgcaggaagaagggccgggaaggcctgggacgtgagggcgctgctggggccgtagcgcgcgctcctccaggcccggcgtctccgcgttctggggaggggcggagacccaggccgcgccttgaagtgggcggtggggctgcggcttgccgagcgccccgggtctgggccgccactcagtctccgttcccggttgcgtgtagtggcggctcgggcggtgaacagcccggatttcacaggggcgccgagcaacccaggtcctcttgtgccagggtcgccgctcctcgggtggggacgggccagcggcctagcgagctgccacgggggtcttttggccggaggtggagggggactcggccacagccagggtccactggtggggtgggggttacagccatgagacggatgggctaggtccgactcgggttccctccgactctgatgctccagactttattgtgggaggcgggacaggggaggacttcgcccgcgtgttttggggaagggccgctgctttgggttgggagcaccccgccttgggacgatcttccgcggataggagtgtaggccgggaccaaatgtcctcgcacgggcacgtc

SEQ ID NO: 38521 - DNA, 745 bp, Artificial sequence
  DNA replication origin
agagagaaacaatcataacagggatctccaggaaatgtctcccggacagactgggaagtcaagcactgggaagtccctaacggacagggaagacatgtggccagagcgagaggcatctaggacaggggaggcagagcaagagggaggacagagcagaaggagcaagagggagaacagagcagagggaggacagagcaagagggaggagagagcagaggccggagcccaggccggatatagcaccatgccaccgccacaggcataaggggaggggttccaaaagggtggcttgtccagcgaggtcaccgttccagtgacagggattgttgccatctctcattcccggcttcctcttgcagactgtatcatggtgtggcttcatttctcagagaagagccgtgaaaagatacaagcatcttctctgacgtgggtccgctgctctcctgcgggacaaagagctcctgtggggctcttgtcctcggctgcagtgtgatcattttgatcttaggagagaggccgctcaggatggggatgagatttcaattgctcccggacccatgcatctcttcacgtaggccaggacttcacacacccaaagcggatccggggcggcgaaaacgattgacaaccggcctcatgacaaaggcagagacgcagaaagagggtcaccaaagacaggccgccatgcgagaaaccgctttgtggcgcacagggcacattctgccaaagacacacacgcacacgg

SEQ ID NO: 38522 - DNA, 947 bp, Artificial sequence
  DNA replication origin
actgcttataccacctattgatatatttcatagtatttatcacaatataaaattacttcattttccccttttaatttaaaatcttttttttttctccagacaagaatgtaaacctcatgtgggcagcagacatgtctgcttacttttttttgagacggagtctggctctgtcacccaggctggagtgcaacggcgcgatcccggctcactgcaacctctacctcccgggttcaagcgattctgctgtcccagccttccaagaagctgagattacaggcgcccaccaggcccggctaatttttgtatttttagtaggggagcagtcgggctctggactacatttcccggaggattctgcaggccaataccacgtctcgcgagatttcggcttcctcttagccaggtggcagattctttcgctgtgcccaattagctgctgccgcgccttggagtccggagtaacttggccaggctggccccgagcggaactggagaaagctgagggtgaggaatccggctccggtccttttgtgtgtggagggctgaggagaggagtttgcgtgtgtgattgccatggttgccgtgggtcttcgtggtctgtgactgtggctgcgtggtgctgactctgggtgatcaagtgggcgcttgtgactgtgcgcgctcggagtggatgtgtgtgtcctggacgagccgcgttgtgtgtgcggatgtggacaaccggtgactgtgtggttggggctgcgtgtcccagggtggatgtgtgactttgcgtgtgtgtgcagtactgtgtgtgcgtgagttgcaggtctgtggctgtgcaggtgcaacttgtgtggccccgtggtctgtgtgagagaggagagtgtgactggctgtgaggcagagggtaagtggatatagggaggcatgtgtgtgattggaactttgtgtgtccccttgagagaaaa

SEQ ID NO: 38523 - DNA, 2007 bp, Artificial sequence
  DNA replication origin
catgaaaataaagtccaatcagagtaggcctagaggtttttttttcttgtccaatcagaacatgtaatccaggaactgcatttgcataacctcttatgctgaggtcatgtcaggtcatttcaggctcttctgtgtcgagcggaggagctactctgtgcccagcttagaggactggaagaggccgcaaccttccacctgctggaggttggaagatggatggaggctggaggatggatggagcctggagcctggagcctgggtcactacctcgctacggttggtggtggcgatagagcagtaggagggcggcgggcagcaggagcttctgctgggctggagaactagaaggaagaggcactgccacatgctggaggctggaacctgtgccatcatggctcgcctcgctgtgattgtcagtgatgtcggagactgcagctcagccacagtggtagaaatgtgatggggtaggtgagtttccgtgcctgccctgtacgcctctgggggcaagggttgggtgtcctattggggctcactgctagaggctaccctgcctgtggcagtggtctggttgggggcactctctggtgttgcattgctggctgtggggcaggttggctggctatctggggctatactgcccgtggtggcaggggtggtggggggaggcagattgtgtacactagcgtgtattgccggcggctggtgaaggattaggggtgctatcttctgctgcactgcctgcggcagggggtgggttgggtggagttatctggggctacaatgctggcagttgggggtggtttaggggcgttgttgggtgctgcactgcctgtgactggggggtgcaccatcaggagatgaactgcccgtggctgggtcagattgtgggcactattgggtggtatgctccctgaggtgtggggggagtgctttgggggggtattggggttacattgtctgaaactgtagggtgtgttggatgtgctatccatgggctacactgctagtggcagggagcagattaggggtgccatgggggctacactgccagcggcgttggcgagctgaggaggtggcagcggcagtgacagcagtgacctccttcttctggtagcctccaagtaagggatggttctcctcttcttggactccagactctagaaggcgattttctcccatgcgagctagattgcacggcagggcctccacacccactgtggtttcctgccccgtgctcatgctctgtgttgcgaagaccacctgggactaccaggcagggagtagtgggcatgatgggggaagtggggtacagggcactgtgggtggaggtgtcaggtatgggaaccagcccttgggtggggagggctggctgggtctgagtttctcctactcaggctctgcgaggagggcagccttggtgggcccagcaattgttggccagctggacttggccaggggccggtttcagtgaaggcactcactcccaccccaggccccagttcctggccagcttttgccagaagaagaggttggactttggaaggtgggtgtgagtgccttcaatgaaactgatccctgacacccagtcatcagcatgagaaggtgaggctctaacggttccactccctgagtcctgttttgggatcttctggctttgcctgcccagctgctccaagccaggctgaaggaggagaaggaggagtcgcctgtggtagggtcgagcagatgacgtggctctgcagcttgcctcatgcagttggtggtggagatggagaccgcagctcgactggagtggtatgagggcacccacgggggccaggtggtaggagcctggtagggtgggctggtacgttgagggtgactggttgtattggcattggcgctagtggtggtagcagtaggaagtctgggggccgggacgggggagtaggaacactgcagggcccatcccgttctggggtggggaggaacctgtggatgctgtaacaaaggtctcggtggcagtgg

SEQ ID NO: 38524 - DNA, 1587 bp, Artificial sequence
  DNA replication origin
agcccaatcagagtaagcctggaggtttttttctcatccaatcaaaacatgcagtgcaggaacctccataggcataaccgcagtatataaatgatgctgaagcgtgatcacgttttttcaggttcctgtatcttcctgtcgagttgctggctgcccgatgtagaggactaggaatcaggagtcagtggccgtatgctggaggctggagccgagggagcgtggctcccctcgctgtggttgttggcagcaacggagagatagcagcgcggctggaacggtaggagaaggaaaacagttttgggatagatggaggggattaaagacggtaattagtgccaaagcaaaaaaaggatagcttagccagagaaggcaatgcaaaaagatggcggcaaaaagatggtggggaaaaaagtttttggctagatagaggtgtaaaaacagggtgggaagcgggagggaaggaatattttgcagaaagacagtgggtaaaaagtttaagggtagatggagggggtaaagagggtgtcaagtgggaggaggaaaatgagggaggtgatgggggaaaacagggcaagcagtagggagagaaggttttgtgaaaagacagtggggcgaaaatacagtgggtgggggaagttttcgggttgaggagcaaaagagggtagcaagtgggagaagggaaaagagggtagccagcaggaggaagacaaggttttgtgaaaagacagtggcagaaaagaaagacggtagagaaagaaaagacgatgggtaaaaagtgtttggatagatggaggggggaaatagggtgagaggaggaagaaagagggtggcaagagggagcagggatgggggttgggaaaacgacggaaaaacagtttggggtaggtggagtgcaaaaaaagagggtggcaagcaggataggggaaagaagagcacgagcggtaaaggggggagactttgaaaagggggaagttttggggtgtagatggagggggaaagagggaggtgaataggagtggggagaaggctttgtgaaaagacgggggaaatgtttttgggtagatggagaagggaaagagaatggcaaggaggaacgggggaaagactatgaagaaaacagtttttgggtggatgaagggggaaaagagtgtagtgagcagcaggagtggagagaaggttttgggaaaagatgggggaaaatgtttttgcttagataaaggagcaaaagaaggtgatgagagcgggagggggaaaagagggaggccagggataaggggaaaagacggtgggaagaaactggggaaagggtttgggtagatggatggggaaaagggtgttgagcaggagagtagagaaggctttgagaaatcagggtgggcaaaaaatgatgaagtttggggggcagatggtggaagaaaaagggtggtgagagggagggggccaaaggcggtcgggaaaagaaggtagggaaataatggtgggggacaaaggtttcgggtagatttttttaaataagatcatttgtatttttgcttttgagcagtttgagttctttatatattttgtgtatgaaccccttgcctgatg

SEQ ID NO: 38525 - DNA, 888 bp, Artificial sequence
  DNA replication origin
ggccccctcccttccccaggcctccctgagcgcctctgcgggcccctcgggccccacgaggggcggctggcgggtggggagtgtgacccatcctcggtgagaaagccttctctagcgatccaagaggtgtgccttggggtacgggatcccccggcctgccgcctctgtctctctctccgttatggtagcgctgcagtagcgactcgcttgcagaggaaccctcctcagcttccccctcgacggggtgacggggggagagcgagggttccgccggccaccgcggtggtggccgagcgcggctcgtcgcctactgtggccggcgcctcccctttccgagtaaggggaggatcccgccggcagggcccagcgtcctagcgggttgggacgcggctgacagcgagcgatggctgcgcgcagcgttccgtccggcgagtgacccccctccgccgcgagtcagctctccgcccgctcccttgccgagtcgcgaccggtgcggacgacggcgtttgcgtggcacgtggtcgggccgcctggccctgggaaagcgtcccacggtgggggcgcgccggtctcccggagcgggaccgggtcggaggatggacgagaatcacgagcgatgtggccctggcgttgagtttgtggctgtggtcgcttcggggccccggtggcgggaccaggggctcgtgaggcaggtcttggtgggtgccgagggccttccggcgtcccaggcggggcgccgcgggaccgccctcgtgtctgtggcggtgggatcccgcggccgtgttttcctggtggcccggccatgcctgaggtttctccctcagccgcccctctgcgggctcccaggtgcccttgccctcgcggtccccggcccttgcctgtctgcgc

SEQ ID NO: 38526 - DNA, 1128 bp, Artificial sequence
  DNA replication origin
ccacccgcctcttttcttcagaggcaaagcacctccgagtaaacccacacacgaccggtcggaggcagaacggtagcccctcggcggccggccggcgcacgcgtcaccagcccaagcccaccgcgatcgctcacagggcccgtgcgcacccgccagaggggagcaccggacgtgcgctcgccggaccaggcgggcgcccttccccgcgtgggaggggcgcgtctcgtctcactcaaccgcctcgaaccccacaccgacgagctccctcaggacccacgcgcggacaccgaggcgccgaccggaggagggggcgctgggggtgggaacgacacaccaccgctcggcctcgggaacctgagggacaacccggagcgctccaggagcaccgcaaaggcccagggggagccaacgctcgcgcaaactccccgggagggcagcacgacgggccggcgggacagcacccccaccgctgcggaggggggccgcccgcaagtcgacaaccacaggaggcgagagcgaggggtgcctgccgcgtcagaggaccccccgacccaccccgcgaggcagaaggcgggggcgggacagcgaggtcaggccgggttccgcaccccatgccttcccaacgcaccacccgcaggcgaggaagaggagagacaaggggcccccgcgggcgggacgagaagaagggtcccattcgccacgaatgtccgcccctcgcccgtcgcggctcggacacggccagggagagcatgacatcaccatattctattcttacaagagtgctgccacgtaagtgtcaatgaatgtttgtgaaataaatgagggactaaaggagtgatcgaacaaataaaaataagttatctgtgtgtattgtatgtgtgaataagattttgagtttggccaaggcagttaatcacatattaacaactctttagatacataaggtttatagcaatgaggtacaaaattggttcaacaccaaattctaagatgaaacaaggtttatgttcagaaatatagtgttactttttctaatatcatttgccctccaactatcagcatgacacatgcaaaccattgatacgtgttttttttttttgtattgaagattccacatgaagaaaaatt

SEQ ID NO: 38527 - DNA, 929 bp, Artificial sequence
  DNA replication origin
tatgtgacccggagcagcaccagggcggggaggaacagaagtggaggcaaagtaaacattccctgactgggtacgtctgtccagaacccgccttcatcttgacccaaacgctgaatggctgagatttccacttccgagtttctgctggggagctacggcggcctcagagggccgaaaggtgccgcaggcagctgctccctggctccctctcgaggagcccctgaggattcgtgcctccccgaggggagtaaagtccgcccgaggcgccggtactggcggtggcggggctgccgggcgcgctgtgaaacggcctaccgctagagctgcgggctggcgacggtccccgcgggggcgggaagcggcttaggctgccttcgttggcctgcggcggcgcggctggaagcgcgggccactcgtgcgcgggtcactcggggctgtgcctcgtgcgactgtgtgtgtaggcaacaagcaggaaataccctaaaatagaatgaagcaccatgttgagggccgcggacgtcgcgagtgctgtgggaatgtgggctgaggtggagagttatggtggcgcgtgttacaagctcaggggtcaggaagaaggctaatcgtggaggcggcatctgtggagggtcttgaacgctgggcaggcttttgcccgatagagatagaggaagctagtcctgtctgatggaggaaacagggcggaggcgtggagggagccgcaagcaggccaggcctgtaaagcagagtgatgggaaccaggatagagaaggcaagtcggggtcctgttttcgctgaagaatttgaatgaaatcagtaaacaggtgagagggatccatcgcaagagcatgggatgaaacgaggagtagtccacggtgattcctctgcagcggtgggtattattcatcgcgtatgtgacaccaaaacggtgg

SEQ ID NO: 38528 - DNA, 1025 bp, Artificial sequence
  DNA replication origin
  misc_feature (769)..(788): n is a, c, g, or t
atggagtggattggagtagagtttagtggaatgctgtggaatggaatgggacggaatggaatggaatggaatgtcttggagtagagtggattggagtggagtggagtggaatggagtggaatagaatgggattcaatggaatggagtggaatggagtagagtggactggaatggagtggaatggaatgtaacagaatggaatggaatggaatggaatggaatggaatggaaaggattggagtggaatggaatggaatggaatggaatggtgaaatgaaatgtgagctgagatactgctgctgcactccagcctgggtgacacagtgagatcctgtcgaaagaaaggaatggaatgaaatggaatggaatagagtggagtggagtggagtggagaggaatagagtggaatgtaatgggatggtttggaatggagtggagtggattggaggggtttatagtggaatggagtggatggaatggaatggagttgagtggagtgaagtggagtggagtgcagtggaatgttatggaatggaatggaatggaatgcaatggaatgctgaagtgaaatatcagctgagattgctccactgcactccagcctgggtgacagagtgagatcctgtcgaaagaaaggagtggaatggaatggagtggtgtggtatggaatggaatggaagggagtgtagtttagtctactgtactgtagtggagtggagtggagttgaatgcgatgggatggaatggaagggagtggagtggagtggannnnnnnnnnnnnnnnnnnnacagagttagatcctgtcaaaataaatgaatggaatggaacggaatggaatggagtgggatggagtgcagtggggtggagtggagtggtatggagtggaatggaatgggacagaatggaatgcattggagtggattggagcactttgaggcctatggtggaaaagtaaatatctttacataaaacctagacagaagcattctgagaaacttctttgtgatgtgtgcgttcttctcac

SEQ ID NO: 38529 - DNA, 838 bp, Artificial sequence
  DNA replication origin
  misc_feature (1)..(67): n is a, c, g, or t
nnnnnnnnnnnnnnnnnnnnnnnnnnnnnnnnnnnnnnnnnnnnnnnnnnnnnnnnnnnnnnnnnnnatggaatggaacgtagtgtagtggagtgtagtgtagtggagtggagtgcagtggagtggaatggagtgtaatgaaatgggatataatctaatagaatggagtggagtggagtggactggaatggtgtggaatgagatgggatgcaatggagtggagtggagtggagtggaatgaaaggaatgtagtggagtggagtggagtggaatggaaggaaatggagtagaatggaatggaatggaatggtgaaatgaaatgtgagctgagattgtgccactgcactccagcctgtttgacagtgagatcctgtcgaaagaaaggtatggaataaaatggaatggaatgaaatggaatggagtggattggagtagagtttagtggaatgctgtggaatggaatgggacggaatggaatggaatggaatgtcttggagtagagtggattggagtggagtggagtggaatggagtggaatagaatgggattcaatggaatggagtggaatggagtagagtggactggaatggagtggaatggaatgtaacagaatggaatggaatggaatggaatggaatggaatggaaaggattggagtggaatggaatggaatggaatggaatggtgaaatgaaatgtgagctgagatactgctgctgcactccagcctgggtgacacagtgagatcctgtcgaaagaaaggaatggaatgaaatggaatggaatagagtggagtggagtggagtggagaggaatagagtggaatgtaatgggatggt

SEQ ID NO: 38530 - DNA, 1542 bp, Artificial sequence
  DNA replication origin
agactgtttccaaactgctcaatcaatagaatggttcaaatgattcagatgagtgcacacataacacagaagtgtcccagaaagcttccgtctagttttcatgtgaagatatttccttttccaccattggcccccaagtgttcacaaataatcctttgcagattctacaaaaagatggtttccaatacactcaatcaatagaaaggctcaattctgtgagatgaattcacacatcaaaaaacagtttctcagaaaacttctttctagtttttctgtgaagatatttcctttttcaccataggcttcaaagcgctcacaaatatccttttgcagattctacaaaaagactgtgaccaaaatgctcaatcaatagaatggttcaactctgtgagatgaatgcacacatcacaaaaaagtttctcagaaagattctgtttagttttcatgtgaagattggagtgcagtggaatggaatggaatcgaatgggatggaatggaaggaaatggaatggagtgaagtggaatggaatggaacggaatggagtggagtggagtgatgtggattggactggagtggagtggagaggaatggaatggagtagaatggaaaggagtggagtggaatggaatggagtggagtggagtggaatagagtggagtggaatggagtggaatagaatggagtggaatagaatggagtggagtggaatggattggagtggagtgaagtggagtggattggagtggagtggagatgaaaggagtggaatggtatggaatggaattgaatggaatggagtggaatggaatggagtggagtggagaagagtggaatggagtggaatgtagtggaatggagtggagtgcagtggagttgagtatagtggattggaatgcagtggaatgtaatggaatggaatggagtggaatggagtggattggagtggagtggagaggaatggagtggaatggcatggagtggagtggaatggaatggaacggaatggaatggaagggaaaagaacggaatgaaacagaacggaacggaaagaagtacagtggagtggagttgagtagagaggatcagagtggagtggaatggaatggaatggaacggaatggaatggaatggaatggagtagagtggaatggagtggactggaggggaggggagtggaatagagtggaatggaatggaatgaaatggaatggaatggaatgtagtagaatggaatggaatggagtggaaaggagtggagtggaatggaatggagtggagtggaatggaatggagtggagtggaatggaatggaatggaatgcaatgcaatggaatggaacggaatgaaatgaagtggaatggagtggagtacagttgagtggagtgaatcggagtggagtggaatggaatggaatggaatggcaaggaatagagtggagtggaatggaatggattggagtggagtggaatggaaaggaatggaatggaaagcaatagaatggaatggaatggtgaaatgtaatgtgagctaagattgtgcca

SEQ ID NO: 38531 - DNA, 1721 bp, Artificial sequence
  DNA replication origin
ttttttacacatttgtataactcaggtaatgaaatgtgaaactaagtgattgcctaacaattataattgatgttaacgatgctaccgggaggccacccctacagtggctgtgccaagtctatgtacttgctagctttgctaagttacatgggattgcctatgtactaaatgtaggtgggggactggtctgaggatgcggcagtgccaccctgccccaatgtcgaagctctggatggggcgccaggcaccgtgcggtcaagagatggaggcgggcgcgtgatggcggacgacaccgcagcgcccagggggtcactgccaggggcaaacgaaccctgggaccacggccaggaatgctgtcagacgggccgtgcagtgggctttcagtcccggacacaccgcgtcacatgccgggcaggcgaggggcaggctggcgaggaggactgtgcctcagaggggtgttggggaggaggggcgctggagcggtggtcggccagtcgccaggccgccaccaggggcaagcggtgaactgcggcgacggggacatgctccccaaccctctccccggtggacccttcctacttgccttcccgcccaactagcccccaccactgatgacacacgatgacgatgatggcatgggacctttcaccccaccagggtcaacaaaccctgcacaacgagttgtgtgaggcacgagggagcccccgagggaggaaaccggaccgcgttggtggccaagggaactcgaccccagccagctctattccctctatgttttcgcgggtggtggtgccgccctctctctcttcctcacagccaggagccccccttccccacgccacccaacgcgtgaccacaccgggcctgtgaggggagggggaaggggcaggcacagcaggagaggagggcagacatcaccggtctgcacttgggaggacggagggcaccgacgtgccctgccacggaacccgcaaccgtgcaccctgaggatcccggaggcacccccaggggctattgattggcaagtgacactcagacaggcataaccctgggaggaacccgggccacaagtccattcaaagtgtcaatgatcaatgtgccctgcaattcacattaattctcacagctagctgcattcttcatcaatgcagaagctgagtgatccaccgctaaaagtcatacaaggtcaatttggctagggtgctcccaacaatgtgaggcccacctggcacagcacgtcctccagaggggttacctcagaccggccagtcagacagcaaggggatgagcctccagaaaggggtcagaaggtttcacaacacagggaggtggtgccaaccacgggggttggggggggcgaatgctgacaccaccctacgggcaccaaggggttcctgcccccacagcgtggggcacaagccacatgcgcagcatgcacgcgatagcgtgacggccactgggaaaagcccataccagcgtcagcggcgacacgcgagagcggcacagccccggccggccggggagacggagtcggcgggggaggtgatggaggggcgggcccctcccgaatggactcccccgtgcgcccacgacacccgacccacagatggacaggtgaccccccaaggggtccttaaaactccgctccagaacgcactaggtacctggatggcaggggcggacaaggagcggggtactggcgtccggccccctaccctcga

SEQ ID NO: 38532 - DNA, 893 bp, Artificial sequence
  DNA replication origin
ggggatgagcctccagaaaggggtcagaaggtttcacaacacagggaggtggtgccaaccacgggggttggggggggcgaatgctgacaccaccctacgggcaccaaggggttcctgcccccacagcgtggggcacaagccacatgcgcagcatgcacgcgatagcgtgacggccactgggaaaagcccataccagcgtcagcggcgacacgcgagagcggcacagccccggccggccggggagacggagtcggcgggggaggtgatggaggggcgggcccctcccgaatggactcccccgtgcgcccacgacacccgacccacagatggacaggtgaccccccaaggggtccttaaaactccgctccagaacgcactaggtacctggatggcaggggcggacaaggagcggggtactggcgtccggccccctaccctcgagaagccctagtgggaaggctggggagagccagcgggccgggccgagcccagtggcgcggtgtggcagaggcgatgatggtgccagtggcagcgatgggaacccggccagccccgacaggagcaggcaagatggggccgagccggcaggacagggcgggacgacggcctcggcagggagggcacagagacccacaccccaccgtgacgctgagaaccaccccgtgcctgccaacacacacgtgggggccatggcaggggaccgctccccactgctcaccaggccggcgagccatccagcccaccccacgacacgcacacacagtttcgtccccgcacgcgtgtctctctctaccccctctctccctcccgagttctcctgctctcggggcaggcggggccgtgcaacaaacaaagggcacaaccccaccagcacacgtgctgcacggggaaca

SEQ ID NO: 38533 - DNA, 1419 bp, Artificial sequence
  DNA replication origin
acgcccccagtggcagcgatgacccattgtaaagtctgccctatcaactttcgatggtagtcgctgtgcctaccatggtgaccacgggtgacaaggaatcagggttcgattctggagagggagcctgagaaatggctaccacattcaaggaaggcagcaggcatgcaaattacccactccctactcggggaggtagtgatgaaaaataacaatacaggactctttcgaggccctgtaattggaatgagtccactttaaatcctttaacgaggatccattggagggcaagtctggtgccagcagctgcagtaattccagctccaatagcgtatattaaagttgctgtagttaaaaagctcgtagttggatcttgggagcgggcgggcgggcgagccatggcccgtccccgccccttgcctcttggcgccccctcgatgttcttagctgagtatcccgtggccctaagcttttactttgaaaaagttagagttttcaaagcaggcccgggccgcctagataccgcagctaggaatgatggaatagaaccgcggttctattttgttggtttttggaactgaggccatgattaagaaggacggctgggggcattcgtattgcgccactacaggtgaaattcttggaccggcgcagttcggaccagagcgaaagcatttgccaagaatgttttcattaaccaagaacgaaagtcggaggttcgaagacgatcagataccatcgtagttccgaccataaaagatgccgactggcgatgcgtgcggcagtgttattttcatgacccactgggcagcttccaagaaaccaaagtctttgggtttttgggttcccggggggagtatggttgcaaagctgaaacttaaaggaattggtggaagggcaccaccaggagtggagcctgtggcttaatttgactcaacacgggaaacctcacccggcccagacacagacaggattgacagactgatagctccttctcaattccatgggtggtggtgcatggccttagctggtggagttatttgtctggttaattccgataacgaacgagactctggcatgctaactaattacgtgacccacaagcggtcggtgtcccccaacttcttagatggataagtggcattcagccacccgagattgagtaataacaggtctgtgatgcccttagatgtccggggctgcacgtgcgctacactgactggctcagcgtgtgcctaccatacgtggcagacgtgggtaacctgttgaataccattggtgatggtgatcggggattgcaattattccccatgaacgaggaattcccagtaagtgtgggtcataggcttgtgtgaagtccctaccctttgtacacaccgccagttgctactactgattggatggtttagtgaggccctcaga

SEQ ID NO: 38534 - DNA, 1517 bp, Artificial sequence
  DNA replication origin
cgtgcctgaggtttctccccgagccgcccctctgcgggctcccgggtgcccttgccctcgcgatccctggccttgcctgtctgtgcagcctaccccgcccgcggatcctctctccccgagtggctcactggcttaggctgcggtggccccgtctgggaccaaacccggctctgccttgtggggcgccgccgccggccactggttggcccgttgtacctgtccccgggcgcgcgccttcaggaccaggtcggcggcgccccgcgtgggcctggtgggcgcccggagggtttggagtcggcctgcagcgggggcagggaagagggttccgtgggctggccgcgactgcagcggcagtgggggagccgcgggcctgccaaaggccagtcggccgccccaggtaccgcgcggggccaccttcgtgcttggaggccgctgacgatgagaccccaggcaccgcggtccacctctccttcgctgcccaaacgtcgaggccgccccgcgcccgccacgtgctagtggccgccggtcccttgcggctgccacacactggtcgggaggtctgtctcctggcaggtgggctcgaagggtcgggagtgatgagcccgtcacggggtgttgtgtcgtgtgggtggatgggatgtccagttcgccaccccaccgcccccctcccaccgccccgcgctgctctctccctcccacattacccgtcacccgccctgctgggcccatcctcaagactgggatgccgggctcatcatcgtgaggcccggaggccactttctacctacatggttgatcctaccagaacgatatgcttgtctcaaagattaagccatacatgtctaagtacgcagggccggtacagtgaaactgtgaatggctcattaaatcagttatggttcttttgtttgctcgctcctctcctacttggaaaactgtggtaattctagagctaatacatgccaaagggcgctgacccccttcgcggggaagatgcgtgcatttagcagatcaaaaccaacccagtcagcccctctccagccccggctggagggtcaggtgccactggctttggtgactctagataacctcaggccaattgcacgcccccagtggcagcgatgacccattgtaaagtctgccctatcaactttcgatggtagtcgctgtgcctaccatggtgaccacgggtgacaaggaatcagggttcgattctggagagggagcctgagaaatggctaccacattcaaggaaggcagcaggcatgcaaattacccactccctactcggggaggtagtgatgaaaaataacaatacaggactctttcgaggccctgtaattggaatgagtccactttaaatcctttaacgaggatccattggagggcaagtctggtgccagcagctgcagtaattccagctccaatagcgtatattaaagttgctgtagttaaaaagctcgtagttggatcttgggagcgggcgggcgggcgagccatggcccgtccccgcccct

SEQ ID NO: 38535 - DNA, 852 bp, Artificial sequence
  DNA replication origin
tggtaccgcgggccccctcccttccccaggcatccctgagcgcctctgcgggcccgaggaggggcgactggcgggtagggaatgtgacccacccttggtgagaaagccttttctagcgatccgagaggtgtgcctttggggtaccagattctccggcctgccacttctctctgctttatgatagcgctgccatagcaactcgcttggagaggaccctcctccacttccccctcgacggggtgagtgggggagagcgagggttccaccggcctccgcggtggggaccgagggtggctcattgcctaccgtgtggcccgtgcctcccccttccgagtcgggggagaatcccgccgggacgggccggcgtcctagcgcttggaagtctgcgcgagcggtggctgtgcccggcattccatccggcacatgaactgctctgctgtgagacggctctctgcccgctcccgtggggaccagcgaccggggccgacgaccgcgtttgcatggaacgggtttgggccacctggccctgggaagcatcccaagtggggggcttgaccaggttggaggatggacaagaaacgagcaacgtggccctggcattgggtttgtggctgaggtcgcttcggggtcccgatggcgggaactagggctcgagaggcgggtctccgtgggtgccgagggccgtccggcatcccaggcggggcgccgcgggacctccctcgtgtctgtggtggtgagatcccatggccgtgttttcctggtggcccagccgtgcctgaggtttctccccgagccgcccctctgcgggctcccgggtgcccttgccctcgcgatccctggccttgcctgtct

SEQ ID NO: 38536 - DNA, 974 bp, Artificial sequence
  DNA replication origin
tagccaggatggtctcgatctcctgacccccgtgatccgcccgcctcggcctcccaaagtgctgggattacagtcgtgagccaccgtgtctggcctatttatctatttattaactttgtgtccaggttatgaagccagttactttttgtatttttttagagacgaggtttcaccatgttgccaaggctcggatcgagggatccaccttcccttgcctcccaaagtgcggggatgacaggcttgagcctacctcgcccagctcccccccttccccccccagcttatccctcaagtgcccgaggccgagcggtggtgtgtggtttccaccccccgcgccccctcctccggtcgccgccacagtgttcgcaagtgcgtcctgagggagctcgttggtgtgggggtcgaggcggttgagatgcgtcccccccacgtggggaagggtgccgcctggtctggcgagtgcaggtctcgtgctcccctctggcgggtgcgtgcgggccgtgtgagcgatcgaggtgggcttgggcaggtgacgcgtgcaccggccggccaccgaggggctactgttctgcctctgacaggttgtgtgtgggtttacttggaggtgctttgcctgggagaaaggaggctgggggacgggggagctcttgggggattgcgcccacgtgcagtggccaggccccccgcccagaccacgaaggctcaaggttgccgcaagcagatttttcctggtaccgcgggccccctcccttccccaggcatccctgagcgcctctgcgggcccgaggaggggcgactggcgggtagggaatgtgacccacccttggtgagaaagccttttctagcgatccgagaggtgtgcctttggggtaccagattctccggcctgccacttctctctgctttatgatagcgctgccatagcaactcgcttggagaggaccctcctccacttccccctcgacggggtgagt

SEQ ID NO: 38537 - DNA, 1616 bp, Artificial sequence
  DNA replication origin
agtttaggcctcctagccaaaaagccaaagccacttctgggatttttttcaaagagccagtggttccacaatgggctgtgggtagttgtggaaatggaaagaagtgtttgcagatacatatttgagacagaagggacagggctcggtcacaggtcatgtaggacacgagcagaggcacattgagaaaaccctcccagcatcctaggtgaacagaggtatgcctttttgagacagtcgagggagacacaaccccagattttagggttggatctttattaatatgtagtatctatgaggtatccaagtccagaaatcaactcaccagttctttacagcattctgtagggagatcatatctgggatgtctaaagttaagaattcaggccgtggtaatggattagattagatgtacttgaacttattttgcaaagaaagagagggtgggagatagcgagagccagagagcaagcgagagagacagagacagagacacagagagacagacagagagacacaaagatacacaaagagagaaagacagaaagagagagacagacagataaagacacagagaaagacagagatggacagagagagaaacagaaagaaagatagagacagaaagagagagagacagacagagagagagagacagacagacaggaagaccgacaggcagagaaagagagtaagacagaaggcagacacacacacacaaagaaagagagaaagagacagatggagaaacagtgagaaagagagagacagacagagagaaagagacagagagagaaagacagagacagacagagggagagagagagaaacagacagaaagagagagagacagatggagacagagaaagaaacagacaaggagagagagagacagacagacagacaggcagagaaagacagtaagacagaagacagacagagagagagagagagagagagacaggcagagagagagacagagacagagaaacagacaggcaaagagagagagagaaaaaaaaccagacagacagagagagagagacaaacagagagactgggagagagagtgagacagagagaccgacagacagacagacagacagacagacagagaaagagaataagacagaagacagacacagtgagagagacagagagagagagacagagacagtgagacagagaaagaaagagagttacagatagacagacaaagagacagacagagaaagacagagacggacagagatagagagaaacaaagagagagagagagagacaggcaggcagagaaagagagtaagacagaagacagacacagtgagagagacaggcagagagagacagacagagacagagagaaagaaagagagagacagacagagatggagagagagagacagagagaaacaaacagaaacagagacagagacagagagaaacagacagacagggagagagggagagacagtgacagacagataggcagagagagagagacagacaggcagagaaagggagtaagacagaagacagacacagtgagagagacaggcagagagagagagagagagaaataggcagagagatagagacagagagagagagagaagaca

SEQ ID NO: 38538 - DNA, 1317 bp, Artificial sequence
  DNA replication origin
  misc_feature (211)..(230): n is a, c, g, or t
agacttccctccgtgtcacctcgactttcaatagcagtggctgctaggtgatgcccgaagacaaccgatgcctgcaagtgtcagtcagcacggaaaagaatgcatttatttatttatttatttatttatttatttatttatttattcatttatttagagacaagtctcactcaatctacagcccgggctgtagtgcagtggcgcgatctcnnnnnnnnnnnnnnnnnnnnggatgacagacgtgagccacggcgcccggccttaaccgtgtatttttaagtcgaggagcttatcagggaaatacgagaagtagggacgccacacgtgacagagagaaaagtttgaaaatgcaccttccatccaagtgggcacccggcctcgacctcctgaaatcatacaccgagtggcgaagcctagcaaggcccatctgtccagattcctctcggcctctctaagcaggcgcttctcactttcgtggaaggggcagggccctccccggcacaggggctctgacagactgacagagaaagagacagacatagaaagacagagatggacagagagaaacaaacagagagagagagagagagacagagacagagagagaaacagggagggagagagagagagacagacagacagacacacagagacaaacagagaaacagagagaaacagaaagagagagagacggagagagagagagaaagggagggagagagagagacagacagacaggcagagaaagagagtaagacagaagatagacacagtgagagaaacaggcagagaaagagagagacagagacagagagaaagaaagagacagagaaagacagagatggacagagagaaacagaaagagagaaagagagagaaacagacagacagggagggagagagacagagagagagacagacagacagacagagagacagagacagacaaagagaaacaaagagagagatggagagagtgagagatagagagagagagagaaacagaaagacagggggagagagacagacaggcagagaaggagagtaagacagaagacagacacagtgagagaaacaggcagagggagagagagacagagacagagagaaagaaaaagacagacagagaaagacagacagagacggacagagagaaaaagcaaaagaagagacagagagagagtgagagcgagagagacagagggagagaatcagacagggagagagagagagacaggcagagaaagagagtaagacagaagatagacacagagagagagagagagagagagaaagatagagacagtcctggcgcgg

SEQ ID NO: 38539 - DNA, 814 bp, Artificial sequence
  DNA replication origin
gaaagaaaaagacagacagagaaagacagacagagacggacagagagaaaaagcaaaagaagagacagagagagagtgagagcgagagagacagagggagagaatcagacagggagagagagagagacaggcagagaaagagagtaagacagaagatagacacagagagagagagagagagagagaaagatagagacagtcctggcgcggtggctcactcctgtcatcccagcactttgggaggccgaggcgggcggatcacgaggtcaggagatcgagaccatcctggctaacatggtgaaatcccgtctctactaaaaatacaaaaaattagcctgacttggtggtgggcgcctatagtcccagctactcaggaggctaaggcaggagaatggcgtgaacctgggaggtggagctttcagtgagccaagatggcgccactgcacaccagcctgggcgacacagtgagactacatctggaaaaaaaaaaaaaaagaaagagagagacagacagacagaggaagagacagacagagacagacagagagaaacaaacacagagagagacagagagagagagagaaacagaaaggcagggaaggagagagagagacaggcagaggaagagaataaggcagaagacagacacagtgagagagacaggcagagagagacagacagagacagagagaaagagagacagacagagatggagagagagacagagagaaacagacagaaagagagagagacagagagagagtgagagtgagagagagagggacagaaagggagggagagggacagacagaga

SEQ ID NO: 38540 - DNA, 698 bp, Artificial sequence
  DNA replication origin
gaaacaggaatccttcatcaggccgtgatgcctcagtcccctgcccaggctcaaggcccaccaggcggcctccctttcgctggcactccaggccttcccccggctcgcgagctcctgagtttccaacacatctggctggctcaggacagggtgtgcttgcaggcgtcagggcccggggcccacagtcctgggatcccctctggtcttccgccttgcagcggaaaaattgttttggatccctcgcacccctcctgcaaggccccctcttggcccacacacccagagccgtcagggctgcccaggggcgaacagcagcccagccctgcgggccctttttctcacaaggtccacaccatcgtcgcttgtcccgaagaggacctaccagtggccaacgggacaggaaggcactgctttgccacgcgctggcactagagccctggcagcctgatccccgggaaagaggggctgagggacacccagacacaccccaccactaccacgagcaaacccatcccgacacacacacaggtacacatgggtgcatgcacacaggcacacatggacacacacacacggacatacacacatggacacacaaagacacacacacggacacatggacacacgcacacggacacacacggacacacacacaaggacatacagacaaagacacagacacagcttgaaagagagct

SEQ ID NO: 38541 - DNA, 966 bp, Artificial sequence
  DNA replication origin
tgctgggcccacagcccctttggccagcggggcgctcagcggccctccggatcgccagcctgggttacttcatcccggagcgattcagaccaattccgtttccgaaggaatgagcgaattccccagagagcaatgagccgagactcaggtggttgtctgtttttcatccacatggttcacagatgacatatccccacgtggagccctgcaacagagcgcgaggcggatagtcccattcacacaggagtcacgctcaggccaagtaaagcgtgattctggattccacgtttctttgctctctgcaaaggtgcctgttactcaagtctctgccgccccccgaaagcgtgaccatgttgactgtttcccgagctctgtggggacccagaaacttccaagaaagcgtggaagaccagcatcgtgtcggtgctctcctttccagttttcaaacaggctatatgggagactccgcattttgcaggaaacaggaatccatcctcaggccgtgatgcacctgacgtttcttttctctgtgctttcgctctcattgtctacatgaaaatgaacgagatccacacacctgcatgtgtgagactatcacggcaactgtgacacccacgcgctggcaatagagtcggcagcctgatcccgtgacaaaggtactgacggacatccagacacgccccaccacaatcactagcaaacccactcccaaacacacagacacacacgggtgcacgcgcgggaacacaagcatacacgcagacacacaaagacacagacagcttgaagaagagcaagggacagagggatggagagagagaaacagcgatcgagagagagagagagagagagagagagagagcgggcaaggtggagagggaagtagagaaagggagagggtgagggagctagagagggatagcaacagagccttggagagggaggctctgctctggtatacagggg

SEQ ID NO: 38542 - DNA, 1197 bp, Artificial sequence
  DNA replication origin
ccgcagcgcgacggcctgctgggcgcgtgctcagtgggacagcttgggccccctcaagctgagtcacaggggcaaggtgtgcttgcaccacccatgtcacaccagagtccgcggtggggctggagccccaggtcgccagggcggcgtgggaacccgaagacggggcacctccacttccgaagctcgcgaccccggaggcctccgcgtcaagcacagatgccagccatcaaggcgcctcccaaccgttccaggagccagggcgctcgtctacactcacctccagcctgttagatgagctcctgtcaaccccagagtttcagcaaaaggcacaaactttcctagatccggtgtcacttggggagctgaaggaggtggaagagcccgctccgctgaaccactcctcagccaggaagaacaccgggcttgctggaggagctttaggacccggggttggggcggggcgggacggggcgggggcagggcggctgcctctctttcgcggtgaacctctggctcggtatggagaggcatatcttcccttccagctgacctgcctaggatacctgagttccaggtctggcgagtgactccacacagatgagggctgtcattctttcctgagtatcccggggatcccagggcccgtccaggtaccgggaggtgtactgtctactgctcatgcgcgggtttgcaggccgcagcctaggttttctaaccagcccaggcggagctctcatccctgttccccgcgcgttctttagtcgggttggcggagtcctcggtccgcgaaacactgggttggggcagaagccaggccagttctcctttctgcagcttgattcctctgcctcttcgctcacaatcacttgccaacccgtgtcctgccagcctccttgccagcaccatggagcgccttgtaactaaagacccgagaccccttgcaaaccggggtgctgccctttctaggcaagaggcaaggcaggcagagatgaggacaggaacggagacagagtgggacggaaggatggagctaggaaaggatggatggactgagagactctggaagggaaagagggagggagggagaaagggaggaaaaaaccaggggagggagggaagaacagagggaaggatggacccagggacaaaaggagcaagaaacagttttaaaggaaggcagagagaaaaacggtcttc

SEQ ID NO: 38543 - DNA, 1460 bp, Artificial sequence
  DNA replication origin
cggaagtggaggtgccccgtcttcgggttcccacgccgccctggcgacctggggctccagccccaccgcggactctggtgtgacatgggtggtgcaagcacaccttgcccctgtgactcagcttgagggggcccaagctgtcccactgagcacgcgcccagcaggccgtcgcgctgcgggtcctggtcctcttggcatttgttggggtgcggaggcctccgagtagtctcagggtgggacagtcccacttccggaggagccagggcagggaactcaaattcccgcgtgccagggcaggttgggagagtccttctgcctgcgaggcctggctgggctggagcagggggacggcccttgctccctggctcacgaaagccccctgtgggagagccccaggctcgcagggcatgtggggtgcgggaagcgccgttccccacgccccagtgtgggtgaactcgatagaggagggagcacgctgacacctgccgggggccgcgttgcaaaaaccgcctacgtccgcgggtgccctgccaccctgtcccgggtgcctggcccttcgattctgaaaccagatgtgaatcctggactcaaggaggcccgtctctctggccagttcttccctggtggcgatgaccggaaagcgatccttcccaaaggctcagagaagcagggcggtctgggatcgggtgacggcggtccgctttcgcctgccttcttgcgggccgcgtctcccgggccagggtcgagattccggccggtgctgcctcagctggcgtgacctctcattctgaaaccaaatctggaccctgggctccggaatgccgatggcctgggccagcctttctctggtggcgatgcccgggtatgggttccgctcaaagcaggctcgcagggcctcgctttggctcggggtccaaaggagtctccttcgccgtcctcgtcctcgggcttccgcggggagggtgctgtcagaaggtgtcgggagagccatcgccgggagagcaccggccggaatttcacggacggacacgggcagagagaggccggtgggctcccgtgcacctcagctggcctctgcgctgcaggcaggtccagctcggaggccgttagaaagacctaccacctccaccccgttatgaacatgcatgagctcggggcccaaggtcccggggtagcccgccctccaaagccgaaaaccacagggaccagggccttgtggggtgggtgggtgtagggccagattagaggggaaaaaggggcttcgggggctggctctctgggttctccagtaattctatggaaactggaagccgctctcttgactcccacagttttcaggcagaaaccaccccgaagggtggagtgtggaactgaacttccatgacagtcttgagttttccaggccctctccgtgaaggcggcaatgcctgtgggtgtcgccgttgccctgatagtctcac

SEQ ID NO: 38544 - DNA, 741 bp, Artificial sequence
  DNA replication origin
tgacagcgtaagtctgtccagaacccgccttcgtctttacccaaacgctgaatggctgagatttccacttccgggtttctgccagggagctaccgcggccgcagagggccgaaaggtgtccgcacgcatctgctccctcgtttcctctcgaggagcccctgaggatttgtgcctcccagaagtggggaaagctcgcccaaggcgccggtgctgacggtggcgggactgccgggctcgctgtggaaccgcctcccgctagagctgcgggctggtgacggtccccgcgggggcgggaagcggcttaggctgccctcgccggcctgcggcggcgagtctggaagcgcggtccactcgtgcgcgggtcactcggggctgtgcctcgcgcgactgtgtgtgcaggaaacaagcaggaaataccctaaaatagaatgaagtgccatgttgagggccgcggacgtcgcgagtgctgtgggaatgtgggctaaggtggagagttatggtggcgcgtgttacaggctcaggggtcaggaagaagcctaatcgtggaggcggcatctgaggagggtcttgaacgctgggcaggcttttgcccgatagagatggaggaagctagtcctgtctgctggaggaaacagggcagaggcgaggagggagccgtgcagcgctggtgtgaggagccgcgagcaggccaggcctgtaaagcagagtgatgggaaccaggatagagaaggcaaatcggag

SEQ ID NO: 38545 - DNA, 879 bp, Artificial sequence
  DNA replication origin
tccttgatttaagcccttgagtgttggttggctgacttagctttggattgtggtccactgagatcgctggatctttttaagctttagagttatgccctgccatgtggatgcaggtggaggaaggacttctcagtgtgacccatgagaggagtggctttcctgggccccaggccccaggctgcatgcgtatgggagggaggaggagaagcaaggaaaggaggagagacagaagtatatactgagctggtagttgggggaagggttggcgggtggggagaagggaagagaggagtctgggccaaggcagaagtgtctccctggggagtcctcagagtgggcagctggacatcgctccatccttcccgcctgacggatgggtctgctgcgcaggcacaagctgtcgggccaggccctgccaaggcagaacagtggcgcttctgggcgctctgctccgctccgctccggaggatggggcccgcctgggaagccagggagtgatggagaaagcagacgtcccagaacaggagccgcggggtcacagaagcacgcctgcctcccgaaacaaggggccacaggatgaggtgggaggggaccggtaatcaacgcgggggagcgtttgggggaaatgttggtctaaagaagagagtcagaaggacgcgcgctgaaggagcctggggatgaagagctcgatgatttggccacaagccccctcacctttaagaacaaagcttcctgcattcagttgcagagttttgtttcccggtcagatgctcagagaccttccaacctgtcccccacccctcagccttgcccatctccatgggcatcttccgcgccctcacccgggactcggagaccaccaccctccgcctccgcctg

SEQ ID NO: 38546 - DNA, 1403 bp, Artificial sequence
  DNA replication origin
tctcggcgtcccggtggggtgggggtctcggtgccctccccgctggagccttcgtcccgccctgtcccgccgtctcggccccatcccgccggctcccgttggggccggccgagttcccatcgctgctgctgccaccatcctcgcctctgccacaccgcgccaccgggcccggcctggcccgctcgctctccccagccttcccgctagggcgtctcgagggtagggggccggatgcctgtccccctcctcatccgcccccgccctccaggtacctagcgcgttctggcgcggaggtttaaggaccccttggggggtcgcccgtctgcccgtgggtcgggtgcggtgggccggggggggagtccgttcgggaggggcccgcccctctctcacctcccccgccgactccatcctctccgccggccggggccgcgccgcacttgcgtgtcgcagctgacgccggtgggggctttaccggcggccgtcgtgccatcgcgcgcgtgccgtgtgtgtggcctttgccctgggctgtggggtcgggaatccctgggcgcccatggggtgctgtcagcgttcgccaccccgtggtcggcacttcctccctgtgttgtgaaaccttccgacccctctctggagtctggtccccttgctgtctgaatggccggcctgaggtaaaccctctgggggacctgttgtgccagtagggcctcccggtgttgggagcgccctcgccaaatccaccttgtatgacttttagccatggattattgggcttctgcgttgatgaagaacgcaggtagctgtgataactaatgtgaattgcaggacacattgatcatccatacttcgaatgcacttgtggcccgggttcctcccagggctatgtctgtctgagcgtcgcttgccgatcaatagtccccgggggtgcctccgggctcctcggggtgcaaggctggggattccctggcatggcctgctggggccctccgtcccctcaagtgcagactggccacgtccgccctcctctgccgccatgcccgccccttctccctccccccgcaggtcctgtgtggtcacgcattgggtggcatggggaaggggggctcctagctgtgaggaagcgagagagggtggcgctgccacccgcgaaaacagagggaagagagccggctggggccgagttcccgtggccaccaccgcggtcctggttcctccctccggggctccctcgcgcctcacgcagctcgtggtgcagggttcgttggccctggcggggtggaaggtctcgtgccgtcgtcgtcgcgcgtcgtgggtagtgtgggtttgttgggggtgcaggcaggcaagtaggaagggtctgccggggagatggtgggggagcgcgtcccgatcgccgtggttcgcct

SEQ ID NO: 38547 - DNA, 1099 bp, Artificial sequence
  DNA replication origin
tggtggcctggccgtgcctcaggtttctccccgagccgcccctctgccggctcctgggtgcccttgccctcgcggtccctggccttgcctgtctgtgcccccctccgcgccctcggatcctctctccccaagcggctcaccggcttaggctgtggtggccctgtctgggaccaaacctggctccgccttgtgtggcaccaccgccagccactggttggtccgttgtccatgtccccgggagcgcgccttcaggaccaggttggcggcgccccgtatgggcctggtgggcgccgggagggtttggggtcggcctgcagcgcacgcagggaagagggttccgggcgctggccgcgatggcggcggcggtgttggagccgcgggcccgccaaaggccagtcggccgctccaggtgccgcgcggggccgccttggtgctggaaggccgctggcggtgagaccccgggcactgcggtccgcctctcgttcgctgcccaaacgtcggggccgccccgcgtccttcctccttggcagactgtgttcccggtgcagcgcgtgcgtgggcagggttgtgccctttgtttgttacagggcctcgtctgccctgagagccggagaactcgggaaggagagaggggggagagagagacacgcgtgcggggacgaaaccgtgtgtgcctgtcgtggagcgggctggatggcttgctggcctggtgagcagtggggagcggccccctgccatggcccccacgtgtgtgtcggcgggctcggggatggttctcggcgtcccggtggggtgggggtctcggtgccctccccgctggagccttcgtcccgccctgtcccgccgtctcggccccatcccgccggctcccgttggggccggccgagttcccatcgctgctgctgccaccatcctcgcctctgccacaccgcgccaccgggcccggcctggcccgctcgctctccccagccttcccgctagggcgtctcgagggtagggggccggatgcctgtccccctcctcatccgcccccgccctccaggtacctagcgcgttctggcgcggaggtttaaggaccccttggggggtcgcccgtctg

SEQ ID NO: 38548 - DNA, 977 bp, Artificial sequence
  DNA replication origin
tgacaaggggcgattggcgggtggggagtgtgaatcaccctcggtgcgaaagccttctctagcgatccgaaaggtgtgcctttgggggtaccggatccccccgcctgccgcctctctctgcgttatggtagcgctgccatagtgactcgcttgcagaggaccctcctccgcttccccctggacggggtgaggtggggagagcgagggttcccctggcctcagcggtggggacggagggccgttcgtcacctacagtgtggcccgcgcctcccccttccgagtcgggggaggatcccgccgggccgagccggcgtcctagcggttgggaggctgcgcgagcggtggttgtgcccggcgttccgtccggcgcgtgacccgctcctctgcgagccggctctccgcccgctcccctgaggagcagcgaccggtgccgaccaccgcgtttgcgtagcaaggcgttgggcctcctggccatgggaagtgtcccatgtggggggcgcgccggtctcccggagcttgaccgggttggaggatagaagagaaacgagcaacgtggccctggagttgggtttgtggctgaggtcgcttctgggtcccgatggcgggacccgggctcgtgaggcgggtctcggtgggtgccgagggccgtccggagtcctaggcggggcgccaggggacctccctagtgtctgtggcggtgggatcccgtggccgtgttttcctggtggcctggccgtgcctcaggtttctccccgagccgcccctctgccggctcctgggtgcccttgccctcgcggtccctggccttgcctgtctgtgcccccctccgcgccctcggatcctctctccccaagcggctcaccggcttaggctgtggtggccctgtctgggaccaaacctggctccgccttgtgtggcaccaccgccagccactggttggtccgttgtccatgtccccgggagcgcgccttcaggac

SEQ ID NO: 38549 - DNA, 1002 bp, Artificial sequence
  DNA replication origin
tgcccgcctcggcctcccaaagtgctgggatgagaggcgtgagccaccgcgcctggtctatttatctatttattaactttgagtccaggttatgaaaccagttagtttctgtatttttttttagagatgaggtttcaccatgttgccaaggcttggatcgagggatccaccttccctcacctcccaaagtgcagggatgacaggcgtgagcctaccacgcccggctcccccctttcccccgccagcttgtcactcaggtgccagaggccgagcggtggtgtgtggttcccacccccagctccccctcctccgttcaccacttcgatgtctgcgagtgggtcctgagggagctcgttggtgtgggggtcgaggcggttgagcgagacgcgcccctctcacgcggggaagggcgccgcctggtctggcaagcgcaggtcccgtgctcccctctggcgggtgcgcgcgagccgtgtgagcgaccgcggtgggctcgggcagtgacgcgtgcgccggcctgccgccgaggggctaccgttctgcctccgacaggttttgtgtgggtttacttggaggtgctttgcctgggagaaagcaggcgggtggacggaggggcacttgggggattgaacccacgcacagcggccaggccctccgcccagaccgcaaaggctcaaagttgccgcaagcagatttttcctggtaccgcgggccccctcccttccccaggtgtccctgagcgcgtctgcaggcctgacaaggggcgattggcgggtggggagtgtgaatcaccctcggtgcgaaagccttctctagcgatccgaaaggtgtgcctttgggggtaccggatccccccgcctgccgcctctctctgcgttatggtagcgctgccatagtgactcgcttgcagaggaccctcctccgcttccccctggacggggtgaggtggggagagcgagggttcccctggcctcagcggtggggacggagggccgttcgtcacct

SEQ ID NO: 38550 - DNA, 1545 bp, Artificial sequence
  DNA replication origin
cggcaggcggggggatccggtacccccaaaggcacacctttcggatcgctagagaaggctttcgcaccgagggtgattcacactccccacccgccaatcgccccttgtcaggcctgcagacgcgctcagggacacctggggaagggagggggcccgcggtaccaggaaaaatctgcttgcggcaactttgagcctttgcggtctgggcggagggcctggccgctgtgcgtgggttcaatcccccaagtgcccctccgtccacccgcctgctttctcccaggcaaagcacctccaagtaaacccacacaaaacctgtcggaggcagaacggtagcccctcggcggcaggccggcgcacgcgtcactgcccgagcccaccgcggtcgctcacacggctcgcgcgcacccgccagaggggagcacgggacctgcgcttgccagaccaggcggcgcccttccccgcgtgagaggggcgcgtctcgctcaaccgcctcgacccccacaccaacgagctccctcaggacccactcgcagacatcgaagtggtgaacggaggagggggagctgggggtgggaaccacacaccaccgctcggcctctggcacctgagtgacaagctggcgggggaaaggggggagccgggcgtggtaggctcacgcctgtcatccctgcactttgggaggtgagggaaggtggatccctcgatccaagccttggcaacatggtgaaacctcatctctaaaaaaaaatacagaaactaactggtttcataacctggactcaaagttaataaatagataaatagaccaggcgcggtggctcacgcctctcatcccagcactttgggaggccgaggcgggcagatcacgggggtcaggagatcgagaccatcctggctaccacaatgaaaccccgtctctactcaaaatacagaaaattagccaggcgcgttggtgggtgcctatagtcccagctacttgggaggctgcgacaagagaatggcgtgaacccgggaggcagagcttgcagtgagccgacatcacgccactgcactccagtctgggcaacagagcgagactccgtctcaaaaaataataatgataataataaatatattaaaatagaaaattataaaaaaacgtagctggccgggcgcaattgctcacgcctgtcatcccagcactttgggaggccaaggtgggcagatcacctgaggtggccagttcgagatccacctgacccacatagagaaatgccgtctctactaacaatacaaaatcagccaggtgtggtgacacatgcctgtaatcccagctactcaggaggctgaggcaggagaatcgcttgaatacgggaggtggaggttgcggtgagccaagatggtgccattgcactccagtgtgggcaacaagagtgaaactccgtccaaaaaaaaaaaaaaaaaaattaagccctgtattctgttatttttacttcctaccctgagaagaacataatacaactgttgtctgtctgcctgcctgcctgcctgcctgcctgtctgcct

SEQ ID NO: 38551 - DNA, 939 bp, Artificial sequence
  DNA replication origin
gttcacacagaatcctgggcaggaaagttctcagcacgtttaggcctcctagccaaaaagtcaaagccacttctgggattttttttcaaagaaccagtgattccacaaggggccatgggtagttgtggaaatggagagacgtgtttacagatacatatttgagacagaacggacagggctcggtcacagttcatgtagaacacgagcagatgcacattgagaaaaccctcccagcatcctaggtgaacagaagtatgattttttgatacagtcgagggagacacaaccccagattttagggttggatctttattaatatgtagtatctatgaggtatccaagtccagaaagcaactcgccagttctgtacagcattctgtagggagatcaaacctgggatatctaaagttaagaattcaggccgtggtaatggattagattagatgtacttgaacttattttgcaaaggaagagagggcaggagatagcgagagccagagagtgggcgagagagagagagagagagagagagagacaaagacagagacagagagagacagacagagagacacaaagatacacaaagagagaaagacagaaagagggagagacagacagagaaagaaagagatggacagagacagacggacaggcagacagacaggcagagaaagagagtaagacagaaggcagacacacacacacacagagacagagacagatggacagacagagagaaagaaagagagagacagacagagagaaaaagagagagaaagacagagacagacggagggagacagagagaaacagagacagagagagagagagaaacagacaaggagagagagagacagacaggcagagaaagacagtaagacagaagacagacacagagagagacaggcagagagagacagactgagagacagagacaga

SEQ ID NO: 38552 - DNA, 1385 bp, Artificial sequence
  DNA replication origin
gtggcgcgatctcggctccctgcatgctccgcctcccaggttcaagagattctcctgcctcagcctcccgagtagctggcattacaggcgcctgccccaccgcgcccgactcattttagtatttttagtagagatggggtttcgccgtgttggcaaggctggtctcaaactcccaacctcaggtgatccacccgcctcggcctcccaaactgctgggatgacagacgtgagccactgcgcccggccttaaccatgtatttttaagtcgaggagcctatcagggaaatacgagaagtagggacgccacacgtaacagagagaaagtttgaaaatgccccttccatccaagtggggacccggcctcgacctcccgaaatcatacaccgagtggcgaagcctagcaaggaccgtctgtctagattcctctcggcctctctaagcaggcgcttctcactttcgtggaagggtcagggccctccccggcacaggggctctgacagactaacagagaaagagacagacatagaaagacagagatggacagagagagacagagagaaacagacagagagggagggagagagacagacagagagagagagagagacagagagaaacaaacagaaagagagagagagacagagaaagagagagaaacagacagacacacagagacagacagggagagacagagagaaacagaaagagagagatggagagagagagagaaagagagggaaagagagagacggacagacaggcagagaaagagagtaagacagaagacagacacagtgagagagacaggcagagaaagagagagacagagacagagaaagaaagagagacagagaaagacagagatggacagagagaaacagaaagagagagagacagagatagagaaagagagagagacagacagggagggagagagacagacagagagacagagaaagacagagatagacagaaagaaacagacagagagcgagatggagagagagagggagagagaaacagaaagagagggggagggagagacagacaggcagagaaggagagtaagacagaagacagacaaagtgagagaaacaggcagaaggggagagagacagagacagagagaaagaaagagagacagacagagaaagagacagacagagacagacagagagaaacagcaagagagagaaacagagagagagtgagggcgagagagacagagggagagaaacagacagggagagagagagacagacagagagagagagagacagacagagagagagacagacaggcagagaaagagagtaagacagaagataggcacagagagagagagagaaagagagagagagaaagaaagagacagtccgggtgcg

SEQ ID NO: 38553 - DNA, 1049 bp, Artificial sequence
  DNA replication origin
gacagacagagagaaacagcaagagagagaaacagagagagagtgagggcgagagagacagagggagagaaacagacagggagagagagagacagacagagagagagagagacagacagagagagagacagacaggcagagaaagagagtaagacagaagataggcacagagagagagagagaaagagagagagagaaagaaagagacagtccgggtgcggtggctcactcctgtcatcccagcactttgggaggacaaggcaggcggatcacgaggtcaggagatcgagaccatcctggctaacacggtgaaatcccgtctctactaaaaacacaaaaaattagccgggcttggtggcgggcgcctatagtcccagctactcgggaggctgaggcaggagaatggcgtgaacctgggaggtggagcttgcagtgagccaagatggcgccactgcactccagactgggcgacacagtgagactccgtctggaaaaaataaaataaagaaagagagagacagacagacagaggaagagacagacagagacagacagaaacagacagaaagagagagagacagagagagagagaaacagaaaggcagggagggagagagagacaggcagaggaagagaataagacagaagacagacacagtgagagagacaggcagagagagacggacagagacagaaagagagagacagacagatggagggagagacagagagaaacagagagaaagagagacagagagagagtgagagagagagagacagaaagggagggagagggacagacagagagacagacgggtagagaaagagaataagatagaagataggcacagagagagagacagagagagagtgagagagacagagagactcagaaaaagaaatagagagatagagaaaaacagagacagagagagacagagagaaacaggcagacagagagagacagagagaaacagacagaaagagagacagagagaaacagggagggagagagagagagacaggcagagaaagagagttagaagaca

SEQ ID NO: 38554 - DNA, 774 bp, Artificial sequence
  DNA replication origin
tgctttgtgggtgcatttcataaggtccttcctttgtttgcttctttctgtctccttgttgccctgggctccgagatttgtagagtgttctcctttgtctggagggagccgtggtgccaagcttgtccacggggcgaggcctgggtctctctcctctcctcaggactggagttcacacgaagtcggtggtattgggaaaccgggtgcacagggacggatttcctcgtggctggcgaagacaatctccttcccctggggaaagcagcccacgggttctggagcggaggtcttggctggggtatgtgggacccgctgcccctgcccgccccttcccccggcttggacggttacagtgtctctggatgaatgaatagaattgcctgggagtccggggagtgtgaagacacccgggacctcagggaacccgtgcctgcgccctcggggtctgtcccgtcctgcccgggttggagccaggctcctggtggggctgccgcgagtcggaagaggtaggatgctgctgcctggcggtgctgcagtggcggatcttcaggaggaggtcctgggcttcggctggggcgcgggggcggtcaagggggagcagagtcgcgggggcggttgggaagcacggaggcaaaagggggaaagagggagagagcgggaagccaaaagcctatggtaccgggtattaccaggtggaatcccatccaaatactaaccaggccccactctgcttagcttcaacagatcagaggcgagcgggcgcgttcagggtgg

SEQ ID NO: 38555 - DNA, 1007 bp, Artificial sequence
  DNA replication origin
aataaaacacgtcttagggctccgttggttttcccgggtggggagccctgactccctgttctagcccggcccaagcaccctccaccccacccctgcctgcggaaaggtgccctgtctacctgagcagagcctccctctccaaggctctgttgctgtcactctaccactccctcaccctctccctttctctacttccccttccacctcgcgctctactgtggagctctctcttcccccttctctgtctctcctccccccttctctgtctctcctccccccttctctgtctttcaatcgctgtatctctctctcctggttctatttctccatcgctctctcccttgctctccttctgtagcaggaggagctgcagacagaacccctcagacaacgagttgtagaaggaggggctttattcagctgggagcatcggcagactcacttctccaaaaacctagctctctgaatgagcaattcctgtccctcttaagggcttacaactctaagggggtccacgtgagaggttcgtgatggattgaggaagcagagggtacgtgactgggggctgcatgcaccggtaattagatcagaacaaaactggacagggattttcacagtgcttttctatacaatgtctgtaatctatagataacataaccgagtaggtcaggggtcaatctttaactagcaggcccagggtgtggcgcagggctgtctgcctgtggatttcatttttgccttttagattttacttcttctttctttggaggcagaaattggccataagacaatatgaggggtggtctcccttcaagctatctgtgtctgtgtctttgtgtgtccgtgtgtgtgtgcccgggtgtggtgtgtctgtgtccgtgtgtgtgtgtgtctgcgcgcgtgcacccgtgtgtatccgtgtgtgtgtcagggtgggtttgctcgtggtagtggtggggtgtgtctgggtgtccgtcagcccctctttcccgggatgaggctgccgg

SEQ ID NO: 38556 - DNA, 1426 bp, Artificial sequence
  DNA replication origin
gggcgctcagcggccctctggatcgccagcctgggttacttaatcccagagcaattcagaccaattccgtttccgaaggaatgagcgaattccccagagagcaatgagctgagactcaggtggttgtctgtttttcatccacatggttcacagatgacatatctccacgttgagccctgcaacagagcgcgaggcggatagtcccatccacacaggagccacacttaggccaactgaagcgtgattctggattccacgtttctttaccctctgcaaaggtgcctgttgctcaagtttctgccccctgaaagcgtgaccatgttgactgtttgtttccctagctctgtggggtcccagaaacttccaggaatgcgtggaagaccagcattgtgtcagtgctcccctttcaagttttcaaacaggctatattggagactccccattttgcaggaaacaggaatccatcgtcaggccgtgaggcacgggatctttcttttctctgtggtttcgctctcgttgtctatgtgaaaatgaacgagatccacacacctgcgtgtgtgagaatatcacggcaactgtgacacccatgcactggcaatagagttgacagcctgatcccaggactaaggtactgatggacatccagactcacccaccacaatcattagcacacccactcccaaacacacagacacacatgggcgcacgcgcgggaacacaagcacacacacagacacagaaagacacagacagcttgaaggagagcaagggacagagggatggagagatagaaacggaaggagagagaaacagctatccagagagagacagagaggaacctgggagattgagagagagagagcaaggtggagagggaagtagagaaagggaaagggtgagggagctagagagggagagcaacagagccttggagagggaggctctatctggtagacaggggcccctttggccagggtagggtggaaggtgtctgggacgggctggaacaggggggcagggccgcccacgcgggaaacccaacagagccctgagacgtgtttttacttggattggttggttgctttgggggtgcgtttcgtagcctcattcctttgttggctcctccctttcctcttggtactgtgggccctgaaagttgtagagtgcgcccctcactgtggcaggagcagtggcgctgagcatgcccacggttcgcggcttgggtctctctcgttttccgggtggtgtggccctagacaatggcagtggcgcctggctggcccaagagtccagtccagctacgcccgcctgattccaggcgtcatcaaaacccggggccacaaggctgggatcaggcaccctagagccactttcccctggccggactgctctccccctctacgcccaagcaccaccagtcgccgcg

SEQ ID NO: 38557 - DNA, 1291 bp, Artificial sequence
  DNA replication origin
cagaactggggctctcccatcctcagactccctggtggcctccgcaccccaacaaatgacaggaagaccagaaactgctgcgcgacggcctgctgggcgcgtgttcagtttgggccccctcaagctgagtcacaggggcaaggtgtgcttgtgccacccacgtcccaccggagtccgtggtggtgctggagccccaggttgccagggcggcgtgggaacccaaagacggggcacctccacctccggaggcctccgcgtcaagcacagatgccagccatccaggcgcctcccaaccgctccaggagccgggaagctcgtctgcactcacctccagcctgttagatgagctcctgtaaaccccagagtttcagcaaaaggcacaacatttcctagatctggcgccactgggggagctgaaggacgtggaagagcccgttttgctggaaccactcctcagccagaacgaacactggactctgctggaggagcaggttggggcggggttggggcgggctgggggcagagcggcggcctctctttcgcggtgaacctcaggcttggtatggagaggcgtgtcttcccttccagctgacctgcctaggatccctgagttccaggtccagcgatagactccatacagaggactgctgtcaagaatgacaataaagaattcctgagcatcccggggatcccagggccggtccaggtacccggaagtgggctgtctactgcgcatgcgcgggtttccaggcagcagcctaggatttctaactagcccaggcggagctctcatccctttttccaccgcgttcttcagtcaggttggcggagacctcagttcgcgaaacactgggccggggcagaagccaggccagttctcttttctgcggctcgactcctctgcctcttcgctcaccatcacttgccaacccttctcccgtcagcctccttgccagcaccatggagcgccttgcaactaaatgtagacccgagaccccgtgcaaaccgaggtgctgccctttccaggcaagaggaaaggcaggcagagatgaggacaagaacggagagagtgagatggaaggatggagctaggaaaggatgggtggaaggagggacaccggaagggagagaaagagggagggagaaagggagaaaaaaaccgggggagggaaggaagaacagagggaaggatggaccgagggacaaaaggagcaagaaacagagaacggaaggcagagaggaaaacggtcttctgcctccagaaccaacaggacccagcactccgggaaaa

SEQ ID NO: 38558 - DNA, 899 bp, Artificial sequence
  DNA replication origin
ggctgcaggaggacactcgctgctgacgcgtagctgtggacttatttaaaggggatgcagcctgagtcggcgtagccaatgcgcatgcgcaaggcgcgagcggcttctcacgtcacagtgcttcccgcggttgtcttagaaaccagtccctgaggcttggcagagcaggagccctccgtggcactgcttgggtgtcggggctctgaggctccggcctgacctctccacggggtcgacgggaatgtctccggatgccaggggtcgcaaagggccgaccaggatgtggaaaccccaggcggagttcgctggaagcagcatggcatcccagcctcaggcctgcccggaccgtgttggggagtctccccaaaagtcgtgccgccgtggtctcgaggacaggtcggcctgcgtgcccctgggctgctctctcacccgagggtcgttctcgtggagagcagaaccccgcagcctcaggggttgcctgggggtgtgtgtttcaatgcctctgctgtatgactccgtgtgtgtgtgtgtgagtgtgagtgtgtgtgtgagtgtgtgtctccctttgtctcttctctttgtctctcagtctctgtgtgtttctttccctctctctgtctgtgtgtgtgtgcccgtgtgcatgtgtgtctttggccgaatgcgcccagtgcaccacagagcgatttttcgcatgtcggcctgtctttggtgagcctctttctgcgtctctgcctgggtcgtgcatccggttgtcaatcgtctttgccgtcgcggtcccgctttgggtgtgtgaaggcctggcccacgtgaggagatgcgtcggtcccggagcaattgtaatctcatcccctttctgcgcgtcctcttttctaggatcaagatgaacacactgcagccga

SEQ ID NO: 38559 - DNA, 2410 bp, Artificial sequence
  DNA replication origin
ggaccccggatgcagccgactccgcggctgcagcaggagcctcgctgccaccccgcagcgctgccattatttaaaggggacgcagcctgactgccaggagcggagcgcgagtccgcccagccaatgctcctgggcgaggcgcgagtggcttttcccatcacagtggttccacggttgtcttagaaaccagtccccgaggcttagaaaagcaggagccctccgcggcagtccatgggtgtcagggttctgaggctccggcctgacctctccacggggtcgacgggaacgtctccagatgccaggagtcgcaaagcgccaaacaggatgaggaaaccccaggcggagtccgggaaaagcagcacagcatcccagcctcaggcctgcccggaccgtgttggttgggttgactctccccaaaagtcgtgccgccatccgtgatctctaagacaggtcggcctgcgtgcccctgggctgctctctcatccgagggtcgttctcgtcgagagtagaatcccgcagtctcaggggttacctgggggtgtgtatttcaatacttctgctggatgactctgtgtgtgagtctgtgtgtgtatgtgtgtgtgtgagcctgtgtgtgtctgtgtgtgtgtctcccattctctcttctctctctgtctctcagtctctgtgtgtttctttcccactctctgtgggtttgtgtgtgtgtgcccttgtgcgtgtgtgtctttggctgaatgtgccctgtgcaccacacagcggtttctcgcatggcggcctgtctttgttgagcctctttctgcgtctctgcctgggtcatgaggccggttgtcaatcattttcgcccccgcagatctgctttgggtgggtgaaagcctggcccacgtgaggagatgcttcggtcccggagcaattgaagtctcatccccatcctgagtggcctcttttctaggatcaagatgaacccactgcagacgaggacaagagccccaacaggagctctttgtcccacaggagagcagcggacccacgtcagagaagatgcttgtgtcttttcatggctcttctctgagaaatgaagccacaccacgatacagtcagcaagaggaagccaggaatgagagatggcaacaatccctgtccctggaacgctggcctccctgcacaagccaccctttaggaaccccaccccttatgcctgtgacggtggcaaggtgctgtatcctgcctgggctccggcctctgctctgtcctccctcttgctctgcctcccctgtttctcaggggcctggatgcctctcgctctggccaaatgccttcaacaaagatgacttcccactccgtcagggagacacttcctggagacccgtgtcgtgattgtttctctttcaaaaagtatttccgcttgattgggtaggtctaatgacccgggagctcttggcttccataggtgtctcaggcagggaagcttccttcttctccacatttcccctcatgggtgggtggattgcctagaatgagctctaggcgaccgtgactggccttgtcttccacgacaggtggtgtcgcatttcctctgcacttcctgtctcattcttgagggacatcctctcctctgctcctgggtggactgactcccttgatcttctggccaaaacgaatgtcagggaaccaaagggactgggctagggctgggggctgggactggggctggggctgggtgcagccgatgttgcgtcagggctaccgggttggtggaggattggggttgttgcgaattttgcagaaacctctttgctcctccggtaggcatttgaaaacgtggcttggctcaggcacaggcagcaccccgacccacggggtcacaggtgttctttgattttccttggcattgatggaaaggtcacctgtttcccccttccacctgcacatgcctggacagcaccctttgtttcgccatcgccctgtatgcctccggtgacacacattaacaccaactgctgtgggataggccagtgccacgcgtggtcacatggtctccacctaggattcgcctctgttcctctttgcagttgacctgtaaagcgcggtcggctttccggatccccagggcttttagaagcggggcaggccactgctctttcaaaggaggagggaggcagagggctgatggatcagtgaatttgcagctgacaccaggccttgagacctacgggatcattctgtgctacagcgaggccctgtctgcctcaccagatgtggtgagcccatcctatctcactgggagggggccaaaatcggatctcaacgggagtccggagaacacagcaggcgtcctgaagctccccctccctcagtggaagtcggctcaaggaggtcctgaggacaggactcctgggggtttgggcctggg

SEQ ID NO: 38560 - DNA, 773 bp, Artificial sequence
  DNA replication origin
ccgcccggcagctgccccatctgagaagtgaggagcccctccgcccggcagccgccctgtctgggacgtgaggagcgtctccgcccggcaccccgtccgggagggaggtgggggtcagcccccgccaggccagccaccccatccgggagggaggtgggggtcggccaccgcccggccagccgcccggtccgggagggaggtggggggtcagcccccgcccggccagccgccccatccgggagggaggtgggggtcggccaccgcccggccagcctggtccgggagggaggtggggggggtcagcccccgcccggccagccgccccatctgggaggtgaggggcgcctctgcccggccgcccctactgggaagtgaggagcccctctgcccggccaccaccccgtctgggaagtgtacccagaagctcattgagaacgggccatgatgacaatggcagttttgtggaatagaaaagggggaaaggtggggaaaagattgagaaatcggatggttgctgtgtctgtgtagaaagaagtagacatgggaaacttttcattttgttctgtactaagaaaaattcttctgccttgggatcctgttgatctatgaccttacccccaaccttgtgctctctgaaacatgtgctgtgtccactcagggttaaatggattaagggtggtgcaagatgtgctttgttaaacggatgcttgaaggcaacatgctcgttaagagtcatcaccactccttaatctcaagtacccagggacacaaac

SEQ ID NO: 38561 - DNA, 1156 bp, Artificial sequence
  DNA replication origin
ctcaatgagcttctgggtacacttcccagacggggtggtggccgggcagaggggctcctcacttcccagtaggggcggccgggcagaggcgcccctcacctcccagatggggcggctggccgggcgggggctgaccccccccacctccctcccggaccaggctggccgggcggtggccgacccccacctccctcccggatggggcggctggccgggcgggggctgaccccccacctccctcccggaccgggcggctggccgggcggtggccgacccccacctccctcccggatggggtggctggcctggcgggggctgacccccacctccctcccggacggggtgccgggcggagacgctcctcacgtcccagacagggcggctgccgggcggaggggctcctcacttctcagatggggcagctgccgggcggagggtctcctcacttctcagacagggcggccaggcagagatgctcctcacctcccagatggggtcgcggccgggcagaggcgctcctcacatcccagacggggcagcggggcagaggcgctccccatatctcagacgatgggcggccgggcagagacactcctcacttcctagatgggatggtggccgggaagaggcgctcctcacttcctagatgggatgacggccgagcagagatgctcctcactttccagactgggcagccaggcagagggactcctcacatcccagacgatgggcggccaggcagagacgctcctcacttcccagacggggtggcggccaggcagaggctgcaatcttggcactttgggaggccaaggcaggcggctgggaggtggaggttgtagcgagccgagatcacgccactgcactccagcctgggcaccattgagcactgagtgaaccagactccgtctgcaatcccggcacctcgggaggccaaggctggcggatcactcgcggttaggagctggagaccagcctggccaacacagcgaaacaccgtctccaccaaaaaaatacgaaaaccagtcaggcatggcagcgctcgcctgcaatcgcaggcactcggcaggctgaggcaggagaatcaggcagggaggttgcagtgagccgagatggcagcagtatagtccagctttggctcggcatcagagggaga

SEQ ID NO: 38562 - DNA, 1189 bp, Artificial sequence
  DNA replication origin
aggcggctgggaggtggaggttgtagcgagccgagatcacgccactgcactccagcctgggcaccattgagcactgagtgaaccagactccgtctgcaatcccggcacctcgggaggccaaggctggcggatcactcgcggttaggagctggagaccagcctggccaacacagcgaaacaccgtctccaccaaaaaaatacgaaaaccagtcaggcatggcagcgctcgcctgcaatcgcaggcactcggcaggctgaggcaggagaatcaggcagggaggttgcagtgagccgagatggcagcagtatagtccagctttggctcggcatcagagggagactgtggaaagagagggagagggagaccgtggggagagggagagggagggggagggggagagggagggggagggggagagggagagggagccttctttttttttattttagaagcgaagagcagaggctcaggtgaggaaaaaattggggggtgggtgtgcgggggacaggggttgcaggtgggccaaaatggtaggtcaggaaggtttgtcttcctatatttaggattttttgttgctaggatttgcgtgcatgttggagagaggttagagaataagagggagataggcaagagatgtaaagatctctcatatttagaggccaaaggagtgaaaaaaaaatcgtgcttccacagttaattatctgggtaacttgggtcacaccccctaactgatcctcctctagagaccagaaatgggccaggtaaggggcagagttgggcaaagggtaaggtttgtgtgcttctcactgggtgtacttgatcatccaccttacctgggtaactacttttttttttttttttttttttttttggaaatgtggtccagctctgtttcccaggctggactgttgtggcaccatcatagtttactgaagcctcaaactcctgggctcaagtagtcctcccaccttagcctcttaagtatgtgagactgcaggcatgtgccacaccgccaggctgggtagctgcttttcaatatgcttctgcacccacagatttggaaaagggcatttttagacagcagtctttcaactctcttcatcctgtaggtttagcctgccatttacatttgatgcacatgaaaaggctaatgggaaggaaatctatagaattgtaattggaagacct

SEQ ID NO: 38563 - DNA, 667 bp, Artificial sequence
  DNA replication origin
aaggtcagtgggtatgtctattttatggatggctcagagaggttaagtaatttgcccaagtttgtacaactagcaagtgtcagatcagggacttgaatcacaaacccatgcttttaacccctgtggtacactgcctctcactttctcaaggtcagaagggaagggcttcaggtccaccatatgaagtgcctacggaatgtcttggggaaggaaagacgagagaagcaaggagaagtatagagaagcagacaagggctacacatgcatagggcatggagggcagaatggtggctgggaaagactgaagagggtttgtggggttaagaggagttacctgaaggagggtgtggtaagccaacaagtgcatgggaagggggcagtcgctatggagatagctggggagtgggggaacggggtccaggagtgggcgccggcagttggaacatccagaacagtgagcagtgcccatcgtggactgggtggttggggagtgggagggacctcgtgtcagaggaggggtctttgtgagcgtgcagcagtgaggaatgctccgccatgaatactaagggcaagaagagaaagggccagagggggctgggtgatgtttagctgctggggtgattaatgggggtgaacggagggtgaaactcaagcccttccaacgaag

SEQ ID NO: 38564 - DNA, 992 bp, Artificial sequence
  DNA replication origin
gagagcgtgattttccccagtattatctcctgtgcccccaacactccaccaggctttaaaggccattatacagaagggagaactgagactcaggagattgatggtttgttcagaatcgcagaagcagcgtggatccaagaagggatctgctcccaaacagaaaccagtgtcttgggagagagagagcagaggaagcccgcacctctgccctaacctgaggctttgagcctcccgcaaagccgagtgagttgagagcgcctggaaggcagacgctgcggagggagggactcccgggctcgccaaacagcggggcctcgggcaagagcgtcgctggcgcgtcctcattctgcgattgctgtcaggggaccatccatcagcgccgccctggacgctgggccagactgcccgccgcccgccccgcccgggtctctccagatcgcattagcgtggggcgagggctcagtgcggcaccggctgctgagggagaggcgtggcggggaggagggtggtgcggggggacgaggacatcgctgtggggacactgcaggggcaggggagaggctgctttaggaccctcctccttttcttccaatctcccgcctctgggatctaaggtggatgaaaggggcactagaatgggagacttttggggggcagggggcgcagaacactgaaggcatcagggaagagtagtgatgggggcagttaccagaagcagagaggaagaaatacctgtaaaggggaaagccagataaattgtctggggaggggagagactgaaaatgggggtgcagagattgggggttagtggaagaaaaagacttaaagggaaaggaaaagagaagctgtagagggaaagagaattggcaaggaattgacgagagagcagggaaacaggaaaccacagatcgtcaggggccgacaaaaccttagagacaatctactgcagcccctcattctacaaatgaacaaatggaggcccagagagggga

SEQ ID NO: 38565 - DNA, 848 bp, Artificial sequence
  DNA replication origin
actatatagtgtttgcccaaagtccttgatttaagcccttgagtgttggttggctgacttagctttggattgtggtccactgagatcgctggatctttttaagctttagagttatgccctgccatgtggatgcaggtggaggaaggacttctcagtgtgacccatgagaggagtggctttcctgggccccaggccccaggctgcatgtgtatgggagggaggaggagaagcaaggaaaggaggagagacagaagtatatactgagctggtagttgggggaagggttggcgggtggggagaaaggaagagaggagtctgggccaaggcagaggtgtctccctagggagtcctcagagcgggcagccggacgtcgctccatccttcccgccagatggatgggtctgctgcgcaggcacaagctgtcgggccaggccctgccaaggcagaacagtggcgcttctgtgcgcactgctccgatccgctccggaggatggggcccgcccgggaagccagggagtgatggagaaagcagatgtcccagaacaggagccgcggggtcacagaagcacgcctgcctcccgaaacaaggagccacaggatgaggtgggaggggaccgggaatcaacgcgggggagcgtttgggggaagtgttggtcgaaagaagagaggcagaaggacgcgcgctgaaggagcctggggatgaagagctcgatgatttggccacaagccccctcacctttaagaacaaagcttcctgccttcagttgcagagttttgtttcgcggtcagatgctcagagaccttccaacctgtcccccacccctcagccttgcccatctccacgggct

SEQ ID NO: 38566 - DNA, 1096 bp, Artificial sequence
  DNA replication origin
cggctcaggacgagtatgtgacctggagcagcaccagggcagggaggaacagaagtggaggcgaagtaaacactccctgacagcctacgtctgtccagaacccgcctccgtcttcacccaaacggtgaatgcccgagatttccacttccaggtttctgccgggagggggggggggggcggggcgtgagggaggagctacggcggctgcagagggccgaaaggtgtccgcatgcatctgctccctggcgccctctcgaggagcccctgaggattcgtgcctcccagaggtggggaaagcccgcccgaggcgcaggtgctgacggtggcggggctgccgggcgcgctgtggaacctcctctcgctagagatgcgggctggcgacggtccccgcgggggcgggaagcggctcaggctgccctccccggcctgcggcggcgcatcttgaagcgcgggccactcccgcgcaggtcactcagggctgtgcctcgcgcgactgtgtgtgcaggaaacaaacaggaaataccctaaaatggaatgaagagacatgttgaggcccgcggatgtcgcgagtgctgtgggaatgtgggcggaggtggagagttatggtggcgcgtgttacaggctcaggggtcaggaagaagcctaatcctggaggcggcatctgaggagggtcttgaacgctgggcaggcttttgcccgatagagatggaggaagctagtcctgtctgatggaggaaacagggcagaggcgtggagggagatgcgcagtgctggtgtgaggagccgcgagcaggccaggcctgtaaagcagagtgatgggaaccaggatagagaaggcaaatcggggtcctgcggtcgctgaagaatttgaatgaaatcattaaacaggtgagagggatccatcgcaagagcatgggatgaaacgaggagtagtccacggtgatccctctgcagcggtgggtattattaatcgcacatgtgacaccaaaacggtgggtattattgatagcgtatgtgacaccaaaaccaccccactcaagctgtggctctttccctaaagtagaaaacagagaccagttgggttccaagcatccac

SEQ ID NO: 38567 - DNA, 1111 bp, Artificial sequence
  DNA replication origin
tggggggctgatcaccccacctccctcccggacaaggcggctggctgggtggggggctgacccccccacctccctcctggacggggcggctagccgggcagaggggctcctcacttcccagtaggggcagctgggcagaggcgcctctcacctcccagacggggcagctggccaggtgggggactgacccccccacctccctcccagatggggcggctggcctggcgggggctgacccccacctccctcccggatggggtggctgccgggcagagacgctcctcacttcccagatggggtggctgccaggcggaggggctcctcacttctcagatggggtggctgccgggcggaggggctcctcacttctcagacagggcggttgccaggcggagggtctcctcacttctcagacagggcagctgggcagagacgctcctcacctcccagacgggctcgcagccgggcagaggcgctcctcacatcccagacggggcggcggggcaaaggcgctccccacatctcagatgatgggcggccgggcagagacgctcctcacttcctagatgggatggcggctgggcagagacgctcctcactttccagactgggcagccaggcagagggactcctcacgtcccaggcgatgggcggccaggcagagacgctcctcacttcccagacggggtggcggccgggcagaggctgcactctcagcactttgggaggccaaggcaggtggctgggaggtggaggttgtagcgagccaagatcacgccactgcactccagcctgggcaccattgagcactgagtgaaccagacaccgtctgcaatcccggcacctccggaggccgaggctggcagatcactcgcggttaggagctggagaccagcccggccaacacagcaaaaccccgtctccaccaaaaaaatacgaagaccagtcaggcgtggtggcgtgtgcctgcaatggcaggcactcggcaggctgaggcaggagaatcaggcagggaggttgcagtgagccgagatggcagcagtacagtccagcttcggcctggcatcagagggagaccgtggaaagagagggagagggagaccgtggcgag

SEQ ID NO: 38568 - DNA, 952 bp, Artificial sequence
  DNA replication origin
ggcgcctctgcccggccgcccctagtgggaagtgaggagcccctctgcccggccagccgccctgtccgcgagggaggtgggggggtcagccccccacccggccagccgcaccgtccgggagggaggtgggggtgtcagccccctgcccggctagctgcctcgtccgggaggtgaggggcgcctctccctggccacccctactgggaagtgaggagcccctctgcccggccagccgccctgcctgggagggaggtgggggggtcagccccccgtccggccagccgccccgtccaggagggaggtggggggtcagccccccacccggccagcctccccgtccgggagggaggtggaggggtcagccccccgcccggccagccgccctgtccgggagggaggtgggggggtcagccccccgcccggccagccgcccggtctgggaggtgaggggcgcctctgcccggccgcccctactgggaagtgaggagcccctctgcctggccaccaccaagtctgggaggtgtacccaacagctcattgagaacgggccatgatgacaatggcggttttgtggaatagaaaggggggaaaggtggggaaaagattgagaaatcggatggttgccgtgtctgtgtggaaagaagtagacatgggagacttttcattttgttctgtactaagaaaaattcttctgccttgggatcctgttgatctgtgaccttacccccaaacctgtgctctctgaaacatgtgctgtgtccactcagggttaaatggattaagggcggtgcaagatgtgctttgttaaacagatgcttgaaggcagcatgctccttgtttctttgttcacttgtttatctgctgaccttccctccgctattgtcctatgaccctgccaaatccccctctatgagaaacacccaagaataatcaataaaaaaaaaagaccctg

SEQ ID NO: 38569 - DNA, 1983 bp, Artificial sequence
  DNA replication origin
ggtaatgaaatgtgaaactaagtgattgcctaccaattacaattaatgttaacgatgctactgggaggacacccttacagtggctgtgccaagtctagggacatgctagctttgctaagttacatgagattgcctacgtactaaatggaggtgggggacgggtccgaggacacggtggcgctgccctgccccgaaaggcccagagctggaggcgggcgcgcgatggtggatgacaccacagcgtccagcggatcaccaccaggggcaagcgaaccatgggaccagacgggccgtgtggcaggcttccggccccggacacaccgtgacgtgccgggcgggtggggggtgggcagggtgtgggtgggcgaggaggacggtgcctcggaggagtgttggggaggaggggcactggagctgtggtcggccagttgctgggccgcctccaggggtggacggtgaaccgcggcgaccgggacgtgctccgccaccctctccccggtggacccttcctatttgcgttcctccccgcccccaacaagcccccaccaccgacgacgtgcgacgatgatggcatgggaccttccaccctgccagggccaatgaaccccacaccatgagctgcatgaggcaagagggagcccccaagggaggaacccagaccgtgatggtggccacgggaactcggccgcagccggctatcttccctctcttttttcactggtggcggtgctgccctctctctcttcctcacagccgggagccccccttccccacgccacccaatgcgtgaccacacagggcctgttgggggagggggaaggggcgggtacagcaggagaggagggcggatgtcgctggtctgcacttgggggaacagagggccccgtgggccatgccatggaacagccgtgcaccccgaggagcctggaggcaaccccgggggattttgatcggcaagcgacgctcagacaggcatagccctaggaggaacccgggccgcaagtgcattcgaagtgtcaatgatcaatgtgtcctgcggttcacattaattctcccagctagctgcattcttcattgacgcagcagccgagtgatccaccactaaaagtcataaaaggttgatttggcgagggcactcccaagaacgggaggccctcctggcacagcacgtcccccagagggattacctcaggccggccagtcagacagcaatgggaccagactccagagaggggttggaaggtttcacaatacagggaggcagtgccaaccatggaggggggggcaaacgctgacaccaccccatgggagcccaggggttcccgcccccacagcgcggggcacaggccacacccgtggcatgtgtgcaacatcacgatggccgctggataaagcccccaccggcatcagcggtgacaccaaagtgtggcgcggccccggctggccggggagacggagtcagcaggggaggcgagggaggggtgggcccctcctgaacggactccaccgtgggcccactgcacctgacccacaggcggaccggcgaccccccaaggggtccttaaacctccacgccagaatgcgctaggtacctggatggcaggggcggatgaggggggtgggaccggcgtccagctccctaccctcgagaccccctagcgggaaggctgggaagagaaagtgggccgggacgggccagtggtgtggtttggcagaggcgatgatggtggcagcggcagtgatgggaacctggccagccctgacgggagcgggcaggatggggccgagacagtgggacacggcaggacgacggccccagtggggagggcaccgagacccccaccccaccatgatgccgagaaatacctccgtgcccaccgatgcacacatgggggccacgtcaggtgaccactccccgctgctcaccaggccggcgagccatccagccagccccatgacacgcacacatggtttcatccccac

SEQ ID NO: 38570 - DNA, 2492 bp, Artificial sequence
  DNA replication origin
cttgtggggcgccgccgccggccactggttggcccgttgtctgtgtccccgggcgtgcgcctttgggaccaggtcggcggcaccccgagtgggcgtggtgggcacccggagggtttggggtctgcctgcagtgcgtgcagggaagagggttccgggggctggccgcgacagtggcggtggtgggggagccgcaggccctccgaaggccagtcagccgctccaggtgccgcgcggggccgccttcatgctcggaggccgctggcggtgagaacccaggcacagcggtccgcctctcgttcgctgcccaaacgtcggggccgccccgtgccctccgtgcatgagtggccgccggtccctcgcggctgccgcacacgggtcgggcggtctgccttctcgcacatgggcgcgaagggtcgggagtggtgagcccgtcggggggtgttgtgtcgtgtgaatggatgggatgtccggttcgccgccccaccacccccctcccaccaccccgagctgctccctccctcccccacgccccatcgcctgccctgccgcgcccaatctcacaactgggacgcggggctcatcctcgcaagtcccggaggctgctttctacctacctggttgatcctatcagaaccatatgcttgtctcaaagattaagccatacatgtctaagtacgcagggccagtacagtgaaactgtgaatggctcattaaatcagttatggttcttttggttgctggctcctctcctacttggaaaactgtggtaattctagagctattacatgccgaagggcactgacccccttcacggggaagatgcgtgcatttatcagattaaaaccaacccagtcagcccctctccggccccggccggggggtcgggtaccaccagctttggtgcctctggataacctcgggccaatcgcacgccccccgtggcagcgatgacccattcgaacgtctgccctatcaactttctatggtagtcactgtgcctaccatggtgaccacgggtgacagggaatcagggttcgattctggagagggagcctgagaaacggctaccacattcaaggaaggcagcagacatgcaaattacccactcctgacacggggaggtagtgacgaaaaataacaatacaggactctttcgaggccctgtaattggaatgagtccactttaaatcttttaatgaggatccattggagggcaagtctggtgccagcagccatggtaattccagctccaatagcgtatattaaagttgttgcaattaaaaagcttgtagttgaatcttgggagcaggtgggctggtgagccacggcccatccctgcttcttgcctctcggtgccccctggatgctcttagctgagtgtcctctggcccaaagcgtttactttgaaaaaattagagtgttcaaagcaggcccaagccacctggatactgcagcttggaataatggaatgggactgcggttctattttgttggtttccggaactgaggccatgattaagagggatggccgggggcattcatattgcaccgctagaggtgaaatgcctggactggcacagtttgaactggagcaaaagcatttgccaagaatgttttcattaatcaagaatgaaagtcggaggttcgaagacaatcagataccgtggtagttccgaccataaacgatgccgactggcgatgtggcggcgttattcccatgacccgctgggcagcttccaagaaaccagcctttgggtttttcagttccgaggggagtatggttgcaaagctgaaacttaaaggaattgacagaagggcaccaccaggagtggagcctgtggcttaatttgactcaacatgggaaaactcacccggcctggacagggacaggattgatagattgatagctctttctcgattccatgagttgtggtgcacggccttaattggtggagtgatttgtctggttaattccgataacgaacgagattctggcatgccaaatagttatgcgacccccaagtggtcggcatcccccaacttcttagagggacaagtggcgttcagccacctgagattgagcaataacaggtctgtgatgcccttaaatgtccagggctgcacgtgcgctacactgactggctcagcgtgtgcctaccctatgtggcagatgtgggtaacctgttgaacctcattggcgatggtgatcggggattgcaatttttccccatgaacgaggaattcccagtaaatgcgggtcataagcttgcgtgaagtccctgccctttgtacacactgcaggtcactactcctgattggatagtttagtgaggccctcggatcagccccgctgggtcagcctactgccctggcggaacactgagaagacagtcgaacttgactatctagaggaagtaaaagtcgtaacaaagttttggtaggtgaacctgtggagggatcattaacagagaagagcgaagccacagagacgc

SEQ ID NO: 38571 - DNA, 1034 bp, Artificial sequence
  DNA replication origin
ttggaggtgctttgcctaggagaaaggaggctggtggatgggggggcccttgggggattgcgtgcacgcgcagcggccaggccccccacccagaccgggaaggctcaaggttgccgcacgcagatttttcctggtaccgcaggccctctcccttccctaggcgtccctgagcacctctgcgggcccgacgaggggcgactggcgggtggggagtgtgacccaccctcggtgagaaagccttctctagcgatccgagaggtgtgcctttggggtaccggatccccctgcctgccgcctctccctgcgttatggtagcgctgcgtagcgactggcttgcagaggaccctcctccgcttccccttgatggggtgatggggggagagcaagggttccgccagtctccgcggtggggacccagggcagctcgtcgcctactgtgtggcccacgcctcccccttccgagtcgggggaggatcccgccgggccgggccggcgtcctagcggttgggaggctgcgcgagcggtggctgtgcctggctttcattccggcttgtgacatgttccgctgtgagccggctctctgcccgctcccctgcagagcagcgaccggtgcagacgaccgcgtttgtgtggcacggggtttgggccgcctggccctgggaagcgtcccaagtggggggcatgccggtctcccagagcttgaccgggttggaggatgggtgagaaacgagcaacgtggccctggcgttgggtttgtggctgaggtcgcctcggggtcctgatggcgggacccggggctcatgaggcgggtctcggtgggtgccgagggccgtccggcatcctaggcgggtcgctgcgggacctccctcgtgtctgtggcggtgggatcccgtggccgtgttttcctggtggcccggccgtgcctgaggtttctccccgagccgcccctctgcgggctcccgggtgcacttgccgtcgcggtccctggccttgcccgtctgtgccccccaccctgcccgcggatcctctctccc

SEQ ID NO: 38572 - DNA, 1100 bp, Artificial sequence
  DNA replication origin
cgccattctcctgtctcagcctcccaagtagctgggactactggcacccgccatggcgcctggctaatttttggtattttgagtagagacggggtttcactgtggtagccaggatggtctcgatctcctgaccatcgtgatccatccgcctcggccttccaaagtgctgggattacaggcgtgagccaccgcgcccggcctacttatctatttattaatgttgagtccagtttatgaaaccagttagttttcgtatttttttagagacgaggtttcaccatgttgccaaggcttggatcgagggatccaccttccctcgcctcccaaagtgcggggatgacaggcgtgagcctaccacgcccggctcctccccttcaccccccagcttatccctcaggtgcccgaggtccagtggtggtgtgttgttcccacccccagcgccccctcctccggtcaccgccgtgatgtccacgagtgggtcctgagggagctcgttggtgtgggggtcgaagcggttgagtgagatgggcccctcccacgcggggaagggtgccgcctgatctgacaagcgcagttcccgtgctcccctctggcgggtgcactcgggccgtgtgagctattgcggtgggctggggcagatgacgcgtgcgccggccggccgcccgccgaggggctaccgttctgcctccgacaggttgtgtgtgggtttacttggaggtgctttgcctaggagaaaggaggctggtggatgggggggcccttgggggattgcgtgcacgcgcagcggccaggccccccacccagaccgggaaggctcaaggttgccgcacgcagatttttcctggtaccgcaggccctctcccttccctaggcgtccctgagcacctctgcgggcccgacgaggggcgactggcgggtggggagtgtgacccaccctcggtgagaaagccttctctagcgatccgagaggtgtgcctttggggtaccggatccccctgcctgccgcctctccctgcgttatggtagcgctgcgtagcgactggcttgcagaggaccctcctccgcttccccttgatggggtgatggggggagagcaaggg

SEQ ID NO: 38573 - DNA, 1702 bp, Artificial sequence
  DNA replication origin
agcatggtctggaggatcccagctcccagcagaggcactttttttcacacagaatcctgggcaggaaagttctcagcaggtttagacctcctagccaaaaagccaaagccacttctgggattttttttcaaagagccagtggttccacaatgggccatgggtagttgtggaaatggagagaagtgtttgcagatacatatttgagacagaacagacagggctcggtcacaggtcatgaaggacacgagcagatgcacattgagaaaacccagcatcctaggtgaacagaggtatgattttttgagacggtcaagggagatgcaaccccagattttagggttggatctttattaatatgtagtatctatgaggtatccaagtccagaaatcaactcaccagttccgtacagcattcggtagggagatcaaatctgggatgtctaaagttaagaattcaggccatggtaatggattagattagatgtacttgaacttattttgcaaagaaagagagggtgggagatagcgagagccagagagcgagcgagagagagagaaagagagagacagacagagagacagacagagacacaaagatacacaaagagagaaagacagaaagagagacagacagacagataaagacacagagaaagagagagatggacagagacagagagaaacagaaagagagacagagacagaaggagagagagacagacaggcagagagacaggcagagaaagagagtaagacagatggcagacacacagagagagacagagacagatggagagacagaaagaaagagagagacagacagagggaaagagacagagggagagagagaatcagacagagagagagacagacagagacagagagagagagaaacagacaaggagggagagacagacaggcagagaaagaaagagagagacagacatacaggcagacagacaggcagagaaagagagtaagacagatggcagacacacacacagagagagagacagagacagatggagagacagagagaaagaaagagagagacagacagagggaaagagacagagagagaaagagacagacagagggagagagagaaccagacggaaagagagagagaaagacagagacagagagagagagacagacagacaggcagagaaagacggtaagacagaagacagacaaagagagagagagagacaggcagagagagagagacagagagacagagacagagaaacagacaggcaaagagagagaaaaaaacagacagggagagagagacaggcagagaaagagtataagacagaagacagacacagtgagagacacagagagagagagagagagacagcgagacagagaaagaaagagagatacagacagacagacagacaacgagacagacagagaaagacagagacagacagaaacaaagagagacagagagagagaaagggagagagacaggcaggcagagaaagaaagacagaagacagagacaggcagagagagagagacacagagacagagagacatagagaaagaaagagagagaaagacagagatggacagagagaaacagaaagagagagagacagagacagagagaaagagacagacagggagagagagagagagagacagacaggcagagagagagagatataggcagagaaagggagtaaga

SEQ ID NO: 38574 - DNA, 1451 bp, Artificial sequence
  DNA replication origin
caactagggagagagggagggacctccagaagggagagagagaaacccgttgccccaggttcggtgaagtcagggagacctccctccgtgtgacctcaactttcaataacagtggccgctaggtgatgcccgaagacaaccgatgcctgcaaatgtcagtcagcacggaaaagaatgtatttatttatttatttatttagagatagagtctcactcactctacagcctgggctgtagtgcagtggtgcaatctcagctcactgcagcctccgcctcccaggttcaagcgattctccagcctcagcctcccaagtagctggcattacaggcacctgcctcaccgctcctgactcagttttgtatttttagtagagacggggcaaggccggtctcgaactcccaacctcaggtgatccacccgcctcggcgtcccaaagtgctgggatgacagatgtgagccaccgtgcccggccttaaccgtttatttttaagtcgaggaacttatcagggaaatatgagaagtacggacgccacacgtgacagagagaaaagtctgaaaatgccccttgcatccaagtggggacccggactcgacctcccgaaatcatacaccgagtggggaagcccagtagggcccatctgtctagattcttctcggcctctctaagcacctaagcacgcacttctcactttcatggaaggggcagggcctccccgtcacgaggtgcctgacagactgacacagaaagagacagacatagaaagacagagatggacagagagagatagaaagaaacagacagaaagagagagagacggagagtgagtgagagagagagagagacatggagggagagagacagacagacagacaggcagagaaagagagtaagacagaagacacagtgagagagacaggcagagagagagagagagacagagacaaagacaaggaaagagagagaaagacagagacagacagagagagacagaaacagacagaaagagagagagagagaaacagaaagggagggagagagacagacagagacagagagactgacagacagataggcagagaaagagagtaagacagaagacagacacagtgagagagacaggcagagagagacagagagagagacagacagagaaagagacagagagagaaagacggagatggacagagagaaacagacagaaacagtaagagagagagacagagacagagagaagcagacagacagggagggagggagacagacagagagagggagacagacagacaagcagagaaagagagtaaaacagaagataggcacagacagagagacaggcacagagagagagacagacagacagacagagaaaaagaaagagagagacaggccaggcacgatggctcatgcctgtcatcccagcactttgggaggccgaggcaggcgaatcac

SEQ ID NO: 38575 - DNA, 1030 bp, Artificial sequence
  DNA replication origin
agagacagagagactgacagacagataggcagagaaagagagtaagacagaagacagacacagtgagagagacaggcagagagagacagagagagagacagacagagaaagagacagagagagaaagacggagatggacagagagaaacagacagaaacagtaagagagagagacagagacagagagaagcagacagacagggagggagggagacagacagagagagggagacagacagacaagcagagaaagagagtaaaacagaagataggcacagacagagagacaggcacagagagagagacagacagacagacagagaaaaagaaagagagagacaggccaggcacgatggctcatgcctgtcatcccagcactttgggaggccgaggcaggcgaatcacgaggtcaggagatcaagaccatcctggctaacatggtgaaaccccgtctatactaaaaatacaaaaaaatatagccaggcgtggtggcgggtgccgagtagttccagctactcgggaggctgaggcaggagaatggcgtgaatctgggaggtggaggttgcaatgagccgagatcgtgccacaaaaaaagaaagagacagacagacagagaaagacagagacagacagagagagacagaaagaaacaaacagaaatagagacagagagaaacagacagaaattgagagagacagagagagagagaaacagaaaggcagggagggagagagagagacagatagacagacaggcaaagaaagagagtaagacagaagagagactcagtgagagagacaggcagagagagagagagacagagacagagagaaagacaaagaaagaaagagacagacagagacaaagagaaagagagacagagagagaaacagaaaggcagggggacagacagagagagagagagactgacagataggcagagaaagagagtaagacagaagacagacacagtgacagagacagagagagagagagacagagagaaagaaagggagtgacaggcagaga

SEQ ID NO: 38576 - DNA, 1619 bp, Artificial sequence
  DNA replication origin
aaagaaagagacagacagacagagaaagacagagacagacagagagagacagaaagaaacaaacagaaatagagacagagagaaacagacagaaattgagagagacagagagagagagaaacagaaaggcagggagggagagagagagacagatagacagacaggcaaagaaagagagtaagacagaagagagactcagtgagagagacaggcagagagagagagagacagagacagagagaaagacaaagaaagaaagagacagacagagacaaagagaaagagagacagagagagaaacagaaaggcagggggacagacagagagagagagagactgacagataggcagagaaagagagtaagacagaagacagacacagtgacagagacagagagagagagagacagagagaaagaaagggagtgacaggcagagaaagtgacaaagagagaaagacatatatggacagagagagacagaaacagaaagagagagacagagacagagagaaacagacagggagggagggagacagacagagaaacagagacaggcagacaggcagagaaagaaagtaagacagaagacaggcacagacagggagacaggcacagagagagagagacagagagacagagaaaaagaaagagagacagacagacagagacagacacagagagaaagaaacagaaagagagagagagaaacagacaggaagagagagagagagacagacaggcagagaaggagaataagacagaagacagacacagtgagacaggcagagagagagacagagacagagagaaagaaagagacagacagacagagaaagagacaaagacagagacagagagagaaagagagaaacagacagaaacagagagagaaacagaaagggagggagagagagagacaaacagacagaaagggagagagacaggcagagaaggagaataagacagaagacagacacagtgagataggcagagagagagacagagacagacagacagagaaagagacagacaaagacagagacagacagagagagaaagaaacagacagaaagagagagagagagaaacagaaagggagggagagagacagacagacagatggacaagcagagaaggagagtaagacagaagacagacacagtgagagagacaggcagagagagagagagagacagaggcagagagagagagagagacagagacagagagaaagaaagagagagacagacagagaaagacagagatgggcagagagagacagaaacagaaagagagagagacagagagagagagaaacagaaaggcagggagagagagagacagacagacggacaggcagagaaggagagtaagacagaagacagacacagtgagagagacaggcagagagagagacagagagaaagagatggacagagagagacagtgagaaacagacagaaagagagacagaaatagagagagggagtgagagaaagagagacaaacaaagggaggaagagacagagagagagagacagacagacagagagacacagaaaaagaaagaggcagacagacagagaaagacacagacagagaaaaacagagatggac

SEQ ID NO: 38577 - DNA, 1222 bp, Artificial sequence
  DNA replication origin
agagagagagacagaggcagagagagagagagagacagagacagagagaaagaaagagagagacagacagagaaagacagagatgggcagagagagacagaaacagaaagagagagagacagagagagagagaaacagaaaggcagggagagagagagacagacagacggacaggcagagaaggagagtaagacagaagacagacacagtgagagagacaggcagagagagagacagagagaaagagatggacagagagagacagtgagaaacagacagaaagagagacagaaatagagagagggagtgagagaaagagagacaaacaaagggaggaagagacagagagagagagacagacagacagagagacacagaaaaagaaagaggcagacagacagagaaagacacagacagagaaaaacagagatggacagagagagacagagagaaacagacagagagagacagacagatgggcagagaaagagagtaagtcagaagacagacacagtgagacaggcagagagagagaaagagagagagagaagtcagacacagtgagacaggcagagtgagagagagacagacagagaaagagacagacagagagagacagacagagagagagagaaacaggaaacagaaagagaaacagagagaaacagaaagggagggagagagagaaacagacagacagacggacaggcagagaaggagagtaagacagaagacagacacagtgagagagacaggcagagagacagagagacagaaacagagagaaagagacagacagagaaagacagagatggacagagagagacactgagaaacagagagagagagacagagaaacagacagagagagagtgagagagagagaaacaaagggagggagagacagagagagacagataggcagagaaagacagtaagacagaagataggcagagagagcgagagacagagagagatagagacagacagagagacacagaaaaagaaagagagaggcagacagacagagaaagagatagacagagaaaaacacagacagagagacagagagaaacagacagggagggagagagagagacagacagacgggcagagaaagtaagacagaagacagacacagtgagacaggcagagagagagagagacagagagacagagacagagggaaagaaagagacagagaaagagacagagagagaaa

SEQ ID NO: 38578 - DNA, 1658 bp, Artificial sequence
  DNA replication origin
tgggctgggtgcatgccaccgctggaagaggccctgcagcgcccccatgccccagggacgcctgtcgtggccctcctctgccccaacccgcgtgctgctcgctccctcccccgccccctctctccctgtcctccccctctctggtggtggcgtgtgggggaggaggggtggcggtggctatacggccccggtggcagggcatgatctcccgtgagggggagctggtggtggcggtgactctggacgcgagccaggctcttcccatggattgccccagttgtggccgcccatggggagcccggtgggtgctggcgtgtcctgtcttgctccgcgctgtcatgcatttcagcgcgggcagggagtgattgggtgtcggtgggtggcgggcggggtggttcattcccccacctccccccggccccatctgtctcctgttccccactccgtggaggtggcgggccacgtgctggtccctgccaccagggcggcggttccgtgcagcgcctcggctggtgcttagcagtcgacgtatagaactggtgtgcaccaggggaatccgactgtttaaacaaagcatcgcgaaggccctcggggggtgttgcaaagtgatttctacccagtgctctgaatgtcaaaatgaagaaattcaatgaagtatgggtaaatggcggaagtaactatggctctcttaaggtagccaaatgcctcgtcatctaactagtgacgtgcatgaatggatgaatgagattcccactgtccctacctacttactatccagtgaaaccacagccaagggaatggggttggtggaatcattggggaaagaagaacctgttgagcttgactgtagtctggcatggtgaagagacatgagaggtgtagaataagtgggaggtccccggtgccccctatccccgtgagggggtggggtggggtcctgtgggctgcccatggaatactactactctgatcattttttcactgatctggtgaggcagggggtgagccccgaggggctctcccttctggcgctaagtgcccagctgcatgctggccgggtgttgacccattctgaggacagtgccaggtggggagtttggggcagtacacctgttgaacagtaatacagatgtcctaaggcgagctcagggaggacagaaacctcttgtggagcagaaggagaaaagctcgcttgattgtgattttcagtgcgaatacagactgaaagccgggtttgacgatcattctgacgtttttaagcaggagctgttaggaagttaccacaagggataactggctcgttgcggccaagcgttcatagggatgttgctttttgatcctttaatgttggttcttcctatcattgtgaagtagaattcaccaagcattggattgttcacccactaatggggcatgtgagctggatttagaccttcgtgagacaggttagttttaccctccgtgatgtgtgttgttgccatggtaatcctgctcagcatgagaggaatcacaggttcagacatgtgcttggttgaggagccaatggggtgaagctacagtctgttggattgtgactgaacgcctctaagtcagaatcccgcccaagaggaaggatacatcagcgccctggagccttggttggccttggctagccggtt

SEQ ID NO: 38579 - DNA, 3483 bp, Artificial sequence
  DNA replication origin
accccctcacggggatagggggcaccggggacctcccacttattctacacctctcatgtctcttcaccatgccagactacagtcaagctcaacaggttcttctttccccaatgattccaccaaccccattcccttggctgtggtttcactggatagtaagtaggtagggacagtgggaatctcattcatccattcatgcacgtcactagttagatgacgaggcatttggctaccttaagagagccatagttacttccgccatttacccatacttcattgaatttcttcattttgacattcagagcactgggtagaaatcactttgcaacaccccccgagggccttcgcgatgctttgtttaaacagtcggattcccctggtgcacaccagttctatacgtcgactgctaagcaccagccgaggcgctgcacggaaccgccgccctggtggcagggaccagcacgtggcccgccacctccacggagtggggaacaggagacagatggggccggggggaggtgggggaatgaaccaccccgcccgccacccaccgacacccaatcactccctgcccgcgctgaaatgcatgacagcgcggagcaagacaggacacgccagcacccaccgggctccccatgggcggccacaactggggcaatccatgggaagagcctggctcgcgtccagagtcaccgccaccaccagctccccctcacgggagatcatgccctgccaccggggccgtatagccaccgccacccctcctcccccacacgccaccaccagagagggggaggacagggagagagggggcgggggagggagcgagcagcacgcgggttggggcagaggagggccacgacaggcgtccctggggcatgggggcgctgcagggcctcttccagcggtggcatgcacccagcccaaccgacccagcccttacagccaatacttatcccgaagttacggatccggcttgctgacttcccttacctacattgttccaacatgccagagtctgctcatcttggagatctgctgcagacatgggtatggccctgcgtaagacttacactgtctcccctggattttcaagggccagccagagctcaccagatgccaccagaaccacgatgctttccaaggtacagtcccctctctcgggtcgaacccattccggggcatcctgcccttcacaaagaaaagagaaccctccccagcgctcccacatgcttctccagggtcagtcacattaccgcactggacgcctcatggtgcccatctccgccactctggattcagggatctgaacccgactccctttcaatcggctgagggcaacggaggacatcacccatcccttcggaacggcactcacctatctctcaggaccaaatgaaccatgttcaactgctgttcacctgagacccatgttcaactgctgttcacatggaacccttctccacttcggccttcaaagctctcgtttgaaaatttgctactaccaccaagatctgcacctgtggcggatccacctggacccacaccctaggcttcaaagcttaccgcagcggccctcctactcctcccggcgtagactctgtggggctgcaggggaggggggaggaggggaggggaggacccccaccacactcacacgggcatactgcccctgccactcctgtccactctcaactgctggcaacagccggatatgggcccgacgctccagctccatccattttcaggagtagttgattcagcagctgagttgttacactccttagcggattccaacttccatggccaccgtccagctgtctatatcaaccaacaccttttctgggatgtgatgagcattggcatcgggcatcttaacatggcattcggttcatcccacagtgccagttctgcttaccaaaagtagcctacgaagcacttgcattccacgcccagctccatgtcagccagccaggcttcttacccatttaaagttacagaatagactgagatcgttttggccccaagacctcttctcgctgaaatgtgggcgtggttggagagtagctgggacagacaggagggtctataagtgctgggggtgaagaggtgagagagactggtgaggatctcactgaggtctgtgagtttctaggtgtttctggggtgtgagagactgactcccgctgaaatctgggcatagttggagagtagctgggacagacaggagagtcattgatggcggggggtgagctgctggatgatggcagtaagaacatatggtatattattaatgaatgaggtgactgtgaagaatctccagaggaggacacgggagagcacaatgacatgagtgattgtcctgcttggctaggaaagggaaatgtaaagttgtgaaattctgttgatgagggatgtgagagtggtgaagtcctgtgggatgatatagagtacttccacatccctggtgaggagctgccccttgggtctgagtttctgggaggggagagggagaagctgggtgagacaggcatgaatcttgaggagtcagggctgggggaccgctcataatctcccgagacctgtgagtctctgggggactcctgggtgcatggggctgactcccgcacaaacctctggatggctggagagtaactgggaggcacaggcgagtccctgaggcctgggggtgaagagatgaaagacataggggaggagcactgtgaggctcgtgagtttgtaggtgattccttggtgtggggggctgactccagatgaaatctggggttgtttggagagtagctgggagacacgggagactccctgagagccaggggtgagctactgggtgatggcaggaagaacatgtggtatgttattgatgaacgtggtgactctaaagaatccccagaggaggacacgggagagcccaatggcttcattgattgcccattatggtgaggaaagggaaatgggagcttgtgggattctgctgatgacagaggtgagtgtggtgaagccctagggaatggtgaatggtagctccggatccctggtgaggagcttcctcttaagtctgagtttctgagaggggagagggaaaagctgggtgaggctagcatggatcttggggagtccgggctgggggaccgttcataagaacagccagacaagatcctacttttcttaggtgcagacatgattaggaaacctgcagctcccagggacccctaccaattttctaacccgcagaatgaaggagtatgtgtgtatgtgtgtgtgtgtgtgtgtgtggtgtgaggtatgtgctccttaagaaaatggaaataaaccaacccatgagacagacagacagacagacagagattcacttagccaagtgttctgtcctgtcctctaaatccacttccaagtcacaagacgctgtaaactccaagtccacgcagagcccgcaaaacgctccggccgctgctacgctcggcg

SEQ ID NO: 38580 - DNA, 1092 bp, Artificial sequence
  DNA replication origin
agatacaggtcatagggagatagtctcatgaggcctgtgagtgtctatggttctcctgagtgcctggggctgactgcggcagaaatctggggaagtctggagaggagctgggagacacaggagagtccctgaaggctgggggtgaagaggtgaaagaaatgggggagggttgcagtaaggtccgtgagtttgtaggtgattcctgggtgtgggaagctgactccaggtgaaatctggagatggttggagagtagctgagagagacagaagagtccctgagggctgggggtgacaacatgagcgagactggggagtaagtcagtgaaattggtgagtttggtggtgtgtcctgggtgcctggaactgactccagctggaatctagagaaattttgagagtagctgaaagagacacaagagtccatgtgggctgagggcaaagaactgagagagaccagggaggatctcagtgaggtctgtgagtctgtaggtgattccggagtgtaggaggctgactctggctgaaatctgagcgtggcgggagagtagctgggacagacaggagagtcccagggggctgggggtgaagatgtgagagagactggggagtaactcagtgaaactggagagtttgatggtgacttcggggtgcctggaactgactcccgctgaaatctgggcgtggttggagagtagctgggacagacaggagagtccctgagggatggtgaagacatgagagagactggggagtaacacagtgaaattggtgagtttggtggtgatttctgggtgcctgcaactgactcccgctgaaatgcgggtgtggttggagagtagctgggacagacaggagagtccctgagggttggggataaaggcgtgctagagactgaggagtaatttagtgaaagtggtgagcttggtggtgatccctgggttcctggaactgactcccgctgaaatgtgggcatgtttggagtagctgggacagacagaagggtccgtaagggctgggggtgaagacgtgagagagactggcgaggatctcactgaggtctatgagtttgtaggtgtttctggggtgtgggag

SEQ ID NO: 38581 - DNA, 843 bp, Artificial sequence
  DNA replication origin
tgggttcctggaactgactcccgctgaaatgtgggcatgtttggagtagctgggacagacagaagggtccgtaagggctgggggtgaagacgtgagagagactggcgaggatctcactgaggtctatgagtttgtaggtgtttctggggtgtgggagaccgactcccgctgaaatctgggagtagttggagagtagctgggacagacaggatagtcattgatggctgggggtgagctgctagatgatggcagtaagaacatatgatatattattgatgaatgaggtgactgtgaagaatctccagaggaggacacaggagagcacaatgacatgagtgattgtcctgcttggttaggaaagggaaatgtaaagttgtgaaattctgttgatgagggatgtgagagtggtgaagtcctgcgggatgatatagagtacttccacatccctggtgaggagctgccccttgggtctgaatttctgggaggggagagggagaagctgggtgagacaggcatgaatcttgaggagtcagggctgggggaccgctcataatctcccgagacctgtgagtctctgggggactcctgggtgcatggggctgactcccgcacaaacctctggatggctggagagtaactgggagacacaggcgagtccctgaggcctgggggtgaagagatgaaagacataggggaggagcactgtgaggctcgtgagtttgtaggtgattccttggtgtggggggctgactccagatgaaatctggggttgtttggagagtagctgggagacacgggagactccccgagagccaggggtgagctactgggtgatggcaggaa

SEQ ID NO: 38582 - DNA, 1346 bp, Artificial sequence
  DNA replication origin
cgggcactcggcagtcaccccgagtggggctgagcggcgggttctcagttctggctcctgtgcagccgccgccgccgggcagaacgcctggcttggccgcagccactgggatacctggccctggttctgcgatgctgggagcgcgagcgggctcgggggttgctaggcagctgctgcctgcacacagagggcgactgcagcttgggcgcccaggcggcggagcatggtctgggtgtcgtctggaatgcgtgcgcgccaggcttgagggccccctggtggtgccacctgcctcgctgctgggcgcctccctgcccctgcgcctgcgccggcgctgggcctttgcgagggctgagctgagttctcctcagcacagacccggagagcatcgcgagggcggagctgagttctcctctgcacagacttcggagatacagcgaaggcggagcagcgttctcagcacagacccgggcgggcgggccgggagcaccgcgagggcggagctgcgttctgctcagcacagaccttgggggcactgcctcgctttggtacaactcggggccgcatcgacggtgaataaaatccttcctgtttgcagccctgaataatcagggtcagagaccagttagaggggttcagtgtggaaaacgggaaaccaaaatcccctctgaatcctgcccaccgaggttctccccagccaaggcgaggcggccgcagtgcgagatccacaccgcagcctcagaagacaaatgcagcattcctaatgcagaaatgacacccaaaatatgacacccccattgctcatgtaacaagcacctgtaatgctaatgcactgcctcaatacaaaaatattaatataagatccgcaatcccctcgctgccgtgcagtcctaagacagcgatcataataatcaacattgacatagtcaataccaacgtagtaacgaacctagggttaaggttggtgttagggttaggggttaagtttagggttagggtttggagatagcggttggggtcagagttaggggttaggagtcaacgtttagcgttaggggttaagagacgttaggggttaggtattaggggttagggttgggttagggtgagggtgagggttgtggttaggggttagggattagggttaagtgttagggttaggggttagggttagggtcaggggttaggggtcagggttagggttcagggtcagggtcaggggtcccactctgtgggttgtgtatttactctgctgactgttccctttgccatgcaaaagctctttagtttaattaagtcccagatatttatctttgtttttattgcatttgcatttgggtccttggtca

SEQ ID NO: 38583 - DNA, 1915 bp, Artificial sequence
  DNA replication origin
tagtgtggaaaagctacaggcactcaacaccagcccagcccatgaggacagctgtgggggatagaccctgcacagccacaggcacagagctgcccaaggccttgggaacccaggcatcacaaacctgtgctctagatgtgagatgtagattcagaaaggatgatttggagctgtaggattcaatgactggcctgctgggtttttgacttgcatggggtctgtaagtccttgtacatttcagtaaatgctggaatgagttaagtcattggggggaagtagagaagtcatcattgtattttgcagtgtgacaaggatacaagatttggggagcaagagccagaataatatgatttgattctgtgtccctaccaatactcatgtggaattgtagtggggaatgttaaaggtgggacctggtgggaggtgatttgatcatggagaagagtgggtgttggaggtaggggtgtggggagaatgggagagattattttgtgggtgggagtgaaagatgagggtgggggagcagattcttcacaaatgggtaaacactatctccttaatgctgtccgcatgacagtgcgttcttttgatgactttggagctgtgagattgagtgaatactgtcctgctgggttttggacttgcatttgtgttatttttctggggaatttcttccatttggattgagaaaccttacccaatgcctgttgtaccttgaaggaaaagaaatcccttttaaattcagggactcattggcagaagggactgtaaccttgtctcagatgagacttggaaatttttacatttggaatgagttaagacttttggaaacttttgaaaaagcatgattttgttttgctctgtgagaaggacatgaggttctggggtatcagggtcagaataatatgggttggctgtgtgtccctatataactcacgtgtcatccttaatgttggaggtgggccaggtgggaggtgttttaatcttggatgagagggggttggggtggaaggaaaaggggtggtagtgtggggaggagtaggttgtcagtagggtggtgggagggtgggagtaacctgctgcagaggcagaggctcatgggaaacctctactaggacagtgcacctgtggctttgcagggtgtagcccccatggctgctgtcatgggctgggttggtgttgagtgcctgtagcttttccatactgagggtgtgagctgttggtgggcttacaaatctggagtctggaggatggtggcctcctgtgtgggggctcaaagcctatattttccttctgcactgccatagtggaagtttcctaagaggttctgcctctgcaggaggcttctgcctggaagcagtgggcggtggtgtgggtggagaatccttcaccattggttagtcttcttgatgctgatctcctgggagtgagttctgatgtgatttggttgtctaacaggatgtcacacctctttcctttctctgtcttgctcctactcctgccatatgaaacatctctttgctgcttggccttctgatatggttaggaggggcctgatcagtgtgggcctgctcagtggacctagtcaatcgggacttggtcgtaaggcctatttagtggggggtggtcagcaggggtctgcttagagagggtctcattagagggatctagtagtgcaggtcttggtgagtgggttcctagtggcagacaaatgtttggtgtctggtcaatgccaacctgtgctgtgggacttggtcagtggagaccttgtcagctggggcttagtgatggccttgtcagattgggctgggttactggtgaccaggtcaaggggtgctattcagtggaggcctggtcacatgggacctagtcagcagaggcgcttgtcagtggggccctggtcagggcaggctgg

SEQ ID NO: 38584 - DNA, 1657 bp, Artificial sequence
  DNA replication origin
gtttttaagtctcatctgtgttttgtgcttctttctggcaaatttcttctttttggcttggaatgcttacccaatgcctgtacaatcattgtaccttggaagtggttaacttgctttgtatttcagaggctcagggcagaaggtatggcagccttgtcccagaagagacttcgggctttggacatttgagtaaatgctgggatgagttaagatttgggggactctagggaaggcatcattgcgttttgtaatgtgagaaagacatgaaccttgggggaccagggacagaataatatgttttggctctgtgtctctaccaaaactcatgtggaattttaatgggaaatgttaaaggtaggggctggtggaaggtgatttaatcatggtggagagtggaggtgggatggttggtggggtggggagtgtgggggggattagggggtgaggagggttgggggcattgtggtggggttaggggtgaaaggcaggggtggggggtggatccttcacaaatggacatttgagtaaatgctggaatgagttcagacactgggggactgtagagaatgcatcattgtattttgcagtatgagaaggttgtgagattgggggtccaaagggagaataatatgatttggctctgtgtccctaccaaaactcatgtggaattataattgggaatgttaaatgtggggcttggtagaaggtgatttaatcatagtagagaatgggggttggaagggggatgtgggggaatggacattcatggtgtgagtgagggtgaaacatggggatgggtggcagatccttcacaaatggttaaatactgtctccttaatgcagtctgtgtgatagtgagttctcatgataaatgaatgctgtcctgctgggttttggagtcggattgggcctgtgtcccatttgtgttatttttctgggaaaatcttccctttggtttgagaaagcttacccattgcctgtgccatcgttttaacttgaaagaaaagaattgtcttttacattcagggactcataggcagaaaagattggtcttgttttggatgagacttgaatttactacatttgagttactgctggaatgagttaagactttttgaaactgttgaaaagacgtgtttgtatttttctgtgtgagaaggacatgagatgtgggggtgtcagggtcaggataataaggtttggctgtgtttctctacaaaaactcatggggaattgcattcctgactgttgtaggtgggacctggtgggaggtgatttaatcacaaacgggaggttggtaggggtggaagggaaaacaaatgggtaagatggggaggattaggctggcagtagggtggtgagagggtggtgggcagtaggaagggggagtagcctgctgcagtgtcagagcctcatggaaaacctctaccagggcagtgcacctgtggctttgcagggtgtagccccaatggctgccctcataggctgggctggtgttcagtgcctgtagcttttccatactgagagtgcaagtttttggtgggtctatgaatctggggtctgaggatggtaacctcctgcatggggcctccaagcccatctattttttctgatctgccctagtagaggttttcctagtggctctgcctctgcctta

SEQ ID NO: 38585 - DNA, 920 bp, Artificial sequence
  DNA replication origin
ttgagcccaggtgggctgtgcgctctgcgaccctgaggccatctaagggaagctccgccatccagcgccagtgccagatctgcagctgcaaactgtgcgtggggcactggcagcagtgagggcgagtgggggaaggagcagcccctgactctgcctccatgcttctccagctacctgatactagccacacagactccagggccagagcctcagcgtgaagccgggccatccgcgaagccacccaggtggccgcggagtgctcttgccagcaccctatctcccttccgaggaggagcggggtgggctgcaaggccagacaggctctccttctcaggccgggctggcggcgctcctgagatcctggggccgcccgggcgatcccaagaggacctgcgagcccatttgcgcccgcccagagctgcagccccacctgccggcgcgcgcctccagggagcggcttccgggagccgggcagcaaccgccgtgcaggcgcgcgcccaacggcttttcaagtctcactcggtctgagaggtcggaggctgcgagtgtcgctgctgaaggctgtggtggaccgggctggatcgcggattgtggagtagatcatagatttgggatcgcggattgggggttgaatcgcggatttggggttggatcagggatttggggttggataggggatttggggctgggtcggccggggtcgggggagggggttggtgaaaaggtgacagggagctgcccccgctcaagagccagaggttgggggtctgagaagtcaccactatgaagttattcgccttcgggagccgcaggggccagacggcccagggctctatagaacatgtctacacgggttccggataccgaatccgggactccgaactgcagaagatccacagggcagctgtcaagggcgacgc

SEQ ID NO: 38586 - DNA, 1310 bp, Artificial sequence
  DNA replication origin
gtagacctgagaccccgtgcaaaccggggtgctgcccattccaggcaaaagggaaggcaggcagagatgaggacaggaacggagagagagtgagatggaaggatggagctaggagaggatgggtggaaggagggaccccggaagggagagaaagaggaagggagaaagggaggaaaaacccgggggagggagggaagaacagagggaaggatggaccgagggacaaaaggagcaagaaacagagaacggaaggcagagacaaaaacggtcttatgcctccagagccaacaggacccagcactccaggaaaatgttgggttcccattgcgggctaagtgctgggcccacagccccgttggccggcggggcgatgagcggccctctggatcgccagcctgggttacttcatcccggagcaattcagaccaattccgtttccgaaggaatgagcgaattccccggaaagcaatgagttgagactcaggtggttgtctgcttttcatccacatggttcacagatgacatatccccacgttgagccctgcaacagagctcgaggtggatagtcccatccacacaggagtcacactgaggccaactgaagcgtgattctggattccacgttctttgctctctgcaaaggtgcctgttgctcaagtttctgccccccgaaagcatgaccatgttgactgtttgtttcccgagctctgtggggccccggaaacttccaggaatgcgtggaagaccagcatcatgtcggtgctctcctttccagttttcaaacaggctatattggagactccccactttgcaggaaacaagaatccatcgtcaggccgtgatgtacgggatgtttcttttctctgtggtttcgctctcgttgtctacgtgaaaatgaacaagatccacacaactgcgtgtgtgagactatcacggcaactgtgacacccaggcgctggcaatagagttggcagcctgatcccgggacaaaggtactgatggacatccagatactccccgccacaatcactggcaaacccactcccaaacacacagacgcacaggggcgcacgcgcgggaacacaagcacacacacagacacacaaagacacagacaacttgaaggagagcaagggacagagggatggagagatagaaacggaaggagagagagaaacagccatcgagagagagatagagaggaactggggagattgagagagagagagagagagagcaaggtggagaaggaagcagagaaagggaaagggtgagggagctacagagggagagcaacagagccttggaga

SEQ ID NO: 38587 - DNA, 911 bp, Artificial sequence
  DNA replication origin
ctcgttgtctacgtgaaaatgaacaagatccacacaactgcgtgtgtgagactatcacggcaactgtgacacccaggcgctggcaatagagttggcagcctgatcccgggacaaaggtactgatggacatccagatactccccgccacaatcactggcaaacccactcccaaacacacagacgcacaggggcgcacgcgcgggaacacaagcacacacacagacacacaaagacacagacaacttgaaggagagcaagggacagagggatggagagatagaaacggaaggagagagagaaacagccatcgagagagagatagagaggaactggggagattgagagagagagagagagagagcaaggtggagaaggaagcagagaaagggaaagggtgagggagctacagagggagagcaacagagccttggagagggaggctctatctggtagacagggtcccctttgccagggtagggtggagggtgactgggccgggctggaacaggggggcagggccgccactgcgggaaaatcaacggagccctgagacgtgtttttacttggattggttggtggccttgggggtgcgtttcgtagcgtcattctttttttggctcctccctgtcctcttggtgctgtgggccctgaaagttgtagagtgcgcccctcactgtggcaggagcagtggcgctgagcgtgcccacgggccgcggcttgggtctctcgttttccgggtggtatggccttagacaatggcagtggcgcctggctggcccaagagcccggtccagctacgcccgcctgattccaggcgtcaccaccaacccggggccgcgaggctgggatcaggcaccccggagccgcttgcccgtggccgggctgctctccccctctacgcccaagcacca

SEQ ID NO: 38588 - DNA, 1850 bp, Artificial sequence
  DNA replication origin
ctcccagagcgtccagctgtcgctggcggccagaccacgcgcgagacctacgcggtgccagaggcctccatcccctgccagggctctggactctccatgcgaccaccctctcgctgacactccaggccttccccaggctctggagctccagagcttccaacacctggggcccgctcaggacggggtgtgctccgaggcgtcagggcccagggcccagggtcctggggtaccctctggtcctccgccttgccgcggaaaaattattttggattcctcgccgcccctcctgcaaggccccctcttgccccacacacccagagccgccagggctgcccaggggctaacagccggcccagccccgcgggccctttttctcacaacgcccacaccatcgtcgcttgttccgacgaggacccgccgtggccaacggggcaggaaggctctgctttgccccgtgctagcactagagccccggcagcctcatcccgggaaagaggggctgacggacacccagacacaccccaccactaccacgagcaaaccccccctgacacacacacggatagacacgggtgcacgcgcgcggacacacacacaccacacccgtgcacacacacacggacacacaaagacacagacacagagagcttgaagggagaccacccctcatattgtcttatgcccaatttctgcctccaaagaaagaagtaaaatctaaaaggcagaaatgaaatccacaggcagacagccctgcgccacaccctgggcctggtagttaaagatcgacccctgacctactcgattatgttatctatagattacagacattatatagaaaagcactgtgaaaatccctgtcctgttttgttctgatctaattaccggtgcatgcagacccccgtcccgtaccctctgcttcctcaatccatcacgaccccctcacacggacccccttagagttgtaagcccttaagagggacaggaattgcttactcagagagctaggtttttggagacgtgagtctgcctatgctcccagctgaataaagccctcccttctacaactcggtgtctgaggggttttgtctgcagctcctcctgctacagaaggagagcaagggagagagggatggagaaatagaaccagagggacagagagacagcgatagagagagagacagagaagggggaggcgagacagaggggggaagagagagccccacagtagagagcgaagtggaggtggaagtagagaaagggagagggtgagggagttgtagagcgacagcgacagagccttggagagggaggctctgctcaggtagacagggcacctttcagcaggccggggtggggtggagggtgcttgggccgggctagaacagggggtcagggccccccacccaggaaaaccaacggagccctgagacgtgtgtgtttttttttcttgaattggttggttgctttgggggtgcgtttcataaggtccttcctttgtttgcttccttctgtctccttggtgcggtgggccctgacatttgtagagtgtgctcgtttgtctggcgggagccttggcgccgagagtgtccatggggcgaggcctaggtctctctcctgtcctcaggactggagttcacacgaagtctgtggcattgggaaagcgggtgcacagggacggatttcctcgtggctggcgaagacaatgtccttcccctggggaaagcagcccacgggttctggagtggaggtcttcgctggggtctgtgggacccgctgtccctgcccgtcccttcccccggcttggacggttgccgcgtcactggaagaatgaatagaattgcctgggagtc

SEQ ID NO: 38589 - DNA, 743 bp, Artificial sequence
  DNA replication origin
tgggggtgcgtttcataaggtccttcctttgtttgcttccttctgtctccttggtgcggtgggccctgacatttgtagagtgtgctcgtttgtctggcgggagccttggcgccgagagtgtccatggggcgaggcctaggtctctctcctgtcctcaggactggagttcacacgaagtctgtggcattgggaaagcgggtgcacagggacggatttcctcgtggctggcgaagacaatgtccttcccctggggaaagcagcccacgggttctggagtggaggtcttcgctggggtctgtgggacccgctgtccctgcccgtcccttcccccggcttggacggttgccgcgtcactggaagaatgaatagaattgcctgggagtccgggaagcgtgaagacacccgggacctcagggaacccgcgccttcgccctcggggtcggtccagtcccgccagggttggagccaggctcctggtggggctgctgcgagtgggaaaaggtgggatgctgctgcctgtcggtgctgcagcagcggatcttcaggacgaggtcctgggcttcggctggggcgcgggggtggtcaagggggagcagaggcggggggcagttgggaagcacggagacaaaagggggaaagagggagggagcaggaagccaaaagcctacggtacccgttattaccaggcggaatcccatccgggtactaaccaggcccgaccctgcttagcttcaacagatcag

SEQ ID NO: 38590 - DNA, 817 bp, Artificial sequence
  DNA replication origin
tgggaggtgaggagcgtctctgcccagccaccctgtctgagaagtgaggagaccctccgcctggcagccgccccatctgagaagtgaggagaccctctgcccggcagccaccccgtctgggaagtgaggagcatctccgcccagcagccaccccgtccgggagggaggtgggggtcagcccctgccaggccagccgccccgtccgggagggaggtgggggggtcagcgccccgcccggccagccgccccgtccgggagggaggtggggggtcagccccccgcccggccagccaccccgcccgggagggaggtgggggggtcagccccccacctggccagccaccccatccgggaggtgaggggcgcctctgcccagttgcccctactgggaagtgaggagcccctctgcccggccaccaccccgtctgagaggtgtacccaacagctcattgagaacggccatgatgacaatggcggttttgtggaatagaaaggggggaaaggtggggaaaagattgagaaatctgatggttgccgtgtctgtgtagaaagaagtagacatgggagacttttcattttgttctgtactaagaaaaattcttctgccttgggatactgttgatctgtgaccttacccccaaccctgtgctctctgaaacatgtgctgtgtccactcagtgttaaatggattaagggcggtgcaaggtgtgctttgttaaacagatgcttgaaggcagcatgctcgttaagagtcatcaccactccttaatctcaagtacccagtgacccaaacactgcggaaggccgcggggtcctc

SEQ ID NO: 38591 - DNA, 1187 bp, Artificial sequence
  DNA replication origin
aagtctcccatgtctacttctttctacacagacacggcaaccatcagatttctcaatcttttccccacctttcccccctttctattccacaaaaccgccattgtcatcatggccgttctcaatgagctgttgggtacacctctcagacggggtggtggccgggcagaggggctcctcacttcccagtaggggcaactgggcagaggcgcccctcacctcccggatggggtggctggccaggtggggggctgacccccccacctccctcccgggcggggtggctggccgggcggggggctgaccccccacctccctcccggacggggcggctggccgggcggggcgctgacccccccacctccctcccggacggggcggctggcctggcaggggctgacccccacctccctcccggacggggtggctgctgggcggagatgctcctcacttcccagacggggtggctgccgggcagagggtctcctcacttctcagatggggcggctgccaggcggagggtctcctcacttctcagacagggtggctgggcagagacgctcctcacctcccagacggggtcacggctgggcagaggcgctcctcaaatcccagacggggcggcggggcagagacgctccccacatctcagacgatgggcggccgcgcagagacgctcctcacttcctagatgggatggcggccgggaagagacgctcttcactttccagacagggcagccaggcagaggggctcctcacatcccagacgatgggcggccaggcagagatgctcctcacttcccagacagggtggcggccaggcaaaggctgcactctaggcactttgggaggccaaggcaggcagctgggaggtggaggttgtagcgagctgagatcatgccactgcactccagcctgggcaccattgagcactgagtgaaccagactccgtctgcaatcctggcacctcaggaggccgaggctggcggatcactcgcggttaggagctggagaccagcccggccaacacagcgaaaccccgtctccaccaaaaaaatatgaaaaccagtcaggcgtggcggcgcgtgcctgcaatcacaggcagtcagcaggctgaggcaggagaatcaggcagggagttgcagtgagccgagaaggcagcagtacagtccagcttccgctcggcat

SEQ ID NO: 38592 - DNA, 916 bp, Artificial sequence
  DNA replication origin
cagacagagactgacagagagaaatagcgtgagagagagacagagagagagagcgcgagagcaagagagacagagtgaaagaaacagacagggagggagagagacagacagagagacagagagacagacaggcagagaaagagagtaagacagaagataggcacagagagagagagagaaagagagagagagaaagaaagagagagacagtctgggcgtggtggctcactcctgtcatcccagcactttgggaggctgaggcgggcggatcatgaggtcagaagatcgagaccatcctggctaacacagtgaaatcccgtctctactaaaaatacgaaaaattagccaggcgtggtggcgggcgcctatagtcccagctactcgggaggctgaggcaggagaatggcgtgaacctgggaggtggagcttgcagtgagccaagatggcgccactgcactccagcctgggcgacacagtgagactccatctgaaaaaaaaaaagaaagaaagagagagaaagacagacagaagaagagacagacagagacagagagaaacagacagaaagagagagagagaaacagaaaggcagggagggagagagagagagagacaggcagagaaagacagtaagacagaagacagacacagtgagagagacaggcagagagagacagacagaggcagagagaaagaaagagagagacagacagacatggagagagagagacagagagaaacagacagaaagagagacagacagagagagagtgagagagagagagacagaaagggagggagagggacagagagagagacagacgggtagaaaaagagagtaagacagaagataggcacagagagagagacagagagagagagagcgagagagacagacagagagactcagaaaaag

SEQ ID NO: 38593 - DNA, 2854 bp, Artificial sequence
  DNA replication origin
aagcgattgcctaccaattacaattgatgttaatgatgctactgggaggccacccctacagtcgctgcgccgagtttagggacttgctagctttgctaagttacatgggatttcctacgtactaaacggaggtgggggacgggtccgaggacgtggcggcgcctccctgccctgacgtggaagctacagaccgggccccaggcaccgcgcggccgagagccggaggcgggcgcgcaatggcggacgacaccgcagcattcagcgagtcaccgccaggggcacgcgaaccccaggaccgcggccacgagcgctgtcagacgggccgcgtggcgggcttccggccccggacacaaccgcgacgcgcgccgggtagacagggtcgggcgggcgaggaggactgtgcctcagaggggtgttggggaggaggggcgctggagcggctgtgggccggtcgccgggccgccaccaggggcggcgacgaaccggggcgaccgggacgccctcccccaccctctccggacccttcctacttgccttcctccccccgcccccaacaagccctcactacccacgacgcgcgacgacgacggcacgggaccttccacccctccagggccaacgaaccctgcaccacgagctgcgtaaggcacgagggaggccccgagggaggaacccggaccgcggtggtggccacgggaactcggccccagccggctctcttcactctctgttttcgcgggtggcagcactgccctctctctcttcctcacagcagggagccccccttccccatgccacccaatgcgtgaccacacagggcctgcggggggagggagaaggggcgggcatggcagcagaggagggcagacatcgccggtctgcacttggggggacggagggccccagcaggccacgccagggaacccccagccgtgcaccccgaggaacccggaggcacccccagggaccagcctcctttctcctaggcaaagcacctccaagtaaatccacacacacacacaacctgtcggaggcagaacggtagcccatcagcggccggccggcgcacgcctcacctgcccaagcccaccgcgatcgctcacacggcccgcgcgcaccagccagaggggatcacgggacctgcgctcgccagaccaggcggcgcccttccccgcgtggcaggggcacttctcactcaaccgcctcgaccgccacaccaacgagctccctcaggacccactcccagacaacacggcggcgaccagaggagggggcgctgggggtgggaaccacacaccacagctggacttcgggcacctgagtgataagctgttgggggaacgggtggagccgggtgcggtaggctcacgcctgtcatccccgcactttgggaagcgagggaaggtggatccctggatccaagccttggcaacatggtgaaacctcgtctctaaaaaaatacaaaaactaactggtttcacaacctggactcaaagttaataaatagataaataggccgggcgtggtggctcacgcctgtcatcccagcactttgggcgggatccgaggtgggcggatcacgggggtcaggagatcgagaccatcctggctaccacagtgaaaccccgtctctactcaaaatacaaaagattagccaggcgcggtggcgggcgcctgtagtcccagctacttgggaggctgagacaggagaatggcgtgaacccgggaggcagagcttgcagtgagccgacatcacgccacagcactccagtctgggcaacagagcgagactctgtctcaaaaaaataataataataataaagagatcaaaattgaaaatttaaaaaaaaaaaaaaacgtaactggccgggcgcaatggctcacgcctgtcatcccagcactttgggaggccgaggtgggcagatcacctgaggtggccagttcgagaccctcctgacccacatggagaaatgccgtctctactaacaatacaaaatcagccgggtgtggtggcccatgcctgtaatcccagctacttaggaggctgaggcaggagaatctcttcagcacgggaggtggaggttgcagtgagccgagatggtgccattgcactccagcttgggcaacaagagtgaaattccgtcccccaccaaaaaaaaaaaaaattaagcgcagtattctgttatttttgcttcctaccctgagaagaacataatacagctgttgtctgtctgcctgcctgcctgtgacagggcctcactctgtctttcccccagactggagtgcagtgacaccattatggctcactcactgcagcctcaacctccacagggttcggcgattcctcaagggatcctacagcctcagcctcccaaagtgttggggttacaggcgtgagccaccagcaccaggcctgagttaatatatctggtctcactacgtcttaacgacacacccatgaagaactcaagtcaagagagagtcggtaagagactcagcattctctcccgaaagcagtgaggtggatggcggcttgtgtcccgagctcctgtggtttcagttggccgcgcgtagaggagagatttccaatgtttccagagaggtccgagccacagtcattcggggcatccgaggacgagatggggtttctgacagcgacttaagtgccaggaagggtcagaatctgccaaggcccgtgtcccagggtggggccgaaggaacccaaggtagagggagtcagcggtccgcacagagagagctccagccctaggccccactgtgcagacccaatcagaagaagagagtccttcatcctatatgccacatccctccactgaacttgggagcggatccg

SEQ ID NO: 38594 - DNA, 1070 bp, Artificial sequence
  DNA replication origin
atcccctcctgttctaattcactgcccacagccctgctgataaaagcaaagctcatctctgccgtgctgcagggaaccctatttccttcccctgcagctcagccacctcctcctctcaggtctgccagccatgaaacttctttacctgtttcttgccatccttctggccatagaagaaccagtgatatcaggtaacgtgaacctctctcgggggtctgggttcctggtcatgggcttcccgtctttcccttccctctcactgtgggcatcatctgaagcctttccttctctcctgcagcttcgggaggtttgcccaggatcatctcaagttaatatctctctctgattcttttttgccagagtggtgggatgatagatgtttggagcatctggtgcttgagggccagggtggtatcctggtgggagcttgggagaggtttgaggggcaaagcgtgggtgcaggttggggacttgttgaggacttcgggagactagagtggaagctggggtgagttgtgatgtggaggaaaaaccttgggattggagtgatagaaggaatattaggatgagctggaggtgaggagctgggcttccctgatggtttagggcagagttggagacaggatgggatttggggttgagtggagctggtgttgaggattaggctggggcttgggctgaggctgggagtcggtgctggatgctgcagggtgattgggttcagcttggtcatggcatactgctgggaattgaggttagtgacttgattagattagggttagattagattagattagggtttggcttggagttggggcttgggggcattgagttgagtaaggctgggagttctaattaaggcaggcctgaatgagtttgagtttgaattgggttaatatagggtcaaggaagattgcagattgggatgcggctggagctgaggcttgttgggcttatgtgaaatagggtcaggttattgataagaaacagggtctgtgtaatgtgagtgaatcctcttcgttccctaatattacaggtgatcatgtccttttcccttcatccctagctct

SEQ ID NO: 38595 - DNA, 1315 bp, Artificial sequence
  DNA replication origin
cggctgggcagaggcgcccctcacttcccggacggggcggctggccgggcggggggctgaccccacctccctcccggatggggcggctggccgggcggggggctgacccccccccacctccctcccggacgtggggctgacccccccacctccctcccggacagggcggctggccaggcggggggctgacccccccacctccctcccggacagggcggctgacccccccccccacctccctcccggacgtggggctgacccccccacctccctcccggacggggcggctggccgggtggggggctgattcccccacctccctcccggatggggtggctggccaggcagaggggctcctcacttcccagtaggggcggctgggcagaggcgcccctcacctcccggacggggcggctcgccaggcggggggctgacccccccacctccctcccggacggggcggctgccgggcagaggggctcctcacttctcagacggggcagctgccgggcggaggggctcctcacttctcagatggggcggatgctgggcggagggtctcctcacttctcagacggggcggctgggcagagacgctcctcacctcccagacggggtcgcggcctggcagaggcgctcctcacatcccagatggggcggcggggcagaggcgctccccacatctcagacgatgggcggccgggcagagacgctcctcacttcccagatgggatggctgccgggaagaggcgctcctcacttcctagacgggatggcggcggggcagagacgctcctcactttccagactgggcagccaggcagaggggctcctcacgtcccagacgatgggcggccaggcagaggcgctcctcacttcccagacggggtggcggccgggcagaggctgcaatctcggcactttgggaggccaaggcaggcggctgggagatggaggttgtagcgagctgagatcacgccactgcactccagcctgggcaccattgagcactgagtgaaccagactccgtctgcaatcccggcacctcgggaggccgaggctggcggatcactcgcggttaggagctggagaccagcccggccaacacagcgaaaccccgtctccaccaaaaaagtacgaaaaccagtcaggcgtggtggcgcgcgcctgcaatcgcaggcactcggcaggctgaggcaggagaatcaggcagggaggttgcagtgagccgagatggcagcagtacagtccagcttcggctcggcatcagagggagacagtggaaagagagggagagggagaccgagagggagag

SEQ ID NO: 38596 - DNA, 947 bp, Artificial sequence
  DNA replication origin
ccgcctggccagccgccctgtccgggagggaggtgggggggtcagccccacgtccgggagggaggtgggggggggtcagccccccgcccggccagccgccccatccgggagggaggtggggtcagccccccgcccggccagccgccccgtccgggaagtgaggggcgcctctgcccagccgcccctactgggaagtgaggagcccctctgccgggccagccaccccgtccgggagggaggtggggggctcagccccccgcccggccagccgccccgtccgggaggtgaggggcgtctctgcccggccgcccctactaggaagtgaggcgccccgctgcccggccagccgctccgtcagggagggaggtgggggggtcagccccctgcccggccagccgccccgtcccggaggtgaggggcgcctctgcccagccgcccctactgggaaatgaggagcccctctgcccggccaccaccccgtctgggaggtgtacccaacagctcattgagaaccggccgggatgacaatggcggttttgtggaatagaaaggggggaaaggtggggaaaagattgagaaatcggatggttgccgtgtctgtgtagaaagaaatagacatgggagacttttcattttgttctgtactaagataaattctgctgccttgggatcctgttgatcggtgaccttacccccaaccctgtgctctctgaaacatgtgctgtgtccactcagggttaaatggattaagggcggtgcaagatgtgctttgttaaacagatgcttgaaggcagcatgctcgttaagaatcatcaccactccctaatctcaagtacccagggacacaaacactgcggaaggccgcagggtcctctgcctaggaaaaccagagacctttgttcacttgtttatctgccgaccttccctccactattgtcctatgaccc

SEQ ID NO: 38597 - DNA, 913 bp, Artificial sequence
  DNA replication origin
ggaggtggggggctcagccccccgcccggccagccgccccgtccgggagggaggtgggggggtcagccccccgcccggccagccaccccgtccggggggtgaggggcgcctctgcccggccgcccctactgggaagtgaggaacccctctgcccggccagccgccccgtccgggagggaggtgggggggtcagccccccgcccggccagccgccttgtccaggagggaggtgggggggtcagccccccgcccggccagccgccccgtccgggaggtgaggggcacctctgcccggccgcccctactaggaagtgaggcgccccgctgcccggccagccgctccgtccgggagggaggtgggggggtcagccccctgcccgtccagccgccccgtccgggaggtgaggggcgcctctgcccggccgcccctactgggaagtgaggagcccctctgcccggccaccaccccgtctgggaggtgtacccaacagctcattgagaacgggccgggatgacaatggcggttttgtggaatagaaagggaggaaaggtggggaaaagattgagaaatcggatggttgccgtgtctgtgtagaaagaaatagacatgggagacttttcattttgttctgtactaagataaattcttctgccttgggatcctgtcgatcggtgaccttacccccaaccctgtgctctctgaaacatgtgctgtgtccactcagggttaaatggattaagggcggtgcaagatgtgctttgttaaacagatgcttgaaggcagcatgctcgttaagaatcatcaccactccctaatctcaagtacccagggacacaaacactgctgaaggccgcagggtcctctgcctaggaaaaccagagacctttgttcacttgtttatctgccgacctt

SEQ ID NO: 38598 - DNA, 1609 bp, Artificial sequence
  DNA replication origin
ggcggctggccgggcggggggttgacccccccacctccctcccggacgaggcggctggctgggcggggggctgactcccccacctccctcccggacggggtggctagccaggcagaggggctcctcgcttcccagtaggggcggctgggcagaggcgcccctcacctcccggacggggcggctggccgggcggggggctgaccccccccacctccctcccggacggggcggctggccgggcgggggctgacccccccacctccctcccggacggggcggctggccgggcggggggctgacccccccacctccctcccggacggggcggctggccgggcgggggactgaccccccccacctccctcccggacggggggctgacccccccacctccctcccggacggggcggctggccgggcaggaggctgatccccccacctccctcccggacggggcggctgccgggcggagacgctcctcacttcccagacggggtggctgccgggcagaggggctcctcacttctcagacggggcagctgccgggcggaggggctcctcacttctcagacggggcggctgggcagagacgctcctcacctcccagacggggtcgcagcctggcagaggcgctcctcacatcccagacggggcggcggggcagaggcgctccccacatctcagacgatgggcggccgggcagagacgctcctcacttcccagatgggatggctgccgggaagaggcgctcctcacttcctagacgggatggcggcggggcagagacgctcctcactttccagactgggcagccaggcagaggggctcctcacgtcccagacgatgggcggccaggcagagacgctcctcacttcccagacggggtggcggccgggcagaggctgcaatctcggcactttgggaggccaaggcaggcggctgggagatggaggttgtagcgagctgagatcacgccactgcactccagcctgggcaccattgagcactgagtgaaccagactccgtctgcaatcccggcacctcgggaggccgaggctggcggatcactcgcggttaggagctggagaccagcccggccaacacagcgaaaccccatctccaccaaaaaagtacgaaaaccagtcaggcgtggtggcgcgcgcctgcaatcgcaggcactgggcaggctgaggcaggagaatcaggcggggaggttgcagtgagccgagatggcagcagtacagtccagcttcggctcggcatcagagggagacagtggaaagagagggagagggagaccgagagggagaggggagaggggagaagggagaggggagaggggagaggggagaggggagaggcaaaagaaacaaatcttatcagagaccttctctgtccatcctcatcagccttcccatccccaccccctccatgcacacaccactctaaccccttcccttgcctttcctcttctcagcacttatcaccacccaacatatgtttatccacttattttctatctccaccaactaaagtgtcagctgcatgaaagcaaggaccttcttttctttcactgctacatgtctttcactgttattatttcacaacc

SEQ ID NO: 38599 - DNA, 1451 bp, Artificial sequence
  DNA replication origin
acatttattgaatcttcttagacacggaaagtgtcttaagcattttacacaacttgaatcatttaatcctcacatcgaccctaaaggaaagaattgtcatgaatcctgttttatagatggagaaactaaggcatggagagatggaggggagcggggtttgaacacacaccccctggttcagggcagtgccctcaatcaccctgccatcttgccgtgctagctgcataactctccttccctcaacacctcccaccttcccatcttggtctgcaccagttctttcttccctccccctttcctcccttatcccgttctcaagtatttcttccacattctgagtagcctggggtaagctctctctctctctctctctctctctctctctctctctctctctctctctctctctctgtctctctctctctcgccctcagttttcctatctgaggatggaggattggactggattatcttcaggtccttccctgaccactctaattttcagctccttataagtttgtgattcttttatttgctgatttgttttctagtctcccagcccaccctactgtgagctaccgagcagtgagctccctctttctgttcaccacatctccccagagcctggcactgtgcccggcacttagtaggccctcaataaatacttgtagatgaagaaaggaggggatgagggcgattgtactcagttttctaaagccagctcctgcactgtctccctggcccctcttcttttctcagctcttccccctccccacttccctcccgccctctcacctcccagggcccactccggccctccatccggcctgcatttttccgggtttgatatcattttttccactctcccggctgctgccggccgcctctgccaactttccacagctagagcccctccccctgaccgcaggccggagacagcttggggtgggggaagaccttccttcttttcccttccccaggctggggttggggtgtgggagtgagtgccatccatccccgttggaaggctggggtgcggggattcgcggctggaggacgctgctggctggctggcgggtgctgcggtctttctctgcaccgcgtcccccggggctggggcgtctgggatagttgggggaagggatgtccggcgtcagggacacgatggtccaaacggtttgcgtcttgttttcttctcaaagcagtgacaccccttcccttcgggctggaaactcctgacctgatccccaacacccagccctgaccccagccaggctggacgcctcaccacctccttcctcccgcacagccaaagggagacccaggaggaggctgggccctggggtgtaatcctccctggctgggtgactctggcatgctcacctcccctctctaggcttgtttctgccttcgggaaatgagtgagttggattaaactggggtccatcccg

SEQ ID NO: 38600 - DNA, 866 bp, Artificial sequence
  DNA replication origin
aaatgatatcaaacccggaaaaatgcaggccggatggagggccggagtgggccctgggaggtgagagggcgggagggaagtggggagggggaagagctgagaaaagaagaggggccagggagacagtgcaggagctggctttagaaaactgagtacaatcgccctcatcccctcctttcttcatctacaagtatttattgagggcctactaagtgccgggcacagtgccaggctctggggagatgtggtgaacagaaagagggagctcactgctcggtagctcacagtagggtgggctgggagactagaaaacaaatcagcaaataaaagaatcacaaacttataaggagctgaaaattagagtggtcagggaaggacctgaagataatccagtccaatcctccatcctcagataggaaaactgagggcgagagagagagagacagagagagagagagagagagagagagagagagagagagagagagagagagagagagagcttaccccaggctactcagaatgtggaagaaatacttgagaacgggataagggaggaaagggggagggaagaaagaactggtgcagaccaagatgggaaggtgggaggtgttgagggaaggagagttatgcagctagcacggcaagatggcagggtgattgagggcactgccctgaaccagggggtgtgtgttcaaaccccgctcccctccatctctccatgccttagtttctccatctataaaacaggattcatgacaattctttcctttagggtcgatgtgaggattaaatgattcaagttgtgtaaaatgcttaagacactttccgtgtctaagaagattcaataaatgtgggctcccgct

SEQ ID NO: 38601 - DNA, 1063 bp, Artificial sequence
  DNA replication origin
aagggtccatgtcggccgtgttcggtatgggggtggaaagtgcccggttttcccgctgaccctaccttgccgcgggcgcagcgtacggagcgcagggcgccgaagaagatgggcagcagcgccatgagcaggaggctgccgtaggccagcgcgatgccctcgggcgtggaaggcggccgcgtagtgctgttggtggggccgcctgcctcggcactgccgttatgcggatcgctgagggccgagtccatggcgagggtgcgttcgggatccgactccagctccggttgctgcagcagggacgcaggcggagacaccggctctgcagggaaagccacgttcccctaaggcaacaggaagtgacgtgctccctcccaagcccgcgccgcgcacgcgcgcacacacgcttgcacgcacgcgcgcgcgcgtgcacgtctccccgcccgctcgccctctagcggtggccgagggccgggcggcgggttgctaagcaacttgttagcggtccggacaggggctctgggccactgcggtgggcatgcgacccgaatgcccatttcccagtcccagccggtctcctcaatcccctgctgtccactctccgcaaatcctcatattccgaataactaagaatgtgtttattcatacatgcatttattgggtatccaattgtttattcactccttaaatatttattgaatgtccctcaatatgccaacaactgacctaggctctggggacactgaggtgaacaatacaggcaaaagttcctccttgccttcgtgaagtttgcattttagtgcagtgtgtgtggggggacgttgggaagacaataaagaaactgaacaaaataaaagtctgtaaaatgggctgggcgcagtggctcacgcctgtaatcccagcactctaggaggccgaggcgggtggatcacctgacgtcacgagttcgagaccagcctgaccaatatggtgaaaccccgtctgcactaaaaatacaaacaattagccgggcgtggtggcacgcacctgtaatcccagctactcgggaggctgaggcaggagaatc

SEQ ID NO: 38602 - DNA, 1972 bp, Artificial sequence
  DNA replication origin
tccttggtgacagggctctgacctactcatctttgcagcaatcctcccttacccctgacagtggtggaagttcaggaaatactgttgcctggaaggtgttttctgcagagattagtgatccatgtacagaaggtgccagggagaattactcagtttggagagcagctcagatcaagctgcctagccttatgccagctgtccttcgcctcctctgtcctgggttatctcagaactgctctctacactaagtgtctacctgacaggcatagtagagaggcttaatatcacctgaactcagcttagaaaaagccaaataaaaaggaaaatggagtcatgtttgagtctctcagcctaagccccgcctaactactttcctttgcatctgatcgcatacagagccagtagtgagttctctgctcctggggaaggaagatggcaggcctcagctactgctcaagttgggtagtgttttgagaacctcagcttcagcagtttcaaaagtggcagctgctttgtgggcctgccctctttgggcaagacttccacttaggtccatcctcaggtctgggtgggggaggagcatcgggaaggtgcagattaagaggttgtggaggaagggagagggtgccaggaagtgaaaagtcattggtacaacgggctagaaagggcttaatatagggaagaagtggggcagggaagggggagggagaagcagaaggtgaaatgtgctggagtcctcctagttatccaataggacagatgttgaggaaggccagggatggagtctggcccagtctcacaagaggggccaacagtggcccagcagacaggcccagtttggtggggggattgtcttgggggtatggggagaagggctactttgagatagggtcaaaggctgggtgggaaaagggttacaggttaggaacaaggtctaggttttgactaggccatgtccaaggttggatggtagttaagagaggaaaccaggaaaataagacgtccatgcctagttggaaagtagaggcaccaagatgccagcttctgaggagccagctgactgggatggttccagaaagtgatgtgaaaaactgggctctaagagatcattgtttttgaggcaggggcaagggccaggtgtgggggatctaggtgagcacataaggtgccatagattccagtgagacaggagtcagagtctagggatgggtctggatggtagaaagggccctgcggtgggctgaggcagggttcctaacagggaatgacacgaaattgtaccattcagtaagttgtgaggaccagtatccatcaggtatacatgatggggctgatctgcctgggcccaacaggctcagaacaatcagtgcccgagtcgcagtgggggacgggctgacagcgttcccagccgcggcatgatgcacagggagggaagtgtcagggtccgggtcgggagcagaagcaagttcctattggggaaggtatcataccctggtcgggggtcggtgcccagatcccggggtaggaaatgccagccccggaatgtgggcccgagacagagggaacggtggtgatcagggctgggaagagtcagtgtccggggagaggtgtctgtcccgcctaggaagggtccatgtcggccgtgttcggtatgggggtggaaagtgcccggttttcccgctgaccctaccttgccgcgggcgcagcgtacggagcgcagggcgccgaagaagatgggcagcagcgccatgagcaggaggctgccgtaggccagcgcgatgccctcgggcgtggaaggcggccgcgtagtgctgttggtggggccgcctgcctcggcactgccgttatgcggatcgctgagggccgagtccatggcgagggtgcgttcgggatccgactccagctccggttgctgcagcagggacgcaggcggagacaccggctctgcagggaaagccacgttcccctaagg

SEQ ID NO: 38603 - DNA, 1372 bp, Artificial sequence
  DNA replication origin
ccgtgatcgcgccactgcacttcagcctgggcgacagagtgaaaccctgctgcacaaataaaagagaaaagggaaaaagagcggagacaggcagccccgctttacaggtagggaaagtgaggcacagagaagtaaaacgacctacccaaggaaacccatctagtaaaggcagggaccgggatcgcaggctcttggagctcaccagtccccgccgggcggtgcttggcccctccttcccctccggcgggcgtggcccggccgggcccgccccctcccctgcgcgcgttcctggcagcccggccggcgtttcctgcctgcgtcgctgagctggcgggcgggcagcccatctggcggcccccgcggggcggcgcggggaggcggcccagacttgctggagccaggcgccggcccgggggcccccctgcccgcctggagaacccaggtgtggccgcggcgggggtggggggtggtgctttccttcccgctcgctcggcccttcctgacgcaccagggcaggatgcagcctcctcccgtcctctcctcggcctccgcctcccgcgccctggcccggaatgctggagggaatccaaacgcagggcggggaggcaggggcaggcccctgaggccccgcccctgatagccatttgataccaccgctagtcttgcccgtgtttggggtgactcagcttccctgcttgtgcaagaacagctgaactctgacctcctgaatggccgactcttgccttgctcctcagggaccccagacacgatcgtaggaaccggaggtactactgccctaagccatagcgcttgacattatccatttattcagcagtttcaagtcgcggcaagcggcgtttgaccacttctgttccctgcccagtgcttaactggtacctggtgccggcctgatggaggctctgaaggctttccctcagaaagctggacccgccctgggaagcaggtcctaaccccccttcacagtcgagcacaagaccgcttcattcacactgcaggagccagccctgctgtcagactgacggtgccaaacccccttctccaatgctgcccccaaaaggaaccagggatccattatcctgatcatgtcaaacggcaccacggtgaatacgagtcttggaagccagacactctgggttcacatgccccctgggcccgcccttacggtctctgcctcagtttccccatcgtaagaatgatgtaggtacctcaaagtgttgttacaacgattaagtaaatcttaagatacatttgaaacttgaacacgggtttcaattgtgcaggtgcacttaaacgtggactttttttctacctctgccacccctgagacaccaagaccaaccccctcctcttc

SEQ ID NO: 38604 - DNA, 1060 bp, Artificial sequence
  DNA replication origin
ctgagtcaccccaaacacgggcaagactagcggtggtatcaaatggctatcaggggcggggcctcaggggcctgcccctgcctccccgccctgcgtttggattccctccagcattccgggccagggcgcgggaggcggaggccgaggagaggacgggaggaggctgcatcctgccctggtgcgtcaggaagggccgagcgagcgggaaggaaagcaccaccccccacccccgccgcggccacacctgggttctccaggcgggcaggggggcccccgggccggcgcctggctccagcaagtctgggccgcctccccgcgccgccccgcgggggccgccagatgggctgcccgcccgccagctcagcgacgcaggcaggaaacgccggccgggctgccaggaacgcgcgcaggggagggggcgggcccggccgggccacgcccgccggaggggaaggaggggccaagcaccgcccggcggggactggtgagctccaagagcctgcgatcccggtccctgcctttactagatgggtttccttgggtaggtcgttttacttctctgtgcctcactttccctacctgtaaagcggggctgcctgtctccgctctttttcccttttctcttttatttgtgcagcagggtttcactctgtcgcccaggctgaagtgcagtggcgcgatcacggcccactgcaacctcgacctcctgggctcaagcgatcctcccacctcaggtgggaatataggtgtgtcccaccacgcctggcttttttttttttcccctagttgaaacggcggttctcactcttgctcaggctggtctcgaactcaggctcaagcaatcttcccacctcggcctcccaaagtgctgggattagaggcgtgagccaccgcgccgtgcctcagctattttcgtgtgaccgtgtgatctcaggacactttctttcccttctcttccttggttttcttacctgaaaaatggggtgaacaattgaacctccctcaaccatgggctaagcctttgttttcctctccaccgtagccccaacacttggcccat

SEQ ID NO: 38605 - DNA, 810 bp, Artificial sequence
  DNA replication origin
caagtgcggggcccgccaagcccatgcccacccgggactctagctggcccgcaagcgccaggcgcagccccggttaccacccctgcctctctctccacacctccccgaaggctgagggagccggctccggcctcggccatcccaggaaggggcttccacagtgcagcggcgggctgaagggctcctcaagcgcagccagagtgggcgccgaggccaaggaagccccaagagcgagggagggctgccagcacactcacctctcgccatctactcaggaggctgaggcaggagaatcacttgaacctgggaggcggaggttgcagtgaactgagatcgcaccactgcattccagcctgggcgacaaaatgagactgtctcaaaaaaaaaaaggagagtctatgctaatgtttgggtttctacaagttgtgggtaatggtaaagttgaaatcttacgtggaccagtgctgtagatgggtttctatatggttgtgattgtgaatgcatgattgtgtgtttgtgtctaagtatgtttaggagtatgtgtttctgagaacatttgtgagcaagtgcctgcattggtgggtgggtgtgtgtaattggtgtgtgggtataagagagacagatcatgtggaagtgtttgggttgataaaagggcttttgcaagggcattgcctgtgcgagtttgtgaatgtgtgctgtcccatctgcttgcttgcttgttttttttcttttttgttttttgagacggagcttcgccgttgttgcccaggctggagtggaacagcgggatctcggctcaccgtaacctcc

SEQ ID NO: 38606 - DNA, 1919 bp, Artificial sequence
  DNA replication origin
agagcgggtgttgggcggcggacagcgggggcacgcgggcccttctggggagaagcaggaggggcggcggccgctcttggacccagcagccccgggcagcgactttgggtccagccgcgcggggagaggccgtgcaccccgactttgttcgggggcgcacccgcctgaaagacattgctgggcgccggtcccgccctttggggacgcctcggcgctggactcgccgcgcctggcagccgctcgcggcagatgggccgccccggcttcccgcactcggcccgtgggaaccaggcccggcgggcgggggcgagggcgccaggaaccgccccaggggagcggcgcgcagatggggcgggggccggtgaggcggcagatgggtgcgaggccggcctgcggccgcgccacaaaagcgaagggcagatgttcgcggccagatgttccaggagcggggggagcctgggaaaaaccagcttgccttccctccgcccttccccagcggcagctctgggctggccgggggaaggtgcggctggcgtggccgccgcccggcaccactaggacggtgggagctgaggtcagggtctaaggacatctcaggtgaagcttgtacctctagcctcctccaccacaccagccgtcccaccttcttgctggagagtactaaaaatgacatctcaggaatctggtctgaacccccctgccctatgtgaccgccttccccccacccctcttcttctgcaccccgctgtctgccacaccaccatgagcatagtggcagcagtgttcgctgatacttataaagctcttaccagcgctttaaagcattatcttatttaattcttacagccactctgtgctgaaggtcgtctctattctgatttaagcagccgagacagaatgaaaaagttaaaaaaaaaaaaaaaatcaatccgccgggtgcggtggctcacgcctgtaatcccagcattttggaaggccaaggcgggcggatcacgagctcaggagttcgacaccagcctggccaacacggtaaaaccccgtcactactaaaaatataaaaaatagctgggcgtaggccgggcgcggtgactgacgcctgtaatcccagcactttcggaggccgatgcggccggatcacgaggtcaggagatcgagaccatcctggctaacacggtgaaacaccgtctctataaaaatacaaaaaattagccgggcgtggtggtggcgggcgcctgtagtcccagctacccgggaagctgaggcaggagaatggcgtgaacccgggaggcggagcttgcagtgagaagacatcacgccattgtactccagcctgggcgacagagcgagtctccgtctcacaaaaaaaaaaaaaaaaaaaaaagctgggcgtggtggcgggcacctgtaatcccagctactctggaggctgaggcagaagaatcgtttgaacccggaggctgaggttgcagtgagccgagatctcgccattgcactccagcctgggcgacagggtgagactccgtctcaaaaaaaaatccctttcaggtgagggactatgaacagggagctcctgagtgataagtaacttgtccacggtggcagcgagtaccaggcagggctggggctggagtccaggattctggaagctgtggagcatctcttgcttgccaggctgtgggccagcgctggcatattacagtgagcagaatattgttgttgtactaatctattatgactggtgtgaacccaaaagcatctgaaacaggtcttaatcaatttagaaagtttattttggcctagcacagtggctcacacctgtaatagtagcactttaggaggccaaagcagatggattgcttgggcctaggagtttgagaccagcctgggcaacacaaggagaccctgtctctacattgaaa

SEQ ID NO: 38607 - DNA, 1062 bp, Artificial sequence
  DNA replication origin
agccgcaccttcccccggccagcccagagctgccgctggggaagggcggagggaaggcaagctggtttttcccaggctccccccgctcctggaacatctggccgcgaacatctgcccttcgcttttgtggcgcggccgcaggccggcctcgcacccatctgccgcctcaccggcccccgccccatctgcgcgccgctcccctggggcggttcctggcgccctcgcccccgcccgccgggcctggttcccacgggccgagtgcgggaagccggggcggcccatctgccgcgagcggctgccaggcgcggcgagtccagcgccgaggcgtccccaaagggcgggaccggcgcccagcaatgtctttcaggcgggtgcgcccccgaacaaagtcggggtgcacggcctctccccgcgcggctggacccaaagtcgctgcccggggctgctgggtccaagagcggccgccgcccctcctgcttctccccagaagggcccgcgtgcccccgctgtccgccgcccaacacccgctcttcctcctgcaccgaacacttcgggctcactgacgcgccgtctccatcctaagccccaaaccttcaaagtgcaggagacaactgtcacgtcaccctgcaaaaaatgctaacgtctgataatataaaatgctggtgtggacgtgggaaaatagaaactcccaactgcgttggcccctcagcctggaataccccttgtcctcattgcctgcttaactcttgattttgtgaaatataaaaagtaccgagaaatatagcgatttatgttcctaataccacattcccaccacccaggactgacaactgtcagctgtatttgcgcctatttctcctcctccaaagaacaaacctttacagatagtgctcctgtctttttgtgttttttgttttgttttgctttgttttgttttgttttgttttgttttgagacagagtctcgctctgtccccaggctagagtgcaatggcgcaatctcggctcactgcaacctctgcctcccgggttcaggcgattcccctgccccgtagtcctcccc

SEQ ID NO: 38608 - DNA, 949 bp, Artificial sequence
  DNA replication origin
catgggtgcaagaggagagagaggcctgagccctggatgggtgtggttgtgtgtccttggggctgatgcaggattttttttttttttttgagacgatgtcttgctctgttgcccaggctgcagtgcagtggcacgatctcgtctcactgcaacctccatctcctgggttcaagcaattatcctgcctcagcctcccgagcagatggagttacaggcgtgcaccaccacgcctggctaattttcgtatttttagtagagagggagtttcaccatgtgggccaggctggtctcgaacttccgacctcatataatctgcctgccttggcctcccaaagtgccgggattacaggcgtgagccaccgcacctggcctttctgcaggattctgaattgtgtatgtgtggagagtaaggggactgtgtgctctagaagggctgtggtgggaggtctctggcctggtgcaggtgggtgttggttgggtctgtgcactgtgggagtgggtgcctgcaggaagccagtttatccttttgcaggcagtggacttctctaaggctgcgggcatgtgtgttggcatcttggagtcccaggtgttttggcgtgagtaatactgtatagatgtaagtgtgtgtagtgtttgcaatgttgtagtgtgggtgcatgtgtctgtgtgtcctgtttgttgagaggattcattgcatgtggttctgttaggagtgataatggggtgttttgagacatttcctccttggtctctattttttggtgtgttggttatgcagatttggtgtttcggtagtgtgcgcggaggtcagtgtgttggttgtatattatggtgtactgttgtgcgttgtgcatttggcaggttgtgtctattggtgtgtggctgttgggtttgtctgttgtgtcagtcgtacatataaatgccacgttgggcgtgtgggtgtgtgcat

SEQ ID NO: 38609 - DNA, 1545 bp, Artificial sequence
  DNA replication origin
aagtgggagggggcggcccacacttctggaaaagaggggctccggccagtgattatgattagtgggtgggagagctccacatatcaagagagggaggatgtaatctatatttggggaaagagatggcacacatatgcagactccccaggagtcttcaactctaacctacaagaagccccccaaccctctaagacagggaccactggggcgtgacccagcggcgaaggcaggagaccgagccgcgcccctgacccgcgcgggcttgggtggcggggtcctcccccaactcactcacctcgcgggctcggcagtgggagcgcgacctgggtctgcccagcgagcaactgagaacccgctgcggagggacctgagtgcgggcgcccgcccccggcccgccccacagcctttctcggggccgccccagcgtgggaacgtcctgcttcggcagggcgtgggagcgcacagcctgcgtccctgggggcaccccggcccacagattggggggaggcactgcagagcgcctcctgcatcagtgtccctaccggggtcctgcctctggagaccctctgcagacagtagtcccaagaacagggtctccctgcctcctccacacctcccctccttgctgtttctcccacctgggatgttctcttcaggcctttgcagacgcaaaccttccagccaggcccaatgcctcctactccagaagcatcttttaggccagcagtggctcacgcctgtaatcctagcactttgggaggccgaggcgggaggatcacctgaggtcaggagtttgagaccagcctgcccagcatggcgaaacaccttctctattaaaaatagaaaaattgggcgggcgcggtggctcatgcctgtaatctcagcgctttgggaggccaaggcaggcaaatcacgaggtcaggagtttgagacagcttagccaacatggtgaaaccccatctttactaagaatacaaaaattagctgggcgtggtggcacgcacctgtaatcccagctactcaggaggctgaggcaggagaatcgcttgaacccgggaggcggaggttgcggtgagtcgagatccggctactgcactctagcctgggcagcagagctagactccatctcaaaaaaaaaaaaaaaaaaaaaaaaagttagcagggcgtggtggcgcgcacctatagtcccagcttcacagagggctgaggcaggagaatcacttgaacctgggaagcggctgttgcagtgagccgagatcgggccactgcactccagcctgggcaacagaacaagactctgtctcagaaaaaaagaaaaagaaaaagaaaaaaaaaattcccagcactttgggaggccaaggggggcagatcatgaggtcaggagatggagaccatcctggctaacacagcgaaaccccgtctctactaaaaatgcaaacaaaattagccaggcatggtggcaggcgcctgtggtcccagctactcaggaggctgaggcaggagaatggcttgaacccgcaaggcagaggttgcggtgagccaaga

SEQ ID NO: 38610 - DNA, 1978 bp, Artificial sequence
  DNA replication origin
gggcctgctcctcagcgttgagttctgtgcagaagggctcttctggcatggggtagtagcgctgggcatagcagttggtgtagggggacatcttccccccaccacgggctgcagacacaatggagggagctgagtccaggctgcccttgggacaccctatctctaactatattaataaagaaggtggccgggcttggtggctcatgcctgtaatcctagcattttgggaggctgaggcgggtggatcacgaggtcaggagttcgagaccagcctggccaagacagtaaaacctctcctctactaaaaatacaaaaattagccgggcgcagtggtgggcacctataatcccagctactcgggaggctgagtcaggagaattgtttgaacccaggaggcggaggttgcagtgagccgacattgcgccactgaacactctagcctgagcgacagagcaagactctatctcaaaaaaaaaaaaaaaggaggtttataatagcttggggtactagtaagggctcaataaatgttatctttgttattctccatgggtcagcaaggcccttctgctatctggctgaagtctctcctactttaggtctctttcttcttactagcattgaaactagggtctggaaaggaggaatcagggtccaaggttctgtcagcatcctccacctcagaacaaaaggtctaggggcctgaggcttgggggctggctcctaaggaagcttggaatggagatgaccactgtctgctcaccccgcgcactccatttcctggagaaacttgaccttggaccaaggagtgggatcatgggaacatgggaagtgtggtaggaacaggcccagggtggcatggaagggcaaagggggcagcctgcagaggggacccctgcccctatctctggagttaggcagggaggaaggagtccaggtctcactggtgccttctgagctgtgcatccctcgtcttccacctccacctttcctcagcaccaagctccaggcagctctggggagcatctgggggcgtgaaggtatagatgagttctgcccccacatcaccctctgcccccaaaccgcagggccagatggaaaaatccttttccactggtatggtagtggtaggggtgtcccagtgtttcaaggtcaccctcatgcccttgacccttctaattttgtctgatatccccagcggggggccaatgggggtcctagacctttgaagcccctttttgggacctcaattcaccatctgagaagtgggaggaggcctaagtcttgggccagggtctgaagagtttgaggctgagggcttgggttctggtgccagccccagctcagtctggccagattggagaaccccgctcacttgtttgctccccagaggaagctgggtggggtccaggtggagagggagcagttcttgagtctctcttccctgcaggggccagaggcccctgcaccggcagaacagacagacggtctggcccccaccccttcccccctaattggctgcctacgtgcacacaggcctgctctgctggatctggttggggtggggactgggcttagccagtctggctgagcccagtctcccacccccagggaagactcagggtttggcatccatggtggtggggaggggctttagaggatggggacttaactgggtcagagggagggagacacacatctggggaaaagaaggggagtcccacatctagggagagagaggggcacccaacaaatagagtgagggagggggcacactacaggtgataagtgggagggggcggcccacacttctggaaaagaggggctccggccagtgattatgattagtgggtgggagagctccacatatcaagagagggaggatgtaatctatatttggggaaagagatggcacacatatgcagactccccaggagtcttcaactctaacctacaagaagccccccaaccctctaagaca

SEQ ID NO: 38611 - DNA, 1076 bp, Artificial sequence
  DNA replication origin
gcagggcgccggcggccattgtgtccgggcggggaatggaggacccggcaatccccaactgccacgttctgggcctttggggaattcagagcaaaccagcggcatttgttgggggtctccggccttcaacatcacagacaggcctgggggtggccttcccaaagtcagattgcagatctgaggcagtttccccctccctgcgtccctcactgaaaccttgaaccccattgagaagtccctttagggtttcggacgcctccacctcaccctgggctggtgcttaaatagaaaaaagaaaaacaaaaaccaactaaatccataccagccacctccgggagagtactcctggctcccagtaggaggcggagagccaaggggcgtgcaagagagagggggctgggctcccgggtggcaggaggccgcggctgcggagcggccgccctcgatccgggcgatggaggaggaagcaagcgagggggctggttcctgagcttcgcaattcctgtgtcgccttctgggctcccagcctgccgggtcgcatgatccctccggccggagctggtttttttgccagccaccgcgaggccggctgagttaccggcatccccgcagccacctcctctcccgacctgtgatacaaaagatcttccgggggctgcacctgcctgcctttgcctaaggcggatttgaatgtaggtggtgcgggggagcgggagtggggcgggggggactgcccagggagtgactttccgaggaaggcatttcggagaagacgggggtagaaaaggctggtgggagattcagagtccactggtgctttcgatttgacttaagtgaagtatcttggaacctagacccagaccttcgtaagacccacaaagaaaccagttctggtacctggagggggaatggaatttttagggtaaatggcatgcatattaattatttttttttcctgaagctctttctctcccttcagaatcttatcttggctttggatcttagaagagaatcactaaccagagacgagactcagtgagtgagcaggtgttttggacaatggactggttgagccc

SEQ ID NO: 38612 - DNA, 751 bp, Artificial sequence
  DNA replication origin
tcatggtgtaagtattcctattatagccgatatatcagcctaccgatgtgacagctggcttgcgactttctgaaagtgacaaataatggtgtcttaaactaggaaggcagtggtggaggaggtgcgaatgattggatgtataatctagcttgaaggtagatgatgctgaagagttgggtcggaggtggggtgtgagggcgcgagagtaagggaagaacttaggatggctcgtaactttttgtcctgcacccttgggtgaagcgtgggggtacttttgctgccaggcaagccgagagcaactcaattgtggggaagggacgatgtctaaggtctaattttggacatgatagatttgagatgtctattagacaactaaggcaagtagacagttggagatattggagtctagaattcaatggagtgctcagaggttgagatgtatatttggaaattgatgactttggataaaatgtaaagtcatgagactttatgcagatgcccagggagagagcagagagagggaagcggtgaggggggaggatggagatcttggcatgtcagtactcaggagaagagccggcaaaaggaagatgtcccagcaggcatgacttgggagtggtgaggaccacagatgtgggggtgggggagagaggagaggcaaggaggaggctgagcagtgatctgggcaaggctagcaggcctgttcaagggtgcgggtatggagggtgggtggcagggagtgatggtgccc

SEQ ID NO: 38613 - DNA, 1400 bp, Artificial sequence
  DNA replication origin
aggggagctccccgtggccacctcatcttcctcatgcccagcgtttggctttcctgccggcttctcagaggctgagagttttaataaggcccctacgcccgtcttgtccccggaatcaggcatcgggagcagctaccagtgtcggctgcaggcactgaatttttgcatgggggctgacccaggccttgagcacctcttggcctcagcagccccctcccctgcaccacccacccctccaggctcactccgggccccactgcccctgccaactgaccacaaggaaccctgggttgcaggtggcttccctgtccagggaggctccggctacccattggggctgaccccctgcctataccggacgccaggaatgttcttctttgagtaaaggcagcctcacctcgggcagtccctgcaggtccctcaccctccgggctgagcctggctctaggacctgaagaactctcgaaggacccagccctggtgagccaaggacaaccacacagaaagccaggattgaagcggtgctcagccaggcccctggggcctccggacaaacttgggggtgaggggaagcagggcctcttgggatttactctgtggctctcagggccaataaagccatgtgatgatgagggtcagcttgcctgatggctgggggctgagggccagggtgcctgcttgtatgtgggggtggctgtggctgtggggttgtgcagcgggggcagagacccttggtgggaatatctcacatgaggttttctcctgctggggactttctcagggagtttcctagaaagggagaggaaggggaggtagggaatggggagcagggagaggaggatacaggcaagggagagactgggcaggggcaagactgggctggcctgagggactgattctccagtctcagatgctgggacttagcccccgtaggtgcagtcatcataaccctgacaatttgtgacactgatcctgtcccgggcttgtatgtatcatctcacctgtgtgatttggaaagttggccccgtttacagtggtggaaacaggctcgccagctccaactccagagggcaaatgggtggcagagggtaaatcaaaaccacatctgtgtggctctaccctccagcctctgacctgcagcttgagtgaggacataagggtggagaagagggtcagggcagagctggtggtggcccccagaggtgggagggctttgctgcaatcctggaaggccagggctagaaaggcaccctttacccattgtgcagacagggcacctagggttcaaaaggcagcacctaccccctgtttggacttcccacattaatgtgggagcttccctgagcccccagctccatgaggtcctctggtgactctttaagacggcatttcttggggcc

SEQ ID NO: 38614 - DNA, 1252 bp, Artificial sequence
  DNA replication origin
aacatgtcgtggcagtcagggtccagcgtccagtagctgcccttgcctggcttgcggtcatcgcggggcaccttgacaaagcactcgttgagtgacaggttgtggcggatgctgttctgccagccgggccggttgtggcggtagaaggcgaatcggcccatgatgtagcggtagatgccactgagggtggcccgctgccccggtgagctctggatggccatagcaataagggcgatgtagctgtagggaggcttggttggctcagttgtgggggcgccaggcccgggcagaggctgctgctgcatgctggccgggctgccaggctgctgggacctgctgggtcaggctcagcttccagggctggcgtccggaatagcctgcccaggctggttaaaaggtccactggcccagcctcccagcctggaaaggcaaaaaggggtgggtctgctgagccatcctcccctcctccctcgccccactcccacaaggcccaaaagaggcgggcaggagaggccagtagtgggaagccgagcagctgccagggatgaggagttgggaaggaagggactgagaccctcagcccacgtgtgctgggtggtggtggctggggagggacaggatgtgaaactgagcgggacagagacaaaaacaaaatgagacagaggcagaaacatatgaaacagagacagggaaaaaagagatagagacagagagaggtagagacatcacaagagggagaaagagggagagacaaagataagacagaggcagacacaacggacagagacacccagagcctctcagacactcacagagagacacacagacatacacgtacagacacacagagacacacagacatacacgtacagacacacagagacacacagacacagacacacacacagacacacacacacagacataagcacacacacacatatacacagagacagacacacacagacacataggcatacacacagacacacacacaagcacatacacagacacacagagacatacacacacagaaacacagagacacagacacagacacacacacacacacacacacacacacacgtagtatacggagaaagtgagaatcactgagcaggcagaaacaaggaaatccacaaagccagagagaaaggagatactgagagacacaggtgcaaacacaaggagtgaaaggaatgaatagagagagagagagagagagagagagagagagaggagagagaggcag

SEQ ID NO: 38615 - DNA, 1263 bp, Artificial sequence
  DNA replication origin
tagaggctgggacgacctctgggtccggcagagtttgaaggggagggtaagaaggcgaggggagctagcgccgcccacgtccagcccgtgcaccctctctcgccccacagcctgctggctgcacgtgtggctcttctctccgcagcgctggtgcgcgaagccaccgggcgcacagcccagcgctgtcgtctgagtccgcgggcggccgccgagcgcctgctggggccgccacctcacgttgcagcaggttcgcttccccgacccattgcccagcgcccacgtgttgcagggcctgccgcctcacctggagcgcggtgtgcagctctgggtggctccggagggcgtgttcaccaagcgcctgtgccagggcctgtactggcgcagcccaacaaggtggagcgcaggcgcacctgccacctgctgaacacacgcggcttcctccaggcggtaggacggctggaggagtggaacagagtggcgtgggaacgggggcataaggacgcggtgggcaaaggaacatgaacagaggagagtgggcacattaaatgcaggcccagggggatgggcctaagggtgctgggcatgaagtggacattgacacaaagaatatggcacaaaagcaccagggatgggaaagaatacaggcaccaggagggctgggggcacatatacggatacaggcgtatatggggtgctggcatggagaaggcttgaggcgttgggtgtgcagcataagaatagggcttcggtacatgtgttggcttagggcataaggtggatgtgaggtgcaccaagcacgagataggtataggtgagtggcagtgggcatgggttgggcataaaggcatggggtgggcataggggccaaggaagagacataagacctggaagtgggcacagatgtgggacatgggacaggcataggaacgtggaagtgggcctagggtacaggcacacaatgggatgtgggcttacaggacttgggcatgggaaatgagcacaagatgggcaccagtgggttgcctagttcttgcccagtccctatagtctcagtgtcgtataattgtgtgcccacctgcaggatggtcaccggacccaaagtaccagatctgtctgtgcttcggtgaggaggacccgggccccacacagcaccccaaggagcagctcatcatggcggacgtgagtcactccttccactccagccaagaagcacgccctccagtcccctccagacagcccttcccacactccctccagtcccag

SEQ ID NO: 38616 - DNA, 1366 bp, Artificial sequence
  DNA replication origin
gtcatcggagggcattgggcaccagaggtttttgaggtcctatgtctggcaccctggtgaaggagaggaagcagtcaggcaccatctcaccctgaccccagacccatagataaggaggaggccagggaggaggcagggctgggtgaggagacccagtccttactgtggtcaaccaaagggcctggaggaggatgggtggtagtaaggaaccctgctgggccagcctgtggggccactccttgtcctcatcctctgtggcaaatccggagccatcctgagcattgggagaagaggctgtgagggtgggagaggaggcctgtgactcctcaggaattcccagactgttcccaccagtgcagagaggtctgggcggactgaaggccagctggggttgacagtgtttctgagtaaaagggctggctgtccaatgtattagaagtcaatattatggcactgggcttttgagaaaagaactttgaagtttcagagctcaaactcccccgcccccatggaggtaaagagaaagttgatgaagatgttgtaggtattagggccagagatgggtcactgtgatagggagagaagtgctgggggtaaatgcggaggtgagggagctggagatgaaaggtatgcgggacagagccagatgctgatgcgggggtgggggtgatgagcacagagcaatgagctgtcgacgatggcggaaaggtgatggggtggagataataggggtgatacagacagaatgagggagacagagctgatgggaacagtgagggagccggaggtgatggagctggacccgatggggtgcatgggggtggagtgatggacccaaggaggacaaaggaatgaatgtggagaagatggggtggctgcagacagggcaatgaaactgaagatggtggaggtgaagggaatggcctggtggtgctgcagatggagggagggctgcaggagaggtagaaaaaggtggagcgggtgggagcatggggacagggctggagctggtgctctggagggatgaggtaaatgatggtgctggaggtcatagccagagagggtggggccagtgggtgacttgctgagaggtgactgagctggcaaggctgcaggggctggaagaacacactcagcaggtctgacctgcaggcaggctcagccacttcccaggagcttccttcggactaaagggcatgcctacctcttcagggggcgcccaggccctggtaactgcatcaagcaagagacagcctgctattccctgggccccaggaggaaccccctcaatttagacgatcccagatgagtaccccagctcattgtatggcctcaggcaaggtccacctgtttcttggcctcagtt

SEQ ID NO: 38617 - DNA, 635 bp, Artificial sequence
  DNA replication origin
ggttttggtgcacccatcacccaaacagtatacactgaacccaatttgtagtcttttattcctcacctcccagggaaggctctcttgagcaagagatggttaagctgaggatggtgggagctgaccaggtaaaagtgaagagcagaaggcattgcaggcaaagggaatcgcatgtgcaaaggtttaacggtgataaagacatgaaacatttagaaatgaaaggagctacagttggggaggggagggagtggagacagatgaggccagggaggggcagttcatggatggctttgagggtatagtgagtgaggaattgagactccttcacaatggcaatggggagctatggaatgattctgataggggagggtcgaggctagatttgcatttagaaagatccctcttaaggactgcggggattgctgagggatgggggaagcaggaagcccagggaggtcactgcagttgtcctgtgagagctgacagaaatgggtttcagcagagggaccgaagagacattctgcagggagagccagcaggccttggtaatggagtagaatgaagctggaaggtggggagtggccagggttcagatacccaggtggcagaagtttgtggggcagagctgatgagtg

SEQ ID NO: 38618 - DNA, 959 bp, Artificial sequence
  DNA replication origin
gagggtatagtgagtgaggaattgagactccttcacaatggcaatggggagctatggaatgattctgataggggagggtcgaggctagatttgcatttagaaagatccctcttaaggactgcggggattgctgagggatgggggaagcaggaagcccagggaggtcactgcagttgtcctgtgagagctgacagaaatgggtttcagcagagggaccgaagagacattctgcagggagagccagcaggccttggtaatggagtagaatgaagctggaaggtggggagtggccagggttcagatacccaggtggcagaagtttgtggggcagagctgatgagtgtgatgtttggggtgtgttgagtttgaggtgctcgggggccatccaggagacagtagccagcaggcagcttgatgagcaggcttggggttcagaggaagacccacagccaccatgctgaggccacggaaggggacagtgggacatgaggaagtaggttcagaagtgagtgctgggagccccagtagaggaggggacaggatggaggttgagaaacaaaggcctgggaggggttgcagggcaggcagcagagattctggaagccagatgggagtgtttcaaggaggagggagggcctacaagatgcagaccaacccaacaccatccaggagccaaagaagatgaagacagtgacatatgcttagatttggcaactagaggcattatcaagagggacagaagccggactggtcatggggggctgggaggctgagagggagggagttggtgtaaggagactctccaggtgcttcccactgtggaaggagggggaggccacagaaggaggggctggaggtgactttggtgtttggggtggtagtgtgtggatgtgcggttggttgcttattgctcagggaagagagcccagaattgaaatgacggcaactgtccctccaca

SEQ ID NO: 38619 - DNA, 1688 bp, Artificial sequence
  DNA replication origin
gagccccttccgcgacgaggaggagttgcgcgcgctgctgccgctgtgcaagcgctgccggcagggctccgcgacctcggcctcctccgccgggccgcactcagcagcctccgagggaaccgtgcagcgcctggtgccgcgcacgccccgggaagcccaccggccgctgccgctgctggcgcgcgtcaagcagactttctcttgcctcccccggtgtctgtcccgcaagggcggcaagtgaggatgcagtccagccgtggctccccacttccgactggctcccttcgggggctgtctgcgccttccacgccccccaggacgggcccagaggctgggggagccccgcggcggcctgaaccctgcctcccgcgcccgccctgctcgtccgcgtctgcagtcagcgtccccaacctgtgcgtctctgtgtccgggccggcctgctgcagccacctggtgccttagtccttgggctgggggagggggcccacccttaaaggcggcgggaggggagggagggagagtggagggtttgacgggcctggagggtattaaagagacacagaagaagctgcctgtccgagtgcctcccagtcattcaacaaaggcggggcagcaggattctgccaggagccagcaggactgccaggggccagcagcctgcagaaaaggggatgcgagggagcctgcatcccctgggggcctgaggagcccaccaccctcccgcaactgcagtctgcggagttgcctcctgggaccccacctccttctctaacatctcccctcccccaaagccacggtgtcccgcctgacaaggcccaagtccctccttctctcggaacccccttccaccttttgaacccctctcctccaccatgaggggcccctcccctccccgactcccttcccttccctgtgcacaaatagtagctaggaaggtgaggtagcgcctccctcatcctgaccttttactgcatgagttcacttaatcctcagggaggaaacagaggctcagagagatcaggcagcttgccggagcacacacagccagagcagggaaagctggacgctagcttagtcagtctgagtcccatgacggtaggtagttaggaagcagctcctctggtttgggaggttcctgacaaggaggctccacccccagctagtgggaatgacccttcctgccaagactttaaaggccagggctgcccatcaaagcggtagctggctctgaggatgagtagaagtcactgcagctgatacttccaaaactaaagttaacccaaagttgagagggatcgaaaatagctataacccaataagccactcgtatggggttcttaatatgcacaaatcactgtgctcagggctgtcggggaggcaccgattccagcactggagttggaggatggacaaaataaccttcagctgccaccccaacttcctactcctcattcattcaacaaatgtccattgagtacctactgtgtgccagccattgtgctcggccctgggtatacagcaatgagcaaaacctctgccttcatgttgctgacattctggtcgggaagacagcaaataaaaaatatgtcaggtggtgagggagtggaccgtttggttatctgggggaagcattccaggcagacagaacattaaggccatgagttagtaacctccttgccagtaacctc

SEQ ID NO: 38620 - DNA, 1687 bp, Artificial sequence
  DNA replication origin
gactgcagacgcggacgagcagggcgggcgcgggaggcagggttcaggccgccgcggggctcccccagcctctgggcccgtcctggggggcgtggaaggcgcagacagcccccgaagggagccagtcggaagtggggagccacggctggactgcatcctcacttgccgcccttgcgggacagacaccgggggaggcaagagaaagtctgcttgacgcgcgccagcagcggcagcggccggtgggcttcccggggcgtgcgcggcaccaggcgctgcacggttccctcggaggctgctgagtgcggcccggcggaggaggccgaggtcgcggagccctgccggcagcgcttgcacagcggcagcagcgcgcgcaactcctcctcgtcgcggaaggggctctcgccgaagcgctcctccagctgccggcgaagctggggtgggcgggtgaggtgggcggggtcaaggccggcgcggggcggggtcaaggcagccggccccgcccccaccctcccgaccttcgcccttctccgagcgtcccacacctcgctgagcccctcccttcctgagcgtcttctttgcctcccttctccggggtttccatcccctcactgagtccctcttcccttctaggaggcccctccctctccctgacccctcttccccctttgacacgccagcttccagacctgctaaagtgacccccaggcgcccagcggggatcactcctcccgctttgcacttctgggtaactcctcccactttgcacctctgtgctcacaaccccattcccacagatttcttccttgcccgactctttcccaacgccgtgctgcagatgagcctctgggtaccgccctcaacctgctgagagccctccccctctcatcctttgttcccagggaggcttagttcctgacatttctacgtagcatctgcccgagaggtataagagggaaactgctgtggtctcatcaaggacacagggatggagtaggacatggacaattctccccgatggggtcaaacactcaaatccttcaggttccagccaggtagggcaggcagtggggagggctggaagacctggtcaaatggaagggcccgcactgatctaaaggcattcaaattctaaattgaaaaagaaaacacctggctgtctaacaaaatacacctaggaggtggattagctcaaaggccatgagtttgagaccctagaaaaatccgggtctgaggcacaggctaaaaatgttccaatcagtgatcagttcgagtgggaagaaggatctcccacccctggcccaacccagcccttgaccccatccctaccttctgggaactggcccagccaaactcttcaagctgctgcctaaagcctgggttggggttggcgatgggcctggtggccttgatggcttcaagcacgtcccgccagcctagccccgtcacagtcatcacatacgctgtcacaatcgtggtgctgcgagagatgcctgcaaagctgggatccccaacaacccctcaggcttcaagtaagatccaatgtcctccatgcccccaggcaccccaccctgcttcaactcccccacccttgcctcctgagctccaaccataagggacctgtcaggacttgccatcccacctccaggcctttgccatgctgttccctctgtctagagcatcccctggg

SEQ ID NO: 38621 - DNA, 957 bp, Artificial sequence
  DNA replication origin
cccaggccccgagccctttgctctggccctttggtctggtggtagaacactggggaaggctgaatggcggggagggatgtcagtgtcaggcccccatgctccctccatgtcccttcaagcctggggacactcgcctgcatgtgcaccccttgtcctccatcagccttttccccctcccagcctggggccgcttccctgcccccaaccccattcctgagatgcatgggccagggcatgaatggtggacacaggcctgagacaggcagagtgccatggcctcgggacagagtgggcagtgctcaccaatgaagtttccgaggtagagtccaggaagtacctagaggaaggacaggcaagggtcagtggggcaggggctgcacccccttccacccccagggcagctggggggcccacagcccctctctgtcccatgaagggtatggacctcagggctcagggagcactctcttcccttttgtgggccctgagtcctctgtgagaggggtctggggctctggggagggtaggctagggggccagttaaccaaccgagggaaccaagggaggccagcttgggtatgagaggggagaggaggaaggcaggtcttaggaggagaggagaggagagaggtagacttgcagggtgcagggatggaaattctggggctggggaggcagaaaggcaatgacaggcagaggcgggacaggatggagaaacagccccggagagagccgaggagtcagcgacaagggagagggacacatgcagacggagagcaggactcactgggagacagcctgggagtgacagccacagcaagacagcgagagacacacagagtcacggagagagggcggacacagcggggacagagacgcagggtcagagagggggagacccgacagccgcggtctcgagtcacagggacacggagatgccgccgcacggagaccggc

SEQ ID NO: 38622 - DNA, 1401 bp, Artificial sequence
  DNA replication origin
ggggaggctgcgcggggcccgccccctaccttggtcatgccattgcccatgatcccgggggcggcggtccgggtgcacccccagctcgccgcccgggaagcgatccggtcacagctgccctgacggcccaggcccgacgcctgcagcctggcggggaacggggggcctggcgtccgcggccctgcccagccctgcccagccaccgccaccgcccgccgacccccggcccgggagggaaatggtggtggagccgccgctgccaccgccgccgccgcaggctcctcctaccccttcggtcatgtggggcccccgcctcgggtcgcggcggggggccggacaaagccccagtgtgccgggcccacggcccgcgggacaacggcagtttgttggggccgcgtggggccgccacctccggaggtgggggcgggggccttaccccaccctggcaccggcaggcgcgggcggatggggggatgtcgcctagagccccccggccggcccacaaactcccgtcccccttccggctctgcctggacgtccctgcgggccccgggggaaagcacccaacttctcccgcctcggcttctagcagaaacgtgacggggctggactttgatcgccgagggctctctgctcttcagagtctgcttggaacgggataagtgggtaattccttccgatacatcctctccacccgtgcagagacaccctaccaaccagccttcctcctttcccatccattctcccaccctcctgttcactcattcactcgtccatcttcccatccattcatccatcctctcactccttccttccatccatttcggcccctaggagggatggtgccatccagggaagctctgctgggaccaggcacaactgccattaggtgccccaagaaattacaggtgaatgttgggagaggggtttgagggagggttccagtctgaaggagactacatcaggatgtattaatagctagaggtcagggtcctggaaggggtctggagaccaaggtttgaggccctgttcacctctgacctgctagatgaccctgggaaagtccccgtgacccccagctaaccctatctgtgtttctgaggatgttgaggtgagcccttcctggcttctaggaccaaagctggagaatgtaaaataatcaagacacttcctataggactgaaatagaagcagctgcaccagctttgttccttcagccatcacccccacccctcaatctatagtagtaggtgactggggattgtggatagagagcaggacagagagaatccacagagccctttgaaatacagtgattggagaaaaataaaactgtttcttcctccctcaagttcatagcatacatggggctgcccgtctcagctctcataaaagcccaga

SEQ ID NO: 38623 - DNA, 1523 bp, Artificial sequence
  DNA replication origin
taatttgtgcaacaaatattgatcgtcagacattgtgctaggttttgggaaaatagcagtggacagacaggaaaccccgccttcatgaagctcctgctgaaactacacaaggggctaggcgcggtgcctcatgcctgtgatcccaacactttgggaggctgaggcaggaggatcgcttgaggccaggaatccaagaccagcctgagcaacatagtgagactctgtgtctacaaaaaaattagcctcgcatggtggtgcacatctgtagtctcagctactctggagattgaggcaggaggatcgcttgagcccaggagatggaggctgcatgagctatgatcgtgaccctgcactccagcctgagtgacagagcaagacatggtctcaaaaaaacacaacaaaaaaaacgcacaaggtataaagagagaataatgggaggtgggggaggggtgcgtgggggtcaacttgggggaaagtcttgaaactcagtggtcaaagacccccatggggagtggtgaccttcatggagacaaggtgcctgcccagcccagagtggtgcaggatcttgggcagaaggaactgcgagaacagtctggagggggaaagagcttgggccaagggcagagtggaaggagatgaggtcagttaggctggcagaggtcaggtcccatgcagttttggggttttgtctcacaatccatgggaagccatggaagggtgtctcctctctggctgccacgttggggtggagtgaagtgggcagagcagcggcaggcaccagtgagggggcgggcgtggttgtctaggaggaagaggatggtggccaggcccggggtggaggtgagaggaatggccagattccagagcttgtgggagcttggtgagaaccagatgtggaaggggaagggggacacacccagaatggctcctggcttctagctgtgtcccctagagaagctgaggcatggtggggggatgggagggcagaatttgggatgtgttgggtttgagtggttggcagatgcccaagacggatgtcacaggctgctggacataaggatctggggttcaggggcaaggtctcggctggggacagaaagctgggagtcactggcctttgggtggtgtttaagccacagacaggatggggtcactgtgggggagagaggagaagaggcccaggggctgccccctggggaaggtaattgccagaggacgtgggaggagacaactggcattaacgctattgcaatgatgtcaggcatgcctgatgtgcctgcagttcccagagcccgagtgagaaaagcagatgttggcccgcctggggaaacccaccaagcttgcggggaggaggctgggttccacctcagggccttttgcccttgtgattcctcctccctgcatttctctccctccaaatctacccacagtgactcccagttgtcactcaggtctcagctcacatgtccacctcctggcccccatgtcactctctgtcccattgccctgcttgactgacttca

SEQ ID NO: 38624 - DNA, 761 bp, Artificial sequence
  DNA replication origin
gaagtggaggagctcgccgaggaggtgctggcggacaagcggcaggtgagaggcccctccgcggcgctggggcctggcggccggcgccgtgggaaagcgcgcggggtcgcagtgagttgacctggacaggcggttaacggctccgaggcgacagacctgggccgataaatattcggccgctactaagtgagcgcctgcgctatgctggacattcctctctcttcatcctttctctgccccttgccatgctctgtggatctcgacccatcatgctctgggccgtttccctgagcacctgtttcaaaatgcacttcccggccccatggttgatctaggggcaccgccctgtaaaggccctcaggggagagctggaaccgaaaagaagcctgagggggccttgtgaccgggcaggggtggggacgtgggggaaggtggcgccctgtttatggggtgtcttgttttaagtgccaagtttttgaggggagttcctgggggaaggagggtgacgtaattggatttaggttttaaaaggatcccccctggctgctgtgtggaatacagaatataggtgggcaagggcggaggcagggagatgggtgaggggccattggtatggtccagaccagagatggatttggactaggtagtggtggtggagagaagtgaaggggtcagaaatgtattttggagacagactcagtaggccgtggtagtggagccgggggagtcgtgactccctctcatctccagttagaagggtc

SEQ ID NO: 38625 - DNA, 1219 bp, Artificial sequence
  DNA replication origin
tggccgaggccgccgctccatccgacttcgcggccatgttggcggagagggaggcggggagcgacttccgggcggcggaggggggtgcggcgtggggaggaccctgcgcgggcggctcctcttcctccttctcctcttcttcctcctcccctccacttcaattattcattctcctcggcgccgccccgccccgcccccacccgcctgagctgcggccgaagggggggcagcccccgggaatgcggaagcaggggaggcggggcgcaccccaggtcaccctctccctccttcctcggaggcgcggggctccaaccccatgctttctgtctctcatctcccctcggactgcacttccttcttttttgtttatcgcctcccccttcccattctctccacttcgtttttctcctgtgttcacctccagtggcctgggtctgacgggggggtgggtgggggacttggaagaaaggagctgggggacttgggcgggccccccagtaaccctttagcagtcactccatgctaacgctcatttccagtttcctgagtgctcacatattgttccatcccctcctttgatcttgaggggtccccttttcttattgtcttcgttttgaagctgagaaagctgcagctctgagttgctgtctcttccttactctccgctttccctctctcggggactgccttcatctggctacagccctagtagagtagggggagggaaggggacaacatccaacatcaagaggaaagggatgggaggaaacaccgggtggaggaaagagcaagtgcaaaggcctggaggcctgagactggagggcatatcttcaagcaagtctggatctcagatccaggggaggagaaagatggggaagatagggctgcagagttctgaggatgagatcctaaggggccagaaggtggcctttatccagcaggcaatggggaaccactgcagtatttgagcaggggagttatgtggtcacatcaggatttagaaagaagacccagcagccagagtagagaagcgatcacaaggaagcagcctggggctggtgagaccagaaggagattatagcagtaacctatgagagggggtggagttcccacacatcctggataccccaagctcatttcccatctctgcctttgatcagattggatgtatccaggcatttattatacaaacatccatatagtagtgtctctttgcctg

SEQ ID NO: 38626 - DNA, 732 bp, Artificial sequence
  DNA replication origin
gaagggggaggcgataaacaaaaaagaaggaagtgcagtccgaggggagatgagagacagaaagcatggggttggagccccgcgcctccgaggaaggagggagagggtgacctggggtgcgccccgcctcccctgcttccgcattcccgggggctgcccccccttcggccgcagctcaggcgggtgggggcggggcggggcggcgccgaggagaatgaataattgaagtggaggggaggaggaagaagaggagaaggaggaagaggagccgcccgcgcagggtcctccccacgccgcacccccctccgccgcccggaagtcgctccccgcctccctctccgccaacatggccgcgaagtcggatggagcggcggcctcggccagcccggacccggagggggctgccggtggagcccggggcagtgccggcgggcgcggggaggcggcggcggcggccgggcccccgggggtcgtcggggcgggcggcccggggccgcgctacgagctgcgggactgctgctgggtgctgtgcgcgctgctcgtgttcttctccgacggtgccacggacctgtggctggcggcctcctactacctgcagaatcaacacacctacttcagcctcaccttgctgttcgtgctcctgccctcgctggtcgtgcagttactgagcttccgctggttcgtctacgactactcggagcccgcagggtccccgggacccgccgtcagcac

SEQ ID NO: 38627 - DNA, 1125 bp, Artificial sequence
  DNA replication origin
gccggtggagcccggggcagtgccggcgggcgcggggaggcggcggcggcggccgggcccccgggggtcgtcggggcgggcggcccggggccgcgctacgagctgcgggactgctgctgggtgctgtgcgcgctgctcgtgttcttctccgacggtgccacggacctgtggctggcggcctcctactacctgcagaatcaacacacctacttcagcctcaccttgctgttcgtgctcctgccctcgctggtcgtgcagttactgagcttccgctggttcgtctacgactactcggagcccgcagggtccccgggacccgccgtcagcaccaaggacagcgtagccggcggagccgccatcagcaccaaggacagcgccggcgccttccggaccaaagaaggcagccccgagccgggtccccagcctgcgccctcctcggccagcgcctaccgccgccgctgctgccgcctctgcatctggctgctgcagaccctcgtccacctcctgcagctcggccaggtctggaggtaggagaagcgcaggtggagggacctgagcccgaggagtgggggtggcgaagggctacctgacgtcccagccctgatctgacctttccgggctaccctcctgtcctgacctccccccctccccaccccattgcagctctaatttcttctcagtcggcttctccctgacctctgcccccaagccctgaccaaccccagtgccatccggtctgacctggccttcgagaggggaggggatggttcaagaaaggagagaaagagatcctcaggggtgtgcgtgagtggggaggacccggggctcatgaagataaatgtgaagcttaaaacaggaccacagggccctattctgccataacccactcctctctgcctgagtgccaagcctgggctcaggaaagatctcagaagtcctttcctgctcgcaaagatcctcagttcagaattgcagctcattcacaacctgcaaggagagtcacagaatttgagacagctaaatgaatatcccgcctaaacttcttggactttttggagaaagatatgctggacccaactggggagccctcaggctccttctacttcctatgaccccctctccccc

SEQ ID NO: 38628 - DNA, 829 bp, Artificial sequence
  DNA replication origin
cccacccgcctcttaggttgtttcaaggtttaatgagataatgtgtaagggttcagcaaagggctcattccatcgttaaatgctcagaaactgctggcaatgattagtgcattagcttgggctttgctccctgtggaacaaagctttgttcacggagcacatggcaggacagcaagggggtcctgaagtcccttgaagccataatgacatggcagtcattcatttaatctgcagtcattcattcagcagacatttattaagcacctgctgtataccaggcactgttctaagtgctgggaatagagtggtgaacaagacaaagtccttgccctcttggagctcaatagcctaatgaaggaaccaataagaaaataaactatgatatatattatatgggatatataatacctgggccagatcgtgataagtgctatggggaaaaaaatgaaacagggcagggagctactggagtgccagggagaggtgtggctctttgagatagggtggtcagggtggacctctccaaggaggtggcatgtgggcaaagggctgcacgaggtgaggacaagctgtgtagaggtcttggggagggttttgcaggcaaaggaaaagggaagggcaaggagaaggcctgtgtggcagaaatagagtgaggggagcatgtttggagatgctggtggacagattggcaggggcgaggtcatgcagggcctcagaggccatggcaaggactagggcttttactcttcatgacacggggagcccaggataatttggccagagaaggaacatgatcttgacttgtgttttgcaatgtccactctggctg

SEQ ID NO: 38629 - DNA, 1630 bp, Artificial sequence
  DNA replication origin
atgatgagcgagtagaagtcggttgagaagttgcggctggagtaccagaagccggtgagcgcggcgttctccagcaggacgatgcagtggtagagggtcatgcggcggcggctgcggccctccttgacgttgaaccagcagaagatgtagatgatgcccacgaccatgttgtagatgatctcctcccacttggacatgcagaagtccgtctccccttggatgacccagaaggtcatgacgcaccagtgggccacgatgaagatgccaaaatagagcttgtagacgctggcgaagagcgcgaaggccaggccgcgggcggcaatgctgaacaggtgccacagcacctgtgccacggcgcccttgtaggacagcggccgcttgtcgtcccgcgagtcccgcagcaccttctggtaggaggccagcgtccaggccagagacacgagggaggcggaggtggagagggctgtggagacagggcaggggcggggtgggctgggttaggggcgggctcgggttggggtctggggagaggcggagggttctgggtcaggagctgggttttgaagaggcgtgaggaaaggagctgtggatcagcaggggtgtggggaaggtctgggaggtggggagcttcaagagccatgaagaggtgtggtgagggtgcacgggactgggtacttctgtagggtgggagcataaagggagacgaagatgggggtttggcctccatctaggactctggtgtggggctgttaggattcaggggtcttggtgggagggtgggaaatgagggtccgggactctgggagtggaagaggaggtgaagaggaggtcatgattagggtgtggagctgccaggagggggccattagaagtcgtgggccaccaggaggaggccgggcatggagaggaatatctagagctgagctgagcagagctgaggggcggggatggggagacccaaggtgggaagcgttgtgattgggaccccgtaactgggcaaggggtccccagggccatgaggggtggtgatagtcttttgggacactgaggatgggttgggcagggactaggttgggagagcacggagtgcttcagggagacagggggatgcggtttttctctgatattgaggggctctgtcattatggaaggggcaaggtgggaaattaacagggcctgtagggaggaggaggggatgggtgccaggactaggcctgggagggccccccggggccccccagtgaaggggtaggctctctggaaactgatggtgattggccaggtctatgaggcagggggtccccaggagatgcaggctgggatcaggttggggaaggaagtgggcaggggattccccagagggtctaaggtgtttgggtgggagatggggtttggttggctctggcaacggggaagggaggagggcaggagcgcccaggggggctgatgggtgtcgagggagtggaggggccaggtccctcctcactctgagtataagtgggccatcgaaggggacgcgggggtctcgagaggcctggagggtggtgagggtagaaggggcaggcctccctaaaccctgactgagtgagccctgagctggggtggggaagcccacagggcatccccaggg

SEQ ID NO: 38630 - DNA, 874 bp, Artificial sequence
  DNA replication origin
cccatgtgttgcccctgctggacttgccagagaaagggcactgtctggggtccatgacctagaccctgtgctcctcaggggttgtggagagtgggctgcctctatggtgggaaaagatctctgagaaggatggaggtggccgtggaagggatggggtgaggttggagcattgtgtggacagggatggcgtggctcctgtagcatctgaggcctggagccagggcaagagggagctgaagaagggagttggggtggggcagggtgttggggtggggggctggcagtgctggagatggataggagaaagaactggggggggggtctaggctggcagaagcatggaggggtggaagacttgggggaggggaacctgcaatccagagcatagcgaacaagaatgaactccttaggagacgtctcttgttgtgttgtgggctctgtgaaggatgaagttccacacacctcaggtgaaatgtttgaaggagccattttttgttctagatgtgcacctggaacgtggcttctagatacaggtcttcaacacagcagataagatgtctggaaagatctctgggctcaagtgcaggtgaggttttagcacagttatcagaggaactgatccagaagcaggcttagttctagattgagttctagagtgctaggctgataaaatgtcccagggagccactctgatctgtgtattctgttgtgaggaggaggacactggaggcctgctgctctgctgtgggggattctagcacctgtcacagtggtgggggagaagaggttctagagcccagcgtgaatggaattttctaggaatgggtgctctcattctagacttctggggctcatgggagctctaggcccctgt

SEQ ID NO: 38631 - DNA, 999 bp, Artificial sequence
  DNA replication origin
gacatctctgtgtccttctctcaccccgatttccatccagttcctgggccaccttacctgggtgacttcctcactgaacccctccagtcgggacgagctcctgcagctgctagacaccgccagggtgagactctggggagggaggagggcaggatctcgctcccttctccctcttctacctgcggacctcgggaactcgagatctgcccctccctgcagcagctgaaggagctgccgctgaagaccacggcggagcaggacagcatcctgagcctgtctgcccgctgcctgctgctcacctggcgcgacaatgaagagctcattctgcgaatccctacgcacgagatcgccgccgcctcctacctgcaggacgacgcgctgcacctgctagtgctcaagaccggtgcggcgggagggggcgggggcgggggaggggcgggggcgggggcgggggaggggcgggggcgggggcggggcaggggcaggggcaggggccggaggtgtgcggatggagaaggagagggacctgcggcgggggcagaggagatggaaaaggtctgaccatactaccctgagactaggggcaggccgaagaggctctgggaaagcagacagggcctgaggttgaggatgaaggtgggtggcctgagccactacactgaggccaggtggtggagcactaagagggtggagaagcccaagacctaggccagggctggatccgcagttaccacccggctctgaggctagagtggacccttgggctgggggcggggcctgattccaggggcggggctgaggagaggcgggaagtcagaatccaagggggcggtccctgaaacccgggactgggtccccagttaaggctcccttgggaggggacagcctgaccaccaccctctgttcagagggcaggtctgaggccaggggcgcaggcgtcgtggggagcgtggaagccacctggccagaccaccgagaggccaggggtggagactgagg

SEQ ID NO: 38632 - DNA, 2126 bp, Artificial sequence
  DNA replication origin
cacgcccagataattttttgtatttttagtagagacggtgttttgccatgttgcccaggctggtctggaactcctgggctctagtgatctccctgcctcagcctcccaaagtgttgggattacacttatttactcactccacaaattccaacttagtcctattatgtggccgacactgggccaggttcagtaccgcaaagccctcacagtccagtgggatgactgttagctttgtctggaatcctatttccagccacagaggaagtgggcatggtggctggagtacaaatggccttgtaagcaattgtaaggatgttagcttttacttggagtgaaatgggaagccactggaagatgtggagtagtgacatgatgtggctttcatgttaacgggaccactctgactgtgtggggaaagagactgtcagcaagggctgaaccagtcagaggatgaccacatgattcaggtgagagaaaatggggcatggacctgggtgggtacagggggagggtggggagaagtaaatggattttgatgtttttttgttttgttttgagacggagtcttgctctattgctcaggctggagtgcagtggtgcggtctacctcctgggttcaagggattctcgtgcttcagcctcccaagtagctgagattacaggcacccgccgctatgcctggctaatttttgtatttttcgtagagacgggtttcaccatgttggccaggctggtcttaactcctcaactcaggtgatccacccgcctcagcctcccaaagtgctgggattacaggcttggttatgttttaaaaataagagccaacaggatttattgacagagtggatatggggtgtgtgtgagaaagagagagcgtgagagccagccaaggcccacagcaaggttttggcctgaccaatgtaaggacacagctgctattaattgtgacagggaaaccaagggagtggcaggttttgggggaggaggttggagctcagttttggatgtgttgggtttgaaacagtcgttagatcttcagatgcagatcacctagaaatgggtagatgaaggatagatggaggagagaagaagatcaaggacaaagtctggggcactccaacttctgaagaagaggaggaaccagcttggtaggagaaaagcctggaaaaggtggagagctggaagccaagtgaggaagtgtttcaaggggagagagacagctgtggtgtctgagtttactggttattatctgcctcaccatctagacaggaactatgtctgtttcattcaccactgtttttatacggagggatctggtggtccaagatcagaggaaaagcttagaatgctcagaacttgaaggtgtctgctcgcctgtgagctccctaagggtggacaccagatgtctttttcacgtctgtatccatagcacctagcccattgcctagcccagagctggcactcaagaaacatggtcgggtgaataaaagcaagggtgaatgaagaggatgggggaggcagaggggaagacggagggggaaggaagaatggcaggaaggcttctctcttgggtggccatcttagttaccaagagtactggctctgaacttactggatttgaatcttaaaaccaccacgtgcttcctgtgtgaccttgcctatgttacttcacctatggatctcggtttccttttctatagaatgggaatacagtagttgtaatatttgcctccagaggttgctgtgagaattaaatgagttgatgcagccctgtgtctggcatgagctggccctagattcacgctggtgattagtgtcctcgtgaatgttactgtggtggggccaacactgacaacgttggagaaggaacgggctggaggttagatctagtttgttttggccattttgagagttcatcccattgagggagtcaaggggagatgccctggaggtgtccaggtccggagtttaggagccattaggtggggcaggtgcagggagaaggcaggggcagatcctaggaacctggtgggtggggcgggggcaaggtgggggcggggaagcagcgttcccgaagccgggctttgggagcaggctgccctcgggctcaccctgttggctacagc

SEQ ID NO: 38633 - DNA, 867 bp, Artificial sequence
  DNA replication origin
gagtcaggagggcctctcagaggtgatggcacatgaactgaggcttggaggatgaaagggggaagagtgttccaggtagagggaacagcaaatgtaagaatcctgaactaaccaggcgtggtggctcacgcctgtaatcccagcattttgggaggctgaggtgggcagattgcttgaggtgaggcatttgagagcagcctggacaaacatggtgaaaccctgtctctactaaaaatacaaaaattggctgggtggcacatgcttgtagtcccagctactcaggaggctgaggcatgaaaattgcttgaacccgggaggcggaggctgcagtgagccaagaccgcaccactgcactccagcctcagtgacagagcaagaatctgtctcaaaaaaaaaaaaaaaaaattttgaacaggatagagcttagtgggtttgaggggcagcaggtggccactgtggctgtggcaaatggtgtgagggagagagtggtcagagaggatgcttgggggtacctggaaaggccatgcatgtcacaggtaggccatggactgagggagcatgttcgacagaggttctaacccaacctaggggaattagggaacactctcctgaggagatgacatttaagatcacgggatgagtaagagttagctgtgcaaaagggaggggaaaggaggcaatccaggcagagggaccagcaggtgcaaacacccagaggtgaggagatagtagaggaagaaggagaaggggggtggggggcgcgaagcacaaagagcaaaggcaaaggcaagcacagtgacagatgagacttgagaggtgccaggggccagggtatgcgaggccttggaggccagcatgcagtctagg

SEQ ID NO: 38634 - DNA, 1253 bp, Artificial sequence
  DNA replication origin
caatagtgccaaatttaagaacccctgcattccccagcccccaggacagctttgctgaatgaattatgaatgaatgaatgaagaaatgactgtggtcctgatcagctggtagcaacgggaatagagagacgcggtagaattcttgtagttttggagattttggaggtgtgttacacagcatttagggtgatagcccctgtcttttccaggagagggtgtgttctgcccttgcctggagctgggcacaatcccatccacttggggcctcagtcaccctccagcccgactcctcccctcccccgaccacctcccccagcttgggagtcctctgagctgccaggaagccagggtggttccttcgggcagggaactttgcatggccatggtggttccttcgagagaggaactttgcatggtgtctgaatggagcaggcctgcggaagagaaaccgctgaccacagacctgcctggaagtctcgggccgcggagttggggagggccgggccagaagggaggggtcggagtggtggggaaaagagatcacgatgcttccggggtagggtaaggcctttccagggtgggttggaatctttgaagactgtggcaggaatcccttgataggtggggttaggatctctgaagggcagggttggaatctttggaccggcggtatagacccctgggtattaaaactcttaggcggcgggaggttagatcgcgcaggagcaggagcggtattggaaccctggggtttgtgttctaaatcttagggcagggttagaatccactgaagtgagagttcggatccttccactgggcagattagaatctttgggggcaagttgagtttaaaaatccttcagaggtgggattaaaaatcctttggcggggcggggttagtatcttgggagccttggagcgggtgctggggttcttagacgggcgggttcgaatccctaggagtgggatttgggatcctttggagactggggtaggacgctgggcggtgggatggggaggtgttagggaaagtggagcggaagggatgggggttcgcatccttggtggacgcgttagaagcctcctatggatggtgctaatattttttttctcttcgtggagggtttgggatccttcttgcaggagacggaggttatgaccctcggggagccggttaggatcctggggtggcgtctgaatcttcggggaggtgttaggacacttggggcggagttagcctcgctcagggcgcg

SEQ ID NO: 38635 - DNA, 999 bp, Artificial sequence
  DNA replication origin
aggatccgggctgcccgcgagacgaggagcgggcgcccaggtgagtgccgcgcacaggggaccgggaatacccggcccgcgaggggtcccaggaggcggagggagcccaggagcctggggagggctggctacgggtgcggctgggggcagcgaggggagacggaacgtcgggggagccgcgggtagcccgggggatgaggggtcgacagcgagtggagggtgccctagggaggggcggcactgttgcggactgctggattcccggggaaggggacgctcgggcccgtgcagtgactttatccaccacttctctgggccgtccaggttccccttcttgggggggggcggggattttttttttaatttaaaaaagaaaaagaaggaagggatggggcttcacagaacccgggaaggggaaggcccttacggttcccggtgggggccgggtcacgccgggttggcagccagcttggggaagggggtagttgggcggaggcgtgacgtgcgagccacacccaggccggctgcagctggtcggctctctgcccctcctcccacaacaggtctaggtcaaacccccaaacctcctggccccagaccacactgcatgcatgccctgtctctttcctccttggacgaattctccgcctccgaattcgtttcctcatctgtaaaacggggctatgaagtctttcttgcaaggatgcaggaaattggagtatgcgagaggtggtgcgtgtgagagacaggctagtgggtagcggagggggcttctaggggcaaactgcctgttggggctggggtagaggatttggcctttctttgcctctgttttcacaactgcaggatggggagagtaatagtacctccttcacagggttgtttagaggattaattgggtactgaaggggccgggcagggtggcacacgcctgtaatctcagctttttgggaggccgaggcaggtggatctcttgaggtctagagtttgagaccagcc

SEQ ID NO: 38636 - DNA, 841 bp, Artificial sequence
  DNA replication origin
ggtagcggagggggcttctaggggcaaactgcctgttggggctggggtagaggatttggcctttctttgcctctgttttcacaactgcaggatggggagagtaatagtacctccttcacagggttgtttagaggattaattgggtactgaaggggccgggcagggtggcacacgcctgtaatctcagctttttgggaggccgaggcaggtggatctcttgaggtctagagtttgagaccagcctggccaacatggtgaaaccccgtctctactaaaagtacaaaaattagccgggcgtagtagcacacacctttaatcccagctactcgggaggctgaggcacgagaatcacttgaacctgggaggtggaggttgcggtgagccgagatcgcgccactgcactccagcctgggcgacagagagagactctgtctcaaaaaaaaaaaaaaaaaaaaaaaagttactgaaggaaagctttgagaatgctgtctgacagtacacaggcttaatgtatgttaacattgccctagctagacatatggccccgtgttctcagactttagcctacatcagcatcacctggactgcttgtgaaaacagattgctgggccgaatcctagagtttctgattcagtagctctgtgcaggacaatgagaacttccatccccggtgatgctgctgctgctgatccaaggaggacactttgagaaccactggggtagcctatgcctggcacagagaaaggcctcaatgcctatcagttgccttatcccatggttttctctttatggtccttttttttttaggggagggggtgacaggttaaaatacagaaaagtg

SEQ ID NO: 38637 - DNA, 963 bp, Artificial sequence
  DNA replication origin
gaggaggcagtatgcaggaagacccaggaaatcattctggactaagtgacttcaattttagttctggtctcttgacaagcagaatttgaactaaacttttagaaaaagggccagtccttcaaagatttacttccaaggttctgcaccaggagcccgcaagctctgacccaacttccaagcatggctattttacctccaccctcatccacacacagacttcatcccaacatatagcttcataataaagagccttcatccctaacgagctgtgtggccatgttggggaatgggaaggagagcagtgaggtggggctattagtgtttttcaaaacgtagttcacagaccacctccactatataatcactagagtgcttataaaagggcagattcctgggcatcacctagccctatggaattagaatctctgggagtggggctgctcaggaaactgcatttttagcatgcctccccctacacacctcgagattcttatgcacagtaaagtttgagaaccaacagggtaaaaggtccctaagagaggggcagggagttgactgagagaagacaggaagggcagggaagcctctagggatgaaagatgggggtggggtaggtgaaggcaagctctggggtagcggcagtcaagggggtgcgcgatggggacagctatgagtgtaagtgaggacagggctctgaaaaggatctgaggcagcgcttgggctgggagggtggtcagaggagaggtcacatctgcggactggttatgatggtggggaggcggggagagcagggtctggacgtgacggggaggagcaaggatgagaataacgggagggggtcttcagaggggtcaggacagggaggtgagaaatggaaaatggggctcacagtgggcggagaccaaaagtagaatgggaaccggcgaaggcagcagccgaggtcttcctccgaaacggcgcctc

SEQ ID NO: 38638 - DNA, 1619 bp, Artificial sequence
  DNA replication origin
gggggcatcagcccccggcccggccagccgccccgtccgggagggaggtgggggggtcaccccccccgcccggccagctgccccgtctgggaggtgaggggcgcctctgcccggccgcccctactgggaagtgaggagcccctctgcctggccagctgccccgtcccggagggaggtgggggggtcagccccccgcccggccagccaccctgtccgggagggaggtgggggggtcagccccccgccctgccagccgccccgtccgggagggagctggggggggtcagccccccgcccggccagccgccccgtccgggagggaggtgggggggtcagccccccgcccggccagccgccccgtccgggagggaggtggggggttcagccccccgcccggccagccgccccgtccaggaggtgaggggcgcctctgcccggccgcccctactgggaagtgaggagcccctctgcccggccaccaccccgtctgggaggtgtgcccaacagctcattgagagcgggccaggatgacagtggcggctttgtggaatggagaggcgggaggggtggggaagggatcgagaaatcggatggttgccttgtctgtgtagaaagaagtagacatgggagacttttcattttgttctgtactaagaaaaattcttctgccttgggatcctgttgatctgtgaccttacccccaaccctgtgctctctgaaacatgtgctgtgtccactcagagttaaatggattaagggcggtgcaagatgtgctttgttaaacagatgcttgaaggcagcatgctcattaagagtcatcaccactccctaatctcaagtacccagggacacaaacgctgcagaaggccgcagggtcctctgcctaggaaaaccagagacctttgttcacttgtttatctgctgaccttccctccactattgtcctatgaccctgccaaatccccctctgtgagaaacacccaagaatgatcaataaaaaaaaaaaagaaaaataaaaaaaaaaagaggcacagcgggtttatgtagtttatgtatagccttttttcacttgtctaaataaatttttaaaaaccacgtgccaaagccaggcaaagacatcacaagaaatggaaactacggacaactatcctgtgtgttcatgatgatgatgaacagatgaaaaaattcttaacaaaatattagaaaattgaatctaggtttatacatcatgaccaagtggtgtttatcccaggttggcttaatatttgaaaatcaattaatataatacaccagataaacagaataaaggacaaaaatcatatgatcatcataatagatgtagaaaaagctgttgacaaaatccaacatattcatcattaaaactctcaacaatttaggactagaagggaacttaatcagataaagggcagctatgaaaaatccacagccaacatcatactcagtagtgaaaaactgaattatttcccctaagatcaggaacaaggcaaggatgcctactcttgccatttccattcaacactatactataagtcactgcactaaagcaaacacattaataattaagggcatccctgaagaagcataggggaaaaaattaa

SEQ ID NO: 38639 - DNA, 1263 bp, Artificial sequence
  DNA replication origin
gacccccccacctccctcccggacggggcggctggccgggcggggggctgaccccccccagctccctcccggacggggcggctggcagggcggggggctgacccccccacctccctcccggacagggtggctggccgggcggggggctgacccccccacctccctccgggacggggcagctggccaggcagaggggctcctcacttcccagtaggggcggccgggcagaggcgcccctcacctcccagacggggcagctggccgggcggggggggtgacccccccacctccctcccggacggggcggctggccgggccgggggctgatgcccccacctccctcccggacggggcggctggcctggcggggggctgaccccccacctccctcccggacggggcggctggcctggcggggggctgaccccccccacctccctcccggacggggtggctgccgggcggagatgctcctcacttcccagacggggtggctgccgggcggagaggctcctcacttctcagacgggggtgctgccgggcggagaggctcctcacttctcatacggggcggctgccgggcggagggtctcctcacttctcagacggggcggccgggcagagacgctcctcacctcccagacggggtggcggccgggcagaggcgctcctcacatcccagacgatgggcggctgggcagagacgctcctcacttcctagatgtgatggcgtccgggaagaggcgctcctcacttcccagatgggatggcggccgggcagagacgctcctcactttccagactgggcagccaggcagaggggctcctcacatcccagacgatgggtggccaggcaaagatgctcctcacttcccagacggggtggcggctgggcagaggctgcaatctcggcactttgggaggccaagacaggcggctgggaggtggaggttgtagcgagccgagatcacgccacttcactccagcctgggcgccattgagcactgagtgaaccagactccgtctgcaatcccggcacctcgggaggccgaggctggtagatcactcgcggttaggagctggagaccagcccggccaacacagcgaaaccccgtctccaccaaaaaaatacgaaaaccagtcaggcgtggcggcgtgcgcctgcaattgcaggcactccgcaggctgaggcaggagaatcaggcagggaggttgcagtgagccgagatggcagcagtatagtccagcttcggctcggcatga

SEQ ID NO: 38640 - DNA, 978 bp, Artificial sequence
  DNA replication origin
gccgggcagaggctgcaatctcggcactttgggaggccaaggcaggcggctgggaggtgtaggttgtagtgagccgagatcacgccactgcactccagcctgggcaccattgagcactgagtgaacgagactccgtctgcaatcccggcacctcgggaggccaaggctggcggatcactcgcggttaggggctggagaccggcccggccaacacagcgaaaccccgtctccaccaaaaccagtcaggcgtggcggcgcgtgcctgcaatcgcaggcactcggcaggctgaggcaggagaatcaggcagggaggttgcagtgagccgagatggcagcagtacagtccagcttcggctccgcatgagagggagaccgtggggagagggagagggagggggagggggagggggagggggagggggagggggagagggcttttttttttttttttttaagacagtcttgctttgttgcccaggctggagtgcagtggtgtgatctcggctcacttgcaacctccacctcccaggggttcaagcaattctcctgcctcagcctcccgaggagctgggattataggcacgtgccacaacacccagctaatttttgtatttttagtagagatggggtttcaccatgtttgccaggctggtctcaaacccctgacctcagctgacctgcctgccttggcctcctgaagtgctgggattacaggtgtgagccaccacgcccagcccagtttcaatttgagatgatgaaaatattctgtagatagatagtggtgatggttgcacaacattgagactgtacctgatgccactgaattgtatacttacaaatattaaaacagttaattttatgttgtgtattttaccataataaaatagagacatgaacaatatgaaaaaagatccaaatgaaatacgtagacattaaaaaaaaagacaatgtctgagatgaaaaatacactggaggccg

SEQ ID NO: 38641 - DNA, 1338 bp, Artificial sequence
  DNA replication origin
gcggccgggcagaggcgcccctcacctcccagacggggcggctggccgggcggagggctgacccccccacctccctcccggacagggcggctggccgggcggggggctgacccccccacctccctcccagacccggcggctggccgggcagaggggctcctcacttcccagtaggggcggccgggcagaggtgcccctcacctcccagacggggcggctggccgggcggagggctgacccccccacctccctcccggacggggcggctggccgggtgggggggctgacccccccatctccctcccggacggggtggctggccaggctgaggggttcctcacttcccagtaggggcggccgggcagaggcgcccctcacctcccggacggggcggctggccgggcagggggctgacccccccacctccctcccggacggcacggctggccgggcggggggctggcccccccacctccctcccggatggggcggctgccgggcggagacgctcctcacttcccagatggggtggctgccgggcggagaggctcctcacttctcagacggggcagctgccgggcggaggggctcctcacttctcatacggggtggttgccaggcagagggtctcctcacttctcagacagggcggccgggcagagatgctcctcacctcccagatggggtctcggccgggcagaggcgctcctcacaacccagatggggcggcggggcagaggcgctccccacatctcagacgatgggcagccgggcagagacgctcctcacttcctagatgtgatggcggctgggaagaggcgctcctcacttcctagatgggatggcggccgggcgcagacgctcctcactttccagactgggcagccaggcagaggggctcctcacatcccagacgatgggcggccaggcagagacactcctcacttcccagacggggtggcggccgggcagaggctgcaatctcggcactttgggaggccaaggcaggcggctgggaggtgtaggttgtagtgagccgagatcacgccactgcactccagcctgggcaccattgagcactgagtgaacgagactccgtctgcaatcccggcacctcgggaggccaaggctggcggatcactcgcggttaggggctggagaccggcccggccaacacagcgaaaccccgtctccaccaaaaccagtcaggcgtggcggcgcgtgcctgcaatcgcaggcactcggcaggctgaggcaggagaatcaggcagggaggttgcagtgagccgagatggcagcagtacagtccagcttcggctccgcatgagagggagaccg

SEQ ID NO: 38642 - DNA, 915 bp, Artificial sequence
  DNA replication origin
gggaggtgggggggtcagccccccgcccggccagccgccccgtccgggagggaggtgggggggtcagccccctgcccggccagccgccccgtccgggaggtgaggggcgcctctgcccggccgcccctactgggaagtgaggagcccctctgcccggccagccgcccggtccgggagggaggtgggggggtcagccccccgcccggccagccgccccgtccgggagggaggtgggggggtcagccctccgcccggccagccgccccgtctgggaggtgaggggcgcctctgcccggccgcccctactgggaagtgaggagcccctctgcccggccagccgccgggtctgggagggaggtgggggggtcagccccccgcccggccagccgccccgtccgggaggtgaggggcgcctctgcccggccgcccctactgggaagtgaggagcccctctgcccggccaccaccccgtctgggaggtgtgcccaacagctcattgagaacgggccaggatgacaatggcggctttgtggaatagaaaggcgggaaaggtggggaaaagattgagaaatcggatggttgccgtgtctgtgtagaaagaagtagacatgggagacttttcattttgttctgcactaagaaaaattcttctgccttggggaaaaaaaaaaaaacaaaacaaaacaaacaaaaaaaaagtgaaactgtatactcattacacattaactctccattctccgctcccccaacccctggtaaccaccattctactttttgtctctgaatttcactactctaagtgcctcatataagtggaatcctacaatatttgccctttttgcctgccttattatacttaacataacgtcttccaggttgacccatgttgtagctgtgtcagaatctcactccagc

SEQ ID NO: 38643 - DNA, 1752 bp, Artificial sequence
  DNA replication origin
ctccaccgccagcgccaacgaatgtggggacagttcgtctggcgcccgcggtcgcatccccatcgggcagttccgtacccctcctccgggcttccaagccgctcgccccggctgcgggagaccccggcgaatcacatccgagaggggggcgcgtggggcggagccttcctcccactgtcctcccgccaccagccgcccctgtcgccgagcccgcagtcgccagcgcgccccgagcccctccaggccagaggctcccgcaggcgatggcggacaagagggcggggaccccagaagccgcggcgcgcccgccgcccggccttgcccgggagggggacgcgcgcacggtccccgcggcccgggcccgagaagctggggggcgcgggtccctccaccccgcagcgggccccgggaccgccttcccttcccctgggcgcggggaagcggcctccacggcgactactccgagcctggaaaatggccgggtccgggacgaagccccagaaacctgtggtgcagaggggctagggactcgggcaggagccagcgagaaggccgaggacgcgaacaaggaggagggcgccatcttcaagaaggagccagcggaggaggtggagaagcagcaggagggggaggagaagcaggaggtggcagcggaggcccaggagggcccgcggctcctgaaccttggtgccctaattgtggacccactggaggccatccagtgggaggcggaggccgtgagcgcccaggccgacagggcctacctcccgctcgagcgcaggtttgggcggatgcacaggttgtacctcgcccgtaggagcttcatcatccagaatattccgggcttctgggtcaccgccttcctgaaccacccgcagctctcagccatgatcagccctcgagatgaagacatgctctgctacctgatgaatttggaggtgagggagctcaggcactctaggacaggttgcaaattcaagttccgcttttggagcaacccctacttccagaacaaggtgatagtgaaggagtatgaatgcagagcctcaggccgagtggtgtctattgcgactcgcatccgatggcactggggccaggaacccccggccctcgtacacaggaaccgggacactgtccgaagcttcttcagctggttttcacagcacagcctcccagaggccgacagggttgcccagattattaaagatgacctgtggcccaaccccctgcagtactacctgctgggggataggccctgcagagccaggggaggcctcgcaaggtggcccacggagaccccttctaggccctacgggttccagtctggctaagtgctgccttgggatgtgcggcctacataagcttcctcatgcctcctacgggtggcggatctgggctcaggcccatggtgggcgctctgttgtctgctgtctgctgtctgctgtctgctgtctgttctgtgcactcccgctctgcgtggttcggtggactcagctctcaaattgtggccctcgtggccagtctctactgtttccatatggcctcttgctgttctgtgttaacatcacgtggctgtcacatgccgctgcgtctacactaagcacccagtgctgtggatgtgcactgccataatctttacggcatggacctgtgaccgtggccatcccagccatttttgacaagggtacccacaagtcactacttggaggacagtgcctctttgaggcctatgcttcaagactccagcctgcc

SEQ ID NO: 38644 - DNA, 2050 bp, Artificial sequence
  DNA replication origin
tcaggagccgcgggccctcctgggcctccgctgccacctcctgcttctcctccccctcctgctgcttctccacctcctccgctggctccttcttgaagatggcgccctcctccttgttcgcgtcctcggccttctcgctggctcctgcccgagtccctagcccctctgcaccacaggtttctggggcttcgtcccggacccggccattttccaggctcggagtagtcgccgtggaggccgcttccccgcgcccaggggaagggaaggcggtcccggggcccgctgcggggtggagggacccgcgccccccagcttctcgggcccgggccgcggggaccgtgcgcgcgtccccctcccgggcaaggccgggcggcgggcgcgccgcggcttctggggtccccgccctcttgtccgccatcgcctgcgggagcctctggcctggaggggctcggggcgcgctggcgactgcgggctcggcgacaggggcggctggtggcgggaggacagtgggaggaaggctccgccccacgcgcccccctctcggatgtgattcgccggggtctcccgcagccggggcgagcggcttggaagcccggaggaggggtacggaactgcccgatggggatgcgaccgcgggcgccagacgaactgtccccacattcgttggcgctggcggtggaggtggggagaagtgtgtaccaagcaagagtcagctcggagcaaacaccaggggacaggcccagtcgctggtcctggacaagtaaaactttcccatcacaaccaccacgccaggcgattgctcagtgttccccatctgcggtgggcaggcaggagtcgcccggcttccacactcgagtggcgctttggggcagttgtaggacactctcggccttacaggggataaattactcaggcacatgcagagggcttaagaggtatctcctgcaaagactgaccagactgaaactgggagcggcagataatggtaattttctgacacacaaaggtgatcaacacgttcatgtagggaaagcaggtgcttgaaatattcatgtggggaaaataagcaaggtcagagtggaaggatctggggtgagagagggtcttaaatgctacaaaccagggagcgagtgggcatctgcctggtttccccaacaggagttggttcctcctgggctggttggcagaagcgaggtggaccttgcttcactttgtgctaggcccaaaggctacccttccaaaggtggactctagcttgaagtgcaggaactgtacctggcaggctaagagctggattggccagccctcttagtcctcgatcctgcaaatctgtgttcctgtggtctcagctcccaaactgtggcctatggaggtcagtacctccaatccccctccacctctgcgtggaagtccttgccacctcttccagaaagctttcagccttttcctgacaaatggatacaacagctccctcatctgagccctcagacctatactgtggtatacactccctagggagcaaggtggatttccttagggtcctagctagggttttaacctactggggtggacagtgaacatttgtcaagtggaaggtcaaaaatgaagggtcagcccacttcctttgtacataaaacacctgcacttgttaacggccccataggctcttggctggactgcaagtgacttgcactgcttggccatagacactggctccagaccacagaaaagccagttcagtctgagcccctgatgggaggatctcagcacaagggctggcacccaggatggtggtaacgaccttcattagagaccaccaaagtcaggtgaagctatgtaagcctctcagcagtctgcctgaacccggtggttgggcacaagtataggtaaggtcaggtcctagctgtcaccagctgtacaccttgggcagtgactagggtgaacatttgtcctttcttggacaaccagcatcaattcttcatcttaagagtgccccaaatttcctttgagaaaccactcctgtttcagtcttgttgtcactggcatatgg

SEQ ID NO: 38645 - DNA, 1093 bp, Artificial sequence
  DNA replication origin
ggagagtctcaatgacttgcaccattccaagaaacatcaaacaggattaacaggggttggatttactctcaggctgctaattcttctgtcagtgtagatgggccctctttggagtctctttgattcactatttcctcagattcctgctgcctcccactcctggggaggccttgaacaaatggctgcaactcatcacaaccccattttcatggggagaaaacgtgattcgacacccccgctcccaatctggtggcctcaccttaggagagaaaggttagaaacccaagaccagactctacacacagtcccatggctgacaggtggaaaaacacacaagccaggagacaggctaagcttgcaggtgaaagcaccgattcccccacacaggtgtccccatatcctccacctaacaggcccctttctccccaccaaggtgggccacagcctggtcccaggccaacttttagatcaccccactgtggtgtgggaaaggttcaattccccgagcctgggagagatgggagtggatgagggctggagaagcaaaggaaatccagggagaagtctggagggagtctctgggatgggaaggaagagcgaggatgggaaggaatcatgagcaactttcctgggtctctaagggatccccacaagaatgaaatgggggattataagggctggaaggctggggggatggggatagtcagaagtgtatcctctgaatttcaagagggtctcaaaatgggtaacgggatggaagatgtcgaaagcctgggagtatggccactgaggagggaactacaggtggggcttattcgacttctccagacccagatatttgagggaagcctcaaagggagttatgtaagtctggaaaatgaaacagggtacagagcgggctatctggagcaggaaagggggttatgtgggtctgggtaggcgtgtcggagggagggagcaggtgcagcttatctgcgtcccccagacccgggtccctggtaaggtcagcagcgccttatctgggtctccagggagcctaggggtcgggaatgggggaccctcaggactgcgtctccaggtctcggaagggagg

SEQ ID NO: 38646 - DNA, 1061 bp, Artificial sequence
  DNA replication origin
gctgaggggcccgagatgaggcgcgccgccgctccgggtacagggcgcgcggacgcagcgagacggcctcccgcccctctccccgccgtcccctggggccctcgccggcactcaccgcgctcggggccccacgctgcgggccgggccgcgctcgggctccgccaggccccctcaggccccggtagtggcggcggtcgggccattgtgcggtgcattgtgggagccgcgcgagcgggcgctcgggtcgtggagggggcggtgccgcgggatctctatggtcccgcccgcccgcgggctagagcggccggggcggtgcgcgggcggcgcgcagggaccgctgggagcggggcgggcgctcgcgtccctccttccctccccgactgtgcgccgcggctggctcgggttcccgggccgacatgggcgccgccgcgtgggcacggccgctgagcgtgtctttcctgctgctgcttctgccgctcccggggatgcctgcgggctcctgggacccggccggttacctgctctactgcccctgcatgggtaaggcctcccaagccctctgctcagatggagaaactgaggccgggagaggaaaagccactcctcagatgcgcccagagacaccttcacaggtccaggagagaacctcagagcgggacggggcatgctcttctcctctctgccttagttgcaagggcacagaggggccaacgtgtccaactttccatttgacagatgagaaaactgaggctgggagaggttacgtgacttgcttgaggtctaagccagtccagggtccagtaaatggagttagtggggcaggacttgatgtcactgacccacgctggctcctggtgatttttcattgattcagcaaatatttatggggcacctattctgtgccgggccctgttctctgtactgggaataccgcagtgaataagataaactccgtgtccttgtagagccttcattttagttggggaagacaaacaattgagaataagtaggccaggcgcggtggctcacttctgtaatcccaccactttgagagaccgagg

SEQ ID NO: 38647 - DNA, 978 bp, Artificial sequence
  DNA replication origin
aggtcacacagcaagcccagcacagcgccgaggttcggaccccaggctctcgcttccccgccctcctcccaaactggggccctgaccaccgcctcagggcccccaggtgggctgcgacccaaggtggccgtgtctgggggtcgggccgcgaccctgccaggggaaggaggggcaaggccgtccggactaccaaaggatgcctaggaggcagggcagaggatgctccggctcgcgggacagcaaagccaggcagaggcgcgggcgcaggtcgcagggaaaaccccaggcggccacaggattagccctgctcggtgggcgcccggcccctccgactcacctgaggcccgagccgaaagcgggcggcggcggcggcggcggcggcggcggcggcggcgggggcggcgaacccctggctcagccattccccgctgccccggatggggagagacagtggccgctcacttccttagcaacctggctcggcgacccacttccttagcaaccggtgtcaatttcaataactttattggcacacgagcagaggacagggaaagccggctggaggggtctgggcggggctcaggtcggtgctggtgtttagcgggggcccaacacacctcggtctcctcacccacctaagcggggagagtggcgcacaacgtggcctgactccatcctctggtatctcgtgcctcagtttcccatctgtaaatggaacacacgcgatttcagccgccgttcaacctttctaaaagctttcacatccattatctgactggtgtctcaaactgctactgaggtaactcccatttagggtgcccccagtgactcaatacgaacacctataggcacccttgttgtagctttcctgtccttcacccaatccagtcagtcacaaccgccccaggcaaggccaggccacgctcatctctagcctgcctgaaatatctggtctgtttccattcttttgtccagctc

SEQ ID NO: 38648 - DNA, 1190 bp, Artificial sequence
  DNA replication origin
cgcccagacccctccagccggctttccctgtcctctgctcgtgtgccaataaagttattgaaattgacaccggttgctaaggaagtgggtcgccgagccaggttgctaaggaagtgagcggccactgtctctccccatccggggcagcggggaatggctgagccaggggttcgccgcccccgccgccgccgccgccgccgccgccgccgccgccgcccgctttcggctcgggcctcaggtgagtcggaggggccgggcgcccaccgagcagggctaatcctgtggccgcctggggttttccctgcgacctgcgcccgcgcctctgcctggctttgctgtcccgcgagccggagcatcctctgccctgcctcctaggcatcctttggtagtccggacggccttgcccctccttcccctggcagggtcgcggcccgacccccagacacggccaccttgggtcgcagcccacctgggggccctgaggcggtggtcagggccccagtttgggaggagggcggggaagcgagagcctggggtccgaacctcggcgctgtgctgggcttgctgtgtgaccttgggcaagtcttttcacctccctggccttagctgacctgtttattcaatggggtcctaacattgctgctcagagtggtaaagataatgagaagtgtatgtgaaagtgccctaaatggggagagggagaattcttagggcaccctagatgggagaccaagagggcagtttgaagtctgagcgagttagagacgtggcatttccacttagtaactgtgtggccctgggcaagttaatttctctgagtcttcttttccttatctgtgaaatgaggtaatagactactgtggaaatcagtgagactgggtatgtcaagtagcttggcacatagtaagtgctcaaccagctattatgaggcgtccagggtaggagggcaagacttccaggaggagatgactttgggacaggtaaggtgtaggtgtgtagagtgccagctcatatgggtagtcctactgcaatgccaacccccaaccccggttttacttctccattctgctcagagcaagggaggtacttctacaagtagtcctgggaaactctttgaggtcaaccccttgtagatagctggggtcatggtctcattttctacctgggcttcgttgacccttccagaagaa

SEQ ID NO: 38649 - DNA, 1946 bp, Artificial sequence
  DNA replication origin
ggctgtcccgttcttaaaggaagatggccccgccccctcccgcggtgggcagggccttgcccctccccccccagtgggggggtgcgcggcgagccccccccaccccgggccccacggagcccccctcggctgtccgcctcaccaggcgcgcggcctcggcccacgtgcgctccttcttcttcttctgtttgtccttcatccttctccccggcggcggcggcagctccacgcgggacctccgggctgggcgggctggggcggtggcgcggggctggggcggcggcggcggtggggggggcgcgtggcagcggcggcgcgcgaggtctcgggtgcggccggggagaaggggcgggcacgcggggaccggctggcgcgagagcggcggtgggggaggggcggcggcggctccacgcgcccgcgctgcgtcagtcgcccacggcggcagcggcggctgccccgcgatcgctaaggaatgcggcggctccgcataaccacggggtcagaggtcacggctccggcctccgctttcccgctctgctgagggactgagacaggaccgacggcggggcgggagggcgagacgcggctttcccttcggcgcccgggtgcgtgcgtgtctgccgtgggtgtgtgtgagtgtgtgtgaagagtgaggagggggagtgtggggttttttttttttgaacaaaaacaaaccgaaagggcgcctgggagtcgtagtcccaacggcctctctggcctcccccgctccggaagaatatggccgcgtgaagcgcgtggaccacacttcccggcgtgcccggcggcccccttccgctctccctctcgcgtcctccgcctagcaccgacctcagctaggaacggggacgggtcgctgttcggggaaggggctgggtggagtctcgcgaggtgcgagaactggctgggggcctgcgggattctgggaggcgatgctgggaaggggcggtggctgggctcccccggccacccttaaccccttcggtgctttttgcttcaggacctcctggcgggtgcgggtggggagtgaggatggggagctcgactcgcagttcccacttcgtgcttctcctcgcctaaacggttcttacctacacttctcgtaggggacgagaggcaggactttcccttttggtcacctctaaatgactcactgccacataataatgagacaaaaagaccctcataccagtaaaacggttattccacggctgatggacttagacggttcttcatttcttcctgtgctttcaggccgctgtgtatttgcagagcctgcaccagcagcctagagcgttcttaggaacttggtgatatgttgacgggtcgtgtaaagaacttggactctggggccatactgaccagaatgcacctgagggcgtttttagaggcagtaccctggagagaattcaggccctggagtccagcggacctagactggaatcttggctgagtcactccctggctgtccactcaacctctctgagcctcagttttctgatctgcatttgtcttgtatttcatggcattattggaattaaaattaacatacaattcttgacagattggaagaggatgtgaagggagatcttgacattatcaggtccgtatgatatggcgcctggcatagagcaaatgtttaataaatggtagctgttattaccagctgagaaacaataggcaatatacttagcctctctgagccttagttttagaacctgaaatgaaattcagagcgcccagcacataggttttctgtaactataggttcagtcgttgtccagaaacatttctagagtccgtccggagttggattgatgccagctcttaaaaactatgaaggcaggatcagtggccacatttaaacggtttccctgggtgaggaaacacactctccactccctaatgttaacacgtagcgagagcca

SEQ ID NO: 38650 - DNA, 1348 bp, Artificial sequence
  DNA replication origin
gcagcgcgggcgcgtggagccgccgccgcccctcccccaccgccgctctcgcgccagccggtccccgcgtgcccgccccttctccccggccgcacccgagacctcgcgcgccgccgctgccacgcgccccccccaccgccgccgccgccccagccccgcgccaccgccccagcccgcccagcccggaggtcccgcgtggagctgccgccgccgccggggagaaggatgaaggacaaacagaagaagaagaaggagcgcacgtgggccgaggccgcgcgcctggtgaggcggacagccgaggggggctccgtggggcccggggtggggggggctcgccgcgcacccccccactggggggggaggggcaaggccctgcccaccgcgggagggggcggggccatcttcctttaagaacgggacagccccgcaaggcgaggggtggggagcgctccgccgggatgggatgtggcgcctttttccgctcgccctcgcgccccccccgccccgcgcagctaaattccggcggaggggcgagctggcaggccggctcctcccactctgggcagcggggtcccgcgtcccctcccccactatttggcagcgtctgggggtctggggcagcttcgttcattcacccgggggagttgggtttccgggaagggtcggaagctcctccctcgcttcctggtgggtaatggggtggtgcctttgactccgggggtggaaaagcgaccccacattcaaggacgccaatggcatgttgagctttcccaatctaaaccaggtgcgtggagggaagcaagtgcttactcccagcttgaaccctgagcagcggttctctaactttagtgtcctgtgggcgacacctgggaggcggttaggaacgctactcctagggcccttcgtaagacctgctgagcctcagggtctgggatagagcctgggaatctgcgctttcaccagcttcccaggtgattcaaacgcagtggctcacggaccccactttgagaaacgcagactgggctgtttgccttcagaagctggactggaaattggtattttgaggagaactgaatccactttgcaaagaatgtatgttggacaaagacaaagtatctctgttgggagacgttgttcactgaggatttagcaagggagagcgtaacttgagtgtttgaagccgtctcgttcaaccgatgggggttgtgaattttgtgttcagagcgtcagaggacttgcaggtgaaatagcttccttttggattactcccacaaagctcagacactttgagacatattcgggtaattatctgctgataccagtagtaacaggttatactaagatgtca

SEQ ID NO: 38651 - DNA, 1125 bp, Artificial sequence
  DNA replication origin
gattctaacatcagggtccacgaaggtgattctaaacagagctgcagccccagcgccttgtcaggggagcccccaacccttccagagctgccccgttggcctcttccaagcaggtcagagcacccgtgtggtgagattccaaaaaaaaaaaaaaaaaaaaaaaaaagtgtccttgtgcccaaagtctcaggtgcttggagtgtggctagaaacagctcttttggatcccacctctttcaaaaacaaaatgtaccaactggtgaggcaggaagccaggtccaggctgggacagcctccttccctagggcagtgcgctccaggtgccggtggggtcagttctgctgtaggatgaggttttccagttcatctgcagagcgcagcaggaaggcagcagactcccggtagcccgcgatgagctgccgcacggcgctgatctccgtggggctgagctgagcggtgggcacgggcctgctggtgctggtgctggagggggtgggcgtgggggtggtggaggtggtagaggccccgcctttcatgctgaggtccgtgggccctgtggagagggaagtagggtgagaagggagcagccaccctgcctggcatctgggaggtgtaccttccttggcactgtcataacctatggcctagtgcccactgtgagttgggcactgaagtccgtggctctggtccatctccctgatggctctatccctagtgcttagaatgggcctgcgggcgacagggttctcagagaatcctcagggtgatcttgcaaggatccggttttaggtgaggaagaggcggccttggggcaaaggaactcctaagatctgcctctcctcagtgtggtgagcagagcttgggaatgggaaatactacttccattgaggaactgtgggacaagtgctaaaagaaagcctctgccagtgtgcctaaaggagcagcacccatctgtgtgctcttccccagcccagacaccgaggctggaaggggagatggtgtgcaggagactctgcaggtaggcaggggcccaacacacctgagagatgcgtgtggggaaagcccaggaggagctgagagtcgagccacaaaaggccaggagaagaaacatctgtgtgcccagac

SEQ ID NO: 38652 - DNA, 1072 bp, Artificial sequence
  DNA replication origin
ctctgttctggcagaggggaccctgtggctgcctcagctgaggctgtgggctggggcaaattgcctctgaggtggggtagcagcactcaccccaacccagggacactcatgaggaggacacagggtgggatactccgaggtggctgcagtggccacagtgccttgggtggggcctcacacccaggcctctcattccagatgactcctcctctgagagtggcagcggcaatggctcctccaccctgaacccatccacgtcgagcagcacgcagggcgaccctgccttccccgagatgaatggcaacggcgccgtggcccccatggacttcaccacggccgccgaggatcagcccatcaacctgtgtgacaagctcccgccggccacggcacttggcacagcctcctacccctcggatggctgcggtgccgacgggctgcggagccgcgtcaaatacggggtgaagaccacccccgaggtgtgtggggctgggggctgagtccatttctttctgtaaagggctgtcgcgaggcgagaatgaaattgtatacgcccagagcttagctggagccagcccatgtgtgtgacaccgagccagggtggtggctgtggctggtatgtgttcggttcctggtgaagctctggaatgggagatggcttggagtgtgcccccaagccaggcccccttctccgagcctgtgaagtggagctgacggcccctgccttggtagaggtggtaggtggatatgcatccccacaacccatccccctcccccagaacagcatctgctggggataacagcaagtggccactttcggcacagccaggtacgaggcctcccactgcctggtttgtctgcgtgcctgtccccattttataggtcgtgcgaaaaaagggcgagggcccagggatgtgggcagtggaactcctcctttgactaggctgatggacggtggtaagggtgggcacagtacgtacccctaccagtgggcatcccccctgcttcctggggcctcccccacacttccacaagctgcctccgggccactaaggtttcctgtagtagtgcctct

SEQ ID NO: 38653 - DNA, 1160 bp, Artificial sequence
  DNA replication origin
ggggtccggcgtgaccctggcctgggggaaggggcggcagggcccgctgtgaccacccctcccccacccactctgggtgcaggtgtggagccgccagggtcacccgtacctccccgggaccctcgcgggtgctcacctgacagtgaccccgggagttcccgtgcagcttcagcctctgccgtctcagctgagcaagcaggaggccggggctggggctggggctgggtgggcagagaggcctggaatgtatctggaactgtctggtcccctggttaaagtttcctcccccgcgcccgcaggctggcggtgccgcgctctttgcggcagggggcgccctcgcagtgctttgccggggctgcccaccctgagacgccgggcaggcccactcgggggccgcgtgcagaccccagaccttgcagccccggctttgcacgtcccaggccgtggggcctgcacggagcgcagattcgggggccaccgtgcctgtgcctaggctgccagggctgggcttgcttacaggagggagtgaatggctggaggtcacagtagagccatccttcctgcttccggcagaggaaggagacatttgagggcccaccgtgggcaggggctctgagagctcgaagctgcaaggcagtgcccggcagcaggagcagggtgggtgggaggtgcggtcctgggagctggggagaagggagagcctggccgggcttcgagggcctccagggccctctgacaggccactcactcccaaacccttggagctcggtctcccttaagcctggacataacgcttgcgagtttggggtgcaggaagaccctccatgccctgcacagccctgcctggccacacccctcctgatggcccctctgttctggcagaggggaccctgtggctgcctcagctgaggctgtgggctggggcaaattgcctctgaggtggggtagcagcactcaccccaacccagggacactcatgaggaggacacagggtgggatactccgaggtggctgcagtggccacagtgccttgggtggggcctcacacccaggcctctcattccagatgactcctcctctgagagtggcagcggcaatggctcctccaccctgaacccatccacgtcgagcagcacgcagggcgaccctgccttccccga

SEQ ID NO: 38654 - DNA, 1085 bp, Artificial sequence
  DNA replication origin
ggtggtgggatgatgggatgtcacttctgggcctatgtagggtgtggcactgcagccagccttgggcctggtgcctgtgatgaaggcagtgaccacttgctcactgtgtgccaggcacgatgcccactgaggagcagcccctcattccagaggaggaatctaaggccctccaaggtcaagcaagtggcctgtgagggtggtgtcggtatgtgaagtcgcacctgcaaggtgggtgaaggatgggccccctgcagctcatgggagcgtgggtaaccagccagtatgggtgtcatccctgtcccccgtggaggctcctggacctcaggtgcaggggcttctctggtgacagggtctgtcctggtggggcagatggccctcacgatgaccctgggccaggggaagggagcatgaggatccctggcagggccgggcagcaagctggggttggaggcgtgagtgcctccttcctagggacagtggagaaaagtgccagcctgaagtggcagtgtggaaccagaccttgaaggctggctgccatctgctcagctggaggtgtcatggcaggcagattgcagagctccagcacaggatagtgaggctgggctgggggactgcagaggtcacaggactgagagtgccagtggctgtgggccggactcttactcagctacaggaaagcatgggacaggggagtgaggattaggcctggctctcacaggtgggatgtgggtggcctgggcgctggagagcagccagtgggagctgcatgaggagctggtctggttcccgggtggaggaaagtgggcacccccattctcacaattcaccttccctgttacccacgaggctgagtaaggcacatctgtcccccaggaggtctggcaccttggttgcagtcattactttgtttccaggccagcactcagtaggtgctcagtaaaaatgctggggaatgtgttggctccagactgggcgcgagtaggctgtggggtcccggggacagccagcgcgggccgggactccgaggatgcagccagtgaggggcagctatgggcgggctttgagcagagcccggagctgccctg

SEQ ID NO: 38655 - DNA, 832 bp, Artificial sequence
  DNA replication origin
tgagctccgagggtggcagttgcccccatccccacagtggccctctcactgggcccacctcagactgtcacaggctgggctccgggatccccagaagcccccgttgcagtctgggagcctcgtgcgtcggcagtgggtgagttatgatgtgagaaaatgtggggtgcagggaattggggtttccttttgagctcctgccccatctcgggcaccatcctcaccttagaaccgtgttttacggctgtgggacccactctgaaaggaaacggaggctccagaaggtggagtagcctcttccagccactccgcggctcaaacctgtggcctccccagtcggcaaaacatgggcctcaggttgcaggcagcccccagagcatgtggcgcgggggcagctgtgtggggtgggggctggcatgccggggctgcctgagcggagctgggggtaggcgagaccttggtgtcactggggaaggcaggctttcgcgatccatgttgtccctctgagtaggctctgtgtgtgcggcatgagaaaatgagataatggcagatagagcctataaactagggcaaaggggctgtttttggtctgggttctgtgtgtgtggtaaaatgtgtgacataaaatttgccatttttaagtgtacactccagaagcactgttatttccacagcttgttcatcccccaacagaaactctgcaccctttaagtactaactgcccattcccagcccgtggagcctcactgtaccttctgtctctgtgaatttgcctgttccagatgctgcgtagaagtggaatcactgagtatccttgtccgtctggcctgtttcc

SEQ ID NO: 38656 - DNA, 1035 bp, Artificial sequence
  DNA replication origin
accctgctgtgtgcccagcctgaccctgtgagcccagagctatacatgtcgctgttccacagggcaggaaacatcgtctccgaggggaagtaacttgcccagaccacagggactgggtctctccagagccagcgttttggccactcctgtggaaggacactcaagtccctgtttttctttctttctttctttcttttttttttttttttttttgagatggagtcccgctctgttgcccaggctggagtgcaaaatggtgtaatctcggctcactgcaacctccgccttccaggttcaagcaattgtcctgcctcagcctcccgagtagctgggattacaggcgtgcaccaccacgcctggctaatttttgtatttttagtagagacagtgtttcaccatgttggtcaggctggtctgaaactcctgacctcatgatctgcccgcctcggcctcccaaaatgcagggattacaggcgtgagccaccgtgcttggccaagtccctgtttttcattgctggaagtggcgctgcagggtgcccctcagggctggccccatgtggcctgagtctcctgtcctgggctttatccccaggccctagcactgaataggtgctcaaccaacggccactgagtcactcttggcagagatggggaatcagagaaagggcctgggaggaggtggcctgggaagctgggcagaggcgtggcagcagggggctgggaagggaggaggtgcccgatgccaggattgagggtttcttgggtcacctgtttccaaaagctccctatgaccccaagctccaaccaggagagaagggcagagaggccacagccaggccatctggggagggtctggcatggaagggttctgggaggatggagtggtcgggcccaatatgtggcatcctgtaggcaggtcctgggtgctgtgccatggatctggccggcccttccccgaagtatggtcttgagctagccgatcccccaactctgggccacagcttctctctgtgacatggcctgggggctgtggcc

SEQ ID NO: 38657 - DNA, 1035 bp, Artificial sequence
  DNA replication origin
cgcccaagaggtgtgtctggccctgagcgcccagggtcgcggggcgcaccccactcccggggtgcgcgccgcgggtcctggggggcggtgattgtgcgcgcagcgccgcggtattgtgccacggccgctcggtgtgcagcgggctcggcaccgcgtcccggcgagggaggcgttctctggcggcggggcgggggccgggctcgggttgccgcggccgccacgagaagggaagtggactgtgtttggggatgtgaggacgggaagcgttgagtgtcagggaggggttccccggcgcggcgcggggagttgagacgcggtttgcagagttgagcccacttcagcaggcccgggtccctcccgggaggggacggggtgtccctctcaggtgcaccgtctgaccggaagccgcgggcgttggcggcccctggcgaaggggccttccttaatgaggggacacggcggggcgggggcagccggccgcctcgagggcgcgcgcaggggttaagttggatttacacctccgccctctctctcctccctccaccttgtcttcaaggctggacactttggatagggaggaggggggagtgcaatccgcatttttattccagccgctcgggagcagaagtgaccctgctcccacccggagctgcgtttgcccgagtccggccgcccctaccgggctgcgcttcctgggggaagttctcattaagcctcgctaattagcattattcctgtagaaaggttaaggttagaccgtccttttccttatgggaggcccaccccctcctccccattccctactccctcccctctccccaagagcacaaaagcacaaaaagaaagtgtgaagaggctcagatcaatggagaagccacaaacccattaattcaaatggaaccttttttccccctctaaaacattgattttcctttctgtctgctctgaggggagatgaataacctcctgatttcacctgaaatggtgtttggactctgtgatttcctcctctttctgagaaggattgtggcttga

SEQ ID NO: 38658 - DNA, 1281 bp, Artificial sequence
  DNA replication origin
ggacgcgggtacttgtggggcggggctgccgggcctcggggttcggctcccccgggcggccggagcgagaccccgggctgggaaagccaggcacgtggccggctctcggccgtacccccgccccacccccacggcagggcccccagtgcttgatcaagttcaagctcgagctcctcggcgcgctgcccaccggctgcccctccgcgcccctcccccttccccatccgcaccgtctcgctcttcactcttcctttgtctctttcccaccacttagtttacaccccctccgccctcctccccgccccccgcgggcacccgagtgtccgggaggcgctcacctgttcgacccaaacatctacgcgacccccagcgcccgccgcccgcgtgcccgcccccgccccgccgccggtcattgtgctccgccagcccacaccgggccgggtcctgacggcgcgcgagccacagttgtaaagtaataggataatctcggggacgtcgctccagcccagacccgggcacgcactgtccgtggagacggcaccgccggggaggggagccacgcggattccagatgcggtcccccaggcggacagacccttgcccggggcgcaggaggaggcaggactggcatcgcggggtgggagccctggacctccgagcaacctcggactcggcccgaaaagcaacactctcatcaccaaaccgcagaattagaccccgatggagaaaatgggtcaggggatccattcccaccccacccctccaaatccagaccctccgctaccacagatcagcctcgaaaaaagcttgtgcttcaacaaggatggggaactgccctcgtggaattctgtggggaaattgccaaaaaaaaaaaaaaaaaaaaaaaaaaaaacaactaaaaaaaaaccctgataaggatcccacctcctgattcctctggtcgcatccgaagaggaagggcaatttctactgactctttacgctaccattcattcacggtggaaccagcagagaagagaaaacgagacagccacagcgattgtttgcaattttgaaacagactgcctttaaccctccaactttttttctgtaaaaagccttttttctttcttcctctgaaagctttgcattgtgaacaatccatggtaaacaaggctccctctacagccgcgagtgcgaagtacaaccccacaggttcagagcccagcgtttacccgtcagaaaaataaaatgatgacaagacatcacattagcgccacgcaggcttccttccgcacatgc

SEQ ID NO: 38659 - DNA, 1843 bp, Artificial sequence
  DNA replication origin
agctcggtttgcatgtcgtttgcacattactcagtgtatgtcagaaggtacgaacatctccctttccgggagagggctgccgggcccccctgccctcctccagacagcaaaaatgccagccggctagacgggagcgacgccctggcctctgacggcacccgcctgccgctgcctcccccattccctcctggagccaaatttaggcagctctgctactgagagatggggagagcggaggcaggaaacggtgaggttggaggcagcctggccttggccctcccagagtggagcagccccaggggtgcccctgtccctaaagctctgggtgcagtctccccccacccctcctctcactggaatgctggcggggttggggaacgctgggttctcagctgcagcccagggtgctggctaccccagccatgaaggaggagggagggagggagggagggagggagggagggagggagcgagggagggagggaggaggtcatggccggggcagtggggaagggatcagatagcctcctcctgccccagacacccgccgccactggggacacagagccggttctgcttcttggacacttcctgcccctccttggtgtgcaccccccaaccctgggcctgattgtgggtggggggcaggggacacagccaggcctgaggggactgaaccctccctgccccccaaaggctctcccaggccatctctgactcaggccagcctcgcacctgaatggtcttggttcacctacctgggaaatggaaggggtggcctagaatgacttccaagcagctgcctgcactgacagtaggagcttttgggaggcctgacagaaatgagggttgtgggctgggtgtggtggctcatgcctgtcatcccagcacttttggaggccgaggcagtgggatcacttgaggccaggagttcgagaccagcctggccaacatagggaaaccctgtctctattaaaactgcaaaaattagccaggcatggtggtgtgtgtctgtaatcccagctactcgggaggctgtagcaggagaatcgcttgaacccaggagccggaggttgcagtgagccgagatggtgccattgcactccctcctgggctacagagcaagattccgtctccaaaaaaaaaaaaaaagaaacgcgggttgtggcagtggctttaggcctagaaacttcttcgatttctcaggtatggctaggagaggcagctactcacgatgctgggacagaacctgcgtgggctgaactgaggaaaggaagaagaggtgtgtgctggatttcagccaccacgaatccaggggtgggactaatggagcccagtagttggtatcctggggtctgactccctggatttgaaccccagctctgtcactctgtaccttgtgactgtgggcaaatcgcttcagctcttctgtgcctttgcttcctcaccctgggacaacagatctctcgttgctgttgcgaaagtgaaacgaggccgtgagtgcttggcacacagtaggtgcaccgcgacgccagccaccagtgtgactgttttgtctcccaggacggttaggaggccccggagccacagcagatgtggatgtggacgcggtgggaggcgcagtatcttggttgttaaatgggcacggggatggggggttcaagtctgcgtgaccctgggcaaatggccacaccccgctgcgccttgggcggggagcagcagaggcactgaccgcggagggtctgtgaggactacgggagatcaggcttggcacggcgcctggcacatagcgggcgctccctgaaggagagctggcaagatcgaatggtaccgccctgcacaa

SEQ ID NO: 38660 - DNA, 963 bp, Artificial sequence
  DNA replication origin
ccacaggctgacagcccttccaccacgctgttgctccagaagctactgtgttcctaaggagggcagggagggtggaggggagggagagtagaggggagagagagtggagaaggagggtggaggggagggagggtggggagggagagtggaggggtggagagtggagggcagagagtggaggggagggacagtggaggggaaggagggtagagggagggagagtggaaggagggagagtggaggggaaggagggtgaaggggaaggagggtggagggagggtggaggcagggagagtggagggcagggaggctggagggagggagagtggagtgcagggagggtggagggagggagagtggggaggggtggagggcaggtagggtggagggagggagagtgaggagggagagtggggagggagggtggaggtcagggagggtggggagggagactcgggagggagagtggggagggagggtagagaacagggagggtgaaggggagggagggagcgagcctcacctttactgaatacctgccctgggtcaggccctattctaggcacatggccaaccagtatctcgatgactccatttcatagaggaccgaaaggagattagggttggagagatgaaggctccctcttgcctaagggcctgaggcctagctaggcttttccactgcctgcgctgctcaggtgacgttctggggtccccaagggccatcacagggcttgcatattcctcatgttctctcacctgagccagccagcccaggcccaaggcaatggcagtggtgacaacggcagtaatcctaacactggctgataacgggcaccatttaggcactgggctccaaaacccacataatcctaaacatggagaaactgttgcccagagaggccaagtgacttatgtaaggtcacacagctgacaagccatagcgctaggacttacacccca

SEQ ID NO: 38661 - DNA, 767 bp, Artificial sequence
  DNA replication origin
tcaagccccatcaagaggatttccactttctctggccatgttgggaagcccaggtcgggcaggggcacaggcggtggaaaggagggaaggaaactggcttgaagggaggtgcagggctggggagatatggctggatggccccatagtggggccccagaaagccagatctcagggattgggagccattgagtgttgtagagcaggaagaacatggggagggaggtgtttagggagtgagtctggtccagtgtgtgcagagcagagactggagtctgaggtccagggaggctgtaggctctagggggcagtgccctaaatgggagcagatttactcccatttaggaatgagggggaggggctggaggggtgaatctgagtctcctcctcatcagctgctttgccctgcacaaagaactgttcatcattcattcactcatttatccatttagcaacctggagagggcctcctggggtgcactgttgagacccatagatgtggttcttgccctggcagagttcagggcatattgtggggaacggatgctacatgacacagttatggtggtggtgctgatggtggtgatggtgttggggatggtggggatggtggtgaggatggtgatggccgtcatgatgatgattatagtggtgatggtaatggtaacaatagtggtattaatggtgatgatggtgatgatggtgacgataatgttgatgtggtgatgatggtggtgatgatgatggtgatgaatatggtgatgatggtg

SEQ ID NO: 38662 - DNA, 1200 bp, Artificial sequence
  DNA replication origin
ctttgaagggtcttgcaacctgatccaatttgaaagcacaggtccttcatgtcaagctttcagtccattacactttagtctgaattagtttcaaagcatccctctggtcaagaggtctgtattcacaggctgctgcctgaggcaggactggcacaacataaagtctgtgggctttcctagggctcatgaagatgggtgtggggtggggaggagggaggatgcctctgttgtcctgggtcctgggggggcttttggaagaaggttgacagtgatgcctggcacaggctccatttgcattttttgtgagtggcagagcgtgcgtttttgtcagttacacgttgtgatttgggtggcatggtcctgggtaactctggggggctgcatttcggtgccagggtgatgcagacaggtcaggctctgccttcctggggcctcccctctaagtcctgggtcactgtctgctgaggggtggggacaccgtgcacccttcttccctgggtaggagctggtaggaaaaccctctgctttatggcccctgcaggctgctttgtcgtccctgcacgtctgggaggctggaaggcccatctgggacctcagaaatgctgctgggaggattggggggtggggagcctgtggctgggggtgtctggggaccaagtggagggcctcaggcatacctgggcttcttcaagccagatcttagctcagaggttgtgcgactgaatcctgaacatgtgtgtgctcacgggctagaacacgcatgtgcgtgcatgtgtgtgtgtgtaaaagtgcaactgtgtgggtgtgagtgtgctgttcctatctatgtgcaggctggaaatgcttgtgtgtgtgtgcgtggagtgtgtgcagggcacaggtggagaggctcctctgcgtgtttgtcggcatctatgtgagcacctgggctgtgggccttggcagctgcgggtgtgactgcgtgtgcttgcactcatgtgagatctggattggactcaccctgtctgtctgccagtgtggtgctgttgggatgtcctccatcatcaccaagtcacctgagctgctgccctggcccctgccatccccggagtctcagcagctggctgaagccaagaggtggccataagaggtggtgccatacccccgtccccatgactgcagccaaggcatctccttgttccagcttcccactgccacccc

SEQ ID NO: 38663 - DNA, 771 bp, Artificial sequence
  DNA replication origin
cctccctcgacagcccgcccctcgggctccccacgcccgcctgcctggcctgctggtcccgagagcccgtcagttacctgccactcgcccagccagccggagccaggcaggagatgccacccccatctccaagttctttcctggggcccagttattatttttatatttccattttccttttcactgatccaagaggaacaaatcctgctgggaattctggggcagccattggcctcttcctgggaggggctgaatgggacctcctttgaaaggtgcaaaggacgtctccctggcctacacacacacacacacacaccccctcacccctggtgtcatttgggagagagcctgtagtttggtcctcggtgggtttttgtgaaggtcattgggccataaacctttgtcaaaagcatttgtttagtacccacagtccttgtgcgggcactggggtgctcgggtgggtggggctgtgtgcctgctcccaggtcacccagctgtcgggggtggtgggcatagctgaggacaggataaagaagcccatgggggcttcaagagagagcaggtagaaagattccaaggaagaagggaggtgggagttgggtcatccagcagacaggccccatatagcctctgtccccagggtggccatggtgtgtcacctctcttccccattgctctctggctgcccccaccctgggcctcccttcctcctcccacagccatatgcggtgctgtggtcagggccctctcctagtcccggccagcctcggg

SEQ ID NO: 38664 - DNA, 876 bp, Artificial sequence
  DNA replication origin
caccacccccgacagctgggtgacctgggagcaggcacacagccccacccacccgagcaccccagtgcccgcacaaggactgtgggtactaaacaaatgcttttgacaaaggtttatggcccaatgaccttcacaaaaacccaccgaggaccaaactacaggctctctcccaaatgacaccaggggtgagggggtgtgtgtgtgtgtgtgtgtaggccagggagacgtcctttgcacctttcaaaggaggtcccattcagcccctcccaggaagaggccaatggctgccccagaattcccagcaggatttgttcctcttggatcagtgaaaaggaaaatggaaatataaaaataataactgggccccaggaaagaacttggagatgggggtggcatctcctgcctggctccggctggctgggcgagtggcaggtaactgacgggctctcgggaccagcaggccaggcaggcgggcgtggggagcccgaggggcgggctgtcgagggagggcacgtctgttgtgtttgtcgatctcctggcagcctggactgggaggcctgggtcccctttctctgcctcccaggcaggtggtcccttggggagggctcattattggtctgagagccagggtggagactggggacggtcgcgctgccaggggcaggcagagcgggtcagcgtgggtctcaaggagcatctgaagccagcagctgggccggcaggacctggggtccaggcccagcacccagtttctgcatgtggcctggatagggggagggggtgctcagcctctacagctgtgtggataaagagtggacgactgctccagatgcccactccctagggagaagtcgagccacacagaaagccagtgag

SEQ ID NO: 38665 - DNA, 819 bp, Artificial sequence
  DNA replication origin
gtcgggccgcgccggcctccccccgccctccttgctccctccccggccggagcgcgagagccgggccgccccgcgccggcctccctccctcccccgctcccccgctcccccctccgcgctcctcccccggccggcccgcccgccccgcgctcagccccgtccccggccggagcgggctcttcacacacaattgattcggtcgttacgaaaagtgcacttgtcccctccccctccccctccgcggccgcccgggccgggcccgcggggtgagggggccgcgagggagggaggcgggagccggggagcagatccggaggcgcctccccccgcgcccaggggacggggctgcaggccgcggggagtgggagccgcgagcgcggagggcgggcggcccatctgcgaggagcgctgataaccgcgctgcggccgccagcagcccatctgcgccgctgccgcctccggccggaccgggaacagggggccgggcagaggggcgcgccgggaccgggctccccgagggggaagctggggcagtgacccagcccgcgcaaggctgggaccctcccagcctaaatcagcactctcgctcaaacccggcgagtctgggtcattgtcccctcccccgatcgagtccaggacccctcccccagcccaaatcagtgccactttcccagatggggagtatgggtcagccctccccaccctgccaggtcggtcccctcctcggttctcccatcttgggtcactgccccccgccggagggcggtttttctgaggtcagtgacccacgagatggttggctgggtcttgccccctacc

SEQ ID NO: 38666 - DNA, 1655 bp, Artificial sequence
  DNA replication origin
tcaggattcacttccaaatctgactccacccgaagcccatgttcttttcattatactatacattctgctgtgccagaactcagcccaagattgacaaccaggtttttagcttctgaaaggcaggcaaagacccagcctgggtggagaggtggtccggcttagtggttattgaagtgggtcctggaactggacagagagaccagggctcacacaaggaccccaccacccaggcacagggcatatttgccacagttatcattaccattgccaggctagagcatctctgctctcaggaagagtgtgctggaaggataaccgtcaagggacacatggaaaaagtcagggtctgagcttcttaatcacagaagcccctgcgcccctggggctggcctttgggtagtgccttccccgctctgagtggtcacctcttaaaaacgggcatgcataccagcatagatccaaaaagagctcttgagaagataaagaggaaaaatgactgtggagttgttggtgtatataaagtaacatgaaatgtaaattatctaaaaataatctcccatgtgaaatgcagagagaggttggggcttgggagacctctagggttctttcagcatttactggcacctactgtgtgccaggtgttgtgctagggcctgtgcatatgaggatgggtcagatatggccctgagcatctggagctccctgtctactgggggaagtgagccaggtatacacagcgtggggctctctccgagcgcggtgaaaggggaagagtttgtgtgtgatatggcagcagcagccagatgcacatgagctgaaacccacccctccttcctgcatgaccttgagcaggtcaggccacctctccaagccccaggtcttcgtctgtaaaatggagccattccctctgcctctcagagttgccaggacatggcacgtagtaggtcctggggtgggggactttgggatgggagtagacagtagttcctacgcaggaaacggtcctgcactagacaaagtctgggcctcaggacttggatggtgacttgcctgcaggagtgtcatggggacatggggtggacccccggggacagctgggagagaagtgcagcaattcctcatgacctgttaaggaagtggggggtaggggcacagaaatcctggggaattggcctgtgcctttatttatgttggtaatttcattaagggggaggggaccagctagctctacccaaggtcagatctgcccaggtaggaggggggcggtggggctacctgagtttactcagcaagagattctaggtcaaggcgcactcaggaaggcagggtgtctcaggatgagtttgtggatgtgttgagagttttctgaagcggaggtgggattgggctgaggccacaggcgacttcccagggggcctgggcctgtcccagagcagtggggcaggcaagcagaggcaaagctggccaaacttcggggaattcagggtgaggcaaaaggagaggaagtttgggggccccgaagggcggcgatgtggggttcccccaggggaacactgctcttctggcttcggctcacgggagaggtcaagtcacttgcgggagcgagggagggggagcctgccctacaccttcccggcctggctaagtggggcggg

SEQ ID NO: 38667 - DNA, 2522 bp, Artificial sequence
  DNA replication origin
tgcaggggaggaagagacaggggagggggctgaggccgggtctccaggggccttcacgccacgcagggactctggacatgatcccgagggccaccggcagccactgcagggctcaggggagggggtgacataattagatccaggtttttaaaggcctttctgacatccattgtggggaatggggtgggtctgagtggggccacaggccggaggaaggcagggccagtgagagccgtggacagcagtgaaggcagggaggccacaggccccgccaagggactggcaggcataggctgcgttgccatagccgcgcccaggccctgagagctctcaccctgcatgccctcactgtgcccctcctgggcactctttcaccaagagcgagcagcctggctcccggctgcaggccaggccctattctaggcccgggcaaggcggcgtgaacacaggcccaaagccctgccctcctgggagaacctacgacaaacatggtaaacagatgaaataggtggtgtgtgaggacagcacagaagagagaaggggacaggtggggaagggccaggcagtggtcaggatggtagacagggcacgggctgggcctccccagaaggagactcctactccaggccctgaaagaaggtaggatgtttctgctgttgctgctaggggaagaactttccaggaggcaaacacccctggcaggagctacagtggggtcagcctggcaggggagggagactgggcaggagaagccatggtcgggggtgtgcaggctcaaagaagatctctatgaggactgggcttctccgagtgacacaggagccactgctgggcctgagcagagggacgggcctgactctcctgggacggggcccctctggccgccgggtggagagtagactgcaggcggcatgggcagaagcccccagaacagggaggcagtggagtgaagatgcaggtgagatggtggaggctggcccaggggaggctgaggggttgtgagcagctctggggactgagatgtgtttggggtcagagtccatgggattcactgatgcagtgatgtgggatgtaagacagagagagacacagagagtcagagacagagacagagagtcagaaacagagagagacagagagtcagagacagagacagagaatcagagacagagagtcagagacagagacagaaggagacagagggacatagagtcagagacagaaggagacagagagggacacagtcagagacagagagtcagacagaatcagagacagagggagacagagtcagagacagagtgttagagacgggggagacagagagtcaaagacagagacagagagtcagagacagagggacacagagtgtctgaaccaaagacagtcagagacagagggagatagagagtcagagacagagggagacagagacagagggacagagaatcagagacagagagtcagacagaatcagagacagagggagacagagagttagagacagagagtcagagtgtcagagacggaggagacagagagtcaaagtcagagacagagagagacagagggagacagagattcagagacagacacagagagtcagagacagggacacagagagtcagagacaaagacagagactcagagacagagtcagagacagagacagagagtcagagacagagagagagagtcagagacagagacagagagtcagagtcagagacagagagagagacagagataagacagaggcagagtcagagtgacagagtcagagggagagagacagagagacaaagtcagaaagacagaggcagagagggagacagacgcagagagaaagaattagagacagatgagagagagttagagatggacggggtaaagggttgaggatgacagccagtgttccggcctgggccaggggagaatgcagtcgccattctctgggatgaggagggttgagggtggaaccgatctatgtgcaaatatcaggagatcctggagaagcccggaggagctgtgcaggaggaagtggatgtgtggctttggagctcagggggcatgtccaggttgttgatatcagtgtggagggcagcagagaatcggtctttaaagtcagccagggaggaaggcagatggaaagggacagcagcccagggattgagcccacggcccccagcctgagaggtgagggagagattggcgaagaggcagaaaatggactgagaaggggcagccagggaactggcagggagggttcttctcacaaccaggggaggacagcgtttgaaggagcagcaggtgttagctgcatctgatgctactgacaggtccagatagggaggtctgagagatggcattgggcaggtttagaaacgcgaagtttcttcatttcctcgggagggggaggggagaccctgtggggagtggattgaagggagaagaggggagagagactctggagacagcgagaataggtgtgttttcagggcgttccagcgaagggctggaga

SEQ ID NO: 38668 - DNA, 2084 bp, Artificial sequence
  DNA replication origin
agtgagaccctgtctctacaaaaaaaaaaaaaaaaaaaaaaaaaagtaaaaaaattagccaggtatgatggcatatgccagtagttccagctacttggggggctgagacaggagaatttcttgagcccagaagtttgaggctacagtgagctatgatcacactattgcactccagcctgtgtgcagtttatttaaaacctttatatttaaaataaataaactaatactcaatgagcttgacttagtgccagatgctatgctaggtacaggggcctagcggggaatgggacagacagagccccaggcccatgctggtttgtgtcctgggggacagatgttactaaccatgcaagcacatgcctgcagctgtaagaagagctgtaaaataaaagtccaggctgggggtcaaggagggcttctttgtggaagtggctgctgacttgagatctgaaggggagtaggaagtaggtgggtgaaatgtgggtatgttggctctgaggctggggatgggtggcagaggagtgttctaagtcttggagtgggtgagagcatggtgcctgttggagacagcaaggagaccacttaatagcagagcacagagggatcggagattgcgtgaaggcagtggaagatgaggtccagaggtaactcagtcccagttaggagctccaggagagccagtgggagatttgaggcggtgggaagtaggtgctaatttacatcataactcctcctactgccctcagagaatgacctgaagtagggtttggaaggcagcagggagcctagtgagatgggtgctgcggtgtccaggctagagggggtagtggcctttgttgggaggtggtaggggagttggagagagagttagaggtaaaatagatgggctctgggagtagagtggatatgagaactgagagcaaggaaggagtgaaggactcatttgcccattgaatttccctttacctaagtggaatcaggcagagctcatgctgggcactaaggagtctaccagttcagggacccttctctccatccatccattcacccatccaccctcccatccatcctcccatccatccattcacccatccaccctcccatccatccattcacccatccaccctcccatgcagccacccatccaccctcccatccagcctcccatccatccattcagccatccaccctcccatccagcctcccatccatccattcacccatccaccctcccattcagcctcccatccatccattcacccatccaccctcccatccagcctcctatccatccattcacccatccaccctcccatccatccattcacccatccaccttcccatccagcctcctatccagccagcccaccagctggccagccagtcagcctctcatccatccatttgtccattcatccagccattcccccattaatccatctagcctcccatccattcatccgtccatccatccattaatccatccatctgcccatccacccatctgcccattcatccatccatccatccatccatccatccatccatcctcccatccattcatcagccagcctcctgtccatccatccatccacttatttattcattcattcactcattcattcattaattcatccattcatccatccatccgtccacccacctatccatcccagcctcctatccattcatccagccagcctcctatgcaccctcctatccatccagccaaatggccagccagtcagcctctcatccatccatgcatttgtccattcatccagccagccattcatccatccagcttcccatcctttcatctttccaccgattcatccatccagactcccatctgtccatccatccatctatccatccatccattcatccagcctcccatccatccatctatccatccatctatccattcatccagcctcccatccatccatctatccattcatccatccatccacccaccctcctgtccatccattcattcattcatccacccatccatccagccagcctctcatccatccatccatccatccatccatccatccatccatccacccacccat

SEQ ID NO: 38669 - DNA, 1402 bp, Artificial sequence
  DNA replication origin
aaagtctccagattaaattgtcaaatgaaaaatgaacaggacagaaccacatgcacagtatgctactgtcggctttaaaaaaaaaaaaggtatgcattgtatatacataaaattatctctggcatgatagatgaaaataggagaagctgcctgcctgtgaggaggagtcctggctggctggactgggtgggagggatcatttctacattttttcttgcaccttttgaattttgaaccatgcaaatttgttacctagtcaaaaataaataaataaatactttttggaagtaaagaaaaaaagaaaaaagaaaatgaaaaagaaaggcccctctggctgccgtgtggataatggattatagattcaccagggtggctggggtgggaaggaggcttgagtgagttggtggggatgaggctgggggtgggatagtggggagggggctgaggtggggaggaggctggggtaggttggtggggaggctggggtggggaggaggctgggggtgggatggtggggaggaggctagagtggggaggaagctggagtgcagaggaggctggtgtgggttggtgggaaggaggctggggtggggaggaggctggattggtggggaggaggctggggtagggaggagactagggtggggaggaggctggggtggggaggtggggagatattttcagttccactgtgtagatgaggactgtgaggctcagacaggccaaatgccaagctgcagacctttcggctggaaaatggaggatgggcttggatgagaacccaggcccatcagggtcctcattacctcccttctgttctctgctatgtgttcccttgaggccccggtatgagggatttggttccctgggtcccgtacctacagcaagatcttgaccacaataggtgctcataaatgtttgctgagtgatgaatttgctcatttgatcattcattcattcaacaaatgtatcagtgactcctctgtgccaggcatggtgctagggccctgggattcagccttgaacaagagaaagctcccaccgttttggagctcacattctcagggggcaggggtgtgacaggcaatcaagatatgtataatatgagcactaagaagaagagagcagaccaattgagaggggaggtgccttcagatggtcagggagggctcggaggaggagggcatgtgacagtagagacttgaagaagtgtgggttgggtgcctgtaatcccagcactttgagaggttgaggtgggaggatccgttgaggccaggagttcaagaccttcctgggtaacagagagagactccgtatctaccaaaaagccgggtgtggtagtgcacgctgtgatcccagctactcttggaggctgagatgggaggatcacttgaacccagga

SEQ ID NO: 38670 - DNA, 902 bp, Artificial sequence
  DNA replication origin
agggttctgagaaaggacagctgacaccaggccagtcagggcattgcctgagaggggtgttgaaggattaataggagttcactaggctgccgaggcagaggacgcagcatctgcataggctccgcagagtatgctgtgggagatttttagtcgtttcatggggtagtgacaaataaggatagctacatttattgagcacccactgtatatcctagtccagtgctacacacatgagattattggaatcgcacaattgaaaccctgctccccttgtggcagagacctatttcactttcatggatgagaaatcaaggttcagataagttaagtaacttgcccaaggtcacacagcaactacaaagcctatgctcttaatgacccagggggtggtaaggggtgggttggagagacaggccaagctggaacaggaaggatcctgaaggccagactagggtgtcaagacctaatcctggggccaccagaggcccatggtagggttttgagtaagggcaggaggtctggcctgtgtttgagacaaagactctgtggcctatttggagggtgtacagggtagctgagactagcctggaggctactgcaatagtccaggcgagggctgaccccaagggggacatgcttggtgaaggggaggaagggatgtctttaggggagacagtgagacaaatgcaagaccaggggagtgggctgaggccactggttgaagtgcagatcaagatcagagttcgggtccgataagtctaacagggagttcggctccgatgagtctaatagggagttgatgctctttcctgctttccagccagttactatttccttgatatgtaaaagaccacattttctggtcgagcatggtggcgggtgcctgtaatcccaggtaccca

SEQ ID NO: 38671 - DNA, 911 bp, Artificial sequence
  DNA replication origin
cagggcgaaagtgggggtttcctggccagcccctgggctggctcctgtctgctgcagcagcctgcatggctgtcctccccactgtacctcgggcaggcatcgtgccaggccagggtgcggctgcccggcgggtgaggaggggctgccctggccccgctgctcgctgcccggctcttggggcgggctggaggcaggatggatgttcgcaataattacccagctgcagcttccccagagctgccgccatagcaacggtgccgggcgccccagccggccaagtggcaggagggggatgtgggcactgtgggcaggtcggggagtggggtggcacgagccccaggcacagccccactggctccctttgtcagctccctcactggcccaccccttccccggaggccgggggaggggggctttgtctgggcatagggaggttggcacagcccaggagaggctccggcagacgccccattcccactgccagggcccatgtggcaaggggaagcaggtgtcaggagggctgggagcgctcagggtccccatggctcagggttcagtggagggtgtgctgtgccccacctggtggcccccacacaccccgggtcccctggtctcattgtgcacagtgctgtcttctttctctagaagggagtgtgtgggcactgggcactccccagggaggactccactcaccctgccttgcaggggtcctcttggagcaggccttgggcagaactggctttgggtggggctttacctgtgggggaggccctggggacccccataatcctgccctcatggtacccgtcccctctctctgtacttggaagccctgacagtccctccctcctgtgaacattcagtctgatgaagagactgtggttagctccattttccagatggggagactg

SEQ ID NO: 38672 - DNA, 1617 bp, Artificial sequence
  DNA replication origin
tggatccaaaaagagctctgggatcagtgggacttacttacccagtctcagctactccaagatctgggaaacagtgggttctttgggcctgggccaggccagagcctcagtttccccatctgtaagatagaggtggttgcagtcagactggataattccaaagtgcagttttgtttgtctcagacctcctgccccaccctctccagcttatattctcagaaaacatggtgctaaaaggaatggccccgtcttggctcctattagcctctgtctcaggaggacaggggagcccaggaccagggaatcagtcggaagttcaagttctactcctgacttcaagttctactctccgccttctagctgcagccccaggtgatgtttgcaaaggcccctgtaacttagtgggtgcttagtcatggtccctcccctttccatgcctgggcagatctctgagcctcacttctctgagcctcagtttcctcacctctgcaatggctgtgcctccctgcctggcccagtgccagggctgtttgaagctagcagaggatgctggatggaaagagcttttcaggtagaaaaccgtgtgctgttgggaagatttattgctgggactgaaagtgggaggtccaaaggccattgaggctgagacagtccctacccagaaggctgtgccagggaccaggctgctctccctccacccgcactagctgagcagaaggccttctccccgaggccctaatgtctggtggtgagcaggggccgggctctctttcaacagatatttacccttttattttagagtgtctgtcccccaagcagggccctggtcagcggctcgatgaccaaggtctggggaggggcacaggcagcctgaatccttcccttgctctcatcccccatgtcctgtggattctccttcattttcctctctcacctgcagctccaggggacccttgcctcgcccgtggccccttgctgctcccgccaccttgtccccctcctttgtgctgcctccacttccactctggccaccaggattctctctgtgtgtgtgtgtgtgtgtgtgtgtgtgtgtgtgtgtgtgtgtgtgtgtgtgtgtttgagatggagtcttgctctgttgcccaggctggagtgtagtggtgtgatcccagctcaccgggagactctcccgtgttcaagcgattctcctgcctcagcctcccgagtagctgggattacaggcacatactgccacgcccaactaattttgtattttagtagagatggggttttgccatgttggccaggctggtctcgaactgacctcaagcgatccacccgcctcggcctcccaaagtgttgggattacaggcgtgagtcagcgtgcccggcctcgggattctttggaaaataacatctgagcggtatctcctgccgagtgccagcctgtgcagggccctgaggggcagtggagccaaaaggagaagagacggcatccctgtgctctgcaccctgctgacccccggccactgctccctagcccatgtcctgctggggcgcaccccacattctaccacacaaatctgttccagcgccagaccacacttcctctctctccccttggtgcctcccctc

SEQ ID NO: 38673 - DNA, 1316 bp, Artificial sequence
  DNA replication origin
cctggcccgttctcaatgagctgttgggcacacctcccagacggggtggtggccgggcagaggggctcctcacttcccagtaggggcggccgggcagaggcgcccctcacctcctgggcggggcggctggccgggcggggggctgacccccccacctccctcccggacggggcggctggccggtcggggggctgaccccccacctccctcccggacggggcggctggccaggcagaggggctcctcacttcccagtaggggcggccgggcagaggcgcccctcacctcccggaccgggcggctggccgggcggggggctgacccccccacctccctcctggatggcacggctggccgggcggggggctgaccccccacctccctcccggatggggcggctggccgggcggggggctgaccccccctcacctccctcccggacagggtggctgccgggcggagatgctcctcacttcccagatggggtggctgctgggcggagaggctcctcacttctcagacggggcagctgccgggcggaggggctcctcacttctcagacggggtggttgccaggcagagggtctcctcacttctcagacggggcggccgggcagagacgctcctcacctcccagacggggtctcggccgggcagaggcgctcctcacatcccagatggggcggtggggcagaggcgctccccacatctcagacgatgggcggccgggcagagacgctcctcacttcctagatgtgatggcggctgggaagaggcgctcctcacttcctagatgggatggcggccgggcggagacgctcctcacttcccagactgggcggccgggcagaggggctcctcacatcccagacgatgggcggccaggcagagacactcctcacttcccagacggggtggcggccgggcagaggctgcaatctcggcactttgggaggccaaggcaggcggctgggaggtggaggttgtagtgagccgagatcacgccactgcactccagcctgggcaccattgagcactgagtgaaccagactccgtctgcaatcccggcacctcgggaggccgaggttggcggatcactcgcggttaggggctggagaccggcccggccaacacagcgaaaccccgtctccaccaaaaccagtcaggcgtggcggcgcgtgcctgcaatcgcaggcactcggcaggctgaggcaggagaatcaggcagggaggttgcagtgagccgagatggcagcagtacagtccagcttcggctccgcatgagagggagaccgtggggagagggagagggagac

SEQ ID NO: 38674 - DNA, 944 bp, Artificial sequence
  DNA replication origin
agtgaggagcctctccgcccagcagccaccccatctgggaagtgaggagcatctccgcccggcagccaccctgtccgggagggaggtgagggggggtcagccccccgcccggccagccgccccatccgggagggaggtggggggtcagccccccgcccggccagccgtgccatccaggagggaggtgggggggtcagccccccgcccggccagccgcccggtccgggaggtgaggggcgcctctgcccggccgcccctactgggaagtgaggagcccctctgcctggccagccgccccgtccgggagggaggtggggggtcagccccccgaccggccagccgccccgtccgggagggaggtgggggggtcagccccccgcccggccagccgccccgcccaggaggtgaggggcgcctctgcccggccgcccctactgggaagtgaggagcccctctgcccggccaccaccccgtctgggaggtgtgcccaacagctcattgagaacgggccaggatgacaatggcggctttgtggaatagaaaggcgggaaaggtggggaaaagattgagaaatcggatggttgccgtgtctgtgtagaaagaagtagacatgggagacttttcattttgttctgcactaagaaaaattcctctgccttgggatcctgttgatctgtgaccttacccccaaccctgtgctctctgaaacatgtgctgtgtccactcagggttaaatggattaagggcggtgcaagatgtgctttgttaaacagatgcttgaaggcagcatgctcgttaagagtcatcaccaatccctaatctcaagtaatcagggacacaaacactgcggaaggccgcagggtcctctgcctaggaaaaccagagacctttgttcacttgtttatctgctgaccttccctccactattgtcccatgaccctgcc

SEQ ID NO: 38675 - DNA, 1383 bp, Artificial sequence
  DNA replication origin
aggagctaccccagccatcattttctcagatggtgaaactgaggttcagagaggccaagcgccgtacccaaaggtcactcagcgggagagctggcaggaaacctcgcgtctgccggtgccggcgccgcccctgcccctccccggagcccggcggccgcgcgtgtccgcggccctgcgagggctccccggctccggacagcccagggcggccgggggaggagtgcgctgcgacggccgtggcgaaagtgcggttgtggatgcgcggagaggccggcagcggtggcagcggcagcggaggaggaagctgagcagggcggcggcggcggtggaacctgcggggctggggcgcgcgccatgggccgcctgcactgcactgaggacccggtgccggaggccgtgggcggcgacatgcagcagctgaaccagctgggcgcgcaggtgggcccggcggcggggcgtggggcgcggggcccaggtgattccaggatccgggcctggggtgggggggacgtccgggggtgcgcgggagttgggagagactagacagagcggcgtcttgtgggcgtttggggtgtgtgaggtgggttcggggcgaggctaaggtgagctggggtctgaggagagtgtggggagccaagggatctccggaggcctaagggccacctgaggggtccgaaaggctttgtggggtctcagagatgggactacgggacctctgcggggtcctggggccgaggagagcttttggggtcctagaagagggacggaggggagtctagatgaggctgaaggagtttggggaactgaaggaacagactaagggcgtggggagttttggggagcagtggggtccaaagggagatagatgtttggcagggaggccgaggaagcctgaggggagtgggagggcccgagaatctgagggggcccggggaagcttggcctgggctgccgtcttacatctcagtgtgacatgagtgtcagtaatagccaggccccactggggctctgtgggcctgaggggctcgatctgggacaaggctgatgacaccttccacctccacccagttaaggagagtcactgggattcacatggaaagaaaccttatacactgtgtacagtgggggtcttcatcctcgatggtaggggagctagcaaagcctttttctcccccttcaggctgcaggtgccaaccaaggcagtcttggaggcatcctgcttctgtgctggttgggatgccttttcataccaccaaggctgctgaaataggtgagaatgacacttctcacccccactgggaagatacatctatttcccccgctaggttgtcacttcccaggaggtagcgcccctcttctttcatctccataccccccacaact

SEQ ID NO: 38676 - DNA, 1913 bp, Artificial sequence
  DNA replication origin
acaatatgccccaggctgggcatggtggctcatgcttgtaatcccagcactttgggaggctgaggtgggtagatcacctgaggtcaggagttccacaccagcctggccaacatggcgaaaccccgtctctactaaaaatacaaaaaattagccgggcatggtggcaggcgcttgtaatccgagctacttgggaggctgaggcaggagactgaacccaggaggcagaggttgcagtgagccgagatcgcgccattgcactcagcctgggtgacagattgagactctgtctcaaaacaaaacaaaacaaaacaaaacaaaacaaaacaaaagatgtgccccagatggtggagacaagctacaggccctctccagagagacccccttcttcctgcaccaatggactggacaccaatttgtatgtttgtgccagaaagccaaggagtcctgctgttcattcacaagaggccctgctgggcgccaggcagggcgctgagctgagcccatttctctctggtatctccctagcctctccccaagctcttaggtagaataagatccagtaagtatagacacttttgcggcatccaaagaattaacccttcactcatttactcacctggtaagagatacagggagaaagctgtggagtaactcagggagctggagcccataaggcaggaaacccatgcccattcattcaacaaacttgtattgagctcctttttgatgcatcccccatccactataagcacttggagacccacacagatgtggtttctgctcccatagtgtgtgtgtgtgtgtgtgtgtgtgtgtgtgtgtgtgtgtgtgtgtgtgtaggggaatgtaaacaggaaaacagatatgcaaaacaatttcagatcgcggtaagtgctaggaacagaatgaaataggataggagtgatggacaggggagacttcaggtggagtcatcgggaaaagcctctccataaagtgaccttctgggagaaaaccgaggggtaagaatctggtcctgcaaagatctgggcaagaaatgtccaggtgtagggaacagcgaggtcaaagtcaccatcacaaggaaacgcttggtgtattgaggagcagcagagaagttggagtgaaggcagagaggggttaaggtagcatataccttgaaaggggaggctcctataggggcttacaggcgatataaatcattcattcattcaacacatatttattgagcatctactgagatcctgtccttagtttactgcgtggagacagaccacaagcaggtaaacaagcaaatatgtaagtcccaggtcagataaattttaggaagtgctgttttccagtggttcaatggtcatcccagggcagaggtggggagacctgctgagggcggcttctccctcagtcagtccatgcctgcagggtctggaacccaggtagccagagacccgctggtcttctttcccctcccctgccctcccctcccttcaagatggctgacaaaggccgggctgggtggaaggaagggaggaagggcgaggcagagggtccaaagcaggatgacaggcaggggcaccgcggcgccccggtggcactgcggctggaggtgggggttaaagcggagactctggtgctgtgtgactacagtgggggccctgccctctctgagcccccgcctccaggcctgtgtgtgtgtctccgttcgggttgaaaggagcccgggaaaaaggccccagaaggagtctggttttggacgtctgaccccacccctcccgcttagggcttctgatcccccagggtgatttcactggcccggggttgggagggcagggggccagggggcggagcccgcggagaggggcggaggggaggctccgagcgatttcaaatttccctcgtccccgcccccccgttcc

SEQ ID NO: 38677 - DNA, 1120 bp, Artificial sequence
  DNA replication origin
gcggggatctgagtggctgcggcgggggcacccccgggcgggggcggggcaagagccgggccggggctacaaggggagtcggcaccgccccctccccacccactcccgctgccccgtccggcccgcgccgcttcctcgcagcagctgctcccggctccgcggccgcagcccgcgtggacgctccgagcgccccccgacggacgggaccggctccctggcggtcgggcgagcgggcggcaacgctgcccggccggcagcgctggggttaagtggcccaagtaaacctagctcggcgatcggcgccggagattcgcgagcccagcgccctgcacggccgccagccggcctcccgccagccagccccgacccgcggctccgccgcccagccgcgccccagccagccctgcggcaggtgagcgccccggggccccggggaggctcggccgccagctgcttcgagggctgctaggggaggggacggcgggggctcccgaagctgccggggagagaccctctccagggacctcccgaggaggggctctcgccgggttggagacccggctgggtttgcggggtgaggaaacgtccacggaccctgcttggggtggaacggggacagcgggtgggacgcgggggacatacgtctgacggggaccggagatactagaggaagggacgcgtctgctgcctccaggagcccgaagaggagagaagcttgctcgcagggagggggacgcgctggcttcccggggtccagactcgaggaggaggaggtgcccgtcgagagcatgaacaggggctttgctcatgggcagggggtgtaattacctggcctctgccttgggaaaagttaaggggcagaggaggtgaggaggggtttctgccatgcaggtgggcgtccgccccttgcaactgggatgtggggtcttcaggcgaggcgctgtcccttcccccaatcccagctttaggaaagagctcgtgagtgtgggcttagactcgcgcgggctggggtgtgcgccgtggagggcgtgaggcagagggcgacctcccggggtgctcctgagctgagccatcaagcgcggggagcagcggggctgccctctgcctgtgcacacctggc

SEQ ID NO: 38678 - DNA, 1227 bp, Artificial sequence
  DNA replication origin
gcctccaggagcccgaagaggagagaagcttgctcgcagggagggggacgcgctggcttcccggggtccagactcgaggaggaggaggtgcccgtcgagagcatgaacaggggctttgctcatgggcagggggtgtaattacctggcctctgccttgggaaaagttaaggggcagaggaggtgaggaggggtttctgccatgcaggtgggcgtccgccccttgcaactgggatgtggggtcttcaggcgaggcgctgtcccttcccccaatcccagctttaggaaagagctcgtgagtgtgggcttagactcgcgcgggctggggtgtgcgccgtggagggcgtgaggcagagggcgacctcccggggtgctcctgagctgagccatcaagcgcggggagcagcggggctgccctctgcctgtgcacacctggcccgggaggagccggccggaggggcggcgcctccctgtcccggccacgccgcctaccctggggtcttaccttccattcttagcctaactcccgtgtgcggctggccccacttcccagactcgcacactaaggcctcaaaacctctagcaccagctcctggaagataagcttcccggctcgtggttgcatggggagggtgtattgagctccactttatcggggagaaagtggaagcggagaaagacctaacaagttgtaagactgcgctgcccttgggcccaggcttcccgctggaggatctcacctgtggatggagttccgagcccaggtcttgcccgcgcctccagctttccctgctcccttttcctcccctggtctaggagagaggctcgctgggcctccgtgtttccaccctcccccgaagctgggaagtgtttgaattaaagggaattaagggcagagtatgaactttgagttgcctcctgagttctggatgcggtgggttgtggcagacgggtggcagtttttgggaaacagctgttatctcctctaccaggcctgctggggcttcttgttcacccaccttggaaacgccaggtgcggacttgatttttccagagttgagatgatggtacttagtttatagggttggtatacagtaagcactcaatacatgtttgccattgttggaatcactagctagcacacgggctaagcaagcttccttccttaaggaagcatagttcttagttcatcatgtgtttaaaccctgtctcgccaagttcattgctctc

SEQ ID NO: 38679 - DNA, 1267 bp, Artificial sequence
  DNA replication origin
ggacctcattggctgcgaccgaccacgtgccgcagtcgccccggcggtcggggccccgcccctcggctaccgttctgtggatcaggggccgagctccgcccccggcgcgcggctgagaccctctctataaaaggagccggcggaggatggcgagcctttacgtcggcgcgtaacgagggggtgcgtgtgaggtcatcgcgcgggcgggcgggcggggtctggcggtttgaacgagacgaagacggaaccggagccggttgcgggcagtggacgcggttctgccgagagccggtgagccggctagcgggcccggggggtgcggctgggggggcggccgcgtgggccaaggccgggcgtgcgcgggcaggccctacgggcagcgccagggccgttccacacggcggtgctgttcgagccgggtgggggaagggcggggccgtcacccggcgcgcgcgggctgggcctgggggcgcgcgctgcgctctgctcagggggcggggtctcgggccggaagtgggctgctgctacgcggggtgggggtttctgggccgccgctgaggtgtggtccctgcgctgcagcgactggaggtcccagggtggttgggccctgggagggtgtgggcgaggtgggccgtcctgggagctctggggacgcacattgtgggaggccgtgttgcctgagggccgagagatcgggtggtggagtcagacctgggttgggttccgtgcggtgtgaccttggacaggtgctttaaccgctgtggatctcagcttcctcatctgtaaaacggggacagtaatactacccacattaaactcttagcgcgatgtatggcagaaagtaagccagctcttggactccctcctttcttcagtgtgtgtttattgaatgcccactaggtgttgggcaccgtgctaaaccctggctgttttcccgggaacaaagatttgctctccaggaatccacattatgatgagcaggaggacagtataacgggatggtatcaacagtgctagttcagtccctacttcacagttgccctcggatgctgcagggcagagcttgacctctgccccattttggggatgaggatcctggggcccattgagggaggttatgctaggccgggcatccgcttctccgatggcatgtctctaacagtagtaatgataatagcagctctttgttagttgggcacttgttttgtgtcaagcactgttaagtgctccatgtggctttgtgtcttttaatactaacactgtcttt

SEQ ID NO: 38680 - DNA, 682 bp, Artificial sequence
  DNA replication origin
atagacccattttgcagaaaaggaaactgaggctcaaagagccaggtcacttgactgtggccacagagctggtcactagtatgtagcagagccagagttcaaacctgagctcttcagccctccaggatcctgcctcacagatgaggaaaatgaggcccagagaaggaaagggcttgtcctggtcacaaagcaggtgccttcattcagtgaacactggctgagagtgtcatcccagtggcacaccctgggtgatgccaaaaggtcacaggccactcatccgtgggttctaccttaaggagctccaagatcttggcactcgaggtcaagctggggcattggccttgctcagcttggacggggcaaggggcttcctggtggccgcagccgaggactagcagatccgcaggcagatagaacgcaggggcacaggccaagcacagggcccgggagtggggggtggtgcacacatccaggctggggcgggggacgcggcgggcagtggctgggttgcaaagcgctggctgcagtcaggtttggagcagtagtgaaaagcagcccagccaagactctgcccctcctgggccctctcccagctccagcctgactgagctctccaggtcctcacatcatcaagcctggctcgcccctggtcctttcccgtgctgttcccttagctcccttt

SEQ ID NO: 38681 - DNA, 829 bp, Artificial sequence
  DNA replication origin
ggcagaggttgccgtgagccaagatcgcgccactgcaatccagcctggggactgagcaagactccatctcaaaaaatataagataaaataaaaaataatagccaccatgattaccattattaacatggctgtaatcacatttcctagaggagaacagggccagtgactcatccaaaatgctcgcccggcacatagtcagggcccatcagtggcgtcccctccaccaggcagaagcccggctgcttggctgagacccccttctcctatacaggggccagcattgactttgagcacacgtcagtcacctataaccatgagaaggcccactcctactggaactggatccagctgtggaactacgcacagcccccagacgtgatccttgaggcaggggggatggcgggagatgggacagcggcaggggagtggtccgggcagggtttggggacaggagctggcagaagaggtagggggtgggagcaaagggagtgggggcaggggcggggttagaggtaggagcaggagacagatgcaggggcaaaggcagggagcagaaggagggggctactgacaaggcgggggctggggagaaggcgggggcaggaggtgagaacagacagcaggggctgctggggctagggtaggagcgaaacagagggacagcttgctttggcattgggagggaccccaccactcagcccttaagatttgagggtcagagaaacctcaggactacactgggcatgggcccatcatagacccattttgcagaaaaggaaactgaggctcaaagagccaggtcacttgactgtggccacagagctggtca

SEQ ID NO: 38682 - DNA, 982 bp, Artificial sequence
  DNA replication origin
ggcaggacagggtgcagtggtgatggggaggtggggcactcacttcaggaatgaagcgagccagggtcttggtggtttgtgggggcagctcaccaatctacagaataaaagtcaaggttagggttgctggagtcctccctggcccatcctaacaaacatctccactgacttaacaaggtgtaccctttgaggctcccttcatcacaatacttaacgctctgagtttaactaaatattgtgccttctgggcagcccaggtgatgacttacacatttcaatgctcataactcttagcacaaggtcaaatgctaagaaaatgttgttggatgaaaaagcaggaagatagatgggagaatgggtagatgtgatgggtaaaggggatgggtagacatatttggagatgaatagacagatggatggggaaacggataaacagaggagtgggtaaatgggtgggaggatgatgaatggatggatgggtaggtggaaatctaggaagaatacatggatggatgatgtgtggacggaaagatgggtgggtggatgaatgacaggaatggtggataggaggatgagtggatgggaatatggtggagtagaatgataaatggatgggaaaatagatgaatggactgatggatgggaggatggatggaaaggtacatggatgaatggtaaacagatggttgggaagatgaatggatagatcagcggggaatgaacggacatgtgggtggatggttggatggatggatggctgaatgagtggacgagtaggaggatggataaaggaaagttgggtggatgtagtggtgtttgggtggtacatggcaggtgcatacattcattcattcaacagtatcagactttgtagtaggtgttatgtggatgatatgaagggatggatggatgctagttggaaggatagaacctagggtatgatgaatacatgacagctagaaagatgagtgggtgggtgttg

SEQ ID NO: 38683 - DNA, 1771 bp, Artificial sequence
  DNA replication origin
gtgcccaccaccacacctggctaatttttgtatttttagtagagacggggtttcaccatcttggccaggctggtctctaactcctgacctcataatccaccctcctcagcctctcaaagtgctgggattacaggcatgagccaccacgcccgtcctgaagtcaattttttaaagctgtaaagtgcagagcacttagaagggagggcgatgaagaaaatccatgaagggctggctgatgtccaaatctagttaaagtaagaccagacaaaacccagcagaaaatgagctggccaggatgccagggctagatcagcctggagaagtcatcccgttcagcctctgctcttcgctggtgggaaaagtgaggcccagggagctgagcaacactgcgaggtgctgcctgggggctggaggtggaaaaaagggaggaaccctggactgatgcccttgcctctctgcagccatttcaggcatgctgcagcaaagtgatgctctccactcggccctgagagaggtgcccttgggtaaagcccgtggtgatggtggtgggcctctcctgggcggtctgcttggtggaagtggaagtggaggtggtgggggaggtggtctcctggggggcctgcttggtggtgggggtggagggggtggcagtgatctgttgggtggaggcttactgggtggcagtggcagcagtggtggggagttgctgggtggaggaggtggcagtggtggggggttgctgggtggcagtggtggggggctgctgggtggcagtggtggggggttgctgggtggcagtagaggggggctgctgggtggcagtggtggtggtcttttgggtggtggccgacaccattacaatgactacagacgcattgaattcccccgaggtgttggtgatattccctacaatgacttccatgtccgaggaccccccccagtatataccaacggcaaaaaacttgatggtatttaccagtatggtcacattgagaccaacgacaacactgctcagctggggggcaaataccgatatggtgagatccttgagtccgagggaagcatcagggacctccgaaacagtggctatcgcagtgccgagaatgcatatggaggccacaggggcctcgggcgatacagggcagcacctgtgggcaggcttcaccggcgagagctgcagcctggagaaatcccacctggagttgccactggggcggtgggcccaggtggtttgctgggcactggaggcatgctggcagctgatggcatcctcgcaggccaaggtggcctgctcggcggaggtggtctccttggtgatggaggacttcttggaggagggggtgtcctgggcgtgctcggcgagggtggcatcctcagcactgtgcaaggcatcacggggtaaggaggggacgggttctccccagaaagcccccatacacctccaaatgggggtgatcactccctgaagctggggttgccggagggaaggtcttcagagccccacacacttcagggtttggcctcaggattggaagttttaagacccccaagttacatggtttgggtcttggcatgaaacagtcctaagtttgagacccagttcagcttttcatgtttgcgtgtgactttgggccattgatatcatctctcgagtctcagtttcctcatctgtagaatggtcatagtaatacagtgtagtggaaaagaccccaaggatttaaaaactatacatatatatcataagttctatgctcagcctgttcctcatagt

SEQ ID NO: 38684 - DNA, 896 bp, Artificial sequence
  DNA replication origin
caatctcggcactttgggaggccaaggcaggcggctgggaggtggaggttgtagcaagccgagatcacgccactgcactccagcctgggcaccattgagcactgagtgaaccagactccgtctgcaatcccggcacctcgggaggccgaggctggcggatcactcgcggttaggagctggagaccagcccggccaacacagcgaaaccccgtctgcaccaaaaaagtacgaaaaccagtcaggcgtggcggcgcgcgcctgcaacagcaggcactgggcgggctgaggcaggagaatcaggcagggaggctgcagtgagccgagatggcagcagtacagtccagcttcggctcggcatcagagggagaccctggaaagagagggagagggagaccgtggggagagggggagggggagggggagggagagggagagggagagcaccgggtgcaaagttttaatgttcaggaaagattagccttgttcttttttttttgagatggagtctcactctgtcacccaggctagagtgcaatgtcgtgatcttgtgtctggaattggtgggttcttggtctcactgacttcaagaatgaagccgcggaccctcacagtgagtgttacacttcttaaaggcggcgtgtccagagtttgttctttctgatggtcggatgtgttcggagtttcttccttctggtgggttcatggtctcgtctcgctggctgcaggagtgaagctgcagaccttcacggtgagtgttacagctcttaaggcggcgcatctggagttcttcgttcctcccagtgggttcgtggtctcactggcttcaaaagtgaagctgcagaccttggcggtgagtgttacagctcataaaggcagtgtggacccaaagagcgagc

SEQ ID NO: 38685 - DNA, 1192 bp, Artificial sequence
  DNA replication origin
acagcacatgtttcagagagcacagggttgggggtaaggtcacagatcaacagtttcccaaggcagaagaatttttcctagtacagaactaaatgaaaagtctcccatgtctacttctttctacacagacacggcaaccatccgatttctcaatctttttcccacctttccccccctctctattccacaaaaccgccattgtcatcctggcccgttctcaatgagctgttgggtacacctcccagacggggtggtggccgggcagaggggctcctcacctcccagtaggggcggctgggcagaggcgcccctcacctcccggacggggcggctggccgggcagggggctgacccccccacctccctcccggacggggcagctggcctggcgggggctgacccccatctccctcccggacagggtggctgccgggcggagacgctcctcacttcccagacggggtggctgccgcgcggagggtctcctcacttctcagacggggcggccgggcagagacgctcctcacctcccagacggggtctcggccgggcagaggcgctcctcacatcccagacggggcggcggggcagaggcgctccccacatctcagacgatgggcgccgggcagagacgctcctcacttcctagatgtgatggcggccgggaagaggtgctcttcacttcccagatgggatggcggccgggcagagacgctcctcactttccagactgggcagccaggcagaggggctcctcacgtcccagacgatgggcggccaggcagagacgctcctcacttcccagatggggtggcggctgggcagaggctgcaatctcggcactttgggaggccaaggcaggcggctgggaggtggaggttgtagcaagccgagatcacgccactgcactccagcctgggcaccattgagcactgagtgaaccagactccgtctgcaatcccggcacctcgggaggccgaggctggcggatcactcgcggttaggagctggagaccagcccggccaacacagcgaaaccccgtctgcaccaaaaaagtacgaaaaccagtcaggcgtggcggcgcgcgcctgcaacagcaggcactgggcgggctgaggcaggagaatcaggcagggaggctgcagtgagccgagatggcagcagtacagtccagcttcggctcggcatcag

SEQ ID NO: 38686 - DNA, 911 bp, Artificial sequence
  DNA replication origin
gtctctgcccggccgccatcccatctgggaagtgaagagcacctcttcccggccgccatcacatctaggaagtgaggagcgtctctgcccggcgcccatcgtctgagatgtggggagcgcctctgccccgccgccccgtctgggatgtgaggagcgcctctgcccggccgagaccccgtctgggaggtgaggagcgtctctgcccggccgccccgtctgagaagtgaggagaccctccgcgcggcagccaccccgtctgggaagtgaggagcgtctccgcccggcagccaccctgtccgggagggagatgggggtcagcccccgccaggccagctgccccgtccgggagggaggtgggggggtcagccccctgcccggccagccgccccgtccgggaggtgaggggcgcctctgcccagccgcccctactgggaggtgaggagcccctctgcccggccaccaccccgtctgggaggtgtacccaacagctcattgagaacgggccaggatgacaatggcggttttgtggaatagagagggggggaaaggtgggaaaaagattgagaaatcggatggttgccgtgtctgtgtagaaagaagtagacatgggagacttttcatttagttctgtactaggaaaaattcttctgccttgggaaactgttgatctgtgaccttacccccaaccctgtgctctctgaaacatgtgctgtgtccactcagggttaaatggattaagggcggtgcaagatgtgctttgttaaacagatgcttgaaggcagcatgctcgttaagagtcatcaccactccctaatctcaagtacccagggacacaaacactgcggaaggccgcagggtcctctgcctaggaaaaccagagacctttgttcacttgtttatctgctgacctt

SEQ ID NO: 38687 - DNA, 641 bp, Artificial sequence
  DNA replication origin
cgccccatctgagaagtgaggagaccctccgcctggcagccaccctgtctgggaagtgaggagcgtctccgcccggcagccaccccgtccgggagggaggtgggggttagcccccctcccggccagccgccccgtccgggagggaggtggggggtcagccccccgccaggccagctgccctgtccgggagggaggtgggggggtcagccagccgccccgacagggagggaggtgggcgggtcagtctcccgccccgccagccgccccgtccgggagggaggtgggggggtcagcccccagcccagccagccgccccgtccgggagggaggtggggggggtcagccccctgcccggccagccaccccgtctgggaggtgaggggtgcctctgcccggccgcccctactgggaagtgaggagcccctctgcccggccaccaccccgtctgggaggtgaacccaacagctcattgagaaggggccatgatgacaatggcggttttgtggaatagaaaagggtgaaaggtggggaaaagattgagaaatcggatggttgctgtgtctgtgtagaaagaagtagacatgggagacttttcattttgttctgtactaagaaaaattcttctgccttgggatcctgtt

SEQ ID NO: 38688 - DNA, 1136 bp, Artificial sequence
  DNA replication origin
ggtggccgggcagaggggctcctcacttcccagtaggggcggccgggcagaggcacccctcacctcccagacggggtggctggccgggcagggggctgaccccccccacctccctcccggacggggcggctggctgggctgggggctgacccccccacctccctcccggacggggcggctggcggggcgggagactgacccgcccacctccctccctgtcggggcggctggctgacccccccacctccctcccggacagggcagctggcctggcggggggctgaccccccacctccctcccggacggggcggctggccgggaggggggctaacccccacctccctcccggacggggtggctgccgggcggagacgctcctcacttcccagacagggtggctgccaggcggagggtctcctcacttctcagatggggcggccgggcagagacgctcctcacctcccagacggggtcgcggccgggcagaggtgctcctcacataccagccggggcggcggggcagaggcgctccccacatctcagacgatgggcggccgggcagagacgctcctcacttcctagatgggatggcggccgggaagaggcgctcctcacttcccagatgggatggcggcggggcagagatgctcctcactttccagactgggcagccaggcagaggggctcctcacatcccagacgatgggtggccaggcagagacgctcctcacttcccagacgcggtggcggctgggcagaggctgcaatctcggcactctggggggccaaggcaggcggctgggaggtggaggttgtagcgagccgagatcacgccactgcactccagcctgggcaccattgagcactgagtgaacgagagtccgtctgcaatcccggcacctcgggaggccgaggctggcggatcactcgcggttaggagctggagaccagcccggccaacacagcgaaaccccgtctccaccaaaaaaatacgaaaaccagtcaggcgtggcggcgcgtgcctgcgattgcaggcactctgcaggctgaggcaggagaatcaggcagggaggttgcagtgagccgagatggcagcagcacagtccagcttcggctgggcatcagagggagaccg

SEQ ID NO: 38689 - DNA, 2809 bp, Artificial sequence
  DNA replication origin
tgggctgtttctgaggtcaagtatgttgttaggaagatcaaacccattgacccagggtcagtggaggttctgccaagggaactggccagtgatttgagcatagagaactgtgaggatgctcactgcagccttacctggaatagccctaaagtgggacccgccttaacatccagcaatgggatttattaaataaaccgtgggccaccaggcagccatcacaaaacaatgtagaccaaccaacagaagtaagtgaaaagggaaactgtttcttctattttttaacaaaaaaaaattttttttaatctagaaaaaaatactggaaggaaatgcatcaacagtacacgtttcttggtggtgtgatcacaggtcactttcaccatcttcttggtatttttcagaattaaaaaaatgtttacactaaatatatgtattggatatgtaaacaaccccactaaatggcctgcaaatgagtcaataaaggttgggcgcaggacaagggagtggaggaaacctcattcctttcccaatgcccgacccacagcccccaccaacctgggactctgaggaattattgtgatgccattgctgatagcagcaacaaacgcccagtcatgccggtcccggaaccaccaggaaagaaataaagaaatcattactggaacttacaacataatccctcttttgtgggacagaaatagattaaattcagtgcaaatgaaccctggctaagttggaagctgtcctagctcttggggggagacaaagaccagatctctgccctcgtggggcccacagtccagttgatgaaggtgtgttgggtgacccaacagaggtggatgcaggcagccggctgagtgctgggattttcatccacgtgggcagcatgtgcgtaggctcagagctccaggaatgggaacccaggcagggtgatgtgttgctttcactgccgtgagccttggccaagtgtgcaaagtaccaggatagaggtgacacagggattgttattagggccagacgagcaatacaaatgccagggtgcagacaggatgggcttaataaggccagcacaggtcaagtatgtcaaacagtagaacaggggcaaacacacagatggtatggtcagcactgagagagagggaggctggcacctgcctcgtgtgtgacagtcgctggcagctcagtggggcccagaaggggataacctgcctgattagggaggggaaaaatgatttctttctttctttcctggtgattctggaactggcatgactgggcttttgttgctgctatcagcaatggcatcacaatgcttccctggggaatagttcagagaaggcttcctggaagaggtgacatttgatctgggcttaagggatagggatgtgttaggaggggagggcattccagagtgggagcctttcaggggcaaaggaaggagggtgggttttggaaagagtgtctgggagcttgcctgagtcgcttgaaggggaagggagtggggcgggtggcagggaaggtgggctggaggggaagggagtggggcgggtggcagggaaggtgggctggaggggaagggagtggggcgggtggcagggaaggtgggctggaggggaagggagtggggcgggtggcagggaaggtgggctggaggggaagggagtggggtgggtggcagggaaggtgggctggaggggaagggagtggggcgggtggcagggaaggggagctggaggggaagggagtggggcgggtggcagggaaggtgggctggaggggaagggagtggggcgggtggcagggaaggtgggctggaggggaagggagtggggcgggtggcagggaaggtgggctggaggggaagggagtggggcgggtggcagggaaggggagctggggatgttctcatgaggagtcagaaccaggggctggaggtgagatgggattggggatgggaatggagcacaagcagggctggggtcctgaggccctcagtgcctcccagaacgctgtgggctgtatggagcctcccccaaggcaggggacagtgtgctcagatcctcaaaaccaggcctcgggtagcctgcttgtcttcactgtctggctttcccagaggtctctgtcttgctcttgccatccccttctctttctgtctctccttccctcctcctcaggctgtccctgccctgtctctctcttacccactgtctctctcctctctctgccaatctcttgggtgctttctgaagctcaggagggagctgggcggcctgtggagagtgcacctggacacactacgcggtgacccgcccctactgtgtggcctcaggcaaatgtcctcacctctctgtgcctgcagtctgtgcctggcaaaaggggctctgggccccagctgtcggcctgtgctgtgcctggccttgacatggaaaccacccaatcagatgagcaggtcctctttccaggccctgccctgagcatggtgttaactcactttgacttcacaatagcggtgctgcaggggacaggagctgggacatactcacagcacgctcacttaaagcaaagcggggaaccccagaaggaactcttgacactgggatttctgtgactggtattgcagttgctctgattgatatcatatcatattgtctagctgtaactagataaaggaagacaggaaggggtgacttacaaagttcagctgttgtgagaaccctcacgtaccagtgtctacctgtccttgaaaacggtgtgactattgagtggggggcttgggaaatgggcaggtccctgggagatgggggaatcactg

SEQ ID NO: 38690 - DNA, 1270 bp, Artificial sequence
  DNA replication origin
caaaatggagtctcctatgtctacttctttctacacagacacagcaacaatctgatttctctatcttttccccacatttcccccttttctattcaacaaaaccgccatcgtcatcatggtctgttctcaatgagctgttgtgtacacctcccagacggggtggcggccgggcagaagggctcctcacttcccagaaggggtggccgggcagaggcgccccccacctcctggacggggcggctggccgggcgggggctgccccctactccctcccggacggggcggctggccgggcgggggctgacccccccacctccctccctgacgggtcggctggccgggcgggggctgacccccacctccctcccggacggggcggctgctgggcggagacgctcctcacttcccagtcggggcagctgccgggcggaggggctcctcacttctcagacggggcggctgccgcgcggaggggctcctcacttctcagacggggcggctgccgcgcggaggggctcctcacttctcagacggggcggccgggcagagacgctcctcacctcccagacggggtcgcggccgggcagaggcgctcctcacatcccagagggggcagcggggcagaggcactccccacatctcagacgatgggtggccgggcagagacgctgctcacttcctagacgggatggcggccgggaagaggcgctcctcagttcccagactgggcagccgggcagaggggctcctcacatcccagacgatgggcggccaggcagagatgctcctcacttcccagacggggtggcggccgggcagaggctgcaatctcggcactttgggaggccaaggcaggcggctgggaggtggaggttgtagcgagcggaggtcacgccactgcactccagcctggcaacattgagcactgagtgaacgagactccatctgcaatcccggcacctcaggaggccgaggctggcagatcactcccggttaggagctggagaccagcccggccaacacagcgaaacccagtctccaccaaaaaaatacgaaaaccagtcaggcgtggcggcgcgcgcctgcaatcgcaggcactcggcaggttgaggcaggagaatcaggcagggaggttgcagtgagcagagatggcggcagcacagtccagctttggctgggcatcagagggagaccgtggaaagagagggagagggagacagtggaaagagagggagacggagactgtggggagagggagaaggagagaggg

SEQ ID NO: 38691 - DNA, 1052 bp, Artificial sequence
  DNA replication origin
cattttggccaggctggtctcaaactgctgacctcaagtgatccacccgcctcagcctcccaaagtgctgcgattacaggcgtgagccaccgcacctggccaatttttgtattattagtagagacagggttttgccatgtttgccagactggtctcaaacttctgacctcaggtgatccacccaccttgacctccaaaccccattttctatcccctcctgaagtgccctaaagaaggaagcttgaatgcccctggggataagaggcttattaccagagggacactcccagatcctcccagcacacctgtagacacctcctgcacaccctcggcggcccggtgacagccatccacaagctggcgggtccaggcagccagctcctgcggtgactccacgctgaacaggtgagtgtccacaccgtgacgcgtgcccgtgcgcagggcaaaagagagctctgcatcgtagggcactgagcccttggaggggcctgagtgcaccagtctgggggttgggggcagagggctgagcatgaggcctcaggccggaggcaaatagttctgggcaaaggggccagtgacctgggaagaaaccctgtaaatcctttaccacctaacaggacaggacttgccagggggcactgattgactcagcaggagacatctcctgccaccctccccgtcactcccttggctctggctatactggtgtcatcacacacacctagcacatgcctgcctcagcacctttgcatatgctcttccctctgcctatacatgcttccctgattatctgcacggctcactccctcacttccttcagatgttagtttaaatgtcacctcctctgagaagccttccctgacctcccagtccaaaatagcacccttgtcactcactagccttactttttaatcatggtaccagaaattatactttttattatttgttttcgttggtttttgactgtctttttcactagaatgtcaactaggttagaaattttgatcttgtgttcaccactgtattcccagtaactaaaaccatgcctgccc

SEQ ID NO: 38692 - DNA, 1348 bp, Artificial sequence
  DNA replication origin
aggccctgagccggccagcccgtactgccccactcatcgccaccaggtacccacaggcaggggcagtatgtctcccccagaacttgccaggagatgctccagcagggccccagaagctgggaactccagccctgtccaccctcagctattccccaggtgacctgaagcaagtctctgccctgtctgggcctcagtttcctcatctgtaaaatgggtgcttggaacaaaaggatataaggtccccattagccactcattcgctgacacttatgccttgtgctgcatggttcagagggcacagagctgaccccaacagtttctgcctccagagagaaccttgtctggctggggagacagacccaggaacagccattacagtgcagggtttgtaggagccacttaactctgttggggtagtagaggaaggcttcagggaggaggtgacatttgagctggactttgatggatgagtagaagttttctgtttaagaaagggtgaaagagcatcccatgcagagagaacatcatggtcaaaagtacagaggcatgaagggctatagcatgttcatggagctatgagtttgtgataaccagaattcatgcaggaaatggagagaagggagttggcagggcctgatcttgaagagcttctattgcctgattaaggaatgttagctttagcttaagagtttggtagtgttgaagggtttaagctggggagcgaggtgctctggttgctttaagagaatccctgtggctgccacgtggagaatgcagcggagagtgcaggatggaagtggggaggtgctgcagtcatgcaggagagatgatggtggctgggggaggtggaggtgggtggcaggagcagatggggaagaaaggcagcattggcattggaaaccacatgggtgtaaaattaacagggctccgtgcttgccagatggggcgggtgaaggaggggtccggaatgaacaggaggtttggagcttgtgtctgggtgagcgtgggactgggggtgggggtggaaagggaggaggctggagcaagatgctgagttaagtccagagtgtgtgtgggatggagagggagcttggataggaagcctggggactcgagggtctgcagctcagggctggaaagtcgaaggcgggtgtcagcagcagtctgtggcggggggaactgagctataggagaaagagtgggtggagggaggaacaaagagggatatggggcagaactttctgccccagagaggggcagttggcttaccaaggccacacagcaagtgagagtcaagctgcaggggtctgaagtccttgtcccccatgtctccttacctcaggctggc

SEQ ID NO: 38693 - DNA, 1851 bp, Artificial sequence
  DNA replication origin
gccacaccccagggtagccccgcccccagagctcctcccccagcggccggggtagggtggcggctggcccagccgggcccccgctgccctctgccctgggcgcttggtcggagcgggctgggcaaagcgggacagggcgagcgcggcggcccgggggctcggaggcgaagatggcgtccggcaggcgcgccccgcgcaccgggctgctggagctgcgcgccggggcgggctcgggggccggcggcgagcgatggcagcgggtgctgctgagtctggcggaggacgtgctgaccgtgagccccgccgacggcgaccctggtcccgagcccggcgctccgcgggagcaggagcccgcgcagctcaacggcgccgcggagccgggcgccgggcccccgcagctgccagaggcgctactgctccagcggcgccgcgtgacggtgcgcaaggccgacgccggtgggctgggcatcagcatcaaaggtgggcgcgggacaccgagggcgcggggtcgtggtgtctgggggcagccgagggcgcagggggctggcagcgcgcccaggacatggagctggaggcttcctgtctgggggtaaggggggtctgaggaaacaggtaacggagggcactgggcacaccaaggttggagggggtttcagtagttggtggccttagggggcacggaagacacaggtgtggataagattgtgggagcaccaaggacacgtgggtgggagttctgtgtggaggcgggggggtctgaggggtaaccagcatgaacatcaaggacaagaggggtcccccggaaagcagagtgtggagaaagggggttgaggccgggacaccagtgggacagggaggagggagtccctgagaagcaaccaaggtgggtgcagaggggaagcctggagtctgggaagcacaggggtggataggaggcctgggtgcaggcacaggctggggtcacaggcagaaggccagcaaggacctaggaatctaaggacccaggaaggctgcagggagccctgacagctggatttgggtctcctgatctgactatctccaccttgcacaggatagagctttcagcccccaggactgaccgctagtggggtgcagttagggtgcaaccagactgtgtttgaatccaggatcagctgtgtgaggttgcaaaagtcccgtcccgcctctgaatctgtttcctcaactgtataagaggatgacagagttgtgatgtttctgagagcagggctcaccacaccagcacactgtaggtgcctagttaattactgctgttagcggagaggaaaaatggaggccagcagatactcccaaagcaactaaacatagttgttaaaatccttgcacacccccagctgctgggttcactattcctgcccatctgtttctcagggtcccagcccccagcaggtgctttgggaaagggtatcagcctttgtctccaccttgaatacataccgtaccctctggggtctccctggtactggttctgttgactagtgcctccagaccgtttggcttggctgaggcggtggggatggtggtgaatgccaccactgtgtgccaggtgctgtgcccaggacactagtctcatgatccacttcatcctggcaacaagtggtgaaaggtagggagtataattcccatattgcaggtgaagaaactgagactcagaaagttaaaatgattttcccacgattacatagtgagtgtcagtgctgggatttgaaccttaattatcagctactgtccctcagagagtgctcagggaagttgattctttcctgtagaagggcagatccccaggcagccaaccaagaggggctaaaaagg

SEQ ID NO: 38694 - DNA, 832 bp, Artificial sequence
  DNA replication origin
cggggctcacggtcagcacgtcctccgccagactcagcagcacccgctgccatcgctcgccgccggcccccgagcccgccccggcgcgcagctccagcagcccggtgcgcggggcgcgcctgccggacgccatcttcgcctccgagcccccgggccgccgcgctcgccctgtcccgctttgcccagcccgctccgaccaagcgcccagggcagagggcagcgggggcccggctgggccagccgccaccctaccccggccgctgggggaggagctctgggggcggggctaccctggggtgtggccagtgctggggagggggcctcgggcaaatgcaggaggccggggcggggcccgggagccgagggccgccgtgtgggactacctagcggggtgggtcagaagggcggcggggcgggccactaagtaaggcgaaagcccgggaggcgtggtgctgggcggggcgtcagggggcggggcttcgcgtcgggggcggaacccagtgagcccgcgcagggggctcggcgctcggaatgcccatcgagggccgggactgtaactcccggacgtgggagcgcatgaaaaagagacagaaccacgtatcctggtgcgaagcactgggcatcgggctgggctgcatatggcggagggctgggctgcgtatggtagagcgttggactccaaggcttgagtttaagaggtagacaccgtctgggcgtggaggctcacgcctgtaatcccaacactttgggaggcctagatgacagcccagaagctcgaggctgcagtaagccgcgatcgcgccactgcactccagcctgggtgacagagcga

SEQ ID NO: 38695 - DNA, 1040 bp, Artificial sequence
  DNA replication origin
cgcgtcgggggcggaacccagtgagcccgcgcagggggctcggcgctcggaatgcccatcgagggccgggactgtaactcccggacgtgggagcgcatgaaaaagagacagaaccacgtatcctggtgcgaagcactgggcatcgggctgggctgcatatggcggagggctgggctgcgtatggtagagcgttggactccaaggcttgagtttaagaggtagacaccgtctgggcgtggaggctcacgcctgtaatcccaacactttgggaggcctagatgacagcccagaagctcgaggctgcagtaagccgcgatcgcgccactgcactccagcctgggtgacagagcgaaaccctgtgtcaaaaaaaaaaaaaaaaaaaaaaggtagatgctgagccgcgagagaccttgcgggcacagttgctagttggggagctgaggaagaagttggtttcctatcggggagggcgggggatggggggtgggggtcgaggctttggtctgtgggcgtggcttatcgctggcgtggcttctaaagatgacaggccccgccccctggaggagaccgctaccgacaccgcttagggcttgggggaggtgtgggcaggatccccacttcaaaactggagggaagtttaagagattaacccctggctgtgttcacagtcgagtatagaaaagcctgaagtcccacactttgaggcctggcagaaaaaaaacagaactggtgtgtgggaagagggttgcaaggtggggctctgggtctgggcgactggagacatggtttctaatctttgctgcctctgttagctccaagtcgactttggtcccctcacgtcactgctctaggcctcaatttcctcatctgtaaaatgtggatcataataatacctacttcactgggctggtgtgaggattaaatcaatgtgaaaacacgtggtaaactgtgactccctattctatagaaataatcactttcatttagtgaatgcttactcttacctagggctggcagaatattttccaagtgttatcttt

SEQ ID NO: 38696 - DNA, 898 bp, Artificial sequence
  DNA replication origin
gagaccctccgcctggcaaccgccccgtctgagaagtgaggagcccctccgcccggcagccgccccgtctgagaagtgaggagcccctacgcccggcagccaccccgtctgggaagtgaggagtgtctccacccagcagccaccccgtccgggagggaggtgggggtcagcccccgccaggccagccgccccgtccgggagggaggtgggggggtcagccccccgcccggccagccaccctgtccgggaggtgaggggcgcctctgcccggccgcccctactgggaagtgaggagcccctctgcccggccagccgccccgtctgggagggaggtggggggggtcagccccccgcccggccagccgccccgtctgggagatgaggggcgcctctgcccggccgcccctactgggatgtgaggagcccctctgcccggccaccaccccgtctgggaggtgtacccaacagctcattgagaatgggccgggatgacaatggcggttttgtggaatagaaaggggggaaaggtggggaaaagattgggaaatcggatggttgccgtgtctgtgtagaaagaagtagacatgtgagacttttcattttgttctgtaccaagaaaaattcttctgccttgggatcctgttgatcggtgaccttacccccaaccctgtgctctctgaaacatgtgctgtgtccactcaggcttaaatggattaagggcggtgcaagatgtgcttcgttaaacagatgcttgaaggcagcatgctcgttaagaatcatcaccactccctaatctcaagtacccagggacacaaacactgcggaaggccgcagggtcctctgcctaggaaaaccagagacctttgttcacttgtttatctgctgaccttccctccac

SEQ ID NO: 38697 - DNA, 1477 bp, Artificial sequence
  DNA replication origin
ccgatttcccaatcttttccccacctttcccccctttctattccacaaaaccgccattgtcatcccggcccattctcaatgagctgttgggtacacctcccagacggggtggtggccgggcagaggggctcctcacatcccagtaggggcggccgggcagaggcgcccctcatctcccagacggggcggctggccgggcggggggctgaccccccccacctccctcccagacggggcggctggccgggcagaggggctcctcacttcccagtaggggcggccgggcagaggcgcccctcacctcccggacagggtggctggccgggcggggggctgacccccccacctccctcccggacggggcggctggcctggcgggggctgacccccacctccctcccggacggggtggctgctgggtggagacactcctcacttcccagacggggtggctgccgggcgtaggggctcctcacttctcagacggggcggctgccgggcggaggggctcctcacttctcagacggggcggttgccaggcggagggtctcctcacttctcagatggggcggccgggcagagacgctcctcacctcccagacggggtcgcagccgggtgctctcacatcccagacggggcggcggggcagaggcgctccccacatctcaggcgatgggcggccgggcagagacgctccttacttcctagatgggatggcggccgggaagaggcgctcctcacttcctagatgggatggcggctgggcagagacgctcctcacttcctagacgggatggcggccgggaagaggcgctcctcacttcctagatgggatggcggccgggcagagacgctcctcacttcctagacgggatggcggccgggaagaggcgctcctcactttccagactgggcagccaggcagaggggctcctcacgtcccagacgatgggcggccaggcagagatgctcctcacttcctagacggggtggtggccgggcagaggctgcaatctcggcactttgggaggccaaggcaggcggctgggaggtggaggttgtagcgagccgagatcacgccactgcattcagcctgggcaccattgagcactgagtgaaccagactccgtctgcaatcccggcacctcgcgaggccgaggctggcggatcactcgcggttaggagctggagaccagcccggccaacacagcgaaaccccgtctccaccaaaaaagtaagaaaaccagtcaggcgtggcagcgcgcgcctgcaatcgcaggcactcggcaggctgaggcagtagaatcaggcagggaggttgcagtgagccgagatggcagcagtacagtccagcttcggctgggcatcagagggagaccgtggaaagagaggaagagggagaccgtgggccgtggtgagagtgagagggagagggagagctctttttagcttttatagcttttgttgtgtctaagg

SEQ ID NO: 38698 - DNA, 1067 bp, Artificial sequence
  DNA replication origin
gagccctgaggagtgtcagccggtcatccacctggtcccccggctcttctgacacaggtgcgcctggggtggggtgggaggcctggccgaggcaggcaccgcatccccccttcccccagggcccgctccttcactgcccctcacttcattctgagcacctgcgggacctgagaggcccctgcctgaccctgcacgggccccacacacagggcgcagctcagaggccgagatgcagtggcggctccaggtgaaccgcctccaggagctcatcgaccagctcgagtgcaaggtgagggccgtggggccagggccccacaagggaggaccctcctggtatccaccagagccaggcccatgctggaggcccggcccacactctgtgccctcacaggccccccggctggaacccctgcgtgaagaggacctggccaaggggcctgacttggtgagcccaggagaggggcaagcggctggatggccgtgtctgggggtgctcatgaattggggattcatggggccggttgcccaccaaccctctgcagtgcgcatgtgccccgcccccaggcctggcaagcaggtgccgggttctgagaacctgcaggaaccaccacctttctctgggctttggttccccatcagcatttccgaaagccaggtctggggcagtgtggacggaagctggagggtggaaggaagtggtggcatactgcaggaggaggaacagtggctggatcaagcagcacccttggagacagggagaagaggatggagacagggaggctggggggcaggttggcggcaggaacccagctaaagggtaggttggatctggcatcagtcaagaaggctaggggccaggtgtgatggctcatgcctgtaattccagcaccttgggaggccaaggtgggaggattacttgagcctgggagatagaagctgcagtaagccgtgatcccacacaccactgcactccagcctgggtgagagcaagaccctgtcttaaaaaacaaacaaacagaaaaacagctgagaacctcctggaggccacagccagtccctcccctgtg

SEQ ID NO: 38699 - DNA, 1292 bp, Artificial sequence
  DNA replication origin
gattacctgggctaaggtcacatagcaagttagtagcagggccaaaattcatacccaaaccacagaaatccccctctattcaccactaagcaccttacatgcattgcctcatttatgatcattagcccagttttacagctgagaaaccaaggctagaagtgactgagtggagcccagattcacctgtgggccctggaaggcggtgctcagagcctgcaattggtgaggtcagcccgtgaggtcacaatgttgccagggcccagggggcagagcagacggagtgtgggccatcgtccccagtggtgaccagccctgccatgggaaactatagttcccacaaaaggaccaaagcacccaagcaggcccgcaaggagaggccggctgacatggacaaggcctggtggaaatcgttcctcaaccacctcactcggaagaagccggctgtgagggcgggggatggggagcagggctggggaggcagctggggggcagagaaagctggacaagtgggtgggaagggatgctgggagtctaggccttgtatgcagaagtcctagggggtgagggaggaattcgaaaatctctcccaaggatgaggatcccaggagcccatatgggtgtggatgggggtcctttcaaggtggctcacgcctgtaatcccaacacgttggtaggccaaggtgggtggataacttcagcccaggagtttgagattggcctgggcaacatagggaggccccatctctacaaaaattaaaacttagctggttgtggtggtgaatgcccgcagtcccagctactcagaagactgaggtggactacgtgagcccaggaggtcagggatgcagtgagccgttgacagcaccactgctccagcctgtaggacacagcaagaccctgtttgactcagtcttaaacaaaaaaagcccagaagggagggcagagattccagaaccagaaagtggatgagacttgagagccccggggggtgagcatgagtgggattctctcccaaccctggacgaacgggtggagatcccaacacggagaatcagttctagttggtactactggagctagaggcagggggaattccctagtgtcctctcttcagctcctaggctcagaacttccctgtctccctctcaaatgagcagaagccctggaccaggcgggggtgggaggtgctgaaagcccctgacatagggcctggaagggatctcataaacttagacggagctggtctcaggaagtcagcctgggatggatgagggtttccagaaaggaggcgg

SEQ ID NO: 38700 - DNA, 1287 bp, Artificial sequence
  DNA replication origin
ctctgcaaagcctcatcctcctgaggaccagtttggttgcaggtagaagactcaggtgaatgtaacccaaaataaggactttattgaaaggatcttacatgttatggatatcaagagcaagggtgaaatcaggtttcaggaacagaatctgactgcggggctgtggggaacccaggatgtgcactgcattgtgttgtttgttttttgagatggagtctcgctctcttgcccaggctggagtgcagtggtgtgatctcagctcactgcaacctctgcctcctgggttcaattcccctgccttagtctcccgagtagctgggactacaggcgcccgccatgatgcctggctagttttttgtatttttagtagagacggggtttcaccgtgttagccaggatggtctcgatctcctgacctcgtgatctgcctgcctcagcctcccaaagtgctgggtttacaggcgtgatccactgcgcttggcctgcattgtgtttttattctgaaggctggcttagcctgtgcatgttcaagtagagaacatggtctcttacagctcctgaatcacagtcctagggggaggggctgacaggaccagcttgggccaatcactgtatgggcaggaggtgcagccccatggaagaacatggttaccctgattgtaaccatgtggatggtagggaagagtcagttctcacaattagcaggagtgatgttatagctcttgcagcctccagcctggtgcaggcaaggtggaggagatgttcatcctggtggcggtgacaaaagtgcatcttcagcagaagctgggctgatggctgtagtgagctgggacttcagtcctgctgcatctgcccccaaaagagggcatcctgaggttggtcaccagagtgtggcaggaaggcgggctgcaggtttggcaggccaggggtggcattgggtgtggagctggatttgggacccgggagagtgaggagaagcagcagcaggatcccgcccacagaaagtgtggcagggcttcttctaagtgatttggggagtgagactgaagctgtgggctttttccctgttggtaatggagacctgttgaaagcttatgagcaggggagtgagctgccctagacaggtaagtggtttggaattagtctttgtcacgtggggaaggagatgggacagggtaggttgggagacaggtgccttggggaagactggggggcctgaatgctttggggttaccaagcacaatgtgtaggagtgaggggccagagagaggcccagggcttccagct

SEQ ID NO: 38701 - DNA, 1269 bp, Artificial sequence
  DNA replication origin
aaaccgaacccagagaaagatcaagacttgcttaggactgcacagtgagtcagcttcagaactgagtcttgctgggtgcggtggctcacacctgtaatcctagcactttgggagtccaaggcaggtggatcacctgaggtcaggagttcgagaccagcctggccaacgtggcgaaaccctgtctccactaaaaatacaaaaattagccgcgtatggtggtgcatgcctgtagtcccagctactcaggaggctgaggcaggagaatcacttgaactcggaaggcagaggttgcactgagctgagattgcaacgctgcacgcccagcctgggtgaccgagactccgtctcaaaaataataataataaaaaaaagaactgagtctcaaactgaggcccacgtgaatccatccgtggaagcccataaaggtagggccagagcctctcgggggctcttcagggaagctgcagatctgtgatgaaaaagctttttcttcagcactgggaggggtagggggccacacatctggacagagtacatcagataattctaagtggtttgggaaaggaatcagactgtgctgggctgctgaagccagacccctggatgccaaaatcactgcccttggctctgtccagaagagaggatgggtccagggagttgtcataaggtagggagctgcgaagtgcagctgctggggagtgaggtcacaatgagcccaatccaagttcttttctgccttctgaccagcccctcccctctccacaaccaggaacttccgtcaagcccaggtgagaggtgccaggaggctgcctgggtcctcaagggggatatatgtccaaatggccttaccacaaggccccttcgccctcaaagttctgctcctcccgggggcttcttaggatctaaaaggatcagtcctagccatctcgtcagccatctcagcaagggctgacggggcggaacagcaaagcagaggcgggtcctgagagcgtggagcctgaagcccggcgccagagggagaccaagagggtgagatgcggctggaacccagccagagcggagactgaagcctgaactaggggccgggcctcaggcctaggaactagccacgagctgaaaaggaggcggatggcccggacagaagaggcggggctttcagaccagagggcggagccaagagctgaaaagggtggtgatttggtccagaagaggaagaacttaggctccggaggcagagccaaaggctgaaggggactactccctaggaca

SEQ ID NO: 38702 - DNA, 1314 bp, Artificial sequence
  DNA replication origin
gactgaacgtggcaggcagcaccctgtcgcgctacctgcgggatctgctggtggcggcgaaccctgacctcttgcagcaggccctgccccgcaaggccatcacacatctcaagaagcgcagctgctacgtgtccctggacttcgagggcgacctccgcgaccccgcccgccaccatccggccagtttcagcgtgggtaacgggtgctgcgtctgcctcagcagtgagcgcttccgctgccccgaacccatcttccagccgggcctgctgggccaggctgagcaggggctgcccgcgctggccttccgggcgctgcagaagatgcccaaaacgctgcggacacgcctggcagacaccgtggtgctagccggcggctccacactgtttcctggcttcgccgagcgcctggacaaggagctggaggcgcagtgccggcggcacggctacgcggccctgcggccccacctggtggccaagcatgggcgtggcatggctgtgtggaccggcggctccatggtggcctccctgcactccttccagcgccgctggataactcgggccatgtaccaggagtgtggctccaggctgctgtacgatgtgttcaactgagtcaggctggactggggggggtggcactgcgttgggggacagctctctatctaaagagtcaagtgtttggagctggcagggtcctcctggaggttggagctgactggatgggtcacccccataccctttctgggccaggagaaggtatttgggacccatgggaccctcattttgaactgcagtttgaatctccccaaccactgccagttcagagaatgccagtccagctgcctacccacagggccctactttatggcaataaaggtgatgccccacttgtgtccatgccacagatatgggagttcctccaaaccctcgtcatgtaccatttggacatacatccgatgccaggccccaaggggcgatcccttgaaaagctactaaatctcatgtgaaagtcaccaggaggaggagccctgtgcctagccatgtgctcaggtcattgttgactatgagtgcctcagtttccccttctgtaaaaagtggggtcaggcacaatcccgggcctgctcactgctccctcccccttacaagagctatggagcaaagggaggtggagatatttcttgaacacacaaagggaagggcagcttattttttggaagtcaccactcaagggcctcaagccctggctatcagcactgttcgagcttgtgtatacacgtgtccacacaaacgcgtgggtgttcacgtacctgcctactca

SEQ ID NO: 38703 - DNA, 1239 bp, Artificial sequence
  DNA replication origin
cccatctacccaccctgggattctggccccctggaattcctcagcagccaagcaggccttatatcctgagcccagcccaacctgtcccatcaggagaccagcaacagtcccttgccacacgtaccctggggcccaggggccacaggagaaaagagctcccatgggcctactcaccacacagtttttctgtttctaaattgctgcagggaaaagagaaggcgcccttcagacctgggcctggtaaactgggactaatggggccaatgccccacatcccaccccaccaactcccagcttagcctaacaaggccacttctgctccaccccagattaagttgctcctgtggacagagtccttgcagggttggagaatgggttctactgcccccaccaatcactctaagggcaaagattcagacccattcttggctaccaagaggatctcaggccaggggaagatggatgtggacacaggccagtgagaagtggtcagagctgcgaaggggaagccaggtgcaaggcaatgaagtccagggacggcatggggtatttagttgtaggttagggagggtttcctagaggaagagctgcctaagtgaggccctgaaggacaaggaactgggtggggagtctggccaggaggggaggggaagcactgcagatgaaggttccagcccaagtctcaggagcctgagactgaccctcaggaaaggggagaagggaagtagagggagtaacagcggttcatgcgtgtgcacccctgggagcaggcacgggaaggagcgtgcacactcctgccaagacgcgtagatgtgggagcacacaaggggtagatggttgcgtgtttatgcactgcattctcgggtggaagcaggcggggcccagctgtccccaggcatcctctggtccctgtgggaagcgggaatggggagctgagccatgggtggtgactcagacttggctattttggggtcccagctggaagcagtgtagtgggcaaggctgtagctggagagggggtaggcaggcgggtaaagttggaactgagccctggtacctttctccctgccccctcttcctcatcctacaaaaggaaccaaggcagcaggggacacagtggggtaaagacaacctggcctcgcatctacccacggccccctctcatactcactcggtgagatgcccatcaatgccgctgaacagttcctgcagctcccccaggctgagaaccccatcggc

SEQ ID NO: 38704 - DNA, 2932 bp, Artificial sequence
  DNA replication origin
agcagaggctgggagtacttatgtgggacaaagacatgggatttggcctgaatgatgtgtgaggtctctgagcagatgggtgcggggagctgacccgggggaggatctgaacctccccagacagaactccctggtccaagtgagagcatgtgtcctgatcaatgggttgggacaaacaatccccatcaatttgaagagacccaaggagaaggggcaaagagtggggacaggaccccgtctctaggaggatgaaacacaagagggcgtgaagacccagatgaaaggagccccaggctgactgcgaagctcagaccctccacgggccacacagggcacagtgggctgctccaagtcatctagggggagcagcctgttgctggatgggtcccctagggctcctgctttagcttccaagtttctcccagaccagggtctgagactgcccaggacccaaggcaggaggagccgactcctttggcactggacccagctttatccttgcccaaggcgtgggtttagttgtgtcctccaagacctccctggtccagatggttggtcacatgacaagttactgagccctctaaaaacctgagtaaaatctccaaaaaggcctcatctccattacctcactcttccaagtgcctcacacaaggagcctgggattaaatgctgcaaagacccaagttcgagcctatcaattaaaggctgtgtgaccttaggcaacttgcttcacctctctggccctctgctcctttatgaaatagggtgaattccaatctagctggtggttgtgaggacaacagagggccacgtacaggaagtgcccatcaccatgccagggtgctgtgtgaaagtcagcccctatctccagtccgtggccaaaccacattctctccactctccatcctgccaaacttggctgagaacagcacttcctctgggaagtgccttgattgattctcctgttttgggcccccaagatttgtctcaactcttgacttcccacccaacctcccaactctccctgggcctcctggatgcctcccaccctgccccactgtgggacccaggggaagccacactcaccattcttgtctgctctgcggaaaacctagaggacaaagggacatagagagaactgtgagtgccacctgggaagccagaggcccccactcaacccgacagggtcccagctggccgacctaccccctgcctcgcctttcctcccgcccagcctggtcccaaaccacctgcccagctcagccctgcaggagcttttcctgcaagcggggcacaggaagagcacgcagcgggtgccacctctgctcacttctcctgcagggcctggcctcgtggggggtgctcctggccagtcccctgcgtccccacctcccacacccagagtgcagcccaagttctatctgatacatcagcccctggcacagttccagcttgaggaaggttgaggagatgggccaggttgtggcccaggaatcttgcacagccgtcctagacctgagccccgagctctgctgtgtggccatggtctaccccagctgccctctctgagctgtttccttgcgtgctgttgaaaaccaacagcaggcagtggctactctgtctctgcaggcgcctgagttacccactagcaaatagatcaggagcagctggggttaactctttcagggctggggcttcctatggggctgactctgaggaccttcggcaggcgtgtgtgtacacacacacgtccaagggggagtgggggtggcagaaggcaagttcggcagatttcatttatggagaagtggagatgaagagcaacagaggcagagaggagcagagtcaagacaggtccccgtctctcttagtgacctgctcccaggtcacccaaagcagcccagcaaaggggagactggcaggcctggcaagcaggggtgggccaagcctgggccgagagcccccatgaactccaggtcctgaacgccagccccctccagggtcctgttttgtcagggtcagtggggctcaggaaagactctaacctctagcctaactcagagaaggtctgccactggctgaggggcacgcagcaagccagggaggcccaggtagggtagatggagatcttgggagtgggcaggggtgctaagctgggaatggggacatctggggtcaccctattgtatccctgcctccatgactgacctgagacatatcccctcaggccttggttttcctacttgggaagaaggagggtcaggtcccttccagccagggctgtggtcaaggtgctgagtcactaggggcagtggggagggggtgggagacagctttgcctccctctggagttggggcatgagggggccaggacagagccgagcacagcggtgaacggtggagaaagggctcagggccgtggctggtgcccatggtggccgcagggccacccatggccccatgggagggtgactctgagcagcccttaccaactgtaggactctgctgccctggagtggggcctgaagaactctgggggcggcactagagtcaggagtgaggggcccttgcgtttccaggctccccttccccagtcagcccagcctggagctgccacagagtggggtgaccgctgctgtgattgtcgccagccccccgccaacaccagacacacaaatggggtgggctgaggggtgggaggcagcaggggcagtgacactggagcagggacaagaggagacatggagagacagaacaggtcacacaagggcagaaaggtcaagagaaaacagcagggccagagagaggggaagagacccagaaacagcggcggggcccgaacaaccccggagggtgagactaacagagactcgggtagggagacaccgcgagcagagcccgcgcccactcacgtcctggaagagcgtgtgtc

SEQ ID NO: 38705 - DNA, 1223 bp, Artificial sequence
  DNA replication origin
ccagaccctgtggtccctcctgcagtgtctgaagcgcctgcctccccactgctctgccccaccctccaatctgcactttgatttgcttcctaacagctctgttccctcctgctttggttttaataaatattttgatgacgtttgggccgggttttgggactctgttgggaacatttcggggcgggagaggccaaggttgctggggaaatgcccattctccacttcccttctccctgtccgtgcccgatttgatttgagcctcataactcgaagaaaggtcagcttcctcgctgttttggtcctaactcaaaagcagatccagtaaaggtttttgttgtagaaagccaagaatgctattcagtgctgcccgaagtgcagagtaatgagtggcctctcctttccccagccccagaggccactctgctcagtttgctgtcttccttccagacgtttctggacattagtaaacatgtaacaaatacagtgggctggttctgtgtcaggtatttaacagttctggggacacgggtgttacctcctttcatggtgctctcagggtctgaaagaggagatctgcataaatgagaaaatcgggaaaggcgttctggaatgggtggtgcttaagctgagcgctgtaaaataagtaggagttaaccagaggaagaaaacaccaagcagaggacacgatgggcaaaggccttgggcaggagggagcgggatagaggaccggagagaaagcagtgtggctgcggtcctgaggtgagggtcagagtggtgctcctggagtggggcgttcagtcttaagctttattcaggggccaaggagtcactggagaccgaagtgacacctcctctttcgcatcttaaaagctccccccggctgctgtgtggagaacgggttgaagggagggccagagtcacggaggggaggggaaagggctgcgcttagtgccagagagggcgggcgtcgggatgcctgggattcggccgcacggacctgtgggcttcctctgcgccagcccccgttgtaagcacttgacattgaatgagtcccaacaattgcatagggtgtctgccagtaccatttttgtagatgaggatacagacgccccaaaaggtgaagtcctggtgggttttacccacttgtgtcaccctgacctcggcactggcttggtcatcctgtccctctgggtaggcccgcagcccctaggttctgctcccga

SEQ ID NO: 38706 - DNA, 772 bp, Artificial sequence
  DNA replication origin
tgatgggtaggtgggtggggtggggcagggcccctcttctggggggtgggcaggcacgacagcccctgccttcctccctgctggggcatccccggcctgtgatgctccccgtctccccagaaccgctgttgtcccggatgggcagcctgcgggctcccgtggacgaggaccgcctgtccccgctggtggcggccgactcgctcctggagcatgtgcgggaggacttctccggcctcctccctgaggagttcatcagcctttccccaccccacgaggccctcgactaccacttcggcctcgaggagggcgagggcatcagagacctcttcgactgtgactttggggacctcacccccctggatttctgacagggcttggagggaccagggtttccagagatgctcaccttgtctctgcagccctggagccccctgtccctggccgtcctcccagcctgtttggaaacatttaatttatacccctctcctctgtctccagaagcttctagctctggggtctggctaccgctaggaggctgagcaagccaggaagggaaggagtctgtgtggtgtgtatgtgcatgcagcctacacccacacgtgtgtaccgggggtgaatgtgtgtgagcatgtgtgtgtgcatgtaccggggaatgaaggtgaacatacacctctgtgtgtgcactgcagacacgccccagtgtgtccacatgtgtgtgcatgagtccatgtgtgcgcgtgggggggctctaactgcactttcggcccttttg

SEQ ID NO: 38707 - DNA, 874 bp, Artificial sequence
  DNA replication origin
agtcctgggtccacctctcactgtgtggcctctctcaggtggaggccatcatagcacctgccaaaaggtggccggagggttgcaggggaagcagttgagtacacagtgcttagagcacaacagctcttctttcccctgggtgccttcaaaagtcagtgaatgtgcacaagagggagtggttcatcagcatggggggggttcattcagcaaacatttgttgatgccaggctccatggcagacactatagattctcaagtgattcagacacctctgagggtgagatagatacatctgcagaaatgtgtagggagagacagaatgtggcaaaaggttgggtttgaggcagttcagagggagaagaggtgacacctcctagctgatgcgtaaggtttctgcccacagaggtagagggagcaggcgtgaagtggggagggtgggagggatgcaagggcagtctagatttctgggaaaacgtgactcgggttcctctagagaagcagtggcagatgagagtacaaaggcaatggggagctggaggaaggccttaagcaggggcggcggcatggtaaggtttgtaggaggactggctgcagcagaggcagggagaccagtgtggagtctgctcagcagcccactgggaaggtggtgatcgccgtggtgatgagcagttcttggtagctgcatgtgaggagggtgacaggtcaggaactctagctcaggaaaccctgtggatggtggaggggaagatcagtctggttttggtccgggtacttttgagcagcctgtgagacctccaggacagtcccaatcctggagtgtctgaactaagccagagtgcttagagcttgggttcttcctcagaccgtcttgggt

SEQ ID NO: 38708 - DNA, 1077 bp, Artificial sequence
  DNA replication origin
tgggcgacttcaagccagctaaaactcacaaccccgctgtgagctgtgttgtcactgtgcccatctgacggaggaggaactgaggcccagagagggaaagtgacttgcccctggtcacacggctgcaggtggtggggctgggatttgaactgaggcctgctggcttcagctcagaatttgcatctcggtagtgagcacagctgctaggggaagtgaaggcggggcggaggaaagtcctggggcctaaccgttggtgagccattgaggagaccctccttcctgcctcgatgctgactgccaggtgcaggcctggccggccaggcctctggggacagccctcctggctgggaggccttctctgcaggggcggggcagctggaccagctgctgatcccctccctctgcctgtccttccatctgccaccctccaccctcccaggccctggttgccatggaacctcattaatcaggcaggccgacccctgagtctctgtagaaggactaggtgggctgggcctctgggagctggagaggaggcccccagtgccaggagagaaaatgtctcagggagatcctttaataaagccctccctgatcgctgagctcaagacgaattcagactggagggcccagaagaggcggctgaattccagtgggagaagggattggaggcgtagaagcctggagctgggaactgtggggcacagggcagggtgtggagaccagtttgactggcgcagcctatgggtgaaggtggggctctggtgtgcaggcggggtctggccaggcaggatggggtctcagcagggaacttggagcaagtgggaggggtgaggcaggactcaggacaaggaggtagaagctgcctaactgctgatgggggtgtgggtggcagctggtccctgaggcatcctgaggaggctcccccaacccccttggccccatgcccagtgctgccttccggaatcaccacaatgctaataataataacaatagcagccaccattgttttgaggatgtcttgtgtgccaggctctgtgccaagcgctttacttaattaactcatttaaccccatc

SEQ ID NO: 38709 - DNA, 1080 bp, Artificial sequence
  DNA replication origin
gaggcctgccgccatgggcccgcgccgccgccgccgcctgtcacccgggccgcgcgggccgtgagcgtcatggccttggccggggcccctgcgggcggcccatgcgcgccggcgctggaggccctgctcggggccggcgcgctgcggctgctcgactcctcgcagatcgtcatcatctccgccgcgcaggacgccagcgccccgccggctcccaccggccccgcggcgcccgccgccggcccctgcgaccctgacctgctgctcttcgccacaccgcaggcgccccggcccacacccagtgcgccgcggcccgcgctcggccgcccgccggtacggaccccagggacgccgcgccgacagcgccgcctgtgccccccgcgcagacccgggagggcgccgtgtttggcctggaggcggcagggggcgggggaggggttgactgaggcgcccaggctgggcggtgcagagccggggttgggcctccgggccccgccctggggtgcggggtgacctcgggccggtccctgtttgctgctctgtgctctgcgcctcagcttcctcaccggagcctccccagcgtcggactcagtgataataatagcccacgtgtattcaactggcgtttactgcatgccaggcctttgggcgacttcaagccagctaaaactcacaaccccgctgtgagctgtgttgtcactgtgcccatctgacggaggaggaactgaggcccagagagggaaagtgacttgcccctggtcacacggctgcaggtggtggggctgggatttgaactgaggcctgctggcttcagctcagaatttgcatctcggtagtgagcacagctgctaggggaagtgaaggcggggcggaggaaagtcctggggcctaaccgttggtgagccattgaggagaccctccttcctgcctcgatgctgactgccaggtgcaggcctggccggccaggcctctggggacagccctcctggctgggaggccttctctgcaggggcggggcagctggaccagctgctgatcccctccctctgcctgtccttccatctgccaccctccaccctccca

SEQ ID NO: 38710 - DNA, 1624 bp, Artificial sequence
  DNA replication origin
gggcgctggcgtcctgcgcggcggagatgatgacgatctgcgaggagtcgagcagccgcagcgcgccggccccgagcagggcctccagcgccggcgcgcatgggccgcccgcaggggccccggccaaggccatgacgctcacggcccgcgcggcccgggtgacaggcggcggcggcggcgcgggcccatggcggcaggcctcggcgagggctcgatcccgctccgcccccggccgccgctgcctgcaaagtcccggccacttttacgcgccaaatcctttttgccgcgaaagagccacgagccgccgagcgccgccacaattggctgccccggccgtgacgggaacaacggcggcggttcctattggctttaacgcgccggacccggcggcgaggggcgggatggggcggcggcgcggggcggtacggccaatggcggggcggggcgcgcgcaggctttgtccggatggtaccaggcgcggtgtgactccccgcccccagcccgggcgtcccctgctggaggcgtggggacaccggaacataggccccgccccgccccgacgctcccgcatcccactgacctttctatagtgcaggttcagaacagagcctctcttctgcacgtgaccctcaacctgtagcccccaacagcctcagcttagatttccagagactgtcccctcttcttttcaggatcatcagttccacagcccagccatcagccacctcttccatcctcaacttgcctcacccatgacattatcctaatcctgcacccagccctatcccgctcacccagagcccaagctgaagagcggtgcctggaaatggcgagggggacgtcgggctttcctgcaagtcccattttagccaaaatctccaacagccaacgtatagcatctgcttgaactcattcattccctcactcattcaacaaacgtttggagagcttgctctgtgccccatcctcaattcgtggccctaaggagctcacagtccagtagacaggggaacagaaaggtaacagacgtttacaatacgatgaagtggcgtctgggcgcggtggctcaccaccggaatccctgtaatcagctggcggggtggatcgcatgagcccaggagttcgagaccagcctgatcaacatggtgaagacccatctctacaaaaaatacaaaaattagccaggcatggtggcgtgtgcccgtagtcccagctacttgggaggctgaggtgggaggattgcttgagcccgagaagtcgaggctgcagtgagctatgatcatgccactgcacaccagcctgggcgacagagcgagatcctgtctctaaaacaaaaaaagaaaacacatcacttctagggagccctcccaaggatttactcacttcctctattgcccactgctgcctctgctccaatgctgaccacacacactccttttctccatctgcctcccctgccaatctaggagctcagtagcgactcctcccaacactggtctggcccagagcaggcgctgagaaaggttatgaaagaaacagaggctaagccagaggctgcctagactgtgacaaggagaccacggttctgcaagggtggtccttaggccactggcttcagaaccac

SEQ ID NO: 38711 - DNA, 1424 bp, Artificial sequence
  DNA replication origin
agaggcgcccctcacctcccggacgaggcggctggccaggcggggggctgaccccccacctccctcctggacggggcggctggccgggcggggggctgacccccccacctccctcccggatggggcggctggccgggcagaggggctcctcatttcccagtaggggcggccgggcagaggcgcccctcacctcccggacgaggcagctggccgggcggggggctgacccccccacctccctcccggacggggcggccggccgggcggggggctgacccccccaactccctcccggacggggcggctggccgggcggggggctgacaccccccacctccctcccggacagggaggctggccgggcggggggctgacccccccccacctccctcccagacggggcggctggcctggcgggggctgacccccacctccctcccggacggggtggctgccgggcagagacgctcctcacttcccagatggggtggctgccgggcggaggggctcctcacttctcagacggggcggttgccaggcagagggtctcctcacttctcagacggggcggctgggcagagacgctcctcacctcccagacggggttgtggccgggcagaggcgctcctcacatcccagacggggcggggcggcggggcagaggcgctctgcacatctcagataatgggcggccgggcagagccactcctcacttcctagatgggatggcggccgggaagaggcgctcctcacttcctagatgggatggcggccgggcagagacgctcctcactttccagactgggcagccaggcagagggcctcctcacgtcccagacgatgggcggccaggcagagacgctcctcacttcccagacggggtggcggccgggcagaggctgcactctcggcactttgggaggccaaggcaggcggctgggaggtggaggttgtagcgagccgagatcacgccactgcactccagcctgggcaccattgagcactgagtgaaccagacaccgtctgcaatcccggcacctccggaggccgaggctggcggatcactcgcggttaggagatggaaaccagcccggccaacacagtgaaaccccgtctccaccaaaaaaatacgaaaaccagtcaggcgtggctgcgcgcgcctgcaattgcaggcactcggcaggctgaggcaggagaatcaggcagggaggttgcagtgagcctagatggcagcagtacagtccagcttccgctcggcatcagagggagaccgtggaaagagagggagagggagagcgagagcgagagcgagagcagaaaaaatatttttaaatcaatactacacatagtacaaaactcaaagttataaaaagttgatagccagcatagtggctcacgctataatcctaacactttgggagcct

SEQ ID NO: 38712 - DNA, 922 bp, Artificial sequence
  DNA replication origin
ggaggtggaggctgtagcgagccgagatcacgccactgcactccagcctgggcaccactgagcactgagcactccgtctgcaatcccggcacctcgggaggccgaggctggcggatcacttgcggtcaggagctggagaccagcccggccaacacagcgaaaacccgtctccaccaaaaaaatacgaaaaccagtcaggggtggcggtgcggcccgcaatcgcaggcactcggcaggctgaggcaggagaaccaggcaggaaggccgcagtgagccgagacggcggcagcacagtccagccttggctcggcatcagaggaagaccgtggaaagagagggagagggagactgtggggagagggagagggagaccgtggggagagggagagggagaggaaaaaatatatttttttttaaattcttttttttttttttattgatcattcttgggtgtttctcgcagagggggatttagcagggtcataggacaatagtggagggaaggtcagcagataaacaagtgaacaaaggtctctggttttcctaggcagaggaccctgcggccttccgcagtgtttgtgtccctgggtacttgagattagggagtggtgatgactcttaacgagcatgctgccttcaagcatctgtttaacaaagcacatcttgcaccgacccatttaatcctgagtggacacagcacctgtttcagagagcacagggttgggggtaaggtcacagatcaacaggatcccaaggcagaagaatttttcttagtacataacaaaatgaaaagtctcccatgtctacttctttctgcacagacacggcaaccatccgatttctcaatcttttccccacctttcccccctttctattccacaaaaccgccattgtcatcatggcccgttctcaatgagctgtt

SEQ ID NO: 38713 - DNA, 1121 bp, Artificial sequence
  DNA replication origin
acacagcaaccatccgacttctcaatcttctccccacccttccccctcctctactccacaaaaccaccattgtcatcatggcccgttcccaatgagccgctgggcacacctcccagacggggtggcggccgggcagaggggctcctcacttcccagtaggggcggccgggcagaggcgcccctcacctcccggatggggtggccggccgggcggggggctgacccccccacctccctcccagacggggcggccggccgggtcggggggctgacccccccacctccctcccggacggggcggccagccgggcgggggctgacccccaccaccctcccggacggggtggctgccgggcggagacgctcctcacttcccagatggggtggctgcccggcggaggggctcctcacttctcagacggggcggctgccgggcggaggggctcctcacttcccagacggggcggctgggcagagacactcctcacctcccagacggggtcgcggccgggcagaggcgctcctcacatcccagacggggcagcagggcagaggcgctccccacagctcagacgatgggcgggagggcagagccgctcctcacttcctagatgggatggcggccgggcagagacgctccccactttcgagactgggcagccaggcagaggggctcctcacatcccagacgatgggtggccaggcagagacgctccccacctcccagacggggtggcggccaggcagaggctgcaatctcggcactttgggaggccaaggcaggcggctgggaggtggaggctgtagcgagccgagatcacgccactgcactccagcctgggcaccactgagcactgagcactccgtctgcaatcccggcacctcgggaggccgaggctggcggatcacttgcggtcaggagctggagaccagcccggccaacacagcgaaaacccgtctccaccaaaaaaatacgaaaaccagtcaggggtggcggtgcggcccgcaatcgcaggcactcggcaggctgaggcaggagaaccaggcaggaaggccgcagtgagccgagacggcggcagcacagtccagccttggctcggcatcagaggaagaccgtggaa

SEQ ID NO: 38714 - DNA, 995 bp, Artificial sequence
  DNA replication origin
tctaggaagtgaggagcggctctgccctcccgcccatcgtctgagctgtggggagcgcctctgccctgctgccccgtctgggatgtgaggagcgcctctgcccggccgcgaccccgtctgggaggtgaggagtgtctctgcccagccgccccgtctgggaagtgaggagcccctccgcccggcagccgccccgtctgagaagtgaggagcccctccgccgggcagccaccccatctgggaagtgaggagcgtctccgcccggcagccaccccgtccgggagggtggtgggggtcagcccccgcccggctggccgccccgtccgggagggaggtgggggggtcagccccccgacccggccggccgccccgtctgggagggaggtgggggggtcagccccccgcccggccggccaccccatccgggaggtgaggggcgcctctgcccggccgcccctactgggaagtgaggagcccctctgcccggccgccaccccgtctgggaggtgtgcccagcggctcattgggaacgggccatgatgacaatggtggttttgtggagtagaggagggggaagggtggggagaagattgagaagtcggatggttgctgtgtctgtgtggaggggggtggacatgggagacttttcactttgttctgtggtaggaaaggttcttctgccttgggatcctgttgatctatgaccttgcccccagccctgtgctctctggaacatgtgctgtgtccactcagggttgggtggattgagggcggtgcaggatgtgctttgttgggcagatgcttgagggcagcatgctcgttgacagtcatcaccactccctagtctcgggtgcccagggacacagacactgcggagagccgcagggtcctctgcctgggaagaccagagacctttgttcacttgtttgtctgctgaccttcccttcactgttgtcctatgaccctgcggaatccccctttgcgagaaacacccaaga

SEQ ID NO: 38715 - DNA, 1194 bp, Artificial sequence
  DNA replication origin
tctgtagggtgatcagggagggtctccttggggaggtggcactgagtcaaggcctgaatcaagggagagaacatgaagggtagaggccggtgactgaatgagcattactccgagctccttggctggttgttaggcatgcccagtgcgtaaaagccctttggggctgctgagcctgcactcatggcaggggcacctgtgtttgtgcagcctccaggagaagctgtgggccatactgcaggccacatatatccactcctggaacctggcacggtttgtgttcacctacaagggtctccgtgccctgcagtcctacatacaaggcaagacctacccagcacacgcattcctggcggccttcctcgggggtatcctggtgtttggagaaaacaataacatcaacagccaggtaaagatcctcccgagatgggggtagtgaagggggcgtggttcagcacagaggtgggggtgacagaagggggcgtggttcagtacagaggtgggggtgatggaagggggcgtggttcagtacagaggtggtgacggaagggggcgtggttcagtgtagaggagggggttggggaagagggcttgtttcagtatagaggtaggagtgggggaaggggcgtgattcagtgtagaggtaggagtaggagaagaggtgtggttctgtatggaggtaggagtgggggaaagggcgtggttctggatagaggtgggagtgggggaaagggcgtggttcattgtagaggtgggagtgggggaaggggtgtggttctgtatagaggtaggagtggggaaagggcgtggttctggatagaggtgggagtgggggaagggcgtggttctggatagaggtgggagtcggggaaggggtgtggttcagtgtagagttatgagtggggacaagggcgtggctcagtgtagaggtaggagtgggggaaggggtgtgggtcagtgtagagttttgagtggcagaagggcgtggttctgtatagaggtaggagtgggagaaagggcgtggttcagtgtagagttaggagtggggaaagagcgtggttcagtgtggaggtgggagtgggggaaggggcctggttccgtgtagaggtgggggtgggggaaggggacgtggttcagtgtagaagtatgggtgggtgaaggggcgtggttcagtgtagaggtgggggtggggagggg

SEQ ID NO: 38716 - DNA, 1410 bp, Artificial sequence
  DNA replication origin
ttgttgagacggggtctcactatgttgctcagacaggtctcaaactcctggatacaaatgatcctccagcctcagcctcccaaagtgctgggattacaggtgtgaaccactgtggccggcatacacattgtaattaaataacctttaagatttaatgtcggtctttttttttttttttgagacagagtcttgctctgtcgctaggctggagtctgtggcacgatctcggctcactgcaacctctgactccctggttcaagcaattctcctgcctcagcctcccaagtaactgggattacaggcacgtgccaccatgcccagataatttttatatttttagtagagacggggtttcactaggttggccaggatggtctcgaactcctgacctcgtgatccgcctgcctcggcctcccaaagtgctgggattacaggcatgagccgccgcgcctggcctaatgtcggtctttcttcccacctctaactccatgggaaaggaccaccatgtctctagagctattacgggacttggtgcatagcaggccgttaataagcagttgatggaggatgaatgaagatgagaggggtctgtgtgtgtaggggaagtcccagtgaggagcacctctcattctgtgagacctggataggacccctcggaggctgggctaggagtggctggggtgggtgttgggggtttatgtgacagaaatggggtcccaacaagcagggatggagggtgaagagatggagttacttaagagataatgggatccccagcacggagacccacgcctgtaatcccagtgctttgggaggccgagacgtgaggatcgctggaggccagaagttgacaccagcctggacaaaatagtgagaccctgatctctacaaaaaaataaaaataaaaattagtaggacatggtggcgtgtgccggtagtccccgctactctggaggctgaggcgggctcccaacaggcagagttgagcagggtagtaggggcgggaagtctctaataggggatgagggatgggaatctatgttgtacagcctggagatccctgtgacagttgggtggtctgggtgagatgggataggggtcatggtttgttgcagagtcggggtatactgtgctcagcggaaatggggtccgtgcagcagacctggaggactcacgtgctgtgggaatgggggattctgtgtcagagctggggggtcgggtccggtgagatggggatgcggatttagataatagggatgggaagttccgcgtgtgcggcggatataaggtcggtgtagacttggtcgttcaagtgaggcggggtccacactcggtggcccggtgactgggttatcgagtggagccagggcagcccagagatgctggggtcccgcgagcctaggttgggtt

SEQ ID NO: 38717 - DNA, 1466 bp, Artificial sequence
  DNA replication origin
gccccctggcggccccgactcaaccgccacggctcccacaatgctcgcgtagccgggcttcggttcctgtggcggcgacggcggcggctccaagatggcgcaggcgatctttgaggccctggagggtgagcggcggcggggccggcggaggcggctgttccgcgctgcgccccctcccgccgcgccctcgcagcgcccggcctagggcgcgcagcggccgcggggcggagggcgccggggctggaacagccgcggggcgggaggggcgcgggcgggaacagcgcgggagccgaggcccggcgggggagctccggggccggaacagccggggagagccaggccggcggggagggggctcgggtccggaacagcgccagcctgggcggccttgggcgggcgcgggaggggctccctgcagggaactgcgcgggaggcgacggcggggcggtctggaacagccgcggccagggaggcggcttggcggcgcgcggggcccgggacgggggtgcggtcgcagctgcgggcaggagggcctcggcggcctgaccacgaagaacttctgcggagcggactgtatgcctcgtgctaggacgtagtctcaaaatcagaccacagcagcagaggcgccacctgtgtgcacagcctggactcagagcttagggacccaagccagcaaacacctggcgcctgcagtgcgcaccgtggccggtgcagttttacaaattaaactgacaccgtgggtgctggcgcggtgtgcccggccgggacgcggtgttcccagacccaggccagcaaacgctgggtgccgacagactgttccgtgctctgcaagaacctgggatggggttggtgctcaggctcaaaactgtgggctttggagacagcaaacactgagcacctccatgtgtgcatctgctgggcgtcggggaggaagggcagccttagcgactcggggccatggcgcagaatagatattgtgggaaatacagaccaagaatggtcttggaggagtgggatgagatgagtatacagatagggtgcaaactcgaagtactggactggcgggatgaagctgaagctttgagtcctgcagcttcctaggagatctcagccactccctgcactttttaattttttgagacggagtctcactctgtcgcccaggctggagtgcagtggcgcgatctcggctcactgcaacctccccctcccaggtttgagcgattctcgtgcctccgcctcctgagtagctgggactataggcgtgcaccaccacacccggctaatttccttttttttttttttttttgagacagagtcttgctctgttgcccaggctggagtgcagtggagcgatctcggctcactgcaacctccgcttcccggggttcacgccattcttctgcttcttctgcctcagcctcgagagcagctgagactacaggcatccgccaccacgcccggct

SEQ ID NO: 38718 - DNA, 1357 bp, Artificial sequence
  DNA replication origin
ctccagcctgggcaacaagagcgagactttgtctcaaagaaaaaaaaaaaaagaataaaaagtcccttccacacaacctccaggggctcttctctgctttagcggtggtgggaatcccttgttcatgaattaaggcaggtggatcaggggccaggaaggagagaggaaggaggagcaaggggagaggcaggagggctggagggagacagacagcgacagagaggagggggagggggctggagggagaggggagaggacaggggagggaggctggagggggctagaaggagatggggagagggaggggaagggaggctagagggagatgggaaggaggagggagaagggggctgcagggagatggggaagaagagggagatggggagggtgagggagatgggggggagagagatggagagagggagggagatgggggagggggaaggagatggggagagggagggaggtgaggaggcggagggaggggggagggagaggagtagggagagggagaggggaaaggaaatggggaagaggagggagaagggtgctggagggagatggggaggaggaaggagatggggaggaggagggagatggggaggaggagggagacgggggctgagagagatgaggggagggactgagtgagatggggagggagatggagaagtggagggaaaaggggctgagggagacagggagaagagccagatggggatgggaagagagagaaaggcatgaggagagggggagggggaggggaggggctgggctggagttctcaggggcagggtacctacccgagtggatgtgagcatgcagtttgagataatgctcccgccggaagaacttcttgcacacttggcacttgaacctgcccccgctgccgtgggtgggcagatgacgccgcaggtagcgttcacaaggaaacacctgggagagaagaggggccttcaggtctgactcaccgggcccccctcccctggccatcttctgaactcaaaggttcctcgtttccagcccctatagagacaccttcctttctggctatcaggggccaggacccagaatgtcagactcagcccttagaacttcatggctccccacaagcccggacaaaacatgtctgccctgagcttttgcccggatgttcttcccacccagagggcctttctctctttactgacaaactcttacacatccttcaagacccaactcgggcgtcactgctcctgtcaagccttccctagctccctggtgctatgcctggcaaagccaattctgcctttgaatgtccacccacacttttaagtcagcatttaacccactgaatgacagccctttgcttacacag

SEQ ID NO: 38719 - DNA, 953 bp, Artificial sequence
  DNA replication origin
ccctggacccaaacaggagcatcaggcctgcccaggaaacagacacctcaggtccgtcactcggaggcctggatgtagacgggcacagcgagcatggcacatgggccctcggccccagcctgcagctccgccagagccaggttggagcccagcccctcagcgtgtccaggtaccaccagctcagtttccgcgcccaccgcaccacccacaacgatggacagcaccgcgtccggctctgcgaagggcggcttgccggggacagcctcgggcaccagcccagcccctgtgtccttcagctcctccagccccagcgggtcaggcaagggggtcagcaccttgcgcccaccactgccgcaactgcggggggctgccctcctctgggggggccgccgggtttgcaggtccttgtccttttgggggccgagacgacagcggtgatctttgaggtatttgtggcgggaaaagcccttggcgcagccagcacagcggaacttgtagttgcccgtgtgggcgcgctgatgctcggcgaggtgggcacggcggctgaaggacttgctgcacagggcgcatttgtggagcttcatgcctggagggcaagggaaagtcagtgagaagcatccagaccttcaccccgcaacagtgccctgcgctgggaataaaatccaggctctttccccaccagcacctgtgtgatctggccccagctctctccaccctcgtcgtctgccttcttccagccactctctgcgccagccacactcgctctcctcagagatgccacgctggctcctccctctgcgcctttgtacttgccattctcctctgcctggaacagctgctcactctctgcaccttggctcgctttgccaggtcatctcaggctcagggaggggccgtgacgcctgaggccacccacaggaacatggcagcactaagactccaacccagccctg

SEQ ID NO: 38720 - DNA, 1419 bp, Artificial sequence
  DNA replication origin
ctctcccattagggttgaggccgtgttttgttcacccctatgaatacagcgcatgcagcaggcactaaaaagaatttccagaatatctgttgactatcagcagagaagcatcctccagataggctattttgttctcctattagaatggagaaaacatcgatttagcccctactatgtgctgagcactgtaaatccatgattttcctttcagaaaggtaaatgagctcaaggtcgcactgctagtcactagcagacttctgagtgaattacctcaatcctaaacccctctcaaggggaagggatgtcgttctgtgattcactctcacatggccataacaagaaaaagcaaacatttctaaactgctttacagttttaaagcattttcacattcatctcacttaagaaaaacacaaagcacttggaatgcccagaaagccatacgacaacaggaagtaaagtaagcagtgcctcaagattcaatactggggccctgaatcctagtagtggggactggggagcagtcgggagtctctatttctggttcagacggatggggaagcggtgagtcatggggtgaaggcttgcgccacgggaaactttggtaaggtcaagctacgaggcaacaaaaagtgaatcacaacgctggaaaacaccttaggcctcaacagaggccgaactctggctgacggatggggaaactgaggcctcaaagggaaagcaacttgctcaagttcactcagcaagtgaatagagcaggaatcgggggtctcatctcccccagtccccttttctctccagcaaggaggcttttcaacgagaattctgagacaagaggacaggggagaggccaaggggcagctcacagattccaccgaggagtcgggagagggcacaggtaggaccaggaagcacagaaatgctaggatgggggcagaaatgagccgaggaggaggcaggggcagtagctaggcaggtgggtgaggcgagaaggaaaaggcggaagagaaagggacagagtgagggcggaggaaagtgctgtgagattggggtctgaagggacctggcggggtggagagaggctgaggggagagggcagaataagtctgacgatggaaaagtccagggatcggggagacattgaagggagtcggggagggggtcccagacccggcaagaagtctgacccggagagttccagggtcagaccagaccccgaggcgagtctgatgaaggtgaagtccgggcccggggagcctggggggagcccgtggcaagtctgaaggggccgggcagcctcaccgcgcttgtttttggtgccgtgcttcttggcggccgtcagctcctgctcgattttcttctccaggaactcctgtttcttgcttaacatctcttccgtgtcccgcagccgctggatggcc

SEQ ID NO: 38721 - DNA, 1668 bp, Artificial sequence
  DNA replication origin
ggtctggaggaagccgcgcggctgggaaggaggcggtactgccgcactcggggacgtaagggagggaggaaaagggcggctgcggcgggaagaggctgggcacacgcgcgggagtcgtcgtcgtcgccgtcgccgccgctaccgccccctcagcttctctgggttccgctgccccgagctggcgccgctcgcgcgccccgccgcactgacagcggcgcgagccccgcaaccgcgagccctgccctcggccggcaccactgaggcgcgcgggggtgggggcacccggagcggctccccgcagctcggctccgcccgccgctccggccctggttccgggctctcctccttctctgtctcctgggaaggacacggtgacacgagcacgaggagtctgcagccccgcccagaaacagcccggcttcccaggcgcatgggctctccccaccctctcagcctggctttggaaaggtccagagcttcggcggggacgggaggaaggcggggccagggtggggcctgaaagggaggagggactgagacgcggcttggggaggcggggctggggcgggaagagggcagcttgcacaggtttggagccgaagtaggggcggagctaagatggtgatgaggccctgggaagagggtcgccggaccagtggggaaggccgtgcaggagatggagagccgggaaccaggacagcgcttgaaaggagatgctgtgggcggggctaaatggagaatcgcccagagggcggagccacgggtggagggaggcggggctgaagagaagcttagagtgggaggaagatggaagcgggcctgaaggaggcgggcccggaagcagggaggggaggaggggccccgggggtggctactctgggcgggtgccggaaggaggcgtgccccaaggaaggactgaggggtggtgcttgaggtgggcggggcctggagatggcgctcaaatctgcaggctgtgggcggtgcaggagggatccggaagagacgaggcaggaagaaactcctggtcctttcgcttttaaggaacgtgccacctagacaaggtgagggtcgctcttcgctgcctaatctgggactgggcggagaggccgcgctaagggtgatctccgaaaaagatgcaggagatgttttataacttgatccaggtgctagtcctctctcctacacatttctcctgtcgggatttctcactttcagtgttccagcctccggtgaaccagtcttcctagtgagagcacgagaagcccgttgtccttcattcctcagctatggatttccctgaaagttgagaactgaccatattctcgatgcctcctccgacctgtgatttcatgactcacatcgcttccccagaacctgcttaacagacgggattcctgagaatggagcagagtttgaattcagagtcctggctttgccataccagcagttataattgtccttctgttgtttgatgacctccctgccctgcttcaaaaggaagagaaatcaaagagttgacgaccctgagcgcaaggcctgggacgttcttccccaaactcgctttaatatcaccttctcaaaagaactcttccctgaacaccttgtctcaagatgttctctagtttgtcttcttgttctgtcatttatttgtctgttcattgtttgtgt

SEQ ID NO: 38722 - DNA, 815 bp, Artificial sequence
  DNA replication origin
accatcttagctccgcccctacttcggctccaaacctgtgcaagctgccctcttcccgccccagccccgcctccccaagccgcgtctcagtccctcctccctttcaggccccaccctggccccgccttcctcccgtccccgccgaagctctggacctttccaaagccaggctgagagggtggggagagcccatgcgcctgggaagccgggctgtttctgggcggggctgcagactcctcgtgctcgtgtcaccgtgtccttcccaggagacagagaaggaggagagcccggaaccagggccggagcggcgggcggagccgagctgcggggagccgctccgggtgcccccacccccgcgcgcctcagtggtgccggccgagggcagggctcgcggttgcggggctcgcgccgctgtcagtgcggcggggcgcgcgagcggcgccagctcggggcagcggaacccagagaagctgagggggcggtagcggcggcgacggcgacgacgacgactcccgcgcgtgtgcccagcctcttcccgccgcagccgcccttttcctccctcccttacgtccccgagtgcggcagtaccgcctccttcccagccgcgcggcttcctccagacctctcggcgcgggtgagtggggactgcgggcgtctccttaggggtgcggggagggtgtgtgctttgtgcctttccgttcactcacttcttccggcaggccgctgcctatttttagaaacttatttctgcccttcggggagtcccgggagcccgagtaactctaggccccctccgccgctcctttctcccactc

SEQ ID NO: 38723 - DNA, 1416 bp, Artificial sequence
  DNA replication origin
cggacggggcggctggccgggcagaggggctcctcacttcccagtaggggcggccgggcagaggtgcccctcaccacccggacggggcagctggccgtgcggggggctgacccccccacctccctcccggacggggcggctggccgggcgggggactgacccccccacctccctcccggatggggcggctggccgggcagaggggctcctcacttcccagttggggcagccaggcagaggcacccctcacctcccggatggggcgactggccgggcggggggccgacccccccacctccctcctggacggggcggctggcctggcgggggctgacccccacctccctcccggagggccccccacctccctcccggacggggcagctgccgggcggaggcgctcctcacttcccagaaggggcgcctgccgggtggaggggctcctcacttctcagatggggcacctgccgggcggaggggctcctcacttctcagacggggcagccgggcagagacgctcctcacctcccagatggggtggcggccgggcagaggtgctcctcacatcccagacggggcagcggggcagagacgctccccacatctcagacgatgggcggccgggcagagacgctcctcacttcctagatgggatggcggccgggaagaggcgctcctcacttcccagactgggcagccgggcagaggggctcctcacatcccagacgatggacggccaggcagagacgctcctcacttcccagacggggtggcggccgggcagaggctgcaatctccgcactttgggaggctaaggcaggcggctgggaggtggaggttgtagctagccgagatcacgccactgcactccagcctgggcaacattgagcactgagtgaacgagactccgtctgcaatcccggcacctcgggaggctgaggctagcagatcactcgcggttaggagctggagaccagcccggccaacccagcgaaaccccgtctccaccaaaaaaatacgaaaaccagttaggcgtggcggcgcgtgcctgcaatcccaggcactcagcaggctgaggcaggagaatcaggcagggaggttgcagtgagccgagatggcagcagtacagtccagcttcggctcggcatcagagggagaccgtggaaagacagggagaaggagaccgtggggagagggagatggagacagagatggagagggagggggagagggagagggaaagggagagttcttttttgtttaaccaattgagttttgagtgttctattagttctttcaactatggcctatccttgggaattatagggaattcctgttgtatgtgtaattttccactgatttaagaatttttggaatgttttactacagtatcctggcccattgtcagttttaatt

SEQ ID NO: 38724 - DNA, 860 bp, Artificial sequence
  DNA replication origin
ggggggccctccgggagggaggtgggggtcagcccccgccaggccagccgccccgtccaggagggaggtgggggggtcggccccccgcccggccagtcgccccatccgggaggtgaggggtgcctctgcctggctgccccaactgggaagtgaggagcccctctgcccggccagccgccccatccgggagggaggtgggggggtcagtcccccgcccggccagccgccccgtccgggagggaggtgggggggtcagccccccgcacggccagctgccccgtccgggtggtgaggggcacctctgcccggccgcccctactgggaagtgaggagcccctctgcccggccagccgccccgtccgggagggaggtgagggggtcagccccctgcccggccagccgccccgtccgggaggtgagggacgcctctgcccggccgcccctgctgggaggtggggagcccctctgcctggccaccaccccgtctgagaggtgtgcccaacagctcattgagagcgggccgggatgacaatggcggctttgtgcaatagaaaggggggaagggtggggaaaagattgagaaatcggatggttgcggtgtctgtgtagaaagaggtagacatgggagacttttcattttgttctgtactaagaaaaattattctgccttgggatcctgttgatctgtgaccttacccccaaccctgtgctctctgaaacatgtgctgcgtccactcatggttaaatggattaagggtggtgcaagatgtgctttgttaaacagatgcttgaaggcagcatgctcgttaagaatcatcaccactccctaatctcaagtacccagggacacaaacactgcg

SEQ ID NO: 38725 - DNA, 1320 bp, Artificial sequence
  DNA replication origin
tcagagagcacagggttgggggtaaggtcacagatcaacaggatcccaaggcagaagaatttttcttagtgcagaacaaaatgaaaagtctcccatgtctacttctttctacacagacacggcaaccatccgatttctcaatcttttccccacctttcccgcctttctattccacaaagccgccattgtcatcctggcccgttctcaatgagctgttgggcacacctcccagacggggtggtggccgggcagaggggctcctcacttcccagtaggggcggccgggcagaggcgcccctcacctcccggacggggcggctggccgggcggggggctgacccccccacctccctcccggagggcacggctggccaggcggggggctgacccccccacctccctcccggatggcacggctggccgggcgggggggctgaccccccacctccctcccggacggggtggctgccgggcggagacgctcctcacttcccagatggggtggctgccgggcggagaggctcctcacttctcagacggggcggttgccaggcagagggtctcctcacttctcagacggggcggctgggcagagacgctcctcacctcccagacggggtctcggccgggcagaggcgctcctcacatcccagacggggcggcagggcagaggcgctccccacatctcagacgatgggcggccgggcagagacgctcctcacttcctagatgtgatggcggctgggaagaggcgctcctcacttcctagatgggatggcggccaggaggagacgctcctcactttccagactgggcagccaggcagaggggctcctcacatcccagatgatgggcggccaggcagagacactcctcacttcccagacggggtggcggccgggcagaggctgcaatctcggcactttgggaggccaaggcaggtggctgggaggtgtaggttgtagtgagccgagatcacgccactgcactccagcctgggcaccattgagcactgagtgaacgagactccgtctgcaatcccggcacctcgggaggccgaggctggcggatcactcgcggttaggggctggagaccggcccggccaacacagcgaaaccccgtctccaccaaaaccagtcaggcgtggcggcgcgtgcctgcaattgcaggcactcggcaggctgaggcaggagaatcaggcagggaggttgcagtgagccgagatggcagcagtacagtccagcttcagctccgcatgagagggagaccgtggggagagggagagggagacggagagggagagggagagggagtaactt

SEQ ID NO: 38726 - DNA, 1201 bp, Artificial sequence
  DNA replication origin
cccggccgcccatcgtctgagatgtggggagcgcctctgccctgccgccccgtctgggatgtgaggagcgcctctgcccggccgagaccccgtctgggaggtgaggagcgtctctgcccagccgccccgtctgagaagtgaggagaccctctgcctggcaaccgccccgtctgagaagtgaggagcctctccgcccggcagccaccccatctgggaagtgaggagcgtctccgcccggcagccaccccgtccgggagggaggtggggggtcagcccccccgcccggccagccgtgccatccgggagggaggtgggggggtcagccccccgcctggccagccgtgccctccgggagggaggtgggggggtcagccccccgcccggccagccgccccgtccgggaggtgaggggcgcctctgcccggccgcccctactgggaagtgaggagcccctctgcccggccaccaccccgtctgggaggtgtgcccaacagctcattgagaacgggccaggatgacaatggcggctttgtggaatagaaaggcgggaaaggtggggaaaagattgagaaatcggatggttgccgtgtctgtgtagaaagaagtagacatgggagacttttcattttgttctgcactaagaaaaattcttctgccttgggatcctgttgatctgtgaccttacccccaaccctgtgctctctgaaacatgtgctgtgtccactcagggttaaatggattaagggcggtgcaagatgtgctttgttaaacagatgcttgaaggcagcatgctcgttaagagtcatcaccaatccctaatctcaagtaatcagggacacaaacactgcggaaggccgcagggtcctctgcctaggaaaaccagagacctttgttcacttgtttatctgctgaccttccctccactgttgtcccatgaccctgccaaatccccctctgtgagaaacacccaagaattatcaataaaaaaataaattaaaaaaaaaaaagttactcaggagacccttttagaaatacttagggaaagataagctgtctccttgggatgactgggctggtgtctgtgcatatgccttctctggatccaagtgactttaccacaccaagccttaagactgccagactgttctctccattgaaagccattctgcaccactggccatacagaaggaatctcatattc

SEQ ID NO: 38727 - DNA, 934 bp, Artificial sequence
  DNA replication origin
gtgaggggcacctctgcccggccgcccctactgggaagtgaggagcccctctgcccggccagccgccccgtccgggagggaggttggggggtcagccccccgcccggccagccgccctgtccgggagggaggtgggggggtcagccctccgcccggccagccgccccgtctgggaggtgaggggcgcctctgcccggccgcccctactgggaagtgaggagcccctctgcccggccagccgccccgtccgggagggaggtgtgggggtcagccccccgcccggccagccgccccgtccgggagggaggtgggggtgtcggccccccgcccggccagccgccccgtccgggagggaggtgggggtgtcggccccccgcccggccagccgccccgtccgggaggtgaggggcgcctctgcccggccgcccctactgggaagtgaggagcccctctgcccagccaccaccccgtctgggaggtgtgcccaacagctcattgagaacgggccaggatgacaatggcggctttgtggaatagaaaggcgggaaaggtggggaaaagattgagaaatcggatggttgccgtgtctgtgtagaaagaagtagacatgggagacttttcattttgttctgcactaagaaaaattcctctgccttgggatcctgttgatctgtgaccttacccccaaccctgtgctctctgaaacatgtgctgtgtccactcagggttaaatggattaagggcggtgcaagatgtgctttgttaaacagatgcttgaaggcagcatgctcgttaagagtcatcaccactccctaatctcaagtaatcagggacacaaacactgcggaaggccgcagggtcctctgcctaggaaaaccagagacctttgttcacttgtttatctgctgaccttccctccactattgtcccatga

SEQ ID NO: 38728 - DNA, 1149 bp, Artificial sequence
  DNA replication origin
tcctaacccccaggtcggcagcagcggtgactgggagtgcagctgtgaggctgggacgcccgggtttcctgagccccgggagagcagcgcgggactccgtggcgaagggaccgagaactttcgggacctttacagaaacagccgcacaccttcgagcagcctatatatattgtatttcgattttagcccaagccaggtctccctgaagtcccatctcctggaacctccgcccgcctgcagccctgggaagccgccctgttagggatcacccgcccgagaagcgccccgcgtccccgaagccctgcctgctcgcggccgggagtgggggcgctcagcagttgaggctgagcacgcggcaggagcaggcgctgcggaagaagcggcactggcaggaggcgcacgggtcgcagcaggcgggtgccggcggcttgcagctgttgcgggtggccacgcagggcgcagataggggggtccggggccgcaccactttcttcatcgaagcctccttctgcgtgggaaacgccggggctttatgagccggccacgcccacccctccggtcctcacctctgcctgggagctcctcgggctagggagatcccggaccagaggtttccccgctggcttgcccaccgcccaccgcccgctcccccagtcagattccctcacctccatccccatccagacttacctggctcttgcctggccctggtcgtcttctccctagtttgtgttttttttgtttgtttgttttttgttttttttttagacagggtttcactctgtcagccaggctggactgcagtggcgcgatctcggctcactgcaatctcgatctcgggctcaggcgattctgccacttcaacctcccaagtagctgggaccacatgtgcgcaccaccacgcttggctaaatttatttttattttattttctatgtttttatagacggggtctcacttattgtccaggttggtctcaaactcttgagctaaagtgatctgcctgcctcggcctcccaaagtgctgggtttacattacaggcgtgagccaccgcgcccggcctaagtggtttctctttgaacttaaaatgaaacatgaactttcttttggcctttgagatttggcccttgcttgcctctccgacccct

SEQ ID NO: 38729 - DNA, 1001 bp, Artificial sequence
  DNA replication origin
ggggctctctggaccccctggaatcgcagcctcggcgcgtttctggccgcgcgaagccagctggaagttggagttctcgcgcggccatgagcgggccgttccgggtggccgtggactacaagtcccagcatgccccgcgacgccggggccgccgcgcggtctgcgagccgcaaactggcggcgtgctccgcgggagagcacacctggccacggcctgggacggctggcacctgccggaccctgctcggggggcctgcgcccggcctcctaggcctggaccggaccctgtccagctgggcggccccgacgagcgtccacccctctctgggcctcctacagggacggcgagggcaccccggagggtgtatgaggagaggcctggaaagcgagccccaggccggctccgatcctcctctcccctgggactttgggccagttacccaacctgtggggtcccccacccctccagcaggggcagccttgcagaaatctcgaagaaaatttggagtggtttgaaaaatcctgctgtcccaccgattgaagtgtaatacagggatagttaacgtttacttagtgtttcctgtgggatcggcactgccttctagctttattctagtctcatggctctatagggaaactgttctcattttatgatgagaatcctgaggcagaggtaacttgccctcagtcttacagctggtggtgatggagcaagattggaacgcaggccatctagatctctgagcgcaccctttcaccactgtgtgcaagcgaatacacgcggaacaatcctagtgaattttcagcaaaaaccagttcagtttggctggtagcttttcaagtaactttgacactattggaccgggtgtggtggctcacccctgtagtcccagcactttgagaggccgaggtgggcgaatcacttgaggtcaagagttcgagaccagcctggccaacgtggtgaaacgctatctctaccaaaaatacaaaaactagctggg

SEQ ID NO: 38730 - DNA, 883 bp, Artificial sequence
  DNA replication origin
tcccatctaggagtgaggagcgcctcttcccggccgccatcacatctaggaagtgaggagcgtctctgcccggccgcccatggtctgggatgtggggagcgcctctgccccgccgccccgtctgggatgtgaggagcgcctctgcccagccgcgaccccgtctgggaggtgaggagcatctctgcccagccaccccgtctgagaagtgaggagaccctctgcctggcaaccgccccgtctgagaagtgaggagcccctccgcccggcagccgccccgtctgggaagtgaggagcgtctccacccggcagccaccctgtccgggagggaggtgggggggtcagcccccccgcccggccagccgccctgtcctggaggtgcggggtgcctctgcccggccgcccctactgggaagtgaggagcccctctgccaggccaccaccccgtctgggaggtgtacccaacagctcattgagaacgggccatgatgacaatggcggttttgtggaatagaaagcggggaagggtgggtaaaggattgagaaatcggatggttgccgtgtctgtgcagaaagaagtatacatgggagacttttcattttgttctgtactaagaataattcttctgccttgggatcctgttgatctgtgaccttacccccaaccctgtgctctctgaaacatgtgctgcgtccactcatggttaaatggattaagggcggtgcaagatgtgctttgttaaacagatgcttgaagacagcatgctcgttaagagtcatcaccactccctaatctcaagtacccagggacacaaacactgcggaaggccgcagggtcctctgcctaggagaactagggacctttgttcacttgtttatctgctga

SEQ ID NO: 38731 - DNA, 1369 bp, Artificial sequence
  DNA replication origin
ccatgagtggacgcagcacatgtttcagagagcacagggttgggggtaaggtcacagatcaacaggatcccaaggcagaagaattattcttagtacagaacaaaatgaaaagtctcccatgtatacttctttctgcacagacacggcaaccatccgatttctcaatcctttacccacccttccccgctttctattccacaaaaccgccattgtcatcatggcccgttctcaatgagctgttgggtacacctcccagacggggtggtggcctggcagaggggctcctcacttcccagtaggggcggccgggcagaggcaccccgcacctccaggacagggcggctggccgggcgggggggctgacccccccacctccctcccggacagggtggctgccgggtggagacgctcctcacttcccagacggggcggctgccgggcggaggggctcctcacttctcagacggggcggttgccaggcagagggtctcctcacttctcagacggggtggctgggcagagatgctcctcacctcccagacggggtcgcggctgggcagaggcgctcctcacatcccagacggggcggcggggcagaggcgctccccacatcccagaccatgggcggccgggcagagacgctcctcacttcctagatgtgatggcggccgggaagaggcgctcctcactcctagatgggatggcggccgggcagagacgctcctcactttccagactgggcagccaggcagaggggctcctcacatcccagacgatgggcggccaggcagagatgctcctcacttcccagacgtggtggcggccgggcagaggctgcaatctcggcactttgggaggccaaggcaggcggctgggaggtggaggttgtagctagccgagatcacgccactgcactccagcctgggcaccattgagcactgagtgaacgagactccgtctgcaatcccggcacctcgggaggccaaggctggcggatcactcgcggttaggagctggagaccggcccggccaacacatcgaaatcccgtctccaccaaaaaaatacgaaaaccagtcaggcgtggcggcgcgtgcctgcaatcgtaggcactgggcaggctgaggcaggagaatcaggcagggaggttgcagtgagccgagatggcagcagtacagtccagcttcggctcggcatcagagggagaccgtggaaagagagggagagcgagaccgtggggagagggagacgggagaggcagaggcaggggcaggggcaggggcaggggcaggggcaggcagaggcaggcagaggcagaggcagagctgcatactttcaagaatgacaaaatttagtagttatacaaggtga

SEQ ID NO: 38732 - DNA, 930 bp, Artificial sequence
  DNA replication origin
aaggaaaagggcacagatggcaacgccaggagaactcgcgggcccgagcagagctccagaggcgaacactgaaagacctgcagagacagttcctgaaaaagagctgccagaaatgatgcttaaaatccagagcagaatgcgcagactgaagatcaacatttttttgggggaggggggagggggacgaagtctcgttctgtcgccaggctggggtgcagtggtgcgatctcagctcactgcaacctctgcctcccgggttcaagcgattctcctgcctcagtcagcctcctcagtagctgggattacaggcgcctgccaccacccccagctaattattgtatttttagtagagatggagtttcaccatgttggccaggatggtctcgatctcctgacctcgtgatccactcgcctcggcctcccaaagtgctgggattacaggtgtgagccaccacgcctggccgccgaaataatttttaaagaatgtagtttagtaacaaggacatggaacccaaaaggaagaaattagatggaaaaatggtgagcaaattggtaaacatgtgaatctaaacaagcatttaatatgcaatatgaataataatgattaatttgtgggccacagaaacaagatgcatgagacacaagaacatggaagactgagagggcaatttgagagggggttaaagagactgagcattgtctggctttgtaaagtcaggtgtgtatttcagatatttaagaggatcaccaaaagaatacaaacggaactataactgccaatgcagagaaaagggtagtgatgggtattaaaactataatggaaggcagaaagggagaaaaaggaagcaaagtaaaagggatggtaaatatatagtacaaaaccagaggtagaaaatgtggtttacattcacctcttaaaacacagatgac

SEQ ID NO: 38733 - DNA, 1148 bp, Artificial sequence
  DNA replication origin
cgggcctcaccgaagctccgccgctgcttgaaaggccggtctgagggcatcgcgcgggcccggctgggcgcgcaggccggggctctggggcgcggggatgtgtctgcggtttgggggctccgggggctccgcgcctcgcgctcaagggctccggggctcgcgctgagcacggcggctgcggctgcgggaggtaactcgcccggtgacgtcaggtcacaacattccttaaaggggaggccagtgcgccgctcccattgggccgacgcacaacccgcccgcccggacccgtgacgtcacggcgcagagagcctgggtccgcggaccgggacgcgaggggcggggcttctgggcgcgtcacagtcccgtgacgtcatgggcagcgcgggagcttctcccgcagcccgaactcaaggtaaggcccggagggcggtggggccgccctaggccgatggagcgggcgggccaggctgcagccccacggcaccacttcccgccctcaccgagtctgtgtcaggactgacgcggttctgggcgccgtgggaaacagccggagccaaaggcccggcgccttcacggggcttagggcgagagaagggagaaggtgcgggaggcacagtcagacacaggatagaacaggatgctagaaatgaacgcccaggtttgaaaaagaataatataattgaaaagtagagccatcgaaattcaggtctcagaggatgaggtgagaaggcagaaaaggacaacagaagagaaatcgtggacctggaggctgatcggaagcagctcaccagagagacaggtgatggggaataaggaaaagggcacagatggcaacgccaggagaactcgcgggcccgagcagagctccagaggcgaacactgaaagacctgcagagacagttcctgaaaaagagctgccagaaatgatgcttaaaatccagagcagaatgcgcagactgaagatcaacatttttttgggggaggggggagggggacgaagtctcgttctgtcgccaggctggggtgcagtggtgcgatctcagctcactgcaacctctgcctcccgggttcaagcgattctcctgcctcagtcagcctcctcagtagctgggattacaggcgcctgccaccacccccagctaattatt

SEQ ID NO: 38734 - DNA, 1945 bp, Artificial sequence
  DNA replication origin
agccccggcctgcgcgcccagccgggcccgcgcgatgccctcagaccggcctttcaagcagcggcggagcttcggtgaggcccggcaggcgagctgcgagctctggggcaggggtgccggccgaccccgactgccgcaggtgacgtcagccccgtgacgtcaggctctggctggaccctcgggctgggaccagctccggcctgggcgggggctgcccgcttccccaccgcgataggtgccaggggctgtggggcctgatggccccgggggtgggggctggagctggggcgtggccgggggccgcccctccgggacaggcggggcggacctgggccggcccgacccggcctcacggtctggccgctgtccgcagccgaccgctgtaaggaggtacagcagatccgcgaccagcaccccagcaaaatcccggtgagtcccgcacccccagccctgccccgcccccgcctcgcgcgttcccgacacgaccccctgcccgcccgccctgctcccaggtgatcatcgagcgctacaagggtgagaagcagctgcccgtcctggacaagaccaagtttttggtcccggaccatgtcaacatgagcgagttggtcaagatcatccggtgcgtgggcagccgccgccaggaggtggctagggtcgggaggggagccgggttcccgccgagaaggggtgggagtggggtcaggggtgatgggaccgggcggtgggcccctgttctggggtggctggaaaggtcaaggtcggggctgcagtcggtgttgggtcagaggtgacagctggggtgagaatgggtgtgaaaggctgggaatcattctgggggtcagggctatgtccgtcccgcagccaagcccctcacagctgcatactctcccgccggctgcaggcgccgcctgcagctgaaccccacgcaggccttcttcctgctggtgaaccagcacagcatggtgagtgtgtccacgcccatcgcggacatctacgagcaggagaaagacgaggacggcttcctctatatggtctacgcctcccaggaaaccttcggcttctgagccagcagtaggggggctcggcctgggagtcgggcggccccggtcaggccctgcccagagagctcctggttcctgaactgagctgcctctaccgtggtgggctgggcaggcatgtgcccccctagtcagagggcaccaacccacctactctgcccctgggtggatcctgggccggtcgtgttagggttgtccctctgggtgctggctggtgggatgggggagggtggggagcagctcccagcacccctgctgtgtggttcatcttttttttaggcccctgcctgtctgcccatctgcccctcacccacccgaggctctgcccaccgcctggacctgcccacccctgaaagactggcccctggctccccgcccctcggtctccacgtggtgtatggatctgtggtcattgtccctctgcagaataaagattgctcaggcctgcctggccctgtgcctccagccgcttgcttgggagtggggagggtgctggtggggctgcccgcaccatccccgggctctggcgcacagacttgtgttctgtggccgcggtgctcgctctggaaacccacacctgtgtgtagtgttccagaacattattaggggccaccccctctaggagtgcaatgcagatgtggtctcagggtagacttcataacaaaaaacatttattaagtagccacaatctaacaagccctgctcacctgcctcttctccttcctgtctgggagggggctccttggtgtgcagagccacaaggtgggggtccaagttggggagctcccagttcttccccataggccttgctgtcagtcagccatgggtcccttttggtaccagagacttgtgaccctggactcgaacctcttctgcccaagcactcg

SEQ ID NO: 38735 - DNA, 1401 bp, Artificial sequence
  DNA replication origin
catctgtgccaggtggttggtgccaatcctctgaggcctccaggtgcctgagagctgcggtgtctgtagtgtgagcccctgtcccctcatccttctctgaggctgggccctgcccaacctgctccagggaccagtggtcttgggaagcttgggctgactgggattgcagactccgggtctggtgtatagggcccttggcaaatccctattcctttctgggcctccttgaagagacagtgggctgagcttctaggctccctttgattcttctgtgtgtggcccagaatgggacagacagactgagctgggcacagaaataccatagtgacagaaccattcgaagaccctgccctgatggaggccccgggccaggggaggaggcacagtcaggctgtcagctgaatggaaaattacactttcgatgagtctgttatcgagtagagattagtggggccaagaactaatctggggggcaagtgatccttcctgagccctgaagagtaagcagctgtcaactagatgaacggggagagaacattccaggcagaagaaacagtaaagatcctgccgtggggtgaggtggagccgggagagggcggacagggaccctagcaaggtctcagagcacgagggagttcgagctttgccctaaggcttgggaagcctttggaggatttgaaggctggaagtaacaccatcagatgtgggttttgaaaagctccctctggctgccagggagaatggggtgggcacgggtttgagagcagggagcccaaggaccaagctttgctgttgtttaggagatgagatgacagtggctctgtccagagtagtgactgtggggatggatccaaagggtggatttgagtttagggggaattgacaggtcatggtggctcgatgtatgagagaagtgtcagggcaattttgtggcctgggcacctggctggaagatgggggcatggatgctgagtgggagaagtgtatttgacagagggaaggtgaggagtttgatgtggacctggctgggatggaagtggctgtgggaggatggggcagaggcctctggttgcacaggcaccaggctggcattcgaggccagagcctgggatggaggtgtagaccatgggtgggggcagggggagtccaggcagcttctgagaggccagaccttgcagggtcaattatgggccctgaggtgggggccctgaggagggcctctccagtgattgtgatccagagccaggcaggggcgttcctgtcttccaacaacacctgccagcagttcagggatcctgggtttagggggaggtacccagcagcgcctcacaccctctctctccccccagatcctgctcatctctgattacttctatgccttcctgcggcgggagtactacc

SEQ ID NO: 38736 - DNA, 1003 bp, Artificial sequence
  DNA replication origin
gtttttttgttaaagggcctggaccagggcagacactcagaagatattcatttccctgtctctccatcctgccctgcactagagcatgttctgagggtttcgttctacttctgattcatcctgtctgtccctggtcacccctttatcagctagctgccccatgagctcttcatcatggtcccagagggaggcggccctggagccctcatggctgccatagagaggaatgtggaccgagccgtccctgggggcagcgctgagagggtacagaccagcaaacaactcagagagagctggccctgtgccgggcctggggccatagaactggagcaaatgcagccccatttggttgggaggccagtgggcagtgacttcacttcagggtccatgtaacaatgcagggttagagaagactcctggcaggagatgagcctctgagggataggtgggagctgcagcgctgctgggcagggcagggggagccagggaacttctgagcaggcaagcgtgcgtgtatgtgtgtgtatctgtgtgtgtgtgagtgcagtgcgagcatgtgagcagtgagagcgtgcgtgtatgtgtgtgcatctgtgtgtgtgagcatgtgtgtctaagcattgcaagcttgcatgtatgtgtgcacctgtgtgcgtgtatgtgtacctgtgagtgcaatgtgagcgtgtctgagcagtgcgagcatgtgtgtgtgcaagcatgtgtgtctaagcattgcaagcatgcgtgtatgtgtgcacctgtgtgtgtgcacctgtgtgtgagtgcagtgcgagcctgtgtgagcagtgcaagcgtgcatgtatgtgtgtgcacctgtgtgtgcatgtgtgagcagtgtgagtgtgcgtgtgtgtgcacctgtgtgtgtgtgtgtgtgtgtgtgtgtccagagaggtggctgcaggaagagaagagggcaagtctgagaaggggattggcaaggcagtatttcagccacattgggtgggatccagagacc

SEQ ID NO: 38737 - DNA, 1309 bp, Artificial sequence
  DNA replication origin
cggggcggctggccgggcggggggctgacccccccacctccctcccggacggggtggctggccgggcggggggctgacccccccacctccctcccggacggggcggctggccgggcggggggctgacccccccacctccctcctggacggggcggctggccgggcagaggggctcctcacttcccagtaggggcagccgggcagaggcgcccctcacctcccggacggggcggctggccgggtggggggctgacccccccacctccctcccggacggggcagctggccgggcagaggggctcctcacttcccagtagggggtggccgggcagaggcgcccctcacctcccggacggggcggctggctgggcggggggctgacccctccgcctccctcccggacggggcggctggcctggcgggggttgacccccacctccctcctggacggggtggctgccgggcggagatgctcctcacttcccagacggggtggctgccgggcggaggggctcctcgcttctcagacggggcggctgccaggcggaggggctcctcacttctcagacggggcggctgccgggcggaggggctcctcacttctcagacggggcggttgtcaggcagagggtctcctcacttctcagacggggcggctgggcagagacgctcctcacctcccagatggggtcgcggctgggcagaggcgctcctcacatcccagacggggcggtggggcagaggcactgcccacatctcagacgatgggcggccgggcagagacgctcctcacttcctagatgggatggcggctgggcagagaggctcctcactttccagactgggcagccaggcagaggggctcctcacatcccagatgatgggcggccaggcagagatgctcctcacttcccagacggggtggcggccgggcagaggctgcaatctcggcactttgggaggccaaggcaggtggctgggaggtggaggttgtagcgagccgagatcacgccactgcactccagcctgggcaccactgagcactgagtgaacgagactccgtctgcaatcccggcacctcgggaggccgaggttggcggatcactcgcggttaggagctggagaccggcccggccaacacagcgaaaccccgtctccaccaaaaaaatacgaaaaccagtcaggcgtggcggcgcgcgcctgcaatcgcaggcactgggcaggctgaggcaggagaatcaggcagggaggttgcagtgagccgagatggcagcagtacagtccagcttcggctcggcatcagagggag

SEQ ID NO: 38738 - DNA, 939 bp, Artificial sequence
  DNA replication origin
tgggaagtgaggagcccctctgcccggccagctgccccgtccgggagggaggtgggggggtcagccccccacccggccagccgccccgtccgggaggtgaggggcgcctctgcccggctgcccctactgggaagtgaggagcccctctgcccggccagccgccccgtccaggagggaggtgggggggtcagccccccgcccggccagccgccccgtccgggagggaggtgggggggtcagccccccgcccggccagccaccccgtccgggagggaggtgggggggtcagccccccgcccggccagccgccccgtccgggaggtgaggggcgcctctgcccggccgcccctactgggaagtgaggagcccctctgcccggccagccgcccggtccgggagggaggtgggggggtcagcccccggcccggccagccgccccgtccgggaggtgaggggcgcctctgcccggctgcccctactgggaagtgaggagcccctctgcccagccaccacccagtcttggaggtgtacccaacagctcattgagaacgggccaggatgacaatggcggttttgtggaatagaaaggggggaaaggtggggaaaagattgagaaatcggatggtggccgtgtctgtatagaaagaagtagacatgggagacttttcattttgttctgtactaagaaaaattattctgccttgggatcctgttgatctgtgaccttacccccaaccccatgctctctgaaacatgtgctgtgtccactcagggttaaatggattaagggcggtgcaagatgtgctttgttaaacagatgcttgaaggcagcatgcttgttaagagtcatcaccactccctaatctcaagtacccagggacacaaacactgcggaaggctgcagggtcctctgcctaggaaaaccagagacctttgttc

SEQ ID NO: 38739 - DNA, 1178 bp, Artificial sequence
  DNA replication origin
ctttccgtcgctccggcccgcctcgccgcaaggctttctgggagccgtagtccccacgtctggcctctccggcgccagcggcagcgcgcgcccacccgcggaactacagagcgtggcgcacagcgcgcgaggctcctccgcctcgccttccctccccgcccgcgcgcccgccccagttatcatggcggctcccttggtcctggtgctggtggtggctgtgacagtgcgggcggccttgttccgctccagtctggccgagttcatttccgagcgggtggaggtggtgtccccactgagctcttggaagagaggtgaggccactggctcgagcagactgtcaggccccacctgccctcccgcggcctctgtgaatgggaggcgggggcagtgaccgccagcgcgcggttcctagagaactaactgactgtctcgtggggttcttggagagggcggggcctgagggcggggctggtgaggggagggggcgtggggaccggggcgtggggacagtgtcgtgaggtttgggccctgggggccggaccacctagtggtggggatctgagggggcgtgtcccattcagtgtcctgagccgaggagtgtggtctgtgggaagggttggaataagaggaggaggtgcttgtggagcgcggcttgcagaggagtttgggatttggggcgggatcgccaggggtgctccctgggataaaaggttatgtgtgagggggtccgggatgaggggaccaattttgcttaagcgaggagagtgtgcgtgtgctttagacgtctcttctcagtctgggacttgcagggcaatttttgttactgttccttactaagttcttcaccgaacattgttttatactaacgcctacagcgagaaagcgaagttggcctgaagtagctgcacaggctagtgagggagacaaatcgttataataattcatgaaaagtatactttatgtgtccacccagttccttccttagtattctgaccctgaataaactatcccctacctttccagttttccagaatgtgggatttgagctgactcttgaaggatgtagggttttgaaagggagattagagaaaaggagagttccaggtagcagaaagtaaataggatgaagaaacgttcaaggatgtgaaatgtccaaagcaggggagtaatggggtgga

SEQ ID NO: 38740 - DNA, 1366 bp, Artificial sequence
  DNA replication origin
gccggcggagacagacaaaggcccgggcgcggggggcgcagggcgtgtccgtggcaggggagcccccaggcccacccgggtcgggactcacctgggggcgggaggggggcggcacggcgttgaggtagttgtgcggcggggcgtcccagggtcgccggccgctcacaggccgggccgcatcgccgggactcgcgggggaggcggcggggccgcggtcgctccgggctgctgagctcgcccgcggggctttgagtctgtgcggccgctgcggcggggctcacggcacaaattggaacgttcaaacagctgattgtgacgtcacaaaggggcccgcccgcctcgcgtcaccggctggcggggcggcggccaatcccgggctgcggatccccccctgcccctcccctcccctcccctcccggtttgcgggccgggcgctcgggccgggaaacgttctcggaaccgggagggtgagtgttcggggaggcagctgcggggagctgggagccctgcgccgcggcgagctctccgcgaggaggatctccactccctcctaccggctccttattttcctgattcttcccggatcgcagcgccctcacctctcccactgctccccaaatcctttcactgcatcctatatccaagtcccccgatgcggaccctgttctcgacccacaccacgtccgtgcacctgcattctccccactgcccttattcctgctctccctcccccctctggctcacctcctcagccttacacactctgctttcccaccccgtttttcctcagctcggcgggcttgagaaaagagggacatccccaacccccggttcccggggagcatctgggaatgtagagaagttagtgaagctgacgtgaaatttcgcagagtaggacttggagaggaattgccctgggctgagtaaacattgacctgagacggctccgcgcttgaacgtttacataccttatttaatctatgttgctaccggggctgtaaagaagtggcaggacagggactgattatgagtcctgatttacacgtgggaaagctgagtctcacaatctcactgttagcgtgtgaactcatgttcaacaatgcattcaacatttattaggcacctactattgcaccaccataccactagctgacatgtattggcacacttactgtgtgccacgacctgtgctatgggtgtgtttttttatcttcacaacaacccaaaaggtagatattgtcccgtttaacagttgaggaaacagactcagagagctcaagtgactttcttaggtcacaaaagtacagtcaatggcagagccaggatttgaacccatagctcccagccctgaccctctccattctct

SEQ ID NO: 38741 - DNA, 1141 bp, Artificial sequence
  DNA replication origin
ctttgtgacgtcacaatcagctgtttgaacgttccaatttgtgccgtgagccccgccgcagcggccgcacagactcaaagccccgcgggcgagctcagcagcccggagcgaccgcggccccgccgcctcccccgcgagtcccggcgatgcggcccggcctgtgagcggccggcgaccctgggacgccccgccgcacaactacctcaacgccgtgccgcccccctcccgcccccaggtgagtcccgacccgggtgggcctgggggctcccctgccacggacacgccctgcgccccccgcgcccgggcctttgtctgtctccgccggcggccgccggggccgcgttcccggctcccgattggttgccgcacgcccggtagaccatgacgtcgttctatttgcatatgacattgagacgtcaccaaggccggtaccgcccccacaggctcgggtcgcttgtcctcccgtgacccggtagccgctgtgtcggggctgggccctgggtgagacgctgcaatccaaagggggctgcagggggatcggcgatttcctaggcttatccaggggctggggtcaggcctctgatcccctactttctctttgcaacctgagaaggagtcagacggcgctgctgggcctaggttgagggggtcgtcaggagttcagggctgcatgggactccaggtggttgggacagcaccagatggtggtgggatcccctccctccggctccagactccgcccccagggactaacagaataacatcctcctaatccctgatttgtgtgcagcgccttagctgatgtcactcctagacccaaaatgaagggtcttagaccccagtgcatggaaggggcaacaggcccagagaggaggattagctctctcgaggtcacataaccaattagagtcatgctcactgagtgacagatggattattagccaggggcaaagacataataggggctcagtacaagtggtaagatacacatcctccttccactggggacccgatcttgggctcagccttatcacggtttgataggctcctaggtgtccttactcctggacccttttccagggaatctctggagattggttcaccttttgtggtcctgaccccttctgtcctcactgtacct

SEQ ID NO: 38742 - DNA, 957 bp, Artificial sequence
  DNA replication origin
caaggagggcgcgggcggagggcggcccgcgggggcaggggcggccccggggctgggtggagccgcgtagctgtctacggggcgcgggatgggagccgtgcagaggaggggagcagcgaggaggcacacacacacacacacacacacaccggacaagggggcggggagagaaagggcatcgttagtcagacccgcagcccgtccgcagcgccccggggcacccacgggccaggcgtctcgccctgctgccctaggggacctgacgtgcgggcctctcctgggccgccaggagagagccccggctttcatgggaaggggccccgtgaccccacctccagtaggcttgggggactcccccgtcccccagcagcgcccttcccctccgctgctaggccatctgcccttagaatgacttcacaggcccaggagacagacccaggcctcacccggcaggtcaatgatgagccagccgtccacttcatcctcctccgacacgaaggcgcgggggcagtcggggtcttcggggggcgagggggtgctgaagaagaggctggagaggcgctggaacatggtggggggcgaagcgcctcacgggggcgccctatggcagtgcaaaaacctgggaatcagaaggacgtgagagccaccactgattgaggttcaccccactcctggcctggggaagaggccagaagatatcacccccagagcagggagaagggtacacacaacggggatgtgtgcggacgctttgggaagatgtgctttctgcattcaaatccagggttttttttttatcttctgtatgattttagaaagttatttaacttatctgtgccttagttttctcatctgtcaaaagacaatgataatagtaccttcctccgggctcttataagaattaaataagctaataatagtatcctcctccaggctctaataagaattaaatgagct

SEQ ID NO: 38743 - DNA, 851 bp, Artificial sequence
  DNA replication origin
cacggctcccatcccgcgccccgtagacagctacgcggctccacccagccccggggccgcccctgcccccgcgggccgccctccgcccgcgccctccttgatggacgagagctggtttgttacccctcccgcctgttttacggcagaggggcctggactcggtcccgcccgcctccagagcagtcccctggaggacctcctcatcgagcaccccagcatgtccgtttacgtcaccggcagcaccatagtgctagagcccgggtccccttccccgctcccggacgcggccctgcctgacggcgacctcagcgaagggtgagcgggccgggggcggagcctggaggcccagggagacggatcttggaggccagggtccaggctaggaggctggggtagtggggccaggagcccgccccgcgctcgagggggtagcggccttgggagggttgcctttgagacaaagtggggggccggtgggcctccgggcgaggctagaagcgggcctgaggacggaggggcggggcttgagagggaggggcgtggccaagaggctggggccggggttggaggcttgaggagcgtggctggagcgcctagggagtgggacttaaacagaaaggcaagggtggaatagggggtgggggtccagtctcccccgaggtccagtttacctgttaagggctagaaccgaggaggcacctccgggttggtacccacaagaagggcgtcgggcaccccaatctgaacagacacagaactgagccgaagcaagggtgggagatggcagcgccctctagaccccccgcccagcttacccggcttgaccgagcctggctctgtcctcacaggga

SEQ ID NO: 38744 - DNA, 969 bp, Artificial sequence
  DNA replication origin
cttgtgaacagacggccaggatggtagggccttgcccagcttctactcgggtgacgtgttgggggtagagtggcaaggtactaactaagcccttcagatttcagggcctgcagaagggtggattatagaaaagggaagtgggggcagactccaggcttcagcctgggagcagggtttggcctctctgagcaagcacagtgcacactcccttggtgccctgctccctgcagcttctcaacgtgtctgtcctgtccgcatctccaataggctgcctcgttccctagattccctccatcttctccctctaactcacgtctcacagtcctcttctacatactgtacctttccaggcctaagcagctccacagagtaccgcccccaaggcagaaggaaggggagactaaaagcaaaaccctgagcccttactggagggcaatgacagcagcccaggctgcacaggctctacctggtcagagctgggctcagggtccccaccatttggtagggaattactgggaatgaagaataagggaacaggagtgagtgtaatgccaaccatgggatagtgtgagacatgtaaggtgggagttgaaggtggggaatgagccagatcagggactggaagaagctttcagaaataggggcaggccagaggtagaggactggagggcaagggtgaaagggagagacagggatggggaccagagaagaaaggatggaggggccaggagtagggggcatggatgattagatgctgggtatggggaccaggagtgagggtgaagggtgaatgggttcagaggcagattagaggatcagagatggggaaattgagggtgtcggggaaggaacggctatcacccaacctcacacgctttaagaagggaggtttcggtgtccagcccgaggagtcggaggagcccgacagggatcgggatcggcaaggggttcgtggcgcggccggtggac

SEQ ID NO: 38745 - DNA, 1512 bp, Artificial sequence
  DNA replication origin
tccccctccctccccggcccggtccggcccatccccctccccgccggctccgtgaggccctgccgggtcgggctgcgggcggccgggcgcgggcggcgggacagacgggcgcacgcgaggactgacggacggacgcaccgagggcggcgggcacgcacggcccgggccggcgctccaaggcccgcccgggagggccggggccgcgctcaggtgaggggacggcggcgcgggcccgtaaggggtgggcccgccgggcgtccgcggtccttgtcgggctggcttcgcggggaggaggcgccgcccgggcccgcgcggaaaaatggcgccgggcgaccgagtggcacggtctgagagcgggcccggcccggagccgccccgcccgccgcgcttgtgtccccgtcgccatgttggggagcgggccccaggcctgcgggcgggggcgctggagggagcggcggccgggctgggtggggagggtgctgggcgcgggggccggtgcactgagggagtgcagggctggccggggtctgcacggggtggcgctccaggcctggggaacaggcgggagccggtcgtggggtcgtggtcagggtcgcggagaaggaacactgggtccgaagggaaccgggattggggtctatgggctgagaggatggcaggacgtggaactgggttaggccttaggcggtgttagagccctaatgcaggtaggacctggggattggggtggaggcatgggggccaagctcaggctgtcagggctggagcagttctttgctgggagggaaggaggtgattgatgaggaatgagggccctttgggtacagacgctggttcagattggggcagtccttggggtactggggctgaattgcaaagctgtataactcccaaggctctgaagacttatgtcccaagcatcctccaccccctcttgggggaagcaacaggaaaaaggaggtgtttgatgagagaaaagggggacaaagggagactgaggtttgggtgcaggagctggccagcaaaagaggcacagagagtggaactggttggcaaggaaggagagaacctttatcaacttagggagttgtgtgtgtctttaaaaggagggacctggctgtttgggggcggtgacccaaggtgtcttccctggaaggggacagcccacagcttaagagcagagtcacctggagaggtcatcagaaaggcgttattgaagccagtaaaatggtgaagaagagtgaatgtataaaaactacaaaggcctgagagatcaagtaaagatttcaaatcaggtagtgattttagctgaaacatagaaaggtaaagttgacttttcaagatcttacaagttagtggcagaggggtactagaaattgtcggctgcttcctcactaaacacattgccttaaaggaatttgctagctgggagaaaggtgttaagaaatgaagcataacattcttgtgatgaaactaaaagcaaacaaacaaaaacaacaagaaatgaagcat

SEQ ID NO: 38746 - DNA, 937 bp, Artificial sequence
  DNA replication origin
cccggccgccgctccctccagcgcccccgcccgcaggcctggggcccgctccccaacatggcgacggggacacaagcgcggcgggcggggcggctccgggccgggcccgctctcagaccgtgccactcggtcgcccggcgccatttttccgcgcgggcccgggcggcgcctcctccccgcgaagccagcccgacaaggaccgcggacgcccggcgggcccaccccttacgggcccgcgccgccgtcccctcacctgagcgcggccccggccctcccgggcgggccttggagcgccggcccgggccgtgcgtgcccgccgccctcggtgcgtccgtccgtcagtcctcgcgtgcgcccgtctgtcccgccgcccgcgcccggccgcccgcagcccgacccggcagggcctcacggagccggcggggagggggatgggccggaccgggccggggagggagggggagggagggagagagggagggagcgcgagagggggcggggcggactcgaggggcggggcattgcccacgtgaccagacgtccccgggagcgcgaggtggagcgcgcgccagctcccttcggtgctgagtgcttagtgctgggatctcgtgggtctctgtcggctttccagggctattctctcgccagtgagtcccacttcggaagcacacattgcacagtcttttgcgagcgctctgagtatccttggacatggcaactccaagcctcagtttacccatctgaaatatggggaaaatcatagtgcttgtgaagagcaaatggaggtgggcttggaaagcacttgtcaccgtgcctgacacatactgtctaataataagcttaatgggatatagataaaagctttcattattatttgcctctaaatccctctcttctttttcccatcattacctccctagcaagctaaaatgctcag

SEQ ID NO: 38747 - DNA, 685 bp, Artificial sequence
  DNA replication origin
gggcgggacgccaggactggaccggatgagacgcgcaatagatggggtagatgggggctgagtggcccaccctaagtgccctgacccccaggagcctgttaagtgcgaggcagggatgtctaagggcccttcccagaccccctcgtttgaggccgcctccaggtgagggtgggataaggtggggagggggtctgaggagcaaactggaagagagggcctctctggcttgggctccaaatctcaaagattctacccttctccatcaacctcatgtctctcccaaatccccaggccccactgacctagatcatgagtcacgttgaagccatcttgggccacagctgctgcaaaggccaggacttgggaccatggcagcctgggggggccggagagcagggggtggaggaggtcctgggggaatgaggaggggtccggggggaggggggttcctgggaaggagagtcctggcaagggaaggggatattaggagggggagttgggaaaggaagaatccagggaagtaggagaaggccacccaaggagagatgcaaacgggggtccctggtccccagggggagggttgttacctgccatagagctggtgagcttcatgtagccccttcaccattccgggaacccccaccaagagcccaggctgggcaaggcgggtaggcgagggagagag

SEQ ID NO: 38748 - DNA, 1171 bp, Artificial sequence
  DNA replication origin
caccccccaggaagtgttctcagccctgggccctgggtgccaggaaatttggcctaggtatcagggaggggcgggaatccagcctccctgctgcccagctggggaggtccctgtctcttcctagccgggcaccgttgccccgcctgtcctggggtgcacgcgaaaatgaggaaaggtgagtagtgctagccagtgcggggattgtgtggcaggggcggggcagggaaagcgctgaatagtcccacctggagggtgggcagggccagataggagatgcccagaccgaccccggctgcctgcccgcagacccggactccttcctgaagtctgcacggctgcagcggctgccatcgtcgtcgtcggagatgggcagccaagacgggtcgccgctacgcgagacgcgcaaagacccgttctccgccgcagcggccgagtgctcctgccgccaggatgggctcacggtcatcgtcacggcctgtctcaccttcgctaccggtgtcaccgtggcgctggtcatgcagatctacttcggggacccccaggtgagggggacaaatggggagggggaggaaactggggagtggggagtggggtaatgtttgaggaactgtggaaactggggaatggctgagtggtagaaggggagagagggtggtgacttgggagaggaaggtcccaaagagaggagctccagggcatgagggagacagaacaaggaagaataaggacagatccattaggaggcacttggggtaatgagggcagagtcaaggcaacaagggggcagggcttcgaccttcatgccgcgtagagttctagggctagtggaggtgccctagggaggtggacagctcctcctgcccccaccaagtcctctttcccctcccagatcttccagcagggtgccgtggtgaccgatgctgcccgctgcacttcactgggcatcgaggtgctcagtaaacagggatcttctgtggacgcagcggtggcagcagccttgtgtttgggtatcgtggctccacacagttctggcctgggcgggtaaggagcagtggaggtcggggtcccccaggcctacttcttgcctccaggtctgtaggcctcatgtgcagcactcctaacttagggagaggggcttttgggccccaactccttgcattttctctttcta

SEQ ID NO: 38749 - DNA, 926 bp, Artificial sequence
  DNA replication origin
caaataattaacagagacaagggagaagaagggagagatccaagaagatggggatgaattaaggagatggagctggaggtggatgcttgacacagaagaaggaagaccggggacttcccaaggcagggcagggacggggtcagcgggcctcaccggtgtcggggtctcccagaaaggcgtcctcgtccttgcggcccctcagcggggccgcgggcgccggctcgtcctcgggcagccgcgggaagctggtgatgctcatgtagtccactggcgagtaggcgcccagggcgctctcctggctggcctcgttctccgccgccatcctcgcccgcgccccccagcagcgcagcgcctgccggaagtggctgcggcgggggagtgggagggcggagggcggggcctgatcttcgcgacagccgggagggggcgcctctcccagccctcggccgtgtcccggtctgactcgcccccgtctgctcagcgctatcagcctgcagctggcacacaggtgcgtgtagatggacagccaggaaggcagcgcagggtcgaggggagagcgcggggcaagcgagacttcagtggctctgcactttacgcagctcagggaccaaaccccttcctccttccagcctgaatacagctagtgtcctcctcaaatcccaggcttccttttcgggccccagaccctttcactgaccgcaaatccctctcgaccccagatcctgtctctgaccccaaactcctcggaccccagacccctccttgaattccgagatcctcctcctccgattttagactcctcctccgaccttagacctctttttcgacttcagactctgtcttcacccccaaacccttttgaaaaccccagcccatgcttcatctccaggcctctttgactgcagacgcctctttggacaacagat

SEQ ID NO: 38750 - DNA, 922 bp, Artificial sequence
  DNA replication origin
cgacttttccttatagtatttctgtccttgccaacctcgatccctccccaaccagacacggccccgccccctctggcaccgcccacccgccagactaagccactcccccactcaccaggccccgcccctctacggaggccccgcctctagttcggcctgttttctcagtcccggcacccgccgcgaccgcaaaggcggccgcggttctaggaacttgacgtgatggggcttcctgaggagcgggtccggagcggcagcgggagccggggccaggaggaagctggagccggaggccgggcgcggagttggtctccgccgcccgaggtcagccgctccgcgcacgtcccctcgctgcagcgctaccgcgagctgcaccggcgctccgtggaggagccgcggggtgaggcccggcccgggcgggcctggggtgtcagtgaggagaagagtgggggctccctgggggagtcgggggctcccttgggaagctgaggggtgggtgaggagatggaggttctgtgaaggaagaattgcggttctttgaaaatggaaaagggattccgggaggagacgagggttccatgggagctggggagttccctgcagacttggagggtccgtggtggagatgcgggtttttgcgaggagacgcgggattccgtgagggaagaagtgaggttccttgagattgggacggggaggtcggccaagagagtgaaagtttcatgggaagagaaggggagttcctgaggcgaaaagagggtctctaaggggcgacgggagccttgaagggaggagggccacgaatagaactttctttgcttccctttcacaccagctcagccactgcctcctgagacccttaacctgtgaactgttgagggcaataacgggtctggttcccatcttggggtcctcagattag

SEQ ID NO: 38751 - DNA, 1173 bp, Artificial sequence
  DNA replication origin
ggtcaagtcggaggctaccgggggcagagtcaccgtggagaccaaagaccagaaggttccgttccccctttcctgagattagcctctctgtccctaggcctcctggccaacaggatctgccctctggttgaagggggtctgggtatgtgggtgggggtgacaggtgaggtcggtcggttcctcccggtcccccggcccctgacacgatctccctggtaggtgctgatggtgcgtgaagccgagctgcagcccatgaacccgcctcgcttcgacttactggaggacatggccatgatgacgcacctgaacgaggcctctgtgctgcacaacctgcgccagcgctatgcccgctggatgatctatgtgagccccaggcccgggccatgggcggggtggggcttgtatgtggggcggggctagagatgaggtgctgggggcgggcccatagcggtggggcggggctgtgagcggtggatcggggctgtgaatgatagagcgggtccatagcgggggtggggctgtgagcgatgaggcggggctctgagcagtgggggcggggctggaggttgggccttgggaccttaggggagcagctgtagcagtgcggggcgggtctagaactcacctgcggactatggaggccgtgcgtgtgggctggggcagggctgtgagcacaagtcaggggtgaggccaggacggccacagagggtgtggtgtggcaagtcaagtagctccttgaggaatatcgcagggttcttctgaagactggggcctggggcctggggatgggaacttgcgtatccctcccaaaaccctacctatggggggagaatgtggtggcccatgcctgtaatcccagcactttgggagggcaaggcgggcggatcacctgacgtcagaagttcgagaccagcctggccaacatggtgaaaccccgtctgtactaaaaatacaaaaattagccggtcgtggtggcacgcgcttgtagtcctagctaccctgggaggctgaggcaggacccaggaggcggaggttgcggtgagccgagatcatgccgttgtactccagcctgggagacagagcaagactccatctcaaaaacaacaacataaaccctacctatactctctcttcagacctactcaggcctcttctgtgtcaccatcaacccct

SEQ ID NO: 38752 - DNA, 1048 bp, Artificial sequence
  DNA replication origin
ccttctgctgagtggaggccatcacagcgcctgtttctcaggaccgtcagcgctttaaccaggataatgcagagaaagtatcttgcctggggcccggcccgcaagagtcttggaagacactgggtgccatcgctacccctccgggccacacgctgatgtcctgaaatggagaggcaagtgccgtaccccgttttttgaggtggggaaatggaggctgggggacacagaacagaaccttgccccaaccagccacaggggctgatctgactacagggcagcatgttagggttgggagagccagtgggtctgggagctgagaggcaggggacacaccctgtccccagcctccttcccacacccacctgcctcccagcaggcgctggtactcaaggcgcatgaggcggccacggctccgcgcctgcagcagcgtcagcaccttggccaggcgctggtcacggagctcttccaggacgcctagaagcccagccttgaagaacacctgggggcggagaggtagacagccagggtaacccccaaccatccgcatgaaccctgcccagtgtgaccgccacagccatggccagccctgatcccacagtgccccgaccttggtgtggccaaactggtactgggtgtgatccaagtccagcgagcccagcagtttctctgtggccttcctgctgtccatgaaggtgtcatccgggatggcactggggttcaggatacggtacctgggaaaggagggcagagctggtcaggagagggctgggtatggggcacaggccactgagaatggggaagtcagggactgaggaggctcgtgtgggtagcaggggactcgttcctgggcctctccgaggctggtgcagaggttccagcagggcacatgccaaacaagggggccagggatgcgtcaccacactgggacactagggacactccacttaaaatccctggggggttggctgggtgcggtggctcacgcccataatcacaacactttgggaagccaaggcgggtggattgcttgagcccaggagttcaagac

SEQ ID NO: 38753 - DNA, 1126 bp, Artificial sequence
  DNA replication origin
gaatcctcattacaaccccatgaggagggtccttccctcaggcagaagcggtggaggctcggagtcaagtgacttgcctgagtcccatagctggaaggggcacttgctctgacctggtgtggtgtggtggccgctcagagtgcggggaagggcgtccccattctggccctggccctggcacaggtgaagaacctgacggaagagatggctgcgctggacgagtcagtggcccggctgaccaaggagaagaaggcgttgcaggaggcccaccaacaggccctgggtgacctgcaggccgaggaggaccgtgtgagcgcgctgaccaaggccaagctccggctggagcaacaggtggaggacgtgagtcagggccaccccgagactgggtggcggggccggggtgccggctggcttgggccatggctgacccctgctgtgcctgctctgcagctggaatgctccctggagcaggagaagaagctgcgcatggacacggagcgggccaagcgcaagctggagggtgacctgaagctgacgcaggagtcggtggctgatgctgctcaagacaagcagcagctggaggagaagctcaagaagtaggtgtggtggggcagcaggtgggggccttctgagcctgcacctggcccttgttcccttctggattcttgtggttcctgcggcattgcagaggttaagggtgggggttgacagatggggcactggggtgcaggggtagtgtcttgccctccctgtactgagggccctagccagggtccagggctgaggcctcagggcccagtgcagcaggtgcatggggtgaggtccctcagggcctgaaggggactggggggcgttatggggtcccaggcgggtgggtgggagttaaggcctgtgctggccacccactctgtggctcccaggaaggactccgagctgagccagctgagcctgcgggtggaagacgagcagctcttgggggcccagatgcagaagaagatcaaggagctgcaggtgcgtggggatcgggtgggtgaggcctggggtcagaggcccacagaggtgacagctgccccacgtgcccaccccaggctcgggcggaggagctggaagaggagctggaggcaga

SEQ ID NO: 38754 - DNA, 1205 bp, Artificial sequence
  DNA replication origin
atggggtcccaggcgggtgggtgggagttaaggcctgtgctggccacccactctgtggctcccaggaaggactccgagctgagccagctgagcctgcgggtggaagacgagcagctcttgggggcccagatgcagaagaagatcaaggagctgcaggtgcgtggggatcgggtgggtgaggcctggggtcagaggcccacagaggtgacagctgccccacgtgcccaccccaggctcgggcggaggagctggaagaggagctggaggcagagcgggcagcccgggcccgcgtggagaagcagcgtgcagaggcggcgcgggagctggaggagctgagcgagcggctggaggaggcaggcggcgcatccgcggggcagcgcgagggctgccgcaagcgggaggcggagctggggaggctgcggcgggagctggaggaggcggcgctgcggcacgaggccacagtggcggcactgcggcgcaagcaggcggagggcgcggcggagctgggggagcaggtggacagcctgcagcgggtgcggcagaagctggagaaggagaagagtgagctgcgcatggaggtggacgacctggctgccaacgtggagactctgacccgcgccaaggtgtccgtgccttcctcaccccatacccaccctgactttaaaccaatcccgatcccagcagccaatactgttcccacaccagcctccacccagtaccttatcctgagccctgacctcttcacctggtacacaaccctcatttctcagcctcctaccagtcctgaccttaagccgtgactcccaagccctgttccctgactccaggtcatttctgatccagcatctacttccagcctcagacccttgaaccagcagtagttgtgaccctagcccttgactcctgaactctgacttaatacctgtcctctcttcctgtcctgaaccccagcaccctagccttaacccctgacctttctaccacataatcctgacagctgacctctgaccattgtccccaggtgactccgcagctaccatcccaactctcaccctgacccactgccctgggactggcccagccctgtcagttctgacacctgttaagcccagcagtagaatctctttccctgactttgaacttggggctctgctctccctttgattcctgggcccacatctagcttaccagtctctgatcccaga

SEQ ID NO: 38755 - DNA, 2007 bp, Artificial sequence
  DNA replication origin
caaggtggaggagctgcagcggcagctggcggacgcaagcacgcagcgtgggcgactacagacggaaagcggtgaggctggggctcagctggccacaccaggcagggctttggtgcagccctcaccagcctgacctgtccgctcgcctctttgcctgcaggggagctgagtcgcctgctagaggagaaggagtgtctgatcagtcagctgagccgtggaaaggccctggccgcccaaagcctggaagagttgcggcgccagctagaggaggaaagcaaggtgggctggcaccggtgaccatggagtgggcaggtgggcaccagagccactgggctgcactaacgctgaggtcactggtgtccctgcaggccaagagtgccctggcccacgccgtgcaggctctgcggcacgactgtgacctcctgcgggagcaacacgaggaggaggctgaggcccaggctgagctgcagcggctgctgtccaaggccaatgccgaggtggcccagtggaggagcaagtacgaagcagatgccatccagaggaccgaggagctggaggaggccaagtgagtgctttgctggccaggccactgccatgcagagctttatgcctgtgcctgagccccgctgagggtgggtgaagggagctgctggggctgttctccctccttccatggtccacaccttgtctggttccatggcctagaaaaaagctggcactgcggctgcaggaggcagaggagggcgtggaggctgccaacgccaagtgctcatcgttggagaaggccaagctgcggctacagacagagtcagaggatgtaaccctggagctggagcgggcgacctcagcagctgctgcgctggacaagaagcagcggcacttggaacgggcactggaggaacggcggcggcaggaggaggagatgcagcgggagctggaggcggcacagagggagtcccgtggcctgggcaccgagctcttccggctgcggcacggccacgaggaggcacttgaagccctggagacgctcaagcgggagaacaagaacctgcagggtaggacctgccacacgccagggccagggtgctgccctggggtcggagcaactttgagttatgggggtgccctggtggggccaccctggaatcaggggtgagtggagtgacctgggtgggagtacaagccatgggggtggcctctcagcaccctgtccactgcagaggagatcagcgacctcacagaccaggtgagtctcagtgggaagagcatccaggaactggagaaaaccaagaaggcgctggaaggcgagaagagtgagatccaggctgcactggaggaggcagaggtcaggggctggctgcaggggtgggtggacactgacctgctgctccactggccatcccccccccccaccctaccctgcctgctctgtatccacagggggccctggagctggaggagaccaagacgctgcggatccagctggagctctcccaggtcaaagcagaagtggaccggaagctggcagagaaagacgaggagtgcgctaacctgaggtgtgtccatccttctcccgtccccacctcccgagagcagaaggggagggaagcagtgtgtactctgctctctagtctgtccctcccatgggactttgaggtccgggttgctgtctccattctagctgtgaacctcggagatgctaaaggacttgcccaaagtcacacagtgggggtggagccagtcagtccacctctgtctgcctgggcctcactcttgtccatgaacttgctctgatgggccacaggcagtcacaagagactttaaatcggggaggggtgactcatttgttctcaaaatgggttcgtttccaacggtccttgggcatttgtaaggacaggtatgcccttacgagaccccctttcatgccaccctcctcccataggcgcaaccaccagcgagctgtggagtccctgcaggcctccctggatgcagagacacgggcccgca

SEQ ID NO: 38756 - DNA, 948 bp, Artificial sequence
  DNA replication origin
tgggttcgtttccaacggtccttgggcatttgtaaggacaggtatgcccttacgagaccccctttcatgccaccctcctcccataggcgcaaccaccagcgagctgtggagtccctgcaggcctccctggatgcagagacacgggcccgcaatgaggcgctgcggctcaagaagaagatggagggtgacctcaacgacctggagctgcagctgggccatgccacccgtcaggccacagaggcccaggctgccacgcggctgatgcaggcacagctcaaggaggagcaggcagggcgggacgaggagcagcggctggcagctgagctccacgagcaggcgcaggctctggagcgccgggcctcgctgctggctgcggagctggaggagctgcgggctgccctggagcagggcgagcgcagccggcgactggcagagcaggagcttttggaggccaccgagcgcctcaaccttctgcattcgcaggtggggacaggagtccctggggacagagcaggtgcaggcctgctggctggctggctctgagactcctcttcccctcagaacacaggcctcctaaaccagaagaagaagctggaggcggacttggcccagctgagcggggaggtggaggaggctgcacaggagaggcgggaggctgaggagaaggccaaaaaggccatcactgatgtgaggctgggcaagggctgtggggagcctgggacagaattgcagagggacttccctgaggctgggcacctgaccagctcctcctccccaacaggcggccatgatggccgaggagctgaagaaggagcaggacacaagtgcacacctggaacggatgaagaagacgctggagcagacggtgcgcgagctccaggcccgccttgaggaggcagaacaggccgccctccgtggcgggaagaagcaggtgcagaagctggaggc

SEQ ID NO: 38757 - DNA, 1418 bp, Artificial sequence
  DNA replication origin
gctcctcctccccaacaggcggccatgatggccgaggagctgaagaaggagcaggacacaagtgcacacctggaacggatgaagaagacgctggagcagacggtgcgcgagctccaggcccgccttgaggaggcagaacaggccgccctccgtggcgggaagaagcaggtgcagaagctggaggccaaggtgtgtgcagcccctctagtccttggcgcaggcagggtgggtgacccaggggtgggcttggcatcaggctgtccccctgcctgcaggtacgggagctggaggctgagcttgatgcagagcagaagaagcacgccgaggcccttaagggcgtgcgcaagcatgagcgccgtgtcaaggagctcgcataccaggtgggcgacagggtctccctggggagtggccctggagctggcccagcccaagcaagccctgagtcccccttgcccgcccaggccgaggaggacaggaagaacctggctcgcatgcaggacctggtggacaagctgcagagcaaggtcaagagctacaagcgccagtttgaggaggcggtgagtgcgctggggcctggacacctggaccgggcaccccagctctgccccagggtctgtggccaggtgaggcatcagcagcagctccaccctccaaggtcagtgacccagagggaagagagaagcttctaacatctctggggagatcagacctagctccttctcatggaacagaccccatgtgctttcccctggccaaggctggggctgcctctgaggggtggggcaggcacaaaaaggcacatgaagttggtgcgtcccaacttccttattcccgctgtggtattggtgaggatggacagtggcaataggaacaaagttgagaaccaggaggagctagctcccttcttggactggggcagggaccagaataagcatctcagtcacccaagcggaaccaaggccctgtgtgtgcccccaggagcagcaggccaacaccaacctggccaagtatcgcaaggcccagcacgagctggatgatgcggaggagcgggcagacatggcggaaacccaggccaacaagctgcgggcacggacccgggacgccctgggccccaaggtgaggagtggcaggggcattgctctctgtgcagggggactgtgggggctgacaggtagtactgctcactcagctatccctttctcctcagcacaaggagtgacggcctgaccccctgggctctaaagaggaatgtctgctgttgcacatctggctgaggccacctgccccgatcctgccatctctgcatcgccccctgctgccttcagccttccctgggccctgaataaacaccacagccagtttccttctcattcttttctttggggttcaggaggaaaaacacagtcctagggacaaaa

SEQ ID NO: 38758 - DNA, 1703 bp, Artificial sequence
  DNA replication origin
ggtgactgccggtccgggttcaacaggatggacactgtctccttccagtatgagaagctgatgcaggagctctgggcaaagagggaggggctggggggcgcctggaggacccaggtcaagcccagcaccgggacacccctctgagaggccctgggtccgcggcccacccatcacccccttgagggtggggcactcacgttctctaggcaggtgctgtccttgtccttgtgcaggtagtgctgctgccagaagcgcagcaggttgtggaagttgttgagcaggaagccggggtacttcttgctgtgctccatccgctgcagcagccgcaggtacaggggcagccgctctttccgtcgggccagcatcaggatcaccaggctggtgttgaggcagctgacgttctcctgcaaggccacaggcccacagggtcaggggctggtgggagccccagtggcccctggtgaacctgggtagccatcaggcagggaggagagtggccccaggcctcgggccacccacagagctctccctgcacagaggtgagataggactgggggaagggggcccccagcagccccagtttcctgactgagcaccttcctcttccccacgcccacctcccaccccacctgaggcaacaacacctgtccctgtccagacctgggctcaagcatcactccttccggaaggtccgtcccaggcagggctgggtgcgtgtgttggggcggttatcccgcttcagaagtgccattcagcactagcctgcgcgcctcggtggggaaagagttctgccccactcaccatgcactcccacctggtgcttcacctcagaacggaaccaaagaccacctctgagaggtgctaagatcaccctcactctagaaaagaggggcaggaggctcagagaagggaaggctgcatgactattcagtgagggagttgggcagcctcaggtccgattccaaagcccagcagggcagaaggtgtgagggacgtggacatgggggaggcggggagagcactggcctgcaagtcagcctgtgacctgagggcacttgcgagccctccttccttaggccctgtctgtacaatgggacactgattcctcctgagcacagtcctcagaagagctgggtctccagagacgcacttctggagtgggggacagaaacctgctgggcaccaggacaaaggaagtggtttccaatcgaccttccctgctgtgtgtctgccggggcctctcacctgggtcagcgtctgcacgtggatgatgttgatgaggcggaagaggaaggacatctgcgtgggcacctgggatatgtaggcgagcaggcggcattcagacagtacctcggcaactgtggagggaggcaggggtgcagcaggtcaggcttaggcccagtggctgggtcgcccaggcctttcgtggagccccgcttgggtcctgactctgaagctaggagctcatcatcaaaacagcttcaacgaaagctgactgtggcagaaagaaggacctccagctgtcctgctaccaggcaaagccatgttctcagagtgcccaggagcaccccacctcatcctccagaaccaagctcagggcagctctccctcagccctccccagactggctccagacccgtgccctccatatcacacacagaagagttccctccacaggaagatggatccatgacgctgcatta

SEQ ID NO: 38759 - DNA, 1047 bp, Artificial sequence
  DNA replication origin
ccacatctcttttcccacctaccccgctgccgcgcaggactacaattcccagtagcctccacgccgcacacggtccctgccacgcggcttgcgcctccgccgacggcccactgggggcgctgcggcgacccctccgccgccccgtagaaatctccgcggccccgaggccgcttgcttcctgtttgtccgacgaggagacatggcggcggcgccggtagcggctgggtctggagccggccgagggagacggtcggcagccacagtggcggcttggggcggatggggcggccggccgcggcctggtaacattctgctgcagctgcggcagggccagctgaccggccggggcctggtccgggcggtgcaggtacgaggctggaccaggaggggcggggcggggcggaccaggcgggagctggcggggggccggggaagaggcctttccaggccgccgctggacgggccaaagcccttttggctggccggaaggcctccctgtgagctgcccggacgctctcagctgcagcggggccgtgggaagcagctggcttgatgtcccttgtcaggggccgagcggggctgggctgctgtggacactgatggcgtgtacgaaccctgggcccagtttctggatcctcccttctttgcgccacgtctacacgtctgggggaccctgtcgtgtttgttttagcctctgtgggcctcgagtttatcccgtgtattgggcgtgggggagggggtcatcattgcagcccccaaatggttcccgagcatttcataaatgtcattttctcaggcctttccttgacactctttccttcccctttctaaagtaggtccccattgttattctgtcacagccgcgaattcgtttcgtttacattactttcttagtctataatttcgtatttctttgttgtctgcctttttctcgcccgtctcccacattaggctgagttccagcgggtgcagagactatatctggtttgctagtgtagagcgtcacggttaagagggactctggagtcaggcctgggttcaaagccc

SEQ ID NO: 38760 - DNA, 992 bp, Artificial sequence
  DNA replication origin
ggctgcaatctcggcacttagggaggccaaggcaggcggctgggaggtgtaggttgtagcgagccgagatcacgccactgcactccagcctgggcaccattgagcactgagtgaacgagactccgtctgcaatcccggcacctcgggaggccgaggttggcggatcactcgcggttaggggctggagaccggcccggccaacacagcgaaaccccgtctccaccaaaaccagtcaggcgtggcggcacgtgcctgcaatcgcaggcattcggcagactgaggcaggagaatcaggcagggaggttgcagtgagccgagatggcagcagtacagtccagcttcggctccgcatgagagggagaccgtggggagacggagagggagagggagagggagagggagagggagagggagagggctcactttttaatttttaagaaattgtgacaaaatacttgtgacacaacttaccatctgaaccattttaaagtgcacaattctgtggcagatttagctacaggtctgagttcacttggaatatgagcataataaaaacgtggtctgaggccaggtgtggtggctcatttctgtaatctctacactttgggagaccaaggcggtaggattgcttgagcccaggagttcaagaccggcctcggcaatacagcgagactttgtctctacaaaaaaattaaaaattagctgggcatagtgtcacgcatctgtggtcccagctgcttgggaggctgaggtggaaagatcacttgagcctgggaagtcgaggctgaagtgagtggtgatagtgcctaggtgacagagcgagaccctatctcaaaaagaagaaaaataaaataagaataaaagtgtaaggtcaggcacggtggctaatgcctgtaatcccaacaccttgggaggctgaggtgggcggatcacctgaggtcaggagttcgagaccagcctagccaacatggcgaaaccctgtctctaccaca

SEQ ID NO: 38761 - DNA, 1349 bp, Artificial sequence
  DNA replication origin
gaggggctcctcacttcccagtaggggcggccgggcagaggcgcccctcacctcccggacggggcggctggctgggcaggggggctgaccccccccacctccctcccggacggggcggctggccgggcggggggctgacccccccacctccctcccggacggggcggctggccgggcggggagctgacacccccacctccctcccggacggggcggctggccgggcggggggccgacccccccacctccctcccggatggggcggctggccgggcagaggggctcctcacttcccagtaggggcggccgggcagaggcgcccctcacctcccagacggggcggctggccgggcggagggctgacccccccacctccctcccggacggggcggctggccatgtggggggctgacccccccacctccctcccggacggggcggctggccgggtgggggggctgacccccccatctccctcccggacggggtggctggccgggctgaggggctcctcacttcccagtaggggcagctgccgggcggaggggctcctcacttctcagacggggcggttgccaggcagagggtctcctcacttctcagatggggcggccgggcagagacgctcctcacctcccagacggggtctcggccgggcagaggcgctctcacatcccagatggggcggcggggcagaggcgctccccacatctcagacgatgggcggccgggcagagactctcctcacttcctagatgtgatggcggctgggaagaggcgctcctcacttcctagatgggatggcggccgggcggagacgctcctcactttccagactgggcagccaggcagaggggctcctcacatcccagacgatgggcggccaggcagagacactcctcacttcccagatggggtggcggccgggcagaggctgcaatctcggcacttagggaggccaaggcaggcggctgggaggtgtaggttgtagcgagccgagatcacgccactgcactccagcctgggcaccattgagcactgagtgaacgagactccgtctgcaatcccggcacctcgggaggccgaggttggcggatcactcgcggttaggggctggagaccggcccggccaacacagcgaaaccccgtctccaccaaaaccagtcaggcgtggcggcacgtgcctgcaatcgcaggcattcggcagactgaggcaggagaatcaggcagggaggttgcagtgagccgagatggcagcagtacagtccagcttcggctccgcatgagagggagaccgtggggagacggagagggagagggagagggagagggagagggagagggagagg

SEQ ID NO: 38762 - DNA, 927 bp, Artificial sequence
  DNA replication origin
cccggccagccgccccgtccgggagggaggtggggggggtcagcccccctgcccagccagccgccccgtccgggaggtgaggggcgcctctgcccggccgcccctactgggaagtgaggagcccctctgcccggccagccgccccgtccgggagggaggtgggggggtcggccccccgcccggccagccgccccgtctggtgggggtgtcagccccccgcccggccagccgccccgtccgggagggaggtgggggggtcagccccccgcccggccagccgccccgtcagggagggaggtgggggggtcagccccccgcccggccagccgccccgtccgggagtgaggtggggggggtcagcccccctgcccggccagccgccccgtccgggaggtgaggggcgcctctgcccggccgcccctactgggaagtgaggagcccctctgcccggccaccaccccgtctgggaggtgtgcccaacagctcattgagaacgggccaggatgacaatggcagctttgtgggatagaaaggcgggaaaggtggggaaaagattgagaaatcggatggttgccgtgtctgtgtagaaagaagtagacatgggagacttttcattttgttctgcactaagaaaaattcctctgccttgggatcctgttgatctgtgaccttacccccaaccctgtgctccctgaaacatgtgctgtgtccactcagggttaaatggattaagggcggtgcaagatgtgctttgttaaacagatgcttgaaggcagcatgctcgttaagagtcatcaccaatccctaatctcaagtaatcagggacacaaacactgcggaaggccgcagggtcctctgcctaggaaaaccagagacctttgttcacttgtttatctgctgaccttccctccactattgtcccatgac

SEQ ID NO: 38763 - DNA, 1217 bp, Artificial sequence
  DNA replication origin
aatccctgacctcaagtgatccgcccgcctcggcctcccaaagtactgggattacaggcatgagccaccgcgcccagtctctgagctgggtcttaaatcatgaataaacttcgccaggcagaaaaagggaggcagagcaatcctgacatgctattcatgtgtcagccaaaggcagcatgaggaatcccaactagtttgatatataagcagcgggaagcggccagaaaaggcagcaggggccaggtctctagcagccttgaatgccaggctaaagactctggacttgatcctgtggggaggcagtgtagcagaatggctgagtgctggacttgactgcctacgtgcaaaccttggctctgctacactatctctgtctcagtttcccatgtagactggggttaataatagtagctattgcattaagccactggggaaaggcacaaagataataatgtatgtaaagcccattgcccaggttataataagcactgaatcgacattggctatgattatttttgattaatgaaggggagggggttatggcactggaagattttaagtaggaaaaggacatgatctcatccctgggtcaggtggaggtcggaatagagaacggggagatgaagtagaaagttactaccccagtctagatgagacggatgaatcctgaatcagggcagtggaagaggagatggagaacaggcgatggaattggaattttattcaggtcaggatttgttaaccatttgttccgttggttaacaggaaacggggggagggagagccgagggtgaaaaaggaggcagaaaggagtgtctcttccactgcaggcctcagtttcctcatctgtaaaacggagataataatccctgtcctgtcctcctggcagagttactgtcagcgtcaaacgggagaagcggtgggagggcacattatagtttatgaagggtcgagaaggcgggcggccagcctcgaggtagggggttattatcttccgctgcccgccgccccctcccacgccggcccaggctgaagctgactctgcccgcaggcctccaaagacttcatatgctccagatctcctacttccgcgacccctatcacgtgtggtaccagggcaacgcgtcgctggggggacacctaacgcacgtgctggaaggcccagacaccaacaccacgatcattcagctgcagcccttgcaggagcccgagagctg

SEQ ID NO: 38764 - DNA, 978 bp, Artificial sequence
  DNA replication origin
ggggagaagggcctggggctgtgaggaggggtttggggttagcctgttagaggctaagaaagaaggggccagggactgtgatgaaaaaagggaattgtcaggccttgttcaactgtaatagaaaaaaaaaacagggggtgaggctggggcaggggcggcagctcacgcctgtaatcccagcactttgggaggccaggcttgtggatcgcctgaggtcaggagttcgagaccagcctggccaacatggcgaaaccccgtctctactaaaaatacaaaaaattagccgggcgtggtggcgggtgcctgtagtcccagctgcttgggaggctgaggcaggagaatcgcttgaacccgggaggcggaagttgcagtgagccgagatcgcgccactgcactccagcctggacgacagagcaagactccgtctcaaaaaaaaaaaaaaaaaaaaaaaaggggggtggggtgggggactaggagagaaaggagttaaaggccatgatggtgggggaagggggacggagtggtgcttggtgctttgagaaaagaaattggggtctttgagaagaaggagttagggttgtgacggggaaggagtggggctttgagagaagaacttggggtctttgggggaagagttcgggtcatgagtggagctaagagcgaagtcatcagcttgtatgagaagtggctggagggtggggggtgaagtgctgggggctgtgggaagggaaggacggagatctatgaagaaaaggagttggaggactgtgaggcgaggggtgaggagttttctggggaccttcgacgtcacggtgtcagggccttccaacagggtctatcccaagaggttatgccagcaggacgaccgcccgagtcggggctttcttagcggggacaactgcctctctccagcccccacccagcaatcttcaaaggcccaggcgccaccgagctccagtggctgccgggtccctgcaa

SEQ ID NO: 38765 - DNA, 1452 bp, Artificial sequence
  DNA replication origin
cttggattttacatttccaccacttcttcgtgttacttctttctaccctattatatcagcgtcccatcccaagtctgacacacctggaagtattgaatgttgtattttgattgtggatgacttgtttatttggttatatcttttgaacgcctcaggtgattctgtctgtctttggaggatgggccataggcttcctgccccaactccattatctgttttccacaaagatagataaacattcacttatcagactaattcagcaaagcatacacgttcttaggttcttagcaaaccaagtactttgtccacctctcctctccatctcccctccctcaaatcttcagtgggcagatgtgggagaagaaaggagctgtcactccaaaccttctggtgtttcagttggggagtctggcttcacagtgagctgaaactttcccttgccagcctccatcaatccagccccttctgagggggctggagagtaattaacatcgccgtccacctgtgcacaggaagatgcctacagccacaccagcaatgatgaaactgcccaccaggacgcccaggaccagcgaagtgtaggagcggcttgtttggctccctgcagaacatgcaaagagttagcccgaagaataggcccccaaggagtccatgatttgagtcaaaccccaaagcgtttctgccccagaggaaagggacccgtttaccaactgactgaagctgcgtgtgttctgtcccaaacccccagctgtgggcctcttgttgctctaggcatccatccttcaggtccatccatttgtctggaacccgccctctccccagcttgcaggcctgggccccgtcccatcatacctttcgtgttttccgcggaaatatgtttctgcacatactgcacacaggtgtcctccaggaattcccgcagttcataccgagtgcggttgtaggcattgagctgctgcagggtgaaggtgaccactccggaggtgacctgggtgtctgcctgccacaaggctctctccggccggaaactcacaaaggagctcccattcacagccacttcgaagaagacatgggctctagagccctcgggaggcagctcacagcccaggaagcagcggatggtcagaggaactgtggatagacagtcagggtcaggggactgtgcagagagggtgccaggtgtggggcgaggcccaccaaggggaaaagaacatgagaaggcaagagtcagtgctgtgaggagaggggagtctaggtcagggaactatggggagaagggcctggggctgtgaggaggggtttggggttagcctgttagaggctaagaaagaaggggccagggactgtgatgaaaaaagggaattgtcaggccttgttcaactgtaatagaaaaaaaaaacagggggtgaggctggggcaggggcggcagctcacgcctgtaatcccagcact

SEQ ID NO: 38766 - DNA, 1937 bp, Artificial sequence
  DNA replication origin
cggtgccgccccccgccctgcccggatgccccgagcccgcgccccggccccgcgcgccagccccacctgcccggcgaagggcgcctccgcctcgtccgcccgcgccaccgccaccgccaccgctgcccggttccctgcccccgccgccgccgccgccgcccgcgcggcgcccgggaggcagcagagcgcgggcagcagcagcagcagcagccgcccagggacccgccagcggctccagcgcggggcctggcccggcggcggcggcggcggcggcggccccggcgcggcgcggccgccccggctcctcggcatcccggcggcggggcccgcgcccggcccgcctgccttcgccgccgccgccgccgcctcggccgccagcgcgcccccgcctccgcgcgccccgccccggtggggggcggccgggggcgcgggggcagcacccgggcgggacctgcgagggcagtggctccccgaccagccctggggcaggggccgcggagcggcgctggggagggggttgcagaggctaaaagaacagttctagaggcagggtccgaaggggtggaactggaggtcggggtctgggggtagccctgagcaggagggggaagaggctaaatcagtaatcctggaggtagaacaactggatggccctgggggaacatatccggggttgggggtccggaaccctggggagagggtcctagggagtggcattggaggagagggggcctgagaggcagcctgggggaggagactgaggagcggctctggggtaaaggcggggttcgagagcaagctaaagaaatagccctgggtctgagagggtgactccggagagggagctctgagtggctctcctgggccggggtggtgggggaaaggggtagagaagacctgaggagcgtttaagagggggcattcctgtgagacattaggtgaagttgaggtgaagctcagtccctcacccctagagggaaagagctcatccagctgggaagatcatctttcatccaaaacaacccatatttatcaagcgctttctatttgtagggctctgggctacttgggatgctgaaaggaaaaaaaaaaacacccaaaaacaaaaacaaaaaagagaaggccgatttcctggagtgcagaggtttacagcttgatgagaaaacataaacgcaaagaaaaacagaatggcaaacaccacgtgtcaacaaggatacaggcggctgctccaggggtcgagggagacctgatgaggggctggggaagttaggaaaaagtgtaatggaggagggtgggactctagctaggacctgaaggaaaggctggatttaaaccaggggaggggagaggagagggcatttcagggaggaagttgagggtgtacaggatgtgcctgaggcggcagataagtttctctggagcacagggttcctataggaaagtgttgggaagtgagggaagttgtacaagacagtgaatgctaggataataaatttgggttgtgttctgaaggaaaatgggggagggtggtcattaaaggttgtgtgtgtgtggtgtgtgtgtgtgtatgtgtgtgtttaagcaggatgatgtgtgaaaatagtattttatgattacgtggtaatttggagatgaaaaaagggcacaggctttagcgtcagacctatgttcatatcttggctctgttccatttttataaaatgatgctactattactgtataagattgctttcagcatgaggtgcttgacacttaatagatattccatgttagttcccctcccagtggagagaataatgaccagaggaggcagagagattggttaggagactagtgtaatagtctaagtataaggaaataaggataacaataataattaacatttattgagtgcctaatacatactagttactgggctaagcactttcctccacgat

SEQ ID NO: 38767 - DNA, 2549 bp, Artificial sequence
  DNA replication origin
cggcggcggcgaaggcaggcgggccgggcgcgggccccgccgccgggatgccgaggagccggggcggccgcgccgcgccggggccgccgccgccgccgccgccgccgggccaggccccgcgctggagccgctggcgggtccctgggcggctgctgctgctgctgctgcccgcgctctgctgcctcccgggcgccgcgcgggcggcggcggcggcggcgggggcagggaaccgggcagcggtggcggtggcggtggcgcgggcggacgaggcggaggcgcccttcgccgggcaggtggggctggcgcgcggggccggggcgcgggctcggggcatccgggcagggcggggggcggcaccggggacgggcctgggccgggccgcacctactgccgaggtcgcggaggcggcgcgccgggggtccgcgccttgggtccgggctggcgcggcccagggcgggggctggggagggcctcgccgagggccgccgaggccgggagctgcttcagcaccgcggacaggggcagcgggcgggggccgagcacgagggtcgggtttgttgtgttggcagtggggtgtgtggcctgcatgactatgtgcgagggaaaccgtacaacgcctcggagtaaatagtaagcgcagccagtctgttgtgggttgggagaagaaaccgaggatgttcaagctggagaagggggagggggagggcggaggaaggactcgatcactgtcttcgtagctgaagggctgtcaggtggaggtaggatagacttgttctagcttggccccacagggcagaactagggccagcgggagtgggggttgcaagaagacaaatttgggctcgatataggaagaagtttgtaacaattggagctgctcaaccagcttaggaggcggcgagctgctcatcactggcatgtgcaagtaaaagctctcggaggggattggatggaggcatgcataatgcttgcatggatgcatacatcatcatcacaataatgccagctagcatttactgaacactcactatgtgccaggcctggtgctatgttttatacgaattatccaattcaatcctcataactactctatgaaatagctgcaattattatccccattttacagatggggatacagactcaaagagcttaagtaacttgcccaaggtcacacagctagtgagtgatggaattggaattctaacctaggcaggctgactctagtctccccttatttacccatgaccttatcctatatctcatggggggtgcagttggactaatttctctagtatcttccaacctagaggactgcaatattctaataaatgatgttgggacaatggtgttttgctgaggaaaatcagagtgatagcctcgccaccctaagagatggagtatatttgttgaagcaggcagtctgtttgtttagaagaatctgcctcaagagatattcttaattgggcatggagctcagggggtcatacgtgcactgaaattgcgtacaaatttgtaagtgcaaatgtgtgtatttctaggcgaggacccctagatttcttcagcctctcaaagggttacaggttccacaaaacaacaaaaaagatatggtgtgtaaaagaacctttagtgccagttggcagttgtcctccaaagattttataattgctggttgacttgttgtggaaactttgcttagcctctttgtgttttcacatgtgttttatcacatgttaaagtaatgcatttcctaagtttataccctagaagaaagattgctttagactgcctgagtgcacaggatgaggtggaaagaccctggcctgggattaaggaggcctgggctctgatctgaccttggcccccattggtttgtgtgaccttgagccatttccttgccctctctaggcttgaatttcaccatgtctaacataaagagatagagctagacaatctcaactctgaaacttttttattcctacaatatttcaagcattaagaggaagctagtccttacctgtatcagttttataggctttgattattccacctcttagcctttgtctttttaaacttaagtttccccctatgacacgagacccctagaatagccacactcattctctgggtcattttagttgtccttttctagataccttttggccctaattttcaatagatgtcaacttgaccattgtctccagatacaggaccctacggttttgcataaaggaaggttggtttcttctttgctctcctggtcccatcctgcttcccccttccctctgtcagctttcctgatctcaacacactaggccactgcctttagggaacaatctataatagctcccggagccttttcctgggtcaaaactgatagcctggaacacaacaccctgtatgtggattatttttatcggagtgcattaccttacatttctccaccttgacgtttgtctgccatcttgcattgcactcagtaacttccttcaagcattcgctcactctctctctcccttcctccacctcttcctccttccttctcttttggc

SEQ ID NO: 38768 - DNA, 1236 bp, Artificial sequence
  DNA replication origin
gcctgcccatgcctggcccttgccccagccccacctgagcctgcccatgcctggcccttgccccagccccacctgagcctgcccatgccgggcccttgccccagccccacctgagcctgcccatgcctggcccttgccccagccccacctgagcctgcccatgcctggcccttgccccagccccacctgagcctgtccagtgcctgccccttgccccacccccacctgagcctgctcaatgcctggcccttgccccagcctcactccggtgcttcagtctgctgtgatgggctccatcatctagttcttgggccactgatctgacttggagatggatcctgctctgcccttggttcctccagacagtcaaagatgacactattatgattcaggtcccagttctttatactccttaagaaacaactggaactctgcgttgggaatctcaggtgaagtccatcaggtggattttggggtgggaggatccagatcagagggaatggggtttggcaggcagtgataaggagactgaattaagccatggttttgtttgttttgttttgtggtttttgtttcatttgttttgttttggagacagagtctcactctgtcacgcaggctggagtgcagtggcatgatatagctcactgcaagccacgattctttttcacagctgaaagttaccaaaccattcataccccacttcctgtaacctaaaaactataggcatctaaacagaagacaactaagagcccccagaggaccaaataaacctgaggttggagtcacagcatcctgtggaagccacaaggaggacaaggttatgggctctcagcacctagtgccaatgcccacatgcctggctcttggcctatgttgtaagcctgatccccaggcccccctacattgtgagcctttgaaactcaggccaggaaaaacagagtgagggtggagccaaaggcagggaggaagagggagagtcgaagcacctgtaggtgatgtgtttttgcctccacttctgtccagtcagggcatagcgcttgtttctccgcctacggcttaagtgggggtgatcagggacaccacatcggggtttcttcatccacctgggcagagagaggacacacacacacgcatatgcactgtggtcactgaacactttaggaagggactgcctattccccagctccagtctggaaagcaatgtgcatcctcaagctacactctgggaccctg

SEQ ID NO: 38769 - DNA, 760 bp, Artificial sequence
  DNA replication origin
ttccctctgatctggatcctcccaccccaaaatccacctgatggacttcacctgagattcccaacgcagagttccagttgtttcttaaggagtataaagaactgggacctgaatcataatagtgtcatctttgactgtctggaggaaccaagggcagagcaggatccatctccaagtcagatcagtggcccaagaactagatgatggagcccatcacagcagactgaagcaccggagtgaggctggggcaagggccaggcattgagcaggctcaggtgggggtggggcaaggggcaggcactggacaggctcaggtggggctggggcaagggccaggcatgggcaggctcaggtggggctggggcaagggccaggcatgggcaggctcaggtggggctggggcaagggcccggcatgggcaggctcaggtggggctggggcaagggccaggcatgggcaggctcaggtggggctggggcaagggccaggcatgggcaggctcaggtggggctggggcaagggccaggcatgggcaggctcaggtggggctggggcaagggccaggcatgggcaggctcaggtggggctggggcaagggccaggcatgggcaggctcgggtgggtgctggctggcacttctcaaggctctgctgtcatctcaggtggatccctttggtgcagaggcaagatctaagacagagatcctcaagagttgaactaagggctcccctgctgacaagcactccctacagaacgggac

SEQ ID NO: 38770 - DNA, 1054 bp, Artificial sequence
  DNA replication origin
gccagctgagaatgaacaggagatggaggcaggcagcccaggctgcagaggtgagggatgtggggccaggcccagagggctcagcctagaggcttccaatctcagattctcctgcctgtggtcatctgtttgtccatcaccccaggacagggcagacagaggggcaaagcactgggggccccagagcctagcttcccctcagcctgggggacatcacagcatttcagtgtcagtcacattttaaactgatcagcctttgtataatgttttttaaatcatttctaaataaaacagaaatacagagtgtgtcatttccctgggatgagggaacaaagatcaggttccaagagtaaccttaggacgctctgggaagagaaccgggtcctttggggtgtctgggagctgcccacccatctcctctgccagaccggcggtcagatagcctccctctacaacaggctggccctgggggcccagggttattggggttccaggaacacagcctgatgatgcctccttacgatccaggatggagagcagcccccccaggagtatggggagggtcactgtggcacgggcttctccatgacctgggacatgacctgggacacatagtcaagagcacggttatcagcaatacagatattaataaaaggcagacgaagtcaggaggtcagcaactttgcgggcttaccaggaggcctgtcctgcctctggaagccagcgacagagagggatgcccccgacccagccagccggagaaagggatggggtggtcacgaaggtctgagctgggtctgggtgtaggctgggaagcaggctggggtgtagactgcgaaggcggccctgccgggacttctttccagtccccggcgacctcttcgaattctctgctatctctggggagcctcgggtgggagggggtgtaagagacgcagggacgtggggagaggagacaaggcaggcaagaaccacaggggacggcggacagacgggcgacatcctgcggaggacgccgtcagtaccaggaagtgcaggcgatgaggaagcgcac

SEQ ID NO: 38771 - DNA, 1535 bp, Artificial sequence
  DNA replication origin
tcgggctggggctggggctggggctggggctggggctggggcggatgccggggctgttccgggccctccggcgccgcaggctggggctggggctggggctgggtttgcgcaggctccggggcgccgcggccgccgcttagctgagcccccatggtctgcaagaagagaagccctttaaggtctgggtcgccgggacaccccgctagggccccgccccggctctgccctcacctctcgcagccagacccgcgggtctcccggaacccacctcggcgtcgggaggagctggcgccgtgacgccaccaccgcgtaccgacctcaccctccgtgcgttggagcggaaagaagggactcgaccctgtgcttcggggcggggctccgcgaccgtcccccgccaatcccgccccagcgcctcaaggccccgccccgcgcaaggggacggaatgcaccccaacagcctccaagacgcccaggccaggaggacgctgggaacccgctgccccgccccacgcccacccaggaaaagacctgcaacctccatccaccttagtcaaagaatgccccgaagccagatgccccagagctctcacaggggacttgcccagctcaggggaaaatcggaacggactctctgcctttcaaggccagagaagaccggcgcagaagtcgggtgaaaactgtgagaactagaccgggcgccgtggctcacgcctgtaatcccaacactttgggaggccgaggcggtgggtcgcttgagttcaggagtataaaccagcctgggcaacacagtgacttcgtttctacaaaaaaataaacgaggcgagaggatcgcttgagcccaacaggtcaaggctacagtgagccatccttgcgtcacaacactccagcctgggtgacagagggagacactgcctcaaaaagaaaaaagaaaaaaggagaactgtagtggagagtgtttcttgccccaggatgaagcctcacatcctgatggtagaggagaagggaatggcgtgtgtggaggtggtgaactgggttgggtgtgtgttgtgttcatcccaccctatcttcccagaatgctggaacaactggagagtgcagggattgtacacaggctgagggccccaaacatcacattcagaatggcccggagggaactgcactttaatggggtggcacaggacagcagaaccctcagccagcagccacagggcctgccagccagcacaacagagcaggtttttgcagtaatgatagatccaggcgataagcacaggtggaaaagggttgggtgcccagcccctcagtcccagtgagctctctgccacctccctgccagcatccggtacagattgggcggaatgtggagaaggttggccacagtccagagccaggagcccatggaacaacttggaaggtgactcaggtgaggctgaagagaaaggaaagcgcacggtcagtagctgtttcacagagcccacctcactctcaagtgaggtgcctgcctcagccctcatcccgggaccagctctgacaag

SEQ ID NO: 38772 - DNA, 1708 bp, Artificial sequence
  DNA replication origin
cagccagcccagcgtgcgggccatgggccctgccggcgggtgaggcagccgcgtggcaggcatgttcggaggcccggggcctggggtcctgggagcccagggcatggcgggacccctgcggggccgggtggaagagctgaagctgccgtggtggcgggagagctcaccgctggtgctgcggcacagcgaggcggctcggctggcggccgacgccctcctggagcggggtgaggctgcctacctgcgggtcatctccgaggagcgggagctgcccttcctgagcgccctggatgtggactacatgaccagccatgtgcgcgggggccctgagctcagcgaggctcaggggcaggaggcctccgggccagaccgcctcagcctgctctctgaagtcacctcagggacttacttccccatggcctctgacatagaccccccagacctggacctgggctggcccgaggtgccacaggccacaggcttcagccccacccaggctgtggtccacttccagagggacaaggccaagaacatcaaggacctgctgcgcttccttttcagccaggcccacacggtaagggcctcatctctccatcactcatctcacagaggaggaaactgaggtccagagagggaagggaccagcccaaggccacacagcgacttaggggcagaatgaggaccagcacctctggcactattagattgcaaactcctagaagggggacatcccatatttaccttggcaactgcttggtacccaggaatagtatggatgagcatagaacagggcatgggtgtcagggactccacaatcccctgaaatgcacacgaagtggtgcaggttggagggaggagtcctcgctgcatctttaccttggaagatgctccactgccttaaatcagattctcaaaaagttttatgatccccacactaagaactccaaccttggggaacatctgagtcacctccttcacttatagaagaagaaactgaggccagagaggggcttgggacttgcccagggaggtccatatggtgacatagagctcagggcttggggagacaggggctctctgacttgggtcctggggaccagtccggccctccttgctggctcaggtccctagttgccccctaccctcctgcaccacatctgcagctgggcctgaagcaggggaaggggccagcgtgtgggcctctttggcgtggccttgagggctgggctttggaaccaaggaggaaggaggagaggaggctgctgggctcagtgatggggagcgggagctcaggagaaagagaattgggagggcaggtaggggtggtcagcacccagaaaggctctggccacacacgagcacagcttcccttctgaagccctggcctccgactccaggggaatggacgagatgatccctggcagggtttgagggagagttaggctcctgctgcagagatgggaagccaggatgctgggatcccaccggtacttccagagcctccctggcaagccttcctgtgccccaggcaggggacggccaggcctgattggcatcaggaatggggttattagtgaggctgctgctgtcgtcctcctcacccctgcctctttgatcttcctgcctgtccttgttcccccaccctggccaggcctgtgctgtgaactagggcatcccccagtgcctcgccttctcagcccccatttag

SEQ ID NO: 38773 - DNA, 1078 bp, Artificial sequence
  DNA replication origin
ggattgcttgaggccaggagttcaagatcagcctgggcaacatagtgagatcccatctctaaaaaaattttaaaagtagccgagcatggtaacatgcacctgtaatcccagctactcaggaggctgaggtgggaagatcgctcgagtccagagaaactgaggcacagctgtagtgagctgtgattgcgccactgccctccagactgggtgacagagcaagaccctatctcaaaaagaaaaagaaaaaagacaagctccagaagcctacggacaccttctggatgagaatttccaggagggtggggcccggggatctgcatttcatcacctctcaccacccctggggtcagggtgagagccactgctctaggttcttgaaggacagctccgagccggggtgggagagagccagggggctgtgagcaccacagttaagatgatggagagtggcaggacgattatgggagcaaaaagagggctggctgggggacagaccagcgttgatgtccttggatattccatgtgacagtcgttcagctctcagggccttgcagacttgagccagggcacgtgctatccactgtggtatgtgttgtgggggtcatggccggtctctacatcggcgtttgggtgaagagtttatgcaagtggatgtgattacaatgtgtggtcggtctgtgtcagcccacactccatgtctgtgtatcggtcagttgtcagtgtgtccatctgcatgggtgttcatgtcttttcctgggtgtcttgagtcgctcacccacctgcagtgtgtgtgcgtgtgcgtgtgagtgtgtgttcctgagtcgcctgggcccctcttggctgtaattcaacctctgtgggtcccgggaagtcagcatttggagacttgctgggagcctggtggggatggggcggcgttgctgggaggaagagagggaggcaggagtgtgcaccgagggcctggcactgccgcttccctgggcaggcgagtcccaacacaggcagacaggtggggctgacctgacaggttccagaggccaggggcaatagggtggagcgtggctctgatttagggtgg

SEQ ID NO: 38774 - DNA, 1082 bp, Artificial sequence
  DNA replication origin
ggtcccgtggtcaggaagcagaggtacgtgtttgacattagtgccctggagaaggatgggctgctgggggccgagctgcggatcttgcggaagaagccctcggacacggccaagccagcggcccccggaggcgggcgggctgcccagctgaagctgtccagctgccccagcggccggcagccggccgccttgctggatgtgcgctccgtgccaggcctggacggatctggctgggaggtgttcgacatctggaagctcttccgaaactttaagaactcggcccagctgtgcctggagctggaggcctgggaacggggcagggccgtggacctccgtggcctgggcttcgaccgcgccgcccggcaggtccacgagaaagccctgttcctggtgtttggccgcaccaagaaacgggacctgttctttaatgagattaaggcccgctctggccaggacgataagaccgtgtatgagtacctgttcagccagcggcgaaaacggcgggccccactggccactcgccagggcaagcgacccagcaagaaccttaaggctcgctgcagtcggaaggcactgcatgtcaacttcaaggacatgggctgggacgactggatcatcgcaccccttgagtacgaggctttccactgcgaggggctgtgcgagttcccattgcgctcccacctggagcccacgaatcatgcagtcatccagaccctgatgaactccatggaccccgagtccacaccacccacctgctgtgtgcccacgcggctgagtcccatcagcatcctcttcattgactctgccaacaacgtggtgtataagcagtatgaggacatggtcgtggagtcgtgtggctgcaggtagcagcactggccctctgtcttcctgggtggcacatcccaagagccccttcctgcactcctggaatcacagaggggtcaggaagctgtggcaggagcatctacacagcttgggtgaaaggggattccaataagcttgctcgctctctgagtgtgacttgggctaaaggcccccttttatccacaagttcccctggctgaggattgctgcccgtctgc

SEQ ID NO: 38775 - DNA, 1171 bp, Artificial sequence
  DNA replication origin
tccttgaagttgacatgcagtgccttccgactgcagcgagccttaaggttcttgctgggtcgcttgccctggcgagtggccagtggggcccgccgttttcgccgctggctgaacaggtactcatacacggtcttatcgtcctggccagagcgggccttaatctcattaaagaacaggtcccgtttcttggtgcggccaaacaccaggaacagggctttctcgtggacctgccgggcggcgcggtcgaagcccaggccacggaggtccacggccctgccccgttcccaggcctccagctccaggcacagctgggccgagttcttaaagtttcggaagagcttccagatgtcgaacacctcccagccagatccgtccaggcctggcacggagcgcacatccagcaaggcggccggctgccggccgctggggcagctggacagcttcagctgggcagcccgcccgcctccgggggccgctggcttggccgtgtccgagggcttcttccgcaagatccgcagctcggcccccagcagcccatccttctccagggcactaatgtcaaacacgtacctctgcttcctgaccacgggacctcggtcatctagagagaacacccagaagtcattccctgcaacctcaccaagggagccagtcacttcgaggctgcgggggaaggccccagctctctcccagtccagagagctttctttcacctctgccccattctgacagaagccaagagccaaaccactgagagcctttttgaaaatgagagcatttcctacatagccgaccaagtaggggtgttcacctgaagatgtggctggggatgatttgcgtgattctggtgtttgtgtcatgatatacgtgttatcagagatttatcagctttgtaactgccttctacctatctctctcccagccatgagctaacgtgatgtctcatttgtgagataggtggagtgagcattaaaattactcctgttgactgggcacagtggctcacacctgcaatcccagcactttgggaggctgaggtgggtggattgcttgagctccggagttcgaaaccagcctgcacaacatggtgacactctgtctctacaaaaaatacaaaaattaaccaggcatggtggcgtgcacatgtagtcccagctactcaggaggctga

SEQ ID NO: 38776 - DNA, 733 bp, Artificial sequence
  DNA replication origin
gcagggtaccaaaaacgagagagtgtgactcaccccttacaagtgtggctggtctggccgggagtggtggctcatgcctgtaatcccagcacttggggaggctgaggcacgcggatcacctgaggtcaggagttggagagcagcctggccaacatggtgaaaccccgtctctactaaaaatacaaaaattagccaggtgtggtggtgtatacctgtaattccagcgactagggaggctgaggcaggagaatctcttgaacacaggaggtagagtttgcagtgagcagagatcacgccactgcactccagactggcaacagagggagactccatcttaaaaaaaaaaaaaaaaaaaaaaaaaagtgtagctggtttgtgggccaaagatttctaaatgaggtgtccctggaaaagataactgaaaagggtccctaggagggagaagccgtgacccttggggttggggatggggaatgtaaacgtgtagggggtggaggggacaaaggtgggagagcagagctcagagtgtagttaggggtctggggagtggggtacgggaagtggcagtgttagggcaagaggtatagggagtaagagtgtgagggtcatggcgtagggtggagggtaggaagagggtaaggctgggcaggtagggagtggactgggagtttggcatggtgtggcgatgtgcagtagaggtgtgccctggggaagcaggattgctaggtctagc

SEQ ID NO: 38777 - DNA, 974 bp, Artificial sequence
  DNA replication origin
ggacgcctaggacactgcagcctttgaaggaagctctgcagtggggctaatgggcaggcactagagagccagcaccttgctggtgcaaggccaggggggcaagggccaaagagcacagcttctgggcgaaccgaggatgccaggagttgtgggaggacagagtttcagaattggtggacccaggaagggactggatgaaggagatgggtagaggtacggatggtggggccgcacatttggtggagccagtagcgggctagaaagatggagccatcaacctgatggagccaaagaagggcaggccaagaggtgtggtcgtgagtgggtggggccttgggtgggggtgtggtctacaagaggtctgagtcagggaccctcaagactctgaccctctcccacgttgcacaggaccaggggctgcaggaggttgagagactgcagcgcaagccggggcctggcgcctgtgcacagctcaagcaggcactggaagtactggtggctgggagcaggtgagctgagagccactcctactgctgcctgtacttgggccaactccagggcaagggagactctcggtggctgtctggacccaagggcagcttgcagctgcatttgctcagcaccttacagaaaaatgagaagacaattattcctatccagggagctgatgagattattgggggttaggcttcccctgattctctggcacctcagctgttttccatctccatgagttccctttcccacgctcctagaggcttatcccgtgtctcttcaaacctcgcctcctttctttcacacttgttcctgctaatcaccttcccacacccagtctacctccttgccggcttctgcatccatctgctctcctcctttcctgctccagtgaccacagctgtgatctggatttcatcactggaggaattagttctgtaattgtcaattttctccccttcatcattgattggtcccta

SEQ ID NO: 38778 - DNA, 803 bp, Artificial sequence
  DNA replication origin
cagccctcagcctggcgcccactgacccttgctgctctggggcaggtcgcgcaggccgtctggaggagcaattgggccgagggtccagggctggggagggaactgagggtgcagccgtggaggctcagcctctgctgggagccaggccagaggaggagaaagaggaggaagaactggggacccatgctcagcggcctgagcccatggacggcagtgggtgagtgctgccggtggctggaagggggggtttgggaggtctccaggaacccagaatgcccgcgaagcctcctctccatctgccaggccatacttctgcttgcccctctgtcactgcaagccatgcatgcatgtgtggagttgctgggaggaccacacctggcgcctgcagagcagcaactgcgtgcgcaaagtggccgagaggctggtaagggcaaggctggcgcccacagggagagaccgggccgtagggacgcctaggacactgcagcctttgaaggaagctctgcagtggggctaatgggcaggcactagagagccagcaccttgctggtgcaaggccaggggggcaagggccaaagagcacagcttctgggcgaaccgaggatgccaggagttgtgggaggacagagtttcagaattggtggacccaggaagggactggatgaaggagatgggtagaggtacggatggtggggccgcacatttggtggagccagtagcgggctagaaagatggagccatcaacctgatggagccaaagaagggcaggccaagaggtgtggtcgtgagtgggtggggccttg

SEQ ID NO: 38779 - DNA, 982 bp, Artificial sequence
  DNA replication origin
agcggcttagcccccctcccctgccctcacccccgaatacttggaggagatcagggtgaggtgcagagatttaccagcactcgccctccccacgctcccctccaacacgcttctcttgttccccacagcggggtttaaccctaccttcggcccggcctgggtgcccctctatggctcgccccccggcgcggggctccgggatagtcttcaaggtctcaacgaaggcgttggccaaggcatttggttccgcggccgccttctgctggctgtgtccatgcaggtgttggaagggagagctgaacctgagcctccccaggcccagcaggggtccacgttgtcccggctcacccgaaagaagaaaaagaaagccagaagggatcagaccccaaaggcggttccgcagcacttggacgccagccccggtgccgaggggcctgagatcccccgtgccatggaggtggaggtggaggagctgctgccgctgccagaggtgggggctggggggtagcaaagggggcggggtcacctcagctctggaaggtggaatccactctcaggcattaaacaccacgacaggggtctcaatttgggggcctgggcgaagagtgaggtgtgtgcccacatgggctctggtatatgcacacatgttgtgggagagaggacccatacccagggccaatgctggggccgggaggagggagagggagtaagaaacctgcagtgacttccaagccttggtcgcacttctttctgtgggcaatgcggccaagcatagtccaggctgttccctgggagagtaggtgctgactccagcctgatggcctcccccagaatgtcctggcgccctgtgaagatttcctgcttttcggtgtgctcttcgaggccaccatgatcgaccccaccgtggcctcccagcccatcagcttcgagatctccattggtgtgtggcctagccgaacccctgagtgccatttcagacctt

SEQ ID NO: 38780 - DNA, 853 bp, Artificial sequence
  DNA replication origin
ctttcgggtgagccgggacaacgtggacccctgctgggcctggggaggctcaggttcagctctcccttccaacacctgcatggacacagccagcagaaggcggccgcggaaccaaatgccttggccaacgccttcgttgagaccttgaagactatcccggagccccgcgccggggggcgagccatagaggggcacccaggccgggccgaaggtagggttaaaccccgctgtggggaacaagagaagcgtgttggaggggagcgtggggagggcgagtgctggtaaatctctgcacctcaccctgatctcctccaagtattcgggggtgagggcaggggaggggggctaagccgctctgaaacggaagaagttggccagcagctgcggacgcgccgctgtggaacacgacctggggcgcctccaaaacagctcagcgccccaaggagctggaaatcgcgggagcccggcctcgggggacgcagcctgagccctgggggcggggtcgggattggggcggagctacgggcgatcggccaggcctgggggtcggggaaaggagtggaccggcagtgtcagcgtgtgcacagctgtagaagggtgggactgggctggttactggacaggcggttgtggtcagaattttgccaacggagccaaaccgatggtggggttcacagtctgggggcggcttgaagcagtttgttttgcgggcggaccagccctcctaggcggagcggggtcgcgaggatggggcttgcggttgggaatgggccctatggagccctatggaccgaggcgagtgaggccagatttgccgcggccagaagcgctcacccgcgcggcccggatggga

SEQ ID NO: 38781 - DNA, 1508 bp, Artificial sequence
  DNA replication origin
gaccgaggcgagtgaggccagatttgccgcggccagaagcgctcacccgcgcggcccggatgggagatccgcctcaggtccggcacgtgcgtagcgagtgccgcgtcgaccaggggcgcgtcgtcccgcagctgcaggcggaggctgcgcgtcagcggcgggaagagctccacgaagctcagctgctcgttccattcgggcgccgccgcctcggcgctcaccgacgtctcgccctgaaggtggcgttaaagacaggagaagggagatcagcgcggagtcggggccggagccgcggcgccgtgggccccggagggacttacctcctgccccaggaaagacacccgcacatagggctccaccaggacgcgctggtcgtgcagggcgcggaccaggctgcccagcagccccaggcgcagcgcgggaagcccctcggcgcggtacaggcgcacgcggagccgcgcccatggcctctcggcgggcaccccgcgcggcaggagcaggttcctaggggagggggcaccgagcggggggggagaaactgggatctcggcccctccccttatccgcgccccacggccacccccggatccatgtcctcctccccacctcaccccggctcacttctcgatgtccgaacagtgccctggggccgggggtagcattggagggggcaggtccccgcgcgccctcacggacaaggtgaccttaatgaaacccttggtcccggcgcgggtgtctcggggatcatgcagcggaacccatctttggtagaactggccatctaagggcgaaggggcgagccaggggtaaggggcgaccggcgggacgcacagggtggccgtgaggctatcggagtgacggacaatggccagggcttctctggctcagcagggaggggcggaagtgccaagagttcagcctccgccagagatggccctctccgaagtgagtgtataggggtccatgcggagtcactgcagggtcaatctctagggcccttgtccgtgcagagtctcaataaggggacgattccatacctggctggtccaagatgatgcccaggtccatcctgaaggtgcctatccgggtggccataaaggggagggtctgcgaatggaaagccttgggggaaggtggtgttagtcctgcagctttctcatccccccttctctgaaggacactggtcacccctaccccactcaccgtgatctccagcagcaagtcttggagacgaagccgcgtgtcatgaaattcgaacaagaagtactgaattgaagtggggatgagaggtcagatgtgaagggctcctgccagcttacccaggtctcttgctcagaagaccctccttcccccacccccaaccctctcactgcaagcttttcctggatcagcaaccccccaaccccaacccataggcccagcatctggctccatttccacctaggcctcacccgctccgggaatagttctcacatcaacccctcccattctgtcaggctcgccctctt

SEQ ID NO: 38782 - DNA, 1591 bp, Artificial sequence
  DNA replication origin
gcgggagggcaggtgcggccgcggggcctgccgacttcacgcagggtccgtggggtccccgcggcgcgcagcggctgaaggaggccccagggccttggcgaccgcagcggcggctttagcgtcagtgactaggcagcagggggtcaggatgcggcgaagctcccgcccgggctcggcctcgtcctcgcgcaagcacacgcccaactttttcagcgagaacagctcaatgagcatcacctcggaggacagcaaagggctccggtcagcggagcccgggcctggggagcccgagggcagaagagcccggggcccgagctgcggtgagcccgccttgagcgcgggagtgcccggaggaaccacatgggcaggaagctctcagcagaagccagcgcctcggagccacaactggcagacagcctgtggcgcggcaaccgtgaggggcggggcctcgggtgcgggcggggtcgaccccgggtgagccagtggagggggcggggcctaaagggcggtgctgggcggggacggggctaagatgatatctgggcacctcctacaaggtgggtcctgtagggtaaagggatggtgctaaatgagatcccttaaggggcggagcctcggtgtcctggacggttatgggaaggggcggggaaaatcttgtggttgggtgccactgagggggcgcggcctcaatgttagcgtgagtggctcccaggacaattgggttccaccaagatctaaggctgggggcgggtcatccgtttgggggagggaccaactcttttttttttttttttgcaacggagtttcgctcctgttgcccatgccatgcaatggcatgatctcggctcaccgcaacctccgcctcccgggttcaaacgattctcccgcctcagcctcccgagtagctgggattacaggcgtgcgccaccatgcccggccaatttttgtgtttttagtagagacggggtttctccgtgttaatcaggctggcctcgaactcccgacctcaggtgatccgcccgcctcggcctcccaaatcgctgggattacaggcgtgagccaccgcgcccggccaggagaccaactcttgacggagcctccctgaggggcggggcttcagagggcggagctggagccgggatagggctgcggtgggaccaaagcctgtgagagacttcccagctgtctggcttgtggactgagcaatctgcggcccggtctcgaggggaaaataggtctgtggtccgcaaggccccagtggagcccttgggttcccgcagaaccgactgggtctccagtagtctctgaggagccgctcgaccttctcccgaccctggatctgaggcaggagatgcctcccccgcgggtgttcaagagctttctgagtacgggccaggccagctgcgatcccctctgaccctcgggttcccctctccgaactccagttctctctgagcccccggcccccgtttgagtatcgagcccctctccgagcctcaactcattcctagcccccatccaattatcctagccgaccctctcttcctgagccccaggcccacccccggcccctcccaagccccttctgaac

SEQ ID NO: 38783 - DNA, 858 bp, Artificial sequence
  DNA replication origin
atgaagggacaaaacacagagccgctcagctcccgtcgtccttgctcctacctcagcctggaaacggccagggcttcctttttgaagactgtgtcccctttcctcgactcctccttgacctcccagtatcagagcccccaagagaccctcaagcacaatccctcataagtctgtttatatccagccctttcttaaggattgtagcctctggcactacccccaccccagcagaccgacagtccaggggacccccacaatctccgggttcacaacctgccaaccccctaccccaagacagtctccccaactcacattctccaaaggagagaccaggtacagaagccccagccagaatgctggagaaagagagggaggggtctcagaaggaaaaggaagagaatgggtttccccggcatagggggacagtggaaagaggcttgagggggttaagcctggggaggaccgtgggagtctgagggggaattagggggttctgcaggggaatgccaggagctgcaggaccgaggatgtaggagaaaatgtgctgggtttgcctccaaagcacccagggcaggggctccagggaattcactgcccctcacctgacagaaagaggctcagcagcgacacagccgtgaacaggaagcggatggaacagacctccctggggaaccggagggaggctgaggccccgacctgctcaaccctccagtccccaccccagggtcctagacccagctcttgccaacatgactcaatcagatctgaatcggctcaagcgccagcaaggttccggccctgctccccaccccctccaaagagctgttcctggggcgccagcgtcccttcctctgacct

SEQ ID NO: 38784 - DNA, 785 bp, Artificial sequence
  DNA replication origin
gctgcaggcgggcggagggaccatcggaaccgtcggacagagcgactgctgccgctccccagcccgggcctcagctcgaccccatccatcgacccgcccagagctccacctccagcccgccccagtccccagcaatgccaggtctctccttgagttaaacgccatcctccacgccctcggctcagccaagctccgcctgtagggcggggttttggtgcttttcccagcgtcccgcccggggtcccatcccgggatgtttccagactcacctccaggataaccgtgggcggccgtgcgtagttccagaagctgaagcgattccagaagtaggcagtgttcctgtctgcgtaatcgtgggatgtcttctgcaggtcgatggaggctcctggaacagtgagaagtaaccctcagaggctcccaggccttgccgggagtcggggcgcgggggcgcgggggctgggggcgggtgggggctgtccgaggctctgtcttcggccggtcaggtgcatgggtctgtctgtgtcagtgtcttggcctctttcctgtctgcgtctctgtcttccagtgtctccgggtcttacccacagagctcaaagcatagtcgggcttccgcacaaaatcctcattcagcctctggaacacgagcttggccactctctgcaaggagggagggcgaggcctggaggggcgaggcttgcgggctgcttttacaggtggacgggacctctgggagctggttgctttgggatggacttcgtgggcaccgggagaaatcccgcagggct

SEQ ID NO: 38785 - DNA, 1234 bp, Artificial sequence
  DNA replication origin
cttaggcctctgagatctgagaggatgcaaggaggacgcaagaggatgagcctgcgtaccgaagtggggacgaggccatagcgaggactcccccgtggtctgagagggggcaggccagagctggctggctcagcggcctgcgagctaacggggactgcagtaaaaacacgcctacatcccgagtacggaggatttcttgtctcccccagtgaagcagaggttataactacatctctgtgcctggaggtggggagataatcgtagtgaggacactccttcaacccgaaatggaaaggaggcctttgtggcctaccagcaaaaggggacccaggtcacacctgtggggaggaagctgtagtcggtacactcctgtgagttcagaaaggaagtgtcacaaccggccgccttcgtggcctgaaggtggaggggtttgcagtgaaatgcctccgaggtccattgctggggaggggctttactcgagggtgtagcagttttgagaagccggcgtctgaagctaggaggtgagggggtggggtgagtacgcctcctgaggctctgagaattgtagtaagatgccaggcctttggtcccccagtagggaaggggctgctgtgagcagcacatttacggctccctcgggagaggatcctgtggcatttcaggaggacgagatccagtgggctgcggagggtgggtgcttttgatggagagttaattgagtttctctgaagcttggctgcattagtttgcagccacgtgaattgggtggtgggagggactttgaggatctacaggttagtgacggggttggacgccagtgcagcaggcttagctgctaggttgtaaacgtacgggctttttgtgtgcctccaacgtgtgctttatagtgacaaatctgaggggctcttgtgagggttactcagtattaagtgctaaacatttactcatctgcgtggtgtcatgctgagaattgcagactttaagagatttctgggccctaaaaccctccttggctccaggattctcagagataacctaatataaattgaagaagttggtagggaccgttttatattattcaataatagagtcagtataacccactggaaaaaagtgtgatggcaactgaaggtttgttgaagggagaggctaggcttgtgactgcagtattttagagcttcttgcttgaatggtttgaaatggtgtaatttttgcaaaatgcagtcttagcaac

SEQ ID NO: 38786 - DNA, 1038 bp, Artificial sequence
  DNA replication origin
tcgaagcagcttggctgggactgtccgtagggacccacggccaccggcatctgcgggggataggaaagtgtgggcccaggcgctggcccaagagtcgggcggggacggaagcggtaggctgggaagtgggcccaagggctcaggggaagtaagggaaggaaaatcagtgggtagcccgactccaccaccctcttcgcgttccggccccgcgtcgcccggcgcctacctcacctcgctcgcgggctgggtcgctcagctctacgtctctcacggaaaacgacggggagggcgctcgcggcccgatgaatcgcttccggagcgccgggcagcacttccgggagcctggggcccaggactgcagcggcttcggaaggtgggctctgccagcgggaccatgctgctccgagccgcttggaggcgggcggcagtggcggtgacagcggctccagggccgaagcccgcggcgcccactcgggggctgcgcctgcgcggtacgctcgggtcccgctctccgggaggcgcggacctgtcccctccgcgcggcgacgcaactgaatattccggagccttcctgtccaccctgctgcccagaccctctgacccttctctcaaatgacacatccctcaaactttcttaggcgggtccccgaacggttgaccccggcgcaccacccctcgcaccctgcgcgacaggcccccagagccgtggaggcgcgtccttcagaccgctcctggccaagttacagatgctgctccgggctcccgtgcagaccgttaccttcggtcagaagggactgcacctactctggctccacgttccttctaaacgtctttgccctttagagccttccttcctacgataccatttgaatatcaactcaacaccccctccaggaaccctctctccctctcccttacctccttttacagcgtgtcaggtatctggtgttgttttctttccattgagattcgaccctagcatcccttacacttatctcacctccagccagatttttccttctgccctttggatgccat

SEQ ID NO: 38787 - DNA, 1424 bp, Artificial sequence
  DNA replication origin
cgtggcggcgtgcgcctgtaatcccagctacttgggaggctgaggcaaagaattgcttgaacccgggaggcagaggttgcagtgagccaagatcgcaccactgcactcccgtctgggctacagagcgagactctatctcaaaaaaaaaaaaaaaaagtggccaagtacggtgttaattccagcactctgggaggctgaggtgggtggactgcttgagcccaggaattcaagaccagcctgggcaacatcgtgaaactgcgtctctacaaaaaaatgcaaaaattagccaggtgcacacctgtggttccagctatctgggagactgaggtgggagaattgcttgggcctaggaggtggaggttatgaggagccgagactgcgccactgcactccagcctgggtgacacagtgagaccgtgtctcaaaaaaaaaaaaaaattagctaggcatggtggcatgggcctgcagtcccagctactcagaaggttgagctgggaccacaggtgcgcacgttcacgcctggctaattgttgtatttcttggagagacgggggtctagctatgttgcccaggctggtctcgaactcctgagctcaagtgatctacccacctcagcctctcatagtgttgggattacaggcgtgagccactgctcctggtctcatattcttttggggtggcttcaactccgaccttcgtccccagagaaaatacagctccttatccttagcagcaattggaaacctttctaggagttaatgataaagtgggggagaaatgagtgcaaaggctctgagatgagaagaacctggattgttagcggagttgaaggacactgagaatgtgggggagctggattcgtgaggataagaaagcagcaggtcaggtccagactttgaagagcctggtagatagtctaggtgaagagttagatcttaatccggagtagggagggaaacgagctttgagcaggggatggcgttttgaaaagacctctctgccggtgtacgaagaatggattagaacggcgaagagtaatagggtggaaaccatcttcatcttggagagagatggtggtcgcttcgatggagaaatgggaagctttgagacgcatttaggtggcaaaattaacgggtgatggatagcgtccattccccggcttcggtgatctcagtgattacgagtgagtggggacttcgtgttcctgctagggcgcgggcctgtttcccgcgcgtcagggtagtgggcgtggcctgcgcaggccgttgccacagtgatcgggcagacggggcagggggcggggcagctgggaccttacgtcactcggtggtggcgatgatgcgtgtgtgtggggggcggggcatacgctgggcgcgtcccgggggtcacgtggtgcagagcacgcagagtccttctgtcggttg

SEQ ID NO: 38788 - DNA, 1038 bp, Artificial sequence
  DNA replication origin
ctggaaggctcaggggcaggcggtgaggcctctggcagcgaggagcccacacagttacgctcaggggctgagctcgaaccggctccttccagtttctccggtggcaccgccgcgggactcccagtggccgccaagatcggctccgtagccgccataactccagctccgggcgtcactctttgtccggtagctgtgtgctcagcactgcgtctgcgcgggggtggggtgagcagggagacgtttccggttaaagggcagagctcgcgtcacccttgagggagtcggactcgggaccggccgagagtgtgcggagcttacctgcaccagcgaagcgcctgcggcagccggaagcgaaagtctctggcttctctgcgtccaggtcggcgcgcgagcacccggaagccgcttgcgggctcccggaagcggcgccctctagcgttctcgagtcgcatgaggcggctgctgccctcgcggtgcgggagggcgagctgcgcgtggcctgggctccttccgaatggtggcgcctctgagcgccagttcgaggaggagtcggaggaggagcctgaatgtttggagatagacttcaagtcccggaccttatccgtgcgccgcttcggtttgcaggtgacctttgcgtgcgggcgccccttctgattgaccctgatgagctgtagctctgatggcccctccttcgggaatgattagggtgacggctggccggggctcgttcgagtggcgcccggccggtggtgacccgaacaggagagcgggacggcgaccattctctcgggaggggcccatctggagaaagtcctctcgcttggtcaaactaggagggcgatagcaccggccttactgcgacgatgacaaagtacaacacaccgtctggcgcgaaggagatgctcgagaaccctttgctgttgttatttttcgcgtgtcctccgaaaccaagggaaatgcggctctgtgggttctgttaacgtcagcatttaataagtgaactctaaatgcattgccccttatggtggccgctggcct

SEQ ID NO: 38789 - DNA, 919 bp, Artificial sequence
  DNA replication origin
ggagcgcctctacccggccgcgaccccgtctgggaggtgaggagcgtctctgcccggccgccccgtctgagaagtgaggagaccctccgcctggcaaccgccccatctgagaagtgaggagcccctccgcctggcagccgccccgtctgagaagtgaggagcccctccgcccggcagccaccccgtctgggaagtgaggagcgtctccgcccagccggccgccccgtccgggagggaggtgggggggtcagccccccgcccggccagccgccccgtctgggaggtgaggggcgcctctgcccggccgcccctactgggaagtgaggagcccctctgcccggccagccgccctgtccgggagggaggtgggggggtcagccccccaccctgccagccgccccgcccaggaggtgaggggcgcctctgcccggccgcccctactgggaagtgaggagcccctctgcccggccaccaccccgtctgggaggtgtacccaacagctcattgagaacgggccatgatgacaatggcggttttgtggaatagaaaggggggaaaggtggggaaaacattgagaaatcggatggttgccgtgtctgtgtagaaagaggtagacatgggagtcttttcattttgttctgtactaagaaaaattcttatcctgttgatctgtgaccttacccccaaccctgtgctctctgaaacatgtgctgtgtccactcagggttaaatggattaagggcggtgcaagatgtgctttgttaaacagatgcttgaaggcagcatgctcgttaagagtcatcaccactccctaatctcaaatacccagggacacaaacactgcggaaggccgcagggtcctctgcctaggaaaaccagagacctttgttcacttatctgctgaccttccctccactat

SEQ ID NO: 38790 - DNA, 1372 bp, Artificial sequence
  DNA replication origin
ggataagaatttttcttagtacagaacaaaatgaaaagactcccatgtctacctctttctacacagacacggcaaccatccgatttctcaatgttttccccacctttcccccctttctattccacaaaaccgccattgtcatcatggcccgttctcaatgagctgttgggtacacctcccagacggggtggtggccgggcagaggggctcctcacttcccagtaggggcggccgggcagaggcgcccctcacctcctgggcggggcggctggcagggtggggggctgacccccccacctccctcccggacagggcggctggccgggcagaggggctcctcacttcccagtaggggcggccgggcagaggcgcccctcacctcccagacggggcggctggccgggcggggggctgacccccccacctccctcccggacggggcggccggctgggcggagacgctcctcacttcccagacggggtggctgccgggcggaggggctcctcacttctcagacggggcggctgccaggcggaggggctcctcacttctcagatggggcggttgccaggcggagggtctcctcacttctcagacggggcggccgggcagagacgctcctcacctcccagacggggtcgcggccgggtagaggcgctcctcacatcccagacggggtggcggggcagaggcgctccccacatctcagacgatgggcggccgggcagagacgctcctcacttcgtagatgggatggcggccgggaagaggcgctcctcacttcctagatgggatggcggccgggcagagacgctcctcacttcccagactgggcagccaggcagaggggctcctcacgtcccagacgatgggcggccaggcagagacgctcctcacttcccagacggggtggcggccgggcagaggctgcactctcggcactttgggaggccaaggcaggcggctgggtggtggaggttgtagtgagctgagatcacgccactgcactccagcctgggcaccattgagcactgagtgagccggactccgtctgcaatcccggcacctcgggaggccaaggctggcggatcactcgcggttaggagctggagaccagcccggccaacacagcgaaaccccgtctccaccaaaaaaatacgaaaaccagtcaggcgtggcggtgcgcgcctgcaatcgcaggcacttggcaggctgaggcaggagaatcaggcagggaggttgcagtgagccgagatggcagcagtacagtccagcttcggctgggcagcagagggaaaccgtggaaagagggagagggagagggagaccgtggggagagggagacggagaaggagagggagagggagagcc

SEQ ID NO: 38791 - DNA, 1677 bp, Artificial sequence
  DNA replication origin
gtccacgccttaatggcctccgccgcgcggcgttcgagctgccgccatacttcccggcccaccacgcccagcgccgcccaaaggcgctgcgtcccggcggctctgcgggggtttcgtcgaggcttgggtcgggagacccgggtgccggcggggtccgggctgggagacgccacggccgccattagtcaccgaggtggggtgggaaagagaggttcgctgcggcttcaaggtctgggcacagccagtgggcgggcacagccagtgggcagccacagcagaggcctccgttatctgcagggcagagggctcggcctgtcccggggccccccagttcacccgccggcccggggccggagggcctggagggccctggaggagcgggctgcgttctgcgtctctccgcgatctctgccggaccggaactgacttggcagttctctgcgctggcaagagaggagcggtaccggaagtgcccttgcgctgggggcccgcgagccgtggttccgggtctgcaatgttccggcgtgggggtggggaatggggaatggggtgtggtcacgtggggttagggccccctccaccccgcttgctcttcgcaacggaaattgctactggcctcagaattccctgagcaaacgttgcttctctatctccttactcctccggtgctggataagaagactccaatatttcatttattgactcatttaccacctgtttaccgagcacctatgtgcctctaagcacgggggagtgcagcagtaaagaaaaaaacacaggaaaatttctgctctcctaaaatttacattctagtaagggaaacaacaataaacaagatccttaaaatgcataaaagggtagatagcgaaagtgctttggaaacataaaaaggaaagaggaatatgaagtgcaggtgcggaatgctttatagtacggccaggtgactctggagcagagacccgaaggaggcgaggggatgagccatgcttggagatgtctgtaggggaacagcttatgcacaggccacaaagccgaagcatgtgggccaggcctgttccaggaacagcaaagaggctggggaagagaggagagaaatgggaccatgggagggagttgaactgcagtgcgggagagctgaagtggaggcaggggcagaagcagggagacctgataactgactgttgcaatcaagcaggtgagctatgatagggacttatgccagggcgacgacagcaaagggggcaaaaagtggttgaattcaggggttgacataagctcaagtctataagatttgctgacggaccagatgtgaagtgggagagcgagaactgaaagatgactccacactttttggcctgagcaaatgaaaaggcagccgccttaagtgagatggaagaaaccatgggaggagcaagctttggggagaacaccaggagctgagttttaggcatgttaagtttgagatgtctgtttgacattcaagtggaaatgtcaagcagacagatggatttatgagtctggcattcagggaaaggtttgaactggagatgaatctttgggagtcgtcagcatatagatgtctttaaaaccttgaggctgcatgagagaaccaagagagggacaaggtctgaggtctgatccctgggtaacgtttacaggtcagggaatgagaaggaa

SEQ ID NO: 38792 - DNA, 873 bp, Artificial sequence
  DNA replication origin
tcaaccagccagccagtcagccagtcagccagctgcggccaggctgacagatccagcagtcttggtctgtcaggcacccatgaaacctgcgttcagtcagacggaagctgacacactcgtattatcaggcggtggcggcacctgtggtcagtcaggcacagtcgctgggtcagcgcggcccgtcgggctcggacagaaccagtcgggtcgcagctgtcgggcctctctccgggcagagagttgctggaggcggggcttcgttccggggcggggcttcgttctgggcggagcgttggctggaggcagggcctcgtcccggctgggcctgcctcccctcccggcagcttccgggcgttgccatggcagccgcggccggctcccagactgccagggggtcgaaggactcgcggcctttcccgcgctggccctgcccctgggcgccccagcgcctgccaagtggaggtcctggccctggggccgactctctagaagcggccagtgggttcggcgaaccgcgccccgcacagcagcagagtccccgctacggggtcggcattttctcatcctcttgctcaggcgggcatgattagggggctgggaaggactcacagaaggcgacgcagcaagaagtgacagagacccagaccctccggagccccagctgctcacctgaccctgcaccgccccccaggaagaatcaaacgtctctaggcagaaagggcggccgtatccagaagagagaacagccatgcagtgatgtgcttagggaaatctggcgcaacaatgtcaaggcgagcactcaccttgtgcccagccctgtaataaaaggtttatatacagtatttcacccgagccttataattttgctttggg

SEQ ID NO: 38793 - DNA, 1033 bp, Artificial sequence
  DNA replication origin
gtgaccggccgcgacggtctgtgtctgactgagcacaaggttcctagcggccgatcagctgcttgaccccatctctgctgagccggccgacaccgacggattgactctggcaacgcctggcccgagtggcgctaccggcttccagagacttcctgacccctgccgaggttgcaccgctcagcgctgccctgtgaggcgctgactgtggccgcagctgagtgcggctgccccttcacagacagggcgtgcagaatgacggtcgcctggctgtccctccctaggcgcccctggctagctcggcttgcctggcagcgtctgtgtctgagggacgtgttggtggccgccgctggccgcatctgtccccctgcaggtgggcatcaggttgcccccgtgaagtgcagctggggccgagcctggctgaaggacggccaccttctctccagctgtccagcgagggcttctgaggtggtgccctccggggctctgtggcctggacctctccagccacacacagtcagagccttaggggatcccaagcaagggcacccacagggaagagagcctaagacagaggccaagggacaggcaggcagcaggggtgggacttcgggccaggcgaggaacagctggaagaagctccggggctgggaggaggccgcaggaccttgaggtgccggagtttagggatccgattctgtaagggaggcagcaccttgaggagttgggttggtgtgtggggtcctcaggacacgatccctgactttgaatacctttttttgcgggttttggggaaatctctgtcagtgccttgctgctctgcagaagggtcatcccgcagacctcagatctcttcccgaattaattaatttatttatttttatttatttttttctttttttgagatggagtcttgctctgtcgtccagcctggagtgcagtggcccgatcttggctcactacaaactccgccttccaggttcaagcgattctcatgcctcagtttcccaggtagctgggattacaggtgtgcgcc

SEQ ID NO: 38794 - DNA, 1607 bp, Artificial sequence
  DNA replication origin
ctgtctggctcgcggtcctggtgtccggcggctgccccggcgggctccgaggcgcgctagagctgcgcagaaatgccccgctctctcgcgcgctcgctcctgctctccctcccacggcgctcagccccctcctcgcccgccccccacaccccctctcgccgctccgccccgccccggccggctcccccggaggaggcggcggcgatcccggccccccaagcagcagcgggcgggcgaacgagcaagcagcggcggcgagcagccaacaccaggggagcgccggagccgccggagccgccggagctggggccgcgcgccggtcccggggaggggagcagaggaaggggctgagccccgcgaaccctcccggcgctggggacccgccgccggcttccccacgtgggcccggcgtcaacctgagctgcggcgggctcagaggccgggcgaagaagaggagcagaccccacccggggcccccacgtcctcccgggttcccgccagcgccgacctcgattttccctagcttagacttctcggctctgtgcccggtgccccggggtaaccccgcggccccgcgcccagctcgccgacctcgtctacctccagccaggacctggcccacgcccacccttttccacgccgcgctcccattgttcccgcggccagggctcgcggaggatagcccagtgcgttccagcccctcgcaggtggcaacctctggactctctggggactctccaagggctgagtccctggctctgggatcccgacgcccaccctccacaagcccaaacacccccaaagtaatgggcttttctaaattagggttataaccaccacggcccgtataggcgctcctttaggtccttcttggagtacacactgaggctaggagagaggaggaactaacccgtgttcagcgagcccaagatagcatctgaaagaagatggggcagggatgaagtgtctgccttctatagataaagaaaggaattcctgccctagggctcctggggcagggccaggccctccagaagtgcccggaataatgagcctgagcctcctttgttagatgctaaaggaagaaacagggaagatgcaaatgtcattcacttgccagggttttactggaagtcaagacatgcaaaggcctgctaagtagctttcacctacttgtctcacttaagtggcagctgggattatccccattttgcagatcaggagcctatcctaggtctcccctccaggcagcacagagccaagatgaagcccaacaattctggttcttcactgtggtccatgcctcaggtataggatactaagagcaggtgcaaagtgagcagctgagaacataagaaagcaggaaggagaggcagggcttgggcctccaaggacttacacaaactaagggagggcaaaactaaggaactgaggccccaaagcaggactgaacatggcttgtccaggaaggaagattatgattaacaataagaactgataataactcaccggttaggaacacttactatatttattgttctaagatctttatttgcattaattcgtttaattctcacaataacattagaggttattcttattcccac

SEQ ID NO: 38795 - DNA, 916 bp, Artificial sequence
  DNA replication origin
cgggaccggcgcgcggccccagctccggcggctccggcggctccggcgctcccctggtgttggctgctcgccgccgctgcttgctcgttcgcccgcccgctgctgcttggggggccgggatcgccgccgcctcctccgggggagccggccggggcggggcggagcggcgagagggggtgtggggggcgggcgaggagggggctgagcgccgtgggagggagagcaggagcgagcgcgcgagagagcggggcatttctgcgcagctctagcgcgcctcggagcccgccggggcagccgccggacaccaggaccgcgagccagacagctcccggaagccgcgccgccgccgccaggttagccgcacccgccgtccccctccgcgtcccggggaccccgccgcgtcgggtcccgcgtgtgcgtgtggggtggccgccgagggcggcgggctcgattcccgatctttgggcactgacaggccggcgggccggctccaggagccgcgggcttcggttcgtgtgtgtggggactgtcgcgggtttgtgtgtcggggctccagtctctgggtgtgtgttaggtgtgagcgcgcgtgtgcccgtggatccgtgcgagcggctgctcggtgtgcgcgcgcgtgcgtgtgtgcgccgggtgtgcatctgtgtgtgcgtgtgtgagggtgtgtgccttgcgtgtcttcgcgagtggtgcgtgcgtatctgggtgagggtgcgtgtgtctgcgtgtgtctgtcggtgaatgtatctgtgagagggtgtgtccgaatgtgtagcagtgtgtacacctctgggtgagggcgtgtgccagtggcttcgcttgtggctgcagcctgtggcgggtgtgggtgtgtgtgtgcgcgcgcgtcgctgtgtgcgcgccagtgtaactcccgtgtgtg

SEQ ID NO: 38796 - DNA, 801 bp, Artificial sequence
  DNA replication origin
tcggtgtgcgcgcgcgtgcgtgtgtgcgccgggtgtgcatctgtgtgtgcgtgtgtgagggtgtgtgccttgcgtgtcttcgcgagtggtgcgtgcgtatctgggtgagggtgcgtgtgtctgcgtgtgtctgtcggtgaatgtatctgtgagagggtgtgtccgaatgtgtagcagtgtgtacacctctgggtgagggcgtgtgccagtggcttcgcttgtggctgcagcctgtggcgggtgtgggtgtgtgtgtgcgcgcgcgtcgctgtgtgcgcgccagtgtaactcccgtgtgtgcgcgtgtgagtgcgggtgtgctcccgcgtagcccccgtgtgcgtgtgcgcggctttgtcttcgcactgccgggaggaagcggtgggggcggcggtccaggcgccgccgccgctgggagctgggcacctggcctgggcggtgggtggcggcggcgggggtgtcccttccccgtcgggcagagactccctgctggcaggtgggcggccacaccccgggggtcgggggaactgggctgacagcagagcccgcgttctgacctgagctggagaggagggcgtgtcctgcttgaagcccgtgtgcgtgcgtgcgtgcgtgtgtgtgtgtgtgtatgtgtatgcgtgcgcgcgcgtgtgtggatgtgggtgtgggtgcggggtggtggtggtagcaacagcagtttccaggctggtgaccagccggttcagggattcatttcctgttgtggccaggggacatgtcccctccggcctccccccagccccccaccagacctagcctgtg

SEQ ID NO: 38797 - DNA, 1559 bp, Artificial sequence
  DNA replication origin
gtgtgagactcccttgggagctcctgggaaaaagtgaatttgaaaggcctggggatgagaagtccaaaggcaaaggacaggatttgtacagaaggctgccaagcaggacactcgtccttctgtcagtcggcctgggcagatttgtctgtcttcccaccttctgtctggagggtgggcctgttctctaggactgggagaagctggcttcattctgctctctgctcttcatccgctgctgaacctggtgagcagggggagtgaaggcaccggaagctttgtctaaagacacctgatgaaggaggtttaagttggagaagagaaggcttgctttgggcatggtacaaagggacgcaattgtatcttgagttctctaaagggtgctgaggagagggcatagcctcattctttggaggccctagagtgcctatgaggacccagggtagaaggtcaccatgatggagcagcacactgggagggaggagttgggggagggaggtgcctggctctatagtgtgtgacaagcagagatggagagcccactggtgaggctgatactgagggaatcgcatcagggaaggatggagggctcagctcacatcgaggctgcttcccagcttggggcctctgtgcttcccagggcagtggattctgtggtaagaactatggccagcacatggtaggtacttaggaatgatgtgaagaatgaatgaatagttgtgtatgcctggaggtgagggtggtgactgggggttcgcggtcatatgggttgcagtggacccatggacagaaatctttggagatcatgctgcggttacccaccattctctctatgccttcgccatgaactagggaccctagagataggaacgtccagccctttcgtcatttgcaaatgaggcccagagcatggaacaacttgcccaagggtacttgctgagccagtggcagacctggactggaacccaggccctctccctcccagagtcctctgtggcttgaggtccccaccttcggattgtgtgagatggaggtgctgcagtggttggactggtttttttagtgggtaacagtgctcctggaggggaggagcatggcttaccttggttttgagccatgatctctgccacaagctgcttggccagcccctgccctttcctggagctcaggtgcacactcagcctgtgctcagacacatacagcaagtgcgcctgtacacaggccccatccccaataggtccctgggctctcactgttacacttactgtcattgtcaccaaggcgcatgtggacaaatgtacacatagacaccctctggacacactcagaggcacagaggattcccaggagacagttgtaatacctcctcccggtgggggaggacgccgagtcctaggcgggttctgccctgtcgctgtgctgcaggggtggtgaggggatccggctccggtgggatgggaggcccactgaggctgagtcaccccttctgagtcaggcatgcatccccctcttctctcctccccctccctttctcgctgatgagcccccaagagggcttggcg

SEQ ID NO: 38798 - DNA, 1691 bp, Artificial sequence
  DNA replication origin
accgcagcagggaagccagcacctgagctgcaagagccccagaacaagaggtggaagacctgggtacattaatgctgactcccccgctcagctgctttgtgaccttggccaagtcactcttactctctaggccccgttcaacctttcaatatcgactgagtgaggactacctgaccaagcattgttttcatgcaggattctatggaagaagctcttcaagaagctcacagggctgagcccaggaggactgtcacatagcccaggaagggctttaataggaacaatgccctctgcactgatctcctccaggactgccttgaggtgcccctgaaatcccagggactgtgctctgcatgccataaatactatgcctgggttgccaggcaggcatgacctcaggctggccaggagaagccagctccatccttgcacagagctggcagagccttcctgggccacggtggctcataggggaggctggcacaggctgcctctgccgcaggctccatctggaggaatgggtgggcagagaggcacacagctgcctctattctccacacccttgcccgggacaggaggcactgtcttccaagagctgcggagggcaccatccaggccccagatcttgacctggctcaagtgccactgattctggaaggctcctaatgctgagggtggggggatggggtgggaatgaagccaagccgctggaccccgcacagccctggagaggtcctaaatctggccgtctcacattcccacctttgggtgcagaggaggtgctatgcggatccagaagtgaatgtgggaacacgtggtgctctctcccccaccaatgcatcctcagagctccgagggaaaagcaacgacgatggctggcagctgagggagagaccagcatccccagaactcccttttggtccttgtccagacttcaaggtctccatggaccactttgagccatatacgtctgccagtcagtggcctctgcacccagtaagtaccccaatggctgtagacattggccccccatgcccatccctgagaccccagcctctcgggcccttggacctccccaagtgtgaaggtgccagacacaagtgggacacacaagccctctccctctgatcaggggacggtcactggccaggacaatgccaggccagaactgcagaagtcctagggctaagatccctcctagcagctctgaggtacttggaagggagacggaaggggaggcaagcccagagcggggaagggtccgtaaccagagtgaggagagatgagggcaagggctcgccagcatcccaggctccagccaagaactcctcctgcagcgtcagaagcagcagaaatccaaagagcccttggcctctggaggcggcagcaggagtgctctccgaaaagagactgggccagccggtgggagcccagcgcccacccaccgctcatcctacagcaggaccaaccccccgccaacccccagcctccggatcctctctccaggccttggaggaggctgcagaccggtaggtagggaggaacagcgagaccctcccccacactggccaggggaccaacagcctgaaaactcagttctcggcctcgcccccgttcctccccagggctggaggctgggcctagatgttgcaagcccccggccccgagagccacctgattcccccatgtgc

SEQ ID NO: 38799 - DNA, 1508 bp, Artificial sequence
  DNA replication origin
cctgaaggctgtagggagcagtgggatcctggggtcctgggatccctaaaggttaagggcattggagaaacctagtctgaatgctttgctgttcagacaggggactggggcctgaggggaatttcccaagaccttcaaagagttggtggcagaagtggggttgaaacccagatctcaggactccaaggcaaggctcttcttatgtcccagtctctggccctttaccttggcagcccaagaataaacccacttctcttgcagttaaagttcagatgaagagttggtgactgtgtgagagggaagaagtggttaacatggaaggaataatttgggggaagcaacaaatgggaagaagacgaggaaaggaggagaaaaggaggaggtttttgccatagcggagcagtagtcgaccctgcctgggggaggtgtaggactggagttggggcagatgcaggtgtgctctgaggcacctccctcccccacccccaatccccactcccacatctgactgccaatagatacaaaaagaagctaggggtgaggacacaggggacacagacgagatggaggcgagaccaaacagtgctgtcgggcaggagatgaatctagggaaggggtgggtcaggggagatgtgctaaatgaaagcacagaatggcctggaagagctggtggtgcaggtgggatggtcagcaggtgagctgcaagtatggaggaccgggtgagctggggagagggtgggagggctgagggaggagggagagatggccgattggccaggagagtctaagaagggagctggagagagaagcttagcgggtggcggagtggggagcaaggacggctgcagagggggatggctggggagcagagatgaagttgaagctgagatggtgccagggaagtgagcctgggatggactgtgggatggtgacaaatgagctagggatgggaacggctgggtagggagggacaggtcccatgcagtacctcctgcttgtgtctcggcgtggtttcctgctccggctagtgggatgtggtaggagggaaagaaagcagcagggtcagtagagcagatggattagagataccacgatgggcttggtccagcaaggagcccagagcacgcacactcgaccaagtggaggccagggcagctgggtgggccaccagcagggcagtgaggtagtcagaagaaggtacaggtgtgaagcagggtgctgtcccaggaaggcagagaagggaactagaggccaagtgggcagagccacactgggcagatgggatgtgagaatggagttccctgctctcgctgtcagtgggagcatgttcaaggccctgtgctcacaaggtagacggaaagaaacctgctgaacaactataccaagaggaagctctccctggcctgtgtgtgcacacacctgtgtgtgtgcatgttgtttgcacatctgtgtgcatggatctaagggtgacgggtgcatacatctgttattaagtgagtgtgaggctg

SEQ ID NO: 38800 - DNA, 1371 bp, Artificial sequence
  DNA replication origin
tgagattcagcctcacaatgcataagcttgcaatcacctattttgaggattgtggatcacagacagttttccattgtctgaatgtgttgctatttatccagtttccaaatgatggacatttaggctgtgtccagcttttcactattacaaacgatgctgctatgagcatccttgtgcaagcctcccgggcccccatgtgaggtgttctcgagggcaaagcctgctcatcttcaacctgatcatatatataccgccaggtcgctgtccagcccctggctctcgctggctcccagctcattcgccaagatcttcccactgctccagggagcccactctcctccttgctgacaccctgcccaaacatgccacctctttgcctgctgcatgcaggtgttaaactcacctttccatccaggctttactgaagccctgcctcttccaggaagccctcttgggcagcgctgggcctcagggtgtcatctcctctgagtgacctcctctcaccccagttgttagagccagagaagatagagacaaacccagaccagacactggggaaaggggaatgtgttctggagaaaggaaatatgggtagactagtagggagtgtgagaagctggggtacgaaacagattgctctgggccttgatggatgagtaggagtttgtcaggtagagaggtgggagggcatggcaggcacagggaaaggcagaggctgggcactgaaacagtcatcactgggttggggatgtgagcagggtgggtgggtggtggaggagactggaacagggctgtgaggagccttgcaggccaccctttcacgccattctgacccttctgcattcagaggcattctctggagatggctgtgtgtgggagccagagaaggcaggcacattcatttgacacctactgaatgccaggcaccggtaaagagctcatacccatgatctctttggtttctcacccaagttggggatagagactcgtggtgtccccattttacaggtggaggaatggggctcagagagggacagtcttttgtctgtaaccacagagccaggagaggcagggctggtacgcagttcaggttcatcccactccagagactgcatttaacccccgttcagccagaggctagaagacacctgggagagggttctgcggaagcaggtcaccgggagggggcacccattcctagaggcaggagccccaagttctcgggggtggggtggttcctgactggcgcggtgtgacccgggccagtctcgttctctctgggcctcagtttccctcctccacggggcggcgatggtcaacacaggttcctgccggcccgccccgtagcctggggttccaggctcccgtgcc

SEQ ID NO: 38801 - DNA, 1212 bp, Artificial sequence
  DNA replication origin
ccccggaccctcaaatcgggggcggcggcaccggggcccggaacccctgtccgggaccggatccccattccggctctttttcccgcggactcccccgtaccccatatcaagcggctgccaaagcctggaagccccctcctcaggcccgccccctaatccgcagggcggcctgggggtcaggcggacccctcccgtgcccggccaaccttggcgcttgggagagcagggctatgccggcccgggcattcctccattcaacccagctgcctcggatcccgtctcggtagacccgggagccgccggctccccccttcccgagctctttccctgacctggcatctggggagggggcgggggcagcacccccctcccgcgctgcatagcgccccctccctgtttgcgtccctgggaggggctgggctgacccgggcacctgggctgggggggcactcacatggctaccggaggcccccacgtgcggcgccccgcggagacaggggttcgcgttcagagctggtggcggatggaccaggtggccgcggggaccagctgggtccagatgtgctgggcctgctggaaggggacaggtgctacctggacgtgtaatggcccttggtctcttttggccgaacctgccgctccgatccccctccatcccttcatccctccatccctccatccctccatccctccggcccttctccccttcttcctccgctgcctgtgttgcagagaggggctgtcagagactgttgatgtgggaaaaaatgaaatgggggaggggttgtgattggcaaaggccagttgtgccgggagcggtgggtagaggaggtgccctgagaatgggaagccctaagcttggagggcagcgctgatggggagagggttcctggcacccccacctgcctggaagtggaaatgacatagcgggagggggctgcagttccagcccccgggggactggcctgccctgcctctacctccactgcacctcctctccaagcctagtccccagtagggaggggggagtcctggctctctctgcctctgagccctcacttgtgggagggggctgttttccgccagctggaagtggtgggaatcagttgtacaggaccatctcctagaatgcctgttggaagagccctgtttctgtccctccttggtggccacctctctcttgccttctctgccagagggcactgggctgcc

SEQ ID NO: 38802 - DNA, 737 bp, Artificial sequence
  DNA replication origin
agagggacacagagggaggcccgggggagtgggacgcagagggaggcccgggggagggggccttgaatccaagttcttcagattccagactctccccgctaccttgctgtgacagaggcacagagaaggaggcaactccaacagggtcacacagaggcctggggtggtgaggggaggagggcccaagcacctgcctcccaggcctcctaggtgccctgggggcccctagaattctctttagctccttgaagttctcccaagaatccctaaggagttgggcagcaagaaaggcactggactgtgagtcacgaggctgtgatccagtccccgctccacccctgaggtctttggaccagtcatctgtggccccggtttcccacctctgtgagatggggacaagcactgtgccctctgtgcagggctctgcccatagtgctcacccttggcccactttcccaggctggcccttctgtgagctgccctgggctaggctagggagggagtgccagaaggttccggggggtgtgcgggtgtcaggagagagcacagtaacaccagctgccttattttggggacttgctgtatgccaggctctgtcctcagtccttgaacacacaggacctcaattcaccctcaaaccaagcctctgagacaggcaatgacactgttatctctctgaggacagcgggggaaactgaggctgagagaggtttctgtgacctgctcaaaatcacata

SEQ ID NO: 38803 - DNA, 847 bp, Artificial sequence
  DNA replication origin
caaagggctcaggggggcccagactccaggtaccaggtgtggctgctcacaggccctgcctcccccagccctgacaagtacagtggatgcagaatctgtctggaacacagcatttcgtctaaatatatctgctttccaatgcagggcatgcagcaagggagtggggggcatgacgcaggcctgcagcgtggggagaaccagagcccccactcacagccccacagccccactgccacctgccctggcagagggagtccaccagggcaagggtcagtgtgggcctggctgggcccctccaagcatggttcccattgcctgagctcccaccccaaagctgccaccttgaatgtcggccaggcacaaaccaggacagcagaggagggaggggacacggggtggggctggggaagggggacacagaggagggcttagaggaggggataaagggaggcctgggagagggagacacagaggggggcctggaggagggggacacagagggaggcccgggggagaggggcacagaggggggcctgggagagaaagacacagaggggggcctgggagaggaagacacagaggggggcctaggggaatgcgacacagagggaggcctggaggaggcggacacagagggaggcctggaggagagggacacagagggaggcctgggagagggggacacagagggaggcctggaggagagggacacagagggaggcccgggggagtgggacgcagagggaggcccgggggagggggccttgaatccaagttcttcagattccagactctccccgctaccttgctgtgacagaggcacagagaaggaggcaactccaacagg

SEQ ID NO: 38804 - DNA, 870 bp, Artificial sequence
  DNA replication origin
ttaaaataaaaagcagatacggcggaggaaggcggagggagctgggggagtcgggagagagtgggtggggcccagcagcagctgcagccgcatttccccatggtgggtggggatgaccaaactcattctgcgcatcagaaactgggtctcagagaggttaagtgacttgcccaagggacaaggcccagatacagccccagcgtgatctacatacatactggaggtcaggctcacttcagccctgagggcaaagccagaaccaacaggatgttttaggggttactgctcattcgctcaataattcatggaaatgacatgctatgcccagcggcaggctgtggagggggatgggagggaagtggtgggggtggtggagggggcaaggcccgctgggtaggtgcagggaaggcttcaggttggggatgtgaaggatgagtgggcattccaagcagctggggaaggcgggaagggagtccagataaagagggagtcctaagccactcagtgctgagctgagatgggcctgagagggctgggtctgccctgtgctgtgggctctggagggtgggttcaggcacagacaggaggcagggacactggctgctcctcatggggtctcctgactctgggatcctgagggttaaatttgcagcggatgcagttgtcacaataacccctcctctgggaagcgggtgcttcccccccaggatgtttcaagcccagacttccccacccctctgtgtccctctgcagcccatggcattgtgccctttctgcctcttctggtgggagaaggcctaggctggttgttgcctgctacctgtgctgggattggtggtatgcctgtgacccctcctgatggatgtcagc

SEQ ID NO: 38805 - DNA, 1533 bp, Artificial sequence
  DNA replication origin
gaccatctagttgcaggaaaataagctcagggctccaactgattctgcgttatggtgagttgtataattatttcattatatattacaatgtaataataatagcataaagtgcacaataaatgtaatgcgcttgaatcatccggaaaccagcccccctcatctgtggaaaaactattttccatgaaaccggttcctggtggcgaaaaggttggggaccactgccctaccagacagcagggcaggtgcaaggtcacagtctttgatttgttcgatggatatttcctaagcaattactatgccccagacactgtgctgggggctgcagatgtgttggtggggaagagaaacaatgtctccccacctggagctcgctttagaaatgggggctcctccaaacccacctgtgggtgtgatgtgctgccggccgggtggtgtgagtgctaagaggcaaaacgaccaggacaaagtgcgaggaagcccaggcaggtgagacagggtgtctggtctgggtccaggaaggcctctctgaggaggtgacagctacagaagctcaggggaatgagggagggagagaaccccgggtgatccagggaagagtggtcctggcagcggaaacagcaagtgcaaagggcctggggtggagcagctgcaactgaagaagaggtgggaggccagagttggggaaggagggcatgatggtgagagtgggcgatggcagagacgcacatggggaccagaccttgtggggccctgtaagccagggtgaggtctcagcctccactcagtgagatgggagccactgagggctttgagcagagactgtgtctcaacaggactatctggctgcagtgtggagactggactgaagggatcatgagtgcaggcagggaggccaaggggcctctaatttgggggagaggtgaccgtggctgggactcggtggcagaggtgggggtggggagggccggctggattctagagatgttttgaagggaagagaagcaggatttcctggaggactgagtgtggggcgagagagaggagtccaggaagacgggaaagtttttgtcccgagaaaaagaaactagagctaccctcaagtgggatggggaaaactacaggaggagcaggttcaggagaggaagggaaggcggtgaaaattgtctgataccttgtagacatccaggtggacaggcccagcaggcagtgctgcatggagatgtctagagtttgggggaggccaggctggatgtgccagtgagcaggataggaggctggaagggtcgccagggagtgagagctggggtctcttcaggcagggaggtgtgggtgacgggaagcatgtctgctgaactgaaagtctagatgttggtctgagttataaagacataaagaacgggactcttgctgtcataacatccacaagaggggggctacggaaatgagtggctgctcagcaggcccaggttctgcgctgccctcacctcctcctgcgtccactgtgtggccttgctaatgcacctgccccctctg

SEQ ID NO: 38806 - DNA, 1496 bp, Artificial sequence
  DNA replication origin
tatgttattattcccattttgcagacagggaacactgaggccagttgtccaaggtcacacagctatgaggcggtagagctggtatctgaccccaggctgtttagctccacagagtcaatgctgggataaagtccagcccctgacccggtcctccaggccgtgtggagccagcctcagttgccctttccaccttcatctctgtcactcctcatcttctggtcaagttcctcagacatcccaggtgtctccctccaatgtctgtgcccttgttcacactcctggtcccctccagcctctgcagactcctgttcacctgccacgaccccgttctggtgtgtgagcatcccgaggctgggaatgggtttaagttgttttcatgtcataaagtcctgcacgtggcttggggcgtcagggccatggcgaattgtgggtggcggcttggtgggtgggtgatgagtagctggaagggtggggggagtagatgaagggtgaaccaaggggcgggtggacagactggtggaagagtgggtgggtggcatgtgctgcagtgccctcagtggggcggggcctgagcagagcatggggggctggacatggggagggatggcggcagggaggggtctagggtgatgcctacttttctagcttggggtcttgagtgaatcatggtgtcatcagggcagggtgggtttaggggagaaggggatgaggtccattttggacatgggggtgtgacgggccaagggttcaggaggccgctggggagatgagcctcaggttcagaggtgacctcgggctgcacagagagactcgggaggtcagtatgggtggtgattcgagtcgtgggggccaatggcgtcaccacctgggagctgggcatggggtgagaaggactcaggacagaggaacagccacatctcagagccagcaaaggagggggaagaattatagtcccccagatagaaaagccaggagtgtcagagcaacagaagagtcttgcggagaggagaaacaaggtgttgggggtgtaagaagcccccagggcatgagggaactccgtcagtgctattttaaaaaaactatttttccatttcagttcaactttacaaatatttattgagctaaaaggttctgtgtaaatccattttgtaaattaaatttttgtgcaacaaataccattttaactgggcctgaggtggcaaggtttgggagaccattcattattcgaggaaccctgagtcgaattcttttgaaaagctttgtttggtttgttttttgtgtcagcaaggattttggcttttcaggcttgcagagtgaggcgttcatttgttccacatgcgttttgaaaagatccttctggctgctgcagagaagatgggccagggaggcagccgggcacctagggaggaagctggtgcagtgtccgaacaagagatggtactggcccggacgggggcgactctgggggatcaaggggaggggatttgagggatgta

SEQ ID NO: 38807 - DNA, 1200 bp, Artificial sequence
  DNA replication origin
gtgcaatggcaggatcctggctcactgcaacctccgcctcctgggttccagtgattctcctgcctcagcctcctgagtagctgggattataggtgcgagccaccaagactgaccaatttttgtgtttttagtagagatggggttttatcatgttggccaggctggtctcgaattcctgacctcaggtgagcacctgcctcagcctcccaaagtgctgggattactgacgtgagccactgcacccagccatgagatgcattttgaacgagatgatcttcggggtctaacaaagcgctgacttcttatcatcttatatgaaattccagaaacagtgagactattttctttttcaataggaggaaactgaaatccaggcagtatgtgatatatttagggctcttgtggttctgaaactgcttccttggtttagaagcattagggagggtgatgtgtgaccgggcttcctctcaaaatggtatagttgggtctgatcatgtaacaatgccgcagaaacaccatgagagggtagccctgtgggccctggagtctgtgctgcctgcttgggtgacaggaggtgagtgggtggcttagcaacagtttctgagcagtgatgtacaaggccatgttcccaagggacagtggggatagtggggctggactagcaagtggcttgtaggcagaatgcactggccctaggctgggcagtctgctgagggtttatgggaaggctgggtggggctggagtgggagtcctggacattaccttccctttgtggaaagtgggcctctgacacagagggcatggagaatggtgcagtacctgtgtagacatggcccttgggcagtgtgcatgtgtatgctatagagagtgggaatgctgtgtacactgaatgagtgggcttggacatctgtggtgacatgtgcagtctggtgaggggtatgctgtgtgcatgtggaggcggggacagtgcaaggtagatacacgttgagatgtgtgtccacagtgcagtagttgctggcgcgaatgtccagagggagggtagtgggaaggtgggtgtgctctgtgtatatgctgcatacttgtgggggggggttgctgtgacaaagtggctgctggtgtgtgtccttggtgaggtgtgtggtacactgggggtactcactgaggggcatggggcatatgcttgttctgtacattttgag

SEQ ID NO: 38808 - DNA, 1200 bp, Artificial sequence
  DNA replication origin
ttctggtcttgaaatcctgacctcaagtgatccacccgcctcgacctcccaaagtgctgggattacaggcgtgagccaccgcgccgggcgggccttatttcaatgaaggggttctctcaagaagcaggactcatgagtgggcgtggctcaaagggggcgtggctcccacgcaggcggggcttattttaatgcagggctcctcccagggagcaagactcgtagtgggcggggcttgcctctgggcgggaccgtaagggtggagctgcgcgcctacctgcgggggttgctctgctctcccagcgactgctgcgtggccctcagatagctctggcgccgcgccgcggtcttgggtgagggcttggggctgccgccggactcgtcgctgtcctcgtcgcccatggccttgatgtagctgccgctgcgcatgcgccggcacgggatagggccctcggccgcggcatccgtctcgcgtggggacagcagcgtggtgctccactcgccgccgccgccgggcacctggggatggggcacaggactcagtggggccaccgcagaaaatgagcagatggcgagaacccccatctccgggacctgaagctccctcgttccctgcagaattcgggctcacgtgctgggtttcccgcctttgaaacctcggggcagcagagcagagccctgggctgggaggaataccggggttccagagcctctccagcctgggatttctccatggatcccaggctgggtttgccccagaagcaatgccctaggccctgtggtcatggtggcctccactgcagccatctctacttagccccacagtcacttcacgtggactctcaggggatgcttatgatctcactgcacagatgagaacaccaggcctgagggacgcaaggcacttgcagaaagaggccccagaccaggatccagagcctgagcctagaatgggggatcagacgaccctggcacatcagcatgaggggggacgggatcccagagccaatggatattctttgtcccacaggtggggaaactgagatacagagagcagaggtgcttccccgggtcaggtagccacatggtgagctggaaaaagggctcagttttcccatctgaacttcagggactccgtccgtggaacggggctgtgatagggcaggtgaggtcacagctgtgagggcagccctggtcccccag

SEQ ID NO: 38809 - DNA, 1002 bp, Artificial sequence
  DNA replication origin
aattccaacctggaggccattctctatcttctgcccagtcaactagactcctggctgctctgagaacactgccctcttcctgcctaggtaccagtgtcacctgacctgttctcttccctctgtctcagtcttcccaggccacctcctccatgaagccttggctcctgtcccccctagttgaagatctagggagaagcttgttccctctaactcctccaagccttacagcaacacgatggggcttggctggtgaattccaggcaggcactgggacaggaaaagtctgtctatcactctttggcttctggattcacctccctcccccatctcggaactccccacagggatcagttacaggagcaagggtagagcgggctttggccttccctaggcagtgctgttacaggtgatgcactcactcagggcaggttctcctaacctgaagaccaagatcccgtgggacagttcccctctgggagtggaacttacctggggatgtggctcctgtgggaggggtttacctggacctatcacccgagtgtggctttcatgatcggggtttaccaaaggatgcagctcacctgtggtcagggctgaactgtgggtggggctcaaggggtagttctccaattggccgggctcttcgaggtcaattcatcagagtgcagggccaacctgaggatctcatggagggagctaacctgatggcgggttcacttagggggcctggatcattatagtagtgagttcacctggatctgaagctgagggacaggattcatctgtgggctgggatctccgggggaacagccgaatgggaggaaggcgggactcctggggtaggggcagaactaagaggggttcacctaggggacgaggcttgcgggtgagcgggacttgtacttactgaaagaggttttcccctggagggctcacaagtgggcgggactcacccgaagtggggagaaaagcctctgggaggggcttccacgcgggcggggc

SEQ ID NO: 38810 - DNA, 1010 bp, Artificial sequence
  DNA replication origin
tcctcgcggggccgcggctgctccgggcggcgctgggcgggccccgggcgtccgggctgaggaggcggcagcgacgacgtggaccggacagacggacggactggcggcggcggcggcggccagcggcgggcactcaccctcctccctcacgcagcccggcccgaggctccggttttgtacgcccgaggggcggggctccgggttaaagtcccgcacctgccccgcccctccccgccccccgcgtcagccgcgcgcgcgtcgtcagggactcccgggccgggcaggggcgcgcgcagcccgcttggcatgtggcccggcgcgcgcagccgggctggtcggcaggcgcgcgggccgccgcgtccggcccacgcccagccggccggcccaggaaaggagcgcgcgcccacgtcggcacgcgcatgcccgagcatgggggggtgggggtggggtcgccgcccctcgaaccgcctcgccaaaccggttccagctggaacgcgacgcatgctctgtgcgggaggtggaccgaggcgggagttcccaccagttcaccccagcgacacctcgctgtaaggggggaaccgaggctccgaggaagctgcccgaggtggccctctcacccctgcatagtcagattggccctctggtcctggctgctctgcgccctaggtgtatctagctgtcctcgccactgcatcctccctttgctttgctaacccagagtcctagagattgggttccaatcccggctccgcctctggaggcctgtgtgatcttgaacaacatccgcattcaacttccctgagccttccattcctcccccgtaaaataaaacaacaagcacacctacgatctcatggagggcaaagtgaccagctcgagccgggttggcagtaggtggtgccttcacgcctcctcgccttcccagttcctggcttctaccccgcgagtcccctctcctcactgaatccaggtcctgtcgctgccttgtgggcctcatctctccaggccgc

SEQ ID NO: 38811 - DNA, 1310 bp, Artificial sequence
  DNA replication origin
caagatccaggcagcacagacctttgttcacttgcccactctggtgttctgcaaagttctggccatgaaccccacagcctagctgcctaggaggctgaccccacccccacccccctgcaaaatttcattactcaagctggcaagaacgcagcccccacacccagccggggctaaataaacgtccaaatgatatcacatcctgccggctccaaaatagcccggcctgcccacaagcgatcacaaagtgccaggccatgcggggccaagtgggcagggatgcccagcccgtggtgccctccacacactcaagcaactaaagcagaagcctcagagcaggaaggccccccactccctcctccgccagacagcctggcccctccctcctttccccctttgtgggaggcctcagagcccccttgccctagcgccagcccttgccccagcgccaaccccatggagcctcggccgcggccagcctgcgggccaactccggcccgacccggacaccccaccactcacattgcttcaagagctccagacacaaagccatgagggccggatgggggtcagagacccagagacccggcaaagacagaaaaagggagagggagacaaggagcagagagaaggggagacagggggctagggctgaaaaagcaagggggggccaagggccccaggcaaagaagcaggctcaaaggggggccttcagcgcaagaggcacagagtggcgagaccaccgagacagatgtgggggcacagaggggcagggagagcaaagcaggggaccccgatcccgagaagtgggggtgctcggagacctgagagagaacaaggagagacagcgacaggggacaaaccaggggaaagcagagaggagctcctgaagtcagggagctgaggacatattggggggtcccaaggagaaagaccccaacttgggacctaggagctcccagtggatatggggaacacccagaagagggaaagcccaggggcaatgggggttcagaggaggcgagaccccagcgacttggggtgcagaacccccaaaggatgtgcaagaaactcacggggagcccttggggagagtggaaggtgttctcaaggggaaccccaaaagatctgggggcgctctgagggggagtcccgaagagtggggtcgcccagaaagggcggctctgagggctgaagagcgctctgagaaggggacccgagatggggagcgagggaggggctgcggaggagcgcgagggcagagacaaagagacagcgagccggggagagacaaagcgggcggagcggggaca

SEQ ID NO: 38812 - DNA, 1521 bp, Artificial sequence
  DNA replication origin
ccctgacttcaggagctcctctctgctttcccctggtttgtcccctgtcgctgtctctccttgttctctctcaggtctccgagcacccccacttctcgggatcggggtcccctgctttgctctccctgcccctctgtgcccccacatctgtctcggtggtctcgccactctgtgcctcttgcgctgaaggcccccctttgagcctgcttctttgcctggggcccttggcccccccttgctttttcagccctagccccctgtctccccttctctctgctccttgtctccctctccctttttctgtctttgccgggtctctgggtctctgacccccatccggccctcatggctttgtgtctggagctcttgaagcaatgtgagtggtggggtgtccgggtcgggccggagttggcccgcaggctggccgcggccgaggctccatggggttggcgctggggcaagggctggcgctagggcaagggggctctgaggcctcccacaaagggggaaaggagggaggggccaggctgtctggcggaggagggagtggggggccttcctgctctgaggcttctgctttagttgcttgagtgtgtggagggcaccacgggctgggcatccctgcccacttggccccgcatggcctggcactttgtgatcgcttgtgggcaggccgggctattttggagccggcaggatgtgatatcatttggacgtttatttagccccggctgggtgtgggggctgcgttcttgccagcttgagtaatgaaattttgcaggggggtgggggtggggtcagcctcctaggcagctaggctgtggggttcatggccagaactttgcagaacaccagagtgggcaagtgaacaaaggtctgtgctgcctggatcttgctgagattcgattcaggatgagcagggagaggacttcttaatctgaccaccctgaggattgactttggtagtctaacctctggggccttggttctgccagcttcaaggtgttgtaaccttgagcgagacccttgtcctctctgtcagtttccctatctgtaaaaagtggataattgtgctggcctcacactgttgtcatgatgatcaaatgaaacatctgtagacacgctttgtgaactgtcagcctgtctttaaacagccccatcgagggagaggagcttgcccaagggtaaacagctggctggctcctgccagagctgggacagggatccaggactaggacattacagtccagggctctttaacctcctccccactacctggttattcgagaatgcacctgcccttccaatagagcagggagacggctgtttcttaattcaggccccaatcctgcttgttctttgttagtccgtttgtaaagatagatgggcgtgcccatcgggatgtctgtgcagggggacagttggattttccatgttccatcccattgttgtttaagggtgggccctgcttggacagtggcacttggaataaagtcactttgtagttgtgagccttggctg

SEQ ID NO: 38813 - DNA, 1200 bp, Artificial sequence
  DNA replication origin
cccggatcccacctggtgcggagaaggcgcttgggctcgctgggtgcgtggaactgggccggccgtcgggtctggactccaggcgggggcggggcgtggcggccgggccttacaaggcagaagaatgtgcgcggggcggggccgcgggcggggtgcgggggccctcggctgccgtccggccttatttggcctcgacccacgggctggcaggcgggggcgctctggggtgagccccccttccttgctgtgccagcccgggctgcacagagggccttgtagggaggggaggtgatggggtgagcaggcaatgggagagggggtgtgggggttcgctctgggccaccccttcccctccagagaggcaaacggaatgtccagggccgcttccccagaggcctcccacttgtatgggccgtgggagtgcagcttcccctgacgggcaacggctctcgacgtggggagggcagaggcggtgggtgggggggctcccagggacccctacgcccggtgactcgctctgtccacatcagcggtcgcccgccagagcggggttgaaggaaccactcgggaagcactggtttcgtggagggaaacacgatgaacaagtagctccgcggcctggggcctcaaaggagaaggggacctggggggagcgtgggctgttccgcagggtgctctgggcagtgacattgggcagacaggaggtgcaggggtgcgccccgccgtgagggctcccgggcttggggtcgccggcagcaggaggtcaggaggatgggggcgggagccggaggggctgagaagcagcagggacccctctgtggctccctgtaggccatgtggggtgtcggagggttccgagcagggggtgacgacctggcttgggttttgacggaatccttctgggtgatgtgttgaaaatagcgcagagggggccgagtccacgagcaggggacctgtgaggagcgacccagcaaggatcaggctgatccggactagcggggaggccgagggacaagtgctaaaactatttccgaggtgcagccggtaggatctgctggggcatgggaatgggtgtgaaagaaaagagttagggtggactctcagagttttgatgtgagcaacgagaaagagctgccattttctatgatgggtttgctgtgtggagcagtttggggataagaaactctattttggacagat

SEQ ID NO: 38814 - DNA, 1662 bp, Artificial sequence
  DNA replication origin
tccgtttgcctctctggaggggaaggggtggcccagagcgaacccccacaccccctctcccattgcctgctcaccccatcacctcccctccctacaaggccctctgtgcagcccgggctggcacagcaaggaaggggggctcaccccagagcgcccccgcctgccagcccgtgggtcgaggccaaataaggccggacggcagccgagggcccccgcaccccgcccgcggccccgccccgcgcacattcttctgccttgtaaggcccggccgccacgccccgcccccgcctggagtccagacccgacggccggcccagttccacgcacccagcgagcccaagcgccttctccgcaccaggtgggatccggggccccgggggtcttgaggacaggcctaacggcccagggctggagatgagaggtggcccgggcccgacccggctgtcacggggggcaaaggcgggccccacggactgggacgtggtagggtctgttgggcacggactgaggggtgagctggggcagcgagtttgctgggggccgacagggactctggccaggggccgggcagcaggaaggctgttctggcctctgagaagcagtggtcctgcggcaagggaaggccatcgtccaggccctgcccctttgctgaggagctggagatgccaagcccagagctccggggggggctggggagcccgggtacaagggtgctggggagagggttgcagtcgtcagttccccctggcccagtaaaggcatgtgtgtcacagatggagaaacagccctgtgggactccacgcccccacagcatctgtgtcccctccccatctcccatccctacaccctgggccaggggaaagggaccgagaccagggggcccttccgacacagccagtgctgtatgcagggacccgggccttcccctctctgggtcatctcgcctgtgggtggggaaggtctgcggagggccctgatggactcacccctagggggcaggacgaggactagtggctgggagaacctgatccctgctcttcccagccctccagctgctctaaggaggagactcagatgaggtgcactgagaaggaggcatctggcctgcccagctccaggggctggaggtcatgggggcactgccctgtgctggcttcagcccagccttttctgttatggtgggaatctggacaccaggatgggggacatggcatccagtcacatccaggccaagtatcagtgctgacccctggtgtctagggcacctgaagggggaagcgatggcctcagaactaaaggccccacccatgcctgcccctcgcccctccaccagttctagaaggcgcctctggatacacagagccctttcccactccactgccacaggcccgcctgaggactggggctccctgttttgttcaagcctcgagggcaccagcagccaagtttgctctccactgacccaaacctagcccaggaatcctgtcttccaggtggcccctccccctctcatgggcactccactccccttctggggcctcttttcctagctgcaccatgggggcacccctgcctccgctcaccacttcccacaattgctggggtggacatggcggccttgtgcaagcccttaagtacagtgctcccagccacaccacagca

SEQ ID NO: 38815 - DNA, 637 bp, Artificial sequence
  DNA replication origin
aaagggggatccctgagcgagggtcatgggcagggagctggtatggacgggtgtgtgcggggaggggtgactggcgggggctggggtgtcagggggctggggtggcctagtcgtctttatccttggcgccatgtttgaggatgcgggtgaactccacgtagttgaagttgcctttcttatcaatgggtgcctcccggtacatctcgtccacttcctcatctgtgaagcggtcacccatggtggtgagcagctcccggaggtggtcctcatggatgaaacctgcgggcaggggcagggtgggtgagagcaggaacttgggctgagacatacacagcagccccatccctcagccccctggcagctcttgcagacctagaggggctgggaagatacaatcttagtctctggtcagtctgaggaatgaggacgtggcaggaggggtgtgggggtgcacgtgaaggggtgtcggatcccacgtgaaggggtgccagggtcctgaggggaggagttgtgcagtgggactgtctccgaggtgtcacttggggaacttgaggctgtgcacacagatggtgttgggtgtgccctgttttaagcgtgagctctggagttccactgcctgagttgcagtgctgattcc

SEQ ID NO: 38816 - DNA, 1342 bp, Artificial sequence
  DNA replication origin
taaattaattgaggtttgttttatgacctagcatatggtctttcctggagaatgtaccatgtccacttaagaataatgtggccctggcatggtggcttatgcctgtaatcccggcactttgggtggctcaggtgggaggatccctttagcccaggagttggagaccaacctggacaacgtagtgagaccccatctctacaaaaaataaaaaaattagcttgggtggggcatgcctatactccaagctacttgggaggctgaagtgggagatcacctgagcctgggaagttgaggctgcggtgagctgtgatcacgcttctccactccagcctggttgacagagcaagatcccatctcaaaaaaatgaaaaaagaagaaagaatggtattctgtggttgtagggtgccgtgttctgtagatgggtgttaggtctacgtggttggtagtgttctgtggttgtggggtgcagtgttctgtagatgggtgttaggtctatgtggtgggtagtgttgtattctgtggttgtagggtgtggtgttctgtagacgggtgttaggtctaggtggtgggtagtgttgtattctgtggttgtggggtgcagtgttctgtagacgggcgttaggtctaggtggtgggtagtgttgtattctgtggttatggggtgcagtgttctgtagacgggtgttaggtctaggtggtgggtagtgttgtattctgtggttgtagggtgcagtgttctttagatgggcgttaggtctaggtggtgggtagtgttgtattctgtggttgtagggtgcagtgttctttagatgggcgttaggtctaggtggtgggtagtgttgtattctgtggttgtggggtgcagtgttctgtagacgggcgttaggtctaggtggtgggtagtgttgtattctgtggttatagggtgcagtgttctgtagacgggtgttaggtctaggtggtgggtagtgttgtattctgtggttgtagggtgcagtgtttagatgggcgttaggtctaggtggtgggtagtgttgtattctgtggttgtagggtgcagtgttctttagatgggcgttaggtctaggtggtgggtagtgttgtattctgtggttgtggggtgcagtgttctgtagatgggtgttaggtctaggtggtgggtagtgttgtattctgtggtcgtggggtgcggtgttctgtggacgggcgttaggtctaggtggtgtagggtgcagtgttctgtagatcggtgttaggtctgggtggttggtagtgttgtcgtgtgttcaagtcttctgtttccctattgatcttctgcctacttgttctatctgttattgaa

SEQ ID NO: 38817 - DNA, 1136 bp, Artificial sequence
  DNA replication origin
atctggccctctgctgctccctgcactgacttttcccagcggctttcgggtccacgcggcctccggctcggcgcggggcgtcccggcggggagcggggggcgccgggggcgcgcgccgcgtacctgcccggcctgacactcggcctgacagctcgcggctggaaagcacctcgcggcctgacgtcagatcccctctcctccccccgcgccctctgcgccctcccccacccgcccggagggagaaaacaaactttgtgcggagcgcgacgagctgcgcccaccccccgcggggcgggccgtcggcgccgaggggcttcgccccgcccagcgcgcccggagggggcggggccgcgggcaccttcttcctgcgcccaccccgccctcaggaatgctgcatggcctacccatagcggcggtgggagcctccgccggggagagcccgctcgggggcaggaagtggcccggccctcctcgtggagggcgtttccggagcgcctactgtgctccttgccggggtgggggtcgttaccgagtgggaacttctgcaaatcctgacttttgtcacttcgcgccccgcacaagatgtcctgccggcggtgcgattggtcccgttgcttcgaggggaaactgaggccacttagtccgggcacttacccgcagctagttaaggactaggctctgatggagacgcttgttacgacctcaatggcctgtagaatctgggaggccgcctccgacctaagcccaaaaagcacatgatcgggctcacagggggcggccagaggtgaaaacagccaacgctttacaacgacgctgtgcggggcacttcgtgtgtgtcatcccgtctcatcctcgggtgatagggtatgtgttgtcctatgtaagtctctggcttactcatgagccgcagagaggttcttgatttgcttttgtcacacagtcaaccggtatcattcagcccaggtcggtcgatagtgaagcctgatcccttaccccttgtgcccggccttaaacgatcagtccaggagctcccggagttcctgtctggtttctttttcctcttctgccagttacaccctactccagaaggttttccttggcctcccccaccccagtcagtacattcttccctgctc

SEQ ID NO: 38818 - DNA, 1047 bp, Artificial sequence
  DNA replication origin
ggaagcggggcgcgtggggccggcgccccggagaaagtttgttcgcgccgggaccctcgggcaggccgaaggtgatccaagcctcccgcgggagaagcgcgtagtctccggggcagggggcggccaacatggagtctgggcgcagggctgggggggggggggcggcgcggaggtgggagcccagccccctcccctcccttcccctcccctccccctccgggcccagttcggagcacaaagccgagcgcgcacgctccgccgtccccgcgccccgaagagtcggccagccccgaactgccggagtaggggtgggaaccaaactttttcctgccccgggacagacacgtgagttttctttcttccagagcccccgtcccaccgggatggcgggcccgcgcgggagctggtgcgcggagtcggcccggggtgtggggactgtggggtgcaagcgccccgagcgccggacgattcctcgccgacccaggagccatgtgctccgactcggtctgggccgcgggggaggttgcgcgctttgtctgaactgctgggaatgcgggcgtgagtgcgcggcccgggggagtgtcgggaccagctaggggagttgtcagaaagttcgtgcgggagtggctgcaggtggcgtcgtgggagtctgtaggagggtgtacgggatgttgtgtcgaggggttgctgccacaggtcactgagggtagaactgattgttagtgtgatgacgcctggagttttccctgtcggagagatcgggggtggccgggtcggttggagttcgtgggtgggcgggtacagaagttgggctagttgtgtgggtcacagttgttcgtgctaggcctggggtctgtaagctgtgcgtgtgcgtgctgtatgcgtcggtgaaaaccctagggtttgtaaggcttgagcgatgggtccgggccagttatcctagcgctgttggttaattgcctggcgtgagtgtgtctgggtgcggtgtggggtgcatatgtgggaagcctcccagactacagatggccctgtgtggcggaacaccga

SEQ ID NO: 38819 - DNA, 1366 bp, Artificial sequence
  DNA replication origin
accgttctaccaagattgtccctcccctcacaccttaccgcgagcccggcggatgctgacgtcatttccgccacgagtagcgcgcttgcgccaaggcgccggtcgctgtttcactcggatggcttcgcggtcgccgattggctgcgtgagcacgtcggcgggagggcgcgcgacactgcaccgcccctcccttcgcggcgcctgctctgtagagccggcggaaccgggtagcttggccaggttgtgaggaaccgcagcgcgccgcaggaccgggccgctgagcctgcagccgccccgcgccgtgacctgcgaccctagaccccgactccctttggctcagcccgcgcgccccaggcccggcccgggcggcgcgacgggaggatgagcggcgggcggcggaaggaggagccgcctcagccgcagctggccaacggggccctcaaagtctccgtctggagtaaggtgctgcggagcgacgcggcctgggaggataaggtacggtggagtctgaacagggcgcgggtgcgaggagtcggctgggactcggggaacggaagactggcgcgggcctgccctcgtcctcgttccggcacaatcgagtagggcagtggggcgggtggcccaagggtgtcagagcaaacttggcgggcactgggcggacagctgggcttggagctccccgaagggtggcctaaggatgaagccccctagttatgcggaattggcgaggagcggggagaggcgttgtcattcgcgggcagggtttgtgcctgaactgggaaagggagctgaattcgattcggcctccgccttttatgtgcagtagggttttgagtaggttacttgtttctttcgaattaagtagcacaaacattaacagtaacagacttctgctgagaatgctttctacgtgccaggtgctctgcaagcggaatctcgtttaactcagaataactctgaagtggggtactgtggtacattaaagccttttgcacatagtgaggctcgctaatcttgagctgctgttgcttgttgaatgtaaaggaccgaatactttgataagcatgagtcaagaggggagactgagaccacccgctgggtgagtgtgaggtgtgggggtggagaaacgccaccagatatgtgcgagaattggttgggacttcagaacgttcttactcgtcccattcggaggatgcttcgtaactctgctccatgatctggaaggggccatcacaaacagcttgattccaggtagcttgaaaagcgtattatatttgcagtcatttcttggttttctgggctgccgaagtggattttccttcctgaagttcctgtaaagggggatgggaggcacttcctgaaggtg

SEQ ID NO: 38820 - DNA, 1250 bp, Artificial sequence
  DNA replication origin
gaggtgggcagattggttggggctaggagttcaagaccagcctgagcaacatggcaaaaccccgtctctacaaaaaatacgaaatttagccaggcatctttgtgcatgcctgtagtcccagctactagggaggttgaggtgggaggatcacttgagcccaagaggttgaggctgcagtgagctatgatggtgccactggactctagcctgggctatagagtgagaccctgcatcgagagggagagggagaaggagagggaggggggagggggaggggggagggggagggagagggggagggggagggagagggggagggggagggggaggggggaaacagaaaagaaaagaccagcactttgggaagccaaggcaggcggatcatgaggtcaggagatcaagaccatcctggctaacacggtgaaaccccgtctctactaaaaatacaaaaaaaaattagccaggagtgatggcgggcacctgtagtcccagctactcaggaggctgaggcaggagaatggcatgaaccccggaggtgaagcttgcagtgagctgagattgtgccactgcactccagcctgggcgacagaacgggactccgtctcaaagaaaaaaaaaaaagaaaagaaagtatttggaatttatttgtgaaatttttaaaagaggtaaagcttgtaaagagccctttgtggtgcctggtacagagtaggtgctcaagaaacactggttcacatccttttgcagctggtgtcagtgaggctggtctagctctcctcgcgtgccctgtggtgtctcaggcttgtgcacaggaggcgggagcctgtgtttattatttgctgtttatcctctccctcctccgtctctttcctgacatggtttctatggagacgagggtccctgagcaattcttctgccagagcctcagtcccatcatcaagatctgccgttgccatcctgacaggctgccgaggtggtgctgtcacccggctgggaacaggagcccctggcctgagctgatgtggttgccatggagacagctctccgctagagagaagggaggtggcagaccctggccgagggctgcggtggcactgttgcccagctaccctctcttccagtgtcacacccctccttgtgttttaggcagaaagccaatacgagtgttgacgtgatttattatggtatagctgctgtgtttgagccctcactctgtgccaggcaccacagaagccttgaccacaccagcacat

SEQ ID NO: 38821 - DNA, 1315 bp, Artificial sequence
  DNA replication origin
gtcgctggctaagggccgccgcggcccaggcccgggctcagcagtcgcctgcagcgccgcgttctcctcacggccggacaagaaggggcgcgcagtggctcccggggcgcgcggtgcgggtgtgcgggtggccggggtccgcaccggggtccgtgccaagggccgtccgcgctcgggtgcggggccgcgaccgccaccgccgccccccagcctcacggatagcagctcggaggtgtcggactgcgcgtcggaggaggcgcgcctgctgggcctggagctggcgctgagcagcgacgccgagtccgcggccgggggcccggcgggggtccgtacggggcagccggcccagcccgcgccctccgcgcagcagcccccgcggccgcccgcctccccggacgagccgtcggtggccgcgtcgtcggtgggcagcagccgcttgccgctcagcgcctcgcttgccttctccgacctcaccgaggagatgctggactgcgggcccagcggcttggtgcgggagctggaggagctgcgctcggagaacgactatctcaaggtgggggcgcccgggtagaaagggaggtcgcaggggtcgccggctgtcacagtcccgcgggcctgaggcaccagccggccctccttcccactgaacaatccggagaaaggggcccaagccctctggggaccactctgaggtggatctggggctccctcattccccccgccccctctcaactttatttgggaagcgcgctcctgaaaaagaccttggaactggctacagggccctaacctgggagcggggacttgagaaagctttggagcgttctgggaggcgttgctgaggtgggggtgggtagccagggaagggatggatctctgccttcagctgcccagaacctccacgcccaggctctccttcttgggacgggattgatagacaccgccgccagggaaacctgtggccatcccctgcccaggaaaggcctgaatgccatcctgagtcgttacccagggctttcccgggcgcaggcctgtctctgcctgcctttctgggcgggtccagtttgaaagcatgacatctgggaacatccccttggctggagtccacttccgcccagcctaacggtcccacagcctggaggatgatgtcgtgggagaaccggttcagaggcagcttcctaaatcccaggacagtgtcttttgccctccctggggcagaccttgtgcacacaacagccccattggcccctcgtggccagtgcctttccatgttcgcagtgagaggagggcaactgcccacctggaacaggacttc

SEQ ID NO: 38822 - DNA, 1817 bp, Artificial sequence
  DNA replication origin
ccaacacctccaaacctatgttctgcacaggggcagaaactgaagcacagagagaggacacactttccaagagcttcacagcatctttctgtgccagactagatgcagcctactagagccaggggcatctgagctggatggaccctgtcatctgttacattagaccagagcaggtggggactctgaggcccggaatgtgggaaggcctgccctgggtcactagcctgcggctcccacatccttctccagcactcctgcccacatgccatgccaccctgtttgtgctgagtcttttgtggtcccccccaacacacactgtgtgctccatgagttcaggcactgacatgcccaccactgcgtccctcagtgtacctggcgcctgtgcaaacagggtttgtggacagtcagtgggccgtgaggggagctggtgtcttgctaggagggggtggggatgcccctgcggaagtgtttgccaagagcctgctgagtgcctgctcctcacttggccgtatggagggcacctagcgttggggtggaggagcactcactcacctggatccagatgaagtcatgcctctggagagaggggatgccccaggagtgtattcacagcgtgtgggggaggtgggacagagacaaagaagtggacctggtgcctgctgtgtcacaggcaggtgcagaggtgaaggaagggaattgggggaggaagaagaaggagaaaatgggcaggaggaagaagaggggaaagaggaggaaaaggaagacttggaaaaggaggggggaaaggaaggggaaagatgggagaagaaggaggaagaaagagcaggggataaatgggagggggaggagagaacaggaggagaaagaggttgtaaaggggcaaaaacagccctgcccttctggtggcaaggggtgtggggcaccctaaggacgagggtacatctgtggggcaaagcactcaatccagctctgccctgcggtggctcagggatgggggcgtagcggccaggcggtgtgggggctggggaaggtgtgagagacatgggaaaatcaacacggccaggagccaaggagacgcccagacgcccgggaggaaagaaaacacgcccatcagagctcaagtcctcctgcactgctcctggtggggacgtgtggggtcagggcaaccgtcccagcccatgccagcccccacgggggccaaaaccgccttccaaagcatccgctaggctgacatctcgtaataggtcccctccattttatttttgtttttatttatttgtttatttttttgagatggagtctagctctgccacccagactggagtgcagtggcgcgacctcggctcactgcaacctccgcctcccgggttcaagcgattctcctgcctcagcctcccgagtagctgggattacaggcacgcgctaccacgcccggctaatttgtgtatttttagtagagacggggtttcatcatgttggtcaggctggtctcgaactcctgacctcgtgatccacccgcctcggcctcccaaagtgctgggattacaggcatgagccaccgcgcctagctacgggtcgcttccattttagccgtacagagcctgaaacccgggtcgggggcgcatggggagaaatatccgccggtcaaggtgcgcgagccaggcatgcacacagggcttcacggtccctatgccaggagagggaagccgaggcagggggagcccgagcgcgcccgggaggtgtgagctttgggtcccatcggcgccgcctagaccgtgagcttggcgcgtgcaccccaggcttcagtttacgcatct

SEQ ID NO: 38823 - DNA, 902 bp, Artificial sequence
  DNA replication origin
aggacggtcaccccgtctacaatgtagccagttctggactctcaacaagtcttatctcctttgtggtatccctggtctgaactgaccctgagtccacagcccctacgtcagccccacctagtccctccccaccagagccctgttgttctcaaggcttccctgggtctacaatgtagattcttgactccccaaatccaaagcacctcagagcaggtgggacccacaggcccctccctggccagccatgagtgttgggcccagagaggataggtggtagagccaggactcagatccctgccctagaagagagatgcaggccactctaatctcaggaccactgatgtgaccaagggtgtgtcaggagtggctgagccagcctggtctgctatgtccctgcattcacaccacccaacacctccaaacctatgttctgcacaggggcagaaactgaagcacagagagaggacacactttccaagagcttcacagcatctttctgtgccagactagatgcagcctactagagccaggggcatctgagctggatggaccctgtcatctgttacattagaccagagcaggtggggactctgaggcccggaatgtgggaaggcctgccctgggtcactagcctgcggctcccacatccttctccagcactcctgcccacatgccatgccaccctgtttgtgctgagtcttttgtggtcccccccaacacacactgtgtgctccatgagttcaggcactgacatgcccaccactgcgtccctcagtgtacctggcgcctgtgcaaacagggtttgtggacagtcagtgggccgtgaggggagctggtgtcttgctaggagggggtggggatgcccctgcggaagtgtttgccaagagcctgctgagtgcctg

SEQ ID NO: 38824 - DNA, 948 bp, Artificial sequence
  DNA replication origin
agccgccctgtccgggagggaggtgggggggtcagccccccgcccggccagccgccccgtctgggaggtgaggggcgcctctgcccggctgcccctactgggaagtgaggagcccctctgcctggccagccgccccgtccgggagggaggtgggggggtcagccccccgcccggccagctgccccgtccgggaggtgaggggcgcctctgcccggctgcccctactgggaagtgaggagcccctctgcccggccagccgccccgtccgggagggaggtggggggtcagccccccgcccggccagccgcccagtccgggagggaggtgggggggtcagcccccctcccggccagccgccccgtccgggagggaggtgggggggtcagccccctgcccggccagccgccctgtccgggaggtgaggggcgcctctgcccggccgcccctactgggaagtcaggagcccctctgcccggccaccaccccgtctgggaggtgtacccaacagctcactgagaacgggccatgatgacaatggcggttttgtggaatagaaaagggggaaaggtgggaaaaagaatgagaaatcggatggttgccgtgtctgtgtagaaagaagtagacatgggagacttttcattttgttctgtactaagaaaaattcttctgccttgggatcctgttgatctgtgaccttacccccaaccctgtgctctctgaaacatgtgctgtgtccactcagggttaaatggattaagggtggtgcaagatgtgctttgttaaacagacgcttgaaggcagcatgctggttaagagtcatcaccactccctaatctcaagtacccagggacacaaacactctgcctaggaaaaccagagacctttgttcacttgtttatctgctgaccttccctccactattgtcctatgaccctgccaaatcccccc

SEQ ID NO: 38825 - DNA, 1362 bp, Artificial sequence
  DNA replication origin
ccacctccctcccggacggggcggctggccgggaggggggctgacccccccacctccctcccggactgggcggctggccgggcggggggctgaccccccacctccctcccggacggggcggctggccgggcagaggggctcctcacttcccagtaggggcagccgggcagaggcgcccctcacctcccggacggggcagctggccgggcggggggctgacccccccacctccctcccggacggggcggctggccaggcagaggggctcctcacttcccagtaggggcagccgggcagaggcgcccctcacctcccagacggggcggctggccgggcggggggctgacccccccacctccctcccggacagggcggctggccaggcagaggggctcctcacttcccagtaggggcggccgggcagaggcgcccctcacctcccggacggggcggctggccgggtggggggctgacccccacctccctcccggacagggtggctgctgggcggagacgctcctcacttcccagacggggtggcagcagggcggaggggctcctcacttctcagacggggcggttgccaggcggggggtctcctcacttctcagacagggcggccgggcagagacgctcctcacctcccagacagggtcgcggccgggccgaggcgctcctcacatcccagacggggcagcagggcagaggcactccccacatctcagacgatgggcagccgggcagagacgctcctcacttcctagatgggatggcgaccgggaagaggcgctcctcactttccagactgggcagccaggcagaggggctcctcacatcccagacgatgggcggccaggcagagacgctcctcacttcccagacggggtagcggccgggcagaggctgcaatctcggcactttggggggccaaggcaggcggctgggaggtggaggttgtagcgagccgagatcacgccactgcactccagcctgggcaccattgagcactgagttaacgagactctgtctgcaatcccggcacctcgggaggccgaggctggcggatcactcgcggtcaggagctggagaccggcccggccatcacagcgaaaccccgtctccaccaaaaaaatacgaaaaccagtcaggcgtggcggcgcgcgcctgcaattgcaggcactcggcaggctgaggcaggacaatcaggcagggaggttgcagtgagccgagatggcagcagcacagtccagcttcggctcggcatgagagggagaccgtggaaagagagggagagggagaccgtggaaagagagggagagggagagggagagggagaccgtggaaagagagggagagggagag

SEQ ID NO: 38826 - DNA, 706 bp, Artificial sequence
  DNA replication origin
ggctcctcacatcccagacgatgggcggccaggcagagacgctcctcacttcccagacggggtggcggccgggcagagtctgcaatctcggcactttgcggggccaaggcaggcagctgggaagtggaggttgtagcgagccgagatcacgccactgcactccagcctgggcaccattgagcactgagtaaacgcgactccgtctgccatcccggcacctcgggaggccgaggctggcggatcactcgcggttaggagctggagaccggcccggccaacacagcgaaaccccatctccaccaaaaaaatacgaaaaccagtcaggcgtggcggcgcgtgcctgcaatcgcaggcactcggcaggctgaggcaggagaatcaggcagggaggttgcagtgagccgagatggcagcagtacagtccagctttggctcggcatcagggggagaccgtggaaagagagggagagggagaccgtggggagagggagagggagaggagggagagggagaggagggagggagaggagggagagggagaggagggagacgggaagcttatttttctattcttggtttggtttttgagacaaggtctcactctgtttcccaggcatgatcactgctcactgcagcttcaacctccccaggctcaggtgatgctccttaacctcccgagtagctgagactacaggcacaagccacc

SEQ ID NO: 38827 - DNA, 1288 bp, Artificial sequence
  DNA replication origin
gacggggcggctggccgggcggggggctgacccccccgcctccctcctggacggggcggctggccgggcggggggctgacctccccgcctccctcccggacggggcggctggccgggcagaggggctcctctcttcccagtaggggcggccgggcagaggcgcccctcacctcccggatgtggcggctggccgggcccggggctgacccccccacatccttcctggacggggcggctggccgggcagaggggctcctcacttcccagtaggggcggccgggcagaggcgcccctcacctcccggacggggcggctggccgggcgggggggctgaccccccccacctccctcccggacgggcagctggctgggcagagggatgacccccccacctccctcctggatggggcggctggccgggcggggggctaacccccccacctcccttctggacggggcggctggccgggtggggggctgacccccacctccctcccagacggggtggctgccaggcgaagacgctcctcacttcccagacggagtggctgccgggcggaggggctcctcacttctcagagggtgtggctgctgggcggaggggctcctcacttctcagacggggcggttgccaggcagagggtctcctcacttctcagacggggcggccgggcagagacgctcctcacatcccagacggggcagcagggcagaggcgctccccacattgcagaagatgggcggcctggcagagacgctcctcacttcctagatgggatggcggccgggcagagacactcctcactttccagactgggcagccaggcagagaggctcctcacatcccagacgatgggcggccaggcagagacgctcctcacttcccagacggggtggcggccgggcagagtctgcaatctcggcactttgcggggccaaggcaggcagctgggaagtggaggttgtagcgagccgagatcacgccactgcactccagcctgggcaccattgagcactgagtaaacgcgactccgtctgccatcccggcacctcgggaggccgaggctggcggatcactcgcggttaggagctggagaccggcccggccaacacagcgaaaccccatctccaccaaaaaaatacgaaaaccagtcaggcgtggcggcgcgtgcctgcaatcgcaggcactcggcaggctgaggcaggagaatcaggcagggaggttgcagtgagccgagatggcagcagtacagtccagctttggctcggcatcagggggagaccgtgg

SEQ ID NO: 38828 - DNA, 1582 bp, Artificial sequence
  DNA replication origin
ccgccccgtccaggagggaggcgggggggtcagccccccgcccggccagccgccccgtccgggaggtgaggggcgcctctgcctggccgcccctactgggacgtgaggagcccctctgcccggccagccgccccgtccaggagggaggtgggggggtcagccccccgcccggccagccgccccatccgggaggtgaggggcgcctctgcccggccgcccctactgggaagagaggagcccctctgcctggccagccgccccatccgggagggaggtggggggggtcagccccccacccggccagccgccccatccgggagggaggcggggaggtcagccccccgcctggccagtcgccctgtcccggagggaggcgggggggtcagccccccgcccggccagccgccccgtccgggaggtgaggggcgcctctgcccggccgcccctgcccggccgcccctactgggaagtgaggagcccctctgcccggccaccaccccgtctgggaggtgtactcaacagctcattgagaaccggccatgatgacaatggcggttttgtggaatagaaaggggggaaaggtggggaaaagattgagaaatcggatggttgccatgtctgtgtagaaagaggtagacatgggagacttttcattttgttctgtactaagaaaaattcttctgccttgggatcctgttgatctgtgaccttacccccaaccctgtgctctctgaaacatgtgctatgtccactcagggttgaatggattaagggtggtgcaagatgtgctttgttaaacagatgcttgaaggcagcatgctcgttaagagtcatcaccactccctaatctcaagtacccagggacacaaacactgcggaaggctgcagggtcctctgcctaggaaaaccagagacctttgttcacttatctgctgaccttccctccactattgtcctgtgaccctgccaaatccccctctgcgagaaacacccaagaatgatcaataaaaaagaaaaaaaatggaaaaaaaaaaaaaaagaaaaataagcttcccattatgcaagagtcctatggcctttgtgctttcctaccctgtgaactaagagtctaaatctgtgaaaagatgtccatgaggtagagttgaattaaaatagcaggttgcagaacaataaaaaaaaaaaaaaaaaaaaaaaacaaaccaaaccaatccaaaccaaaacaactgaatttactgtataacagtagctctcgatgtgtagtacccagaccagaagcagcagaagcatctagaattttttattttttgagacagtctctctctgttgcccaggctggagtgcagggcatgatcttggctcactgcaagctctgcctcctgggctcaagctattctcctgcctcagcctccctagctgggactacaggcacatgccaccatgcctggctatttttttgtctttttagtagagacagggttttgccatgttggccaggctggtcttgaactcctggcctcaagtgttcccccaccttgggctcccaaaatgctagaattacaggtgtgagccaccgtgcctagcc

SEQ ID NO: 38829 - DNA, 1426 bp, Artificial sequence
  DNA replication origin
actggccgggcggggggctgacccccccacctccctcccggacggggcggctggctggcgggggggctgaaccccccacctccctcccggacggggcggctggccgggcagaggggctcctcacttcccagtaggggcggccaggcagaggcgcccctcacctccctgacggggtggctggccgggcagggggctgacccccccacctccctcccggactgggtggctggccaggcggggggctgacccccccacctccctcccggacggggcggctggcctggcgggggttgacccccacctccctcccggacggggtggctgccgggcggagacgctcctcacttcccagacggggtggctgctgggcggaggggctcctcacttctcagacggggcggctgggcagagacgctcctcacctcccagacggggtcgcggccgggtagaggcgctcctcacatcccagacggggcggcggggcagaggcgctccccacatctcagacgatgggcggccgggcagagacgctcctcacttcgtagatgggatggcggccgggaagaggcgctcctcacttcctagatgggatggcggccgggcagagatgctcctcattttccagactgggcagccaggcagaggggctcctcacatcccagacgatgggcggccaggcagagacgctcctcacttcccagacggggtggcggccgggcagaggctgcaatctcggcactttgggaggccaaggccaggcggctgggaggtggaggttgtagcgagccgagatcacgccactgcactccagcctgggcaccattgagcactgagtgaaccagactccgtctgcaatcccggcacctcggcaggccgaggctggcggatcactcgcggttaggagctggagaccggcccagccaacacagcgaaaccccgtctccaccaaaaaaatacgaaaaccagtcaggcgtgacagcgcgcgcctgcaatcgcaggcactgggcaggctgaggcagggaggttgcagtgagccgagatggcagcagtacagtccagcttcggctcggcatcagagggagaccgtggaaagagagggagagggagaccgtggggagagggagtgggagagggagtcaaatattttaaccaatctgcttatcttaaatacttttgatttcctgaacatgagctcatttttagcattagtcacacttaataaacattcattattttcatcagtaaaaacccatttctggctgtacatggtggctcacacctgtaatcccagcactttgggagaccgaggcgggcagatcacttgaggtcaggagtttgagaccagtcttgccgacatggtgaaaccccatctttactaaaaatacaaaaattagccaggcatggtggtaagcacttgtaatccctg

SEQ ID NO: 38830 - DNA, 953 bp, Artificial sequence
  DNA replication origin
tctgagaagtgaggagcccctccgcccagcagccaccccgtctgggaagtgaggagcgtctccgcccggcagccaccccgtccgggagggaggtgggggtcaacccccgccaggccagccgccccgtccgggagggaggtgggggggtcagccccccgcctggccagccacccagtccgggagggaggtgggggggtcagccccctgcccggccagccaccccgtcagggaggtgaggggcgcctctgcctggccgcccctactgggaagtgaggagcccctctgcccggccagccgccccgtccgggagggaggtggggggttcagcccccccgccagccagccgccccgtccgggagggaggtgggggggtcagccccccgcccggccagtcaccccgttggggaggtgaggggcgcctctgccctgctgcccctaccgggaagtgaggagcccctctgcccggccaccaccccgtctgggaggtgtacccaacagctcattgagaacaggccatgatgagaatggcggttttgtggaatagaaaggggggaaaggtggggaaaagatttgagaaatcggatggttgccgtgtctgtgtagaaagaggtagacatgggagacttctcattttgttctgtactaagaaaaattattctgccttgggatcctgttgatctgtgaccttacccccaaccctgtgctctctgaaacatgtgctgtgtccactcagggttaaatggattaagggcggtgcaagatgtgctttgttaaacagatgcttgaaggcagcatgctcgttaaaagtcatcaccactccctaatctcaagtaccccgggacacaaacactgcggaaggccgcagggtcctctgcctaggaaaaccagagacctttgttcacttgtttatctgctgaccttccctccactattgtcctatgaccctgccaaat

SEQ ID NO: 38831 - DNA, 1274 bp, Artificial sequence
  DNA replication origin
gatcaacaggatcccacggcagaagaagttttcttagtacagaacaaaatgaaaagtctcccatgtctacttctttctacacagacacggcaaccattcgatttctcaatcttttccccacctttcccgcccttctattccacaaagccgccattgtcatcctggcccgttctcaatgagctgttgggcacacctcccagacggggtggtggccgggcagaggggctcctcacttcccagtaggggcagctgggcagaggcgcccctcacctcctggacggggcggctggccgggcggggggctgacccccccacctccctcccggacagggcggctggcctggcagggggctgacccccccacctccctcccggatgggggtgctggcctggcggggggctgaccccccccacctccctcccggactgggtggctgccaggcggagacgctcctcacttcccagactgggtggctgtcgggcggagaggctcctcacttctcagacggggcggctgccgggcggaggggctcctcacttctcagacggggcggttgccgggcagagggtctcctcacttctcagacggggcggccgggcagagatgctcctcacctcccagacggggtcgcagccgggcagaggtgctcctcacatcccagacggggtggcggggcagaggcgctccccacatctcagacgatgggcggctgggcagagacgctcctcacttcctagatgggatggcggcgaggaagaggtgctcctcacttcctaggtgggatggcggccgggcggagacgctcctcactttccagactgggcagccaggcagaggggctcctcacatcccagacgatgggcggccaggcagagacgctcctcacttcccagacggggtggcagctgggcagaggctgcaatcttggcactttgggaggccaaggcaggcggctgggaggtggaggttgtagcgagccgagatcacgccactgcactccagcctgggcaccattgagcactgagtgaaccagactccgtctgcaatcccggcacctcgggaggccgaggctggcggatcacttgcggttaggggctggagaccggcctggccaacacagcgaaaccccgtctccaccaaaaccagtcaggcgtggcggcccgagcctgcaatcgcaggcactcggcaggctgagtcaggagaatcaggcagggaggttgcagtgagccgagatggcagcagtacagtccagcttcggctcagcatgagaggg

SEQ ID NO: 38832 - DNA, 948 bp, Artificial sequence
  DNA replication origin
ccccgtctgggatgtgaggagcacctctgcccggctgcgaccccgtctgggaggtgaggagcatctctgcccggccgccccgtctgagaagtgaggagaccctctgcccggcaaccgccccgtctgagaagtgaggagcccctccgcccggcagccgccccgtctgagaagtgaggagcctctccgcccgacagccacccagtctgggaagtgaggagcgtctccgcctggcagccacccagtccgggagggaggtggggggggtcagccccccgccaggccagcacccccatccgggagggaggtgggggggtcagccccctgccaggccagccgccctgtccgggagggaggtgggggggtcagccccccgcccggccagccgccccgtccaggaggtgaggggcgcctctgcccagctgcccctactgggaagtgaggagcccctctgcccggccaccaccccgtctgggaggtgtgcccaacagctcattgagaacgggccaggatgacaatggcggctttgtggaatagaagggcgggaaaggtggggaaaagattgagaaatcgaatggttgccgtgtctgtgtagaaagaagtagacatgggagacttttcattttgttctgtactaagaaaacttcttctgccgtgggatcctgttgatctgtgaccttacccccaaccctgtgctctctgaaacaagtgctgtgtccactcagggttaaatggattaagggcggtgcaagatgtgctttgttaaacagatgcttgaaggcagcatgctccttaagagtcatcaccactccctaatcgcaagttcccagggacacaaacaccgcggaaggccgcagggtcctctgcctaggaaaaccagagacctttgttcacttgtttatctgctgaccttccctccactattgtcctatgaccctgccaaatccccct

SEQ ID NO: 38833 - DNA, 1842 bp, Artificial sequence
  DNA replication origin
tcccggacggggcagctggccgggcagggggctgaccaccctcctccctcctggagggggcggctggccgggcagaggggctcctcacttcccagtaggggcggccgggcagaggcgcccctcacctcccagacggggcggctggccgggcggggggccgaccccccgacctccctcccggacggggcggctggccgggcggggggccgacccccccacctccctcccggacggggcggctggccggcggggggctgacccccccacctccctcccggacggggcggctggccgggcggggggctgacccccccacctccctcccagacggggcagctggccgggcagaggggctcctcacttcccagtaggggcggctgggcagaggcgcccctcacctcccggacggggcggttggccgggcgtggggctgacccccccacctccctcccggacggggtggctgccgggcggagacgctcctcacttcccagacggggtggctgccttgcggagaggctcctcacttctcagacggggcggctgccgggtggaggggctcctcacttctcagacggggcggttgccaggcagagggtctcctcacttctcagacggggctgccgggcagagacgctcttcccctcccagacggggtcacggccgggcagaggcgctcctcacatcccagacggggcggcagggcagaggcgctccccacatctcagacgatgggcggccgggcagagacgctcctcacttcctagatgtgatggcagccgggaagaggctctcctcacttcctagatgggatggcggccgggcggagacgctcctcaccttccagactgggcagccaggcagaggggctcctcacatcccagacgatgggcggccaggcagagacgctcctcacttcccagacggggtggcggccgggcagaggctgcaatctcggcactttgggaggccaaggcaggcggctgggaggtggaggttgtagcgagccgagatcacgccactgcactccagcctgggcaccattgagcactgagtgaacgagactccatctgcaatcccggcacctcgggaggccgaggctggcggaccactcgcggttaggagctggagaccggcccggccaacacagcgaaaccccgtctccaccaaaaaaatacgaaaaccagtcaggcgtggcggcgcatgcctgcaatcgcaggcactcggcaggctgaggcaggagaaccaggcagggaggttgcagtgagccgagatggcagcagtacagtccagcttcggctcggcatcagagggagaccgtggaaagagggagaggggagaccgtggaaaggggagggggagagggaaggggagaaggagagggagagggagagcgagaggctgttatttttctttttgagacagagtcccactctgttgcccaggctggactgcagtggcatgatctcagctcactgcaacctcttcctcctgggctgaagcgatcctcccacatcagcctcctgagtagctgggaatacaggagagtgccaccatgcctggctaatttttgtattttttagtagagacggggattccccatgttgcccagtctggtctcaaactcctgggctcaaacaatcctcccgccttagcctcccaaaatgctgattacggacgtgagccaccacacccagccttgtatatgtttttaattggccgtttgtatttcttttatgacttgtttgttcatgccctgtacactagtccttctcagatttaatatgcacacaaaccacaatcactttgggatattattaaaatgcaggttctcagctgggc

SEQ ID NO: 38834 - DNA, 1000 bp, Artificial sequence
  DNA replication origin
gccaaccgccccgtccgggaggtgaggggcgcctctgcccagccgcccctactgggaagtgaggagcccctctgcccggccagctgccccgtctgggagggaggtgggggggtcagccccccgcccggccagccgccccgtccgggagggaggtgggggggtcagccccccgccggccagccgccccgtccgggagggaggtgggggggtcggccccccgcccggccagccgccccgtccgggagggaggtcggggggtcggccccccgcccggccagccgccccgtctgggaggtgaggggcgcctctgcccggccgcccctactgggaagtgaggagcccctctgcccggccagccgccccctccaggagggaggagggtggtcagccccctgcccggccagctgccccgtccgggaggtggccacccctactgggaagtgaggagcccctctgcccggccaccaccccgtctgggaggtgtacccaacagctcattgagaacgggccaggatgacaatggcggttttgtggaatagaaaggggggaaaggtggggaaaagattgagaaatcggatggttgccgtgtctgtgtagaaagaagtagacatgggagacttttcattttgttctgtactaagaaaaattcttctgccttgggatcctgttgatctgtgaccttacccccaaccctgtgctctctgaaacatgtgcttagtccactcagggttgaatggattaagggcggtgcaagatgtgctttgttaaacagatcctgaaggcagcatgctggttaagagtcatcaccactccctaatctcaagtacccagggacacaaacactgcggaaggccgcagggtcctctccctaggaaaaccagagacctttgttcacttgttaatctgctgaccttccctccactattgtcctatgaccctgccaaatccccctctgcgagaaacatccaagaatgatcaataaaaaataaaaggccgggcg

SEQ ID NO: 38835 - DNA, 1290 bp, Artificial sequence
  DNA replication origin
tctcctatgtctacttctttctacacagacacagtaacaatctgatctctctttcttttccccacatttcccccttttctattcaacaaaaccgccatcgttctcgtggccgttctcaatgagctgttgggtacacctcccagacggggtggcggctgggcagagggacttctcacttcccagacgtggcagccgggcagaggggcccaccaccccccagacggggcggctgccaggcgggggcaccccccacctcccggacagggcggctgccgggcgggggcgccccccacctcccagacggggcggctgccgggcgggggcgccccccacctctcggacggggcgtctgggcagaggggctcctcacttcttggatggggcggccgggcagaggcgctcctcagttcccagacggggtcgcggccgggcagaggcgctcctcacctctcagacagggtggcggccgggcagaggcgctccccacatcccagacgatgggcggccaggcagagacgctcctcacttcctagacgggatgacggccaggaagaggcactcctcacttcccagactgggtggctgggcagaggggctcctcacatcccagacgatgggcggccaggcagagacgctcctcacttcctagacggggtggtggccgggaagaggcgctcctcacttcccagactgggcggccgggcagaggggctcctcacatcccagacgatgggcagccaggcagagacgctcctcacttcctagacagggtggcggccgggcagaggctgcaatctcagcacttcgggaggccaaggcaggtggctgggaggtgggggttgtagcgagccgagatcacgccactgcactccagcctgggcaacattgagcactgagtgagcgagactccgtctgcaatcccggcacctcgggaggccgaggcgggcagatcactcgaggtcaggagctggagaccagcccggccaacatggcgaaaccccgtctccaccaaaaaacacaaaaaccagtcaggcgtggcggcgcgtgcctgcaatcccaggcactcggcaggctgaggcaggagaatcaggcaggaaggttgcagtgagccgagatcgcggcagtacagtccagcctcggcaacagagggagaccgtggaaagtgggagacggagacgagggagagggggagaccgtggaaagcgggagacggagatgaaggagagggagagcgccaaccaaattcttaacttcatttatcttttctaccttaatgtttttttattattt

SEQ ID NO: 38836 - DNA, 838 bp, Artificial sequence
  DNA replication origin
caacctctgcctcctgggatcaagcgattctcctgcctcagcctcccaagtagctgggattacaggcatgcgccaccatacctggctaattttgtatttttagtagagacagggtttctccatgttggtcagactggtctcaaactcccaacctcaggtgatctgccagcctcggcctcccagaatgctgggattacaggcataagccaccacgtctggctgagactttgaagagcaaagaggtattagaagactgtagactgcttacgaatcttcagggcacgtggaggcagaattagaaaaagaggccaggtgtgctgggccacacctgtaagcccagcactttgggtggccaaggtgggattgcttgaggccaggagtttgagaccaacctgggcaacaaagcaagacacccactccccatgtcaaaagcagaagcgaagagaaggggaggggaggggagaggaggggaggggaggggagggaaaggagaaggaaagaggcaagaagaacacactagaaaagtagctgtttggttgttttttaatttattatctccactttgcagatggggaaactgggactcagacaattaaataacttgtccatggccactatgcttagcagggtaaggctggagttttgaacctaagtctctttggctccagtgcccatactctcttggctgagtctcccaaaggcaaatcctgtccccagacacaaaataaacagattcaaagattgggggtgaatgggtggaggtgaggaagatgcagcaaaaagaacttgcaggaggccaggcgcggtggctcacgcctgcaatcccagcactttggga

SEQ ID NO: 38837 - DNA, 1114 bp, Artificial sequence
  DNA replication origin
tggcttctgctgttgactggctgtggcacctcaagcagcccctttcccctctagcctcagtttatcaccgcaagagctaccattcatctagcacaacctgaccatcctcacactggtcagttccaaccttcccaggaatcttctgtggccatgttcactccggttttacaggtgagggggctgggctgggaagctgatcgacttgtccaccccacagcagaggggcagctagcctagatgcgaacctagatcagtgtagagtaaggctttgctcattcctggtctcctggaaggtatgttgtacccagaggcctttgccttccacattctagggtgctcctcccagctcctctcagcagggacctttgcccagggaatagaagcctgacctgtctgggccttaatttcccatctgtgaaatgggagaactttcaaagaaggaatatggaggcaggtgtgatatttaaagctggacccaggcccacctttccctgtgctaggattccaggacaggtaaggagccaagggtggggtgcccagccccaaaaggatagccctggagcctgcgccagggggtaagaggggagtctttgtggcctaaagcagcatttcctcaatgtcccgtttttctgctacatttcctgccctggttcagaggtacttagcctctttacttacttggaagtgtgactgccactcagatgccctggtcagcccctcctaagcagtaataattagaactaggggacttccgatgggctgccagggatgttttgcccttatgcacttaaaatgaacccgtaactattaaaataaatgtcgctcctccccaccctgtccctcctgccccagcccctactttgagaaactcaggtcaaggctaaagtccaaggcctggttcttgtcagtgcctcagtttccccatctgtaaagtggggcgatcttccgccgctcaggccaggtggtggttaggattaaaccctgaagtcgacctgagcagcttagcatggcgcctggcccagagcgggcgctccacgcccgctgatattattaccaatcgtgatttcgggagaggcggatctggggcgtagaaggtgggtgggttggggagggc

SEQ ID NO: 38838 - DNA, 2342 bp, Artificial sequence
  DNA replication origin
attggtcagctctgtacctctggcctccagcttggggctgttcacacaggggacaccgatcagccccctgtgtgacaatgaaggccaaactcctccccagggcccacaaggccccagcatggtccagccctgctgatacaccccctcattctacctcttacccactccccttcattgtgcacgctccagcctcacagcttcccccactgattctccatgacagcacgtcttggcacatacctcagggcctttgcacatgcacttcctgctgcctggcaagccctttccctaactccatgcctggtcaacccctacatgccctcttcaagattcctgtgtaccctaggcctctctccctgagtccttatcatatctgtgattatatagtaactcaactggcaacttgtttgcaactttgctcaccctccagattcaaacttctgggaggccaaggacctgttcccagctccccagcaagtatccaaccaggctgaccacaccccaccacctcagggcccctgggaagggaaaaaagagctccctctccccttctttgccaagtgaactcttgctcgtcctcagctcaggccctgccaccttctagaagcctccatgactcccacagctcccactccctgctaaccccagcacaatactgctcagcccgagttccaagttcctggtacgcagcaggtgctcaatacaggggtcacaaatgcttatacatggggaggtttgagaaaatggggtcagctgaggaccacggagatgggcagaaggtccctcaacaggtcactgagccatctcctctctggttcctggggcttgggggagccagacatccctccaccccacccccctggtcacaatcagagaagcaaaagcaggaaccaggctgagctgtggataagtcatgctccaacaagagctaggggacagggagagagagccacgggccttcctcctagaagagaggggcctaagctaagcctggcggggcaagggcagataagcagcacctggaggagagggcactctgggagggacacagtttaggagcaaaggcccaggggcacgcgggagggcctaggcaggcagtcagctgagagaggtgacacactgtaaatcatttccttgggtggaaagaccacatcaccacatcaccaaaaaggcctcgtggctttcattcaatccctcagcagagcagtcttttccgacactgctgtgtgtgcagtcctgtcttgcgaacctccactgccccatcactggagggatgcagggacagccagactgtggtctctgaggtctgggctttcattccagcttccaactatagggccttggtcaagtcacttcccctctcttagcctcagtttccccatcagcaaaatgaagataaacaagagtctgtacctcctaaaaggtgttcagtagatgttggcagctgtcattaccactggcccagttttatatgtggcaaaactgaggccagaagggaaaagtgaattgcttacggtcacccagctgctggctggcaggacggtgccagggctatttctttctcaaggcaccaacccatcctcttctagaatgaactagccagcaacctcacatctcacccatctttctcagccaatgtgtccagtgaacaattcatttattgagcatctactacacgccaagcctctacctgcagaagcgcttagaatcttcgcctgaggattctcatttcacgtatagggacttagaggggcagtctcttggcccaggtcactgggtgagacaagaagactcggtgccttgatcccccagccagggggctgagaagagggtctgcaacaggaccagcctggcccacccttgaaaccaagtctgatcccagctgcactgtggctgtggctgggcctggacttaccccaggtgacccagcaaccactgccccaaattgtacagagtccatgaagttcaggaggtcttgcccaggggcacacacaggctctgtccactcctaagtccacctgaaggacgcaggggctgaaaggataccacacaggtgagccccttctgttcaccccatccttccaccagcctagcaattccagccaggcccacctgccaccaatgaggaacccagctcagagaggcaggcagttgtctgaggacacacagcagggcaagtggcagccctggtggggactcaaacccaccccaatcccagcccaggcagacaggtggacctggcccggtggccaacccccaaaacttttgccaacttctgagccggctggtagctgggcctgctcaggggcgaggctgggggctgtgggcaggggagaccaaac

SEQ ID NO: 38839 - DNA, 1834 bp, Artificial sequence
  DNA replication origin
cacagctatttaggggtagagccaggatctggatgtggagagcccagctccagagcccactctcaccaccatgccataccctgtctcgctcttgctttgagagggttgaaaagactttgggagggttgaaggatatttcaggtctaggaggctcttagcacgggcctgctagagccatagcctgatgaacagtgatcagagagtgggcgccattatgatttctctttctaatgacatcctcaaaacagtgctgagatgtctgctttatccctgctttgcagatgaggacgctgaggcccagagagggaaagccacttgcctagggacacacagcggggagaggtggagcagggcctctatttcgagacccctgactccacacctggtgtttgtgccaagaccccaggctgcctcccaggtcctctgggacagcccctgccttctaccaggtgagatgatggccctatcagggctcaagatgggtggggagatcccagcgaatctgggtgggagctgggaccagccagggcctgcggatggggaaatgggaggcagagggtggtggcaggactgtgggcgtcagggggagttttcaacttggtttactctgtgtttccgtctctctggacctcccaggtttctggctctgaagtcccttagctcttaaatagtcactcattcgttcagctgtttactgagcacctactgtgtgccacaccccatgctaggcactgggagcacagcagtgaacaagatgaacaaaagcccacgacagtagtcacataaccacatgaattcaaacaacaaaaacaaaacaggaccacatgttatcaaagacagacacaagtcagggggacccagtgaaaggatttggggaacacttcccaaggaggggacttttgagttgagaacggaaggaggcaccagtcaccctggtgaagtggccagggaacagcatttgggcagtgggaatggtatgtgtgaaggccctgtggctggagtgagctcccagccatctctgcttcaaacctcctgctgtatggccttggctgccacttttagcacctttccccagcgttaggcaattcccgtcagccacgtattcattcaacaaaccctcaatgagccccctccatgtgctaggtgcccgggacataggcgtggctcagatactgtccctgccaggagggagggaaacagtgactcagggggaggtgggtgggtaaggtcagggcttctgattatgaggcatttcttccgttcctggcgctggaccgaggaagccctttacggatggatgccatccttacgctcattttacagatgaagacatcgaggttttgagaggctaactctcccaaaaaggctggtgcccctgtcccccatttttttcttttctttcttttttttttgagacagagtattcctctgacgcccaggctggagtgcagtggcaggatctgagctcactgcagcctctgcctcccctgttcaagcgattctcctgcctcaccctccggagtagctgggactacaggcgcgtgccaccatgcccggctaatttttttttttttttcaagtagagcccgggtttccgcgtgttggcccggcaggtctcaaactcctgatctcaagtgatccgcccgcttcggcctcccaaagtgctgggattacaggcgtgagccaccgcgcccggccctgctgcctctccttgggcctcgttttccctatctgtggaatgggtgggagggaggccggccaaggggccccggcagccctgcctgttccagtgtcttctctctctcctgccaggaccatgggtagcaacaagagc

SEQ ID NO: 38840 - DNA, 1035 bp, Artificial sequence
  DNA replication origin
tgcgcgggcggcgcggggtcctcgcccacctggggccacggcggggaggcggcggggctgtgtgcccggggtcgccccctctgcgcaggcccttcctctcgccaggggtagcgcccctgggtgacttgggtgtccggggggtgggggggcggccgtacacactgtgaagcgtccgcgccgccgccgctggctttggggtggagcaagcgcaaaagacacggggtgtggttaatgggttctaattggacgcttaagcccaagaagaagaagggcggcgcgggaccgggcctgttgctgccttggcgcccagtcctttttcgttgcctgggtccgcccagagatgagtcgggacgcgcggcccacgtgcggcggaggggcagctgggtcgctcggggaacggggcaccggatggccccggttgggcccgcgccaggatgcgcccctgcgccctctgctggcgctctgcggtcaccgcagccccggagagggccgttttggagagccgcggcggtgccccagacactccacgcagacttcactccttcactcagacccgttcactctccccacaggcacacgctgggccacacacacggctacacccccgccagggacacgcacacatgcggggtggaggcagggtcacagacacccgcagacacatccccaacgcagatgtacccagatacaaactcacatgcacaggtgacctcacacttgtagctgaagacacacgcacatgccgtcagaagcgcattcagagacacacgctcagctggaaatcacaatctcaccatcgtggccgcccaggagacagatacacacaggtgcatcgagaacatgagaacactcagagacacacggacaggcgtggacccttcagacgcagacgcacgcccaagcgagagaaacagacccacagacacaccattcatttgttcaataagtatatgtggagctcctactacaggccagggctcctctgctgcccgggccccagcggtgcagacagaacccacctgggggaaggaagca

SEQ ID NO: 38841 - DNA, 1092 bp, Artificial sequence
  DNA replication origin
agacacatccccaacgcagatgtacccagatacaaactcacatgcacaggtgacctcacacttgtagctgaagacacacgcacatgccgtcagaagcgcattcagagacacacgctcagctggaaatcacaatctcaccatcgtggccgcccaggagacagatacacacaggtgcatcgagaacatgagaacactcagagacacacggacaggcgtggacccttcagacgcagacgcacgcccaagcgagagaaacagacccacagacacaccattcatttgttcaataagtatatgtggagctcctactacaggccagggctcctctgctgcccgggccccagcggtgcagacagaacccacctgggggaaggaagcaaagggcagctcgtggagggtgttagaaggggcgctgctgcgaaggcgcaaaacaggcagggagggagggctgggggatgtgaggaggtggaggctgtagcttaaaatggtggaagggggtacgggggcctttctgagggggcagttacttggagccaaatcttcctggacaccaggagcgcccagagtgacacactttatagagagagagcgagcctcctgggggagtgttcttcattcaccgcttccttcagcctatagctctttcttgagcacctactatgtgcctggctctggaaacaaaacaaagatgctggttattggcgacttctgctcctagagcaagacaggcaccaaacagataagccagcacccagcactgcccaaagccccggggacggacgcggacaggaagggatgctcccgctcccacacgcccttgcagggatgcgcagatacacggatgcagtggacacgtgcacaggcccatcttcactgaacctgactgtgtctttgggctgagcacttgcgtgtgggagacaaatccactcctcctgggtacagggccatcctgcccatgccttccctggctgtggccccactgttctgacacaccccacccctctctgcaggtggagtgaccacctttgtggccctctatgactatgagtctaggacggagacagacctgtccttcaagaaaggcgagcggct

SEQ ID NO: 38842 - DNA, 1456 bp, Artificial sequence
  DNA replication origin
gttattttatttacgcatcaccatagcctcgagaaatgggaagtcttacttgcaccattttacagatgaggaaactgaggcccaaagaggtgaaataacttacccaaggtcacatggctagtagtggcagagctggaagactaggctggccctccgacccatgatcctttcaggaaggctcagtggaggtgcagcagaggccacaggagggagaggcccgtgcaggggaggggcgtcagcaggatggctctgaagtcctggtggagtctctaccaagcgtctcagactggggtgacagctggggcagagctgtggaggcaggaagggctgggagaactttggttctgcctttttcacctggattcagagagtagccccatgcttgcctttttccagccctttccctccactcttcttgtcttccagggagggtgggctgggggaggtttggccaggaggctggggctgccaggaggcctggaagtgatggaatctcattcagggaagaccctggggtagctgattgggagatgggggtgggtggattgggagcccctcctcatgtcacaatgctccaatgctccttcgcttagacgtcagagatggtggctgagcgcggtggctcacgcctgtaatcccagcactttgggaggctgaggcaggaggatcgcttgaacccagaagtttgagaccagcctgggaaacatagggagacctggcctctacaaaatataaaaataaattagctaggtgtggtggcgcatgccagtggtcccagctactcaggaggctgaggcaggaggatcgctggaaccaggagttgaaggctgcagtgagccatgatcgtgctactgcactccagcctgggtgacagagcaagactctgtctcaaaaaaaagaagtgaaggagggaggtgtaggtggggggctggtattagtagaagaggagagggaaagggatttggggggcggggcttggtaggagatgggccaccggaatttaaggtgtttgagtctcacacctcatcccggggacccgcctgcatgcacgtccttcctccatcagtgctcagggcctattactgtgcagtgcctcccccaccctgtaagagtggggggctttctgaatctagcatggggcccaggcacgtgtggaggctgggctggctgtcagggcagtagagagctagaggaggaacccgtctgtggatggggtctggccaagtgggggtcctcgcagtagcagacccagagatcccgcgccatggatcttgctgccacatggccctgggtcctggtattctgggtattgtgtggccctgggtgtgaggaagccctctggggctgaggtctgactgcctcaagctccctcatctgacatcctagtctcaggagtcagggcccctcctgggtctgactctgggttgctccctgaactgccccttcctcccaccca

SEQ ID NO: 38843 - DNA, 855 bp, Artificial sequence
  DNA replication origin
gcaagtaaggttgtaatagaagagattcctggctgagagaaagtcaagtgagacctacaaagtgtccccatgctctgagatttggaagcccgctcctgggagctggtgagacctgggtggaggcaagcaggggccctgctgggacccagtgaccatccaggccccaaccctgcaaactagagcaaggcttgcctctgtcccaaatcacgggtcacacctaaagggctcctcggctgaaaactacaggcctcctcctccagcctacccatctgcagggggaaactgaggccagagggggctgggacttgcccaaagtcacacagtgagccctgtcagagggggtgaggtggcagagccccaatgcccagggcacttctatgcgaaagtgaggagaaggagtggggggtgtgatggggatggggcaggaagagctcccggcgtggtcgggtcccctgggcctgggcgggagcggggaggggcggaagtacctttgcagccatctgaatgtgaaccaggtctggctggagcgggggtccagagacacagaggagggaggagagagcgagagcccaacaggagagaagaggcagagatgggggtggtgagaggcggagagtggcagaaagagcaggggagagagcgggagagccaggcggtgctggggacaggggacgagggggcagccacagaggcctcacatccaaagcaaccaaggggacagggacggggtccacagggagtgaggagaggtcaatgggcagggagacctgggaactagggtccagcccctctcattcccactgtacagctgggaagactgaggccagagaagcaaaggcctctttgctcaaggtc

SEQ ID NO: 38844 - DNA, 856 bp, Artificial sequence
  DNA replication origin
ggatggtagcagtgacattggggagtgggtggggctgtcaagcctgcctagaggagatcacaaatacacgacgagaataccgttgtgtgtgctcttcgtgtgtttcctaggagtgcagggcaggggtgctgggtcgatccacaaaagtcctgaaaacgctgaagaaaaatccaaagacccttcccctcctccctccttccccaccaccgaagcacacagtcttgaaggttgatttgcaaccgtctatacaaacacatttattttacacaaatatacatcagatcacacacctgtgcaccggagtcaactctggccacgacattgcttaattaaaaacaaatttcaaaaactggacatttttctgttcagtattattttcacaagccaaacacatcatagtgtccaggtcagggtggcatctgggtggcatctggagatcgcagggggcgggtgtgtgtgtgtgtgtgtgtgggtgtgggtgtgcgtgtgtcttaggagtagagatggagttctggatgtgaggttgtggcaggtgttctctgcttgctggtgggagtatacctggatgcgtgtgcctttgtgttcatgggggtatgtgcgtgggctctgtttgttcgcagacatggtgcttggatgtttgtgtgtgagcacttgtctaggtggtctgtgagcctgggctcatggaaatgcgtcccagatgtgtgtgcttgggcattaacgcgatgaggtgagccggtccgcttgctctggctgtgtgtgcagaatgtgtgtgtactgtgtgaacacagatccaggggcttcatgagcctgtgggctcctggagtgtgtgggcaccgaggtgtgcagctgggttcac

SEQ ID NO: 38845 - DNA, 837 bp, Artificial sequence
  DNA replication origin
gggggaaacattttagttttctcaaaaagaaaaaaatgcatgcagaattaagagtaaaaccaactgaaggcagaaaggaaaggctgagggggcatggagccctggggtctcatatccccgggagacacctggacactacacagggccgaaggaggggacagcggggccaggagactgtggcccagcagagtggatgacatctctcgcctctgcactccatctctgtgtgtctatctctgtctcccttacacaccgagtccagcacaagccaactggacacaggcccagagtgaggaagtcccaaccggagaaggagccagagacaggagtgggagaggcagagcgactttcccgcctgccttccctgagcagacattaccaatgtggcgggacctgggatcactagggagaacgtcacccagtccctcaagcgcttgttctagtgggcgggctgacacgctctgcggattccagggcgtcagggagagctcccagggccggtctgtggcctcggagatgtgctttgcaggatgaataggagtttgccaggttgtagagagggaagaaagggcattctcagcggtgaaaacagcctgggcaaaggcatggaggtgtgggagggcctgggaagagtcagagatgtgaagaggtggatggggagaaaaatctgagaggcagaaagggagggtggggactagagaaagagagacagcacccaggcaaagaggaaaagagacagaaattagcaacagtgagacagagagacacatagagaaagaaaaggaaaatcagccaggcatagtgactcacacctgtaatccctacactttgggagcc

SEQ ID NO: 38846 - DNA, 656 bp, Artificial sequence
  DNA replication origin
cagagatctggatacatggacacatgcacacgtgcccacacacacaacctgggggtggaacaatcaaagaaagagatgagcatttaatgagaccacagcaagaggcaggcgggaggcagaggctgacacacagacggacagatggacacggccccaggatcccaggagacacgctccaagggctgggtgggaaaagccccagaaaggggagggctgcggggagtgagaatcgggatggacctcacagacgacaaacagatggacaaaaagcttctctccctgccgctccctccccgccaccaactccagcccctctgtctccatccccttttcctgtctgtcctgtctgaatctctgaatctctgcctgtctctttttctctctatgaatcacagcgtttcagagcctctgagagaaaaatgggaaaagaagacagagatgatagaaaatgcagagtgtgcgtgtgtgtgtgtgtgtgtgcatgtgtatgcgcgcgtgtgtgtgtgtgtctgtgcatgcgtgcacccagcatgaagtctggtctggagaatgtaactagggagggaggaagagaggggacgagagaagcagaggatgaacaaagagactttcgaagctcataggaaaaagcctgggaggcaacagcagcagggaca

SEQ ID NO: 38847 - DNA, 879 bp, Artificial sequence
  DNA replication origin
gcctgcatggtggggatcaggatgacacaggtcagcctgtgcacaggcaggtgggggagacacagggctctgagtggggccagaagtggtaagaggaaatgaaagcccacagcagagcgttaagtgagagaaggctgagccacccagggcatgtggctctgtgccagaggtccccctgctgacggagtgggagtggacaagtgagttgagttttcggaggttgcaggtaagatgtccagggatggttgccagggaaattgtccaggaggcaagccttgaggctgaggctggaccaggatggggagtgaggagaagaacacccccagatgccaagtccaggagcctctgggacaggggaagtgaggtgagcaagagattcatgcacagacacacatgtacacaggtgcatacacgtacacagatgcaaacacacactgacacggtggcaagaacaggagggagggagaaggggaagtcaggtgggaggcagatggacagccacaaaggcacagagatctggatacatggacacatgcacacgtgcccacacacacaacctgggggtggaacaatcaaagaaagagatgagcatttaatgagaccacagcaagaggcaggcgggaggcagaggctgacacacagacggacagatggacacggccccaggatcccaggagacacgctccaagggctgggtgggaaaagccccagaaaggggagggctgcggggagtgagaatcgggatggacctcacagacgacaaacagatggacaaaaagcttctctccctgccgctccctccccgccaccaactccagcccctctgtctccatccccttttcctgtctgtcctgtctgaatctctgaatctctgcctgt

SEQ ID NO: 38848 - DNA, 1311 bp, Artificial sequence
  DNA replication origin
gaaggagagcgaggggggaggtggtgggcaatcggggagacgcgcgcacacacacacacacacacacactcctacagggacgcacagaatagaagcagaattcaataacaacttggagagggagcggagcgggagagagcaggcagggagggtagtaggggagggaggtaggcacacgcggagcccgtcttaggaggtgttcaataaccgctgatggagcgcaggaacaaagacaaggggctcccagagggaagcaacagctgagaaagttgcaggatagacagacagacaaaatgtcacgcatacacacagtgagaaacaccccgagcctcaaggggcgggtgggagggagcctgcactcgagggccaggacggtctgtttcttgctccgggtggtggaggcacaggtgcagacacatgtgaaattcatcaaagcttttcatttcagatttgtgcatcttacgatatgtaagttagatcccaattctttgaaatgagaggaagaggataaaaggtggaaggaaaggtgaatgcgtcagacagggagacaggaacagacacacacacacaggtaccagtgatgcccagggaagaacaaaacccgaccaagtcagaggaaaaaggaaataaaatggaacctgaccaggagagaaagaccgactcctagacccccacatggaaaaggagaggcccctgggagacctgaattgggggtaggggatttataaggcaggaaggaaatcgccttgagctagaggggggcataagagagtggcaggggaatggcccggcaggggtgacctgctggaagtggagtgaggctgcatgaggccccctgatgagggaaggagccaaacaggatgccaagcccaacgggccttgaagggtttggggccgggtgatgggtgtggggcccaggaggcagctttgttctcaggtcccggtccagaacccacaagcggggagggatggagatggagaggtgaagagggtgggcgctgaaatggccccgcaggagggtgcaggggggcgggtgacaagagtgcaggcccaggaaaggggtggggaggtagaaaagggcccacaaataactcttggacagacagacagatggatagatggatggatggacagagcaccctctctcatctgcagagggaaagcaaagcctcagagatgatgcagaaagagacaaggagaggtttaggagaagtggagagagagatggatccgggcaggtgtgcaaaggtcaagatgcagccagagagagcaaagggaagaggagatctgtctctctgtctctccccctac

SEQ ID NO: 38849 - DNA, 1639 bp, Artificial sequence
  DNA replication origin
gaaacaccccactgcagtggaaagagttgggtgggacaacaggaggcaggaggaaagagaggggttcactagaagagagaagtcacagctgaggaggagcgtatgagcctacggcccgcggcccagcacactccactggagtctccccaccagaccagggaccagggccgcggatctgcctccgtatccctaagtccgccccctgtgggtgctgggtcagggagcatctaccaaaggcacgaccaaatttgcctgctgtgagccaagtgcaggccagagcactgcacgggctgctgcactgcaggaggtgacaggtgacagagactccaaggaggggactagagcacagcccaggaggggacatgaatcccaaggcaaggtgctggggaagggacggggcgagacccattgggggaccacatggaccggacgtgggcggggaggggaagcggaccagcccagggtctgagctgggtgctgccaggtagtgggcatatgaggcgggacaccccaggctttggcaaagaggggtgtgtgagtccatcgtgaggtgcccatggaatgtccggaaggttgtatgcagggagggctggaactcaggggatggaggtggggtggtccctacaaagggggagctgagccccagagtggggacagtcaccaggcgtggtgggaagggagaagaggacaaggaacaacagtatgttagaaggccaaggctcggagaaggagtcctctggaagcagggcaggcttaggggaccaatgtgtctacagtcagatgccagagaagttgaggaagatgaggacaaggtcatgtctgcagggaggtaggcgaggtgctggtgagagccatgcgggaggtcaggcacaaatcgcagctggagtgagtgagaaggaggtacggacagcaagacagctcaggatgtggaggggagggatggggtaggggcttgaagggggctgggggttgctctgcagcggaagagatggaccgtgatgagtggacaggtctgggctcggctcggagatcctggctagagaccccgatgttggcagcttatgtgtggagcaaagggagttggcagaagggaatggggggatgccaggggcaggaggaggcggccagagctggcatggagacggacaggccggcacatgcccagggtgagagccagcctgcgcccatccctcagagacagcgaggggaggaaggaggggtggaagagccagagagagacacggggctgggctaccctggaacaatctcgatggagcccccaggagtgggagagaaagggaggaaggcagaggtgggggaaggagagcgaggggggaggtggtgggcaatcggggagacgcgcgcacacacacacacacacacacactcctacagggacgcacagaatagaagcagaattcaataacaacttggagagggagcggagcgggagagagcaggcagggagggtagtaggggagggaggtaggcacacgcggagcccgtcttaggaggtgttcaataaccgctgatggagcgcaggaacaaagacaaggggctcccagagggaagcaacagctgagaaagttgcaggatagacagacagacaaaatgtcacgcatacacacagtgagaaaca

SEQ ID NO: 38850 - DNA, 870 bp, Artificial sequence
  DNA replication origin
agctcagaccctgggctggtccgcttcccctccccgcccacgtccggtccatgtggtcccccaatgggtctcgccccgtcccttccccagcaccttgccttgggattcatgtcccctcctgggctgtgctctagtcccctccttggagtctctgtcacctgtcacctcctgcagtgcagcagcccgtgcagtgctctggcctgcacttggctcacagcaggcaaatttggtcgtgcctttggtagatgctccctgacccagcacccacagggggcggacttagggatacggaggcagatccgcggccctggtccctggtctggtggggagactccagtggagtgtgctgggccgcgggccgtaggctcatacgctcctcctcagctgtgacttctctcttctagtgaacccctctctttcctcctgcctcctgttgtcccacccaactctttccactgcagtggggtgtttcggcctgtctgagggagggtctgcgggcctgtccccgtctgtctgtctgtctctgtctgtcagcgctgcgtatctggtctgcctgtccctctgtcttcgtgtctgtgagagatgtgtgtgtgtgtgcattctgctgttgggcagtcctggcgtctgatttgtgcgtgtgtgtgtttcttgtgttggggtgtgtgtgtggtggtctgtgtgtcctggagtgggtttctggctggccggttttgccggtgtggagggaggcctgcagcatggcagctgtctgtagggggctgtctgtgtgtctgtctcggtgtatggggctgctggccagtcctgcctgggtgcagagatgagttgggggaactccctgagtgcaggggtctgtctgggtgataccatcca

SEQ ID NO: 38851 - DNA, 1169 bp, Artificial sequence
  DNA replication origin
ggcaaagtatttgatgcccaaaaggagcaatgaagcactaatgctccagtgggggaaggcgttgcagaaagacagtcagacacacacagtagggaggaaactgggcgtgggacactcagaagaggagcaggaagacagagagggagaggaggaggggccgaggggccaggacacaggacccctcctctcatcctccagagtccctctctatagccgcctggggggaagccgctcctgggcccaggggactcagagccgagtggctcacggcctggcctgacggacagatgggacaccatcagcacacggtgcggcaggagtgctcctggaagccccttccctcaggaagccacggtggcaggggagacacggactctgcttaggggtgggaggcacggggaggggaaggcggggacagtcccccagtctgcagggggaggtgacttggagccagatgcccgatcaccggggcaggttgggaagggacacctcacacagagagtttgcaagggccaggaggggtgagaatgtgtgtgagggcggggtggtgtctgagatgacaggccatctgggtggccggtggctggtgtgggggtgacagagaaggggtgaggcttgagaggcaatgggggttgaagcatgcaagggtttgacgcccaggctaacgcctggacggcgcccgcgggatggagggagcccaggaagggttgaagcagccagggacacatggccagaagtgcttgagaggcagccacgggctccatgtgcacactgggaaggggaggacggagctgggtgtggcctccctggggactgggtgaatgcggggagggatttccactgcatcctggccagacagagctcagaaatgagattgttcattcaatcaagccccttctacatgccaggcgctgttctaggagctggagacgcaacactggacgacacagacatgggcctgccctcatggggcttacagcatagtggcagagatgatagcgtgagagactgaaactaagccagaaatcaacgtgtaagaagatggcagggagtgatcagtgttataaagacaaacagcagcgtaaggggaaatagagtgacagagacgcattcagatggtgtggccaggaagggcctctctggggatgggcagtccaggcagcgggaac

SEQ ID NO: 38852 - DNA, 1446 bp, Artificial sequence
  DNA replication origin
cggcagagacagaggacagaggacagagaaggcaggggccagacggggcctgggcgtgggcatctggaggacttgggacaggcactgctctgggtttctgaccctgatgggagcggaagcagaggccacagaggaagccagcagggtccttccagggagagttggggtacccgtagagagggaggtggggattgagagctgtcgggggtgtggaggggagttcaggagtcctcatgatggtttgtggatgggggaggggcaggccagccctggcctgggcgagtgggctgagggtgggaacctccagctctggaaccagggaccaggtgtgaccagagggtgggtttagctctgtggcctcctgggaaacatgggggatgtggggatccctcaggatggagctccaggagcagtgagacccagctggaggcagcagtgagagggcaagaccccaggatggacccccccctcccagggcccccagcagggtaggggtaggcagagggaggggaaagagacacactcacagacacacatagacacaaacactcagagacacacagacacacacacatacacacagacacactcagagacacacacagacacacatagacacattcacagacacatagacacacacagatacacacacacagacacacatagacacacacagacacacactcagagacacacacagacatacacacagtcacagacacacacacacggacacatagagacacactcacagacacacagacacacacagaaacagacacacactcagagacacagaccacagagacacatactccagaacacacacagacacacactccgacacagagatacacactcagagacacacacacactcacagacacacagagatactcagagacatacatagagacacacacacaggatacacacgcagacgcacatacagacacacagatacacagagacacacagaaatacacacacacagacacacacagagatacacagagacacacggaaatacacactcacggacacacagagatacacactcagagacacacacactcagacacacacagacacacacagacacacaaagatacacactcagagacacacacagagacacatacacagaaatacacagacacacagacacagagatacacacagacacacaaacacacatgctcacagacacacacacagatacacactcagagacacacacacagacacacacagatgcacaggagtccagaagaagtgggagaagacggagcctaagagaggaggaggaagggaaatacgtggcatgagcagagtcagacatggcacatctggaaaaattgagaagggaggagagaggccaagagatggagagagagggagagaagaacaggagcagagagagacagagagagaggctgagag

SEQ ID NO: 38853 - DNA, 824 bp, Artificial sequence
  DNA replication origin
acacactcacgcatacacatacatacacacatgcgtgcatgcacacgcatgcacacgcacacaggtgtgcgcacacgtgcatacacactcatgcatacacatacatacacacatatacatacacatgtgtttgcacatggggaaggaggagcagggaggctgtgggcaaggaacgaggaggggctggcaaggtggggtaggcctccaaggcactgagccccaaaccccaaacaggctggcacccactgagaaggagactggggtgtgtttggggcgacctgctgctgtgtgcaggcttccagggttaggttgggctgcagccggttccccttgaaactacctcgatctgggggcaagtctgggctgacctggaggccgggcagggaaagggtctcccagaggaaggtcccagagcccaggagcacaaagcggggccctggggaaggaagaagagtttgccagagggggaagaaggcatgggggaaagagggccgggtcaccaggcagaggacaaaggctgagcacaaggacaaaggcttggaggagcagaatatcctggtgtgagacacggagacagatagcggcagagacagaggacagaggacagagaaggcaggggccagacggggcctgggcgtgggcatctggaggacttgggacaggcactgctctgggtttctgaccctgatgggagcggaagcagaggccacagaggaagccagcagggtccttccagggagagttggggtacccgtagagagggaggtggggattgagagctgtcgggggtgtggaggggagttcaggagtcctcatgatggttt

SEQ ID NO: 38854 - DNA, 1376 bp, Artificial sequence
  DNA replication origin
cagcccctctcctggcgcacaggagggctccctggctggcatttgaatgagtgactcagagagacttggagagcaggcctgaccaaggcaggtggacagagggacagatgtgtgaacacacacaggcgtgcgggcaccacacgcacagcagcactcacccatggattggaaggaaatggaatttaattctagagacaggcactgagaaacagaagacaaaagttgtggggttgggggccaggagaaagaccctccaggggcagacctggagcccaacacaaagactgggactcagcacacagcctgccctggagggctttagggtctgcaccaacgtgccggccaccagctgcgcgagaggggaatggaacacagactccaggaggacagaggtggggagagagacagagagggagagagagagacagagaaatggagagggagatggagaggcacagagagagaatgggagggagggagagacagagagggagggagagagagatggagagagagcagggaggagagagagagggagggagagacagagggggagagagaaatggagagggcaacagagagacacacagagagacatggagagagggagggagagagacagacagagacagagagatgaagagacacagagggaaacagaggaagagatgcagaaacccagagcataacagtaacccggagagagacagagagacagagagatatagagagacagagagagacagagggagagataaagggaggcaaaaaggcagagagacccagggagagacagagatgcccagagagacagcaagagtccagaagggtgcagagtaaggggtgatgtgggagacagagggagccaggaaggagaaggagctgaggagggaggcgtgtccagtggggacttgagggtgagaaagtgccctgaggggaggtcttggctgtgggaagagcctgggccaatgccaggaaagctgctgttgccctgttttagcagacattaggaattctggactttactgcatggcccgtagggagctagtgaaggttatagagcaagggggtgatctgtcacagttggggagtttgataatgtgccctctggcagcaaggaagaagaaggaaggtgcagaggctgtgaggggctgcggtggcagtagggaagaaggaaagaggttggtccacgcaggtgtggctcctccgagatgtttaataggtactcagggaataagcatgggagacaaactatggagggctgcgggtggtgaggatggggaagggaaggctggtcaggatcactggggacatgagtggccttccccagctttgacactttgctatggctgtcccctcggtctgggatgcaccct

SEQ ID NO: 38855 - DNA, 1409 bp, Artificial sequence
  DNA replication origin
tgtcacccctctggactctgagctcctgcctttggggcctgtgtgctcagcagggacccagtgtgtactcagtgcaagtctattaatggatgggtgggtgatgagtggatggacagatggatggatggatgggtacagtggtccaggcttcaattttctaggccagggctgtggcaggggctgataagatggtgggggttggggggtgctgagcagcttttggggaaagattatacaggaagaacagatgggctgtgggcggcaggagagtgaggactcatagatgacttggggctcctggctgtggacccaggcaggcaatgacactcagcgctaacgagaacagggagagaaacacatcaggggtgcggaaatgatgtggtgagtttgtcatccactgagtttgtgataccaaagacagctgaggattggctttgagtatccaacttgtgagcatgagggcaacctggcccttggggccgtcagcaccaagggcagggcaaggtggtgcagaggaggagggtggagctcaggacatgcaccggggccccaagatgtgaaggcaggtggaagaagaggatgagaaggagacaaaggcagggatggcagacagcatgcattcacacatgcacacacgtacacaatggagcagcccaggtcctgacatgaagcaggtgtttaatcaacctcttgtggatgaatcaacaaatagatggaaaaggtgtaaatgacagtgacccagagaccaggaaccgcccatcccaagtcccagggggaaagaagtgagagactgacagatgtacacacacacacacacacacacacacacacacacagcatgaatggcttgcagactcagagcaaaaacccaacaaggcttctctgtaaagagaaagggaaaatgtggctttggaaggagataaaaacccaggcattgagggaagggagatgggaccctcagacacacagcagggacatggatacaggcaccctacagatacaggcacaaactcacctctcactgactggcacagaatattttagatggatggatgggcgggtggatggattgatggatagatggatggataaatggaagagtggatgaatggatgggtgaatggatgagtggatgggtgggtggatggatgaatggatgagtgagtgggtgggtggatggatggatggatggatacatgaaagtgaatgaatggatgggttgatggatgagtgggtggagagacagatgaataaatggaggagtgaatgaatggatgggtgaatggatgagtggatgggttgatggatgagtggatgagtgagtgggtggatggatggatggataaatggaagtgaatgaatggatgggtggttggatgagtggatgggtggatggataggtgagtgag

SEQ ID NO: 38856 - DNA, 3200 bp, Artificial sequence
  DNA replication origin
cccgtggcctggcggggacaaggacgaccacaagcctggtgctgagtgctcccaggggagtgctccctgcatccaggagggcccaagggaaggctcagcgggagcttctctggggaggacaagggccctctggggaggacaagggcccaggccttcttctctacaatggtggggcgtgggagaaggggatggaacctggtggccactccacatggagcctccccgtcaggctgatgacatctgggctctgcagagagggccagagtggagcctggccaggggtcagccttggaagggcaggaaagtgctggggagcaggcagggcagggccctggagcaccggagtcccacgcagctggcaggagaaacccttcaaaggaatggaggaggcccaactgagaggtgcgggaaagtctggcctccgtgtctggggcccagggagaggctgctgtccagaagccagcactggcctccatggggcaggggagcgaagaatggataggctgcaggtttgtcaaggagcaggtaggcagacttgcggggcactatgaggggcttagggcaggggtcctcagttgcagaggggaaggcagagaaacctccaggcctaatactccctccccagctcatctgtggccaaacaggagggagcctatgagggcgcacagtctcacccccacctccaccacctcatctacctgctgagagggccatggggaagagagagcgtcaggtgggggtgggagtgagattttgcggaaaagattgtgaagacctggggcacattagaggtagggcagggagaggggaggggtggccagacagctgggtctgggagtgggggtgggggtaggaggatggagagtttgatcctggctcagggagtctgtgaagctggtggaaccagtgaacagagcaggggagagaatagtgaacatgtgatgtctggggcttgagctgaagagccgtgatggggggacactgaggtgaggcagtttgttgcagggcctttgaattcccaggagtggacaagcagggagatctcagggagggagagaagcagaagagggaggcgcagctgcagaggcatctgcgctagagcaaggaggaggcaaaggggctggagaagtagccaggagtgaccccacccatgcacacatgcacccacacacatacacacatgcgcacacacacatgcacacgcaggtgcacactcatatgtatacacatatgcacacacgcacacatgtgcacatgcacacacactgtgatttgcagcgtgacataaagtcttaggaagcctccatcagccatcttttagtgcaggcataactgctctgtattctccctggactctgagctcccacaggccatggcctaaggctttgtggcctgtgaccccagcgaatacccagtgggtgctcagtgcaagtctgttaatggatggatgaaaggatggacgatgaggggataggtaatgggggaatggatgatgggtggacagaagatggggggatgaataatgggaggatggatgatgggggatggatgggtaatgggggagatgcatgatggggggtggatggatgacagatggatggatgatgggggatggatgggtaataggggagatgcatgatgggtgggtggatgcatgacggatggatggatgatgggggatggatggatgatgggaacatggatggatgatgggggggtgaatgcatgatggggatggatggataatgggggatggatggatggtagaggatggatggataatgggggatggatgatgggggatggatggatggggatggatggatgatggggacatggatggatgatgggggatgaatggataatggagggatagatggatggatgctcctggcatcataaacctgacaactgggctatgtcaggggctgaagtgatcggagtggggagggggctgcttagccaccccttggagagagacttgaaaggaaaagaggacagatgggtagtgggcagcaggagggagtggaatcagagatgactcgtgctcctggctgtgaaaccccaggtggtggtgaagctcagtgccaatgagaactgagtgagaaacgcatttggaggatggggacaggatgtgctgggcttgagtgaaagagcccagtctgtgtgagccacgattcactggcaggatgaggagagaacaagtagggtctgggctgcaggggatgctggagtgtcaatgcaaagaatgactctgtgaacctcagggagctggtgaaaagctggggagggaatgatccaggacaggaacctggggccccaagatgtgagggtaggtaaagcaggaggagtcaggaaggaaagaaagacacaggacacacaggcagaccctggtcctggctcaacaagtatggtgtgttggatgtatggactagcagatggatgaagaatcactgagaaaaacagagaggatggaatccaatgaagaccaacatatgtacacatgtgcatgcacacacagcaagacctggagaaagtgggaaactttatgagcttgagaaaaagagagggagctagggggaagctgtgcgcacgcatgtgtgtgtgcacacacatacaaacacacacacagcaggaaggatgcaccaactcagagcaaaattaaataacacttcttgagagagtgggaaaaaaacacactgagccaggagaccaagacagaagctggatgagcaagatgatgtgtacattcaaaaaattagagcatgggaagtagagcgaggtggggtcttcagggagatggccaggcaggcaggtgagacccaggcacatgcatgcacacagacaccctgacacacacatggccaagcttgaacaccagttcctggaacaggctcagtgcgtttttctgaatgggtacacggtgggtgggaggatgggtggggtagcccagagggtgagaacaaaaacctgagaaaggccccagagaggagtcacctgaaattatcctaatttggttgtgatatcactttcctgatgggacctgttactgttacataaacagaatggggaacagacaacgcacacactccccacacacatactcaagaactagggccaagtccaaggggaactgggaaagatgagggagaaacaaagggcaaatgaggccaagaaggggagtgacagagcacttggag

SEQ ID NO: 38857 - DNA, 1049 bp, Artificial sequence
  DNA replication origin
gctacgacgcagcagatcacagagcaagaggattccaccaaagcaaacagcagaggtggcaggacagaccctcactgtcccaggagcttagggaggagagggatcctggtcctggcaccttgaccaggacccctcatgaacgaggggagaggaggagataaaagatcctattccatttggcaaacaggtcagtggaggccccaggtgaaccccgtggtgggctcaaggtcggggcaggtggtggtcacagagggcccgggagggaagaggggaaagagcctgaagttccatctcaaactcctctgtggacggaggagagagcagatgagagggagatgggaacgaaaagtcagcggagggaagtgaacaagtttgcctctgaaaaacccaggagaggggaacatggcgttgccagggcaaccacacgaatggggtaatggagaggagtgaagggaagacggggtgggagtgtggcttagaggaggcaaacctgaaaggtgggggcagtagaggggaagggcgcctggactcgagtgcccagggatggtgaaggggagcacaggggaaggattgggaagtcaaggatttctccctgggcttagagagtttgtgatgccggtgggacgtccaggaggtgggggcgggtaagaagatgtttagatgcgtaggcctggggtgtacgtaggggggcccgggtggacacagaggcaagcagagggaatctcagaagccccacaggtgggcggcctggcccggggagggggtatgcgtggaggggcgcagatggaagagaacacagcccagggctggctgacgctggaggggtgagggaggaacgggtgtggagaagtgggcaatgcagaaagacaccacacgcacacatacacacaacacacaacacaacacacatataacacacacatgcacatgtacacgcacaacacacacacacaacacacataacacaatacacacaacacacacccacatgcacacacacattacacacacaccctgagtgtgatgctcggtgacccaacccagtcttc

SEQ ID NO: 38858 - DNA, 948 bp, Artificial sequence
  DNA replication origin
gctgtgtgttttgttcagcagaacatccagtaggtgttcagtgtatgcttgttggatggatggatgggtgaatgggtgggtgatagatgggtagacgatggatgggtggatgatggatggatggatagatgaatgggtggatagatgaatggatgggtagatggatagaaatgatggatggatacgtaaaaatgaatgggaggaaggatggaaagaaaggagggaagaaggaaggaaggaaggaaagaaaggagggaagaaggaaggaaggaaggaaggaagaaaggaaggaaggaaggaaaatagatggatgtgtgggtggatgaatggaagaagtagttacacaggcctatggtccaggcatgagatgctaaggcctgctgtggccagggctgaggcgttgggttagggtcttgaacagccccttggaggaagattcagcagcaggaaggggagacagatgtgccatgggtgacaggagagggaggtgtcagagataactcctggcagctgagataactcctggcaggtggtgatgctcagtgctgagaccaggaagtgtgtggctggccctgggaggtgatgggttggaatgtgaagatgacttgtgggtgagaagctctgggtccatattggtttcaagtctgattctgcatttgagggcagagttcggatggcaagtgagggatagcggtgtcagccagaagagtgggaccaggacaaggagtggggcctgaccttggaggacaggaggaggagatggagtcgagaaggagaggggaggacataacagatcatagcctggagctcagcgagcactgtgcatgcagagggatgggggcaggctgggccggggtgtttgcagctagctcgtctgtaatagtgatcatggggaagcagctacatgcccatccacagagtggcatcaaccaccattcacctggcctc

SEQ ID NO: 38859 - DNA, 1210 bp, Artificial sequence
  DNA replication origin
tgctggaggcacagccctatggtgggactggatgtggtcagaaggagtcaagaaagtgcctgagacttggtctacttgtgctgaggatggggagctgggcaggtgaggaggttggagaaaagaagagcagtgtgggaagggcagggaagtgtctagtcctgtgttcaggtacatggatgtgcaagtcccagttcaggagagagctctatgtccaagaaggacaatgggtggccacagatgtcctgggggtggaggaagctgcccttggggaacgggcagggcaggaagcggtggaggactgagctctgggaagcatcagtattgagaggtggatggaagagagaaactgcccaatgggtgggagaaaagccaggagcacccagtgtcctgaaggaggagacagtggcctcccaagcaaggatgggcaccccaatcaggaccccaatgggccaggagaaatgaggaggaaaaagggaccatgggctttggcaagaaggaggtctatggagagctctcttgagaaccatggtgggctcaatgtggctgaggtcccttgccaaggatggggtatgcgtgggctgggaatggaagcaagtaaagccaagggtccctttcccagattttctgcagatggacagagagagaagacagagcatgggaggaacaggtcaccagaacacatctctcatgctggaaagcagactcagaaggagggaagaggatggctgtcaccagggcaaccatgctggccatgggatgaaaggagcaaaggaggagatgggagatttgggagaaagagtcagcacaagtttaaaggaaggaggtggggagaaggggaagcctggatttctgtccctggagatggaggatgagagcataagatgaagcctggagaggagggaggttgtttggagcctggggagtgtatgatgctgggagtatgactgagtggggctgaggacaggacagtgagtatacaggtctgggagaggggagatgagcacagaaatgcagaggagtttgtgtgcagggacctctgaagccctggtgtggatagtatggcccatggaaggacaagggcagaggggtgaggacacagccctggggagcactgatagtagagatcaggaggaaagagaagggtctgagaaagtggccaagacagagcaaacacatgcatatatgcacatgcaagaacacacacggtgat

SEQ ID NO: 38860 - DNA, 1037 bp, Artificial sequence
  DNA replication origin
gactttagtccttccttcctgaaattttagtgttttttttcaacttgaagttcctccagcttcagacattcctcagccttcctctgtgctgacactcagagagaactcagatgcaggctctcaagatgcccgtggtctggcgggaaagatccccccaaacacatgcatgtgcctggctgttcccaggggtgtgatcctgtgatgctatgggggctttcaggggagaggccctgggacttcatcagggaggatgaagtgcctgagccaagagaagccttgctgtgtgccaggcagacaggtgagaggcgttcctgccaagggcagcttgagcaaaggccagaaggtggggagagggtgagtctttctgcactgcaagaggttccttgtgactggagacagggcagaaggataagtcaccaagagtgtgagggtttggccttgcccagagccttaaagcaggaaaaattggcttgaagtttatcaggagggtggggaggtggggaagctggcttagtggggttaggccagtgaagggtgagctgccaagtgggagatttagaaaggtggcttgggtggcctcaccaagtgtagacaggaaggggcaaggctggagatgggaaacccgggaggccctgggagctgacacccagatgggatggtggtggtgtgctggaggcacagccctatggtgggactggatgtggtcagaaggagtcaagaaagtgcctgagacttggtctacttgtgctgaggatggggagctgggcaggtgaggaggttggagaaaagaagagcagtgtgggaagggcagggaagtgtctagtcctgtgttcaggtacatggatgtgcaagtcccagttcaggagagagctctatgtccaagaaggacaatgggtggccacagatgtcctgggggtggaggaagctgcccttggggaacgggcagggcaggaagcggtggaggactgagctctgggaagcatcagtattgagaggtggatggaagagagaaactgcccaatgggtgggagaaaagc

SEQ ID NO: 38861 - DNA, 891 bp, Artificial sequence
  DNA replication origin
tgctcaaggaacaccaaggaagcccatgtggctggagcaacatgagcaagggggaaaggagtgggagatgaaaggagagaggtaacaggaaatagactgggtaaggcctgtgggccatggtgagaatattaacttttactgtgagtgacatggaagctatgggaggatttaagcaaaggtgattcatgattcttccagaggttaatggaggatgaagagggggtgggagtggaggatggacaacaaaggaggaagcctcttcagttgtccaagcacaggatgctggggcctggccagagagaggggctgaagggattggggttagaagggtctcagagtggtcccttggaaagagacttggcaggaagtgggacagatgtgccgtgggcagcagaaggagttagagatggctcagtctcccactgcagcctgaggcaggcagcggggctcagtgctaatgcgaactggaagagaaacacatctcagggtgtgaagatgatgcaatgggttggattctcctggggaggaatctagtggcttgcgaagaagagaaaaaggtggggagtcttggttgcaggagcagttagggagatgtcagcacagagggcaggggatgagttcatccggggagtgtgtgaggagtgagagaaagagaaggaaaggaagacagaccagacaggaagaccctgccccagagttagctgagcatgctacagatggctggatggagaggcaagcagatgaaatgtccatgagagtgacagagagtggaagccaaccctgaccatgcctcagaaagagatgacccacttacacgtacacacaagtacacacacacacagcaggaatgatgcgtggacagagcaaattccataagtttcctctggagag

SEQ ID NO: 38862 - DNA, 1006 bp, Artificial sequence
  DNA replication origin
atcacttgaacctgggagatggagaacgcagtgagctgagaccatgccattgctctccagcctggatgacagagtgagactctgtcagaaagaggaaggaaagaaggaaagaaggaaagagggagggagggagggaaggaaggaaggaaggaaggaaggaaagaaggaaggaaggaaggaaggaaggaaggaaggaaggaaggaaggaaggaaggaaggaaaatgaaagaatgaaaggaaggaaggaaaacgaaagaatgaaaggaaggaatgaaggaaagaaggaaggaacgaaggaaggaaggagggaaggaaggaaagaaggaatcactctggcttctagcgaggaagcgatggcaggagtgcaggagggggtggagctgaagagaactggaagggcccaggagccactgggagatgaagtctccaggcttgaggctggactgtggaggtaggtggtgagagccagtgagctgtggaggaagatgccaggcgtctcctgggtctactggctggtggcatctctccatgagatgtgggactctggtgaagcaccatatttggatgagaagagttgtctgttgagtcagttgagcatgaggtgcctttgggacttgtggcttctggagtccataggagaacttgggctggaattggacattgcagaggctttgggtccaagccggggtggaggcggtgttgaagcagctcagagatgggtgagattaaggaacagagtgcagaggaatgagcagatgacagaggctgagcccaggcgagcactcgggttcaggtggctgggtaagggaagaggacaccaagaaggaaggaccagagaggaaagcagcaggggggactccctggggcccatggaagagagtttccaaaaggacacagtggcagtggcagggagctcaggggaggtaaaagttgattggtgaccctggacttggccttcagggccgtttgtcagtttttcggggatgcggaggggtgggtcaggagc

SEQ ID NO: 38863 - DNA, 765 bp, Artificial sequence
  DNA replication origin
aagaaggaggggatgggaagagcaagatgaagtggacagagaccagaccctgcagagccttggatgcccccatgtcaaggagtttggacactgtcctgcagtcactgggcactgttgaaagtttttacactagagtgatgcattcagatttgttatttgggaagaccactgagatggtcagtgtgaagactatatttggaagaagatagtctctaggcagggagaccaatttagaaaataaagtcagaaatgcataaggattgttggctgttggggtgagagagagggtagaaccaagggtgattctcgtgtgtctttgggttccttggcagatggtgaggaggtgcttgagatggggaacacagcatggtagccagtttgggtggggggaatgggctcagtctcagagaagtagagatgaggggccgggggtacagccaggaggaggttagcagacagctggatgccagagctgggactcaggaagaaatctgactggagggaccaacctggggacagaagttaatgggactccaggaatgagcaagaccatcaggcagagagtgtagagggaagatgggaggtggagagtgtagagggaagatgggagagagctcatagcatcatgagtcccggagacatgtgaggggctgacggaggtgtgggtgggtgacaaaggagagaggaaaaggaaggacctgagcaatgagacaaataactaggagaggaggttgccatagcaaccaagatagggaagagtttcag

SEQ ID NO: 38864 - DNA, 1340 bp, Artificial sequence
  DNA replication origin
ccctgcccactactcatttctttggggctcctggatggagacctgaagtaaggctttgtgttctgaaatcacccccttggtccctagtacctctttggagggctactcccacctttttcccctcctctcatctttcccaaagtgatacttgctttggccccttatcctaagaccacaagtaaagcacctatccctttggggagggggaagtggtcccttattccaggaccacaagtgaagatgtcagcctttctctttggggagagggggagatggtcctttatcacaggacagcattgagatggggttgggtgtgtgaggggcccagcttattgcaattttgatggccctccttttcctccctcccccaagcagtgtgcctgttccacagtgggcacatcagctgagtcttagaagtgtatgttgatgccgctaaagaaatcacaagagacaaagttttggtgcgcctctactgcaccgcagggtcctgggacactgtgcgagacaggggaggtactttttttattttttgtagaggtggtccctgtcctccaggagcttacaatctagctggggagacacaactaatgcacacttaaacaatcagtacaattagcgattaccacaatattgaccacaactgcatgagaccagggaaaagcaagatcagtgaggggcaaggggggttcagagaaagtgttttagtaaaggtgggattcatttacttttactgcttgaatagttccaaatcaagtgacacattattttggagtagggtgggcttgggaggcagtgaggaggaaaggggaatcgagagagcaaatgcagcgaggctggaatgcaagtgccctgggcaagggacagcgagagggccccactgtatttcttaaccaccctccttcctcaactgtgccctccagtcccgccacacaggcacgcggttggtgctgcaccaagattcagggcgtcggctggcgatgtcagaatgtccattctgctggctggtgcggtgttttgatttccatggtggggcctgctggcatggccctggcttcggggctgggatggtgctgtcccgactttgtccagatcagaatgcggtgcctatgcccagatctcaggggtctgctccccctatcccccctcctctctcgaccctgccccttagtgggaccggtgcaaaggggttgggaagggatctggtatcttcgtcattgtcggtactgcttctccgggggtctactggcccctcactgaccttgccaagtgctcctctggcgagggaacacaggggaccccacattcctgcgcggcactggctcccgtgctggccgagatgc

SEQ ID NO: 38865 - DNA, 636 bp, Artificial sequence
  DNA replication origin
gaggtacctgttccctcatagtgctgttgagagaattaaataagaaagtgcttgtcaagtgcatgttctgggtggcccactgtgaggactgacagccacagctcttccctctgcctggccaagaggcaccagctggggtgctagatgtgagctgagcctctggcctaggggacgaggggctgctgtagggctgagtgtatgctgggggagagggctggggtgagctgaggtggggcagtggatttgcccccgagagcctgaggggagccatcagtgtgctttcagccgggaatgtcgtgactgcagtgtggggtgtgtgctgggttcagaggggcagcagagagatgacagggtggggagatggttgaggttgggcgatgctaacgtccaggcaggtggtgcggctgggctggcacagtgggtgacacacatggcttgtgggtgtgtagcatagtgtgccctgtgcatgggcctgcatgggcacgtgtgtgtggtctatctgagtgtgtgtcatgagtgtctgtaggggcatctgtgtgtctgtgtaatggtgcatgtgtgtctgggagtgaagttgagggcatgcattgtactagtatgcctaccatacttgagcgtgtttgcaaatgtgtgtgg

SEQ ID NO: 38866 - DNA, 991 bp, Artificial sequence
  DNA replication origin
gccagtccagggcggccagggctgctcttatccaggccctctcccctcctccttcccccacctcccctctgcagcagccggcgcagtgattgacgcggtaattggcgcgcttaggcaccgggctaattgaggtcaggctgcagattgcagtggctgcttcgcagaggcggtgggcgtgggggctgcgcgcgctccctccccctgcagggcctggtgtgaggacgtcgtggagcggggaggtccccccaccccgccccccgtcctttttcccttgggagaacgctctccagcggcaggtgtcgtggggaggtctcctgggccctcccatttcaaggggatgggaaacttcagacagagggaaagagaaggccagggagctctccaaggcaggttgaacccatcttggagcctgaactcctggggagggaggggctcgggaaagagcccacgggtgggggcgggggagccttggcttgagtaattccccctctttgagcttactctcattcattcacacattcattcattcaacactcacttattgagtgccctatgtgtttgaagcactggaaataaagttgaaataaagacagacatggttccgccctcaggaagctaacagacactggggagataaacgagctaatagttgctattgcaaacatatgctgtagagagacattatctgcagggaggcaactgaaatggggtggtcagggaaggcctctctagggaagggacattacggctgagacttgagggacagaacactgggaatgggcagagtgtgagtgatgggggcagggggaacctcttctctaagacgggggacagaaaaatcctgatgagcaagggtctcggatggacctgtcattctgcaacttgcttgtttggacttacataatcctgagatgaagacacgttggtacgtgtagttctagtacattcattttgcctgtgctttttctaccatgcacagctggttcttaga

SEQ ID NO: 38867 - DNA, 945 bp, Artificial sequence
  DNA replication origin
cctggccagccgccccgtccgggagggaggtggggggggtcagccccccgcccggccatccgccctgtcggggaggtgaggggcgcctctgcccggccgcccctactgggaagtgaggagcccctctgcccggccagccgccccgtctgggagggaggtgggggggtcagccccccgcccggccagccaccccgtccgggagggaggtgggggggtcagccccccgcccggccagccgccccgtcccggaggtgaggggtgcctctgcccggccgcccctactgggaagtgaggagcccccctgcccggccagccgccccgtccgggagggaggtgggggggtcagccccccgcccggccagccaccccgtccgggagggaggtgggggggtcagccccccgcccggccagccgccccgtcccggaggtgaggggcgcctctgcccggccgcccctactgggaagtcaggagcccctctgcccagccaccaccccatctgggaggtgtacccaacagctcattgagagcgggccatgatgacaatggcggttttgtggaatagaaaggggggaaaggtggggaaaagattgagaaatcggatggttgctgtgtctgtgtagaaagaagtagacatgggagacttttcattttgttctgtactaagaaaaattcttctgccttgggatcctgttgatctgtgaccttacccccaaccctgtgctccctgaaacatgtgctgtgtccacccagggttaaatggattaagggcggtgcaagatgtgctttgttaaacagatgcttgaaggcagcatgctccttaagagtcatcaccactccctaatctcaagtacccagggacacaaacactacggaaggccgcagggtcctctgcctaggaaaaccagagacctttgtccacttgtttatctgctgaccttccctcc

SEQ ID NO: 38868 - DNA, 1395 bp, Artificial sequence
  DNA replication origin
tccgggacggggcggctggccgggcggggggctgacccccccacctccctcccggacggggtggctggccgggcggggggctgacccccccacctccctcccggacggggcggctggccgggcaggggggctcctcacttcccagtaggggcggccgggcagaggcacccctcacctccgggacggggcggctggccgggcggggggctgacccccccacctccctcccggacggggtggctggccgggcggggggctgacccccccacctccctcccagacggggcggctggccgggcagaggggctcctcacttcccagtaggggcggccgggcagaggcgcccctcacctccccgacagggcggatggccgggcggggggctgaccccccccacctccctcccggacggggcggctggccaggcggggggctgaccaccccacctcatgagggaggaatttcttactgaaatctccatttagacagatgacactagactcttctggatagcaaaattgcagataggcaaggaacaactgcagaaggaactcacctgactaaaagcatgggcagaaaagcagcacagggattttagtgttggctgaaagatgatggcagcagggagagctgatgcaaagtatgccttgaagatgataatttctgaggtcttgactgaggaaaggagtcttgaggttgtgtaatactgcttctactaagatgagagttagattccaggcccagttctatggcttcgggctcaagtattgtcactaatttgagtctcagtttactcatctgtaaattacagggttagactagtattctttgtctgaatctgagttttactatacttagcctctgaatatccttgatgccaccattggaaaatttaccagattatatatagatatggcccagtgtggtataaagtaagtagacaggtagattcagaagagatgaattctgcttggagaatttaccctaatggcccaaggaacttggatgaattctgcttggctgcagtcaccctaatggcccaaggaacttggagaatttgcatacatttgctaatagtaaattatgattcctggtgatttcattggtttaacttgtcctcttcccttgaattatgccaccttccttgatctccagtctgatacagatgccccatccatggtccctttgttctctatgcccactcagccacagcgctaaccggaaggctcaataatcctccattgacttgtcagtgttgtggttctcacaagattgaaagtgccttgaaggaaagaacatgccttttttgtttctttgtttcttaaaccttgtactcttggcatggagctaggtagctgcttagtaagggtgccctgtaaagctcaatgaggacag

SEQ ID NO: 38869 - DNA, 1122 bp, Artificial sequence
  DNA replication origin
cctcgcccggctccggcccagccccggcttcggggagcgagcgcacgcccagccggccgcctccgactgcgggactcttcccttccgcggaaggccacgccgcgccgccgccgcaccctcctccctcctcccgcctccctcctcccctccctcctcccctccctcctcccgctcggagcaggcggcggagggatctgccgcttgatttatcatcaaagttttgcccaggctgggatttttaaagcggtacccgcaactttcccccgcccgagtgcggaggcggggccgggatggggcggagagagccaccccagggacgcggttcccgcaaagcacgacccaacgggcttcagccacagaaatgccgtccagcggggagagggagaaaagccagggcacccgccgccaggccagcgcactcagaggctcctaactttaccggcagggcggggccggggtcaggggccagtggggctgggggtgagggcgaggtagggtgggagcctgggctgagacccaggggacctggtgatagctctgccgccgacctcggctcgctgtgtgatcgcgtccgggtgtctacccctctctgaacctcgaagtcttcatctgagaaataggggtaatagctgtctgcgggggtcctggtgaggatttgcgaaatcgtgcatgcaaagcgcttagcataatgctgcctacgtggtaggagctcagtagttattattgtcggtgttcccctttctgggactcagttttcgagtctttgtaatgggagagagacaggccagttagttgttgcggctcctggctcttgaagatactggaccttatgtggtggatgggatcgcccccttctggactgtaggctccttccctagaccaatgagccttgatggtgtgtgtgtgcatgagtgtgtgtgtgcgtgtgcgtgtgcgcgcgcgtatgcgtgggtgtatgtgtgtgtgagtgtggcaggggagggggatagggcaccattcccattcccaagagcaagaatccaacaaagtcctccagttccttcccaagccgtgttactggggctgatgggacagacaggagggcggaactgtggtcccatttaaaagataaggaagcgcctg

SEQ ID NO: 38870 - DNA, 982 bp, Artificial sequence
  DNA replication origin
ctgtctagtgaagggctgcatggaagaaaggtctcctttggtttcatctatgctcgagcctccatcccagagccaggctcacaggggtcagggggagcccccacagctgccgggctcatacagtccaactctgctgccaacttgggctccttcggggctagcaggagcttctgacactcagccagccagtgctgggaatgcttgtctgctccccggcttccacagcggctggagttgagatttcccacatttcagtcctctagggccgaggatgaggatgggggtaccctatggaaggatggcacggcttcctgcccatccccagaggcagacaaaagcacccggcattccacttccactcccactcccatgcctctggctgcaagcagcaaccccaactactccggtggctctgaggggcttccaccaggtgccacccgcccaactgggaggctgcagccccaggcgaccagttctcaagaaacaaggtcttctgcccccaaggacctttccagtggtatagggctgggtgtggagaggaagaggacaagggcctctgtgcggttaaacccagaagagtaaaggcagatgggcagagaggagtgggtgagcaaattgtgttcatgtgtgtgtatgtgtgtgcctgtgtgtgtgtgcgcgcgcgcgcaccagtgtgtctgcaggtgggcaggcaagagttgtggcgaagcgtgtgcgccagctggcagagtgagcccaccggcgcagtgcctgatgtgcgtgtgtagtgggcataagtgtaaaggcttgcagtgaggagggggacctgaggtgtgtggagatgtgcagggtaggagttgtgagtgtgagaaagcagcgactgtggctctgagtgtgtccgcggctgtgcatatcggtgtggccatgcaggtgtgcgtatccgcgcgagtgtgtggggaggaggttcgggggtgcgccccgggtgcccccttctctgcagggc

SEQ ID NO: 38871 - DNA, 1171 bp, Artificial sequence
  DNA replication origin
tgggtgggaacgaacttcattcacttttcctaagtccttggtaagcatactcagagagctggggtcaggaagagataatgggggactcttcaggatcccagggaacagtgcataggcaggtgggccaagagagggaggtctctagagggagctcactgtgtcctagagcagtcaggggagacttcctgggggaggcaggttccttctgggcctgtatccagggactgctggggctgagaggggactccagaggccagagtggagctgcgcctggctgcctgggtctggcagaggcctcgtggagaaccatgtgcatgtatttagaaaagcaggctgcagctggaacctccaagaatcggctctggagtttggtcttacccctggagaagggggcagccctggaagccttctgagtggggagggcgcacggccaggttggcgtcggagtgggttggccgtggtgagtggagatggggagctgaagcaggacttggggctggatgcgggcgtgcacggacaggagaggctgctcccgggaaggcgctgagtttggtgtgagccttgctgagtttgtggttcatgggatgctggggctggccggtatccagggagggtgggaacgtgggatcagaaaaagagggaattgtgtgtgtgtgtgcgcgcacgaatgtgtgtgtgcgtgtgtgtatgtgtgtggtgtgtgtgcatatgtgtgtatgtgtggtgtgtgcatgtatgtgtgtgtatattgtgtggtgtgcatgtatatgtctatgtgtgtgtatatctgtgtatgtgtggtgtctgtgtgtatatgtgtgggtgtgtgggtgtgtgcatctgtgtgtatgtgtgtggggtatgggtgtatgtgtgcatgtgtgtggggtgtttatatatgtgtgtgggtgtatgtgtgggtgtgtgtatgtatgtgtgggtatgtctgtatatgtgtgtattgtgtgtatgtgtatgtgtgtgtgtattgtgtgtatgtgtgtattttgtgtgtgtgtattgtgtgtatgcgtgtgtgttgtgtgtgtgtgtacactggcctcctttctagtccttgcacacaccaagttccttccagaccttttctctccctggctgttccctctgcccctcgtgctctcttcccgtctcccggctcctggctcccctg

SEQ ID NO: 38872 - DNA, 798 bp, Artificial sequence
  DNA replication origin
tgctagctactgtactagctcagttacaggacaccctcctcatggcagaaagtcctgttggccagtgctgatgatggcgttggagggaagggtggtttgaagtgccgggtttaaatgaggtggtcagggcaggcctccctaaggaagcggactttgagcagggtcctgtggcaggagagggagggagccatgtgagggaaggcagttccaggggagtctgaggaaagggtgttccaggcagaggaatcagcaggtgcaaaggtcttgaggtggaatctcaactgggatgcctggggaaggagctgaaaggaggccactgtggcaggagtaggagcagggagtcaggcagaggccaacactggagggaatggcctcccatggaaggccctgtcagccatctggagtgcagtggtgcgttcaaggcttgctgcagccttgacctcctgggcacgagcaatccttttagctgggcatggtggctcatacctataatcccagcactttgggaagcagaggcagtgaggactgtggctgttactgtgggtaggagaacgccctgggagagtggtgagtagagcagggacagggatgatttatgttttgtcaaggtacgtctggctgctgtgtgaaaatagcttgttggggaggaagagtggaagcgggaggccagtgagggttccccactgttgcaggtgagagaggatggcagcttggccccaggaaggcagtggaggtggggagaaggggccagattctggaggtgtcgggaggcaggacccacagggttccttgaagact

SEQ ID NO: 38873 - DNA, 1160 bp, Artificial sequence
  DNA replication origin
ccctaggcctccatgagtgaccctgcagagccactgccccagaagggccctcctgggttccctgggtcttcaccaggggagaggccctagttctgctcagaagattcaagtccatattcagggaggggtcactgtccacacccccaggtccaagtgagggatggtaggaggagggaggcgaggctggggggccccggctcaggacaggatgggggacaagcaagcaaagcaaaacactggactccacagaagctggtgacaggaagggggtggccccgggccccagcatggtccctgccccagtgttcagggcggttggccccttggtgcccagggccaccttctccgagccaggtcaccgcaggggtctgaaagggcaggggtgggtggggcttacatgctgagcaaggggtggtggaaagagggccgacatggtggccacaggcggcctcggggatggggcgcggctggacgcaggcagtcggtccccggtggtccggcggctcctcatgcactctgtacagcgtgggggcggatgggcgggggcaggggcatcagtctagaggctgcaggcctcctggtccaccgagcgcttcctcagctccttgcctggcttggggggcggcggggcgggcgcggcgggaggggcttcgggcagatgcaggacggagttctcccctggctgcacccgcaggtaggccttgaccttgtggtgccgggccttgccgtcgctgaagtcgatgacgcggcactcgtaggtgccttcgtccgtgggcttcacccgggacaggcgcagcttgtgggagatgttgctgcccaccaccttgaccacctgggggtgacagagagaccgtgacctgtccatccagtgacagtgggggagaagaagagtcgggggggggggtcccaagatcgcatgctaggacgggagccccagaaacactcccacaagggcccaccgaggtttgcacaagagtgagttaaatagcaaaaaagtaaaagcaactgccatgtccaccaacagaccacataactaagcagtggccggttccctgcatgaagcactgcagagtggtccgaaagacggagctagaactaggcacgtgagctcagtggcaaacagcagagggaaagctctcactgctgcccacccccagggg

SEQ ID NO: 38874 - DNA, 1543 bp, Artificial sequence
  DNA replication origin
ccttccaggcagagggaattgcagacaccgatgccttgaagctggcagaggcagagcatgctggaggccagtgtggaggagcacagcgtgcgaggaggggttcaggggccagaccctgcagggccaagggccatggccagggcactggccttgacctcaagggccatggggaaccaaggacaattgatcacaggagtggtgacatcagatttgtactttatttcattttgagatggagtctcactctgtcgcccaggctggagtgcagtggtgcaatcttggctcaccacaacctccgcctcccaggttcaagcaattctcctgcctcagcctcctcctgagtagctgggattacaggcgtgcaccaccatgcctggctaatttttgtatttttagtagagacggggtttcaccatattggccaggctggtctcaaactcttgacctcaggcccccctcggcctctcaaagtgctgggattataggcgtgagccaccacgcctggccggggtttgtattttagagtctccttctggcaactgtgatgtgaggggcatagaatggacatggggtgaccagagaggtgggcgccattgtcccggcaggaagggctggctcatgttctcagcacttggacagcaggtacagtgttccctggaatgcagatgggcaggtggaggcccagagcagggcggatgtctccaggacctcaccccgctttccactcctctccaacagtgctgaggtgcctgggcatccctacccgcgtcgtgaccaactacaactcggcccatgaccagaacagcaaccttctcatcgagtacttccgcaatgagtttggggagatccagggtgacaagagcgagatgatctggtgaggtgggggccagggtgggatcggagcccagtagggagggccccatggagaggaaaccttggagggcttcttggaggaggtcacatttgaattgggccttaaaagttcagcagtatttgagcaggcttggggaaggcctagagggaaagtcaaccacatacatgatggggcctcaggaagaatcatgctgcaaatgttgtcgggagtctggaatgccacattagggggcccaggcttgattccaaaagcaataggttgtcactcaaggattcagagtgggagagggcggggctgacaactgccaggagggctagaggggaagagatgggcggggggctggggcgtggtccaggtggggagtgataagccctgaacggacagaaaagaagggatggagccaagaaattaggaggtcaaaggggccactgagaggggcaaggaggggagaggagttgagaagggctctgaggtgtaggagtgggcgccttggctagagagggtgctgtgagatgggcccccgtggggggaagaacaaggcagtggggagacaccctgggctcagtttgggacgaggcgagcttgcatctggggacatgaatgcatggtctgcccgtgggaggtggcgatgaatgttgctcatgttctgcttcattcccgcccccctat

SEQ ID NO: 38875 - DNA, 1535 bp, Artificial sequence
  DNA replication origin
ccgtagcctgctgtgggatataaatgaaatggtggtatgaccgtgatgcataaaatacatcagaaaatgaattggctctgatttttcatggctttttattctctcctgagaaggagaacaaagtcaagttcttcctttatttcccagggtcctgtttttttttttttttttttttttgaggcggagtctcgctctgttgcccaggctggagtgcagtggtgcaatctcggctcactacaagatctgcctcctgggttcacgccattctcctgcttcagcctcccgagtagctgggactacagacgcccaccaccacacccggctaattttttgtatttttttagtagagacggggtttcaccgtgttaaccaggatggtctcgatctcctgacctcgtgatccgcctgcctcagcctcccaaagtgctgggattacaggcgtgagccaccgcgcccggcccacagggtcttgttttgtatccggtcttgtgctgggctgtgggacatggcctttgcaaagcttctggaggtgatcacagtccaggaagatgagacctagaggaaggaaggaataacagcctatggggatcagggggtacttcttgaagtagggaatatttgagctgggctttgaagaacaaataggagtttgccatgcaaggaggtgtgtgcacgacatactaggccaagggaactatgcaagtgaaagctcagaggttggaaagtttatgtcgtgcctgagaggtatattgtagcttggggcataccttgtgtgtgaaggagccccaagagatgaggtgggagaagccagcagtgtccagtttgtggaacagccctgaacattaggccgatggcaatagggagccacagagggttcacaccgtggaaggctgttgtgcagcttggagggagatctggcccaggaaaggaccacagaagtggggggaaaagagcagacagaagggcccctggaggtgggtggtccagtggaaggtggcaagaaggggtcctgcttttgagaaagatgacatttgaatggcaaggatgaggaggtgtgagccctgcagagagcagcgggaagagcattctgagcagagaaatagcacatgcaagggccctggggcagtgagcctgggcagagtgagtgtgggtgtgagtggtgagagatgaggtcaaaaaggggatgggagcagatcatgaagggccttgaagtttgcacggtgaagtctaggttttactgtggatacggttgaaacagaagagtgatgggactggatttctgtatttagaatctgtctcagttcccatcagagcagcgtgtgtgggctgggttggagggggacgagggggctgacatcagctctgcagggtgggtcacgccttggggaagtgggagatttggctgagcaagaggagaaagggacagtgacagggcccaaggtgactctgagggggagccccagggacaccgggctgcccactccatgggctcctgctccagatttccaggttcccccaaccaggccctggatgaa

SEQ ID NO: 38876 - DNA, 1477 bp, Artificial sequence
  DNA replication origin
caggggcagagtgggaacttgaaccccggcctcttgaccgacttccctctcggtcgggtgattctcctcacgctgctctttcctccaagctttcaccagctgcagggagcagtttctgcaacaatctctataaaatggggcaattacgggtcagctgggcccaacactctttgtgggtttgttcactgagactccagccagagcccgtttgacccagggagaaatatccactgaagcaacacgggttgttttccctgagccatatgtcacctaggaatggagacgggggctacttctatcttccaaattcatcaatagatgtagagcttgttccggaatgtacagcttgttctggaatgtagagcttgctccggaatgtagagcttgttttggaaaaagtgccagggaagccccgtgggcctctgtctctccgggaacccttcccgctcagggctcacagtggatccggaagcacaggagaccaagagaccagagataccaggatgagagataggacccctggttgccaggttcgagaagtcctaggctgagtccctggaaagttagtcttgctcctttctggcacacagtggggcctcaagaaagctcagtggatggatggattgagggagggagggaagagaaggccgagggagggatggatgaagggatgagtggatggataggtgggggggtaggtgatgcatgggtgagtggatggatgggtagatggatggctgattagatggatggctgattagacagatacaaggatgggtgagatcggaggattatctgggttttgctacaggaagggacatgggtgtgtctgtttttgcaggtgtgtctgcatgtctgtacctgagtccatgcctgcatgtgtgtctacctctgagtagccacatctttgtgtgtctgtgggtgccctctctgattttgcgtccacatctgacagtggcattggtgtctaggaggtctgtgtgtgtgccaggtgcctctggacacctgctcatctgtgtccacagctgtgtgtggctcgcggtcaaggctacctggctgtgtcaggctgtatctatgtcctggtgtgtgtctgccattcgaatctgaatttgtatccatgtcactgtgtctgcgtggccagccgtgtttggtgtatctgtgggagtgtatctgtgtttgtgtgtgtatctccacagccctgtcttggtgtgtctgcgtctgctctctgtgtatgtatatctgagtatgtgtgtgagtgtgtgcgtgtgtgtgtgtgtgtgtgtgtgtgtgtgttgggggtggggaggtgttcttgatcccagatctgacctaagagtccacatctgtgtgtccaggtgcaccccggttccgttgtgtgtttctatgagggtgctgcgtgtgtctgtatctgagtgtgtgtgtccaggtgtctgttctccaaggtctgagtctgtgggtccaggtgtgtctgtatcct

SEQ ID NO: 38877 - DNA, 787 bp, Artificial sequence
  DNA replication origin
gttgacagctgacctgagtcttgaatgaggagttggccaggtgaggaggggtggaagtgaagggcattccagcaggaagccactgcatgtgcggtggcctcgaggtgagcaagggaaggcatgtgccactgtggccgaagcatggagaggggtggcgaggctggaggggaggcgggggcggagggcagctgccagatctcaggggagctggatgcctggaggctgatgcttcctgaagacggtgggaacctttgaggagtttggagcagagactgatgaggtctggtttgcatttgagaaaggtcgctctggggtcctggtggaaaatggctggggtgaggcagacgagaatttggcagccaaagagaggagtcaggtgatcctgggtcctgggcccagttttccctcttctggactctgactgccagggggacgggctgactgccttctggatcccttcctggaagaggcggtgaagcctggatcagggcgggggcaggggacagcgcggagcacctggctggagagctgttggtggaggggaagtggtgtgggacacactgagggctgattgtgggttgggaggcaggaggagaagcagtgctgtgagcagatttctggcctaggagcctgactgggcggtggggtcatcaccgaggtaggactgggggaggagcaggtttgggaagttgccaggttgggtctgatatgttggcggttggtggctgagaggcatctaggaggtccatgggaggcagctggctgtacagtctgcagccgtggactt

SEQ ID NO: 38878 - DNA, 1012 bp, Artificial sequence
  DNA replication origin
gggaagatgatgatgatgatggtggtggtgagattgaggatggtgatggtggggatgatgataataatgatggtgatggtgatggtggggatgatgatggtggtgatggtaatggtggggaagatgatgatgatggtggtgatggtgagattgatgatggtgatggtggggatgatgataatgatgatggtgatggtgatggtgatagtggggatgatgatggtggtgatggtaatggtggggatgatgatgatgatggtggtgatggtgagattgatgatggtgatggtggggatgatgatgatgatggtgatggtggggatgattataatgatgatggtgatggtggggatgatgataatgatggtgatggtgatggtggggatgatgatggtgacggtgatggtagggatgatgataatgatggtgatggtgatggtggggatgatgatggtggtgatgatgatggtggggatgatgataataatggtgatggtgatggtggggatgatgatggtggtgatggtgatggtggggatgatgataatgatggtgatggtgatggtggggatgatgatggtggtgatggtgatggtggggatgatgataatgatggtgatggtggggatgatgatggtggtgatggtaatggtggggatgatgatgatggtggtatggtgagattgatgatggtgatggtggggatgatgataatggtgatggtaatggtggagatgatgatgatgatgatggtgatggtgatggtgagactgatgatggtgatggtgatggtgatggtggtaagtatacaccgatttaataggcattttcttcctccaaggcaggagctcatcctgggaagtttcaatggtgatagcgaggttgatggtgatggtgatggtggggatggtgatgatgttggcccatataatatactgagtgtttacagtgatctgacactatgctaagaactttttccatggattccagcatttaatccacacattctggc

SEQ ID NO: 38879 - DNA, 1115 bp, Artificial sequence
  DNA replication origin
ccttcccagaccactctcgctgaaatagctctctcctcttcccccacatcctgctttattaccaatacacacacacacacacacacacacacacacacacacagagtctctagtctgtctccctcactatgatgagggagaaggggctgcgactattttgttcactaccacatgtgcagcacctagaccaatgcttggcacatactaggtgctcaataaattatttgttggatgggtggatggatggatggattagtggatggatatatggatggatgggtaggtggatgggtgggtgggtgggtggatggatgggtaggtgggtagacaggtggatgggtaagtggatgggaggtgggtgtgttggtgggtggatggatgggtgggtgggtagacaggtggatgggtaagtagatgggaggtgggtgtgttggtgggtgggtgtattggcggatgtaaaggtaggtgggtgggtgggtgaatgaatggatgggagggtgggtagatgagtgggcgggtaggtggatgggtgggtgggtgtattggtggatggatggatggatggatggatggatggatggatggatggatacatggatagatgggtaggcggatgagtgggtggatgaatggatgggtgggtgggtagatgggtgggggtagatggatggctgggtggatgtattggtgggtggatggatggatggatggatagatggagttttatttcatgctgctccctcccttactcaccaccctccaaccagacacactggccttacacttcctcaaataggttaagcttcctctcacctcagggcatttgtcctagctgttccccctgcctggtactcctttccttcccaatgcccacctctaccccgctggcttcttatagtaccatgtggatctccactcagctgtcactcccagagcagccttccctaccaccccagcaagagtgggtcccactctgaaattcatcctggattgtgcctccttcagtccttccatattggtgatttgcttgtttgtttacagttatttgtttgcttcaaaacacattcaatgtgaaaaagaaactttagaaactgcagaggaatgcagaaataaat

SEQ ID NO: 38880 - DNA, 1154 bp, Artificial sequence
  DNA replication origin
aggcagaagaattgcttgaacctgggaggtggaggttgcagtgagccaaggtcgcgccactgcactccagcctgggcgacagagtgagactctgtctcaattaaaaaaaaagagagatccagagggactgtgcacgtgaactgctgagcccattatccctggccaagctacaggctcaagaaatagcagccatttttgttataaatcagaatagttatacaataatatattctgtacagcattaattatatacatttatcaaaacaataattatggtatgtgattactgtgataattataattgtgctacattactattgttatgcacagcaatatggcaacagggtgcctgagtagattggcatatttctcagggtcacttaatcccagggacccagaaccagaaaagaaagagcacagctggccacacccaaaatgcggggtttgcctgctgttcctgtttcaaccacgagggggcactcaaagccaaaccagaggttggacctacagacgagggtgtgtgtgtgtgtgtgtgtgtgtgtgtgtgtgtgcgcgtgtgtgtggtgtggggggtgtgagtgggtggtgtgtttgtgtgtgtgtggagggtgtgtgtggtgtgtgcatgtagggggtgtgggtggtctgtgggtggtgtgttttgtgtgtgtagggtgtgtgtggtgtgtgtgtagggggtgcgtgtggtgtgtgtgggtgctgtctgtgtgtagggtgtgtgtgtggggtgtgtgtgtttgtgtggggtatggtatgtgtgtggggtgtgtttgtgtggggtgtggtatgtgcgtgtgtgtggggggtgcttgtgtgtaggatgtgtgtgtggtgtgtgtgtgctgggagggagtgtgtgtggggtgtggtgtgtgtgtgtttgtgtgtgtgtttttttccctttcctcctccatcactttctcccttcccacagtcattgctacagataccatttggctaatatctcagaaacgggattttgggatgaatgagtgtttagaggaactgaaagttaacacgacatctttttgatttagtcaaagatgatacactctgaagatttcacatactcctttttaacaggccagtctgacagtgttgctgcctccccatccagggctggtgctcatgag

SEQ ID NO: 38881 - DNA, 1200 bp, Artificial sequence
  DNA replication origin
gaggggctcctcacttcccagtaggggcagccgggcagaggcgcccctcacctccccgacggggcgactggccgggctgggggctgacccccccacctccctcccggacggggcggctggccgggcagaggggctcctcacttcccagtaggggcggccgggcagaggcgcccctcacctcccggacagggcggctggccgggggggggctgacacccccacctccctcccggacggggtggctggccgggcagaggggctcctcacttcccagtaggggcggccaggcaaaggcgcccctcacctccccgacggggcggctggccgggcagggggctgacccccacctccctcccggacggggcggctggccgggcggggggctgacccccccacctccctcccggacggggcggctggccgggcggggggctgacccccccacctccctcctggacggggtggctgcctggcggagacgctcctcacttcccagacggggtggctgccgggtggaggggctcctcacttctcagacggggcggttgccaggcggagggtctcctcacttctcagacggggcggccgggtagaggcactcctcacatcccagacggggcggcggggcagaggcgctccccacatctcagacgatgggcggccgggcagagacgctcctcacttcctagatgggatggtggccgggcagagacgctcctcattttccagactgggcagccaggcagaggggctcctcacatcccagacgatgggcggctaggcagagacgctcctcacttcccagacggggtggcggccgggcagaggctgcaatctcggcactttggggggccaaggcaggcggctgggaggtgtaggttgtagcgagccgagatcacgccactgcactccagcctgggcaccattgagcgctgagtgaaccagactccgtctgcaatcccggcacctcgggaggccgaggctggcggatcactcgcggttaggagctggagaccagcccggccaacacagcgaaaccccgtctccaccaaaaaaaatacgaaaaccacgcaggcgtggcggcgcgcgcctgcaattgcaggcactcggcaggctgaggcaggagaatcaggcagggaggttgcagtgagccgagatggcagcagtacagtccagcttcggctcggcatcagagggaga

SEQ ID NO: 38882 - DNA, 878 bp, Artificial sequence
  DNA replication origin
aggagggaggtgggggggtcagccccccgcccggccagccgccccgtccgggagggaggtgggggggtcagccccccgcccggccagccgccccgtccgggagggaggtgggggtcagccccctgcccggccagccgccccgtcggggaggtgaggggcgcctttgcctggccgcccctactgggaagtgaggagcccctctgcccggccagccaccccgtccgggagggaggtgggggtgtcagcccccccccggccagccgccctgtccgggaggtgaggggcgcctctgcccggccgcccctactgggaagtgaggagcccctctgcccggccagccgccccgtccgggagggaggtgggggggtcagcccccagcccggccagtcgccccgtcggggaggtgaggggcgcctctgcccggctgcccctactgggaagtgaggagcccctctgcccagccgccaccccgtctgggaggtgtgcccagcagctcattgagaacgggccatgatgacaatggcggttttgtggaatagaaaggggggaaagttgggggaaaagattgagaggttggatggttgccgtgtctgtgtagaaagacgtagacatgggagacttctcattttgttctgtactaagaaaaattattctgccttgggatcctgttgatctgtgaccttacccccaaccctgtgctctctgaaacatgtgctgtgtccacccagggttaaatggattaagggcggtgcaagatgtgctttgttaaacagatgcttgaaggcagcatgctcgttaaaagtcatcaccactccctaatctcaagtaccccgggacacaaacactgcggaaggccgcagggtcctctgcctaggaaa

SEQ ID NO: 38883 - DNA, 1458 bp, Artificial sequence
  DNA replication origin
ttttcttagtacagaacaaaatggagtctcctacgtctacttccctctacacagacacagcaacgatctgatttctctattttttccccacgttttccccttttctattcgacaaaactgccattgttatcatggcccgttctcaatgagctgttgggtacacctcccagacggggtggctgccgggcagtggggctcctcacttcccagacggggcagccaggcagaggcgccccctaccatccagacggggcggcggccggacgggggctgccccccacctccccgatggggcggctggcgggggggggctgccccccacctccctccaggatggggcggctggccgggggggcggggctgccccccacctcccggacagggcggctgctgggcggagacgctcctcaattcccagacggggcggctgccgggcggagggactcctcacttcacagacagggcggctgctgggtggaggggctcttcacttctcagacggggcggcggggcagagacgctcctcacctcccagacggggcagctgccgggcagaggcgcttcccacatctcagacgatgggtggccgggcagagacgctcctcacttcctagacggtatggcggccaggaagaggcgctcctcacttcccagactgggcggcagggcagaggggctcctcacatcccagacaatgggcggccaggcagagacgctcctcaattcccagacagggtggcggccgggcagaggctgcaatctcggcactttgggaggccaaggcaggcggctgggaggtggaggttgtagcgagccgagatcacgccactgcactccagcctgggcaacattgagcactgagtgagcgagactccgtctgcaatcccgacacctcgggaggccgaggctggcagatcactcgcggttaggagctggagaccagcccggccaacacagcgaaaccccgagcaagaccccatttctacaaaaaataaaattagctgggcatggtatgtgcctgtagtcccagctacgtgggagactaaggtgggaggatggcttgagcccagcaggcagaggttgcagtgagccaagactgtgccactgcattccagcctgggtgacagagagagcccctgtctcaaaaataaaatacaaaaataaagagcagccaccattcttagggttaagataaaattccccccaactcccttcccccattctcgcaaggctgagatccagactttgttgcagagggcacagctgtggttccctggatggcagagaagccactgcagtgtttgttggtagaatctgctagaaatctgtcctctggaacttgccaggaaactgtcctctacggagtgagagaaagccattcacagagtggtgtctcactagaggcactctgctacaaaatcgccaaaggtggggacactgcgggaagctgctggcctt

SEQ ID NO: 38884 - DNA, 1291 bp, Artificial sequence
  DNA replication origin
tggggggtcagccccccgcccggccagccgccccgtctgggaggagaggggcgcctctgcccggccgcccctactgggaagtgaggagcccctctgcccggccagccgccccgtccgggagggaggtgggggagtcagccccccgcccggccagccgccccgtccgggagggaggtgggggggtcagccccccgcccggccagccgccccgtccgggagggaggtgggggggtcagctccccgccccgtccgggagggaggtgggggggtcagccccccgccaggcgagccgccccgtctgggagggaggtgggggggtcagccccccgcccggccagccgccccgtctgggagagaggtggggggtcagccccctgcccggccagccgccccgtccgggaggtgaggggcacctctgcccggccgcccctactgggaagtgaggagcccctctgcccggccaccaccccgtctgggaggtgtacccaacagctcattgagaacgggccatgatgacaatggcggttttgtggaatagaaaagggggaaaggtggggaaaagattgagaaatcggatggttgctgtgtctgtgtagaaagaagtagacatgggagacttttcattttgttctgtactaagaaaaattcttctgccttgggatcctgttgatctatgaccttacccccaaccctgtgctctctgaaacatgtgctgtgtccactcagggttaaatggattaagggcggtgcaagatgtgctttgttaaacagatgcttgaaggcagcatgctggttaagagtcatcaccactccctaatctcaagtacccagggacacaaacactctgcctaggaaaaccagagacctttgttcacttgtttatctgctgaccttccctccactattgtcctatgaccctgccaaatccccctctgcgagaaacacccaagaatgatcaattaaaaaaaaaaaaaaagaaaaacaaaacacagtctctctagcagatctaaataaaacatgacttaaaacctgatttccttcagcacctccaatggaaatggaacatatttcacaaaggtaaggtgggaaaagatctcattccttttctttgtggaataaaatataatctgttctgtgtctgcattgtactgcactagtggctcattcaatctcagtagttactggggctctgattccctcggagtgctgcaaaaatcctggagaaatgccaaagacaccagggagaactctctgaacttccgtctaacctgtgtaatgagtcacacactcc

SEQ ID NO: 38885 - DNA, 1415 bp, Artificial sequence
  DNA replication origin
tcacctcccggacggggcggctggccgggcagggggctgaccccccacctctctcccagacggggcggctggccgggcggggggctgacccccccacctccctcccagacggggcggctcgcctggcggggggctgacccccccacctccctcccggacggggcggggagctgacccccccacctccctcccggacggggcggctggccgggcggggggctgacccccccacctccctcccggacggggcggctggccgggcggggggctgactcccccacctccctcccggacggggcggctggccgggcagaggggctcctcacttcccagtaggggcggccgggcagaggcgcccctctcctcccagacggggcggctggccgggcggggggctgaccccccacctccctcccggactgggcagctggcctggcgggggctgacccccacctccctcccggacagggtggctgccgggcggagacgctcctcccttcccagacggggtggcagcagggcggaggggctcctcacttctcagacggggcggttgccaggcggagggtctcctcacttctcagacagggcagccgggcagagacgctcctcacctcccggacagggtcgcggccgggccgaggcgctcctcacatcccagacggggcagcggggcagaggtgctccccacatctcagacgatgggtggccgggcagagacactcctcacttcctagatgggatggcggccgggaagaggcgctcctcacttcctaggtgtgatggcggccgggcagagacgctcctcactttccagactgggcagccaggcagaggggctcctcacatcccagacgatgggcggccaggcagagacactcctcacttcccagacggggtagcggccaggcagaggctgcaatctcggcactttggggggccaaggcaggcggctgggaagtggaggttgtagcgagccgagatcacgccactgcactccagcctgggcaccattgagcactgagttaacgagactccgtctgcaatcccggcacctcgggaggccgaggctggcggatcactcgcggttaggagctggagaccagcccggccaacacagcgaaaccccgtctccaccaaaaaaatacgaaaaccacgcaggcgtggcggcgcgcgcctgcaatcgcaggcactcggcaggctgaggcaggagaatcaggcagggaggttgcagtgagccgagatggcagcagtacagtccagcttcggcttggcatcagagggagaccgtggaaagagagggagagggagaccgtggggagaggggagagggagagggagaccgtggaaagaggggagagggagagggagagggagaccgtggaaagaggggagagggagaggggagctttttt

SEQ ID NO: 38886 - DNA, 756 bp, Artificial sequence
  DNA replication origin
ttgggacttagctcggcctggcgacgagcagcctggggaggaggggaagagtcagatgaatctgtagaaaaggaagactggaaagactcagcgacacttggggttgggactgaggggacaggcgggagggaaagaaggaggatttgggaggaatcgcattgggaacagagactagggagggaacgaagtgtgaaaaatgtctggatgtaaggcacctgggaccatttgcctatttttcaacaaaaattatttaggtcttgtaggatggagaaattgaaagtgccattttctggccatttagagctattgtcaagtttgtatcggggccaagcagtgttgcagaagaagataaggcatttaggttttaggtcaggtgtgagttgaagaggttttaggtttttaagaacacaggctaagggagaagaaggaggaatggagggtggaagtttgcctatagtgaaggaggcaagcctagagaaaagagagagtagagacatggagggaaggggttcgggggttcttaccttccagaaaagcgggaaaggggtcagcgcgcagaaataaggggttggggcacagagacaagaggttggggcacagaaataagggattggggcatggaaataagggatcggggcacagagataagaggtcggggtatggaaataagggatcggggcacagagataagaggtcagggcgtggaaataagggatcggggggttcttgccccccagaaaagcaaagaaggggtag

SEQ ID NO: 38887 - DNA, 1412 bp, Artificial sequence
  DNA replication origin
ataagcaaaaattcagaagtgtgaagtactagatgagtttggagtgccagctggcgtttgctgtgtttagaacacagacgagtgcccaggcagggtaggaagaaaagtgggaacagtcagagagggcttcacttgctggtttctggaataggaaatctaacctaatgaccatggaagaaggaagggatagagggaaggactgtgggtggatggatgggtagatagtgggatagatgcatggtttggtagatgagtggatggatggatgggtagatagttggatagatgtgtggtttagttggatagatgcatggttgagtggatgggtgaatgagtgggtggatggatggattggtagatgagtggagagatgcatgattggtggatgggtgagtggatgatagattggcatatgggtggatgggggagttggaggaattaatggattgatgggtgggtaagtagatgggtgggggggataggtgggtgggtgagtgggtgggtgacgggcagttgcataaatggatgggtgggtggatggatggatgggtaggtgggtgagtgggtggatggatgggagactgaatggaaggatgaatgaacagatggagggaagaggctacgcatcgctaggtgagaaagcagcctggtcagcagtggtagatggtgctgccttgtgttcacaggagtctcaagagctggaggggtctcagtgctaggggcaccatgcatgctgacaccgcagaggggcctctctcctgctctggctcctccccttgctgtcacttgttactcagggcaaagctcacggtgggggcaggagggcaggggtatccctgttatctggttctgggctctgtcttaggcaggccctgtgatcctgggcctcagggatggggctttctcagcagcataaaagctttgatgtgaaggaattatttgcaggagttgggggaactcctgcaatctggggtagaccagatggcagcagactgactgagaggcatggcagtggagacagaaagtgaagacacttcttcttggttactaaggcagggggaggaagaaaacacaggcctgtgcagaggccaacaaaggtcctggaagggacacactagggaactgaaaggacaatgcccaggctcctggagagcaggggcggcacggcagctgcacccagagggatacccagcgcccagcagcactcaccgtccacagcagatcctggtagtgcaccattatctgcaccacctcggctgccccttctgccagctgcttctccttgcctttggggagcttggggggccgcccttggtgcagaaagaggttaggggccatcacggtggaaacattcctcagagtcatcttgttgtgctgttcccgggccaccaccttcctgaggaattccagca

SEQ ID NO: 38888 - DNA, 817 bp, Artificial sequence
  DNA replication origin
agctgcggatcattaccgcccttttgttctccgtcgcgcgctcgccccacgctaggaatgcaaactgtaggcgccgccagcccccccttcctgtttccctgggtgggagtgggaagggagttttaaactgaattgtgctcagactcccagcccagtcttcccggagccatccgttccttcatccaatgcggacacccatatctaaggttcgggcaggatttccggggcaccctcaaacccagcccgtgggatccgggaaggcctcctggaggagagtccacgaggcacggagccgaggatggggttggggttaggtcttggagggcttcgaatttccggcaaagggtctgggatggttcttgaggacagcagggatttgcagggaggctgggggtggaggtgggcagaggtcttgctcacatttgtgttctacaaaggtccttttggcttttgggaggcggagactgagactggagtccagaggaccaaggaggacgaggtaactgccgtggtccaggtgggagaaaatgtcggtgaggtcttgggggatagaacgcaaaagaagactagggagtaaaatttacagaaccagtggctagtcaagtttaggggtgagggggaaaatgaggacacccccaagattctgacttccgtgaccatatgggcggggggacgtctcctgagaaactgggaaggaatgagggttgctgggctgagcagatgagggagacctcgttctcccacccccttcctaaccttgtactttccacacctacgtaagtaggccctcgtttcacacaggcctctgttcagcgtc

SEQ ID NO: 38889 - DNA, 1240 bp, Artificial sequence
  DNA replication origin
aggactgagttgtcagtctctcgcggagcgggtcgtctataagtcagtttccctggcacccatccttcgcgcgtaaacccggccgcgagtcccccttgaaggtagaagtggctggcatggatcgctcccaaggaagctcagcctcaggctcagtcacccgggttctctccgcccgtccagggacgccgcgagggaagcgattgtgcggatcgctcgccaccagccgctctccaaatgcgtgcagaatggaggcgaaaggttggcttttctctttcttttcgtttgggggtctggaagaaggcaggactctatgaggacacctctcgtcagcctcctagcgggtctgcgaatgcccacgccgagaggggcgcagacggggccaggcgcggaggaaagaagggctcgcggcgctgcaaggcggaggaagcagaggctcgcggtgcgctggggccctgctccgacggccgcctccaggctgtgaaagcttgggctgtttgtgttgattggggtacgggtgtgtgagcgcgagtaagggagagacccagagacaaagaccgatgctgtatcagactctgcttgaggttggatcagtgtggcctctgagaatgaggtttggtaaccgcgtgtgttctgtgtctgtgtggttttgcgcgcattccagtgtgtgtgccagagctagtgtgttggattacgtatgtgttcccgaatggggttgcctgcgttcgtgcctgtgttagtccctttgtagtagtctccgtgagggtccgctgctctgaatgggtccctgcgtaagtccccagctgatgtcctggccgggctcctcctgagcagtaaaccgcagggctccacctggcagtcccagcctgaatggagaagtagcggctgtgactggaagtgggggcgggggcggacggaaaaaccgaaggaaacaaaaaaggaagcagctccccatctcccctctctcgaggccctttctccctgggaaccccagccactctttctctgcagtatttctagattagctcacgtcagcgcacaagtagggcggcccgagggctttggccagagagttggagctgccaggacaagacaggcttccctctctacaccctcccgcctcctgccacctcctcccatcccaagcccctcccagtctcccggaggaggcttctctccagatagggaacctccaccacattggacagagatgctcctaacctctccccaggtacccccttaa

SEQ ID NO: 38890 - DNA, 859 bp, Artificial sequence
  DNA replication origin
ttttctttctttctcatcgcttcctgctccctccccccatttccttcacttttgcagtgtctccggacaggtgtctcagaccgaacttcagcctagcggtcttgcagctggtgccgttgggagggagcgtgggttagggcggaaaacaccgcctgggggcgtaggtccccgcgcagggctgggagggatggagaaagggagattcctgggtacaggagggggtctccaggccgagatcaccgggcgactgtcgggggcagagcccggcacgctgagctgggaggggggaggacaggcagaactgggaatcccgcgcttacctggatggcgttggtcacgttccagcctgcctcccacgccgtgattttgggcttgtcgtggcccccgaattcgccaccacctcccacctggtccttggagccggagggcggcagaggagctccgctgcctcgctgataatggatgtctccctcgacgggcgcttcagcgccctcgtccccgcagggctctccctcggctttcaggatgtccatctgcaggccctggcggtgctcaaagtcgaggtcgtcgcaatgcgcgaagcccaccgcctcctcatccgtggccgcctgaaaacccatcctggcgaacatgccgctcatcttggcctgggacttgttggacacggacgtggccacgttggacagcttgctgcggagcaaggtggccatggcggcggtggggacagcggaaaggacagaaggacccgaggatgcggggaacgcgatgcaagaaggcgagggctggggggcgcaaagtcgctatctccgcttgctctccgcgcggcgccccggggctctctggctcatgaccctcgcag

SEQ ID NO: 38891 - DNA, 1390 bp, Artificial sequence
  DNA replication origin
cttgaaagacgccccgggaagtcgcggggcacagcgaaggcgggagcagccccgggtccgtgatccagcaaggccgtctcgccgggccccggagcggaaagcgccttgggtcgggccatctggtgttcggggcccggtggagtcctgcttaccccgatacatggaacaacccctgggaggcctctgctcccagaaaacctgccttccgtggccccagtgatagtgcgctccagggacgccgcggggccaagctgtaagggaccggggttgcctagagctgaagtctccttcggcccagaaagctgcggcctgccagcccctgctagctcggaggtcgttgccaagactccaaacctgctccctatgtaggagtcctgcgccgcctggtggggagtggggggttaggaataaggggagagggcctagagagcaggggccattcttagcctctggagagggcttcgccagggtcacacggggaggagctggccgcctctttgcggtgcagccgggatttcgggcgagaggggcgagtctgtgcacaggtaatgctggattattgcggactaaatgtgtttgtgtgggagcatgtgtgtgctttcgtgtgtgtatacctgtatgtctccaacagggccgcacccaagggagcaggctggttcctgtctgcatgcatctgtgcatgtgtgtgtgcatatgttcaaacgaatattcgtgtgtttggtatgtgcaggtatatgcttttgtttgtggagctgtaggggtgtacgcaggtgcatttggggatagtactgtggtctatatatagatacatgtcgtgtgcgcctgtgcctgcgcctttgttcgtgggaaggggggctgtgggcatgtggtgtgcctgcctatatacgtgtgcgtgtctatgcgtgtgtgcggggggaggagactccgacctcagcgatttccccttcttctttcctcccaaaaatgcagctgtgaatccgttccagagtccaagaccaaaccgtgccctccaatcctgattttctttctttctcatcgcttcctgctccctccccccatttccttcacttttgcagtgtctccggacaggtgtctcagaccgaacttcagcctagcggtcttgcagctggtgccgttgggagggagcgtgggttagggcggaaaacaccgcctgggggcgtaggtccccgcgcagggctgggagggatggagaaagggagattcctgggtacaggagggggtctccaggccgagatcaccgggcgactgtcgggggcagagcccggcacgctgagctgggaggggggaggacaggcagaactgggaatcccgcgcttacctggatggcgttggtcacgttccagcctgcctcccacgccgtgattttggg

SEQ ID NO: 38892 - DNA, 1338 bp, Artificial sequence
  DNA replication origin
tggaccaggacttctgcgacacgggcagccccgggaagctgttgtacatgaggttgccactcaccaccacgtacaggatgcacgtcatcaccagctcgatgatctgcgctacgttcaccactcggccgcccagcgttgggaagcgcggggcgcagcaggcgttggctatggccacgtacgagtcccgcacgcgcaccacctcgccgtcttcattctcctcgtacaggcacgcgatgaggatcttgccggtgtagcagcacacaacggcggcgaagatgatgagaaacaaccccaggtagccgccgtgcaggatggcgtagggtaggcccagcacgaacatgccctgtggggcggagaggcaaccagacgcggacgctcagcgaacttggcaacggatgaggggcccggggggcgtggcttaacgctgtggcccgaagggggcgctaaggacactgagaattgggtctgagccgccggggaggagaggttaagagcaggctgcggggtggatgtaggggaactaatagtgagcccgggtgtcgagccagagatggagagggagggatgtatggacggatctgagaaggaaaggtgcgctaatggctggtgatagcgagagggctagggtgggagagggctgagaatagggagaagccacaggagggaagggagatacttcgggatggtttctggggacaggaacagaatgaggagttgggggaggagatgagaagggacagaagggagcgtagtcggaaaggggctctaagaaaggtagtgagctgggcctgggccagtggaaagagtgggcacgggatttgtggtggggctggaatggggcacgggagctaaagaggaaaactcgggcgtctcaggctcagaccagaggaggaaacgttaaaggctgcagttgtgaggcgaaaaggaaatagggtagagagggagaggggctgaaggtggggcaaagcccctgggaggcaagaacagagacaatgtgaagacgcttggggagcagcgcgcggggaggaggaagcagggctggaaattgagagtcttaggacaaggctggagttagagtgaggcgagggcgagacctaaggaaggggactaagtggaggctggggaggcaagcaggaggaggagcttggcgggaaggcgccagggaggccagaaagccgaaccgagcaagagtctagaaccagaagcttcagggtcaggcggacagggctgtagggtttagaatccacacggggactaagagctaacgaaatccagggtcccggaggcctacgagcctccagcctcctgccctggcctcccttggggcctatcaaacgg

SEQ ID NO: 38893 - DNA, 1014 bp, Artificial sequence
  DNA replication origin
cacaggtgaagggcggagtaggctgggctgggctgggtttgaggggaggggtgcggtctcgtctccgctcactctgctctcggagaggtaacagtcacttcagtagctccgattgtcttttagtcgaccagatgctaggcgctgtgggtgtagcagcgaataaaatgctgctccttgtatcttggagcatacctttgggcatatatgcttgtttgttaagaagcccatttattaacaaatacgtattgagcacttactctgtgtcaggcactttttaggcatttggagtacatgtgtgaacacaaaacttcctgtgcttatggagctgttaatactatggaaagatattctagtatgaaaaggcagacagtaaacatagaaatagtagattctacgccgtgataggagaggagggagttacattttttcagtaagatggtcagggtaggactcgtgaaggtgatgtttgagcaaggacttgaaggaggtgattcaggtagcaagccatgtgaatatctgaaggaaaaacggtccaggcagagggagcagccagtaaaaaggccccgaggcaggagtgtgccctaatcctaactgcaaggctgcctgtgtgagggggagagtagtacctgaaagaggatgtcagagaggtagtggagaggcagatcacacaccttataggcttttactgagtgaaatggggagccatggcagggtgttgagctgaagaaggacctgacttgtgttttaaaaggatcactattactgctgtatggagaatgaattgtcttggatcatagggtggaaacagggacgagttaggaggctgttggaataacccaggtaagggatgatggtggcttagatgaggcagatagcagggaatgtcattagaagcagttggattctggaaatactttgaagatagagccaacacgatttgctgacagtttggatgggaccttgacttaataacttaaattgactctactttcgtattttcaagtaaagatgaga

SEQ ID NO: 38894 - DNA, 1215 bp, Artificial sequence
  DNA replication origin
ggccgcgagcctccgcgccgcctctcggctcctcccccaaggcggggcctgagctcctgggactggggtgggcgcgctcaaccccatccggcttgggaggcagcgcgggacagggtcccggcgctctcgggtggggacccctcttctgagctgcaggaagttgaaaccggttgggacgtggccaggcttcggaatagttttcctaacgctgccccctcctccaaaatagttttcctaacccccaccccgaccatggaaagagggaagccaaggacggtatccctgctcccatttgacagacgggaatcctgaagcccagagaggagtggtaacctgctcaaggtcacacagaatgaatgccagggccaggaactcagggttcctagcttgaaggcctgcgcggcctgagtctgaaggcttcccaggaggtccaggggccggccctggccttgcgctggggacagatctgtggggccaggtcccccagctgctggggccgagacatgggggctgtggcctgcggtgtggactcgcatcatttcctctttctggaaagaagggaggtgaagcgctggaggaaggaagtggtcgtacctctgctgacgtctgacgccctttgagatgtgcaggatgaagataggggctgcttccctgagatttaacgctaaaaataaaaagcaaaacatacccggtggcttctgtcacctcattcaagcctctttctggggctgaaggcctctgcactctgtgcaccagcctttctttacaacacaatgggtttaactatttaagttgctgagagtcaccccccaccatcaccaccccaggaagagaaaagaaagttcataaacaaagcagagaaaacctccccaaacattctctggaatccacatttgctgaaccctggccttagaacaataggtttctcttctccacaaaggccttgtttcctgagctttcccggcctacagatgagagccctaggcaccccagggccagccagctggggaaattcagagtttaagtttggggagtttggggatggtacccagttaatttgattctcagctgtcatgtttgaggaactcgcccgaatcctttttttttcactggcaatattcttttgaggccaccagcatcacctgagtttagtgattttctgtttgctcagtcacctttcttgggggagagaaaatctgtgggttgaacttgttc

SEQ ID NO: 38895 - DNA, 818 bp, Artificial sequence
  DNA replication origin
gccaacaacctgccaatgcgccccctcccctggcctcgtcaaggaattgcgaggccggggagaacgcccccattccagcccgactcccggacctagcgctctcggtacccgtctttccagagtccccacactcccatttatctcaagctatcgtcccttggccaaagcgccccggcccccagctaggtgatagcaggctgggaccacctccccgccccatcctcatcccccgccctgcgaagccgcagagcgcaaggagggtggtggcgccgccggggaactcacccgctctcccgagccctgccccgggcggctcccgaccccggctgtgtctgtgggtccccgagccgcagctgctccagcggcgacagagctggctctgctcggccgcgagcctccgcgccgcctctcggctcctcccccaaggcggggcctgagctcctgggactggggtgggcgcgctcaaccccatccggcttgggaggcagcgcgggacagggtcccggcgctctcgggtggggacccctcttctgagctgcaggaagttgaaaccggttgggacgtggccaggcttcggaatagttttcctaacgctgccccctcctccaaaatagttttcctaacccccaccccgaccatggaaagagggaagccaaggacggtatccctgctcccatttgacagacgggaatcctgaagcccagagaggagtggtaacctgctcaaggtcacacagaatgaatgccagggccaggaactcagggttcctagcttgaaggcctgcgcggcctgagtctgaaggcttcccaggaggtcca

SEQ ID NO: 38896 - DNA, 885 bp, Artificial sequence
  DNA replication origin
ctgtgtgaccttgagcaggttaccactcctctctgggcttcaggattcccgtctgtcaaatgggagcagggataccgtccttggcttccctctttccatggtcggggtgggggttaggaaaactattttggaggagggggcagcgttaggaaaactattccgaagcctggccacgtcccaaccggtttcaacttcctgcagctcagaagaggggtccccacccgagagcgccgggaccctgtcccgcgctgcctcccaagccggatggggttgagcgcgcccaccccagtcccaggagctcaggccccgccttgggggaggagccgagaggcggcgcggaggctcgcggccgagcagagccagctctgtcgccgctggagcagctgcggctcggggacccacagacacagccggggtcgggagccgcccggggcagggctcgggagagcgggtgagttccccggcggcgccaccaccctccttgcgctctgcggcttcgcagggcgggggatgaggatggggcggggaggtggtcccagcctgctatcacctagctgggggccggggcgctttggccaagggacgatagcttgagataaatgggagtgtggggactctggaaagacgggtaccgagagcgctaggtccgggagtcgggctggaatgggggcgttctccccggcctcgcaattccttgacgaggccaggggagggggcgcattggcaggttgttggctgcggccgtcgtagaccgatcttggggcggggaggtggggtcctcggtctgttctggactcatggggccgccgtctgccgggggtgcaatgccgggcggcgggagccacagcggacaccaaacaacccccccccgcgcactctcccggc

SEQ ID NO: 38897 - DNA, 1921 bp, Artificial sequence
  DNA replication origin
cagccagcccggggagaccccgcgagtggtagttccccgggaggggcgcgcccggcctctcccagggccccgtgcgccggcggctgggtcccccgcgccaggagcgctcccctctgggcgactccggctcatcgattccggcccagaggagcgcccccgggcgccgaggatgggcggagacgtgcagccgcccctgagaggtcgcccagaggggtctccccaaggtcacccggagtgcccaggctgagctgcccagaccgccccgggtggagagccgggaggcaggcgctcgctgccctcctccttcccccatgtagactcccttcctccgctcccccaccccggcccggcctccagcttcactggagatgctgatgatgcagctcccagcccttggaggataattgagcctgggagagctttgaatctggccctcctgagaccccagggctgcgccgctgccgcgcgccaggcctgggtcccggtgctcccgggcacctcaggagcggagggagagggatgtggcttcatcagcgcttctaggaaccgaaaaccgagctgcctgcgcgcccatgtgattgcatttcacataaagggcccctgttttcactgtcagaagagccccccagctctccgcggctctggacaccaggtgccgcctctgaatcaccctctgtggaggacccggggcccggaggtacaggcgccctttcccgcagggctctccctggaaagggcctgccgatggcggcctcagtccgcaggggtacttccctgtgtaccctgccatttcctgcggctggtgaagcaccggagaaaaaccgtccatctaggaggcctcctccaaggctggtaataaagcttcttagcccagccagcgactagctgtctactcgtgggcaaggtacttggcttctggagtctcaactgcctctaagatacggggctaacagccgccaggctgtggggagatgagggagaggctgggtgcagcagagcgggaggatgaacactccttggccaatactggccgccctcgggattggctttgagtggggcgtgtctctcttagacaggtgcagaagtggagccctggtgggtggttctgcaggggctgggggagtttccacatcttcctcccccagctctgtcataaaaagccagcttgcaggaggccggtgggggccagcaaatccttccagccggctgcctgctcacacggcccttcccacacaaatctcccatgcccttctctcccacctgtcacccaaatcccatcttcctggctgagtccccaggatgctgggggcaagatgtcaaccaggccaccctggactgtcaactctgtgcctacttgtctactggggtctacctaacagtgttcccctgtcctggaaccttcctggctccagctcttcccagcctctgtaatgtcttctttcccctcttttggtctcctaccaccgtgacactcattagtggctctgtggttcatgtgtcaagggccccgtgccatctgtgctctccagatcatccatggcctagaaagacacggtaggcaaggccctgtgcccactcagactttgctctccctggtaattgacggagtggaggttaaattctaatctagctgttaagtcatttcaggagcttgagccacagggctaagaggatactgatgtaggcaggtggtttttccttaaagccagaacctttctcctttctgcagagcccatttgagccctttggaaactaggcctatgtgtgatggcctcacagaatcctcacaaccccgtgaagtaggcattactgattcccattttgcagatgggaaaactggggctcagctcctctcaaaaccagctccatgccccaagtgtagcaacagaggctgcagccaacctggtttaggagaaggcag

SEQ ID NO: 38898 - DNA, 1030 bp, Artificial sequence
  DNA replication origin
atgatggtggcctggcctccagaaacgaccacagggatagagagaagagtccagacgccaacagaaggagcaggagcggccgtggaagcccacggccccaggtggctgtgggcgtgggtgtaggcgtgggatggggcggcaccacagccccacccctatccccagggaagccagggctcagcgccaggacatgtgggaaaggagcagccgtttgcacagatggcgccagagacccaggttctttctgcgccagccggtctttgcggggcgggggtgcgggggtgcgggggggacggtggctaggtctgaggacattctctccggacaggcagggaaaggtgtgaccctgtaagcgagtgggtgctgcttcagacgggcgggagaaccacgcagcagcacggcgcggccggcagagggcgccaaaggcaacgaagcgaggctgcggtggaaggtgagcatctccaggccttcactgggagatgccgctgaggagcccctggggtcaggggcaagagggccagaaatccaacccctagagaccgcaggaaacatagggggtggagtggaagcctctggttgaagggcgaggggactgtgtgcccagatggcagagtcttgtgagatagatgtccaggggctggaccagtctacacctgggagacccggcctgaataagggctgcgttgggggctgggtgcaggggcgcacatggagtgggtggtagctggtggagtgggcgggcctcctcctctgctgcggccgaggtgggaaatggcacctggcagtcagccgcctcctcccgcctcctcccgcctcctcccacttcctcccttcccagcttcaatctatcaccaggtatgaattgcacatctcctaaatcgctgtccccaccctctgccctggatgaagtttcatcatctttccctacctccccgtcattccccttcctaacaccctcgaccagagagagcttcttcattaatctaatcatgttgctctccgtttacaaacctctgagggctccctgttg

SEQ ID NO: 38899 - DNA, 1059 bp, Artificial sequence
  DNA replication origin
aaaaaaagagaaaagagaggaaggaagaaaagcagaaaaggagggaaggaggaagggaagaaagaagaaaggaagggagggagagagggagggaggcaggtagggaaaagaaagggagggagagagggagggaagaaagaaggaagggagggaagaaagaaggaaggaagggagggaggaagaaagaaggaaaggagggaggaagggaagaaagaaggaagggaggggagacagaagaaaggcagaaagggaggaagggagggaagaaaggaagggaggaagggagaaaagaaagaaggaagagaggaaagaaagaaggaaggggggaagggaggagagaaagaaggaaggagggagggagggaagaaagaagaaaggagggagggagggaagaaagaaggaaggagggagggagggaagaaagaaggaaggagggagggagggaagaaagaaggaaggagggagggagggaagaaagaaggaaggaggaagggaggagagaaagaaggaaggaggaagggaggagagaaagaaggaaggagggagggaggagagaaagaaggaagttggaaaaagacaagaggtggagggaggctgctctggggcagggaggggcacgtactactgaacgaggatcttcaccaggttgatgtggccgcaggtggctgcagcatggagaggtgtccacagctcgttgtccttggcgttcacattggcaccatgggagaggagcagcttcacaatttcctcaaagttgtcgatgcagcactgggagagacacacaggcagagtcagctccaggcagggcactgggccccgggccctggtcaggacacaccaggttccccgcaagaggccatgaggaagactgtggaaggcctgtttgaatccagctccatgatgttcacactgtaagcattgcccttgaccttgagcaagccacttaacctctctgggcctcagtctccttgtgagtaaaaatgaagttaataatatgtaagataaaaatatacaggtaaaaaacactctgtcagctataaagtgctttgcaagtatcag

SEQ ID NO: 38900 - DNA, 875 bp, Artificial sequence
  DNA replication origin
gccaggcgctcgcgtcgcaggaaggccgcgaaggcttcggggccgcccgccaccagctcctccagagccaggcgccgtgactcgctgaacagctcggtcgggttgggcggcccgcacggcgacaggcaggcggcgggcacctcgtccaggccctcggacagcagagccatggcggcgctcggactcgacagccctcggacaaaaaccggcgtgcagtcccgctttataggcaacctttgaatcaaacaggcccgcgccattggccgcacctccccgcctcggctctcccattggctgctttccttccaatagcggagcgaggcggggcgcaagcctctacggctccgccccctgatgcgttattggctgcgatgctgggcttgctaagaggaatttaaacttgcaggggcgaggcgggccgcagagcagggacagagcggggagagccgagctcctggccatcccagcgcgccccctgccggtcgccccgctgcgcggccgtgcaaggccagggacagtcaggcctagacaacgaggagaggcaggtgccgactcccggagactctggccacgctgctcctaggctctcagtgctttggcatggccaaccatatcgcctttatcacctgcctttaaccatgtattcattcattcaaagaataccggctcatcgtattaggactgctcctttgattacaccctcgggtagtcttctctcatttcatcgatttttgccttgtaaaaccccaaccaaccgtggttataccctactttccacctgcaccccggcagccctacagggctgaagaaaaaacaaaaagagcgtaaccatgcttactgactggtcatgttttaaattcataatccgtaagact

SEQ ID NO: 38901 - DNA, 1021 bp, Artificial sequence
  DNA replication origin
gtacctcagtaccagccacctggccttctcccaacacttcctttcgaccaactctctcctgcccccaaggctagtgccagcgcctgactctgattctctccgagtcggcatttttcttcccatgctggggcacaggcgcaggctccgggagttaacacacctgccactcctgtgctgacacacagcttttaagaaaacggggagacaggaagcgagcctagacgctgctggggtgggaacagaccctggaggctcccccagctggggagggggctgccggggtggaaccggccctggaggctcccccagctgaggagggggctgctggggtgcgaacataccctggaggctcccgcagctggggagggggctgctggggtgggaacaggccctggagcctcccccagctggggagggggctgctggggtgggaacgggccctggaggctccccaagctggggagggggacttctgggttgttctaacagaggactctgtgggggggactcctcccactggcccctctacccatgcccccacctcaccctcctcctcccgcacattgaaccgggtgaaaaaatgtctcccccactgcaggcggggcactggctggaacgcgcaggaaggaagcctccagccccctcacctgtacaagatgtcagggcagcccttcctctcatcacctgcgaacaagatgtccagaaacactgccaagaaacagccaccaaagttcagcagccccagagcaatttgacaaaataaaatgccccttttcagaacatcatattagcctgctggcccctcagtggatcacttatatgggtcttgtttctgctaaaacacacttggtgtcacatcttccttgaagagatgagggagagcttagttccagaagctttggggaaagaaaaagagaaggcacaagtccccaaccagcaccccaaagcctgaccctcacaccccagcccaaaccaccaggcacaaaggtaacaagaaacaatactagtattcacccgagtg

SEQ ID NO: 38902 - DNA, 1209 bp, Artificial sequence
  DNA replication origin
tttctgcactccccctcctccccttcctttccttctctcctcttctcttcctttccctctctcctattctctcccttcctcctttccccctcttccttctctcccacctcccttccttcctgttttcctcatttgcatccctgcttcccctgtgctctccctcctgtcctccctcctcttttcttgtctctttcctttctcttccccttcttcctctctcctcttccttcctccctgctcgcaccatgccactcaatgctccaagctggacacagctgcagggaaatagcctcagccctggcccccaggagcttccacctagtgggagccaggcaggtggacaggtgatgatcctgtcacgtgatccacatgctaatgaagatctgggctggtctcctgggagctttgctgggtctggaggggtagagaaagccctcacagagcaggagacctctggcctgggtctgatagtttctctggctgagtcaaaagaaaggggcattgtaggcagagggaagagcttgcacaaagtagggggacatggtcaatgaattcttatgcaaatttggaattggacaagcctaggcttgagccactgtcagtataacctctgcccaatcatttcagcctctctcagcttctcatctgtaaaatggggtatgttagtactcatgatgccctgggatgtttggggaacagaattagctcttgcatctgaaaatatctagcactatgtgtcttatcacattttaccctcatgtcaacctggggggccgggtacaattatatcttaattttacagttctggaaatggtggctcagagaagttgagcagcctgtccaagttcacacagccaggtagattgaagacacaaatgtaggcagcctgattcccaagcccgagtgtttaataacaatctctccaaagtcagcacatacacttggaataaaactaacacatcaggtgcctgctctgtaaaatgaggttgcacaaacctggcaggatgacagggataactctccagagctggaggggccatgggggatgcacttttgatttttatggcttctcagggtcccaccaattgtactgtcttagcctgtgtctggttggtgcaggaaaaaggaggatgggcagtggagcaggaggaagaagggggaggaagagcgagggaggagggtgcattggagggagcaggaagaggagga

SEQ ID NO: 38903 - DNA, 1334 bp, Artificial sequence
  DNA replication origin
tcagggtctttggagttggctcaaaaccccggggtttaggcagaggaggggactgtggcctggttgtgtccattagggcaggcagaacaggtcagggcagaaatcaggggggtgagcctccctctgtactgtccagttagttggggtgggtggagaggggtgaggagctggctgtaattaactttaccagcgtccttaacagaggtgagagaacctttcccctacttccctttctactctgtccagcttcctcaatggccttgaggaccttcccaaagctgtgactaggccagggagcactgaattgagccatgctgccagtgtgttccaaaccaagattatatcccagctctgcagttctgcaaaaccattttctttttacagaacttccctgagggctgggttggggcctttgtgaagtcagtgggtgcattaagagattgttggagtgttgggggattgaaggatggaaggagggaggagttgacagtgtaggaagaggttgacatattggaatggaatggaagggttgctgaatggacagatgaatgagatggtagatggggttaggtattggtggattagacatggaattgtatgtataaatggaagggagcatggctccctgaagggatgggttagcatgtgaatgtaggaattgatgagggtggaagtaaatgtagagaggggttggaaattttggtggttggatggaggatttggaaaaagaagggatggtaggtgaagagttggaggaagggggaggggttgacaaatgtatggacaagttggcagatgggtggagggattggtggatggatgaaggagtttggaagataagtggagaatggtgcatggatagagagaaggtcagatggagaggagctgggaaatacaggggctgattcatggatggaaggattggcatgtggatagtggaaatggtggtgactgaaggttctgtggaggttgaaggagttagaggaagggtggaaaagttggcctataaagaaacatgaatcgatggaagagtgtttggcaggtgggtaggcagttggtagaaggatgaggagtgggattttggagcttccggtgggtgaaagtttagatggatgggtggaggtgggtaaatggaagacggtagatacaggaggagatgtcagataggagaaaggattggcagatggggagaggaggtggtaaaggggcagaaaaaaatggcagactggcaaaaccctctggggaaagttatagggataggtagaagtgtgggaaagctgtctaaatccataatggaagaattggctttgtggcttaggcattagccccgacag

SEQ ID NO: 38904 - DNA, 1795 bp, Artificial sequence
  DNA replication origin
tactatctcaaaagcagggaaagaaacgcaatgcattggtctaaagaacgcacttgaaagttgcaaaattacttgccaatgtttgggtttctggtacattctgagcatagcagttggttcagtgcagtgtctgcttaccagtgcactgccagggtcagggatggctaagcctctcaccctaggagcgctgtggctcctacaattagcgcaggcccagagggttcagaagggacctcagggtgattctggttacaataaaaagcagaggggaggatctgttttcctttcctttcctttcttattaagggtatcaatttgaccataagacaaggctgtagtccagaacactcctctggggtgcggagcttggcagcttccctgccctgccctgcccttgtactgggacctctcggttctctctctcagcaccaacaaggttgaaaactaaagcgagagaggaaaaagaggaccgaatggggataagggaaggaaagaaaacatgcaacttccaagtgtgccccaagacaaagttgttttctgatgcaaaatgcccggaactttttctttttttttttctttttaacttacaaacaaaaataccgtaataataaacccaaacaaagaccctcagcttgctgccacgttctctatgcggtttggcggggcgggtatttacaagcctacagctgggactgaaaccccgcacgcagccgccggagtttccaaactgcgatcccttctcacccaaagaaacaaggggagtatgatccatgatcaacaacatgctaaagttaaacaagaaaatggtacaaaatagaaattattaccatacatgtccagcatgcaggattaatatttttaatgcagattttttgtatttttctatataatcgagcaggcaataaaactgatgagatttgggcgccgagcgtcctaactgaggcctgtgtctcagggctgagagccagtgttctccgaactctgacagacaggtccgtctgtccttccttctttcgctcagcctcgcctctcgcctgccgggacgccagagtccctctcctttcctcgttgctctcttcctggcgcggactactctccgggcagcaaagcagctgtcccggcttaacgcgcaaagttcagaaagccaggagtctccagatggccttggtgacttctcgggactatgcctcgccgcccttcagcctggagagaagttactccgggacctcccaccctctcgtctctctctccggctctgctcgagtctaggaggcggcgctggcgtgcgctactctcgccttagccaaggtcccctgcccgcccgcgcacccgcccgtcgcccgcggcccgcgcgcccttcctccctctcgctcaagtcaaacaggtcaaggctggggccgcggcagggacagggtccggggtagtctgggactagggacgtgggacagggagtccgggccggggcaagggcgggggccaggaccggccacgactcacagaaagaactcgggagaggaggggctgtcgctggtggagcccgcctccctgaagccggagttggcgagtttctcgcacttgaccttgtaggcgtctctctcgcgggccagccgggacacctcctgcttaagctgctccacctgctgaatgagctgcgtcttctcattctccaggtggtgcttctgctggacgcgtttatacctgcaagactgggcgtagccccggttcttcagggtccgccgcttctgcttcaggcggatcacctcgtccttggtgaagccccgcaggtggcggttca

SEQ ID NO: 38905 - DNA, 1186 bp, Artificial sequence
  DNA replication origin
gccgccggccaagcctttgtctggggacgcggcggcgcgccggagagtcccgaggctgcctgcaccgccccagagctctgggctgtgcccgcgcagggaccgggccgggtagagtcgggcggggtggagaggcaagcggagcgcgcggtggggctgaggggaggcgtggggcgagtgcccgttgctcgctctctagctctcttgctcttacgctctctcgctcgcagccgctcgcagctcggcggtgcagctgtgctggatccggcggcgccgcagccttttatcgcctcctgatgtcactggggtgcgggggcccgggcggcccggtgcgcgggccaatagctgcacggcctccgcggcccagcggcgcagggcggggcgcgcctgacagctcccccgccccccgcgtcagctgactggcggcccgagcggccccggagcggcggaggcctggcggagcgctggagcggagtgggacggccagcctgggcccacccccgtaccctgcaggtcccggcccacgcacgctcgcctggagtgcgcgccccacctctaggccaaatcaccgctttcccctcctcgcgcactctcctccctcagttccctttgcaccccacccccatcccgtgtcacccccaaggaggctcagaatgagcgccgggacaacgcctcctgggccctttgttcccaagcggcccccgcccagtgggcgacgctctgtgtgtcctcgcggcttctggccgtgtgtgtcgtgcgttcctgtttctggagatctgcgcgtatttgtatgttggggagggcgggctcgaggctccgagagttgtgttcagacccaactcttaacctcaggggacctttctcaggccaagcgagggcccctcctggcgggtgcagtcgcagagccctgaggttcgactccactggccccgccgctccccgcgttcaccccaccgcacaatgttcacagtgaaggcgacgggaaaagcagcagcccaaaggctctgaattcctcttccccgccacacgcacggaatcctgagcccccggagcctcggggccgaggccggcccgggacggtgctccgagtagctctccactgctggggagccggccctgtttttgtttgaacgttttgtaacgattaagcagatcccggcgtcagcccgccgcggagaggctcaaacag

SEQ ID NO: 38906 - DNA, 658 bp, Artificial sequence
  DNA replication origin
gggatctgatggaatctttgtttcctattcccagagaaatacaacacggattcacacagacacaatagcacactgtcttgacactgtattagggcactgtgaatctgctctcttacttacttttaggggtccccttgggtgtcactttccttccctgtaggttggcatcagcggtgccagtgccaaggcaactctagcatggagagtgatggtgagacacggtggtggagggcttgtgtgtggttatcggctgtggggacagtgatggggaaaagagtgtgagcttcccctgtccggagatggggatgggcaaatcaggactgaaggaggaggaaatggtggggtgggggctctgcaggatggggaggagcaatgagagaatggaggcggggggggggcaggagaccagagaggaaggggcaggggtggggcaggtgggaatcgaggggcagagggagcaggggtgccagattgggaggcattcaggacagggtgacatgtgagtgacgcccggcgacttaagagaggagaagttggcggcctgaaagggaggaagacagaaagcagggcttttcaatatgagcattcatgtcacggtgacagcagtcatttatcatgccctgaatgggagcgcagggcccggcaatgccgccaaagg

SEQ ID NO: 38907 - DNA, 1519 bp, Artificial sequence
  DNA replication origin
ccgtcccgcccacgtaaagacctgccactaggtggcagtccatctcagctaccccaccgctccttactccacagaggctggctaggacaaagggtctcaatgtcatgctgaattctgagcttcttaggggacgcacttgaggaaatcaacgttaacacacaagtttccactacagcaagacaaagtcagaagcagcagccccaggtcactatccagctgagtgggttgcctgagcacacgctcttacaaactctagtctagtcctactatctcacaattcccaggaagcctggctctttctctggcatcagctggaagctctgttgggcttctcacctctgaaatgcagtaagttgtcctgctgtgcctggcagccgacccactgcctggctcaacatgtcagacaggctccaccgcgaccgtgggtgtcctcaattttggcggtgctgacaagggtagatagattgcaggggtgagtttcaagaatggcttcagaaagacaaagagtatgaattatattccataaccagaaaaaggccttgtggctggagaatggagagtgaaggatcacttgtgagagatgaaactggtgagatgggcaggtcatatagaacctgctaggccaagcagggagtgtggattttaggtgcaatgggaattcacggagggttttagcctggatgtaggggatcatgatttaatttcattttaaagatttaaagcatgataaatccaggcaaaaccaaactgatagatccaggcaaaaccaaacaaggtgagtagtctgggtgacaggagatggggccttcagcttgtgggctgagtgacaaggtcttgatggattggaggtgaggcaaagggaggaatcaaagttagctgcaaggtttttgaccttccaacttagagaagtttagcgccgcgttctgagaaagtgaagactgtggaaggaatcgtttggggagggaaggcgagctgtctaagggggggggatgtggaacatgcagtgggatgctggggcctggaacgtaggggagatgcaggtttggagtcaccggtgcctgtgttgttgggcaaagccaggggaaaggtcaggtcgccttgggatctggcctagcactgagtgcagaggaagagaagcttctgagatcgagaggcagcggctacaggaggaggaagaaagcaaggcggggaaaaccaaagttcaggagagcatttgcaggagggcgctgcggggtagggtctgagtcggagccccgaatcggactcgagtcctgtcgcgtggggacggagcgtgcagaggcccatgcgagggacagacacaaaggccctgggagctgcaggtcagaccactggacagcgcggccgcggacctaacgcccctgtaaggggtgctcacgcttggggggaactctccgaaagagaggaccactgaaagccaccctggcagcaggggcggaacagacagacgtgggtctggccgtcgccagaactgcctgcggaccagccccgcgctgccggg

SEQ ID NO: 38908 - DNA, 1925 bp, Artificial sequence
  DNA replication origin
gctcccgggcggtcctggcctgtgccgccgccgcccccagcgtcggagccatggcgggcgccgcgtccccttgcgccaacggctgcgggcccggcgcgccctcggacgccgaggtgctgcacctctgccgcagcctcgaggtgggcaccgtcatgactttgttctactccaagaagtcgcagcgacccgagcggaagaccttccaggtcaagctggagacgcgccagatcacgtggagccggggcgccgacaagatcgagggggccagtaagtgcgcccacttcctgcctgggcccgccccgcgcgggggtcgtgggagcccggcccgactgcttgcaccccggccggccgccccagcgacttgggcaaactttcgggccctcccagactccctccgggccccgcccccgcttcgtctcgggtggtcactgggggcggggggcatccgggtcctcggtcacctgacaggacaccccccctcccccagctggggggagtgttccaggcgctttgccctgaggcctaaaaatcctcgcgggctggagacctgcggtgcaggcatcgggccccccagaccctgggagtggtggcggcgtcggcgaggggagctaaggcagtggcccccaccctgcacgggaacctggggcctgaccagacggtccccgcccactctttatccagaaagagcagtctgtgaaactctccgggcccccaggctgggctcttatttgcaaaggaatctttgggttccctaagtagaacttaggcagatgttgggtagggctggtcttggagcagagctgggcctactcatctccctctgggggagagggaggaaggtggtcttgtttggtttggagaagcctgagagaagccagtggctggaatttttttttttttttttctgctacttttgtcccaaagctgggttttggaggcctatgtgggtgggcagacactcaatgccagggcagggactccccttgccctgggaagcacgttcccaggagatgggccccataaaggcctgccccagcgccttggagtcaggtattcttctcaggagtgcagctagtttgtgagtctagccctttgtcctctgtccggtggcttcagggagcgggagcggcttctcttagtttcctgccttttcgccttcccaggcctgagcttggctgcttttgcgctggtctctagtgggaggagggagttgggggattttgaaaaaccccagatctttgagagttgttccacttagcgcgtgcctgtgctgtggtcggatgggcactctgctctgccctccattcccccgcctctcagtgtgaagagatggtgtgtctgcaactctagactgggttgcttcttgcagggacccccggagactagggttagagagacccaggctcagaaccaggtctgtgtgaaggagggagatcaggaagtgacaccccaagggggggtcccacaaaccttcttgggtatggtgtgcatgtgtgtagatagttgaggagattgggaggaaggaaggtcttgtggtgaggcagccaaccatcctcagctacaaactccagatctgacacagatctaatgcagctgctcaacttagaaatggcagcccccttcctcagtgcccccactgaccctgtcagccattgggagaacattttagtgacttgagagcctgtggattccaaagtaaaggaagaatcgacactgcaaagagctgagataaccctgggaacatcactcaggcatcaggctccaggcatggtccccttccttactccctatgctgtgttgagttggtggcactggctggaagttctcagagatctcctgggtaacagactgcattttaaaccacgcatattagcaggcaataaatgtagcacagtggttgatggcaagtctggatttgaagccca

SEQ ID NO: 38909 - DNA, 1091 bp, Artificial sequence
  DNA replication origin
ccgagagcggccgagcccagccgagcggcccggagtcggttggtgcagctgcgtccccgccgctcagcagtccgcggctccggcgtcgccgccgccgccgcctctgcggggcctgcgccggccgcccgcccggccgcggggagggaggcccgcagcgcgggaagagcggcccggtcgcgggcgccgccaccgccgccgctgccaggtgagcgcccgccacggccagccggccccgcgtgcccccgcggctgtcagtccccggtgtctgtatctctctctgcctgtcagaccctgtgtctgcgcgagctccttcccgccacgcctggcccgcggccggcccgcagtctcagtcagccccctcccgccggctgcccctggtctttctgtcagccgccagcacccccatgctgagaggctccgccccttccccccggagccccgccctccgccatctgtcatcaccccccgggctccaggagcgggcgtccaggggtcctaggggtcagggtagccccgcgtgccaccatcgtagaaggcgcaaaagggggtggtagaggggaagcgggggcgttcgcgcaggcccgcctgaccgtgtgagagtgcatgcccgagtgtgcgttccgcgtgtgcacccgagagccgcctgcgtccacgcccgagggcccttgcactctgctgggatgtggcagcccatgcccccggtgtaaagagcgtcagctcgaccagtgaaggcggcagagccaggactcgaaccactcggggtacagtagcaccctgaatcttgggacccttgtctgcccacgcgaaaacactacacgtgggccccaggtcctcggattccctgagtggcgtgtgagtggagtttggagcttgttaagccttcccagtttgggattttcattcagggaagcctgttggaagtgattgaggagtggatgggatgtaggacttaggtggggagtgtttgagggcttgagtcattttgagttgcatggtttacatttctgagcagtgattgccctgggcttgtgccctgcgagaaacttatgtgacttggggtgggggagtgaggtaggaaggaatgctccttt

SEQ ID NO: 38910 - DNA, 1023 bp, Artificial sequence
  DNA replication origin
aacgggtgatgccacaggggggcctggcaggcccagggaggactgtggtgaccacaaggaggcaggccatggggcagggagaggaagccggagcagcagggctgcacgcacatgggatgcacagctctgtacctggagaggttcacgtgtgtgtgtggaaacaaacctgttgtctccggtgtgtcagtgggtgaacaggtacgtggctgaacagtgagggcatggaccctcgcgagcctgcctgtaccctggaccttcccttccctgctcacaatcagaggtacccgtccatctgcctctctgaccagagccgaggtcccggagcaggctagagaggagtggaaagaactaaggggagcaggtaggagccaagagtggcccccagggcagtgagggggctgccagcgccagctccagggcagtgcccctccctgcccacagggagggctggggctgtgtctgattctcccaggtgctactgcagcctgagtggaatttctcatggcagcctgagctagagggggtccaagtggtcttgggagggatggggcaaaattcctgcttctctccaagctaccaggatgggtgggacttctacctgcatccttccctaacatgactgtgagcttcaggaaggcctgcccttacccacccctgtcaccttaagcacagaaaaagtacagccctgggggtgctatggaggtggggagatacccagccttatgcaagtgtctgagggcggccctgagtgccagctagggggagaagcacagccctcaggtgcaggatcccactctcttgccctccctggcccaggtaccgcacagtactcagacccaaatacaaggttggctacaagacagtgacagacctcgcctggcgttgctgtcccggcttcactgggaaacgctgccctgagcacctcacggaccatggggctgcctcaccccagctggagcctgagcctcagattccttcagggcagctggacccaggccccaggcccccttcctacagcagagc

SEQ ID NO: 38911 - DNA, 1413 bp, Artificial sequence
  DNA replication origin
ggctctgcctggggtgctggctgaacttgaattctagctgaatttgagagctgttgtaggaggaagagtaccgacactcagtgggcctgggtacatcacagcgagcctcctggaggaggtggtacaagaactgctctgagagtaagggaacaggaccaaaggcaggggctgcaaaactacgaggagaggtggatttccccgggagccaggcagggaggaaggacaagacatggtgctctcaaaggagtcactgagtggggactcggaagccttaaatgccaagataaggagtttggaatcagcgaaggatgggggggtgtggcagggcacttgagggagaatccgggctggcctcttccccacgcagggaggggcagccacatcaggctcctggttccaaatagtgcttagcccaggggccacccatcacggaggctggaatcagagaccagcagcggggctggaccccagaccaagggcgttggctcccagggacacagagaacagacagaagagacatgggagtttggagtcctgctgaggcccacagatggaggtgggagggtaggcgcctctgtgggcctcgctcagccagatattccaggggtgccattttctcctgtagggccctctgtgcctatgtggtgcacaggaatgtgacctgcatcctacaggagggagcggagagctacgtaaaggctgaataccggcagtgtagatgggggcccaagtgccccgggacagtcacgtaagtgcactcctcacctacacacttggaatcccctggcacaagcgccagtcctgccttcagctgagagcagctgccaactccacaaggggcttcttggactccagagagcccacctgagcccccatacaggccagagtagaaggcggccccagaaaagagggtgccaaggaggaccccagggatttgggcttgcagcagagcatcacccgcacagacaggggcaggcttgggttggagcccaggaaccacagagggacaaggggaaggttctgggggcagaggcagcacaaggctaggaggaagtgacagaggcagaaggtgaggggagaggagggagcagagggccccttaggcaacgggtgatgccacaggggggcctggcaggcccagggaggactgtggtgaccacaaggaggcaggccatggggcagggagaggaagccggagcagcagggctgcacgcacatgggatgcacagctctgtacctggagaggttcacgtgtgtgtgtggaaacaaacctgttgtctccggtgtgtcagtgggtgaacaggtacgtggctgaacagtgagggcatggaccctcgcgagcctgcctgtaccctggaccttcccttccctgctcacaatcagaggtacccgtccatctgcctctctgaccag

SEQ ID NO: 38912 - DNA, 1043 bp, Artificial sequence
  DNA replication origin
agggggcggcgcccggggccgagcccctgcccaggcgagcgccctacgctccgggaggttgcggggctggcgaggaaaaaggaaccgagggggcctggcgcggcggcttgggatcctggcagtgccagcggaaacctttccagcgaagtaacattttccagctgcgctgtgtgcagactccgggcgagcggaccaggtggagggagaggaggaaaggcggtccgcgcgctgagcacgcggggctcccccgccccgggcctcccttctctcccctggcccggccaggtaggagatagagctgcgcatccgggcggccgctgccctctcgcagtcagcctggccccagcaaccccatgggagccccagcgtggccgggctgcagagccagagcgggctcctggctccgggcctgtgctgtggcacagccgtccacagcggtcggcttatgccaggcagccacctcctcagcccttgtggctcatcaaggagcctgctttccccgcctcagcttctggtgtttcgtgggcagtggcttgcgaactggcctcagttaagtgggctggaggctctgcctggggtgctggctgaacttgaattctagctgaatttgagagctgttgtaggaggaagagtaccgacactcagtgggcctgggtacatcacagcgagcctcctggaggaggtggtacaagaactgctctgagagtaagggaacaggaccaaaggcaggggctgcaaaactacgaggagaggtggatttccccgggagccaggcagggaggaaggacaagacatggtgctctcaaaggagtcactgagtggggactcggaagccttaaatgccaagataaggagtttggaatcagcgaaggatgggggggtgtggcagggcacttgagggagaatccgggctggcctcttccccacgcagggaggggcagccacatcaggctcctggttccaaatagtgcttagcccaggggccacccatcacggaggctggaatcagagaccagcagcggggctggaccccagaccaaggg

SEQ ID NO: 38913 - DNA, 1461 bp, Artificial sequence
  DNA replication origin
gcggggtgcccctggcctgcgcccccgagagcagcgccgcgacggcgcacagccagacgagcaggcggcggcggcccatagcggcccccgcgcctctgcccggccccgcgcggtgccccccgccgggtgtccgcctgcagcgccgcgccgcccccgccgctggtcggcccgggtcccgccccgagggtcccggggtccccttcggcccccgagctcgctggcccggccgcctggcgcttcgcggcggctgcgtcccgcggagtggccggcgctgctagcggctggggccgcggaggggaggcgggaggcgggctctttgcggattagcataaacttggggccgcgccgctcgccgccgccagcccctcgccccagctccgagcggacggccgaggagccgcctgcgaacaggaggttccaaagggagcagccccaggtggcaggggcgcaggccgccgcgccctgggaggccccccgagcacaccagccactctgtcgcctgcgggcacggggcgagacgcagagaagcggacccctgaggccagcctgggcgtggactttccaggagtcgtccaccctcaggatacgcttgtcttcagagtccgtgtgaacccgggaactgctctccagggctctggagccgagatggccgtgactgggggcacagcagcaccacctcccccgccacctctttggaatagaccccagatcatccccgtttgctcgctctgcctcctggccccatcattgcccgggaaccttagtttgataactccgctgacctctccccaggcatcccacctcccccttaccccgcaacctctgccacgtagcctggtggcccggttgcacctctggttctctggaggcgcctgtgttgcctctctgtcttaggtatgggttgcaccgagcccgaaaggcctatcaccgccccagcccagccaaaagtgctgtgcttttcgtgcaactgaagctctaagccggctggtcagagaaaatcctcaggtctttctcacaaggcactgccgcggtgaagccaggcgtcgtccacattttgcttgtgaagttgactcttggaacccaagagttgggttttatcgtcgtcctcattcagtatcaccttgctaactctctaacctgcacagagtccttctgattctgtcatcagagcggtactttcctggccttgtctcatccacaccggtggctacagccgtctgtgtctttgccccaggagctgataggtgtacagaactctggggcttgcttggagagacctccctccaaattgaccttgagatatgaattaatgccttttggatagggtgatggttatcaaggatactggaaggggcagctccgaaacccacatctatttcctgcccttagctttagtggcttttgggttctgtggggcggacatctgaccccagctaggcccatcctgctttcccccaggct

SEQ ID NO: 38914 - DNA, 1162 bp, Artificial sequence
  DNA replication origin
agagaatttaactcatcagcaaaaataaaggcaatgggaatgaagagatctccaaaggagtttgtaggccgggcacagtggctcacgcctgtaatcccagcactatgggaggccgaggcagttgaatcatttgaggtcaggagtttgagaccagcctggccaacatggtgaaagcctatctctactaaaaatacaaaaattagccagggatggtggtgcacacctgtaatcccagctactcaggaggctgaggcaggagaatcgcttgaacctgggaggcggaggttgcggtgagctgagatctttgcattgcaccctagcctgggcaacagagtgagactctgtctcaaaaaacaaacaaacaagcaaaggagtttgtgtggtgtaagaagaaaactggggacatttaaggcgaaaactaaggaaaatgattcagtgaaggagatcagaaagatgtggtcagaggagctggaggaggggggtggaagaggaggggagagagagagggagaaagatggcgggatggcggggggagacagagacacagagagagagagagagacaccagccaagataagagagcaagagagggaggagtttccaagagactcagagaagctataggtgaagagttggagttcacaacccagagggaaggtggtggtgccctcttcttggaccaagttgggtggaagcagggtggaggtgagggagtcatggagtggaggcagtgactgtggggagggggcaggaagaagtcgaaggcagctgaaggagaatgagtgagtccagggaagggtagggtgctgagctggaagagctgagatgtttctaggcaaaggggagggagccagagagaggaaagcaaggcccctagcaggcaggacccaggctggagggaagaggggcaggaggaggaggaggcggcagacaggctgggaggcagagtacctgcaggtgtggcgggggctgacggggtggcaggaagcagaaatgacctctgcttattggtctgaacgggaagtgaggttttctcctgagatctggagagaggatggaggaatatttagatgaggctgaggagaagtgaaggtttgaggacaggctagaccatagcctctgcggtggctgcaaggctctggtgactgccccttggccacag

SEQ ID NO: 38915 - DNA, 959 bp, Artificial sequence
  DNA replication origin
gggggtcagccccctgcccggccagccgccccgtccgggagggaggtgggggggtcggccccccgcccggccggccgccccgtccgggaggtgaggggcgcctctgcccggccgcccctactgggaggtgaggagcccctctgcccggccagccgccccgtccaggagggaggtgggggggtcagccccccacccggccagccgccccatccgggaggtgaggggcgcctctgcccggccgcccctactgggaagtgaggagcccctctgcccggccagccgccccgtcggggagggaggtgggggggtcagccccccgcccggcaagccgccccgtccaggagggaggtgggggaatcagccccccacccggccagccgccccgtccgggagggaggtgggggggtcagccccccgcccggccagccgccccgtccgggaggtgaggggcgcctctgcccggctgcccctactgggaagtgaggagcccctctgcctggccaccaccccgtctgggaggtgtacccaacagctcattgagaacaggccatgatgacaatggcggttttgtggaatagaaagaggggaaaggtggggaaaacattgagaaatcggatggttgccgtgtctgtgtagaaagaggtagacatgggagtcttttcattttgttctgtactaagaaaaattcttatcctgttgatctgtgaccttacccccaaccctgtgctctctgaaacatgtgctgtgtccactcagggttaaatggattaagggcggtgcaagatgtgctttgttaaacagatgcttgaaggcagcatgctcgttaagagtcatcaccactccctaatctcaaatacccagggacacaaacactgcggaaggccgcagggtcctctgcctaggaaaaccagagacctttgttcacttgtttatctgctgaccttccctccactattgtc

SEQ ID NO: 38916 - DNA, 1271 bp, Artificial sequence
  DNA replication origin
tcccagtaggggcagccgggcagaggcgcccctcacctcccggacggggcggctggccgggcggggggctgacccccccacctccctcccggacggggcggctggccgggtggggggctgattcccccacctccctcctggacggggcggcttgccgggcggggggctgacccccccacctccctccccgacggggcggctggccgggcagaggggctcctcacttcccagtaggggcggccgggcagaggcgcccctcacctcccggatggggcggctggccgggtggggggctgacccccccacctccctcctggacggggcggctggccgggcagaggggctcctcacctcccagtaggggcggccgggcagaggcgcccctcacctcccggacggggcggccggccgggcggggggccgacccccccacctccctcccggacggggcggctggccgggcagggggctgacccccacctccctcccggacggggtggctgccgggcggagacgctcctcacttcccagacagggcggctgccgggcggaggggctcctcacttctcagatggggctcctcacttctcagatggggcggttgccaggcggagggtctcctcacttctcagacggggcggccgggcagagacgctcctcacctcccagacggggtcgcggccgggtagaggcactcctcacatcccagacggggcggcggggcagaggcgctccccacatctcagacgatgggcagccgggcagagacgctcctcacttcctagatgggatggcggccgggcagagacgctcctcactttccagactgggcagccaggcagaggggctcctcacgtcccagacgatgggcggccaggcagagacgctcctcacttcccagacggggtggcggctgggcagaggctgcaatctcggtactttgggaggccaaggcaggcggctgggtggtggaggttgtagcgagccgagatcacgccactgcactccagcctgggcaccattgagcactgagtgagccagactccgtctgcaatcccggcacctcgggaggccgaggctggcggatcactcgcggttaggagctggagaccagcccggccaacacagcgaaaccccgtctccaccaaaaaaatacgaaaaccagtcaggcgtggcggcgcgcacctgcaatcgcaggcactcggcaggctgaggcaggagaatcaggcagggaggttgcagtgagccgagatggcagcagtacagtccag

SEQ ID NO: 38917 - DNA, 851 bp, Artificial sequence
  DNA replication origin
tgcagggtccccggggctggaaaactcccgggtgcgctgggccttgggaagaagcccgttgggagccaggagtaccagggagccgggctgagcggcagaagacgcgggtggaggctgctccgttcgcttggccactcaggatcttcttttcctgacctgcgggtccctcgcttctccttgcatctgcccgcgtggcctcggcccctgcggaacccctgtgtcgcgggaccccagccacatcctcccccacccccggagacgccagccccgggtcttccagatcactagccagctacctgagagacctccacctgggcgctgaacccccgccggcgcccgagcgcgccaggtccccgccccctgcctgcgatctgcagcgtgcaggaccccgccccgccccctcggcccgcgggaccccggccccgccccgcccccgtggccctgccgctagtcccgggggggcggggccgagcgcagcggcgtctccaaggcggggggcacgaggcagggggcggggcggtctcagcgccggccaatcaaggccgcgatcacatccatgcaaatacgagcacaatggagcgagcccatcactcgcccctgcaagcaagcttgaaatgggcttctgtctgagcggcagccgggatgaccaatgggtctgtgttttggaccggcgaagcccaatggcgcgacagggaaggcgggcccgagatgggttagggtgtccttgcagggtgtctgagctaaacttcaccaaataatagctgtttgtattttggctgctgcaggagccattttaggtaagttcttctcttaactttttattttcctccctggcctcggcggaccggcct

SEQ ID NO: 38918 - DNA, 1907 bp, Artificial sequence
  DNA replication origin
taaaaagttaagagaagaacttacctaaaatggctcctgcagcagccaaaatacaaacagctattatttggtgaagtttagctcagacaccctgcaaggacaccctaacccatctcgggcccgccttccctgtcgcgccattgggcttcgccggtccaaaacacagacccattggtcatcccggctgccgctcagacagaagcccatttcaagcttgcttgcaggggcgagtgatgggctcgctccattgtgctcgtatttgcatggatgtgatcgcggccttgattggccggcgctgagaccgccccgccccctgcctcgtgccccccgccttggagacgccgctgcgctcggccccgcccccccgggactagcggcagggccacgggggcggggcggggccggggtcccgcgggccgagggggcggggcggggtcctgcacgctgcagatcgcaggcagggggcggggacctggcgcgctcgggcgccggcgggggttcagcgcccaggtggaggtctctcaggtagctggctagtgatctggaagacccggggctggcgtctccgggggtgggggaggatgtggctggggtcccgcgacacaggggttccgcaggggccgaggccacgcgggcagatgcaaggagaagcgagggacccgcaggtcaggaaaagaagatcctgagtggccaagcgaacggagcagcctccacccgcgtcttctgccgctcagcccggctccctggtactcctggctcccaacgggcttcttcccaaggcccagcgcacccgggagttttccagccccggggaccctgcagcgccttggatagatctccgtgaaatcaggtgtcgagctatggtgcatttattttcgggcctgtcgcccctaccatccttgtagcatcctcaaggacagggcccagtgtttggcagagattcaactaattgttacactctcgaattcattcgttagcaggtaatctttgagtgcccactaaattccagacattgatataaaacgggatattgcggtcaacaagacaaagcccttgctttcatggaataggcgaaagactaaatacaaggggtaggtagtgataaatgctgtaaagaaaatagatggaagaagaagggaaattagaccagggtttaggaattaggaaattcctaaattatgaaaggaggtatggagagtttgccctgcctggctgaatactctgtatggcgtctcattactgccccctcccaccctaaccttggcagtcaccagccctcctcgcgccctgcttgcccatcgtgttttctaagcacccactaaaaaactgattggattctgactgtagaggctcattctacctcaaagcagaaatgatctgagtctgatgattctaagagcagtttgtgggatacatttaggataagcacattttgactgtgtcaggggccatgataatgatttagcagaggcttactaactccagagagagaatatttttagcttctttgaaatcccagttttctgatggctttcagcctgtggccctaactctcttctgagtaacactcttcacttcttggcagacacaagagatttctccagcttgaaaacagaggcagcagccccctgctgcctatctctctcatctgtgtgcatttctgtcatttgactcaaggctggccaagatgtcttatggtctttctttcttgtctttcttcctcccttaaacagatatttattaggcaccaactatgttccaggtattgttctagacacaaggaatgcagcattaaacaagacaaataatatctttgccctcaaggagcttacaatccagttgagggtgagatagagagttacgcatagatcctgaggatctccaattttgccaagctgctggtgagt

SEQ ID NO: 38919 - DNA, 1521 bp, Artificial sequence
  DNA replication origin
atggtgaagatgttatataactttgagttattatatgataaaaatgggcctaatttactgtatgcgggggagggaagaaaggagggagagagggaggaagaaagagaaagaaaaaaataaggaaggaagaaaggaaggagaaagagaaagaaagagaaaggaagggagggagggaggaagggagggaaggagggagagagggagggtgggaggaatggagggaaggacggagggaggcagggagggaaggacagagggaggcagggagggaaggacggagggagggaaggacagagggagggaaggacagagggagggaaggacggagggagagagggaagggcggagggagggagggaaggacggagggagggaaggacggagggaggaagggagggaaggacggagggagggagggagggaaggacagagggagggaggtaggttggttggttggtttggttctatcacagagccctaacctaaagaggtgggtagccactcagtgtaggcttaccagatgaagttactgcaaatctcagacctgaaaaatgagcagaagttattcaggtagataagaggaacagattctaggcagagggaaccatctacatgaagccttgggaccagagaagtcatgtcataatcaagatgctaaaatactttctaaacgcttagcatgtcagttgccaaggggaaggctggagctgtgactggaaagagccagacattgcaaaccttcaggggcatgctaaagattttcattgtttctatgaagggcactgagaatttgctgaatggttttaaacaggaatatggcatggtcgtattttcatttggggaggactgctctgctgacagtaaaaatgaagtggaaagggcaaaatggcagtgaggaggccagctagaagactgctgtagtcatcgaggccagagaagaggaagattaaaaatagagccattgatactaatttccacaaggtcgtttgtcctattttccatgctaagtgactatggaagtaaagagaagaaaccagactcaagagatatttaggaggaagaattgataggactgcaagatgccatttgataaatggctaaagaatccaaggtttttttttcatttggggggaatatgcaaagggccagctcaaatatgaagggctgttgtatggaagaagaagcagagatgcataggtaaaaccagagtcaatgggcaaagttacaaggaagtgctcccatctatctctactccccagtcagagagcataaaatcactagatacagcaatgaaactaagccgagattagatgattaccttgcaagaattctgtggagaagagccagacctcaggtaaaggtgggccagctgacctccaaggtcccaagatgctaaaactgtaacaacatttgtctcctttgagcctcaatcttataacacttcaggtctgctctctgatttgtatgccacaacttacgcactgtgatttcggctcgctgcttaaaatattcccatcaccc

SEQ ID NO: 38920 - DNA, 2056 bp, Artificial sequence
  DNA replication origin
cggctgctacaacgagcagtgaggaggagcagctgcaggcgccgacggaccgctttgcgggctacatcgacaaggagcggcagctggaggtgcacaaccgcagcctggagggcgaggcagcggccctgcagcagcagcaggcgggccgcgaggtccgtgagacgcgcggtgcgatgctgcgcctgggcagctgcgcctggaacaggagcacctgctcgaggacatcgcgcacgtgtgccagcgcctcgacaacgagctctggcagcgcgaggaggccgaggcggcagcccgcgcactcacgcgctgcacgcaggaggccgaggcggcgcgcgtggaactgcagaagcaggtgcaagcgctgcaggaggagtgcggctacctgtcgcgccactaccaggaggagcaggtggtcgagctgctcggccagacccagggctgcggcgccgcgcaggtgcaggctgagttgcgcaacgctctcaagggcgaagtgacatcggcgctgagcgagatcggcgcggcgtgcagcttgaaggccatgcggtgcagagcacgctgcagtccgaggagtggttctgagtaaggctggactgacgttagaggcagcgaaggtgaacatagatgccatgtgctcagcgtaggaggagataactgagtaccggcgtcagctgcaggccaggaccacagagctggaggcactgaaaagcaccaagggctcactggagaggcagcgctctgagctggaggaccgtcatcaggccaacattgcctcctacgaggaagtcattcagcaactggatgccgagctgaggaccaccaagtgggagatgatagcccagctgcgagaatactgggacctgcttaatgtcgagatggctttggatatagagatagccgcttacagaaaactcctggaaggcgaagagtgtcggactagcttcggcccaattcctttctcgcttccagaaggactccccaaaattccctccgtgtccactcacataaaggtcaaaagtgaagagaagatcaaagtggtagagaagtcagagaaactgtgattgtgggggaacagatggaggagacccaagtgactgaagaagtgactgaagaagaggagaaagaggccagagaggaggagggcaaggaggaagaagagggtgaagaggagggggcagaagggggagaagaagcaaagtctcccccaacagaagaggccacatccccagaaaaggaagccaagtccccagtgaatgaagaggcaaagtcaccagctgaggccaagtccccagagaaagaggaagcaaaatccccagccgaggtcaagttccccgagaaggccaagtccccagcaaaggaaaaggcaaaatcaccagctgaggccaagtctccagagaaggccaagtccccagtgaaggaagaagcaaagtcaccagctgaggccaagtccccagtgaaggaagaagcaaagtctccagctgaggtcaagtcccctgaaaaggcctgaaaaggccaagtccccaacaaaggaggaagcgaagtcctctgagaaggaagaggcaaaatcttcagctgaagtcaagtttgggctcgaaaagcccaaagaatccaaagttgaagccaagaaggaagagactaaagataagaaaaaagcagccaccccagagaaggaggctcctgccaatgtggaggtgaaggaagacgctaaacccaaagagatgacaggtggccaagaaggaaccagatgatgccaaagccaagggacctaccaaaccagcagagaaggaggaggcagcagcagcaccagagaaaaaagacaccaaggaggagaaggccaccgaggccaagaagcctgaggagaaacccaagacagaggccaaaaccaaggaggatgacaagaccctctcaagggacccaagcaaacataaagcagaaaaggctgaaaaatcctccagcacagaccaaaaagacagcaggcctccagagaaagccacagaagacaaggctgccaaggggaagtaaggcacggagaaaggaatgtctggagcagccaaagaaactc

SEQ ID NO: 38921 - DNA, 749 bp, Artificial sequence
  DNA replication origin
tgtgggggaggggtgggcggagtgtgggcggggtgagtgtctgaggtggctgacatttggtatgtttgaggaactgaagacagggtgggtggctggagtgtgacagcatgaccaagtgtccaccagaagaggctgggaagcaagcaaggtgagaccatgcaggtctggcaggccccatgaggggttgggattttgtcagctaagccagagctgcagacaggactttctgccttgagggcagtattctgtatctgcactgccgaccaccatagccaccaaccattggtggctattgtgcacttgaaatgtggctcgtgcgactgaggaactgaatttgacattttatttaatgtcagtcaatttaaattcaagtagcctcatgtggccagtaggcaccctctagggcagtgtagaaagtgcaagggcagctgggggagaagctcctggcagggcagtggtatcacctcagaggagtttgtagggaggcagtgctggttgcaggggcgaggatgggtggaaacaacagagggaggcagggaggggtggatgtgggggtctaggtggagatgatggctgcccaccaactgtcctgagttctgtggcctcttgtgccttcctacagccccagtaccatatgaggattggaaccgctgaagcgggagtcagtgtgtgtttgtttctacctggtctagcctgatgcagggatgtggcctctaagacagcaactgcaaaggatggatgggttagtc

SEQ ID NO: 38922 - DNA, 1704 bp, Artificial sequence
  DNA replication origin
aggagcctgtgagcctacaggttctgatactgttaagaagagaaggcaaatgatcccatccctgtctgaagtcaggtggtgggaagttttcaatctaaagagccaaatagggtcggagagagaggaaaagaggagggagagggagaaaaggaaaacagagagacagagagagtgagggagcaaggcggggagatagagtagaagaagggggaacagggagaggcagagaagagagggagagagaggagagatggggagagagagagggaaagagaagggagagagggagagagggagagaggaggcaggtgggaggggagaaagcgggaggagagaggtggggagagaggggaagagagagagagggagggtggaaagagagaaggagagagagggaaagagaagggagagagggagagagaaggcaggtgggaggggagaaagcgggaggagagaggtggggagagaggggaagagagagagagggagggtggaaagagagaaggagagaaagggagagggagagagagagggtgggggagagaaagagggggaggagagaggtgtggaagagagaggaaaagggagggagaggttggagagagaaggagagggagaaaagagcagagagagagagagaggaagaaacagagacagagagaggaagcagggagagggcagggagaagggagagagaaagggaagagaggtgggagagagtcagggagagagatcggtgggggagagagagatgagagagaagaaagagaggagagggcaaggaaggagaaaagtagggtgagagatagccggggggctgggaaaatttgcaaggtgggtggggagccatgcagacatgtccagccacatggggccttctggtttgagtgtccagaaacacaaatgttgtgggccctaggccttgggtgtgatcacaggtgctgaattctgaaccccatctggccactaactctgacgagtcacttaacctccacactctttagttctcagctgtaaaactgaaaaataataatagtgatttacctctcagtgctggtgggagaaatgactaatggcaggtgacagggtgaaagtacgaggtatcactgggtgtgaaactgcttgatgagaggccaccctgcaagtggcactcaggaaccagagtctggggtgcaccaacccagctcccagatggaaatgggctttgtctctcccaaggcagaggtggctggcataaaagctctctccaaggctcccaaatgggcatgacactcaatatccaaaatgcagaaagacctccccagacactggtcctgctctttttggtggctggaggcctttgcacacctctgtttccctcgctgctcatgcctttccccctgaacacctgatcatccctcaacgttcagcttaagcatccccttctcttagaaatctaccctggtaacctgcttcatcttcttccatactctgtgcacacccctgttagcccctttccacagcctgtctgtaatccttcgtccatttattagcactcattatgtgccagacactcttctaaatgctggagatgcagccatgtgtagacagatgaggccctatagagctcccgtagtaacagggaagccaaacaataaacacctaaggtgataaataaagagaagaggccgggcatggtggctcacacctgtaatcccagcactt

SEQ ID NO: 38923 - DNA, 2170 bp, Artificial sequence
  DNA replication origin
cgaggctcgccatccgggcggcggcgggcagctcagccccttcccgcgggggccggggccgggactggggcgggcgcggggtggccccgcatcgccggcgcggccgctggctgtgcgcgcggctggctccgctcgggctcccggagccggcgctcctgcgttccaagccgaggcgcggcgcgaactgaggcgggaggctgggcgggggcgggacgcggggggcggggggcggtgtcccccgagtcctaacgccgccgccgttgccgccgccgccgccgccgccgcccgcccgggcgctccgcctcggccgtgcacacaccctcacgcgcacgcccgcgcctggcacacgcccgcggctggcacacgcgggctcccccgcgcaccctctccggggccgaccagctcgggccgctggcacagtcacgcgcgtccacacatcacccccgcacccacacgccgggcagggtcctcgcctcttcgccccgcgccgcgccgcgcagccaagcatcgtctgccctgtgggggcgcaggtacgggggcggtgcggggaggaggaagctgcagcagccgtttgaactcggggtggggaacaggtgaatgggggttcggtggcgagaagagggagggagggagcagccctcgcaactcaagataaggggccaggtgaattgcgaaagcgggtgggggcgtctgcccaaagctggggcaggcggctgctggccagggtctcgggcacaccctgagatgagaatttcatctaagagcgcgcgcgcgcacacacacacaacccactcacactcttctgggcgcatcgctgaccgcgccacaatcgtcgtccccctcaattagccgcccaccccaccttcttcttcacccacatctctctcttgtccccaccaccacgcggaagggggcgcagaaggggcatgaggcatccccccaccccctacaatttttccctggcagccttccctttccttttctagggagacagaaccttgtagctttttcccttttcttctcggtcttaacaaagacctggttggggctgaaagcctaaaaccatagatcagggttggagctgtccctggcagcccacggcccacagcctggctctctgctgtcctgggaggcagctggtacctgagtcttggctgggggtctgagatgtaaaagccaggggcagggatacccagaaatgcttaagggattcacactttgtgaacactttgctacctggccaaagccctccttcttctgtgtcagcacagccccccacccccatccttgttggggtaccagggactggactggggagactgtaagtgaattgtgaaaatcaagcatggcagggtttccaaaagtggggagccccaggctctggacccaagttggcatggcagagaacacagggcgtcactctgtcagtccccagttcccagtccccactaggtaaagtggcccagttccctggcatggaagcccaatttacaatcccaggcaaattcttccacccctctccggaccccgactcccaccaccaccaccatgaccgtgaccactttcaaaagctgacgtgcttggactagcctgttggaccagccagtgcctcccacacttgcctggtcaaagaactaccaggaagatttctccaagtcctgcttcccagacccctgctggggagagtggaatttggcaggcctgtcgggggtggcctgggagttgaaccttttacaagctgctttggagattaataattctaccaatatttatggtgcatttaattgtgtgccttactctgtgctgttctctggggataccacaatgctatagcccttagggacaattggaatggaaagatcccttctgctcagagctgagcttccagctgtttgctccatcactcactcattctaaccctgccttgggcagatgagcagttaggaagtgtgcgaggagaggcctgacccaagaccaccacaagcgaccccagtcatggcagatcccaggggatgacccgggtggggagatttctaagccactaaagagcttggtgtcacacttgtaacttgttgccactttcttgggctcctgccaattcatcccctctctcaagctttctggaaaactataaaatagcagttctcacagcatcctcagagcaacgccc

SEQ ID NO: 38924 - DNA, 1322 bp, Artificial sequence
  DNA replication origin
tatggccgcctcctcgaagtagacctcaaaaatgggtgagtcgggcctgggcgcccgcgcccagcgtcccaggcctggtggcggcgggaactctccaaggaaagaagcggccaaggccgcggcgccgcgtggcagggcctcaaagatggcgacggcgcggcgtcgcgggggcgcgcggtggggtacgggcgcgcgcacgtgcgcgtcctggctaacgactcccccgcggttgtccggccctcgcaccgcccctaggtacggcttcgtggagttcgaggactcccgcgacgccgacgacgccgtttacgagctgaacggcaaggagctctgcggcgagcgcgtgatcgtagagcacgcccggggcccgcgtcgcgatcgcgacggctacagctacggaagccgcagtgagtcccacccccgcgcgctccgcgcccttggggaccctgggggcgggggtgggtggggtggggcctcccagcccgggcaggcgcgagggccgggggtcgtttgacttgggtgtccccgagccccgctgccttcacgtctgcccggggcagccatgggacgccggagcgcggggattgggtttgggtgtttggttttgtttatttgccaagttgggaggtgggtggcttcttctggccccttgtcagcactgtcacgggttcttcccacagaggaagtaaggggtggctgtatttgttgtattctccttacttacctatcagtgcattagttagaggttcgggggcaggctcgggtggaggtggggtagggggcgcgggggacggggaaggggaggagcataaagtataggtcttaaagctatggaacttgatgggggccaaagaatgtactatttttaagtaatgtggtattgtaccacaaagtagatctaaataagctttatgctgtatttgaactaattggggcatgttattgggaggaggttggggggatttttggttatgttaaatgtttgatgtttaaattgttgcatgttgaattcaaactttttaacaagtccttgatgtttcaatttgaaagtgaccaatggggctgaggctgtgtccactgaggctaagatgactgcctttcctgattggccttggcttttccatacattgtgtgacccttgccctatgaccctttggctgaccttaccggaagccatgacgacagcagccttttgccattagacgcagggtgatggtgaggattccaagggttagacaaaactggttaatctgaactaggtgactgttaccttgcgtgttttgtggccaaaccaccaccaaaaacctcacactgtgatgtaagta

SEQ ID NO: 38925 - DNA, 1048 bp, Artificial sequence
  DNA replication origin
cgcccagaccgctttccccggcgttttcccgaacctcctccccagcccgcgccccccgccggaggcgctcggaaggagcgagacgccggggccgcagacctgagccctcgccgccctggacggagcggggtggcgcggcgcccaggggacgcaaggtctgagcccacgcaccgctggttgcttacctgcctggccagccggtggccgcccagcgcctagctacggtccgagccgggcgccgcgcgcctgcgcgttcggggggcgggtccgcctccctgcaggacgcagagcgcggggcccgagcgccgggcacatctgcccggcccaggcgcaggcccaggcttctgtggcgcccgcgccctcttgcctgccttcgaggccctggttgtgcgcgcctcatgccccctcaacctaggacaggtttgccgcacgggcgtggcgggtcgagatttttcctgcccccgaacccctgcatcacagctagcagagcgcagcgggggcgcagggaccgcggagctcgaagagagagcctggagggctaccgagctgagtggttagtgacaaaagacgaggctgcacccaggcatgcaccccagccgagtgtctgctctgtccaacgccttcccaccgcgcctgccctcaccctggaggggagctcaggagcgtcagaaaacggcctcaggaagggtgaagggcacgtgcgaccggagagaggaaccctcgtgcggggactctggtcctggccctgccgggcataaagagcggcattagccgcgtctacttttgggtgaccccactgcgaagggctgggtaacatcagtatcccccaggtcctccatttcgacattggtaaagactatcacccacttcatggcgtatggtcgttttcagtttgggttcctgtggtggtgtagcaatcactgcccctctctgcttcactttgactgatctcttcgcctccacctgatctctctaattaatcaaatctccttgttattggttctggtaacacaagatacctgtctcgcttacacataccacagctggc

SEQ ID NO: 38926 - DNA, 1229 bp, Artificial sequence
  DNA replication origin
tgcgtgtttggagatacgcaatcaattaagagtttttttattaatggaaaggtgtggagggcggggttttggttttcttgggaaatgaatgagtcatttggcaaactttcctaccattaattttggatttttataatggaatatggaattttttttgtttctctctctttttttttttttggccataaagagaaagaataaaaagaattccgccattttagcgttttaaaaagtaaccgttctgcggaactgtcggatcagtgaccgccccgcccgcctttgcctataccagtcccgggaggctggtggcgggtcccgatcctggaaccctgcgctcagggccgcttccgtcccctcccgagtccgggaagcagctgcggcgaggggcggggccgaggccccaagtttgtagcgctcagccttgctgtgtgttgttttctgggtagctgtcgagggctctactccccacccaacacctatagtaaggacatttattggtcgtttttgtatacaaggccttggaaggcaagggattgagaaaaccttgtcagacatcaagagaaaatacccatggacacattcagccaacagatatttattgagcatctgctatgtgcacggctctgggctggggctacaatggttgttttaggtcgggtcccccgaaacagactccgatagcaagatttgagtgtaggtttatcggagtgctcttgcgaatatcaccagtaggggaatgacgggttgggcggaagaagaagctgaactgctgatgtagtctcaacagaggcctcagcctgacctaatggaagctctggaactgagatggccctgcagaggtgttccaaagtaaggcaagggggtggggtctttacacctcatagcaactcgtcattggctggcggcttctaggagagccttcaagtgaggtagctccctaggctcagagcagttccaagagaggctgacggcagaaggctgaaaactttcttcagtgtccaccagaaacccagactcttctgagtcccccctcacttcatggcagactccttctcagtcccttttgctagacccttttcctcttcccaacctataaatgtgggtgtgctccaaagttcccacttttttctttatactcagttatgtggttttttcttttttctttctttctctctctctccttccttccttcctcccctcccctcccctttctctctgacagggtcttg

SEQ ID NO: 38927 - DNA, 1023 bp, Artificial sequence
  DNA replication origin
ctagggtaggagtctgggaaggaagagcatctctgtacctgctcaagcaagtgtggatcctggagaggggatgaccgttttcactgtcctccacctgccttccttcacatgcctacacatgcatggccggattgaggtagggccactagactcacctgtgtcgtgtctatttgtatatctgtttacagccagttcggccaccctcggcctgcccagcagtgccctggatgtgtcttgctttccccgggagccaatccatgtgggtgccccggagcaagtggccggctgcgaaccagtttctgccaccgtcctgccgcagcttagcgccgggccggccagctccagcaccagcacagtgcggcttctggaatggacagaggccgcggccccgcccccagggggcggcctgcgggtcagtgtctgtggggattggctaagcctcgtaaaccgcagccatggggcggggcttgcaggcccggaggctggacctgagacggaagtgggggaagctggctcagatgatgggccctaggggtgggctttgagtgagggactctcggggcgtggcttgagttgaagcactcctaggccctggggactatgggggcgtggcttggagtgaggcactctgggactgggcctgtgggtgtctgggggcgtggcttagactggggcaccctgagtgggcctgtgttagtttgggggcgtggcttagagtggggtaccgtgggactgggcctgtgggagcctgggggcgtggcttagagtggggcaccctgggactggaccccgcaggtgcttgggggcgtagcctggagtgagggtttggctggtgtagcttggagtgaggccccctggcgtggagtcttgaggcctgctgagggcgtgagctggcatgaggcgaagagagggccatggcaccgactccgagatgggtcaaggacccgtacgggagtcgcaatcctcagaccctcccgcgctccagttccggataagcgagtataagccgctgaacatggcggg

SEQ ID NO: 38928 - DNA, 1575 bp, Artificial sequence
  DNA replication origin
ggcctgtgggagcctgggggcgtggcttagagtggggcaccctgggactggaccccgcaggtgcttgggggcgtagcctggagtgagggtttggctggtgtagcttggagtgaggccccctggcgtggagtcttgaggcctgctgagggcgtgagctggcatgaggcgaagagagggccatggcaccgactccgagatgggtcaaggacccgtacgggagtcgcaatcctcagaccctcccgcgctccagttccggataagcgagtataagccgctgaacatggcgggagtggagcagcccccgagccccgagctgcggcaggaaggcgtgaccgaatacgaagatggcggggccccggcgggagatggcgaggcgggcccccaacaggcgggtaggagccccgctccccaggccctgagctgggccctgtgcgggtggggcgaggcctgagccccagaaggttcgggggcggggcccggggtggtcctggggtggagaaggctggaggaggccatccgatgcggagatggaccgaggcggaggcagggcctgagggggcgtgggcggagcctgagtgtggctgcgatggggagggaggcctgaggcccatttggcccccgcagaggaccacccccagaatcctccagaagatcccaatcaggaccccccagaggatgatagcacctgtcagtgccaggcgtgcgggcctcaccaagccgcgggtccagatcttggttcctctaatgatggctgccctcagctgttccaggagcggtaaggggaggaggtcgcagccctacttgctctaccttcagcccccaaagcctcattcctgttcaggggttaggagaggggctgggtggtgcagggcgggtggttctttccctaaggctggcccttcctcaggtcagtcatagtggagaactcctcaggctctaccagcgcttctgagctcctcaaacccatgaagaagaggaagcgcagggaataccagagcccatcagaggaggagtcggagccagaggccatggtaggaagagggcagtggggaagggagggggaagctatagcctatgcctcaattcccactgtcccctccatcaatccagattatggagctgggccagagaagacacgcataatgactcactcatcatattttggggtcccatcctgagttaggtcctatacctggttaaagggaaatgaattaatcactctcttgattttccagagctcccatctcagtttagtgtcaaggttaagacatagtcaggtgaactagcacccaaagtacatgtgcaggcagctggaaaactccatcactggagtccagtgcctaggccaaaggccagggaacacccagggctctagctgcagaagctggaagggacagagcatgaattctactgggcgtgtaagagcatcacaaaggaagtttttgtgtactcagtttctctaccagataataaggagagttgtagtcaggctgtttaattaggatgtgcatgctcatgtgagtctgtgctcaagtgatagggggatgtctgctggagctgcactcctgctggcgg

SEQ ID NO: 38929 - DNA, 1109 bp, Artificial sequence
  DNA replication origin
ctgactccatgagtaatgcccctgccagtcacgccctcaccaacatgcctggtgacgaatgagctctaggacttggggctgggtgcctaccctccccagggctcctcagctcccatgcaccctctaagaaggaccagcctggtcagatataggtggagcatggggacgtgtggggtatgaggaattcaggtcaggaagaaagcatcagctggagagggaggccaagcaggggctgcaggagggcccagccctgggccagtcactttaaggtgtcatcagcgtttttgaacatgagaatggcgttatagatcttcaaggctgggcccagcttgacgctcatgatcttcacaatgtccgcctgtgtcagcaaaaggaaggcctcgccgtcaatcatctgaggggttgcgggagggaggtggaaagtggagaaggtggaaagggtcacggggcaggggtgaaggaaagggaggggtgtgcatggggaatgggggaggggagtaggagtaaaggatatgcgggagaaagggaaggaggagagaaggggagagaaaggaccgggagaaaggagaagggagggagaaaggaaaaaaggaagacagcaatggggacggagaaggaaagaaagacagccactggtttccccgtgttcacacacttgttctctttctctctttctgctgactggtctgaggtttagcatttgtatccgcaaaatgtcttttgagtcctcacagacactggctttgagaaacctgctcttgttgtccccacatgacctcattggtcaaccttagtgctgctaacagcaagacaagcagacactgtgtgcattccaacatgaggcagtacaaagtacatagtatcacctaggaactagtcttgccaaaagcagaggggggcagggggagacagagagacacagagagagaaacagagacagtgacagtgagaaatttaacctaagtctaacccagcctttggatctaactttcagttcatgggaaatacaggggatagaggaacaagttaagtgacaccactagaaagcaacaagacaaatccaaaaaaccacactctgaaagacttttaaaaatgtcaattggccgggc

SEQ ID NO: 38930 - DNA, 916 bp, Artificial sequence
  DNA replication origin
gagatgtggggagcgcctctgccacgccgccccgtctgggatgtgaggagcgcctctgcccggccacgaccccgtctgggaggtgaggagtgtctctgcccagccgccctgtctgagaagtgaggagcccctccgcccggcagccgccccgtctgagaagtgaggagcccctccgcccggcagccaccctgtctgggaagtgaggagcgtctccgcccggcagccacccagtccgggagggaggtgggggtcagcccccgccaggccagccgccccgtccgggagggaggtgggggggtcagccccccgcccggccagccgccccgtccgggagggaggtgggggggtcagccccccgcccggccagccgccccatccaggaggtgaggggcgcctctgcccggctgcccctactgggaagtgaggagcccctctgcctggcaaccacccagtctgggaggtgtacccaacagctcattgagaacgggccatgatgacaatggcggttttgtggaatagaaagaggggaaaggtggggaaaagattgagaaatcggatggttgctgtgtctgtgtagaaagaagtagacacgggagacttttcattttgttctgtactaagaaaaattctgccttgggatcctgttgatctgtgaccttacccccaaccctgtgctctctgaaacatgtgctgtgtccactcagggttaaatggattaagggcggtgcaagatgtgctttgtcaaacagatgcctgaaggcagcatgctcgttaagagtcatcaccactccctaatctcaagtacccagggacacaaacactgcggaaggctgcagggtcctctgcctaggaaaaccagagacctttgttcacttgtttatctgctgaccttccctccactattgtcctatgaccc

SEQ ID NO: 38931 - DNA, 1207 bp, Artificial sequence
  DNA replication origin
ggatcccaaggcagaatttttcttagtacagaacaaaatgaaaagtctcccgtgtctacttctttctacacagacacagcaaccatccgatttctcaatcttttccccacctttcccctctttctattccacaaaaccgccattgtcatcatggcccgttctcaatgagctgttgggtacacctcccagactgggtggttgccaggcagaggggctcctcacttcccagtaggggcagccgggcagaggcgcccctcacctcctggatggggcggctggccgggcggggggctgacccccccacctccctcccggacggggcggctggccgggcggggggctgacccccccacctccctcccggacggggcggctggcctggcgggggctgacccccacctccctcccggactgggtggctgccgggcggagacgctcctcacttcccagacagggtggctgccgggcggaggggctcctcacttctcagacggggcggctgccgggcggaggggctcctcacttctcagacagggcggctgggcagagacactcctcacctcccagacggggtcgtggccgggcagaggcgctcctcacatcccagacggggcggcgtggcagaggcgctccccacatctcagacgatgggcggccgggcagagatgctccgcacttcctaaatgggatggcatcctagatgggatggcggccgggcagagacgctcctcactttccagactgggcagccaggcagaggggctcctcacatcccagatgatgggcggccaggcagagacgctcctcacttcccagacggggtggcggccgggcagaggctgcactctcggcactttgggaggccaagacaggcggctgggaggtggaggttgtagcgagccgagatcacgccactgcactccagcctgggcaccgttgagcactgagtgaacaagactccgtctgcaatcccggcacctcgggaggccgaggctgggggatcactcgcggttaggagctggagaccagcccagccaacacagcgaaaccccgtctccaccaaaaaaaatacgaaaaccagacaggcgtggcggtgcgcgcctgcaatcacaggcactcggcaggctgaggcaggaaatcaggcagggaggttgcagtgagccgagatggcagcagtatagtccagcttcggctcggcatcagaggg

SEQ ID NO: 38932 - DNA, 1653 bp, Artificial sequence
  DNA replication origin
gggagcctggggagggtcgggggtatctgggtgggggaggggtgagttaaagggagggggaggggcccaagccctcccggctcgtctcaccagcgcgtccgccgagacatccccccggcccggaccgcgccgcgctcgcccgcccgccggcagagcccggagcgggagccgggccggggtcaggacccgggctgctccggccgctccgggccccgggccgcgctcgaaggcgtcagcgtgtcagcaggtcccgcgctcctcgctcgcaggaactgcagtcgccgccggcgcgggttgaagcacttttctatctcccgccaagcgcgtcggcgccgcccagtcctggcgcgcgggcgccgggggaggggcctgagtgaggggcggagccagggggcggggcggggcggggcctgcggggcggcacctgcccagaccctccagggccggctgcaggacaggggcggcggccgctacttcggagttgtggagcgggccgggatgtgaccgaggcctggctcacgtgtcagtccggggcggcccaggagtatcccacatagcgaagaccgaggaaggggagcgaggcgcgagcatgggagagccagccagggaaagcgccagggcggaatcccccacgctagtccaagccactactgggtccctagagccgcaccctaaagcggctcctcaccctacctgtgcctctccctgcttcctctcctgcctccaagagaccctccttaatagactttattttttgttgttcatttttcttagaggcagggtcttgctctgtcgcccaggctggagtgcagtttcgcgatcatagctcactgcaacctccacctcctaggctcaagcgatcctcctacctcaactcacgggtagctaagaccaggcactcgccactacacccggctgattttttttttttttttttttgagacggtgtctcgctttgtcgccaggctggagtgcagtggcgcgatcttgactcactgcaacctccacctcccgggttcaagcgactcccccgcctcagcctcccaagtagctggaactacaggcgcacaccaccacgcccggcaatttttttttttttttttttttttttttagtattttagtagagacgaggtttcaccatgttggccaggatggtataggtctcctgacctcgtgatccgcccgcctcggcctcccaaagtgctggaattacaggagtgagccactgcgcttttttttttttttttaagagaagggggtgtcttgctatgttgctgttgcctagactggtctagaaactcctgggctcaagagatcctgccgctttgtcctcccaaagtgctgggattgcaggcgtgagctctttccagaatttaaaaccatcctcctctccctcagggtaaattccttactccacaatcacatttatctgatcttccagaccaccacccagccctggccaaaagaaacggcctctttgcctttgcctgagccattacccagggcaggaacacttcctgcccctcccacgtggctgattcctatttaatttggggtccactgcccacaatctgcctgtagacttctgcatttccccctttgaactgggagcatcctgaggtccaggtggcctctcaatgcacaccagtat

SEQ ID NO: 38933 - DNA, 1076 bp, Artificial sequence
  DNA replication origin
ccgcgccggcggcgactgcagttcctgcgagcgaggagcgcgggacctgctgacacgctgacgccttcgagcgcggcccggggcccggagcggccggagcagcccgggtcctgaccccggcccggctcccgctccgggctctgccggcgggcgggcgagcgcggcgcggtccgggccggggggatgtctcggcggacgcgctggtgagacgagccgggagggcttgggcccctccccctccctttaactcacccctcccccacccagatacccccgaccctccccaggctcccaccaagctggggtgtgtgtgtgtgttgggggtggggtgtttccgcggaaatgctgcgtcctgggccctctgaggcaggggcgcgcgtaaagctggggggctcttgggcgtccctcgcggctccccaggcctgttgggcctcggagctgggacgggcgggtctcttgggacccgggccaagccgtgcatgatgtcattttgtctcccgcctaattgcgggatgggggtgggccggccggtgtcagctggcagggccttcgccggcgagggaggcgacccctgggagcgagagggagtcttcaagtcccagccagtgggagaccgagcctgggaggcacttgttgcagcctagttttgggtcaacttggtgggtgggctttgctccttaacattccggggagcacagagtcccccaagccctctcccctggactgagaagggtgctgagttgggggctcttttgtctctcccacctgggttccgcgccccagcttggttcggtttgagacctctcttcctgttcccacgaggagttttgggcagctggggttgaaggtgcgggggagagagagagtccctggggcaaaggcaggaactgcggtctccattttacttatttccccagagacttaagtggcagagctgagcccggagccaggtctgtggctccagatccctgtcttacacctgtgcgcctggggcctgagctccaagcttttcagcctgcctgggagacaggacagtggggtcctgacctcttccctgcctggatcgctgcagctca

SEQ ID NO: 38934 - DNA, 654 bp, Artificial sequence
  DNA replication origin
acccaggacagcccagttgcagctgggttggtcccacagtcccacacacacacagcccgagtgtggtgcctcacgtgggctgccccgtgcctacccacagccacagaccccgcacctggaggaggacttgaaggaggtgctgcgttctgaggctggcatcgaactcatcatcgaggacgacatcaggcccgagaagcagaagaggaagcctggggtgagtagggtaggggtgggagagcctgggcagggggaattggagccgtggcatgggggaggcgtctggggacaggttgtagaaagtgaggcgctggggagaatgggggcgtagcatatcccctttgccccctttcgcacggtggttgttgaggaaactgacaagataaggacagtgtctctgggaccctcctctgctctgctttgaaggattcacttacttatccagcattgtgttcggaccctgctcaagttgggctgggctggatgtggtggatggagcagcaattacgacccagactggatctccccttagtgttcagggggcagagacagatgctagacagacacaccatgactgaattcacagggtaccaagggccgcagaaagggaggttccaaaggaatcttttgggtggaggcgaggcggtcgggatgagc

SEQ ID NO: 38935 - DNA, 1619 bp, Artificial sequence
  DNA replication origin
tttatgcattatatactgtgttcttataataaagctgcagaaaagagaatgttattacgaaaatcataaggaagagaaagtctatttattattcattaagtggaagtggatcatcacaaaggtcttcatcctcgttgtcttcatgtttaggctggggaggaagaggaggggttggttttgctctctcaggggtggcagaggcgaaagaggtggaggaggtggaaggggaggtaagagaggcagacacacttggtgtaattttatcacaaaaaatctgcgtataagtggtcccgcacagttgaaacatgtgttgtcgaagggttgactgtcattcattaattacccattgtcatccatgcaatgaaggtccagggtgttggggggcactgtagagagggcagttagggaaggcctctgtgcggggctgacgttttaggttgagaactgaaggctggggaggaagcagatgtggaagatggggaacagtgtgctgaggctcagagtgggggaaaagtgccataggattgtggactgtggactgtggaccagaaagaggactcccattcctgccactcctgccccaagaagggggagcaggtatgtggggagggcggggcgaggtggtcctggccagctgagaagtagtgttggaacatgagggtgctttagccccgggttaggaaatggggggccatggaggggtgggggcgaggagtgacacgggctgacttaggatgtgtaagcgccttgtggctccagtgtggactgcaagtgggggcaggtaggggctgtgggtggctgcagggagcccaggtaagaggtgctggctgcttggtctgaggagggagggatgaggcctgagccaagggcagacccagatatatctagcgcagggagtgcacctcacacaggctgacttctgggtatttggagactccctctgggccagggcagggacttttctcccattcaataggtgggaacactgaggcctccaaagtgaagtgatgtgcctgagttctctccggcaggtgcagcgctacacaaggcctctgcccacctttgtggcctggctggaccagggatcttgtccctcaagaagtaagcgagtccagctcaggagagaacccagccctgcaggtgctcagggcagacacagcctcgatttacagtgaacccctcccctggactggacaaggagggctcagagaggcttgagatggagcggggcttgggaggaggctgcagtcaggtgggggaagaagatgagaggcccgagcacagttacataatgacaatcagcagcagctgaggacaggcagctttgatggtggtggtggtggtgaggtggggcggggtggggtcgggggtagcaagagtgatcagagaggccttcctggaggaggtgaggaaaccacagaccaaagacgtggccagcagggtgtgagagatgccagtgagagtggagggtgggtttgcgtgggagagaccatctaggtgagaggatggggtgtgggtgttttaggattaggggtgaagcctcatcatctaggctgggaggcaggaggcctggcctgtggccccagttcttccctgagtgatcagctgcctagagtggc

SEQ ID NO: 38936 - DNA, 1374 bp, Artificial sequence
  DNA replication origin
gcgcctgagtcccgagctgccaggtgactccggccccgcccgccggggacccccgcccgcccccgcctaccttgccgccgtggtaatagtccaggtgcgccaggccggccggctcggccccgggccgcgcgcccaccgcgggcgccgaggggtacaggcggacgtccatggcgggcgcggcggcggcggcggcggctcccgcgggcagtgcctgggcgggcggcgggtgggagccagtgtgcgagcgggactgcgagcgcggggggcgggccgggggcggtgcccagaggagcgccccgcccccgcccccgccccgcccgcgcgcgctattgttccggcctcgggcgctgcctagggccgggggcccgggggcccgggccggggcgtggaggtccttcctccgggctgggccgccgccgggtcccccgcccggccctgcatccctgaggggggcgcgcctgtccagacggcgcttttccgtcccgcctttcgccacccacggtgaggagagaagcccgaacggcacccctccccagaagtgggacactcccttgccctaaatatttgaggcggcgctagtccccgccccgcggcgtgggtgcggggggaagaggaaggtggtgacaggaccactttggagatgggtgctgccttacctggggggacgcaggccagcgccggaggatgctcttagcatgcccgccccctcctcgtctcactgatctgagtcagcttgacagccccccctggagattgccgcgcttaaactctcactcacatatggggaaactgagtcaaaaacttgcagcatcagtaatggagctccaggcgggtgggctccgttgcccccaaaggatccagagctgaaaccacttggagaaggcagcaggaccccaccccttttaatgatagggaggggagggccgcaggaatgcctagagcccgaagctctgaagaggggtctaggatctgcccacagtcacggtctcttggagtgaggaaaggaagaaaatgagattggaatgggatggctctgatggtgggtcagaaaggtgactgtgaaatggggttcctccccaaccaaaaaaaaaaaaaaaaccctctagttcttgatatcacttgctggttgctagactgttgcacccccatcccccttttcatgcaagaattgtctacactagcaatctcccctagcaatctcactgctcactgactgctccaggtatgtctgactgggagaggccaggaggcgaagtcagccagaatggcattcttgtgtggcaccaggatataggatgccattgggagaaaaggacttgagcttcctgcccactcaggagctagcttagaacttagttctcaactgctgcttgg

SEQ ID NO: 38937 - DNA, 1264 bp, Artificial sequence
  DNA replication origin
cccctggggcctgagggcgcactcagggaggcccagcccgggaggccccgggatccgcgccgggacgcctctctcctgcctcatccccactaccaggggcctgacgaaaagcctgcgaggttggggagagaccctggggggcgccgatccagccactggacgcgcactcaccccgcatcgccacggagcccacgcgtctgcgccagggctgcgggaaacccacgcgcgctgttcaatccgggctccgagtgacgaaaacccgcgcttggctccagccggcccgggaccgacgcaccgactggcggacgcgcggacagtctggcttcctaactaagtttgaaagttccctctccggcgaccgaaggggacgcggactgcttagaggcacccaacccatccaggctgggccagacccggcagtgggacctgacgcctcgggttcggggttccaggcacgcaagcctccatcactgggaatgcgcccggcgcagcgcagctgggacctggctggggtggggggatagatcctggaaacatggaggagggagggtgtccggcactacagccccagcctggagggacgccggctcaccgctcccgggaggacacaggcctcgattggccgcagcctactcggaatccgaggccccgccaggcagtgacggccaattagtaaactgcccaattagtgtgctgcggcgctgagaagttaaacctcgacgcgcgagtgtggatgaccgaggtgtggccgtccctgggtgtgaccgcgtgtgactgtgtggccgtcaggacgatctgtgtctgaggctcaccgtccaggggggtggctgtgtgtgacagcgtgcgcctgggtgaggcgttgtggctgcgagagtgtgactgtcgggcgacttctttgtgtgactgtcccccgttgtgcctgggtgtgacagcgggtgggggcatgtcacggtgtgtggggcatcggagcgtctgtgggtgactcgtctgtggcggtgaggctgtttgcgggtgagtggttgcgtgtcgttgtgtataagtgactgtcagggtgacttgcgtgggacggcgggaccgtgtaagcagtgcctggccgcctgcgtgtggctgtgggtcactgtgacggcttgtgaatgactgcgaggctgtcagggggacgcgagtgaggggccactgtgtcgtcgcacgggtggctgtcgggatgacttctgcccgcgatcccaacaactcagggcgtgagcgtggccgcgaggggatcgatgtg

SEQ ID NO: 38938 - DNA, 1676 bp, Artificial sequence
  DNA replication origin
aaccccgaacccgaggcgtcaggtcccactgccgggtctggcccagcctggatgggttgggtgcctctaagcagtccgcgtccccttcggtcgccggagagggaactttcaaacttagttaggaagccagactgtccgcgcgtccgccagtcggtgcgtcggtcccgggccggctggagccaagcgcgggttttcgtcactcggagcccggattgaacagcgcgcgtgggtttcccgcagccctggcgcagacgcgtgggctccgtggcgatgcggggtgagtgcgcgtccagtggctggatcggcgccccccagggtctctccccaacctcgcaggcttttcgtcaggcccctggtagtggggatgaggcaggagagaggcgtcccggcgcggatcccggggcctcccgggctgggcctccctgagtgcgccctcaggccccaggggagcggcttctggcaaagcctccctgcagttcgccaggggcagcaagcatccaggccactagggcctgcgcgatgtggggcggtggtgggcgacaagtgaggtctcgcgaagagtggcggtggttctcttttgtccagtgacctgcaaagttagaagccgatgaggggggatggtagcctcaggagaaggccgggagctgcctccagtctgatggaggaaaatagattaaaagtagcaagtggagttttcagggaggagaaggttgggtgtgggggcagctggtctgtcttctgcccttggctttgttatttttcaaaatgtgaagttggcgaggtaggtaccagcctctggtttgcgggtgtgggtgggctgggcatttgtgcctcaaagtctgagtgggtgggggtttagcctggagcgctccgtttgagggtggtgtttctataaatctcgccagggtggggctgtcccaaataggggcctttggaggcaggactcagccgaggcccctgctttattctgatgctctgtaaacctctgactcagcaccagaacctgtgcgaatctcgccgggaagggcccgtcagggagggaatgagaagccggcgattctggtttctttctgtgtgggatgtaggacccctggcccatagctgaggatgtgtccagagtggggcggggcagggatgggggtggggatgcagctgagccacttgataggtgaaaggaaggtctgactttgcacttggatgtgaaatctgctactcagtccttcaggctagagcagggtgaggcgggaggggagaggtcactgtattcatttaggggctagaggtcttttggtaagggattcccaagtgggcatggccttagtggtggtggttggggggtagggccaggctgtgatcaggaactccccttttctggctcaagaagtggatggggaggggttggggagggaaatgcccaagctccacctttacactagtcactatcaaagctggaggggaaacaggctcagggtgcagtagtgaccacacttggggcctgtaggcctggctgaatccagacattgtggggtggacacacccacacatggggggctctgtccgcagacaagaggctcgttgcacagggagccaggctttatatacataagggcaagcatttgcccaagtgatgcccgacacctatggggcagttgacctggaagggctcttggcgaccg

SEQ ID NO: 38939 - DNA, 730 bp, Artificial sequence
  DNA replication origin
tctgcacaggaagaggcagctcttatttcagagcccaaggtaaggagagagagagagagagagagagagagagagacctgccctcagtcagaaatggcagaaattaccactgaggcctgcagtgttcagggaggacttcctggcagagggaaactttaggtgggacctccaagaagcataggaggagaacatagaggaatggggaaaggcagaggcatttatttagcatccatcacaggatgggtatttcacttacgttatttatttaatcttcacaacaatcctatgtagaaagccacctccaccgtgcaggtgaggagctgaggcttgagaggtgagggcactgggccggggtcacagtgggattggaacccaagcctgcttgccaggaacatactttctcttcctaagggaccataccacatagggagggggtgtgtggaaaggggaggggagctggaggccttgggaattactgcagacctgactggatgggcagaggctcgtgtagagggggctgggaggacactgactaccaggctctggggtttggattctgtatggggagccatggagggctttggggcaggcgtgatggtgcagtgtcatgccctctgtcctgggaccctcttcccatcccaactctgagccagcttctccacattgtccaccctccctggattcagacttcatctgtgtgtgtgtttgtgtgtgtgtgtgtgtgtgtgtg

SEQ ID NO: 38940 - DNA, 1035 bp, Artificial sequence
  DNA replication origin
ttggtgggcttgaggttattcgttttgggtaatttgggaagcagagctggttaataactgatgggttgaacaattttttttaaactcctgaatctataacagcacatcagatctttttcgcatgggagttacttcaaactttcaagaacagataattccacgctaactgatgtatgtatacgtatgtgctgtgtggcagagaagagctgctctgttgtttgtattcttgctgaatgaacgtatcgaattttagcatcgcggactctgaaaattaatcaaaaaattaatctgtgccatgttgcccacattccaatccagtgtaaaaatttctgtgtatccctccaaggaggaatgactactgggcaattttgggaccagccatgactgccttctggggttgggggagggggcgtggtctcagcctcggcccaggtcctgcctcctgtttggaccgagatgagtttgttgggggaggtgtgagatggagaaacctgaggaaggcgcttggccctgggaagggtgagtggggttgctccctgggccagctctgtgggcagtgggggcaggctgcaggtaggagttaaaggtgttcacactgttggggacactgctctagggtctggcaataacttgaagcctcaaggtgtgaggggccccgaccgtagactggccccggcaggtggaggatgctgcagggagaacctggcccacgacaaggctggggcacccagggctggcagctttgggagcacagggatggggagtgagagagcccatggcagagaccccagtgctttcacagccggtgtgaccctgggttcttggaggcgctgtgggtcgtggccaccatcattgcaggatggaatagaaaacatgcagcagacactgcctcccaagaaggaggaaggccctggagtggggcttgggtggtggtttcggggctgaaattcttgtagttgcaggtaagaccagagccagagacatttggagcaataccgatgtggccccacttgggccatgggcatagtcagtatg

SEQ ID NO: 38941 - DNA, 2243 bp, Artificial sequence
  DNA replication origin
cgagagcccgcagctgcacgagcgtgagacccctcggcccgagggtggctccccgtcaccggccgggacgcccccgcagcccaagcggcccaggcccggggtgtccaaggacggcctgctgagcccaggcgcctggaacggcgagcccagcggtgagggcagccggtcagtcactccgtccgagggcgcgggccgccgcagccccgcgcgtccagccaccgagcgcatggccatcgaggctctgcaggcaccgcctgcgccgtcgcgggagccggaggtggcgctttaccagggctaccacagctatgctgtgcgcaccacgccgcccgagcccccaccctttgaggaccagcccgagcccgaggtctccgggtccgagtccgcgccctcgtccccggccaccgccccgctgcaggcccccacgctccgaggccccgagcctgcacgcgagacccccgccaagctggagcccaagcccatcatccccaaagccgagcccagggccaaggcccgcaagactgaggctcgagggctgaccaaggcgggggccaagaagaaggcgcggaaggaggccgcactggcggcagaggcggaggtggaggtggaagaggtgaggctgtcgggcaaggtgtgcctaaggtcgggttccctagaggtagcagggcttgagggaggattcaggggcaggggatttgggggttgctggggtgcgagagaccgaagcaggatagagcaggaggaaatgctgcagggctggggattaggggagcatagccttggcttggtccacagaggacgttggagcgtaaatggccgcatggagtcctcctacctttgcacctggtatcccattggcagagacagttctcatgagcaggggcagctgggagcctgagcagctggagggtgggtccatttgcccagtcaggggggttgggctgggcaccagcagcatctgctacaaggtgtagcagtgagggcttcatggaggtggaagaagggcccaacaggatttgggttatagacctcctgacttatgggaggcagggagctaggaacggcggcaacaaagactgaagctgggctttgggggactgaagaatgcgtcccaaggggaattagcaggatgcctgggttccaggcctgattcacacactatatgacttggggcatgatcttgtccctccctgggtcctgagggatttggttatttctaagagtccttccagctgtgatggtctgccatccaggtgacaggatacagcagtgaacaaagccggcaatgctcttaggaaggtccatccagaagttcctgctctgtccagccttgctgtgacctgggtggggggtgtctccgaggccatggggactcaggaagcctctctccactgctcccaggtccccaacaccatcctcatctgcatggtgatcctgctgaacatcggcctggccatcctctttgttcacctcctgacctgaccgtcgcttaccaggtgcagccagctggctggaggaggggttggggggcaggagcccctggggagttttgagcaccagggtggtgggaggagggacctactcggtacttggatgacagtcctgtgactaattgaggcccacccacctgcagaagccaagacctagagtgtgatttgataccagcgcacacacacacacacacacacacacacacacacacacacacacacttacttcattagcttagtgtttgcagagcacctgctctctgtcaggtgagcactgagggcttcattcactcattcatttggccaacatgtactgctctgctgggagatggggatacagcagggactcactcctgctccaagaatggggtgaacataatgaaagtaaccctgaacttagagctcattacagaaaagtcttaccgttcaaacactgagcacaacaggtctagactgagctcacctgggacggtgggacactcatctccgtgctccctttctctcttccccacttcagtctttaatcccttggcacacccagcctgctcctgttcctctgcccattggttccctctcagttttttccccatgatggagctgggggctggggtaagttcccgtgaagtggagtgggctgggctgggctgaaggagagtggccctcactgctctcaaggtgaagcatctacaagacaaaatcttccccctgctggaactagccttcacagcctcaatcccatgcttggcaataataaca

SEQ ID NO: 38942 - DNA, 1757 bp, Artificial sequence
  DNA replication origin
aaggcatccaggaccagcagccatgggagctgttataccccaggcctgaaggggcaagaggtgggggacagggaaatggtgtgatgactggagcagggatggggacggtgggggtgggtgagagttgcagctgtggaggggggtggtgggagtgggtgagagctgcagctgtggagggggatggtgggggtgggtgagagctatagctgtggaggggcccggtgggggtgggtgagacctgcaggcgtggaagggggcggtgggagtgggtgagagctgcaggtgtggaggggggtggtgggggtggatgagagctgcaggtgtggggggcggtgggggtgggagagctgcagatgtagaggggggcggtgggggtgggtgagagctgcaggtgtggagggggacggtgggggtgggtgagagctgcaggtgtggagggggacggtgggggtgggtgagagctgcaggtgtggagggggacggtgggggtgggtgagagctgcaggtgtggagggggacggtgggggtgggtgagagctgcagctgtggaggagacagacaggcaggaagagggagaagtggaatagatacccagccctctccggcctcgtgcttgggccctgaattgactgggcgcactggaagccagtgagcaagggagctagtgatgcaggctgtagagatgatctccctgggcagagctgggtagggaatggatggggtggggcaagggggggagatggggccaaaggaaaataaccagcccaaatgtgtgtgtgtgtgtgtgtgtgtgtgtgtgtgtgtgtgtgtgtgtgtctgtctgtctgcctcccttccacctcattcacagtgggcaacctgtattataagtttcttacctatctttccataaatattctctatatagaagagcaaacaggttgtctgtttacacaaatgttacatacaatagaaattcttttacaccttgctacctgatttaacatatcttggaattcactctttgtcatacacaaagatcaatcttattcctaggattggctacataatactccttcaaatggctatgccataatttagttaaccagctctgtactgctggacttggctttgtttccaatcttttgctattacagtgttacagtaaataccgtgtagctcacaggctaatcagagaaaggcaaagtcacctggcagctaagtgcaagagatggtaagagcagacagctggcagttagggtaagctttcctggggtagggtcctgaaggatgagtaggagttcaccagataaagaagtgaatgatgggtctggggacaaaagtttccagaagtcatttgggacttgtacatgtgtcattttgtacaatttgagtatatctgttgatcacactcccagaaggggaatcactagcacaaaaatatgtagatgatggatttttaaagaaaaaaatggttgaacaattaaatgataaatgtcagtatatggaaactggaaaattacttaagtgaataaattataaaagtatggcaggaacagctaacccttcgatagtgcttactctgtgcaaggcactgttcttagacctttgtggccattaactcatttaattttcattaccctatgatgtaggcactattattatccccattgtgttagttacccatcaccgcataacaaattgtccccacatagagcagcttaaaacaacacacgtttgttgtcttaacagttctgcaggtcgggtatcagggtata

SEQ ID NO: 38943 - DNA, 1405 bp, Artificial sequence
  DNA replication origin
gcgcgctctaaggacagaacggcagctgccggtggacctcatccgctctctaagggagtcaggcttgacctgagccctgaaggaggagtagaggttaagtgagtggcaaaggaaccagtatgaacaaaagctctgtggcaggaggaactaaagaaggaagaactagcacagagggaagaaaactccaggctcagggaaagaatgacaaaaaataaggctgggtaggagggtgggaacctgattagaaaaggccactcactaactgagtgattttggacaagtcaccttatctctctgagcctcacttagctcatctgcaaaacagaaataaacacagtacctatcataaggttgttaaagggactgagtgagtccatatttgtgaaccacttaaaattgccttgtacctagtaggtgccataaatgtttggagacaacattagaactttatctgaagcacaatgagaagacttaaaggggtttgaatgtagatgatagggtgggtgtttagtagatgggagggtggatggacgcatgggtagatggataggtgggggaggttgaatgaatagaagtttggttgagtgatagaggtggctggctgggtagctggatgaccaggcgggtgggtgggagtggatgttgttttaatgaacagaagtgtcgctgggtggataaatggaagtacttgagtgaatggatgcgtggctggatgttaagatgggtggctgggcagctggaagcagctgagtgaatgcaggtgattggtgggtgaggggacgggtgagtggttgaaagggtatctgtatgtttgaatgggcatctgggtagttggacgggtggttgagtcgatgaatggatgggtgatgagctggttgagtaggtaaaaggatgaaaaattgggtaggttgcatggaatagataagtaaatctttgagtgaatgggtggttgttcaggtagatgttaggctgttgttcaggtggatgttcaggtgtgatgtgggactggaggtgggtgtgtgggtggaggggttgttcagtgagtgttagagaagttagtcaatgaaggaattgggtggatttggatggatgtttgggtggttgactgcgaggttgtgtggatagatggatgactggatgactgggtgggtaaacaggaagtggaatgggtaggggaatggagtggatgactggagagatggctgttcaggtggatattagaaaggttgggtgagtggtagggttaagtcagtggaagggctgggtgtaactgagtgatggatggatgggtgagtgaacaggagccaccagctcccgaagagcctccaattaacccctgaaggtgatgggggtaaaagaagcagaatcaggcttggagacagggcctcctaggttgccctgcccc

SEQ ID NO: 38944 - DNA, 932 bp, Artificial sequence
  DNA replication origin
gacgcggcgtcgctggcgcccgagctgaggtcgctcttaaggaagctgacacggctgcgctggctacccacggacgtgcgcgactctgcgcgccgcagcttgcccagcagcgcgccccgctggaagaggccgccgcccttgggcgcccgcgcggccgcctcggcattggccaggaggctgagcgcgaagccgccacgcgggatggcgggcgagggcagcgcggggccgtcggaggccggcgaggcgggagagtccggggccaccgtgccgttgctgtgctcgctgcgcagggacgacagcgacgtgcgcagcggcgagcgcaccaccacggccatcccgtagggcacgctctggcgtactccgtagccatggcgcatgccgttggtgaactggccttggtacgtccctgcgggcgaggagagggcgcgtcagtaggcggcacgacgggtccccgcgtgtgcacggtggcctgggagggcaagggcgggagtgggcaaggcggggtgggaccgagaggcgcaaggccgtctgagggtcagggtgcacagtgctatgagtgtttgagtctactcgagtgtgcaataacacgagtgggtgagccaggaggagcttgcacgatggtaggaatacgttggtgggaacatggcaaggtcacaagtcgtgaacggataagctagtgagttcgcatggtagtgcaaatgttggagagcatgggcttgtgtgtgtatttgtgcaagatcgtgcgtacaagacacttgtgggcgtgcatatcggtgtcttttgactatatgagatcatgaggtgggggcaggtggctcacgcctgtaatcccagcacttgggaaggtggaggcggatggatcgcttgagctcaggagttcaagaccaacctgggcaacatggtgaaacctctctctacaaaaaaattagtca

SEQ ID NO: 38945 - DNA, 1268 bp, Artificial sequence
  DNA replication origin
tggcaaggtcacaagtcgtgaacggataagctagtgagttcgcatggtagtgcaaatgttggagagcatgggcttgtgtgtgtatttgtgcaagatcgtgcgtacaagacacttgtgggcgtgcatatcggtgtcttttgactatatgagatcatgaggtgggggcaggtggctcacgcctgtaatcccagcacttgggaaggtggaggcggatggatcgcttgagctcaggagttcaagaccaacctgggcaacatggtgaaacctctctctacaaaaaaattagtcaggcgtggtggcatgcacctgtggtcccagctactagagaggctgaggtgggaggatcacctgagcccgggaggtcgaggctgcagtgagccatgattgtgccactgcactccagcctgggctacagactgagaccctgtcacacatacacacacacacacaaatcatgagtgtgcagggtagtgtgtgcacagtggggtgagtgcctgagatctcacggagttgacattatggatgtgtatgaggttctgagtgtgcaaggctatcagagtgccaaagaacaaagtaatatgtagcactccaggctgagtgtgtgaggtgatgggcatcagtgaaaccgagacactgagaccgtatgaaaccatatggaggaaggctagtggtgtgtacaaggtgtcggcaacttaggccctgcatgtacacaagtccatgagctcctgggattaagatgccttatgttagcagccatccaagtcttatgtgtgtggagaggcagcagggagtagtggttcagagcacaaactccagagccaggctccctgggtccagatcctgcctctgcccttactagctgtgtgaccttgggcaactgacttaacctccctgtaccttagcttccttatctgccagaggtaataactgcctcttacctcctagggtttttttttgaggtttaaatgagttaatgtctccgaaaaactctgaaagcaaagatatgtgtgtgatactgtgattctacaaagttgtgctcacgtgtgaggtcacctgagttgtatgacaagctgatacacagctgccaaaataacttcatccttcacccccatcctgacatgtagttctccccagggctcatccaaaaaccttctcctattctctctagatgactgcacatctagtgtttttaaactgccatttatgtcctgctgacctccccaaatatatccccaacccctccctctcccttcggtagctccagatgt

SEQ ID NO: 38946 - DNA, 1138 bp, Artificial sequence
  DNA replication origin
tactcactttttttctcagttattttagccaagagcaaatgagcgttaggcataaccttaagagctagagaagagcatgtttgtaattataaaaggctcattatgctcctctgcatccccagatccccattcaaagaaagggctgtacaactaactccggacaacagatataattggcttgcctttcttcattaatattaaatttgtgggagacagtcttggcgttttcactgcagtgaactcgtgaagttgaacaatctccaaagagatgaaactttaaaaagcctattcgaagttaaagtcaaatcacaccaggcaatttaactttgcctcggattttccacaaccttacaaaaattacaaagttcttctaagttcctccatcaaaaggccaaattcctggttttttctttcaacaaaatggatgcgtcacaatcttatttacatcttgccgttttaaccaagacctccttgaatcccaagcctaggtctacacttccaggcccctgagaagacctaagaacgatcaagaagggatgcgcgggtaagcgttgtcatcacaacattaaagatttcgaaactcccagaccaccagaaagcgtagagtatggggaagaaaaccaaacccagcaactctaagaggcaaactagaccgggaggaaacaatcggcccccaggacaaaaagcacattcacacctctccgtgcaacccactcatccctttatactcgcagcgctgcagccaaagcacaaagttctttcttttcacccagagtctgtgcctgtcgcggttaaacatgaacggaggaaaattcctagtcagaacccagaggggtaggacggggcttggagtgtggggacaacgccaagcagggagctgtccaggggcactgcccgcccggggtctccagctgtgaagttgcgctcctcgggagattcctggggtcagaacgagaggctggagtcggagcgaggcacaagggatgcgggagaagaaaggagtggggccgaagaggtagccaaagagaatggggctccgaggcgagagagaaaggactggaaggggcaaagggcggccaaggagggcgaaaaggggaagctgccgctgggcgggagacggcggaggagcgagacgggg

SEQ ID NO: 38947 - DNA, 1601 bp, Artificial sequence
  DNA replication origin
ggtcgatgggactgggcgccgtggagtagggggcggcgctcatcggggaggctcgggccgcacaggagcccatggaggaggtgggaggctcaggcatggcagggctgcaggtcccgagccctgctccgcgggaaggcagctaaggcccggtgagaaatcgagcgcagcgccggtgggctggcactgctgggggacccagtacaccctccgcagccgctggcctgggtgctaagcctcttattgcccgggtccggcagggccggccggctgttccgagtgcggggcccgccaagcccacgccctcccggaactccagctagcccgcaagcgccgcgcgcagcccaggttcccgctcgctcctctcggtccacacctccctgcaagctgagggagccggctcccgccttagccagcccagaaaggggctcccacagtgcagcggtgggctgaagggctcctcaagtgccgccaaagtgggagcccaggcagaggaggcgccgagagcgagcaagggctgtgaggactgccagcacgctgtcacctctcactagtagtaggccaggcgcggtggctcatgcctgtaatcccagcactgtgggaggccgaggtgggcagatcacctgagatcaggagtttgagaccagcctggccaatatggtgaagccctgtctctactaaaaatacaaaaattagccgggcgtggtgccgtgcgcctgtaatcccaactacttgggaggctgaggcaggagaatcacttgaacccaggaggcagaggtggcagtgagccgagatcgtgccgctgcactccagcctgagaaatagagtgagactccctctcaaaaacaaaacgaaacaaaacaaaaaacacttaaaatgtgtagacccagtgatttcaatctagggatttgggctttagaaatgcttcaagaagtgagcaaagctaaggacgaaggtttcattacagctgtctgtaagagtgaaagattatcaagaacctaaatgcccatcggttatagcaactccattttagtgataaatgcagtcactgcaaagaataagtgatctcaccaccacaaagaaggcgaggaggaataaaaagaataagtggtatatgtctagtgtagaacctggaggtagaaagccacaggctcatgttggctataactcacagccgtgtgttcttgaccaagtcaatgtctctgagcatcagtttctgaagcatgtggtggggttaatagtgcctcaacttactcagcattcactgccccaacagctgaggagcaccaggtataccaggctcagtactaggcacaggggatgcaccattaactcagagagacacagacctgccctcagcaggtctacagtctagctgggcatagacagtgaaaggagagtccccaaagtgtgctgagggtcaaaagcagggtgttttccgaatctaccctgacactgtcaccagctcaggcagagatggtttatataaagcatttagaaaagcaaaggaatggagagattatcatggactgcgttagtttaaatccttactctgtcacactctggctgttccttaacaagttccttgacctctctgggccaca

SEQ ID NO: 38948 - DNA, 797 bp, Artificial sequence
  DNA replication origin
gagctatgattgcaccactgcagtccagcctgggcaacaaaatgagaccccatctcgaaaaaaaaaaagaaaaagaattagagcttgtctcttccaatgccttcgttctctcactgcacaaatattcattgagtacctactgtgaaccaggccctgttctggtggctgggactacagcagtgaactagagggatggagttttggccttctgaagctttccttctcagagagagacagatagtaaaggaagtaacaaataattctacaataagtgacttgaagaaaaataaagcatggggggcagggccagggtgggagtcatgttgtgttagacagggtggctggagagggtgtctgaaaggcgacatttgtgcagaggcaggagtgaaatgaagatgctgctgcgctgtgcaggaaagggaaccccaggcagtgaccacagcagcctacaagcgtgcggatgcgtccaggtggggaggcgggttttcgcggacagagtgtgtagggggaagccggtaaaaggtgcgatccgagaggagaggaagggccctggggacttgtgaggttggaaggcactggttttgagcagcaggcgacatgacttgaacggatccctctgtctctgagaggaacacagactgcaggcgcaaggcagaagcagagcccaggaggaggctgatctaatccaggagagacagcgggcctgggagcagggagggagcagcaggtctgtttgtcaggatcacgacagcactggggtgtgaggggaagccaaggaaggtggccaggcttgatgc

SEQ ID NO: 38949 - DNA, 967 bp, Artificial sequence
  DNA replication origin
tcagggagagtccgttttcggctgtttattatatttgtagccattggtcgacctcattcgaaagtttcttaaaaaaaaaatcccttcttgtttgggggccagaaaataactcaaaactgtgcagaaaatttatttgtgtgtgtgactcttctggggccagagaggattgacttctttgtgcgtcagttttatcgtctgcaaaatgggaatcatggtagcacctgtctgatgacgttattacaaggtaaatttatatttaaaattcgtggaggtaagccctcaatacatgggagcttttattattactactactacaaggaggaccatcactgagcatttattgtgagccacggcccgggctgatagccagggtaaaaaagtgaacgagagacatcgtgtcctgagggaactccacagttttccggaggagacagactcgtaaacaagaattcacagtgattccggttatgattttggacatacaggggggctgtgaatgcacagagaaaacagttaacctggatttctggaggtgaggttagtgtggatgatcagggagagatgccaaaagaaggtgacttccaaaatgagacatgaaggctgtctttatgttggccagaagatgaggctggtggagtgtaccttgctgtgggtagataaagcaggtagagaaagtaggtagagaaaagccttggggagagagtgcagacttcttgggaatctgcaaggatttcaggctagctggagagcagattatgagagttggagggggtctggctagatggtgtttgagagacaagcaggtgctcctcctgaaagactgtaagtgtggaggagtttgggctttgtgttgggggcagtgggaagccatcaaagggttttaagccggaggtgtgtgtctttgatcagaggtatagtttcagaaagatcagttttttgtgtttctctcttggtcttatcattcctc

SEQ ID NO: 38950 - DNA, 1778 bp, Artificial sequence
  DNA replication origin
ggaaggcagcgcccagcgaggcggctggagcgcgcgcccacaggtgggtccggtcgggcgccgcggggccgtagttttcgggtcggcgggcgaggacgccgggtccagaattccaggaaatgcgcgatccaggccggcgggcggggcgggggctccggcgagagggcgggccccgggaacggcggcgggcggggcgggaggcggggcccggcccgttaagaagagcgtggccggccgcggccaccgctggccccagggaaagccgagcggccaccgagccggcagagacccaccgagcggcggcggagggagcagcgccggggcgcacgagggcaccatggcccagacgcccgccttcgacaagcccaaagtgagcgcgcgcgggggctccggggacgggggtccggcgcctgggcggcccgaggggcttagcggggcccagcccggggcgtccaaaccctgggaacgaacgggggctcctgcaggcgagttcttccttcggcttaggccgtggcttgcttgcgggctaatcagggacaatggggcagagaaggtccagaacccggaggcctccagagtctgcttctgcccctgacttgacccctctgggtctcagtttcgctgtctgtcaagtgggcatcctagcaccgctgagcgctgtgtgggcctgggcagggacttgaggtctctgaagctcagctgtatgatcaggcccgatgtctacgccggataggcacctagtgctgtgcccggcgcctactgagtgctcagtgaatggaagcagctttgtacgccagcgttatggtggtgagcgccaaggagctcaggtttgtggatgcgccccggggaagaaccgtgagccctgccagaaaggggagggaggggagcagagcaccccccttcccccgcgcgggaagaacaggagctaggtaggccctgggtttggggccctagcagggttcactcgaggccaagccatggccactggccccaggggagaatccccttgtttctccgcccaccagctgtggcgtcttgggactgttggggtcagggagggtctggacccccttggcctgtcgcagagtccgagaggaggggcccaggagtctgccaagcagggtgagtcagccagtagggtgtgagagtggttggggaaggagtcagctgcagtcagcctcaacttacccttctaagaaataggtgtgagtggcccaggaggttggctcacgcctgtaatcccagcactttgtgaggctgaggcgggaggatcatttgagtccaggagtttgagactagcctggacaacaaaactagaccccgtctctccaaaaaataaaaaaagttaggggaagtgtgtgtggtggtgcactcccgtagtcccagctactcaggaggctgaggcgggaggatcgcttgagcccaggaggttgaggctgcagtgaggtgtgatggtgccactgcacttcagcctgggagacagagcgagaccctgtctcaaaaaaaagagaagaaaaagaaaagaaaagaaataggtgtgaatgatgatgacagctatcacaaaagtgccggtgagaatccagtgagtgtgcatgtgtcagtgagggagacaggctgtggagagcccacctaccttctgaggagggtgaggcctggcccccactactgatgcccccagcccagggaaaatgctcagctactccccgtcagaagctggaagcactgaggtgctgtacaagccctcctacccccacccctgcctccttcacgtcttactg

SEQ ID NO: 38951 - DNA, 719 bp, Artificial sequence
  DNA replication origin
tcggtggccgctcggctttccctggggccagcggtggccgcggccggccacgctcttcttaacgggccgggccccgcctcccgccccgcccgccgccgttcccggggcccgccctctcgccggagcccccgccccgcccgccggcctggatcgcgcatttcctggaattctggacccggcgtcctcgcccgccgacccgaaaactacggccccgcggcgcccgaccggacccacctgtgggcgcgcgctccagccgcctcgctgggcgctgccttccccccggctcctccagcaactttcaagcgtccccctgcagtctgggcgctgctgtgcgccaggcccaagctagaagcggggaccccgggagcatcgcaagcctcgagcggcgtgccttccaccggatagacggacgctcgtcgcagaaacacacaccataattgtatagttaaggaactttcgaggggggccagccgtggcctgcagaacctgcaggagttcatcaggggtgggtgggggtggagaggacattctacgtgagagactccagggagctgggagtgaaaggaggcgaggaaggctggagctcggagggagggagaacacagacagtcccctcctgggcattcacctttaagaaacccgcccaggcgcagccagagacctgtgcagaatgttcacaccagcgctattccgaataacaggaacattggaaacaccct

SEQ ID NO: 38952 - DNA, 1346 bp, Artificial sequence
  DNA replication origin
ggcaggaaaccatgtaatctcgcctagccatacctggggaatctgcctgatagttccattgggggtcctctcggggaactgctctactgccttcctggaggtcaggttcatgaagccggcggttatcagcgtgagattgggctagagaaaaaactctttcccgttcatctggggagagggtagaagtcaggatgacatttcagtcactccaggttaaactgtaggacagagttagatatcgggattcctgtatatatttagtggggtctgatgagaaagagcctaaatgctggctgatttgggaaaggtctgatagagaaaaaggcacatgtaccctgactatgccttcagctccagccacctctctaagaggaaattgttgggcaggtgggggagagctagccgcagaacgaaactgaaaaccagactgggtgtggggagggcgggtaatagaagggttataggatgtgggagcagaggctgaagaagagttggaggctgattcagcctggtggggagcgagctgaggaggagcagtctgggaagaaggtgagacgtcagatggttcagtagaaaaggaagattcacaagactcagcgacgcttggggttgggactgaagggacaggtgggagggaaagaaggaggatttgggacgagtcgcattgggaacagagactagggagggaacgaagtgtgaaaaatgcctggacgtaagacacctcagaccatttgcccatttttcaacaaaaattatctaggtcttgtaggacggagaaatgaaaagtgccattttctggccatttagaaccattgttagtttgtattggggccaagtggtgttgcagaagaaaataagatgcttagattttaggtcaggtgagagttgaagaggttttaagttcttgagaacataggctaagggagaagaaggaggaatggagggtggaagtttgcccatagtgaaggaggcaagtttaaagagaagggtagagatatggagaagggggtggggagcagccctgggctgcaatgtgggtgagcagccaaagcaggcgtccccgcaattgacttgccaccaagggaatgtgggtgaatgaccaaagcaggcgtccctgcggtgatcggacaccaatggaatgtgggtgaataatcaggcaggcgtccccgcagtgattaaatggcaagggaagactgtcttcctgagtctgtgaccggccctggagttttgggttcacggataaaatgtgtctcctttgtctctactggagaggaaaaagaactggaattggaaggacagagagattgaagggtagcaagagaggctggagaagagagtgaaaagac

SEQ ID NO: 38953 - DNA, 1432 bp, Artificial sequence
  DNA replication origin
gtagtggcaccagcacgctgcttccagcccactgagcttcatcctgcttctcgggagaagaaggggtccaggccctctctaccaggtactggggcccaattctgcctgggaactgagtcggacaggcactgggttggacatccctacaggcccgggcgtctgctcacttgtgatatctgtaacagtggctcacacttctaaacaaatcctcagggccaagctcagctctccggctccacatctactggttcatttaatcctcacacccactgtattagttccctgttgccactgcaataagttattacaaacttagtggcttaaggcaaatgtattatcttctagttctgtagggtggagggctacacaggtctcactgggctcaaatcaaggtattggcaggactgagttcctttctagcggcttccatatggaagtatgtcctcctctgggacctggagggcctaggcggcaggctgggcctcaggggcttaacatacgtcagcgacttaatacaacagaagctcaaaactggggctcctgattgggggttgggggacaaccttgcaatgtgtcattcagccccaggtttttcccaccttgtgggctccctctcttctaaagactttagttctctgcattcagccgtctggtgggggaaagagatggagcacgtgtagggcagggttttatgggccaggcctggaagtggcatatgtcacttctgcccatgttccatgagctaaagcttggtcacatagaccctgctaagtgcaagaaaggctgggcaatgtggccagctgggcgcccaactccacctccccggtgcatcccggatcccctcatttctctccatcttcacacatttggactacactagccttcgaactggcctccactcctagccaccatcccttttccccatgacagccaggggctctttaaaaaatatgaatcagatcattgtggtggtgttgcgtgtgtgtttgtttgcctgtgtttgtaatacagcctttccatggctttcaataaacccacataagggcttgtaagaccctgtgtgaagttgcctctttgccttccttctgctcccccaaagtatctgccccccagttctctgggctccagcgacaccggctcctctgctattctggctgccaagtcatgctcagttctgttttaagcaccaccttagatggtggggttcaccttccccaagaaactatcccttttccttctttctcactcctgtcttaaattagtttcttgtttgttagctggccctcctcactaggatatcacttttacttacaacaggaatgttgtttgcaccagtaggtgcttggtaaatatttgtcagaggattgactgactgaatgaaagaaggaaggaaggagagaaggaagggaagaagagatgaagggacgaaggg

SEQ ID NO: 38954 - DNA, 662 bp, Artificial sequence
  DNA replication origin
gctccagcgacaccggctcctctgctattctggctgccaagtcatgctcagttctgttttaagcaccaccttagatggtggggttcaccttccccaagaaactatcccttttccttctttctcactcctgtcttaaattagtttcttgtttgttagctggccctcctcactaggatatcacttttacttacaacaggaatgttgtttgcaccagtaggtgcttggtaaatatttgtcagaggattgactgactgaatgaaagaaggaaggaaggagagaaggaagggaagaagagatgaagggacgaagggaggaagggagggacggagggaggaagggagggacggagggaggaagggagggacggagggaggaaggatgggagggaagaagggagggagggatggggaaaggagtgaaaggaaggaaggaaggaaaggagggagggagggaggaagggaggggaggggggaggggagggagggaaaaaggaaggaaggaaggacggaaggaaggacggaagactggcacgaggtcacaacatgagttagtggcgggaacaggacttctgcaggcccggggtttgggcctttgcttcagatctcactattcacagacacatgaaccccgggcaggcgagtgggaggcggacaggggagcgg

SEQ ID NO: 38955 - DNA, 1150 bp, Artificial sequence
  DNA replication origin
gaggatgtagaggaagctgaaggccacgtaggggagcttcctctgcagcgcctcgccgctctgcagtgccacgaagtcgccgaagccgatggtggtgagggtgatgaagcagtagtagtaggcgtggaagaaggtccagccctcgaagtgcgagaaggcgacggccccgagggccagggtggcggcacacgccagcagcccggccaccaccaggttctccgtggacacgcacgtccaccgcaggcccaggcagcacttggccgccaacaggaggcgccgcaccaccgcgttcagccgttcgcccaggctctggaaagtgaccagcgtcagcgggatgcccaggagcgcgtagaacatgcagaagaccttgccggagtccgtacccggcgcggcgtggccgtactctatgcagggagagcggaggggagggctgtgagcgcccagctccagctgacaacagtcccgcccgcagcctgcctgcccggcgtgtccctccccgtccccggggctggaagggcatctccaaatactagtcctaactaggtcattcatcaccccaaacttcagacaacccaagtgtccctcgactggggaatggataaacaacctgtggggcatccaaacaccaatttttttcagcaactgaatgaactcctgtaacttgcggcaaccaaggatggatctcaaatgtctaagctgagtagaggaagacgagctcgaaagcctacagaccgcatggttccctataaatgacactctggaaatgacaaaactgtggcaacagagaacagatctgtggttgcttgccagtagctggggttgggggcaggcttaactacagaaggcatggtagaattttgggggttgatggcaatgttccgtcttgaccgtggctgcagttacgcggcaggtgttcatctgtcaggagtgtacacaggaaaatggtgagttctactgtatgtaaattatgccttgatgaaaaaaaagcaaaactttccccactttccagctacaccccgagctgcttccccagtcagcatgtcctctccacatgccttttctcctgactacctccccctccactgctcagcctgcccgcactgaacaccttttggttctgattgtctggcgtggcgattcttactgggtc

SEQ ID NO: 38956 - DNA, 1729 bp, Artificial sequence
  DNA replication origin
caaggtgtttgacccatgacacacagcatgactttgaagaaaaactaaaccgctcctgcctctgatgctcctacaaacccatgctcctgcccagcctggctcttgagatccaagtggactgctgaccactctactgtgttggggagccccctacttcttcccaccttgccttgtccagaataataatacaacctccctcagctacatgaaggcagaagttaaacctctgagcctcagttgtttttttctgtaaaatggtgattataaaaatggtaaaatgtctctgcagtaatcatctttacccttacccccatccccacctccaggtcaatagaaagacaggtctattggggatctgcctcacctatccccattcattcaccagtcaacaaattcttctggagaaagggcaggaagacatgcccaccacttcatcccatgatggaaccttggtggccaggttgatcagacaagggtccccaaagactaagtctaaacctgggcccaggaacttcctaaaaccgtaggctacattttgtggatggtgcatatatgcacttcgggagagatagtccatgttttcctcagagacttgaaagtgcccatgaaaccattttgctcctcaagcacatacactcctccagcacatacactcctctgttttgttcccccattgaattcaaagactctcggattttcaccttataaaacactgaactccaccctcacaccatacagagctttgcatcgatacgatgatccccatttcagagatgaggaaatccaggctcagaggtggcatgacttgcccaaggtcacagctaagaagtagagaatgaagactggaacctgattccgattcccaatctggcattctttggggaactctcacccaagccctctagctaccccacctgttggtggattcccttcctcaccccagaaccaaatccggagctctcatgttccttctgccgggtcccagggccctaaagagtaggtttccctacagctccccacccctcgctctggctgaggttgtgcgcaggcctgggaggaggaggttcaagccgctggctggtggccggcttcagcccaccaagaaaggcgactccagggacaagagcacctgaggtcaggggcacacaccagcgggcggacaagtgtagagttggcgccgccctacacctctctccgggaagagaggggaggaaaggccgtcacctggccggttcccctccgtctgccccaggcgtataagaagcaggagtctggagccccagcccatgagggaaggagaggagagataaatgggggcgctcaaggcctggggcgccgggcaggggtcttgggcagggatcctctggatgtggccaagacaaagatggagaggtaaggtctgcgcgccacctccaatggcggggggcgcgtcggagccccaggggtgggacggccaaagcccagggcttgaagagtgggcacattcaggagactcagggagggtggcaggtcggctccagggacgaggcaaggggcctccaataggcgcgggtgaggagggagatgggtcctggcgacccaaagggcccacctgcgggaaaggtgaatgcagacaatctcggggtccctgggggagaaggccagaaggtagcgcatcctggagaccctggggtcccgtgggtgcggaaggagaccctgggggcgccttcccaggggattgggggtgggg

SEQ ID NO: 38957 - DNA, 1468 bp, Artificial sequence
  DNA replication origin
acttctggctgacagccagcaaggaaacaggaacctcagtcctgcaaccacaaggaactgaatcctgccaacaacctgaatgatcttggaagcggattcttctccagagcctgcagagaagagcccagtctggccaatactttgtgaggccctaagcagagaacccagctcaggctgcccagacttctgacctacaggattgtaaatcactagattggtgtttttaagctgcttcatttgttatgcagcaatagaaaacaaacacctgtgttatcttacaggcagttcacaaccatccaaaatggaaggctcctgtccccattgtacagatgaggaacaggacccatgggataaagagttttgccataggccacccagaaagacagcaccacagctgagattcaaactctgggctgtctctttctgaggcctgaactgtttccatgtcgccagatggcttcataaagaggtgtgcgagcagctgagaaggttgtttgacatctggggcctgattaggtgggcagggaccctcacgtcccaggtcacatgcagggaatggaacacgggtttccgattcgctcgtctctgtcctggggctgtgagtgtctgagcccgtgtgtgtctgaggactgcgggtcgccgagggtgataatgggagagtctgtgagtgtgagcctgccaagtgtgtctcagtgtacctgagtctgagggtgtcagtcaatccgtcgggatgcacccacactgggagggatggagtctgtgtggctgtgtcttggcgtgtgtgtgctactctagtgtgtctgagggtgaaggtgtgtgcatctggccgtgtcagtcagagtgtttgacagtgctgagatgatcacagggggaggcgacacagagtgtgtgctgggtctgggcttgtgtgttcatctgagtgtatgaatgtgtgtatgaattctggggtgtctttggtaagtgtgaatgcatgagactgtgtatgcctacctgaacttcgtggggttttgtggcatctgagagtctccccgtgagggaggccgggcaccagggatgtcctgcctacctccctgagtgtgtttgcaggtctctgcgtgagtctgcgtgtgtccgtggacgtgtctgtccccgcatctgtgagggggtgggtctgtgggtgtatctgtccgggtgtctgcggggcatgttgcagagtgaatgtgtaggtgtgggtgcctgtttgagcttctctgtgggtgcaggtgtgaagccgagggtctctgtgtgggaggccgagtgccgacccgcctgggcgggaccctttgagcgcatcccctccgagcgcgccagtgtctctgggagaggcctgtctgggtgagggactggacgccggcctctccgcaagtcggccggctgagggtgggggccgaggcggggtcgggaacagccctcggaccagggcccagacaacctcgcccggcgcctgcct

SEQ ID NO: 38958 - DNA, 1194 bp, Artificial sequence
  DNA replication origin
cttacggcacagtacggagttgcaccccgcccggccggcaggacctcaggcggcccgagcctctccaagaggtaaagggcccggccccggaaacagggaggggccgctgcgaggtctggcctcgccgccggcggccgcgcggagcgaaagaggcagcgcgccgctaccccacggggcccacccactgggccgccgtcgtcgcagcagccagagaggggcttcgagtttgggcccccgggggccccggtcggaccccgcgccgcactcaccgtgggagggctgcagggaacaaagacccttccgagcgaagctccgagcgagatgacctcttccttcctaagcccactactcaggcggcggcagcggtgcctgcagtggctgcagcggcggcggcggcggcgactaccccggctccggaatcggcggcggcggtggcggtagctccacttccgctccgatcgccacttccgctccggtcctggccgcgccccgccccaaaccgtgttctcattgggcaagcgaggcacggggttgccacggccccacgggaggggcgcagacggaagggaggaggaagaagagcgaaaggcagggttgcaggggccggggcagggcggatggccgggggagggacccaggaggaggtgggcggagaagaaggaaatggggcgggggagcgggaaaaggaggtgggaggagagagggcggagctgggggtggtcaagatacgggctgtgtgggaataaggaggactaggagtgtggtctggatggggattgccctttctgctgggactggaaacgcgccagggccagtcccggagattcgaggtttagcagttccccctccaccccgaaagtaatcctcactgggtcggaggccgatgtcagtcctcttactgtgtgctttggtaatgctggagccagggaagaacagaaattgctcatccctcaatgttcatttaatcctttcaatccttcagggtacttaccttttccttctttggtagactgaagaggccacgtgaagtgccaggaatccaatgcacaaacgtctttttaaaaaacctgtgtagggtcgagcgcagtggttcgcgcctgtaatctcagcactttgggaagctgaggtgagaggattgcttgaggccgggagttgtaggctgcagtgagctatggtcatgccactgcactccaa

SEQ ID NO: 38959 - DNA, 1405 bp, Artificial sequence
  DNA replication origin
gcttgcccaatgagaacacggtttggggcggggcgcggccaggaccggagcggaagtggcgatcggagcggaagtggagctaccgccaccgccgccgccgattccggagccggggtagtcgccgccgccgccgccgctgcagccactgcaggcaccgctgccgccgcctgagtagtgggcttaggaaggaagaggtcatctcgctcggagcttcgctcggaagggtctttgttccctgcagccctcccacggtgagtgcggcgcggggtccgaccggggcccccgggggcccaaactcgaagcccctctctggctgctgcgacgacggcggcccagtgggtgggccccgtggggtagcggcgcgctgcctctttcgctccgcgcggccgccggcggcgaggccagacctcgcagcggcccctccctgtttccggggccgggccctttacctcttggagaggctcgggccgcctgaggtcctgccggccgggcggggtgcaactccgtactgtgccgtaagggacagcggagccggggatcccggaccctccctcactatctgcttcgggccccacgcgacccctccctgcgtcttggtcggcaagaacgtccccttcagccctgtcacctctgctccgtgctttctggtttccagaaattaaaatttaatcaaacgcggatgagttttctagccccagtccccgtgtttggctcctcctggatgagtaaggggtttaaccttgggagacagcagtgggggaaccccctcccattttgcagtaaaaccatttcatcatccttcactggttatggagcctggcaggacccaagattccctaggaagggaattgggtttgaatcaagaaaatctgtttgttggagccggttactgagtcaggccggatccccaggaaaaaatatcagggggtgagaatcggagtattttctcacagtatttaccgtcatttaatgccagattcttttgtgtctttaccccaaattcccccatattgtgtgttagcacgtttttcggtctgaaatttgcccggtggcttcctggtcggggggtggggagcggagggaagaagaggtgggaaggtgagtgcatctttgccgcaaatggagaactcccatataatggggttttcagaggtggcagccttggtaagcaatttgccaacctttctgtaaaatacatgtttcttgtcgttgccttcattgcatttctctttggtaaggctagatagcatcaggtcctgattttgcttgccctgtgtgggagatggaatttggcaagatgatgctatgaacataaaatcagcctcgggaaccaaaagagaaaggtgaagcacttataagaatatgaaaattgtctgcatttctcattctgtcagttcatgtgaag

SEQ ID NO: 38960 - DNA, 1173 bp, Artificial sequence
  DNA replication origin
ctttttccgcctcccagggcggggtcagaggtgtccccacctgtagcttttagatccccaagtgctcgcaggtggggggtgggcccaggagggatcccgggggaggggcgtccgagcgcgcccacgattggtgcgcagggacgcgggggcggtaaagggaaggggcgggcccgcgcccaggaaggagggcttccgcccgggtgagcgcggggctgctgggtgacccggctcctgcttgccccgcagccccggccccctgcccaccatgaacgccagcggttctggctacccgcttgcctcgctttacgtgggcgatctgcaccccgacgtgaccgaggccatgctctatgagaagttctctcccgccggccccatcctgtccatccgcgtgtgccgcgatgtagccacccggcgctcgctgggctacgcctacatcaacttccagcagcccgcggacggtgagccccggggatggggcgggaggggaaggaccgacggacaagcaggcggacagacagaagccggaactgggccgcttgcgctttcatcttacactttgcagccggggaaactgaggctcaaagataacagggcgttggcagaggcctggcccctgagacgggaattggtaattagtgtggtttactgctattcctctacagaggagagagattagggtcgagtgaaaacagatacaggctttgtgggggtgggggtgggggtcaggcggaccagggatagaagcccagcagccgtgtgactctgggcaagttactcgaccattctgagcttcagatgcgtgtctggaaaatgggggtcctagctgccttatagagtgcttgtgaggatgagagattcaaagcacctggtgaggaagatgcccaaggcaacacagctggtgagcaggggaggcaggagaacccagccttgggctcaggcctttcccagcgcgacgtgagatccacactgggcgcctctacctgcacgggctctgaaaaaccgctgcctccaggccgcaaggccgctttctcagagctgatagcattgattagagcttgtccgatgagtttgcctgcacttctgttgagagtggagaggatgagtgagcttgggcaagccttcacgctctgcaccttttcatctgcaaaatggggctaaggcgtattctccaat

SEQ ID NO: 38961 - DNA, 724 bp, Artificial sequence
  DNA replication origin
ctctccagcctgggtgacatggagaccccgtgaaggaagggaggaagggaggaagggagggaagaaggaaggagccatgatcacgccattgctcaccagcctgggtgacatggagaccccacgaaggaaggaaggaaggaagggagggagggagggagggagggagggaagggaagggaagggaagggagggaagggagggaagggagggaagggaaggaagggaggaaggaaaaatgtaggtcttgcttaacgcagcatttcccaaacttgctggatcattaagagtctttttcagcacaacattcacgagcttctctcactgggaaatgccatttgactaacactatctctcccttttatagagagggaaacaaagacttcctaatgagtcctcggcagaagcaagttagaaacctccatttccctagaactctagtcttcatgctctgccttgctggggcaggggggaaggctgcggtgggagttgcgggcaggccgtcacctggggcatggcaggcaggaagtagctggagggctgctgaaaggagcccaggagggggttgctcagggtccgcatggtggagaggcgctgcatgtactggttggtcaagatggccttccgctcctctttgcgctgggccagtgccacgtagagtggcttggtgcccacgatgcgcccgttcatctctgtcacggcctttgtcgcctcttctggggaggaa

SEQ ID NO: 38962 - DNA, 1252 bp, Artificial sequence
  DNA replication origin
aatacctccaggcgttcctggggcagcgccgcctccccaaaatcacgcaaaacttggtttgctaagaattgtcagctcttctaaaggaggcgcttcacgcatctcagtctgtgaaatgggacccaggacccaggtagaggtgcgttctcggcctggggaccgagtattttgtgcgctccggtaacgcaggaagacagcgccactgacactctagagaccagcgggcaccgcctggaggcgccttcaccacttggcggttccgggtccgcgccccaccgcgccacaagactcacgcccgaaccacgtgatcagggccgtggctccgccccgctcccgcgccgcgcgccgcttccggtaggggcggaaagcggaagtgtgggagggtctgcggggcgggctcaggaggtccgcgggaggatggagcagtgagcgggtctgggcggctgctggcagcgccatggagacggtacagctgaggaacccgccgcgccggtgaggggccactggctaagaggacgggcatggggtcaggggaagaaaaggcgggaactggttgaggggatacacctgtgtgggagtccccggagctaagcgacccagccgatggggcacctgctgagtgaggggggggacgtctggtgggtgagggtccggctgaggggagcatctgctaaggaggttagacttgggaccggttagagggagcactcgctgtggtgagactgtgctgaggaacgtggggacaagttagggagagtacctgctgaggccgggccactcgggggaacgctatccaagcagggactcacggaggtgggggcgaatgctgaagcagggtgagaatctgtgagggatctctttaagggggtggatcgagaactggccaagaggaaggccgggtggactttctaagggtctgaagtcccacttgaggggtgcggtggggggatctgtggaggggaaaagctttgcgcctaaggctgaaagcatgcgaggaaaggttgagggtctagcaagggaggggatggtggagggtagcatttcagaggatgctgttggtggtgtccccactgtaggatggcatcttttattactgatgttcagtgtcttcctaatggtcttcacatcctcctcagctcttcagaacctgacattgggaggtaggtaaggaaataagaggatattttcgagatggggagactgaggtccagagtagttgggaagtgtttccttctttactccgggtcactga

SEQ ID NO: 38963 - DNA, 1222 bp, Artificial sequence
  DNA replication origin
gccccgacaccgggatccgctggcggcgaagcgacgaggcgctgcgcgtgaacgtgggtggcgtgcggcggcagctgagcgcgcgcgccctggcgcgcttcccgggcacgcggctgggccgcctgcaggccgcggcgtcggaggagcaggcgcggcgcctgtgcgacgactacgacgaggcggcgcgcgaattctacttcgaccggcacccgggcttcttcctgagcctgctgcacttctaccgcactggccacctgcacgtgctcgacgagctgtgcgtcttcgcctttggccaggaggccgactactggggcctaggcgagaacgcgcttgccgcgtgctgccgcgcgcgctacctggagaggcggctgacccagccgcacgcctgggacgaggacagcgacacgccgagcagcgtggacccgtgccccgacgagatctccgacgtgcagcgagaactggcgcgctatggcgcggcgcgctgtggccgcctgcgccgccgcctctggctgaccatggagaacccgggctactcgctgccgagcaagctcttcagctgcgtctccatcagcgtggtgctcgcctccatcgccgccatgtgcatccacagcctgcccgagtaccaggcccgcgaggcggcggccgccgtggctgcggtggccgcgggccgcagcccggaaggcgtgcgcgacgacccggtgctgcgacgcctcgagtacttctgcatcgcctggttcagcttcgaggtgtcgtcgcgcctcctgctggcgcccagtacgcgcaacttcttctgccacccgctcaacctcatcgacattgtgtctgtgctgcccttctatctcacgctgctggctggtgtggcactgggcgaccagggcggcaaggagttcggccacctgggcaaggtggtgcaggtgttccgcctcatgcgcatcttccgcgtactcaagttggcgcgccattccaccgggctgcgctcgctgggagccacgctcaaggtacggcctctgaggccaggttggagctggggtgggcgggtgtagccatccggcaggttagcaggtgaacttacaagcctgccgagtccaggcttaacgttcaactgagatgccgtcctttgtgccaggcacagggctgcacaccaggtgtacgtttcacatgcagtgtgactatcccaacagccctgtgaagaagggcttaccgttatctctttttcctgggg

SEQ ID NO: 38964 - DNA, 1472 bp, Artificial sequence
  DNA replication origin
tgcacgtcggagatctcgtcggggcacgggtccacgctgctcggcgtgtcgctgtcctcgtcccaggcgtgcggctgggtcagccgcctctccaggtagcgcgcgcggcagcacgcggcaagcgcgttctcgcctaggccccagtagtcggcctcctggccaaaggcgaagacgcacagctcgtcgagcacgtgcaggtggccagtgcggtagaagtgcagcaggctcaggaagaagcccgggtgccggtcgaagtagaattcgcgcgccgcctcgtcgtagtcgtcgcacaggcgccgcgcctgctcctccgacgccgcggcctgcaggcggcccagccgcgtgcccgggaagcgcgccagggcgcgcgcgctcagctgccgccgcacgccacccacgttcacgcgcagcgcctcgtcgcttcgccgccagcggatcccggtgtcggggcccgggaactcgctcacaaaggtttcagtgctcctccctgcggacaccagaagggcgcgctgaggagttcccgggcttcccttcctggaagaccaggttaaaatcccctcctccatccaaccagccaaggggtgttggaggctgtgtgtgaagcatctggtatgcaggaggcgctcagtagatgtcaggtgccctctggactcagagtcaggcctggctttgactatccttcatccccatcatttgactttggccaaatcactgacccaccccacccccatttcatttttctcctttggaaagtaaatgctgagatctacctggaaggatatgaaagcgatggaatcgcaggatgtcctggcacctagtgggtgctcacataggatgtctccttttccaggacaaacttggatttatttacaccaaaggtctactgtgggatcttgggcccgccagccctctgaacctgtttcttctgcaaaatgaggatagtaacacttacctcctaggggtgttggcagcaccactttagaccggaggttctcatagtgtgttccccggaccagcagcatcagcatcacctgggaatttgtcaaagatgcaaattctcagcctgccatcgatttactgaatcgggaactctaagggtggggtctagcactttgtgttctaacaagattggaaagtgattcggctacatagtcaagtttgagagctcctgctttagattatgtaaagcatctgtagagtcagccagacctgaccttgaatcttgactctcttgtgtcaccttaggcaagtaacatcacctctctgagcctctgtgaaatggaaataaaaatattcacctcaaagtgtggttatgaagattaaatgacctagtgtctttcttgggcttggctcacagaaggaatttaataaattattcactggtgtcactatcttctggagtcaggcaaacctgggtttatctccacccctgacgcacctggggccttgaggaagctatttgtcctccaggt

SEQ ID NO: 38965 - DNA, 860 bp, Artificial sequence
  DNA replication origin
cctgaaaacagggagaaagagggcagaaagcacactgaactgtgggctcccaccagggacttatgtgaccccaggcaatacctttctttcttaggcctgtaaagtgatggaggtgtgcttttactgccaaaggcccttccagactcattggtctgatgttggggcaatggagagccaaagaaggttcaggagcagtgagattgcaggacagggatagctgtcatccaaacagctcttgttatctgctgctagcttgtagcctgggttgcaggtgcagtggaacatggcccaggcattgacacattggtgctggcaaccatgtcccccctcagcacactggtccttccctgaggacacacaggactagaatcagtagggaacagatgggcagaagcctccaacaagagagagctggatggggatggggtcagaggcaggcatcaccctcaaatggctttcagaaggaaatgactaatttgagaagggccgtaccaagtgagagggcttagggaaagaataaggcttaaggagcccctgtgagtaggctcagaagaggagacactcaattagacacgtcagtgggctgggacaggactacacaggggcaggagtgggtaggaaggtggagaggtgctaagtcgaggtgggcggaataaactcaaaacagatcagaacagatcttgcagcatttgtgggaggagctaagatgataatgggagaagtcatccccatgtgggagggccacgactctttggagcagccgatccctcttagctttgagaatcactggttccgtgtgtgcagggggttggtgctggaatttgacattaagcctgtggtaagctgtggcgggtagggca

SEQ ID NO: 38966 - DNA, 1612 bp, Artificial sequence
  DNA replication origin
gaggggacagcgcaagaccgcaccctcgaaagccaggccagacaggcagcagccacagccaggaccgctccaccccttggggctctcctcagggaagtgccttctaagcttccaatgaattccggctgtggagtgtggctgccccggtctccccagtctcccgctgtagctgaattccagcctggcccgcagctagccctgtctgcagctccaagcgtggtaggagcagggggtgctgggtttgccccccctcaggaggaaggggggatccctccctgccagtgggaggggttgcagcctgcacttcccctccccacccgccagccctgggttaaatgcggccgttgcctctgtgtgctccagctgcctggcagtccccacctagggcacgctgccacgccgccgttacctggtccaagtgcccgggaggctccgcctgtcggcttcgctctgcagctgcatctctgatctgtcctgcaggctcaggtgagtcaaaggattgggaggcactgaggggtctgcaggggagtaggcatcaagccaggtcaggcgagtgtattttagcagagacgctgcctagggtgccctatctgatttgcagtgcccttccccacttctgcagggtcctttccaaatcgagcccccaccctcaaagccatcaaaataggatcatcccttttctactctcatccctccaggaaccccctgaaatgtccctaagggacttttgagaatttatttacaggcctctcctcccttgctgctccactccctcaacctcacctcagggcatctctgaatctttctttttttaatgcaaggattaactcctcagaggaatcccaggttctagtatcagtcctgccacgacatcgccatgtacccttcagcaagacactaccctctctggacctagttcctttctttgtagaatgaggggtttggaaaggtgatgaactttgaggcatttgctattttgactttctaggattcctggggtggaggcagggtgccaggtgagaagttggctcagaccaagaatgggatgaggggaaccttaaccaagatttaggggcccagaggcatctccgggtaggaaagtatgggaggtggcagaggccccttgtgccttagccctcatgctgtccagggatgttggctttgcctgtggcccaagcttgacaagggttccccgccctcccacttccaccagcgctgccacatcttgcttggtcaccctcccacgacgggccctgccagaggatttatgttcttctaccaggcctgggaggggaaaagggagaagaatccgggatgagaaggtcgcctggagtgagaagcaggcactggcctcgctcagaataggcgcattcacggaattggggggcgggggcggagctgctgttgggttaggggcagctggccctctctgccaagaaacagcaacagaaaaatggctaacacagcttcagcatggggcgcggcggtggggtaggagctggaaggaaatgaggtttagtgaattctaggcgccagggggcctcaagagagagaaggggaaccaggagccctaggttctaatcctgcttttgcagttcggcgggctgcctcc

SEQ ID NO: 38967 - DNA, 1025 bp, Artificial sequence
  DNA replication origin
gttctgcccagggctatcctgggaaagctttgttttgaaagggtcccgtggtcacctctgggcctggggtgcacccttgcttgggatggagagatagctagtagggtaacaaccccagggcagggacagggactcaggatgccagctgcctctgcaccctgttcctcctctagaaaacgtccaaaaggtaggctctctgctccatcagacttgtggttcttttctttctgtgcaggtcccctcttttgtgtgttggtgcgagggttgggggaggcacacttggggaggtggctcatacagaccaaactctgccttggataggattgattttaatgcagctgtagaatccctgatcctcaggactgcgtcctgctgggcctgtgggagaagtgactgggggggacagttaaggcggcaagacctcatcactgtccaggcacctgcccagccaccaaatctgtggaccagggagcaaacacaggcaaaggtactatgcctggctgcagtcagagagagtctcgggaggagcaggtctttgtgctctagggcaggacacagtgctctaggtgggaactggtgccccaggtgggaccgaattccccaggtgagacttagagagacccggtgctccaggtggatctaatattccaggaaggacctggtgctccagggtcctgatgccccaagagcttgccccctatgcctggatgtgtgaagctgtgtgttttctcttcaagaggggacacagatgcctggagggtaaatgtcccaaacttggctcctcggggcatgtaaaattgtgtgtgagaggcagggagagctgaagagagaaaaggacagaaggatagggacacgcacataggtctgtagactaagtactgagggggaagggagagagagagaggtttagagacagagtgagaagaaatgaagacagggagagccatacacgacggacacaaagacagcaccactcaggtcttgtcttcctgtatgtgtaaggacaagggagggagtgagccggg

SEQ ID NO: 38968 - DNA, 1080 bp, Artificial sequence
  DNA replication origin
tggatcattcattcgacaaacatccgcgagcaagtcaggaactaggagtcatccttgccacctccctctccctcgctgcctatattaaaatacacctccatttcctgtcgattctctttcctaaatatctttccagtccaccattccttccgtttgccccaccacctcccgcctgggctcctaatgcagtaaccttctatctggttttcttttctttttttttttttttttgagacggagtctcgctctgttgcccaggccggactgcggactgcaatggcgcaatctcggctcactgcaagctccgcttcctgggttcacgccattctcctgcctcagcctcccgagtagctgggactacaggcgcccgccaccgcacccggctaattttttgtatttttagtagagacggggtttcaccttgttagccaggatggtctcgatctcctgacctcgtgatccacccgcctcggcctcccaaagtgctgggattacaggcgtgagccaccgcgcccggccctatctggttttcttgtactcattctggcccggctacactccattccctgcattacaagtcagctgtcatttcagaacacaagtctggtgtgcccccctcgacccccccgccacgcggcgttgcctaaattcctccactgttagaataaaatctggacgctgatatctgagctaagtcttgaagacatgagttcaacaagcagaaaagagggagaagggcatgtgcagagggagggaagtgtgaacaaatcattgacacattcaggtttccctgtcaggggaccagcactctgtacactaaagcactgcctcttaacattattgggatctcaaaacaaccctgtgagataaatacagcatgcaattttcccactagtttacaagcatggaaactagtttgtgggaggcaacaaatgcaatggttaagagcacaggcaatacagtcagaccctcttgggttgtaaacctattgattcctctagccagctgggtaaacacttctctgatccttgatctcttacctactaaagaggaataattaatccctccctcttataagat

SEQ ID NO: 38969 - DNA, 1015 bp, Artificial sequence
  DNA replication origin
tagtctccgctcgctcggatgcacttgctgcgcccccgccccgcgcagacccgcggcgggcgcccgcgccggttctgcccacgcacacttgatgctctgcgccttttgggcagcgcccacgcaacgactacgcacccgaaccctgcctccggcacccttggccacactcgccacacttacacgcgcgcacttctccagaggacgcacgatgggaaagagagagttgggacccgcaggagggggcagggcactgacccggtgccgcccagcagggcaggtgcaaggcggcggaggacccctgccctgggactcgcccggctgcccctgattcctggctctgggactagacagagccgccgcccaacctaccaagcacactgggcggggtgggcgccgggccggccgggcgggtcagagctggaagggtgggccgctacgccgcgccccccgacgccggcaaggagccagcacctccacggtgctaagaggggcgctgcgctgctggccaggcgggggtggaggggcgaggcggcaactgcgagaggagaaacgtttgccctcttttcgcagcgtctcctggctcagaccagtgctagaagtgtccagtctagcagctcctggaccaagactccgtggccattcccttcctcctgccttccatccacccccttacggtcagagctccgaaggcagcgtggtgacgggtgcggggaggggagtggggggatctctctgagatacttctgccttggggtcactggatcattcattcgacaaacatccgcgagcaagtcaggaactaggagtcatccttgccacctccctctccctcgctgcctatattaaaatacacctccatttcctgtcgattctctttcctaaatatctttccagtccaccattccttccgtttgccccaccacctcccgcctgggctcctaatgcagtaaccttctatctggttttcttttctttttttttttttttttgagacggagtctcgctctgttgccca

SEQ ID NO: 38970 - DNA, 937 bp, Artificial sequence
  DNA replication origin
caaatacaagaccctgcttgtgaaggtgagctatttaggagactaccatctttcctttgaactccaacagctctttatgcgtccccctcctgggacacatctcactgacttatctccccattagtcagtgaggagcaattggaaaggcgggttctgggtccagttcagagcaggcctcctgacccctagggctgagaagctgagaccctgccagagcactgaggctatgggccagcccaggtcggtgcattcattcccattcgctcatctccttcccggcgttctgctctgagcccatcaccagaggcaagggagtttctagcttgaggatcagacgtcatcctccgcagactgccttccccacctcatctgcacccagcgtatcccagaccctggccagctccacgggcgccacagaggtggagagggacccaaccccgactggccaaggcagggccacggaagtctggggagaccgtgcggccgcgggctggcggcggaggagcgaggcgctgacgccgattcccgggaaaggctcttagagctgccgcccaggtcacaacgctaaaaatacccagggcccctggagcctgtgctccagcagcgaggagggggagggagaggccaaggtgggggagctgacgggggccaggggctctgggacaccccctctcttttcccctccccctaaccccaccgatctcacgagactgaaggagctgtcccccggggggccgcggagcccagagctggagaaagggagttgtttacgcgacctataggtactggaaagggggtgaagagatttgggggcaggaggctgccaggggccgggcaggagccagcgaaatggagaactccctctcggtctcagccccacccgcactggagccagcaagagggaaaaaattccctaaaaagggacacgaggcgtcgg

SEQ ID NO: 38971 - DNA, 1363 bp, Artificial sequence
  DNA replication origin
agggaattttttccctcttgctggctccagtgcgggtggggctgagaccgagagggagttctccatttcgctggctcctgcccggcccctggcagcctcctgcccccaaatctcttcaccccctttccagtacctataggtcgcgtaaacaactccctttctccagctctgggctccgcggccccccgggggacagctccttcagtctcgtgagatcggtggggttagggggaggggaaaagagagggggtgtcccagagcccctggcccccgtcagctcccccaccttggcctctccctccccctcctcgctgctggagcacaggctccaggggccctgggtatttttagcgttgtgacctgggcggcagctctaagagcctttcccgggaatcggcgtcagcgcctcgctcctccgccgccagcccgcggccgcacggtctccccagacttccgtggccctgccttggccagtcggggttgggtccctctccacctctgtggcgcccgtggagctggccagggtctgggatacgctgggtgcagatgaggtggggaaggcagtctgcggaggatgacgtctgatcctcaagctagaaactcccttgcctctggtgatgggctcagagcagaacgccgggaaggagatgagcgaatgggaatgaatgcaccgacctgggctggcccatagcctcagtgctctggcagggtctcagcttctcagccctaggggtcaggaggcctgctctgaactggacccagaacccgcctttccaattgctcctcactgactaatggggagataagtcagtgagatgtgtcccaggagggggacgcataaagagctgttggagttcaaaggaaagatggtagtctcctaaatagctcaccttcacaagcagggtcttgtatttgaggcaggtaggttggttatgccattttcagatggggagactaagaccagaaaggtgatttccttaggggcagagcctagtctggaagtcaggcctgtgacttcagagcaagggtttggggtagatggcacatgcgtgtgtacgtgtttgtgtgggtggagagaaaaggaggggcgcgggaggagttgctttagcctttgtctgggttttgaaggatgggaaggggtgggctgcagcactggaggaagggaaccctccaccctgagatctctgtctctatcctatcctgtccctggccttctgaggcaagcggggccaattaaggggaaaacgtacctcctccatttgtgctgaaccaatccctccaacccctctcaggagggcatgatatggagagttgggcattggctgtgttccctgaatacagagtatctctcttgtggtgcctg

SEQ ID NO: 38972 - DNA, 1282 bp, Artificial sequence
  DNA replication origin
gtatttaccttacatacaggtaatgcgtgtataaacacatacgcaaataacacctctgaggcccgcaggtcactgccacctctaacggccccattggactgtgaattccagtgggcccagccattctccctcagccatgactggatccgcaggtcccaacacaagcctctcatccagcaggcgctcaacaaacactcaagtaacccatcaggcccagtttttggagaagcctgggactcaccttgagggaaaggatgtcctctgcgcggatgacgaactcgtcctgctcacggaaaatgccctctccgccactctcgtcagccttctagtccgtctctccacacacggccgccgtctcctgcttcttggccaggtgcagaggccaggtgtccggcagctcagcgtcctcgggggatggggggcgggctcccctggaggggcagccggtggggcagcggctggcgggggtggcagtggaggcgaaggcatagctggtggaggtggcagcggtggtggcggtggtgagctggacgtgggggccaccagcgggggtggtgagggcagggctggctgtggcggcggagcgggtgggagaggctgaggagtcggggctggaggtggagtgggtggagatttcttctccagcagagggggctctttctgtattttgtaaatttttctttctgtatttttctgtcataaaaaggggtaccttaggatgaagcacaactccagcctgggcaacacagcaaaaaactccatctcaaaaagaagaaagagagaaagagaaaaaaagaaagaaaagagaaagacagtggttagaaagaaaagagaaagacagtgggtcagaggtccccctcagtaacatccctcttggttagaaatggatttggcactatgaaatgttaactgctattctctggattaatctgccttgcactgtttgctgatggctacaggtgactggattaggcatgtacaggatcttggaacatggggaacttttttctccccagagggggcaacttgagagctgatgggactgctggaaaagatccctttgtgactgacaagtacctgcctgaacttttgattcagtgttgctgcaatgggtgggtattcctctggtctccctgagctccccgcttccccaccctgcctcagaccaggcttctctctcttactctctctttctctccttttcttttcctatcgtttctgttacttgagactacctgctcttccatcttgcccagagaccacatgttgaaattccgggtcg

SEQ ID NO: 38973 - DNA, 941 bp, Artificial sequence
  DNA replication origin
aaatgaggagcccctccgcccggcaaccacaccgtctgggaagtgaggagcgtctccacccggccagccgccccacccgggagggaggtgggggggtcagccccccgcccggccagccaccccgtccgggaaggaggtgggggggtcagcgccccgcctggccagctgccccgtctgggaggtgaggggcgcctctgcccagccgcccctactgggaagcgagaagcccctctgcccggccagccgccctgtccgggagggaggtgggggggtcagccccccgcccggccatccgccccgtccgggaggtgaggggcgtctccgcccggccgcccctactgggaagtgaggagcccctctgcccggccatccgccccgtccgggagggaggtgggggggtcagccccccacccgaccagccaccccgtccgggaggtgaggggcgcctctgcccggctgcccctactgggaagtgaggagcccctctgcccggccgccaccccgtctgggaggtgtacccaacagctcattgagaacgggccatgacgacaatggcggttttgtggaatagaaaggggggaaaggtggggaaaagattgagaaatcggatggttgccgtgtctgtgtagaaagaagtagacatgggaaacttttcattttgttctgtactaagaaaaattcttcggccttgggatcctgttgatctgtgaccttacccccaaccctgtgctctctgaaacatgtgctgtgtccactcagggttaaatggattaagggtggtgcaagatgtgctttgttaaacagatgcttaaaggcagcgtgctcattgagagtcatcaccactccctaatctcaagtacccagggacacaaacactgcggaaggccgcagggtcctctgcctaggaaaaccagagacctttgttcacttgtttatctgct

SEQ ID NO: 38974 - DNA, 2165 bp, Artificial sequence
  DNA replication origin
ttgtcgtcatggcccgttctcaatgagctgttgggtacacctcccagacggggtggcggccgggcagaggggctcctcacttcccagtaggggcagccgggcagaggcgcccctcacctcccggacggggtggctggtcgggtggggggctgacccccccacctccctcccggacggggcggatggccgggcagaggggctcctcacttcccagtaggggcggccgggcggagacgcccctcacctcccggacggggcggatggccgggcggggggctgacccccccacctccctcccggacagggcggctggccgggcagaggggcttctcgcttcccagtaggggcggctgggcagaggcgcccctcacctcccagacggggcagctggccaggcggggcgctgacccccccacctccttcccggacggggtggctggccgggcggggggctgacccccccacctccctcccgggtggggcggctggccgggtggagacgctcctcacttcccagacggtgtggttgccgggcggaggggctcctcatttctcagatgggacggttgccaggcggagggtctcctcacttctcagacggggcggccgggcagagacgctcctcacttcctagatggggtcgcggctgggcagaggcgctccccacatctcagatgatgggcggccgggcagagacactcctcacttcctagatgggatggcggccgggaagaggagctcctcacttcctagatgggatggcggctgggcagagacgctcctcactttccagactgggcagccaggcagaggggctcctcacatcccagatgataggcagccaggcaggacgctcctcacttcccagacggggtggcggccgggcagaggctgcaatctcggcactttgggaggccaaggcaggctgctgggaggtggaggttgtagcgagccgagatcacgccactgcactccagcctgggcaccattgagcactgagtgaacgagactccgtctgcaatcccggcacctcgggaggccgaggctggcagatcactcgcggttaggagctggagaccagcccggccaacacagtgaaaccccgtctccaccaaaaaaatacgaaaaccagtcaggcgtggcggcgcgcgcctgcaatcgcaggcactcggcaggccgaggcaggagaatcaggcagggaggttgcagtgagccgagatggcagcagtacagtccagcttcggctcggcatcagagggagaccgtggaaagagagggagagggagaccgtggggagaggggagaggggagagagaggagagaggagagaggagagaggagagatcactgtattctttggtgttctccttgtatttttttttgttattgccttacattaatgtgtgtgcatttgaagaaataaggacatttcagtctttgaagactagttttttctggggaagccctttatcagtcatccggaggttcgggagaggccatctggcatgatcccaggtcatacttgctgctagagtcctcaggcaggctggcctggttcctgggtcaggaggtgggtgggcctggtgcttgagtccacagggttgggcctgaaggctggatccactggggtgaatttgttgattgggtctgcaggaatggtgttggagccagggttcaagaaggcaggcctggaccttgtatcagtgaaggccagcctcatgcctgggtacacaggagctaacctggctctgggatggaccgtgagcctgaatctacagggtctggccaagttctgggagggggatggcacctgggactattgagatgggtctggagcctgagtacctcagggctgtcctggagcttatgtctgcaggggtgttcttggagcctcagcctatgggatccggcctagaactgagttctactggggtgggcctggaccctggatctgctatatcaggcctggactctgggttcactgggccttgggtgcacatggactggcctggagcctacagtcaacctggtactggggctagtgtggagtttggttcacaagggctggtctggagcctcaagatcatgggcactgacctggtgcctagagtcactggagctgtcctggagcctagagccaagaagcctggtccagctctggagtc

SEQ ID NO: 38975 - DNA, 1611 bp, Artificial sequence
  DNA replication origin
ccaaccccagcctacagaaaactggtcccttcctcctaccccgcagtcatccccaggccttggcccagcgggaaacatcccttgactgaaccgccactgaacacccacactgcacaatcgaggcgcagccctcccgagaggaagccccaacgacctccacctacaaggcctctaagtgtaactgtcctgggcgaggcgcggcggttcggttcccatggtaaccccgcagctccagcgtcgcgcttccgggcggacgagcagcgcgctccagtgacgtcacggcgccactttccggccggtgacagagtccagcggagttgtgggggccgggggcgccatgggagccactggcgacgccgagcagccgcggggacctagcggggccgagaggggcggcttggagctgggggatgcgggcgcagcggggcagctggttcttacggtgagggcgcccccggtgaggtctgggctcaggccgggcacggcctcggggctcctgggaccctggcccgcgggcgagagaacgcggaggctggagctgcagagggggttggcgttttcgcagcccgacgacctggatttaaattctggtgccgccctcctagctaggtgacgtgggccatctctgtcaaccccctgagtcccaggatcctcttctataaaatggaaatgattagtacctgtctcataaaacttgttgtgggatgggaagataaaggcgggtacaacgccccggacatcacctgacacagagttgaccctcggtaaatactgcttcccttcctcctgccgtgccagaaggcagggtcgggacttttaaggcaggaaacttcctcagttcctcttttgtggaggaggccttacaactatcgtcccaccccaaggcgggagagatggtgacggatctgagaagcagggatgtccaggtttaacttcatacccaccctccacctccaccccaccccagtgtcacaggccgcagtgacatttgttccgttggtccccacagaacccttggaacataatgataaagcaccggcaggtgcagcggaggggccgccgctcacagatgacaacaaggtaaggctggccctgcatggggcttatatcccagccactggcttgcatggcagatttgggatccccagtgcacaaggctatggagatctacagccggtagaaagagcacaggactgaggaagaggagactccgattctgtaactctgtgtgatcttgaactagtcaagtcacttccttctctgaactcacgtacaaaatggggaagggcacaggagatgggttgtggaataaacaatacctaagatccctcacattcactggctctgtggttgagggctctaaagaggtcagttagcatggagtttaagagaacaggctctggagtcagacaactgtgttctcatcaacagactctgatgagcccgttttctcaactataaagagggattaatagtatgcatgtcagggaagggagagagcacaaggtgggcctttgggatgctgatagtggtgaaatggatgttcactataattactcattaaagtgtatagacttttctgtataagtattatatttcataaaaacactt

SEQ ID NO: 38976 - DNA, 1351 bp, Artificial sequence
  DNA replication origin
acaagtttgaagttgttcttctggagaaccaagggcgctgacagagtgggggttgggaagaatggctttgaggtgaggaactgctctggggctgcctcttcagctcagactttctctgtgtctcctgcagacggaccagcaggctgaggccaggtcctacctcagcgaagagatgatcgctggtgagtgaggcgcggcaggctgggggctgggtggatgtatgctggggacatgttggcctctaggcagggtgggggttgggggggggtaggtgtgaggctgacagtccagcaggcctcacctctgccctctgccctccctcgcagagttcaaggctgcctttgacatgtttgatgctgatggtggtggggacatcagcgtcaaggagttgggcacggtgatgaggatgctgggccagacacccaccaaggaggagctggacgccatcatcgaggaggtggatgaggacggtgagcgggtgtccctcggaggcaggggatggtggggagaggcggcagcggctgggctcaggctcagtctgccacctgctgcccgcaggcagcggcaccatcgacttcgaggagttcttggtcatgatggtgcgccagatgaaagaggacgcgaaagggaagagcgaggaggagctggccgagtgcttccgcatcttcgacaggtgcgctgggggcccgggagccgagggaggggcttagcagtcagaacccggccggcagcgctggaagcttccccgtgttgggagtgcggaagcggggcgtcgagtgtggtggccagggcagctcgccccggccctgagccctgccctgtccctcggacctgaaggaatgcagacggctacatcgacccggaggagctggctgagattttcagggcctccggggagcacgtgacggacgaggagatcgaatctctgatgaaagacggcgacaagaacaacgacggccgcattgacttcgacggtgagggccaacgggagcttgggaagagcgggtgggagccccagaggacggcgggcactggtgcctggctccggtgcagtgtccttggccttgtgggctgggctgggcgtaacttcaccaagttccccatagtctcctgggggcaggtatagaagcgctccacgactctgtgcagtttatcaattaatgaccaggcaggggggcgtggtggctcaggactgtaaaatcctagaactttgggaggatgaggtgggaggattgcttgaggccaagagttcgagaccagcctgggcaacatagtgagaccctgtctttacaaaaaataaaataaaataaaaaggcaggtgtggtggcacacctgtggtcccagttgctcc

SEQ ID NO: 38977 - DNA, 1656 bp, Artificial sequence
  DNA replication origin
acctccatgggctgcggggggctgcacccggacccctggggcgcggcgcgcccctgaatgcaccgtgggacgcaggaggtagaggcgcacgaggcggcgcaagagacatcgggagggtcctgagcccctccggggaggaacgcggtcctaggctgagtgggttggggggaaagcgatgctggctgggtcccctggttcgcaagacctcggactgccagggggtggggcctcaccgcgcccctccctctccggttcgggccccgcccctcctcctcctgcgccgggctggggtacccctcctccgggatccggtacacagcgtcgcgcgctccccccagggtgccatggcctcccggctcctgcaccggctgcggcacgccttggccggcgacggccccggggaggcggcggccagtccagaggccgagcagtttccggagagctcagagctggaggacgacgacgccgagggcctgtcctcccgactcagcggcaccctcagcttcaccagcgccgaggacgacgaggacgacgaggacgaggacgacgaggaggctggccctgaccagctgcccctcggggatgggacgtcaggagaagacgcaggcgagtgcaggaggacggaggcgggaaccctggggctcgattaggcctccatcccagccgcgttcccagagcatccagggcgctaagttgatccagctgaaactcccacacttcttaaagcgcctgggccacctcttggctgtgtgaccttgagagagtcttaacccccctctgagccaagttttcccttgtgtcaagtgggagaactcactctcatctcagaattgctgcaggcattaaatgtacagggcttgggatccgaatggaaatgatgtattaacgatattttgagggtggagctattaatttagcccctactgtctgccaggcacggtgtttggctcctcggtgcctctctgtccctcagtttccatttctgtaaaaagggggtaagtcctgcctcacactgggaggatgagtgaggccacgtcagtggttgatgtcgaccctggccctaggcccattgatatgactggtcatgtgtctgcagaacggagccccccacctgatgggcagtggggcagtcagctcctggcgcggcagctgcaggatttctggaagaagtcccggaacaccttggcaccccagcggctgctcttcgaagtgaccagcgctaacgttgtcaaggacccgccctccaagtacgtggtgagtgagggtctagaacccctgggctgtgagtccagaagtatggctaggagcaagtagggaagaccccaacttcctgaggggtctatgtagttataaatggttaccttgtttacaaatggggaaactgaggtcagaaaggggatgtaacttgagcaaatcctcacacaagacttagtttccttgagactgactgaagtggggattaaggaccttcctcttaacctggttttgagactaagagaactggtgtgtgcacttccccacccagcccacaaggtttttgcaaattgtagcaagatgtgagatacagagagacagatgttatctgggtcaaacttgagatccaagttgcatgggctggtagttaaggaaataggctttcgatccagaccaatcttg

SEQ ID NO: 38978 - DNA, 1251 bp, Artificial sequence
  DNA replication origin
cctacaacttagccgtccacaacaggatcatctgatcgcgtgcgcccgggctacgatctgcgaggcccgcggaccttgacccggcattgaccgccaccgccccccaggtccgtagggaccaaagaaggggcgggaggaagactgtcacgtggcgccggagttcacgtgactcgtacacatgacttccagtccccgggcgcctcctggagagcaaggacgcgggggagcagaggtgagctggcaccggaggctggaggggatccccgagcccgggatcggtgcgcggcagaggaggctcgcgggtgggagctggcgctggggccggggcttccctcgcggaggcgccgccagcaactccccgggggctgctgcacggaagcgctgaggagcgagtcaacagcccctctgctgcctcccgtagatgatccgagccgcgccgccgccgctgttcctgctgctgctgctgctgctgctgctagtgtcctgggcgtcccgaggcgaggcagcccccgaccaggacgagatccagcgcctccccgggctggccaagcagccgtctttccgccagtactccggctacctcaaaggctccggctccaagcacctccactactggtctgccgccctgccttctgggcgggattgggagaagagatgacggatgagggatggggggtagttctgcagacccctgaggatgcctgggagccgggagggctggaaagggcccctccaactgcgccaaccctgccctgacccccctcccaggtttgtggagtcccagaaggatcccgagaacagccctgtggtgctttggctcaatgggggtcccggctgcagctcactagatgggctcctcacagagcatggccccttcctggtgagtggacagcagggggaaagcacagttcccaaagtaaaaggctggggaaagcgagagaggggctttgtgattttccaaaaagtttccttccttctaagcctcgggattttcctctatgccattggctttgctgcctgtacctctcagaggttttacccacatgtaaagtgcctctcatggtggccctttccctccacccagctggcccttgggacttactcagccatctctttcctcctcaggtccagccagatggtgtcaccctggagtacaacccctattcttggaatctggtatagctggagctgtgggtgtgtctgggcacttggatggggtggcatttagctaatttttccctcccctctaga

SEQ ID NO: 38979 - DNA, 1189 bp, Artificial sequence
  DNA replication origin
acttatggttggacgtccaaggaatgggtttaagcggctcagataactcctgcgaccccaccccacccccaggcccgctcgccatggccctcttcggggccctcttcctagcgctgctggcaggcgcacatgcagagttcccaggctgcaagatccgcgtcacctccaaggcgctggagctgggtaaggcgcaggggcagacagggacggacgggagcggacggggttggggtcgccccaacagtgggcacgggagctaagtaagggtttctctgctgcttcagtgaagcaggaggggctgcgctttctggagcaagagctggagactatcaccattccggacctgcggggcaaagaaggccacttctactacaacatctctgagtaagtggggggcggggcctcgcgatccggggcggggcctcggcggtggaggcggggcccgagaaatctcagggtctcgggagactggaggctgagtgggatggggcgtggccaaatcgatgaggcaagacttaagaaaccggatggggccgaaaagataaaggccaagccagtcatcataggcgggaccaggcagatgggcgtggccttgaaaatgtagagggggccaagaaggaagcaggaccagtggatgtgaggcgtggtcgaagaacaacagaaaggtggagtcaaggaacttcccaatagatgagagtggagtctcgggcacggggtggagttaatcggaggggtggagaaactgaaggctctaagtatggtttaggatgagggagggggaataaggaattgagatgtgagacggagcttaggtgatggaggcaaagtgaacggactctattaaaagaccgggtgtagcaaccccagggtgtgggaggggagggggtgcaagcaaacaagactttttttttttttttttctgagagggagtcttgttctgttgcccaggctagagtgcagtggcgcgatcttggctcactgcaacctccgcatcccgagttcaagcgattttcctgcctcagcctcccgagtagctaggactacaggcgcgtgccaccacggtctgctaagttttgtatttttggtagagacgggtttcactatgttggccagactggtctcgaactcctgacctcaagtgatccgccctcctcggcctcctaaagtgctgggattacaggcatgagcc

SEQ ID NO: 38980 - DNA, 1033 bp, Artificial sequence
  DNA replication origin
gcgcattcttggagggtggcttgcggtctcctaggcctcgcgcccggggaggagaggaggtggccgaccagaccgtgggctcccgggtctcccggctccctcaggtcctaaatctctcccattagagattctgcctggagcccccatgttagcgttctccttcatcggctctcctccccacgccggcttcagtgcaccacgcggctcggcgagggactgggaacgggatagggacgcgccccaactcactcagcggtggagctggggggcggcgcggtcacgtgggatggcgggcagctcaggggatccgggcgacggggtctggcgggcagggttgttccagccgcctttataaagccggcctccccgacccctcctcctctctgcagctctcccctcctcccttgggggctgggaggggacggggcgggacgctggcagccgggagagtggaaaaggctgcacagagccccgtgacaagcccggccgctgtctggacaagtgggagacccaagcccagggagagggaaggaaatgcaggagccggcccactcagccccaacaatcccactttgctgggaccttggttcaaattacaattatccatgtcttcctgcatgatcttgggcaagtcacttcacttgggtcactgaccctcagtttcttccttcagcgaaatgtgcacgatgataggaactacctcttgggcctttattacaaccaggtccaggcacaaagtcaaggaatattttttctttccctgccacccacaatcatctcgggacctccttgcctggctttgctatgggcccccctacctgtctctgtgtcaccacctggggaccttaaggtcccagagacctttcccacttgggaaagcaagactagacaagtgctgtcagcccaggaacataccacaccggctgaaatcagaaggaggtctgccatttatcgtggctggtggattgttttttctattttttttatttttattttttgagacggagtctcgctctgtcccccaggctggagt

SEQ ID NO: 38981 - DNA, 2002 bp, Artificial sequence
  DNA replication origin
tctctcgggctccgccccccgccccgccgcgcgctcccgcccccgggctgaggcgactcagagtcggagcccgacacaaaggcggtggcggcggcagcagcggaggggccctagagcccgctccgctggggctctccgggcccacctccctcacttcggccaccggcgcggccgcccacccgcgggtctaagatggcggcggcaacagagacagggcaagcggcagtcccgagcagaaagcgccggaggggccgccgccccccagcttcggatccccagaccctggcgcggctcgctgcgggaccatggcttcctgggactcttacctgcccggagcggactggaggggacgcggctacacgttctgctcgaccgcccgttttgccgcctccgcctcgccctccccagcgccgctgccgccatcttgtgtcccgggccgggactccgcgctgcgcatgcgctggtaccgcctctgagggacctcgccgcggccgcgccgccatcttgagtgtggcagggtcggctggctcctcgcacccagcttgctttcggccccctccccttcttcccatccgtccctgctgttccttgtggcgctgaggaaggggagacagctttgtaggcctgcgggtggactgaggaaggaatgaattcactggcacgtccccgcctcagtttccccctcgagcacacacgcaggagccggatgttcgcggtgggcggtgcgcggcggggttggactgagcgtgcgcactggggggcgtgggggctgtcttagaacctgcgggggtctcgggttctgccgccggcccaggggaggcatcgtggtgacgtaggctccggacgtagcaaggacctgggtcctggcacccgcgcggctctgcctcttccagccagtctctttccctctctgggcctttgtgctgcgtggtgtccaaatgttaagaagccctgccccatgcccgggctacatatacatcgaacccaagctgtaaatgctcttgagtagaagcaacttaaactagccttcgggggcaagtaatagagatggctttcggcagagttgggaaatcaactaaatgcattgtagggcctttccaacattgacatctgtggccattagttgcagttcaaagcctcactgagccctcaaaccagctacagcgggtagcctggcagggaactggcagctgtgaggtgctcctcatccggctccctgcaggattctttttggtaggagcctgcaggcgtccgagtggtagctccacccatctccggtctccccagcaagcatcccttccagtgctagcttgagaagaggaaaagcttgccacctgctgtcagaccggcgcttgtgtggagccaggggctgtaggtaccccggctgagtagcctctcagatgtccatggtcctggctgcacgccagcgtgggggcaggcaggcggacgctcaagaaaaacggaggcaccgatatgagtagtaattgagaacgagggttcatgatcctcatctgatttcaatccctgctcctccacccaaaatgtgtggccttgaaggagttaaccaatttaaattttagtttcctcagtggaagataataaatccgcctacctcataaaggtttggtgagaattaactcaggtgatgcatgtgaagtcctcagcgcaatacctggcgcttcctaagtgctgaatcggttagccgtgatcatctcacagtggcatgagcattgctccaagtagatttgagccctccagaaataagccagctctatataggcacagcagttctgccctcgcagagcttctcgttcagataagaggcctgatgggaaaccagactcctgggtcctgtctcagttctggaagggtggggggccagctttgatttatgcctgctgccctggcataattactaatattgcctcctttttcagaagtgccctgctttgggccgggcgtggtggctcaccccggtaatcccagcactttgggaggccga

SEQ ID NO: 38982 - DNA, 892 bp, Artificial sequence
  DNA replication origin
gggagggcgaggcggaggcggcaaaacgggcggtcgagcagaacgtgtagccgcgtcccctccagtccgctccgggcaggtaagagtcccaggaagccatggtcccgcagcgagccgcgccagggtctggggatccgaagctggggggcggcggcccctccggcgctttctgctcgggactgccgcttgccctgtctctgttgccgccgccatcttagacccgcgggtgggcggccgcgccggtggccgaagtgagggaggtgggcccggagagccccagcggagcgggctctagggcccctccgctgctgccgccgccaccgcctttgtgtcgggctccgactctgagtcgcctcagcccgggggcgggagcgcgcggcggggcggggggcggagcccgagagatgggccggcgcgcgcgcgcgcgccaaacagcccaccctcgctggggtagggggaggggaaggtgcgcgcgcgcgcgcgcgctggagctcgcctctcgccttcgtgcgccgtcgcgcctgcgtactttgttcgccctttgactcctccctactgggccggagaattctgattggtacattgcggagatggtcccgccccacgtgcctccaatcccggactcggactctggcttctggtgggtttttctggttgcgcagatagagttgtttatccttgagcagcggtaattctcaaactgcggtatgcgtgggggtcgggaagccacaggataaataaagacgttaacttaagagcagttatgtcttactgggagcgtacaatgctggactctacatataacggtcgagtgattccggtttataagccggaaagcagaagggcccggaatccgggtctgtccaacccaggggctggtacttcggccaca

SEQ ID NO: 38983 - DNA, 1359 bp, Artificial sequence
  DNA replication origin
cctggggaggggagagtcaaggaaggcttcctggaggatgtgaacccagtagcaagccaggcagagaagagggggaggggcatttcaggcagaggaagcagcaggagtgcacccattgaacagctggaattgcagcttagatcccagggctgctgtgtggcaccatgctggccctccaggataggacctgattggatttctccacatcggtgggtggtcactggggccctgggtggattgtaattggcgggtgagggggtggagctgacactctttggtcctctgtgtggcaggtcctgtgtgggtgtggagatggccaatgagaatcacggcagcccccgggaggaagcgtccctgctgagtcactccccaggtacctccaatcagagccagccctgttctccaaagccaatccgcctggttcaggacctcccaggtactgagggggagcagtagtggggtggtggggtaggaagggcaccctgggagcagtcctgaccctggctgggctccgtgcctgtttgcagaggagctggtgcatgcaggctgggagaagtgctggagccggagggagaatcgtccctactacttcaaccgattcaccaaccagtccctgtgggagatgcccgtgctggggcagcacgatgtgattgtgagtgccagcctagggtgggggggtctcagagtggcctctggcacctgggccttccccaaatgtaccctgagcagccgttcagtgcccagccctgtgctggcacctgcagatacaatgacaagcaagacagacacagcccctgccctcatggaacctacactcaaatggggtagactgacaagtaaacagatgattgcatggctgctgcacggtgggtgctgtgccgcgaggcaggaatgaacaaggcagacttgctccctacggtcgcagagcacccatgggctgccaggtgacagcaggattacacttgtggtccgtgtatgaggaatagtgttagaatacatctagatcctgacatactctggggaaggcaaggagatgggaaaagctctgagaatgagtgtttaaggtgagagagtgagtgagtgtggggaggaaaagaacattctaggatctgacatgtcagtacgacgggaagtacaggcatgggctgtctggtgggaacatgggcttttgggtccttctcagctggggcagcatttctttactgggcacagttgagacagttggcatcttcattttgcatgtgaagacactgaggttcaaagatggggaacgactggcacgagacctcacagtaataggcagagcaggacgcacacctgatgtgagttcagggccacactactcaccaccatgcattc

SEQ ID NO: 38984 - DNA, 891 bp, Artificial sequence
  DNA replication origin
ggcctcggagcgaccttccggaacactgaaaatgtgtctttcccggggccagcgggggaagtagttccggcctacaataggccgatgggttcctccgcagcggaggaaagaggatggcgacctcgtcgatgccggagtcagagaggaacgtggctacgaaagcctcgggtgagcttcgggtagagttaggcggccccaccgtaccctgccgtggagtgaggtcacactgcggggatacccggaggcgaggtcccaggccggcggggctgtccgaacagggccccggggtcccaggccctttagtcgctctcgcacttgcctgagcggaaacccggcgccaccacaagatggcgtcgggcctggagcacaggcagcgccggggacagccccaaatcgccaggccccgagaccgtcgctgtcagccgcctccgcaggggaaccgggggggagcgaaccactgacccagggggccagcgggctgtaccaccggccctgcaacccggggggacgcgggggccgaagggctgaaccactgggcccggatggggctcacagagcggaacgctccacgagaatcgtgggggcgagggaaagggtcaagattaccagccattgaccaccctcccgggaagggccttagcctgggaagcacagcttctccgtcaagtttttcccgagctcccctcgcaatacaccaggaagctccgccccgtcggagactcaatcttcgcatctgcaaaatgggcgcaggggtgcaaatgggtggccgtggttgccggggctggggagatggcccacttgttccagccacggtcacctctcttctcagagtgaagttcccagaccctacgccccgctgtcaggcagcccgccgatcagatggaggagaac

SEQ ID NO: 38985 - DNA, 857 bp, Artificial sequence
  DNA replication origin
ccctccagcttcatccccctccctccctttcatacagttcccacaagctctgcagtttgcaaaaccctacccctcccctgagggcctgcggtttcctgcgggtctggggtcttgcctgacttggcagtggagactgcgggcagtggagagaggaggaggtggtgtaagccctttctcatgctggtgctgccacacacacacacacacacacacacacacacacacacacacacacaccctgacccctgagtcagcacttgcctgtcaaggaggggtggggtcacaggagcgcctccttaaagcccccacaacagcagctgcagtcagacacctctgccctcaccatgagcctctggcagcccctggtcctggtgctcctggtgctgggctgctgctttgctgcccccagacagcgccagtccacccttgtgctcttccctggagacctgagaaccaatctcaccgacaggcagctggcagaggtgggcaaacacctagtctagagttggggagggctgtccgtgagggtgttgagtgtcccagagaggatgcagggcctcagaggagatgctttaggggtgtgttggtggtgatgggcgtatctgaagaacagaggtgtccagggttaggcagtggggggtcttgtggaggctttgagcagtgatggccagaaatgggcaatggggctttcctaggtgggaaatgggaaatggtttggggtgggggaggcattggagggttctggggtaagcataggctgggagtgaacaggggcaaaccttatgcagctgtggggtagaaatgggctagaggcatccaggggtgagaaggagctgaggatgtctaaggaggggaga

SEQ ID NO: 38986 - DNA, 668 bp, Artificial sequence
  DNA replication origin
gatggggattgaccgggcgggggagggaaagtaggtaactaaccagagaagaagaaaagcttcttggagagccgctcctcaaagaccgagtccagcttgcggggcagcgcgggccacttgtcggcgataaggaaggggccctgcggccggctccccctgccctcagagaatcgccagtacttcctgagaaagcgaggagggaaaggacgggctctaagccttggacacagggccagtgggcgggaagggacgggcagcccctccgcaaagccccctcccgcatccacacaaccccgcctcctcacccatccttgaacaaatacagctggttcccaatctccgcgatggcgtcgaagatgttcacgttgcaggcatcgtccaccggactcaaaggcacagtagtggccgtagaagggccagcagtggggggacctgtggggccagctgaggggggacctgtggggccagctgtggggcgctctgaggggtggacagtggggggtccggtggggcagaccgtcgggggagccgtgggctgcggtgtggtggtggttggaggccgtggctcaggttcagggcgaggacctaaaaagagacacggggtgagactcttcctattcctgcatacctctgtacccctagaacatctgctcccctaagcttctcag

SEQ ID NO: 38987 - DNA, 1350 bp, Artificial sequence
  DNA replication origin
gcactggggagcccagggcctcccagcgaagtggccagattcaggaacccttcgcacagcgggcactaggaccctgcgcggcgccgcgtctcgcggggggcgggcgggcggagggggttgggggatccgctctttctccctcctagagcctggttgcagccacttgtgcgatcccggaccttgccgcggccgcctggctcctttccgcgccatgagccgcaggttcacggtcacctcgctgccccccgcagggcccgccagaagccctgacccagagtcccgccggcattcggtcgcagacccccgccacctcccgggggaagacgtcaaaggtagaggccgcagggggcggggcctgccagggccgggcgggacgagggggaggggccggggcggaccgtctgttgaagggggcagggccaagaccgggggcggggaggggtcccagccctaggcctgagaggggaatggagccaggactaggaaaccaaggggccggggccgcggaacgcaaagtgtggagggggaggggccaaacgcgaggtgggcgtggccacgagggaaaggggtggggccagggaaggggtttggacggaggcgaagggggcgggtctggtgatggaaaggccggggtcaaggtggagagtaggccgtagggcactaaaggggcggggacatctcgagtagggagcgggaccagagtgaggaggtggaactagggaaaaagggggctgtgtgttgaagggggatggtcaggagcccctaaaggggaggcggcgggactaggttggtttggggtcaggaaagggcgggactagtagggaatgagttgggccaggaggatgggagtggggcctgggaggggggtggggtcgagggcgggaggaaaactgagtcagggttgccgaggcaggtgccaggtcagcgggtcctcggtgcctggcggatcctccaatcctctagctccctggaggcttagcggacagcgactggggatcccgggaaggagacgggaggcagggaagttagtatggatcctgggcagcgagattcagggaggatgccgtagggtcgctgatcccgactcttggggacccacttagctccttgtctgctcgagctccgtaagggttgggaggagccagctcaggcggggttgggggcgtcttcctcgcgggccctgtgcagggtcttgtaatggaagttacacgcagggcacagagtataggggaggggaaagatccttctggccttcggtggagaagtagcatcctgggcgcgtgcacagtctcccctcagggggcactcatcaggggtcctctccctggctctgaggccctcgggtctgga

SEQ ID NO: 38988 - DNA, 863 bp, Artificial sequence
  DNA replication origin
acacacacacacacacacacacacacacagcctctgccacagcacacagcattccaggctcatacacacctgcacacccaaagcttgggggctgtgtttcacttcgaccccagcgaagtagtgtgagtaccggcatctgagagtgtgaatgggaaaacagcaatcaccttgggacatgagagagggccgtcttattcctaagccaggggatgaggagcgagagaagagaaggcaagggtagagaagcaggatcccacagccaccctcctctcatcttatgagcattacacacctactaagtgccaggctctgggtctggaactcagaacacaaagataaaggagatggtccctgtccttgagatgttccaatggaggatacccataagtaaagaaaacgactgccatccaccgggacatgtgcactaagggtgcagtgggtgggccgaagaggaaactgaaaaggtttttggaaaaggttaaatgagctataacttacagaacgaataggagttttcctggctgatggaggtgggagaatgaatgtggacaagaacaccagaagcaaatgaggaaagagaatgacagacttaaggctttggcctttattttgcaagtgatggggggcttctgtggaggagggctagggaaggactggaggcagggaggccagtggagaggatgtggtcgtggccatgtgaggcttggagcagggcgatgatgacagaggggggaccgatgctgccagattcaggataagtttcagaggtgaatggccaagacgtggggatcagttggatttgctggaaagaaaaaaggaagggttgagaatggctccagaatttcttactttcaaatctggga

SEQ ID NO: 38989 - DNA, 1418 bp, Artificial sequence
  DNA replication origin
ctctcgttcgctgtagctctgtctcgctctccgctccacggaggaagaagctgcagtgcccgcccgcccggcgcacacacactcgcacacggacacacgctcacacccgcgcgcgccccctctcagcagcggcgctgctcacctcatcccgtatgcaggaggcgtgagccactggcggggttttggggggagagcgggagggagagagaagagaagatgaggggcgggcagagcccgactagtggcccccttgcacaaaaactgggggattgcgtgggtgggatgaagggggtgcttcgggggacagggcctcgcctcccttgagcagacgcagctccccccacccactctccgggcggggcccggcacgtgggcaggtgccatcccgcgccctaaaaataacggcagggaactaggtcgcggccgcggggaggcggccccgcagcggctgcttgactgggggtctggggtaacccccagggggaagataaagggcactgaagtggccgtggaggtgcgccatggaacatggggcccttgggaagcctctctgcaagactggagaggccagccctgaagtgggggaggagaaccagaccctctttcataccactgctcaagagattggagctggaggcatgtagagcccagggcccataattaagcaatgtgctacccccaggggcgttcaggtcactgggctgactgacccaatctgtcttaaaatgggtggggtagcgcctgagaagttccaaggaactctctcattgtgcttagactgacaagagtcccagcgtcccacccccaagacaagtccctggagcccacagccagggaccttctgactgcggactgatctagagataagacctggtgaggaggagcagaagaggcagcagtgagtttccagggagcactgactttccatcagggatggtgcagcctctagggaggacaggccggtcctgaggctggccagggacagagtgggggagggcggaatgaggccgcctgtcggtttgagaccagattttctcctggggcagaagtgtctaatcccctaatccaggattgctttctgaggcttccagagccgacatgctctctgtcctcctcccctcttcccttaggccaatcccccagaagcttgatcatcctgggacccctcagagcccctagagtccaggtttgagccagtggtgcagacatctcaggaagtggcatcagaggtttgaaagctttgagtctctagaagatctaaacatctgagggtgggagcagatcggggtaaacaatcttcacactggtactagctctctccctggctctctaagttccagaaaagttcttcggttgggaaaagatcagtcattgtatcttacacacagctttcatttcacagatgaaaaaactaaggc

SEQ ID NO: 38990 - DNA, 894 bp, Artificial sequence
  DNA replication origin
aaggcgggtagaggggcgcgggcgaggcggcgcagccatccccggaccaggggccgcgccgccaccatgctaaacaacctgacggactgcgaggacggcgatgggggagccaacccgggtaagctgtggtccgggggcggcgggggagggggcagcgaggagaggaggcagctctggggttagaggcggagcgggggccacctccttcagagaggaggctgggactgacccgggcggtgggcgccagttgcagcctggagctcagctccattggaatgctccgggcgctgtccaaggtgctggaatgcgccgcgcccgggggcagagctgcgggccgggggattatcgctgcccacggcttcgggctgacttgggttagctaaaccgaggaggcggtgggaaggggatagaagacctagaatgggctgatgtggagctcgacggcgggaggagggctcctttccccgacaggggaccccggcgtcctggcgcagagcaggcacccgtggagccggggggcgcagtctgctgcagtccctcgttctaagacttccatctggaagatgggggaagaggtggctgtgtgtgtgtgtgtgtgtgtgtgtgtgtgtgcgcgcgcgtgcgtatgtgtgtgtgtgcgtgtgtgtgtgtgtgtgtgtgtgtagggggtttggagccatatgacagccccccgtccgggctgtggtgtctccttaagacacccagattgtccccttggtgcaatctgggacccctcccccaaggcttcccaaggtccgacctcagactgaagcgtacttcctccatagattttcagctctactttgcagaatctctctctcgctttcccgtgggttcctattcaggacgggaagcaagatcaccctcctttct

SEQ ID NO: 38991 - DNA, 1180 bp, Artificial sequence
  DNA replication origin
gccggccgcgcgcccgcagccgcttatgtaacgcggcgcgcagcgcggagccagactccaggccggatccgggccaggagatgagggcaggggagagggcggctaggtaggctagttctgggtcccgcctttccagtagctgcctgggcgggacgccaggctcccgggacttgtcagccagggctgatttcgtcccctccctgaacgccaggcgcactggttgagggggatggggaatgagcttccgagttctcaaaggaccagaacagctaaggggaaactcgccctgattccccggagccaaggagtaagggtgatggcgggagcgccgagcggcgcgcgcgcgagaggcagggccagactgaggctgagccctccccgcccccgccccctgggagctctcaacccgaatcggctttcaattaagctgcggcggccagagctcccggggaggaaacaggcgagcggcgcaggctaagaagcctccccggggcctggggctgggcctgggggaatccctaggccaggtccgagagggagacggggcgtcagaccccaaggagaaagaagaccgggacacatccctgggctcttctttagtccagaagtgccctcttgctcgggtcatccccacctgcccgaggtcagcaaccagttccttcccgtacatccccaagaatctagaatcagagatgtcaggggctcttggcctgatggtcctctctcaagcccagaaggtccttagcacctcctactaccatctccaagcaccgcttggaggaggggggacttctctctctgggacccacagcacatgacccaggttctggccatttgagttccaggtcctggaccctatgtatagaaagaaggtctccagatgggtccgctgcactcagtgtctagaaactaacggagaggggatagaactgaagcgagttcctagttcaactcttgcctcacacacactgatgcctcttttctaggcctcctgagcccctgtggaaaccccaaggcctggtgaaaccttggcagagaaagcgggtgctgggaaatgggaccatacctggtgtctgagggaacagagagatgctctccatctgagtccccctctcagagtggaggcatctgaaggggatcccggatggaaagatccgcgtcgggatgcctggcgctgccg

SEQ ID NO: 38992 - DNA, 956 bp, Artificial sequence
  DNA replication origin
cgcgcgcgcgccgctcggcgctcccgccatcacccttactccttggctccggggaatcagggcgagtttccccttagctgttctggtcctttgagaactcggaagctcattccccatccccctcaaccagtgcgcctggcgttcagggaggggacgaaatcagccctggctgacaagtcccgggagcctggcgtcccgcccaggcagctactggaaaggcgggacccagaactagcctacctagccgccctctcccctgccctcatctcctggcccggatccggcctggagtctggctccgcgctgcgcgccgcgttacataagcggctgcgggcgcgcggccggctaggctcggcgctgcgctctcggcctgcgcggtcgccatggagaccggcgcggggccacctagttgcagggtctcgggccaggaagcccctattcctgtcccctgagcgccacccgcccccgcgaaggaggaggcgcttgggagggggtgtgaaaggcagaggggaggggttctcctgtctggttgtcctggccctaagaggggatgctgcggggaaatggacccagctccataggagacaggaccccaaaatcttgcggctggatatgcggctggagatgtgggatggggagccccggctgggtgggcaccaagtatgttaataataatcgcaattgtaatgatagcaatagccacactcgtggcgggcacacctaatatgcatgatttaatttaatcctagcaacagccctatgagttaagcttggttagtatccctttgcaaaggaggaaactgaggcgtagagaatttgtgacttgctgaaagtgacgacacagccagtgaagctgggactggaatgtcagtttccataactccagcccccttttttaaccgttaggaaacatcctttcacctcaggtcccctcagtctctagtccacaccatgat

SEQ ID NO: 38993 - DNA, 1301 bp, Artificial sequence
  DNA replication origin
taatcctagcaacagccctatgagttaagcttggttagtatccctttgcaaaggaggaaactgaggcgtagagaatttgtgacttgctgaaagtgacgacacagccagtgaagctgggactggaatgtcagtttccataactccagcccccttttttaaccgttaggaaacatcctttcacctcaggtcccctcagtctctagtccacaccatgatgtgctgagaacaggaggcatactatcagcattttaaaaggacctcttccttgtttctcctgttctctggccccagagagctcttctgagaccctggggtccagaagggagccctggagaacttagctccaaagacttttcctgagcacctattatgtgctgggaggtgggtctcttattcccaggaactcacatatgtgagaagaaagagctgacgattgcaccctatttgacaaccgggagtttctgccttgatggatgaggtggaggtggtggcagaagactgggtggtgggtttctttggagcaggcgaggcatcactcctcctggcccaatttttagtcaggaagagattggttttataacagagacaggccatgctctggctgggtgactgaggaaggtttcccggaggtagagaggaggatggggaagacgcagacggatggagatggggagaaagggatgtcagccatcgaggggacaggagaatctaggtgcctagggcctcaatttcacttggaatttgatcagcggggagtttctccagtgtccagagagatgtcaactgctggaattcagccccggaattgaggaagggtcatggctgaagccaaggaaatgtacctatggggcctcttatatctttctgaagggaccttcccccctggtgcccaagatactttctcctcgagtgatctcatctaggcacatggcttcacacgcatactacacatgtttacatagcttacccccatctctttctcctgcctagcctctttgctgcatgtatcctgattcgtatatccaggtggcttctgcatgtatccacttgagtgccctacagtgcctcaccctcagctaaattcagcatcttccccacctccaaactccttctcttctagtcttcccatttatcaaatagcaccatcatccaaccattcacccatgctagaaaccgcagacattatcctaggttcttcctctccccctccccaaacatctggcatggaaatatgccaataattctgtctgttgctctacattgctctggtcaggcacatcatcagcccttacctgggttac

SEQ ID NO: 38994 - DNA, 662 bp, Artificial sequence
  DNA replication origin
tgatggtgtgagttcccctagaccgggctgtcacctcccaggtcttgcccatgccctgccccatctccctcttgctttctaagtcccagcttcagcaacagccctgctggggctcagaggctgggtctccccaccttgtctaggaccctctccttcctgggcatgagcctctgcctggccctcatgttcatctgctcctggtattatgcactggtagccatgctcattgctggactcatctacaagtacattgagtaccgtgggtgagtgtggggagtggaggttggggtggctggggaaggctgaagggtggtgggaaggagagggaaggggtcatgagggattggggtggtgggggtgagatgaagcagggagtgggagaggatggggctggagtagagggagagggtgatatgggatgacattggaagatggggggtgggagcagaggctttgagaaatggacaggaatggtgagagaatggatttagaagtgattttccaaggaaacttagccaaggcttggttgagtctgttggcaggagtgatacacatgtcctttctgagcctgagagatggctctgccctggggtagctggtgcagtgtagatggttctccctgccccctcctggctttctgctctcatgtgatccacttcccg

SEQ ID NO: 38995 - DNA, 1667 bp, Artificial sequence
  DNA replication origin
ctggggttctggagaggaggtggggcaggcagatcagtggtgcagtagctatttggtctcaaatcatagcaatattttaacaactggtacagttccagaaagtgcatcctggctgaacatcatctctggtgatagctctttgcagggcatgggtggtgactcccagcagagctggcaccaacctatgtcactccctagatccagagtatcacagatgagtcacgaggctcaatccggagaaagaatccagccaacacgcggctccgcctgaacgtcccagaagagacggctggtgacagtgaagagaagccagaggaggaggtgtgcagcttgggtggtttggccccaaccagtgggagcagagcccttggcctccaaaggactcaactgccatcgcttcattcatccctcaggtgcagctgatccacgatcagagtgctcccagctgccccagcagctccccgtccccaggggaggagcctgagggggaaggggagacagatccggagaaggtgcatctcacctggaccaaggacaagtcggtggcagagaagaataagggccccagtcctgtctcctctgagggcatcaaggacttcttcagcatgaagccgtacgggcctgggggctaagggctgggggctggggtgagctaaagggtcttgctccccatggcagagcaagagagcagaaggcatcctggtctgtcagcctgcagacccagctcagacattgtcttggtttctccatctgaggacttagggggttgggccccattgctaagtctcagaattcccagttgcaggcagcggaaaggtgaagggtgtgggggctggcagagcaggactcagggcagatgaccatggcccaagcccccagtgtcttcctctttttctgactctgctctttttctttctctctttgcatctcttgtgtttcctgaagggagtgggagaacttgtaagtgcttcagcattttttcattctctctcctaggatggccagggtccctaccctcctcactctgttgtgaacccctaattggtgccacgacctctgggatctctgaatagcctagcctggagatgtttaggattggtggtcctaggcttgcaagaaccagtccccagcagcccagttcgggctggaagggcgactggctccaatcttctctacccccccggctcacgcggtctccactcctccttcctgccgcaggaaccagtccaacgtgcggcgcatgcacacggccgtgcggctgaacgaggtcatcgtgaagaaatcccgggacgccaagcttgttttgctcaacatgcctgggcctccccgcaaccgcaatggtgatgaaaactgtatcctggaattaaaattgggggaaagagggaggtggacgtcagggaatctgggtcctgtccctgggatggaagagctgagctgttcctgcctccggatcagcacctcggacagggacacgggcgcgagaggtcccctggcagccgagcgcgaccccaatttcgtcgggagggaaggagaccgggtctttctccttgaccggctctcagacatggagtttctcgaggtcctcacagagcacctggaccgggtgatgctggtccgcggcggcggccgcgaggtcatcaccatctactcctgagaaccaggacctg

SEQ ID NO: 38996 - DNA, 1079 bp, Artificial sequence
  DNA replication origin
agatgaggtgagacaagggtccaacttttcctggattcgcctcccagcggacgtgagcttccactgcggctgcagagacgcgagcaacctcttctcatcggctcttatgcaagttggggccaggataggggaggggtgctcctcaagaggaagaaaccgagaggcccgcgccccaccgaggaagccccgccccggtgccttcgctggggagcaggcgtctctcctcagtcggcttgtcgcctgctccccgtatcccatggctcctcgccaaagactgaaattgtggagctggagggcgccccctccccggagtttcctccctgggacaagtgagggaggagggggccgattctggtttaggggccggacccactgagaggccccagagccgcccgtgatgttcctcccccgtccccatctggcagctcctgtctcgcctgagggacccagccgccttctccgtgctctggggccgggcctcgctgcttagcagcggcctctagctccgtctcccggggacctgggcctgagggagggctggagtcgcacgcgctttgtccttagcgcctgtctgctctcctctaactaggacccagggcctttggcttccccagctcatccttggcccttccgctccaccagcctggtctgaggcgtgctctgtccttagagaaggcgcggtggccgggttcccttcccctagggcacattactaagggggtcaggcactgcatgctcgttccagcaccatctgggactgggtacagtacctccagccccagggccctgacctgcgcacctagcttgacatctcacgcacctcccagagctggcgccactgagtaatccggacctcaccacctcttttcctttgagcccaaggcagagctggagctggcgccacccagacagcgtcaggtgtggctggggtaggtttggaggtctgccagttacaccaagtcccctctgagattcgatcaggggactggatagattctttcaggtactcaatcaggaagctggaggtgttagacaccagccccctgcatccttcagtagacctccctctgaacaccaca

SEQ ID NO: 38997 - DNA, 1624 bp, Artificial sequence
  DNA replication origin
cgagcgactccaccgtttcgacagggggtgcgggatgtgcggctcaaccagagaagccttgaggactcctagtgaccgaccgttcgtgcacagacaggcggctgcgatgcgacgccgccgacctgcgtccaccacagagaaccgtaggccgcctcggccggccgggcctgggcctgacgggagccggaggcggccgcgccccgcaccgggcatgcgcagcaccgcgcgcacccggagaggagccgagaccgtggccgcgcgtcgagtgggccttcccgcctcagcctccccgtccggccaggccccccacaacggcctgcccgtcagccccacgcctcggctgacggccagcgcttcccggcactcaccgctaccagcgcggcgggctcccggccgctccttcgcctcaggcccgccgctgccgcctccgcgtcggcccacctgcccgccgtaggacaaaggcgccaccaaccgaccggcgcgggcacgaggcaatggcggccgggcggagagtggagatgggggcagagggcgcgcacgtagcggcaggcgcggcactgtcgcaagaccgcgcgtgtttacggcagggctgagttggggcgtcgatctccttggcaatgagggcccgggaagtggctctcgggcgggagttgagaacgcagggagttgcctagcaacagcgtcctaggctgaggatgggccccacggtggtcgcctcagcccccgccccagagtactttttttctgttttcagagcacattccctcctccctaactgtgggaacagaacattcaaatccccaaataccttgatttagtcttgcataaaactgaaagcaaaaaccccaaatccctatacacgtgtgtattggagaatatatatagtcctgtaacctccggaccacaaggaacaaagagagcagaaaggtggagaaaatgttgtatttaaatttacatttaaataggctctgtactctattagtttcactgacaagcggcaaaaggtttctggagatatagtcacaggttcttcttgagttatttattcttggaatattcgttcaacgtcaaaaatttcccggaatgtaactgttgaccgtgaagcctgtaaaatgttgtactgttcatttcatgtatagaatacatttgtcacagggaatgggatttgctcacacaatagtaaatgcactctattaatcacagccatagctatattaatcaggtactcttttattagtgttggaaacgcctcagactccatggggtctagttcttctccttgcgaatattgcctactaagaaaaaatggtgcctgcggaatttaaacactacaagaagccagatttctttgacatctacccctatgctcactccactcatttattcactgaatgtttattacatacctactatgtagccctatacttattatatgcctgcttgttaggcgctgttatgagcaaatgcagacccttttctgctatctttgagattacagtctggtgaaagcattagacgaataatcacacttgagtgtgtaattgcaaactgagataaacgctgtgatggaaagaaatagggattctcaatggttgtaactagaactttagtttactcacaggca

SEQ ID NO: 38998 - DNA, 930 bp, Artificial sequence
  DNA replication origin
aagatctatctgacagaaatcagatggcctccactgtagcagattttcaatttatctcctggtcaaactttggtgctcacctctgaagggttacaggcttttacaccaatcaggtaccccctgatttggaagggaacctcttatcccagaagacagtatcactcgtggttacaatagcattttgggcatcaggccgcacaggttcagtgagtctggccatgccacataatctctgtgggacaagcaaattaactggcctcaattgtctcatttgtaaaataggaatatagtacacatattacagtgtgtccagaattggtgggttcttggtctcactgacttcaagaatgaagccgcagaccctcatggtgagtgttacagttcttaaagacgtcgtgtccggagtttgttccttctgatgttcgcatgtgttcggagttttttccttctggggggttcgtgggctcgctggctcaggagtgaagctacaggccttccaggtgagtgttacagctcttaaggtggcacgtctggagttatttgtttctcccagtgggttcgtggtttcaatgacttcaggagtgaacctgcagaccttcccagtgagtgttgcagctcataaaagcagtgtggacccaaaaagcagtagcaagattgatagcaaagagcagaacaacacaactcccacagtgtggaaggcaacccgagcgggatgccactgctggttcaggcagcctgcttttattcgcttatctggccccacccacatcctgctgattggtccattttacagagagccgattggtctgttttacagacagctgattggtccgttttgacagggtgctgattggggcgtttacaatccctgagctggacacaaaagttctccacgtccccactagattagctggatacagagtgtccatt

SEQ ID NO: 38999 - DNA, 688 bp, Artificial sequence
  DNA replication origin
caggatgctgccccaggtcttggagcagagcttgggaatgcccttgggatttggagttcggtggcgggggtggggggctgttgcctaggtggcacgctggggagggtatgctgttgctgaatctaagcttgtattatttccacactggcaaaacgaattattttcagtagacaggaggatggggtgggggtatgggagtggaggacattgcggtgagaccaagagcactggctgccagggccagtcacttgggggaaagggcaggggctggcctttgccagaagacagagatggatggtctggatcccaggcttaggttacctaagggcagaccaagactcagctcctgcattgggggtggtggtggtggtgtcagaaatcactggagaagccaggagggggggcctaccccaccttgggtgaaggccaggaagtctgtggggcctctggaatactaatggcctccggcgggtcctgcaggatgcagcaggcaggctggagtctatttgtctctccattctcaacactgcagtttcctggagaggggtgatggggaccagggagtgaggacgaggcttggaccagggtcttcggctgaacaagagccaggctgcagtgggaaacacatgcgtgctggaactgggctctaccacttcctagctgtgtgacctcagacaaatcacttcat

SEQ ID NO: 39000 - DNA, 1218 bp, Artificial sequence
  DNA replication origin
gcgggggagcgggcgggggctcgggcgggggcgcgggcagccccccgcaggcccacctgccctccgagcgccactcgctgccgcaggggccgccgagccccgagccagacttctcagtgttcagggacttcatcagccgcaaggtggcactggcggacggggacctgtcggtgccgccctacgacgccttccagacctacgccttcgagggcgcggactcgccggccgcctcgctcagctccctgcacagcggctcgtcgggctccgagcaggacttcgcctatctcagcagctggggtccgcgcttccggcccctggccgcgctctacgccggccaccgcggggacgacgaggcccaggcctcctagcccctcgccctgccgtcggggcgcggctgctcacccgcccagcacacgccggggccccaggacaacgcgtttcccccgcggaccccctttcctgccctcccccaaccctcccttggcggctggacggaggggggacttgctaggagcggactcttccattcctcctcctctaggggtgcagctttggagcccagaggtgcgggattctgaccaacggcattaaaactgaggcgagaccgggcacggtgtggctctggggttagaatgggagatgggggtggcgttgcagagtcgggaaggggcgggtcactcaatcctggcctgggggagaatgctggagggagcacgccgctgagatgcccccaccccaggtttcccccatcagagttaagaggaaagaaggctgttcacttactaagcacctactgtgtgctgggacgctgtacagagaccagctcagtcgtcagagaaaccatgaggtggtgtcctgcacggaatagaaggggaaaggaccccagagaagtggctgtgacccgtccaagggcacctggccagtgaatggcagagcctctggcactgaccagctgcctggcctcgggcaagtcacttcacttctctggtcctcagtttcctcatctgtcaaatggggttaataacagaacctacctcgaagagttgtgaggctaaaaagggttcatatgtgtcaagtggttaggacagtgcctggcacatagtaggtgttcaataaatgctagcctttgttactattcttatctttgtggttcttagaagcccagtgtgtctgcctccaaggtctgagctctctcccttgctccagatgcccttcccc

SEQ ID NO: 39001 - DNA, 1175 bp, Artificial sequence
  DNA replication origin
cggcgtgtgctgggcgggtgagcagccgcgccccgacggcagggcgaggggctaggaggcctgggcctcgtcgtccccgcggtggccggcgtagagcgcggccaggggccggaagcgcggaccccagctgctgagataggcgaagtcctgctcggagcccgacgagccgctgtgcagggagctgagcgaggcggccggcgagtccgcgccctcgaaggcgtaggtctggaaggcgtcgtagggcggcaccgacaggtccccgtccgccagtgccaccttgcggctgatgaagtccctgaacactgagaagtctggctcggggctcggcggcccctgcggcagcgagtggcgctcggagggcaggtgggcctgcggggggctgcccgcgcccccgcccgagcccccgcccgctcccccgcccgcgctgccgcccccgtcgccgcccttgagctcgccgaagtcgtagaggctccgcagcgccgacatgtcgtaggcttcggtgtcctgctcgccgccgccttcgtcgttgtatttgatgacgttgtcccgcatgtcttcatcctcgtccgagctcaggtggctcttgtggtggcgcctgagggtgaggatcagcagcaccagcactgcgagggggacagagggggcaactgagggccaagcccctcccagggcattagaaggaccctctaccccatctcctcccgcctcccacccagcagagcgggcccagcctcaacattcctacagatttcctggatttctgttcaaaaagccattcttgcaatcagaactgagctgagtgtctggagaggtagtgagctacccatctcgggaggtatgcaaatcgaggctagattactctggggtggaggtggccaatgggagagcagtgttaaaggttttcctgggtgttgaggcctgaggtctcccttctcagccctatgaagagatacactctctgaggactctaggtgctgggggtctgtagcaggcagctgagaaacagaaggagctggaggagtgaaagatgtccttcaccctgacctctctttcaccctcaccctcctctgccacaccagaagtcttgagctcctactcaatcctttggttctcaggtcaaggcctgcaggaacccttccctgagagctgcaggccaggttccatgccttcccctg

SEQ ID NO: 39002 - DNA, 1622 bp, Artificial sequence
  DNA replication origin
aattattagctccattccaactgaggaaactgaggctcagaaaggttgagggctgcccatggtcacagcagctacccgtgcaagtgaaatgcacacccagttgcttcccgctcctcctcggtcgcaaggggtttctctgccccttgtgtgtgtccaaggcaggcggtccctctcttggagtggggttgggagaaaaggacatgggctccatttggcactggggcaccttcaatcagccctgccctgccccccgcaggtacgccattgaccgcgaatcagatttggaccagatcttcgatatcgatgcggacacaggcgccatcgtgactggcaaggggctggaccgcgagacggccggctggcacaacatcacagtgctggccatggaggcgggtgagctgggcgccacgccccctccaagggcaaatatggggcccaggagcaaaagctgaagggaggggccaagggctgggggcagggccaaggcagccctgtcagtcaaagcccacgggggaggggccaaaggttggggatggtgcgaagagaaagaaactagacaaagatctcacagcggtgaaggcgagggcaaaagctgatgggtgcgagcaaagatccagcagggttgcaagtcaagggagtagggctggttccaagtcaagggggtagggctggtctcaaactaggctttcttctctcatcattaattgagcatctgctacgtgcaagccctgttttaggggttggggatccagccttgaacatgacagaaaagcttctgtcctcatagggagaacaagactatcaacagagagaaagcacggacataatatgtcaggtgatgctaagtgctaagaagaaacaaggagagaaggaggctgggaaagggaactgggaggaggaggtgcgttgcttctcttaggggaacatctaagagatgaggaaaagacatttcaacaaagacctcaaaaggggagggagtcatgctgacatctgcaggaagagcattccaagcagggggaacagccagtgcaaagaggccctgcggtgtaatttgccaagcacgttggaggaacagcaaagaggccagtgtggttgatgaggggcagcgtggtcagccagagccactggagagtctttggactttactccaaatgaagttagagtcattggaggcatttggggagaggagggatgttctccatcagggtacctctggcagctgcattgagaagagcctggagcctgagagggaaacggggccttagctagaagctgaaagcaatagtgcttgggagataggaccatggcctggcccagggcagtagctacagaggaggggaggaggaggtgagaagtggctggctttgggatacaggctgaagatagagccagtggaatctgctcatgggctgatgtcccggggagagatggagaagggtcaaggatgactccagggtgtttggcctgagtttctggaagaatatgtgtgtgtgtgtgtgtgtgtgtgtgtgtgtgtgtgtgtgtgtgtctttttggtgcagctagggagaaatgtgagctgggagagaaagagagagagcctgagacatggcatccaggtaagtaaggctgtggaggtgagg

SEQ ID NO: 39003 - DNA, 833 bp, Artificial sequence
  DNA replication origin
ccagcaggcaatgcttctggggtcctcccctccccactctgggagactacaaaaaggcccctttcctcctgcctgtgggaggggccgggtggctgcgcaggggcccctccttaccaggctgctttgtcctggcgcacaatgagcgcttgcttggcattcgaggcctttgtccgcgcgcagcctcgcggcgcccccaccagcgttatcagcatggggaagcggaggccggagctggcgaggcctctctgggccgccgccgcccgagacatgtgttggacacgggcctttaaggcctggagccgccacacaaaggcccgggaagaaggcggaacaaagggctttttcacgcggcaacggaaaagctgcagattagctcgcgcgtgctgcgcaggcgggaggagccggcggccgtgtccccaggccccctcccacggcactcgcccagcgcgtgtccctgggcgtgtccacgccgcggcccccagagaagcctcctaatgccacaactgcccccctctcccctgctcaaaattccccgttggctccccagtacacgccaactgtgctgtgccggtgtgttctggtgccgaattctccccacttcccggttcgaaccattttgcagtgtttgccatttctgggataattctcagccgccgcgcctttgcaccttctgtttcccctgcccagaacgccacccacactcccggtctctgccttcaagctcagttccaggggcacctcttagggaaagataagaatcggcagggtgcagtggttcatgcctgtaacctcaacactttgggaggccaaggcgagcggatcgcttgagctca

SEQ ID NO: 39004 - DNA, 688 bp, Artificial sequence
  DNA replication origin
ctttggagacctcctcccattctacaggttggaggatagaggccaggagaggaccagagacatgacatagcctgggcttctgatccctcgtcagggctgggcgagaggccgggctgatgggaggatgccaactgccttcttgttgtttctcctcccttcttggctcagagctgtctcctctctcctccctccatgctgctgctgctcctcctcctcctcttcctccttctcctttgccctgtttttctcttttgttctttcctcgaggggaagggaggggctggaatctaaatggaggcagctgttcctaaggccatagggcgggggcagcggggacccgccattaactagctaaagacctggggctgggggtcagtttggctggctgagcccaggtgtttttattccagctcagggagccagagagtgagtgggagggagggaagcagggaggggtgggaggaagcagtgtgtggcagggactgtggcctggcaaacttaggggtggaggggtggggtgggggcgaagcttgtgcagctcacgtgtagtgctcgcatgggttgtgtatttggtctgtgttgtgggtggacagtgtgtgttttgtgtggcgtgaatatgtgagtggtgttcctgtgtgtgtgagattgtgcattatagttgagcagtggctcaagaggcagcagctca

SEQ ID NO: 39005 - DNA, 922 bp, Artificial sequence
  DNA replication origin
gcgggggcagcggggacccgccattaactagctaaagacctggggctgggggtcagtttggctggctgagcccaggtgtttttattccagctcagggagccagagagtgagtgggagggagggaagcagggaggggtgggaggaagcagtgtgtggcagggactgtggcctggcaaacttaggggtggaggggtggggtgggggcgaagcttgtgcagctcacgtgtagtgctcgcatgggttgtgtatttggtctgtgttgtgggtggacagtgtgtgttttgtgtggcgtgaatatgtgagtggtgttcctgtgtgtgtgagattgtgcattatagttgagcagtggctcaagaggcagcagctcagccctgggtctggatccaggtctgcattgcccccaggcaagtcacttccatctttaattcccagcaaaatagagatgataatcctactttgtaagttgtcgggagaatgaaacgcatgtaaggtgcctagctgagttccaggaaaattactccatgaatgggaactattgtcactgtaattattattcagagatgtctggcagggagtacacaggagtccccccaacccagtgtgtggcttgcatgcctgggggcggggaggtaagatgtagggacacagtagtctgagaaggacaggaggaagctgtgggtctagaaggttctgcttaaattttgcagtcctacttctcatttggtgacaacaacctgaagggcagcaaggggaactagaacaggtgaggctgggggaatagggagagaatatgagtttgtggcagctcgtgtgtgtgtgcacccacacatgcaagggaggcctgggaatggtgcttaggggtgcagatctgatgcccatctgcctaggtttgaaacctagatgtgtgaccttgggcaagtca

SEQ ID NO: 39006 - DNA, 1635 bp, Artificial sequence
  DNA replication origin
ttcagtctttatttttattttttagtttattttaattaattaattaatttatttattttgagacagttttgctctcgttgcccaggctagagtgcaatggtgcaatctcggctcactgcaacccctgcctccgggttcaagcgattctcctgcctcagcctccagagtagctgtgactacaggtgtgcgctaccacacccggctaattttgtatttttagtagagacggggtttcaccatgttggtcaggctggtctcaaactcctgacctcgggtgatctgcccgcctcggcctcccaaagtgctgggattacaggcatgagccaccacacccggcctctatttttacatatcattaattcaccacatattcagcacgtgtccactgagtgctgaggcctgggctaggccctatgggtatagtggtgaacaaatagacgtaaatccctaccctcagacagcttacctttcagtaggagagacaaaaaaggtaatcagaaaagcaggtagcatgtcagatggtgatgaaaggtaataaggaagcagcagaggaagacaggggataggaagagtcagggctaagggttggggtggagttgaaattttaggaagagtggccagagaaggtctcactgagaagatgacttttgagcaaagacctggaggaagtgagagagcgaactatgggggctattagggcgagaacgttctaggccgagggatccgctgtagcacaggcccagagtgcagatgagcgtggtgtgtttgcaaggctgtgagggggccagtgtggttgcagcagagtggactggaaaggagagggaggtgtggtctgagaggttcagggaggccagagctgtcattgtaagggcttgggcttttattctgagcctagtaggtgtctttggagggcttgggcagagcagggccaggctctagttcacatttgagcaggatcaggctggctcctgcaacaattctaggttaaagaggggtgaggacagaatcagggacaccagcaaggaggcaactgcaatactccaggcaagagaaaacggtggtcgggaccaaggtggtagcagcagaggtggtgagaagtggtcagattctggatccatttttaaggtagagacagcagaattcgctaatggattgaagggaggcatgagagaatgagaggaggcaaggatgcctccaacgtttttaacctaaacaactggaaggatagagctgtcattcccaagatggagataacggcaggcaaactggtgggttttttttttcttttgatggagagaccaggaacccagttctgaacttaagtttgaggtgtctagcggaacaccaagggagatgatgagagggaagggggtgcagggagaagactgggggagtcctgggcacagggatggcccagtcgagagatcagggagccagtgtggctgcagccagcagcgcggagaccccgccagtgcagtgcccgcctctgtgtctgtccctcctggttctctcccttattggcctggctcgcctgcctgtctcattgactgttctcacatctgcttccttggctctttggctccgtgcctgtttctctccacccgtgcgcctctctccgcgcctccctcccccacg

SEQ ID NO: 39007 - DNA, 944 bp, Artificial sequence
  DNA replication origin
ccagtgcagtgcccgcctctgtgtctgtccctcctggttctctcccttattggcctggctcgcctgcctgtctcattgactgttctcacatctgcttccttggctctttggctccgtgcctgtttctctccacccgtgcgcctctctccgcgcctccctcccccacgcagccccttccttcggccctgcccgccccagccctcctcccctctgcccgcagtctgtccgcgggggtgatggcgggatagcaggcagcaggcgtcggccccgggcgggggtctcaccggacgggccggttggcggcgtcggggtcccgcgccgtcaccacgccgaccagggagcccacctgcgcgtcctcctgcacctccaggaggccggagggcggccggaactcggggggctcgtccacgtcggtcacggccacgcgcacgatcgcctggtcgcggaacgtgcccaggtcggcgaagcgggggtccacgaacttgttgagggcctccaggatcacggtgtgcacgggctgggattcgaagtccaggcgctgcgggagggagcagagggccggttagtgggtggggtctggtggacactgaggccttcacgagggaggccaaggcaggcggggttggcccaaggtcacacgttgtctcagcaggggcggcagggatgtttgggctgcattgcagaactgacccagaccaacccggtgggttacgggtggagaaactgaggatcctcgaggacagtcttgcctaaggacacagccactccaggctaacgcgctgagcacccaaacttcctgcttcccagcgcagtgttggcggcatatttcattagtttagttcacgaacacaaagcacctactgtgtgccagtgctttaagtatattaactcaacttgacatcaaccctaagaggcttgtattcttatgatctgatcttacacat

SEQ ID NO: 39008 - DNA, 1183 bp, Artificial sequence
  DNA replication origin
ggactggttgcccaggggagtcacacagttgcttttgtgttgtgtctgtgtgtgagaaaatgcaggtgcaatgtgtgtgagcaagtgtgtttgaaagtgtatgtatttgagaccaagtgcagtggctcacacctgtaatctcagcactttgggaggctgaggcaggtggatcacttgaggctaggagtttgagacctgcttggccaacacggcaaaaccctgtctctactaaaaatgcaaagattagccaggcatagtggtgcatgcctgtagtcccagctactcaggaggctgaggcaggagagttgcttgaacccgggaggaggttgcagtgagctgagatcgcgccactgcactccagcctgggcaacaaagtgagattctgtttcaaaaaaaaaagaaagaaaagaaaaaagaaaaagaaaaaaagtgtatgtatttcagtgtgtgtatgtgttacagtgtgtatgagagtgtgtgtgtatatgttagtgtgtctgtgtgtgtttgtgtgggaggatgtgtatttgagagtatgtgtgaatgtgtgtggatcattgagtgtgtatttgagagtgtatctgtttgtgtgtttgtgtgtatgtgagtatgagttatttgtgagagtgcatctgtatggccaggtgtgagtgtgtgtgtttctgtatggatgtgtgagtgtatctgagcccatgtgcatttctgcatgggcaggtatgtgtgtgggtgatctgtataggcctgtatgtaattctgtgtgagtctgtgagtgtatgagtggcagcatgtgactggatctgtaaggtatatgagtgtgtgtttgtgagtgtatctataggagtgtgtatgagtttgtgaatgtttctgtgtgtgtgaatgtatctgtgtgtatctgtgtgtgtgtgaatgtatctgggaataaacctgtgaataaacctgtgtgtgttattctgtgtgagcctgtgtgaatgtatctgtagaagtgtatgtgagtatatgagcatgtgtgtacatctgtgtgatcatgtgtgtatgtgtgagtatctgcatccatatgagcaagtatgtgagtctatctgtgtgaccgtgtgtgtgagcatgtgtgagtatatctgtgtgggcatgtgtatctgtatctgtatgagcgtgtgtgagtgtgtgtggtgtacactgagccctgtcc

SEQ ID NO: 39009 - DNA, 822 bp, Artificial sequence
  DNA replication origin
aagagaaaccgaaaggcaggaagcagccgctgtgggtgccctaaaaggaccttaaaggtccgaactaagcggcttgtccttggagctaagttgaagcaggcgtttgagctcttccggggtcacaagtgtagtttggggaagggaggacggctggtttcagcagttttgagagctctgcccacatggcagttgttaaggacctgatggaaaaacacaagcatctttaaggaaaggtgtctaagacacagagacctttaaggaagagtggcttctttcttgcttatcccctcaacaccaccaaacgatggtgcagcacgcccacccgctgtccccacttcactcacggtgacattagaacctgactaatctctgagaagccttgggggagtgcgaggaggacaggatgagaagactgaagaccagagaggtgaagtgactcacttgaggtcacacagctgggagtggctgccaattccagcggggtgctctcactgctcctgggataggaggggcctggcttgggtgaaggcggggaatgagatgtcagacagcacagaatgtttatcaaatgccattgtgaggctcacagccctgtggggcaggaggataggcagatatgtagggattaggatgcaaggcttctcggaggaagtagcagcaatctacaaaggataagaaagtgtctgcgggtgcagtggctcacccctgtgatcccaggactttgggaggccaaggtgggaggattgcttgagttcaggagtttgagaccagcctgggtaacacagagagaacccatctctacaaaagaaaaaattagctagg

SEQ ID NO: 39010 - DNA, 1049 bp, Artificial sequence
  DNA replication origin
accaagcactaggatttgcctcactttgctgaagaggaaacagactcagagaggctgcctttcgttgccagagtcctacagctgggaaccaccccaaggggacttgaatccagatctgactccatggtcacacttgcgccaccagaaaggcctcaaaacaggaagagggttggggctcagagtggggatggggaccgtgaggggctgtattcgatggcctcccgcaggtctcccgagggtctcctctcccagcttccctggggtgaggcgaagtgggggaacgagctccgcagccccagatgacccctgtctcgcttggtcccccgggcccaggcacgtcggtgatgcaggtgatggcctcggatgcggatgaccccacgtacggcagcagcgctcggctggtgtacagcgtgctggacggcgagcaccacttcaccgtggaccccaagaccggtgaggggcagggcggggccagaggcggagccgtggggcggggccaggggcggggcgggacgaggaccaccccagacgtctgctctgagccttctgtcccagaagctctgaggacagcacagggggcaccttgtgcacagcaggagagtccagggtcgcggagagggaggggcagccaggcaggaagatggacggactgaggaacagaaaaggaatggggtggggggttcttccaaaactggaagagaaaccgaaaggcaggaagcagccgctgtgggtgccctaaaaggaccttaaaggtccgaactaagcggcttgtccttggagctaagttgaagcaggcgtttgagctcttccggggtcacaagtgtagtttggggaagggaggacggctggtttcagcagttttgagagctctgcccacatggcagttgttaaggacctgatggaaaaacacaagcatctttaaggaaaggtgtctaagacacagagacctttaaggaagagtggcttctttcttgcttatcccctcaacaccaccaaacgatggtgcagcacgcccacccgctgtccccacttcactcacggtgacatta

SEQ ID NO: 39011 - DNA, 1227 bp, Artificial sequence
  DNA replication origin
ctttgattaggttacgtcctctttcccaccagcctgatgaactcctacacgtatgtcaaaacccagttcaggtgttttctcctccatgaagccagacaaaatatactatttaatgattgcctactcagtgcctggtgctgactcatgaagcttttcatgcaccagggtgcctctgccactctggggatccccaaagtggcagaggctggatctcactcaccttttctccccagcatcacacatgggccccacaaggggctcaggaattgaatggatgaataaaagtccttctcagctccttatatgcctatgttatagatcttcagccagatttaccagcatttactcagagagtttgagaaagtagtttcattcattcattcattcattcacttaataaaccgtttgcaagcaatgtctgtgctaggcactggggatttcgcggcgagcaaaacaaacatggtctaatagaaaagacacacattaattgcacaatgaaacaaacacatgcataattaaagtgttatgaaggaaagatgctgggacctcacgggggatgtgacagcagatctgtcctagcctggtgtgggcaagaagggtttctctgagaaagtggcattggagctgtagtgtgagtgtaaggtcatcagtggaaggagcaggaaagggcagttcagcaggagaaacaacttaggcaaaggggcagtggcaggagtgtgcatgggacgttgactttcagaagagcaacggaagggcagtgaggctgaaactcagagactgtggcaggagatgaggctggaggagccagatctttgtagtcaatggatagaatctgggctagaccccagtgcatagggagctgctgaagaattttaagcagagtggagcagctagagtatgtgtgtgagatgatcggatttgcaaactcgttcctaaatcccacatgcatctagctacaggatggaatgggattgcctgctgggctctttctaagatgcaaaagggaggggaaggagaggagggcatggggcggagtgggagtgggaatggggctctgggcccccttatcagtccttggctagggagcagaagaggcacatgaaacatggatttaaaagggcaggtgaacaagggtttcttgtatctacccgtgggtgtccccagggtcctgggatctggagttggagtggggccccactttaccttgcccacatacaggggctccgt

SEQ ID NO: 39012 - DNA, 679 bp, Artificial sequence
  DNA replication origin
atggatctggggacggcaggctggtccaagagtggggaggaaagatgtctctcggactctgggaaagaaatattttctgggggaatgtggaggcaccagaggcaagctcagaggggttgtgaccctgcccggagtcactgagggtgtctccaagccaggccctctgggactcaggtgctgtatccctagaagctggtgtgggggtacgagcacatcagagggccttcccttggtgcctgtttcagatggaatgacctgtctgtgctgcgatggataggaaggcaggcatatttggtggtgggctgggtgctggacttctgtgcaccaaggaggcctgggtcttgggggctcttgaagatgccttctagaagcacctagggtgggggatttctgggggctgggcagggctggagagattgtcagccaggtcaggggcaccgcctactagggtctctccttgtgtgggcatgagggctgagcggggcaggggctgtgagaaaggcgtaggagattgggagtacagggcgtatgatgccaggtgaaaggagaggctgcgatgtgcgggagagggcgcctactagactatgggctccaagaagaggggaccactgtgagttgctatgatgcctgtcccaccctgcacagtaccaggcacacagcaggtgtttaattagtacct

SEQ ID NO: 39013 - DNA, 788 bp, Artificial sequence
  DNA replication origin
gtttttctagaaggcattagaagatagtgttggcagggtttacctctggagagcagcgggccaggttgggagggcgctgtcacagcctcccttgtcctctctgtggacacagcatgggcttatgcaggtggcacacacaccacgtctatttttgcaaaaaatgaataaggcaataactggttggtaagattttaagtcatttttgtttggcttttttctctatcgttctttgttttaactaataaacgttgttaaccaatgaaggggtaggtgggggaagagatggtgaaggtgagtgaaaaggggtggtcagagaggtgggaggaatagcagaagagagtggggtggaggaaatcagaggggggtgagtttggaggagggcccgccccccactggtccagtgctgataagagaccaagggggaggggccccttgaggtgaggatcagggcgtcctcagtgacagcaccaggaaggccacctgtgacctggtgatggttgtaacgaggagggggcgggcaccagattggagtgggctgagcagtgagtgggagagtgaagcgaagacaacttgataagttgggctttgaagggaaggagggagggggcggtagctggagaggaaggcagggccgagggagggctttcttaaaggagagagttgggtgtgctcagtgctaatgagagggggcgaaagtgtagatccaggcagaaggtagggggcaggaggcgttggccgagacaagaggaaggaaggatcctccgtgatgacaggtgacaaggaggagg

SEQ ID NO: 39014 - DNA, 1115 bp, Artificial sequence
  DNA replication origin
ctgaggcagcctccctctcgcacagcagagcaatttcccaaagcattttctctaatttgtgattgtttttctaaccagaagcagcaagagtctccagcttctcccagcccgtaagacgagcctgatggagctgccaaagctgcaggtctccacccccagcccagcccacttggggacttacaagtccctctgtcctaaaagcccacccatggtactaggcaggctgcggggagggtcttatggtcccaaatccaggggcttctttcccagcctgaagctggctgagttgatgcagagacctgggagtgactttaagctggggccacccactgctggctgattgtgccccgcggacatcaagggctggtaccctgggacagagggtggcatgagggctcgaagccaggggctgctcaagggctccaggaggggcaggggctgagtgaggaggtcagggctctgtgagtagggatgcgggctccttgagggaatgcaggctcagagaggagatgagtcttcagttcaggggacagaaattctgtgggagaacaggggctctggaaggggcaggcattccagaaggtgaccaggagctaagtaacaggaggtgctcagggatggaacgggggctcagggatgggatgggtctccaggaagggtggggggctccgtggagggttagagctttcacagggggtgcaggagctctgtggagattctggggaattgggggctctatcttgagagaggaccaggcctccacaaggagatggggactccaagaagagacgggcgctctgtgggaggtggggatctggccaggggctcagctgcagggctggggtttgtgagcacaaaggctcagaaaagagagtgcgggctcagtgaggggatgggggctaacatgctggggacaggggttctgggaggggctcggggctttccaagaggatgagggcttggagagaaatggtggcttatgaagggacagtggcagtgagacagtgggaaggcccttcctccaaggttgttttggggattaaatgcagccatctcctccctgacccactacccaggtgccctacctcagctgacccatcctagccacaggcttg

SEQ ID NO: 39015 - DNA, 1283 bp, Artificial sequence
  DNA replication origin
ctcacccggaggtcacaacacacttttaggggccaaactttgtcctctgcttctgctactcggcgtctctgctaaaggcattcaacagctttcctccggcactggcctgggagcactgggggtctaacttgaacacctcatgctgaatttagagcaagtgtcttcttgtcctgcctgcagcgtgaagccaagaaacggctctgttttgccccaggcctacccaacacataagcagcgttggtgaggcctggatgtcaagatgcctgggttcctattccggctctgggtatagcttaccatgtgacctcgggctgctgttgccaatccttgaaaatggaaaagagggcagcccaggtggtctccaatgtgctgctcacagttaggaatagggaaaggggttgtctccaggggtcccctgatggggccacccaagaggtacaggtgccccttagctgagagagacctggctggctttataaagtacctgcccccgaggcactggcagtggtggaccgggaagggcacacagacatctccaggaagcagtgtttaaatgttggcaatgcccttcccttccaggaggaatggaagaggagtgtcccagacactgggacaaggagggaaataagggtgaagtagagaaatggctggggcagggaacagttgagtgctacagaaaaactgaggcagacaggatagaagatgggtcggggttgggggggacgaggaaatggtcattggtgggcaaagaccaaaggatgtcactatgggtgtagaggccaagtttcaacaagggctgtagactaggggcaactgagggggacggagtgggcactgatggacacatatacgggatacaaatgaaggacagagagtcgcggtggttagggaggagcctttgggccctagggcagtggtgatgctgatatagggtattggcgctgaccagtgggagaagaggatgagatcctgaacctgggtggagagggagagagagctggcaacagccaaagccctcaaatgagccgctgcctgtgctgggggcacctcggccagccccagaaacctggggagtgctggaatcagccccacggaaaaagaagctggcatgcgcaaccctggcgacgcccgaagggtttggagagaagaggttccaaggagcgagcacctcggaagacctgagcagcttcaaacagcagcttctctgcccgccacaagggggtgccctgcacctcggggagacctcgggggatcctggatcagccctaccctctgcagccccg

SEQ ID NO: 39016 - DNA, 695 bp, Artificial sequence
  DNA replication origin
tggcgcgccggctcggcccctggcgctgccacccctcggcccgcgggggtcccggaggctcccgggcgcgcggcggacgaggttgtggggacgggtgggagctgcgggcttcgggccgagaggcggctcggctccgcgccggggaaagtttggacgtgggaaactccctccccgccctcccggccgagaggagggggcgcgcagggccgggcgcaggcaccccggctcctcctgcggctggaggctcgccccccgcgccgcctgcccggccgctcccgccggccagggggctccctccctgccgggcagcctcccctcggcggcgatccggccgctcctcccgcggcaccccgcgctcttacctcggggagcggcccggggctccccctagtcctgccgcctcgggacgctgcgtggggcgggagccccggcgcgggcagcgggcgagtccggagccccgcggccgcccgcaggagccggagggagagcgggagcgagagggggagccgcggcggcgtgtgcgcgcgtgtgtgtgagcgagagagcgagagagcgagagagcgagggagtgagcgagcgagcgggagcgagggagtgtgcgtgtctgactggggggaagtgtgcaagggacggatcccttccttcctcccgcagcctctggtggagactcggagaatgcagggcccgccgggcag

SEQ ID NO: 39017 - DNA, 1948 bp, Artificial sequence
  DNA replication origin
cctcatttgtaaaatgggctaatactagtatctgattattgtgaggacttaaaagcagaactatggcacacagcaagtgctcaataaacattcaatgtgttctcagagcctagccatagtgctcacaacagagtggacactcagagaaagtttgttgaaggaaggaagaattggaaataacggtagaatgagcctgaaaataggaaacattgggataggaaaacctgagggtctaataaagagtcatggggagctgggtgcagcagcacatgcctggtgtcccagttacttgagaggctgaggcagaatgatcacctgagtccaggaatccagcctggacaacatagtgagacccccatctcaaaaaaaaataaaaataaaagagagagaagagagagaccagagcaaaagagaaagatgtgacaacagttcattcaataacatttattgagcacctactgtgtgcatgcagatgtgacagcaacagtgtcccagaccaaaacaacctgtggacaactaagtaggtctgactccagagatgaacagcacacaccagagcctggaggaagaggcaaagaaggaatgggaactggagcaaacagcaaaagtgagtcagagcgggaggagagaaccaaaagtgaagagatgcacctggaaggctggcctctggtctctgaaagcatgaaagagtggaggctaagaatagagaggagaggggaagagagagatggagaaaaggaaggcgatagaaaggcaaggctggaagagatcaatgaagggaaataaaccaagagaaggacgtaggggagggaacagactggcacagtggagaatacatctcaaaataaataaatgaatgatggagtttagtaggaggggccagaggggcagccagcaggagaggtgattccaatcatcagcaagacggactagggtgtggagatggagatggaaattggggaaggaggcgaggaggagagaaggataggggcgaggtagagctgggggtcctggagggccctgccccctctttgccatgaacttcagcagctgcttgtgggtgattaaatggctggtcattggcagcttggcgggacagaggtctgcagctgtccagtctcctgttatccttcactcacctatctggaagccatggggaataggggggcgggcaactcctaaggggacctacaacccaagacaaagggtgggtctatgggagtcactggtcctatcctaccatcaacgacctcatattgggaactcaggagtggggtgggagggtctcctccattaggcctcatcccagagagatgaagtagtaaggagagccaggcagccaggagaaagaaacagggccaggtggaaaaaacatcagggagcagaccagccggatttttaaaagaacggaaaacccaaccagcaaggagtttctgggcagtgggaagattttattgggagacttctccaggtcaaggtggcaccaagttaaggatggaggtgtcttgttttgcctgcttactttgttggttgcaaggatgtccagcgggactctccagaggaaaagcccacaagtttctctcccggggacacccgacctcccacctgcctggagactcagccctgggcacctggtcggtgtccacctcaatgcacagtgactgtttctgaactggcagatctggtctgtgcaaggtgcctttctgggcagcaagccggggcggccactgttcgagaagcctgctcctaccctggcctgcgcccctgctcctctgaaggcggcctcccgcagtagtcagggggcggaaatgggaagccctattcgcagtaaaatcaggtggggaaataggctctggtctcaaactgcggccacctggggagctgccaggcgaggaggtagatggtccccctcctgggggcgctcccttcgcgcggatctggggttgga

SEQ ID NO: 39018 - DNA, 1427 bp, Artificial sequence
  DNA replication origin
ggggtctgcgaggattaacgccatgaggtggaggtgcttaagggcgcagcggcctcggcgcctgtggctcccgcaggctcgcccctccccgtcctggcgcccccagccaagggcggcctccccgtcccctcgaagttcccttcccatggagtcccctccccaagtagtcccctccccctccctgcggtcccgtcggccccggcggagaaagcgggctcgcagaggtgcagagcgcccggagtcccaggtggggcgccctcgttcgggtcccgggtccctctggggaggggctagggtgtgccccggctgctccctacgccccccggcgggctggcggccccgtccccgcgctgacatttctttggttgttcatgtcacggcccttcagtctgcgcagttttacaaatgtgctggcgagatgaaaggcgccgggaacagcgactggagaacaagttcggaaaagcttttaacttccagctcccacagacaaagcgggaggagggggaggaagggagggaagggaggggaagcacagagtggggagagtagaggaagggagcgggaggaggggagtgggaaggaaggagggaaggaggaagaggagaaggaagtgtggggagaagagagaaagggaaacggggcactgagagtgcgggatgaggacagagagaaccagaataggacaggcaagagggagacagagggagactgggtgccccgaagaaacagagatgggaagagacagagaaacagagagagggagacagacatggaggcagagagaacaggacagagggagggggaaacggaaagagaacgacagacgcagggacacagctaggagataagcagatggggggaggggagaagggtgctagagaagatgtaggggcaggtagcaagagactgacacccattcagaaacagtcagagagaccagagacactgagggggaggagacagagacaggagtggaggcagtcagagaagcgaggacagatggacagtgcatgagaaggcgacagacagataaagggatgacagagaagtgtagagaagaagaggaaaagagccagggagaatagcagagcctggagctaagagcagcctccccatccccaacacacacgcgtgtatgcactcacacacacacacacacacacacacacacacacccttcactgacccctgctcaaacctgcaggctccctggagcagaccctgctgttagggcgttcagactagagcagtggctctcaactgggggtgactttgcccttcaggagacatttggcaatgtcaggacacatttttagttgtcacaactggggagggggtgtgctgctggcatctagtgggtagaagctggggatgctactaagcatcctacatgggacatgcccaatgacgaagaattatctggccca

SEQ ID NO: 39019 - DNA, 1374 bp, Artificial sequence
  DNA replication origin
cccgaccacaacagacgccccgcccccgtgctgccccgccccgccttttcgccccggctccgcccagcccctgggtagcttccggcggaagttaccgcccgtgccgcggttcggcggcggcatccggcctcgcacttccggtggggagattccggcctggagctcccagggccgaggtgagtgggtgtgcggccggcctcccggcgcactcccagaggctggggggccggggctggagaagggaagcgggctccccacccgggatctgcgcgggttgacatggggcacgccacgcccctgcccctccccgggcctcagtttcgccgtctgtggagggggcaggggtctccaagcgccctcctgcaaggcacctgccggacgccggctcatctggtatttcctgagcacctgcgacgtcctgggtgcgggacccgggccggaatcggacacggccctgccctctgaggggctgcttcccgcggtgggattggggcgggcagtaaacacgtgagcaaacaaggaaacgtcagaggtgggagtgccacgaggattgggaggggtggggcattggagaaagtattcagccaagcggaggtctgcggaagggagctgaaggcaggaagagcagcaagtaaagaaaaacacaggtttgatgtgtttgacacgtggcagggggccgctgtggcgggtgctgggaccagtggcagaagaatgaggttacagaggccttccttgtggaccaggctgaggagctgggcttagccttagggcatgatctgtttcgtgtgccatctctctggctgctttatagattccaggccttaggggcgaaagaggaaacagggagaccagttagaccagtggcagtcagcaggtgaaagataattgtggcttagactgtggtagtgggaatggagaggaagagaagtagaggggtcaagaagtgtattgaaagtggaactgacagggcaggatttgagaaatgacagaaataagtggtcaaagatgacttcatcatagatttttggttttggcttaagtaaccaagtgtattatgctggcatttactaaatgactttgggatagattgggagcgtgagaaataattacgaaatcttcttagggcatcttaagttttagatatttggagtgcagctaccaaataggcagttagatatatgagtctgatacagaaaaggtcagggctgatgtaaagaatttagaaatcattggcaagtggattgggtaggatgagattatgtagggtaagatttaagagagaagagaagccaggttccaagctttaggcacccaatttttatagattgagttgacaagaaggtgccagcaaaaaagaccaataaggagtccaga

SEQ ID NO: 39020 - DNA, 969 bp, Artificial sequence
  DNA replication origin
atcccattaataatgttttaatattgattatgttataataatataattttggaatatattgtgttaaatatattactaaaataatttcagctgttccattttttaatgtggctactagaaaatttaaaattatatctatggctcacattacatttctattagacagcagcatcactctagcatagagcctggcacacaaaaagcattccaaatgtcagtttcattcccctgcaggtaggacatcagtgaccacgattcacatccccttcctcttgccaaattcaaaccctgcatctatttatttggtaaatatttatattgcctggccctgtgtgagatgctagagatactacatgaagcaaaaccgacactatcttcttcgtggaccttacaatctggtgggatggacagagaaatatcaatacttttgtaaataaatgtaaaattgcagttgtgcaagtgttgttaaggacaagtacccagggtgataaacgtggggtactggtcgaaaagtcagggacagggatgcctcccctgcagaagtgatgcttaagcggagatctgaaggatgaagaagagtttacaagactaagccaggggaggaagagcagaccagggaggaggaatactaaataaaaggccccaaggaaggcaggagcttgggatgtagaaggaacagaaagaggccagtgtgtggagagcactgagcaagcggacggacgagtagacagacttgggagaggtcagcgggaccggatctccagggcctgggtgaggttctggatctgaccctacaaaggggtgggacgccgggccagtttcatgccctaagcatccagatctgctctgcatttctcggctgggcgcggtggctcacgcctgtaatcccagcactctgggaggccgagacgggcggatcacttgaggtcaggagttcgagaccagcctaacacggtgaaaccccgtctc

SEQ ID NO: 39021 - DNA, 1748 bp, Artificial sequence
  DNA replication origin
aataaatggtgggaaccgatgagtttcttggcctggacgagtaaatcaagaagagcaggtataggctccagaggtgtggtccctctgcctctccgctgtagggctggaaccattacctgttcttacctggccggctggactccaacaagcatcaggatcttgagggcgattcgccggtgcaggttccactcctcaatggcgctggccatgatcagcccactgaggaagaggaagttggtgtcgaggaagtactgggggcagaccttgttggagggcaagatgcccatgaaggggaagaggacgatgggcagcagcgccgtcactgagagcggcagggcctccgtgcaccagtacaccgccatgagcaggatgacaaacaagcagcggccttcctgcaggaggagatgcatgctcagagggtcagcggggctcggggcagaaggggaaggaggcccagggctcagggcagagggggaaggaggcctgggctgggggcagagggggaaggaggcctgcggcagggcctgccccggcttgttctcagggcagcagtggagcaggtgtgtgcctaaggcgttgacttaaagcaggtggcatcacctttctaagcctcattttgctcaattataaaatgaggaagctattttggttcacctcataggactgtttgagaatgaaatgaaatacattgttgtcttagagataaagacgagaatgaaaatagtttacttgatagaggatcccaggaggttctggaaggacaatggggaaatgaaacagaaggaagccaatccagagagtgtcccatgagaaggttaccactgtggacacctggatctcaattctgatggggacagggcagaccatgcttcagtgtatgtcccatgagaaggttaccactgtggacacctgaagctcaattctgatggggaaccctgggggacagggcatatcatgccttagagttgtctcaactggaggcaaggaagttggagcatttatctgccaactcctggccatcattggttgagggctgatactgggagcattaactttcagcacttccggcatccttatgtgcagactgagcatgctcctgcagccaggggaaatactcccgcagtccatctcagaggcagtaggaagctactagtgtgtgcggaaatggtgagcaccagtgggggtgtggagttgggacagggagcaactgccacatccttacacggtacttagtgcaatgcccaacacataatgcatactccataaacaataacaacagctgacatctgttgggctattaagtaccaggtgctatttattcctaacaaaatcctagtgatgtaggtatgattattacccccatttgatggattaggaaactgaggtgcaaggaggtggttagcaaggtaatggctgtgcagaccagggtagaccaaagcaatctacctccacagccagaccttcatacaagtgccctgctgctgttctcagctaaatattagacccaatgaaaggcagacaaagtaatttaaatctaatcagtggttgccaaggctagggtggaaggtctatgttgtgggggcataggtaggggttgcagaggagcacagaggaaacttttgggctgatggcaatgttctatacctagattggagtggtagctacattggtgtgcacatttgtcaaaacctgtcaaactacacacctgttctcataatgagagtgataatgacaatgacttcacatct

SEQ ID NO: 39022 - DNA, 1142 bp, Artificial sequence
  DNA replication origin
tgagatccagaaggcagggtgggactcaagctctaaggagcagctgggaagagggaagaggcgttaggagcgttcacagcggtccgcggcaggtgcaagggagggaaggcgagggggtctggtggagcctgtctacactgggacctcagcggtctcccaacttggaggcttgggagaagaggatcccgcctgtggttgaccgggggcgcacaggcggaggaggcgttaccttgggcgggagggcgaagaccaccggcagcagcgcgagcggcgtgaacagcagcaccagcagccgccgcgcgctccacaccttcttggccgctgctgccagcgccgccatcagcgcgatcgcctggcggtacgggccggcccgggactgccccgcctggccccggcgccggcttaaagcctgggggagggtcggggaggggactgcgctggggaacccgccctctccctgctcctcctggaggaaaagggtggtgcctgcgcccctgggaccgggtgaaagaggcccgggaacgttggagaaagttaggcactagaattagcaaacgggaccccagccgcagggcagtgtggccttgcctcttggcttcccagcaatgtggcctggggcagctggcttatcctctcctcgcctctgtttactcgcctgtgagatggctgaggatgacaaggcgaggattaaggcgcgtactcctattacccgggttcaaatcctggcacggccacttactcactgcgtggccttcaacaacagcctctgagcctgaaagtggagtggtgataataatagtctacaccatggaatactatgcagtcacaaaaaagaaggacatcatgttttttgcgggaacatggatggagctggaggccattatccttagcaaactaacacaggaacagaaaaccaaatgccgcatgttttcacttataagcgggagctaaatgatgagaacacatggacacatagaggggaacaactgacactgaagcctatgggaggctggagggtgggaggagacagaggatcaggaaaaataactaatgggcactaggcttaatacctggatgacgaaataatctgtgcaacaaatccccatgacacaagtttacctatacaacaaatctgcacatgt

SEQ ID NO: 39023 - DNA, 1689 bp, Artificial sequence
  DNA replication origin
gggcagaaaggaagatggaaggaagcgcgaccgagccccgtcccagcccccgccgcaggcctgcagtctcgggctggccacccgagaggcggtatccggccggggcggccctgggggagccagggggcgcgcactcttaggggagcgtgggggcggtgtctacaccctgggaaggggtcgggcttccagcaggcagcgcccgatcgggacttacccatggcgagcgggactcggcggcgtgctgggggcgctgaggggccgggcgcgcatcccccgccggagtccccaacgccgctgccgccggacaaactttccggcccgcccccgcctctgtccctcctgccctgccctcccgcgcgcagcgccgccaacgccacgtcggccagccaggccccgaggcctggaggcgggacggaggggagcccaggaccgcccccggccgccccaggcctggcaaggaccccctccctcgcccactgtcctcccgggggcccccacccgccatctcccgggtccccttcgttggtagtcctcccctgggggggacacaccagcaagccatcctccctggtagaagaccccacacgcactgtcttcccctggcctctttgcagggaagaggtgccccaatcactggtccacacttgtctggcctccccagcgtgcgcacacacacaacacacacaacacacacatctacaccgagtgagacactcgcgcatacccactggagccgctcactctctcatggattcatccctcattcactccacgcttgggtttggacaccaccacataccaggcactacgctaggcttgggatgggccgaagaacaaaacagaacaggtcttttgtttaccttctaggaggggaagagtttacattctaggaggggaagacgaaaaagaagtaactaaaggatcctgagaaatatcagctagtgataaagactaggcagaaagttaaactacggtggtgggttaggcagacacaggtggctgctttagcttgctgatctgagaagaggatatctgagcagagatccggcattccccgcagggggaacagcaaaggcaaaggccccggggtgggaaggagcttatggggtacaaaaaacgcagaaatgaagccagagtgtctggagcagaggagaagacagggagagaggagggagatgggagctaagggaggggctttggtgggccagggtcaggaatgtagatttcaaccccatcagcaggacagataactggggagttctaactggttaagggccagaatactcagccttcccacctgggaggctgttgcaaggtgagaagttggtttgggctcatgtcactgtggtgaggttggagaaaagtaggcagatcacatatatatgctccgtaagaacttacagactggaagaggggcagcttgtggctgggaaaggagatccagagttctgtcttggctgtgtgacatttgaggtgctcagcaggcatccacgtggaaataggtgggcagttggctatgagcctgggattcaggaaaggggtaggctggggacactgccactaatgctcactcaggcaaaaatgcacgtacaagcccagcactcacatgggcgcagccttatccagcctctcaatacgtgttcacagataggcacctttgcatgtgcaccagtggctgtaccctcacca

SEQ ID NO: 39024 - DNA, 1190 bp, Artificial sequence
  DNA replication origin
gacgtggcgttggcggcgctgcgcgcgggagggcagggcaggagggacagaggcgggggcgggccggaaagtttgtccggcggcagcggcgttggggactccggcgggggatgcgcgcccggcccctcagcgcccccagcacgccgccgagtcccgctcgccatgggtaagtcccgatcgggcgctgcctgctggaagcccgaccccttcccagggtgtagacaccgcccccacgctcccctaagagtgcgcgccccctggctcccccagggccgccccggccggataccgcctctcgggtggccagcccgagactgcaggcctgcggcgggggctgggacggggctcggtcgcgcttccttccatcttcctttctgccccggaaaagtggcccctcacttgctgcagcgcccactcgggcccaggcactctcccgggcgccctgatccgacagccccaggcaagtgcagctgttcctggtctgcagatgaagaaatggaggctccgaaagaagcaaagcagttcatcgattcgctgagcgcggttgtgccccaggcgctgttgtgggcctggggacgctgtcgcgaacgaaactgcgaacaaaacagacgaaccccctcctctggacgtgattctgcagagaggggacagagaaggagattctaacacagcattggggtgggacgcgtggggaatggctttgttgccactcgggactagggctctatttttctctctgcattcagaagcctcgaaggatcagtcgttgattcttgagtgagcacctactacgtgccagacattgatataggggttagagcttcagcaatgaacaaaatagacaataaacctctctctcatggaggtggcattctgattgagcagctgggtaaacacgtttatgaataacttcagagagagataaggtgttgtggaacccataaaatggggtggcgtgaaggccaagggcgtgggttccttgggtaggtggtcagggtgggttttctggagtaggacgttttggagctgagaacttcctcagaagcgggtcttgctgagatctggagaaagagcttccaggtggcagcaacagtgcaaaggccctcaggcaggaatgagtttgtgtggcccaggccaggatggccagagcacagcgggcagggcactgaggtcaaagggatggcagagag

SEQ ID NO: 39025 - DNA, 1348 bp, Artificial sequence
  DNA replication origin
cagggagggcgttggcggccagcggctgtggctgtcagtctcccacgtacttgtcaagaaggagatgaaaaaaataaactatagggttaatgaaagcggcaagatgacctcggctgatccccgtaatcccttgctctaagcctggctttctatcatcagtcaagggttcttttttttctccttcttcagaaagtttctccagagaagcagcccttccaaatttaataaatctccccgcccccagctttccctgaaataatgaaccggcaggatgattttcaaatgtctgtctcaacgctgtgacgaagaatccccaggaaaaaactgcaggggagagggaggtgtgcagactggggctgtttgtggctgaggatgtgcacagatgcctggaagtgtgtgtgatggtgtgtgcagcgtgtgtgtgtatgtgtgtgtgtaaggagcatcaggcctgtgggacggggatctgacagggactgcctacattgaaagtgtgtgcacgtaggtagacacatgtgtgtgaacatgtgagtgaaaaaatgagcacgtgcgaatgtgcacgtgtgtgtttgcgactgtgcgtgtgtgtgtgcatgtgtgcgtgagtacatgtcagagagaacgtaagtattagagtttatgtgtcaggcaaaggtttggaggtccatgtgcagtgtgaggaaatgcctggatgcctggatatggaggtgtgtgtttattggatgtgagcgtgtgggtgtgcaggtgtgtgtttattggctgtgagcgtgtgggtgtgcaggtgtgtgtttattggatgtgagtgtgtgggtgtgcaggtgtgtgtttattggatgtgggcgtctgggtgtgcaggtgtgtgtttattggatgtgggtgtgtgggtgtgcacgtgtgtgtttattggatgtgtgtgggtgggtgtgcaggtgtgtttattggctgtgagcgtgtgggtgtgcaggtgtgtgtttattggctgtgagcgtgtgggtgtgcaggtgtgtgtttattggatgtgagtgtgtgggtgtgtgggtgtgtgtttattggctgtgagcgtgtgggtgtgcaggtgtgtgtttattggatgtgagtgtgtgggtgtgcaggtgtgtgtttattggatgtgggtgtggcgggtgtgcaggtgtgtgtttattggatgtgggtgtgtgggtgtgtaggtgtgtgtttattggatgtgagcgtgtgggtgtgcaggtgtgtgtttattggatgtgggtgtggtgggtgtgcaggtgtgtgtttattggatgtgggcgtgtgggtgtgtaggtgtgtgtttattggatgtgagcgtgtgggtgtgcaggtgtgtgtttat

SEQ ID NO: 39026 - DNA, 1160 bp, Artificial sequence
  DNA replication origin
cccgcttggcgagtgccagaaagaggcgcagggcgagggggtcccggtgaacaactccccccgcccggcgaatcccggcgggcggcctggggtgggcgccgctggcggtactcaccgcgcgcagtggagagggcgccccgacgcggtgcgggcgggcgggcgggccggtgcgggtccgacgaggccgggctgactgcggcgggcacgttgctgtctctgccgttgccgctgcctccgcctcctgggctgccgcggctgctgcctgcgccgggaggaccggccccttctcctccctgggccgggccctccctctgcccccgcccgggtccccgcgccgctgcgtgggcgcgtgggggcgccgaggcgcgacgctgggctacgcgggcgcacacacccggcggctggacgcagggcgcggggctctggcccagcacgtgccgccgcgccgcttcctgagcctgcagccgagcagagcgcgctcactctcgccggtcctggaggccagggcccagcctcctccccacccaccgacaccccgcacctcctccctccccggggcagcacatcctccctgcaacccaggcatgacccctgtgaaaggaacgacggctcggagaggacctcaatagtgacactaacattcgttcactcaaccacccattcattcattcaaaatatattgagcatctactgtgccaggtaccactcctgagagactcagctagaacaagacagactagttttctgccctcccggaacttgcattcacatggagaggcaaaccataaacaaataaccaagtaaagaagcaagacagtttcagaaagttagagttacagggagaaaaataatatatgtatctgctgttggggagtggaggagaggcggtaattttagctagagcagtcagggaagacctctctgaggaggtgacatctgaattatgaggaagtgccattggtgtggtatttaggtgagaacggttcaggggtctcccctatgtttcacccattttacagctaaggaaactgaggtctcaagagcttaactggtttagtgaaagtgagaggtatagccccctccacctacatgcccaaatcaaggcaccccacttactccatcctctcatagccaccccccttttagtctccctggcaatg

SEQ ID NO: 39027 - DNA, 1257 bp, Artificial sequence
  DNA replication origin
attgggtggatggatgggtagatacgtgggtaggtggatggatgggtggataggtgtctattattttctccctatggtgagcaagtcagtcaacatcacaaagcctgtttctttacctaaaaatatagaaataaaaatggtgtccacctctatggtcattgtgagaatgaaataaatcatgttaaaagcagagccctgcacataagcactcaaaaatgttcatcattttttatgttattattaattccctgtctccaccataacaatataagctctataatctgcatatttttgttcatatctgtacattcagtgcctattacaatatcaagtacttagaaggtactcctgaattttttgttggatgcatggatggatggatatggggtagatgggtggttgggtggataggtgggtgggtagatgggtggatgggtgtgtgggtggatgggtggatgggtgggtgggtagactgatgggtgggtgggtgtgtgggtagattgatgggtgggtgggtggatagatggatggttggatattgggtggatggatggatgggtggatggatggatattgggtggatggatgggtggataggtgggtgggtggatggatggatggatattgggcagatggatggatgggtggatggatggatattgggtggatggatgggtggataggtgggtaggtagatagatgggtggataggtgggtggatggatggatggatgaatggaagggtggatgggtggatgggtgaatcagtcagtggatggattaatctatcaatctgttgatctcaggataagattgagagaagccactggattgaagtttactttgggttgtcatctgattttaaccctcagggtacagtagctagattcctgttccctaccttcatcccccagatctttctaatacgatgactacatctttatttcctttgtccacagggttgataggcactcccaaaagggagacctggctacagctccgagctgagctggaagctctcacagacctctggctgacccactccctgaaggcactaaacctcatcaactcccggcaagtggcagccctcattttcctctgtgccactgaactttctcgcagtagacagtggtggctcctgcatgtccacacttgggagaattggactcctcaaactctcacttgtacactttccaaatattttttttttttgatatggagtctcactctgtcgcccaggctggagtgcagtagcgt

SEQ ID NO: 39028 - DNA, 960 bp, Artificial sequence
  DNA replication origin
gcccagcagccaccttgtccgggagggaggtgggggggtcagccccccgcccggccagccgccccatccgggagggaggtgggggggtcagccccccgcccggccagccgccccatccgggaagtgaggggcacctctgcccggccgcccctactgggaagtgaggagcccctctgcccggccagccgccccgtctgggagggaggtggggggggtcagccccccgcccggccagccgccccctccgggatggaggtgggggggtcagccccccgcccggccagccgccccgtccgggagggaggtggggggggtcagcccccccgtccggccagccgccccgtccgggagggaggtgggggggtcagccccccgcccggccagccgccccgtccaggagggaggtggggggggtcagccccccgtccggccagccgccccgtccaggaggtgaggggcgcctctgcccggccgcccctattgggaagtgaggagcccctctgcccggccaccaccccgtctgggaggtgtacccaacagctcattgagaacgggccatgatgacaatggcggttttgtggaatagaaaggggggaaaggtggggaaaagattgagaaatcggatggttgccgtgtctgtgtagaaagaggtagacatgggagacttttcattttgttctgtactaagaaaaattcttctgccttgggatcctgttgatcggtgaccttacccccaaccctgtgctctctgaaacatgtgctgtgtccactcagggttgaatggattaagggcggtgcaagatgtgctttgttaaacagatgcttgaaggcagcatgctccttaagagtcatcaccactccctaatctcaagtacccagggacacaaacactgcggaaggccgcagggtcctctgcctaggaaaaccagagacctttgttcacttgtttatctgctgacc

SEQ ID NO: 39029 - DNA, 1275 bp, Artificial sequence
  DNA replication origin
gccgggcagaggcgcccctcacctcctggacggggcggctggccggacggggggctgaccccccccacctccctcctggacggggcggctggccgggcggggggctgacccccccacctccctcccggacggggcggctggccggacgggggggctgaccccccccacctccctcccggacggggcggctggccgggcggggggctgacccccccacctccatcccggagggggcggctggccgggcggggggctgaccccccccacctccctcccagacggggcggctggccgggcagaggggctcctcacttcccagtaggggcggccgggcagaggtgcccctcacttcccggatggggcggctggccgggcggggggctgacccccccacctccctcccggatggggcggctggccgggcggggggctgacccccccacctccctcccggacaaggtggctgctgggcggagacgctcctcacttcccagacggggtggctgctgggcggaggggctcctcacttctcagacggggcggttgccaggcagagggtctcctcacttctcagacggggtggccgggcagagacgctcctcacatcccggacggggcggcagggcagaggtgctccccacatctcagacgatgggcggccgggcagagacgctcctcacttcccagatgtgatggcggccgggaagaggcgctcctcacttcctagatggcatggtggccgggcagagacgctcctcactttccagactgggcagccaggcagaggggctcctcacatcccagacgatgggcggccaggcggagatgctcctcacttcccagacggggtggcggccgggcagaggctgcaatctcggcactttgggaggccaaggcaggctgctgggaggtggaggttgtagcgagccgagatcacgccactgcactccagcctgggcaccattgagcactgagtgaacgagactccgtctgcaatccctgcacctcgggaggccgaggctggcggatcacttgtggttaggagctggagactagcccggccaacacagcgaaaccccgtctccaccaaaaaaatacgaaaaccagtcaggcgtggtggcacacgcctgcaatcgcaggcacttggcaagctgaggcaggagaatcaggcagggaggttgcagtaagccgagatggcagcagtaccgtccagcttcggctcggcatcagagggagaccgtggaaagagagggagagggagaccatggggagaga

SEQ ID NO: 39030 - DNA, 1526 bp, Artificial sequence
  DNA replication origin
gggggatgcagcagcggcagcggcggcggcggcggcggcagcggcagcggcggcgcggagtcccctgcgcccagcggcccggccgggctgcggcagaggcggcggcggcgccccgctccgggtgaggttgccggggccgtgcgcgctggtgagtggggcgtggggggcaggtgggtggctgggggacgcggggctcgggcgggggctcgcggcggccggagccttccccggcgtgagcccggccgcgagcgccgcccaggtgagccggggctggtccggaccgcccggctccagccccagcgctgcttgcggaggtgggtccgggcgggcgggagggaggctccggcgccggccgtccgcagagggatgacctgtttgaccccgctggctggcgggcgggcgaggacttcccgccgcgcccctgacccgcggacacggcacaccgagcacaggcggccccgggtaggggagcgcgcctgggccggccatccgcaggggcatggccttgttgacccttagggtttagacccaagggaccggtagatgccagcccacgtggggcttgtccgggcaggactcggggaagcagtgggccggatcttcagagtggttggaaactcgcagacaccgaaaggacaaacaggatcgaaaaggcagacttcctcccaggccagggcagaacgagtttccatcgcctggcggagggatgctcccctccccggctcctcggggtttcagaagtctagcggtgaattctaggagtgcacttttccaaacattccttatagtagttcgttcattcgttctacaagcatttctggagcaccccctcgtgccgggcaccgcgttctgttccagggaaacgcggctgaacaggatctggctcctgcgcgccagaagctgccggttcactgggagggcagcagggtagagagatgccgtctcggggtggaagatggaaagggaagcctgcaatcctagtttgcacactggcctcggtccgcaactcccccacctgcacgcagtaggcccagcacacagtaggaagagcaagccagacctgcctgtgacgaccctctcctcctcctcctcccccttgaaagctttgattcattccctgcccccctttctggaaagtcttcctgcagcttgttttaatcactttttgagttaaaagtcaatatttaattaaccaagtaattacattcagcttacgtttcaatctgggtatttgctcatctgtgcgtgttgggacacccgccctctcgcccctccatctgtcccctgcctgtttcccaccgggtccacccccacttttggggcagagaaggggaggctgcgctggagcaggttctcagggggagacagggagcaggagagacgggctttctctggaggacacccccggatctgcgcgctctccaaatttcagcttgtagtgaatagtgaaggtgatttcttgacagcctctgcctcccattacagaaccaccagagggttctaattaaattagagccaatcgttaa

SEQ ID NO: 39031 - DNA, 909 bp, Artificial sequence
  DNA replication origin
gcccccggccccctccccgcgcgccgccccagccaaagtccggctccgcaccccgcccggaccgctcttaaatcgccccagcccggccggccacgctgccccagccagccccttggcacggcgctaccgccccccgctcgcctgcccgccggcctccacgcaggggaggcgggcgcgctccggggcggggagcgtcgggccgggagccgcggacggctggggcccggggcgcggggggcccagccgcggtgccctcctcgagccctccgcgcgctagcgcttttacctccggcctgggggacgcgcggcccgcgacccggccctgcctgtccccggcgcacggccccggccccggccccgaagtccagctccggacggggcagtgaacgcagagctggggtcccggcggctctcgacctcccgatgcctccggactcggctggccgcgctcccggcgccgagcgcgcaccctcgccgggacacacagacgcacactcactcgacacactctcgctcctgctcgccctcggcggagagttgaaacagatgtgggattcgcccaggagctggaaacgagggagggaagcgagccagagccttgtgtgcacgtgtgtgtgcgtaacacacaaaccagggggcatcgctaataaatcaaatatcgtgataaattcaggagggccatcgatcaggtccacttggctggaaacgacgtgaatctgcctcttttccgctttcttcttctcctctctcggagctggagggagccaaatgttccgcggggagtgcgacagccccggccgggcgctcccctcgtaatgacacgttaataaatgttttcttttatctgctttcacaggactcgccccggtctgcaaacactcgactgcctttgccgaaagcctcgcgctc

SEQ ID NO: 39032 - DNA, 921 bp, Artificial sequence
  DNA replication origin
tcgctcctgctcgccctcggcggagagttgaaacagatgtgggattcgcccaggagctggaaacgagggagggaagcgagccagagccttgtgtgcacgtgtgtgtgcgtaacacacaaaccagggggcatcgctaataaatcaaatatcgtgataaattcaggagggccatcgatcaggtccacttggctggaaacgacgtgaatctgcctcttttccgctttcttcttctcctctctcggagctggagggagccaaatgttccgcggggagtgcgacagccccggccgggcgctcccctcgtaatgacacgttaataaatgttttcttttatctgctttcacaggactcgccccggtctgcaaacactcgactgcctttgccgaaagcctcgcgctcgcctccagccacacacatttgccattggagaggccggcgccggccgcgacccgcagctcaatcgcagggcaaaccgagctgcctgtgcgcgcccgagaactccccgagaaattaacttcggctcaagtgaaaatagcagctgttgtccagaaatggcccgggagtagcatagaaaggagaaaccggcttcctccgaaaggggaggaattggactcaagggggtgctgtctaccgtggtttccgctgtccctcgcgccacagaagaggccggagggggaccggcctgacgcgggtgggcaaagagcgggcagagaactcaccagcagctgcagaaaacacagccgagttgctagctaaggggaaacagacgccgctgtgggaaagcacttgtaaacagcagtaacttattaaatcttgtgacaatctcacacagtaagttactatgcccgttttaccatggaaaccaagagaggtttagtaactgtccgaagatcacacagttataagtggtggatcctgtga

SEQ ID NO: 39033 - DNA, 669 bp, Artificial sequence
  DNA replication origin
ctaaaaggcgaccagctcccacagtgcggcctgagccgtggaaggacaagggccacagtcacacccataatcctccttctctctgctggaacacctggttggccggagtcacccgaggggcttcgggagtgccgtggaggaggaagctgcggtccactctgctcttgcactggctcagcacagaccatgggctcttctgagacagcaccaggccaggctcagagagggccaggactctgttcccacaaagcaccggggctggtgggggacccacctgtcaacagtcaatagcagagcaccagcatgaaataatcctggagtgggggtggccccagcaggaagccctcagctcccactgggagtgtgttgcagggggtggtcggggactcaggtggggtggggggggtggtgttggagtcaggcctccgagcatgagcaggacattgaaaagaaaggagggaagaggggtggggtgggaacaaagccagagccaagaacgtacttagtgggagcgagaaggcggctttggtggatagagtggacagggagaagtgagaaccaggttagagaggggctggaacccagagggcagaggcctgagatgcccatggcagagcgtgcactatgtccccttgatttaggcattgcctgccacctgtctcatggagg

SEQ ID NO: 39034 - DNA, 1166 bp, Artificial sequence
  DNA replication origin
gttccagcagagagaaggaggattatgggtgtgactgtggcccttgtccttccacggctcaggccgcactgtgggagctggtcgccttttagccttttagcactggtccatccgtttctttccattgccccgtggagtctgtggccttttctccgggttctgactgagaccagagtccagcctgcctgggggcagttgtacactgccttgagtgcctggtgacagggtgacagcactgccagcgtctctgggttgggtttggggaggcaccagaggcctgagcagacggctggggttggttatggctgctgggaagggcacaaagccaggagtgggtggggcagggagaccatgaggagcctgtgcagcccgttttgtctcagcagaggggcgagtcccagtagcttccccgggccagggcgtcagctgagtcctggcagtgcaggcagcccccaagctgggcatctgggcagcagggaggggggggagcttcagggaggacgcggtgggtagcacgtgtctcaggggacacgtgtgcgtgtgagagggtgacagtgtgtgtatatgtgcgcctatgaatgtgtatgtgactgtgtgcgtgagagtgagggtgtatgtgagtctgtacatgtgtgaatgtgtgtatgtgtgtatgtgagtgtatgagcctgtgtgtatgtatgcatgtgtgtgtgaatgtatgtgtgagtgtaggtgtgttggggcctgtgtgcgtgtatgtgtgcgtgaatgtgtgtaagtgtaggtgtatgtgaacctgtgtatgtgtgtgagcctgtatatgtgagcatgagcctgtgtgtatgtgtgtgtgtgtatgagtctgtgtgtgtatgtgtgagactgtatgagtgtgtgagcctgtgtgtaagaatgtatgtatgtgtgtgtgagagtgtgtatgttgggcgtgagagtgtgcgcatgtgtgggagacagagtgtctggaggaggcagacagtgggatatgggagcagagagagcaaggcgacctccaaggagaaacggtgtctgggcgaccctgagagcctgagatgtggcctgggggttaccatggacggaagggaagtaggggggtcaggacgactcacgctctggtccttgtcactaaaagtcagagcagctgaaactcaccaagcatcact

SEQ ID NO: 39035 - DNA, 976 bp, Artificial sequence
  DNA replication origin
agtgcaatggcatgatctcggctcactgcaacctccgcctcctgggttcaagcaattctcccgtctcagcctcccatgtagcttggactacaggcatgtgccaccgctttcggctaatttttgtatctttagtagagacagggttttgccatattggccaggctggtcttgaacccctgacctcatgtgatccacttgcctcagcctcccgaagtgctaggattacaggtgtgagccaccacgcccgtccaagatttcttttccttctctaaatcattacagggggtctggatgctagctgtgccctgccgctgggttatgcagcccagaaatgaaatttcaagagagtgggttcatctgtgccaagtcacatcttcaccaaagaaatctgggctctgatggggtctgcgatggacttgtacgtgtgccatctgggggatggagggtggggtggtggccaggacgggcctgtctgggaaagaggcttccctgagccaagacagtgggggccacaggggactctgggatgggaaagccagcccagccagggtccttgggggatctggaggggacgtgacaaagcaggagggtaggaggggagccaggagtgggaagctggggaagccagagcagcagaggctggagcaaatcccgtgggaaagaaccaggaatgggtggttcctgagggagtggctcaaacaccctcgcaggggggtggctcacctttaaagaatgtcttgctcaggccgggcacgatgtctcatgcctgtaatgccagaactttgggaggacaagtgagacgaggttggttgcagtgagccgagatcgtgccattgcattccagcctgggcaacagagcgagactccatctcaaaaacaaaacaaaacaaaaaatgccttgctcttcctcaatcaaaatccccctgggagtaaaagatactgaatgatagcatacataagaaaagtgcccaggcca

SEQ ID NO: 39036 - DNA, 1357 bp, Artificial sequence
  DNA replication origin
ctgttcaaatggctcctttccgggtctccagctccatgaccttcaaactaggagagcagcagcagctcctcccgcggtcttccagctccatgaccctcacactagaacagcagcagcagctcctcccggggtcttccagctccatgaccctcacactagaacagcagcaccggctccaccctgggtctccagatccacgaccctcaaagtagaacagcagcactgactcctccccgggtctccagctctacaaccctcagacttgaggagctggagactcggggaggagccagggctgcttttctactttgagggttgtggagctggagacccaagatgcagcagctgctgctattctagtttgagggccttggagccagaaactttgtgaggagccggtgctgcctttcaaatctgagagtcattgagctggagacccagggaggaaccggtgttgctgttctagcctgacagtagtgaagctggagacccaaggaggagccggtgctattgttcatgtctgaggattgtgtagctggagacccagggaggagtcggagctgctgatctagtttgaaggctgtggagctgcagatcccaggaagagccggtgctgccgttcaaatctgtgggtcttggagttggagccctggggtgacccagttctttcattcatgtcttaggatcatggaactggaaacctacggaggcggcggtactgctgttctagtttaaggatcgtgaagctggagacctggacaggagctggtgctaccgctgttcaaatctgagggtcatggagctggagtcttggggaggtgccggtgctgcctctcaagtctgagggttgttgagctggagattcagggaggagccggtgttgctgttgttgttggaggattgtggagctggaggccaaagaggagctggtgttgcagttcaattttgacggtcgtgtagctggagacctagggaggagctggtgctaccactgtgtaagttgaggtttgcagagctggtggccacggggaagagccagtgctatagctgaagtttgagggaactggagacccagggagtagccggtgctgctttctagtttgagggttgtggagctggaggcttggtggggagccggtgctgcctcccaagtctgagagtcattgagctggagatccacaggggagctggtgctgctgttgtagtttgaggattgtggagctggagacccggggcggagctggtgctgcagttggagtttgagggtcagggagctggagatctggggagcggccagtacagctgtttaagcctgagggtcgtggagctaaacatggagccaaagttggggaagcag

SEQ ID NO: 39037 - DNA, 1354 bp, Artificial sequence
  DNA replication origin
gcaaggttgatggaaagtagaaaagttttctgacttgcgtgaacagaaaagaaacatcaatttgaaaggaaaacatttatttatttacttcctctacagttttcctgactgctacatttcatgagaagggattgtttatgagggtcaaggagctggaggcctggggaggagctggtgtttctgttcaagtttgagggtcctggagctggagtccaggggaggagccggtgctgccactgatgtcttagggtcgtggagctgaagatcccagaggagccggtgctgctattctagcttgagtttcgtggagctggagacccagggagaagatggtgctgctgttctaatttaaggatcgtgaaacagaagacccagggaggagccatgttggtttgaatgttgtggatctggagatccacggaggagctggtgctgcctttgaagtctgagagtcacttagctggagatccagagaggaaccggtgttgctgttctagtctgaacagatctagagttctggggagttgccggttctgcctctcaagtctgagagttgttgagctggagattcagggaggagcctgtgttgctgttttagtttgagggtcatggagctgcagactcagggaggaggggtgcggttctagtctgagggttgtggagcttgagacacagggaggagctggtgctgctgttgtttaaggctgagggttgtggtgctggagacccaggtaagagctggtgctgctgttgtttaaggctgagggttgtgtagctggagagtggggaggaggtagtcttagtgtctaatgtgaggttggtggagctgtggacctggggtggggccggtgctactgtgtagtttgagggtcatggaactggagacctagggaggagctggtgctaccaccatttaagtcagagggtcatggatttggagctttggggaacagcccatgctgctgtttaactgtggggaggatctgctgtgtccgttgaagtttgagggtttgggagctggagacccagggaggagctgatgatgccattctattttgagggtcgtggatctggggacctggggagaggctggtactgctgttgtagtttgaggttcgtggaactggagacagggggaggagccggtggtgctgttcatgtctgagggttgtagagctggagacccagggagaagcccgtactacagctttttaagtctgagggtcgtggagcctgagacctggggaggggccagtgctgctgttcaaatggctcctttccgggtctccagctccatgaccttcaaactaggagagcagcagcagctcctcccgcggtcttccagctccatgac

SEQ ID NO: 39038 - DNA, 746 bp, Artificial sequence
  DNA replication origin
agatgataggtgaataaatataaattattctattaggttgatgcagcagtaattccggcttttgccagtaaaggtaatggcaatcaaaagcgggaggagccggagctgccattcattaaaagcaatgacaaaactgtgatgacttttgcaccaacctaatagaataaattacgagtgcgcaaaacgctgtgatgggaaagttccaagtgccaggatagcatctagcttcctggagtcaggagatgggggttttcaacctgagcaaggttaagtccaagtggtgggggcaggcggggggcgatatttcaggggagactccaaggatgaacggaaattagaaaagtgaacgcagatggtgaggggggaagggtttcaggcacagagaacagcatgtgcaaaggcctggggggaggacttcgtgtgttcatggactgaggggcagccagcaggctggagctgagccggtggagaggaggatggggagccggggaaaggcgctccacgcagggggcacagcaggggcaaaggcccggagtcaggcctgaacctgtgtggtttgaggaagtgacagaggcctgtctgggaggaaagtaacagcagaggggagaccataaggtcagggcagagggcagggccgtgctgggcactgtgggctgtggataggacctggcacgtatgctcgggtgaggggaacgtgttagaagattttaagaagggcaggaacatctggggataatgtgtattct

SEQ ID NO: 39039 - DNA, 717 bp, Artificial sequence
  DNA replication origin
atgataggtgaataaatataaattattctattaggttgatgcagcagtaattccggcttttgccagtaaaggtaatggcaatcaaaagcgggaggagccggagctgccattcattaaaagcaatgacaaaactgtgatgacttttgcaccaacctaatagaataaattacgagtgcgcaaaacgctgtgatgggaaagttccaagtgccaggatagcatctagcttcctggagtcaggagatgggggttttcaacctaagcaaggttaagtccaagtggtgggggcaggcggggggcgatatttcaggggagactccaaggatgaatggaaattagaaaagtgaacgcagatggtgaggggggacgggtttcaggcacagagaacagcatgtgcaaaggcctggggggaggacatcgtgtgttcatggactgaggggcggccagcaggctggagctgagccggtggagaggaggatggggagccggggaaaggcgctccatgcagggggcacagcaggggcaaaggcccggagtcaggcctgaacctgtgtggtttgaggaagtgacagaggcctgtctgggaggaaagtaacagcagaggggagaccataaggtcagggcagagggcagggccgtgctgggcactgtgggctgtggataggacctggcacgtatgctcgggtgaggggaacgtgttagaagattttaagaagggca

SEQ ID NO: 39040 - DNA, 1377 bp, Artificial sequence
  DNA replication origin
aaggtccggtagctggcaccctggggaggagaagtcttgttcgagtttgagggtcgtggagctgccgacccagggaggagcaattttgttgtcgttcgagtgtcaggaagctggcgactcaggtaggagaaattttgttctagtttcagggttgtggagctgcagacccagggaggagcaaggttgttgtaattcgagggtcaggaagctggcgacccagggaggagaggtcttgttctggtctgagggtcatggacctgcagacccagggaggagcagtgttgttgtagtttgaaggtcaggaagctggcggcccagggaggagaggtcttgttctagtttgagggtcgtggagctgcagacccagggaggagccatgttggtttgaatgttgtggatctggagatccacggaggagctggtgctgcctttgaagtctgagagtcactgagctggagatccagagaggaaccggtgttgctgttctagtctgaacagatctagagttctggggagttgccggttctgcctctcaagtctgagagttgttgagctggagattcagggaggagcctgtgttgctgttgtagtttgagggtcatggagctgcagactcagggaggaggggtgcggttctagtctgagggttgtggagcttgagacacagggaggagctggtgctgctgttgtttaaggctgagggttgtggtgctggagacccaggtaagagctggtgctgctgttgtttaaggctgagggttgtgtagctggacagtggggaggaggtagtcttagtgtctaatgtgaggttggtggagctgtggacctggggtggggccggtgctactgtgtagtttgagggtcatggaactggagacctagggaggagctggtgctaccaccatttaagtcagagggtcatggatctggagctttggggaacagcccatgctgctgtttaactgtggggaggatgtgctgtgtccattgaagtttgagggtttgggagctggagacccagggaggagctgatgatgccattctattttgagggtcgtggatctggggacctggggagaggctggtactgctgttgtagtttgaggttcgtggaactggagacagggggaggagccggtggtgctgttcatgtctgagggttgtagagctggagacccagggagaagcccgtactacagctttttaagtctgagggtcgtggagcctgagacctggggagaggccagtgctgctgttcaaatggctcctttccgggtctccagctccatgacctttaaactaggagagcagcagcagctcctcccggggtcttccagctccatgaccctcacactagaacagcagcagcagctcctc

SEQ ID NO: 39041 - DNA, 2044 bp, Artificial sequence
  DNA replication origin
agggagaagcccgtactacagctttttaagtctgagggtcgtggagcctgagacctggggagaggccagtgctgctgttcaaatggctcctttccgggtctccagctccatgacctttaaactaggagagcagcagcagctcctcccggggtcttccagctccatgaccctcacactagaacagcagcagcagctcctcccggggtcttccagctccatgaccctcacactagaacagcagcaccggctccaccctgggtctccagatccacgaccctcaaagtagaacagcagcactgactcctccccgggtctccagctctacaaccctcagacttgaggagctggagactcggggaggagccagggctgcttttctactttgaggattgtggagctggagacccaagatgcagcagctgctgctattctagtttgagggccttggagccagaaactttgtgaggagccggtgctgcctttcaaatctgagagtcattgagctggagacccagggaggaaccggtgttgctgttctagcctgacggtagtgaagctggagaccaaaggaggagctggtgctgctattctagtttgaggttagtggagctggagatcacaggaagagccggtgctgctgtttaaatctgtgggtccccgagctggagccctggggggagatggtgttgttcttgttcaagtctgagggtcatggggcttgaggcacagggaggagctgctgctgttcaagactgagggtcgtgtagctggagagcggggaggaggtagtcttggtgtctcgtatgagggtggtggagttgtggacctggggaggagccggtgctgctgtgtagtttgagggttgtggaactggagacctagggaggagccggtgctactgccatttaagtcagagggtcgtggatctggagcttttgggaacggcccgtgctgctgtttaactgtggggagcatccggtgtgtcaattgaagtttgagggtttgggagctggagacccaggagggatccgatgatgccattctattttgagggtcatggatctggagacctggggagaggccggtactgctgttgtagtttgagggtcgtggaagtggagacaagggtaggagctggtgcttctgctgtttatgtctgaggattgtagagctggagacccagggaggaactggtgttgctgttctagtctgagggtagtgaagctggagacccaaggaggagccggtgctattattgttcatgtctgaggattgtgtagctggagacccagggaggagtcggagctgctgatctagtttgaaggctgtggagctgcagatcccaggaagagccggtgctgccgttcaaatctgtgggtcttggagttggagccctggggtgacccagttctttcattcatgtcttaggatcatggaactggaaacctacggaggcggcggtactgctgttctagtttaaggatcgtgaagctggagacctggacaggagctggtgctaccgctgttcaaatctgagggtcatggagctggagtcttggggaggtgccggtgctgcctctcaagtctgagggttgttgagctggagattcagggaggagccggtgttgctgttgttgttggaggattgtggagctggaggccaaagaggagctggtgttgcagttcaattttgacggtcgtgtagctggagacctagggaggagctggtgctaccactgtgtaagttgaggtttgcagagctggtggccacggggaagagccagtgctatagctgaagtttgagggaactggagacccagggagtagccggtgctgctttctagtttgagggttgtggagctggaggcttggtggggagccggtgccgcctcccaagtctgagagtcattgagctggagatccacaggggagctggtgctgctgttgtagtttgaggattgtggagctggagacccggggcggagctggtgctgcagttggagtttgagggtcagggagctggagatctggggagcggccagta

SEQ ID NO: 39042 - DNA, 1020 bp, Artificial sequence
  DNA replication origin
agtgttagggtgaggatgacaagggaagaaggcaggggttggggctgtaggggcagacagtggcagggccttctcagccacatgtggcactgggggtgtctttaaatgcagtgggagacctcagtgaggttagcagggatgtgacgtgaccatagaaggtccctctgtccatggtatgggggatgaggaggaggggctgcccagggccagggtggtctgtgaggtgggtgaggccatcatgtaggtgagaaaggatggtcacctgagctagcagggtgatggcagaggaggaaggaatagaacagagccaagagccatttagcaatcaactcagtaggacttgggtttgagacaagagggagagggaggagataggggataagagagctgcccagggttctggatgggcctggagggacggggtcaccagtcactgaggcggtgacccccaaagagcctacatttgggggtgaatttatcgggctgagttgaaggtgccatgggacacccatgtggacctgcaggtctgaagccaggagagtggttggctggtgtggctaaggagtcccctgtgtgtctgtgaccccatgtgtctgtggtctaaggggggctgagacccccaggaggggaagcagagtgagcgagaggcagactcaatggagggaccccctggatttaggagcaggagaagaagaggacaagggtggcagagaaagcctggctgagcatgggaacaagaagggggccttcatcaattcctgctactatgacaatatgcctgagactgggtagcttataaataatagaactttattcctcacagttctggaggctgggaagtccaagacaaaggcgctgacaggttcagtgtttggtgagggctgctgtctgtgtccaaatgggtagaagggtgccagtcacatccaggagcttggcctcatgctggaatcacctcctgaaggccccggctcttaacactatcacgttggcaattgggttttaacatgagaatttcaggag

SEQ ID NO: 39043 - DNA, 1349 bp, Artificial sequence
  DNA replication origin
cggggaggtgtggagggagaggcgcaggtgggaaccagggctgtgtggggcgcttgtgggcaagcgtgagttccgggtgggagcgggctcggcaaacccattccagggtgccctgcccttcacaaagaaaactctccctggggctcccatgggcttctctgggatcagtcacgggctccgtgggccctacactaggagtggccagccagagccgcaggccctgggcagtgaagggattagcacccaggccagcagctgtggagggtgcaccgggtcccccagcactgctgcctggcccacgctgctcttgaattcttgctgggcctcagccacctccccgtggggcagggctcgggacttgcagcccgctgtgctcaagagccagccccccggcatgggcttctgaaggaggccacccccggctccacggcgctgggtcccatcaacctagggctgaggagtgcgggcatgccgctgcgggactggtgggcagctctgccctcgtccctggcttgggatccactaggcgaagccagctgggctcctgagtcaggtggggagttggagaacgtttatgtctagctggagtattgtaaatgcaccaatcagcactttgtgtctagctcaaggtttgtaaatgcaccaatcagcactctgtgtctagctcaaggtttgtaaatacaccaatcagcaccctatgtctacctcaaggtttatacatgcaccaatcagtgctctgtgtctagctaatctagtggggacttggagaacttttgtgtctagctaaaggattgtaaacggaccaataagctctctgtaaaatggaccaatcagctctctgtaaaatggaccaatcagctctctgtaaaatgaaccaatcagcaggatgtgggtggggtcagataagggaataaaagcaggctgccagcgccagcagtggcaaccagctggcgttccctttggagctgtggaagctttgttctttcgctctttgcaataaagcttgctgctgctcactctttgggtgggtgtgccttaatgagctgtaacactcatggcgaaggtctgcagctttactcctgaggccagcgagaccacaaacccaccgggagggacgaacaactctggacgcaccacctttatgagctgtgacactcactgcgaaggtctgcagcttcactcatgaggacagtgagaccacgaacccaccagaaggaatgaacagctccagacgcaccaccattagaactgtaacactcatcttaagggtccacggctattcttgaagtcagcaagaccaagaacacacccattctggacacactttcaaatgcatccaatggaagcta

SEQ ID NO: 39044 - DNA, 1322 bp, Artificial sequence
  DNA replication origin
acagcccgtgctgctgtttaactgtggggagggtccggtgtgtcaattgaagtttgagagtttgggagctggagacccagggaggagccggtgatgccattctattttgagggtcgtggatctggagacctggggagaggccggtactgctgttgtagtttgaggttcgtggaactggagacagggggagggggcggtgctgctgctgttcatgtctgagggttgtagagatggagacccagggagaagcccgtactacggctttttaagtctgagggtcgtggagcctgagacccggggaggggccagtgctgctgttcaaatggttcctccccgggtctccagctccatgaccttcaaactaggacagcagcaccagcttggagccagaaactttctgaggagccagtgctgcctttcaagtctgagacttgtaagagctggagacccagggaggaacaagtgttgctgttctagtctgagggtagagaagctggagacccaaggaggagcctgtgctgctgttcatgtctgaggattgtggagctggagaaccagaggggagctggtgctgctgatcgtgtttgaaggctgtggagctggagatcccaggaagagccggtgctgccgtttatatctgtgggtcttggagctggagccctagcggggaacccggtcctgccattcatgtcttagggtcgtggagctggaaacctagggaggtggtggtgctgctgttctagtttaaggatcatgaagctggagacctggacaggagctggtgctaccgctgttcaaatctgagggtcatggagctggagccttggggaggtgccggtgctgcctctcaagtctgagggttgttgagctggagattcagggaggagccggtgttgctgttgttgttggaggattgtggagctggaggccgaagaggagctggtgttgcagttcaagtttgacggtcgtgtagctggagacctagggaggagctggtgctaccaccgtgtaagttgagggttgtggagctggtggcgctggggaacagccagtgctatagttgaattttgagggagctggagacccagggagtagctggtgctgctgttctagtttgaaggttgtggagctggaggcttggtgggagctggagctgcctcccaagtctgagagtcattgagctggagatccccaggggagctggtgctgctgttgtagtttgaggattgtggagctggagacctggggcagagctggtgttggagttggagtttgagggtcagggagctggagatctggggaggagccagtgctgctgttta

SEQ ID NO: 39045 - DNA, 2099 bp, Artificial sequence
  DNA replication origin
ggacagatcgtgttctagtctgagggtcgtggagctgcagatccagggaggagcaatgttgttatttgagggactggaagctgcagacctagggaggagaggtcttgttctagtttgagggtcatggagctcccgacccagggaggagcaatattttcatagttcaagggtccagaagctggcgacgcagggaggagaggtctcattctagtttgaggatcatggagctgctgacccagggaggagtaatgtttctgttgttcgagggtcaggaagctggcgacccagggaggagagatcttgatctggtttgagggttgtggagctgctgacccagggaggagcaatgttgtcatagttcaagggtcaggaagctgacgacacagggaggagagatcttgatctggtttgagggtcgtggagctgcggacccagggaggagcaatgttttcatagttcgagggtccggaagctcgcgacccagggagtagaggtcttgttctagtctgagggtggtggagctggagatccttggacgagctggtgctgcagtttaaatctgtggatcctggagctggagccctaggcattagctggtattgctgttgttcatatatgagggttatggggcttgaggtacagggaggagacgctgctgctgttcaaatctgcgggtcgtgtagctggagagcggggaggaggtagtcctggtgtctagtgtgagggtggtggagctgtagacctggggaggagctggtgctgctgtgtagtttgagggtcatggaactggagacctagggaggaaccagtactaccgccattgaagtcagagggttgtggatctcgagttttcggggacagcccgtgctgctatgtaactgtggggaggatccagtgtgtcaggtgatgtctgagggtttgggagctggagacccagggaggagccggtgctcctcttctagtttgagggtagtggagctggaaatcctgggaagagccagtgctgccatttaaatctgtgggtcctggagctggaacccttgtgggaagccggttctgccattcatgtcttagggtcgtggagctggaaacccagggaggcagcggtgctgctgttctagtttaaggatcatgaagctggagatctggacaggagctggtgctaccattattcaaatctgagggttgtggagctggagccttggtgagttgccggtgctgcctcatctgagagttgctgagctggagatccagacaggaacctgtgttgctgttgtagtttgacggtcatggagctggagactcagggaggaggggtgcggttctagtctgagggttgtggagctggagacccagggaggagctggtgctgctgctgtttaaggctgaaggttgtggagctggagaccagggagggagctgctgttgctgttgatcaagtcagagggtcatggggcttgaggtacagggaggagctggtgctgctgttgcaggtttagggtcatggagctggaaatctagggaggagctgctgctgctgttcaagtttgagggtcgtgtagctggagagcgggaaggaggtagtcttgatgtctagtgtgagggtggtggagctatagacctggggaggagccggtgctgctgtgtagtttgagggtcatggaactggagaccttgggaggagccagtgctactgagggtcgtgtatctggagctttggggaacagcccgtgctgctgtttaactgtggggaggatctgctgtgttagttgaagtttgagggtttgggagctggagacccagggaggagctgatgatgccattctattttgagggtcatggatctggagacctggggagaggccggtactgctgttgtagtttgaggttcgtggaactggagacagggggaggagccggtgctgctgttcatgtctgagggttgtagagctggagacccagggagaagcccgtactacggctttttaagtctgagggtcgtggagcctgagacctggggaggggccagtgctgctgttcaaatggctcattccggggtctccagctccatgaccttcaaactaggacagcagcagcag

SEQ ID NO: 39046 - DNA, 772 bp, Artificial sequence
  DNA replication origin
ataaatataaattattctattaggttggtgcagcagtaattccagcacttttttgccagtaaaggtaatggcaatcaaaagtggggaggagccggcgctgcagttcattgaaagtaatgacaaaaactgcgatgacttctgcaccaacctaatagaataaattacgagtgcgcaaaacgctgtgatgggaaagttccaagtgccaggacagcatctagcttcctggactcaggagatgggggttttcaacctaagcaaggttaagtccaagtggtgggggcaggcgggggggcgatatttcagtggagactccaaggatgaatggaaattagaaaagtgaacgcagatggtgaggggggaggggtttcaggcacagagaacagcatgtgcaaaggcctagcggggaggacatcgtgtgttctggatgtcctccccgctgaggggcggggactgaggggcagccagcaggctggagctgagcgggtggagaggaggatggggagccgggcaaaggcgctccacgcagggggcacagcaggggcaaaggcccggagtcaggcctgagcctgtgtggtttcaggaagtgacagaggcctgtctgggaggaaagtaacagcagaggggagaccataaggtcagggcagagggcagggccgtgctgggcactgtgggctgtggataggacctggcatttatgctcgggtgaggggaacatgttagaagattttaaggagggcaggaacatctggggataacgtgtattctagaatct

SEQ ID NO: 39047 - DNA, 1336 bp, Artificial sequence
  DNA replication origin
ggagtcgctggtgacattgggctctgattgccatgggctcagtgacgggaaggcgctgccttctatcctccccagggctgccttcgagggtgactttcaccacgattggaaggaaacagccagagactgcagggcctgagctgactcagtcactcagtcaaatgtttgcgaactgtgagctgttgaggggagcccggagagtgttgcccccagtaacttccccaggagctcgtgatccagctgaggagcccagaggataaaataattctttaattcactctgcagacacttgctgagacctcctcccaccgcactgtgtcaagcactgtcctgggcagtgggccagggggtcaccgtcctttgctcatggaaatgagaaagcacccagcagtgacaccacagggcttatctgtgtgtttgggcagctcaggtgttatgggagcaggtaggagcaggaaacccaggacagacttccaggagggtgtgctgctgtgatgatgaggactcaggcagatgaaaagagcagggaagagtcccaggcaggggaactgcacgtgcaaaatcctggaggcaagatggagcagcagagtgaagaaactgaatgaagttcagtggggtttaagcagcgttggggtgaggatgacgagggaagaaggcaggggttggggctggaggagcagacagtgcagggcctttccagccatgttgtggcacggggggtgtctttaaatgcagtgggagacctcagtgaggttagcagggatgtgatgtggccagaaggtccctctgtccatggtatggggaatggggaggaggggctgcccagggccagggtggtctgtgaggtgggtgaagccatcatgtgggtgagagaggacggtcagctgagctaggagggtgacagcagaggaagaaggaatggaacagagccaagagccatttagcagtcaactcagtaggacttgggtttgagacgagagggagaggaagggacaggggatgggagagctgcccagggttctggatgggcctggagggacggggtcaccagtcactgaggtggtgacccccaaagagcctacgtttgggggtgaatttattgggctgagttgaaggtgccgtgggacagccatgtggacctgcaggtctgaagccaggagagcggttggctggtgtggctaaggagtcccctgtgtggctgtggcccaagggtggctgagacccccaggagggggaacagagcgaatgagaaggcagactccacggaacctgagggacacccgcatttaggccccctgcaggaggatgagatgacaaaagttgctgagaaggcctg

SEQ ID NO: 39048 - DNA, 722 bp, Artificial sequence
  DNA replication origin
ggcaattttttcttacttgcccccctatgaattttaatactacataattactgcagaatggtttatgcactgtgtggacatctacatttttacataaagacaaaaatcttttcacctctgggagccagctctggcccccatgggagcagtattctccgctaagaaggcctgctcccattccttcttttgttgattttgggaggaggtgcaggagctgcctggggccttggggcagagcgattcgggagaggggacagagaggacagagtccggagaggggaggggagggatgaggccgaggagcagccaggagccccgtgtggctggggccagggggagttgagggtagaggagtgatgggtgactacagggcaggggccgggggtggggggcggagatggatcatctcaggccttaggggaccctgtgaggacttcagcttttactctgagggaagtgggagccattagagggtttcagcagagacaggacatggtctggtttattttttaatggatgatctgtgtgaggacaggttggggttgtggggtcagagctggagaaggaggccagcggggtctactgcaatggtccaagcaggagatgatggtggcttggaccagagggtagctgtgagggaggtgggaagtggccgtatccttgatctgttttggaggtagagcactggcacggtttgctaagaagggtatcaccccagagct

SEQ ID NO: 39049 - DNA, 728 bp, Artificial sequence
  DNA replication origin
aagggagcctgtctgggtggagaagagacggtaaggctgagaatggtgagggtgaggccagaccacccaggccttgctgtccatgttaaatattcacctttcacagaatggtaagggaaagccattaagtatgttaagcagaggtcagaaagtaggtgagggtgggagggggaagagcagggaggctggaggtttactcagcaaatacttcttgagcatctaggatgaggcaggggtcagaagtgagccaaaagcttccctttgcagaggtcatgttgtagtggaaggaggtgcacatttatcaaccagatgcctaagtgtagtgaggacgtgacagggtgctatgcaggaaaataaagcaggaagaaagttaagagtgaatgcaaccggggtgcatgctgagggtccagagaagacctcgctgagaaggtgacctttgagtagagacttaggtgagccttgcatatgtctggtggaagggcactccaggaaccgggaatagcaaaggcaaagggccctgagtcaggagcacgtctgccagatgccaggaacagcaggcaggccagtgcaaatggagctcaagagcaaagggaaaggaatagcaggtgggatcagggaggtgacagggaacctgggcatgagaatgttggtctgttgaaagggcttggggttttattctgaaataggagccacaagagggtcctgaggagggataaggtctgccgcag

SEQ ID NO: 39050 - DNA, 1501 bp, Artificial sequence
  DNA replication origin
tccgtgcgcgtgggacccatggctctgacaaagtcttggacaaacactgcttcccgatccttctcacccggtcgcctcctgcctacagcatctgcggacgctcagccccaagagatgcgagctgctcggggaccgccctgagtttctgagagtcctggggcgatggcacctgggtcctgtgcagatggcactggggagtctcgaaggcttcgactcgggctgagcgtgggggtgggcgcgggggatgctcagtcctgaccccaccaccgcggcccggaggacataagacgggggctgtgtcccctcagaaagagacagcaggtcccgctgtgtgcccacgctgggaagagacggtccagcctccaccaagtggaaacctgagcccagaggaatggccctgccccttccgctcgacctggccagtcctgtctgtgggtttccattgtcagccatgaaggggaattgagactcacaggtggggttaagccgagtgacgggaaggttaattctggatgcacagggaatctgaagatggaattgtgaaacattcatggatttgccccagtattccagccaaccatgcctgtgtgggtgtgtgtggggtgtgtgtgtgggggggtatgtgtgatgtgtgtgtgtgtgtgtgtgtggtgtgtgtggcatgtgggtgtgtgtggtgtggcgtgtgggggggtatgtgtgatgtatgtgtgtgtgtggtgtgtgtgtgggggagtatgtgtgacgtatgtgtgtggtgtgtgtggggggtatgtgtgatgtatgtgtgtggtgtgtgtgtggcatgtgggtgtgtgtgtggcgtgtgggtgtgtgtgtgtggaggggtatgtgtgattgtgtgtggtgtatgagtgtgtggcttgtgggtgtgagtgtgtggcatgtgggggtgtgtgtggtgtgtgtgtggtgtgggaggaagtgtgtgatgtgtggatgtgtgtggtgtgtggcggggagtgtgtggtgtgtgtgtgtgtgtgtggcgggggggtgtgtgttggggttgactgtgtatagttccctgattaatgattcctgcctcctagcctgattcaacggatggagccaaatggcctagtggttaagaacatggtctctggagccaaactgccccactaagcaggtgccttgagcactctgcctcagcttccccatctgtagcatggggagcttagtaatagtgctgtgtctcattgggttggtgtgaggactaagtgagatcatagatacagggcatggggaatagtgcccggcgtgtgccagctcccaccactctgcaaagaggacacgtcctacctccccatagccaactcacacccagcagctcctgcatggacgtggtgctattctctggggacctgcatgcacctgacttcagcctggccttcaggggtcattctccgggtgaacacaacctggttcatatgtaaaggaattttagccctaagaaggtgtctgctaggtccccactgat

SEQ ID NO: 39051 - DNA, 4052 bp, Artificial sequence
  DNA replication origin
ggtgctgttgtttaaggtttgtggagctggagacctgggtggagctgttgctgcggttcaagcttgagggtcatggagctggagacctggcaagaagtcagtgctgctgttctagtttgagagtcttggagctggtgacctgggtaggagccggtctgctgttctagttttagggtcttggagttggtgacctggggaggagcaggtgttgctgtaatagttagggtcgtgaaactgaacacctggggaggagccagtgctgctgttcacatttgagggtcatgggagctggagactttgtggcgagctagtgctgccattcaagtttgatgatggtggagctggagacctgggttggagccagttctgctttttaaatttgaaggtcatgaggctggagacctgggcaggaattggtgctgctgttcaagtataagggtcatggagctggagactcaggaaggatcaagtgctgcagttcacgtgtcgtggagctggagacccggggaggaacgggtgccccagttcaagtttgagggtcatgaagctggagacacagggaggagcaacagtttgagggatgagtggctggagacctggagaggagccagtgttgcaattcaagtttgagtttcatggagctggaaacctggacaggagtcagtgtggctattctagtttgaaagtcttggagctggtgacctggacaggagtcagtgtggctattctagtttgagagtcttggagctggtgacctgggcaggagtcagtgctgctgttctggtttgagggtcttggagctggtgacctgggcaggagtcagtgctgctgttctggtttgaggatcttggagctggtgagccagggaggagctggtgctgctgttgtagttagtgtcggggagctggagactttgggttgagccgctgttgtagttcaagtttgatgttcctggagatggagattggtggtgggggggagtcagtgtttcttttctagtttcaaggtcgtggagctggagaactggagaggagatggtgctgctattctagtttgagggtctgtagctggggacctgcagaggagctggtgctgctattttagtttaaggtccctggagctggagacctgggcggagctgttgctgtagttccagtgtgagggtcgtggagctggagacctggtgagaaatcagtgctgctgttctagtttaacagtcttggagctggtgtcctgagtaggagccggtctgctgttctagttttagggtcttggagctggcaacctggggaggagcgggtgttgctgtaagagttagggttgtgaagctgaagacctggggaggagccaatgctgctcttcatgttttagggtcgtggggctggagactttgggaggagctagtgctgccgttcaagtttgacgatggtggagctggagacctgggttagagccagggctgctttttaaatttgaggttcgtggagctggagacctagagaggagctggtgctgctgttttattttcagggtcatggatcatgagacccaggaaggagctggtgctggagttcaagttggaggcgtggagatggagactttggttggagctggtgctgctgttctagtttgagggtcgtgaagctggagaaccagggaggaggtggtgctgcagttcaagtttgaggttcatggagctggaaacctgggcaggcgtcagtgctgctgtactagtttgagagtcttggagctggtgacctgcagaggagctggtgctgctattacagttagcatcctggagctggagaatttgggtggagccagtgttgcaactcaagtttgatggtcgtggagatggagacctgggattggggagccagtgttgctattgtagtttgagggtcgtggagctggagacgcgggaaggagttggtactgaagtttaactttgaggttcgtggagctggatatgtgggcagaagtcagtgctcctgtttagtttgagggtctgtagctggggacctggggaggagcaagtgctgcagttcaagtttaagggtcgtggagttggagatttggcgagaagttaaggctgctgttctagtttgagagtctcggagctggtgacctgggtagaagctggtctgctgttctagttttagagtcttggagctgttgaccccggaagagcgggtggtgctgttatagttagggtcgtgaagctgaagaccaggggaggagccggtgctgctgtttgagagtggcggatattgagactcggggaggagcgggtgctggagttctagtttgaggtggggagctggagactttgggtggagctggtgctgctgtagtttgagggtctgtagatggggacctcgggaggagctggtgctgctgttttagtttaaggtccatggagctggagacccagagaggagatggtgctgctgttctagtttgagggtcatggggctggagacttcagccagtgctgaagttcaagtttgaggtttgtaaacctgggcaggagtcagggctgctgttgtagtttgagggtcttaaagctgttgtcccaaggaggagctggtgctgctgttctagttttagggtcctggagctggagaccaggagaggagctggtgctgctgttctagtttaaggtccatggagctggagacccagagaggagatggtgctgctgttgcagtttgagggtctgcagctggggacctggggaggagcgagtactgctgttttagtttaaggtccgtggagctggagatccagggaggagcaggtgctgcagttcaagtttgaggttcgtggagctggagacccagagaggagatggtgctgctgttctagtttgagggtcagggagctggagacttcagctagtgctgaagttcaagtttgacgtttgtggagctgtaaacctgggcaggagtcagggctgctgttgtagtttgagggtcttggagctgttgtcccaaggaggagctggtgctgctgttctagtttaaggtccatggagctggagacctggagaggagatggtgctgctgttgcagcttgagggtctgcagctggggatctggggaggagtgagtactgctgttttagtttaaggttcgtggagctggagacccggggaggagcaggtgctgcagttcaagtttgaggttcgcagagctggagaccttgggaggagcgagtgctgctgttcaagtttgaggttcgtggagctggagacccggggaggagcgggtactgctgttcaagtttgaggttcatggagctggagacgctgggaggagcgggtgctgctgttcaagtttgaggttcgtggagctggagacccggggaggagcgggtgctgccgttcaagtttcaggatcgtggagctggagacctggtgagagaagtcagtgctgctgttcttgtttgagagtctcggagctggtgttttaggtagaagctggtctgctgttctagttttagcgtcggagctgttgaccccggaggagcgggtggtgctgttacagttaaggtcgtgaagctgaagaccagaggaggagctggtcctgctgttttattttgagggtcacagatattgagactcggggaggagcgggtgctgaagttctagtttgaggtgtggagctggagactttaggtggagctggtgctgctgttcttcttgtttgagggtctgtagctggggacctggggaggagccagtgctgctgttttcgtttaaggtctgtggagccggagacccaggaaggagctggtggctgtagttcaagttagaggtgtagagctggagactgggtgtagccagtgctgctgttctaatttgaggtttgtggagctggagacccagggaggagctggtgccgctgctgttgtttaagtctgagggttgtgtagctggagacctgggaggagcctgttgtgctgtttaagtctgaggttcgtgatgctaaatatggtgccggtgttgggtaaggagagagagaagagaggaggagagagagaatgaatca

SEQ ID NO: 39052 - DNA, 996 bp, Artificial sequence
  DNA replication origin
tgtgctgctgtttaactgtggggaggatccggtgtgtcaattgaagtttgagggtttgggagctggagacccaggagggatccgatgatgccattctattttgagggtcatggatgtggagacctggggagaggccggtactgctgttgtagtttgagggtcgtggaagtggagacaagggtaggagccggtggtgctgctgtttatgtctgaggattgtagagctggagacccagggaggaaccagtgttgctgttctagtctgagggtagtgaagctggagacccagggaggagccggtgctattgttcatgtctgaggattgtgtagctggagacccagggaggagccggtgctgctgatctagtttgaaggctgtggagctgcagatcccaggaagagccggtgctgccgttcaaatctgtgggtcttggagttggagccctggggtgacccagttctttcattcatgtcttagggtcatggagctggaaacccagggaggcggcagtgctgctgttctagtttaaggatcatgaagctggagacctggacaggagctggtgctaccgctgttcaaatctgagggtcatggagctggagccttggggaaggtgtcggtgctacctctcaagtctgagggttgttgcgctggagattcagggaggagccggtgttgctgttgttgttggaggattgtggagctggaggccgaagaggagctggtgttgcagttcaagtttgacggtcgtgtagctggagacctagggaggagctggtgctaccactgtgtaagttgagggttgtggagctggtggctcggggaagagccagtgctatagttgaattttgagggagctggagacccagggggtagccggtgctgctgttctagtttgaaggttgtggagctggaggcttggtggggagccggtgccgcctcccaagtctgagagtcattgagctggagatccacaggggagctggtgctgctgt

SEQ ID NO: 39053 - DNA, 1373 bp, Artificial sequence
  DNA replication origin
cggtgctgctgttcatgtctgagggttgtagagctggagacccagggagaagcccgtactacggctttttaagtctgagggtcgtggagcctgagacctggggaggggccagtgctgctgttcaaatgactccttcccgggtctccagctccatgaccctcacactagaacagcagcagcagctcctcccggggtcttccagctccatgaccctcaaactagaacagcagcaccggctccaccctgggtctccagatccacgaccctcaaactagaacagcagcactgactcctccctgcgtctccagctctacaacactcagacttgaggagctggagaggcagggaggagccagggctgcttttctactttgagggttgtggagctggagacccaagatgcagcagctgctgctattctagtttgagggccttggagccagaaactttgtgaggagccggtgctgcctttcaaatctgagagtcgttgagctggagacccagggaggaaccggtgttgctgttccagcctgacagtagtgaagctggagacccaaagaggagccggtgctgctattctagtttgaggttagtggagctggagatcacaggaagagccggtgctgctgtttaaatctgtaggtccccgagctggagccctggggggagatggtgttgttcttgttcaagtctgagggtcgtggggcttgaggtacagagaggagctgctgctgttcaagactgagggtcgtgtagctggagagcagggaggaggtagtcttggtgtctagtatgagggtggtggagctgtggacctggggaggagccggtgctgctgtgtagtttgagggttgtggaactggagacctggggaggagccggtgctaccgccatttaagtcagaggatcatggatctggagcttttgggaacagcctgtgctgctgtttaactgtggggaggatccggtgtgtcaattgaagtttgagggtttgggagctggagacccaggagggatccgatgatgccattctattttgagggtcatggatgtggagacctggggagaggccggtactgctgttgtagtttgagggtcgtggaagtggagacaagggtaggagccggtggtgctgctgtttatgtctgaggattgtagagctggagacccagggaggaaccagtgttgctgttctagtctgagggtagtgaagctggagacccagggaggagccggtgctattgttcatgtctgaggattgtgtagctggagacccagggaggagccggtgctgctgatctagtttgaaggctgtggagctgcagatcccaggaagagccggtgctgccgttcaaatctgtgggtcttggagt

SEQ ID NO: 39054 - DNA, 2081 bp, Artificial sequence
  DNA replication origin
tgaggaagctggcgacccagggaggagaggtcttgttttcgtttgagggtcatggagctgcagacccaggcaggagcactgttgttttagtttgagtgtcagaaggctggcgacccagggaggagaagtcttgttctagtttgatgttcatggagctgcagacccaggcaggagcaatgttgctgtagttcgtgggttaggaagctggtgactcagggtggagaagtcttgttctagtttcagggtcgtggagctgcagacccaggcaggagcattgttgttttagttcgagggtcacgaagctggtgacccagggaggagagatcttgttttaatttgagggttgtggagatgcagacccaggcaggagcaatgttgttgtaattcaagggtccggaagctggagactcagggaggagaggtcttgttctggtctgagggtcctggagctacagacccagggaggagcaatgttgttgtaatttgagggttcggtagctggcaccctggggaggagaagtcttgttctagtttgagggtggtggagctgcagagccagggaggagcagtgttgttgtagtttgagggtcatggaggtacagacccagggaggagccgtgttgttttgagtgtcgtggagccggagatccacggaggagctggtgctgcctttccagtctgagagtcatttagctggagatccagggaggaaccggttttgctgtactagtctgagggtagtgaatcttgagccggaaggaggagtgggtgctgctgttcatgcctgagtgttatggaactggagaaccagaaaggagctggtgctgctgttttagtttgagggtagtggcgctggagatcctgggaagagccggtgccatcgtttacatctgtgggttctgcagctggagccctaggcaggagctggtgttgttgttgttcaaatccgaggtcatggggcttgaggtacaggaaggagctgctgctggtgttcaagtctgagggtcgtgtagctggagagaggggcagaggtagtcttggtgtctagtgtgatggtggtggagctggagacctgtggaggagccagtgctgctgtgtaatttgaggatcatggaactggagatctagggaggaaccagtgctaccgccatttaagtcagaaggttgtggatctggagttttggggaacagcccatgctgctgtttaactgtggggaggatcctgtgtgtcagttgaagtttgagggtttgggagctggagagccagggaggagctgatgctgctgttctagtttgaggggagtggagctggagatcctgggaagagccggtgctgtcatttaaatctataggtcccgaagctggaaccctggtggggagccagttctgccattcgtgtcttaaggtcgtggagctggaaacccagggaggcagcggtgctgctgttctagtttaaggatcatgaagctggagacctggtcaggaggtcgtgctacggttgttcaaatctgagggtggtggagctggagccttggggagttgccggtgctgcctctcaagtctgagagttgttgagctggagattcagggaggagcctgtgttgctgttgtagtttgagggtcatggaactggagacctggggaggagctggtgctaccgccatttaagtcagagggatctggagttttggggaacagcccatgctgctgtttaactgtggggaggatctgctgtgtcagttgaagtttgagggtttgggagctggagacccagggaggagctggtgatgccattctattttgagggtcgtggatctggagacctgggtagaggctggtactgctgttgtagtttgagggtcatggaacgggagacagggggaggagccggtgctgctgttcatgtctgagggttgtagagctggagacccagggagaagcccgtactacggctttttaagtctgagggtcgtggagcctgagacctggggaggggccagtgctgctgttcaaatgactccttcccgggtctccagctccatgaccctcacactagaacagcagcagcagctcctcccggg

SEQ ID NO: 39055 - DNA, 708 bp, Artificial sequence
  DNA replication origin
gtcgatgcagcagtaattccggcttttgccagtaaaggtaatggcaaacaaaagcggggaggagctggcgctgccgttcattaagagtaatgacaaaaactgcgatgacttttgcaccaacctaatagaataaattacgagtgcgcaaaacgttgtaatgggaaagttccaagtgccaggatagcatctagcttcctggagtcaggagatgggggttttcaacctaagcaaggttaagtccaagtggtgggggcaggcggggggcgatatttcaggggagactccaaggatgaatggaaattagaaaagtgaacgcagatggtgaggggggacgggtttcaggcacagagaacagcatgtgcaaaggcctggggggaggacatcgtgtgttcatggactgagaggcggccagcaggctggagctgagcgggttgaggaggatggggagccggggaaaggcgctccacgcagggggcacagcaggggcaaaggcccggagtcaggcctgagcctgtgtggtttgaggaagtgacagaggcctgtctgggaggaaagtaacagcagaggggagaccataaggtcagggcagagggcagggccgtgctgggcactgtgggctgtggataggaaactggcatttatgctcgggtgaggggaacttgttagaagattttaaggagggcaggaacatctggggataatgtgtat

SEQ ID NO: 39056 - DNA, 996 bp, Artificial sequence
  DNA replication origin
agggaacccttgatgggctgggattcttagtgacttggagtgctgactatttgaatgtgaatcaggatttgttcagctgcaaggagtagagtaaattaacagttgcttagtcagtgcttctgaaactttcgtgtgcatacaaatcacctgggttccttgttaaacagcagcttctaattcattgggcatggaatggcatctataataagctcttaagtaaagtccacgcttctagtccagggaccataatttgagtagcagaggggtgtacactgcaactaccagggagcttccaacttaattggaatcctccagaattccaatttaattggtatggggtgtggtctgggaattggcaaattttaaatccccccaggtgcttctagtgcacagctaagacaagaaccactgacttaagcaatagagacttttccttaccgcacggtacaagaagtccagaaggccgcgttttccaggctggtttggcagcactatcgtgtccggaattggtgggttcttggtctcactgacttcaagaatgaagccgcggaccctctcggggagtgttacagcttttaaggcggtgcgtctggagttgttcgttctctcccggtgggttcgtggtctcgctggcttcagaagtgaagctgcagaccttcgtcgtgagtgttacagcccataaaagcagtgtggacccaaaaagtaagcagcagcaagttattgcaaagagcaaaagaacaaacctcccacagaacggcaaggggacccaaatgaattgccactgctaggtctggcagcctgcttttattctcttatctggccccgcccacatgctgctgattggtccattttacagagagccgattggtctgttttacagagagctgattggtccattttgacagggtgctgattggtgccatttacaatccctgagctagacgtaaaagttctccacctcccccctagattagctagatacagagtgtccacaca

SEQ ID NO: 39057 - DNA, 927 bp, Artificial sequence
  DNA replication origin
ggagcatgatgccaaagccaggcctgggtcgccagctgggagtggacaggaaggggcggacgaggcagccactcaccgcggagcaccctggggcatctggtccttgactcgcaggtttttggccagaatctccacccttgggccctggaagaaggaaccatcaggcaggggcctctgcaggttcagggcacgtgaggaagcacactggggggtgggggtggggcccagaagcccaaggacccagaagctaagatccttgctcccctccagattcagagaaggctcaggtctggggctggtggctaccagcccctcatcccaccctggctgcaagcatgccacgccctcagcccagggtgctggaggaccctgtggccaagcggcctcacctgcttccgcatgatgtccgtggcctgcatgatgcacttgggcagcaacccgtggctccgtgccaagatggccgcctgctccagggacacgctcagggtgctcctgcagcaggggagggaggacagcgggttggcggtggggggacaggggtcgggggaggacagcgggagtcagaggacagtgggtgagagctggggcaacttcctgtccctccgaggcctcccagacccaatcctgaccatcacggcaacgcctcctcctgccgtccctccccgcttgctcctcttcctccaggcagccaccaccctcactggcaggcactctggtgcttccccgtctgcagaagccctgttgagttccctgtgacattcccagtgcctcgctcagaggaggactcggtaaatatctgctgagtgagtgggggactccctgggagcctcacgacttgtcggctccgtggggtttgagatggacacatcgattcacacctctctgggtttctcaacagttctagaacgtggattctgcagcaagacc

SEQ ID NO: 39058 - DNA, 698 bp, Artificial sequence
  DNA replication origin
tcaaggggatttctggaggaagagggctccaggcaggggaagcagctagggcagaggccctgaagtgggaccgtgtctggcgcattggaagagcagaaggaagctgatggggctggagcagtgagtgagagggagggctgggtagtgaggtctgtagggtaacggggtccagccctggaggcccctggcaaggacccatggggagccactggaagcttctgatcgaagtcctgtggctgcaagtggagctcagattgtcaggggcaaaggtggctctcgggggagctgaggaggtggtggctcagcagagtgcgagagcaggggtgggaggagcagacccgtgctaggggtaggtaccggggagcaaagcattttgtctttgaaaaattatgcatctggtttttcacttttcccttttatttaacacagatcttctcttgacaggaggggtggaaagttttaaatatgattatttcagtaaaaaggcgagctgacttagggaaaatgtggttgatcgatgggttggtatgtggaagtggcagaaagcaccaaggtggaatgtgtctgctgaaagctgtggaaacacctggtttgagagcaggctcccagctcggctttatctgcaggggggaatgggagggacaattgtgcagcatagggttggagacctgccttagacggggatgtgggcagggtac

SEQ ID NO: 39059 - DNA, 1068 bp, Artificial sequence
  DNA replication origin
gttggaattaaagcacttaatgggatagggcacggcaagggggcagagaaggtgctatcggagctgaggcctgaacgaaatgaaaaacaaaacttcataaagagtggaggaacatgctccaggcagcagacacagcacgtacaaaggtcctgagggaggccccaaggcactggaggataagaaaagagatcaggaggtcaggcgcaatggctcacgcttgtaatcccagcactttgggaggccgagacgggttgatcgcttgatcccaggagttcaagaccagcctgggcaacatagcaaaaccctgtctttataaaaaatacaaaaattagctgggtgtggtggcgcaggtctgttgtcctagccactggggaggcagaggagaggagagaggagagaggggaggggagaaaggggaagggaggggagagaggggaatggaggggaggggagggaagaaagaaaggggaggagagaaagaaaaggaaggaaggaaggaaggaaggaaggacgggcacgagagagagagagaaagaagaaaagaaaacaagaaaagagaaaagaaagaagagagaggaaggaaggaggaagggagggaaagaggaaagagagaaggggaggggaggggagtgagaggtttaattttatcctaagtgtgacgggaagcattgggggactttacagtgaggggcatgaaatcagagggaacagcagtccctgcagtactatgggagagaagttaatggagccgtcttcatatgagtcaggcttcagctccaaccctggcagtgaccagaaacctaacctctgagcctctgtcttgactgcctgctgcaggccacgcgttaagatgggggctgctgtggggtatgcaggatgagttgcttcaggaggccaacctctctatacagtgtacggggaggggacaggagaggcaagggaacagaaagggagacctgcaagcccaatctcttttgttaggagggtagtctcagccagtgatgcagcctggcttcttggcagagttgccccctaccacctagaatccacctattctggtactccaag

SEQ ID NO: 39060 - DNA, 788 bp, Artificial sequence
  DNA replication origin
tttttggttctagagacacagcagggaacaagacagacaaaagctcctgttctcccagatattacgttctggtgaggataggagagacacttaataaataagaataagaggaatacatcacatgcccgctggtgctaggtgcaatgtggtggagggaacggtgtgggagcgggggcaggggatctccccctcacatgggcggggtggtgcagtttacacagggggtcagggacggccatactgaggagggacatttgagcagagggctgagggaagtggggagtgagcccaggccacatctggggagcagcagctcagaggctcttaggcagagcgagccaggtatgtctggggagcagagagggggccagggtggctgaatggagtgagaggggagaggagtggcgaggaagccgcgtgggcgcaccatgccaggctgtgtccactcctggaagggcccagacccctgcccggctcggagtacaggagcagtgtgtgtggcttcagttcagacaggtcccctggctctgtgtggagactttagggatgatgctggcagcagggagggcagtaggaggcaacgctagaattccagcaggggaggatgctggctgagaacagggtggtgggggtggcaggagaaatggtcagattctggatgttttgaaggtggacctaataggttgctcatgggtgagtagggcgttgcaggtgagagacagaaaggagcagagaatgactccaaagcctttggcttgagctgccattgactgagctgggatgctatg

SEQ ID NO: 39061 - DNA, 856 bp, Artificial sequence
  DNA replication origin
cccaaatatgagaatattttattcaattataattatacatgtaattattatttaaaaaaattattaaagagatattttgtgttgttttttaacactaagttctcaaaatctggtgtgtatgttatactcacaaaacacctaaatttgtcgtgggtacgtttggagtgcccagtagctacctgtggctcgtggctaccatattggatagcacaggtctagatgactgtggaaactgagaggttctttgtgacacccacatcctgtaattctaagctctaaaagttgagggttcaagaggagcgaagctctttcactattcagtttttggagggtcaggatagtttcttcaccttctttgtgtctttcactggtgcttcttgcgctctgtagagtctaggagtaagtagatggttggctgagtaggtagatggaggcaggtgcatgtgtgatgggaagtgtggtgacgggttgtgtgggcacacgggatgaggcgcagatggctgggggtttgggaggtgaatggatggtagaaggaggcagggagggaaggaaggaatgtggacggatgttggaattgacgtgtgtgtgagtgaatgagtgtttgaatgcttggaggtttaggagatggctggatggaggaatagatggaaagctgggggcatgtgtggatattcaggcagttagagaaatggatatgaagactggcagatatgtgtctagatgaatggtagattggggccttcaggtatggtgtgttgagtgaatggatagatggatggaaggctgggtggttatataattgggaaggtgggttggtgacggaggtttggagattagtagatggatggccaattgg

SEQ ID NO: 39062 - DNA, 948 bp, Artificial sequence
  DNA replication origin
cgagcccggcggcgacggggccggggactgcgcccacccggacccccgggcccctggcgccgcggcgcccagctccggccccggcccgtgcgcggccgcccgggagtccgagcgccagctgcgcctccgcctctgcgtcctcaacgagatcttgggcaccgagagggactacgtgggcaccttgcgcttcttgcagtcggtgagtgtcgctcgggagcttggggacagctttccctccagccgctcgccccgctgcggtccccacaacctgtggccgtggtccccgtgggtggagaattgcctcgggggcgccccgcagggcgcgcggaaagcgggggggatccgagctcctccagagctgtcgcgtcgcctccctccctggccggcgcacggtcctgctccgaccggggctctcccgcactccacttccccgcggcgcgcgctgcccttttgtcttttcttccccgtccccgcctttcaaatagttttaaaattagttacatccgcgatgcaggggcttggggaccccggcggcgccgggagctggcgctcctgcgtctttttcccaggaataactacgcgcccggtgcaccactcatctaggacataccgtaggagccccagagcccaacgtccctgcgcgttgatggagtaggataaaacctgaagctcagaggaggggcggggattgacagaaccccagggtagaatcccccatgcacaggtttttgctggagttcggggagagtgggtttcgaactcaaaactcggcagtccaggctccctaactgcatccacccccaccaactccccatctccaagtgcaaaaccacggcctcagactttgtaaaataacaaccgaccacttactatgtgccagacaccttacatgtgtcattaattagcaggtttaaccttcacaggcggtctatgaagtagggacgagta

SEQ ID NO: 39063 - DNA, 1108 bp, Artificial sequence
  DNA replication origin
gcgccagggaccgtctgccaagtgccacgccgcgctcggccgcagaggcgctctgcgcgtgcacggggcccctggggacgcggcgcggcgctcggcgcctccgtcggaagctcgggggtcgggcgggagcctccggaagggccccgcggagccgggagtccgaggccgcgcgcacgccgaaccgagcgtaccaactccgcgcccggacgcgtggcgcccccccaacccgcagtcaccgcgggctacgccactcccacccggcacacgcgacacccgccgcgcgcaggctcctgcttgcaggtccggccgctgctcgggccaagtaaacaccgggctgggaaagctcgctgcggagccgctcgggggcaagccagccccgccacgcgcgcctccgcggccccgggaagtcaggggcgaccgctgcctgggcagtgacggcccctctctgggcagtgacggcccctcccgggaacgccgggccctcgcggtgccctcggtgctaccacgaccttgggaaggaacatgcgtggcgcgcgctcgctctcacttttctctttcccgtttcctttcccatctctctctttccttccttccttttctttctgaacttctttgccccctgaccctgccctttccacctttcccagaagaaattattacctgctcttgagttattgatcaagtggcaggtaccctgcctgctcccccttccatccacccaccccatgggataaggccttgggaaacccagcttcttgtcaggttgctctgggcaatgttgatcatcacccgccttatcggaaggtatggagaggggaggaagttctggggcctagagtcagctgctcaggttcaaatcctagctccccacttgctggccgggtggccttgggctggtttccttgcttcaagatcctcagtgttttcatcagtataacgggaacgatcatggtacctagctccaaggtcctccccggggttccatgggaagtacttagcacctagaaagttctctgtaaatgtttgttcttactattattgcatgtgtgaagcccaacacctagaaagttctctgtaaatgtttgttcttactattattgcatgtgtg

SEQ ID NO: 39064 - DNA, 1092 bp, Artificial sequence
  DNA replication origin
aggtggtgatggagatgagaggagagaagcgcaaggtaacgggaggtgaaggggagcacgagaatggagatgacgtgggtaagagaggagatgaggaaaggaaggggaacgagaggattggcaaaaaagaacggtgacaaggagagatgataaaggggcaggaggagaaggcgagtaggaaagaaaagaggtgagggagcgaggactggaagctggtgaatgaatgagaagtgatcgggagtaaggggcgtcaggaggaaggaggaagggcgatgagaaggcggcggcggaggggaaggggggaggcccggcgcggcggctcacgcctctaatcccagcgcttccggaggccaaggcgggagcatcgcttgagcccaggagttcgagaccagcctgggcaacatagggagaccctttctctacaaaataaaaagtaaaacagccgggcctggtggcgctgcttgtggtcccagctactggggaggctgaggtgggaggatcgcttgagcctcggaggttgaggccgcagtgagctgtgatggcaccactgcactccagcctgggccacagaaggagaccctgtctcaaaaaacaaacaaacaaaaaggaggtgagttagttatggaggagatgaggtggtgtgggaagaggtgagagggaggcacagaggtaaaagaaaaaggagaaagacaggagggagaggggaagtgaaaaggaaagagaggtagaaatgagaggaggggaaagagtaggagaaagggtgaagggagaggaggtaggaaggggagctgtcaggaagaacagaaaagaaagaaaaagatgagagtaacaagttaggaaaacaggaaagagatggaaaaaggaatggtgtaggaaggaggtgaaggggaaggaggtgaggaagagtggaaagaacatgctgggagaataggaaatggaaggggtggagggagaggggaggtgaaaggaagacagagagggagagagagaaggtgtgtttatgtctattctccacaagcagggtttcaccacagccactggcaagatacacacatccatatgaccctcctgtcacagcagcagtgaccttgc

SEQ ID NO: 39065 - DNA, 987 bp, Artificial sequence
  DNA replication origin
ttcgggatcggggggaagcggaggccaggaggccgggccaaggccgagtaggatagggcaacggccgacgtgctgaggccagcgcggggcagggcgggagcggctcacccaccgagcgccacctggcaggccctgcgcagctgggagtgctggggccgcttcacctccttgtcggctaggatcttctccagggcccgggacacgaacatgctcttggtctggctctcctgcatggccccggcccggcgggggctgacggccccgcgggcgggcggcgtgagcgagatggcgagctaggctgcgggcccggcgtcccggccggcaccggccgcgtccgtccgcgccgccccgtcaggaagcgacacctcggccccacggcgccgccatgttggagcgcgtcacgtgaccacgtgactggcgaggccgctacggccgcctagcgtccgtcggccccgtgacccccagcggggcggagcctaaggctgggggcggagcggagtcaggtgggcgagagacagaaggcgagggtggagggtggaagaagagaaggtggggaggggagtgggcatgggcgaagggtataggggacgcgggggctaaagaaaggcgaaagcggggagaggtggtgatggagatgagaggagagaagcgcaaggtaacgggaggtgaaggggagcacgagaatggagatgacgtgggtaagagaggagatgaggaaaggaaggggaacgagaggattggcaaaaaagaacggtgacaaggagagatgataaaggggcaggaggagaaggcgagtaggaaagaaaagaggtgagggagcgaggactggaagctggtgaatgaatgagaagtgatcgggagtaaggggcgtcaggaggaaggaggaagggcgatgagaaggcggcggcggaggggaaggggggaggcccggcgcggcggctcacgcctctaatcccagcgcttccggaggccaaggcgggagcatcg

SEQ ID NO: 39066 - DNA, 1196 bp, Artificial sequence
  DNA replication origin
aagagacttgaacttgtttaaatgtcattggggagggagccagttcaaggagaggtttggtaatgcagaaagaagaaaggacagtgtttcattttttcaacaaatgttgagtgcctgccactctgtgctgaagaattctcagtacttgggaattcagcagtgaacagaacaggcaaagtgtctgttgtcatagagtttatgttctgctggggaaggcagatagtaaatgaactgatatataatatgtcaagggtgataaatactaaaaaaagactaaaaaaatgaattagtaaagtgagagaacaaaccaggtaaggagatacagggtgacaagggggtggcagtattaggtgctgaggaagtcccctgaggaggacatcagagcagagatctgaaggaagtgagggggtgagccatggagatatctggggggagggagggcattcccaggagcaggaatagctcatgcaaaggccccggggcagaaatgtgcttggtgtgttcgagcaagtaggccagggccagggtggtagaaggtgagagcagagggatagcaggggccagatcacatagaggtttggaggccaagatcgagagttttaattttacgcggagtgggatggaaagctactggagcattttgagcaaaggagtgttgtgatctgagttacattttgagggcatccctctggctgctgttgagaaaagctgtggggtggaagggaggataattgctgaagcatggagaccagttacaagaccattgtgatggcccaggtgggagataacagttgcttggcctagggtgatagtggtggcctagtgtggtaagaagggatcaggttctagatattatggatagtgtgaagttcctgagaaggcggatagggatgggaggtgacagaggtggaggggttggacacccactcccttatagcaggagagagcagagagtaggcccgaagtgggtcaggttgtaggtttgctaacagcaagctgagggagtctccttgtgcccacttctaatttctgagtgaagtaggaggccactccattggttgtgagtaaagaggacggcagcagaacagcgatgattgggaggggagagttgggccattgagggtggagaaatgtgcagtagccatcgtggagagtgagaggtgaccaaattactgggcagcatttcaggtttcatt

SEQ ID NO: 39067 - DNA, 1004 bp, Artificial sequence
  DNA replication origin
cgccccatgcgggaagtgaggggcgcctctgcccggccgcccctactgggaagtgaggagcccctctgcccggccagccgccccgtccgggagggaggtaggggggtcagcccccccccccggccagccgccccatgcgggaagtgaggggtgcctctgcccggccgcccctactgggaagtaaggagctcctctgcccggccagccgccccgtccgggagggaggttggggggtcagccccccgcccggccagccgccccgtccgggagggaggtgggggggtcagccccccgcccagccagccgccctgtccgggagggaggtgggggtgtcagccccccgcccggctagccgccccgtccaggaggtgaggggcgcctctgcccggccgcccctactgggaagtgaggagcccctctgcccggccaccaccccgtctgcaaggtgtacccaacagctcattgagaacgggccatgatgacagtggcggttttgtggaatagaaaggggggaaaggtggggaaaagattgagaaatcggatggttgccgtgtctgtgtagaaagaggtagacatgggagacttttcattttgttctgtactaagaaaaattcttctgccttgggatcctgttgatctgtgaccttacccccaaccctgtgctctctgaaacatgtgctgtatccactcagggttgaatggattaagggcggtgcaagatgtgctttgttaaacagatgcttgaaggcagcaagctccttaagagtcatcaccactccctaatctcaagtacccagggacacaaacactgcggaaggccgcagggtcctctgcctaggaaaaccagggacctttgttcacttgtttatctgctgaccttccctccactattgtcctgtgaccctgccaaatccccccctgcgagaaacacccaagaatgatcaataaaaaaagaaaaaaagagagaaatgcaaatcaaaaccacaacgagataccatctcacg

SEQ ID NO: 39068 - DNA, 1018 bp, Artificial sequence
  DNA replication origin
aggtaaaacctggttttggaatgggaatgagcaagcgttgacaggactggcagcagcagcagtgcagggcacagggaccgaagagagcagccctctcctgtgaccaggaaagagttgctacctggaagagtaactgcagaaacccaagaaactccagttgcaaatcctatgttcacagattttctttggttttctaaatttacccttaagtattcccacaagaattaggaattgctgcactttctaaactactcttttgttgaagaaaaaaaaatcttgaggccagtcccagtggctcacgcctgtaatcccagcactttgggaggctgaggtgggcagatcagtttaagctcaggagctcagaccagcctgagcaacatggtaaaaagacttggagtccatctaataaaaaagaaataaagaaagaaagacactcttgaaaagtcttctccactaggcccagtaggggcccagatgataacggcatctttgtaagggatgggaggaagcccatggaggggctgggagagggcggcctgactcaacttttcttcggacagatcactctggctgctgtgaggataaagaggaaggtggccaggacagaagcagggaaaccaatcaggaagttactgctaataatccagcctagcagcaatgggggcttagagcaggacagagcccgtgcaggtggagagaaggcacagtctgaagcacaccagcaccttttgtttttgttttggagacagagtctcaccctctcacccaggctggaaatgctcaaatagcagtagtctcatatggcccaacctaaaagttgggttcttgatatatctggataatgcaatcttttttttttccattaaaagagggaagaacaatcccaacaaaaaatgggcgaaggatatgaacagacacttctcaaaagaagacatttatgtggccaaaaaacatatgaaaaacagctcatcatctctggtcattagagaaacgtaaatcaaggcccgatgtggtggct

SEQ ID NO: 39069 - DNA, 2155 bp, Artificial sequence
  DNA replication origin
cccacccgccgcccacctccccaccgcggcggcgcccgcgagggccccaccaggcccggcccggcccggccgcctcacctggctgctgctccgagctcgtcccccggccggcggtcctgggcggtggcggcgaggaggggaaggaagaaggaaaaaagggagaggaagaagggacgaagggagggaagaggcggagtggccgtggaggaggcgggcgccgccgggccgggggggggaggcggtcaaaggaagcgggagccgagagagacgcggcagccgccggcgcaaacgctgaagagccgctcaggcgcccgcagcccggcaggaagtgacgggggaggggcaggcgcccgcccccggcccccgcccgcctccaggcccggccccggccccacccccacccacggtccgaaccacaagttccggctggcactgcggcggagcctgcgctcgcaaggcacgccgggggcccagcgggaggagcgccctgtcccgcctggaccgcagcggcccgtcctgagtcccggggcctgccgggagttgtagttctggtgggagtttcgcgctgcctgctggactcgaagcgggtctgggagaacccagcctaccttctttcctcctccacttcctttttccttccttgctgtcgcttcttcctcttgtcctgcctctggccttcctttctctccttcctgcagttgtttcttcctccatctgtaaatgttcattaaatgcttgccatatgcaaggcattgctccaagagctaagaatgtagtggtgaactgacaaaaatccctgccctcgtggagcttacattcttgtgtaagtaaaatacacaataaataaaattgaaaaatgtgtagtgagataaaagacaatggcccgggcgcgttggctcaggcctctaatcccggcactttgggaggccgaggcgggcggatcactaggtcaagagatcgagaccatcctggctaccacggtgaaacccccgtctctactgaaaatacaaaaaattagccgggcgtggtggcgggcgcctgtaggtaaacagctactcgggaggctgaggcaggagaatcgcttgaacccgggaggcggagattgcagtgagctgagatcgcgccgctgcactccagccttggcgacaaagagacactggtctcaaaaaaaaaaaaaaaaaaaaaaaaaaaaaaaaaaaaaaagacgagaagtgccagattactatttatttcacccagacctagataaactaagtggtttttagcagctgtattgtatgggaggttggagagagggtggccagtaaagaatcttggccaggcgcagtggctcacgcctgtaatcccggcactttgggaggccgaggtgggcggatcacctgaggtcaggagttcgagaccagcctgactaacatggtgaaaccccgtctctactagccggatgcagtggtgggcgcctgtaatcacagctacttgggaggctgaggcaggagaatctcttgaacccgggagacggaggttgcagtgagccgagatcacgccattgcactccaacctgggcaacagagtgagactctgtctcaaaaaaaaaaaaaaaaaaaaaaagaatcttgaacttctgcacactcagcgaaaattatgctcgcgttgtgagaggtccaagaaactgagaatgaatgaaggaactgcaggtgcacagagcttctctctcccgctcactctgggactgccgccccactatttaaaaataattctctctttcttaaatgtctctcaatctaataattgctcaatctctcttgccaacggaatataaattcaaaatacgagctgctgtgtctgaagaggcccctccaaacaaggctttggagccttagcgaagcctgggaggacacttgcctccttacattgcttcttgtgaagtgcaatgacactgaatttcagaacaccaaaaatagtcaaaggactttcaccgtccctttagtgcccatccaagacagtagtaagcaacattcagatattgtccagccctctgctaaaagtgatcttttctttctaacttccaagcagtgtggatcccatacctccttgggtaaaggagcagatgcagagaggtctccctaaacccaaagctgcgcacaatcagacaatctcg

SEQ ID NO: 39070 - DNA, 1553 bp, Artificial sequence
  DNA replication origin
agaaagaaattacatgtttcaataaccaggaggtttggcaactacgaggtgctgtttcctcaggaccagctagaaatctgatattctttcttcctcctcattcttctaccttggtgatttttgacactggtcctgtaagaggaagaggaagcccctttaagggagcttctcaacccaactcatacacatggtgtgggctggggctaaggaaagagtgggtgactcagagtcctcagcaaagggatttttgagactgtcttcactgagttctaaaatattcataattggaaactgtgactacatttggcattatatgaggggcagcttttttcctcatctgaaaaaggagtctcttttcttccccctgggaatatctctggtgagtcccctccctcatcttatcaaacccagccctcctggcgcaggctcagtatttagagtttgtttgtttattttcaattctccgaggggaaaattccttcttccccttgttgaaaaatgctaaaatagaaactccagaaaatttaaaagaaacggaagaaaagaaaaaaagatgttaaaaaaaaggcaagggaaggaagggaggagtagacatgaacaggaaatgctgggatcgaaaacagactgaagtgtttttttttggtggggggaatcaaggcctaaagggcacgaagaagaaaatcagtgatgatcaagctggcctggagtcagaatgagaggggctagtcatcaccagagtgggacgcaggaggctgaggtcggaggcagagctgggtttgggggaagtctccagggtcctggggaatccctgacccagggagcccacggtccctaatggaaatgttatggggtcagggagcgccaaggctgtgaggtggcggggttatgggggccttggggagagggtggtagcgagcaccagggggtgcttgctgaggacggaggcggcggggtgggggcagggagcaggctgaagggggtgccgaggtgctctgtagaagagggggattgataaggtgacaggaggtgaggccggaggaatgaggggggtgcgagtggcagaagggagggcacagacaggggtaggggcagaggagatcgaagtgctgagggcagaagcggtgacggtgtcgggggtgctggggagagcgacgggccagctgaggggatggggacactaaagagagtacaggggagccgaaggggcgacggggcgctgagatgggccaggggctgagtgggtgacggggcgctgagtaggcgatggaggtctggggtctgagggggagacggggcgctgagaggcgctctgagtgggtgctgatgccgctgggggccaaagaggtgacaaggctctgagtgggtgatgggggtctggggattgagggggcgacggggcgctgaggggccaggggctctgagcgggtgacgggtgcgttgggggcttgagagggtgacaggtcttacgggcagaggcagtggcgggtcggcgcgggcgccggggttcgcggcgaggcaaggaagaatcaggggcaggggcagttgcggggcca

SEQ ID NO: 39071 - DNA, 1394 bp, Artificial sequence
  DNA replication origin
gattgagggggcgacggggcgctgaggggccaggggctctgagcgggtgacgggtgcgttgggggcttgagagggtgacaggtcttacgggcagaggcagtggcgggtcggcgcgggcgccggggttcgcggcgaggcaaggaagaatcaggggcaggggcagttgcggggccactcacccggctccggcgcgtcctttcactgccgccggcgagtgctggggcttcggcccaggcaggtcggtggccccgcccggcgccgcgcactttcggtttccgttccccgcagaccctgggcggagccgggcgggcggcccagaggaggagaaggaggaggcgggggcccagggtggagagcacgagggcctggcccaggcacggccggcgcctccgccctcgaggagggcgtcacctcagctccccccggcggcggagccggcgggctcaggcgggcgcggctgaggggagcggaccgcggggggcgggagatgactgcgcccaaggcctttgcgggcctcagccggccccagaggaaggggaacccgtcgagcggtttggtgcgtgtgaagcgcgacatggcgaggaagcggacaagcccgggtggcccggcgtgtagagggaagggggcggggctagacgcggcctggacaactactagagcgcctcgggctgtgctgctcgagactacatttcccagagcgacgcgcgcggagcgggcgggaaagagagcgtttcgggtccagtgcgcaggtgcgaaagccatctttggttatataagggaggttcaggaagccattcgttctttcgcgtctgcggtgcccggagtgtggtacttctcctagttgcagtcaggcttcatacgctattgtcctgcccgtaagttcccgttttgtgtgtggtgagtggaaactccatgttcttcgttggagacctctggtcctcccttcccttctttgtgccgtcgtctctgcggccagccctaatctccttctcgtggcttctccgtctctgaccccaaataggccttaagggcgtgggagaaatgagtttctggagctggaaaagccactgccttctgcacgggcctgagaagcccttggctggtgtaaatgatgacttcacttttttccccatcagatcgacaatgctgacgtcttatattttgccagttagttctgatacatcggcctcaaaaggcccggccttgttcgtttctgaccgtgggaagatggcggttaacgccctttatttgttggttcacaggttagagcagccagcgggtacagaatggattttggaagagggagtcaccactggacctccaaggaagccacgtgcagacatctacaaccttcgatctcctgacgagtaagtctttgtctcctatgggtctac

SEQ ID NO: 39072 - DNA, 990 bp, Artificial sequence
  DNA replication origin
ggagcctccgcccccaactcaaggcaggctacacaagatctgtctccgttggcgtcccggtacctagcttgagcccgaccatgggcatgcgtggcgtggcgcgaatcctgtccctgtcgctcgtcctggccgcggtggccacgggggcctgggagcgggggccgctgggcgtgctcttgccctggcagggctccgccgcgctgggccgctgctgtcctggccgtgacccgatgtttgtcgcccgcgggcccccgcgctgcttctgcgaccaagcgtgcggcgcggcgcggcgcgggactgctgcgcagactatacgcgggtctgcccaggtgcacccggggaaaggcaaggcactagcggaacgctcggagcggaggggagctggggcgggggatgagcggaggaagggagcccagcacctagggggctctgggcttggaggggtcacacgagccgagggcggggcgcggcgcttggggactggaagggtgcgccgcggggcagacgggacgtgcagggggtcgcgcgggcaaggagggacgcagacactcaggacctaaaggggaagcactggctgtggagctgcgagccgagaaagacgcgcaggttatgaacctgggtgcgttcatctcgggggacctgaaggagagggactcgtggagagttgaggggtgtttcggaggaggggcgcaaggactgctcacaggacttgaagggcggcaggaaggtggaggattcggcccaggtgcgggacgcaggcggtggaagggaaatgagcacaagaggcgcaggcaggaaggagagcgcctggtgcgagagaggaaggagcgcacccagtaagcggtgtcgggggggtcgtgaagcttggagggcctcgaggggagggaggcgcttgggttgaggtagggcgccagatttcgcaaatcaaaatacagcacacccagttaaactcgaatttcagataaacaaatctttctagagaaaaatatg

SEQ ID NO: 39073 - DNA, 1090 bp, Artificial sequence
  DNA replication origin
cctgaaggagagggactcgtggagagttgaggggtgtttcggaggaggggcgcaaggactgctcacaggacttgaagggcggcaggaaggtggaggattcggcccaggtgcgggacgcaggcggtggaagggaaatgagcacaagaggcgcaggcaggaaggagagcgcctggtgcgagagaggaaggagcgcacccagtaagcggtgtcgggggggtcgtgaagcttggagggcctcgaggggagggaggcgcttgggttgaggtagggcgccagatttcgcaaatcaaaatacagcacacccagttaaactcgaatttcagataaacaaatctttctagagaaaaatatgtcctaaatatcgcatgggatatacttatactaaaaaattatttgttgtttttctgaaattgaaatctaactcggagtcctgtattttatctgagagccccagctggggacgggcgcggggccaagagagctgcgagggaggaggggttgcaagcttctttcgggcggaggggtcacaaggcgaatggagaaggtgacaaggagcatggagaaaccaagaaaagggctaacgcttggagagcaaggatggaaagacgctcaaagcggaggcggaacggtctgagtgattccaaaactagtgtgtccaagctggttagaactcaggcaggcgggtccagaagccgaggggcctgacagatacgcaggtgaagtccatctgtggtccgcgtgctgggcgtggccaccgggctagtccaagcattcctggtaaaggctcctccagagtggtacccacagcgctctattaagggctattttagttgagtcattagtgggaaggacgctgcctatcccctccccccccgccaccccactcccttcttctagagatggagccttgctctgtcgcccaggctggagtgccgtggtgcgatcatcattcactgcagcctcgaactcctgggctcaagcgattcttctgcctcagcctcccaagtagctggatgacaggcacgcaccaccatgtctggctctctatcctttttaaatcccagaagtaaagttttcacacccactggag

SEQ ID NO: 39074 - DNA, 986 bp, Artificial sequence
  DNA replication origin
ttgaacctgggaggccgaggttgtagcaagcagagattgtgccactgcactccagcctgggtgacagagggagattctgtcaagaaagagggaaggaaggaaggaaggaaggaaggaaggaaggaaggaaggaagggaggaagggagggagggagggagggaggggggagggggagagggaagggggggaagggggagagagaagggggggagagggaagtgggggagggagacaagggagggaaggaggggctgcgcacggtggctcatgccggtaatcccagcactttgggaggtcgagttaggcacatcacctgaggtcaggagttcaagaccagcctggtcaaatggtgaaaccccatctctactaaaaatacaaaaattagccaggcatggtggtgcacgcctgtaatcccagctactcaggaggctgaggcaggagaatcgcttgaaccctgggaggtggaagttgcagtgagctaagatcaccccactgtactccaacctgggtgacaagagtgaaactccatccaaaaaagagaaaagaaagaaagagagagagagagggaaggaaagggaagggaagggagagagttcattaaaaaattaagtatacaataaggagaatagggcaagggccaggagagtgtgtctgggagatgaaatgtgggaagccctgaatgggcaggagatgtcagtaggaccgtgactcagctggcactgagtggaagcataaagctattttcagtgtcaacataacgacaaggcttgttccttcagtctcaaaattgcagatttctcccaactctttggttctgcgggatcccaagccctgcagtttccctgccatccccgaggctttggaaagacggttagggggtgcagacgctagatgaagacgaggctgtggaccacagggcaggaacaatgccggagctgccctagcttctcccaggtccctcggcaccggggatggctggccgctt

SEQ ID NO: 39075 - DNA, 944 bp, Artificial sequence
  DNA replication origin
agggacccataaaaagccacagcaagaagatggacactgacgaataagagagagagcacagagagacaacagtggcttgctggggtggagtagggtttgcttccctgtgaagtcccagacctaggctggattggatcaccctgtgattttaatatctccatatttataacctcactctgccccagcaagggaaaaaagcagcttacagacatgcttacaggacattgagatactgtcagatagtttaaacataagtaagaagggaccccgaggggtgggtgtggacccacacgacacatgcagttggttgtggatgcttgcgggtgaggggtcaccccctggttacttatttatttggtgagtttatttccagaatggtttggtgcagcttgtaaagatgtttcagctcttggaacaagatgtaaatttcaaaataggagagaaaaatgaggcaatgtgaaaaataaaggaggaggaggaggaggaggcaggaatgagtttgaacacaaagagtgggccagagagtctttggtgctgctgggtaatggcaggggctgtaggggactgaggaaggcttggggtgggagccaaggcagggcaggagggcactggttgatcagcaacttctctacgtcaggctgggatttggggttgcctgggaaagatggggcctgtcttcatgtgcccgaagtgctgggtgctgggagcaaatgacaaaacagtgtgtgcaaggctataaaagaggttctgtgaggttcacggagaacccagaaaagagagatgttgatgttgaaatccagcaagaccaacttgggaaacatggggagaatgtaactgagtgtggggcctaaaaaaaggggtcaggtaagtagatttgtggtaaaagaaagaggagaggaggaagcctaaatatccagccatatcttactagctagggctgactc

SEQ ID NO: 39076 - DNA, 1286 bp, Artificial sequence
  DNA replication origin
ggaaggtcaaggccggctgggagcctggtggagaggtggggggcggggggacagcatgcccagctccccgtttgctgacccgcgtccgctttcgctttctgcctcgcagccgtcgggatggaggtgagaagacggccgtgacgcgcgcccgcggggccccctgcacccccagcagcccacagcgctccctgcccccctcccccgcagcagcgggccttgccgtcgagtgacagcggcctgggggggcagggggggcgggggcggccggatcagcgatgccggcgggcatgacgaagcatggctcccgctccaccagctcgctgccgcccgagcccatggagatcgtgcgcagcaaggcgtgctctcggcgggtccgcctcaacgtcggggggctggcgcacgaggtactctggcgtaccctggaccgcctgccccgcacgcggctgggcaagctccgcgactgcaacacgcacgactcgctgctcgaggtgtgcgatgactacagcctcgacgacaacgagtacttctttgaccgccacccgggcgccttcacctccatcctcaacttctaccgcactgggcgactgcacatgatggaggagatgtgcgcgctcagcttcagccaagagctcgactactggggcatcgacgagatctacctggagtcctgctgccaggcccgctaccaccagaagaaagagcagatgaacgaggagctcaagcgtgaggccgagaccctacgggagcgggaaggcgaggagttcgataacacgtgctgcgcagagaagaggaaaaaactctgggacctactggagaagcccaattcctctgtggctgccaaggtgagtctgggatctgggggctgctggtctggggggatctgcttgcatccccatattgaggaccactgctggaggactctggctttgttcccaacgatgaagattagtaatggggaggggctaggactgagtccccagaggtgaggaccaaccccctcagacttttcccatgtggcactggtcactccatctttttattatccaagacgttatacccctacttggttggagaggtttcacagggacccataaaaagccacagcaagaagatggacactgacgaataagagagagagcacagagagacaacagtggcttgctggggtggagtagggtttgcttccctgtgaagtcccagacctaggctggattggatcaccctgtgattttaatatctccatatttataacctcactctgccccagcaagggaaaaaagcagctt

SEQ ID NO: 39077 - DNA, 766 bp, Artificial sequence
  DNA replication origin
gttaagccgcgctcgcttccgacccgcaggtggcgccgtcctgccttggtgcccggctccgggcgctccgaagtgcgggacagaatagcagcgagcgcggagccgaagctcagccccgacttgttgatctcgcccaggcagccgccgccgccgccgccgcgggagcaggaggaggaggaggtggaggaggtgccgcgcggccgcggtcctgcccccgcgcccccggcgcccgccggcgccccccgcctcggagagcgcgccccggccccgcggcgcctgcagcccgggcgagttgcctgcccggccggggtaggcccggctcagcccggccccgggaccgccgctgcccacgggcgggggcgcccgggcggccgggacgatgcgcggtccctggccccaggaggcggccgccctgggggtgagtgttggggcgtacggccttccgtgggggtgcatggggacacggacagggggtttgcctgccgcagctcggcctgttggtctgctcgggctccgcagctccaggctggaggggagcggggtgggaggcaggcaagggctgaggcctgaggggacgcgcaatccccattctggggctaaggcgtgagccctacatgcagggggtgctcaggggaaccccccgaaatcactagtgcgcggtaggaggatggcaccttttgaaaaggccagaaaatttagctcatttccccgcctcccacctcccccaccccttcccttccaagcccggggaaaggcgcagaacccg

SEQ ID NO: 39078 - DNA, 1180 bp, Artificial sequence
  DNA replication origin
accccggccgggcaggcaactcgcccgggctgcaggcgccgcggggccggggcgcgctctccgaggcggggggcgccggcgggcgccgggggcgcgggggcaggaccgcggccgcgcggcacctcctccacctcctcctcctcctgctcccgcggcggcggcggcggcggctgcctgggcgagatcaacaagtcggggctgagcttcggctccgcgctcgctgctattctgtcccgcacttcggagcgcccggagccgggcaccaaggcaggacggcgccacctgcgggtcggaagcgagcgcggcttaactcctgcctgcccggcccagcctgccggggaggccgggggcgggctccgggatcgggccaaggagacgcgcgtggccgtgcatccctctccacccaggccacctgcacagctggcctcgcgatcccgccttccttcgtcccgtcaacaacgtgtgttgaacgcctcctgtgcgcgagccgcggtgcagggcacggtgacaggcgtctgagatacagctgtgaatcaaacacaaacatccggccctcgtggagctggttggaaacagatcataaacaaaaaagcgaaaggatatatgaggcggtgacaagcgctgggggaaataatgaaacaggaggaagggtcagagggtgggagggggcagatcggaactgtaaatagcccttgctttcatgagcttccattctagattttagcggggggtcgggggtgggggacggaggcggacaatgaatacatcagtacatatgcaatgtggcaggtggtgataaccgctaagaagaaaaataaagcgaggtatggggaagagagggtgaagagtgagctggtttatatagtctggtgattcattcattcattcattcattcatttattcatgttaagttggacatctggttattgacagcttcctatgtgcaagcagaatgccaggctccgtgaagggaaagtcttccccctggagctccccatccagtgggggaggcaaaacccatcacataatcccagaaatgaaaactggaggaggtacctggagaggcaggcaagggttctctaaggatgccacagatgggccttgtgtttactcatttattctttcaaatattcatttactgcatgataagtaaataggtgtcagcggccgggcacagtg

SEQ ID NO: 39079 - DNA, 958 bp, Artificial sequence
  DNA replication origin
ctgaaaggtgacatctgagcagagactgaaggaagtgaggggtgaaccatgtaaatatatagaatgaagtttcccaggcagggagcagcaagtgcaaaggccctgaggcaggactaagggtgacacggtggggaggcagagctgccggaccacacaggtccctgtaggccatggggagggctttggcttttactgtgagtgagacaggtgcctgctgtagggctctgagcagaggaagaacctggcctgtctttcgctttagagggatcattctggctgcagcgctgacaagagactgtagggggtggggaagcagaggcagggagagcagagaggagcagcaggatccagacaagagagggtgctgctgggccagggtcaggggtggttagattctgaacatatatcaaagtaaagccaacaggatccgctgttggatgggaccttgggggaggccatcaaggatgaatccaggtttgggcctgagtgacaggagggatggcagagccatgggcagaagagggagatggcgggaggaggaagtttcagggagaagatcgggggttgggctttgggtatgttgaatttgagatggagatgggggagtggacacctggagaagagagtctggagttcaagtttgaggtccaggcttgggagttgtcagcatagaggagtttaaatcctcaggactggaggagatactgcaggcgagggtgggtgaagaagggggcatccctggggctctccagtggtgggaagggtgaggaggaggggccaggaaggtgggaggagagccgggagtgggaagctgggtcagatgctgcagagaggctgaaaaatggtagctgtgattgctgctgtcaggtcggagatgatgagtcaggaataataatctcaaaagatactgagcacttaccctgggccaagcatcctgttgagcactttgcaaccacca

SEQ ID NO: 39080 - DNA, 787 bp, Artificial sequence
  DNA replication origin
gcctcaattccgtaaagagtcaggtagccggctctgggggcggcagacagagggtcaggggtcctcctgggacactcatgtgtggccacagctactcacaagagcttcattcatacacccagtgagcaactactaatcctactgtgcgccaaagaccattctgggcactgaacagtcggcagtgaaaaaaacaaaaatccctgtcctcaaggagctgacctctcagcacagggagacagacaacagacgagaggatgagtaaaatgaataatgcgccagctggtgccccgcggcactgtcagacacaaagctgggtagcaggatgggagggcgggggctgtggtgtcaggtgccaggtgagggaggggctggtgtcaagctgacagctgaaggctgagaaggagtcagccatgggcagagcagagggaggggtaggaagcagagcaagcaccaggtgtgatgtcctggggcaggagggagcccggtgctggggagcagcaaggaggctgatgaggctgcagcagagagctcgaggggacggtgctgagatgggggcacagagaaggggaggagatgcctgctcccagggagggattcagggaagacttcctagagaagggagggtctgagctgagatctgcaggatgatcgggggaagcagaagaggaacgtgttcaggcaacaggcacagcctgtgcaaaggcccagagctgagagtgcaaccgtgcctggtgggagaggtgccagctgtggctggtgcaggcactggagccggggtgtgaggcag

SEQ ID NO: 39081 - DNA, 674 bp, Artificial sequence
  DNA replication origin
tgtggtgtcaggtgccaggtgagggaggggctggtgtcaagctgacagctgaaggctgagaaggagtcagccatgggcagagcagagggaggggtaggaagcagagcaagcaccaggtgtgatgtcctggggcaggagggagcccggtgctggggagcagcaaggaggctgatgaggctgcagcagagagctcgaggggacggtgctgagatgggggcacagagaaggggaggagatgcctgctcccagggagggattcagggaagacttcctagagaagggagggtctgagctgagatctgcaggatgatcgggggaagcagaagaggaacgtgttcaggcaacaggcacagcctgtgcaaaggcccagagctgagagtgcaaccgtgcctggtgggagaggtgccagctgtggctggtgcaggcactggagccggggtgtgaggcagaggatgggagggcctgggctgtcagggctggccacgcaaggcaggcatttgcagcagtgagaaggttgtgcttgatctgaggggctctgggaggcccgagaaggaggtcagggcctggtcaagtgtgaaaaagggtaagacatgggagctagcatgagctctcatgtgctctcactgaggcacacttacgcacacgcacacgcacacacacaggaccacgctcag

SEQ ID NO: 39082 - DNA, 951 bp, Artificial sequence
  DNA replication origin
ggccaagggaaccgtgaggactctgtgggtgggggaagcaatttgagacacccaaagcaaagactgtaggaaagacgccatgcaccagggccccggctgttcatctgacctagctcatgaactgtaaaaggagacactggctggaaatgggaccttacaggtcattcagagaggaagtcacagagcaagacttcagaggtcatcttgtcctgtggcttccagactttgggatttcacagaacagaaaacaaaatgtttgggagatcaacttgggaccttaaccttttatctggtcttgtaaatgtatgttaaaaactgcacaaccgaacgttccttccttcagcagtgccgggcactaatccaggctctggggatacagcagggaacaggacagatgaagtccccaaattcacacagctgacactccagtgggggaggccgaattgagttatgtcagagagtgataaacacgatgacagagatccacgggtggggtgacagcatctggggggctttcttaggccgactgacgaggcagggtcatgctctgggggtctggcttctgagccaagacctaactgcaaagtgcccaccacgccaacactctaggcaggggaaacagcaggtgcaaaggcccagaggtgggaggaagctcagagagacggccagtgtggctacagcataaagagccaaggagggaaggtggacaggaggtcagagaagtgggcagaagcaggcctcaggcagtcgggaggtcagggaaggctttggaaattatgctgagtaagatcgggtgacatcaggggtttgcacaggggcaggacatgatctaacttagtttgaaagccccctctggctgctggatggaggatggactgtaggggtaaggaggggtggagagggaggcaggaggacctagcaggaggctgccaggtgtcaccaaggtgagag

SEQ ID NO: 39083 - DNA, 1193 bp, Artificial sequence
  DNA replication origin
ccatcaggcctgagctggggggagcagggtttctaacagagcgccccggtccgacccctgcggacctcggagggccccatcccccaccccccccaccccgccccaaagcgggctggggtgggcggagtgggaggggcgcgccgggtgggggcggggaactttacctgggagtgggccaggccgccagccccgccagccccgccagccccgccagccccgcgatggcttgggccgcgctcctcggcctcctggccgcactgttgctgctgctgctactgagccgccgccgcacgcggtgagtgtcctgctccgctcggccccgccagacaaagggggcggctcccgcccgggctgcagcccaagggtctcggagcccgcggccggcccggcccgagtcccgctccagtatcccgggcaaggcgagaccctcggaggtgggagtcccggggccccgcacgtgggtgagggggccaggccgtgctccccctgccaagaaggtgcaaggtgggaaggtgcggggtccggtaggtcccccggggcgaatcgcccaccgcgacaagtccgagtctggcccttagcgcgacggcagggacctaggagggggtttcaggtgaggaccgagggtttgtgggtggggagccgtgcggggacagcctctgcgtggcccgggtggaagaagcgctctccactctccagcctctgcctgcacctggcacccacctacgcgctgtcaaaccctgccttgctttcggcagtcctatagggatagcctcgctcctcaacccattacacagatgggagtgttgagccagcggagtgtagagcccctgggggatgtcttgatcatgccctggaaccacccaccccgggattccccgtctggaagacgggggtcggtgggcttagtaatttcatttgccagggagaaactgaggcctatgaagtctctaccttcccctgaggtcccacagcctggacagaacggagccagggtcagatgtcacagcctcctggtcccaaaggttttccagctccattgagcatctgtgatttaggagaaaaagtaaagacagcctcaaatcaaggagatagctgtagctctccttttcataaaatattttttaagttaacttgaattgcataaggaatagctgaatacattcgacttaacacaaatatttatcctgttatag

SEQ ID NO: 39084 - DNA, 1230 bp, Artificial sequence
  DNA replication origin
cacctccgagggtctcgccttgcccgggatactggagcgggactcgggccgggccggccgcgggctccgagacccttgggctgcagcccgggcgggagccgccccctttgtctggcggggccgagcggagcaggacactcaccgcgtgcggcggcggctcagtagcagcagcagcaacagtgcggccaggaggccgaggagcgcggcccaagccatcgcggggctggcggggctggcggggctggcggggctggcggcctggcccactcccaggtaaagttccccgcccccacccggcgcgcccctcccactccgcccaccccagcccgctttggggcggggtggggggggtgggggatggggccctccgaggtccgcaggggtcggaccggggcgctctgttagaaaccctgctccccccagctcaggcctgatggaaaatgtgggagggaggggaggggagaaggagggggagggggagggggcggaagggatgtggtgggctggggagtgatcaaggggaaaggagatagatgggggactgagggggatgtggtggactggggggtgatggaagggaggggagagggagaggatttacaggaaggaagagattatatgcggggagggaagagggatggggaagatgggagaggacttttggggaagggaagaggagggaatgtgggaagacggcgggacgatggggaaacagccaaggaggtatggggaggagggggcacagtgggaggagaaaatgtggtgggaggggacgaacatggaggaggagtgtaagggggtcaggaggagctttcccaccacattccacattccacctagacagaggaaaccccccaaggctcctcctcaccccatcccccaccccaggcgtgctggggacctggagttttccattctgtggtctgggctgggagggctggtctggattatatcgcaccctatagtatcttcagtaactactgggcagggggtacaagggtgtctcagggagtcccctcatcctcacctgctttggggacagatagtgcccgtgaagtatgcaccctctacctggtgcacgttagggcctccggatgtggtggccattgtcatcgctacctggtgcttggggtgccagccccctgtgcccgcggctctgcaatgtaccaccccagggtgctgatgagaactgggggtcaatccagcctcactccacgcccctgcccccac

SEQ ID NO: 39085 - DNA, 961 bp, Artificial sequence
  DNA replication origin
aactccatgaggttctcttttccccattctgtcaatgaggaacctcagcttagggaggtggagcagtctgcttggggtcacaaagctgaggatcggccaagcccagctgtgaaccccactgctagcagacagccctttggagctccccaaatttggagaaaatcctctggacccgttctatggccttcttgggattgttggcttctctggcagataagctggaaaaataaacaagaggatcagaaaactccttttgcctcctgctgttctgaatctgctgaggccacaagggggtcatccagctgcctcgacagccaacattaagcaggcaaatgaatgaatcttgagtatgatagcaggacatgtgaagtactgccagaaaaaaaaactatcaaaaaaacaaagaaacaaaaatcagtaagaggagatgactgttttagaccaggtggccaaagacagcttctctgcagtgacagctgagcagagatagaggcaccggggaggtggtggaaagagcaggctgtgcgaagaatgctccgaacagagggaacagcacgtgcaaaggccctgcagtgggacctctagggaaagatggggagatcagtgtggctggagcagagtgggtgagggagagagtcgggggcatagggtcaggcaggtaaaggtgagaaggggcggatcatgctggttctcgaagggccttgtcaggaccctggctgataaggatggaagccaggagaccaggaggagcaacagcttctccagagctctgctgggactatggaatgaaacgtgcctaagctcacccggcactgaatgggtggatacaggactagaacaagacctcctgggtcttacctccaggttcagcccatggtttcataaaacttagtgtgccaagcactcaacagtttgtgattccttttagtgtcaagctctcatcacttcctcacaacagccc

SEQ ID NO: 39086 - DNA, 861 bp, Artificial sequence
  DNA replication origin
tgagccttcagtaaatgttacatggatggatggatggactggtggatgaatgggggtagatgggagaatagatgaatgggtgagtgaatgagtagatgggtgagtgggtggatgaatacataggtggatggaagaataggtgaaatgagtgggtcaatgagtagatgggtggatggatggatggatgggtggatggatggatgcatgggtagatggatggatggatggatggtgggtgagtggatgaaagggtggatgggagaatagatgaatgagtgagtaaatgagtggatgggtgagtggattgaggacagatgaatgggtgggtgggtgaatggatggctggataaatggatggatggattgatagacaggtgagtggatagatagatggatagatgggtggatggaagaatggatgaaatgggtgggtaaataagtggatgtgtgggtgggtgggtggatggatgggtgaatgggagaatagatgaataagtaaatgaatggatgggtgagtggatgaatggatggatggatagatggatggacagatggatgaatgagtgggtgagtgggtagatggatgattaggacttaatcctgagaatactggacttggaggaaaattactgggtcattaggatcctgaccacagagtcatccaggccaacttcacctcctctcctcctggttccctcaagcccaagcatcttcagggagaggaatctcctcagagcaggaggatagaaatacaaggtagaaagggagcaggtaagggatgagaggacctgtgggaacatgggtctggacgaacaataacccagcctctgtggtatctggctttgtacagctctggagtca

SEQ ID NO: 39087 - DNA, 1308 bp, Artificial sequence
  DNA replication origin
atttaatatctttcttattcagtgcattagatggaaaccaggtacacacagcacagtgcctggcacatagaaaatgctcaataaatattggatggatggatggatggatgagatggatgaatgaatggatgggatggatgggatggatggatgatagatggatgggatgaatggatggatgtgataaatggatggttgagatgaaccgatggatgaatggatgggtggatgggtaatgaatagctggaatgggtagttggatagatggatgatggatgggtggatgagatggatggatagatggatgatgagggatggatggatgagatggatggatagatgggatggatggatgggatgaatggatggatgaaatggagggatgaatgaatgagatggataggagggatgaatgaatgggatggataggatggatgaatagatggatgaataggtggatggatgaatgggtgggtgggggatggatggatagggtgaatggatggatggatgaatggatagttggatcgatggatggatggatggatgaatgagatggatgggatggatggatgaatgagtgggatggatgagatggatggatggatgaatggatgtgtgggtgggggatggatggttgggatggatgaatggatgagatgaatggatggatgagtggatgacatggatggatggatagatggatgggatggatggatggatggatgagtggatgggatggatgggtggatgaatggatggatggatggatggatgggatggatggatggaaggacggatgggtgggtaatggatagatgggatgggtggatggataaatggatggatggaatggatggatggatggatggatgagtggataggatagatggctggatggatggatggatgagtggataggatagatggctggatggatggatggatgggatggatggatggatggatggacggatgagtgggtaatggatagataggatggatggatggatgagaggatgggatggatgggatagatggatggatgggggatggatggatggatatgcaaccagataaacaaacctaaagtacacctttaatcatgccactctccttctccagaacctaacttggctgcccactgcctatggaatagacagcaaactctcctctgggacattcaaagcgttctgaactgattccaaagtgggggtgcagtgagtgataagtgagaagataagtcattcatactgaagcattaggaagtggatcagttaaccatctctctccttgatctgggcatga

SEQ ID NO: 39088 - DNA, 1812 bp, Artificial sequence
  DNA replication origin
cctttcctttcctacaggagttcaacttaaggcagctcagctgagctctgggtcttgctggggtaaatactgcctgacccgtgctgcaggtgaacgggctgagtaaaaagctacgcagtgtaacagaagcagtcctccactgtgctgcccaggcatgcccacgcttgggttttctttcaagaatcacccaggtggtaccaagaaagttgcataagacacttgagtgaggggacttgggggtgaagggggtggtgagggttgatggagtttgattccagaaggttctctgggatcagtgtagggtttatatgccagattctgctcagagattgtcatcatggcttctatgtgttgaatgtttgccactcacagtattaatagtgtcagatgccggggacataataatagagaaaataagacaggatcagtggactcattaaacttacggtccactggggggtatgattaaaattgtatcctcaatacctggtccaaaaggggaagctgcaggtgacgagtgcatggtagggtgggcattccagttgggaatgtagggaaggtggaagcaagtgagctagggggagacaaggagcgtgtggcacacagctgcagggcagggaggaagccagcgtggctggagtagagggggcaggggggcgcacagggggaggagtttgcatttcatccttagagcagtggattcaagagttttcagcaggcagggctgcgtgatgcgattcggattccatagcaactttgagagatggctctggttgcagggagaacgagcgatggtacagaagcagaagagaagcaggggcgagtgagatgggtgcagggacgacggaggaggggagactgggagatactgaggtcgtgctcccaggacctgccaggggtgatggggatggaggactccacctaagctgctggcttcccacttgcacaggtaacagggccattccctgagatgggggcactagagtcagaccagattggcgggatagatacgagatcagttgtgactgctgagttcagggagttttgagacaacctggcagagacagcagggtgggggctacaggcagactggggagtctttgggtggaggaggttagtaaggacccagcagcgggtgagattgctgggggattgagaacaggaagcatggagtaagagaaggcagcagccttggcccagcctctgagaacctggttgagaaaaggaggatgagtgagcaggaggaggggtgggaggacaagcaggccaagagggagagtggtcagccgtgctgaaggcagcagagaagcgatacaagaggaagagggagaagcagtgagttggcagtggccaggtgttggaaatgtggcaggagccgttttgctgacctgatggggtggaaggaggagatagcagcagagtgggtgtctcttggatttcctgggaaggggtggaaagaggaggtcagggccacaggaagcgcgggaagctgggggtgggaggtgaggtggggttgggttttggttttcccacaagagaagcttgagtgtgtttcttctgaaccacagggaatgtctgagagagcacagctgaatacgtacaagagaccaggtgatctggtgggaatgtccctgaactactggcaggagatgagattcaaaccagaaaaaccaaacagaaggaacgaggagctctgtataggccatcccattggcagacacacaccccgtgaagactgttgttgctgtggaggtcagagatcccttccagccagctgctggaattgggattcagcagaactgattcctggca

SEQ ID NO: 39089 - DNA, 1038 bp, Artificial sequence
  DNA replication origin
ctctgtgtcctccgctcttaaccttcatgctgtctttccttctgatctcttcctgtcctaactggtgccctgtggtcttataaaagactatgcttggggcaggcgggggaggggtgggagggtcagtttctccagagaccgcctttcctttaaaggataagactttgaaaagaaggagtacccattacatctttcctccatgctcccccttctcacctggtaccatttcccaaaggccccaatcatatccccttctctacggacaatttaaacttctcctttgtccgcagagcaggcactatccaatactgaagaaccacaccatctaccctcaaggctaggagagggcagaagtggaagaaagaacacagacagcaccccttccccaggtcttcagttgagaaagaagctgtggctgaaagtctggggggctgggggcaaaggtgacaaggatgtgcccttgtgggtacgcgaggtgggggggggggagatggggaagaggcatgggacgctcaggggattagcaggagattgaatgggggtggacctctgtaaggggaaggggggtgccaccggcaggcagagagatcaggccactgaagaggtgaacgtgagttagggaggaggacctggaggtggatgtaataggggaagtagaggaagaaaggggagggagggggctcacgggagcaggaaacgatggagtcatggggagtgggggaggatggatgggagctagaaggtggggcggcctgggacccgggcacatgggctcggcgaagagcgggcgcgccgcgggggactggggtgcggggaatgccgggaatgggggttcgaggagaccccggggaagggaaggggaagcgggagttctcgagcagaggagcgggaagtgggagttccagcgaggcaagagcgggaagggggttccggagcaaggggcgggcgtgaaggtacagtcgggttcgcgagggtggcgttaggaggggcggggtgggccggaggctggcgcgggagagggatcccgggcgcctgttg

SEQ ID NO: 39090 - DNA, 1675 bp, Artificial sequence
  DNA replication origin
agagcggcagccgccgcggtcccaagcccccttcctacctatgccgggcgccacatagacgaagtacagcagcgaggacgagagagaaaagaagaagagcgcggcgagcagcgagcggcgcggcagccgcagcagcccccggcgggcgcgcatgctgcagccaggcggccgctagagagccaggccgggcctgctcccgcagctccccgtccgccgcctcctgggccgccgccgccaccgcctgggcctcggccaccgcctcccgggcctcgcgggccgccactcgccgccgccgccgcctcgccgctcccagccgccggccgtcgcgggccgggccacatgaagcgggcgggggccagagcggccccgagcgggcgcagcggcgggggcggaggcggggcgcacgcgcgggaggcggggccagtgccgccgggcaccgtcgcaaaagacccgcgcgcttgcgctcgccgccgaccctcgctcggcgcccacagcagcccgcatggagtaatcgccaaatggcgacagaccctctcccagtgcggccaccgcccaggctttcggggaatgtctcccaagtgctccgcgctagctcgtcccccatctcgggggccaaggggccatctacaaagtctgactcatctcgttgcccactgcagcagaagagtggggactgcaaggcttgggggttcggcctggtatacaccctcattcattcattcattcattcattcaattcaccatttatttattgaatgccagacacagttgttggcgctgggcatgctacagagaaaaaaaacgataaaaatctctgtctacttgaaacttacattatgtgagagataaaagaaacaaatcagctagtaatatcaggtactggtaacacatatgaatacgataaaacaggaggatgtattgcaggcaggctggagtggtcaaggaaggcctcactgagcagtgacacgaactgagatataaaagggtgagaaagcgccagcttttttgaataagctggggaaaaagcagtcataccagggggaacagcaggtgtaaaggccctgaggtaggaaaagggctgatctgcccccgagttgaatccaaggccaacatggataaaatccagtgaagtagggggggaaatagggatgagcttggagctgtagtcagggatcctactgtatcagaaatagcataatgataacaattgtcaatgtctctagacttctgctgagaaacatggacttcactcatgccatgaaattcccccaccagtcttgagatgtgtgctgttattattactatcatacaaatgaggaaactgaggtttctagatggaaaggcaattcacccaagccttgcagtaagggcttaaatcaaaactggcctgtctcccatgtcaggcccttgacctctaggttgtaactgtctcagcagtctgtatgacctctaattcttatcctgcaggcaaatcggtatcctatccccatcacctgggtatgggaccatatccaaaaaaatgctttcagatcagcatcagctcaaaggacctcagaaggcaatgaacagtcctagaaatttatggcaagaagcagtagcctcaaggagctggactgaggaggccagtgtccctgtgtagacatatctgaaactagggtactgtcttggaatgcca

SEQ ID NO: 39091 - DNA, 827 bp, Artificial sequence
  DNA replication origin
taggcattgcagataaaatggagaacaaaacagacaaaaatttctgcattcatgaagcttccgttctcatggagggagatggttaacaaacaagtgtatgagtaaaacatatggtaggttaggtgtcatgtggaaaaatagtttagggaaggcggggggccttggattttaagtagggtggtcaaggaggtctaacacacaagataagggttaaataaaaggccaaacgtaggagaggtgggagccaaagagctacccagaagaagagcattctagataaaggctcagtaagtgcaacggtggaagtattcctggtgagtctgggacaatagtggaaagtcaaagtgtgtgggaggggagatatagagccccatgcccccctcccacacacttcagaggggaaaagggggcaggattgagtcctgtacattccccacgttttttttttctctggagattggaagccattggagggtctaagcagaggagtgatgagttaagctgctgtgtggaagtccgtaaggaacaggggtgagtcagagaccctgaatggagccgttgcaattatccagatgagatagagtgccttggatcaggaagggaggtagcaacagaagcggccaataaagttcaaagtcctcagccccagtcctcccgatgggggtctcacctacccctctcacctcaccttgttcctccctgcatccccaccccaccggtcactgctaggcacatagaagcatctactaagcatgtggtgaatcaatgaaccccttaatgaatggtccacccctagatcatcagcatcctttttaacgctaggcata

SEQ ID NO: 39092 - DNA, 779 bp, Artificial sequence
  DNA replication origin
caagagcagcatggcccgcccagggccactcaactaatacccacaacagcacaagatgcaatgtgtccagtacccctcctatctcgagatgctgtccctgtggaggcccctggtggcactgatggggctgtgggctgcttaggtggtaatgacaggctggctggtcctctgtgacgctactagggcacaactgaggggcatggactgagctggaaaacagcacattcctctgttagaagtttcctggcttccttggtgccatacggaggggacaggcagtcctagccccacccttggggagctcctagagcagctgggaggaggcacagcaaataaggggtgtgaaatgctacctggaagagatggtggggggaggggggtggggggtgggggggggcatggtgcagacagcaccaggaccttccccagacaggaaagcggggaggctcacatcaccatggggtagggcagccaggctgctgcaggccagacccagatggggagacggcagggcaagagcaaagggcacataatacagagacatggtgaggacaagggactctcagcctctctaaacctgtcacgggccagaggattcagtgacacgggacatgtaatgtgctttaacagggtgtgtacccagcaagtgcttagtaccggctagccaggccaccgggcaattcaaagtaggatttcttgggcaagggggatgcaaaggcatagggatgacagcatccccacggcatccaaacaggcagctggaaacaggagtacggatc

SEQ ID NO: 39093 - DNA, 949 bp, Artificial sequence
  DNA replication origin
tctttaagcttttcaagcttttgggtgattctatcatgcaaccaggaccagaactgctgttctgggcttttcattagcagcaaatcgcacagggaggctttttgtctctttgcctgtggctctattagctaggactccaccgtggacaggcttttgccaatcaagtcaagagaggagaggggagaggaacacatcctgtaggaattggggagggacgaagaaaaggaccccatgtggaggggagagacggaggtaaagaggcgggactcgggtcataggtaggagcaaagcagacaggctctgagtgcagcgcctgctctgctggaggagtctcagtggggccacagtgaagtgtgctctgcagcttcactgcaggtggtggggagggggacggggcaggtgcagggagggcagaggatggccggggaggggagggcatttagatgctgtgaagcagtggttgtcaaacactggtctgtattagaatctacctggggggcctgtgaaaccacaaaatactgagcccaccgcagccacctgcagaggtgctaattcagtaggtctgaatgggcttgggaatctgcagatctaacaggtttccagtgatgctgctagtctggggagcccattttgaggactgctgatcagcgtggtagtaaagaggacaggctcgggagtctgtgcccacagctgtctgattctcttggtgcctcggcattctcatctgcaaagtgggtataatgaaagcgccagtttctggcaggctatggggacaatctgagatcatccaaggaaaacgcaagcacactgactgccacagaaaacattccagaaactcagcggttcatcctcagaggagctgtcctgtttctgctagtgctgtgcttcgccaagcgtgttcacaggatcagctgcagcagcaccacctggcaacttgttagaaacgcaa

SEQ ID NO: 39094 - DNA, 1456 bp, Artificial sequence
  DNA replication origin
gcgcgaccgtatcgaggaatgacatgcttcttgttcccctccttccagagcactccgctggtccaggcggcaacatgtccatgcttttagtgatgtccctgcctctaatccagaagccatggaggagataaggtagcccccctcgatcggatggggaagcccagttcaatggatactaaattcaaggatgacttatttcggaagtacgtgcagttccatgagagcaaagtggataccaccaccagcaggcagcggcctggcagcgatgagtgcctgcgggtggcagcctcaaccctgctcagcctgcacaaggtggatcccttttatcgattccggctgatccagttctatgaggtggtggagagctccttgcgctcgctcagctcctctagcctgcgggctctgcacggcgccttcagcatgctggagacggtgggcatcaacctcttcctctacccgtggaagaaggaattcagaagcatcaaggtgaggtcctggagcagcctccatacaggccctccttctctcttcctgcccctggcagtccctcctgagaggctatgccagtctgatcccatccatcctgtgctctcagatccttccgggctccgaaccttccccgtctctccagcatcacctctgaaccgtttctggcccggctgccacaccttaagcagagaagctgggaaggcaggggcagccaggttatgcagggtcttgtggcccagggcaaggcttggatttgttctgagtaggcggggaaggaggcagtgtgggatctggcttgcatctgaagagggtcattctggctgtggtatgggaagtaggctgtagaggggtggggggaggtgggagggatggggagagcagttaggaagcttctcagcggtcccagcaagctgaggggtgttctgtactaagtgggaacagtagaggaggagggggaattgagagagggatcctgaatcagaccacgcgggggatggcacaggagagctgtcacctagccaggcttcttcattctgccatgggaggagtggtaatcaagagaggggatggcacaggagagctgtcacctagccaggcccttcagtctgccgtgttactcagcccctcatggaaataccagagaggaacgttctgattgtcaccgcgttctgcctgtaatctggcccctttattcagccatgtttgcccaggctctctcttcatatggagtagagtcttcgtgccccactaggaagcgagaggttttgcttcctgtgtttaacaaagtagctgctgccaggcgcggtggctcacacctgtaatcccagcacattgggaggccgaggcgggtggatcacgaggtcaggagtttgagaccagcttgaccagcacggtgaaaccccatctctactaaaaacagaaaaattagctgggcgtgttggcgggcgcctgtaatcccagctattca

SEQ ID NO: 39095 - DNA, 1017 bp, Artificial sequence
  DNA replication origin
ggccctgagccaccctcggcgggtcccaggagcctgcgaggcagctcccgggagaatgggggtcctgaggataggctgggggtcccgggagcgccgaaacagcgggcccacctgtagtcctgcctgccgtgagggtaccccgctcccgggccagccgagccctgccgctgtctggcgccccctccgcctggggaagccccgaaggcagtttccgcccgcggccgcccgtcactcaccctgacactgccgccgaggacggcccggccgagggaagcaagcgagaggcgcggctgccgccggagccgggccccgtcgggctctagcctctccggccggctgcaggggtactgagaccagtacccgggggccagcagcgacccggaaacactcggcccggaaatgatgtcaccatgaggcgggcccgaagagagggtggaccacggctgcgcgctggctccgggaagcggtcgatgcccgcggccgacggagactacaacccagaggcggaggacaaagcggaaggccgaagagcgaggacgaaaccggcggaaccgcactttggagcctaacgagccatcgctgcgtctgagactgggacccggaagtaaacaggccggacgtgacgcaagccgctcggcctagggatggtggctggccgggttgtcatggaaaccgctcaggagcagggagctgggagctatgagtgctgactgcgtgaactcggcctccacttcccggacctgccacttatcatgatccacgagctgtactcatgactccgcacaagcaagcaggggctgacggtcggatccctcgcccccattttacggacagaagtaccgaggctcaaagagagccagtgagatgctgaaatcacgcgtgattggaatccagccttgctagggctgcgggtgttacgggccgtgggcggcggttaagagcgtgggttctatttttagttttgccacttactagctgtgtgaccttggacaagttacctaacctctctgagcctca

SEQ ID NO: 39096 - DNA, 2119 bp, Artificial sequence
  DNA replication origin
aaatgaaaagtctcccatgtctacctctttctacacagacacagcaaccatccaatttctcaatcttttccccacctttcccccctttctattccacaaaaccgccattgtcatcatggcccgttctcaatgagctgttgggtacacctcccagacggggtggtggccgggcagaggggctcctcacttcccagtaggggcggccgggcagaggcgcccctcacctcccggacggggcagctggccaggcggggggctgaccccccccacctccctcccggacagggcggctggccgggcggggggctgacccccccacatccctcccggacggggcggctggccgggcagaggggctcctcacttcccagtaggggcggccgggcagaggcgcccctcacctcccggaccgggcggctggccgggcggggggctgacccccccacctccctcccggacgaggtggctgccgggcggagatgctcctcacttcccagacggggtggctgctgggcggaggggctcctcacttctcagacggggcggctgccgggcggaggggctcttcacttctcagacggggcggttgccaggcagagggtctcctcacttctcagacggggcggccgggcagagacgctcctcacatcccggacggggcggcagggcagaggtgctccccacatctcagacgatgggcggccgggcagagacgctcctcacttcccagatgtgatggcggctgggaagaggcgctcctcacttcctagatgggatggcggccgggcagagacgctcctcactttccagactgggcagccaggcagaggggctcctcacatcccagacgatgggcggccaggcggagatgctcctcacttcccagacggggtggcggccgggcagaggctgcaatctcggcactttgggaggccaaggcaggctgctgggaggtggaggttgtagcgagccgagatcacgccactgcactccagcctgggcaccattgagcactgagtgaacgagactccgtctgcaatccctgcacctcgggaggccgaggctggcggatcactcgcggttaggagctggagaccagcccggccaacacagcgaaaccccgtctccaccaaaaaaatacgaaaaccagtcaggcgtggcggcgcgcgcctgcaatcgcaggcactcggcgggctgaggcaggagaatcaggcagggaggttgcagtgagccgagatggcagcagtaccgtccagcttcggctcggcatcagagggagaccgtggaaagagagagagagggagaccgtggggagagggagagggggagggggagggggagggggagggggagggagagggagagggcgaactcaggagtttgagaccagcctgggcaacatgaataaatcctgtctccacaaaaaatacaagggcatggtggcgcatgcctgtagtcccagttacttgggaggctgaggtaggaggattgcttaagcctgggaggtggaggttgcagtgagccaagatggcaccactgcactctagcctgggtgacagagaccctgtctcaataaataaataaataaataaataaataaataaataaataaatatgatgtcccaggcagtctgactccatgtcataaccctgaagataagctgtctgacaacacaattaaattatgctcttagatcagagtgaggatcctgaaaagaaaacagtatgggaagtaagagctagtagttagcaaaactgtatcatttcattcaatcaagagaaatgtaataaatgtaataagcagccactatggataaagtgcttctctaggctttaaaacatataaaaggattgattcatgatagctaatgctaattgagtaattaacatgttatcatgtcacaaggactatctcatttaacctgtattttggtaggtactatcgttacctgtagcaccaaccagctcgactgcctgtcgttcctcacccatccttagtgcagggtgcagacctggcacccagggccaaacacagcctcagccacactcctgtgataaccatggtattgactggtccaattgcagtggtgcttacgactaattcatcacaaccagttat

SEQ ID NO: 39097 - DNA, 995 bp, Artificial sequence
  DNA replication origin
cccgtctgagaagtgaagagcccctccgcccggcagccgccccgtctgagaagtgaggagcccctccgcccagcagccaccccgtctgggaagtgaggagcatctccgcccggcagccacctcgtccgggagggaggtgggggggtcagccccccgcccggccagccgcccggtccgggaggtgaggggcgcctctgcccggccgcccctactgggaagtgaggagcccctctgcccggccagccgccccgtccgggagggatgtgggggggtcagccccccgcccggccagccgccctgtccgggagggaggtggggggggtcagccccccgcctggccagctgccccgtccgggaggtgaggggcgcctctgcccggccgcccctactgggaagtgaggagcccctctgcccggccaccaccccgtctgggaggtgtacccaacagctcattgagaacgggccatgatgacaatggcggttttgtggaatagaaaggggggaaaggtggggaaaagattgagaaattggatggttgctgtgtctgtgtagaaagaggtagacatgggagacttttcattttgttctgtactaagaaaaattcttctgccttgggatcctgttgatctgtgaccttacccccaaccctgtgctctctgaaacatgtgctgtatccactcagggttgaatggattaagagcggtgcaagatgtgctttgttaaacagatgcttgaaggcagcatgctccttaagagtcatcaccactccctaatctcaagtacccagggacacaaacactgcgcaaggccgcagggtcctctgcctaggaaaaccagagacctttgttcacttgtttatctgctgaccttccctccactattgtcctgtgaccctgccaaatccccctctgcgagaaacacccaagaatgatcaataaaaacaaacaaacaaacaaacaaacaaacaaactcctgagttcaagcaatccacccgc

SEQ ID NO: 39098 - DNA, 2156 bp, Artificial sequence
  DNA replication origin
agggtttcatttgcctgcttcagaacctcgtataaatccaaataactatgcatttgtttgtgacctctgctcgacattgtgtttttgagattcatccctgttgctgcatggagttgtagttcatttttattgctgtatagtattctattacaggattgcaccagggttcattaatccagtctactgtttataaacatttgtgttgtatccagttttgttttagtttttgctttttttgctattaggaacgagggtacaatgaatatccttttttgttttttcggggtttgggctggacaacagttctttactttgcttggttgctcattataatccccaggggagttttttaaaatgctgatgccagaggccccacccagactaattaaatcaagatgtgggtgggggtggggtgggccgaggcttaggtgttttaatccttccctgtggggatctaatgtgctgccagagctgagaacccctgggatgcagttggtttgaggacagacttgtcagctgcagcccctgggatgcagttggcttgaggacagacagggagaggagtcacctgttgctagctgatgccaaacttttccaaagtgactatgcccaccgaccctctcgccagctctcacctcctcatcaactcttgatagtgaccaaatttttccttgttgtccttctgatgggcgtgaaatggcagctcactgtggcttgaatttgccatttctctcttcactaaacgaggctgagcagttagtgaagttgctgctgaaacaaagaatgaaaggaagccagcgtgaagatctaggagcaagagacgtaggggagaggaggaagagcagcaggtgccaaggtgggaaaggtctgggatgttggaggaacagaaggaaggctgggggtgggatccttgtgcatgggggagggagagaggctcaagccaatgtcagctggggtcagagcagcggggccgagttggctgaggagaggactttggcttttactctgagacaggcgcatgggagggtttgagcagaggagggggtgatctggcctcactttggcttcaagcaaaggatcctgattggagctaaattgacacgggacggggagtattccgcttaatgactgcttactgcctctgtcccccaccctactgcccgctctccagctagaaccaggggaggacgattttgttcacggctgtcacacccggcaccaagtgactaaacagacagtagttctgcccttcaggttggtggtggtggtggtgtggggtgcttataggtttttatagtcttccttcacaggtggaaacaagaacggtgagacctgtgaggtttatttcagagccacccccgggcctggtacgcctcccagggaagctggggtgggggtgcagctgcccctcacttgggcccaccccacatgcattcagtcagggcccctatggagccgtgttacagcctttagacacaggatcgaggatcttcacggggtgaggagacacgcccggcccatgccttctttctcccgccagcctacagggatctttttcaacgaaactctaaccaggtccctcctcagctgaaaatccttcggtggctccccagtgcccttgaggcaaagtccaaactcctacgaggccctggggcccagcacatctgacccctccgggcatgcccatcccaccccatccctggaagctgctctctaggagttactctgaagcagttgccacttcttccctcgggccttttcccttgataattcttcacttcctctgggaagtcaccccgaccccctgtcaggtgacccgcctcttaacggtcgccgcgtcccgtctctcccccaccaaagcacacttccctttgcattgtaattatctgtttacttcgtctgtctccctcactggaccagaagctacccttcgggagaggctctgagtgttctgtccggggctgtgccctggccccaggtacagtgccccacacgtgctgggcgctccgtaaacactggataagggaaggaacgggtgctcttggctagctgggccaggctgctttgcaaaaaggccgtggcatttcaagccgccgagagccacgtgcggtgtccctttcctcgcttcctccccagtgatgtgcgtttccctcgtc

SEQ ID NO: 39099 - DNA, 1438 bp, Artificial sequence
  DNA replication origin
tctccaggcgccagccgggcggaggaaatttccgccccctcccaagcccgaggcgggggcgggcgtcggaaggtcaggtgtcccggccggcgcgcagcgccagggggcgtcagaagcgctcagaccaccgggcgctgagccggtgggcgcgcggcgtcctgccggggtcccacctcgcagaggcctcgcttcgctcgacgtcccgccccggacagccccagcaccggggacgacccgcgctgcgccagcgaaccccgcctcggaggagtccccgcccgggctctcaccgccacgcggcgcgagcccggccagcagccggcgcacctgctcggggagtggccttcggcggagacgagcctccgattggcgcggaggtgacaaaggggcgtggcagataaggccccgcccctcccaccccccaccacccccccggagtacttaagggagttggcggcgctgctgcattcattgcgccgcggcacggcctagcgagtggttcttctgcgctactgctgcgcgaatcggcgaccccagtgcctcgaccactatgccgcgctctttcctcgtcaggaagccctccgaccccaatcggaagcctaactacagcgagctgcaggactctaatccaggtgcgttggaggggttctgggctccaggaggtttgggggagacaggcgaaggctgcgtggggggcacctgagggaggcggcctgcctgagccaggatcgagtcacaggatgttttgtggaccattgcgggctcgggagaccgggcaagtgggtccccagttccggggatctgtctgggtggttgggggagtgccgtgtagagggcaggggtcttcagcttggggggcctttgtagccggcgagaggcggaggagctccgcaagaggggaaggagaggaggcctgtgtcaggagggccctctggacgctgctggggagagtccggagtccagagggttgaggggaggggtggggagacgagatgtgtgtgaggagggggattggggcagggtggtggctccggggctgggatgatggggttctggcctcaggctggagactggggacttaggagagggagatcaggaaatgacctccttcaactgggggtcctacgtgtgagagactcagattgggtgacctgggcgaggagggcaggaacctggtctgtcctgtggataatttttttgatctaattatgtattgagaatcggccccacccagcccctggccagcggtgggctcatgtttgttgattgagtgaatgatttaattaacgcctgactctgctttttctccctcagagtttaccttccagcagccctacgaccaggcccacctgctggcagccatcccacctccggagatcctcaaccccaccgcctcgctgccaatgctcatctgggactctgtcctggcgccccaagccca

SEQ ID NO: 39100 - DNA, 1376 bp, Artificial sequence
  DNA replication origin
cagcggaggaggtcaacgaggccaggggagcttggccctgaaggcgtcctcccagggcggggacggtgagggcgcctcctgctcctccacctgccggccggggcgcgcggtggtcccgggagggccggggaatgcgcgggggtggtcgccgcccccagcccggctcacgtttccggcccgggccgcacagcccccgccgccccctcgccgccgccgccgccgctgccggccccctcaataaggcgcctcgccttccacctccgaattttccacgcagggttagcctggcgacgcgctgtctgcgggccccataaaggcggccgtgtgctgcattcgtctcgccggggccgcggcctggaggggcgcccgggctgcgaggggcctccgcctgcggctgcagaaagggccccctcctcggcccggcaggcgcagcctccagaactccaagttcagaaacaccgtaaagacaaagagcaaacatcgcagccagcctgcgctgggccctgctaagggtgcggaggggcttcagaacccatggcaccctcctagtcgacctgggtggcaaagccttctctgagcctttgcaggagggtagaggaggctcaggggttggaagaagttgtccaaggttgtgcaggaggaatggggcaattacaatgagtcgggctcccagcccagcttcgttgtggagcctctgcttcgtgccaggcactgctctagggcttggagtattgcagtgaacagatgcaaacctccctgccctcctggggctgacattccatcggggggaaccagacattggcaaagaaacccctgaaataaagtgtcaggtgccagtgagtgcaggggcgggggggggcggggcggggggaataatgcagggaagggggttgggaagtgacggtggtgggcatgaaatggctcctgggatggtcagggaaggtattttgtttttgtttcttttatttttcgttttattttattttatttttggagccagagttttgctctgcccaccaggctggagtgcagtggcaccatctctgctgactgcaacctccacctcccaggctcaagccattctcctgtctcagcttcctgagtagttgggactgtaggcatgcgccacctggctaattttttttttttttttttttgagatggagtctcactctgtcgcccaggctggagtgcagtggcgcgatgtcggctcactgcaagctccgccccccgagttcaagcgattctcctgcctcagcctaccgagtagttgggattacaggtgcctgccactgcgcccagctaatttttgtatttttagtagagttggggtttcaccatcttggccaggttggtcttaaactcctgacctcgtg

SEQ ID NO: 39101 - DNA, 1547 bp, Artificial sequence
  DNA replication origin
gggttctgaagcccctccgcacccttagcagggcccagcgcaggctggctgcgatgtttgctctttgtctttacggtgtttctgaacttggagttctggaggctgcgcctgccgggccgaggagggggccctttctgcagccgcaggcggaggcccctcgcagcccgggcgcccctccaggccgcggccccggcgagacgaatgcagcacacggccgcctttatggggcccgcagacagcgcgtcgccaggctaaccctgcgtggaaaattcggaggtggaaggcgaggcgccttattgagggggccggcagcggcggcggcggcggcgagggggcggcgggggctgtgcggcccgggccggaaacgtgagccgggctgggggcggcgaccacccccgcgcattccccggccctcccgggaccaccgcgcgccccggccggcaggtggaggagcaggaggcgccctcaccgtccccgccctgggaggacgccttcagggccaagctcccctggcctcgttgacctcctccgctgaataggcccttcccttttggggcggcaggactaaattgcggcctggggcccaggacacgggagcaaccagcgacaccggtcacttacggatgctgttaacacgatggtccgccccatggaccacaaattgaggctgagacactcaggagacggtggcacactcagatgccagggccgtgccccatggcctaaggggacacctgaaccacactagaaattggagcggcccctgaaagtggaggtcattaataagatcaaagttaagggcccaggacctgcaggtgcccagcccggagctgccatggtggggctggagccaccccgaggtacctctctgaacctcagttttctcatctgtcaagtgcggatgggccaggcactgtgtcagaagcccaacgaagaacagagggcaggagccactagcttcttgactcctgggtttccatcccaggcaaggcaacagacggatgcccctggcagagggacatagaaacaaaaagtcaagcccggcccagtggctcaggcctgtaatcccagcactttaggaggccgatgcaggaggattgcttaagcccaggagttcaagaccagcctgggcaacatagcgagatcctctctctacaagacatttaaaaattagctgggcatggtggcacgcatctgtagtcccagctactcgggagactgaagtggaaggattgctcgagtttgggaggttgaggctgcaatgagctgtgatcatgccactgtactccagcctgggagacagagcgagaccctgcttcaaaaaagaaagaaagagccgggcgcagtggctcacgcctataatcccaacactttgggaggccgaggtgggtggatcacctgaggtcaggagtttgagaccagcctcctcaacatggtgaaaccctgtctgtactaaaaatacaaaaaattagccgggcatggtgatgtgcacctgtaatcccagtcaccaggaggctgagacaggagaatcgcttgaacccagaagg

SEQ ID NO: 39102 - DNA, 978 bp, Artificial sequence
  DNA replication origin
tgctctttctatgacactgtaaagagacatggacaaaggatttctgattgacaaagccaccgtccagctactgccactgtggtttcccacgtctgctcgtaagggaaggaaatgccaaattccagttggcggttagtgaaaatcaggacatccctttttttcccccagtccaagttcacagatccctgaattctcttcgagggccctggaggtggtggtgagtgataggatctcactggggatggtgcaggtgcccagaaggaggggagtcagatgggggctccctcaggggtttgagctggagtgctgagtgcccagtgtaggtggcctgggttggaatcggtctctgcccacactccctggagacctcggccagtggctgctggtctccaggcctcctctgaggaatggcctcctcggcctctagggttgaataaggaggaggtgggacagcgtgtggcctgtgttggcacaggggtctgggctcttgatagaggggttgggggagaggccgtcctgtgccttggagggggccccttccccatccaatggcctctccgaggtctgggcctgtgtggaagtcaccgttttgtgtttgtgtcatctgggtaagctggtgtgtctttgtgtgttggggtggatgtgtgtgtgtgtgtgcaggtgtgagtgtaggggcacatctaggaagggtgtcaggcagtgtgagtcagcgtgttgtgtgtggctgtgtgtgtgagcaggggtccgttctgagagtgcgttgtgtacgtgtgtgtcagggtttggtatggcgttcactggtgtgtgtgtgtgagttgaaagtctctggtgttagttgatgggagtgaatgtgagactgtgggtgtatttggggacgtggggggtggactgatgtgtgtgtgtgagcacacatgcagcagggttggtgggcggtgtccagtgtgtgtctgtgtgaacgtgtgtggccctgtcaccgcc

SEQ ID NO: 39103 - DNA, 809 bp, Artificial sequence
  DNA replication origin
gccaccatgcccggctaattttttgtatttttttagtagagacggggtttcactgtgttagccaggatggtctccatctcctgacctcgtgatccgcccgcctcagcctcccaaaatgctgggattacaggcgtgagccaccacgcccggcacctgcctgagctttaagtgtgctcttcctactccccctcccaattcctttagttcatccattcattcatttatttgcccggaaggtattgcgcacctccttcgggcagggccctgctttaaacagtgaacagagtagacaacctgcctgccctcatggagccatcactccacccaaggagatggcacaatgagcacaccgcacactgggctggaacaggtgtctctggaggagccaggcacaggtgggggagccaggcgcagctgggggagtcaggacatagcgcgggggctttccctgttggagggggttgagtacggtgtctcagaaagtgatgccagggagatctgcaggacgaatcgaaggaagccatgtgggtgtctgcggagagagagttccaggcagagggaacagccagtgtgaaggccctgaggcaggggtgtggtgggcagagtcaaggagcaggcaggaggccagtcgggtgggagcagagtgggcgaggccaggaggtgaggccagcaaggggacggggcgggcaggtggggcaggcaatgaggaggatgtggcttttgccttgagcccctggagggtcctgagcagaggggctgcagagacatggtcaagttccaggtggggttagggcgagaactgaccttcc

SEQ ID NO: 39104 - DNA, 959 bp, Artificial sequence
  DNA replication origin
tccccagctggcagggatgagtggagaggcccctgtcaatggtgtctgtgctgaacaagtcccatttgctgctgcctcctccccaggccagaataaacgtgcacctgccccaggtcacagagcacacagcagggagccgagggggtggggcagggagctgagggctggagcagggctcctggtgtctctgaggacaaaacagtccattgtggccctgtgggtattgagggaatcacagggcctgaatggaggcgggtgaggaggcagggcaggtgtgggagcaggtgtccacggtcatcccacggcatcgcccctggggggaagtgcccccctatgcgtgccctggaaccggcctggctggtcggacacctgtcccctgcagcttcttgtcaggagacaacataggcgtgagccaggccccaggggtggggtgggatgagggagtggggggtgggatgagggagtggggggtgggatgagggagtggggggtggggaagtagaagatgggaaggatgggactgggggacagagactctggggtctagggcagagagacccaggatagaatcccagccctgctccttcaggctgggaacactggacaagtcacctctttaagcctgtttcctcattcacaaagtggggctgaaactcccctctgtgccccagtgaattttccaggcacacgcatggggcggggtatggggggctttgatgatttggggcctcagtctgcccacagcctccctcccagaaagggttcatcattcttttactgaagaaacacttaatttagaaaaggccgggcgcgatggctcacgcctgtaatcccagcactttgggaggtcaaggtgggaggatcgtgtaagtccaggagttcgagaccagcctgggcaacacagcaaaccccatccctactaaaaatacaagaaattagcaggcatggtggcatatccc

SEQ ID NO: 39105 - DNA, 786 bp, Artificial sequence
  DNA replication origin
gttccagccagtcttcattgcaaaacaagagggaaaaccgaagccaggacaggctcggggacctggccctgcccctgcccctgcccccagtgcctagagaccccaaagcagcctctgctgagaggcccttcccaggatctcccacaggccagggctctgggccctgcaggaagtggccagggctgggacaggcctgctgctttgatcagctttacgagccagggctgtttacggagtctcaggcccccagccccctgccacccggggctgtgtcttgtcaccagcacttgggatattagcagtcccaggagagtctgctggccagacgggtcttggccccatttcctccagcctggcccgcaccttgcctcttagcctcagcctccggggacagggaggggcaggggtaggctgagagggtcccctcgggccagatacctcctgggctggggtgctccccgcacttcctctgcaagtgcaaatgcaagctcagtcctaccacaggcctttgcctgaagcctgcagcccacccccaggtctccccacctgctcctcttttctgcttctcctcctcggggcttcaggtccctcctcagagagccctccttgaccacactgtggagtcaccctccagcacaacttcaatttaattcctggtgcccgcatcactgtctggaattctcttgctcattctttatcctttggatgttctgtcttcttccccagtaagggaaacttgtctgtcccactcacttttgtgtccccagcacctagcatggttctggc

SEQ ID NO: 39106 - DNA, 2093 bp, Artificial sequence
  DNA replication origin
gtgcacttgtgtggatattcaaaaccaaacactacagaaagaaattctgcaagaggtttccttccttagcgaaagccccaaatcgtccctctcagccccgccccctcccacccccacatcccggcctgtgggtggcccagtctggtctcccacctctgctggtgttctgcgctcctggccttggagcaggtccgagctggaatgccctgcaagaaagggggctcctcagagtccctcagagtggccctggctctgggcagccaggggtgtggggctttggggaggggggtcccggctgactgatgagaactccaaatgctccccagccccggctgctaatcacttccagattggccgggtcagggccagggccgccgccgcctggctccataaacagcccgtcgctccagatggcggctggctccagcctggcgagcaggttcatgggggactggggggtggcagcaggtggaggacccccacctcactagccgcctcagctgccacacctccacaccgccctgagttggggaccctgggccagaaggggtggcagaaactgaacccattgctcagaggagggaaactgaggcccggaaggggcaacgtgggtggtggtcaaggtggggggaagacagagatgtaaggggggtgctccttgagggttgatgctgggttcactttacctctgtgaatccagcacaccatgaggatgccgtaaagacccgaggagggagggaaggggggcatcattgccagctgggtttaaattctggctccagcttttactccctgagtgaataaattatttccacccccagcctcagttttctcatctgtaaaatggggatggctggagtacaggattgctggaagattcaatgattcggctcctgcagacagtttgcactccacacacggcgcaggcgctgaacacagcttctccctcttccttttccggaaactccttctattcctgcttctcctgccgccggagagcacagtggcctcctccaggaagccaccttgacttttactcagacctctccctttgtgccaggcactgtgcttttcccacagcctctctcacagggtctctcctcgacacaactggcacctgacgctcttgtccttttgaaaacaaggaaacagagggtcagggaagtaactggtacctagtgctgttagggccccgccccttgcagatgaggagacaaagggccagggaggcagtgggatggatatgttgaggtcgccaggaaaagacagcctgatgtgcacctggagctgtctctgaaggtctcacagaacctggcacagcgtcaggtaacccggctgcctctcctgccacacccaccaaccccagagcccacaccttggcacagaaggaagagatccaggctggtgctgggtcgtaatatcccagggaaaggggtaaggagccttgacctgctcccatacctgcctgtctccaaactgggctggatcctggctgggtggccgctgggtggtagccttgtcccaggacacccggcagcaggacaaggtgggggagccagttgctctgtgagttcccctcaggaccatcccttcctgctccgctgagcagagacacagctccccgaggcctgagtccccatttttcaccatctttatcctcgttcctggcacagaaaagcctcagtatcactttgtcgaatgtggtattgagtgcatgggtgaggcactcctccaagcaacttactacagtaactttttaaatgtttacatagccctctgagaaggggactattattattgcccgttcacagatgaggaaatggaggctcagagaggttaagtgacttactggaagtcacacagctggagctaggatttgaactcaggtctcctagctccagcgtgcacattcttgcccacatgtctctgctcccagggtagcagtgagcctgaaatacgtgcagtgcctggcaggtagtaggtgcttttccaagcccttcttttgcttcactcagccttgaggtcagcggcccgttctgccctgtgcctgggaggaatgttcgtggtggccccagcctggatccgagaagaaa

SEQ ID NO: 39107 - DNA, 1230 bp, Artificial sequence
  DNA replication origin
catcctgccctgggaatctgactgtagacaccaggaccctccacagccgtttcccacaaacccctgctgggaacatgcctacctggctgtgccatccaaagggcactgccctctacagcttacaggctgattccaaatcctagagctcccgcttcaccaggggcatgttggtatccacactccagagctgcccattccacagatatttaatgagcagctaccgtgtgcccagcactgccctaggcccagcagacacagcggggaacaaaatagtcagaaaacgcggccctcgtgaaatggatgttctgggaatggtgacagtcagggcaaaggactagggagaaacagtaaacagatgaaaaagtaaaccatgtagaagatgagatggtgataaatgctatagagggaaacaaggcagggagggggataggggatggggtggggcagaggtgccattgaaaattggaatgggggcaggtgcctgatgcttgagaagtggcatttgagcaaagacctgcaggaggtgagggagtgaggcatgtggacatctgggggaagaatgtgtcctgcagaggaagcagccagtgcaaatgccgtgaggcaggagcatgcctaatttgttggagaaacaaccaggaggccagtgtggctggagcagagtacagggtcagggagggaggaggaggcttaggagatggggtgggggaggggtagtggtggggcagatcctacagggcctttcaaagatccatctttttctccaagggagatgggaaccattgcagaggagggacgcatgtgctccaggtttttacctctagcttccctctagcttcctgcagagaacagaccacggggcattgctggaagcaggcagttgactgcagtagaccagaggggcagaggatggcactggacctggtgttccagaagaggtaagaactgatcagtggccgggcacagtggctcgtgcctataatgccagcactttgggaggccgaggtgagaggatcacttgaggccaggagttcaagaccagcctgagcaacatagcaacagaatgagactccagctcccgcatttccttgattccggaatgcatgcctttcctgtggcctcttagacttccatgcaatgcagaacgctcagaccagggagcccacaggactcagaagtgagagggtaagagggggaaaggagctgggggactcccaggttttggcctagccc

SEQ ID NO: 39108 - DNA, 1765 bp, Artificial sequence
  DNA replication origin
tctaaaagggaaggaaaagagccttccaggccacgggtcgtgcaggtctccggggcgggcgtcagcggcggcgtatgtgcgtgcgcgcgcgcctgcgcatcagggccgggggacgggtaaggggggggtgaagaaggggccggccttcaagcaagagcgacgcaagatggcagccaccacgggctcgggtgagcgggggcgccgggcccggccggccgagggggcatgggcttgggccgggggccggggaccctcaaagcctcctgcagcggagccagggtccccgcgccgcctctgtctgctgggctccgcggcagccaccggcgcggcctgaccgggggaggaggagcaggcggtggccggaagcacgggcggggggctgaggggcctgtgggcggcgcggcgaggccctgaggctcccccgggaggcgtgagggccctctgtgctgtctgggggagccggagtgggcgaggagcgagctccgaggcactcctgaggataccggggctggcgactcttaaggggcgatctagaggtcccctagaggaggcgccccacagcggatggaagtcccatactgggtgccaggggtgcggctgagaggggccttgggatgtctggaggggacatcagagaagcccttcaggctggatggaagaaacgggatcctgagggggtgacttgagaggatcccctatcggttgagggaacggctccggcgttagttttagagatggggttagctgaggaaatagctatgttgactagaaaggaggagccttggagcagctgcttttggggagaatgaagggggtctccgcatgataagtgagaggagggaaaaggattcagatgccagagggacctaatagcggtgatagtgaaatgaccccatcattaccagtctcctgttcgaggatacagatggattgcttcaagttaggtttcaggggacaaggtccgagtggggcagttggtggaagcctctgatattggatgagggagaacagatgaattgggagccccgaggatgtctctttgggagtggggattcaactgagggaagcccctgaaatgagggagtggaaaaggtcgggttccggagatgtttcctgtaaaggagaaaagtctcctctttttgaattgagtgagggaagcatatcctagaagtgtctcttctgtggagacgctcactctcatcgactcctttaataattgggacagatatgtgggttcagctcagaagttccccactggctgatgggagtagggaggtgaatagatgaaatgggaactcttgggtgaggctgcaccctcaggtgcctggcagtgaagttggccaaggaggttctctcagatggggtgaaaatgggttacctctctgatggaggaagcaaacagggccacagtgttccccactgtggggctgcagggacaccagcctgagtacagcaatcattggcatatttaaggccacagcagcggcagtgttgggaaggaattggtgatccatgggaaatagggtgaggggaattctttataaatgttgctactctgcggtctcaaggagccatacttgcctgatggttggggtgggaataaaagaaattgaatgtgggggatctgactgaagtgacccaccacaagctgctgccttttgagtttaaaacagtggggtcttcttgcagaatagcggagaccatgaatccttttactcgattttggtttcagctggaacagtgctgagtcaattcatttaccatg

SEQ ID NO: 39109 - DNA, 1409 bp, Artificial sequence
  DNA replication origin
aggatgttaaccctggcctacccccaggagagcaggaggttttaagtccataggctgggtgtcttgggtataggcctgaagaaaccatagcggcatggaccaggtgcccaagtcaggtgtgaaaaatcacatacagagaatggagtggtctaggacccagtgaggaaatgcaaatggtccgtggccatgccgccttttaaggaagagacggcatggaacccaggccagtgagggcagaaagctaaggtgctagtgaccccaggcccactccaggcaagggctgcatgtggtgcttggtggctgccccacagaaaaaggaaggatgtcaggatatttgacaaacaaagcttcattccatggtgacacccaggtagaggtgcctcccagtcacctgaaccaggagttctcaaaggcacttccttaactcctggggatatagggccctcctgaggccaaacagtaaaattcctagggctcacgtaggagtcacaaaagtgggtgtagggggggtgcttgctggagcatatacagtgagcaaagcaggaagaagctagggagaaaccgtggcctgagggaaagggacagagagggagaggtgaactccaacttatgatctggtctggggaatatgggggttccagtcccaagtcctaaggaaggggccaatacatggatgtgagggaggggcaagagctagagttggggcttatgtacaggggagcttacagtggggtacattcagtcccctcactgcctgggatccaggaatatggggcaaggactgatgctcaccactggagggttggggagaggatatcggtctgtagccactgaagctatcactaggatggggttttgggggaagggtgtggggggtaccgtgcagctggaagcccctgagttagggttccctgggcagaggggctgacattcccaggttagggaggtgaggtcattgtttgcagcccagggcctgggctagggcacagaggaggtactaggatgtagattccagatctggggaacccaggatgaggtgtgacttttaggggcctgagggcagtgcttacagctgaagggcagctttgggcttggaccgggtcctggggggatgagggggtggggttctaagtctaggagcactcttcacaaccgagaatgccccggggctaggattccgtatctgcgggtccgatgggagctccgtttgtcgcccagggagctcatggtaatttcttgatctggggagtgtctctgcagccaggaaaccccggggccaaggttctggcttgggttcggaagggacactggggtggggtccccgaacttgctatttgcaagttagacacccgggctggagttccgcatctgggcccgaggttgggactccagtctggggtcgctgtccg

SEQ ID NO: 39110 - DNA, 1269 bp, Artificial sequence
  DNA replication origin
cggcaacaagacgcctcgtcctcgtccagctccagctgctggcccggccagttctcggcgcccgccatggccactcgcccgatcggcccggtgcgctctgctggcggcggcggcggcagggccgcggaaccgcggcgagatcacgccgcccaatgaccgcccagcgccgggcgcggcggcggcgcgggcggggtcctcgcccggccgcgcgtcacagccaatcggggctcgcgccggagccgcgcaggccaatcggacgtcgctgagccgcagccaaccgccgcgagccggaggctgggacgcagctggacgcagctgggcgcggaagcttggggcggaggcgcgtgcccgccttcccagctcagccccggcagggctcccggctccagcccactgggagctcgcggcgcgtcgccgcccagctaggcttcggttcacgggcccatgcaatgggccgaggcagggcccagaaatgggcatttcttgagccggcagcgttaagcgcccactgtgtgcaaggaacgcgagggcagggcgccgggctggggccgaggccaggaagcatttggcgggtgctctgtacgatgctccctagcgaggccgatggagagtgggctggtttatcaagccctactgtgtgcagaggtttcgggtgccatgtgttcatcagctgtgtgccagctctgtgctgtgcgcccaaagaggagaaacgtcgagcctgccccgcatcctccccagctcatgttctcccggtggcgaggacagtaaactaatgaaaatgacaactagggtcactatgagatttgctgagcgcttaatatctgtcaggtgctggaccaagagctagacgagcaacatttatttgactcttaaacaccaatggtattgcctcctcagagagccccaccaccaccaccctgctcaaaggtgccccctcctccagtcactgtgacatcaccctgttttgtcttcacagcgcttctggtggggattgagcttgcagtccctgtctctcctatcagagagcaagctcctgagggcagagaacagctttgtttacagcagggcccccgtgccaggatcggggctggaacatggtagaagctcaataaatgcttgatgaatgaattaaggctcagccagatgcgtctaatacttcggcagataaatgacagcagcagggatttaccccaggtctaaccgacaacaaagtatgcaataatttctcatagaaattccatacaggcagccgggcgcggtggctcacgc

SEQ ID NO: 39111 - DNA, 1238 bp, Artificial sequence
  DNA replication origin
ttcactggtaaatgttgagcgtgctgtgctcaggagtccctcgtgggccagccctccccaagtggcagcctgcagggagactgaggtagacagctaggataatggtggctggcgatagggaaggaaattcactagcaggtgggacagggagggcctctcagaagccgtggcctctagctcagccctgagtgtcccattttgcagtgaggaagggctggccgggtggccctagggaagctgccgcacccctctgggccttgatccctccccaacccagaggctgctgggaagacccagaaagccagcaggctgggccagtgttttatcccctccctccctgcctcctacccaccaagggtgcccagagatgtcatttctccagctcttgggggcggaggtcaccccagctcagcagataacaccaaaggttgagcaatgcccgcctgcccgctggggccagggctggggtcagtgggctggggatcagccccgggcaggctgggagctcctgcctaggtggcctgggctaggagtggcagagaggtgggcccagggagctgccccaatggcctaggaatgggtccgggagggcaaagggccctctaacctgagcctacccagcagaggcgggcaagtggtcagaaggccttgggcctgtgttcaagtccaggcgggccgttgtcgctttcccgtctgtgaaatggcagcagcaaaagcatcttcctggtggggtgaaaaaagttgaacctcggggtgcaggcccaccgtaagcacagggcagggacttggtaaaaacttatctttctctttccttctctttcctgcataccaccccctcccgtgaggcctcgcttaagtccctccctagcaacttcagaaacagaagtttttggcctctgggactggcaataggtcttagggctcagatgagggcatttcatttgggatgaatgggggacatgcggccatgtgaccttggtatgccacgccatgctctctctgggcctccactggcacaatccgtgggggtcccgttctctctgatgtgcagcccacaacgtaagccttaggtttgggagtctggtgggaacaatgccaccaccactgacagtagcgacacccttcatggattgcagctgggagaagtgaagtgactcacccaaggtcacacagtgtggcagggccgagcaccccccgcccctgccccatcccagggcccaggtcgggtggcgcagcgc

SEQ ID NO: 39112 - DNA, 1564 bp, Artificial sequence
  DNA replication origin
cccattgcagattgtgataaaggccctgaagaaaataaggtgggggaagtggaggagggtgattgggggggaacgcgtagggagccttccaggctgggggaacagcacacgcaagggccccgaggcagggcccagctccgtgtgaggagaagagcctggagccagcatggctggagcagaggcagcaaggggaggagtggggaagaagaggacaggggtggggcagggtgggggcacagggctcctcatgcaggggtggagtaggggaggggaggatgggggcacagggttcctcatgcaggggtggagcgggggaggggaggataggggcacagggttcctcatgcaggggtggaatgggggaggggaggatgggggcacagggttcctcatgcatgggtggagtgggggagggaaggatgggggggcacagggttcctcatgcaggggtggagtgggggagggaagaatatgggggcacagggctccgcatgcaggggtggagtgggggaggggaggatgggggcacagggttcctcatgcatgggtggaatgggggagggaaggatggggagggcacagtgttcctcatgcagggctggagtgggggaggggaggatggagaaagcggggaggggtaggccacatctttcatgcagggtgttggaggctgggcgggctgtgaggtggctttgaggatgagagagtgggtgtccctgccaggtgtggcacccagaaaggccttgacaagcctgtggagggaatgaaataggctcctgggccttcgggatgaggtaaagtgcagtcggtgaagggcacagggaggcctgcccgggcccaggagacctcgtaggcgaggagcctgtgacccagggcctggagccacggggagcagttcatcgggcaggaatgaggggagggctcaccaggaggggcgctggaggagccagggccgggagccaagagagggagagttctttgggtagccctgactgcaggggagagggcaccaacccttgtggggagagaggcaaggctggagagggaggggtcttcagggtgggattggtgagggactggggacaggcaggagacaggacctctgcgggggtgtttgctttttatttgatttcccaagtaatgcatgattgtgatgggaggatcagagactgcagagtataaataaaagaaggaaataaagagcactactcagaaataaacccattaacacttgctgtgtggccttgggcaagttacttcacctctctgtgcctccattttcttgtttattaagtggaataattaatagtacctgcctcataaggttgttgtgaagcttaagtgagataacacaacaaatttaaagcagtgccacacacagtaggtattagctgtcatcattattcatatcatcattaccattttggtgggttaggagcttagatgctagaattggaatgctggtgttctgaattcaacattttcttttttttttttcccccttgagacgaagtcttgctctgtcatccaggctggagtgcagttgcgtgatctcagctcaccg

SEQ ID NO: 39113 - DNA, 1407 bp, Artificial sequence
  DNA replication origin
gttccacaaccgggaagtggctgggtaaggttcctagacccagggcctctgatcctacttgccacgatgtttccatcttgttctgtgctgtgtctgcaactcacagcctggcacacaaaagactctcaaagatgtgctccaggaatgactttgatgagcacacaccacacaccaggtgctgtgctaagcccggggatacagaagagaataaggcggccccaagccccaccttcatggcgggtccattattggggtgggggatacaggtggtccgatgatgagtgctagggaggaaaataaagaaggggagggagaggagagtgtgtgtgtgtttgtgtgtgtgcatgcaagagggagagaatcagagagagagtgcgtgagtgtgaggaagagaaggatgtttcacttaaccacagaggtcagggaatgcctggctgagggaaggtgctattgggtggggtggggcgggggagccatgaggtctctggggaaagagggaatggcatggcaagtgcaaaggctctgagatgggaccatgctgtctatgttcaagggaccgcaaggaggccagtaggggaggtgccattgtgagtgatggggagagaagtaggatgggagctgggaggtggtgtgtgtgtgtggcaggggtgggtggggttctgagcagggcggggatatgcctgacttcttcctcctagggttacagggtgggtgatgtcggccaaggggaggagagaacaaaatgaagcagttggtggaaagtatgcagcctgtggtctggtacacagtaagcactcaataagtagcagagtatgtgtgggttttggatgagtgaccgctaagctttttttttgacacagggccttgctatgtcacttaggctggagtgcagaggcacaatcatagcacattgaagcctctacctcctgggctcaagtgatcgatcctcctgccttgaccttccgaagtgctgggattacagatatgagccaccacacctggctggagtgacctgctaagttttaatgggattcctggtgggttgggtgatacctgaggggacctgcctacttgggactcgccccatggagggctcagtgacctcagatgagctggaggtggggaggtggtgggcaggcgaatgggaggaggaactggttgggggcaggcacacagtgtcccgactgggagggcaggcctttccgggctccccaccagctcccctcaatctctgtgtgtggtccacaggcaggacccccatttgggctctgtttatgtgtgattacaatctgtggtctgtctctcccataggtgctaagttccctggacaggaacccatctgttgtatgggtggctgtgtcctcagctcttagaatggcactgggcacatagcaggtgctcagtgac

SEQ ID NO: 39114 - DNA, 878 bp, Artificial sequence
  DNA replication origin
atgtatcttccacctcctgtttaaaacaagggtggaatattacatacactaatttcccttgaattttttcattaaaaataaaatctagagggaaaaaaatgcttgtgtaacaaataatacttaaaagcaaacaaacgaaacagaagggtcctgggagggctgcgggtcatacttttcaatggccgggtaacaacaccagggtgtggccaggcctaagcagcatcacccatctccccgaaatcatgagtgacgagttctcattttggctttttttcctctagacacgtgtaggcactagacactttacacacaagagtttactcagctcttaaggagagaaagtgaggcagtgaatgagccagaacttgaacccaagcccatctgaccccacagccacacaggcctcgctcactccttccttaggacacagtaaggaagaggagaaacaatggcacctgcccgtggggaactgacattctagtctgggagacagacgaaaaacaaaatgaatccataaactctatggcctattcccagaggctggggttctagggagaaataaaggagggaagcaggggaaagatggtggggagtctgcaattttaagaagcgctgtcagggaaggcctcgctaggaaggtgatgtctgggcttgaaggaggtgagggagtgaacaggtggctttcatccatttggtgggacaacaagcacgaagacctgggggcagggagctgctgggagctgggggctgctgggacatgaaggggaagaggccaggccaggccacagagggcgtggaggccggctgaggggctggggctttattcagagagtaacggggagccatggaagggtttggagcacggccgttggaggtca

SEQ ID NO: 39115 - DNA, 847 bp, Artificial sequence
  DNA replication origin
tgcttcagatgcttcagatcatggagtcctggaactactgaattttttcctccaggacgaaggaatcaccagccctcagcagactaaacctttgcaactctaaaattcaaatgcacaggagacctggtagaccaagtcatgtgcttgtttgggaagcatttattgagcatctagtatgtgctaaagtactagggagacagcaggaaacaaaatggactaaccctttgactttatggctcttaggttttgggagggggagacagcaaagaaatgacaaataagtgaaagacatagcatgtcccatagtgagaccactgggaaaaggggctgagtctgcaggaattgaaggggctggccacacagatgtctgggacagagcattccagatcgtaggaaaagcagatgcaaaggccctgaggttggaacaagcttgcattgtgggggaaagtgaaggagagccagagatcatccaggccctgagggcctcaggaggaggaggagtttgaattttattgcaagtgaggcgggagcattggagggctctgggcacaggagggagatggcctgactcaggttctaacaccaggttcctcagcttcggcaccattaacatttggggctggatgctgctctgtagtggggtcgtcttgtgcagtgtaggatgttaagcagcgtccccggcctctgcccactggagaggttgccagtcgcacctcctccccaaacccagctgtgacaactaaaattatttccagacattgcggaatgtgtcctgggtgcaggatctctctggctgcaaatggggcaagtggactgtggggggccaggatgttgtgatgagagcaga

SEQ ID NO: 39116 - DNA, 986 bp, Artificial sequence
  DNA replication origin
gcctggagcacgtggctgcaccctaccgtgcgtcagtttcctcacctgtgaagggtgatcgtggtggtcctgatcttgcagaactgcagtgagggctgtgagtgtggggtgtctcaactgcacctggacacgcagaaggcactctgtgaacactgactttcattggcccaggcctctgaatccatgacagttcaatctctgaaccccacagcttcctccttcaccctttgccgccccagggcaaggtgagggcggtggtttttatgggcctgggaaccagacaggctcgggctcagagggggcgcctgctgctggcgggagtggggcctcctggttcccactccctgattttgggctgggggccggtggtgggcaggggtggggcagcactttgatgttcttcccttcattccaccaccactgcttgagcacctactgtatgccaggctccaggggacccagcagtgaacaaggtctctgccctcactatggtggaggagaggatggaggagataaacatcggtgagcaaatgcttgaagaggcgagaggatttcaccagagagaagggccgtgatgggaatcagcaggggtgtttgggagctgagtgggtcagagagggcttttctgaggcggtgatgtggagcagatgcctgaaggagaagaaggaccagacctggggaagagatttccagcagagggaaactcaccacagcacgtgcaaaggccctgagggtgggaatgggtttgggaagttccaggaaaggcaaggaggctgaaggggtgtgaggaggggacagcagcaggacatggtgctggagggccagcaggggttggaccatgcagggcttggtgggctgagtgagcagccgcggctgggacttgggcaggagcctatgtgagagatggcaagactgcctgagatcgcattcagaacttctacccatctcacagatgagctcagtgaggcccgagccagcttccccta

SEQ ID NO: 39117 - DNA, 767 bp, Artificial sequence
  DNA replication origin
ggtgctcaataagtgtttctcctcctttgtctccttccgagtccatcttggaccttagcccataggggacttaagggcctgaggtttggaatctgcgtggaaggcgggaagtcgtctttgctgatccagaaacccagagctgagctttggggttggcaagagcagagacgcccccagcacccctgcccctcacgctccctgcaccctgtccccagcatcatgtgcagcctgggtggctgcggcgagctggggcctgcccaacgggtccccagtaatgacactcattacacaggtgtctggcagcggggggaagcgaaggccccaggggccgcattcacatggcacccagccagcccaccccaggcccttcctcgtcctttataagtctggtgcccagggcaggcgggcaggctggggagaggagctggcgaagggccagctggcgcccagtgaaaggagggaaagttgagaggtctgggtgccaagcactggtgtggaggccaggggaggtgggcacggggggcgcgtgtgtgtgcacacgtgtgtgtcagggtgttttggagggggcgggatgcagtgaatctgtgtccaggtctatgcatccccctggcctgtgtgtggagatgagagggtctgtgtagatgaagcattgatggtcccccaggtgggtgcaaaatctcccatgcccgtttcatttgttctttaacctacactgtgaggtgggtaccaggctgggtccagcctggacctggtgatgtcagagccag

SEQ ID NO: 39118 - DNA, 848 bp, Artificial sequence
  DNA replication origin
ggtgtggaggccaggggaggtgggcacggggggcgcgtgtgtgtgcacacgtgtgtgtcagggtgttttggagggggcgggatgcagtgaatctgtgtccaggtctatgcatccccctggcctgtgtgtggagatgagagggtctgtgtagatgaagcattgatggtcccccaggtgggtgcaaaatctcccatgcccgtttcatttgttctttaacctacactgtgaggtgggtaccaggctgggtccagcctggacctggtgatgtcagagccagtcccagggcagccctagactctgccgtctaagagctccaaatccagggacagacagacgccaggcagaggatcaggacatcccagtgaagactttgatggagaaaaacaaggcagggggctgacagggatcaataggatggggtcagaggcctcactggaaggtgagcttggctggaggcctggaggacgagccgccatggcaagatctgcaggaagagagttctgggcaggaggaatggcaagtgcaaaggcctcgatgcagggctcagcttggcctgtgtgaaggggcgagtgaggaggggactgggggccggggcaggtccagagctcatggccaaagtcaggagtgtgcatcttctgagcgcagtgggaaggttggcacatggtaggtacacagatgggggctccactggggtgaatgggtttgatgagagccgggaccgggccctctgggtgtgggaacgattggctttcagagctacagacaggaacgtgggctgctcaattgtatttgaacctattctcctgggttcaaacccctcctggatcctggaacctgttattaagccg

SEQ ID NO: 39119 - DNA, 840 bp, Artificial sequence
  DNA replication origin
tggagagatggatgatggatggttgaataaataaacaagtgctggattttaaattgtgtgatggatggagcgggtgatttcattgttgaatactgtgaattactgatggatgaatgaatagataaatatataattaaatgaatgaattaatacataaagtgatggatgacttaatagatggctagatgaataaacagataaagggataaatgggtagatggattggtgattccatgagtgaatgggtgggtgtatggatgggcaaatggttggatggatagatgaaagagtgggtggatggatgagtgagtggacagaagaatgggtaaatggatagatgaatggatgggtgggtgggtggataggagaatggataggtagataaatgaatggattggtgggtaggagggtggataatagaatagatggatgggtaggatggatggatggatggatggataggagaatggataggtagaaaaatgaatggattggtgggtgggagggtggataatagaatagatggatgggtaggtggatagatggatgggtaggtggatagatggatggatgagtgggtggacggataggcgaatggatgggtagataaatgaatagattggtgggtaggagggtggataagagaatagatggatggataggtggatggatggatggaaagatggatggatggttagattgattggtggatgaatagatgaatgggtggatgagtggatggggaaataggatggaggagtacatggatggtggatgagagaatgaatggatggataggtaagttggatggatatacaggtgaatgcatgctatgtcata

SEQ ID NO: 39120 - DNA, 771 bp, Artificial sequence
  DNA replication origin
tttattgggcaattcctgtgggtcaggcgctggggacatggcaggacataggacggtcaaaggtctctgcccccgtggagttcacacttgtggagagagcaggcaatacacaagataaataagttgcatattgcatttgagaagatccatgctagggagagaaatgaagcaggaaaaggagatgggatttcaatgggcggggcaggaacagcctggtgagcaggtgacagctgacaacgatctgtaggaggtgagggagggagccgcggggaggggagagtgttccaggcagtgggaacggtgcacaggccctgagtgggggctgtggctgttgtgtttggggtgtagcaaagaggccagtgtgtggaacagggtgagcgagggagagagactaggaggacgtgagggccaagaggccgtggggggcggatcctgcagggccacgtgggctgttaaaggactttggctttttctctgcaggacatgggagtcatggagggttctgagcatagaagggacgtggtctgacttcagttttcatggatccctctggctgcagtggagaatgggctggaggggccagggccaggacagaggcaggggggatagtggggaggtgatggcaatagtccaccctctgtttagtgatcctggtccttccccgctctaaagccttcctgacttcccatcgcctctggacaaagctcaaactccttagcgtgacattcaaggcccgcttacctgactctagctgctccctgccccggctcc

SEQ ID NO: 39121 - DNA, 1058 bp, Artificial sequence
  DNA replication origin
cctcagtctccctacccataaattggtgccataatggttgccatcacctggagttgctgtgagggccccttggcacagcatctggcacacagtaggcacccaacacagatgagctgttactgccagcattcccatcactctgactcaaagctctgcactgtctggaactcagtctcacccctcctctgtaaggcaggccatgactccggacccgccgtgtaccagcactaactgttttctacccagtgattgtttatttaactgtcctcctaaagtaactcctcagccatcaaagggctgtttacaaagcccacaattagccttcttggaacaacaaataaacagaaacctaattaggcatgtttctcctggctcaaggcacggcaaccccaaggcttgggcatcacagctgtcattcaaatagacatttgtgggctgtatggatgaatggatgtgtagatggatgtgaggatgagtgggtgggtgggcggatgaatggatggatggatgtgtgggtggatgagtggatggatgaatgggtgggcggacggttggatggatggattggaggttggaaggaaggagaggtggatagatgatatttgaactgatggacagatggatgaatggaaggttgaatagatagaaggcaggaggaatagaagaatggatgggtggatgaatagaaggacaggtggagggaagtcttgatgggtggagggatggctgagagttggatggaaaggatagatggaataatggaaggacagatggagagatgtttggatggcggatgaatgtgtggatgagtaggtaggtggaggtatgggtaaaggaatgaaaagatggactggtgagttcaggttagtggaaggccagagggagagggtgatgtgaactgaggctccaggctttttcctgcgtctccttcccaccctgccctgttcttcactgagatgctgtgtcaccacccagtagaagggactctgaccgtgtggcatcagaacaatcctgggtttgaattcgctcctaccatgttctgcctctgtggccttgag

SEQ ID NO: 39122 - DNA, 779 bp, Artificial sequence
  DNA replication origin
ccttctgtcattatattacgtatttatatagtttctttttgtccactacctgcctagaatattagaaccatgagagcagagactttgttcacagctgtatccccagtgcccaacccagggcctggcctccatgatgctcaatatgtgcttgtgggatggatagatgggtggatgaatggatggatgaataaatgggtggagaaatggatgtatgatatgagggaggaagggtgggatagatggatgaatggatgggtagattaatgagtggatggatagatggatggatgaatgaatggatggatggatggatggatggatggatggatagatggttggatggatgtttggatggaggggtgggtggatagatgagtggatggatggatggatggatggatggatggatggatggatggacagctgaatggacggatagatggttggatggatatttggatggacgggtgggtggatagatgggtgggtggatggatggagggaatgaggagtggatagatggatgaatggatgggtagatgggtgggtggatgaatggatcaagggagtgagagagggaagggatggatggatagatggatagaagggtatactaatgggtggatgaaagggttgacggatggaaggaatgatgggcggatgggtgggtgagtggatgggtagatgggtgggtggatagatggtgggcggatggacatttctcccagcgtcgcttcccatccctgtgctgtgggtctctcacgtggctgccctgactt

SEQ ID NO: 39123 - DNA, 874 bp, Artificial sequence
  DNA replication origin
gatgggtgggtgagtggatgggtagatgggtgggtggatagatggtgggcggatggacatttctcccagcgtcgcttcccatccctgtgctgtgggtctctcacgtggctgccctgacttgcctcccctggccccaagcccgagcagggagctctgggggcttccacatgattgggcaggatttctatttctcaccctcctctgaggctgggcagacaaaagcctttgttcttcctccctgcctggccctgctccagccagggtgggaagttgctggcaagtcagcaacttaactttgctgcaactgaactgaactttgaggcgtaacctgtcaagcgagccccggaggcttctgcggtccacaggggaggggcatgatggaggcatggtggggagcaccatggccaggcacagagatgatccctatctgggtggacccccaagtctcccagagtagattcattttttgaagcaaggaggggaagctaatagatgaagctggctctgggctctctgtggacagctggggacggtgtttctttttgtcctccagagttgttctgcagggtgaggggtaagaaagggggccgctactaagtgctcacggtggtcctgtgagggggtgtcacggtcaccattgcacagaggggaaaactgaggctcaaagagactaagtaacacgcccccaggatcacccggctagagtatggaaggcaaggtatggacctggacagtgtggctcagataaaaatttctcatgtcccatgtcaccccgtcacacttggcataagagccacagttcttccctaacactgccttgctggatgaactcaggtaagcctctttccctctccgggtcttagtttctctcctc

SEQ ID NO: 39124 - DNA, 912 bp, Artificial sequence
  DNA replication origin
agtccttcttgaattgctgcctggcccaggccatggtgtcccagcaggtgaaggggtgggcagtccagctgccagccctgtcagatgcagccgcaggggctgtggctcaccaaggcccggggcctgtcctgggctcctcacttggctctcgtggctgggacagattgcttccttcctctctcctgggtgccaggtaggcccagaaaccacctgatgtcagcaaggcctggccacccactggtggggaggaagtgggcgggtgcccagggacagatgagccgggcagacgtgccctgaggcagcacagtcagggctgacgtgggcattatgcacctcggggctttcagagctggctccggtcccgtttgcccacatcaagcaggtcagagtggagagggccaggggcgctggggtcaaggcatgcactgaccaggcgtctgtccccactcctcaaaacacagccaggagatgagcgcactggggtggtggcctgtggaagaggggcagggtctgtgtccagatgtggccggagggtggggtcgactgtgtgcggtacgtgtgtatggaggtgactgtgtgtctggcatgtgaatgtaagattttaggaaggtgagtgagcttgtgcacaggtgtgtgtgtgtgcacgtgtgtggctaagcatgtgtgagtgagtaggcatctgtgtgccgtgtgtgggagccgggcagggggcagcgtgtatggctgagtgtgccagcacattgctgagcatgtactcgtgtgcgtctgggtgtgtgaatgacaaaataagtgtatatggttaattacatgagtgtgtgagtgagtgtggggaggggatgtgtgtatccttgattgtgggagtcagagtgtgtgtatgtgtgtgtgtgtatgtacatgcgctgttgtgaagag

SEQ ID NO: 39125 - DNA, 1332 bp, Artificial sequence
  DNA replication origin
gtgagaataacagcactgcccttatgggattactgtgagagttaactgagttaatgaacatcaaccattatcattggttcagctgatgagaggtaagggttcgtgtccgtgtacccagattcacactgtggcactgtactcaccacccgtgtggcctaaggacctctccgaggttagggcagtgccacccccatggggtgtggtgagggtaatgggaaggccctggaatagggccggcaacctcagaatacttaatgacagctgctgctgtttctatggtgtgtttgtcaggcccttcattcattcattcacttcattcatccaaaactaggctgggtgcagtggctcatgcctgtaatcccagtactttgagaggccgaggcgggtggatcacctgaggtcaggagtttgagaccagcctggccaacatggtgaaaccccgtctctactaaaaatacaaaaattagccaggcgtcatggagtgccactgtaatcccagctactcaggaggctgaggcaggagaattgcttgagcccaggagatgaaggttgtagtgagccaagatagtgccactgcactccagcctgggcaacagagcgagactatttcaaaacaaaacaaaacaaaaaccgaaactatatgccagcctctgctccaggccaggcaaagactgtgccctcagggagctgaaattctacaggggaaacagatgatatcaaaatccgagaagtgcacagccagccccaggggcataaggactgtgggagacagcaggaagggaaggggcccactggggccaggtagaaattgccacttaaaaaaggctgtccaggacagggttctcaggagaggtgacacctatgtaaggtcctgaggaggcgagggcacaagccatgaaggcacatggggaagagtgttctgacgagagcacagtcagtgcaaaggccctgaggcaggaacgtggggcccagcccacagggcatgagcaatagccaggaggctgttgaggttggggggagtgagttggaggcgggatgggggataagtgcagagaggggacagggttttttctgcacctctgggatgctggtcacctcggcaggcctcagtcatcctgagaacatgggcatgcacagcgggtgtctgtcaggggaagcccctctgggggacttgctgtggtccctggggtggctggtgaggccgctcccgtgtcccctctccagtctgtcctacagcagccaacacagcaggccttgctgctgggtggcccaagggccacctccatcctcagctacctgtctgacagcgacctccggggtcccagcctaaga

SEQ ID NO: 39126 - DNA, 2000 bp, Artificial sequence
  DNA replication origin
aggggtggcaggtgaggcaggggtggcaggtgaggcaggggtggtaggggtggcaggtgaggcagtggtggcaggtgaggcaggtgaggcagatgtggtccctgcctatgggggttcatgttctactggggccaggggtgactgctttgaatgggactggacaggtagtgactgtcaccatgggctgggctagcggggtgcttagctcagggagggcctctcccagagaggagaagtcgacaggcaggtgtggggccgcccctccgcgtgggcagcgccaccagcccgtgtgcccaccacaggtggatgagctgtacgaggactactgcatccagtgccgcctgcgcgacggcgcctccagcatgcagcgggccttcgcccggtgccccccgagccgcgcagcccgagagagcctgcaggagctgggccgcagcctgcacgagtgcgccgaggtgggccgggccaagctgggctgggcagcaggggcagcaagagctgggccgggcagtggggacatcgagagctgggccagtgggggctggaggaggtgttctgggccccaaggaggcgtctctctgcctgtggcctctgtctggctgcagggatggttagaggccctcgtggcctagccccaggcagccagctgagccacctccggggctttgcaggacatgtggctcatcgagggggccctggaggttcacctgggcgagttccacatcaggatgaaaggtaacagggctgagagggggtgggcggaggcctttctggaggccctgagacttctgctgaggggcacgggaattggccagaatcccaggggtctgagcccagccctggcttttgcatccatgtgacatgtgacttctggcaagtcccacccctctctgagcctggtgtgagggcccagcaccctctgtccattttccatcatgatggtgtacctcccccccatcctcaccccactgaaactgaaaatctatactcgggggaaccccagagaggacctgtggtcccaggtcagggagagtggaaggcggaggggagaccggccatgtctgtgttccaggcttggtgggctacgcacgcctctgtcccggagaccactatgaggtacggccactctctggggtcaatcctcagggctccccgccaggtctttgggggacgggagctgctgggaaccagggttgcagctggggctctgcctggcagggagggccctgggcggacagcaaggggacacccacctgggctgacgcggcccctctcgggctggttcacaggtgctcatgcgtctgggccgccagcgttggaagctcaagggtcggatcgagtcagatgacagccagacctgggacgaagaggagaaggccttcatccccacgctgcatgagaacctggacatcaaggtggggatggggcccgggggcagggctggggtgcctgggtgttcggctcagacaccaccctccagcccccacccccaggtgacggagttgcggggcctgggctcgctggctgtgggtgcagtgacgtgtgacatcgccgacttcttcacgacgcggccgcaggtcatcgtggtggacatcacggagttgggtaccatcaagctgcagctggaggtgcagtggaagtgagtcccgtccagcctggggagagcggaggcctggctggctgcccctggtggcctggccacactctggccctgggttcctgcaccagcctctgccaagggtgtccctgccctcacgggtcctcatctgtccctcactcccacccctcagtcaggtcgaggcctagaacttctctgtagcccctgcctgcctttctggttttgcttcccttcttgcttctgaacccctgactattaaagccacagggaaggttggggggacactttccggggcctcccgggcttggctccttggaggaggctcacctctccaggaaggccctccttgctgctcccaccccctcattcctggccgaccctggct

SEQ ID NO: 39127 - DNA, 1727 bp, Artificial sequence
  DNA replication origin
ctgggaaatagaagagccagacctagaactgcctcatcccacgtgcatgtgtttaatcagtgctgtccttggcgtggacagcagtctgccgttggcagaggaaggagtgggtgggggtggctgtagacatggctttctgtcctctgactctgagctcaggcgccgccagcatagagcctcataggccttggaggaacatgtgggactctgacagcttcttccgccctcctttcctccctcacaggctttctattatgacctggacaaggtgagtctgcatacggtgagtgaggtgggctgggcctggctggatgagaatgactgtgcctcattgcatcttcctggctgcctgatgggcagaaaacctgggtctcctccccattttaggaatgggaaggctgagtctctgcgatgagccttcctcagggatggtgaggggccccattctctgagttaggacctgtaggagggtggcaggggcaagcggggcaggtgggtggcccaggcaactttgcaaacatcttccctttttccgggagaagcaaacgcgctgtgtggaaaggcacattcggaagatggagtttcacatcagcaaggtcagctggctcgtggatgttgcagggtggggtggggcagtgccagcttgctgggcctcagctaggttagcaggagctggggaggtgccctcgaaacagggatcagggcctctgggtatggggcagctgcaggaggctaaggatgagcaggggcctcgggccagttgaaggacagcaggggctcagccctgaggtgggagtcagggggctcagccctgaggtgggactccctgaggactgtgtgggctctttcttcagtttatgcagaaagacctcatgctcagtcttagatggctgggaaggttgagccctcccagcccattgtacagttggaaaagcagaggtccagagatgaacatgggttggcccaaggtcgcatagcagatctgtaagctttagagtctgcaaacggtttcatgatcttgctttactccccacactgcccagtgggtggcaggttatcacaaagtcatctcccatttcattgttgaaaaaccaggcagaggaggtgaagggacagattcccttgtccctttcactcatttttgctgtgcacactgtgtgccagtcgctgccaggagctgggtatgcagcaggtgaggcaggggtggcaggagaggcaggagaggcaggtgagacagggttggcaggggtggcaggagaggcaggagaggcaggtgagacagggttggcaggggtggcaggtgaggccggggtggcaggtgaggccggggtggcaggtgaggcaggggtggcaggtgaggcaggggtggcaggtgaggcaggggtggcaggggaggcaggggaggcaggggtggcaggtgaggcaggggtggcaggtgaggcaggggtggcaggtgaggcaggggtggtaggggtggcaggtgaggcagtggtggcaggtgaggcaggtgaggcagatgtggtccctgcctatgggggttcatgttctactggggccaggggtgactgctttgaatgggactggacaggtagtgactgtcaccatgggctgggctagcggggtgcttagctcagggagggcctctcccagagaggagaagtcgacaggcaggtgtggggccgcccctccgcgtgggcagcgccaccagcccgtgtgcccaccacagg

SEQ ID NO: 39128 - DNA, 888 bp, Artificial sequence
  DNA replication origin
atggggtttcgccacgttggccaggctggacttaaactcctgacctcaagtgatctgaccacctcagcctcccaaagtgctgggattacaggcgtgagccactgcgcctggccaggatggtcctactttatagatcttggcatggggcgccgtggcctgccaagcctgaaatatttactctctggccctttacaaacctatagaaaggtttgcctgccctgatgatatattatttgtgttggtcgcaccctggcccctggaatggatagacttaggaattcaccattaaggcctgaactgctgtgccatgtgcccctcccgcttccatccccctcatgttcttttgtcatggccgaggccattccttcaatctcaatggttcccattttgtcaagggcctactgtgtccttttttctccctgtgaggtaggcgcttctcctaccctgctttacataggaggaaacggaggcccagaaaggctgaatgacttgcctgggacacgcagctgggaaatagaagagccagacctagaactgcctcatcccacgtgcatgtgtttaatcagtgctgtccttggcgtggacagcagtctgccgttggcagaggaaggagtgggtgggggtggctgtagacatggctttctgtcctctgactctgagctcaggcgccgccagcatagagcctcataggccttggaggaacatgtgggactctgacagcttcttccgccctcctttcctccctcacaggctttctattatgacctggacaaggtgagtctgcatacggtgagtgaggtgggctgggcctggctggatgagaatgactgtgcctcattgcatcttcctggctgcctgatgggcagaaaacctgggtctcctccccat

SEQ ID NO: 39129 - DNA, 956 bp, Artificial sequence
  DNA replication origin
tccacctccagttcccgttgaatcacctgcaggcattggcttcctgctaggtcctgggggaggacccctgagctccagaccaggccaggtccctcctgtgtgtgctccctgagctccttcccaggggcatttgctgcggggataggaccccacctccacccccctgaggtcagccctcccagctcactaacctttccctgggggctcccttcccatgggtggtggtgccgggaccccagggttaagatcctggagtgtcccagctggaagcaccttaggaatccctgttcacgcagcagatattcacggagcacctactctggccctgtcctgggctctggggacagacccaggccctgctgtcctgggagctgatggcagcaaacaataagccagtgataattgagacagatccagctggtggcagtgctgtgagggaactgaactgggggtgggggagggcacccatggtctcctgggagagcctgacgagacaggggcatggggagtggaggcaggaagggacagaagaagtggatctgcgcgtgtgcagatgggggtgggccgggaagccttcggcggcgggaggcagctgcgagtgcagatgtcctgggtgggaatgagctttaagggacagaaagcaggtgtgcggctggcatgcgtgacagcagtcagggagggaggaggaccctgcggagcctcatgggctgcagtgaggccttgagacacattctcagtggaggggagcctgggaagggtttaagttgatgccccaagacgagaagaatttgacccaggctccagagcagttagtgctcagtgccccaactccaagcctcagagaacagaaagagtgggtgctgcctgagaaaggcacacagcaggcactccataagtgctgcaaagagggggttaagtataaaccggccaggaaatgatgctgtttctcaacttaa

SEQ ID NO: 39130 - DNA, 1573 bp, Artificial sequence
  DNA replication origin
ccccgcgagcccgcgcgcgcgcacccgagcggaccacagccgcggcgcgtgcgcgcgctcacctgcagcccccgaagatgccgcaatccctcgcgttccgcccacacccaatagaaagcgcgcacctgcgcccgcggcgccaaccaatcgatacacgcctcgcgcggtgcgtgggcgggctgcctcctcaaaaccccgcctaccaccgcacgattggtcctgcgctacgagggaggggcgggatcacctgaagccatggccctccgccccgcttcaggccggagagccagaaggcgcatgcgcgggtgctggagtttccgccccgggaaggcacgcggggaggccggccggaagcgcgagcgcacctgaagaagggctcggctgggtgggccttttgcgcacgcgcgagcgcgcgcctggttgcccggctccgccggggctcgcgccgcttagcgcgcgccagtcacacgcacggtccaggggattggatgcgccgcccgtccggttgccgaggcgctgcggggctattcggttccagccgggcccccttcccgcttccactttgggatgctgcagcccccaacgacgcccctccaccgccccttatcgttgcttaggcgtcccgctgcaactcttggttgcaaaattcaagttttcccgcctctgcagcggttgctgggggagaagcttagggctctcttggcttcattttgtccgaagagactctgcacgccttaagtccgtcaggtcgagagggaaggaaagtgggctgaggcgcgggaaggctccttgcaggcccagcctccctgaggatttctagtccagtctttcagggctttttttttttttctttaaaagtcttccttttccctcctcccgccattccttggccattcgctgtttctacaaatgacagcctctaggttgtgttcgtttcccggagtgaccaagctgtgtcccagagcaacaaaacgctgaatcctcctctctgaacgtcccagagcccggcctctcttcacacagaccctgtgggtcatggggaggagaggagaagactgaagcttttggctggaggagattcccaggtcccaaggtctccctgtgggacccgggaatccaagagctgttgaaacctgcaagccaggaagggggcaggggaatggaggtggaggggaaggtccaacctgagatttggcaagaagagtggttagggtaccttcctcccctcatctccctgcccacctcggaggcctcctaacacttgtacccctgttgcccagcacttgttacaagttacaggtttcccatttttgtgtgcatctgagttttgtgagtaatctgccaccagcctagaatgaaagctcccgaaggcgcagggacggcttgtgctttgctggcattgagtggcacagaacccgactcccagcgggtactcagatgggtctttgctgggtgctgccactgagggtgtcccttctgcaggctctttgccccacttgggttcaaaggcgagaagctcatttttttccctctggaggattcaggtaaccagacgttttgtgggaggatttaa

SEQ ID NO: 39131 - DNA, 1325 bp, Artificial sequence
  DNA replication origin
cgggggaggcggcagagggagaggttgcggcgcttgtggcctccgctccgccccctcctctcctccagcgctgtcgccgtcgccgccggggcccggagggagggagctgcttccccgcctgccgcgccaccagtccgaccctcggtcccgccgtgtgagcagctggtggagtggagctcagcgcggacgccggagctgcggccgccccctctgcaggtgcctgtgaggaggcgcccgggccgcaaccgctttccgagatccccagtcgcgcactcgctccccgcgctcctgaggggccgcccggccggaggaggccgtcgcggggctcggcgttcagcatgaaccgcagccaccggcacggggcgggcagcggctgcctgggcactatggaggtgaagagcaaggtgcgcggggcccgggctgggcggagcggcgggcctggggggccggggcctgggagaggccgggccaggctcggagcgccgggggaggcgacgggctgagctgccccggggtctggacggtgcggtcgggagactgtgggtaataaacttgccgaggagggggtggcgggggtcagggggcgctagtgtccgcccctggcccgggcaggaagaagacctagtccagcatttaatctcattccgtaaatctcattcccgtgttcacggacgggagtaggggccaaggtatatccaaggatggcgcacactgagtgaaatgcgaggctgctcaaaaggtgtaggagaatcctgcctgctgggctgtgagtaaagggccctggaccaccccgttgttcccactttctgtggttaaggggcgcatcgagtggcgaaggagagagcccagtgaactaaacagccctttaaaagttcgctttgcttcctgctggcgctctttctagcactaactttggtatgcatttaatctgtaaaattagtactatcaccttacgttggagtagcactttacagtttgactctagatgctcttttcattccatcctgctacctactcacatcaagtgcttttccccttgaccaacggtatgccaatctgctgataattacttcggtattcactgaatttctaaatctcaaggctcagtgagcagggtagtctgtagggagggattagttagggaatgccttccaaagggggttttgagctggaatttgaaggtgatcggcagccaagggaacactttcagcaagcgtttcttgagttgaagagttaaaaggagcttagataatctagcccaattctctgagaagactgaggcttagaaaggttatgacttcctcaagctgtttttttgcaaagcc

SEQ ID NO: 39132 - DNA, 1169 bp, Artificial sequence
  DNA replication origin
gctgcacatctctgcgtggcgccccgcagccacccttcaggaaggggggaatccccgggccccccactccgggagcgagaggatgctccggggaagccgagggtccggagcccggacccctaaccgcgagaaccctctcctccaactccacagccccgtcccctacctcggccccaggctcgggggtcaggaagagcgcgagctcgcgcgccccgctgcgcatgggctccggctgatcagcgtccacgagcagcatcaggagggcgacggggtccggctggcggaggctgcctgggagcccgtggttgcgcccgggcctcggagccccgcccccggtccgctgcatgccccgcggaccgcctggcggaggcggggcaggtgcgctcccggcggtcgcggctcgcagctccaggagcgccgggccgagcgggcagcgccacccagtggcgagcggcgcgcgctgcgcccgcccccgcagcacctgggcatcagtgctttgcaaactcgcttgcagatggcagtcacctggagctcttttagaatttcccaagcctggaccacaccgtctctgggttaagacctgggcatcaggatcttttgatgtttgttaggtggttccaaccagattgttgacccaaagctaaatttgagaactattggggcaagccacccctccccatcggaatcccggtagagtacaggctcccggccccggacccggccgtaaaatagaatccccgggaagcttttaaaagcccggaagccaggcctcgcaccaggccgattaagttggaatccttcggagtggggcttgggcatcggtagtttctaaaactccccgggtgattctaacgggcgtccgggttagagaggcgctagcttagaggaagcccaaagccgcccgccccccacccgttcccatcctactaaagcatctagtttgcatcgggcggagggtcctggaatttagggaaggccgagtgtgacggtcctcgtcttcctcttcggtgcggattttaaaataaacttcaccaggaaactattgagcgcactacatttcacaaccgcacccactccctccatgccctcggaggccggcctagatagaccctttacaagccttggggctgaagagagcgaggtgcgcctcatctcccaccccaacagtg

SEQ ID NO: 39133 - DNA, 879 bp, Artificial sequence
  DNA replication origin
ggagggccgaggggtgccgggtcccagcccccacctaccagccccctccccacggctcccagggacctcccgggttcgtttccttcaaggtctttggtggagtgctatagggggacggagggttcctggcaggctggtttgggaatcaaattgtgtttttcaggcatttcattcttgctgagattttgaggatgagaggggagaaagttccttccgacaacaagaagttttcatttttgggggggtgctgtttgttgggccctatgtggaagcaccccaactttgccctggttggtgggaccctcaacatgcccttctctcaaagcagcaccaccgtcaggggcatcccctgtggcagcagtgccctgggcccagccctgccatcctggggttgttggacattgtttgcggcctttgcacatgccggttcccctccctggaaaacccttcccgctccccacctggcaatgttcattattgttcaaagccccagtcacacggtcccacccctgggaagccgcctgggttcccccagccagccttcctctggggtcccctaacccaaaccctcgttcattgcctggcgggcacatggcctcatctgcattttctcctgttgttcccctagcctgagagctgctcaagggtggggcctgtgtcttgtctttgccatggtgatgagagttctgatgctgctggagtgttctgggctgtctttgggccaccacaagcagcacttacctgccctacttggttcatccccaggccacccggtacggagtaactgtctccattccgactcttcaggtgaggaaaccgaggatcagaggagttagaacattttaacaaagccagggcctggcccatttgattccagag

SEQ ID NO: 39134 - DNA, 2069 bp, Artificial sequence
  DNA replication origin
tccaaaatgaatatacccaccggtgtgaattgacaatgtggtccaaagagcaaggcaggaaacggagtccagatcctcaaaatggtagtacagggcataaccactaggccacctatcagttcagtacaaaaagtacaaccctgcgcatcatggtgtaaaagctggggcctaggtttcgcattgtgcatctcacacctatggaaataacaagaggagtaaaatctatggaaatcaacacaccctaagaaggtgggtgctcacagaagactggtatcaacatttttgtaaaggtggttggctgctgagataatgaatggcaattacaagtccaaatttggagggaaacgaaatttttacaatcaacacttgagttcgacaatgaagaacccaacatgggcttgatgtttaccaacaaggctttgcaaatcatgacacccatctacacacttaatccaacatctctcaagaatgatttttaactctcaaagaattggaaagatttggcctatgaagaagggagttaaccagctatgcccccaaacctgttactttgtttcaaaccttctcctttaccaccagacttaggaaagatatggtgacacattcaaaacttgaggtggaagaactccagaggaagggaatccgaaccaaggatgtgccaaggtgattcgtcaagaacaaatatggactgggggccaacagttttgaaaaagtaaaaggagaaaacttctaaaatgcagggtgggctctttaaaagaagtaaaatcactgctcttgactcacttaatccttcgccatgttgctgtcagctcaccaactaagagtgcgagtgtgtcttgctgggcccattttcccatggtctgtagaaggcgctgtgaagcacatcctgttctagctcgggggcccttcccccctctgcagccttacccagtgcagagaatgcgccccctactgactccaacactcatcgcctttagccgacttggctgcggtgcattttgggtgggggctggtattttctccatggccataaaccagaagcaacaatgcagatttctaaagaaactgtatcaagctatccaagagatttttttttttttcattctgaaggttcaagatacaggcacaagaagcatcagggatgggaactgggtgtgtggggatggacatcattaacatgacaaacacagaaacagtttggttctttttccctcctaagcctttgtctgtgaaatggggttatggcaagaagtgtccagagtaactggtaaattcaagaagattaagaagacttcgtgtgtggggggtgtgtgtgtgtggctaaaaaggatatcagacctagagtcttggtcttgggcagaagaggaagagaagcaatcgcgccttttccagcagacagggatcaaggttgggggggaggggaaggcaggcaggcctcccagaggaaagaagaggtgaatacgagtgtgttcacaaaactactccccattcattacattaaaaaaaaatctttttgcagctctctggatttccattttctaccaccttactgcaaagttggggctcagaatgttcgaaagaggtgctgaccaggcagctgagattggggaaaagggatggtggtgaactgtggtcaggataagaggaaagctggcaggttggggaagaaggattgcacaggggaggcaaagactcactccatgccatgcatgctccccgccccccccaaccccgtcccccctcccccaggtaagggtgggcagacctggcagaaggctggttcaaggcatgggggtgtgcgtgggggggctccttttgggggtggggggcggacgggattagttccaggatgggagaagctcggttctggctgggggagatgcccttagctgcaaaagctccgggcggccaggcagagtgctggcctcggtgggctcacagggcggagaagggggtcgggctgcaggaggaggcgcctggacctccggagcagagtcgggtagcggtccgtgccgggacgggggacccgtcggcgccggggtgtgcaaaggagcgtgtgtgcggctgga

SEQ ID NO: 39135 - DNA, 670 bp, Artificial sequence
  DNA replication origin
aggggcacaccaaggccagttaggaggtggggagagtatgggcaagagtgtttacagtggtttctgtggagaggaatgggcacgggacagggtgagcaggtttagggttggctgatttgactaatttcagcaggttctgggcatgagggcttcctttagctgtctggtacctggccttggagtgcttaggccaggtggacagtggcctggagtctgagagctcagtaaaggaggtggctggggtgtgcgttccgggttctgtggcttgcataggaaaggtgcattccaggcaagttgtttactatctctaggaattggccaactctgggaggggcagtccctccagggtcagcaaggtcccagaccacagagcatcagagtacagaaaaaaagacatgtttaatacactggggacatggtgggagtgtggccttttatacagagctggaagaaggagccagatgaggcctcattgtttaggtgacattggagcagagacctgagtgaggtgagtgagtgagtgatgcgggtctatcttcaggaagggtcctccaggcagagggtacagcaagtgcaaaggccctgaggcaggatagtgcttggtttgttcaatgcatagagaagaggtcagtgtagccggaaaggagaggtgaaggggaggcaaggagac

SEQ ID NO: 39136 - DNA, 1002 bp, Artificial sequence
  DNA replication origin
aacgggagaaagaaaggcacagagggggggacagtccaagagaaacgagagagggagcacagtattcactggtcattttccttaaagtgtctgttctctttttctacaaccccagtagggccccaccgggcctgaacaacccaagcacacagggccctttacttccagcccccacttgctggctttgctgggaaacccagctcccttttttaagacagccccatggaaggcattctctctttttcatcaatttcttttccctggacatgatccacattagagacagacatgctgtttctgctgtttgtattttttttttttttctccaggcagacccataaagcaagtttttgctgggcatgttatttgcatggtgaaaagaacaaggcatctccttattgagggaaacacacataggggctggggtgggcggggctgggctgatgacccagcttcctttcacggctgcaggcggaggggcagggcccctctgctgatgttctagtgttcttcccggggtgtgggagtgagggtgtccttccccgggtgcgtgggagtcggtgctgcgccaggactgcactcggaagcggcctgtccctctccaggcgtctgcagtggatggcaatggcttcgggccacagatggcaggcagggcaggcgtgtcctccgcgctcagttattgtctctggtgtccgaggaggcacttccgaacaagatgtcactgtcctgggacacgctcagctgcgacttggttttgatgaggaactgcgccctccggaacatcaccctctcttgctcctgcttgagctccaggtaggagcgggagaaggtgtggaagatggaggtgactgggaaggccatgagcaggatgccgctcaggatgctgctcagggccactacctggcccggggtgctcctggggaccatgtcgccatagcccaccgtcgtcatggtgatgacagcccaccagtagcaggcagggatgctggtgaactcggggct

SEQ ID NO: 39137 - DNA, 1505 bp, Artificial sequence
  DNA replication origin
ccctctcttgctcctgcttgagctccaggtaggagcgggagaaggtgtggaagatggaggtgactgggaaggccatgagcaggatgccgctcaggatgctgctcagggccactacctggcccggggtgctcctggggaccatgtcgccatagcccaccgtcgtcatggtgatgacagcccaccagtagcaggcagggatgctggtgaactcggggctgtcggccatctcgttctcgatgacgtagagcaggggcgcgaagagggcgatggccacgcagaggaagagcagcaggagcccgaactcgcgggtgcagcggcgggccgtgagccccagcgtctgcagccccagggagtggcgcgccaggcgcatcacgtacaggatgcgcagcgcccgcagcacgcgcagcaccagccccaccttgtccaggtagctgttgcccgcgccgggcttgcgacggcctgcggcggcgccgtccaccagcagcgtgatgtagtagggcaggatggccaccaggtcgatcagcgtcagcgggctccgcaggaaggcgaacttgctgggcgcctgaatgagccgcaggaggaactccagggagaaccagcccacgcacaccgactccacgatgaagacgttgtggcacatctgggaacagtggccctgggagagaggggaagggacgccggaggggtcagcgggccctccaggaaaggagggcagaagctctgccctgtgccctgctgggcttcccaggcggaaggtgacctctccaggttgagtggccccgggtcctctccctagttgtgcccactccgaggcctggggcactaagcaccatctctacactggccgctcctcatctctctctccagcccccacctcagccctgaactccagacccccaacaggctgcctccctgacgctcccacctgggtgtctgaggggcatctcgaactcaccatgggatcctggtttcctctgcccactggtggtttccctccctagctttaggcaatcccatctttccaatggcttaggacaggagacctggcgtcatccttaccaccttgcgtataacccccaggaagtctcttcatttaaaacagtgcgagaatcaaacccactgcccactgctcccacctggtctggccaccatcctttcttgcctggatggttgcagtcacctcacctccccgctgggctccctcatccctgcagtccattttccacacatagccagagggatcctgttcctcctctgcttagcaccctccacggctcccgatggactgtgaggaatagtcttgttcagtgcccccatcactgccccgggcaaatttaggctgaggctgcctcaccgaagctttcaaaagaggctggaaatgtgcagttttacatgaactctcctggtgacaaatgttggtgataatgttggttaaatagataaaatgttgatttaagtcctggtgataattcagtgcaaagaaatactctatgggccactaaaac

SEQ ID NO: 39138 - DNA, 923 bp, Artificial sequence
  DNA replication origin
cagcggctgcggccgcaggatgagccccgccagggctgtcagcccgaggaccgccgccgtcggatcatcatcaacgtaggcggcatcaagtactcgctgccctggaccacgctggacgagttcccgctgacgcgcctgggccagctcaaggcctgcaccaacttcgacgacatcctcaacgtgtgcgatgactacgacgtcacctgcaacgagttcttcttcgaccgcaacccgggggccttcggcactatcctgaccttcctgcgcgcgggcaagctgcggctgctgcgcgagatgtgcgcgctgtccttccaggaggagctgctgtactggggcatcgcggaggaccacctggacggctgctgcaagcgccgctacctgcagaagattgaggagttcgcggagatggtggagcgggaggaagaggacgacgcgctggacagcgagggccgcgacagcgagggcccggccgagggcgagggccgcctggggcgctgcatgcggcgactgcgcgacatggtggagaggccgcactcggggctgcctggcaaggtgttcgcctgcctgtcggtgctcttcgtgaccgtcaccgccgtcaacctctccgtcagcaccttgcccagcctgagggaggaggaggagcaggtaagagcccacgccccgcggggaaacgcgccaccacgagggaagggactctgagcattgtcacctcctccagaaagcctcctctgattgcacactggctgaatagcatccctggtccctcctgacatcaggaatgtttgtgtgcatggtctgcctccctgttaatatgtgagcatcatgggggtccacgcctgtgcctgtcctggcctccactgtgcccaccactgccctcccccttgccagtgtttagaacagtgtccagcacaaacaggcactca

SEQ ID NO: 39139 - DNA, 1680 bp, Artificial sequence
  DNA replication origin
tgaaaaataatactgcttttcacgcagcctgatatcctcacaagaaattttttatttctctgtggtgttagttctgttagttctacagcatggtgggtttaagtgattttgcctctgagggtctgtggatgcttggggagaggaagctgtttgaagcagaggctgcgatgggggagatgaggtgaagtccggaggcaggtgtcattcattcctttatttgttcgtttattcagtagttactgaacgctcaccacgtgtcagactctgtattagagccggagacacggcagagaacaagacagacctaggccctgtcctcacggaggtgaccttctggtggggaagactgtttccaaatgagcacacaagtcatttcaggctgcagcgactgcagtgttgttgacagagcaaggtgagagatggagaatgactattgtggggtgtggggcaacattggctggaggggtgaaggagggcttcttggaggaggggacatggggttgagccgcatggatagatccagccccgtgaggacctggcagagggagtggcaagaatttgctccctgacttgggggtgggcttggatgatcaaagaccagagaatgcagagcacagagcgaggggaagctgggagaagaggagaggggcaggggccaggtgcagcagggccgaggggctgacaataaggagctggggcttattctgcaagggacaaggagtccatgtgtgcctgccaggtcagtggacaacgagtgggctggggagcccaggctggaggctatggaagtcattctggaaatgactaaggtttgcagcggtggaagtcccagagaacaggagggatttgggatgaactttggaggaagagccctcaggactggctgaggaatggggcctgggggagggggaaaagagaagaatcaggattccaggggtgccatttaccgaggcgacggataggtggcgctatggtgagctgagtcagaggaagctgttcctggctgtgggattatggacagaagaagcagctggcaaaatccaggagagaggggggagatgggtgtctcccaaggacggtgccagaccatcaatgctgagctgatgggtgtgtgtttgcggggggtgagggtgtcacctggcagctttgacctggctaggctggcaggggccggagggccagggtagtagagctatggtgaagtcagaggtgggggcctcacctgtgccctgtgcccggtagccactgaagctgcatcacatcaggccagagtggtcagggcagggcatatggtaggcagaaaaatgtccccacattcccctagatgcccacgtcctaatcctaatccctggaagctgtgactacgttagactgcatggaaggaggaacgaaggttacaggtggaattaaggctgctacagctgatctgagatgggaaattatcttggatgatctgggtgggcccagtgtaatcaacagggtccttatttgtggaaaaagaaagcaggagatggagcggcagagggctgcggcatgagaatgactccactggccactgctggctttgaagatggaggaaggggccatgaatcaaggaatgcaggtggcctccaaaggctggaggccaggaaatgagctccctggagcctgcagaaaggagcacagccttgccaatactcg

SEQ ID NO: 39140 - DNA, 1909 bp, Artificial sequence
  DNA replication origin
agtttggcggcggctccgggaggcagagcgggctccccgggcgacttccaggcccctctcgcgtcctcgccccggacccgtgggcagccggggggaacggaagccgcggccgggccaactccgaggcggggacgccgcgacgggaacttgaggtgggaactttgcgcgctgcagcctcgccgggcgccaccgaagcgcgaaccggaccccgagcctgcaaactcgggctcgggggcggctgcacgtggccgtggccctgaactccctgcgggggcctcgaaacccgcctgcggggaggccagggcgacagaggactcgggagtcaccgctggtgcgtggcggcgtggagcgcgcttgttacggccaaggtgcgggtccggcttcggttcatcccaaggggtcaccgggatgcgaagtccgggacgttcgccgccgcggtgaccccggcgggggcgcatcccggctgtgggccgaggtttctcccccgatcctgggaggaaggagagttagggattggggtgggggagtgtgtgtcacttgctcattcactgtatccttaggcacagtatggagccccccttcacccccaccgtgggcctgattgagtcattcattatgaacacagcaagcgtttattgagcgcctactgtgtgctaggcactggggatactgagacagttcactgggcacccccaggaactggtaggaaggtggtggtctcagccttagggtttccatgtgggagagaggctcagcccggaggtatggaaggaaaagggtgaagttcattcattcattcatagattggacaaagattggttgagcacctattgtaagcagctcatcataccaagcgctcaacagtcattcatccagttcacaaacatttatggaggcgctatgctggggagaagtgaagagggatggaatgggggcacccttcatgcagcttagagagaagtaaggattaagacccaggcccccgcttgggaggccgcagactgccggggtggccaactgtagcagcccatgtatataggcagaagtcttggttcatctaatgcattccttctcaaggtgggaggtgtggaagctggaattggttctagaataggaagaaaagatcttttcaaagctccttaggggcgggtgatggggtagggtggggaggagttgagaaacactgatccgacattactgaggaatgcaggttcccaccaatggggtttatgagttaggttgtccattcagcaggcattttcttaagcactcgctgttattaagcacttaaagggtgccaggcaccaaagttacccaggtaaatgacagacacatagaagagggagacagacacagacgcccccaccccctttgctgactccctgagataagtacagggggaagtaagaggagggagcaggaactggtctgattcattgtggggtgggggaagttcctgccctatgaatctgagcagaggtttattcattagtgtgtgtttgatacccccatacccatgatggcagagtccctatgaagagcctcaccggcagcacatctccaagaaaagtttggcactgctgattggggccttgcggtcggcactgtggctagggcatgctgtccttctttgggggatttttcaggctctgccagacctgagctctatttgtgcctcccccggcttttggagccctgcagagtcgcctgataggaggggaaggagggaaggtgtgtttgaaaaacaggcaagcgctggcccctggggatcaccctcctcagtcattctcgaagccagcccgttccacgggaaagatgtctgtcctgggacacactcctaacctgcagggaactgcaagcacactggaaacgaggcaacctaggttcttctcctgagacttgagagccc

SEQ ID NO: 39141 - DNA, 1338 bp, Artificial sequence
  DNA replication origin
gagccacggccgccccgtctctgcctcccggtccccgccgggctccgagtgcgccgggagcgcggcgcagcagccgccgagggagggagcgaggcaggaggcgggacggagggaggggactgagcgcggggcggggagaaggggcgggcagccgaaagcgcagcgcctggcctcgcctcgcttcgggacagtggcagcggcgccaccgtcacggggcgtccaggcgcccaatcgggaccccgcaccttggatccgggggccctggcgcgcctgctggattgcgctcctcgcggccagttcctgagcccgcgtccgggactgctcgcgctacgccctccctcccgttgccttcttccccgtctgctctcccaggagcgaccaccctgcggccccttcgcctgcacgcgacagccttcaaggtccccgcgctccgctgccctggagcttcacgcaccaggcggcgcggcagcctcctagggtcgcgcgccctgtcagctttccccgcggtgcaagtgctccggtggtcccgggtccgcgcccctagcagcaccgccccagggtctacatgtgctagatattaaaaccccactctccgctgccccggggccgcgctccacgcgcttacacatcctgggaaccacatgcgccatgtctcctgcctttccctggaagtcctggaagtccaagtgcactgctgcctctgggtccctcgcccccctaccccgggcaaatactgcatccttgaggccctccacgcgctgctgccctggagccgaacgctccaagcaagcttccacatcctgggggccatatatcgcgcgccttttctcgacctcctagaccaatgttgcccttgggcccttcctgccaccgccacccagggactgccagcatcttgctgtgccaaattcctagggccagtacgtaccgtgccaggtgttttcccttccagtcccgcggggccgaggccccagagccctcccgggctagcagagccgcacttcgtcgtccactcccctggccggtgcagggcacttggaccaggtcctggggtcttgctcccagtgtggccgcctagcctcggagttggtaggatgctgcacagatgctggaggttgggttggagggatctattgggttggaggaatctactgagttggagggacctattggtttggagggatctgtgctgctggcagggctggcctcttagggtggcttgccttgcactccgttcctcttctcctttctgtctcttgcactccgttcctcttctcctttctgtctcttgcactccgttcctcttttcctttctgtctctactgcctttgcctatca

SEQ ID NO: 39142 - DNA, 974 bp, Artificial sequence
  DNA replication origin
cgaggaactgactcctgccaacagcccactgtcaacagcgagctggggcccttctcagtcaagccttgagatgcctatgaccctgggagacgcctggagccagaggactcagtgaagccgctcccggattcctgacctatcgatgcagtgcgataataaatgtggttttaaggcactacattcggagagatgtgccacacagcaacagataacgaatacggaagggtagggatcagtcatgtgtcaggagggaagagaaggaaggaggagaggccatgctggacttgggaacagcagtgcagaggcccagaaggaactgagaatgggcccccagcagaaccacagggatctagctgggttagagcgcaagctgcaaataccactctgtaagggcagaaacgcggcctcattcaccaactgccatatccccagtgcctagaatgtgaagggtgggcatgcggtaggtgcccaataaatgtgtaggaaacgtgtggtcaagggaggtgagtggcaacgggaggatcctgaaaagagagctcagggcaggtgggcaaggctgcgggcctcctcacggagcctggacttggtcctggggccacagagcctcagttcacatttcagcaggaggacagaaggacaggctacccgcgagcatggcctggacagaggagccagagacgagaggcaaaaccaggggaggggactgttctgccggtgacagatggcagggaccaggatggccatgggggagaggagacacgtgaccagacctgagtggtctaccagaggcagagccacaggacctgcccatagacaggacatgagggctgagggagtggggatgtcaagggacagctccatttgtggtcggggtgaccacgtggatggtggtgctgcttttggtgatggaaaacatgaggaacagtggacactttgagcaggtcacttctcttctccgtgcattagtctcctca

SEQ ID NO: 39143 - DNA, 1692 bp, Artificial sequence
  DNA replication origin
ttccacaagtcatgcccagcccatggatgtgtttacaaggtgttattctgcacaattatttcacaacttgaagtagttgccacaggtatgtagggtacagtttcagctgctgacctggagaccccaaataacagcaaagagatgtttgtagttctcccccagagcagtttcaggataagcaggtggatatgtggctctgtgggcagggacccaggctcccttcctcttgttgctcttcttccttccagaatgttccctaccagaaggtccacagtgtgcctcaccatcaggtcagccaggtctggattcaactggcaggaagagcggaggggagggtgtgaccctccttctcagggcccagcctggctgttgcccacatctgctcacagcttattggcccaagctgatcacttggccacatgtagctgctggagatgtagcttattcagggtggcagcagcccagctcaaacccaaaggtaccattgccaaggaagaaggagctaatcaatctgggggagacagagtggtctctgacacactgacatttaaaaagcaggagatttgaggtgtgtgttgagaccctggtgcacacggaggatgctaagtgctgagtgcctctatgtgccaggcccacatggagtttcctcgtttaatcctggaatcggccatatgcaggaagttctgtatcatccccagccacacatgaggaaacagaggtttagcagagtcctgcgacatgccccaaaccacagctagaaagtggaagagttggttctgccccaggcctgactccaaagcctgtcttttcatctctgcgctcattctacatatttggcaggttgggctcctgtatttcccaagaagctgaatgtgaactgccatggccctttcctccgcatcttcctttctagacacactccagaagtaaaatcatagcaacaaacatttcctgagtgtcactgaggtccaggcactaactatgccgagaagtcaatgaatgctatcacatggtcatactactctaccaagctcattattcccatttcacagatgaagaaactgaggttcttagggccaagtaatcagcatgcagtgttacacagctgctccaaagagcatagagccagctgaaattctcctttcaaatgtcaactgctatcagtgggtctcaacttgtttagtcaccccatcacatgtcatccatctatttatccatccactcacccattcatccactcacccaccagtccacctgtccacccgtccacccatccatctacccacccatccatccacctacctattcatccatccacctacccacccacccatccatccacctacctattcatccatccacctacccacccacccatccatccaccattccacctgtccacccatctacccatctacccatccatccacccacccatccatctgcctacctattcatccatctacctacccatccacccatcaacccatccatccatccatccacccattcatccacccatcaacccatccaccatccacccatccatctactcatcaacccatccatccatccacccatccattcatccatccatccatccatccacccattcatccacccatcaacccatccaccatccacccatccatctactcatcaacccatccatccatccacccatccattcat

SEQ ID NO: 39144 - DNA, 877 bp, Artificial sequence
  DNA replication origin
gtcagttgtttggtttataaaatgtgttaaatattaggaaatgattaattttccatacatgccagatgagcccattgttctccatgcacaggaaaaggcatgtttgctcatttaacacccggttcctgggggcctaccataccgcatgccagggtggtagagagatggcattgagcaaatcaagacaatcgtcgccgccatggaatttacaggggcaagagacaggcagcaaacatgcacacggccatccaaacagcgtttttgacatgccaggctgagtgcatgtgtgggtggggcatggggtaggtcccacatgacagcggtcactgaagtcctctgaggacaagaatttgattggaaaattgaagaatgaggaagagccagtccacgaaactcgggggtcaaagcgtttcaagttttaggaggagacagagagagaggtggggaatggtgtggtctgggcaaggaacagaaaagagacctggaggctggagaacttggggccgaggaagatggctgagcctcttgcctgaaattcggatcatcctgaacgcaaagggaagccgtggagggctttaaacagggctgtgatgggatctgaggctgctttaacctcgatctggctgctgtgtggacggggaggtcgggagtacaccagcaaagggctgttgtgtcatccaggtaggagatgagggtgttctggtgagcatgaggcatagaggtgggatgatttcagaagggacccagcaggacttgctgatatgtgggcagtggggacagtgaaggatccggggttattcccagggttttgactaagcgactgtgtagatggtgttgccataaactgatgagtaagatgggtgtgtgttgggagaag

SEQ ID NO: 39145 - DNA, 853 bp, Artificial sequence
  DNA replication origin
ccatatgtttctttgggagttcaggagtgcaaataaaaacctctagcatctgctaacaagatttgccagtgaataaaccctgaggagacagactgtgtcctggtcctagaatcaggctgttatctcttctcagcaggatggctttggaacccagggccctcttagtgccatgcagtccagcctcagagggcacagtggattgacagaggcagatgcttgggggactccacaggccaggccggggcatgacctcaaaaatgtgctggccactgggccggtgagaaaatcgatttctcacctccagccagcagtgctgcccagcaccgggtcatcctgcagttgttgtgacagcaaacccgagtgccatggaaaggattgtgaaacccgggagctggctgcctggagagcaggacactgtactcggctccatgtgtttggcggggaggggggggggcggcgggagcgggggatgggggggccggggtcggtggggcgggggtggggtcggcggcctcatcctgtgcttctccttctccttctcctgtgctccttgttgttctgttgtgcttggcaccagcttgttttggacacagaagtactccttttgcagggagacccatgagattgcaccccctttgcatgccaaacgtctagcccagctggcatgcacccctgttctgagggctgcgttccaactccctgctcctcccgaagatagcatccccgtggacccagctggcagagagtatgaggtggccggggacgcccaggaatcgggcatgtgagccggccagggtttccctctctaaacagcagcagtgtttgcatcctggcctggccagggtgctcccga

SEQ ID NO: 39146 - DNA, 797 bp, Artificial sequence
  DNA replication origin
ctggccaggccaggatgcaaacactgctgctgtttagagagggaaaccctggccggctcacatgcccgattcctgggcgtccccggccacctcatactctctgccagctgggtccacggggatgctatcttcgggaggagcagggagttggaacgcagccctcagaacaggggtgcatgccagctgggctagacgtttggcatgcaaagggggtgcaatctcatgggtctccctgcaaaaggagtacttctgtgtccaaaacaagctggtgccaagcacaacagaacaacaaggagcacaggagaaggagaaggagaagcacaggatgaggccgccgaccccacccccgccccaccgaccccggcccccccatcccccgctcccgccgcccccccccctccccgccaaacacatggagccgagtacagtgtcctgctctccaggcagccagctcccgggtttcacaatcctttccatggcactcgggtttgctgtcacaacaactgcaggatgacccggtgctgggcagcactgctggctggaggtgagaaatcgattttctcaccggcccagtggccagcacatttttgaggtcatgccccggcctggcctgtggagtcccccaagcatctgcctctgtcaatccactgtgccctctgaggctggactgcatggcactaagagggccctgggttccaaagccatcctgctgagaagagataacagcctgattctaggaccaggacacagtctgtctcctcagggtttattcactggcaaatcttgttagcagatgc

SEQ ID NO: 39147 - DNA, 1155 bp, Artificial sequence
  DNA replication origin
taggaagtcatcacaaaactttgatattgaaagaaaggattaataacccagcccatgtgggagagattagcagcttctgcggagaggtctttgtaatctatccttgtagccggcagcccctggggcagcgctggcaggcgggtctctgggaacagagggtgcctgggctgagctggggttgggaaaagccatcaggggattggtttgagtcactgctgggtggcactctcaaggtggagtgtctggaagcctctggctggtgcacggcgactcctgaaatgttgccaagtgcatcgttgctccattgagtggccccagcagatgcagggggatgccagtggcctggaggcccaggcaaggcaggagggaagggttagaattgggccgtgggcctcacgcggttgctgcccaggctcgcggatggggaggtccgtaggctcctgccatggaaggggctggccctctgcccagttctctgggcttggggaggaatgccaagagctcagactgactcaccccagggggcgggcctggcctcttggcccacgctggaaggagagaggcctgaggaggtggggccctggctgtggctgggatctgtttcttgcctgccctgggaaggtggctggagcaggttttcattcttttctgcagcctggcttctggaataggtggctggctagttaacctaagagattgggcgctggagctggagaaacctgcttttgagggttcaaatgtaagcttcaccatggatccttggccaagcggtgactttactcctcttagctttggttttctccccagtcaaatgcgaatcattttaatacttccttcctcagagggttgctatgagcattcaactatagcattctggtttagtgctcagcacaggcctgtcctgttcctccatttttcatttattaaagtatagatgaggacatagatgtaaatagatgtattgagaatacatactgggagatacagacatattcatatccattcatccacccacccatccatccactcacccacccatctgtccacccacccacccatccacacacccacccttccacccatccatccacccacccacccatccatccacccatccacccatccattcatccatctacccacccacccatccac

SEQ ID NO: 39148 - DNA, 829 bp, Artificial sequence
  DNA replication origin
aaagagcaaataactatcacatgtggggtcaggtggagggaagcgtcaggtggatgatgcaacttaaggcagggtgtgtggagggacagtgggaagggcgtggggtgtcacattggggtgcggctgtctgggaaggcttctctgatgagaggtcacctgaggacaggttccaatgaagagtggggtgagccctgcaggtcatggagggagagcatttcaagctgagggcatgataagtgttgggatgcagggacgggcacctgcctggtgggtgtctggctctcttgagggtgacaaggccagtgtggctgtcatggggggcagcagggagggaagaagggtgggtgggagatggagaagcagggccagatcatatgggatcttctgagtcatggtaaggactcgggctttttgatgcaaggaagatgtttgctgttggggcgattttagcagaggtggcaaaagctctaacttaccattttaaggatctttctagctggactgctatgtgaagaagactgtgtgtaggtggagggagaggggtgggtaaggagactgggccccctctttgaccagggcactagagtggaagtgatggagagtcacaggtggcaaatttgagtgggatttagggaatggaattgacagggctttgagatggatctaatatgggatggaggcagagagagttaccaagagttagggttgttattgaagtgattaacacacagtcatggcttgttggaatgggtgagagtcaagtcatggacgaagtgtgcctggtctgcttgtgtgtgtgtctgtgtgtgtgtgtgtggtgggggggaga

SEQ ID NO: 39149 - DNA, 1012 bp, Artificial sequence
  DNA replication origin
actcaggcttccaaaaaattggaggaggagaatgttctgagatcactggggttcatttgctcatttattaaaaatacttaccaagcacctactgtgtgcttggcactgggaatatggcagtgaaccacaggcaaaaatccctggccctgtggagctgatgtgctggctagggggagatagcaatatagcttataaataggaaaattttaaatagtatgttaaataggaaaatgaaatagtatgttgggaggtgataagtcctatggggaaaactatcaggccaaggagaattgggagtggtttgatggatctccctgggaaagccacatttgggcaaagaaggaggtgcccacgtggaagctgcagggacctctccaggctgaggagagagcagggctgagttgggtgacatcttgaacagagaggaggcctgtgtgggaagggcaggggaaggggaaggataggggggcggatcgtgggcctcgcacatgtttagttagaggacttggactctgagcgaggcgggagctgggagggcctggcttgacgtaggtgtcagcaggatccctctgctggggtgtggacagggagaagctgctgcagaggcccaggccagaggggatggtggctggaccagggtgggggcatgggggagcaggagaaggggttagagtcagagcatgttttgaaagtcaggctaactggatttttttgagactggctgcaagaggggtggcatctgtctgtctggggctgtagccttgggaaaggccagagtctctagggaccctgttcatccctgccgagactcctgctatttttagagggaaagcatcttttagaggtgacttgatgtagccttttcacttcaagatggaggcggggatggggtggggagtagcagagcggggtgtgtgatgtgggggttctgaggccgacttttgaggagccatcctcaccacctcctccttgtctataccagtcttttgatgagactggtgatttcattaaa

SEQ ID NO: 39150 - DNA, 1150 bp, Artificial sequence
  DNA replication origin
ctgtgttgtcataaaactatttacaaacacaacccatgggccgcatttggcccatgggctgtggtttgcctgcacctggtttggcagaatgagattccctaaacagatacctggtgcgacgggagctgttagcaggcgtcagtggagaaaagatggcagggaaaagggaaggaggggatctttttgatgggtcgatctcaggaggtgcgggctgagcagatgcaggaaggaaccaggggaagtgggaggatctcgcggggagggtttccaggcagagggaacccaaggcgtctgaggcaggagctgcttaagtacggcgaagaggttggaggggttgttgctgactcagcttggggagaagtggggagtggtgggggtgggtggcaggccggggcacatgctgcgttagtgactttaggttccatctaaagtgtccagaagcctttatagtaggttttgagaatggacattttaaaggctgctgcgtgacaaacagactgacagagccacagaggaagtggggaggccagggaggagatgactgcagtagtccccatgggagaggacggcggcttggaccagggtggatgcgatggaatggggagacctgggaatctagtttctgttctgacagtggagcagtcagggctgatgatggatcagatgtgaggcatcagagtaaggagtccaggccgccccatgagctggcggggaggttggaggagcctctgatgaggtggggggccttggaggtggagttgctgtgaggggtgggtgggtggcactaactccgtgggaatttcccaagcagccccacgtgcctggacctgtacaggatgcagtgaggcagggtgtctgctagaagagggtcaggctgagaattaaatgacagtgtgaggtgatgggtggcagtgtccttgggtggctgacatagaacattctacttgaacagcattctgcagcggtagggcctttcgaggtggcagcaggagcccgggctaggcagccgctaaaagaggaagttaggtcattttgcagtcattggttttatctttattttagtgtattttattttatttttgagacagagtctcactctatcacccaggccggcatgcagtggcacagtcttggctcattgaaacctccg

SEQ ID NO: 39151 - DNA, 1115 bp, Artificial sequence
  DNA replication origin
cgtccctacgaggaaagggaccccgccgctcgagccgcctccgccagccccactgcgaggggtcccagagccagccgcgcccgccctcgcccccggccccgcagccttcccgccctgcgcgccatgaacgcccccgagcggcagccccaacccgacggcggggacgccccaggccacgagcctgggggcagcccccaagacgagcttgacttctccatcctcttcgactatgagtatttgaatccgaacgaaggtcggtggaggctacccctggcctggcccctgagcccgccaggggctcaggcctggggactgggcacaggagtcctcttggctccagccgtcccccttcctaaggggcctggagggagggtgcccctacccaggtgccagggaggggaggcgtcagtggcccctgccacccttagggggcggtcggctccctcttgccccttaggggcaccagtttctggttgctcatgactgctccctgagggtcactctcagcaaaacaaaaggtggcaggcaggtcccaaggctggggggcgggtgctgtctgctggcctcttgcctgggactgggctgtcaaagggcaagggacatgatttctgtgcctttggagggaggaggtgaggaagcgaagaatggagttagcagggaggagttgccaaaaaaagaaggaaggggggtgcagctgaacccagttatcaagggtaggaggccgctccttccctccaggcactgaagtgaggccacgcagctcccatcacctcctgtgagcagtggttgacggggactttgtgttgaaactgaggaagaggttgtctgtctgatgctggagagggttaaaacctttggtattataaggccggcccatttcctccctgggttctgctgctgaacccatcacttaccactcacaagaggattggtctgagctatattaagtgatcttctacgcttagtcctaatggatgtggtgggatggggtagggtgaggggcagctgcagcatggattcagaaggacacaggctctttctgcctgaactttgtcactctgtgcctccaactgccctcagttgctgggggctggggacttccccgggctgggccc

SEQ ID NO: 39152 - DNA, 1530 bp, Artificial sequence
  DNA replication origin
agaagtcaagctcgtcttgggggctgcccccaggctcgtggcctggggcgtccccgccgtcgggttggggctgccgctcgggggcgttcatggcgcgcagggcgggaaggctgcggggccgggggcgagggcgggcgcggctggctctgggacccctcgcagtggggctggcggaggcggctcgagcggcggggtccctttcctcgtagggacgcacgccgggtccggggacggcgcgcctggcgcagcgggtcctggacgcgcccggggaagctgagcggcggcggcgacggcggcgcgagcttcctgctccggaggcacctgttgcagcccggggaggcggggggggggggggcgtggaggcggggacagggcggccaggccggcgggggcggggccgccaccaggggaccggaggggaggggcgcgcggcctgggctggccggtgccgggaggaaggaggctgtccgcggacctgaccacactgtcccgggccaccgctgggcgctggggcggccgctgtctcccaccctccacgggtgagtgcgacacgcgctgcgcgaaccagggtctagacaagaaagctgccgccactaggacttttgccctaagggacccactggccccacactttttcctgcttttcttctccatggggtggaagggggtatccacccccttctattgcagacccgtgtctccaggcgtctccgtgtgcccacgggggcggcatgattttcacagtacttcagacacctgcatggccctgaactcaactccccagcgcctaggaaggaatcggactgacagcactagtcccccccgttacagctatgcctcctggccacctaccacgtgccaggtgctgggcacccagccggagccagacactgttgccctcggaagctcaggctctggtagtgggagaggcctgaaggagagaaacaggacaaaaagcatctgcttatggggccaggagagaactcaccagggtatgggataaaggttggggtggctttagtcccttgggtggtcaaggaggacctctctgaggaggtgacatttgaagaaacctgattgatgaggcgatcttggggaagtgtgttctggcagtgagaaccaaaacacagagccagagctcgaaggggctgggtgtgctggagggagaacgaggagtacagttctgatggggcggttggcaagtgacaaacacgcctggctgcttgtttaaagcatgattcccaggcccctccctggagcttctgattccataagtctgaatacagactcgtgaatgtgtatttttaattaagcacccaacgtgagcattaatgaacaggtacatttggcaaacactgcataaggacccagtaactaaagaacaccctccaataaaactctgccagggggctccaccaacttagctgaagttggaaacagactcacagaggtagaaaagatcaaaacagtggtcttcaacccttcccacatattagaatcacctgggacacctttttaaactcccgtgct

SEQ ID NO: 39153 - DNA, 978 bp, Artificial sequence
  DNA replication origin
ggggtcacggcagacaggcgaggaagggggtcaccttgctgagtgagtgagaagggatgaagacaaaaggccaaaggtggctgggcgcagtgcatcatgcctgtaatcccaacactttgggaagcctttgggaggtgaggcgatcacttgagcccaggagttcaagtccagcctgggcaacacagtgagacctcgtctctataaaaaataaaccaaattagccaggtgtggtggtgcatacccagtgcacacttgtagtccgagctacttgggaggctgagatgggaggattgcttgagcccagaagtttgaggctgcagtgagctgtgattgcaccactgcactccagcctgggtgacagagtgagaccctgttacaaaagaaggaagggaggtgggggggggggggggcggaagggctgggagtgggcgaggggctgggggaggggagggagggtaaggaaaggaagggaagaaagggagaaggaaaaaaaaaaaaaaggccgaaggggtgatctagtgatcgggtgggagcaggtactggagaaggggcagtggctgtcagctggggtgacgagggtaccaggatggagggcgtggtgtgcactaagacaagcagccctgggagagaataggtttaggagatgagggaagaaagtcaggaggggtcccaggtacagcatccttatgagccacatgcagcaatgccaaacattcggctacgttataatccaaagctccaggtcaggcctagagatggagatggagacagagccatcagcatccacagagcgatggaagcagggtgaggggccatccggggaacaacataacagagtccagcaccgagccccagagacaccaaccccaaatcaccacacagaggaagacggtcaaagagacagaaaggaaacgggggctgtgcggctcatcctccctgtccagggaagttcctcgtgatttcttaatagtgctaaag

SEQ ID NO: 39154 - DNA, 1086 bp, Artificial sequence
  DNA replication origin
actggccgcttggtgacactaccccttgtgttctccccccacaatttcggggaaggaatcccacggctgggacaggggctgccacctgctgtgcccttcccgcagtaggagaccccgagggcagcttaggcgcggaacaggcaagggtttttctgcatttgggaagaggggacgggttggtattttgcgcctcgccgtcttcctgttcggaggatggcagcgtgacgcgttgaggtttgcggggctctcgtatcgcctgccatagacttacctgggcgtgaggggcgggggtgggaaggacgggggtgggcgctggtgcaaatgcagatttcccggcccccgcctagacccgccaatcagagttctggggggcggggcctggagatgtgcagctccacaggccgcgcaggtgaggctggagcccgcgggaggctgagcgcggtgttgggcggggcctgcggccgctctgctccgcccttcctcgggcgtctggtcctctctgggcatttcccggtggcggccgcttattgcagcgtcagttgctcggaacaggagacgcggcgggtggagtgaaccataagggtggcttcaccaggtgtcagtggaattaaaaaaaaaaaaaaaaagaatggtgctggcggccattttgtggggtctttgtccctggcttcctgaatcctccgaagaagaggcctcactgatattacccagaggaggaaactggaggttacggaggttaagggctatagggaagactgcaaaatggagattgaactccggattgtctgacccaaagatagttccctcactcctcccttctctgttttgcgtttattattattagtattattattattattgagacggagtctccctctgttgcccacgctggagtgctgtggcgagatctcggctcactgcaacctccgcctcccgggttcaagcaattctctgcctcaacctcccgagtagctgggattacaggcgcccgacaccacgcctgactagtttttgtatttttagtagagacgggggtttcaccatcttggccaggcttgtcttgaactcctgacctcgtgatccacc

SEQ ID NO: 39155 - DNA, 940 bp, Artificial sequence
  DNA replication origin
caggttggccgcgcgccgcgcccggcgccatgagcctggggcagggctggggaggcggggaggtggggagggggtccctgcgcttcagccccgggcggcacctagcctgatgccggccctttggggttcgagcgcccggttgcctgggcctccttgcccaccttcctttagaaaccccgagaagccgggcccgccccagtgctgtttacacactcgcggaattcggatcagccgtgctttctcaccgttttattgttccgtaattaatatctgtccgtaattaatatctgaggtaacaatttggtcagtgtcacaccgagctctgcgcttggagcattactcgggagcccagatatgctcagcttttaggggggcgcggcctacgcctcggggtaccccatcagcgcccctgggtcccagccccaggaggctgcgccgagaccacctgcgctccggtggccccttccccctccgcccggggtggacccgaaccagcagtcgcaggagggtgggagggtctcctactggccgcttggtgacactaccccttgtgttctccccccacaatttcggggaaggaatcccacggctgggacaggggctgccacctgctgtgcccttcccgcagtaggagaccccgagggcagcttaggcgcggaacaggcaagggtttttctgcatttgggaagaggggacgggttggtattttgcgcctcgccgtcttcctgttcggaggatggcagcgtgacgcgttgaggtttgcggggctctcgtatcgcctgccatagacttacctgggcgtgaggggcgggggtgggaaggacgggggtgggcgctggtgcaaatgcagatttcccggcccccgcctagacccgccaatcagagttctggggggcggggcctggagatgtgcagctccacaggccgcgcaggtgaggct

SEQ ID NO: 39156 - DNA, 838 bp, Artificial sequence
  DNA replication origin
gcgagcgggcgcagcgcggagctcgggcccatggtgcgcccgtgtccgtcggtcgggccgcgcgggcgctccgcgcgtggcccggcgctcgcgagctcgccccctcgctgcgggcccggcccgcccgctgccgccgcctcctcccccggggcggcgcggcgccggcgggcggcggcgcggaggccggaccgggcggcggcccaggcggcgcggggggcgcggcggccaaggcgggcggcgccgccgacatgacggacaacatcccgctgcagccggtgcgccagaagaagcggatggacagcaggccccgcgccgggtgagtgggcctgggcccgtgttttcctttgtccgcgcctcccggagcccggcgctcgggccagcctggccgggcctgacaggttggccgcgcgccgcgcccggcgccatgagcctggggcagggctggggaggcggggaggtggggagggggtccctgcgcttcagccccgggcggcacctagcctgatgccggccctttggggttcgagcgcccggttgcctgggcctccttgcccaccttcctttagaaaccccgagaagccgggcccgccccagtgctgtttacacactcgcggaattcggatcagccgtgctttctcaccgttttattgttccgtaattaatatctgtccgtaattaatatctgaggtaacaatttggtcagtgtcacaccgagctctgcgcttggagcattactcgggagcccagatatgctcagcttttaggggggcgcggcctacgcctcggggtaccccatcagcgcccctgggtcccagccccaggaggctgcgccgagacc

SEQ ID NO: 39157 - DNA, 1147 bp, Artificial sequence
  DNA replication origin
tctatggcatttagcaaatgccaaggaagagcccagcactttgggaggccgaggtggacagatcacatgaggccaggagttcaagaccagtctggccaacatggtgaaaccccatctctactaaaactacaaaaattagccaggcacatgtataaccccagctacccgggtagctgaggcaggagaattgcttcaacctgggaggcagagattgcagtgagctgagattttgccactgcactccagcctgggcgacagagggagattctgtttcaaaaagaaaaaaaagaaacggcgtccaacatgatcagtcattagatgtaactatgtaaaagtcagctttagattagtttatatggtattattacaatttcaggctctttagttacatattgatttttaaactccctcactttgttccttccctctgttttttttttcctgctctcataactttatcaggcctttgaaaagttcatgggtcccagacactgtgtgggagggtgtggaagtgagtgtggatgtgggctgcggtggagataggtgtgtgtgtgagaccgtgaatcacagtgacaggtaatgcagggtgactgtctgaggcctgagagtggggcccatgtgcaagcccaagaaagtggctggtgtgagaatgagggtgttcagactattgaagggtgtttggatgaaagaggcaggtgcgtgtgtgtcatggtgagttcccagaatccagatagagaatgagggtgaggatggtgaaggtcagagggtgaaggagtctgataagctgagggtccctgtgtgactgtgatttctgcaggcacatgggtgtgaggcttgagaaactgggtgcatggatgatggtgaccaacaggagggtgagagtgttatgtgtgtgtgcaggactcacatgtgattgtgaatgttagatgttgcaggcagtgagcagtggcaggtgtgtgtgtagggcctgggcgtgaatatgcacgttggtgcaagagtgagtgagaatgactgactgatggggtgagcgtggccgggtgcccgtgtgattgtgcatgtcagatattggtggggatgagtgtcacagcgcgcgtgtatagggctgggatgtgattgtgaatgtgggattttgcggggggtgcggtgg

SEQ ID NO: 39158 - DNA, 615 bp, Artificial sequence
  DNA replication origin
tcagagaccatctctgatacccggggtttcccgagaagacggtcgccactttttggcttccgtatccccgcctttttgtcggagactgaatgtaatacatttcccaagtttataatacgtcaatagaattccccgtttaacatttttccagggcaaattaaaaggatcggcttgacggaggggatggctgggcgttttcggggcgccgggtggtcagcgcagcgcgcacccgaggtcccaggcgcctggagggactctctttgtgccttggttgggggcggggtggggtgggggttgaggggagcgtgaaggcttcgtggcctggcccacctggaacaaaagggttaaccctcagcccgcctgcttcctccggagaggaggggcgagctcctggttctgacccctcccctggtcctacgctgacctccccttcccccttcattttgggtgggcgcacacacgtggggcttttggtggtgtttggcacctttcgggagggaagcttgttacgagagggcttctgaaattaacgatggttggagtttggaatcagagtcaacctgagctgagctaaaacctcgggcctggccgtgcgctgccactgcgatttgggag

SEQ ID NO: 39159 - DNA, 876 bp, Artificial sequence
  DNA replication origin
cgctctggccccccacctctcccctttcacacccaagcgcaaatgtggaaagccgagcgctccagaaaagccacgcaaaacgggaggccggtgcaccccagtggggctgccgcgcgcccgccaccccggccactgggggctcgcaccctcgggcttgccgcggttatttttaggaagtcggaaatcaaagatggctggaggtcaggccccgaaaggttagggcgaagatcggcaggcggcgcagcccgggcagaaaaggcgaaatccagaaaagaaaaaaattttaaagggaaacattgagccctcctcccccacctctctgggccctccaatcccctgcgcagcgcgggtggcccgcaccccagctcctgagggtggggagaggtcgcgccccctccccccacttggcccgggaggggcgcgtgcaacagatcgtcctcctccggggggtcttccaggggtgcgcccctcctccagcctccaagaaaagccccaaggggctggtggagagggtggggatcccccggggttctttcttttgagagcgacgcgagggagggggacctaagttacaaggggggggggtaacaccagtgaggggagtggaaccaattaagtgaggggcagaggacaaggagaagggaacctttcgggagcgagaacagaggagcgagtgggggtcaattttacaattaggggagaaagctgggggtgaaacttacacaagaggggagaagaggaaaaaagtgtgaaatgtgcaaaaggcggggtggtggggagaggaggagacctctcctcccgggcactgagcccccaaatctcggctcctgaatttgcgctggacgccgcccgctccccgaagcctgcgccctcgag

SEQ ID NO: 39160 - DNA, 1278 bp, Artificial sequence
  DNA replication origin
tcttgagatggagtttcactctcattgcccagactggagtgcaatggcatgatctcggctcactgcaacctctgcctgccgggttcaagcgattctcctgcctcagcctcccgagtagctgggattacaagcctgtgccaccacgcccagctaattttgtttttttgttttttttttttgagacagagtctctctctctgttgcccaggttgcagtgcagtggtgccatctcggctcactgcaagctccgcctcctgggttcacaccattctcctgcctcagctaattttgtattttcagtagagacggggtttcaccatgttggtcaggctggtcttgaagtcctgtccttgggtaatctgcccaccttgacctcccaaagtgctggaattacaggcgtgagtggacgcccggcctatttcttcatttttcttaaaattatatatatatatatatatatatatatatatatatatatatatatttaaatagatatttatatattttttttttcagagggatttgctctgttgctcaggttggagtggtgcgatcatggctcacggcagcctccacctcccaggctcaagcaatcctccatccttagcctcctgagtagctgggactacaggtgcacaacaccacacctggctaatttttttattttttgtagagacagggtctcgctatgttgctcaggctggtcttgaactcctggcctcaagtggtcctcttgccaaagtcctgggatgacaggcatgaggttcggcacctggctatggtcatgcatttgaagggaaaccagttagctgtggtagtgcttttttttttccctcagacattttcagtggtacctgtccaagtgcagaatggactaagagttggattgaaaaggaatggggtttagccaagcaagtacaacagagaataaaagaacaggggcactgaggctgaatgtgggggattacaatgatggaccctagactcaaggcctggtaagagaggcagagcaggaagaagtgaagaggagtaaaacaggtttgtgagcatggaggttgggggaaaatcaagcgattgttggacttggggtcccaaagggacaaagccagaaagattttaggggatagtcggaggaaaagatgcttgaaattgagatggtggagccgatgtcgtggctggaaaggatgagggtatggagcacctgctcaggtggggtggatgacaggagcctcatggagaggaggacaaggagctgagcagctgaggtatcaaagggtc

SEQ ID NO: 39161 - DNA, 1394 bp, Artificial sequence
  DNA replication origin
tctggggtagagcccgagagtctgcatttctaacgagctcccaggtggcgcgggctgcccgggagcggaccgcaagtccgcgggactcctggggtcttggctccaggccaatcagccgtcaggactcttgataaatcgccctgctcggctgatgagcagaattgccgggacatgcgcgttccggccgaaggggggtaatttccgaactccgggaattcgttgtgtgaagtaggccactcctagggacgcgcggggagcccggtcctcgcgccatgtcgcggcgcaagcaggccaagccccagcacctcaactccgaggagccgcggcctgcgcgccgggagtgtgcggaggtggccccgcaggtggcgggggagccgggtgagtagcgccgctggagccccgcccgggggctgggggccggtgctcagaggttctccggacccgcgcgggtacgaggaccgggcaggggacctgaaagggcgggcgaagcgtccggcgcagagtcctgggactcggacctgggcgtccccgccccccgcctttgtaaattacactctcctggagtccaccgtccccttccccgcctggattcctctagccactcctctcaagagctagtcaacgagtttgcctcccaaacacgctggaaggatgctcagaggacccctcagaggctgttttcgggatgcgcgggcacccgagtctccggcctccttggcactgggcttcggctgcgcgcctggaaggtggcttcttgccttggggttacgtttcaaatgcgttgtccagggaaggcctcaccgaggagcggacgttcgagcgaagacccgaaggatgggagggagcgagctgtgcaggtacccgggggaagagcattccaggccgagggaacagaagcgcagggacccagggcgtcagcgctgctgtagcccgagaggtcaccggaggcccgagaggtgatgggggcagacggtggggggcgggggacggccgtgagccttggtaagagctctgcattttatctgagcgaagtgggagccgtggtggggatagagcagtgatgctgtcgcacttaacaggcggcccccacaccccctcctcggctgccacgtggacacaggatgtagcaaggagatcgtcggctaccttaagccccccgggcagcatttctcgtcccgggatcctccgcttcagaagagcctgcgggaggggaccttttctcgctcgccaaattcttcctgcaagttagggatccccccatcccccgcctccactggaatctcaggggtggggttggggaatctgcatttctaaggcgcttccctttttgcttatcttgtgcttagattaagagattgtaggttcctactttctcttaggctgccagctccccg

SEQ ID NO: 39162 - DNA, 1276 bp, Artificial sequence
  DNA replication origin
ccgcttccccggggagccgctgctgcaaagccaggttggggcgccgggcccggccagcgccctctaggcagcggaagtgcagcttgctttacatccgtcctccccgcctcgcagagttgggagaaggcagggtggggggtgtggaaaaataaaaggaaaagtccttgcaccatgtagatcagcgtcccccactttggcatcccggccggccggggacctcccagtctgcggccatgaacgcgagcagcgagggcgagagcttcgcgggctcggtgcaaagtaagtgcttttccgggagcagtgcgcgctccggggcccagtgcgcgctccggggcccgggcccaagcacgtctgcgacgcagccagcaggcccggggccccgaaatcggggtgacggctcggagccgcgtctcggggaccgcggcgggcgcgctgtgcagggggcgccggagtgggcttggggtgggggcgcacccgacctggcgcaagaccgggggcgctctccagccttgcgagaccccttggaagggaacagtgggggagggcacgccgttcagacaatcgccaccccctaagggcattcccgccccatcaggcggagtttggggcgggcaggagaaagggaggaatctagggtaaacggggcaacactgatgggaaaacttctgcctcagtggctcaaaattagagcctggagattgggggaatcaccaggtctcacgaggtcctgccggctcattgcaaagccttttcctcattaagggtggagatctgaatggaaaacggggccgtggtcgctttatttgggtttggggttcagtttttatttaaccgaggaggacatcagcgtttttcaagtccctggtttctcccggtgcattgtttcccaaagtgtggtccagagactgagtgcaaccagccacctgggagcgagagcgtgtattttaaaacagctttctgggccccacccattcaatctcgggggtggggctggggatccgctgtccttcgtagctgcctgggcaactctgaagcacatgaagtttgagaacccatctaccaggggtttgcagaaaatctggcacatagtaagctcccagcttgttagctgctactgttaacagtttgggagacactgggtcccaaacttggcggtgtattccttgcattactgtgaaaagcacagattttcctaaacaccatcctccccaccccaccctgttatgactcagtatctcctaggtggggctcagatatgtccatgtttaaatagtgt

SEQ ID NO: 39163 - DNA, 964 bp, Artificial sequence
  DNA replication origin
ctgatctacatggtgcaaggacttttccttttatttttccacaccccccaccctgccttctcccaactctgcgaggcggggaggacggatgtaaagcaagctgcacttccgctgcctagagggcgctggccgggcccggcgccccaacctggctttgcagcagcggctccccggggaagcggcgggcgaatcccgaggcccaggcccgcggagccccccaacgcccccggggagctggatggccacgcgcgtcccggcgtgctgggcgaccgcgggtggcgagggatgcgcccctgcccgcactctgcgttctccgcggacgcgattggcctccccggctcggggcgccttttgcacctgcaaccccaggcgttgggcccccagcgcggccgtgcagcagcgctgctcccgggacgcctgggtggtttgcggggagacccacgtgcggctgccgttgcggggtgggtgcgcggggcgcggcgagctccggagaaacccaggttgggcgtgagcgctgggcaaatcagcaaagcgctgggcgggtcccttgccccgctagggagactgagaggaccgcgaagaggtggggtcgtagcgcggagggacccctgctccaggagctgccaactttatcgtgcatcgcagtcgcctgaaaggcttgttagaacacacgctgttgggcccaccctagcgtttctgcttcagtaggtctggggcgaggcgtgagaacgagcatttctaagttcccaggtgatgcccctagtgttggtcggcgtccacactctgaggacagtgacctctctgctctgtccctcatgtcttactactactgtctcccccgggctcctgcgtcagccctattgtctctctgccgaccctcccaagcctcagacctctcccagcctcgagggatttgcccatagagtctgtcctgcttctgaaggtcagcattcaaattcacact

SEQ ID NO: 39164 - DNA, 1352 bp, Artificial sequence
  DNA replication origin
ttattttaattctggtttttcatttatggtagtgagatacaacttcctttaaaaataactttaagatggggagagaaaaaccagctattccttacagtggaattccaattataaattctgaatgacagaaatagaaagtcaccatttggccaacaccacagtaattattattgcaggcaagaatcatcagtgaatgctaaaattagtgggtaaaattaaggtgagaaacaggatatttgcatagtctcatagactaaaagaatctccccagaaggcactatttagtacaaaggaagaaataatacctttacagtggagaagaggctgacactgctttcatcaagagaccaaagttaatagtacattaaacacccctgatatgaggcactgagaaggcgcagcaccactgtcaaaaattgttgacttcaggctaatcatgagtaaacatcagacaaatgtaaaccgagagatattttacaaagtagctggtcagtgctctttgatcatgttgaggtcctgagagacaaaggaagactgagaacctgtcacagattggaggagactaaggaggcatgacaactgcacacaatcctggcgtggatgtgctttgaatcctgggttgggtcttggtttaggtcctgggttgggtcttggtttaggtcctgggttgggtcttggtttaggtcctgggttgagtcttggtttgggtcctgggtggggtcttggtgtggatcctgggttgggtgttggttttgatcctgggttgggtcttggtttgggtcctgggttgggtcttggtttgggtcctgggttgggtcttggtttaggtcctgggttgggtcttggtttgggtcctgggtggggtcttggtgtggatcctgggttgggtgttggttttgatcctgggttgggtcttggtttaggtcctgggttgggtcttggtttgggtcctgggtggggtcttggtgtggatcctgggttgggtgttggttttgatcctgggttgggtcttggtttggatcctgggttgggtcttggtgtgggtttgggtcctgggttgggtcttgtcttgggtcctgggttgggtcttgtcctgggtcctgggttgggtcttggtttgggtcctgggttggatcttggtgtggatcctgggttgggtcttagtgtggatccttggttgggtcttggtttggatccctggttgagtcttggtttgggtcctgggttgggtcttggtttggatcctggattgagtcttagaccagaaatgacattgatgggcatttggttatatttgagtaagatctgtaaattactgaacagtattatatttatgttaatttcctgctttt

SEQ ID NO: 39165 - DNA, 1028 bp, Artificial sequence
  DNA replication origin
ttcatttggtctccacaagatgcattaggtaatgtcaatatgtgagtctggttctctgaggggcagatgtgaaagcagggctaggcacacacaaagaggactgggggaaatgcttacaaaggaaaatggagaggaatctgagagagaagctgggtgagccatcagactgtggagtaattttgatccttgtaaagtagggaaggaaggaagggagaaaggagggaagggaggaaggaaggaaggaaggaaaaggaaagggaagggaagggaatgagggagggacgcagggagggagggaaggagggaggaaggaagggaaggagggagggagggaaggagagagggagggagggaggaaggaaggaaagggaatggaaggagggagggtggaaggaagggaagggaaggagggagggagggaaggaggaagggaaggagaaaggaagaaaaggaaggaaagacggaaggaaggtcaagtggaagcctcttagactgcactgctgctctgagaaggtttgtcaaagttgatgaaccacagttgccaggcagggaagccccatgcctttgaggagtgggcctgctttcatgtcctgttgccctcggcactggtgggagcagcttgcctatgggcagtgtggcctcttggagaacactatgatggatttcagagtgcagcctttgggtttgtcggtccatcattctccctattgtcagtgacctgagagatgaatttacatccatgcccactctaatccttatttcccaaatgtaggacacataccacagagagcacttgagattatttgagtggtagcacattgaattttttagtatgaaaattactttatcattctctttcatctgttagtgaaggagaatgagtcaggttggtgctatcattttgtagtcctcctttgaacaacaggcacacctcaggcatataaactttggcaggctacaatatctagataaaatggaataaccttgtcttattttcatgtgtatttatgatgataggtatcttacat

SEQ ID NO: 39166 - DNA, 1167 bp, Artificial sequence
  DNA replication origin
ttggaaagacagaaaatctggaattcactcactcacacacacacacagacacacacacagacactcacacacgcactcacacgcgcacgcacccccgcttcctcgcacacacacactcacaccccccacatatgcacacacacacaaacacacacacacaccctcgcacacacacacaagacagggcgaggcgatgccagcaaacatcgatcccgctgaacaaactgaacattaacaaactcctcctcctcctcctctccccgcgacctgatgacagggagaaatttactccccagccgcagagcgccaggcagcgggagcctattaaagggacagcgtcccgcaggggagaggggctgggggcgggggccccggcgcgccggcccaggcccctctgtgcgccctctccgccggggcgagggcgtgcccaccgggcgcggggacacccctccgggaggcggaaggggcgggggcgggaggaaaggaggtgaggagggaaggggtgcgggagaaaaggaggcagtgtgatgatggctgaactctgaagctgggaggctgtggagggagattcaggggggccaggttggctgaccagcagggaccatgcacaatcttaggagagggagaacttaggtttgctcggggctgggaagggggaggggaccttatccagtgaggatctccatcctgtaagtcttaacctgcccccaccaaaatgtgctccccacgaccccttcaatttagtgcccctgtccctcccactttctcgctaatcaatgggtggtcacaaaaacaaaaatctcccttctgtctactttaaggtctaatcatatactcctctttttgtttcctttgaagaatgtttattgagcatctactatgtgcctattctggagacacagaggccacagagaaagggaaggtggtggccatgttggtatttatattctaatgggggagtgcagacaagtgccccccagctatccaatctttgcttaaatgtccccttttcccaaaggtctacctcacctaaaatacacacacacacacacacacacactccctgccccatttctccattttgttattccccagtgagctgatcagtgagtgtcacacaggttatagacagttttctattctgttgattgtacaagttcccctctt

SEQ ID NO: 39167 - DNA, 859 bp, Artificial sequence
  DNA replication origin
gcactaaattgaaggggtcgtggggagcacattttggtgggggcaggttaagacttacaggatggagatcctcactggataaggtcccctcccccttcccagccccgagcaaacctaagttctccctctcctaagattgtgcatggtccctgctggtcagccaacctggcccccctgaatctccctccacagcctcccagcttcagagttcagccatcatcacactgcctccttttctcccgcaccccttccctcctcacctcctttcctcccgcccccgccccttccgcctcccggaggggtgtccccgcgcccggtgggcacgccctcgccccggcggagagggcgcacagaggggcctgggccggcgcgccggggcccccgcccccagcccctctcccctgcgggacgctgtccctttaataggctcccgctgcctggcgctctgcggctggggagtaaatttctccctgtcatcaggtcgcggggagaggaggaggaggaggagtttgttaatgttcagtttgttcagcgggatcgatgtttgctggcatcgcctcgccctgtcttgtgtgtgtgtgcgagggtgtgtgtgtgtgtttgtgtgtgtgtgcatatgtggggggtgtgagtgtgtgtgtgcgaggaagcgggggtgcgtgcgcgtgtgagtgcgtgtgtgagtgtctgtgtgtgtgtctgtgtgtgtgtgtgagtgagtgaattccagattttctgtctttccaaaacccgctcctgtcctctcgcatatcactcacagacggggatctgacagcagccacaaacctacagtgagtgatcgctctccccccggcacgaatccgccatagagatcggc

SEQ ID NO: 39168 - DNA, 983 bp, Artificial sequence
  DNA replication origin
gctcatccctgaacagggatgcacggggctgcgtttcctggatgtgtgcgataaggtggctttttttttccctcctctaattttaaagatttttttaagtcttaatgttctataaacacttaaagaatatctttacaactcaattctagtggaacacccaaagccagctggaagcagaactgggaactctaaagggcaggaaggattgaaatgctagcccaaaagtgctgctgcttttttttttcttttctttttttttttttttaagggaagtttctgccaggaggtgccgagtggtgaaaccgctcagtttcaggcacagccctcttgtctctcgatttggccccgactgcgagccggacgggatggtggagaggcggagggcgctgctgggggcccgggaggctggatttggggctgcctgggcggtcccgcccgaggggcaagacccggcacgcggggcgcgcgccggaacctgggtcccgggagtttgagaagatgttcagggcccgggttggaacccacattttgggattctgggtagggccaccgaagacgggaaggcgctttcttgggcgggtgggggtggggtgagcaggcagggagttttccgccaggtttagttacaggagctagaaaaggccacttctgggaccctggcatctgggccgccctgagagccccagaaacttttttttctttttctttccccccaccccccagaaaagggtagtcatttcaggtttaaggctttggtgtattgttctacctcgaaattccttgagcctcagtttatcttcctgaatcagtctatggggcttggagcgttgaacattcctaaacacggagaaagtaaatggcggttgcagtggtccactggccagtttgggggtcctgtattattggccactgtgtgtcctacagcgtagctaggtttttcagttttctagatcgtttggaagcattaagctgtatgttttaag

SEQ ID NO: 39169 - DNA, 956 bp, Artificial sequence
  DNA replication origin
ctaattttttgtatttttagtagagatgaggtttcgccatgttggccaggctggtctcgaactcctggccgcaagtgatccgtccacctcggcctcccaaagtactgggattacagatgtaagccaccacgcccggcaatttttacaatttctaattcaaccctgtcatttgtcagaaggagacagcaagacagagaaaggaagtgcttttcctaagatcatctgaatagaaggtgcaaagtgtggctggaatccagagatgccacctcctgatccagctctttcctttcttcctctctattcattattgattgactatctgggtttgtatttgctgtgtcacaagttatctaaacatttagcatcttataataagacatatttattgtctcatagtttctgtttgtcagaatcagcccttgcttcagggtctcagacaaatcggcattcaagatgtcagcctatgctgggatttcatgtaaagactctacatgggaagaagctgtgtccaggctcaggcggttattgggaggattcagttccctgagggctgttagattgaggacctgagatcttttctcactattggtcagaggccaccctccattccttgccacctggggcattccagatggcaacttacttcatcgaagtgtgcaagctgagaaggccacagagagagtctgctagcaagacgaaagtcacaatcttttgcaacccaatcgtggaaatgacatcccatcccctttgctctattctatttgttaggaagtcactaggtccagcccacactcaagggcctacactacagggacatggggatagggtggggaccatggggctgggctagaattctgcctaccacaaggccttttttttgaaaatggaaaattctcagttgtgcttgatctttctcttctaaaccaggaaaccacttttcatgggagaggtcaggg

SEQ ID NO: 39170 - DNA, 1326 bp, Artificial sequence
  DNA replication origin
cttaacgagcatgctgccttcaagcatctgtttaacaaagcacatcttgcaccacccttaatccattcaaccctgagtggacacagcacatgtttcagagagcacagggttgggggtaaggtcacagatcaacagaatcccaaggcagaagaatttttcttagtacagaacaaaatgaaaagtctcccatgtctacctctttctacacagacatggcaaccatccgatttctcaatcttttccccacctttcccccctttctattccacaaaaccaccattgtcatcatggcccgttctcaatgagctgttgagtacacctcccagatggggtggtggccgggcagaggggctcctcacttcccagtaggggcggccgggcagaggcgcccctcacctcccggacagggcggctggccgggcggggggctgacccccacctccctcccagacggggtggctgccgggtggagacgctcctcacttcccagacggagtggctgccgggcggaggggctcctcacttcccagacggagtggctgccgggcggagggtctcctcacttctcagacgaggcggccgggcagagacgctcctcacatcccagacggggcggcagggcagaggcgctccccacatctcagacgatgggcggcctggcagagacactcctcacttcctagatgggatggcggccgggcagagacgctcctcactttccagactgggcagccaggcagaggctcctcacatcccagacgatgggcggccaggcagagacgctcctcacttcccagacggggtggccgccgggcagaggctgcaatctccgcactttgcggggccaaggcaggcggctgggaggtggaggttgtagccgagatcacgccactgcactccagcctgggcaccattgagcactgagtgaacgcgactccgtctgccatcccggcacctcgggaggccgaggctggcggatcactcgcggttaggagctggagaccagcccggccaacacagcgaaaccccgtctccaccaaaaaaatacgaaaaccaggcagtcgtggcggcgcgcgcctgcaatcgcaggcactcggcaggctgaggcaggagaatcaggcagggaggttgcagtgagccgagatggcagcagtacagtccagctttggctcggcatcagggggagaccgtggaaagagagggagggggagaccgtggaaagagagggagagggagaccgtggggagagggagaccgtggggagagggagagggagaggaggagcctttccaattttctttctttctttccttccttccttccttc

SEQ ID NO: 39171 - DNA, 944 bp, Artificial sequence
  DNA replication origin
gggaagtgaggagcgtctctgcctggccgcccatcgtctgggatgtgaggagcctctgcctggctgcccagtctggaaagtgaggagcgtctctgcccggccgccatcccatctaggaagtgaggagtgtctctgccaggccgcccatcgtctgagatgtggggagcgcctctgccctgccgccccgtctgggatgtgaggagcgtctctgcccggccgcctcgtctgagaagtgaggagaccctccgcccggcagccactccgtctgggaagtgaggagcccctccgcccggcagccactccgtctgggaagtgaggagcgtctccacccggcagccaccccgtctgggagggaggtgggggtcagccccccgcccggccagccgccctgtccgggaggtgaggggcgcctctgcccggccgcccctactgggaagtgaggagcccctctgcccggccaccaccccatctgggaggtgtactcaacagctcattgagaacgggccatgatgacaatggtggttttgtggaatagaaaggggggaaaggtggggaaaagattgagaaatcggatggttgccatgtctgtgtagaaagaggtagacatgggagacttttcattttgttctgtactaagaaaaattcttctgccttgggattctgttgatctgtgaccttacccccaaccctgtgctctctgaaacatgtgctgtgtccactcagggttgaatggattaagggtggtgcaagatgtgctttgttaaacagatgcttgaaggcagcatgctcgttaagagtcatcaccactccctaatctcaagtacccagggacacaaacactgcggaaggccgcagggtcctctgcctaggaaaaccagagacctttggtcacttaactgctgaccttccctccactattgtcctgtgaccctgccaaatccccc

SEQ ID NO: 39172 - DNA, 1126 bp, Artificial sequence
  DNA replication origin
aacacagcaaaaccttgtctctacaaaaaatacaaaaattagtcagggttggtggcacatgcctgtagtcccatctacttgggaggctgaggtgggaggattgcttgaccccgggacgctgaagctaaagtgagccgtgattgtaccactgcattgcagtctgggtgacagtgtgagaccccgtctcaagaaagagagagagacagagaaaggaaggaaggaaggaaggaaggaaggaaggaaggaaggaaggaagaagggagggagggagggaaggaaggaaggagggagggagggagggagggaaggcagaagggagggagggaaggaaggaaggagggagagaaggaaggaaggaaggagggaaggaaaagaaaaagagaaaggaaagaaaaaagaaaagaaataaagaagaaaagagagagagagaaagaaataacatgaaagaatgaaagaggggcaagtcttttttagtaagaagacatttgaggtaagtcctaaaggaagggaaggagcaaatcatgagggtacctgtggaggattgttccaggcagcagagaagaaagtgcaaatgccaggaggtggaagcatgagcgccgagtttgaggaacttcaagctgctggtgtgagtggatcacgatgaacaagctgggaggaaggggagcctgtgaaaggagatgaggtcaaaaagaaggcaggtgtccaacagggcacagctcataggtcctggcaagactttacctctcatctgactcagatggggcaagtaagggagggaggacatgaccgctttcttcaaagattactctggaaataaagggcagagctcactgcccatgggggtgcaagaggagagcaggcagctgtgatcaggtgggacagcgcctggctgaggacattcagggctgtgggagaatctgagagggccacctaagccggacatggccaggggtcgcttcacagagatggtgcccctcagctaagtcctgatggttgagtaggagttcaccaggtgaaaagggaggaaggagagtgtccctgcagaagaagtgcggaatgacaagcatatcctgtaacagaggctggcagagggccagcagccagctcatggagggctgtatgagcg

SEQ ID NO: 39173 - DNA, 843 bp, Artificial sequence
  DNA replication origin
ctgcgcagtccgaggcagcccccgagactggtgacatctacggcgtacacgtcccctcagccgcgagaggtgccagtctgcccgctgacagctggtggcgagactcagaacgcggccgccctgccgggccccaccagctggccactgctgggcagcctgctgcagattctctggaaagggggtctcaagaaacagcacgacaccctggtaaaccccttttcgcgcccctgactctctcctccctcttccgccctcccagtggcgctccaaaccctccccgacatgcgcgcctcgggcgcatggtgcgcttcggcgtctgggcagggagggtccccggtcccctaggaggaaggaggcgggaggagggaaagcgcttcgggcacggcggaggatgcgcgctgacaccgcgctgtgcccggccggctgcaggtggagtaccacaagaagtatggcaagattttccgcatgaagttgggttcctttgagtcggtgcacctgggctcgccatgcctgctggaagcgctgtaccgcaccgagagcgcgtacccgcagcggctggagatcaaaccgtggaaggcctatcgcgactaccgcaaagaaggctacgggctgctgatcctgtgagtccaatccgagggacctgggcatgcggccagacctgatgagcctgacggcgcctggaaattgtgaagaggcggagttagagttccctggggttggaagcttcttacgtagggcggataccaaagcccctctcccgtgccatcgcaaccctgagctcttgtacagattagagtcggtccacggaaaagccgtgctgtgcacccagcacctgcgttctct

SEQ ID NO: 39174 - DNA, 1021 bp, Artificial sequence
  DNA replication origin
ggcgagcccaggtgcaccgactcaaaggaacccaacttcatgcggaaaatcttgccatacttcttgtggtactccacctgcagccggccgggcacagcgcggtgtcagcgcgcatcctccgccgtgcccgaagcgctttccctcctcccgcctccttcctcctaggggaccggggaccctccctgcccagacgccgaagcgcaccatgcgcccgaggcgcgcatgtcggggagggtttggagcgccactgggagggcggaagagggaggagagagtcaggggcgcgaaaaggggtttaccagggtgtcgtgctgtttcttgagaccccctttccagagaatctgcagcaggctgcccagcagtggccagctggtggggcccggcagggcggccgcgttctgagtctcgccaccagctgtcagcgggcagactggcacctctcgcggctgaggggacgtgtacgccgtagatgtcaccagtctcgggggctgcctcggactgcgcagctgctgcaggaaggcggcaagcgagcggctcttgctgatgggggagctcatggcagcgggggacaccggagcgcgggaaggcaggaggatggggtggggcgaggttggtacgaggtgctagtgggagtcggggcttaacgattctgggaaaaggaagcaaagagggccagctggtgtgatggagcggggtgaggcgggacaggcagcagaaaggacctcggcgaggatgctcgacgctgcaccacgcgacagcctcagagcattggtgcctccttgcactggccgcaggggctggaagagggtggccggtgtctggggacctcttgaaaagggaaagctgggagtcctcctgttggtccgcaaggctgacctctagggtctggctggagccacggggaggtgtcaaggagggtagatgagatgctgctggcgctgcgtttcctcctgtccctctccatgttcctatgcccagggaccatgcatttatggagacagagcatgccctgggtggccaa

SEQ ID NO: 39175 - DNA, 881 bp, Artificial sequence
  DNA replication origin
ccctctcgaggtggggggtcagccccccgcctggccagccgccccatccgggagggaggtgggggggtcagccccccgcccggctagccgccctgtccgggagggaggtggggggggtcagccccccgcccgaccagccgccccgtccgggagggaggtggggggatcagccccccgcctggccagccgccccgtccgggaggtgaggggcgcctctgcccggccgcccctactgggaagtgaggagcccctctgcccggccagccgccctgtccgggagggaggtgggggggtcagccccccgcccggctggccgccccgtccgggaggtgaggggcgcctctgcccggccgcccctactgggaagtgaggagcccctctgcctggccagccgccccgtccgggaggatggtcggggggtcagccccccgcccggccagccgccccatccgggaggtgaggggcgcttctgcccggccgcccctactgggaagtgaggagcccctctgcccggccacgaccccgtctgggaggtgtgcccagcggctcattggggatgggccatgatgacaatggcggttttgtggaatagaaaggcgggaagggtggggaaaaaattgagaaatcagatggttgccgggtctgtgtggatagaagtagacatgggagacttttcattttgttctgtactaagaaaaattcttctgccttgggatcctgttgatctgtgaccttatccccaaccctgtgctctctgaaacatgtgctgtgtccactcagggttaaatggattaagggcggtgcaagatgtgctttgttaaacagatgcttgaaggcagcatgctcgttaagagtcatcaccactccctaatctcaagtac

SEQ ID NO: 39176 - DNA, 1096 bp, Artificial sequence
  DNA replication origin
gccgggcagaggggctcctcacttcccagtaggggcggccgggcagaagcgcccctcacctcccggatggggcggctggccgggcggggggctgaccccccgaccatcctcccggacggggcggctggccaggcagaggggctcctcacttcccagtaggggcggccgggcagaggcgcccctcacctcccggacggggcggccagccgggcggggggctgacccccccacctccctcccggacagggcggctggccgggcagaggggctcctcacttcccagtaggggcggccgggcagaggcgcccctcacctcccggacggggcggctggccaggcggggggctgatccccccacctccctcccggacggggcggctggtcgggcggggggctgaccccccccacctccctcccggacagggcggctagccgggcggggggctgacccccccacctccctcccggatggggcggctggccaggcggggggctgaccccccacctcgagagggaatcttttgatgaacttgccactcatcaagattacacaactagtaagaggtggagctaagagttgaactcagacaatatgaacctaaaaaccagtgttactaaatgagtcactccaatgaagaactttaactggaaatttggtgtcctacggagaggccgtagcatgcaaagatgccagctgtcctcattgatacttctacctacccttccatctgtgctcctgcctccattcccaccctcagataaggaaactcaggacctctagacatgtcaagaacatacttgagttgagagacagctctccatatagacagctctccatatagacaccaaagtttgtagccagatttttttttttcatttttttaatctttcatctccatggtgttcaatgaacccggaacataaacagacagatggtctgagtgggcgggcattttcacttaatgctaacacagttgccatcaatcccacctcttaaactaataccacctccctcttaaattaatgacgtcacaggtatgcagctccctgcagaccttggcaatcacatgggaatctttttggcacttctgagaga

SEQ ID NO: 39177 - DNA, 1098 bp, Artificial sequence
  DNA replication origin
tttgagtcccctctttttgttcctgctccgtggtttagctggtggtgcttgagtttggggtgagaatttattattattattattttttgccttgaggtgtgaatgtgagggtttgatgactttcagatgtctaggaaccagagtgggtgcaggggccccaggcagggctgattcttgggcggaggagagtagggtaaagggtgctgcatgagctccttaaaggacaaaggtaacagagccagcgagagagctcgaggggagactttgacttcaagccacagaattggtggaagtgtgcgcgccgccgccgccgtcgctcctgcagcgctgtcgacctagccgctagcatcttcccgagcaccgggatcccggggtaggaggcgacgcgggcgagcaccagcgccagccggctgcggctgcccacacggctcaccatgggctccgggcgccgggcgctgtccgcggtgccggccgtgctgctggtcctcacgctgccggggctgcccgtctgggcacagaacgacacggagcccatcgtgctggagggcaagtgtctggtggtgtgcgactcgaacccggccacggactccaagggctcctcttcctccccgctggggatatcggtccgggcggccaactccaaggtcgccttctcggcggtgcggagcaccaaccacgagccatccgagatgagcaacaagacgcgcatcatttacttcgatcaggtcagacccggggggaagcgagcacctagggggtgggcggtctccaggcacctcagcacgaggctgcctgcccaggctaagctggtccgattgggaaatggggaatcatgtaaagcactcgccttcccaaatatgcctgggtctgaaacttctaccgtccctcttcctacccctctcaccagccccggctcccatttcttccgggcccctaaaagaggctgctgcggcggcgggggagaggcttgggagcccagagcccggcagcgagagctcagggcaagtttcgagcaacaggtcggcgggagccgaagggcacctggtccctggacgtcgttatctcttggccagatcttggtgcccttgctcagactcc

SEQ ID NO: 39178 - DNA, 1024 bp, Artificial sequence
  DNA replication origin
agcttagcctgggcaggcagcctcgtgctgaggtgcctggagaccgcccaccccctaggtgctcgcttccccccgggtctgacctgatcgaagtaaatgatgcgcgtcttgttgctcatctcggatggctcgtggttggtgctccgcaccgccgagaaggcgaccttggagttggccgcccggaccgatatccccagcggggaggaagaggagcccttggagtccgtggccgggttcgagtcgcacaccaccagacacttgccctccagcacgatgggctccgtgtcgttctgtgcccagacgggcagccccggcagcgtgaggaccagcagcacggccggcaccgcggacagcgcccggcgcccggagcccatggtgagccgtgtgggcagccgcagccggctggcgctggtgctcgcccgcgtcgcctcctaccccgggatcccggtgctcgggaagatgctagcggctaggtcgacagcgctgcaggagcgacggcggcggcggcgcgcacacttccaccaattctgtggcttgaagtcaaagtctcccctcgagctctctcgctggctctgttacctttgtcctttaaggagctcatgcagcaccctttaccctactctcctccgcccaagaatcagccctgcctggggcccctgcacccactctggttcctagacatctgaaagtcatcaaaccctcacattcacacctcaaggcaaaaaataataataataataaattctcaccccaaactcaagcaccaccagctaaaccacggagcaggaacaaaaagaggggactcaaagagaagccacaagggtggcgggtgcccagcggcgcgggtgccagtcctgtctggcttgcggcagggacgagttacagaggcagaaggtccttcccaggctgagaagaacgcgaggctgtgttcatggccaggacgccagcgactcccactttcgcctggtcaaaaaaatcccccaaacctggtgtcacccagaggtagggagggaggcagcggcta

SEQ ID NO: 39179 - DNA, 1284 bp, Artificial sequence
  DNA replication origin
aactcagcacccaccctcaaaagactgcatcaaatgagaagaaattgctgctgttaaccaggcagacatccctaaaatctggaagagagttacaaagtgcagagagggatcaggtgaagattgtgctgggcttagggtggggcatcaaagctgggtaaatggtggccatcttcagaaggcactagttcaccttgtttggttgtagcttagataggtaactttcaacattttaacaaatagcatggtactagcacctgccagccggaactgacaccggcctgtagtctcagctactggggaggctgaggtagtagaatcgcttgagcccagtagttttgcatctagcctgggcaatatagcgagaccaccccccaccacaagtaaaataaaatcataaagtcaaaacacctgatactggccccactggagcagaatctgaaggcccctgtggcaccaagtattaacactttagttgagagattatagggaggtgagggttaggggattcctcgtagtgtcttcaattttaacagttggagctggtgcttatagctcaatgcccggcccttctgaaggaagggaaaaaggctggagacgaggttcaccttgttttgtggagggctcgaatgccacgctcatgagggcgtccttcactcaggaaggaatgggagccgtccatcccaaggacctccctcaataaacatcccttccattcataactagccaatgccattttaggagctccgaatgcctggaggggatactgttttggttaaagataccatacgtgtctgccctctggcagctggaagtgtagaagaaattggggaaggggcgccatgaccccacagcatcacagaattggaaagctggcgggatgggggtggggaggaccttagttaacgccgcgcccccctctcagagagggttagtgactcggccaagttcacgcagccgggtccagacagagacaaacctcccttccccgtggtagctgcagaagaggaagggaactcttgcaaatcagaggccaagatagcagtggagtggcacgggggcggaaagcgcatccaaaggggagaaaaatgctgtattcctaggagtgggattgtcttttatttttatttttatttttatttttttattgttgttggcacggtttcggaggacttattcttgctgagttaactccctctcccactcttttttttggccatgcctggggaggattcgcggtgtggggggaaggcgcgcccctgcggcttctgaggctcatcttcccgg

SEQ ID NO: 39180 - DNA, 711 bp, Artificial sequence
  DNA replication origin
tgtgtaaaaccaaactgtaacccaactgccttgcacacacttcctcaggacctcttgagactgtttcccattccatgtcactcatattagctcacaataaacctctttaaaatattttccagaatttgattgttctattaatgtgccaataacaacagttttgcaataatattaaatgtggcttatttgtatcaagttctgacaggtgctccaaagaccgggccagtttgtgagatcaccttagtgatggtgaatgggttctgctccagcttcctcatcggcctccaagctgtaacagagatgctaagaatccttgggaggtgaagagacaggcagtgcaggtgcctttggagaggatggttgttgtgtctccaccacatctcaaggcgatggaggcatttcagagattgacgaaagtttccaggagtttgaaggatttgggactgatgcctggatccttgtttgaaagtgcaagagtccacagctgtggctggctaggcagaaggtggagggttgggtggaacctggctgcaatgaggttgatggcgtgaagcagtgtgggtttcctgttggtcgtctgcacatctcggggtgtctcaatcttggcactatgggtgtttgtaagctggagaattctgtgtgtgtggtgagtggcggtggcggggcggggggcttgtaagctggaaaattctgtgtgtgtggtgagtggcg

SEQ ID NO: 39181 - DNA, 783 bp, Artificial sequence
  DNA replication origin
caagtgcgcctgcgcgcggtgtgcgcccttaaacgcgactcaaggcgtcgggtttgttgtcaaccaatcacaaggcagcctcgctcgagcgcaggccaatcggctttctagctagagggtttaactcctatttaaaaagaagaacctttgaattctaacggctgagctcttggaagacttgggtccttgggtcgcaggtgggagccgacgggtgggtagaccgtgggggatatctcagtggcggacgaggacggcggggacaaggggcggctggtcggagtggcggagcgtcaagtcccctgtcggttcctccgtccctgagtgtccttggcgctgccttgtgcccgcccagcgcctttgcatccgctcctgggcaccgaggcgccctgtaggatactgcttgttacttattacagctagaggtacaaggggtttgttgagtggtgttgacatgcgcgggaggggtgggtgggcttcagattggattttgtcctccgagatcacctgggtaagaaaagcacagaaggtctctgctgtgttggagttcacgttctagtgggtggggagacagacggtaagcgtacggagaacttgcagctggggtgggtgttacagaggaaaagcaggagtgcggtttaacgggggccgctttagatagaatagcctaagaaggcccttgtcctggctggatgagtgggtgaattgatgaatgagaacctccttgcagaggccttcccggtccgtacttctcagaccgtagaccttggagcagttgtaccggga

SEQ ID NO: 39182 - DNA, 1030 bp, Artificial sequence
  DNA replication origin
gggggagttcgagaccagcctgaccaacatggagaaaccccctgtctactaaaaaaattagctgagcatggtggtgcacgcctgtaattccagctacttgggaggctgaggcaggagaattgcttgaatccgggaggcggaggttgcagtgagctgagatcatgccattgcactccagcctgggcaaccaagattgaaactccgtcaaaaaaaaaaaaaaaagaaagagagagagagagagaaggagggagggagggagggagggagggaagtaaggaaggaaggatggaaggaagaaaggaaggaaggaagggaaggagggaaggaaggaaggaaggatggaaggaagaaaggaagggagggagggagggaaggaagggagggagagagggagggaaggaaggaagggagggagggagggaaggaagggagggagggagggagggagggaataaggctttcctgatggtagaggagccttgatcttggaaaagccgtccaggtctagaacaccatctgcttctggggagaaattttccccagctagctttacattaaagtctctaacggaggccaggagcagtggctcacacctgtaatcccagcactttgagaggccaagatgggtggataacttgagggtcaggtgtttgagaccagcctgaccaacatggtaaaaccccactcctggtatcaattttctgtgttagtttgttctcacactgctataaagaactacttgagactgggtaatttatgcagaaaattaatttaactaactcacagttctgcaaacttaatgggaagcatgactgtgaggccttgggacactgacaatcagcagaaggtgaaggggaagcaagcaccttcttcacaatggcggcaggagaaagatatagtgaagggggaactgccacacacttttatttacttttttttttaatttatttttttgagacggagtttcactcttcttgtccaggctagagtgcaatgacacaatctcggctcaccgcaacctccgcctccc

SEQ ID NO: 39183 - DNA, 1259 bp, Artificial sequence
  DNA replication origin
aagaggacgacgccaggtgtgagccaccacccagcactttgagaggctgaggtgggtggatcacttgaggtctgggggtggcactggaggtgggagaggcagggaggggctggctgggaagggctgtgtaaaccaagttaaggaggttagcttcacctgaagagcaatagggagcgtgaaatggttttaagcaagggactggcttgatttgatttttattctagaaagatctcaatggcagcagcgtgaaaaatgggggctgtcgatcacttaggaggctgtcacagtgtccaggcaggagctgatggtggcctggcctagggtggcaatgtgaggatggaaaaagtgaggtctgaggaggggagggtttagggaggaggaggagggaatcaagcttggcagccaggcaccaggtggaagggtggcaccagtgccggctccaagggagactgggagcaaaccaatgtggaaggccctggacagtctgatttaggaaacactaagtgtggaatgcccaagagacagaacaggggtatccagcaggccacggacatgtgagttgacagcaagaccagagatgcaatatgggagtctcagcttctagattatgttaaaaaccttggccatggatgagaccatcccatgagagtctagctagagggggacccagggcttagccatgcagaaagccaacattcagagaacagaaagaggaaaagttggaaatgaagactgagaagagatggccagggaggaggtgggaaagccatgagcgtgttccaggagaggagggaggagagcgccctgggtccgaggaaggaggcaggaggatcagagggaggaggcaggagggtcagagggaggaggcgggaaagccatgagcgtgccccaggaggggaagcaggggagcaccctgggtcagctgcgtcaagtgcagctgggaagacccatcccgcgaggacatggaagtgcctgttgtactgtgcaccgggtattcctggtgaccttgacaagagtgaatctgagaggagggacagtgggtgccaaagccagctggaagtgggctggagaatggacgggaattgaggaaaggaggcagggggtgctgagaagtttgtctctgaggaaaagcaggaaaaaaggtggagggggtggtcggaggggtttctgtttttgttttaatctagaagcaggtctgtacactgctgagtcacaagggagagggagagatggatgagtcaggagagggagaggatcat

SEQ ID NO: 39184 - DNA, 1425 bp, Artificial sequence
  DNA replication origin
atgcagagtttatagtttccaaggggaggagggcaggggaggagtaaccaggacctttcctgccagtcttccaatcgcgatagctcgttttggctgtgaatttccccccttcccctccccctcccgttaattaaataaacgctggaagcgtgtgtttaccgcacacgactcggccctcggggaactctttttctacgtctctcctactcttaaactcctcaactcacagagggttggagagctggcaccatgagcttccagttcctacgggtgagaaaagaggtgtctgtgtggagggcaggtgcgaccccgggggctagcagagaggagaggctgcgggaggactcgctgcgaagggcgaggggtggcgctgggtgggacgggcgcctggggccgtgcagggtggctcctgggtgctgcccgggctgcctgtcgcccagtactggcgcaggaagacgggtccgcgcagcgtctggcaacagtggcctgctccacgcctggaggcgaccaagttctgagttaaaggcgccgggcttagccgggaagtgtatggcgacccagaacacggagcggagaaggcctcaggggacacgaggctaccgccttagtcctcgggcctgcgctccgagcggttagggtgcgtacggatgggctccgggatgttagtggagaggtgacaggagtctaccatcccacggccaagcgtgtgaggcctccggcgggcgggggtcccccccggggcagggcagggggagagtcaggcatgtctctaacgggctccctagtagaaccgctaggaaagtggccttcaaccctaggcacctttgtggctttcaggtagttgggcgactaaaaattcacttttgcctgctgtgaaatgggacaggtggttgtcaggttagagactgtgcccacgaagtctcgtttggcgggccgggactgacgtggacccgggccctcctcggaagcttgggaacctgtgagcccctcagctcctcgcctcactttgcctgtttgaaaaaaggagttgtttgagaggaagagttaaggctcaaaaggttctaaacgaagagcatgcggcctgacgcggagcgcaaagaagcgagcagtgaactgaatctggtgggactgagaccagaggcgtctgtatgcggcggccgcttcgcgccctattaaagcaatctgttatttacgataatcatttttgtaattattttggagtggctgtgacttgatgtctgtggtgccccagggcatgcccttactggacatagatacttcagggtgccctttgacgccagtgtcggtccagtgggtgccagtgccgcgaagggagggtggcgggcgtgaatgccccctcctcctgggtttgccgcaggccccggcctttccaccttgcttgatcctggcgggtctgccacttac

SEQ ID NO: 39185 - DNA, 1233 bp, Artificial sequence
  DNA replication origin
cgagaggcgggacaaacgtccggcgcgtggcgcggagtctgcgaaagcgctcgggggcctccatcttctgctcgggagtcccctccctggggcgggaagaggagtcgcagatctgcccgaatcttgctctacccgcctggccgccttcttccgtctggggtgggggcaggggtggcggatgactcaggcctggggccgggagccctgtttccaaaggcaccacctcgcgcctctttggaagtggcgcgctgttggggcgctcccgctgttgcagaggcctggtttgcggtttcataggggcgtgggtccagggcttccagggagtaagtgagtttaggctccctagggggcggtagaggggaacccccgacaaccttccatcctcttctccaggcggctgcgaggcctccggggttccagaggggtccccttctgccggtgccggctgtcttgagcgcggccacgcagtccgcgtcttcacgtgggcaaggggcggggacgttggagggaggctgtcttggatgctggagccttcggttcccggctctgctgagcagaaaagttgaagtcaaggaagggttgaggcttcctcacaagggcgcgcgcgtgcctgggtgccggcccagaagccgagaatgtgcgtattggggaagggtctcccgtgccgagaagacagaggatttgttctagctgccttccgtacagagggcgcggaggttgcgctccagttcgaacgcttacccattggaaagagggcagcgccggggtccagggaagctccttgggaatgaatggcctttgccaagcggttccggatcctctgggtcctttgggcccacggcacggtgctgcgcgagccctcagtgcccatcggctcccttcgcctcctgcgtagacgctcccaggcggggaggcatatcggttcctccgggcagctttggctagtgttgctgtgggaaaggagagccagggcctgggatgggggatgagcaccttcttgcccattccgggccccagcgtgcaggaggtaaacttgccagcacagacaagacagcttgttcaagctgcacctcaggccgggtcagagaataaaaccgagggctagaaggcccagaatgtcggacagcccagcggcacccgtcagggagtcccaggcgcccgaaagaggcgccgcacctctggcgagtctaggacccatcttcctggacctgtgctctggagtgcctgcgggcc

SEQ ID NO: 39186 - DNA, 1093 bp, Artificial sequence
  DNA replication origin
atactgaaacccacccctctttcgcctaaacggccttcactcgttcctccaaaagacggatgtcacctggagttaagaaactgcgcatttggggagcgactcaacaaccggggtctcctcatctcctaaaaacacatcccatcccacctacaccccactgaggcttaaggtctgagctgggatcatgcagctggagccccagtgcgccagagacgcccagttccctccgtgggcacagcgcggtcccggcccccgggcgggaggagagaggaagggactcctggggagtctgccccaagggccgcagaggcagcagacggtcctacccgcccaggagttgcggacagcggcgtctcgccgctgtcgcccgaagtggcatctcccgcggctggctgaggccagggggaacccgcgcgcactggaccagcccagcggcccggccctgccctgccctgcggaacgccggctctgcagctgcctctggcgggccggtcactcagaagcctctactcgccctgggaaagaagcgccgggcaggaataaaacccgagcgccacgggtaaggtgagggtgaggaggtgcaggaagttgggagagagcctgcagagagctctcgactggagaggtagacacccaggtcccacatgtttagacagaaaacgaaacttccttccacacaaacgctgcttccctctccccttcggtacttgccacccaaacttgaaagcaaagtgcaatactaatttttaaaatttaaactaacgaaattctttggcccagttattatgcagcaattgactttcattgtaaggggaacatcgctaattctcgagggcgtatttgttgggacgccccaactggctccctgggctggatttaaacattctgtggggattagaggacaagactatttctatttgatactgaatacgattttgcaataatcaatgcctatcagtacggtgtccgcacctgcagtagacatgactctcccatccacggaatggcggcatccactgcctcgctgttccttctcgggttcgtttgaactttagcatttatttagacccaggtgggcctaaaagaaaataat

SEQ ID NO: 39187 - DNA, 1279 bp, Artificial sequence
  DNA replication origin
taggcgaaagaggggtgggtttcagtatttggatcccttcccccagctctgccaatctcaggtgtgtttacggtggaggtgacagaaggaaggcgcgtcgggggacccaggcctcgcaggtcttcggctgtcaacgaggcaccgcccactgactccgcgcttcgtccctcacagcgtggggctcggcgctgcgccaggcccgggtgcggggcggagctaggctgggactggctgggggccgccccgcccggcgcctgggcctccgcgccggcccccggggaggagttatgataatttccttctcattaaggcgctcgggtcccccggctatcgccaggacacactgttcgggcgcggctttccccgtccgcggagcggtcttgacactcgcggcggcagcatctacgctcgcagagccgccgatgcgtgtccagtgacccggacagcaaggcccgcgcgcggcgggggcggcggcagacgcctggtcaccgtgaccccgattttggatttaccgcttgggggctggggggatcctggatttaactggcgactgttttgggggacgccggacgccatgttgtggaaaataaccgataatgtcaagtacgaagaggactgcgaggtgagctggggctccggggtgcagccccgccccgccgaggacagtccgggaggcaggggccactggaccgaggtcggggacgagggcataggagccctggcctctcggtgggacgggatccacttctccggacaccccttagtccatttctgcggggcccctttcctgtatagggccttttcctaaatagcctcccctcgggaacgaggcctggaaagagaatggcaaatcccacccacacagcttaccgggcgctttcctaagcggcaaacagccctgcttcccgttttctcggaaaagtgccccgtctgcaaccctcagacgtggcttttacgcacgaagtctctgtccaaaggggtcagatgaggctacctgctagcgacaccttggcggacactcctccaaggccggcttgtcacctgccccgctacctcctcggggaagcacgaaaacaaccgaagtttggctttcaaaagaagtgggggctggggagtggtggtgggggtgcccgaggccagatggggccgtaagagctcgcgagtgctccagcctgtcggacaggttgagctagagtttcggagagtgggagggaagaaggaggcggcgagcgggaagaggaagaagacgcaggcagcgctaggcgagctcaggggcgcc

SEQ ID NO: 39188 - DNA, 844 bp, Artificial sequence
  DNA replication origin
aaggtgccggcagagccatgctgcctccaaagtccttccttgcctggtctggcttctggtggctcccatccatcctggcattcctcagtttgcacctgtgttgctctcgtctctgcctccatcttcaaatgggctttgtttgtgtatctctgtgtgtcctctcctcttcttataaggacaccactcactgggtttagtgtccgccctaatccaaaataacctcatcttaaccaattacgtctgggaagcccctattttcaaatagtcacattctgaggttctggtggacatgaattttggagggaacaccattccatcaatgacagtggccagttatgattttcacttggcaaaaaggactctagcagcataaagaaggcttgaaggaggccagtttggaatcaggagacagttaggaggcaggagagaggtggagggggcctaggccaggatggggatggcaggagagaagtggagggggcctaggccaggatgggaatggcaggagagaggtggaggaggcctaggccaggatggggatggcaggagagaggtggagggggcctaggccaggatggggatggcaggagagaggtggaggaggcctaggccaggatgggggtggtgacgagggaggaaagtacatggcattgaaagatgttgaggaaggaaaatccaaaggatgggtgggatgtggggcagagtgaaaggtggactgtgatgacaccacccaggccgagtgtggcggctcacacctgcaatctcaaaactttgggaggctgaggagggagggttgcttgaggccaggtgtttgagaccaacctgggcaacatagacttcacct

SEQ ID NO: 39189 - DNA, 1393 bp, Artificial sequence
  DNA replication origin
ctatgactttcataaagataacacaagattcaatataataattttacctagtaattgctggagagtttggaaacaaggcatgttaagtgcccagtgcagtggcttgcttagtaatgcgttgtttttattactaataaagaatgactaaaaaaagcaagctgtgggtgtggcgtgtgtaaacacaccgctcaaggagcccctgaaacacttgtcagaggccgcatgctgtccgcaaggttgcctgtgggatctgcaaccccagacgcagaagtaaaacagcagcaaggaggagaggaggagggaggggaggaggagaagggagaggaggaggaaggggaggagagagaggagaagggaaaggaggagaggaggagggagaggaggggggagagggagaggaggaggagggagagggagaggaggaggagagggagggagaggaggtgggggaaggagaggaggatggggaggggaaggaggagggaaagggggaggaggagggagaggagggagaggaggagggagaggaaggagaggaggaagaggggaaggaggagggaaagggggaggaggagggagaggaggaagaggaggagggagaggaaggagaggaggaagaggggaaggaggagggaaagggggaggaggagggagaggagggagaggagggagaggggatggaaggggagggacagaaagagagggagaggaaggaagacaggaaaagggggaagagaagccgggaggggagtgggaagaggaagaggggaggaacaaaggagggggaggaggaggggagaggaagaaaagaggtagaggggaagggggaaggggaagagggggaagaaggagcggtagggaaagagaaataagcccccatggatcatgtgtgcgtgtcaggcccctcctcaaggctccatgtgcgcctcttatttaatcttcataaaaacctatgacgtgttggcctccactcccaaattcacctcatggtctaagatggcggtcccagtcctctaaacatcatggcataaatgaggaaaggaaaggagtaggaccctgcccagaagccctacacatcaacccctgcttacgtcccattggctggacttgggcacgtggtcttgtgaagctgcaagggggcctggaaaatgctgtctgtatttgaacgacgttgtggccagctagagattgtgggttcttttgttaaaaagcggagcgtcagctgggtgtggtggctcacacctgtgggaggttgaggtgggcaggtctatgcactcaggagttgaaggccagtctgggcaacacggcgaaatcctgtctctgcaaacaatacaaaaggagctgggcatgatggcatgcacctatagtcccagctactccgggggctgaggca

SEQ ID NO: 39190 - DNA, 1130 bp, Artificial sequence
  DNA replication origin
ttgaatatcaaacttcttcaagtatcgtaataaaagtaaataataataataattaaaagaaaaacaatgaaagagaaaagggaaggaagagaaaagaacagtgtgtctgagcatcactggaaggagatgccgtggatgcggaatcccttccaggccacggaaagcagcaggctgagcagctcaggtcggggagcgcatgcaaaggcccaggggtggcagagaatgtggtgtgtttaaggaacagagagaagcatggctcagcctggtgggtgggggagagtgggaccagacgggcttggaatgggctggatctgggaccaggcaggaagatgaggcaggcaaagtagagaatggcagacccagagcgcgtctgcctcctggaggctggcggctgctcctcagcatgaaccagtgcagctacggggcgtgtgggctccgcgtggtcagattttctacttcatgactggggcggggtgggtggggggcggtggtggtggaatcccaattgctgcatgaagtctcatgtcttttagacgctggcttcacgtagaaagatgaagatagactttgcagactgaacggggactgtgggctagaatcaactcaggggacatcagttgcaatgctgagacttgctccaggcctctgatcgaagtggaccacggacttggtcattatgggatggttctggagctcaccaatgatcatctttccgtccatccccaccagagctgggccaagtcttaggaacaatcctttgcttcttggtttgtgaagctggcccagggacttaatccaaacaagggcacagccagaaggaaaagggcgtgtcttcctgaaaaagacttgaataaagggatcctattcaaggccggaaaaggccagtgttgaagcgcgtggcagcctgtccaggcaggtctgagtgcgcagtgacctcttacaggagggggctgtgctgcttgaaagttcaccgctcctgcccaggaaggaatctcttcaagcaaaacctgacacatttggttgcagtctctgcttggatgctgcacaaattggttacccttccttcgggtattatgagaagggccctcctgggtacatctggttcatcccctgcctccagcatggagagc

SEQ ID NO: 39191 - DNA, 1698 bp, Artificial sequence
  DNA replication origin
ttaagcaggtattctacccagtcacttactgaccaataacggtacgccaccgctattttagacgctcgggggtacagatagggttcctaaaaatggaaatttactttgcttaggtagatcagacaatacgcaagcaagagataaatgcaccagataatttctagtgcgggtaaagtttatgaagcaaataaaacagggtcttgtgagagaaagtggcctcctagaagaagtgaccccagatctgagacaacgagcaggtaggaagcctgcctggcgaagatctgggaaaaaagctccccaggcagaggaagccgagaagcaaaagccttgaagcgagcccaagcctgcctcacatcacgaggggaggggaggggaggggaggagagggaggagagggaggagagggaggggagggaggggagggaggggaggggaggagagaggatgggaggggaggggagggagggaaggggaggggaggagagaggatgggaggggaggggagggcagctgtagcagagtatgcggggaggggaatggtgggaaatgaagtgtgagaggtgtacggggccggctcagcagggccctactagccacagctgacatttattgtgtgtgccaggtttaaatgcatcccttcactttatccccgctgaatcctgtgaaaaaggcactatcattctccccactttgcagatgaggaaactgaggcctggagagattttaattaacttgtttcttggccacagtcactcaaggggtcacctatagaggatggaaggaaataagacttgaatgcaggcagtctgactcccgtgctggactctatggttaaaaataaaaaactgcacaacagaagccactggaaagttctctgccctcctccaaggcagacacagctattgatttccagacctatgcaagcgggtgatggcccaggctggcatccctgaccctccctccacatcccccaaaacctgagccggccaccagacagaggttatactatgggggctaccagagccataccctcaaaagctgatggggtggagacaaaaagaaagaacttttgtcactgcagttgggcttgagagtgcccagggtccttggactccctgttcaaaagggcaaatttgctggggtcaccttgcggggtttacaccaggggctccagacccagaatcagagccgagaaaaccagtaagaggccttggtgagccccagcgccgggcctgcccttaccgcctccagcagaaaagataacagagttggcggctctggttgaccagaggcagcacttggcagagggacaaggaagacttacagattctctgccttcactgctgctctgtttagacaaaggcaaagtggcagtctgttttaaaaaaaggcaacaaaaacaacaaactcacatctgtcagagccttttgagctggttgggtgcgtgcagactcctgtgatgtgggaggcaggaagagagagaggcgtgacttccaggagaaagtggcagaacaaaggccaactgaagactgaagcccggagccacagtgggctggagcaggggggacttgcacatctgtctgaacacatctctccagggcttggggtctcagtttgcccatctgcagaaggggataaaaataacagttggttaatacaccagggactttgcttatgttactccctttaacgtggaca

SEQ ID NO: 39192 - DNA, 1262 bp, Artificial sequence
  DNA replication origin
ctaaactggaggataaaattcggtgtgcctgtttctttttatcgtttgatttgtgtctgctagaagatttcaaatgacctacagggctcacattatattttgattgggcagcagtgtgctggactagacatccatgaggaaaggggtctgtctgggtttgcttgtcaccgcaagtgcagggctggacaggagcttgacacgtgctgggtgctcagtagatagttactgagcaggaagaaaggagggacagcagagagggagggagggagaaggaagaaagaaggagggagagaaggaaggagggagggagggaaagaaggagggagagaaggaaggagggagggagggaaagaaggagggagagaaggaaggagggagggagggaaagaaggaaggagggagggagggaaagaaggagggagagaaggaaggagggagggagggaaagaaggagggagagaaggaaggagggagggagggaaagaaggagggagagaaggaaggagggagggagggaaagaaggagggaggaaggaaggaggaaggaagaaaggaaggaaagaaagaaggaaagaacaaaagggagaaagggagggaagaaaaggaaggaagaaggcaaggaggagagagggaggaaagaaagagaaggagggaaggaaagagggaaagaaggggggaaaggaaagaggcagggaggaatagaaggaaggagacacaaacactcccggcagctgtcttgaaaggcctctaaaaccccactggtgagcccagaattctctccccatgtccagtatttaaggcagctgccaaggagcgttccttccttctagcggataccccagctgccccgtccctggtctctgccctgtgtccccgcccagtgtctcctccaggtccccttggctggggatggccttgggtactcacttcatgccctgtttgggagcttctccatttgcaacctgctcccattctggtcctcattagcagtgagaggtagtcaggtttgaaaatcttagctgtgtgagcccggagcctctgggataaaaatcccagggatgcagttccaggctttctgtgactttaattatctttagcaaaggggttgattttccccacaagaaaagggggtgagccccggaacacatatttaggaacttctttcctgtcctgactatgagctttctgagaatacggcgaatacttcaccattacacaacagagatgactgagcaagtgtggggagcatggccagctggact

SEQ ID NO: 39193 - DNA, 1718 bp, Artificial sequence
  DNA replication origin
ccactcacctggccccagagccagtgtgtataataggccacctcaccctgggggaggctgccggcatgtggcgccactgctgcaaaggccctgtgcctctgaggcgctggctacctgcttgcctctcccagagcaagccaggcaaggcttcaccatggatcagaaggcacccatctccctgcccaggggtgtcgagccccttggcaccacagaaaggaaggaagtgaggggattgagtcactatacctggggaaactgaggctgagaagagactccaggtccttggagattggagggatgtgggtcctgatccatcggtctgtgcccagctgcctcaccaccgcctctctcctgatttgggctccccaggccccagcatggagcctgcagcctggtgcccagtagaggctttttgattaattcactgaccatcaatttacaaggttttcctcagcttggaccatgaaatctgcatatccacacctggtccctaccagggttttcagtgtgtgtcgaggtcagagtgtgtgtgagtgtgtctgtgtgtgtgagggggaggaagtgtgtgtctgtgagtgtgtctgtgggggggagtgagtgtgtctgtgtgtgggggagggagtatctgtgagtgtctgtgtgtgtgtagggatcggagtgtgtgagtgtgtctgtgtgtgagtgtgtcggggttggagtgtgtgtctgtgaatgtgtctgtgtgtgagtgtgtgcgggaggcagtgtgtctgtgagtgtgtctgtgtgtgagtgtggggggagggagtgtgtgtgtgagtgtgtggggggagggagtgtgtgcctgtgagtgtgtgaggggagtgtgtgtgcatgtgcataggaatgagagtgtgtctgtgtctgtgtgtgtgtgtgactgtgtctgtgtgtgagtgcatgagcatgtgtgtgagagtgtgtgtgcacgagtcccaccaaccttggggaacactggcccagaagaagcaagtgtatgtgtgtgagaaagcatgtgtgtgcgtgtgtgtgtgagttcgcattttctgggtgtgtgtgtgtgtagagggagagtgttgtgtgagactgtgtttgtgtataaaagtgtatgagagtgtgtgcttgcatgtgagagtgtgtctgggtgtgcatcaataaccataagggtgtgtgtatgtgtgtaagcgtctgtgtgtgagtatgtggatgtgtgctgagtgcattggcagtgcgagaatgcggggaaatgtttgtgtgaggattgtgcctgcttgtgttgcacggacctgttttccagcagctaccagacaggtcgggagtgtgaatgggccgattgttaacctcagaggcagggaaggaaagcagccttttgtcctgcggggagctgagagctaggaatgcgagatgctaaaggcagcagcttgacggtgggggctcccctgttcacgcagacgccttgcctgggactgcacacattcccaagcttgcctgttgccttggaattgaccccacagaaggtgaaatgctttctaaaccatgactgatcaaattgctgtgttttacctgcgtcaccatttcctaaatgtagaaaagcaggcttttctggaagagggaacgtgagccttgctgtgggatagacatctgttacgattttgatgagccgggtttacataagccaagtcatacagtcggcccaagaaaaaggacgggaaacacacggg

SEQ ID NO: 39194 - DNA, 1292 bp, Artificial sequence
  DNA replication origin
aagagagaatgaagcaggtaggcagagataaggagagtagaaagagaaacagagagagagagagatgaagaaggattccaggagggacagagtcagagttgagagaacatgttactcctaagacacatatagagtaggttggctcctggcccccagtcccagttccagagggtgcagtgtatttcttgccttcagaatctgtgcattccccaacaatgtccctttagcttgagctggattgagtggtcttctgctccttcttcaaaatcggtgtgagcagaacacctggaaccagcccttgtgttgttcatcactgtgtccccagcatctaggatggtgcctggcacataagtatacaacggatggatagatgagtgggtgggtgagatggatggttggatagatgggtaggtgggcagatggatggatagatggatgaatggatgggtgggtgagatggatagatagatgggtgggtagatgagtaaaacggatggatagatggatggatgggtgggtgagtgagatggatggataaataaatggatggatggatgagatgaatggatgggtgagatgtatgtatggatggatgtatggatggatgggtagatgagtaagatggatgaatgggtgggtagggagatgagtaagatggatgggtggatgaatgggtggatgaatggaaggataaagatgaatcggggctgggtgagatagatagatgaataaatggatgaatgggtaggtgagatggatgggtggatgaatggatgggtaagatggatgaatggatggtaagtggatgggtggatgcatgggtgggctttggaggggatgtggaaaggcagggtctgatgtggggtcagatgcccccaacacccaccactgcagatacttcagctgcaacaatcttaactgagacccccttatccctgttggggccctgacactgtgctggagccatggtccttaatcacctggggactggttaaagcttagacttctgggcccacccgcagcatctctgattccttgttgggggtggggctaaaatattgcatttctgacaagttcccagatattagtgctgctgatctgggcactccacccagcaaaccacagtgctagaggaatacgacatctggtgatgcagggcaggcaagccccagagttggcgcttagcctgggagggttcttggctttgctcaggaaagaattcaagagtgagtcggtgctagaagaaaacagttttattgaggcaacagtgttacagctctgtgactgctccc

SEQ ID NO: 39195 - DNA, 1130 bp, Artificial sequence
  DNA replication origin
ccctgttggggccctgacactgtgctggagccatggtccttaatcacctggggactggttaaagcttagacttctgggcccacccgcagcatctctgattccttgttgggggtggggctaaaatattgcatttctgacaagttcccagatattagtgctgctgatctgggcactccacccagcaaaccacagtgctagaggaatacgacatctggtgatgcagggcaggcaagccccagagttggcgcttagcctgggagggttcttggctttgctcaggaaagaattcaagagtgagtcggtgctagaagaaaacagttttattgaggcaacagtgttacagctctgtgactgctcccgcagagcagggctaccccccaggcagtgtgtggggagctcagggacagttctgcagttatagtatacccacttttaattaaatgcaaattaaggggcagtttatgcagaaatttctagaaaaagggtggtaacttctgggttgttgccatcaaaagaggcggtaacttccaggtgttgctatagcaatggtaaactgacatggcactggtgggcatgtcttatggagaggggcttttgccttttccctgtttcagccagtttccaatctggtctggagtaaactcctgcctcctacctcactggtgctctcccacagccttcacggtccagctgtgaaacacgtaaagaatgggaaggtggggaggagagctcagttggaataaggcaggcctgggctaggtgcacccccaaaaacatgagcccttgaccccagccagtcccaggtctcaggagcaccctctctgacaaatttatttcctcattcactactgactgagggtcagctgggctctggaatggagaagataaaatggtctgatgtaagcatggagctcacagcctgcaatctgcatgaggtgagggcaaatactcactcatgaaatgtccaggtgggaggaagctggaggggagtggtgctccacctagaaccctgcagatcccttttactgttcccacatgcttctgctgaggtaggaggctggactggactccagagacagggctggacaccagaatgaattgaggactagctaaaacaaagacaggggtgg

SEQ ID NO: 39196 - DNA, 869 bp, Artificial sequence
  DNA replication origin
cattcattcaacaagcactcaggagctcctcctgtataccaggctctgcacctgcggaactacagctgaaaatgaaactgacaaagtcccctcctggtcgcggaaggcagcccacagatggacctagaagagaacgtcgaacgtcgggaaggacgttgtgttgggtggttcacagcacagacgctgcggccaaacgccaggtggtggagggcccttctcaaactgtctgacctctccgggcctcaattttctcagctataatatgggctgacaagagtaaacgacaagagcaaatgagttaatatgtgttgcccctgatgttacagtggataacgatgagctactattaggaaaagccagtcagggaactacagttgagaagaatggcagggtgtcgtgtatgcgatttcaggtggagaggtcacagcatgctcctttgggggtggagggtgataagggggaaggagggaaccatgtgggtatttgggaggaaatggtacagccacagagcagatcagggttgtcaggttcaaggctggaggctggtgctggggtaggaggtgaggctggagaaggtgctgatgtggcaaggcagggacatgcagtttgttccctgaggggtgggaagctgctggaggttgtgacaggtgcctggtgggatctgcccagcttagagagatttgccaatgttgctgtacaagggaggcatgtgggaagaaggacgggccccaggagaaccagcaagaggctctggggtccaggtgagaagtgatggtagcttcgagaggggcagcgatgatggagggaatgagaggcacaaattctgcatgcattttgaagaagtgaccaacagaaagtactggcaaatg

SEQ ID NO: 39197 - DNA, 1252 bp, Artificial sequence
  DNA replication origin
aagaatttcaagacattaagagcagaccattaaaccaagcatgactacctggcttacgcccccatgaagccagagataaagaataatccataaagagggggagatagaaatactcattcccagctctgggtcttccaaggaggcagggaggctgtggccatctgggctccttataggggatggaaccaaagcgtgagaatccaggaggtatcttttcaaacaattcaactcatttgcacaatgcctcaggtaaagctgtctgggcatctcatgtggcatgcagacagcgtgcctctgtgactggggacccatgcccagagagggcaatggacttgccccagtcatgatgctggtgacggagcagagctcatggatcatcacccgtggagcccacctgcaaacatggtcagctttctgagcgcttgtgccctcctctgtgagatgggggcaatagtggtcatcatgttcattcgtaccacaaattcaggtggaaaatctcctaatgcctggcactgttctcatctggcagggaaggcagagcagggcagacgaagctcctggtctcagggtgttcacattctggtggcagacagacaatagaggagagacaaataggcaaccaggagcactttgggtagggtgcaatgctgcagggaaaacagaacaacgtcatggatggcgagtgatgaaggagatgcaagggggagatgtggatggggccctctggaagcagagcctgagctgctgggtttgtcaaaacggggctcccaggaacagggctgtgagggcagcaggggcagacggcacgagggcagcaaggacgtggtctcagctgaggcacccatgagaagctctggagcgggagtcccccccctgttgcccagtgccagcccctgcggaactggagctgtgttcgttggggaggcggtgcagacgtctttggttgagaccaactctccagagaaagaagtggctgtgggtcctgagcagccaacattcagcaagcggccgggtgcgggagccctgcagtcagcggcggcctctgcggaagcaaccgggagcgcagagtggatgttgtaaaggaatgtcccagggaaaagccaaggcccggaggaggaagtgagcttggcgcctgaagcagaagccagcaaactacctctagctctagcagccaaatctggctgaccgcttagtttttataaataaagttttattggccgggcgcggtggctcacgcctgtaatcccagcac

SEQ ID NO: 39198 - DNA, 982 bp, Artificial sequence
  DNA replication origin
atgatgcctgggtgagcatgttttttatgtatttatttatttttgagatggagtctctctctgtcaccaggctgcagtgcagtggcgtgaccttggctcactgcaacctccacctcccaggttcaagtgattctcctgcctcagcctcccaagtagctgggactataggcgcctgccaccacgctcagctaatttttgtatttttagtagagacggggtttcaccacattggccaggatcatcttgatctcttgacctcatgatctgcctgcctcggcctcccaaagtgctgggattacaggcatcagccaccacacccagctgggtgagcatgttaaagatcccacagggaaggagcatgagggtcagatggggggaacatggggaccagttggagatggaaaatgaggggtcagatggggaaggaacaggaggaggttaaatggaagaggaacatgaaggttcagatggaggaggaatatggagacacagatggggaggaatgtgggggtcagatgagggaggaacaggagatcagataggggaggaacgggaggaagtcagatggagaaggagcatagagggtcagatggggaggaacagaggtcagatgagggaggaacatgggcatcagatggggaaggaacaggaggaggtcagatgggggagagcatggaggctcagatgagggaggagcatggagggtcagatgggagaggaacaggaggaggtcagatggaggaggagtatggaggctcagatcggggagaagcatggagggtcagatggggtaagaacagaggaggtcagatggaggaggaacttgggaatcagataggggaggaacaggaggaggtcagatgtgggaggagcatgggggtcagataagggaggagcacggaggggcagacaagtctgctcttctggcctagcttgggctccagagactggcatccccccgggcgggttggcctagtgtgtg

SEQ ID NO: 39199 - DNA, 1578 bp, Artificial sequence
  DNA replication origin
tcatatgtggtcgttcgatgaacccctctctgctttggctgcctggcatctcgtcattacaactttctctcctccaggaagccctccatgatgtcacatcaccccctctcggggcttgtgtctgcctccttcagcagactgccttgttcagtactgtattgcctggcacacagtaagtgcttagtaaatatgtatttgttgagaaaaggaatgactgactgactgaatgaatgactgaatgaatgaatgggaggcatggggatggggaaagagatgagggaagggtaagaaccctgactaatgtggacaagtaatgacaatcccagcgacctcccaaccttctccttgttgaggtaaagagctgctgactgggacccggcctgtgaccaggcctggccagcccggcaggacccagtaatccagagccagcggctcaggttgagtcccagcctcagcactcacacttttgcgggtggagaggcatgagtgggtgggagcgaacacaggtggagggtgaacgcaggtgggaggcgcacgcaggtggagtagtgcgtgccagtggaggtgtgtgcatgggtggtgtgtgccagtggaggtgtgcacatgggtggtgtgtgtgggtggagatgtgtgtggtggtggaggtgtgtgcgggtggaggtgtgtgtgtgtgggtggaggtgtgtgcatgggtggtgtgtgtgggtggtgtgtgtgggtggaggtgtgtgtgtgtgtgggtggaggtgtgtgtgtgtgggtggaggtgtgtgcatgggtggtgtgtgtgggtggaggtgtgtgtggtggtggaggtgtgtgcgggtggaggcgtgtgtgggtggaggtgtgtgtgggtggaggtgtgtgagggcggaggtgtgtgtgggcggaggtgtgtgggcggaggtgtgtgtgggtggaggtgtgtgtgggcggaggtgtgtgtgggcggaggtgtgtgtgggcggaggtgtgtgtgggtggaggtgtgtgggtggaggtgtgtgtgggtggagtgtgtggtggtgaaggtgtgtgtgtgtgcgggtggaggtgtgtgtgcgtggaggtgtgtgtgcatggcggagtgtgtggtggtggaggtgtgtgggtctggagctgcaccagcttgtgcaactgtgagtgtgtgtggcaggagcacctgagtgcgttcgtttcctcttgctgctgtggcaaattttcccaaacttggtggcttaaaacaacacttgatctcatagtctggagctcggaagtctgaagtgggcctcactgtgctaaaatcaaggagtggcagactgcatcccttcctgaggctttggggggaaccaatttcctggcctttttagtttctagaagccaccacattccttggcctgtggccccttccgccctccccaaatccagtggtggccggtggagtctctccctgcatcacttcaacctccgctgctctgtcacatggccttggtgtgactctgaccctcctacctccgtcttataaggaatcacactgtgcccacccagctaacctgggaatatctccccaccccaggatccttaattgaatcacac

SEQ ID NO: 39200 - DNA, 1629 bp, Artificial sequence
  DNA replication origin
caggtggggccctgctctgtgaggcgggcagtgctgcgggtgtagtggggtgagcggtgcttaggtggggtggggtggggtgggtggtgcttaggtgggggtgggcggtgcttaggtggggtggggtgggcggtgctttgatggggcgggggtgggcggtgcttaggtggggtgggcggtgctgcaggtgtagtggggtgggcggtgcttaggtggggtgggcggtgatttgatggggttgggtgggcagtgcttaggtgggggtgggcagtgctttggtggggtggggtgggaggtgctgcaggtgtagggtgggtggtgctcaggtggggtgggcagtgcttaggtgggctggggtgggcgatgctgcaggtgtgggagagtgggcggtgcttaggtgggggtgggcggtgctttgatggggtggggtgggcggtgctttaatggggtggggtgggcagtgcttaggtggggtgggtgggcgttgctttgatggggcgggggtgggcagcgctttggtggggtggggtgggcggtgctgcaggtgcgggagagtgggcggtgcttaggtgggggtgggcggtgctttgatggggtgggggtgggcggtgctttgatggggtggggtgggcagtgcttaggtggggtgggtgggcggtgctttgatggggtgggtgggcggtgttttgatggggtgggttgggcagtgctgcaggtgtgggagagtgggtggggcttagatgcgggtggggcgggcagggcttaggtagcgggtgggcagtgcaacaggtgaggtggccgcctgctgttcagtctcctggcctccatgtgccctcctctggtcagtgcatcttgccttccttctgcagagccaccatccccaatcccaggcacagggcttgagggaaacttattttctgcccccaccttccttaaaggtggaactcatgactgagacctgagcctatcagccggtcacgtgatcctggcccagggctattggctgtgggaagtggatgctgcccgccctgttgtcctgtgggagcttgaggggatgtacatctggcattgctggcaggcattttgttcccatgagggaagagtctgggagagaagcaacctggtggagagtgggcctaagacacggagagaggatgttgatgccgtgagttcccaatcccgccgcgcccgtcagacttaccctcagctttccagtctcaggagccaacactctttccttcagccagatcaaggtccttgtcacttacagccaacaccacaactgatacaaaagggaaggacacaaaacaattgtggagaaagccgtctggatggagccagcagcttcgctaccatcgagtggcatttccagagagcagatgcacgcggaggggtgtagtttgaaggaagacctggcgggatttgctaatgaattggatagcagcgtagtgaaagagaccctcaggaatgacttccggtttttaggctaaggaattgcaagaatggaaccatgaacggagatgttggtttagaccagtcgccctctggaccaagctgctgtgagcatggatttaacaaaatgtcagccccactgggtatgattttcaagtatgaattcaaaacctatgg

SEQ ID NO: 39201 - DNA, 879 bp, Artificial sequence
  DNA replication origin
ctggtggccacagaggagcttcccatctggaaacactgagatagaagcatcctttgcctcgtcctcctctcctaacgtaggttctgtgtcccaggcttgaacaactaacttgttttttcattaattcattcagcaactgtttattgagcacctactgtgtgccaggggctggggcacatcggtgaatgagaacacgaccaccctgggagctgactggcgagggagatcagctcaggggtgcacagtgctgtgtctgatggtggcaaggactaggaagaacctaggacagggtggcagggacatgacagtggggcacagtgtacagggcagagtgagccatgggaggttttggggaggaaatgttcctggcagagggaatggcacatgccaggttcatgagaaatacacggtgtgtgtcagcacagtgaagaggccagtgaggctggagaagtgagccaggaaccagagaggttgagactggagatagtgagcgaggaaccggagggggtgaagctggagagagtgagccaggaatcagaggaggtgaggccagagagagtgagcgaggaaccagagggggtgaggctggagagagtgaccgaggaaccagaggaggtgaggctggagagagtgagccaggaaccagaggaggtgaggccagagtgagtgaggagcttgaaggggtgaggctggagacagtgagcgaggaaccagagggggtgaggctggagagcgtgagtgaggagcccgagggggtgaggctggagagcgtgagtgaggagcccgagggggtgaggctggagagcgtgagtgaggagcccgagggggtgaggctggagagagtgagtgaggagcccaagggggtgaagccgaggtggg

SEQ ID NO: 39202 - DNA, 959 bp, Artificial sequence
  DNA replication origin
agaaaaaaaaagaaaaaagaaaaaaataaacaaagaaagaaaacaaagaaaattagcaatggcaccgtttcttccccagctccagccaagagagaatggggcatccggcggcccggagaggggccccaaggcgctcggagcgcgcggtacgctaaggcgggcgcaccacgaggggacaggtagggcttgacagggagggtaagggggtgcgacggccgcgatgccagagccaggcagggctgagaggggcccaggaagggcggcaaggcagcctcgccgggaagggccctttacatccaggtagcgcgagccgcgccggcccgggacagctcacatgaccgagccccgcgctttgaacggcccttgcctccagccccagagatgcggccggcggcgtaacatggaggggacttcggaggatccctccttcccagtaacccctacaggctcaccgaacccagcgcgcccgacctgggggcgcacacagcttgggagtcatagggctgtgggtgggagaccctcgggcaggcactgcgatttcagccaggagcggaaagctgggcgggctgcatagaagaagcggctccctccctcccagtctcaaagtgcccccgaaaggagacgcgtaccctcgcctgcccttactcaccgaggttgacgaagctcatgaccatgtcggcgtcggtgaggaaatggctatcttgcaggctggccagaggggggccctgggtactgaagacggccttgtaggggtaggagaagccctggccgccgggcccgccgccctcctccaccgccatggcgttgtacaggtccagcatgaacatgggtgccgagttgtgcttgccctggaggtgcgggcgcgggcggtggggcaagcccaaaatggagaggatctcgcgctgcatctcccgccgctcctggctgcggaggcgccggtggatgaagctcgagtgcac

SEQ ID NO: 39203 - DNA, 1892 bp, Artificial sequence
  DNA replication origin
ccctggacgactgtggcactcctgcaatttccccagtctccctggggtaggattcctgcttgccaggatgcccacctttccttctccctcctgcatgtcctcctctgcctggcttctgaattgtttccagagagagtgatagacaagatctgcctctccttcagtccctgaatcttatttaaggctcttgctttgcttccctggcctggaggccggctccttgatggagtctgccatgtgggttcgctcatggccatgtcttcctgcccagcatggtgcttggccctgggactggccacataatatctgggccaggtgcaaaattagtacggggcagggggtactttgttcataggtgattcagaaccacatatggtgacctcagagtaggaaaccaagtgtggggcccttaagagctggggggccctgtacgactgtccaggttgcaggccccacagctcgcctcctgatatcctgtgctccatgcttgtctgttgaaggaaggagtgaatggatgaagagcaggtggtgggggtggtttgagggccttgcctggtgggtgggtagaggcccctccctggcatggggctcaagacctgttccatcccacagcctggggcctgtgtgtaaatggccaggacctgcaggctggcatttttctgctccttgcctggcctctggcctcccctttctccacccatgtggcccctcaggctgccatctagtccaaaagtccccaagggagacccagagggccacttggccaaactacttctgctccagaaaactgtagaagaccataattctcttccccagctctcctgctccaggaaggacagccccaaagtgaggcttagccagagcccctcccagacaagcgcccccgcttccccaacctcagcccttcccagttcatcccaaaggccctctggggacccactctctcacccagccccaggaggggaaggagacaggatgaacttttaccccgctgccctcactgccactctgggtgcagtaattcccttgagatcccacaccggcagagggaccggtgggttctgagtggtctggggactccctgtgacagcgtgcatggctcggtattgattgagggatgaatggatgaggagagacaggagaggaggccgatggggaggtctcaggcacagacccttggaggggaagaggatgtgaagaccagcggctggctccccaggcactgccacgaggagggctgatgggaagccctagtggtggggctggggtgtctggtctcaggctgaggggtggctggaaagatacagggccccgaagaggaggaggtgggaagaacccccccagctcacacgcagttcacttattcactcaacaaatcgtgactgcgcagctacagtggctaccaggcgctgggttcaaggcactgcgggtaccagaggtgcggagaagatcgctgatccgggccccagtgctctgggtgtctagcgggggtaagaaggcaataaagaaggcacggagtaactcaaacagcaattccagacagcaagagaaactacaggaaagaaaacaaacgtgcgaggggcgaggcgaggaaacaacctcagcttggcaggtcttggaggtctctgggaggagaaagcagcgtctgatgggggcgggaggtggtgagtggggagaggtccaggcggagggaatggcgagcgcagagacaggctggcaacggcttcagggaggcgcggaggggtcagcgtggctggcttaaaaggatacagggactgaggggcaagaccggctcaagggtcaccgcttccaggaagccttctatttccgcgccacctccgcgctcccccaacttttcccaccgcggtccgcagcccacccgtcctgctcgg

SEQ ID NO: 39204 - DNA, 670 bp, Artificial sequence
  DNA replication origin
tggcatggtctcggctcactgcaacctccacctcctgggttcaagcgattctcctgccttagcctcccaagcagctgggattacaggcacccgccaccatgcccggctaatttttgtatttttagtactgacggggggacgggggggcgggggggcggggggacggggggcggggggggcggggggggcggggggacgggggcggggggcgggggggggcggcgcgggggggcggggggggcggggggcggggcggttcacgatgttggccagacttgtcttgaactcctgaccccaggtgatcagcccgcctcggcctcccaaagtgctgggattacaggcgtgagccaccgcgcctggccagttgcggatttataaaagcagtcgcttagtaacttgcagcggctacatcaactttggaccaattcgcaaactgctggtgtaaagcgtttttgcgcatgtgctgtcgccttgcgggaaaaggagcctttttcttcgacgatttccgggcgacgcaggaagtggctccagggcgcacgcgcgttgtttccgcggtagtcagggcagtttctaccgcaggcttaaggaggcttcgggctcctgggatttctgtccgcgctcctggccctcgtccttcgcgccagagcaggttcgcaaactcctcagaccc

SEQ ID NO: 39205 - DNA, 1080 bp, Artificial sequence
  DNA replication origin
aggtgatcagcccgcctcggcctcccaaagtgctgggattacaggcgtgagccaccgcgcctggccagttgcggatttataaaagcagtcgcttagtaacttgcagcggctacatcaactttggaccaattcgcaaactgctggtgtaaagcgtttttgcgcatgtgctgtcgccttgcgggaaaaggagcctttttcttcgacgatttccgggcgacgcaggaagtggctccagggcgcacgcgcgttgtttccgcggtagtcagggcagtttctaccgcaggcttaaggaggcttcgggctcctgggatttctgtccgcgctcctggccctcgtccttcgcgccagagcaggttcgcaaactcctcagacccttctgctcccggccgccgctttccgccggggcgagacccccaggtaggccccgtgccgcgcgcgtcccgtcgttaaccgccgccatggctcccgcagaggccgagttgcctcccgggagcgcgcttctgcgggatgctggggcgcgagcgggactgttgactaagcttcgttactgggccctggaagcgaggtcagagctggaaatggccttaggggtcacctagggcctaatccatcgtttctcttgtgggggaactgagcctctgggaagggtcacattgcgttaatgcagtgtgtgtcgcctctgtccctcccccttacacgtctggcgtctcgtcagatacatgtcagctcctgggagaagctttccctggccgctttgcagaagggcgtccccttttagcctcttccacgtcaacctgctccatttctttcgtagcagttaccagtctctgaaactaagtctgtttctgtcttagcccgccaagtatttattgtatacgtatataggtgccaccgtacaggcagtacttctccaggcaagtagtattaaacaccagccgccctgggccaggcattgtactgtgggacccagtatgcattaagggaagaatccaggcaagtggctgccctcttggagccagcattctgggggggaagagattttgagtgtaaacaagaaattccaggggatgtgatggaaga

SEQ ID NO: 39206 - DNA, 1992 bp, Artificial sequence
  DNA replication origin
agcatggggggcgccccgccgcctacggacccgggccgcgcggggctgcgctcatggggggcggcggggagcgcgcggggcagcgaggggcgcccgtccagccgccaggcccgaccactccggcgcccgtcccgccgtgcgcgccgacgtgcgccgcgctgcgctcccgaccggcgctgcggggactctgcgccccggcaccgcccccgggctttgtagcctgccgcccccgccagctcagccccgcccccagccggccccgccccgccccgggcgcgcggggaccgccgggaagcgtagttctaaccccgcccagccgcacccgggcgcgcggcgattggggggaggggggaggggagcgcacgcgggctgagggcggatccgggcctgggggcgctgggcgcgcctttctctcctggctgcccccgcgggcccggccggttgcaggcactaagcacaaccctgaactagggaggccaggccccttccctcgtggagcgcaccgtctggtgaattaaacgtaaaaaacgtaaaaaaacgtaaacggtttttagcatcttgttaattgagtcggtatttaacccagggcgacttagggaagagccacgtgccatattaaaaaagggaaatgatttctgttttatatgtaagattagttcatccgaccgatatttactctgggcgcgaggctgcagcggagcacagatcatattccctggccccacggagcgtccaggactgagaattcggctagtaaacatacagcatacgaccccggagggagctacaccacggtgccgcgatagaagcgggtcccgggcggtctcagaggccccgcgggagatgaggtgggcagaggaagcaggtgtgggctctttccagctccaccccgttctgggctggtgtcagggacccttggggcgagtaagagcagacccgggtccctcatccggcccccagccatagaaaggcggcgcatagtggggctctgtgagcttcacaccaggcagggccagccacagaattttcggggcccagtgcaaaatgcaaacgcggggccccttattcaaaagctaggaatttcaagttggcagcggttgagcatgaaactcagccccgggctttcctgagcgaagggaagggccgtgtgactgcacagaccccgggatcccggacctgcgggtcacaccctccacctctgaagccgggactaggggcctcaagcccgcctcatctccagcccccgcggttgggacctatgcagctgggaaacagcagctctaattggggtcactcccggccccagccctgcggcctcctctcagcacagggcgacgcaggtggggtctgtggggactgggagtggcactccgtgggctgtgggggaccgcaaggccggcgaggagttcccctcgtttcctccagcaccgaggagttctccgcgtttcctccagccctctgccctggctgccggcggggaggagtctgcccgccccctcccccactccacggcccacgctccacgcggcagccttgacctctgacctctccctcccccagctcccgctctagccctctgcacagtggggatgggacccccgagtcttccggaagcctgggcgtcctttcctcccttcccccttcgttcctcgttcctggcgctcctgcccccgcttgcggcccccgttgcccttcatcccgcgtggtttcctctccttccttcgcggagtttcccacctccccggccctgtgtgttcgcctgcctggagcccctcccctgctatttgggcgctgcgagaacagggacctgggatgttttgcccaagctggagggcctggcaaggagagggctctgggatatgtttgttgagtgtatccacgatggaacaaggtggggtgggggaaagctctggcccagccggaggcccttcgaagcgactttgaaaactttcatttaagtgtgaccttcacttgccccctagaggccggggg

SEQ ID NO: 39207 - DNA, 1325 bp, Artificial sequence
  DNA replication origin
ttccagacccaggaagcccaaggccctctccacttcatctccacggactacccaccccaagccagccatgtccactcacccgtaagtccgctggatcaaggtggggtgcagctgctgcaccccaatggcaaagcctaaaacgagagaacaatcagggacttggccttgctgcacgagccacgtctcaagggctgcacacagggtggcagaatcccacaagccacacacctctagtcaaaagggatcatccgcttcctctcccctcccaggcctcccccttgtgaaccccaaggcacaccgctgaagtgtggcagtgagtgacgcaggtgtcagcagccactggtgtcggcactcccaacctccaggccccatggccacttcctccctcctgcgaggacagctggcaactggggtgcagtaccctccctgccccccgcccccttctttgggccacacgctgtgagaaggggtctagatcctcgagggggggatggctgccctgtgccggctctgcaggcacatgatagccgactgccactgctggggcgaggagggggggcctctttccacccgacagataccgacacccaatatagaaaccgagaagagccaggcaggaaaacacaagctctcacccgtctggaggctccgcggcttggcgcccagatatgccaggttcacgttggccttgcggccgtcgatgatggggttcgggtctttgcaagccctctcagctgccgcccggtcggccatggtcacctggtggagcagagacacatcaggggctgccgtggggggaaccaggggcgaaaggggcagacggctccgccctggcaccggatgctgccacccctctcttcccttcctctgagggtgcctgtgacccagggtccttgagccaaagctcctctgaaccctacctggggctctcccacaaagatgcctcctggattccagctcctcccgtcaaagttcaaggcctgggaaatgtggccttcaaggacaaaaataatcccctgcggggatagggcaaaaatgaaccccgaagggagcttggggggccgcctggacttgcccaccagtgagggccgagactttcctctgagaaggagtttgcgacgctatgcttggaaggtaagcaggaaagtgtcttcaagacgtttttacttaagctgatgtttatttggggcggctgagagggctgttaaaaatatgggggaggccgaagagctcctaacaccccggggtggagccattgctcctcaccccccgctgctccaggaaatcccgagtgccctctggctccaaaacctccccaccaactt

SEQ ID NO: 39208 - DNA, 804 bp, Artificial sequence
  DNA replication origin
tcgatgctgctgaagtctctggggtgcacagaagcaatagatcctcacagcagccccctggggcgtgtggttccccagaggcagtgatgaggtcacccggggccgccaggcacctggtcggggagcagaggctggcgggctgtgcctgtctagctgtgacttgctgggtggagccgtgcctgcctgtccctccagcctgcccagccctggctgctcaaggctgaactgctttctctgccttcttggggcagggactcttggcctgggaagcagaggccattccacgggggggctcttttgcctcccagctacctgcaaagccggggcctgcctcagatgctcagcactgggcacctgctgtgctggggcacttgggacgcagcagctgagaccctgctcttgtggggaagacattgtgcaaggtagatgatgaaggggcttccgatcataaggaaacagagccgcctgggtggacccctgaggggtgagctttgagctgtgggaagaagcaagtgcataggtgcgaaggtcctgtggtgggaaggagtcgaatctgggaacagaaggagcccagggcagtgggagtgtggccagggagggcgcagtgcaagtggagatgagttagaagaggtaggttgaggcctaataacgcaggaagccacaagggagcagtttgggttttcttctgggtacagtgggaggcagctggagggttctgcttctggaggtgatggggtgttgatgttttcgtttgtttgttttttgaaacggagtctcgctctgtctccaggctggagtgcagta

SEQ ID NO: 39209 - DNA, 1054 bp, Artificial sequence
  DNA replication origin
gctgccatggtgtgcaaggaacctgggattgcgtctttaaatagttctcagtcattcttaaagtcctccctcaagacacaatgggacctagattaaagagaagccgtctctccgctgtcccagggcgcaggcggaatgcccgagcggtcttcggaggcacgggtgctggtggcacctcactgaagctcagccgggctgtcgccagcccatcatggcctggcagctctgtctgctgtgaaggtgacaatgccacagtcctcggggcaggaacgcccctcactgcatcctgtcaggctgcagctgcggcgcctggtactgcacgaaagtggtgcccgcgggtgctgcggctgagagggcctggggcacggcggcagggtagctgtagcccacgaagctggcagccgtggcaggcgaggcggcgtatgggtactggtcataggtggccggtgggtactgggcgtaggccgggctggccggcgtgtactcaatgtagggcgaggacagcgacgggacaggggcggctgggatcaccacgctgggctgcacgatggctggtgggtagatgtagtgcggggtcagcctgtggggccaagcagagcaggttagggccagaacggagttggggaatacagctgggagaacagtggggtacacgatgcgtgccgccccccaccccgagccccgactttcctcatcggtcagatgggcacagaaacagcacctggccagatgctgccgcctcaaggccttcgcactgactgtctgcactaaccaccaggctccctcctccactccatgtctccttctcagcaaggccttcccagactgcacccccgcatcccagccctacaccccacatccccggagctggtgcaaaaataaaaatcttgaatggttgttttcaaatgattgagagtttgaagccacgacggcggagcatgcgatcaagagcagggcccggtacgaatgtcctggttgcatgtctgggaggccagccctgtcccccttccctgctcatctccctgacactcaacacccaccaagtgacactgca

SEQ ID NO: 39210 - DNA, 924 bp, Artificial sequence
  DNA replication origin
taaccagcccgggcccgcacagcccatggggacagtgctggtgttgggatgcaggcctgacctccccaggcaccccgagtcctgctgccccttagaaggaggcccaggagccttgtctttgcggggctatgagaggggatgctgctgttcccactgcagaggtcacaggggagcgcttccgctgctcaagaggaaccggaactttggaaaccacattcttatctgcccctcacaagagcggcaacttggcaacactcatgagcaattagggttggatgagtcttcaggatgggtcttcatctgcttactcgttcactcaatcattcattcacctactctttcatttgttcagccagtgtttattgaagccttctcaggccagttgctgggccatctgcacagccatgccgggaataaacccacaagcacgtgctgtctatgctatgtcaggtggaaggacgccagagacagttaaaccgggtaaagggcaggaggaggatgggacaggagcctgccttaggcagggtggtcagagaaggcctctggggaggtgacatttgagcagacatctgaatggagagaatgagccaggccctgggcgcaggatgtgccaaacagagggaacaaccagtgcaaaggccttgaggcaggggcggcagcagggtggccagtgtggctgcagggcagtgaacaagaaggagtgtggcgggatgaggttggaggggctgtcgtggggagggatggtcgggccgggatgggcctgtgccgcactgttgagggctttggacttgactgagtgagacgggggacaacggggcccatgagattgttctgccttgtgttttaaagactagagtggtagagtggggccgggcatggtggtgtgtgcctgtaatcccagttacttgagaggctgaggcagga

SEQ ID NO: 39211 - DNA, 1531 bp, Artificial sequence
  DNA replication origin
cgccagcccggcggcggccggctgtgggctgcagcacgcggtgcacgaggcagagcccacaagccaaagacggagtgggccgagcattccggccacgccttccgcggtgaggggccagtcccggtcaagcccacctgctctcctccaagagcatgggctgttctgggcgtgggcggagggaggggctggccggaaaggcccaagggcgggcggcagacgctgaggggctgcctgggagggtcgggtcggggcggggcgtggggggcagggtaaagcaggggccctgccaggcctccgagggagtgtgcttggtctggccgagggctgcttggccaagtctgggtgggctcgaggccactaggcccaaagcctgcctggctctgagggtgctaggtctagaaccgtgcacgaggggaatgcctgctcgggcccgaacctcgctgggcgccgggtgtgcactggcccggggcctgcttggacctgaaacttgctaggcccaggatatgcactggccgagagcctgctgggcccaaaccttactaggcccaggatgttcactgactgaaccggctcaggcctaaccttgctaggcccaggatatgcactgggccagagtgtgctcaggcggaaccttgccaggcgcaggatgtgtgctggccctaagcctgctgaggcccaaacctgttcgttctagggttttgtacaaaatcctgctttagcctaaatcctgcttagccttgaccccctcctagacccaagccagatcagcattgttctgaccctactaagtccaaaaccttttgaggccagaccttgtttcaactccaaagcctgctaggttccagcaccccccgcatccctcctcataccacccccttctcccccctatggaaaccgcttgcttatttttcaaacaggccaagtcattatggcagccactgagatctctgtcctttctgagcaattcaccaagatcaaagaactcgagttgatgccggaaaaaggcctgaaggaggaggaaaaagacggagtgtgcagagagaaagaccatcggagccctagtgagttggaggccgagcgtacctctggggccttccaggacagcgtcctggaggaagaagtggagctggtgctggccccctcggaggagagcgagaagtacatcctgaccctgcagacggtgcacttcacttctgaagctgtggagttgcaggatatgagcttgctgagcatacagcagcaagaaggggtgcaggtggtggtgcaacagcctggccctgggttgctgtggcttgaggaagggccccggcagagcctgcagcagtgtgtggccattagtatccagcaagagctgtactccccgcaagagatggaggtgttgcagttccacgctctagaggagaatgtgatggtggccagtgaagacagtaagttagcggtgagcctggctgaaactactggactgatcaaggtacagctggttttaataaacaaccccttacatgaaaaagaaaaaattcaagtcggcttt

SEQ ID NO: 39212 - DNA, 3237 bp, Artificial sequence
  DNA replication origin
agcacactccctcggaggcctggcagggcccctgctttaccctgccccccacgccccgccccgacccgaccctcccaggcagcccctcagcgtctgccgcccgcccttgggcctttccggccagcccctccctccgcccacgcccagaacagcccatgctcttggaggagagcaggtgggcttgaccgggactggcccctcaccgcggaaggcgtggccggaatgctcggcccactccgtctttggcttgtgggctctgcctcgtgcaccgcgtgctgcagcccacagccggccgccgccgggctggcgcgagagtggagggtggcagtgcgcaggcgcggagcggaaaagagggggcgtgaagggggcggagccaggcagggttgggggagggggtgatgtactgtgggggcaggggggaaggggagtagggagggggagggggagcacggatgaggaggaccccagagggggcactggtggacctgggggggtggatgaggaggggaggagggtcccatacagggcactgggagacctggggtgggggtggataaggagaggaggagagcctgcagggcactggaagactgggtagtgggggagcgcctaaggaggggaggagggtcctgcaggggcacggaaataccttggggttgaagtggatgaggaagggaggagggccccgcagggggcgctgggagacccgggggggaagtaaggagggcacgagggcctgcagggggcctgggagatctgagggggaatggataaggaggggaggagggcccacaggaggcactgagatactggggggaggggtggaatgagggggggaggggtggaatgaggcggggaggatagccctgcaggggggctgggagacctgaggggggtggtgggtaatggataaggaggggaggggggcctgcagggggcctgtgacacctaggggaggggaatggataaggagggtaggagggccaacaggaggcactgagataccagggggaggggtggaatgaggaggggagagccctgcaggggggcggggagacctgaggtgagggtaatggataaggaggggaggagggtctgcaggggttcttgggagacctgggggatgaataggagaggacaaggggaggagggtctgcagggggccctgggagccctgcggggggcgaggggtgggggaatggataaggaggggaggagggcctgcaaggggtgctgggagacttgggggaggggaatggataaggaggggaggagggcctgcaaggggtgctgggagacctgggggaggggaatggataaggagaggaggagggcccgcaggaggcactgagagactggggggaggggtggaatgaggaggggaggagagccctgcagggggcgctgggataccttgtgggggaatggataaggaggggagggggtcctgcagggggcgctgggagacctaggggaggggaatggataagggtgggaggagggcccgcaggaggcactgagatactggggggaggggtggaatgaggaggggaggagagccctgtagggggcgctgggagaccttggggggaatggataaggaggggaagagggccctcagggggcgctgggagacctgggggggaaatggataaggaggggaggatggccgcaaggggcactgggagacgctggcggggaatggataaggagtggaggggggcctgcaaggggcgctgggagacctggaggggaaaggataaggagggaggagggcctggagagggcgctgggagacttgggcgggggtggagggaatggataaggaggggagaagggcctgcagggggcactgagacctggtggggaatggataaggagggaggagggcctgcagggggcgctggggaacctggggggcttggataagaaggggaggagggcctgcagggggcgctgggagacctaggcggggcaggggtggggaatgggtaaggagggaagaagggccttgcagggggcgctgggagacctggggtcggggggaggataaggaggggcaatgggagaggatggggaatggggtgcttagagacttgggtgggaaatggacgcagcagggactgggcggggagagaccttacaagggttccaggagatgggttggggtgggctggacagggcagagtggagggtgaggagggccctctgtgagccacagagacctgagcaggagctaggtgggggctgggaatgtgcaggaaaggagacgtggaaggagggggagatagggcggcaggggtgatggagattgacagggaccccagacatgggggtagggaaatggggatggaaataaatggaaaaaaagaggcttcgtggtgggaaagaggaggaactccgagggctccggggcactgaggtgtgcagagttgccgggtcctgagtaccctcgagggagcagagggagctcgaggaacgaggaagagaggggacgacgagggcaaagaagggagaacgtaggcgggtgtggaggaggatgagcgtccgagggagaagacggaggagttgagcagagaaagggcaggaatgtgggggctggaaagggtgaggaggcagccgatggagcaggggtgcatcggagttcatgggtacttcccaggagctcatttaaggcaggtgggagggcgggggacgtggaggggcggccacactgtgaacggactgaagcccacttaactgttcactctaaagtggttcagttcgttacgtgtgttttcacttcaatcaattgcttttaatggaaattaatcatattgatggtctccagaagaagttgggttgatacctgcaaccagattttaaaaatgcaaatttggagccaatgagtgaatgaaataatttgtacctcactgattcttttaaggcatagcttacaacgttccagaaactgttctatttgttttcacttttgtttcaaaatcttaatggcattttgtttgctgattgtgaataaatatttgtatgctgcgaaaagcaaatccaaaaccaacagctcaaaggagaaagtgtggcaaacaggagattggagattggaccccaaaactcctggagtgacgaaaattgacctggatgaagaaatggctttctcttggccttcttttgtttaaacatatcttccagtcctggggatggatttccctcccatccatagccagagaactttctgtatccatc

SEQ ID NO: 39213 - DNA, 1038 bp, Artificial sequence
  DNA replication origin
tgctcccattgcagagaagaaaatcaaaccgaggtacagagacgttaagtcatttgctccaggacacacaggaaatgacagagctgggacttgagctccatggtggctccgagtctgtgtgttgacccccctgcctgcagcaccgtttatatttggtcctgactatgatttgaagtaggcaggggtttcatgcagaccagcggttcttcagctgtggttcttccccagcgacagcagcagcacctgggaatttgtctgaaagagtgatttgggtggcccacccccagagctcgattctgtgggtcttgaggtgggcccgggaggttctagtgcatgctccagttcgagaaccactggcataggcgagtggtgtagacacgacgtgcgggagaggaatgggaggcagcagaggggtctccatcccagggaagagaggcttcaggggagagaagggggcgcggggggtggaaaggggtcagattcaggccacatttggggttgagccgacagacttggagatggatggggtgttgggggtgaggggaagaaaaaccaaagatgacccctagatgtttggcttctgccagcaagtggatctcagcaccatcctgagtggggaacaccagggaagctggctgggcagggccgaggggtccatgtgaaaatgagggggtggcatgcattcaaggggggctgcccccttgacaattctgctttgcccccctccccaaccctgcattttcccgaggcaagtctctttctgggaacctgactccctctgagaacaggcctggctgagcagcctggggaggagtggttggggcagtagccagggccactgggtggtgtgggggaggggtggtgcacacgctgcaaagtccagtcctgtggcctgtgaagcgagcaacaactgtggtactcggggaacctctgttcctggaaggaatgatcaggcagaggctagctcaccccacaccctggctgtgatgtcctgactccgaaacatctaaagctcagcggggcaaaaaaagatagctg

SEQ ID NO: 39214 - DNA, 1880 bp, Artificial sequence
  DNA replication origin
gtcatatgcttcacagggctgttttgtgttcaacaggtggtctttgtaaagcactccacgcagggctcggcctgtggtcagcccttggtaactgtcagctttgttaccattcaaaggaccacagggtgtgggacaagagcactgcggccccccaggcctgtgctctcgtcaccggctgcaggatgggggcctgttctcgtcacctgccgaagggctgaaatgcctccttgggggtcatggtggggcctgacttattgggtgccgagttagatcaccctttgctattcatgaggctgtggctgtgccaggaaccacgggcgctgtgacaacacagccacgtcccctgacacccactgacgtcccctgctctggggctctccaccgatgatctcatttaaccccgttttgcggatgggaaaactgagactcagggattcaatgacacttgtaacatctcacacctggtcagtggcggagccctctggggcccaggcctggctgccactcggggaggtcttgttgggggcctctttcctttgtcagtgactccaggacctctgggcagagtgggaggaggtgacattcagcagagtgtggccgtggtgctgtgtgtgtgagatgggaagcagttgccctgtctggaggcctgggccctacctgggcactgagctgtgtgtatgtgtgtgtggtgcacgctggtggggggtgctgaggttcaaggtagcgggtcacttgggcatgtcacagcacagagggtaaacccgctgtccaccaggcttggggcagatatggcttctgaatccatcctacctgagcacattgtcagactcaaacaaggagctagactaggagtcagagaaggaggggccagatggagagaagggggtggctcaggatggggcgtggtgagggaccattacccacagcactgatgcggccgcaccaacgaggcaggcccctgctagtttcatcctgaacacagatgatcaccccattttgcacatgtggaaacggaggcgcaggaggactaggtacttgcccaaggtcacacagctagaaaatggttgggcaaaaccttgagtctggggtggtccaagtttgtatctttggccctacactgttgtgtagacctgggaggcatccacccacttggtgagccagagaggggcctgtgggctgactgtaagctcaaatgggccctctcttcaggtcctgcaaatgaggcaccgccccacctccctacctcccagacaggggttgatgatgtgggttttcttccacacttggaggtcgactgtactcattttgtgccctgggtttaatcctagagggccattcactggctgtgtgaccttgggcaagtagcttaacctctctgtgcctcagttttctccatgtgaaacggggtaaagattcctttcttcgtggagtcggtgggaggatgaagtgagttagtgcctgcgggagtccggggggcatcagctcccgcagggtcgggacttcgatgccacagatgggcttgcaggtagggtccttgggagtcacgcaggagctggactggggacttgagcgggggtacccaggttgcaggggtgttccccacgatagaagaaaatcagcctctgaagggtgctgggtttgtgctccttcccccaaatttggggcacgggcatcagccagaaaggagcccgcccccggcccgggagggcagaacaggaactttcacctggggcctgtggaccggctgcaggcttatgtgcaccaccccggaaccgtgggggaaacacgtgtgtctggctgctttgtggggaaggaacaggagggggtcacacgggatcccccccaccccgcctgaccccacctcaggccctggaagtttc

SEQ ID NO: 39215 - DNA, 848 bp, Artificial sequence
  DNA replication origin
acctcagtttcctcatttgtaaaatgagcagagaagcagaggctgggccaactggagcagggtgatggtttgagactggaatggtgtttagggaggatggaagacaggtgccgtactaggagctgtggctgcagtgaccagagggccccaggcagaggcctcccccacactgggaatgcagagatgggctgggggagaagaaccagcagagaagccagagagggaggaggaaagcagaggccccgggaaaggagtctccagagaggggccaggctggtgagaccagggaagcatctgtggggttcagcgagagggatcgtggtaaccttgagggggtggtttctgggggccagggagcagaagaggtctcgggggtggagggggcgggactcagtgtggatgattcttcagaagtttgggtgggaaagggcagagccagatggcaggagctggggccaggctgggagcccccataagatttcaaccaaaagtgggggccagtgttccagtgcagtgggaagcaggcagcagaggagagaggagctgaatcccagaggaagacactgacgtccagatcagccgggcgggatcagtggggcagacccactgcgggatcagtggagcagaaagacgcttcccagacagcacaacagcacgagcggaggtgtggcgggtggaggtgtggcgggcaggcacaggctgtgctcctgggatggtgtgggccactggtgggagatctggggaggagggtgaaccaggctgggggtcagggttcccggccactgtccagctgctcctggctccaggcctctctccctttgacccacagtctctgccactgctgccgg

SEQ ID NO: 39216 - DNA, 1078 bp, Artificial sequence
  DNA replication origin
catcaggtcactgtcgaagatggttctgtttgggggtgcgcgcaccgactcccggttcagttccagctgctgctcggggtcccgaagctggagggtgcaggggccctggtagggtgggggctcctccccgtctgacagcgagatggtgggtggcaggtcgatctcgtgctgcaggtacggataggtgggctggaagcggtggaagcgctcccgctgggcgaagggcggcacggccaggcggtcggtgggccgaggcggggcgtagacctgcggctggaggaagcagagcgggagtgagggagggcggctgtctcaggtgggttgtccagaagcgatcctgagactggagttctgctgcatgggacttggctctctggggaaagggagagggcagcagggctggcgggggcgggagcccagagcctgatcccgcgggggccctggcctggggggcagcactgcagagctgcaccgccctcctccaaacagtggcagcgtccgtgctcccgtgtgcagagagcagagagctgggctgctccctcaggggcagggagcagatgatctccggcaaggaggatcccagcagcaagggcactgcagaggagggcggaggggtgagcctttagcagcccacactgttccagccgcagcgggagcagcccagggtgggatgggggtgttggaggggaggccgagggaggtctcacctctgggattccgttgcctgacactgtgctctccgagggccacaggcatccttcctgcacaggaagaaacgtacaagcagggtcagtggggtgggcaggagggacagcaaaggctcaacccagattcgactcttaggcctttaccctggaatcagctcttgaacccgcccacctctctgcatcggaaccagcttccccagcccctggccctgggcgcttttccaggacgtgagcgcaatcacctcctcactgatccctgaggtgccctctgctgtcccctgaaaatccagcctgacactttccaaaacatacacccacttgtggggcccccttctcaaagctgcctgtagcttcccgtgggcctcagtggc

SEQ ID NO: 39217 - DNA, 1323 bp, Artificial sequence
  DNA replication origin
cccatgccagccggggtctggggagtcacattcctgcacaccttgggcagggtgtcctgggcagggcgaagctggaggagctttggccccggacgctgccggctggtgcccactctgccgtgtcaactccaagggacccggcgtcttgcccattgctgggggctctgctggcaccgtgctcggccagctgccgaggccgcttcggcacagacccgcttgagtcagcagaaactgcccggctcaggcaggatcaaaataaccttcttcctattccagcacttgagggtttttccgccttctaggggaaaaacaaatcaaaaaccaaaaaagaaaaaacaaaaaaacccaaccttagaaaatgcgaatggcaacatccgcagccatctggaatgtgggttttctgaggccttttcaccaagaggagggtcctgacacccccgtcctgttgagcgtggcgtgtgtttgtgagtcctgggatggatgtgtgtgtgtgggcacgtgtggtgcgctgtgtctgtgtgtgtttgtgtctgttgggaagtgtgtgttgggatgttgacttgggtgtgggactgttgaggggtgtgtgttggggtgttgatatgtgtgtaggagtgttgggtcgtgtgttggtgttgacgtgtgtgtaggagtgttggagtatgtagtgttgttgacgtgtgtgtaggagtgttggggtgttgtgtgtggaggagtgttggggtgttgtgtgtgtaggagtgttaggggtacgtgttggggtgttatttgtgtaggagtgttgggtcatgtgttggtgttgatgtgtgtgtaggagtgttggagtatgtagtgttggggtgttgtgtgtgtaggagtgttaggggtacgtgttggggtgttatttgtgtaggagtgttgggtcatgtgttggtgttgacgtgtgtgtaggagtgttggagtatgtagcgttgttgacgtgtgtgtaggagtgttggggtgttgtgtgtgtaggagtgttggggtgttttgtgtgtaggagtgttaggggtacgtgttggggtgttatttgtgtaggagtgttgggtgtgtgttggtgttgacgtgtacttaggagcgttgtgtgtgtaggagtgttggggcatttgtgttggtgttgtgtgtgtaggagtgttggtgtgttgacatatgtgtaggagtgtcaggtgtgcataggtttgtgtacacacgttcacatgtagctcctctttgtttaattccacaaagcttcactcccaaactcagtgccaacttcctctctccgcactcaggggtccccttctcctcccaactgctccctccctg

SEQ ID NO: 39218 - DNA, 1915 bp, Artificial sequence
  DNA replication origin
atgcggggccccagctccgggcgccggccggagccccccccggccgcccccgagccccccgcgccccgcgccgcgccgccgcgccgtccatgcaccgcttgatgggggtcaacagcaccgccgccgccgccgccgggcagcccaatgtctcctgcacgtgcaactgcaaacgctctttgttccagagcatggagatcagtgagtgaccccacgcccccctccccggagactccatcgggctcggaccctatgtcggggcacagctgcgagcgggggtccgggccctgcgcgccccctcggaccgaacgccctgcgcccgggcagcgcccgccgcgccccgggcgcgccctcccggctcgcggcagctggcggccggcccggctttgtcccgcggcgctgcgagcctggcacggcccccgctgtccgcgccccgcccgcccggactcggacccggggctcagcggcggcgcacggcgcgggagggttggggcgggcggatccgtgaagtttccattttatttccctgagggcagtcgcgatggagcatttaggccggctctttatcaactttgggcgggggtggaggggcgtgtgagacactgtctggtctgcgaggtgtctggggctccgggcgtgtgtctggagtgttcgcggcgctgtgtctcgggctctgagtggatgtccgtgcgtctgtggagtgtgcgtggctgcgtggctctgtctgggtcttcggcgtctctcggggtgtctgggggtctgagtcgcggtcttgcccaagagtgcgtgtcaccgagtcttcctgcctctctctgtgtgtctttcccgtgtccgggccggggtgcctttcttgagcgtgtccatctttctgggggtctggtctggttgggccggatctggggaccgtgtgtgtccaggtgtctgaatccagggctcagctctggcccgtctggcccagcgtggatcttgaatgtgtgtgtgtcattgtgccagtgtctgtgtccccgacgcacctataaatagcctctgtctggacagcttggttcagtctggctgagaccatggttacaaaggagtcaaagtttggggctgtttgtgtttgggactgcctggccctaaataagggatcagtggaccaacggtggggagtggggttttgaaccttgtcgctaacgcagccgcctgggcacccaaaagttcagataagtaagtctctacctcctgcacacacagcccacctaggtggacatttggttgagtggagaattgaaccactacctcccgggttctggcttctagcttctagcctacaccttgtcccccagcccaccttttcggggaccttttgcttccctgagctttagtttccccatccccaccctgaagaagcacgccaggtgaaggggcacacagtccttccctgctgggggccaggctgcccctagctggggcccggagctgagaagcagccgctgtggaatgaaggcagtgtctgggcggctcataagcaagtgtccgcaggcggctgccagtttgtggcccctgagcctatacagtgagcttcaagtggtaaaaataaccaggctggccgggctttggtggtgggtccttccatccatccacctctccacactccctcccagcctggaatggaaagctctccccctaccccaccttagctggcctgtgccagactagcgaggtgccaggaggacctgcccagagccagcgtttgcggaaccgacttgccttcccagaggccctttgtgaactcaggaggctaatgaaatgcacgagaatgttattaaaatacgttcgcacacgtttggagagtcttgccttagatggattgctgcttcagtgccctccttgcctcactttttgcctttcgctctgtaaagctgccttgaggacctcc

SEQ ID NO: 39219 - DNA, 1265 bp, Artificial sequence
  DNA replication origin
tgccgccggggctgagcctctgccgctagctttccccagccgagcgcctccgccgccgccgccgccgccgcctcctcctcctcattcaagtccaaggagatcgggtttcgctccgagaccgcggtcggaggcaggcagacggtctgacgtcagcgctagacggggctgccggttcccaccgcgcgggggccggggagggggcgcgcgctgcgccaatccccgccgaggttcccccgcaccccctccccgagccggggggcggggtgacgggaaacggggcgggctcttaaagggccagagctaggcggcccacgtagacccggcacccgcgcaacggaggaggggcgctgtgccctctccccaacggcggtcagcttggaacgcctgcccggcgcacgcccggggccggggagccgaactcggtgccagccgcacccgggcgggttgctggtgcgccctcccctcgcccccgtccctggggtccttgacccaggctcttggggctagcctatcttctgaggagcacaaggtccctgggggctcagggaagagaaattggagaaagggggaggaagcccccaagatggatcacccattgcctggtttcgcaggagactgtccgccttcagttctccagcagctcggggatcatggcccactgaacccccaagcgctttcacccgaacccaaggaggacgaccaggaaagacgggaactcgcgtagacacgcccggaagcccttgtcatgtaaatagctgtcggggactggtgtattgtcgccgccccagccggcgggacctggggcgaatccacacccattgtctgctgcccaaggggcctccggctggggggcgcggctgcggagttcaaaaggggtatgagcaggaggggtgtacttttagttcattaagttttaattacaggagtgctacaagaacacattcttcaggtttaaaaagatattaaaatattacataagagacctcccctccctggcccacctccagcctcttaaaaatttagtgtgtcgccttttagacactttctcaaagcttcacttatttaacaggcacttaaggagcacctacctgtgccagaaactctccaaatattaactcaacctgacaccgactcagtgtggccgaatattactctccccattttacagagcgggcagctggtcaaggaagtcgcttgttgaaagtcacacagtggtggagcctgtgtgccaacccaggaccctggggagctgcctccccctctcc

SEQ ID NO: 39220 - DNA, 609 bp, Artificial sequence
  DNA replication origin
tgaaagaatggatgggcatgtggatagatagacgaatggacaggcaggtgtctgggcaaattgatggatggataaatggatgggtggataaatggatggatggatggatggatggatggataggtggatggatggatgaataggtggatggatggatggatggacggatggatggatggatggataggtggatgaatggatcaataggtagatggatggatgaataggtggatgggtggatggatggatggaaagaagaataggtggatggatggataaatagttggatggatggatggatggatggatggatggatagatagataagcgggcgggtgggtggatgaatagatttctggatagatggatgggtgggtggatggatggatgggtggatggatggctggatggatagatggatgataggtggatgggtgggtggttagatgggtagatgggcgaataggtggatacagggatgaacagatgggtggggactagctgcaagtgtcctgatttgatttctgttgttggggacaggcattctcacagcccaggacagtcgcaagagcagtcgtcttctgggcccctgtgcagctggctgtgctc

SEQ ID NO: 39221 - DNA, 870 bp, Artificial sequence
  DNA replication origin
ggcccacttcccagagagccctggcctccccctcacccgtgggaggtacaggaggaatgaaaaagctaaaatcatgggcctggaggaatgaatggagaaccagacaaaatgaacccattggccctggagggcaggacagctgcggctttggggcttgagtctgcaaacatctgcccctccccagacacccaggctggggtgaaatgggcctgattgggaggggtgcttcacccaccctgtgaaatcatcaagagtgagaatagtcaccagccacatgcttcccagcaaccattgccaggatgctcctcaagcctgccggggtctgaggggaggggactccaagacccagcagcaggggtgggtgaaggagggggatggagggtggggaaggtggggtggatgacggggatgtgggtggagaggaggggatggagggtgggatgggaggggtggagaggaatagcggggtgggtggagaggaggggatggaggatggatgggaggggtggagagggatggggtgggtggacgcaggagtggaggcgagagtggaggtggggaggtggggtagggtgggacaagatgtgtgtggatggagaacatgtggggtacggcaggctgaggggcagtgacacagcacgcaccaccctttccttcagctaggcctgcccctagtccccccagccccccgagcagaccccaccctcctcagcaacgcacaccaaggcctgtggacccctccagccacctcccagtgcccagctctcctgcctctgccctgctgccctccagccacgctggcctctttctgttccttgaaggccccaggctctatcccagccctggcctttgccccggtggctccctctg

SEQ ID NO: 39222 - DNA, 784 bp, Artificial sequence
  DNA replication origin
ggtagggtgggacaagatgtgtgtggatggagaacatgtggggtacggcaggctgaggggcagtgacacagcacgcaccaccctttccttcagctaggcctgcccctagtccccccagccccccgagcagaccccaccctcctcagcaacgcacaccaaggcctgtggacccctccagccacctcccagtgcccagctctcctgcctctgccctgctgccctccagccacgctggcctctttctgttccttgaaggccccaggctctatcccagccctggcctttgccccggtggctccctctgcctggaaggccttcagtcccctgtcccatggacactacctagtgcatggcagagccaggctgtggcccaggtcttcggtctgaggaggccgtgggcttcagtatttcaccatgtcgttaccaccgtgcactcaccaacttggacagcttagtggctgcccggggccaccacagctccaagagggaggggctcaggggagttctgcctctccggatcacaggctgtgggcaggaagtgacttaccagggtcccatagttagttcgggaatctatgactcttatccctgccctggaggtggggtctgccctctgtgacttcactcggctccctctcctgttctcaccaactctgaccctggaaggaaggacagaagggagggagggagagatgactgtcccatccatgggcaatcaatgatgtccacaggcacagaattgagtggacccagggaaggaggaagagaaggagaaagtagggga

SEQ ID NO: 39223 - DNA, 983 bp, Artificial sequence
  DNA replication origin
aagaaatattcattcactcattccacaaatatttatctggtgcccactctgtgtaaggcacaacccgaggcaccaaggagacagaggcaaacaaaatccaattcctcatgccaggtatttacattatagtgtcaggagatgagcagcaaatgaatgaacaagctgacgctgatgcagacatggctttctcaaagtgctgtagagaagtgtattcttttgaaggcaaaggacagttcagccagtgaagttgtgtggagggagtgagatagctcgatcaaacctaaagagacttgtggaccttggagagtcttaggcttttatttttggtgagaaaaaaacaatgggaagatcttgagcaaatcagcgacaaggtgaggcttatactttcacagacctttggctgctgtgggctacagcctggtgagcggggtgggcagaggggcagctcagcacagtgacagtcaccccagggaagtttgatgacctgaaccaatttagcagaggtggagggggtgagaggtggttgatggaactgatcggatttgtggatggatcagatgttgggggaggaagaaagagaaagtgtgagaggtcaaggaggaccccaaggcaagagaaacaggaagaatgggatttgcattggtggggcatgggaggtttggtggggctggagcacgggaggttcaggggagctggggcatgggaggttttgtggggctggaccacaggaggttcgggggagctggggcatgggaggtttggtgggggcatcaggagtgtcagtctaggctgtggattgagccaacactcaggcatccacaagagtcaagcaagagggtttttcttgaaaagcagagagaactttccatcatctttgttgctaattcagataagccggcagcatgggtggggtgggggtcgagtctgtgggtccagaggcagagggaaaataactggtgcccgaggggaggtaggacccaggt

SEQ ID NO: 39224 - DNA, 1144 bp, Artificial sequence
  DNA replication origin
ggactgcccaactgtgggagtgtccttcaaaaggtcaccccttcctggggctgccgggcacagactggggcaggctgggcccgaaggctgggctgggagggcaggatcagctgccggctgagcctcttgccagctggcctcagccacccaccccccggccctcttgctattcctgcttctcccgtccacttcctttgacagctgttggtccctaataatatgtcaggccccaaattccacttcagcagctgcttttgaagagcccgatgacgactccacgttctccctctcagtccagctgagagggacagacatcaatgcagggatcaaagaagtaaattaaatattgcagctgaaatccctgctaaaagagggagctgccccaacccatgagaggatgtcagggcagggtggggccccgggcagcaagtcaggaaggggtgttcctccaggatgagctcctaggatccggggggatggtggggttgcctgggtgaggagaaggcacaggtgcaggctctcggggaggctttggggaggagagggaaggctggcatgggggtagggggcaggaaagtttatgtcatggagctggggagttgccagggtggaccactgtgcagagacgcttgggcaagagcaaaggttttggtcattatcctaagattgacgtgttttaaacctggggtggtcggatcagatttgcattgtaaaaaggtcattcagccctctgggaagtagcacagaggccgtgtggtgctgaaaggggtgttttggactatttgggccacaaggagccccagtccttcctggagaagaaagagccatctgaggagggtgtgcagcagagggaggggttacagccaagagcttttctgcgtccccactgcctgggttgggggcagccttccagcccccggggtgagtgtttcacagaagagctcagctatcaggcttctgcccaaagagagtccatgagggaatattcaccagagtttgtgagtgccaggggcaaagcagtgtgctgtcattgatttttccaaacctgggggccttccgaggcccagaggcaccagcagagtacagacgagtggaggcaaatgcagatgcagtcaccatagccccaggtgccggtgttccccag

SEQ ID NO: 39225 - DNA, 900 bp, Artificial sequence
  DNA replication origin
cttgacttgggaaagaatctgacccccgcaggtaaggggaagagccagggtctacgctcatcttccgaaggtgtttttcacctctccaagtcccggtcacttcatctcttagatgggagttaatttagtcaacaaatattgattgccatgttcctatgtgttggacactggggtttagtggtgagctagatggacatggtccctgttctcacaatgctctcttttaaataagagaggtgaacaagaagtgaataaatgaatctacgcacagtgcgatggctgtcaggcagagaaaggtgctataaagaaaggtaagaccaggtaagggggtggagagttgtgagtctggtggtggtggtggtggtggtggtgttttgcctgagcagtcagggaggactgcttagaggaggtggcatttgagcagggttggaagaaagtgagggagagaggagctgggagactgttttggagaagagccatccaggcaaaggcacctcaagggcaagggtcctgagaagggtttttgttgggggagcaagagggaggaaaagggagcaatgagattcttggggctgggccaggtcatgcaggcttgcaggctcagaagggaagggttcttgggctgtgtggcaacaggctcagattcccatgttaaaagcatcattctggctgtgaactggagaagggacagtggagtgcagggggagaggctggagtaatgatggcccaagccaggctggtggcagtggaagtgtggagaaaacagcgcaggaaatgcacagggcaccaggcagggtgctgattcctcagggggtgcaggaagcttttgttccatggtgggcacgttcccaacgctgtttcccttggaagttgtcccttttccacccccgagcacctcca

SEQ ID NO: 39226 - DNA, 870 bp, Artificial sequence
  DNA replication origin
cacatggtagtggtggctgaggctcggcggactgctttggtgaaggagatgagacctgtgagagctgcttagcgatttttgttgcaaactgaggaagtatctggggtggattagggcccagactagggagggagctgggattgctgtactttcacagagggttttctttcccagggtatggggccaacacttggtcatggggctttggtttctccaggtgtagggaaggacccttggcccctctgcttcaaggcaagcccgttgtgtctgaccccaggcagcaggggagggtttgggcccactaccctggtggtcctccccggggtgaggacagaggcttgagaatcccccacttggtgagggggaaggagggaattctgggagtcaggagggtgacaggccctggcaggtgggggtcttggctagtaccttcctgccagaacaggattccacaagccagacagatgggggagaaggtgggggtgggggaagactgacggcatgtgacagcgatggctgggttttttgttggcgtctggctggtgaccttttgggggaatggattcagaagtgactgctatttgtcaaggcccagttcagagatgccagtgggggtcacctcctcaggattaaatgtcagggccctactgttgctggaagtgggatatacatccctgcaggacacaggctggttggggcttggcagtctcctgagcccaggcgtgtctgcagaaatgcaggtgtgcctacctcatgtgctgtgatgttaatttgtgacttgctcttgtgtgtgtgtgtgtgtgtttcctttctcctcttcccagaaggcagtggaactccttcatcagggttttgtggtatggagtgggg

SEQ ID NO: 39227 - DNA, 1530 bp, Artificial sequence
  DNA replication origin
tcccagaaaccgcccttgaccaagcatcctgccaggagctccctttagctacattttcccaactaacgtgtccaagtgtgcttttatctgaaagccttacttttttatggttttcttttcaaattatgaaaattaatgcatatttacctactgtagaaaatgagtgagacataaaacacacaaagaggaaagtagggttcccctgccagacttggccgggactgagaaagtgaactgccctctgtgggagtgactcttgaaagccttgggatgtgctcctggcttccccaaacatgcccacattccataatatctagtttccatcttaagccactgtcctgggaggaatccaggcccccatcacttattcactccctcattccagacctgggttcgaatcctagcagccccgtgaccacctccccggcttcctcatcacaatatggggctgttgcaaggatttgatgaagttcaccccacaaagccctttccacaacgtctgcctacagtaagtgctcaagaaacagcaccaatgaatgttaacatcaccaccatcacagtggtatcaagggtctctgcttaacagaggcatggtctgaagtgaggatttgagggcaggtagtttataggggaggtggtcccaggaagtccaaggagtaggcaggtgagactgaggaggctaatcaaggtgtcatcaaggccagctgccacatgggccccagaggagaggtgctggacaccctcagggttatctcacctgtggggcaagggagctggggtatttatcctccgttcccaccatcactggctgggggctgctcttgggggaacttagcttcctgggatgtgggtccagactggaatggtgagtacagggaactgggcagaaccagtgcaggtgctgttcagtgctggatctgtgcttggaggtggggacacagacaattcaggttctaggctctccagggactccccctggagactggaaggtggacctaggagtggagactcatattgctgcagccattcacaaaatgcttcctcttctctccgtatttctccctcactcttcattgccacaaacaggacaggggccccaggggcagggtcatgcactccgccctggctcctggtcacgctcccacctcggcaaccccccggagttcagtggagaccctgcatcctgggtccacaccagccttgttcacaagacaaggtgacagaggccatgcgttcagatgtggagcagggagacttgagtatgactcgaccttttacctgatggtcccgggacttcgggaggagatctgccctgctgagcctctgcttctacatctgcaaagtgagacttacaggcttggccgcctctttaggctgcgtgaagaatctggagatacagggaacattcaacacacactgagtgcctgggtctgctcatggtttcccaattcagatccaagaaaagcacgctgctgccccgcaagaccagaacacagagcccctccctccccaggagccggacctgagcag

SEQ ID NO: 39228 - DNA, 2272 bp, Artificial sequence
  DNA replication origin
cttgatatctgcagagacagctcctgccctcacaaagctgcttgggtgacaggacagcttgagagaagacagcgcggctgggctgtgcccagaaggaatccacagagtgacgtggccgagggtgactgagggggatttaggtgggcgcagtgctggagtggctgcccagaggaggtaagacgacaccgagacttgaggaacagggaaaatctggcaggtttagaaccttccagaagctgctgacatgagaggatggttaccaaagagggccataggggtaaaagacagggttagaacagtgggcagaggccggtcaggcagtgcctcaggggctgtgtggccagctagtgccacagtcctgctgcgtaaacaaagctgagcgtttctactaacaggccagcaggtctgcgggggcctgaggggtccaggctggttgcagctgggcagctctgctgcaggcgtctctcactgtcctggcaccagcaggtcggccggggcacaggctccacaagcagggacgtgggaagtggagacctaggaggcgtcgacgtgggaggcgtcttcaggtgcgggcacagacgcggggatgtggggtgcggggatgtgggaggcgtcttcaggtgtgggtgcagacgtggggagcggggacgtgggaggcgtcttcaggtgcgggcgcagacgtggggacgtgggaggcgtcttcaggtgcgggcgcagacgtggggacgtggggtgcggggacgtgggaggtgtcttcaggtgtgggtgcagacgtgggaggcgtcttcaggtgtgggcgcagatgtggggagtggggacgtgggaggcgtcttcaggtgcggcgcagacgggacgtgggaggcgtcttcaggtgtgggcgcagacgtggggtgcggggacgtgggaggtgtcttcaggtgtgggtgcagacgtgggaggcgtcttcaggtgtgggcgcagatgtggggagtggggacgtgggaggcgtcttcaggtgcggacgcagacgggacgtgggaggcgtcttcaggtgtgggcgcagacgtggggacttggggtgcggggacgtgggaggcgtcttcaggtgcgggcgcagacgtggggacgtggggtgcggggacgtgggaggtgtcttcaggtgtgggtgcagacgtggggtgcggggacgtgggaggcgtcttcaggtgcggacgcagacgtggggacgtgggaggcgtcttcaggtgtgggcgcggacgtggggagcggggacgtgggaggcgtcttcaggggcgggcgcagacctgttatgccgtcactcctggctgtaggtgggaagccaagcgagtcgagtggccaagctgaaagtcgagggtcagggagcgatgcctccctccgatgaggccacggcgaggggcagaggcagagaggctgaagaattggaaccgacgtcttaatcccacagaggccgtagaaatgggcttggattttgttccaggagcagtggagagtgactggcgggcttaggaggggaacggtgtgattttctccatatttttaagggaatggttggcaggaggcaagagtggggtcattaggccagtcagggctaatgctgctgtccaggtgagagcggctggcagccaggccagaaggactgtcaggggagatggagccgagggggcacaccccagaaaaatgggtatgggattggagcaaagtggggatcccagcaggcaccctgctctgtggatggagtgaccgagagaatggtggttcgtttacccaggaggagaccctggggatggggaagacctatggtggagttcaagggctctgcgtaagtcaccctatgagcttcttgtggctgctgtcacaaattactgcaaactcaataacttaaaaacagttgtggaggttagaagtctgatatccaggtgtcggcagaggttgaatggactcaaagttccacatggctggggaggcctcacagtcatggctgaaggctaattaggagcaaagtcacattttacatggtggcaggcaagggaagcatgtacgtgggaactcccctttataaaaccatcagatcttgtgagacttattcactaccacgagagcagcatgggaaagatccacccccatgattcaattacctcccaccgggtccctcccacaacacgtgggaattatgggagctacaattcaaggtgagatttgggtggggacacagcaaaaccatatcacctgcgttttctcagatcagggtcttctcccactaaacacactctat

SEQ ID NO: 39229 - DNA, 2177 bp, Artificial sequence
  DNA replication origin
ttcctgtgagggcagtttactctggatttggggttctgattaaagtaaggtttgctgtctgtttggggtcctgatgtgaaaaggtctgttctgggatttggagtcctcgtatgggcaggacttgttttgggatgtggggatctgatgtagccccgagtagtgtagcatttggagggtaggaatcgagcacatctgccctgagatttgggggtcttcatggtgataaaatctgctcaaaatttgggctcctgctatatgcagggtttggtctggaatttggggttctggtataaataaggttggctgaaggatttgggttacatatacaagaaaagtttgctttgagttttggggtactcatggaggcaaggttttgtttgaaccttgacttcctgacatggacatggccagcttcaaccttggagtgctgatgtagacacggtttcgtatctgggggttcagatatgtgtgggtttgacttgagctttggggtcctgctgtggacagagtttgcttcattctttggagcccttatgaagatactttgaggggatttgggttctggtatggtcatggtgagctcggtgactgccttttagatgtgagcagagttagctttgaattttggggtccatatgtgggcagggttcattttgggctctgtcatccttatgtagacagaagtggctaatggattggggttcagatgcacaaatggttagttggaggccgggggtccagaattgggcaattgagggtcatgacgtgggtagagtctgctctgggatttagggttctgttatggccaggcatagcttcagggtttgaggctgaaacatgggcagaagttgcatagagatatatggggtcttgaggcaggcagcgtttgtttcggatcttggcatccttgtgtggacatggttgtggaggattcggggttctaatagtcacataattagtctggcaatttgggatttcagatttagccaggtttgttcttggttttggggtcctaaactggacagagtttgtttcagctttgacctctttgcctggacacagttgttgaaggatctggggttctgaggtagtcatggttagcctggagattaggggttgagtcttgggctggtttgttgattttggggtcctgagatggacagggtttgttttgatttggcatccttgcaagacaaaagtggctggaaaatctggggttctgaggtagtcatgggtagcctggagatttggggttcagttgggcatgtgtgctctggattttggggtcctgaggtggtcaaggtttgttcaagccctggcatcctgggggggatgtggtagctggaggatttggggttctgaagtagtcatggttagcctagagatttggggttcggtgttgggcaattttattctggatttgtgggtcctgaggtcagcagggtttgtttcaggtttggcatgcttgcgtggacatggttggctagaggatttggggttctaatgttctcaagaccagcatggaggaggacttggggtttgctttgagtttggggtactgacatgggcaggcttgccttgggtttgggggttctgctgaggacaggccttgtttcagacaagtcttacatgaacagagttggctttgggacctgggttccttatgaagacatggggagcctgagggtctggcttctggggggtcctggcttggacaggatttgctcagggttggcagatgcagcccgatccaggcaggacctgcttgtggattagggtcctgctgtggacaaggtttgccttgattgggagtccaatttgaacgccgtgtgtttgagattgggaagtccctctgtggccaggaccctaagtggcccttccatctgggtttcagggtggttgggtttcaggggtttgctttgacatctggggtttctcacgtaagcaggcttccctttgggaatccacttcagaagtggacagggtgcccttgcatgtggccagggaaggagtcagggcaggagccaccttcgtcgaggtactggagccgctggaggttgaaggggatgccgaccatcaggtccagctcctctttgagctcccgcacggtcatgtcgccgcggcagtttgccactcggaacatctcccccgtctcctccagccgcacccgcaggacg

SEQ ID NO: 39230 - DNA, 992 bp, Artificial sequence
  DNA replication origin
ggcgccgctgccgccgcacggcccagccccggtccgcgcagaggcggctgccgcccgtcctccggccgtaggtccggcctgtccgctgccagccgcgtggggcccgccttagcagccgggacgccgccgcggccttccgggagccgccgccgccgccatcttgggacgccggccgcgtcacctgacctccccgcccacctcggcagccaccttcgctgagagggcggggccggccggccggcgcggatcgggggcggggcccgaagccgacggccccgcccctgtctgcagggccccgcccctgtctgcagggccccgcccctgtctgcagggccccgcccctgtctgcagggccccgcccctgtctgcagggccccgcccctgtctgcagggccccgcccctgtctgcagggccccgcccctgtctgcagggccccgcccctgccggtcccgcctccatgcccatcccaagatggcgggtgagtggggctgggctcgggggatgccaggggtgcccctctctctctcgccccgtgaccaccccgcgaggccgaggggcccctgcccgaccccgtcccctctcgccgcagccccctggtaacttcttgtgtgtttcttggttttcagagatccccctgtactttgtggacttgcaggatgacttagacgactgtaagtaagagttggggcacccctgtccctccctgggaccctctcaaagaattcagagtgcacgaagcgcggggcgggggaacctcaagccaggcactccttgtcgggaccagaacagcgggacccccaactgcctagatccactggtggcggtccctcctccctgggcggggcgggctgagggtgggagcccttcccttccctcgggggaaggatttttgttgttggggaaactttggactccctgtcacttcttttcttcctgcgcctgcagctgccgtgggatgggcggagggggtagtcccaagtcctagtcgacc

SEQ ID NO: 39231 - DNA, 1042 bp, Artificial sequence
  DNA replication origin
caaccagtgagtgagagcatcattggaaaactttgttattttcattgatctgattagaaactgtgcttactctgcaaatgcagcttcgaatcccctcttccactgtccttctgactagtcagccaccgcagggtgtctgagaagagaaactgcgcagcagcctctggttgccagcatcagaaaggaaatacgaatccctgaatgccagagctagggaggggtagggggagggagaggcagagatggagaaggaaatgggagagagagaaagagagagagacagagagggagggaaagagagagagggatgggggagggggaggaggagggagagacagagatggagaaggagatggcagagagagaaggaaagagagacacagagggagggagagaaagagaggaaagaggagaaaaaggaggagagaaagagagggagggggagagagggagggagagctggggagagggagatatatatatatatatatatttggggagggaggagagcggacgaaagagggaggaagagagagagagaagaggaagagagagagagagagggaggaaaagggaggggtaaggggggagagagagagatggaggaagggagggagatggagcagagaggggggaagagagagggaggagagagagggaaagagagacggagggagagagagatgggggagagacagagatagagggagggagggagagagagagagaggggtataatgtgggagggcaggggagaccgtggcatggcattgtaagtttcagtttctccattttcatttttctgctccccactcccaggaatgcttagagccatagattatcaagtgactgtcacaactttgcttttgtatctaggggaaaaccccaaacaagagtaactgcaataggtaaagtacctgcagcgctctcctgaaatccaaatgctcgcagcaggccctgccattttgtgctgagaaaggaatgtgtctttgctatgaccgctccctgtgcagatcaggcagtagggaaatcatgggctctg

SEQ ID NO: 39232 - DNA, 919 bp, Artificial sequence
  DNA replication origin
gaggtcggggcgtcagcctcccgcccggccagccgccccgtccgggaggtgaggggcgcctctgcctggccgcccctactgggaagtgaggagcccctctgccaggccagccgccctatctgggagggaggtggcggggtcagccccccgcccggccagctgccccgtccgggagggaggtggggaggtcagccccccacccggccagccgccccatccgggaggtgaggggcgcctctgcccggccgcccctactgggaagtgaggagcccctctgccaggccagccgccctatctgggagggaggtggcggggtcagccccccgcccggccagctgccccgtccgggagggaggtggggaggtcagccccccgcccggccagcggccccacccgggaggtgacgggcgcctctgcccggccgcccctactgggaagtgaggagcccctctgcctggccaccaccccgtctgggaggtgtgcccaacagctcattgagaacgggccaggatgacaatggcggctttgtggaatagaaaggcgggaaaggtggggaaaagattgagaaatcggatggttgccatgtctgtgtagaaagaagtagacatgggagacttttcattttgttctgtactaagaaaacttctgccttgggatcctgttgatcggtgaccttacccccaaccctgtgctctctgaaacatgtgctgtgtccactcagggttaaatggattaagggcggtgcaagatgtgctttgttaaacagatgcttgaaggcagcatgctcgttaagagtcatcaccagtccctaatctcaagtacccagggacacaaacactgcggaaggccgcagggtcctctgcctaggaaaaccagagacctttgttcacttgtttatctgctgaccttccctccacta

SEQ ID NO: 39233 - DNA, 1363 bp, Artificial sequence
  DNA replication origin
cgggcggggggctgaccccgccacctccctcccagatagggcggctggcctggcagaggggctcctcacttcccagtaggggcggccaggcagaggcgcccctcacctcccggacggggcggctggccgggcgggaggctgacgccccgacctccctcccggacggggcggctggccgggcggggggctgaccccccacctccctccctgacggggcggctggccgggcggggggctgaccccccaacctccctcctggacggggcggctggcggggcgtggggctgacccccccacctccctcccggatggggctgctggcctggcggggggctgaccccccccacctccctcccggacggggcggccgccgggcggagacgccccccacctcccagacggggtggccgccgggcggagaggctccccacccctcagacggggcagccgccgggcggagggtctccccactcctcagacggggcggttgccgggcagagggtctcctcacctctcagacggggcggtggggcagagatgctcctcacctcccagacggggtcgtggccgggcagaggcgctcctcacatcccagacggggcggcggggcagaggcgctccccacatctcagacgatgggcggccgggcagagacgctcctcacttcctagatgtgatggcggccggaaagaggcgctcctcacctcctagatgggatggcggccggtcggagacgctcctcacctcccagactgggcagccaggcagaggggctccccacatcccagacgatgggtggccaggcagagacgctccccacttcccagacggggtggcggccgggcagaggctgcaatctcagcactctgggaggccaaggcaggcggctgggaggtggaggttgtagcgagccgagatcacgccactgcactccagcctgggcaccaccgagcactgagtgaacgagactccgcctgcaatcccggcacgtcgggaggccgaggccggcggatcacttgcggttaggggctggagaccggcctggccaacacagcgaaaccccgtctccaccaaaaccagtcaggcgtggcggcgcgagcctgcaatcgcaggcactctgtatttgccttgtaaaacagatcaattctagcccctcttactgtcttactcttacctcttattgccttaaacacaatttaaaatgacaaaaatccaagcacagtgggtcctgggggaaggtagaggaaataaattatactgtgtttagctttatctaaataccttttacagcatgtcaaggaattcattttcagttcattagtgctgtttcataagcatcttcagcaaactcacacaaatgttc

SEQ ID NO: 39234 - DNA, 1131 bp, Artificial sequence
  DNA replication origin
gatgaagagcaggctttgcccgagggggtcttgttccatcttgaaaagctcgtactccacatgcgggagccggatgcccagcggtaggcagccgttggtggctgtgacatcccgctcagtgcccatggaccaggcccccgcacccccacagctgcttggctcagagaagttgagcatggccgtggtgacctggtccatgggggtcacatgggcccgtgtgacctcaaacaccagctcggtgccgccgcggaccctggtggatggcgtgcccctggtgtagcggccggcggcatacacggtgaaggtgggctgccggcaggctgggtctgagaagtggtggtaatacccttcccaggagcggctgtgcccgtggaaagtgaagagccgggtgaggaacaggactgctgggcgcacctcgcaccccgagctgacccaccagccgcccaggtgcaggggcagggccagagggggcggcagcacgggcgggtggtgcacatcggagcgggcaatgaggccacaggctgggcacggctgcacgtggtgctggcaaaagacaaacagaaaaacggtggttgtcccacatagagaagttggggtgcagcctggaaaggaaccccagctctgtaggggtgtcaaggcagggtgaggtgcggcctgtccctccctcctctctctcctcactccctgccttcagtcaggacgacctccttgcttcagccaggatggcctccttgatggaggtcagcccctgtatcccccgggccttgggtctcctgctgtctcttccacctggaattccccgccagctccttcttacctcttaggtctcagctgggcaccagagagagctttcccgaatgccccatgtaaggtgggcctcagggctgtcacaccaccctcttttatcttcctcattccaccccctgagactctcctctctctacccctcacccctcatcaaactggaatgcatcgtgccttacagtactaaaaagccctagaaagccgggactgtctctgcggctaccccatccccaccgcacagggcttggctcacagcaagcacatatttgttgcatgaataaatgagaaatgaatggaagcataggtggccttcgtcttgggacctga

SEQ ID NO: 39235 - DNA, 1402 bp, Artificial sequence
  DNA replication origin
ccagttctactacgaggaccccttctgcggggaacctgcccactcgctgctcgtcaagggcaaagtccgcctgcgccgggcctcctgggtcacccggggagccaccgaggccgactaccacctgcacaaggtgggcatcgtcttccacagccgccgggccctggtcgacgtcaccgggcgcctcaaccagacccgcgccggccgggactgcgcgcggcggctgcctccggcccgggcctggctgcctggggcgctgtacgagctgcggagcgcccgggctcagggggactgcctggaggcgctgggcctcaccatgcacgagctcagcctggtccgcgtgcagcgccgcctgcagccgcagccccgggcgtcgccccggctggtggaggagctgtacctgggggacatccacaccgacccggcggagaggcggcactaccggcccacgggctaccagcgcccgctgcagagcgcactggtgagtgtgtgtgttggggtgtgggagaggggggtggtggtctcggggaggcgagctcggaacccagccccgcagctttgcaagacctgggcctgcccagggctctggctgcccggctgtcatcactgcccctccccactctggtccgcgtgcctcaggacatttgcgcaccctgttcacgcagctggagacatcttttttcagcctttacaaggctggcgggcctctggtcggccttcccacgctagtcctccccggcccctgtcctcgtgggcactgcaggatctcatttctgcccctgctgggcacagaggcttggtgggtgtccccctcccttagttctcggctgaaatatccgctccagtccccattctaccgttccccgtttcccgcaggtgacccttgccagctctcagcccgctctgaagctctgttggtgacttgtttattgcctctccctctggcgctaggtccttcacaagggtggggccacagcgggcacctagcacgggtcaggccgacgatcaggaccaataaacgtggatggatgaattagggagagggcagctttcctccagggcgccgctggggccgcgcacaccagcccagatgccaccccctcgaaatctcagtgcgagcctcacactgacctagccgcacagccactggggcgccaccctcgcccactcccaaaccagacggcgaagccacgtggcctgggcttcttgtgagagggccgaaagggatccttcaggtctgggtggagcccggggttctgcatttccagcaagctgtccggggtgtggggaggctgcaggctaaaggaaaccaccctctctttagcatgttccgccttgactccaacacgaatttcattgaagctgattaacctagattttagaagaagccattgcacgcataccg

SEQ ID NO: 39236 - DNA, 1605 bp, Artificial sequence
  DNA replication origin
aagctgcggggctgggttccgagctcgcctccccgagaccaccacccccctctcccacaccccaacacacacactcaccagtgcgctctgcagcgggcgctggtagcccgtgggccggtagtgccgcctctccgccgggtcggtgtggatgtcccccaggtacagctcctccaccagccggggcgacgcccggggctgcggctgcaggcggcgctgcacgcggaccaggctgagctcgtgcatggtgaggcccagcgcctccaggcagtccccctgagcccgggcgctccgcagctcgtacagcgccccaggcagccaggcccgggccggaggcagccgccgcgcgcagtcccggccggcgcgggtctggttgaggcgcccggtgacgtcgaccagggcccggcggctgtggaagacgatgcccaccttgtgcaggtggtagtcggcctcggtggctccccgggtgacccaggaggcccggcgcaggcggactttgcccttgacgagcagcgagtgggcaggttccccgcagaaggggtcctcgtagtagaactggtgggctcgaaagagccggctggggtagaaggtgtaggcgcgggtcaggaactccggtcctgggcgcacctcgcagctgcaggggtggaaggagatgggctgggtgcagagggaacaccgcgccgcgagcccctctcccctctgggctgggctcctttctcccccccagccctcctcttagtcctcagctcaggcctgggcccctccagcctcagttcccctcactgctcgcagtcaggcacccttggggctggggctttgcactggatgcctcgtggcctcgacacaagccttctagttcattctcctttccttcaatctgaattgccctgctggagggccttttgcaaccacctggggacccgctggcctgggagctccgggatgccctgcctgcttcctcccccgctggactctgggcacctggcccagagcccgccccactccctcccgcgtccttgctgagtgaatggaggcccgtcttgtctcccccttctctaggctcactgccctgaccaggtctcatccttgcctgtgacagggcttgaagatataaaccaggagtcggcaaactttttctgtaaagggctgagtaataaatatttttgttttggtgggctgggtggtttctgctgcaactactcaaagttgccattgtagagctaatgcagctatagatgatacgtgcatggatgggcatggttgtgtgccaataaaactttgtttacaaaaatgggaagtgggctggacttggccccagactccatttgctggtgatacaaacagatccaggggaaggggttggacggagaagaaagagaaatgactcctagactcacggtcaacctggggatggggcagaggaggcctctgggacttcctactgagggcgcaggtagggtggacggtggatgaagtcgggggaaaaatagcaggcaccctcctcacgattttactctaaccaggtaccctcttgtactgctattttctttcttatttttttgagacagaatctcactttgtcacccaggctggaatgcactggtgcaa

SEQ ID NO: 39237 - DNA, 1304 bp, Artificial sequence
  DNA replication origin
ccctggtagagtagtcaatgccttctccaggactaaggggttccctggtggctcttcgtgggggtggggagtagggtagacaaaactgtacaaaggccagctgactggagtgtgccatcacaggggcccagtcaccactgacaaaaatgacagtaaccacagttgaagtgtgcccagctgggggctcatccccaagcaccctcacattatgaatggctgagaattctggccctggagttagaccacctggctgggaagcccagatcaacatcatatcaacccgtctggctttgggtaagcatggccatcggctctctcagccttgactttctttcctgtcaaatgggctcacaaaatcccctcctccgtctgggatgattgtgaagattacgagagcacgtgcaggaggatcactccacttgctgcctggcactgagctcatgttcagggaatggcagccgagaaccccggggtgaagaggggctgcgcggtcccacagagcacgctctgctccatgtataggcaaggagcaaagtctaagtcacctcgaggagctcttcaatcacagtcttttcttcccagcccccaaatttctaaacaagctgttttgagaagaactggcaggggtctgaaggagggtcaggggagggtgcctccgcagtttgaagagttgcagattcacctgtcgaaagggacattcatccaggggccgcttcccctgccagtctgggagcgagaggtgacacagctgtccttggccacagagttagttgatcatcagcatgaaaatagaccacctcacccctgctggttctttcgaaagggcaggaaaatgcaaactggaaagggtgacaagggggccagctgtggaagcgcgcctctgctgggtgctgagatagggaggacaggatggggaaaccgggtgtccatctgctctcatccgcctcctccaggccgttgcacccagtgggaatggaacagtctagagtggtgggacacatgccccaggaacctgcagtctcagtcacagcacatggctgttgtctttggcaggccggagcttcccgtcatgccaatgaaatcactgtgagtgtagagccgtggctggctcttggggagtcttgctgcccagctcctcggtgacctttcaccacagcaaatcagacagattcaacagcagagaagccaagagtgcccgggggcctgacgagagaggggggcagcctgccctcaattcagacacagccaccagaaagggggagggtgccgttcagcctgccactgcagctcccagctctacaccg

SEQ ID NO: 39238 - DNA, 1180 bp, Artificial sequence
  DNA replication origin
ggaaggctgagcgcgtgtgagcgccgaggggggcgcaggaccctcgcaacttcttcgcaggactccagcctggccgccggcgcccgcagccgtccgagagccctgcgcccgcgcctccccttgcgcaccgtggcagcgcccggcgggcggtcctgccagccccgacgggatgcccgcagccatgctcccctacgcttgcgtcctggtgcttttgggaggtaggtgccaccctcccccacccggcaaactggctgagctcggaagggagggagctcgccgtctaatgtcccctaagggcccttggggactacggccctgggtcggcccacgcggctgctatgctgcgccctgcgcgcctttctccagtctcacctggccggcacctgcgcgcctccaggagcttcctggggcctgcgggagggagtcgcgtcacctcgcaatatgagagccgctgcactctctgcgccagtcggggcctggcctgtaggtacccagagctgccctttgtgccgggcccagtgggaccggggcctccaagaagatgcaggaggatcccaggcccactgagacccccatggtgcgggacaagcccggctattcagaccaaggttactggggttgtttttgcccacggaatcctgacctgtgcggggtcggggcttcttcctgcagcaggactcggggagaagctagggagcgcgcagtgaccccaggctcgagttgtgcccagcaggcctgacaaaggggaccaaggggcttcaggaacccctggtagagtagtcaatgccttctccaggactaaggggttccctggtggctcttcgtgggggtggggagtagggtagacaaaactgtacaaaggccagctgactggagtgtgccatcacaggggcccagtcaccactgacaaaaatgacagtaaccacagttgaagtgtgcccagctgggggctcatccccaagcaccctcacattatgaatggctgagaattctggccctggagttagaccacctggctgggaagcccagatcaacatcatatcaacccgtctggctttgggtaagcatggccatcggctctctcagccttgactttctttcctgtcaaatgggctcacaaaatcccctcctccgtctgggatgattgtgaagattacgagagcacgtgcaggaggatcac

SEQ ID NO: 39239 - DNA, 1201 bp, Artificial sequence
  DNA replication origin
aggcctcccccaagctctggtcccggccaaggcagagcgatgcgctccttgcgtcaaagcgcacccctagccaggccgttccctggaagggcaagcggggcggggagttcctctaagccccgccagtcctgggacccctgaagtttctattcaggtcttccagctactcctggaaaagtcgcgtcaacttggatcccagcaaacccagaagcgcagtgaaagtggccaacccggtcgcctagaagccagccccggcctctgtctgtaaatgaggccgtcacccgctccccaccacacccaaacgcatctaggcaaagtgtggacccgaccaggcgggttttcctccttctcgcaactcctcctcctgcccccctccctcccaaatctcatctgagtgagtcagctgagggtggcagctcagaagcgaggcagccgtgaggcggaggacaggctgggggatcccaaagggtgcgctccagcccccaacccaggcactgggactctggtggcaccctgggtggcaggcaagccttgaaatcaagtgcacgagccttggaaaggaggaccgggagagttatggcatttatgaatgaagaagagaaagagaatcactcggatgggaaaagttaactggattgttcccacctgcatggatcaccgggtaactgcagtgggaccgagggggcgaggctgcgggctggggatgtgcgggtttccttgtgttgccacgaacccagagagggagaggaagaagatggaaagaaaaaggaaaaagggaaagaaagtaagaggggagagaggggaaaactgaggatgaagagagacagagaagagagacctgagagagggagagaaagaaagagacagaaagagaaatgaaagtgaggaaaggggaaacaggcagagaaagagagagaaaggggaggaaagagaaagggaaaagaaaggagggagtgaaatcaacagaaaaaagagaaccaggaaggaggagggagggggagagagaagagagaagagagagaagagagaacaagagagaagagagaagaagagagaagacagagatgcggtctccctggggaaaggtttggagaactgggccaggcctgtttcccgggactcacgagtgagcagtccacctgcccctctgaagcattttatagactcatttgtcccacttttgtgggctgatcatcccaca

SEQ ID NO: 39240 - DNA, 1049 bp, Artificial sequence
  DNA replication origin
gggggaagataggcagtaagcgccaaagaagtaaataagataacgacacactgtgctaagtacttgggggcgataggctgatgtgctggaagacagttttagacagggtggtcaggacaggcttcctaaggatgtgacatttgaactcagatgaatgacaagaaggagccaggcgaagtaagagctagggagggaaagctggtgccaagaccccgaggttaacaggaggcgacagattttgagagacagaaaggccagtgcagatagaggctgttgagcaagatggggagtggtaaggaaagtcactggtaaggtgggcaggggtccaaccactggggcctgtggccacaggaaggagtttcagttttattttaagtgcagtgaaaagcaaggggaaggtctagaccttccccttgagagattttgtgtttgaggtgagagattttgtgtttcattttgaaatccttgctccggctgctgagtggagggagggtgttggggtgagcgtagaagctaggagaacggtgaggggctggcacagtcatggagggaccagatcaggggtggagcagccaggagctggagggaagaggagggttggggatctggtgtggaggtggagccggcaggacctactgctggattgaatgtggctgtgggagaaagaggagaaagaaggaccgctctaaacggggcttgagtagctgggagatgtggctctactcctgggctgcaggaaggtgggggagaaacaggtttggggacagggaaagccaaagagttctgttgcggccatgttgtgtgaaagatgcatcttagctatcatggaggcagctgcatgtatgtctggacttggtgggggaaatccgaagcaggggagaatggagaccagggcaaagagaagcagaagcagagtcaagtgatagcaggacagaggggagggtgcacagctctgtgtgaactcccggatccaaccatgcctgaagcttgacccaccttggactccagttatgtgagccaaccagcccccacatcctttgttttatctg

SEQ ID NO: 39241 - DNA, 1030 bp, Artificial sequence
  DNA replication origin
agagtgccataaacattcctgggaaaaaagcagggccgactggaggtccattgttgctgagagacaaaaaagatcaaaggggaagaaagaaaggatggagggaggggaagaagagagggagaaaaggaaggaaagaaggaggaaaaggaagaagtaaaggaggcaggaagggaaagaaggaaggaagagagagagagagggagggagggaggggggaaggaaggaagggaaggaaggaaaggagggagggaaggaagggaagcagagagggaggggagggaggaaggaaggagggagggagggaaaaagaaatgaaggaaggaaggagggagggagagagggagcacagagagagggagggaagaaggaaggaaggaagaaaaagagagagagaaagggagggagggggaagggagggaggaggagagggagggagggaggaaggaagggagggagggagggagcacagagagagggagggaagaaggaaggaaggaaggaagggggggaggaaggaaggaagggagggagggaaggaagcagggttctcactggtaaatctccctggctgccctctgtgcgtgtgttacagagagatgttctgtagaaatttcaggagaagggctttggaatcctttcatcgcaagtggtatcaagcacaggtgaccatcaggatgtacggatgagacggcccagttggtgggagctcaccagactgacattaaaaggaaaggccaccccaaacctccatagcagtagctgggaaggcctgaatggctgtgtctggcctggaggaactgctcccttcaggaaccgtagcccttcaggggcctgaagcatttcagagacgaagagggagcccctgagacgcccacatgtagacactccaggaaacagcagtacctgactacactcaacaaacccgaagtcctcacggcctggcaggctcttcacctctggcgcctgccacactccagcctcacggctttccctcccctccctgctcttcccactccctgtgacactcttc

SEQ ID NO: 39242 - DNA, 1011 bp, Artificial sequence
  DNA replication origin
tccaacaaaggaccgaggccccagaagcggcccccacgcgtcctttgtttctgcgtggaacaaactttacacacgtgtgtgttttccgagggtttcccgtgtgctgagcgcttgcaaagcggagtcgcgcccggggagacgcgaagccggtgcccgcggctcacccagggaccccagccagacagcggcacccgcggggcgcgtgcgggacccccaggcgaccgggggaagcaccggtaaccgccccccacccgtgctttttctctcacggagaatgttcccgcgcgttcgttgtgcaactaaaaattaatgtgaaacatccattgaggcaaataacaaaatgcatccaacgaaacccacataaaatcgagagagccgcgagcagggctgggcgagttcactgtgaggaccggctctggcttccgcgcagcgcggagagcagggcgctcgcccggggacgcttcgcagcggtggaagattcgggcgacaggggactgggtcgccgcgcgggccgggctggaggctgcagggacttgctgacaggccatccaaagacagagaggccctggggagggaaattcggggagcccgtgtgcttagcgtagcgccccgggaaatatttgcccaataagggagagtttgtccccacactgcggcagaacccccctgcgagctctgaccccagcagcacggccaagcccccccaaccccgctcccccctttaggggacaggtatttgtaaataacaactgagctggtcgtcggtaggagaatcagattagaaacatggtccccactctcttcctatctccccagcactcatcacctcacaaagcagggggggacctgtttacttttcctggcgctctcccccaggctagaacgtgatcttcttcctacgcagggacagtgttttattcatctttgtacccactgccatctcatctggcttggaacaggctccggataaatattttttaaatatgtgcatgaattaatgagagactcgag

SEQ ID NO: 39243 - DNA, 1471 bp, Artificial sequence
  DNA replication origin
cagcggcggcgcggccaggctgcctggagttcttgttccttttttttttttttttttccttttatttcctcgtggttgtttgtcggatacatctttttccagagtgggaaaaaaaaaaaaaaaagcgagcgccgccgcctgcagtagagcgtgctcggcctgcagaggcagtcgtctccaacttttcctctcccgctccaactccccgcgcccaaaacttcagttcttggggagcccaaatttgcctgccgcgcaacttccactctaattcagcgaccaagggccctggcagcggtttgcagcctgggggccacgctccccaggctcaggcctgctcgttggcctgctcctagtgcctggacccagttgggggaggcgaaacagggcgcccgaggagcaccccgggagagggcggagcactcccgtgccccggggcaggagtgcagggagctcccgcgcccggaacgttgcgagcaaggcttgcgagcgtcgcaggggggcactcgcgagggacggacaggaagagggccaggggggaacgccagaacccgggaccacagcacggaaacggtccggggctgagctgcagtcagatccggggatggagggagccggagaagaggagtgagaaggccggggaggcaggccctgctgtcttcctgcaggccggcagcctgctggcagtggaggaccaggccgtccaggaaaggaaggggtcaggaggtcgggcagggcctcagcaggttcagacaagtccccagaagggagctgcaggcgccctcgagtccaggccccaagcctggctccggttgtccaaagagggcctaggccaggcctctggtgcggaaactgagtcacagccagacctcagggcacggcctagacgcttacgagccaaagttaggggtagagagcagagacctccggggggtctcagggagtagggggcttcagggcctcccagtctagagccggattggcgagttagacgcttgtagatccaaggttggattggggtggggtctctgggacgttggatcgctacgcaaggattggggggattcaagtgcttagagatcgaagtctgccctgggtagggggagtcagacaattggaaagcctaggtagttatttggggaggggtctctacgccttggcgaagcgcacagctgcatctttttggcttgaggcctgaggccttgtcgagaagcttccgtgaaagggtgggccagccgggccacgagaaagaaagtgaataaatcaggaatataagtgggcggggggcccctgagaggggggtcgcaaagggtgagacatggccaccaggcgtttaaccgacgctttcttgttgttgcggaataattccatccaaaaccggcagctgttagccgagcaagtgagtagtcacatcacctccagccctctgcattcacgtagcattgctgcggtgagtctcctggcggcctctccg

SEQ ID NO: 39244 - DNA, 1270 bp, Artificial sequence
  DNA replication origin
tcgccatcttcctgccggcccacgccccggccctgcccggcccggcccggcccgccgctcggcccccttcgccccgctccggcccggcctcggcaccgccccggccctgcccggcagcccgcgggccccgcctcccccgccgctccgggctgctcgcgagacgtgcagggcccgcccggggcgcgagggggcgccggccaggccgggcggaagggtgcgggcaggcccggccgggcaggcccgaagccggccccgagcaggccctgccgagtagggcccgcgcgcccggcctccagcggcgccgcccctgggcctagcggccctgcccaacacgcggggcgacgtggcccgccaggcagcgcctcccggacgggcctggcctccagtggggcctgggccgacgtaggcccaagcccacccgacgcagttccgcccggtcaggcctcaggctggccccaagcaggtcccccgaggtcccttagcagctgcttttgatccccagggaccccgcaccctggccacccatcagttaggccggaggggcccagtgactcttggacctgagtcaggtccttttgtcccactgcctggcatggtgggtacagcgtggacggtcacttcctcctcacttaatcggaggttccctggcgtttatcagaccccgctctgccaggcactgccctggatgtgagagggtgacagggacgtggctttccatccagggcactgctgctgggatggccagttacaaatccaggcactgcctggctgcatggggggccttcccgcccacccctttgcaagaagggtcatctggcacagtctaagcaggaaaggagggacgagatgagacgaggaaggagcagggtgacctgagtcacctcagtcgccttacaggggaggaaaggccatcgggggtgtggggcaggagccgggtggtggaggagccaggggtgagccttgagtggatggtggaggcggagggtcccacccacagggtcagatgcaagggtcagggaatgacgatgcattggggaagctccacccaggagtcatttaaaagcaaaaatctgttacccaacatcctgattgctcaagggcctttggttggtaccctcctctgttacctccatgtagttccataagccactcctgttattttgagtttcttcttcataaccagcctaaaaatgaaaaaaaaaaaaaaaaaaaaagaaaagaaaaaaagaaaaaaaagcactgtcaactccctggcgtggtgtgagaggtt

SEQ ID NO: 39245 - DNA, 941 bp, Artificial sequence
  DNA replication origin
cagttccaggcgagcgcgggggactcggacccacagagccggcccctgctgctgctcgggcagctgcaccacctgcaccgcgtgccctggagccacgtccgcgggaagctgcagccccgggtcaccgaggaggtgagcgggccgccggccgccatgcgacccgcgccgcggaagcccaggcccgggcggcccgcggaggccccgcctcgcccgccgcacccccgccgccgccgggccgggcccaacgaggccgggccgcctccctgaagggctcagccgccaggccagtcctcgcccgcggaggcccagccccaggccccgtcgccggtgcggcgcggtggtcctcctgtcagcccagccctgcgccccgcgaggccgcgacacctgcggacggcggggggggagacgtggccgctcccagggccgcgcgtcggccccgcctggcgacaggccctggcttccagaagttcccatggcagtgtccccagctgcctttccttggggacacctggcccctgccccctctctggtggaagccgcctaagccctatccgagtgttggaagcaaagcagcccccagcctggcccttccaggcttggtggcttcatcccaccagggggatgcgagccagcctagagacagttagctctgcagagaggcgacacatctccctaaggatgggaaaacggtggccgggagctgcgcagtgcccttccaggactgcaggagtggttgtggccgtggctgcagggcagggcctcctggcacgtggccgctgtttgaagcctctgtgtcttgtctctcccttctgatctagctctggcaggctgccctgagcacgctcaaccccaaccccacggacagctgtcccctctacctgaactacgccaccgtggctgccctgccctgcagggtgagccggcacaacagcccctcggcc

SEQ ID NO: 39246 - DNA, 1030 bp, Artificial sequence
  DNA replication origin
tggaagccgcctaagccctatccgagtgttggaagcaaagcagcccccagcctggcccttccaggcttggtggcttcatcccaccagggggatgcgagccagcctagagacagttagctctgcagagaggcgacacatctccctaaggatgggaaaacggtggccgggagctgcgcagtgcccttccaggactgcaggagtggttgtggccgtggctgcagggcagggcctcctggcacgtggccgctgtttgaagcctctgtgtcttgtctctcccttctgatctagctctggcaggctgccctgagcacgctcaaccccaaccccacggacagctgtcccctctacctgaactacgccaccgtggctgccctgccctgcagggtgagccggcacaacagcccctcggccgcccacttcatcacgcggctggtgcggacctgcctgccgcccggagcgcatcgctgcattgtggtgagtgcttcgagaggaggcagccacggtgctcctagtcgggcagcggtgagctcgggcctggggagctcacagccctgctcagactgcagcgcacgcccagagggctgtggacgttatcatccctgctctgtagacagggaaacaggtccagagagacgcggggatttgccccagatcagttttggtggcaaatcagagactcaaacctagatttcctgaggcccactttgtgtctgtccctctgtccctcattttcatggctggtcaggctgttgacatctggtggccaatgtgttatttctcttggagcatgaccaatggtggtcccatggttccggggatgacctgagggatggggtggcggctgctgtgggacatctctgtctagatgtcacctgccagggagctgatgttccggaggcgttcaaagagcagctccctgcactccctggtggcggcccttgcacccctcacgccgtctccctatgtgccacagatggtctgcgagcagccggaggtctttgcttccgcctgtgccctggcccgggccttc

SEQ ID NO: 39247 - DNA, 2429 bp, Artificial sequence
  DNA replication origin
ctggtcaggctgttgacatctggtggccaatgtgttatttctcttggagcatgaccaatggtggtcccatggttccggggatgacctgagggatggggtggcggctgctgtgggacatctctgtctagatgtcacctgccagggagctgatgttccggaggcgttcaaagagcagctccctgcactccctggtggcggcccttgcacccctcacgccgtctccctatgtgccacagatggtctgcgagcagccggaggtctttgcttccgcctgtgccctggcccgggccttcccgctgttcacccaccgctcaggtgcctctcggcgcttggagaagaagacggtcaccgtggagtttttcctggtgggacaagacaacgggccggtggaggtgtccacattgcaggtgggtgtctggaagggcagacactgcccctgggcccgggcaagatcgggcaggtgggagggaggtcgggagagggaaaagcttgttgcgggggcaggagggggttcctgcccttcccaggagctttggttcctgggaagcggcagaggcttttccaaacccaggccccctgcctctgcctcagcgtggtctgtgacttcaggattctgttgtatacaggcagtgtttgttgagcacgtaatcagtgccaggaacgtccatgctgttttccaaataaccctgcccgtttatgtgagctccgtgtgcacgtgtgtgatgtatgcacgtgtgtgtgtatgtgcgtgcacatgtgtgttgctgtgcgtgtatgagtgtatgtgcatgtgttgtatgtgtggggggtgtgtgtgtgcatgtgtgatgtgtgtgtgtgtgtggtatgtgttgctgtgtatgtttgctggtgtgtgcatgagtggtgtgtgtggtgtacgtgtggtatgtgttgctgtgtgtgtgtgtttgctggtgtgtgcatgagtggtgtgtgtgtgtggtgtgcatgtgtggtgtgtgcatgtgtggtgtgtgttgttgtgtgtgagtactggtgtgtgcatgagcagcatgtgttgctgtgtgtatgagtgctggtgtgtgcatgagtggtgtgtgtgtgtgttgtgtgtgttgctgtgtgtgtatgagtgctagtgtgtgcatgagtggtgtgtgtgtggtgtgtgtgcatgtgtgttgctgcaccctttacagggagcacttctacatgtgttatttcactcaatgctgagaatgatccttttgaggctgcaaggccggaagtgatttcccagctccagatccttggatgggcctgacatcaggctcctgtccccacggcagcggtcccagcctctgcgcctgccacctccagtccccgagcccacagcgccacccaggttgtcttttctcatgtgtcagcgctcattcttcacttctggctctggaaggctgtcgccttcacccaggcaagctctcccacatcagcacttgggccacacctcatttctttcactgtgtgctctctgaggcctgtaaccactgcccctcaacccaaattcttccatcttcaccagcatgagatagctccccttttttcccttcgtctctgagcttttaaaaaagtctaactggtttgccttgcttaatcctcttttccctcttaacccatggagacagagtttttgcccccatcctgacattgttttctaaggactgctggatggggtgttgccgtccctccttgaagtgcatctgccccatccagaggtctccctccctcccgctgctccccagactgctgccacctctcggcatccccttcatggcctctccagcgttccgacctgctcagccctctccgggtcagacaccagcatctgcctcttctctctgtctttagggattttcttctgacttccaggcctgccatccaggtgggcacgggtgcccgcagagcccaccgggggctcaagcatcacccttatttccgaggacagcagggcaccctgacctctgctgccctcagtcccttcccctcctgtggacttcctgctgtcccttagactggccacgcccactcctgctcttgctcctctgcaggggtccttccctctccagcccagcatggtctccatccagcctctgcccacattccctccccagggaggcctggccctcttggctagcaccaccctcccatttgtcagctaaaccatcactactagacatgtcacatctttgttgatctcctgtgctcctcactgggttgggagtccccagagggcagggacctggtcttgtgcacagtgatcccagcacccgaccccacacatgaaaaaggcccagtaaacatctggtgatggaaccagtgggggcagtcagtccccatggcccccgaccccattggtcccaactagctagtgtgtcctgtttcttgtctttgctctgcccagtgccgtg

SEQ ID NO: 39248 - DNA, 874 bp, Artificial sequence
  DNA replication origin
ggaatctatggggttggcaaagccgccctgcatcccccagccctggccgtcctcagccacaccccagatggagccacgcagaccatcgcctgggtgggcaaaggcatcgtctatgacactggaggcctcagcatcaaagggaaggtgaggtgcgggctggctctcagggtgccctgggggaggggaggggaaggtgaggtgcagggcccggctctcccgggtgccctgggggtggggtggggtggggtggggaggggaaggtgaggtgtgggcccggctctccagggtgccctggggttggggtggggtggggtggggaggggaaggtgaggtgccggcaggctctccagggtgccctgggggggggggaggggcccagtttgggtccagccagccctctgagaggtgtcatggggtggggggcggcgaggtttctgggggttctgggttggggtgggttcggggagagtgcgcagggcgggttcccatgtgctgaggcgacagcttcacgtggctccctgggtttcatgcccacccttcagaagggtctggaaacaaaagcctggccagggcccaagagcagccccggaaatgacggaagaaatggcaagcagggccagggaggcagggcttgctgcttgggggctttgtcccgagaagagaagggcaaggggacgcctgtgtctctgagtctgcccatggtccccactgagaaaacgctcagagtggccacacaagaccctccaaaggcacgtgacccccaagagcgaggggaatctgggcacggcacagaagcgagtcacccgggaacatcccggtgcggtggccctagaagcctgtcccgtggtacggctttctgtcctgccatcccagg

SEQ ID NO: 39249 - DNA, 1002 bp, Artificial sequence
  DNA replication origin
tcagctccacaagggccccaagtcccccgctcccactctcgcagcccagcctgtgtcagggacacggggcaggggcttcaggaccctcagcctcctcctctcagagctcctccccagataccccagcactgacattccatctgtgtgtacagtgaccacggcctgtccctgtgctgaggcctcctgtggtcattccagggagaagtgggtgtttaggaacaacgaataaatgacagcatgaccctgaggtcacaggatgaggccatggggctccaggccatggacgccacagagatgagctccaccaacaaaggaggggagccctgaagtcctcctagaaagcagagttctggatctgtagcctgctggggcgtggggaggaggaggagagggggaggagggggggaggaggaggaggagaggaggcggggggggaggagggaggagcggggaggaggaggattcccaaatggatgctttcagcctcccagggagggctgctacccgctgaaggctgggccctgcccctaatttctgatccagcaggtctggggcagagctgagaacccatattactaacaacatggggaccccacttgagaagtgctggcttagaagacgagcgagctgcagtcctggggcaaacagtgctgaggtctgcacggctggaagacgtgagacagagacagcacaggcacggccctgcccttgcggccctcacggccagtctggaggtgttctccaatcaccaggagcggctgaaaaaatccaagactcagcagagctggaggtgagccctggagctgtcaatgttcacacacttcctgggtgttacctggcacagttgggacttgctggtctaacagaagagggtggccaaagatggggctggactgtgagtgcttcagcgacagcgtgggaagggtctccagtgctacgccagggcttgggcctggtcccccagggcggccaagggttttgggttggtaagtgggtcagggg

SEQ ID NO: 39250 - DNA, 1129 bp, Artificial sequence
  DNA replication origin
caggaggctcacacaagcctgcgtctcttggagtccctccccaggtccccctcctcgacatccacctcacagcccagtggggacaccaggttcagcagagggtcctcagaggcacggccgaagagcgccagcaggagggccacaccgaagcctgtggctcgctcaccctgcaagcaaagggcaggacacagactctgggcgtggggctgcagcacaggaggggttcctggggacccctcacctcctgggtcccctccacgtgccccacagtccccttctcaggaaggagatcctgagcaccagccggagcccagagccttccatgctgctggctggacacgttcagggctggcaggccaggcgtaggcagggggcaaggccctgtgtgctctgccttcaccccgggagctcctcagggtggggatgggtgagacagggcccaggatcccctatggaggacaggctggctggggaagggtcgcacacagcagccactctgttcccagggaggatgagacctgggggtggtggggacagcgggctggaagctgggtcacagacagaagtttctgatgagctctgccagcagctccagagccagaggggcgctgtttggacaagcgggcgggagcagccagggccagtggggaggggagacactcacagcatgcaccggtgcagcaatgtccaggtggacccagactccgggccagtcgaagccgatgtgtgaggcgatgaagaggccagcacaggagctggggctgttgtctcggtcctagggaggccaggaggacacagtgcctgtgggttgctccggccgggccctctccaccctgccccatcgcctgtcactattgctgtctgcaaggagctcggggtggctgggagggagcgtgtggggaggcagcagaagctgggctgggagggccttgaccatgagctaaggagtctgcccccaccataggccaagggggaagccagcaaagggcctgatggggcaactgagccagacccaagactgggggagaaacccttggctgtgtggcagggaagccagtgagtggcccacgctgtctgggatgactcctgtgccctgacgcctgcctctcaagccctcgtctgcactgtg

SEQ ID NO: 39251 - DNA, 1398 bp, Artificial sequence
  DNA replication origin
gtatttgcgaagagcactgaaggcaagtactctggtgttcagggaccgatcttcaggggaatgccgggcttctttctcacaacacctgaattcctcctaccatgagtgctgttgcacagcactaacccaaacacagacgctgcagggttagtccagtgcagctggggaagaacaggtaccaggtttatgtctccactgtgtgacattaagcaagttgctctgtttctaagcctcaggtttctcaccactgaatggcagtggtgagccctagcctgactatgtcatgggggggcattgaggggaaacgttggagtcaatgtgaagccaccttgggaataagaaagtgcaatgggcatgtgtgattatctccacagctgggcaaagaggatgggcaggtagggaggtgggtagattgggtgaatagggagtggatgggtgggtggatacatggaggagggtggagggatgggtgggtgaatggatgagtggatgggtgagtggatggatgggtaggtggtttgatgggcaggtaggtaggtggatggatagatgagtgggtaaacagatgggtatgtgggtgaatggatggacaagtggatgaatgggtgggtaggtaggtggatggaaaggtaggccatgaatggatgggtagatggatgggtgggtagatgcatggatgggtggatggatgagtgggtggatgggtgggtggatggatgggcgggtaggtggatgtgtaggtagatggtgggtaggtggatgtgtaggtagatggtaggtaggtggatggatgagtaggtggtttgatgggtgggtaggtaggtgcatggataaatgggtgggtaaatagatgggtagatgtgtggatggatgagtgggtaggtgggtgaatggatgggtggatgggtgagtggatggatgggtggataggtaggtggaatggaaggatggggtagtgaatgtatgggtatatggatgggtgggtagatggatgggtgggttgaaggatgggtggggggatggatgagtgcacgggtgaatgagtagataaagggatggatggaaataaggaaggaagcatagttagatcaagagatgatgactgaacacaaggaaaaaaggaaagataaaaaatggaaagagggttggttgggtaggtgcaaagattgttagttaggtggatgagtgattggactggcagataaaaggaaagaccaaagtatgaattgacaaatgcttgggcaaaagcatggatgaataaataatctcctgcagttctacagacagaccagggagagggcaaggatgtgtgctcttagaagtggcagatccaagtctaggatctgactcctgcatgagtgttcctcccaaggcccagctctaggccccaccatgtgt

SEQ ID NO: 39252 - DNA, 1296 bp, Artificial sequence
  DNA replication origin
ctcgtgcctcgcagtgacattgccaccctgcaaagtccccttggtcattaccgccatggacagtgctgggctcggcccccctagtggtctgcggctcactaggaggccagggccgcattggatatcccacagaggggttagccaagccctcttctcctgatagttcttgaccgcctgagtggatgggtgtgggcgactggtgtataccccttcccatgtctcaaaagctaggacagaggtgtagacagctcaggagggggttagctttggggataaaattcaacccatacaaacctcaattctgtgcccatcatcacgttctgccagaaggagagaaggcagcgtatacctccatgcttggccacccgttgtcattcattcatcgatctactacacagtctgtcactaaggcccaggtggctggggacatagaatgcacaggaaacacgcggcctggtttggactttttctcctccaggctggcacctgacacctttccgaaggtaagggaactaacagttgggtgccaggcactgaggatgcagcaataaccaggacagacggggcttgcagcctgatgatgggggagaagacggggcttgcagcctgatgatgggggagaagacggggcttgcagcctgatgatgcgggagaagacggggcttgcagcctgatgatgggggagaagacggggcttgcagcctgatgatgggggagaagacggggcttgcagcctgatgatgggggagaagacggggcttgcagcctgatgatgcgggagaagacggggcttgcagcctgatgatgggggagaagatggggcttgcagcctgatggggagacaggagttaactggatgatgcaatgagtcccatagcagagaaggggcagagaccacacagacagccccgaagctggccccggggtgtgttgggggaaatggccatctgaggagggctttggtctgagacagccagggggatccatagtgtgcccttgccccatctccattccccttccccgtgcctggccatctcccctacccaggcaacgggtgggctagggcacacaaggctcaagtgatgctgctgccaccaggatgggtgccagacctgaggtgttcatggtggcatctgtgacttcctggttggccttctgcgcacaggctgctggagatgatcgcatgcatcaggaccaaccgcagtgtcctggaaactccactgccatccaggctctggctggcagagatgataaaccctttgattctgctgctgtcctattacacactggtcctcc

SEQ ID NO: 39253 - DNA, 1954 bp, Artificial sequence
  DNA replication origin
tggtggtgattgtggtgatggtggtgtggtggtggtggtgatgatggtgatgtggtggtggtggttatgatagtggtatagcagtggtggtggtggtggtatggtggtggtaatggccaagaggtgagagagtgagggggcaggagtttgaggagcccagccatgcagaaagagcctaaaataaagttggagttggcagtcgagttggatttttctttttaatttcactttccagttctcttttagtggattcttaatggaaagccttagaagctgtagagtttggtctgcacaactgcactggatgcccattctaggtcctgtactctgcgaggcactgggaatacaatggtgaatgcatgcagtgagggggatctggaaataatgagtcatcgcgctaaggaaggtctccttataacctaagctaagggcactggaaaagaaagatgttcttttgtttttttccccctgagtatacagcagaagaagccaccctatatttgggcaaggcagggaatactttactgaaaaagtgatacgtgcacacttgagctgagaactgaagggtgagcatgtggcagcagggggttggtgcagttccaagttgaggagtagccagagggtggtgcagttccaagcgaggaatagtgtatttgccagctctctggcggaaagaagctaagcctgttagggaaactcacaggtcagcagagctggagaacagagatgaatctggagggctgggcagggatctctgggcccaacaggttaaactgcagtctttctgttgtcttgaacagccataaaccatgggaagcctttgtcctgatggccatgagggaccaaaatcaagttgtctattttaaagacctctctggccacagagtacggggatggaatttgagaggaagctagagttgatagtagctgggtctagggaggtggttggttttagaaatacataaagctgaggatagtgagagtggcttttagagttatttaggagagtgtcttacaaggcttggtgataacatggatgtggggaattggctgtgtcaggatgacacccaggtagaactagatggaagctagtacttttcactgaggtagagaagcagggaaagaggcccaggtgtgaggtagcaggaggccatgagttctgccatgttgagtggggtggtggggccaagagctctgccatgttgagtggggcggtggggccaggagctctgccatgttgagtggggcagtggggccaggagctctgccatgttgagtggggcggtggggccaggagctctgccatgttgagtggggcggtggggccaggagctctgccatgttgagtggggcggtggggccaggagctctgccatgttgagtggggcggtggggccaggagctctgccatgttgagtggggtggtggggctaagagttctgcctttggtctgttgagaacaaggtgcctttaggctgcacgtgacaaggtatcaagacaaggtatcagacaggtagaaagatgttctaggtctcgggcacagtggaaaggctgtcatagaagcagaaaaagtctagtgctaagtgggagacaagagaggaacactccaaattgagtttccaaccaaagtcattatcaacaggagtcatcctggagctggatggcactggagagatcgagtctcagcccttttattttacaagtaaggaaactgaggcttagagaggtgggaccagctggttagtggtaaagccactcttagactgaatttttctagtcctagttctatccctcaattgtttactacaccaagcagagaatcttcccgtgaaggtggaacatgagccaagggctcagatgtcagcccccttgatatcagatctattttttgtcagcaaccaaatggacagttcacagcttcacattcttttcttgatcactttagaactgacat

SEQ ID NO: 39254 - DNA, 1677 bp, Artificial sequence
  DNA replication origin
gtttttgtatttttagtagagacgaggtttcaccatgttagccaggatggtctccatctcctgatctcgtgatctgcccgcctcggcctcccaaagttctgggattacaggcatgagccactgcgcccgctgatgttgttttttaaattttgcttttatttagttttcagtgactttatctagcagatttttttaaaaaaaagcaaaacagctggcaacccgatgtgagtgccacacatttcttttgaaatattagcgtggtctggccgggcacagtggcttatgccactgttcgtagattttggtctaaaatctcaaaatctaggaacctccaattcgatgtcctttgggttttacagttgtgatatttggtaaatctggacttctttttatattttaaaatcatttttagtttattcttttgggttcttctagttagtagtgccagttagattgatgtttttgttacttattttggctttctctgacttcatcctttgtctatgccttgcgttgtcctctgaaagtgtgtaggagagagaagggtgaaatgggggcaccctcgttttatatctgtttttaaagggatttttctctaatgtcttttctctgacagtatttaggtgggcttcaaagggaaaatagatggtatcttatgagagggctcaacagaaagtttggaggtgagaaaccagaagccagatttgggatcacacaggcctggatataaatcttgcctccttctgcttgctagctgaccagtgactatgcctggtggcggtgatggtgctggttatgatggtggtgtagcattggtggtgatggtagtggtggttgtgatggtagtggtgatggtgatggtggtggtggtgatggtggtgtggtggtgtggcggtggtggtgatggtggtgtggtggtgatggtggtggtggtgattgtggtggtggtggtgtggtggtggtgatggtggtggtgatggtggtgctgatggtatgatggtggtgtggtggtgatgatggtggtgtggtggtgatggtggtgatggtgatgatggtggtgtggtggtggtgatggtggtggtggtaatgatggtggtgtggcggtggtggtgatggtggtgtggcagtgatggtggtggtgattgtggtgatggtgttgtggtggtggtgatggtggtgtggtggtgatggtggtggtgatgatgatggtgtggtggtggtggtgatggtggtggtgatggtggtgtggcggtggtggtgatggtgtggcgttgatggtggtggtggtgattgtggtgatggtggtgtggtggtggtggtgatgatggtgatgtggtggtggtggttatgatagtggtatagcagtggtggtggtggtggtatggtggtggtaatggccaagaggtgagagagtgagggggcaggagtttgaggagcccagccatgcagaaagagcctaaaataaagttggagttggcagtcgagttggatttttctttttaatttcactttccagttctcttttagtggattcttaatggaaagccttagaagctgtagagtttggtctgcacaactgcactggatgcccattctaggtcctgtactctgcgaggcactgggaatacaatggtgaatgcatgcagtgagggggatctggaaataatgagtcatcgc

SEQ ID NO: 39255 - DNA, 1785 bp, Artificial sequence
  DNA replication origin
tctcctccttgggctccttcgactcttcggggtcccttggatctttgtcctcgggcttgagctcctccccttccctggggctctggggctcctgagtgctgggcggcgcgcgacttggggaggcgtcggggcttcgcaacttgagagcgtgcagacgctgggtgagggactggccgaaggtggagtgcttgggcaccaccgggccgcgatcgtcttcaggctcggtctcgggctcagtggtgggggcggtctcaggctcggtctcgaagtcggtctcggactcgatttcggactcggtctcgctctcggtctcgtagtcgaactcttcctcgtactctaggcactcggggagggacagctcaaggtctgcctcctcgtgctcgtggtcagattccgattcgggggactcagggaatacctgggcgccggagcggtggtgggcgttaaggaagctccggcgctgttgggcagccgcgcgctgctgggcacgggcgttggaggtggcaagggcgcggaggagcgcgatggagcaggagagccagaggagcgcggtggctgcccggcggcctatgggcgggcacaggtcgttgtaattatggcgagctcggcgccactgctgagcccgggacctccgatccatcctcttaggcacacaccgagaagccggcctgccctctggctctgcagagagtggctccgaagcacattggctgctggagccgggaaaggtacaccctatgaggtgagaagctggcccggaggtcccagcctcacctccttgtgaggagaaaaagggaagcacctaccttcctgaccacttaagaactttctaaagctccgcgccttgcttgcctctctgagcaagaagaagggatgggaaaaaaggggaaagttctgtctcctcccgggctcctctcgctgagtcttagattccgcagcctaagactcgagagaggtgcctccgccggtcctcttgcctgggagaggacagaggagactgaggcgaggagggacgggcagtgaggttctgcgaagttgcgcgcccggacttctgccgggcatgtgcagtaaggaggtgggggccacctccccgcgagctgcgtggtggcgccgagcctgtggcgcagaccctagtgggccggcaggtggcaggagggaaccttgtttgaaaggatttgggcgaagcgatgggcggggggcctggcgggtggcaaggagcaagcggcaagctagccccaggtccagtacttgggcaggtgggcgcaggctcccgtggggtcgtgcccctccccagtttccccagttattggggaaataaacacagcctgggagcagctaaaaacccagaaccccaaatagcaaatattcaggggaatgagggtctgtctatacacgagtattaagcctctagcattttccaatggcttaatagtttgaggatggtaacttcgggcagccattaatcatgaaactacctttagcagatctgttatagtgactgtaattagaaaagtttccaaacaatacgtgctcaaacagtctgaattggctaattacctcatcttcttcaacaagggcccccacggttgaggtagtagtttgcaagtctgcaagcccatctgaggactgccctgagctcgattgagctgagaaggtggtgctggaagtggactggagctgagagcatgggtaaagggaagtctttcctgcgctctcagttcacacaaccacttctctcctgcggggcagttcagggtgacacggaatcctcactggaggcccctt

SEQ ID NO: 39256 - DNA, 1579 bp, Artificial sequence
  DNA replication origin
ccgggaggagacagaactttccccttttttcccatcccttcttcttgctcagagaggcaagcaaggcgcggagctttagaaagttcttaagtggtcaggaaggtaggtgcttccctttttctcctcacaaggaggtgaggctgggacctccgggccagcttctcacctcatagggtgtacctttcccggctccagcagccaatgtgcttcggagccactctctgcagagccagagggcaggccggcttctcggtgtgtgcctaagaggatggatcggaggtcccgggctcagcagtggcgccgagctcgccataattacaacgacctgtgcccgcccataggccgccgggcagccaccgcgctcctctggctctcctgctccatcgcgctcctccgcgcccttgccacctccaacgcccgtgcccagcagcgcgcggctgcccaacagcgccggagcttccttaacgcccaccaccgctccggcgcccaggtattccctgagtcccccgaatcggaatctgaccacgagcacgaggaggcagaccttgagctgtccctccccgagtgcctagagtacgaggaagagttcgactacgagaccgagagcgagaccgagtccgaaatcgagtccgagaccgacttcgagaccgagcctgagaccgcccccaccactgagcccgagaccgagcctgaagacgatcgcggcccggtggtgcccaagcactccaccttcggccagtccctcacccagcgtctgcacgctctcaagttgcgaagccccgacgcctccccaagtcgcgcgccgcccagcactcaggagccccagagccccagggaaggggaggagctcaagcccgaggacaaagatccaagggaccccgaagagtcgaaggagcccaaggaggagaagcagcggcgtcgctgcaagccaaagaagcccacccgccgtgacgcgtccccggagtccccttccaaaaagggacccatccccatccggcgtcactaatggaggacgccgtccagattctccttgttttcatggattcaggttagttgcccaccgctaaactggggagcctgagggcggtgtgggagcagcgcaggtggaaaggaggtgagaaggaaaggcaggtcaggggcgagtgggaagagaggaggctcagctggtcagcctgggatcgggggtcagggtgaggcggcgagggctcccccaaacttcccaggatgccaggggcgccctggtggccaaaggcttgttggacggcggggcgcacgccgtgcgtcccgctggagacaacctgaggtctccgagctggtgccccggctacgcgactgaatcccgaacgcaccccagatttggagctgcacacccaaacggcattggtaagtcacttgttttgcgcgcttttcttcctcctagaaagactagtctcaaataagttggccttctcaggtgtccaaaatgtggttcggaggtgcgcgcgccaactttcacgatgtgagagcagccgcgctgtagagacaccgttgaaatgtgcggaaagtaatctgaatgggaatgggcgagaactctagagac

SEQ ID NO: 39257 - DNA, 1182 bp, Artificial sequence
  DNA replication origin
cccctgcagccccagccgatcctgactccggggcaaccccagaagatcccgactccgggacagcaccagccgatcctgactccggggcattcgcagccgatcccgactccggggcagcccctgccgccccagccgatcccgactccggggcggcccctgacgccccagccgatcccgactccggggcggcccctgacgccccagccgatccagatgccggggcggcccctgaggctcccgccgcccctgcggctgctgagacccgggcagcccatgtcgccccagctgcgccagacgcaggggctcccactgccccagccgcttctgccacccgggcagcccaagtccgccgggcggcctctgcagcccctgcctccggggccagacgcaagatccatctcagaccccccagccccgagatccaggctgccgatccgcctactccgcggcctactcgcgcgtctgcctggcggggcaagtccgagagcagccgcggccgccgcgtgtactacgatgaaggggtggccagcagcgacgatgactccagcggagacgagtccgacgatgggacctccggatgcctccgctggtttcagcatcggcgaaatcgccgccgccgaaagccccagcgcaacttactccgcaactttctcgtgcaagccttcgggggctgcttcggtcgatctgagagtccccagcccaaagcctcgcgctctctcaaggtcaagaaggtacccctggcggagaagcgcagacagatgcgcaaagaagccctggagaagcgggcccagaagcgcgcagagaagaaacgcagtaagctcatcgacaaacaactccaggacgaaaagatgggctacatgtgtacgcaccgcctgctgcttctaggtaatgcggcggactctgcctgcgggcagcagggccgccggggaaccggggagggggtggcagggctgcctggtggggctaggggctccgcagtgggaggagggggtccagccaaaggcgggaagaacttgctagaaagttccagggagggaccctaactgccctgggagcgggaggggatctttggtggattcgggtggccgaagtatatgccctccagggagaaaagtggtgccgagcgacactgagggtcgtttccggctggacaggccagcgccagcaaccgtaagctggaca

SEQ ID NO: 39258 - DNA, 781 bp, Artificial sequence
  DNA replication origin
agcgcagacagatgcgcaaagaagccctggagaagcgggcccagaagcgcgcagagaagaaacgcagtaagctcatcgacaaacaactccaggacgaaaagatgggctacatgtgtacgcaccgcctgctgcttctaggtaatgcggcggactctgcctgcgggcagcagggccgccggggaaccggggagggggtggcagggctgcctggtggggctaggggctccgcagtgggaggagggggtccagccaaaggcgggaagaacttgctagaaagttccagggagggaccctaactgccctgggagcgggaggggatctttggtggattcgggtggccgaagtatatgccctccagggagaaaagtggtgccgagcgacactgagggtcgtttccggctggacaggccagcgccagcaaccgtaagctggacaggcaggggcttcaggtgagccaggaactgccggggaggggccccggggccccgggactcccctggctaggctggtggggtccacggtgggctggggtcattggggaaggcgcgccccgcctcgcctggcacggctgcttggactcagacagcttgtcgttggtgtgtgttggtgtccatattctgtgttcgcctgtgcatgatacgctgaagtgtcccctgttcctatcccggcacccccaaattacccgccgactgtgtacttgtacttgggaacgggctgtgttgtggtttgcgccatggcccgggcaaaaaactttcgctgttcgcacactctggtggtacct

SEQ ID NO: 39259 - DNA, 1270 bp, Artificial sequence
  DNA replication origin
ggcggctcttgcctgcgccgggcgactcgcacttccgcgggaggccccggcgctccccgacttacatgtgagtgaggtgcactcacacgcaaggcagcgcctgccggccgcccgccgccgccccgcgccgggacaggggctcgctccagccgccgcgccgcagcccggagccagagagcaggggagcgccgcgccggccagccacctgacgcagcccgctccgcggtgccgacgcgactgagtgtccccgccggggagcagagcttctaaccggccccgatgacgccccagcctcttcagaggaccgacccatagcagcggcccctataaaccgaaggggaagcgcgaaaaatcggcccaccggggacgcacccaaatgggccgccgcgcaccctgggggtgcaggccggtgccgggaccgcgcgggcgtgggccgggggcgcgggggccgcgatggcggggggcgcgggcgcgcccaaggcggtgggcgctcaaccccgcctcccagacctgcctcccaattttcggtgagtggtgtagccctgggcggcgtgcaaagtgtgcgacggcggcgcttacccctgctgtgcgcctccttacctccagccacccaccccgccctcccagcggcgcgcgcccgccgaggtaggtgtcagagagccgaattcgaattatttgcgacgcccggacggagtttcgtatcttcggacgagaaaagtgcgatgggagtgcaaagcctcccctgctcgaagcagcaggcgcgccggtgtcacgggagccgaggagcggtggccgtggctgtggagtcggtgctcgaggcgtcctcccaggtgggagaggtggcggccttgcctgggcgccctgggggctctggaacagagggaaaagtagtttacggaacgtgaacttgtttgagggttctttcaaaactctcaagtgtcccgccgcacactaggatatagcagtgcacgggattaggagcagggttactaaattttcaagcagttgaccccagcccgcctttcctgggaccttggttaggtcatctgctgccaccatggtgtctgctgggatacggtttattcattcaataaatgtttggtgcctgccagttccgcggctcaccatgtgcccaggtgagccgaggcggccaggtaatcaggctaagacgtgagcagtgtcttggatgggacacaggcctacgtcccggaaagcccagatatgcaaagtccacaaactgtcttccaactttttctttgacttcttaaca

SEQ ID NO: 39260 - DNA, 734 bp, Artificial sequence
  DNA replication origin
accagagcaggagctgcgggagctgctgccgccgctgccgccgccgccgctcttattgcctcggccgggcccccgccgccgccccgagccaaaagcgccgcggcgggcggggggaggcggggggaggaggaggcggcggcggcgaggggggtggaaggaggaggaggaggaggagggccgaggagcggccgcggcggcggcggcggctgggagggcgggagccggcggagggaggcggccccccgggagcccggggagggggtccctccgcccgcgcccggccggggacgggacgggccggggagacgccccccaccccccgggctcgggcagcagcccggctgagccgaggggggagagggggcgtctccgcgccagtgacgacccctcgcacgacgccaacgctccaccccccggaccgcgtcgcccggcgcccccgaggcctcctccccctcccgcgggcgccgccgaggggctggggtgggcggaaggggagggagcgcgcgcccggacttaggaaaattttcgaaagagcgagagacacagagagccagagagcaggagtgtggaaaaagcgaggcgagcacgaaccaaaggacagagcaaccgaaaaggaaaatgtgtccacacacacacacgaacacgaataaaaacccacactacacagcgatggtggtgtctggtggcggtggcggggtggggggtctgactagatgagccgctcctcgcgcccc

SEQ ID NO: 39261 - DNA, 1380 bp, Artificial sequence
  DNA replication origin
aggagccgagcccgcgcccggcccgcccgcccggcgctgccccggccctcccggcccgcgtgaggccgcccgcgcccgccgccgccgcagcccggccgcgccccgccgccgccgccgccgccatgggctgcctcgggaacagtaagaccgaggaccagcgcaacgaggagaaggcgcagcgtgaggccaacaaaaagatcgagaagcagctgcagaaggacaagcaggtctaccgggccacgcaccgcctgctgctgctgggtaagggcgggcggggggcgccggccccggcccgggggccctcgaagggcgccccgcaggccgcgcgcgccgagcccgccccccgccccgggcgcgcgctcccgagccccccgcccgttcgcgggctctgtctgtggggggcgaggccggaagggggacccaggggcgcggattcggccgggcgggggctcaaaaacggggcggggggccgtggcgacgcgggcgcgggtccccctcccccggcctgcccgctcagtgtctctctcttgctctcgctctcgctctccccctctttctctctttctctctttttccgcgaggcctacacgacgccaggggtttgggtgcgtgttggggagggggagggggagcccatggggctccggagactgcgacaaaaagagggtttcggggacaggaaaccgggtggcgggtagagggagggggacccgcctccgtggggtgtgagatttgttgggagagggaaagaggggaagaaaggggcgaggagaggagggggtgacgctggggggcgccgtggtggcggagggggcctcgccaaagggaggctttggcggggagaagtggccgaggagagtgggggggctggtgacatcagcccctcggaaaggatcggagcggtaaaggtggtgcagtgggggggagggggcgcaagggagtcgtggcgccggagtcgggaggggggcggcgaggggaggagggagggcggttgccgctgggcgcgacttggtgcgtttcgggcaggaccgactgactgtgtgtgcgcggagcagacgtgtcccgggccaggccgggccgtggaaggaggagaaggagagtcaaataaaataagaccaccccccaacaccaaaaaatggatagagttagtacgagaagtgcccagtgaagccaaatgacacgtcattttacagtgtgacctttttttccccttccagacttgcaggctttttcaaaagcagagcggagaattaattgtagcagctgccccccccacccaccacgagcagcgcccccccaacactattttaataaaccattaaaaaaaacacattttcctgctggctggccacattgagagtgctttgtgaaaagaaaaaa

SEQ ID NO: 39262 - DNA, 1142 bp, Artificial sequence
  DNA replication origin
gagtttggccgtgggagaagcttgtgcatacctcagtgagctggttaggccgggtccagatgcttcaggcaggagtagacggagaggccagaaccgaaactgctcatccatccgagctctgcctctgggccaggactgctgtcgccgggttgggttgggcatagaaggatagggctcgggggcaggccatgggacgccctgcactgccaagtggaactccagaagcccaggcaggaggtgcttccagaaggatggagcgaccgctgtgctgactgctgccggagagtggtcagctcggatgacagtggagaagtgacctttagcaagagagaaagggctgaagaggagcggggcagtaggggtcggggcactgtctcaaaccattgagtgaagcagaaaaccgtgatagtgagtgggaggggccgggggcttcctctgttgttgtgagaaaggcaagtttggggtgtgcagatctgcttagagggggcatagctgacaagggagcggggagaaggaaagctggagggagccaagtccttgggaggaaacaggatggaacctagggtgggtcggtcaggtgggaggggacaaaccagccaccggctgctccaggaagagggtttggggtgcagagcatgggcaggctgggtggcggcaggatggaggtctgctttgggacttttcagtgatgcgtgaagtcaccagagcagggacagttccagaaggcccctggctgggcgaccgggaggaggccaggtggaggagcggactgtggggcagtgtgggagagtctggaaggtgacaagagatggaggggatgtgcaggtccagagggggctgccaatgggcagagggactccctgctcattgtgccctgggggagggacaggtgaggctgcaggaagagttccgacttgaacgtggggtcaggagatgaggcctgaggcaggtgcaggggtgtgtggctgtgaaatcattgtcctgggagggcagagtgagatgaccctgaacatgggcccggatttccttctaggatctgttttattgcatttgtgcatgggaagggaagcaggtccctcggtgaccaccctgagctgtccctggctgcaccttgggatttagagcccagccacctgggcagt

SEQ ID NO: 39263 - DNA, 1737 bp, Artificial sequence
  DNA replication origin
aacgggcttattactcacactgtgggctaacacaagtgtcctgaatacgtttaatgcagacaaagccaggccagggtgtgcaggaggctgggtgtgtcaaacacattttccactcatggtgttttcaacttacgagggggttgtcgggacatgaccccacagttaagtcaaggagcatctgtaactgtgcaaagtctacagcaccatgaagaaaaataaatccgggagataattcaggaagtggggtgtcatatgcatagggtggctgaggaagaccccgctgaggtgacatccataggagggagggagggagccatgggacctcagggagagaggaggtgcctggtgggagaagctacctccctgctccactctccgcaggagcaggggagcaagggcggactgggagggagcccgatggtgaaggctcttgaaggccagagggttctgtcttttatctgagtggaatcctgagagggtttcaagccaaagaacatgttctgatgggttgtcacaggctcactgtggcctcaggggcagaggccaggagaccagtgagggcagtcggcagtggggcggtgtggcttagacctggaggaggcggtgggcggtgcgtgatttctgcatctgcttcgaaggtagaaccgacaagacttgtgggtggattatatgagggacagaaaacagaggagtcgggtaccagtccaggcttttgcctgcatagccggaaggacagccagggaggactggggaagaaatgggctgtcaggtgacagtagtggaaggagccatccagacctgaaggtctgaggctggaggtgtcaggtgaccgggacagcgggcgagtgggcaggtggatgtcaagctgagttcaggtgaagggttggtcctggggaagctgacactcagaactctgaggagcagacagctggggagaggggaaggagtggccagggaggtggaggcgggcagtatggtgcaggagaaggaagcatcctggggagacgtgatcaggagaatgcttcacggtgggccccaggtggcagtggaaagaacagtgccggtggagtggcagaggtgggactgaggctggagtgggttcaagggtagagaagaggaagtggagggactccagatacttccctagggagcccagaattggggcggggtggggccgggggctttgtgttccttttttccaggtgggagagcttccctgagtgggaagggacgggctcagtgaggggacaagacagttgatcctgggggagaggagggaagacaaatggaggacctgctgccttggctggcaaatggccagggccccgtggaagtccccttctggtggcttctattcctcagtgaaagaggaagcgagtgcctgggcctgggtgcgctgagaaggaggtttcaggagaaagtggggtgaagcagtcatccgcccagagagagtcccctggggaaatgcggcagggctgacccctggccagggtcccacatccatctgaaagccatctcctttctacccgcagtccttcacagacgcacatcttgtcacctgactccctctcaaagagttcaaggcttcccacaggcacctgttgacctttctattctcccctcaccctcaccccaccctcaaaggctctttcacttcctcagcgggtgccaggcctggacacttcccctagactctgcccagtcctctgcctctagccccacccacaccctgcagcc

SEQ ID NO: 39264 - DNA, 1417 bp, Artificial sequence
  DNA replication origin
tgccctgcctccttcacattctgagagcgctggagcctcctagtgtgaggtgggcccacacctggctcacctctggtgattgtggccccactcccatgccctcaggtgttgggaaaggcgggagggccctaccgagggcttcctgggcccacggcccccgggagccccagcaccgatctgggtggggatgatctcttctcagcacatacccccggcctcatgagtacctgtccccagcggatctgcccaagagctgggactggcgcaatgtggatggtgtcaactatgccagcatcacccggaaccagcacatcccccaatactgcggctcctgctgggcccacgccagcaccagcgctatggcgggtgagtggccgccctttgactgtgggccaggaaagcccatcccggctgcctgtttataggcccaggcagctcagcccgcggttccaggggcctgtgattcaaggccaggtcagcctgggctggggtgctaaggccgaggagcgcgggcctttgccctctgctgaggtgacccaagctgggtcattctggggcttttgggtgacaggcaggactaggactgaatcccagtgacaagtggctgccaggtgccctctctcccccaaagcttgtgacctcagccattgggatagaaacagaaatgcaaaatcactgagtccccaggctgtatttgaggatacagaagtaaactgcttctcagcacagatgaaagcctgtcctgggcttggaatattgggtgaggctagttggctacagcccatggcctaacctggtcactacctccagcctggtgggtttctatcttaggcttttggcaggagtagggtagggaggctcttagcaaagaggaaggggaaactaaggccctccctatcaacgaggctgctgcaccctgctttgggagagaaggcgggagaagggacagctgcaaaccagccccaggcccaccccacagcatttggaagggactctgctatcccctctccagtcacagcacagggtccaggagcctggatttcccctggagatgggacttgcgtggcctgggagtttggcccatgagcactgtggtgctgttgcctcttccctggccttggtcctcatgggtcaggcctgctgtacacccatgtgaaaaggatagactacagtgtggctgccgctgtgggccaaggctgggggacatgcgtttgcgtgtgctccatctcactgacgcctcctcaatgccatgattgcttccagtttgcagatgaggaagcaggctttttgcagagagatggggaggcttgagcatagtgtgagtgacagctgagatttgagcccggaagcctgggctttgtgccaggatgtctgatgggctcagtcttgtgaatgaggggttcttgctctgggggta

SEQ ID NO: 39265 - DNA, 2085 bp, Artificial sequence
  DNA replication origin
cggcctcggcctcggcccagcacccggccgaccccgcactttgggcccctgccccgcccggcccttaaggctgcggcggccaggccgggacactcccccggggcggggctgtcccatcgctgctcctgccccgcccggtgacccctgccctccccgcccggctccgcgccccgctccctccctggctccggggcacctgaactcgcgggccaggcgcgaggtcgccgggcagaccccagcctgaccccgccgccggccgccgccctgagcgcgggactgtccggctggactcatttgccggggttcctggcttcggggtggggggccgcaggctcatgggcccccttggccctgcattcctggggccctgagccctggggagaggcccccagcctcacatctgggcccaggcctcccctaggaagggatcctgggatgcggccaccgcccccaaagaagggtccccgcgcctggctttctaaaccccttttcccaaaggcccaggccctttcggggggacggttcccttttgcagagaaggaaggagggatccttctagaaaatgccccaaaggaagattccacttggcgcaggcatcaggagttatccaatgtgacttccaaagacgccttgaaaaggttttctgctaacgaaactcttcttagtcaaatgaggaaccaaaagcagaagtggccccccaggacgtggttttgtaactgggggagggcttctcgctccctgcggcccctctgtttgtcatggcccttgggcccacaccatggccttcttctctggtaagaacagggcccggcattctgggctgcgacctgacaggcccctgctgggggcccttggcacagggcccacagatgagcttgcctgactctctccatactcagtggcactcaccacattccaagcgtgccacgtgggcaaggggaagtcacagtggctgcctcctgacttccagaagcttccatgaccattcccggaagcgctgaggtggccatggaatccccgcatgactgtccgagtggagagcaaggctggagagctgcttcgtcagcccagaagtttcagtccttgttccccaaaaagtggtcactgaggcaaagtgtggccccggggctctacctactgatgtgtctcttatttgtttggcaagtcgctcatggaaaccattagtgtccatcagtcatcagaaggcggggtggggtggccatcctgggagaagtccccaagcttgagctggcggtgggggtgggagcgaggcctcccaacctctgggcataaaaggagtggaaagagaattgccaagagggggcctttcttcctcccatgtcaaccctctggcctccctgactataggagctgggtccttgtgaggaagaaacccagacacagctgcccttgccaggtcatcaggtggcatctaccaaagcggccggtttttggcttcttctaaagaaaaagctaagaactcacaaaattgtgtggtaagagatatcgtgcccctccctccaggtacccatagttatgatccaggtactgtgaagtccaacagcacattctacagcatgagaaacaagcctggagaggggagggccccttgtgcttggcctctgatgcctgagctgtgatgtcctgggccctggtccctgaatctgggtgaaaaggcacccaaggtgtaagcttttctttcctgtagcatggggagagctggggtgctctgaagatgccccgagactctccgagcaggtccagcgcatgtagaaggtatgacaggcatggtcagcaaggcaggcacacgacccctgcagtcacatgaggccctaagtccagaagtgtaatgcagagctgaacgaggggctctccaggttcactgtgccctgggccctgcaaattatgtagctgggtctgatgacagcaaccacacctgctccatcacaagtcctgtacatcacccgctttcagcccagagcctctggcaaatcaaactcacaaacaggggtcaggaggaggggtgagatggtcaggaaggggaataaacattcacagtcctgctcccaaatgctggcacaaagc

SEQ ID NO: 39266 - DNA, 1195 bp, Artificial sequence
  DNA replication origin
cggcgcgatgcgcccggcgctaagaggcggggtttccttgcgccgcgcgcaaggctggggcaaaacccgggccgggatagggcgtggggccgcgcgtctggacgtccctcgcgtcgggcccgacagcgcctgcgcactgcgccgccggctggggtgctgggggcggggcaggggcaggtgtagcctctgtgcctcgttgtcccctggcgctacccggacatctctcagggtgccggcaccatgaagatctggacttcggagcacgtctttgagtaagtttggggcgcgggtcggctccgtggagggcaggcacgccggccctggagtagaggcgaggcagaggcggcccgcaggaggcttctaggcgtcgggcctagcgaggggagcgaactctgaagcctgcgggccccggcgacacggagggcagaccaaggtcacgaccccgaggcgccctagccgaggggacggctccgacctccagacccaggcggccttgcgaccggcagggctacggggtcacttccgggctgtcccccaccatgaggtagcctcgggccggcggcctcctgaggtcctgggggcgtcgcggagcacgaagcccttgacagcactcagggttgccccatcccgccctgtgaaaccactttgggacgtggacccgaggatcccaagagggaggtgttggttttctccagagtgtactttccctggccgccgtttgggtggagtttctaccttcgaatgtgaatttcgggtgaactctgaccaccaggatgtgaagccttttcacaactcgttcatctacgcagcagagccttggatttggaattcaaggtctagctctggctgtaacaagcgtgtgaccctgggttacccattttcatctgagagatggaaaaggacgatcgtcagggcctacccgtgttagctctttgaggccacgttcaggaacatctttttggataatgtgaactgtttactaacgaaactaagccttgaaccagttggatgtggagaattatattctcttctaggtccctgattccatttacaaaagagccacaaatttaagcagcgaaatccttttttttcccgagttacctgctctgttccgctgatcttaatgtcgttgccacactgttttaattagtatagccttgtaaataaatatgctacaaagccatttatgttttta

SEQ ID NO: 39267 - DNA, 1046 bp, Artificial sequence
  DNA replication origin
gacagccgggagttgttgaggtgcgtctgcgtccgcctgtgcttgtagagattgctctgggtcttaaaggcgatgccgcaggtggcacacgggaagggcctctcacccgtgtgggaccggatgtgcttctctagaacactgggcttcaggcagtcgcgaccacagtgcggacacaggtacttgcccgcattccgcaccttgcctgggctgcccagcgtggggcccaggcccggcgacaggacaggcagagtgcccacgatgttcaccgtcagcgtaggggccgccggcttccccacctgggtggggccaggcccttcaggctgcagcacagggctgagtatgaagggcacgttgcccccatctaggctgcccgtcactagcggggcgcggggctggaggcccccgggaggcaccgtgtggtacagtgggatgggcagggccttcaggaacacagtggggggggccaggccctgctctggcggcagaaggacagggcccagggtcaggtgaggtgaggcctggccacctggggcccctggagggccaggagtgggagctggctggtccctcgcaggaggggcagggcaggtgggttctggaacctccattccgcatcatctggatggcccacaatgctggaaaacctgcagacaacaaccaaactttaccatgggcacctctcctctctcctcatgcagtaaatcttgcctaccctgcaccaagcacttcatcacccaacggaagcctgacaatcccctaaggaatgtactctcatcccaagcgagaggaaggtactctcatccaaaagggaaagctgaggctcagacagcgaagtaacttgtcatgcaagctgacatgtggcaaagcgggatttggacccagatctgtctgaatcctgtctcttatttaacatgccatctgcacaggtccatggcaggtttgccaccatcatcccctggcaccagcacagtgccacatgcagagacactcagaaagtgtgctgacttcatgaaaaagtcatgcagcttgttcaaggtcctcgaagt

SEQ ID NO: 39268 - DNA, 2106 bp, Artificial sequence
  DNA replication origin
ctggacaacgtgcggccccggaagaccgggctgtccaaacagggcagcatcgacctgcccacgccctacacctacaaggactccttccactttgacatccgcgcgctggagccaggccgtaggagggccccgggccccgtgcgctccacctggacgcccccagacaagtctcggcccctcttcttccactccgtccccactcagctctccaccaccgtggaatgtgtccccgtcaccaggagcaactcgctgcccttcgtcgagggctccaggacgtggctggagcccagggagccccgggacccctggtccaggacgcagaagcctctgagccccaggcccggcccagcccgcctgggctgccgctcgggactaagctcgactgacgttcccagtgggcatccccgggccctggtcagacaggccgcggtggaggacctgccaggcacccccattggcgatgccctggtgcccgcagaggacacagacgcaaagagaactgctgcgcgggaggccatggccggcaagggcagagcgggcggcaggaagtgcggccagagaaggctgaagatgttctcccaggagaagtggcaggtgtacggggatgagacgttcaaaaggatctaccagaaaatgaaagccagtccccatggaggcaagaaagccagggaggtgggaatgggcagtggggcagaactgggctttcctctgcagaaagaggcagcagggagctcaggcacagtccccacccaagacaggaggacccctgtccatgaggacatatccgcaggggcaacgccagagccttggggaaatccaccagccctggaggcctccttggtgactgaacccactaagcatggggagacggtggccaggagaggagacagtgaccgacccagggtggaagaggctgtgtcatcccctgcactgggtggcagagacagtccctgttcaggcagtaggagccccctggtctctccaaatgggaggctggaactggggtggcagatgcccccagcacctggccccctcaaagggggtgatgtagaggctcccaggccagtttggccggaccccaagctggaaggaggtgcccgaggtgtgggggatgttcaggagacctgcctgtgggcccagactgtcctgagatggcccagcaggggctcaggggaggacaagctcccctcagagaggaagaagctgaaagtggaggacctgcacagctggaagcaaccagagcctgtgagcgcagagaccccaggtgggcccacgcagcctgcctctttgtcatcccagaagcaggatgccgatcccggggaggtgccagggggctcaaaggagagtgccaggcaggtgggcgagcctctggagtcctctggagcctccttggctgctgcttctgttgccctgaagagggtggggccaagggacaaggctaccccactgcatcctgcagccccagcccccgcagagcacccctcgctggccaccccacctcaggctcctagagtgctctctgccctggcagataatgccttttcccccaagtacctcctcaggttacctcaggcagagacccccttaccactgcccattccctggggaccaaggcacagccaggactctctctgcagcagtgggtggcctgaagaacgggcatcatttgttgggtcaggactggggacccctctttctcccagcccagcctcaggcccctccccaggtgaggcggacagcatcctggaggaccccagctgttccaggccacaggatgggagaaaaggggcacagttggggggggacaagggggacaggatggccactagcaggccagcagccagggagttgcccatctcagcaccaggggctcccagggaggctacctcctccccgcccactccaacgtgtgaggcacacttagttcaggacatggagggtgacagccaccgtatccatcgcctctgcatgggcagcactttggcaagggccaggctctctggggatgtcctgaatccctgggtacccaactgggagctgggggagcctcctgggaatgccccagaagatccttcttcagggcccctggtgggccccgacccgtgt

SEQ ID NO: 39269 - DNA, 1668 bp, Artificial sequence
  DNA replication origin
ggagcaccggaccaggaggacggccgcttgtggccgcgaaagggcactggggccgggtacagctggcctcgccctccagctgtgggggttcgaggccggccgatcgctcgctgcgtctccagctccggccaggagttggctgcggcggtcataaactttcagagcgcgctgcccatccctgcgcggagctggccggctgtggctcgggcttttctggcttctgcaccacccccgtcgcctccccgccccccagaggggctggaactgcctcgccgggcctttgaacccgggcgcactgggggtcgcctcccaggcgctggggggagctggccaggagcgcagcggcccgaggcgcacccaggacagcgaggggcgggggcggcgtggcgtggcgcggctgggtggggtggggtagggtggggtgggggccgggacagctgccagctgccggaaggccacgagagcgcgcgcacacacgcacacgcgcgctcacactcacaggcgcacccccgcccgccagttcgccgctccggagtagcagccccccatccaagagcaagaacagatgagaaaaggctgtgctcaaggggtgttatcttttctatcaggggctgagggaaagacacatttctcattgttccccgagtgacaccttccccttgaagagcctgcttgccaaggaactcggtgtactttacactcttgactcacgcctcgggctggctccctacctctcccaggagttcagagcctgcgtgtggggcagtggcctgggagcaaagtcaacaaagatcctgggttagcggtcctgtggtgtccagggcttcctcagccatctgcacaggttgggtggcttcaggtgagagtcgggctcctctccctaaaggccaagttcattcacacaaccgtccctaccaagggaaatgacctcccaagagagccccctacttccttcatagccttccaagtcctgtgtgtgggaggctgtccccatctccagctcagataaaaatgtctgagactgggaagtcctcctgacttctcagggcacttgtggtcaaaggaccctcctttcataacagatggggttgggggaggggcagtgcttcacatctgtaattccagctctttgagaggccaaggtggatggattgcttgagcctgggagttcaagaccagcctgggcaacatagcgagacctcatctctaaaaaatggggttgaattgggtcctgccctctactagccttaacgaccagcttctgaaaactagaaagcagctgaagtgaccagagcagtttctgaggacagtccaaaagagtgctacaacatccccctggcttgatagctcaggacacctgtcctctgaacacagctgctgtaccaggaggaagccctaacaagcccacctggagagatcacctggagaaacctacgtggagagaaaccgaggcctcccagccgaccaccagtgtcagccactgacctgagtgaatgtgccttccgatgatttgagctcccagccctcaagacttccaactgaggaatagctgtcccgctgtaccctgtccgaacttcccacccacacaatccatgagcataataaatggttgttttacagcactaaactctgggtaaattggtacagagctgcagtaactagagtagc

SEQ ID NO: 39270 - DNA, 2404 bp, Artificial sequence
  DNA replication origin
cagccggccagctccgcgcagggatgggcagcgcgctctgaaagtttatgaccgccgcagccaactcctggccggagctggagacgcagcgagcgatcggccggcctcgaacccccacagctggagggcgaggccagctgtacccggccccagtgccctttcgcggccacaagcggccgtcctcctggtccggtgctccggcgcctgatctaggttcatggagccggggctgtggctccttttcgggctcacagtgacctccgccgcaggtaagcgcacggggcggcgcgcctctcctggcgcgagcgcacacaaaaggacccagggcgggggacccgaggcgcggagaagatgtgcgtcgcggggagcaaactcttgcctgggctctgcactcgtgaagacgcctgggggagggctggggagcagaagcggcgcgcaacgactacccgcacgggctccgggagttgcagcccgcgcactggctggagacctgctgcctgggccgacttggtcaatttttcatgaaactggggacttttcagaaagtttgcgaactattcagaggctgtgccaaaccctggcaaagtttgcagaaagtatgcaaaatgcatgcaagttttcaacgggtgcagatagcttgcaagcttttcacagagtgtgcagatagcttggaaacttttcagaaactgcgcagagctttggaaactttgcagacattttgcttgctccacccccctcctcaggtgtttgggggtggcgggtgttgaggggtctgcacactcagcttaggagcccctcaatctgccttctgcaggattcgtgccttgctcccagtctggggatgctggcaggcgcggcgtgtcccaggcccccactgcagccagatctgagggggactgtgaagagactgtggctggccctggcgaggagactgtggctggccctggcgaggggactgtggccccgacagcactgcagggtccaagccctggaagccctgggcaggagcaggcggccgagggggcccctgagcaccaccgatccaggcgctgcacgtgcttcacctacaaggacaaggagtgtgtctactattgccacctggacatcatttggatcaacactcccgagtaagtcagccttttgtggtgaggaacgtggctcccggaccaggcccacatctgctcattcccaggaggacctcactccaccccagccccgctcagttagcccagagcctgccctggcacagcctttagctcttgctggggcctcttgccagcccaggtctcttctgcaggtcaggggtgtgacccacatcccccctgagggcctggcccaagagaaactcaatcctgagtttgatcctgtggaaggaggagccctccctctgaatgaagtgaactgaccagggggattagatacctgagatgtctctctgagcctcttttctgagatagagaaagccccgaaagtttatctcattccccaggggccaagggggctcatactcactgttgaccccaccaggatccaaggggtttaaaattccttgaaagcatcctggtctccagggagtctaagggtgggtttagctgagcctgacagaacctgcacagtccactcggggtagaattcccctgggatgggctcccttccttcctgtgggcccccctggatgccaaggcagggtgaattcacatcagctcgtccttgggccttccacaggctggctccagtcacccactgccatggtcacagagggccttcccttctctcctgcagtccttagaaactctcttaccctagggcctagacagcaccatcctgaatttgtcttggggttcgtccagtggggaagtcagccttctcctggggccatgtggagagagtgtggctctgacagggggaggctttgatgactcccagtgttcagggaacccctcctgcaggcacatcatcttgcaggccatacagagggcttgaccttgcctgggtcaccaactctctggcattggcttccccatctctaagatctgggacttggatcagacacctctaagttctgttccctgggtgttcatgggatctcttgggactcttgcttgtaccctattagggattcttagctgagaactcagagatggttgtgaatgcaagcccctggaagcctggaaaggcacctttgccaccgtgtcccggagccgtcttgattcaggttcctcacggtcacctttatccccaagccccataacctctgagcccttggtagcagctttcatggggctcacttacctaccttgtgtcatcggcacctcaaaaatgaagtgcagacgagggtagtaaacctgaggggtggaatgtctttcagaccaggggacaagacctctaatcacatccatgatag

SEQ ID NO: 39271 - DNA, 849 bp, Artificial sequence
  DNA replication origin
agcactgctggagggctgaggattctagggagagcactgctggggggctcaggattctagagagagggcactgctggggggctcaggattctagggagagcactgctggggggctcaggattctagggagagggcactgatgggtggctcaggattttacggggagagcactgctggggcgctcaggattctagggggagagcactgctggggggctcaggagtctatggaaagcactgctggggggctcaggattctagggagagcactgctggggggctgaggattctagggagagggcactgctggggggctcaggattctagagagagggcactgctgggggctcaggattctagggagagcactgctggggggctcaggattctagggagagggcactgatgggtggctcaggattttagggggagagcactgctggggcgctcaggattctagggggagagcactgctgggggctcaggattctatggaaagcactgctggggggctcaggattctagggagagggcactgcgagggagctcgattctaggagagggcactgctgggggggctaaggattctagagacagggcactgctgggggctcaggattctagtgagagggcactgctgggggctcaggattctagggaaagggtgtggctgctgagttcttgataaccagaagacagcaatgatcacacctgcaagtctttaaagcttataagacgtcttgggggattggggatgttcggaaagagtggggtttccttcattttctttcttacttcctttcctaccttctccacctgccttttgaataaagaatcagagaccgtggga

SEQ ID NO: 39272 - DNA, 686 bp, Artificial sequence
  DNA replication origin
tctctgtgccttgcccctgtggggcaccccagcaacctgcatgatgggctacgcctttgcccccacaacacaatgaagaaacgatatcctgatccctccaccaggatgggatgaggactgactgagatggtgtgtgagaaagcctgggcttgccttgggaaggcccagtgacagcttccttccttccttctgaaggatctgctggagggcacatgcccgcccacatctggttagcgtgaaatacaccatcgatgacctgaccctgcagctcccaccacgtctgggatgtggccttggaggagtgcccagagggctcccctctagaattctagcactgtgccataagtaaccccagatgcaggtcccctggatcttcacagagcaactccaagcccacccccaggacaccacgtggcagccacaggggccaacctccaccctctggaggaaaccccctggtatttcttcatggcctttagttccttagaatgtgagccctggttcctatgagcaggaggaaacggagagagaagagacaggacaggacagaggggagagagaggagagaggggagagagagaggatagagaggggacagaggagagacagatgggagagaggggagagggagggaagagagtggaagaagaagagggggagagggagagatgggagtgggggagaga

SEQ ID NO: 39273 - DNA, 1287 bp, Artificial sequence
  DNA replication origin
gctaaaaatgctggttccagggccctgacagaaccatgctctcaggagccagcactcagggtgcctgggctttttcttagaagaggtctgggatctatttctgaaataagctctctcagagaaatctgacaggtgcagaatttcagagctacaagctgagacaatggcaggggcctccagtagccgcctgtctctggggcccctggcccacatgaggcccctcaggcccgcacacggtctccctccagctcacatggctccacacacagtccctctggctcacacacagtccctctgacccacacacggtcccactggcccacacacctctcttggctgctgaggttttgtgcttccaccaagccaggggactgttctgtggccctggaaccaccgtgaaagcaaacaaccctcggctgtgttgggagacagctccagctcctccatcctcaaatgtgagagctgatgattggggtggaggaggaggtgagtggggagggggtgggggagaaggaggtgatggggaagagatgagtgggcaggaggtgagcagggaggaggtgagcagggatgagtggaggaaggaggtgatagggaggaggtgagtgggcaggaggtgagcagggagaagatgagcaggggggtggtgagcggggaggaggtggaggggaaggaagtgatgggggaggaggtggggggaaggaggtgatggggaggaggtgaatgggcaggaggtgactggggaggaggtgagcagggaggaggtgagcagggaggaggtgagtggagtggggatgggagtggagtggcgggaaggaagtgatagggaggagatgagtgggcaggaggtgagcagagaggagatgagtagagcagggatgagtaggggaaggaggtgataggaggtgagtgggcaggaggtgagcagggaggaggcgagcagggaggaggtagaggggaaggaagtgatggggaggaggtgaggggggaaagaggtggcgggggaaggaggtgatggggaggaggtgagtggggaggaaggtggggggaaggaggtgatagggaggatgtgggggaggtgggggggaaggaggtgaggcagaggaggggagtggggagggagatgagtaaggaagtgatggggagagggtgagtggggaagtggtgagaggggaggaggtgagggggcaagggaggcgatgcggaggaaggaggtgatgggaaggaggtgagtgtgtaggaggtaagcagggaggaagtgggggggaaggaggtgatggggaggag

SEQ ID NO: 39274 - DNA, 856 bp, Artificial sequence
  DNA replication origin
cagctccgagccaagcagggattcgggatccgcacagccggcggggggcccggggggtgcgaccgctgtgctgccggcagttccgcccgcggcctcgtggtggcgctgttgtgcagcgagtgagcgcggcgcgtgggggaggcttcggcagcgccggggcccagagatctgcagacttcgctgcgccagagtgggggtgcagcgtggggaacagcccgctggccccttcttcctcgggccccgtgccccccactcaggttcctggggcaaagtcatggttgttgtcatcgcccctgattgagcctagatgagacgtggtcccagagacaagggattcaggggactggaggagggacccccgctggggtggctcgttggggaccaacttgcctggcaccgagataccctgccccgctccaggcctgggagcatcctaggagactgtggcccggtgtcctcgggggcctggcacgggctgggttcagtgaagtggagggtcccctctttctgggcaggggcgtctggccgcgagggcgtcacggggtacattgaactcctgctgcgacacctgtgtatccaggcccgggagaagacagagcgcctccctgcaaggggagaccggttcccacctggactaggtgcggggacagggggaaggtccctgagaggaccctggggacggagcagtgggagaaacttccttctttcctagtgaaaggcactgcctgcccagggtgcagagtaaatggacagtgacattgggcccagacagtgacacaaacacccttttcagacatggaaagggggtgcgtgtgacaaagacagagagctctcctagctaaagagagaataacac

SEQ ID NO: 39275 - DNA, 1861 bp, Artificial sequence
  DNA replication origin
gggctgccttcgggcacagctggaaccagctgctcacacggacaatgccagcagcccctgatacctccctgtccaggctcctccctcttctgtgttcttttgattctgagccatgtaatggccctggacgttcagaccatccttctcaggactagtggataacatgggcttctctctcccagtccagcaaagtcccaaatgtgtgcctctgtgaaccaacttttctggcccagcccctgaggtcaggtggatgatctatgctggttggttggactaggtcatgagccctcccctggaattagggaggggccctgggtccacagagtggggaaggaggcttccagcaggaaatggaaatgctattcccagcagagtgggacaaagcctgcaaaacacatggtccctgagtgaccaggaccaatgcctgtcctctcaaattccagcccagtgtggggcagggcagatgggtggacaaatcatctcaatgggatgcagtgtatggccaacagagtgtgcacccagtgcagggggcctgcggaagggagagccaaaggcctggggaagacaggcagggagactgaaggattaaagtcttcagaaaagaggcaaacacttaagccaggtcttgaaggttgggtaggagttcaccagggcaaaccaatgagctgggcacagagctaggaagcaccgcaacactggccaggtgttgaatccagacgctgcacctttctcactttctaggcaagtaacttcacttctctgagcctcagtttcctcctctagaaaggagggcatgatgatagtgcctctctccaggagctgatggaggagcaaacaggatgaagtaggaggggattggagcagtggactcagtttcatctttcatggagcttgcattttctcatccataaagtgggcacagtaacagcgccctcctcagtgagttttctaaaggttcagggaatgtatgctcagcgcagtgccaccacgtgctggctgccgactgttaccaccgttaagcagttctgaagatgaggctgagaagtctgggcgggagacgcgggaagcaggcaggctgccagggaggaggcaggtggctgggaggcctggctacatcccaatcccagcactgccctggccgctgtgtggcccactgattgcacctgctgggggagccgctgggggatggaacgggggttcctagtccctcagcagagtgcactttgaaagccttcagtggtggaggaggggagtggtgttcctttggggctctgaggacctgagtgtcaggaggaaggttacccggaactctgctggggacgtggctgtgtgggtgctgatggggaccctgagtccatctcaggccaggatcctgcctcaagggcagggctgtggctacaaaaaccccaaagtcagtagaggctgctgaggcctctggagagtcaccccaaccccttcaggcccaggtgctggtgggtggacgggcgttttgtgagagggcgctgggagggtcagaggacggggccggcacagttctagttctggagctggttggtggttacaaaggtgtcccccaggcagcactcattaagctaaatacgaatgttttgtttcatagcaaaaaaggtaaatatatggggtttattcgaaaggcagcagtgcctcccaccgcccttacattaaaggcagccaaggagtctccaacttagggagcgccaggcccggctcagtctcggcccatcccacttcagccccagcccattttacacaccagaccactgaggctcagagaggccaagcgactcgcccgccgccccacagcggctccagcgctgctgcctgtttacagcgcggggaaccg

SEQ ID NO: 39276 - DNA, 2007 bp, Artificial sequence
  DNA replication origin
ttaacgtttctagggcatccctggaaggcccgggcacggcgctgaggtctccgctcccgctcccgctcgcccgggcgaggctgcggctccgggcgggtcaaggtcgcagcggagcccctcggagcccccgcccggcggagaggccggcctcgcgtggcggcgccgcccccggccctggtcccggtcccgccccgccggcgcctccccgcggccccggctccgctccgcggccctccggcgggatgcgtggccgtggcggggggcgcgcccgctgtcctgcgcccctgcgctcgctgctgggcgccttcggggcccgggacgctgccgccgccgcccgagatcctgcgcaaggtaagcgcgcgctgcggggaggggacgcgggacgtggggcccggggtgcccgccgggcacgaggcgctgggggacgactcctcctgaatcccttgcccttggccgttgcgggtggccgggaggcccgctgcgcccccagccacagaggtgggcgccccgggtctcgggcttaccgcccccctcctccccctcgcagcaaagtcaccagagtctctccctaaacaagggcagtgtccgcagggtcagaagcgctggcgttggggtcgacagtctggggtttggaattcccctctgcccgctgtatgagcctgtgcgcatggcgtttgaccttgctgcgcctcagtttctgcatctgtgaaatgggggatacctgtgtcttgggggcagcagttgggatcgtatggacagcgctggccacccaagggagggctctgtgcttgatcgcccttcttccccagggagggccatgggcctccacccacgtgggactggcccctcgccccctgctgggcagacacctgaccctggagagggtccagctgcagttcaagggatgggatctaggaagaggggcctgaggaatccagaaaatggccagggccccagctgggccagggaagaggagttgaggacggggagtggcctcaggcctcctggtgacaaggctagagttttgcctgtgctcagtggccatgggtgcatgagtaccaggtgtccagcaggcagagcccggagtggggtggaggagagctaggccagtgtttccgcactggcccttggtgaggataccgggggcacttattacagattgttccaggggccccacccaggcctgccccttgcaatctcctgggagaatctgtgtttttaaccaaagcaccaggaaactctggtttagatccatccgtggttcttttcagtgcctcgaaacgggttgatcctgccttcccttgaagacatttctggttgtcacacctgggggaacgccactggcacccagtgggcagaagccggggacactgctaagcatcccgcactgccaggagccctccttccccacgaggcggtcatggtgtagtccacaggctagtgctggggttgggaaaccctgagatacagggatacatggagtcacaaagtcaagaaaggaggacatggggatttgggggacacttgagagcccgctatctgccaggccttctgtggtgcccttggaggagaagctcgtggcagaagctgagctcaggcacagaggatgggcagctgaatccactcatcaggaatattgagcccctactgagcgccagtcccagtgctgagctcccagggtggagtcgggagagggagatgaggcccctctagggtgctcccctctaatggggcagaagcccctcccccagtgcctgcacagagtaagtgcccacaagtgtcagtgccctcccctaaagcacccctgtttttggcagtgcatgagtactaagaacagtggggcatattctgggttggattttgggaaagggcgttcccagtcctaaccttcggcagcttggcagtgtgttcagggccaccaggagcccatgttctgcctgcagtaattacgcaactcctcacctgttccttgtgctcctcagtcgctgggcatttttaaaatagttc

SEQ ID NO: 39277 - DNA, 971 bp, Artificial sequence
  DNA replication origin
gcggcctctgtctaggccttgatggatggatggcagggctcagccactgctgacccactttccccaaggagaaagcggaatattttgtcagtgggtcagcaaatgattattcatcattgaaaatgcttcaggcactgatctagatgctgggatgctgcggggagcagggaggccctgaggtgagaattcacttgatggcactggggaataggagggtccttgaggctggaagcccatcagctaggggactggagggagctgagtttggggaggtggcccatgggccttggcctccatcagaagtccctaggggttctacatgtgcaacccgaggccaatggcaggttctaggctgaagaattgcatgtccctctgtgtctgagagaaagctcctcatggctgctgtgtggccgcaggtttatttggaggctatggcagcagagttgccagctgcttggaggacaggagggtccatcagagacggagaaagtgggaagcactgggggctgataggacctgctcatgacttgggtaccccaaatccaggatgccctgtaggtttggggtctgagcactgggtggatggtggtgctgtttatgggggtgtggaaggcttggtcggggaggagggagactggccggaggcttctgcagtgcattccttcactttccgtgggagaggggaggtctgggagaggaagcgcgcattccgtgctgaccatggtgatttggaggggctgtttacactgggccattgcacgtctgagtctggagcttggggcggtggttgttctggaggctccaatctgagattcatcagaatggggctggcacttaaaggaggtcacttgggagggggctgaggcagagagtgtggctgggtttcttggtttcaatgttgcatttcaatgttgagtcagataggaccccagtgcaaatgccaagttttgggttggagcaagggtcccggc

SEQ ID NO: 39278 - DNA, 941 bp, Artificial sequence
  DNA replication origin
caacggtacacttcccttgcataggactcctagcctgggccggggctggctgggatgaggggatgggaggaccgggggtctggcccagggtttgcgttgtgggctttgcattgggcagggggagttgccctttggaagctggtgaccttgtggcctagatgacctggagcaatgtcgattttgcgtgattacagtattttcaggaaagctacttaggtgcaccagtcaccagggacggttcacgcgtggacatgtggaaggcctttcctggagggaattcagcagctcttgggcctcacactacgaagtgggccagaccggtgggctcgctatggaaggttcctgcaccaggcattttagtgacaaactgtgggtcaaaggaaacacaagtgagcgcgtgggcaagaaggtgtcgtactggtgcccgtgtgtgcaacggggcagccctgactcagtgcctcagtgcctcagtgccttgggtggtgcccttaaggacaagtgtgtgtgaacgtgcatgagagtgtgaggatgtacatgagtgcgtgtgcctgtgtgtgcctgattgtgtgtgtgtatgcatgtgtttgtgaggccgtgcaagagtgtgtacgtgcctgtgtgtgactgtgtgtgtgagggtgtgaagctgtgatgagtgcatgtgcctgtgtgtgcgtgattgtgtgtgtgcgtgtgagggttgaggctgtgcaggagtgtgcgtgcctgtgtgtgtatgcatgtgtgtgagggtgtgaagccgtgcaggagtgtgtgtgaaggtgtgcgtgagtgtgtatatgagcaagtgtgtgcatgaatattacatgcatgagtgtgtgcatgcacaagtgtgtgcatgagtgtgtacgtgcatgagtgtatgtgtgcatgtatatatggatgcgatctccctcaacctagtgtgccagcctcagcac

SEQ ID NO: 39279 - DNA, 1373 bp, Artificial sequence
  DNA replication origin
tgccgcgcgagaggagcatgacgtcacgggagaggggcgtgagaaggcgcgtggccactgggaggggtcgcacatacctggaccgcgcgccggggtgggggaggaggggctggaccccgggttaggagccgcccaccccaccaagccgtgctctagaaacaggaaagcttcctagtcccgtttcctcccctcccggaggaaagggaaccctgagagcccctaatttccccagcagctgcagacagctggtttccctggtccttcctctcctgggactgggaggccagtgggtcccgacgcgcccaccccggcaccggaggggagcgacctgaggcttcctccccgcaaccacctggcctgggcctgctagggcaccccggaccctccgaaccctcgctccgaaccctcctccctgccggggggcgggggggcgggggagagggaggagggcacgggcgctttccaatgaggcttttcctcagacgcccttaggaacctgaggggccaggcaagggaggcgacaccccccagggctgccactcacagaggtgtcctccagggtgctaaggagcgattctcacaaccccagcggtggtgtggggtgaacacaggcaggcagccgctgcttccccagccagggcagggaaggaagaaagtccaggaaaggggtagagacgggggtggaatggtggtgtcacctggcctggtcctggaaggtgcccagaggaggaggcatttcaacagacaccaggattcaaggaccacagagacacctgggggaggacacccccatttcaatttctcaaccccatggggcagccccgctctaagccccctttgcaggtgctggaaggggtgggggcaagcggggagagtcgctcaccaagggtcctcctgctggggacagagccctccctaaggctgcccccatcagattagcacctacagcagggcctgggagtgcagtgtgagcgctggcagtgtggacgaaatcccggttaagcgccaaggacagaactgagcggggtggtggtggggagggggaataaagtggatgttcactccacacagagctttgggctcttagcagcagttatttcagcagcatcagtcacctctaaagaaaggactcattcattcattcagactgtgtgcagagtcgagtgtgtgccaggcaccacaccaggcattagggacctagcagtgcacaaacacagagacgccccaactccttgagtcttccgggaaagggggagggtgaagccgagaatggtcaccaacacactaataagatgcccaaataatcatttaattacagttggcaattaagatcaggaaacaaagaggaaactggtgggaaactgctaggaata

SEQ ID NO: 39280 - DNA, 1977 bp, Artificial sequence
  DNA replication origin
gtggccgcctccgcccagcgccggttctgggccattccctccctccccactgccgggccccagctccggacgtccccgcttgggcatctgctcctggaaggcagcgctccgcagctgaggccaccgcgctgagggcttccaccaggcgcctgactccagcggggcctggcgcacctgggcgcgctagcccccggacaggtgtgctgggcagagccgccggcagggagacgaagggcgtgcgccaggacagagcccggtttcgtgacagcgtgtggactccgtccactcttccacccccatggcagcgttgattgtttaggtgataaaccggtcacaaaggcgtctatagggcttgattgattactttccagagaggaagaaaggcctaataaagcggggggggaggtgggggggggggtgggctgtgtgcgcctgtcaccatggagacgcaggaagcaaagtgatcattaaaacctctctccaccagaaggcaattttcacttcacagggagaagtctgggcttctgaaatgtagggttcaaaaaaagaatcaaagctggtgttttggtatcaagccacaggactcagttttgtatcttagagaagcacaattccttcgtagattctgttttgataacaagttgcttcgcctgcctttgaagacttattctctctaaatgcaacgaccccagatggggacttgatgatgttaaatggtgggcatcagaatccctggggcccgggtgaaggctggctttgtggggagggattcctgcactggaacacaccagagcttcccgataaactgcctagaggactcattacaggcagctgtgtgggcactggatccctcccccccccatttgaaaatttaaacaataaacccgggcaagtattggaagatttctttgttaagactattgacactgtgtcacttggtcaaactaaggtaccggcctgaataaatctctgacttttctttatctgggagggcaggttaatttccttagagtttcaagcagaggctgccatggccgacccttaaggttttaattaatccttttactaggaatgggggattcagccttcagcactccatgatggattgcctttctctgggttggagaggcgcatccacaactgttccaatcatggaagttgagtggcttctcatgagaatccttctaagctccctttgtctccctggcagtaagaggaagcaaacttgaaatggaaattatggaggacttggctttttggctgtatgtgagtttatgcctctgtgggtgggagcggagggttgggcaggtggtgccggtccatgagagaaggaggaggaagggctgggatgcctgtgattaagttatgcgtgggagggcacaggcttgagctctcctctggtgcaactggtctaaatgggacccagagaacaggtgtcagaggtgaaaagtctaaaatatgtgcaattctgtgagcagtagaaccttactaaaaagcaccaagcaattaagtatttatggattgtgtgaagcagattgtgtttctgttctggcagaaagagaatcagaatcatcaagttggagggaacttgggaacttgatggaggaagggcgggctcagggagtattttctgtaagcaccttgcctggctggcctggtgtgtgcctgcatacttcttttgatggtggactcagttcttcctgatgtagtgcatacttgtctttgggcagatctgtttaagaattctttttccaatggttccaaagggtctggtacccatcagtcctgatgggatcttctcctgctgggtgttactcagggctttcagagagcctggggttttaggtattgaaacaacctcagtcacttcttggaaagtctaggcccttcacctgctcttcctagatagcctcccttatttgtccacctgctgctctaatgtgagactcctgaaaattgaacctgaagctccagctg

SEQ ID NO: 39281 - DNA, 897 bp, Artificial sequence
  DNA replication origin
gtgtctggcagacctgtgaccttgggagagggaggtgtcaagaacagagcctggtgttgacggtgtgtgggtgatgagggtgcacaggtgatgaaggaagtggccatcagcacaagcccacacctgtctgctggcagagtggcataaaagaggaaggggccagcatgggatgccctgagcccagggcctggggaatgtgtctgtgcatccgtctgtagctcatgacaggagaggatgctctgagagggtctccctctccaggcagtaaagcagacctggacccggccctgcagaaggatgcagctgctggctcctctttgctctccctccaagcactctctggccccatccagctggcaggagtggccagttgcctggccaggcaccgccacataggttgagacaccagcgcctggggcttgtgcccattcgtcctacaaatgcttactgaaagtctcctgcatctgagctctgtgctgagctcaggggtgcagcacttcaggtgatggtcaagccccctgtcctcaagaggctcccagtctagaagggacagtccacagagaatgaaactgacaagaaccccaggtgttgaagagtgccaggagcaaatcagaaatgagatcagagttccctggggtggggaacaggtctgaaggactggaaggaccgggcagaacacagaggtctggagctcagagccagagagttggagaaaggagctggagaggcatggagccaggacagagcaaggcagcgacagccaagggacaggggatggctggtgaggagcagtgatgggatcatgttgaggaaggcccaggaggcagcctgggacccgacaagaaggaggccaccatcgtgctggggccgatgccaggggctggccccaggatgtgg

SEQ ID NO: 39282 - DNA, 869 bp, Artificial sequence
  DNA replication origin
tccattttctataatgaacaggcaatgctttcataatcaaaaaaaagctctgagttcttaaactcagtattttttaagcatctagcttttatgtttttaataaccctgaagaagctgacaaggtaattactgcatagttctactactaattaagccatgtagacactctacaaggagccagagggagatcctcagaacccaggactccagaataagagaacattcgaggaaggaagctagaaagagccatggtacagacaaaagaggctcttgcctccgccctctcccacgcccaggaagggggcagcattagagggtttgaggcaaaggagagactagaccacatttgcattttggaaacttcctgttctgcaggaaaaccggtaagaggaagagaaccaagactcagtgttgaggttgtccaggaaagggaaggtaggagctaaaccctggtgggggtgagggtgggggtgggggtgggagacctgaaacaagtggggtgggctccaggaggcccgtgtctggcagacctgtgaccttgggagagggaggtgtcaagaacagagcctggtgttgacggtgtgtgggtgatgagggtgcacaggtgatgaaggaagtggccatcagcacaagcccacacctgtctgctggcagagtggcataaaagaggaaggggccagcatgggatgccctgagcccagggcctggggaatgtgtctgtgcatccgtctgtagctcatgacaggagaggatgctctgagagggtctccctctccaggcagtaaagcagacctggacccggccctgcagaaggatgcagctgctggctcctctttgctctccctccaagcactctctggccccatcca

SEQ ID NO: 39283 - DNA, 1280 bp, Artificial sequence
  DNA replication origin
gatgattgctaggtagatatatgagtggataggtgggtgggtgggtgcgtgagtggatggatggatggagattgatagatggataggtggatggattggagaatgggtggatgggtgggtgaatggattgacggatgatggctaggtagatataccagtggataggtgggtggagggatgggtgggtggatggatggatggataaatggggatggatagatggatggatggatgggtagatggacggatggataaatggagatggatagatggatggatggacgaatggatgggtagatggatggatgggttgatgatggctaggtagatatatgagtggataggtgggtgggtgggtgagtggatgggtggatggatggagattgatagatggataggaggatggattggagaatgggtggatgggtgggtgaatggattgatggatgacggctaggtagacataccagtggataggtgggtgggtggatgggtggggtggatggacagatggataaatggagatggatagatggatggatggatggatggatggatggatggatggatgggtagacggatgtatgggttgatgatggctaggtagatatatgagtgggtaggtgggtgggtgggtctgtggatggatggatgagtgggtagaaatccaggcagctggaaggacagtggtggaaggacaggtatttggaaggacagtcatttgaagaggaaacaaagacatagtatttgaggggggaattatctgcacagcccccaatttgctgacattagctcctggagaaaggagcacctgcaggatgagcatttcccacctgtctgttcttttctcttggccaagaggacctcacagcaatgctctggttacagtcaggggaaggctgtactgaccacacaaagttccaagaggggacaagcatggtgtgacctccagccaacttgactctctcatcttctccccacgttcctaccttggacctcttctgggctggccgattgaaagagaatattcataaagctgactttgaggagtgttttgggaggcaggcacaaagattattggtattgagtcccagttctataacttactagctgtgtggctttgggcaagttaatccctctctctgagcttcagttcccatcctgatgccaaccttgggtactgctgagggaggaggggagaagggggatggatgcacatgaatggaaggcagtagcagttgttaattccccttatctgactttccattttactaccttca

SEQ ID NO: 39284 - DNA, 1143 bp, Artificial sequence
  DNA replication origin
ttagctgggaagagggagaaggacagggagggagaggggtaagtggaggggaggagggggaagggaagagggaaaagaatagggagggagaggggtaagtggaggggaggagggggaagggaagagggaaaagaataggaaggggaggaaaagagagggggaaaaggaggaacagggaggagaagggggaggaacagggaggagaatggggaggaacaggagaagggggaacaggagaggggggaacagaaggggaggaacaggagaagggggaggaacaggagaagtggggggacagtagaaggggggataggagaaggcaggagaaggcagagacaggagaagcgggggacaggagaaggggcaacaggagaaggcaggagaaggcagaaacaggagaagtgggggacaggagaaggtgggaagaggagaaggggggaaacagaaggagggggaacaggagaaggagggaaccagagaaggggggaacaggaggagggggaacaggagaaggggggacaggagaaggcaggaacaggagaaggtgggaagaggagaagtggggaacaggagaagggagaggaacaggagaagcggggacaggagaaggggggaacaggagaagcggggacaggagaaggggggaacaggagaagcggggaataggagaaggagggaacagaaggggagacagaagaagcggggacaggagaagggggaacaggagaaggggaacgagaacaagggggaacaggagaagagaggacaggagaaggggaaggaacaggagaaggggggacaggagaaggggaaggaacaggagaaggaggaacaggagaaggggaaggaacaggagaaggggaagagggcagagtggggcaaacccaagggcaggagtcagagccatgccccccgccccagcactgcctggggcagcacattaattctgaacattctgggggcgttagtccacattcagggtctctgggtctctaaacgcagcagccacaggctgtcttgacaagttgtttccacctgttagaagacgtcttgcccttgctaatgacacctttaagcgggaggtgggagggaaccagcccaggacactgacagccgaggctggctcccgattcctgccccttg

SEQ ID NO: 39285 - DNA, 1524 bp, Artificial sequence
  DNA replication origin
aggggatgctggaagccacctgagtggaacacggtcactctgcactgcagcccttcccgtgtctagccatagccacatattccacatgtgccacacacatgttcacctgacctcccctcccccacgcctgctggtggaatggaagcttcggaaggcagcccccgcatctgctttgttcttccccccatcctaggcccagtgcggagagtggcacacagaggctgttcaggaaacatctgttgctgaactaaaatattggggagggggtgggatcactgcggagggggtgggatcactgtggggagggggtgggatggcaggggagggggtgggatggctgcggagggggtgggatggctgcggagggggtgggatcgctgcggaaggggtgggatcgctgcggagggggtgggatcgctgcggagggggtgggatcgctgcggagggggtgggatcgctggagaaggggtgggatcgttgcggggcggatcgctggggaaggggtgggatcgctggggaaggggtgggatcgctggggaaggggtgggattgctggggaaggggtgggatcgctgcagaaagggtaggattgctggggagggggtagctgtgtttgtccacatcactctcagcgcctctcagggttcctctttccctcctcctcctcaacttcctgccagctgctcacctccctggcccagtgtgggagggtcaggaatggggcatttttaaattccccggcggtgctctccaagcccatagggatccacatgcactcctcaaaccaggctgctccagaaatcacttagaaatcattgctacctaacagacagaatgctttccattcactcatccatctcttcatttgttgcttcttttcttcctttaatgtaacaaaattaacttgaacacctaaagcagcagaagccgcgagtttcctaccccatctcccttctccccttcttatgcctgaatgctggtcctattcagagcagtctcttttccagctgaccacggccacatgaggagggtccaaccaaggagcagtaggtagatgtgtgtggaggagcttctgggaggagccctctggaaaagctgactcagctgagatgtatgcccctttgggacttgaatatgatgtctggtgcctttgcagccaccctggaccatggaggatcaacaccggcataagggtaaatagcaggaaggtaagaggagtctgcgtccttgttgattttggaacaaccatgccagtcctgaccgcctgtgcaactattccagggagtggggtggctctaacgtgcggtctggagtcggcccacctgggtcacatctcagctccactagcttactagctgtgtgactttgagcatcttacccaatctctctgggcctccatttccttagctgctaagaacatccaataatagcatttacgtcttatgtttatatgaatgcaggcaaacaccacccctcatacataacatgggtttcatacatgttagtgagctatggttgtgctct

SEQ ID NO: 39286 - DNA, 1169 bp, Artificial sequence
  DNA replication origin
ggctgaggcgcggggcggtgcgcttggcgagcggggagcaggcctggggctgcgcgcgtcgccggcccgaggaggctgaggggtgcgggagaagcggtggcgacgggagccctggggaccgctgctcgcctgtctccgggacatctgaaggggggttggcgctgcggcctggggcgcatctcgggtgtgtgtgtgctttgttggttcgggggtgaccctgggaaaagggtcaccgtgccggcggtgggagcagggacttcgccttcggcctcgttgttgccactgccggttccacttagggaagaagggagtgcgcgcaaaaccttcctcctgctcggcgccttcagtcccttctctccctcccgccgtccccacctgcggcctctccttgcggttgaggccgccagcccctccgcgcagctgggcctgatgcgtcccgcggcggctcaatgcgcgacacgtggctccacgtgcggccttttctggaccgggctccaggctggccgagcatctgcgaatacggcagcgtggtttttttttgttgttttttttcccgagacggagtctcgctctgtcacccaggctggagtttagtggtgcgatctcgcgtcactgcaacctccatcttccgggttccagcgattctcctgcttcagcctccggagtaactgggactacttggcgcgccaccacgcccagctaattttgtatttttagtagagacgggttttctccatgttggcccggctggtctcgaactcctgacctcaggtgatccacctgcctcggcttcccaaagtgctgggattacaggtgtgagccacctcgcccggcctacattttttagtaatgatgggaggaggaggacgccttccctccccttcattcacctttaatgtctttttggacaccttagctatgttagttaccagggcagaggggactttgaattatctactgctgcttgcattcattcagcagtttttcctttgggggaaaatctttgcctcccccatctgccaaattgttttctttgttgttgtttttatccgtaacgcttttatctgcctgcagatacacaatcatcatcttactagttctctgtgttgctcgctaaccagtcccccagttcagtagactggagcccagagcctgcttacttgtcaggt

SEQ ID NO: 39287 - DNA, 821 bp, Artificial sequence
  DNA replication origin
ccggaggcgctgcggcggtccctgaggcgcagagttgcgacgctcggcggcatagggggcggctccaccgacactacgcggacgcctcctgccgcaggcaggttgagcagagtgcctgggtgggcttcccccacggcggggcgcggagggagggtggggcttcggcttggcctttcaagccggcaggcgagaagcttccgacggttgaggcggagccgttgtggaagctgccgagggggagggggtgcggttctgcggcagtgggcggaggggaggcgccgaggctgggccagggcgtgggctgtgcagagttcgcggcgagggtggctcgcgcaggcgcgaggctccccatcagcacctgcctggccagcctcggcctcggggatgggaaatgggcgctcggagccgcccccgcgcgtgggcgactcggtcaaggtggctgaggcgcggggcggtgcgcttggcgagcggggagcaggcctggggctgcgcgcgtcgccggcccgaggaggctgaggggtgcgggagaagcggtggcgacgggagccctggggaccgctgctcgcctgtctccgggacatctgaaggggggttggcgctgcggcctggggcgcatctcgggtgtgtgtgtgctttgttggttcgggggtgaccctgggaaaagggtcaccgtgccggcggtgggagcagggacttcgccttcggcctcgttgttgccactgccggttccacttagggaagaagggagtgcgcgcaaaaccttcctcctgctcggcgccttcagtcccttctctccctcccgccgtccccacctgcggcct

SEQ ID NO: 39288 - DNA, 1131 bp, Artificial sequence
  DNA replication origin
cggcccatcatcctgcggcgggcgcgctcactgcccagctcccccgagcgccgccagaaggccgcgggcgcgccgggcgctgcgtgtcggccgggctgcagccagaagctccgcgtgcgcttcgccgacgccctgggcttggagctggcacaggtcaaggtgttcaacgcgggagacgacccgtccgtgccgctgcacgtgctgtcgcggctcgcaatcaactcggacctgtgctgcagcagccaggacctggagttcaccctgcattgcctggtgcccgatttcccgccgcccgtcgaggccgccgactttggcgagcgcctgcagcggcagctcgtgtgcctggagcgtgtcacttgctcggaccttggcatcagcggtacggtgcgcgtgtgcaacgtggccttcgagaagcaggtggctgtgcgctacactttctcgggctggcgcagtacccacgaggcggtggcgcggtggcgcgggcccgcaggccccgagggcacggaggacgttttcaccttcggctttccagtaccgcccttcctgctggagctcggctcccgcgtgcacttcgcggtgcgctaccaagtggcgggtgccgagtactgggacaacaacgaccaccgagactacagcctcacatgtcgcaaccacgcgctgcacatgcctcgcggggagtgcgaagagagctggatccacttcatctgagccgcgcggggaccggccacctggagcctccacacctaagctgcgcctcctgtcatttccctgctgggctctcacatctatctggttgttcttcaccaccctccaagtcctctgacctaattttctgctgcaaggtcccctggcagtggcccatcctgtcttctacttgaaacgtctgagtcacttggtctaaaaagtagcctcaggtggccagaaggccgagttgtgtaatgagttggggcagggtggtggggtaggtgcatgggagggtgggccctctggggaggcccaagcagcttgttttgcaaaggcccaagtcctcctgctaggaaaagcttttgcatgtgtcctgaatgtgtctctgtaaacatagctgttatttattattgtgatgttgggacctttagcccatagcggatgcct

SEQ ID NO: 39289 - DNA, 1232 bp, Artificial sequence
  DNA replication origin
gtccaccgtatctgcaacctgcgggggacctctcgggcccggtgcgccctacccttggttcgccaccttgctcctcgagtccttgtccaggtcctccgcttcttgcggttaaagaaattgtaagagtggggagtttttctctagtggaagctttcagaggcctcccgggagcgcagggtagcgcctcttttttcttcttgcttccttggaggttcttacaagaaggctgcgttccgggagcggcccctcccactttcccggtccgcggcgttacttacaaggctgcaacttgaccgggtgcaacttcctagcgagcctccgccccgcccctcgtgacgccgcctgcaggcgggcccccgccggcctcagctcagccagggagctcagcggagctgcgcgcctccgcctccagctcccctgccgcagcgcgccgcagccgggcgtccccgcgcgggcgccggagaggaaggaaggctggcagcctcgtcacgtgtccgctgcagtcgcgaaacaggtctgatcaatttctgtttacgtctgcctggattgcgcgcctatcgatcatagactttgtctgcacaaacggaggacaaggaaaatgcatgctgcgtgtccttagatttctgggttgtggatggggggagcggtggtgcaaaaaccggccttgccaggagctggtctcaggctaattttaaacatcgaggccagcccacactttggacaggttcactgcaacctggacccttggtcagaccgagggagcctcactgcgtagaggagcagcgtcatgtccacatcacccagaatgctttgccgcaccgaatggccagcagattcccttgagggtggggaggggaggtgctgctgttgtcttcctggactccgcgccagagaggaagacaggggaacaagagttattacccgctgatgacttctgcagctgcccttaatcagcctctggcgcttggggagcatatttgtagccagaatctccgacttttagctttgtttccaagcaagccagaaacaccagcaaggcctggagcttgttttctgcctatttagaaccctgcaggcattcgtgtctctcacccggtagctttgagcacaaaaccccacagcctttggtgtaaagcataccaggtgaaatgaagtagaaaagatgcaagtgcactttccagagagcagtttggggccagccattccattaagaaggttcctttttattgtcc

SEQ ID NO: 39290 - DNA, 1370 bp, Artificial sequence
  DNA replication origin
gaggcccggcgccgtatcctgccgcccgttttacccgcgaggaagccgaggcccggcgccgtatcgtgccgcccgttttgcccgcggggaagccgaggcccggcgccgtatcctgtggccgttttacccgcgggaaagtcgaggcccggcgccgtatcctgccgcccgttttacccgcgaggaagccgaggcccggcgccgtatcctgccgcccgttttacccgcggagacgccgaggcccgatgccgtatcctgccgcccgttttacccgcgggaaagccgaggcccggtgctgtattctgccgcccattttacccgcggggaagctgaggcccagtgctgtttaatatcttactcatgttcacttgatgagaaagtgacagatctgagacaaacccaggtatgaggctgcagagccctgctctgaaccgctgagtctgtctcttttcttgggacagggacagcttcctgtggtgacagccttgctcttggctgcagggattaagggaggaataaagctcggggctacagccagcccatccgggatggggagctaccacagggcagcaggtttagctctcactgcttttctgacctgagtatgcctagagaggggagctcagagccatggaggagcaaggagagccttgggtcctacagcggctaccagacctctgcgtgcagttctcgccctgggcaagccctctgtgtgggtgggtgggtgggtgggtgctgccaggacaggcctctgggaagacgtggaacactgacggaaggagggaggagggcagaagccagggtgtttgctcctctctcccgtggcctgggatgggggtctcgtgcactgatgtgtttccctcaccactcccgtggcacagcccctccccctttcttccccgctccagccagcacacccctgacttgactccaccttcagcaggatggccttggcgtctgtgtcctggcaatgtcaccctcctctcatttcttctttagttctagaggttatgacaccagccatggaagagcagagaggccaatgaggtggggaggttggaaacaaaaggccttctccaccccagcttgaccaacccaaaagctggaaggcaaggaagacctaggtgggttctgtttccctgaatagaccttgactcatggaccctccatatggccagaaggtgacccaggcctgttaatcaaaggcccgcactgccctctttgcagccactgattcagggtagggcatgtgggttaatgaagccaatcatgagcaatgggactgagctctgagtgttttgagtgttttggttgaattgagtaggggctgcctctctctgtccacttccatgttgtgacatggtgacaaggag

SEQ ID NO: 39291 - DNA, 859 bp, Artificial sequence
  DNA replication origin
tcttatagccccaggtaccacacctccttggggcttattcctgttgaaattttacacacattgatatattttttaaaaattatctgttgttcctattagatttatgctccttaaagacaggaatgaaacacatctagttttgttcaacacagaatctatgtaactggcctgaaatcaatatattctttttttcatttttggagatggtttctctctctgtcacttaagctgtagtgcagtggcacaattataactcacggcagccttgaactcctggtctcctgcaggatggatggatggatcaatggaaggatggatggcaggatggatggatgaatggatgggaagatggatggatgaatggatgggaagatggatgggaggacggagaaatggatgtatggatagatggcaggacagatgtacacatgggacgatggatgggaggatgggaggatgggaggatggatggatggatggatggatggatgggaggatgggaggatgggaggatggatggatagatggatgggaggatggatggatgggagggtggatggatggaagggtgggtggatggatggatggaagggtggatggatgggaggatggatggatgggagggtggatggatggatggatggataggaggatggatgggaggatggatgaatgggagaatggatggatggatagatcgatcgatggatggatgcgaagatcgatgtgaggatggatgggaggatggttgggtggatggatgggaggatgcatgggaggatgaatgggaggatggatgggtggaaggaaggaaggaaggaaggaaggaagaaggaaggaaggaaggaaggaaggaagg

SEQ ID NO: 39292 - DNA, 2032 bp, Artificial sequence
  DNA replication origin
gaaccctgtttggtgataggtgaaaaatacatgaaattcaaatttcagtgtccataagtaaaggatttattggtgtcctagccccatccatttgttgacgtattgtgtgtggctgttttgtaatacaaggacagtctaagtgggtgacagagattctatggccctgaccctgtacagaaaaaaagttcccgacaccagtcttagggatgaaaaaaccaaggtgaactagctttccttagatgctctctgactccaaaaccattgtctatataacacactacaccatcaccattgctctcaccgtgaaacctgactgttcacagggctttttatttaaccaggttaaacagaaaattaaactggttcttatggacattgccagtctacatggggaagcaccttttcagattacatggccctttgacattaaaactatgataattctttgaaaattttcaacgaccagtggcatagaatggatggtaatgcaccgaggttatggggatggggatgggacgaggttatggggatggggatgggatgaggttatgggaatggggatgggatgaggttatgggaatggggatgggatgagttatggggatgaggatgggatgaggttatggggatggggattcactgaggttatggggatgggatgaggtgatggggatgggatgaggttatggaaatggaaatagaatgaggttatggggtgggcatgtgcagaggttatgcggatgagttgaggttatggggatggggatgagataaggttatggggatgagataaggttatggtgatggggaagtgctgaggctatgggaatggagatgtgctgaggttatgcaggtggggacaggttgaggttatagggattagtatgtgctgaggttatgaggatggtgatcaactgaggttttaggattggggatgggatgaggttatggggacagggatgcattgaggttatagggatggagatgtgctgaggttatgggaatggggatgggatgaggtgatggggatgggatgaggttatggaaatggaaatagaatgaggttatggggatgggcatgtgcagaggttatggggatgagttgaggttatggggatggggatggggatgagataaggttatggtgatggggaagtgctgaggctatgggaatggagatgtgctgaggttatgcagatggggaaaggttgaggttatagagattagtatgtcctgaggttatgaggatggtgatcaactgaggttttaggaatggggatgggatgaggttatgaggatggggatgccctgaggttatggggacagggatgcattgaggttatagggatggagatgtgctgaggttataggaatgaggatgggatgaggttacggggatgtgttatgggaatgtggaagtgctgaggttatggggatggggatgggatgaggatatagggatggtgatgccctgaggttacggggatgaggatgggatgaggttatgggtacagggatgggatgagggtatagagatgaagataggatgaggttatggggatggggatgtgctgaggttatggggacagggatgggatgagggtatggggatggtcatgtgctgaggttatgggaatgaggatgggataatgttatggggacagggataggatgaagttatggggatggggatgtgctgaggttatggggatggggataggatgaggttatggggacagggatagggtgaggttgtggggatgggggacatgctgaggttatggggatggggatgtgctgagattatggggatggggatgtgctgagattatggggatggggatgggatgatatggggacagggataggatgaggttatggggatggggatgtgctgaggttatggggatgctgatgaggaacaagatctcaactgtttcataactacaggagatgaatcctcagaaactgaattgccctacactacatgccaccactcctaattgttttccttctaagcaatatattttac

SEQ ID NO: 39293 - DNA, 1260 bp, Artificial sequence
  DNA replication origin
cagatctggaggcccgaccgcactctgatgcatgtgtgtgtgtgcgtgtgtgaggaatacgtcctccagagaatggtgttctccttgcagtgcgtggcccaatgtcatctggggaggttcagctccaccaaggtccactttcagggaaggaatcacagagtgggatttacctggaggctaacaaagctgaagcctcagggccggtgacttctgagggctggagctgctgggagccatagaacgtcctggctggggagggaaagccagaatgcaatcgggactcatattcatgatagcaaggcccaacgaatcttagaagaaagaacctgaactccaagggctaccataatttattgtgacttattttccaattttaaattagcatttatttttaagcctgtttttctttttaaagaaggctccaaaagttgtattatgagttttaggtcccacaaaacctggatttgcctctgctgaagagcggaggtagtggacagtgttgcctacgttaaggggagtgtatgtgagtgtgtgtgtgacagtgtgtgaatgtgtgtataggtgtgtgagatagtgtgcaagcgtgtgtgaatgtgtgtataggtgtgtgtgacagtaagtgcaaatgagtgtataggtgtgtttgtgtaagtgtgtgaatgtgtgcataggagtgtgtgagcgtgggaatgtgtgtataggtgtgtgtgaatgtatgtataggggtgtgtgtggatgtgtataggtgtgagtgtgcatgagtgtgtgaatgtgtgtataagtgtgtgtgaatatatgtatagggatgtgtgtggatgtatataggtgtgagtgtgcatgtaagtgtgaatgtatatataggtgtgtgtgaatgtgtgtacgtgtgtgtatgtgcatacctgtgtgtgtgaatgtgtgtatatgtgcgtgcatacaggtgtgtgtgtgtgaatgtgtgtataggtgtgtgtgtatgcatgtttgaatgagggtgtgtgtgtgagagagggtgtatgtgtatgtgtctgtgtgtgtgtgtgaggaaggcactgagggcctgggatcaggaagtggagtttggatgccaacgatgccaactgggtctggggaaggagggggctgggaagatgctgtccacggaacaggactcagggttccagccccagggctaggctgagcttggctgtggcctgtgtgtgcttggctccttctgtggtctccacttgatgcccaggctggccctgctgacctagctgtggg

SEQ ID NO: 39294 - DNA, 889 bp, Artificial sequence
  DNA replication origin
gaggaggaggaggtggaagagggaagaggaggaggaggttgaggagggtcttcgtcatcatactgcggtggcctgaccagcagtcccagctgaccgcacgggagctctggagctgaagcagcctattacagggcatggggctgagaaggcaatgcctttatgcctctgcatccattcctctttagttgggctgccccagaaggtgtgtgagtgaggaagctctctgcttgtgaggcagccctggaagagggtgatgactgaaggttgcctgctcacagcacccagcagctggttgggaaggtgagctggcagatcatccctgcccacccagctgcccttaactccccgtttttaagtctgtaggactgaaatcagaggcctcttagggccccaggggaatgaatgagagattccagataaaatgcttagcacaatgcctggcacgggaaacgtcaatgaatgtgaataaaagcaataacaattatttattattattaatagttataataacttgaatatgactatttggggatgctttacaaatatctcagtgtacctaacctcaggcatcattacaggccggcgaattgactgctgtgcccactttatagatgacagccacagactcatggaggatgagcgcagagccgtgaccagggcgggggtttcagccaggagttgggatcacaagtcgtttttgaaaatttcacagtggtcctgtcttgctgacattgtttgagatggtttttcatccttttttgagtggtctcctgacttttcctggtcttgctggaaggatgtttggtggataaggaggaggatgtgacctcccccagcgtggctctccacagaatgcagccaaagtcccgtccttcatcttgaggtcgca

SEQ ID NO: 39295 - DNA, 1372 bp, Artificial sequence
  DNA replication origin
gccatccctggctttgagatggaaggagccacaggctgacaaatgcaggcagccttcagaatctgggaaaaggggatagaaaaggagaggagaggagaggagaggagaggagaggagaggagaggagaggggaggagaggagatgagaaggaaggggagggcaggaggggaggagaggagaaggaaggggaggggaggaggaggggagaggagaatgaagaaaaggaaaagggaaaggaataaaggaaaagaaaaaggaaagggaaggaaggaaaggaacggaaaaaggaaagaaaaggagagttcttccctggagcctccagaagacatgcaaccctgatgacaccttgattttgagctcaatgagacccatcttgaacttttgacctccagaactgtaagacaataaatgcatgttgctggaagccactaagtttgtggtttgttatagtgccaataggaggctaatatatccacttattccatatatgttatagaggagatgcaggaatggatgaatttgttctttcatggggagaatttcttgtatttgttatcccctagaggcagggaaagggtgtggcctgcactgcaaagacctaggtttgagtcccagctccacctgctaaaggagacatgatgtcggacaggtcagtttcctctaaaatgcagatggcggtaggctgttgggaagatcatcaatgggagaatgtatggaaggaggatctgtctgatagaattaagtactactgtcactttccccaaaaacatacatttagtatctgcagggactgagtcaggtgtccaccttctgagctgggtgtggaggaaacttcatctgatccacagactgagaatacggaatggtgcaacagagagtacagaaggggcgctactgaagcaggaaagggcattactgggagtctagaaacagtgctgctaggatgttactctctgagagtacagagggggcattgctgcagcaggaaagggctttactgggagtctggaaacagtggtgctaggatgtcactcactgagagtgagtaaggtattattgagagtatgaaatcatggaaaggcgactgcagaaggggtatgctcagtagcaccctccatgctttcaacaatgtccctcctgtactctcagtaacactttcagaccttcagcaacaccccttctttactctcagaagcacctttacatactctcaggaatgccgtctctagacttgcagtgaaaccccttctgcagtcaccatttcatgatttcatgctctcaataacaccttacacactctcagtgagtaacatcctaacagcactgtttccagactcccagtaacgccgtttcctgcttcagtaatgcccc

SEQ ID NO: 39296 - DNA, 1065 bp, Artificial sequence
  DNA replication origin
tcatttgaaatggggaaaaacaccagagatgtttcactgatccacaccttatcacccagctccgatcagttccgacaaggtgctgtggctgcgtgggtgggggctccctgcgagtggccgtgtgggtggggggctccctgcgagtggccgtgtgggtggggggctccctgcgagtggccgcgtgggcgggggctcctgcgagtggccacgtgggtggggggctccctgcgagtggccgcgtgggcgggggctcctgccagtggccgtgtgggaggcgggctcctgcgagtggccgcgtgctcctgcgagtggccgcgtgggtggggggctcctgcgagtggccgcgtgggtgggggctcctgcgagtggccgcgtgggtggggggctccctgcgagtggccgcgtgggcggaggctcctgccagtggccgtgtgggaggcgggctcctgcgagtggctgcgtgggtgggggctcctgcgagtggccgcgtgggtggggggctcctgcgagtggccgtgtgggcggggggctccctgcaagtggttgtgagggtgggggctcctgcgagtggccgtgtgggtgggggcttctgcgagtggctgcgtgggtgggggttcctgcgattttccacggaggaagctcaatgtgccccttccttgtcagaagctgctgctggctctaggctgcaaagtcccctcaaacatcacagcttcgaactaggagcctgcaaggggccccagcgtttaggggcaccaagcctctgccttctggctggtgaagggctccttccgtgggtaaataccagtaccagtgcctgtaacgccttcagcgggctctcaggaagagccctgtgattttgaaagtcttgattttgtagccccatctatgctgcaaagctttgacaacatcacactgactgatgccaacagctctgccaagtgccctgcaattcccgtctcatcttcattacagtgaccccgtgtgctgtgtcataatgcacattccacagatggacaaactgaggctcggggaggctacctcacctgtcaaagtatttcacagctg

SEQ ID NO: 39297 - DNA, 1339 bp, Artificial sequence
  DNA replication origin
ttactgcagtggcctcaagggtaaggaatcgagaccctcccggtgtgacaaacagacccggactctcagcaacacggaaggaaactgaccagcaacctggcgtaaaggaccctcacatatcacgtggcccaggcgacctcctgcatgagccaaggaaggaaaaagactggaggagctggtcaagtatttccttggtggttgggactatggaaaaagccgtggggcagtaaagcattccttccttgggacacaccaaagtgaaagaacccccaggggcggtaaagcattccctcgtcaggactgaggaaagaaaagctgcgggggtggtggtgggggtgcggggtggggggtacggaggggtggggtggtgggggatgcggggggtgagggggtgcgggggttgggtggtggtgaggtattccctggtcgggatgtcttagaggttaaaaagaagttaaaaaaaatccccatcaggggaagactgaacatcacacaaacctccagtagataaaaataattatatatatgcttatatatatatgtgtgtttatatatatgtgtatatatgtatatatgtgtatatatatgtctatatgtgtgcgtgtgtgtgtgtgtatgtatgtgtgtgtgcatatatatatatatttaaaaattccctttcccctcttctcgggggaagaaagaggctaagctccacttccgccggctactccctaggggaaggggaaggggaaggagaagggagaagagcagcataggcggctggcagaggcagggaaaaaccagcagagagagaaagagacaggcagagacagaaagcaaaaatcttttggcaaagttccaaagttttctagaaaaggtgaaaaaaaaagttaagacatgtcaggaatgccaaaaaaaaaagaaggcaaggtcagtactttaaaggagaaggtcaaagtcagcgcagtaagggcagtaaacataaaaataaggaggaaagacaaaggggccctctggcccaaggttaatgacctgtgcaacttgcgcagggcacctgccaagcctctgggccaacagcggcctggcctggggcctgcactgcagtcgcacggatcccatccagcaagtaagtgtgagagaaagaggaaacaagggatgatagagagagagagaaagctcaaattaaaaaaaaaaggaaaaaataagtaagagaaagactgaaaaagacagagatcaaagaaaggcacagagggtaaaactatgaaaagaaatagtgtaaaaggaaggccaaaagttaaggcatgttaaaaattatctgtgaaagtcgtaaaaaaaagttacaaaggggaatgtatgc

SEQ ID NO: 39298 - DNA, 2257 bp, Artificial sequence
  DNA replication origin
ggcatttttcatgagtttctctgtgattttgttgcagatgattgcagaccagaggtgggcgtggcggggaatcccatcagcattcagaatcaatgtagcaggtctggggtaaggcctgagtttctgcatttttaacaagctcctgggggatcttgatgctgctggtctggggaccacactcagagtgacaggctgaagaccattctttggaggcactgctttgtattttaggtcatatttttcttttctgtctcagcaatctttgctgctgcattcagagtaagtctgataaaccaatgctctctactggactcctgtcagttactgcagtgtttctgaaactatgtatttcggaaaatgcgagttcccgtaagacattacagctgtgtaagaaggtttctttgaacaaagttggggccatgctgcgtgtgccagggtcccagctctgggtgagaatgctggcactgcagctttccccgtgcctgccctctgcaccctcctctgcctgactgtatagtggagttagaaggactccaagagcaactttacataaagctcctacacatgtccctggcacatagctagcaccttgtaaggacaggctattgtcaaactctaccctttctggaaatcacgctgcagtagactcaagattcattcagtagtagagggagatgtgcttaacacagtgtttggagttcaggacccacctgctcctggaccccagtctccctgccacacactcataccttttctttttcaaattggcgcgctcctcagcgcttcaacagtttcgcagagcacgttggagcaaatgcgggggtctgtgatgcctctccaaagaaataactcgcataatgctcaggcctcctgcagacaaaggtgtatccccagcgacagatattttaagaaaatagaccagggacacaagacaagagagctgtcttggtgtctaaagcagtcttggacagcttctgatgtcgctcgagcagtggtgaagcaccttgaataaggaggaaagcagagggggcgtcttcccaaaggacgggcacatggccgaggaatggaattctctgtccatgaggattttggatggatctgttcatgaaacctcactggctacgcaggaccttcgagtgagtctaaacctccagccatgtcaactggtaacctctccttcttcggctaggtggggagtgggacaaggccataactgataggagtccaggctggggcagattttgtgtctcctgactagttccatagttaagttgcaaaaccgaatctcgccttgtgctctcggatgtagtgcttactctggtcctctggggttatctaaaatctggtttccttaagcgtaaggcagagctctaaccgggagaccaccctgcccccaagggtgggggttctgggagggagagagggaagcggctgctctgtagctttctctactggcttgcccaagtggactctgatcttggagctcaacagtgtcactcaatcttccaccctctcctttgcaacctatttcttaaaccagaactaatgtattctggacacagagtccctgaaaccccagacaaagaaaattcgatgtatctgaacaaacaaaaccgcgtttctttaaatctccaagccaaaaggaaaagtgcagaaacatttactcactgtccgacctgtacatatattttacctgataacccttaaagaagtgccccccagttcagccatcacccatgcagggcaaagggagctggagctggcccagcctgtcggcgcagacactcctgacagctcctgtctgggcacttctttctttcttggagcttctaatttctttcttggcttctgaggcctaacagggtgttttgatgcacacacaggaattactaccgtccccaatcctagggtacatccctagcccaggccagggctttgagttttcctaggagcgggagggtctgcaaagccccacaggctgaaatctcagcgtggccctctgctcatctgctccaggtggaaactctcacccctgagctgcccgacctgggttcaagcccgggtcaggggagttagcaaggagacacctgaaaaataaaaggacagaatggaagtgcacactcccaccgcgggcccgggcgggaagtcggactaagaccgcggcgggaccgccccatccagaaagggtgccccgggtgtgggggcggaaaccccagcgctgtcttcagtctccacacccgcgcctttttcccctgga

SEQ ID NO: 39299 - DNA, 2101 bp, Artificial sequence
  DNA replication origin
gcccgcgggggcagagagcgcggcggctccgggggcgcccctgggcggaggcggaggggcggcgggagttgcaggaaccccctctcgtggccgatcggcctcgctgccttctcccgggcagcgctgttgtaacctcggaaataaacaagtgccagcggcgggaggcccgctccgaggccgcggggcgctgggggacgcgctgggcacacgcttcgggcgggcggaaactttcctgggcgagttgagcctcccaccgggctgcgggtgcgatttggagcttcgtggccgatgaagaaagccgcggtttagagcttttcgtaaggaatgaccctgcgtcccgctctcctccctcggtgctgggggtagaggggcgccctccgcggtgccggcgtcgggaagcctggagctccgggctgggggcggcctccggagtcgaagcatgggcgggcgacggcagcgcgcggagctggaggaggcggcgggcgggaggcgccactgcccggtgcgggctgcacccgaggcttcctgcgctcgccggggagccaagcaccgctgtgctcctgctccttcagcggggctggcttcccgcttgcacacactgcctctccctccaccacctcctcctgcctgtcacgccccctcccagaagcttggtcggagggccctgtcgtccaccccatccttccctggccctgtgccatgggctctagacttccccactgagcaggaaaggcgagcgagctccggaggacaggaggagaccccctttccggtcagttaggggagccgtctccctgcctgggctggagatgggggctccgagggtgaaaatgcgggctgaagactagaaggtggaagcgcccccactgcctcctcaccccagccaccggcagcctcccgcagagctgccttcttcgaccggctccggacctagtcctagagaatcttcttcctttctctcctctttctcctccctcccggtgacctggagaggagacaagaagctgcctcctccgccttaccaagagcgcagagcggtgggcctaaagcgcgaatggtctgagcagagccgcccacactttggcctccctgcccttagtggcttcgggagcagcggctgaagtcttctgtctctgccttttggtcatttctcaggcgtctcctctgccaataaggccctggccggcctggcttccccaacagtccgtccttcactccctgcctgctgtgtgtggggctggggaaggatgctcctggtctgtagcctggagagtgctccctaaagtccccagagagcagaggagcagacggggtatcgcgtctgggtggagacggtggcctgccagcctttctctcttagccagagaccttttacacagcaggccctggatgaatgttggttggattaaatttctgtgaacttattgttttacactctcccctttgtgttctcaggcccataatgaggatcttacaactagagagacctgcaaggctgggttctctgaagatgattacacggcattaatctcccaaaatattctagaaggggaaaagctacttcaaggtaaggcggggtgtggaggggtgggagtgaattgctgccatgcttttccttggggaaacatgtagatgggagaggcaaggcttgcctcatctttgtgctctctgtgaaatgatggtggtgaagtccacgaggtgcaaattggttgacctgaaaggcgttttgcataacaggtgaatgattcagaaccccggtcatttttgagtgaagtgaatcatttcctgggcagcaaactgtaattcggatgtaacatcacccaaatagtgtgcagagagagaccttcttaccaagtatttttatgcatgaagttctggatacttaaattatccctgctttgaaatgtatgataaagcagacgatgttgttggaaatgcggtaaataagcccacagacggtctgttcacaaatgtggcattcattttcattactgccccactgacaacacgaaaacacacatgcaggagggaactaccaattagctttatcgtaattgcaggattatatccacacttgtgatgggaaagtcagagacagctt

SEQ ID NO: 39300 - DNA, 3131 bp, Artificial sequence
  DNA replication origin
tatctgctcctctctgccaggcagaaaattacattatttcctcattttgaaaggtgcttgttttgtcaggaagacatcccttccgtgcagttatctaggaattgtcttattgcatttctcccttatcagttttgaaataatattatttccttcttgcttaaatgccatatgggtcaaaacttttgttgctggaaaatggcaccatcaatgaatgcattgtttgttgcagaagttcctggtcaccctcagaggtgataaatgcccagtttaggggataccatgggcagtttgagggagtactatgcacagtttggggaagtaccctgggcagtttggaggattactgtgtgcagttgtttgggggagtactctgtgcagtttgggggagtaccatgcgtagtttgggggagtactgtgtgcagttttggggagtaccatgcacattttgggggagtactatgtgcagtttgggggagcaccatacgcagtttgggagagtaccatgcgcagtttgggagagtaccgtgtgcagtttgggggagtaccgtgtgcagtttgggggagtaccgtgtgcagtttgggggagtattgggggagtaccatgtgcagttttggggagtaccgtgtgcagtttgggggagtattgggggagtaccatgtgcagtttgggggaggaccacgtgcagtttgggggaggaccatgtgcagtttgggggagtattgggggagtaccacgtgcagtttgggggaggaccatgtgcagttttggggagtaccgtgtgcagtttgggggagtattgggggagtaccatgtgcagtttgggggagcaccatgcgcagtttgggagagtaccttgtgcagtttgggggagtacagtgtgcagtttaggggagtaccgtgtgcagtttgggggagtattggggaagtaccatgtgcagtttgggggaataccatgtgcagtttgggagagtaccttgtgcagtttgggggagtaccgtgtgcagtttaggggagtaccgtgtgcagtttgggggagtattgggggagtaccatgtgcagtttgggggaggaccatgtgcagtttgggggaggaccatgtgcagtttgggggagtattgggggagtaccacgtgcagtttgggggaggaccatgtgcagtttaggggagtaccgtgtgcagtttggaggagtaccgtgtgcagtttgggggaataccgagtgcagtttggggaagtaccatgggcagtttgggggattactgcgtgcagttttttgggggagtactgtgtgcagtttggggcagtactgtgtgcagtttgggggagtaccatgtgcagtttgggtaagtaccatgggcattttggggaagtaccatgggcagtttgggggagtactgtgcacagtttggaggagtaccatgtgcagtttgtggtagtaccatatgcagtttgggggagtactatgtgcagtttgggggagtaccatgtgcagtttggaggagtattgtgtgcagtttgggggagtaccaagcaccctttaggggagtaccatgtacagtttggaggagtattgtgtgcagtttgggggagtaccatgtgcagttttggggggtaccatgcacagtttgggagagcaccatgcacagtttgggggagtaccgtgtgcagtttgggggagtaccatgtgtagtttggggaagtactgggggagtactgtgtgcagttttggggagtactgtgtgcagtttgggggagtattggagtaccatgcgtagtttggggaagtaccatgtgcagtttgggggagtactgtgtgcaatttggggagtaccatgtgcagtttgggggagcaccatgcacagtttgggagagtaccatgtacagtttgggggagtaccatgtgcagtttgggggagtaccatatgcagtttgggggagtactatgtgcagtttgggggagtaccatgggcagtttgggggattactgcatgcagttgtttgggggagtaccgtgtgcagtttggggggagtactgtgtgcagtttgggggagtaccatgtgcagtttgggggagtactttgtgcagtttgggggaagaccatgtgcagtttaggggagtaccgtgtgcagtttgggggagtattggggaagtaccatgtgcagtttgggggaataccatgtgcaacttgggggagtaccgtgcacagcttgggggagtactgtgtgcagcttgggggagtaccgtgtgcagtttggaggagtacggtgtgcagtttgcaggagtaccgtgtgcggtttgggggaataccgagtgcagtttggggaagtaccatgggcagtttgggggagtactgtgtgctgttgtttgggggagtactgtgtgcagtttggggcagtactgtgtgcagtttgggggagtactgtgtgcagtttgggggagtaccatgtgcagtttggggaagtaccatgggcagtttgggggattactgcatgcggttgtttgggagagtactgtgtgcagtttggggcagtactgtgtgcagtttgggggagtactgtgcacagtttggaggagtaccatgtgcagtttggggtagtaccatatgcagtttgggggagtactatgtgcagtttggggaagcaccatgcgcagttagggagagcaccatgcacagtttgggggagtaccgtgtgcagtttgggggagtaccatgtgtagtttgggggagtactgggggagtactgtgtgcagttttggggagtactgtgtgcagtttgggggagtattggagtaccatgcatagtttggggaagtaccatgtgcagtttgggggagtactgtatgcaatttgggggagtaccgtgtgcagtttgggggaataccgtgtgcagtttgggggagcaccatgcgcagttggggggagcaccgtgcgcagtttgggggagcaccgtgcgcagtttgggagagtaccgtgcgcagtttggggggagtaccgtgaagcagtttgggggagtactgtgtgcagtttggggagtaccatgcacagtttgggggagtattgggggagtaccgtgtgcagtttgggggagtaccgtgcacagtttgggggagtatcatgtgcagtttggag

SEQ ID NO: 39301 - DNA, 838 bp, Artificial sequence
  DNA replication origin
agttttggggagtactgtgtgcagtttgggggagtattggagtaccatgcatagtttggggaagtaccatgtgcagtttgggggagtactgtatgcaatttgggggagtaccgtgtgcagtttgggggaataccgtgtgcagtttgggggagcaccatgcgcagttggggggagcaccgtgcgcagtttgggggagcaccgtgcgcagtttgggagagtaccgtgcgcagtttggggggagtaccgtgaagcagtttgggggagtactgtgtgcagtttggggagtaccatgcacagtttgggggagtattgggggagtaccgtgtgcagtttgggggagtaccgtgcacagtttgggggagtatcatgtgcagtttggagtactgtgtgcagtttgggggagtaccatgcacagtttgggggagtaccctgcgcagtttgggggagtaccctgcgcagtttgggggagtaccatgcgcagtttgggagagtaccatgcgcagtttgggggagtaccatgcgcagtttgggagagtaccatgcgcagtttggggggagtaccgtgtgcagtttgggggagtaccgtgcgcagtttgggggcgtatcatgtgcagtttggagtactgtgtgcagttcgggacacctgactgtgcttttctgaaggatcctggattctgagtatcactgggggtggaagcaaacacttatctactgatttgctaacatattgcactgttaatctcaacttgccttctcccagtggaactgctcttggtgagactgtagcttctctctaggaagtgatttgatttttgatgtaaggaaaaggattagtgtg

SEQ ID NO: 39302 - DNA, 2054 bp, Artificial sequence
  DNA replication origin
caggggctgagcagaaagccagggtgatgagcactgtgaccacagccttctcccgaaatagcctggaccatcagaaaacacagggtgaggccagaggaaggactggcgccacagccggggcagggacagtaacacccaccaggaagcgaataacttcctgcaagacccaaagcaggagagcaaagagaagaaacaaaaatgctcacacccccagggaggagggcagccagccagaagtctctaaactagccaagggccttcgcagaaccttcaattacccccactgcagggtgaagttaactggaggtaactgactgcacctggccctagtgcctgctgcccagggtggggcaggaaaggcacagaggcggcagtggcagccaaggggatgcaccaagaatccccctaccgtagatcagaaaccagaaggagacctaagccctcttctgagagaggtcctcctgtgggccttctgggatcacacgaatccttgcactgttgagggcatgggaggcagcagccctgaggctggggacgctgtgcagtgggccagcatcatgggtttcccggactctctagggaaacagcctggcttggccagctctgaatccatagccacagagaccttgacacccagaaggaaacccgtcaccgctccgcccaccctgatgagagactgacatttgctagctccttcctgatggacgtccaaagcctgtctcctggaggagtgagggccacgggcaggctggcagagggggtgtgactgagaaggaccctcctcttctctgggaagccgggcatcgctgtcgagtgtctgtgttctcagccaggagccagcctctgtccactcagagatacctttccagagcccacctgtgcctggccctgctctgggcactgaagaaccatggcagagaagggggcagaggcacagctcccttccctgtggggcgcacaggcgacctcccttggaagagtttactcatgccctcaacacacgctttttacacgcctactgtgtgccaggcaccgttcagcaccaaggacggcggcaagggcttgcggtccaggggaagagacagaaagccagcagatgagaactgctcaagactgctgcaggcaggctgagtgctgtaactaacacaggggacctggggacagtgcctcgcatctcatttctgtcaggtggtcggggcaggaggtggctctggggcaggtggccggggcaggaggtgagcctggggcaggtggctggggcgggaggtgggtctggggcaggaggtgggcctggggcaggtggccggggcaggaggtgggcctggggcaggtggtcaggcaggaggtggggtttgagctgagacctgtatgtcagctgtgggcagatcagaggacagctctggtgggggacatgctggacaagtgtgaggaacagaaaggacagtgtggctgatgcacagacacagtgaggagatggccaggccagccagtgggagttggctctgggtgccggcgaagggactggacacagaggctaagcaagcatgaacagggcagtgacatggtcggactcatgcttttcacagtctcctcctgaccaccatggggaggactcaggggaccagagggcagtgagaacaggctgagggagggcctcatcccagggtgggagctttagagggtggctatggagatggtgcagctgtggccatggcaggctcctgggcactgggcatggaaggagatggggacagagacgccgagccccaagacagccttccctgctgcagccctggcagagatcctcccacacgtggggtggctgtggaaatgcaccctcgcacaggtgttagtgggagtgaaattgcagaatctcgaatgatcattcgatgacatccaccaaaatggccaccttataactgacccagaaattccacttctaggaacttgtttcacagaccctctcccaggtgtgcaggggaactcaggggaggaggattttatgataggaaactggaaacaactcaatctttatcatttgggaatattctaag

SEQ ID NO: 39303 - DNA, 862 bp, Artificial sequence
  DNA replication origin
agtgtcttgcccagttggagcagctcggagagcagtgggtgctggtgaagaagatgcagagggctgcgcgtcccttagccagcatggtcggtgaagacctttgtgaataggagacatttgggctgagacctgagaagcaagaaagagccaggaaggcaatgatgaggaagaagaaaggtccaggtgggggcacagcaagtgcaaagcctggcagggggggatgtgcttgctgcatttggctgtgtgggccttggggaggggtttggggttttggggtgatggaagccacagagtattcagcagggaaggggagagcggagacgtggcctaggacagcgtagtggagagcggagacgtggcctaggacagcatagggcagggcagagatgtggcctaggacagcgtaggggagagcagagacgtggcctaggacagtgtagtggagagtggagacgtggcctaggacagcgtaggggagagcagagacatggcctaggacagtgtagtggagagcggagacgtggcctaggacagcgtaggggagagcggagacatggcctaggacagcgtagtggagagcagagacgtggcctaggacagtgtagtggaagtgaagggaagtggtgagattcagcgggtcaggatgggggagcaaaggggacttgaggtgaagacacatcacagtcctgatgacctccggggccatcagtgcccctggctggatggggtggggggcactccccgagacaggggcacctgagacagcattagggaaggaaggaggtggcgagaggatcatgcgttctgtgttgggccagaggagatcaaataactgccaagtacaagggtccagcaacgtgca

SEQ ID NO: 39304 - DNA, 1126 bp, Artificial sequence
  DNA replication origin
atactgttctaagtgctcagtaaaaattaagtcattttatctttataaccaacccttgaggtagggaccacctttatatccatctcacagatcagacacatttgaaacttcgaaaatttattcaacgtacctaaatccatgcagctggtgaaaggcagaggcagcatcccacattcagcaggcagcctccagagcctacacatgccctggccatcaggctctttttcctagcctagtgattaggttccagtttatagcaaatcgtatgccagatactatagagagcgcaacacccagtgaggtctctcatctctgtatctccagtacagggcagcaaattaatgcctggtgtgtgttgaataaatggataggtagatgggtgggtgtgtgagtggatggatggatgggtggatggataggtggacagatgggtgggtgggtggatagatggatggattggtgggtgggtggatgtgtgggtggatagatgggtgggtatctggatggatgggtgggtggatggatgggtggatagatgggtggatggatgggtggatagatgggtggatgggtgcatgaatagatggatggatggataggtgtgtggatggatggatggatggatggatggatgggtgggtggaaagatggataggtagatggttgggtggatggatgagtgaatggatagatgggtggatgggtgggtaggattttcaaaaagcgctacatctgtagccttcctctggctggatctgcaggtaaggaattccctgagaaaggcgtcaaaatttcaggcatatttgtgtgccgagcatggcttggagccatgcttctcacctggagatgcccttaaaacagattccttggcccagccgcagagattctgagtcagcagatttcccatggatctggacaccctgaatttccagcaagctcccaggggatgcccctatacttatctgtggaccacaacagagaggcaaagacataaagctctccagtgcctttggtgccatctctcttgcaacaacagtcagtaatgtttcccttaaccctctgttaattggactaagcagagataatgaaagaatgatttttagggcatgccttcagggccctgcag

SEQ ID NO: 39305 - DNA, 1077 bp, Artificial sequence
  DNA replication origin
gtcaccatggtgatggtacgatggtcatgatcatgatggtgctgacagtgctggcactggtggtggtgatggtaagatggtcatggtcatgatgatgacagtgctgacactggtggtggtgttgggatggtgatggttatgatggtgatggcagtgctgacactggtggtggcggtggtggtggtagtcttatcatggtgatggccatgatgttgatgacagtgctgatgctggtggtggcggtgatggttatggtcatgatggtgacaacagtgttgacactggtggtggtggtgatggtgatggtatgactgacactagtggtggtgatggtcatggtcatgacggtgatggcagtgctgacactgtggtggtaatagtggtgatggtatagtcatggtcatgatgatgacagtgctgacactggtggtggtgttgggatggtgatggttatgatgttgatggcagtgctgacactggtggtggcagcggtggtggtggtggtggtagtcatatcatggtgatggtcatgatgttgatgacagtgctgatggtggtggtggtggtgatggttatggtcatgatgttgatgacagtgctgatgctggtggtggcggtgatggttatggtcatgatgttgatgacagtgctgatggtggtggcagtgatggttatggtcatgatgttgatgacagtgctgatgctggtggtggtggtgatggtgatggtatgactgacactagtggtggtgatggtcatggtcatgagggtgagggcagtgctgacgctgtggtggtcatggtggtgatggtatggtgatggtcatgatggtgatgacagtgctgacactggtggtcatggtggtgatggtcatggttgtgatggtgatggcagtgctgacactggtagtggtggtggtgctgatggtatggtgatggtcacgatggtgatgacagtgctgacactggtggtggtgatgataatggaggtgatgatagtgatgatggtgataatgatttggatagtcataatggtaatggtaatgactggtgacagtagtggtattggtggtggtga

SEQ ID NO: 39306 - DNA, 1254 bp, Artificial sequence
  DNA replication origin
gatttactgattagctggaaaacaggtaactttaaaaaagaagaaaaaacaggctgggtgtggtggctcacgcctgtaatcccagcactttgggaggctgaggtgggaagatcacttgaggccaggagttcaagaccagcttggccaacatggcgaaaccccatttctactaaaaatacaaaaaattagctgggagtggtggtgtgtgcctgtaatcccagctactcagtaggctgaggcaggagaatcacttgaacccaggaggcggagattgcagtgagccgagatcatgccattgcactccagcccgggtgaaagagcgagactccctttcaaagaaagatgagaggaggggaagggaggggaggggggtggagggggagaggaggggaagggaggggaggggggtggagggggagagggagggggagggggagaaaatacaggctgggcacagtggctcacacctgtaatcccagcactttgggaagtcaagacgggaggatcacttaagcccaggtatctgagaccagcctggcaacgtagaaagaccccatctccacaaaaaagaaaaggaaagaagagaagagaaagaagttagatggaaggaaatgcaaagtccccagagagggggagaagaggagaccaaagctgcgggaatggagatgaacaacgatgatttagataggctggaaattgccctaagatgaagctggaagcatggcggggttgcatcctgggcagtgcggggcctggctgctctcccgtgtctggccgtccttggaaggggaactcgtgatgatcttgatttttttttttttttgtaaccagtgcaccgcccttgtcccttattattacagatttcttacggtccatagatgacattcactgatgtggggaattagacattttagaaaggttcccaacagaggccaaagcaggaagggttttctggtgaaatgttcggttttcagtcagcctggagtatttcgttcctaataaagatctaatcacagagattttgggtttcaaatccataggaaggaatgaccattttcatggtgagacattgatatttcattcctgagacccaaagccacctttgtaacctttcaagatcctttttgattgtgtaaacttcagaagtctggagatcttagatatcaggaagataaatttacataggtaagcaccataattcttgttcctcatatattttatattgcatcatttacataggctttaaatatccag

SEQ ID NO: 39307 - DNA, 1288 bp, Artificial sequence
  DNA replication origin
ttaaaatgctaaagctgtggccatgtccaacatgcgtacatttgggaagtggcggtaaattccatgcaacgtcaattaacatttcacaattctgccggccgtgggctggaactttggccagcctgtcggagtgaaggatgcttttccttcaggtcatggcgatcagtctgtcacgggaaggacgctgaccccggcgctccccaggctgcacggtgtccctcattgctggcgtctggcgttcagtcactgtctgggcacccacatcttccccactctgtcccgtcctctttcttggaaaagctactgctgacgtggacttttttttcatgatcaccctacaaattcatttctctttttgtctttcactgtccagcactggagctgctggcagagccgtcaagagaaccggaggctttggcaactggtgccgctcatgcttggcgccagcgggcaggaggcagctttgtcctgcacaccgagacagtgtgcttgtgtatgtgagtgtgtgggggtggggtgtgtgtgcatgtgtttggggggtatgtgggatacggtgcgtgttcacatgtgtgtatgtgtgtgtgtggaggggtatgtgtgcatgtgtgtagagggtatgtgggatacggtatgtgttcgtatgtgtgtgtgtggaggggtgtgtgtgcatgtgtggagggggtatgtgggatacggtgtgtgttcgtgtgtgtgtgtgtgtgtgtggaggggtgtctgtgcatgtgtggagggggtatgtgggatacggtgtgtgttcgtgtgtgtgtggagggctgtctgtgcatgtgtggagggggtttgttcacacgtgtgtgtgtggaggggtgtgtgtgcatgtgtgtgggggtatgtgggatacggtatttgttcacattcgtgagggtgtgtgcctgtgtgtgggggtatgtgggatacggtattcacattcgtgcgtgtgtgtggagggtgtgtgcatgtgtgtgggggtatgtgggatacagtatgtgttcacatgtgtgtggtgtgtgcgctcgagtgtgcatgagtatgcatgtgtgcagaggtgtgtgtgtgaggtgtgtatatgcgtgtgtgtggtatgcatgtgggtgtaggggtgaggtatgtgtgcacacatgcatgtgcgtgtgtgtgtgtgcgttagatgcccacactttgtgttagtgacattctagggactcagtgcttctaggatccagtgactcgcaacattttgtaaaggcctcgcctcaagcacttccttaactcaactcctctgaagtcctta

SEQ ID NO: 39308 - DNA, 1253 bp, Artificial sequence
  DNA replication origin
accaactgcagaattcactcttcccactctccccatcagctgcaagaggagattctgtctgcgcactggcctgtgcgcatctggccaagtgtctgcctcctgtccagtgattccgctcctgctcagccctgcctgcccctgggtactgcaggctctgggagcattgctgttccatcttccaccaggaggccaggtcctaatccagaaggcaacacaagagcacagacaccaccatgtggctctctgcactgcaaggagcccaaagaagaggagggctccggtgcaggttgtggcatccaagaagggccttgggtgggtgtgggaggaaggtctaggggtcctgcaggatatgaactatcagggaggaggacagaggtcatccccgtgagaaggatgaacacaagggcagggtcccgcagatatactggaggggtgggtagatggggtgggaccagttacagggagccctggaagctggcagagggaagagatttcctgtggtgccaagcggagagtcaggaaggcttcccaatggcctgagaggggaagcaaaggaggcagtggctgagagcagccagggaggcaagctaggaaagccagagaagttggggcagggaggccagggaagcaggctagggaggccagggaagcaggctagggaggccagtgaggttggggcagggaggccagggaggtaggctagggaggccagggaggcaagctaggaaagccagagaagttggggcagggaggccagggaaacaggctagggaggccagggaagcaggctagggaggccagtgaggttggggcagggaggccatggaggtaggctagggaggccagtgaggcaacctaaggaagccagagaagctggggcagggaggccagggaagcaggctagggaggccagggaggttggggcagggaggccagggaggccaggacaaggaggccagggctgcagtgagtcccggggaggatgggtgccagtggggaggaaggtcttctccaaggagtggccaggactccaggaccagctggcaccttcactgaggggggtggcagctgaccacaagcacaggaagcgcccattctgcaaagcaaacctgttgccccagccctgggctattcctcagtcctggcatcctctttgtgatttggggaatgtttcccatgcgctaagcgctcatgtatctggactctgagaaccatgaaggcagcacctctgtctaatgctgcaatctcggcat

SEQ ID NO: 39309 - DNA, 1401 bp, Artificial sequence
  DNA replication origin
cttcaccctccaccatgattgaagcttcctgaggccccaccaggagcagatgccagcaccatgcatcctgtacagcctgcagaaccacaagccaaaataaaacctctttctttataaattacccagcctcaggtatttatttatagtaatgcaagaacggagtaacacatgtagataaccccaccctgcaattccagtggacacgagctgggatcgggaaggaatagaaggtgggtctgagagtggacatagccctccctcagggattcaaacaagcagcccttcccatagcaggcgaggtccccgggggagatgcgggagcatagggagttgtaaatccacagcattcactccacttggttttcgtactgagcctctgaaatgtgaacatgttaccatttgttttcatgaggattaaaaaatatcacaggaaagcagccacctggtagacagcgggtacccaacacactgctgctggatttgtttctttgctgccactggtggtgctcttggtggtggtggtggtggtggtggtgctcttggtggtgctcttggtggtgctggtgctcttggtggtgctggtcctcttggtgttggtagtggtcctcttggtgatggggtggtggtggtggtggtcctcttggtggtggtcgcggtgctctcggtggtaggtggtggtggtggtggtggcggtgctcttggtgatggtggtggtggtcctcttggtgatggggtgatggtggtggcggtgctcttggtggtggcggtgctcttggtgatggtggtagtggtcctcttggtgatggggtgatggtggtggtggtcctcttggtgatggggtgatggtggtggcggtgctcttgctattgttgttgctgttctctgtgaggcctgatcagaccatgtaacaaccctagaaaggctatgaggaagagctcagccacctccttggggctgtttcaggcatttcttccctggcatctaggtgtcccacttgcacacctgaggcccatgaggtcccatgccatgcagaggttaagctccatgggtggtagataaattacccaaacaggtgatccaatgtctgcatgcagttgcagctggggccacagacccctacccaaaatgattgctcacccctgagaacagagtaaggcagtgccaagatacacaatgcagggaaaggctccagcagaccctggcagaggagaagcctccttccacgtagggaacagcatctgcctgcagagggctgctgccaggagccagccgaggctacatgcctgcctggacgctgtcatgaggttgctgccggggttgctcagctgcctggggtgagggtgtctgcatccaccccctctgtcctcatggggttctccagccccatgtacactgttgcct

SEQ ID NO: 39310 - DNA, 960 bp, Artificial sequence
  DNA replication origin
ttcagagttgtgcagccaccaccccagtccattttagaatgttttcatcgcctcacaaagaaactccacacccttggctgtccgccttctgcgcccccatggcccccggccctaggcagccactaatctactttctgtctctgtcgacttccctgttctgggcactgcgcatgagagaattgtacagtgtgtggtcctactcttggttttccagatgttcttggtgtttgtggtggaggtcagaggggaggtgaagagaagagggtaccgtgcaacagaaggctctgcggggggacagagggctctgcggagggacagagggctctgcgggggggacagagggctctgcggagggacagagggctctgcggggggacagacggttctgcggggggacagagggctctgaggagggacagagggctctgcggggggacagacggttctgcggggggacagagggctctgtggggggacagagggctggacgcaagaggtggccaggtggccagatggtgctggccccatggtcatgtctgggtgcttgcctgtccctgtgcagagagcagtgaggagcatcagatgtttgaggggagacgggggttgtcacacacgcgttctgtgcagaccattccctgggtcccatggaaggcatccaggggcaggggacagaggcagctgcgaggtggagctgagctggcatccagtgggagcggacaaggctggggtgaggggttgtccctgggagcccgtgccctagagggactaccccacacatggctgggtgcctggcctgatctctctccactttcctcgttgacatcacattgccatccttcgttccctcctcgtttaacatgtaggggttatcaactttgatatcttattactcagtgtctatgagactcctctcctgcctgcccacatgtgtctgcacctgcactgaagtgtggacagcgt

SEQ ID NO: 39311 - DNA, 1037 bp, Artificial sequence
  DNA replication origin
gggaagagggtagggggaagggttggggaagggtgtgggaactgacctgagagggggaagggggtcagggcaaagagggagggggaggtgagctggggggaagagggttggggaaagaggggggaaagggggtgggggactgacctgagcaggggaaaggggtcagggtgaagagggaggggggctgagctgagcaggggaagagggtgggggggaagagggaaggggggctgagctgagcagggaagaaggttgggggccacttccagtgctggtgcctgacgcccagagacaggccagacactgttgccctagatgcggagggaggacagtgtgccgctcattgggcagcccccaccgggcccacctgggtctgccctggctcctgtcactgccaagagaggagaacagaactatcacatgtgtgtcccctcaacgtcaacagcagccggggtttccaaaacggcatgctgtgcatggaaggactgtacctgggagggtgagtggggcagctcagtggggctcgagggtccttccaaccctagacacctgctgccgcctttttctaaattgctgaagacgccacagccctgtgactctgcttgtgtgcgtgcttctagcagggagaataaatgtgcgtctttaagaaagggcctagacttccaggttaggcagtgaagacgccgccgtgtctgcagagcgctgggtcccctcggcccccacacagatacctgaggaaatcaagacatcttcgctgacccacagacactgttggctttttcaagacagacaaatagaaggatgacatcaatagctgatattcagggctttactttcattatctcatgaagtcctcagtgtggccatttattagttcttcattcattcattcattcattcgctcactgtttattgagtatcctctttaccccagcgctggccatgcactgagggtgcagtgaccgtgggctccatccgggcaccctggtgctgtcattagctcgtgttgcacagagtggttggtcacatgtcaggtc

SEQ ID NO: 39312 - DNA, 685 bp, Artificial sequence
  DNA replication origin
cccgcagccagtccctcgggtgcgtcagcaagcctggcctctgggacgcgtggagaagagggtgagaaacacgatgagatctggcctgtggctaaggcacagacggcaaagtccccgttctacaggaaaactggtcccagggtcgggtgggaggtgggggctccctctgcacatcctccccacacgcgattctggaaaggggtatctccacaccttactgccggcaccgcaggggtcgtcactccctgtttcggccactcaggtcccttttgtttcaggagggggtgtggctctggctgaaaggcgagtgctgaggccacagatagcaggagccatagtacggaaggagggaggagcatgctctgctgaggtcctgggctgggggttttggggggtgcatgacctctggagcagcccctgaggtgacagtggccgggggggtggggtcccagtagggagcaggggtggcaggggctggtgttggaggcaggcatgggaagcaggcaggccggtgggtgggaggggcttggagaggtcccagcagccaattcctggaaggtgctagaaggaaaacatcccagcaattcagcagatcagagggcagtggggtcttcccatccagcatgcccccaagaggcaagtccccggcgggtcaccatcacccccacagtgcccggcgtgtctg

SEQ ID NO: 39313 - DNA, 1029 bp, Artificial sequence
  DNA replication origin
gctgccagaaaccatgctttttaccaccatgatagatggtctccgggaagatctaggctgtcttacatgttttggaacttggtgatgggtggatgggatgaatgggtggatacattgatggatagatggacagataggtggaaggatagacagatgcatgggtggatggataggatgaatgggtgaataaactgatggatagatggatgaatggatgggaggatggatgtttggatgcatgagtgggtgggtggatggatggatgaatagatgaatagatacatggatagatggatggatgaatgaatgaagagatggatagatgaatggagagttggatgcatgagtggatggatgggaggatgcatgagtggatgggtagatggacagatgaataaatagatggatagatggatggatgaatgaatgaatgaagagatggaaggatggatgaatggatggaggatggatgggtggatggatgggtggatgaatgggtggatggatgggaggatgcatgaatgggtgggtgaatggacggatggatggatggatagatgaacagatagatggatagatggatgggtgaatgaagagatggatggatggataaatggatggaggaatggaagggtagatggaggaatggatgggtagatggatgggaagatggatgggtgggtatatggttgtatgggaggataagaagatggatagagagacaacgtaaagccaataggtaagttgatggatggacaggtggatgggtgagtggatggagaagtgagtgggtgggagggtgggagggtggggagaggaggagaggaagaggaagcgggtggtgcacaggggagtacagataggcagacgggtcagtgggtgagtagagggatggatgggtgaagggtaaaagtatgaatgagtgagtggctggttggtggcttgtcaggtacatgggggaagtgagaggggaggaagggtgggtgtgtggggagatggaaagagaggtggggaaatggatggatgtga

SEQ ID NO: 39314 - DNA, 862 bp, Artificial sequence
  DNA replication origin
ggagtgtctctgcgcggccgccatcccatctaggaagtgaggagcgtctctgcccggccgccatcccatctaggaagtgaggagcgtctctgcccggccgccatcccatctaggaagtgaggagcgtctctgcccggccgcccatcgtctgggatgtggggagcgcctctgccccgccgccccgtctgggatgtgaggagcgcctctgcccggctgcgaccccgtctgggaggtgaggagcgtctctgcccggccgccctgtctgagaagtgaggagcccctcagcccggcagccaccccgtctgggaagtgaggagcgtctctgcccggcagccaccccgtccgggagggaggtgggggtcagcccccgcctggccagccaccccgtccgggaggtgaggggcgcctctgcccggccgcccctactgggaagtgaggagcccctctgcccggccacgaccccgtctgggaggtgtacccaacagctcattgagaacgggccatgatgacaatggcggttttgtggaatagaaaggggggaaaggtggggaaaagattgagaaatcggatggttgccgtgtctgtgtagaaagaggtagacatgggagacttttcattttgttctgtactaagaaaaattcttctgccttgggatcctgttgatctgtgaccttacccccaaccctgtgctctctgaaacatgtgctgcgtccactcagggttaaatggattaagggcggtgcaagatgtgctttgttaaacagatgcttgaaggcagtatgctcgttaagagtcatcaccactccctaatctcaagtacccagggacacaaacactgcggaaggccgcagggtcctctgcc

SEQ ID NO: 39315 - DNA, 1017 bp, Artificial sequence
  DNA replication origin
gagcacagggttgggggtaaggtcacagatcaacaggatcccaaggcagaagaatttttcttagtacagaacaaaatgaaaagtctcccatgtctacctctttctacacagacacggcaaccatccgatttctcaatcttttccccacctttcccccctttctattccacaaaaccgccattgtcatcatggcccgttctcaatgagctgttgggtacacctcccagacggggtcgtggccgggcagaggggctcctcacttcccagtaggggcggccgggcagaggcgcccctcacctcccggacggggtggctggccaggcgggggctgacccccacctccctcccggacggggtggctgccgggcagagacgctcctcacttcccagacggggtggctgccgggctgaggggctcctcacttctcagacagggcggccgggcagagacgctcctcacctcccagacggggtcgcagccgggcagaggcgctcctcacatcccagacggggcggcggggcagaggcgctccccacatcccagacgatgggcggccgggcagagacgctcctcacttcctagatgggatggcggccgggcagagacgctcctcacttcctagatgggatggcggccgggcagagacgctcctcacttcctagatgggatggcggccgcgcagagacactcctcactttccagactgggcagccaggcagaggggctcctcacatcccagacgaagggcggccaggcagagacgctcctcacttcccagacagggtggcggccgggcagaggctgcaatcttggcactttgggaggccaaggcaggcggctgggaggtggaggttgtagcgagctgagatcacgccactgcactccagcctgggcaccattgagcactgagtgaaccagactccgtctgcaatcccagcacctcgggaggccaaggctggcagatcactcgcggttaggagctggagaccagcccggccaacacagcgaaaccccgt

SEQ ID NO: 39316 - DNA, 1333 bp, Artificial sequence
  DNA replication origin
ccaggtgaagtgtgtggctaatagagagcagccgagctccaaggctgcatgtgcctggagaggacgtggttctgaacatcaccttgttgtaagagtgtgagaggctcgagggtgacagcttcagatatcgtgaacagtcctgaagggacccagaccacatgaagccacatcaccctggaggagtgagaggggctggtggagctgagccctgctttggtggaaagtgtggatgacatgaaggtggttgaagactggctggagacgaaccacccaccgtgctctctgacatgctcttgcttgggatacacagcagggtttgcactcttagttaggatgttgcttgggaatgcatgctgaggcgggcaggcgcgtgctggggtgggcaggcgcgtgctggggtgggcaggcgcgtgctggggtgggcaggcgcgtgctggggtgggtaggcacgtgctgaagtgggcaggcgcgtgctggggtgggtaggcgcgtgctgaagtgggcaggcgcgtgctggggtgggcaggtgcctgactggagtgagcaggtgtatgctgaggtgggcaggtgcatgctggggtggaaaggtttgtgattgggtggacaggtgcgtgttggggtgggcaggtgcatgctgggaaggacaggtgcatggccagtgtggtcaggtgtgtggctgttgtggggcgcagcctcccctggctgaggcgtgggtcagtgtgcgtcgtcaggcttctctagctatggtcataggggcctctgggctccacagccactctcctgggtgggtagatgtgcttccctgtgtctgaccaggtcacctgccattctgcatcgaactgaacctcagaaaatctctcctcccaggatcgtcccctgcattcgtgaataggaggtgatgccaaaggcaggggtccattcctccaggaaagctgctgtgtggctgcgggcaagtcctgtgcctcagctgtgaaaggacagaaccagcccaggtcttaggctgtgtgcagaggcttgggacacaggtgcatgtggaggctgccagccttcacaaccatcagcgctccatgttgtcactgcccagaaacgcccacctgggatgcactggacacacctcaaagcagttgagtacagctgaggcccccagaggcatgtgtcttagagcatctgcagagtctagagccattcttgggccagagcagacgcctggcaatatttgagcaaatctaatgactgggcttatgccaaacgcacgctcagtcctttagggtccacccagagggatcatccctcccacccagggctgcgtggacaagacctctgcaccctcctc

SEQ ID NO: 39317 - DNA, 1154 bp, Artificial sequence
  DNA replication origin
ggtgaatggatggataatggatggatggtggatggatgggtgggtgggtggatagatggtagatggataaatgaatggatgggtggatggatgatgaatgaatgatgggtgggtgtgtggatggatgatggatcaatggatcgatggatagatgatggatgggtaggtggctgggtggattggatggatgcatgggtggaaggtggatggatgaatggatggatggatggtggatggacagatggaggatggatggatggatgagtaggtggatgcaggatggatggatgatagatggtggatggatgtatggttgaataagcgggtagatagatggatgaatagatgggtggttggatgtatggatgtatggacagatgggtggatgggtggatagatagataaatagatggatggatgagtggattggtgggtgggtgggtgggtaggtggttggatgagtgtatgggcaggtgaaaggatggatgaatgatcatatgggtggatgggttgatggatagatgaatgggtgggtatatggataatggatggatgatggatggatagatgggtgtatgaatgcatggatgatcgtatcggtagatgggtgggtgggtggataaacagatgaacgggtgagtggatggatgggtgtgtggatggacagaatattcctccaaaagcatatcaggtgctctgtacgtggtaggattgtgtgccaggtgctgtccctgtcctggagattccaagacgaattatgcaaagcccagtccatcaaggagccctccgcaaagtcagacacacagacttcaatcaggtgtgtatgtgttgcacaagagggtaggccctgtccgtgaagtgtgttcacagcttccacctccagcactgtgcttgctgtgtagtaagggctctgtgagaaatgaggtgtgattccaatgagtgaaactgcccatagtcaggacaacacctgagaccacgggaggggcagcaagtctgagccgagtctctggggtggacagtgaggcatctgccaagggtgggagttggtgctgagcatccctcagggtcactggcagagactggaatcttcactgggaggggtgggagaagattatggagcatccctgggaacccgacggggctcaaggactggg

SEQ ID NO: 39318 - DNA, 926 bp, Artificial sequence
  DNA replication origin
atattcctccaaaagcatatcaggtgctctgtacgtggtaggattgtgtgccaggtgctgtccctgtcctggagattccaagacgaattatgcaaagcccagtccatcaaggagccctccgcaaagtcagacacacagacttcaatcaggtgtgtatgtgttgcacaagagggtaggccctgtccgtgaagtgtgttcacagcttccacctccagcactgtgcttgctgtgtagtaagggctctgtgagaaatgaggtgtgattccaatgagtgaaactgcccatagtcaggacaacacctgagaccacgggaggggcagcaagtctgagccgagtctctggggtggacagtgaggcatctgccaagggtgggagttggtgctgagcatccctcagggtcactggcagagactggaatcttcactgggaggggtgggagaagattatggagcatccctgggaacccgacggggctcaaggactggggccctgtgtccctgctcagctgggaactgcaacctgacagggatcaagaagggaatgggtgaggcgcaggcctgaggggaggggaagaggtggggagaggaggaggtcatcctgagttatccagtgggtcctaaatgccatcactagtgtccatagaagaagaagaaggaggcaggagagtgacagagaaagaaagagacgcagagagaaagacaaagatagcatcagagagagagattggaagatgctgtgcttgaggatgaaggcaggaccaggagtggggatgcagacggcctctagaaactggaaagacaaggaagggctttctggcctggagcccccagagagaacgcagccctgcccacaccttgacttcagctgcccctcctgcacagtgacctctagagcgctgagatgtttttggccaccagacttgtggt

SEQ ID NO: 39319 - DNA, 1259 bp, Artificial sequence
  DNA replication origin
ggctggagtaggggaaggagcagggccctggcctctgtgatatctgcgagcagggcagactcctggttcagattcaagtacaggaaaagggcatttaacttacttaagatgacagcctgtatgcaatgcacgagcagcgccatttgcaggcagcaaacgtgctcaaccctcagcaccaggcacacagagaaagcggcctcccttctgtgggagggccttccctccagactcctgcctcacagcatgcagttcacttttactttttgttaatgtgttatagttggtgtcaatgtatagacctgacgataatacaactgtcttttttaaacaaaaaaacacagcactttacactttagatttttttactcattcagactacctccttctgcagcaggcacatccccctcagatccaagttaagagaggttagtgggatgcattctaatgacaaaaggataagtgggtaggtaggtgggtgggtgggtgggtggacagacggacggacggacagacggacggatggatggatgatagaagataggcaggtaggcaggtggatgggtggataggtggatggatggttagatagatgatgaatggatagatacatggatgatggatggaagatagatggatagtggatggaggacagatgataggctagatagataatagatggatagatgatggatagatgatggatgatggatgataaatgataggtgatagatacattagatagatgatggatgtttggaggaatggatgatagataataaattatagatagatggatagatgatacatagatggatgacagaagatagataatagatggataaataggtagatagatggatgatggatggatgatagatgctgcatgcatacacacataacatatattttggatggatgatagatgatacattagaagacggatggaagatagaaggataggtagatagatggatgatggatgatggatggatgatacatagatagatgcatgcatgcatccacacatacacagatgacagatacatagattatggatggatagatagatggatgatagatgatagatgagatagatacatgatggatggatgggtggatggatggacggatggatggatggatggtaaatataaacgtagatcagtatagacatgggtatatagaagtagcttcataattttctgaagatggtaactgggtaattggttcagaatcttcagaaggagagtaagtagaca

SEQ ID NO: 39320 - DNA, 673 bp, Artificial sequence
  DNA replication origin
gaacctatggcttcagtgctagcagttgctgtatcctgctaagcgtctgcctccattctgggtcctggcttctgggccagtccctgcctttatgacactaccttcatggggtgtgggaaggtggaccaaggaatgggtggatagagggtagatggatggacaggtggatgggtagatgatggatggagggatggatggacaagtggacagatggatagagaaatggatggatggatggttggacaagtggacggatggatagaggaacagatggatggatggacaggtggatgaatggacaaagggacagatggaaggagagagggagggagggaggaagggagagatagatgaatggatggatggatggatggtggatggatgatggatggatagatggatggacagagggacagatggaaggatggatggatggaggggtgggagaaggggagggagggagggatggatggatggacagatggatggatggatggacggagagatggacacacaggtggatggatggatgaatacatggataggtggagggatggatggacagaggaagggagagatgaagggacagagggagagatgggtggaaaagtggaagggaggagaggagagaacagggcattaaaactcattaatgataaagcaattactggag

SEQ ID NO: 39321 - DNA, 2266 bp, Artificial sequence
  DNA replication origin
agcccaggctccctgactcgggcccacgctataaccatgtgcatgccgcctctcccgctcagagagcttccgccagtgcccccaacttagagtcgttcctcaatctgagagctgttaaggaatcaattcatcttttaaattatatttttgattgttttttctgataacacaagtaacataatgcagaaaaatttcacacacaggagtgtgcaacccagcaggggaaacgtccctgtcatctcagctgcttagagagaggcaccgctagttaggtggtcctccttcaagatcttctcctttgtagaaagtgaaaaacacacatgtatcctgtattttattctttcaaaccgaaagccccactggacctgccttcgcagctccctcctcgccttccctgtgtgtcttgggaggataccatgttccactttggatgaatttctcctatctgtgggtagctgtgactgactcacaccagccctattgccactggacactggtgacaagtctaagtaacgcagttgggcagggacattgtttggtgaggtgatgtggaatcaggctgggacagtggttggtgaggtgatgtggaatcgggctgggacagtggttggtgaggtgatgtggaattgggctgggacagtggttggtgaggtgatgtggattccggaggggacagtggttggtgaagtgatgtggaatcaggctgggacagtggttggtgaggtgatgtggaatcgggctgggacagtggttggtgaggtgatgtggaattgggctgggacagtggttggtgaggtgatgtggattccggcggggacagtggttggtgaagtgatgtggaatcaggctgggacagtggttggtgaggtgatgtggaatcgggctgggacagtggttggtgaggtgatgtggaattgggctgggacagtggttggtgaggtgatgtggattccggcggggacagtggttggtgaagtgatgtggaatcaggctgggacagtggttggtgaggtgatgtggaattggcctgggacattgtttggtgaagtgatgtggaatcaggctgggacagtgattggtgaggtgatgtggaatagggctgggacactggttggtgaggtgatgtggaattgggctgggacattgtttggtgaggtgatgtggaatagggctgggacagtggttggtgaggtgatgtggaattgagctgggacggtggttggtgaggtgatgtggtataaggctgggacagtggttggtgaggtgatgtggaattgagctgggacggtggttggtgaggtgatgtggaatcaggctgggacactggttggtgaggtgatgtggaatcaggctgggacggtggctggtgaggtgatgtggattcgggtggggacactggttggtgaggtgatgtggtcatccggcagggacggtgagttggtgaggtgatgtggattctgacagggacagtggtttctgaggtgatgtggattcgggtggggacactggttggtgaggtgatgtggtcatccagtggggacagtggttggtgaggtgatgtggaattgggctgggataatgtttgggtgagctgatgtgtaattgggcggggacagtggttaggtgagatggtgtggtcatcaggctgggaccctctgctgtgactgagacccgtgtgtattgtcactcccgggaggcttcccggaggtggtgacattgtgtgtgatcagcatgtgttagtaagtttggtgcattcaaagaccaactctgagtccattgcctcagccccagggtagcccaggtgatgccaggagggaggggctacagggtttgcagttctgggttggaaaggccgaggccaaggaaggagtgtggacccaatcggctgcccacttagtgtccccgcccaagcattcactgtctttactgaagagcctcctggagcaggtctgctgcatgtctctgttcctgttcggagtgctctgagcgttggacctgagctttggaggacggggggagtttctccaggtggacctggcagaatgagaggagggcggggacaactcaaagaccaccccccacccaccgaccagggagagtgtccacctctcctcacaatggacttgctgcgagtcctcattggggagtttggtgatggcatagccttcctgaaggagacaagggaaagtggccttaggttttccagagtctgtgaggtttcagggaaaagccaggtccaagcagaggcatttctggagctgccggg

SEQ ID NO: 39322 - DNA, 715 bp, Artificial sequence
  DNA replication origin
cttcgggtggagggcatgttcacgtaagttgactcatgttttgggcgaacgttggtggtgagaggagctgaagtctccccatctctcaaggatgcagcagccaggtttagttctgtgctctatgggccgcacctcctggccccccatcctgctccggattccacagcttggtcttgactcaccaggaagcagggcagcaacttgagagtgatgcaggggacacgtgcaggggtgcagagtgtaggggtgcaggggtgcgaagtgtaagtgtgtaggggtgcagggatgcaagatgtaggggtgcagagtggaggggtgaaggggtggagaatgcaggggtgtaggggtgcagggatgcagagtggaggggtacagagtggaggggtatggggtgcagagtgtaggggtgcaggggtgcagagtacaggggtacagagtaggggtgtacagtgcaggggtgcagcatgcaggggtgcagagtgccattcctaagccatcgtcttgtgtctgtgttctgtgtatttgcttgcatgcttttctctccagcgtgattttctgatccgtggatacacacaggctcctccctattcagctaaacctcccagctgcctctaaaagctggggattgtaggggtcggggaggcgtgttctctcattgtaccatcacattgaattgtctcaaacaccctgccaggtagaggtggttatttccctt

SEQ ID NO: 39323 - DNA, 1754 bp, Artificial sequence
  DNA replication origin
ccctctcattctgtgacagtcccacagcccccagcatacaaatgcagatcggaggcaaggagaagccgagcccctggccagggttgagaggagctcaggtgcaggcccaggatgcagactccagacatcctgctctgagctctggcaccacagcccagggggtgcgttcacgctaacgaagcctgcacctcctccatgtgctcttaggctgtctgtgattcatcagaatgtgcagaggagaaggcatgagagctcggcccacagtggacacagtggcgcagcctgccctgcagtgggaacgtgagcatggggggcacgggctgggcgtggtgaacaccccaagtgagcctggggtgatgcagttgggtggccgcatccaaccctgtgaagtgctgggtcctttgctgctgaccatacacagaactctttttcagactgagtttggtatcagtgtgagtgtgcaacacctgcgcatgtgtttcatgtagccgcacgtgtgtactgtgtggaatgtgcgtacgtgtaaatgtgtggtgtgtgtgtgtggtgtgtatatgtgtgtagtgtgtgtggcatgtagtgtgtgcagtgtatgtggtatgtccatgcgattcatgtatgtggtataaaatgtactgtgtgtggtgtatatggtgtgtggggcatgtgtgacatgctccgtgtgtgtggtgtgtggggcatgtgtgtgggtgtgtgcagcatgcactgtgtatgtggtgtgtgtggtgtgtatggggcatgtgtgtgggtgtgtgcagcatgcactgtgtatatggtgtgtgtggtgtgtatggggcatgtgtgtgtgtggtgtgtgatgtgcactgtgtgtatggtgtgtgtgtggtgtgtacggggtgtgtgtgtgtggtgtgtgacgtgcactgtgtgtatggtgtgtgtggtgtgcatggggcgtgtgtgtgtgtgtgtgtgtggtgtgtgtggcatgcactatgtgtgtggtgttacaaggcagtgtgtgtgcggtgtgcactgtgtgtgtggtgtgtgtggggcgtgtgtgtgtgtgtggtattgatatggtttggctgtgtccccacccaaatctcatcttacattgtatatcccagaattctcacgtgttgtgggaggaacccagggggaggcaattgaatcaccggggccagtctttcccgtgctattctcgtgatagtgaataagtctcacaagatctgatgggtttatcaggggttttcattttgcttcttcctcattttcttttgctgctgtaatgtaagaaacgccttttgcctcctgccataattctgaggcctcacagccatgtggaactgtaagtccaactaaacctctttttcttcccagtctcgagtatgtctttatcagtagtgtgaaaacggactaatacaggcacgcactctgtgtgtggtatgtgcagggtatatgtgtggtgtgtgtggcgtgcactgtgtggtgtgtgtggggcatgtgtgtggtgtgtggcatgcatcgtgtgtgtggtgtgtgtggcgtgcagtgtgtgtgtggtgtgtgtggcatgcactgtgtgtgtggtgtgcatagtgtgtgcggggcgtgcagtgtgtgtgcggtgtgtgtggcatgcactgtgtgtgtggtgtgcatagtgtgtgcggggcgtgtgtgcgtgtggtgtgtggggcgtgtgtgtgtggtgtgtgtgccgtgcaccgtgtgtgtggtgttccgggcagtgtgcctgcacctgt

SEQ ID NO: 39324 - DNA, 642 bp, Artificial sequence
  DNA replication origin
gaattgctgtttttcagtcccgttgagggccaccttttgggagaaggataaaacaaaccaccattttctggagatgtgagcttcaaacttggacccccacctcgggaccttctagttgctttcccaaggcagatatgccttctgcagaaacagctcatgtggagagccctgggggaccatcccctcactgccctgatgacctgtagcccccttcagttaaagttctcaaatgctcaggtgtccaggttcagatcagaaactggccagccagccctggggaactcacggaggaatgcagtctgtggatgcttccctgcaatgccagcctcacttacaaggcctccgctctcagggtgaagggcaagaagtgattcatatccaggcttctccaggagatggggggagggaccaggggatgggggagggacccggggatgagggagggtccaggggatggggtgatgggccagggggatggggggatgggcctgggggataggggatatggaccatgtgagtagtgggggacaggcctgtgcaggagagagttcaccctggcctaggcctctcctgagctccctgctccagcctttgcacgtgctctacagtgacacacctgacgtttgctaacagctgcctgtg

SEQ ID NO: 39325 - DNA, 1258 bp, Artificial sequence
  DNA replication origin
tttcaaatgttgaaacagttttaaggacagcaactcatgacgcaatttttttgcctgttcggtttttcgtttacttgaaaggccttaagcgttttgaaacagtagctggagctgggtgctgtggttatgccagagttctggcttaggggcctgctgctgtcaggagcaatgagatagtctgagggtgagagcactgaggatggatgggtggatggatgaatggatgaatggagagatgaacgaatgggtgtagaaatcaatggatggatggtaggtgggtggaaggatggatatacggatggatgaatggatagagagatgaatggatggatggtgggtgggtgggtggatggatggatgggtggatgaatgaatggatggagagagagatgaatggatagatggatagataaatggatggagagatgaaaggatgagtggagagatgaatggatggagagacaaatggatggatggagagatgaatggatggatggtgggtgggtgaatggatgggtgaatggatggagagatgaatggagaaatgaatgggtggatggtgggtggatggatgaatgaatggttagacagataaatagatggatggtgggtaggtagatggatggaaggatggatgaatggataggtagaaagatgaatggatggatggagagatgaatggaaggatggtgggtgggtggatggatgggtggatggatgaatggatggatggagagatgaatggatagatgggtagatgaggggatgggtagagagacgaatgatgagtggagagatgaatggatggatgaagagacaaatggatgaatggagagatgaaaggatgaatggatggatagtgggtggatggatgtgtggatgcatgaatgaatggatagagagatgaatggatgaatggagagatgaatggatggatggtaggtgggtggatggatgggtggatggttgagtggatggatggatgaatggatgacggatgggtagatgggtgggtgtgtggatgggtggacagaggatggatggatgaatggatgggtaggtagaagtgtggatacatggatgaacagatggatgggtgtatggttggaagggtggatggacactaacctaatgtaatagactgtggatatactgttcaccccgtcatactttattgaccaatttcagactgaacacaataaattatgtcaaccctgcccaaatctacaccttgaatttgcaacatggattagcttca

SEQ ID NO: 39326 - DNA, 1618 bp, Artificial sequence
  DNA replication origin
tctagtaactatccaagccaaaaatcactttcagacccatcactcgctgggtggaacgttctccccacttgctcatgaagagcctggggaatcctgtctgcaccccacacaaggaggcggggcagagcctgccctgaagggcccacctggctggagaaccacagggtgtgttactcattaatgtctgggtaacacttatctcctgccatctctctcgggtacatggtacccaggccatccaggtgcctgggaaatggttgtaaaattgagctggattacaattgtaggattttttcctttgcttttcccaggagaggaaaaccttcctgtagatccaaagtagacccccccaagggtctttcaggaagcacaggtgtaagcccaaaacccggggaagcagttttggctgaggtgacatctccttaactgcgtcctcctcacttgcaggactggacctttctgcctcctggaacatcagggagcagggatctgggctggggtgggggctgcgtagggagtgaggggactggagcagtgggatctgggctggggtggaggctgcatagggagaggggactggagcagtgggatctgggctggggtgggggctgtgtagggagtgagaggggactggagcagtgggatctgggctggggtgggggctgcgtagggagtgagaggggactggagcagtggatctgggctggggtgggggctgtgtagggagtgagaggggactgactggagcagtgcatctggtctagggtgggggctgtgtagggagtgagaggactggagcagtgggatctgggctggggtgggggctgcatggggagtgaggggactggagcagtgggatctgggctggggtgggggctgtgtagggagtgagaggggactggagcagtgggatctgggaggtggaggctgggtagggagcgggacagtggcatctagggacctgggatcttggggagtgggagctggcagggggtgaaagctttggggcggggggtagcgggaactgccccgcaaatcctagaactacaggatatgctgaggcccagcactgtacctggagcccaggacacaacaggattttaaggatttttatttcactccgcaaagcctgtcctatttctacctgcatgtcatatttccccaggtggacagagggtcctgggcctgaagggggcacagcctccctgcctggctgccttgagctgatcctgggaaggtttgaaggtcagggcagaggcaacttggcttcagaaagctgatgagggtcttgggaggggaaagctcctgtatgcagtaacccaggggtttcaaagcaaagctgcctccaggccttgaggggctgcgagggcaagaacacaagagggatggggggcggcgatgctggcactgctgtgtgggagccccgtggcctggccacaacttccacctgccccctccgcctcagctcccctctgctcagcgggtgcagtgggactgctgtgagggtgacgtgaggatcggtgtggacagagtgacccttgggcaaatggctgctgaggagcctccttgggtgactttggtttgaccagaacaggttttaaaaaatctgaatgtgaag

SEQ ID NO: 39327 - DNA, 1160 bp, Artificial sequence
  DNA replication origin
ggctgtgggggacagaaaaaaaatttagagatctggggcctgcaagggtttccatagcatgtaatgggagtttgggtcggcttgccaaacacaccaaaccacccacctgcacttcccacacctgcctcccagccccagggccggccgggcaggagcctcgtccctcccaccccagcaggctaggggcgggagggatgagggaaatgagctttgcccctggtccaaggggactggggtctggaggagggctgcacagactccctgggggcagagccatcagccccaaagctggaggctgagcaagggtcccacagtcacccacccgtctgcagcccacgggcgtcggcacagagggagcctcctgggggctcctggagtccaagtccgtccccagtggtgagtccgtatttaatgcttggcagaggagcccccactcgccagggcttcctcaacaggaggcccgcagagccgccgtggaaaacaggctcgtggcctccagaaaggcgagcagagctgctgcatgcgtgacccagcaatcccactgctgggcagacaccctaagaatcaacatctgtccacagaaagccttgcacacagacgtgcccggcagcacactgacaacagccccaaagtgcaaccgccaagtgtctgtcagctgctgagtggctaaacgtggtccacccacacagtgaaatgttatttggccctgaaaggaactaggttctgatacgagctgcagcatggctgaaccttgaaaacattatgctcagcgaaagaagccggacacaaaccccacataatacctccttccattgacacaaagtatgcaggacaggcaaatccatagagacaggaagtacgttattggctgctgggggcgaggccagggaaggagaagcgactgcttaaagcagggtccccaacccggtaccggtctgtggcctgttaggaactgggccgcacagctggaggtgagtggtggccgggcgagcatgactgccagagcctccagtgctccgcctcccatgatgtcagtggtggcattagactctcacaggagtgtggaccctgttgtgacctgcgcatgtggatggaggctgcacgctccttgtgagaatctaatgcctgatgatctgagctggaacagcttcatcccggaa

SEQ ID NO: 39328 - DNA, 957 bp, Artificial sequence
  DNA replication origin
tgtgccacaggctgtcaccctctgccccggggaggggtatgggggcaggggcagggcagtgagacccacgagaacctgccttgggacttttgcggggactcttgggaaagacacgctcccctcacccccagggctgtccagctgcttaggaacaagcttttggcctccaaggccatggtggctgcagcagagaggatctcttggaggagaaaggagggtggggttgaaaaccggccggggagactctggaaacacatctcagccaggggcgctgccacacctggcactgccagccctgcctgcacttcccagtcatggtccccttgctcggggagcccctggggtggggtctgcctcctgctcactaacaagacatctcactctgtgcctcaaccacaaaagagccggccacggtgcctgccacaccctctgagcccagcagggcaggtcagtagtgccccaggggatttcatgaattcaggagggctggataagagtgtggggtgcacacaggaccctcgtggattctagggggctggggaagaatgtgggggtacacacaggaccctcatggattctagggggctggggaagaatgtggggtgcacgcagaacccttgtggatcccggcggggggaggtggggaagagtgtgggatgcatgcagggccctcgtggatcctggggggctggggaagagtgtggggtgcatgaaggattctcgtggatcccagggtggttggggaagagtgtggggggcacgcaggactcttgtgaatcccggggggctggagaagagtgtggggggcacacaggaccctcatggatcccgggcctgtactggcatgctcatgtccccagatgaactccccaagccttcgaagttcctctggagctgagtcaatatttaacccatctttccatttgttttccattagaacacgcatctgaaaccctt

SEQ ID NO: 39329 - DNA, 1460 bp, Artificial sequence
  DNA replication origin
gccctgctgggtgacccgcagacccgtaccacagacgttttccacaaagaaatcaacgttggtttatttcaagttccccagaaagtggaaccaaaatcagggttccctccaaaaaaaaacaaggtccacctgaaatgacgggagggccgaggatttttgcccagtttccagcgaggcctgaggcccacggaggtgactaggggccccccatgtggagggagctggggcctggcttcgcagccctcactccgtccacccaagcttcgccactttcgtctgctgcgttgggcttcccgatgggatttcactggaagaaatgacttctcaaaaaatctttttattttgagataattgtagagtcacatgcagttgtaggaaataagacagacagatcctgtaagcccttcagccagcctcccccaagggtgatatcttgcagaaccgcagtgcaggtcacagccaggaaactgaccttcgtaccggccacagcccctactaggatcccacccgtttgacctgcattcattggtgtgtctgtgtgtgtgtgtgtctctgtgtgcatctgtgtgtgtgtcagtgtgtgtctgtctgtgtgtctctgtgtctgtgtgtgtctctgtgtgtctctgtgtctgagtgtgtgtgtctctgtgtgtctctgtgtctgtgtctgcatctgtgtgtgtgtctgtgtctgtgtgtctctgtgtgtgtgtctgtatatgtctctgtgtgtgtctctgtgtctgtgtctctgtttctgtgtgtctgtgtctgggtgtctgcatctgtgtgtgtgtctgtgtctgtgtgtctctgtgtgtctgtgtgtgtctctgtgtgtgtctctgtgtctatatgtgtgtctgtgtctctgtgtctgtgtgtctgtgtctgtgtgtctgcgtctgtgtgtctgtgtctatgtgtgtctgtgtctgtgtgtgtgtctctgtgtctgtatgtgtgtctgtgtctgtctgtgtctgtatctgcgtatgtgtctctctgtgcgtgtctctgtgtctgtatgtgtatctgtgtctctgtgtctgtgtgtctgcgtctgtgtgtgtgtctgtgtctatgtgtgtctctgtgtctgtatctgtgtgtgtctctgtgtctgtgtctctgtgtctgtatgtgtgtgtctgtgtctgtgtatctgtgtctgtgtgtctgcgtctgtgtgtgtgtctgtgtctgcatgtgtgtctgtctgtgtgcctcccatcaaccctaacctgtggcaaccacgactctattttcatctgtagtgttgtcattccaaggatactatagaaatggaatcacagccgtgtgttcccttttgggattggctgttttcctgcagcatcgttctctggatgtacagccaggtcgtatccatagctcgttcctttctgtggcgtagaattccgtggcctgggtgtaccgcggcttatgagccatcccca

SEQ ID NO: 39330 - DNA, 908 bp, Artificial sequence
  DNA replication origin
ctgatgctctggggaagcttttcccaaattgggcactgtcagccctggggctgggtcgttctctgctgtggggtgtcctgggcactgaggggtgctgagcattcctggcctccacccatgcaatgctggtggtgccccccaccgagctgtgacaaccacagataccaccacttgcccagtgtcccaagaaagacgtcgccctaggttggaagcatggctctaggggaggagaccgacagcaaatagcaaagagtatcatatcagctggggacagaggccgtgtagaaaacacagcaggagagagggacagggcactcagtgcactacattaaaccgggcggcaggcagggctgtttgccaggcagacatgtggctgtcgagctgtggaggtctcgggaggaatgctgtaggcggggggagcagccagcgagaaggccctggggcaggcggggtgggcttggggtgccgggggaatggggccgggttcatttctcatttctgggtgagacaggaaaccgtggtggggtttgaaaagacaagagctcagattggtgtttgaacaggatcactgggcttctgggcgtggacagagcaggagatgcgcagaggctggggcatgtgctccgtggtctgagtggcttccgtcgggtgtgggggagacagtggacataaaagagaaggaaaggcacctgcggggccggccgggtgacttctcagaagataggaaggggcggggggctggggcggcccatgccacctggggtgccgggaaaccctcgggaatatccagcccttccgcagacacgttccctctcccattctcctgagacgcacgggcctttttgtctttcattttctcacttttgatagacctagaggaagtatttctctacggcagggaaaacagc

SEQ ID NO: 39331 - DNA, 1203 bp, Artificial sequence
  DNA replication origin
gaggaaggaatagaaagacagagggatggaaaggtagaaagagggagggagggatggtgtatgggtaggtaagtggatggataaatggatgggtgggtgaatagagggatagatgggtggatgggtgagtagagggatggtggatgggtgggtgggagggtggatggatagatggatgggtgggtgaatagagagatagatggatgggtgagtagagggatgctggatgggtgggtggatggatagatggatgggtgggtgaatagagggatagatggacgagtgggtgaatagagggatggtggttgggtgggtgggtggataaatgaatgggtggctgaatagagggatagatggatgggtgaccacagggatggtggatgggtgggtgggtggatggatagatggatgggtgggtaaatagagggatagatggatgggtgggtgaatagagtgatggtggttgggtgggtgggtggataaatgaatgggtgggtgaatagagggataaatggatggatgggtgaatagagggatggtggatggaggggtgagtggatagataaatggatgggtgggtgaatagagggatagacggattggcggatgagtagagggatggtggatgggtaggtgggtggatggatagatgggtgggcgaatagagagatggtggatgggtgcatgaatagagggattgtgggtgggtgggtaggtgggtggatcgatgggtgtggggcagatagagggatagtggatgggttggtgagtggttggatagatggatggatgggtgaatagagggatagtggatgagtgggtgagtggatggatggatggatgggtgaatagagggatggtggatgggtgggtgagtggatggatggatggatgggtgaatagagggatggtggatgggtgggtgagtggatggatggatgggtgaatagagggatggtggatgtgggggtgggtggctgggtggatggatggatggatggatgggtgatggttggaaagagaaaaggttggtgaccatctgctgtttgtaattccttacggagccagtttatggaacttgagcacgtttcactgaatcacaccgctaggagctggtcttttcccttaacctcttagagaagcacgactcaggattgttagtcacttggagagcatttcacaggttcccttttcgctttggtc

SEQ ID NO: 39332 - DNA, 1932 bp, Artificial sequence
  DNA replication origin
ttatgtggttgttcctgcttggaaagatcaggccctgagaggctgtggtggccccggagatggggtggagttggatctgttcagactcaggtgcttcactgccggccccaagcatggggagtggggttcaaaacagcaccttgtgggtggaacaccccaggttccttcctgtctcacctgaggccctcagcttatgaagctccaaagccacaaactggccttttccgctccactgtagacagtgcctggcctgcctgcctgcaggtggttcacgaggggtgggaacgtggggacatcacatcagtggcgggacatggtgccctcatgcttcttggggaaagctgattgattcctccagcagataagttcctctctaagtggaaatgtcttacactgtttatcatgaaagtttccaggcattcctagaagtaggaggaacctgcataattgcgtggaagcgctgtgtcatgatgattgcgtggaagcatgtcatggttgcgtggaagcgtggtgtcgcggtgattgcatggaagcgtgttgtgattgtgtggaagtgtgtcgtgattgcatggaagcgtgtgattgtgtggaagcatggtgtcgcggtgattgcatggaagcttgtgattgtgtggaagcatggtatcgtgattatgtggaagcgtggtgtcacggtgattgcgtggaagcgtgttgtgattgtgtggaagcgtggtatcgcggtgattgcatggaagtgtggtgtcacagtgattgcgtggaagcgtgtcgtgattgtgtggaagcatggtatcgtgattgtgtggaagcgtggtgtcacggtgattgcgtggaagcatgttgtgattggaagcgtgtcacggtgattgcgtggaagcgtggttttgtgattgcatggaagcatggcgtcacagtgactgcgtggaagcgtggtgtcatggtgactgcgtggaagcatggtgtcacggtgattgcatggaagcgtggtgtcacagtgattgcatggaagcgtgtcatgattgtgtggaagcatggtatcgtgattgtgtggaagcgtggtgtgattgtgtggaagcgtggtgtcatagtgattgcatggaagcgtgtcgtgattggaagcgtggtgtcgcggtgattgtgtggaagtgtggtgtgattgcgtggaagcgtgtcttggtgattgcatggaaatgtgtgattgcatggaagcgcagtgtcacggtgattgtgtggaagcgtgtcatggtgattatgtggaagtgtggtgtcgtgatgattgcatggaagcaccgtgtcatggtgattgtgtggaaatgtggtgtgattgcgtggaagcgtggtgtcacagtgattgcatggaagtgtggtgtcacagtgattgcatggaagcgtggtgtcacagtgactgcatggaagcgtggtgtcgtgatgattgcatggaagcgtggtgtcacggtgattgcatggaagcgtggtgtggtgattgcatggaagcatggtgtcacagtaattgcatggaagcgtggtatcatggtgattgcgtggaagcgtggtgtcgtgattgcatggaaacgtggtgtgattgcatggaagcatggtgtcacagtaattgcatggaagtgtggtgtcatggtgattgcatggaagcgtggtgtcgtggtgattgcatggaagcatggtgtcacagtaattgcatggaagcatgtcatggtgattgcgtggaagtgtggtgtcgtgattgcatggaagcgttgtgtcacagtaattgcatggaagcgtgtcatggtgattgcgtggaagcgtggtgtcgtgattgcatggaagcattgtgtcacagtaattgcatggaagcgtggtgtcacggtgattgtgtggaagcgtggtgtcatgattgcatggaagcgtggtgtcacagtgattgcatggaagcgt

SEQ ID NO: 39333 - DNA, 1449 bp, Artificial sequence
  DNA replication origin
gggacccagagtaaggccttgggaaaggtggcattgtctgtgcctgtcctctccatccgagggggctccctgggcacggtggatgggcatggagtgcccgtgagcctctgtgtaggagcctggtccacagggcattgcgctggggaagcctccagagctcacgtcccctcccctacagaggactaggcctgaacatggcccccagagctgccctttggggaccagcggtgatggcctcagctggaagggcctggggaatgctggaccacatgcctgcagaaggcccagctcactgccaaggtgagccccactgaggggtacagcactgctgcatggcctgtgccgaccctgcggggccactgagatggtgtgccaccgtcccctggcacccaggcctccagcagggcacctctggctgcagtggtgaccagcctcctgcctggccatcccaggaggcccggcccagggacttgagccgcctcatgccccccgcctaggataaggcagtgacaggaaagagggaagcaggaagcgtggagaggacaggaggcacggagggcagagggtgggagaggcaccttcagaggcccagctggtgtcaccactgcaggagagcctccacctgagactggggaaatgaagtggggagggagtgatgcatgcaacacctggcatccgtgagtggggctccggggcttggtggttttatctgctgatgtcggctgtggctgcggagggtttgcatccaaacatgtcggtggccagaggcctgtctcagtgcatgtgctgcctatgtttgcaagtatgtgaacgaatgtgtgtgtgtgcacacgtgcattgcatgcatgtgcatatacacgtgggtatgcatgtgtgctcatgtgtatgcaagcatatacatgtgtgcacgtgtccgcttgctggcacttcagcccatttgactgtgcccccaccacagggggaggagtctacagggctgggggccatgtgctcgcccctccagacacctctgggcaccaggaccctgaaactcctcacaaagtgccttgagccccctctctggtctgcttaggcctctcctgcattttcaccaggtggacctgtcccgaggcccaagggatactgtttgttgggggcttaggtgaagcctggggcatccaaatgcctacacgcaggccccctggggcactgggcaaagccggaggtgggaagagacggaggtgggaagagccacaggcccaggccagctccttccttgctgccacttttggcaccacactccaaggagtctgataattccaaattggcccgggcattccatggagtccgggaggtgtatatgccaaggtaggaggggaatgtgattttgcttgttagtttcatggataccttctaaaccctttaaaacattgagacagatggcatgtgggcccacaggtgtgaggagcg

SEQ ID NO: 39334 - DNA, 1591 bp, Artificial sequence
  DNA replication origin
cggccacggtgcagacggtcgcagtgctcctcgtcgtcggtgagagggggcggccacggtgcagacggtcgcagtgctcctcgtcgtcggtgagagggggcggccacggtgcagagggtcgcagtgctcctcgtcgtcggtgagagggggcggccacggtgcagacggtcgcagtgctcctcgtcgtcggtgagagggggcggccacggtgccgacggtcgcagtgctcctcgtcgtcggtgagagggggcggccacggtgcagacggtcgcagtgctcctcgtggtcggtgagagggggcggccacggtgcagacggtcgcagtgctcctcgtcgtcggtgagagggggcggccacggtgcagacggtcgcagtgctcctcgtcgtcggtgagagggggcggccacggtgcagacggtcgcagtgctcctcgtcgtcggtgagagggggcggccacggtgcagacggtcgcagtgctcctcgtggtcggtgagagggggcggccacggtgcagacggtcgcagtgctcctcgtggtcggtgagaaggggcggccatggtgcagacagtcgcagtgctcctcattgctggtgagacggagcgggactgctcccctgaccttggatgctcctgagctgggctgcccagagggaggcacctgaggtcccctctcctaggggagaggggactcatggtggctgcgtgccggaccagaagcctgtccggtatctgggtctcttcccccgtacctcagcccttgctcctccagccccctgtctccatcgcctctcccaggccgtccctgccagcagctttggtcgccagcagctttggtcacccttcctggccctcccccatgtgttgacctgtctggagcccctccccccaccatatggaggcagaactgaggaggggacatgtttgttgcagggtcccgtgcctggtacagggttatgctgagtgtcacccccaacccccagcaccacccttgtttttacaggggaggcagtggagggcttcgcagagcatcttccctgctgaggagggtgggctgggctgggcctggcttcaggcgtcggagagctggggcagtcaagtctatgtctctaaggagccccccagtgactttgaggccagagctctgtggggtgagggagatgcctgggctattctgctggttctgtgtcctgggaggcccccagggacacagggaggcctgagttcaaaccccgcttgcagtgggcgactgcccctctctgagcctcagtttcctcatctgtaaagtgggggtgaccatagcctttccacggcaggttctgtgggacccagagtaaggccttgggaaaggtggcattgtctgtgcctgtcctctccatccgagggggctccctgggcacggtggatgggcatggagtgcccgtgagcctctgtgtaggagcctggtccacagggcattgcgctggggaagcctccagagctcacgtcccctcccctacagaggactaggcctgaacatggcccccagagctgccctttggggaccagcggtgatggcctcagctggaagggcctggggaatgctggaccacatg

SEQ ID NO: 39335 - DNA, 2942 bp, Artificial sequence
  DNA replication origin
cctcgtcgtcggtgagaaggggcggccacggtgcagacggtcgcagtgctcctcatcgtcggtgagaaggggctcccacgatccagacagtcgcagtgctactcatcgtcggtgagaaggggcggccacggtgcagacagtccgaatgctcctcatcgttggtgagaaggggcggccacggtgcagacagtcgcagtgctcctcatcgtcagtgagaaggggcggccacagtgcagacagtcgcagtgctcctcatcggtgagaaggggcggccacggtgcagacggtcgcagtgctcctcgtcgttggtgagaaggggcggccacggtgcagacagtcgcagtgctcctcatcggtgagaaggggcggccacggtgcagacggtcgtagtgctcctcagcatcagtgagaaggggcggccacggtgcagaccgtcgcaatgttcctcatcatcagtcggggcgggcacggtgcagacagctgcaatgctcctcatcatcggtgagaaggggcggccacggtgcagatggttgcagtgctcctcagcgttggtgagaaggggcagccacggtgcagacagtcgcaatgttccttatcatcagtcagaaagggcggccacggtgcagacagtcgcagtgctcctcatcgtcagtgagaaggggcggccacggtgcagacagtcgcagtgctcctcgtcgtcggtgagagggggcggccacggtgcagatggtcgcagtgctcctcgtcgtcggtgagagggggcggccacggtgcagacagtcgcagtgctcctcgtcgtcggtgagaaggggctcccacgatccagacagtcgcagtgcaactcatcgtcggtgagaaggggcggccatggtgcagacagtcgcagtgctcctcatcgttggtgagaaggggcggccacggtgcagacagtcgcagtgctcctcgtcgtcagtgagaaggggcggccacggtgcagacagtcgcagtgctcctcgtcgtcggtgagaaggggcggccacggtgcagacggtcgcagtgctcctcatcgtcggtgagaaggggctcccacgatccagacagtcgcagtgctactcatcgtcggtgagaaggggcggccacggtgcagacagtcgcagtgctcctcatcgtcggtgagaaggggcggccacggtgcagacagtcgcagtgctcctcgtcgtcggtgagaaggggcggccacggtgcagacagtcgcagtgctcctcgtcgtcagtgagaaggggcggccatggtgcagacggtcgcagtgctcttcgtcgtcggtgagaaggggcggccacggtgcagacggtcgcagtgctcctcgtcatcggtgagaaggggcggccacggtgcagacagtctcggtgctcctcagcatcggtgagaaggcgcggccacggtgtagacactctgaatgctcctcattgtcagtgagaaggggctcccatggtgcagacagtcacagtgctcctcagcatcggtgagaaggggcagccacggggcagacagtctcaatgttcctcatcatcggtgagaaggggcggccacggtgcagatggttgcagtgctcctcagcgttggtgagaaggggcagccacggtgcagacagtcgcaatgttccttatcatcagtcagaaagggcggccacggtgcagacagtcgcagtgctcctcatcgtcagtgagaaggggcggccacggtgcagacagtcgcagtgctcctcgtcgtcggtgagagggggcggccacggtgcagatggtcgcagtgctcctcgtcgtcggtgagaaggggcggccacagtgcagacagtctcggtgctcctcagcatcggtgagaaggcgtggccacggtgtagacactctgaatgctcctcattgtcagtgagaaggggctcccatggtgcagacagccgcgatgctcctcatcgttggtgagaaggggcggccacggtgcagacggtcgcagtgctcctcgtcgtcggtgagaaggggcggccacggtgcatacagtcgcaatgctcctcatcgtcggtgagaaggggcggccacggtgcagacagtcgcagtgctcctcatcgttggtgagaaggggcggccacggtgcatacagtcgcaatgctcctcatcgtcagtgagaaggggcggccacggtgcagacggtcgcagtgctcctcgtcgtcggtgagaaggggcggccacggtgcagacagtcgcagtgctcctcatcgtcagtgagaaggggcggccacggtgcagatggtcgcagtgctcctcgtcgtcggtgagaaggggcggccacggtgcagacggtcgcagtgctcctcgtcgtcggtgagagggggcggccacggtgcagacggtcgcagtgctcctcgtcgtcggtgagaaggggcggccacggtgcatacagtcgcaatgctcatcgtcagtgagaaggggcggccacggtgcagacggtcgcagtgctcctcgtcgtcggtgagaaggggcggccacggtgcagacggtcgcagtgctcctcgtcgtcggtgagaaggggcggccacggtgcagacggtcgcagtgctcctcgtcgtcggtgagaaggggcggccacggtgcagacggtcgcagtgctcctcgtcgtcggtgagaaggggcggccacggtgcagacggtcgcagtgctcctcgtcgtcggtgagaaggggcggccacggtgcatacagtcgcaatgctcctcatcgtcagtgagaaggggcggccacggtgcagacggtcgcagtgctcctcgtcgtcggtgagaaggggcggccacggtgcagacggtcgcagtgctcctcgtcgtcggtgagagggggcggccacggtgcatacagtcgcaatgctcctcatcgtcagtgagaaggggcggccacggggcagacggtcgcagtgctcctcg

SEQ ID NO: 39336 - DNA, 1223 bp, Artificial sequence
  DNA replication origin
gcctcccaaagtgctgggattacaggcgtgagccaccgcgcccggccgtgagtggttttttgttatgcaagtcagtgtacatgtgaattgtgccccaggaaaaggaaggtgggggggtgcccagggctgggggaggggagagggtgggagggggcccagggctgggggaggggagagggtgggaagaggggcccagggctgggagggagtcccagggctaagggaggtgagagaatgggacagaggggccagggctggggaaggggagagggtgggagggaggtgcccagggctaggggaggggagaggacggtagggggaggcccagggctggtgggagggagggtgggaaggaggggcccagggctgtggaaggggagagtgtgggagggagggcccagggctgtggaggggcggttgcagggctggggaaggggagagggtgggagggagggcccagggctgggggagggaaggggtcaccactgggcccagccctgtggcctgcccttcggggagctgggactgactggctcctgaggcggaggtggaggctgctgggttgggcaccagcgtggggctcaggtcagactgctgctgcccagcaggggccggagggctgcctgcttcttcgagctcagtttcctcagcctttgagctcagcctccacaggtccagggtggctggcactgacactgtgcaggggctccactcttgagccactaccagtgtggactcaggctctcagggcaggtggggtcaggggactgggccagtcgtagagctttgaggacccagagtctggtgtgggagaacccgtttgtgcctggactcatggcctggagggctgggattctatagtggggaggcgaggccagggcgccaaggtgatcagaggggcacattggcttgtgagaggcaggcagagcaggggggcagatcatggggctgtgagcccacgacccccagcttggctgggacttggcaggagaatgtccttcctgggcggcgcccatggcagacccaccttacagccgtgtgccagagcgggtgcagatgggtgggatggctgggaggctcagcctgggcaactggggtattggggcagcctggggggtcctggatagttgtctgcagtgatgggcagtgagtggcctggcccagccacacacgggcagtctctcaatgcacagacaccgctgcactgaccctacatggggcct

SEQ ID NO: 39337 - DNA, 1061 bp, Artificial sequence
  DNA replication origin
ctctgcctcctgggttcaagcaattctcctgcctcagcctcctgagtacctggtattacaggcatgcaccaccacctggctgatttttgtatttttagtagagacggggtttcgccacgatggccaggccagtctcaaactcccgacctcgggtgatcctcccgcctcagcctcccaaagtactgggattacaggcgtgaaccaccgcgcccagctggctgacagttttatgttaccacgagtgcagctccttgtcagggcaggtctgtgattgtgctacggctcattaacgagattgcaaatcatgcgtctctcctgtgtgtgcccactccccctgcaggcctccgtggcactcagtaagcagcgggctcagggagagcgtcctggatggtcaccatgcaggtaagatgaggaggacacttggaaccaggcattggatgcgagccccaccccatgggagggggacggggggatgctgggcaccagggggacctgtgggccagctggccctgggcttgtgcttggggagtgaatgatgggttctgacccccatgcacccctgtgggcccctggcatcactggccccatccttcacccctgccaaccacgcttgccctgtgcctctgaagctcccccactaagggggtggagtctaattccctgccccttgactgtgggttcagccatgtgacttgctttgactgaggggatgttcacggggcatgtggtgctctgaactgagagctgcggtgaccaggctgctgtcctgtgttgctgccatcagtgagggtggctagcctgctggtcagggggaggatgagggagtggggggcagagctcagctgccccagcggcctggcctggaccagccaaccaaatgctgactctgtgctgctgagatcgtgtttgtgtttgttactcagcaactagctgatacacggtcccagcaacagacaaggaagcccagaggtagctaagtgacactcccaaggctacacagcatctcctactgggagctgtgtaagaaatgaccccccccaaaccctccatcctggcagctg

SEQ ID NO: 39338 - DNA, 1664 bp, Artificial sequence
  DNA replication origin
ggctggattggggccacatggtggggctgaggcccaccccttctgagggccccagagggaagggtccccacaccccctcctcagagcacccacttgctgcgtttggggaggggctagtcgaggcctccctgttcctccagggagagtctggcttaggccctcctccggatgcagatggccctttcccctgtgagcctcagtctcctcatctctgaaatggggacagtggcagcaccacccagcgcccgggtggccgagggttgacctcagcgcactcgcccccacctggccgcagagacaggaacacaaaacacgcagctgccctgcggggtaggggacacgtggcaggccaggggaggggcggggccggagggtcggggtcggggctagagggctgggggcggggccgggggcagggccgaggcggcaggtggcagcgcgagttcgcggcgggtctggggcggacacaggctgtgccttgtgggagccgaggaggagccaggggcggggggcccggggaggagatcaggctcgagcccgtgggtaaggcccggggcggggcacctgggcctgggatgctgggtgcatggtgggggccaggtggggggcaacgggatgtgagtgggggcggccgggggggccagggaggctggggaggcgggacgcggcccgtgtggggacgcgggtgccgggtggagggtgccggggactggagtcccggtgcgccccgcgtccttcgtggaggacaccttcgcctcctcccaccctgcctgtgtccgtctacacctccccaagcagacacctggcccgtaccccggggtttagagcccagggcagtcgcagtcacccaggctgactcgcgggagggctgccgatgtgccaggctctgcggggaggggaggggtcacaaacctgccacagtccctgcacgtcgggtcgttgccggtggaactcctgagagggcaccagacgttggaacccaagaggcatttggcaccacaacccccaggtagaagaaaaaaggaaaaaggggcccaggaggacgcagtcctgcgaaccccgcgaaggcttatctccagggagtaaaagactcggggaccccccgccttcccggacctcagggcatctagggtcctgcagtcgcctggggtggtgacacccggaacggtgtgcaggcagggcagggcaggcggagccagcaccgaccgcatctccaggggatcttgcttctcagagaggagactcttcccagaaagcaaaacaggcggggacaccctagattcggcagcagctcccaggaggagggactgcagggacagactcggggcttcctggtaggcaggtgggtgggaaactggctcagcctccaccacagcagcttgaagcacagccaccagtgcctgagaaaggacctctgctcttcctaaagccaaggaggctccgtgagggtgaagcggggccagaccccaccccagccacacagggctttggcttgccgtcttgactcctccagcagtgacttgaagtttctcagctcagtttaaaaaaacaaaacaaaacaaaacaataaaaaaaaaattggcctattgcggtggctcacgcctgtaatcccagcactttggctggctgaggtgggaggattgcttgagcctggcagtttgaga

SEQ ID NO: 39339 - DNA, 1287 bp, Artificial sequence
  DNA replication origin
gtggtggggagggagggacgtacaatattgtttcgccaacaagcgtccaaggagctggagcttgctgggctgccagagtcccctgaatgtggcccagttctctagcagggccttccactctgtgctgctcttcccctatgtcctctcaaatgccaccagctccaggaagccctccgcctccgtcctgagcactcatcccctcaccagcagccctctgggtcacttcagacttcacttcttggccacactggagccctggtggtccctgggccgcctcagaagcttatgagaaatgccacgtgatgactgagggggccccgtgtctcccggcacagcgccttgcacgggcacatggggccagcaggccccacccatcctacccgctcggggtggacccaggggggtgggtcatgtggcctggcttgtcttggtcactgacacaagctgagggatggccgtgacctcagcctggccagtcctgtctcacccagacatgttacaggaactcccagaaggacacttcatgtttgggggctggcaggacgtcagctcagttgtccaaggactgccaccgtggccactgcggggcagagtgtggctgagaccaacacagaggccgaatgaagagccagccttgatggcatcccggagcgcctggatccagccgtgcctgaggactggcgcctggatccagccgtgcctgaagactggcactgggtctgttttcatggttgggggcaggtggctataagaatgccacacaccaattccaggctgcggtggacccagccagccacgagaacgagctcccaggagctgaggatggagggggagcccgacattgcaagccaggccctggaaagccaactgcccagtcctcgctgctgccctgccagggcccctccccgcccttcccctcccagggtagattgaggggaaaagaagcgtgggccccaaccctggtggtgccgagaacccttgccagagagactttggggagcgctccccctagaggggatgtcagaggcttttggacactcggtgtgtggggaggtgctgagactcctggcgggtcctgagggctggattggggccacatggtggggctgaggcccaccccttctgagggccccagagggaagggtccccacaccccctcctcagagcacccacttgctgcgtttggggaggggctagtcgaggcctccctgttcctccagggagagtctggcttaggccctcctccggatgcagatggccctttcccctgtgagcctcagtctcctc

SEQ ID NO: 39340 - DNA, 971 bp, Artificial sequence
  DNA replication origin
gtgcaaagtgtcgaaactttccgcattgcacactataaatatatgcaggttaccatacgtcaatcaggtctatctcaataacgctgcaaaaataaatgaatgaaaaataaaaaagctgcgttcgtgtgtggagacaggaacatgggaggtgccaaatggaagaagcagaggtgcgggtggggaagaggtgagggtggggcactggggagggggaaggaaggtgcagggaaggggaaggagggttcagggagtggggagggggttacagggaggagggatgggtgaagggggaggggagcagggggtgcagggaggaggggaaaaggcagcaaggggagggggaaaagggaggggaggggggaagggaggacgggggaaaggaggagagggggaaagggaggggggaacggaggggaggtggggaaagggaggagggggtaaaaaaaggggaggaaggaagggaggggaagggggaagggaggggaggtgggaaggggtgcagggaggtggcaggtttgatggtgctgaggggcggggtggggggcactgctcctgaccctggtccaggtccagcactgtctgctgatgctggaggtggggtgggaggtccgaggtgggaggagggaggaggtctggtcctggtggagggacctttccatctctaggctgcaggggtggtggggagggagggacgtacaatattgtttcgccaacaagcgtccaaggagctggagcttgctgggctgccagagtcccctgaatgtggcccagttctctagcagggccttccactctgtgctgctcttcccctatgtcctctcaaatgccaccagctccaggaagccctccgcctccgtcctgagcactcatcccctcaccagcagccctctgggtcacttcagacttcacttcttggccacactggagccctggtggtccctgggccgcctcagaagcttatgagaaatgcc

SEQ ID NO: 39341 - DNA, 1255 bp, Artificial sequence
  DNA replication origin
aatctcagaggagctacgctgactggaagaggccggacacagaagcctatgcattctgattccgcctgatggaagttcatgggtgggtagaagcagggtgtggggctccggtgaggagactgtcgggaaggggcgccagggccctctggggtgatgaaaatgttctgttttgatcatcatgggtgtcacacaggcgcgtgccaatgtgaaacactaagctgacaggtaatatctgtgcatttgagccagtgtaagggcacctcagttaagcaaccgggaaaggcttgggccccacccaggtgggtcacctggccccgcactagggatctgacaccaaaggactcgtggcatgtaatggccccgatggtgggccgagtgccccgacggggggccgagtgttccgacggggggccgagtgccccgacgggggggcgagtgctccgacggggggccgagtgccccgatgagggggccgagtgttccgatggggggccgagtgttccgatggggggccgagtgccccgatgggggggccgagtgttccaatggggggccgagtgctccgatggggggccgagtgcctgagaagttgtcatcgtttttccagtgctgctctgactacaaatctggtggttctccacagtcagttgctggcgttttcccttctatcagacggtggcctccaaatgtaattaaaaaaaatctttttaatactaggtctacaaatcaagtgtaattttatctaaaaaagaaaaagtctgggtggatgtggtggctcatgaggcctgtaattcccagcattttgggaggccgaggcgggcggatcacctgaggtcaggagctcgagaccatcctggccaacgtggtgaaaccccatctctacaaaaatagaattatctgagcgtggtggtgtgctccagtagtcccagctcctcgggaggctgaggcaggagagtcgcttgaacccaagaggcagaggttgcagtgagccaatgtcatgccactgcactacagcctgaggacagagcaagactgtctcaaaaaaaaaaaggaaaaggtcccctgagccttcacctggccctggcctcagggcactattcacccggggctgccactgaggcagtggcatctgtgctgctctaggctttcattggtctgagcagctttggggacccatcggggcctcctgtgtcctcagtgccatacagacagcaagtgctcaaccagtgcctgatctcacgatggtggttatgcg

SEQ ID NO: 39342 - DNA, 1170 bp, Artificial sequence
  DNA replication origin
gttggtgtcgcgccctcccttggttggtgtcgcgccctcccttggttggtgtcgcgccctcccttggttggtgtcgcgccctcccttggttggtgtcgcgccctcccttggttggtgtcgcgccctcccttggtgtcgcgccctcccttggttggtctcgcgccctcccttggttggtctcgcgccctcccttggttggtctcgcgccctcccttggttggtctcgcgccctcccttggttggtctcgcgccctcccttggttggtctcgcgccctcccttggttggtctcgcgccctcccttggttggtctcgcgccctcccttggttggtgtcgcgccctcccttggttggtctcgtgccctcccttggttggtgctgacacttgcgttagaatatcttgatttcttaccctcggcagcctttaaattgagcacctgagatgagcgtctctccttcaccccggtcctcttttttagctgctgaactattttgaagatagaaacatcaaacacagtccggaatttatagcaggtgtcactgggtcacacagcctgtttgggtggtgcctgtgagagccctgccctcaccctgcaaactgtcactcacctcgcctgagttctcttttgggaggcctggccctcaggtgcggatcactttataatgagctagtgtggagtgcggaggcttcagtagcaaagggaccccgggcaggtctgaagaagggccctcacagcgcagggcgtctgaacggagacaggtgccctcatctgtttgaatctcacaggaataaagaaaatgcagtgggtcagagacacacttgcatgccatcacacaaggcagccatgctcccagcctgaactgaaagtggcagaacggggaaggggggaggaaggacggcatgaggggcggggccatgtcagggctgttcacagcaaggctcccactggcacacacagcagaatccgctccttccagcatcttaactttggttgagaatgtgctgtaaagatgccatcgtaatctttgtacttaaatatatgtgagcagctttcaccatcggagcagaacttagttttcatgccagctgggggaaatgacagctgttgggagttgtgtggcacgtgccccgctgggcggtgtcgtgtgtgtgtggtgcgcgccccgctgg

SEQ ID NO: 39343 - DNA, 875 bp, Artificial sequence
  DNA replication origin
gagggactgcggcatgtgcaggcgcaatggcgcaaaacagagcctgggacgacagacagctccacaagggccggcaccaacatggagccctgggggcctcggcctaaacaactccaaacacaggggcttggggtttgttaggtacaggtgctgggattagaaaacaagcaagcgaagcaaaatccccgcggccctggacataccacgtgagccctccctttgcaggtccccacctctgacgcatggcgctgcagacagccctcgccccatcacagggctctcaaaaggatcaaatgaaaggaggaggtctctccaccgcatatgtgccatagacactcagtatcgaagccaaatgcagagtcgccgtccgcggaaccgcccggtgcagggtctgcgccacccaaacgtcaggccccacacggtcagcacctgggggctgtccgggaggagcgcgtctgctcccggggcgggagccccttggtccgtcctttactccgccacggagccccagccgagcaatgggtggagaatgctgtgcccacagccgccccgggcggcgggtaacaatagcctatgccgcacacactccagccacctccgccccgaacgcgtacgtgccctctccgtgcctaaccatttacggggtgtcacacacacaaggccaggtcactggcagcacgttttgaagaacagcagtagtagcgaaaaacactcagacacacagcttagaaagttagcatcacttccgggaggccgaagacaacgtggctgccgagctgatgtctcccagcctctcttccaaacacagttcagcacaagcaaggaacgcaggtttacaccagcatcgccgtctgcactggacgagggcgcctaga

SEQ ID NO: 39344 - DNA, 1747 bp, Artificial sequence
  DNA replication origin
ccctggtctcctgtctcacaggactgttcacgctgcagtcgagcagtttgcacgggcctggcagctccactgttggccatcggcgtctgtgagccctagtggcttcttcctctgccttttggtgacaggacctccacaggggaggcacactctggtcctcagcctccctctcccgcctccgcctcactcagagcctgaggatgtctcttccctgcagtttcccgcccaatagaggaggctcttcctcccattcctgaggctgtttctgggccctgaccggaggcggcttggctggctcagaagtcttttctgttcttgccttgtgggggacgggtggggaggggggtgcaggctgggaggagccatggaggctgattccttccccttcatgggttctcttctcttcctccccggcagccctgccgtcggctctgagagcccgtagtgtatgaggttgcatctcagagtcccgccgcccactgggccctcgcagtgcattgggtttggtgtctcctctcgggtggggtgtgggtttggtgtctcctctcaggtggggtgtgggtttggtgtctcctctcgggtgggtgtgggtttggtgtctcctctcgggtgggtgtgggtttggtgtctcctctcgggtggggtgtgggtttggtgtctcctctcgggtggggtgtgggtttgttgtctcctctcgggtggatgtgggtttggtgtttcttctcaggtgggtgtgggttttggtgtctcctcttgggtggggtgtgggtttggtgtttcctcttgggtgggtgtgggttttggtgtctcctcttgggtgggtgtaggttgtgtgggttttggtgtctcttccgggtgggtatgggtttggtgtctcctctagggtgggtgtgggtttggtgtttcctcggatggggtgtgggttttggtgtctcctctctggtggggtgtgggtttggtgtttcctctcaggtaggtgtgggtttggtgtttcctctcagtgggtgtgggtttggtgtctcctctcgggtggggtgtgggtttggtgtctcctctcgggtggggtgtgagtttggtgtctcttctagggtgggtatgggtttgatgtctcctctccggtgggtgtgtgttgtgtgggtttggtgtctcctctcgggtggggtgtgggtttggtgtctcctcttgggtggggtgtgggtttgatgtctcctctcgggtggggtgtgagtttggtgtctcctctcgggtgggtgtgggtttgatgtctcctctccggtgggtgtgggttgtgtgggtttggtgtctcctatcgggtggggtgtgggtttgatgtctcctctcgggtggggtgtgagtttggtgtctcctctcgggtgggtgtgggtttgatgtctcctctccggtgggtgtgggttgtgtgggtttggtgtctcctctcgggtgggtgtgggtttggtgtctcctctcgggtggggtgtggtttgctgtcttttgtgaacgtctcctgggtcatggtgtgaatgtcccactctgcctgagggggagattcgcccagctctcatttgccctgttttctcctgacccttttcctcctttctgtgtctcgattctgtcctcttggcttcctgcctttcgtaggttccttactgcattttcaccgcctcccctccctcagactgtttgcagtttattcatttctgagataattttgtctcttccttccattactttcttaagtccagtcaac

SEQ ID NO: 39345 - DNA, 1455 bp, Artificial sequence
  DNA replication origin
ctcagagcactggattgggaggcaggtggtgtcgcctggctgttgctgctgctgctgctgactttgaagcttggttaaggtggggttggctggttactccattgtcgagttactctttttctctgtgtaattagtaggtatctcaaggagacacttggaggctgctgataccatttcttatcaggcctttggcccctgcgtgggcattcgcaaggacgctgccagtggaggctgctgtggcgtctgatgctgactttctatttctgtctttctgtttacatttattaattggaattctgtaaagagagctgccccgtctcccttatttttcccacttgttaattcattcagttacttacttatattagcatggatatttatttttttctgtaggtaacaagctgctgctacagtttatttattttgttgcttgagcagcccggctctggccatcatgagctccttcaggttagttccatgtccttgtgacacgacaagaggatttggtgactttatgacaccacagaatgttccagcacatcttctgttttccatgatttcttggaggggcattgcttcctttgactggggatggtgtttcctttgatgggggatggtgtttcctttggttgggaatggtgtttcctttgattggggatggtgtttcctttgattggggatggtgtttcctttgattggggatggtgtttcctttggttggggatggtgtttcctttgattggggatggtgtttcctttgattggggatggtgtttcctttgattggggatggtgtttcctttgatgggggatggtgtttcctttgatgggggatggtgtttcctttgatgggggatggtgtttcctttggttggggatggtgtttcctttggttggggatggtgtttcctttgattggggatggtgtttcctttgatgggggatggtgtttcctttgatgggggatggtgtttcctttgatgggggatggtgtttcctttgattggggatggtgtttcctttggttggggatggtgtttcctttgatgggggatggtgtttcctttgattggggatggtgtttcctttgatgggggatggtgtttcctttgatgggggatggtgtttcctttggttggggatggtatttcctttgattggggatggtgcttcctttggtcggggatggtggttcctttggtcggggatggtgcttcctttggtcggggatggtggttcctttggtcggggatggtgtttagaaccatactctgggcagcaggtgtgctcattgctcctggggtgtccctgcatccaggccttccaggtggactggggcatgtgcacacacacaaacactcgtctgcacctgcacctgtgctgaacacagcggccttctcacttctcctcaggcctcaggatctagtctgacgtcacaggctcattctagcttcc

SEQ ID NO: 39346 - DNA, 869 bp, Artificial sequence
  DNA replication origin
cagatgacagctgtgctcacccctgcaagcggccagggtgcccagagtctacagtcagacaaaagggagcccagagcaagagggccagatcctgtttcagaaacagaggccagtgtggaataaaggtcgggaagacaggcgacaaggcgggaaggcggtgcctggactgaaccctaagagactccggaagacatggtcaggcggacaaggagaaggcacggtaagaccagccactccagatccccaggccatcccactgacgccagcacagccctgagccacgagacagccatgaggctgaggaaggtggacagccgagagctcggccatgagtggagatctggagcttgggactgtgggttaaggagaggggaggctgccaggaatcctccctcccaccttccggccaggggacagagtgctgttctctgcgacagaggtttcgggaggggtgggggtgggggggacggctctgccactggagcgcgaatgtgcctcagctggtctgctccatggggagggggcttctggtggctcagggtgcagaatgcctgttccagccgggactgcggacacctgggaattttataagaggtcacacaggagtggggagagggccagaagggagttgctggagaccctgaccagagtgcagcatggttggggcagccagaggagaagagagccacagacaagggacgcaggcaccagaaaacggcaaagcccgggagacctccaggcgccggccccagaacacccagccccaggaaggagtctccttagctaggccacacacgccttcgacacgtgtgcacccctccccttcgcctgcagccttccagaggagctctccctgctggcacaggcct

SEQ ID NO: 39347 - DNA, 2733 bp, Artificial sequence
  DNA replication origin
gttacctgttttgactgttgtggcctcatcttcatggaaggttgtagaaaaacagtttgtcaggtgtcctccgtgagtacttacaactccagcgtgtgacagtaggcgttgggtgaagatggggtgagcgggtgaggctgactccctgccttggggacaggctgctccgtggggctgctgtgtgctccgtgacaggttgggtttctgcagcaggtctgaagcagtcactttgctccaagcatcttgagtgccgtcgtctctggcaccgtgtttagtctttgtgacgatggtgtcgtgaaacctgcctagggacgagacactgaggctcgcatttctatgaactgctcaaggccacgtgactggtggggcctggggctagaaacccgggctctggaacctctgcccgggccctgcctccctctggagtgaccctggtggcagctgtggactgctggggagttgggagttgggctggggtgcacggtggatgaggggcagggtgcggggctggggcaggcagggatctgggccgtggtgcttctctgcaggtgtgagtatgggtgtgactcaggtagatgagacccaggacgatgtggagagcagggccttcctctgcaggcagtggggacccctgaaggctgtggagtggaagagccagaaggtctggcctgggttctagatgttggtcctgatgacacactggagacagaatcagaaagagggcggtggtcactgagcaggggacgcagaagtgggcctgtgtgttgtggctgctggatgctggctggtgccaggcactgtgtgcgcctcccatgctcaccactgccctgcagggcacatgtttgggatccacttcctggacaggtcacagacactcgcacagaagctcagcctgggaaccccgcttgcagggtctcggcacatcctgatggtggggatagtgggggcagatgtggaaggcgggcgtgggcactgctgcacctggagaaccagcagccatgatggggctggtgggtggtgccagtggaggcacagtgcagatgctgcagcttggagttgggggacggagcctggtgaccgaggtggtcatgcggggagaggactgggggaggggggatggagcccagtgaccgaggtgggcatgtggggagagggcccagggggggatggagcccggtgaccgaggtgggcatgcagggagagggccgcgggacgatggagcttggtgaccaacgtgggcatgcagggagagggctggggggaatggagcccggtgaccgaggtgggcatgtggggagagggctggggtgggggtgtacggagcttggggtgtacggagcttggtgactgaggtgggcatgcggggagagggctgcaggaggatggagcctggtgaccaaggtgggcatgtggggagaggaccagggggcatggagcccagggaccgaggtgggcacgccaggagagggccctggggggatggtgcctggtcacaaggtgggcatacagggagagggcctgtggggatggagcctggtgacggaggtgggcacgtggggagacgatcctgcttaacagaggtgtggccccacacgaggaccctggaagtgcagtgggtttgtgttgcatgagagtgggagcacctctgttaggggaagagcagggtccaccctggggacaggagggaggggctagctaggacctgctggccagctggagtcagggagattccagccaggccttgcaggtggccctgtctgtggttgtcctcactgctctgcactcgggatgcccagctgagcaaatcacttgacaactcccatcctttcctaggtgtgtccaggaggagctagtacagggctgggctgcctcttggtttttagaaaagcatttgtggtacaacagaactcccagaggcagccccctttctcatctgggacttgggcaggcacgcgccagcctgccctgtgtgggaaggtgctaggtatgtcgcagccacagggaattgactcggcattgagccccagggcttcagggattttcagaggtgactttgagacttgatttcttctacacacccttccccgtattgtgactctgggtgggggaccaggcatcttgatgagggggtggtccagtgagggtttgggtgctggggagctaggtctgggatggccctgatgtggggcggtcccggggcagggttgccggtgtcaggcagcgcccgtgtttgaacatctcggcgaggaatcccgggtgctggtgtttataaaaatagacctgcggcttccatggctgtgtcctttttggtatgattgacattggatagcgtgcgtttgtattctgccgtgttcctgtgatgggagccaggggcgactcttctcatggcgaagtctggttggtgctgaagcatgttgcatcacctgggcttgacggtgcgctctgcgctcacggcagaggcagaggctgcagcatcttccgccaccgtttccatctctttttatgctatttccagtgtgatggtgcctctagcgctgtcctgagtgtggcctgttgtgcatgtgatggggtcttcacttgcctgtggacttactcttctcagcgcccctttcttgtgcgggggtggggagggtctcgctgtagagggaagagggtagagcaggtgccctgagactgtgtgatctcttccttctaaaggagctcacgaatattcatcagctttaagagaagtcc

SEQ ID NO: 39348 - DNA, 1186 bp, Artificial sequence
  DNA replication origin
attccccagtgcccagggcagcgtgggtagtggcagaaaggggccttgctgggtgggtgcaggaggaagcagcgctgggcatgccttgttctggggggccaggtgtgggggttctgatctcttggggccaatgtgtgtgtgtttcctcggcagaggtcctttctgccgtgacttcttccttctgcctggagcctggcaggtggctctgggtgatgcctagatgcccgtcctatcagcagcaggggtgtgccctcccgggcgggcctctgctgttccggagccctgtggctctcatggagcctgcactgggtttattgaactctcttgtccttctcttctctttttattggggctttgaccatttaaattcctttactcttgttttggtgggtcttgctggggaggggtgggggagagaggagactgtgctgccagcaccccgggctgctctcagcgggtgggggcacctgtctggaatctccatgtacaagcacaagcaggcattgtggcgttttgggaagagtcgtcagaagttgcctcctatggggcagaggtgccaggaggagactcttgctgtgcccaggtccagactggcaggagaagggagcggtgagtgatgggacatggagtggtccatggggagcagagccaggccgggaccctggaggggaggatgatgagaggccgaggataggtcatgtgggggaggagcccttccttctgctgctgtgccctggtcgctgctgtgcagaaccttctggtctgcagtgtcctctgggggctctgggtgttacctgttttgactgttgtggcctcatcttcatggaaggttgtagaaaaacagtttgtcaggtgtcctccgtgagtacttacaactccagcgtgtgacagtaggcgttgggtgaagatggggtgagcgggtgaggctgactccctgccttggggacaggctgctccgtggggctgctgtgtgctccgtgacaggttgggtttctgcagcaggtctgaagcagtcactttgctccaagcatcttgagtgccgtcgtctctggcaccgtgtttagtctttgtgacgatggtgtcgtgaaacctgcctagggacgagacactgaggctcgcatttctatgaactgctcaaggccacgtgactggtggggcctggggctagaaacccgggctctggaac

SEQ ID NO: 39349 - DNA, 2144 bp, Artificial sequence
  DNA replication origin
gagttgcttggggagtgctgcaggtcggcgtggacgggcggaggtgaggtgcacggatgccgcttctcagcataaacgtcgctcgtggctcccttctccagagtaccttctcaaggtgggcatcttctctgttcagatgtgggtgccccagtgtttccctgccgctcctgcctgaccgggcacttaatggagctgcttagtgacggatccagagcggcagagagctgggccgggagctcgtcacagggcagtgcgagggcggtcctggtcctccggctcccgcggcctcatgggctcctggtttcaggatggtgcttgcactcagggccgccgtggctctcccttcgccccaccatcgattagacgcagagctctgagagttgggaaagcacggactgggcgtcttggaggctgtgattctggacaggtgatagggccaccctcttccactttcgggtgctctgtgggccagacgcagctctgcctgggcccgaaggctgggcttggggatggcatctcctcagtgccttggaggttgtgggcgtgccaccagagttcctgtgtgggaagggctgccacctgccttgggtcacatggttccagccctggagacctggtgttgtggggggtggcggaagggacctgatgtcatggggtatggtgtgaaggaaatggcgttttgtggggtggtgtgagggacctgatggtacgagtggcagcgtgagggacctggggtgtgggggatggcctgagggacctgggatatgggggatggcgcgagggatctggtactgtgggggtggggtggtgtgagggacctggtgttgtgggggtggcttgagggacccggggtgtggggtgtggggggcggtgtgagggacctggggtgtggggggtggcgcgaggcacctggagcgtgagcctgcagttcacataggggtgcaatgtggggacggtggtgttcaagccatgggacacttgcccatctgttgtgggggaggtgacaagatcccagcccagacacctgggcggggacattctagtgatgcaggggaggcagtgacccacagggcacacacgggctggggctggggtgtggagctggtgcggggcagggcaccctggggtttgtcgatctcagctgactggaggcggctggttccagatggcagtgctgggggtcaggttcaggaggagatggagaagtaggtcactgactgtggtgagggggtcaaaggacagtttctttgttttttcctgtttgtattttaaggagagatcttggagccatgctcaatagcggaaacaaagtgcgccccatttggattcgtgcttcgggtcggtgggagttaggctggatgaggatgggtggggcgggagggggaggttgagcctttgacatgcttcatgtcagccacttcatccaggccactgtcatttagcctgcaccccgctactgcaccccacttggagctggttggcctgggcacgtctgcggtgctcggtggccatgctgtgctgcggggatgcagggagtccacggtgcaggacgcagaaggggaaggtggccttcctgtcatctctcttccttgtggttgtggaggtgacatggccctgcaggggtttggtcgtgtgtctgcaggccctagagcctggtgggaggcggcaaccttggtttgtccaggaaggggtggcagatatccagaatggagcatgtcctgtgggtgcaggttcctcacgggtggatctgtttgtcatcactgcatccctgctacccgggacgcccctgaggtattgatggcctggccagtgatggctgcaggaggcttggcaggggcagcgttgagggccacaggccacctgccatgaggttctgaagtggtgccatggcaggggccaggcccctcagaggagggactgtggggactgagggactgtcttgatggctgtgggggtcaccgagcggatggggagggagggtggcctctgtggatcagggctcttggtggtgggaaaacaggtctgggacaggcccagccctgtgtcctatggcggtgagaggggtgggagtgaacggtggatgggactcatgctgcagggccgagatgacgaagttccctctgcacgtgcagcctggggagggc

SEQ ID NO: 39350 - DNA, 1998 bp, Artificial sequence
  DNA replication origin
ctttactgcaaagtcagaaaatgaaaggctgtgtcccccgaccccatggaacaaggtgcccaccttgccaccggcagcacctctgcccacagtgtctgcagcccccagtggaccagctgacccacaaagcctctgccccaggtgtgcttgggccacacccagcgcccagagaagggttcagctccctggctcctagtgtcctgccttgtccacgcactgtccactcagacctctgaccccaaccccgaaacaattcccttgggagccacagaccttcttactgcagggccctcattctaaaacctaatgtcaaatttgatagacagaaaaaactgtttctggggtttcctgactattcggaaatggtccctccaagatccatgtaccccaacaccaccctacctggctacgctcctctcacaactttgagatcaagatgccacgtgtgccttcctcacatcggcgctttccagtgatgcccagtgggggacacaaagggcccagcaagacctcaggaaggacggacacaggcctacacaccaggccacagacaatggggctcggggggccaacctcagcaagacctcaggaaggacggacacaggcctacacaccaggccacagacaatggggctcggggggccaacctcagcaagacctcaggaaggacggacacaggcctacacaccaggccacagacaatggggctcggggggccaacctcagcaagacctcaggaaggacggacacaggtctacacaccaggccacagacaatggggctcgggggccaacctcagcaagacctcaggaaggacggacacaggtctacacaccaggccacagacaatggggctcggggggccaacctcagcaagacctcaggaaggacggacacaggcctacacaccaggccacagacaatggggctcgggggccaacctcagcaagacctcaggaaggacggacacaggtctacacaccaggccacagacaatggggctcgggggccaacctcagcaagacctcaggaaggacggacacaggtctacacaccaggccacagacaatggggctcggggggccaacctcagcaagacctcaggaaggacggacacaggcctacacaccaggccacagacaatggggctcgggggccaacctcagcaagacctcaggaaggacggacacaggtctacacaccaggccacagacaatggggctcggggggccaacctcagcaagacctcaggaaggacggacacaggtctacacaccaggccacagacaatggggctcggggggccaacctcagcaagacctcaggaaggacggacacaggtctacacaccaggccacagacaatggggctcgggggccaacctcagcaagacctcaggaaggacggacacaggtctacacaccaggccacagacaatggggctcgggggccaacctcagcaagacctcaggaaggacggacacaggtctacacaccaggccacagacaatggggctcggggggccaacctcagcaagacctcaggaaggacggacacaggcctacacaccaggccacagacaatggggctcggggggccaacctcagcaagacctcaggaaggacggacacaggcctacacaccaggccacagacaatggggctcgggggccaacctcagcaagacctcaggaaggacggacacaggtctacacaccaggccacagacaatggggctcgggggccaacctcagcaagacctcaggaaggacggacacaggtctacacaccaggccacagacaatggggctcgggggccaacctcagcaagacctcaggaaggacggacacaggtctacacaccaggccacagacaatggggctcggggggccaacctctccagtccccaaacacagtccccaacagacaacttctcctgtccccacatgcggctcccaacaaacaatttctcctgccctcacacgcggttcccaacg

SEQ ID NO: 39351 - DNA, 1274 bp, Artificial sequence
  DNA replication origin
cggcgattggctgcggcgcgcgcttaaaaggcgcggccaatggctgcgagcgctagaggccggggcgcgggcggtcggccggggtgcggcagcagcggcgggaagcgcgggggctggagctcaggggcgcgggcgccggggcggtggcggacggggagggggccgccgggcggggcgcgggatgcgggaacggtgcgctgggccgggccgaggcgggcgcggggcggcgacggggcctcgctctttgtctcggctcgctccaaaatggctgcggcggcgctgacgggagcgccgggcgggcgccgtgcgcggtggcagcggcggcgcagggcccgtccgaggcccggggaacagcgcgcggggatgccggggcgccgccgggcggcgcgcaggccctggagtggatgggcctgggaggcgggcgggaacggggaggggactgtcgcagcgcgccctggggacggggaccggcgcccggcccctccaagccgccgcggggaagctgggtccgcctctggctcagccggtcccgggcggtggggaggggtcctgcgcgcacggctcttctcgccctccaatcgtgaccacccctggcccttccctccatttttaatcaataaacccagccgccccgggctgactgtccccgcacccagctgccttggagacaggagtgtcgtataagcccgtaggtaagagcacggtgcttgccaggcgccaaacgaagttcccgagcctgaagccggcacgtctggaagtagctttttttaccttctgctgggggaggggagtaagttacctaaagtgttcccaagcaccttctctctagaaatacttcagtaaaagttccagtcccctctttctgcgtgttttattttccaaccaaaagatggtgttattggacatttctagtggttttcctttctctcatttcttcctaagagcccagaataggtttcagagagacgcttccttgcctcggacctcactggggccaagaggccacagggtcagtcttcgcagctgaagacagcgccgcaataagcagagacctcgggacgatgaatgacgttgctgacaaagaaaatgatttttttaattgctttaacaaaggagactgctagtctcgaaagcagacccgaactggacccttgtgcctgttcgaactgtagccttgcaaaggaatggacttactgataactggaatacgggacttcaccccaggcttgtttctcgacagcagcagcagccaatgagcattgaggacggagcct

SEQ ID NO: 39352 - DNA, 1076 bp, Artificial sequence
  DNA replication origin
tttccaaccaaaagatggtgttattggacatttctagtggttttcctttctctcatttcttcctaagagcccagaataggtttcagagagacgcttccttgcctcggacctcactggggccaagaggccacagggtcagtcttcgcagctgaagacagcgccgcaataagcagagacctcgggacgatgaatgacgttgctgacaaagaaaatgatttttttaattgctttaacaaaggagactgctagtctcgaaagcagacccgaactggacccttgtgcctgttcgaactgtagccttgcaaaggaatggacttactgataactggaatacgggacttcaccccaggcttgtttctcgacagcagcagcagccaatgagcattgaggacggagcctaggagaggtgcctcccctataggggaacagtgtttgggggaaatcactgcaaacgtacagctggagttttgtacctgaactttggctcccagaaggcaggaaaggaaatgaatgaagcaagctgagtatggcggggagggcccctgtgggtacacctacggagcaccttgagctcagtagggggacagtctgagttttccagaaagaacagaaatataaagtgatgattaaatctcgggatttttaatttttgagtgttgacaactaattagaacatttttaaagcaggtcaaagcacaggcaggctaactggccccacgcacaacttgcaaggtggggcgcaccaggctcactgcacagcccatacccacagacccctcagattggagtcggggcagaagcagaacgcaggactcgcaggaaacagaccaggttccaaggcccccagggtcccaaaggctggggtaactgaaggttcccacgctcaggcctccactcttcaagtccgctgctactccactgagatctgtaatgagtctcctgccatctacgcacagtggtgactcctcttctccaaggccccgccaggagtctttcattccaacgtgttcgcaggatcttctggggaaccgtccagcctggcagctgcaggaactgcgagaagttaagggtctgtg

SEQ ID NO: 39353 - DNA, 1177 bp, Artificial sequence
  DNA replication origin
acgtgagggcaacacaggtttgtttacagccaggtcaccacaaacatgagtcagtaggtttgtttacagccacgtcactacaagcatgagtcatgcattgccctaggacggctatgatgtcacttggagaaaggaatttctcagctccactgttatcttatgggacaaccattatatatgcagtccgttgttgcccctaacgtcattatgtggtgtatgactgtatctgtgtgtgtgtgtgtgtgtgtgtgtgaacacacatgtacatatagctcacatatacagtcacagtcatacacacaggaggatgtgtgagtatgtgtgcaactgagtatacaggagtgcgggtgaatgtacaagagcacatgtgagtgcatgcaggtgagtgtacaggagcgtgtgtgaatgcgtgtgcaggtgagtgtacaggagtgcatgtgagtgtgtgtgctgatgagtgtacaagagcgtgtgtgagtgcatgcaggtgagtgtacaggagtgtgtgtgtatgtgcaggtgagtgtacaggagcatgtgtgtgtgcaggtgagtgtacaggagcgtgtgtgagtgcatgtatacgttagtgtacaggagtgcatgtgagtgtgtgtaggtgagtgtacaggagcgcgtgtgtgtgcatgcaggtgagtgtacaggagcgcgtgtgggtgcgtctgcaggtgagtgtacgggagtgcatgtgagtgagtgcaggtgagcgtacaggagcgcatgtgtgtgcatgcaggtgagtgtacaggagcacgtgtgcgtgcgtgtgcaggtgagtgtgcaggtgagtgtacaggagtacatgtgagtgcatgcaggtgagtgtacaggagcgtgtgtgggtgagtctgcagtgagtgtacaagagcttgtgtgagtgcgtgtgcaggtgagtgtacaagagcttgtgtgagtgcgtgtgcaggtgagtgtataggagcgcgtgtgagtgcatgcaggtgagtgtacagagcatgtgtgggtaagcgtgcaggtgagtgtacaggagtgcgtgtgagtgcgtgtgcaggtgggtgtacaggagcgtgtgcgtgtgcaggtgagcgtataggagcatgtgtgagtgcgtgtgcaggtgagtgtacaggaacatgtgggagtgcgtgtgtagatgagtatgagagtgagtgcttgg

SEQ ID NO: 39354 - DNA, 873 bp, Artificial sequence
  DNA replication origin
gaatggcactgggcgcctcttctgtccccgccggctgtgtggcccgaggcgggccctggggcttgggtttctcatccatgcagtagggacagtgtcccacctctgcgtccctcatggggcatggcaaggaccgggggaatggagggcctgcctggtcggatcagagagcagggtggggggtggcggcggtctcaaagaggaaggaaggcccctaggctggggaagtcgtgttgatgccaccacgggcacagccaaggacaaaatgccctgggggcctcacgggaccagacccttgggtcctcccaccaggggtgggagaccatcctgtccatgaccacgtcccacgacatgacttcagttcccgcctgtcctcacactggggactccccctgctcactgcacccactgtccagtgatgggtaatttgagccccagcagaacagttgtcaagaggctgctccgggaaggccacgcaggcaccacactcagggcaaacgtagtggagtagggggtgggaggcgattgcggacatgggcatgagggttcccaggaagagggtgggcatgaggcaggcatctgcatgcttttgggggggcatggctctgaaggggcaggtgcaggtgggagagggtgtggggagagagaattctgtgcccccatgcagggggatgggtgttgccagaggcagggtgggggcaccgcggacagtcgggcggagggcacattccaggaagcgttttacacacaggcagacaggccccactgcagggaaatggaagatgggaagggcagcccatggcttttctggtgtcagaatggatttctgaaacacagagtgaacacagtcatccgaaaagcccagggttcaatgtg

SEQ ID NO: 39355 - DNA, 1460 bp, Artificial sequence
  DNA replication origin
cggcagcgggcaaaaccttcacagccccgtgggaagctactctgcatcctcgtcccccgggggaccctaagactgaggaggcctccaggcacctttctcagtgaactcctagagaatgtgcagggagtgagcggggagggcagtcgggggacccaggttccgctcaggacaaaccccaacagaggtgtgggagctcgttgcccatggacagcagtgtgaagagcagccgcctggggagtcagggccaggctgcccatgagagcccctgggaggatggggctgatggctttcttgctccccacgtggaaaggtggcccaggacacgctttctagagtccctggggaggtttgggatgggaacaggcagacacaggataaactgaccgcaagaacgacttacacccaaagcctggaggagtgcgctgctcaggcctgcgtgggcccaggggaccaccctctgccgggcgggtgagcagaggaagtgcagggaagcagcagcaggacagcagggccgtggggctgggaatccagagcaggcagggccacgttcttctcttcgtggcctcatctgtggcctcagatcgttttgatgcagatgcaaaggatgccttaggagagtcagctctgtcgccatcaggatttccgtctgtatcagaggcaagggtgtacccatgggaagcagaggtgggtccaggggtgcacggaggagggtgggctgctcagacagcaagcaggtggtgaggacaaacctgagagaagccgtctcagccaatagcagtggccactcagatcatccagtcattggttcattcattgatctgttgatggactgatccccccatcactgatgtactgatcccacagacactcattgagtgtgggtcaacatacaatccccacgctggtgagcatcggggctggggtggggctgggcactctatggtaagggctccttccttggtctgggactgaggcctcctacctgctgcaccctggatgtacctcgaggcttccaggccaactctaggtgtgtggtttaatgggcctgggtgtggctgagtatggggttttatccaagcttgccaggcattctaataagtagccgggggtatgagctgcgggtctagggagagcgggggaagcttcagtgagaatctaggaggaaggagtgggcagagaggtgggctgcagagtcccctgaaggctggtgtggggaggcagctgtgagggtctgaaagggggtgtggagggacaggccggggagagccaggaggagcccccacggaagggctgggttgagggagggcatgggagagcagagctgggaggttacaggagagcctggagaggacagaggggacggcctcggcatggcagctgcacccacagagcaggcagtaccacatggcacctatcgagtgctgccagatgcccagtgactgaagcagggctagtggggc

SEQ ID NO: 39356 - DNA, 1773 bp, Artificial sequence
  DNA replication origin
gaggggccagggcagaggagggccaggcagaggctcctcctgtaacacaagcaaggtggccgcggcgggggccgtgtggctgcaggttaggtgtcgttggattctgcataggtgttgaaagtcaaggcattgagatttcctggccccagctgtgagagaacgacgtgggggtcatggagagctccagggcctttgcctgagcactggtggtggggaccgatgccactggggcgggtggagacagatctgcatccctggcatcagaactgcagtcctttgcacgcagccccagggggacgggaacctgcggtccgggagccatgggggctgcagctcagggagaagcccccacgtggtgaggttgcacatggccaggccaggactgggcgctgagccccaggaggaacccgagggagactagaagtggggccagcagagagaggaaaccaggggatgttggggagcccggcagcagtaggaggggggactgtggccgagctgcccctccccaccccagaggacagcttaagggacttaatctccaggaagtcatgggtgaccttgaccacgacagcatcagcttgtggcagaatggcagtgattgcaggggcagttcctctggcgtttgcagaaaacaggaggcaagcttgccggggatagggggttacgggaggggggtttagagtggacaaaattgcaggatacttgggggctactagggatggctctgaagagaggggaaagctgaagttcccaggagaggactcagcagaagggaagggagcccaggggggccgggggaggagccgtgtggaaggaaggagacaagagatgggtggaatgggaagaggaggtgggaggcaggggaggtggagaaaaggagggggaggtgggagggagcccttgggaaaggaggaagagttaggtgttgggggaggtgggagtgagggatacacgggaggcaggagggactgcctgtaaggacttggactcagccaggcgcacaaacagcaaccaagaatgatgtttgcacatctcaggcccaacttttacaaccactttggaacaaaaccaaagacagtaaacacggtgaagtcatccagtgcatgtgaaagaaaaaaaaatattgtgttcttcatccaaacagtgaatgttcttagcatttctgagaaacacaggtcacgtggatactaatcagggagtgcttcctggaagaggtgggagtacgggcagaaatcagccaggtagaggggaggtggctttccagacaagaccatgggctgagcaaaggccccagatggaggaggaggaggagcggacaggccagtgtggggagggtctgcgtctgctgggagcagagagaagccccatcacaccggctccttccttgggaggccttctcaccttcctagagggagcagcgcccccatcctgctccccccacctccctgcagcctgcacctgcctatcaagaagccttaccccatctcaagcacacacttgggtatacgttggtctctgccaccagctgcagctgatctctgccagctccgcaagggagagccctgttgtgttcagttcattattgtgtttccagacccaagacaatgcataaatgtatgaatgaataatagaaatgaatggatggatggacggacggatggatggatgggtcgatggatagatgggcagatggatggatggatggatggacagatgggcagatggatggatgaatggatagatgggcagatggatggatggatggatgga

SEQ ID NO: 39357 - DNA, 953 bp, Artificial sequence
  DNA replication origin
gggggctttgcccccttggcctcagtttcccctcctacagaagtggggtccggacgactcccctatcttgggccagatgcgcctatagccctcaccctcatgggggaccggggagtggcggaggccctgggcgccgggtgttcccgggcagccccgggactcccgccccagtgcccaggtgccggcggggggcgggcgcggcggcagctcccgggaaggcggcgcttccggcgtggcagcctctaaatataacatgctgagcacactttctcttttaatcctgcccctcctcccaaagcctgccgcagctttccatttcccttaaaataaattctgactggctaccgggggcctcggagcctccgctcgtacccggggctgcggcccggaggccttgcccacctccccggccgtggaggaagctcggccgcccgccgtcgcttagctgcgggccctcctcgcgtatactccgcgtgattagtgaccgagggcgcgcggtgtgtgctttttttgcttccgtcttgaccgtgaacatcatcagatcacggaccaatattgggtcctggaaaaaaaaagtagtgggtggtgactataaaaatgcaataggctgggcgcggtggctcacgcctgtaatcccaacactttgggaggcggaggcgggcggatcacttgaggtgaggagttcaagaccagcctgggcaaaatggtgaaaccctgtctctactctaaaaatacaaaaaaactagccgggcgtggtgacagacacgtgtaatccccagctactcgggagtctgaggcaggagaatcgcttgagcctgagacgtgaagattgcagtcagcagagatctcaccactgcattccagcctgggcgacagagctagaccccgtctcaagaaaaataataataaaaatgaaatagaataagctagaagatatcagatggcgtggtggg

SEQ ID NO: 39358 - DNA, 1361 bp, Artificial sequence
  DNA replication origin
gcagatccgctacgagggcattctctacaccatcgacaccgacaactccaccgtggcgctcgccaaaggtagcggccgccgcccgcccgagcccgctgacccccgtccgccaacagccccggcctgcggtgccctccccgccccggggcgccccggagcctggcgcccagaccccgcccagaacccacccagggcacacccggcccgagatcccctgcccgcgccttcaccccggacgcccccgaggcgcccccttcccgcgcgccaccctcccccagcgtagccggccgcacaatggtctccctgggctcccagggcggcgggattgtgcgcgggcgcccggcggtgtttggtgaggggcgggcccggcccccgcggtgccgccccctcggccgcccagcccacctctgcaggtgccagctccgaggagcagggcggctcccgtcagcgggcctcctccccgccagcctggggggatccctgcgggggagcctcgaggtcgggtggcggggccagtgtcccggcgtctcccgaaggctgggggtggggtcacaacacgcgaatcctgcaagcctttctggaacttattagacagctggggccttgatcctgaacaaataccgcgtcctaatgcggcctcctgccaaggcagaagcatccgttggcagccagatgccccggtttaaacggttctcctgctctatcctgaccttcccactgtggggcttaccttttggtgacagccgcctgtgggtgctcgtaaccggctgtggccgctggaggacttacaggaggggggctctttagagtcagaatctctgaggttgttgaggcagcgggtggtccagagtttctttgtcttcatcacccagagaagacggggagtgcacttcccctgcctctcagagaaaagtgcccgtggagccacgtctgcctaagcccgtgtgtgtgctggatctggcgctaggctcccaggggttcttgaagtgtctagacgcgtctgaaacgctgcttaggtcacagggaacttcatgtgtagaagaacgcactcattccaaacagggagtgtctccttttgaagcccgtctcctgcgtggcttcaggagcttgttgagtatgccagggctatgcactcacttgcagccatggaacctcactacacttattacaggagagcccagttagagaagctgaggcccagagtaggcccaggagttagcaggagttgtgtcttaccagttagaggctgctgtcccacccacctctgcccctagaggcttgctagaaagagacttgggcgctcctggaagcctgctggttaggggttagtagactcaattccttatagatgcggaagccgg

SEQ ID NO: 39359 - DNA, 824 bp, Artificial sequence
  DNA replication origin
cgcccgggtcaggactggtttggacgcggccgtttcgttttgacgagggctcgtgtacattgaccttagtgacattgtttgaaacttaaattcgtaccatcaagacgtgtcagtttaattggtcagtctgtgagatcgttattcttttatcatctggtattcagaggtttgagcaggcagagaaagcagcacacacggttctgtaaattttgatttgttttcattttctgaatctttgttttgaaatgaaggcccagtattcatcaggtgatctaactcagcttaaagaggactaggagtcggctgacccctgtacccaccccaatactgccacccccgccagctggccgccgctggctttaacgaacccatatagcttctctgggcctcgagtcagtcgaaggtcaagtgagtcagtacctgagaaagctcccagaaaacccaaacacttcagatcaatacttctcagccagggatggttttgggcccacacggagccactggcagtgtgtggagacttttccagtggtaagaccttgcagaggtgctcttggcatttggagggtagaggccagggacgctgctcaatatcccacccgtgctcagggcggcaggcacagggagatccccctgcccaggtgctcacagtgctgagctggagaagccctgctctaaaccaggaggcgctgtttatcccaatgatggttccctttgtttctggcttgactcgggttgactgtcagtgattgttcatgcttttaataacagccatatccttctccagcatcagccataaacagtttgggataacacttgacaccttg

SEQ ID NO: 39360 - DNA, 760 bp, Artificial sequence
  DNA replication origin
ctgcagaggcggcgtttggcgtgagccgcgagcgctcgttctccccactcagcgcctcgcttggggcccggcctcgcgtggggccccgggcacgggggccgtgacgacgccatcttgagcacccctggccccggccgggcgcgtgggtcgcgccgccgccccggcgagcagaggccgggcgagggccgctctgggccgcggagcgcggggggtaggccgtgcgctcgctggggggctgttcacgcagccgggtggctggggagcgaactactcaaaccccccttatggggacccccacccgctccggggcaacacttattctctaggcccaggtgggcttcgagaacaaagcggctcgctggcctggccggtggcgggcgcctcccaggtctccgcactctgccgggaggagccttcccggggccgggctgcagccgcccgggtcaggactggtttggacgcggccgtttcgttttgacgagggctcgtgtacattgaccttagtgacattgtttgaaacttaaattcgtaccatcaagacgtgtcagtttaattggtcagtctgtgagatcgttattcttttatcatctggtattcagaggtttgagcaggcagagaaagcagcacacacggttctgtaaattttgatttgttttcattttctgaatctttgttttgaaatgaaggcccagtattcatcaggtgatctaactcagcttaaagaggactaggagtcggctgacccctgtacccaccccaa

SEQ ID NO: 39361 - DNA, 1097 bp, Artificial sequence
  DNA replication origin
gacgctggaggctgccggcccccgagcgcgctgtcccccgagtccgcggcgcgcgctgggaactgtcctgggctatgccgggcgcacggggacccctcggggccggagccgcggcgagggcttgtcgcgctccgcagccagcttcggtggcgacggcgggcggtactcgttttctgcgctcattttggttagtggtgaggggcccgggtcggcctccgggcgcacttgcgaccgcggggactgtggccggggctgcccctcttgctcctggagcgaggcgcgaacgatggaggcacggaaggacgcgtcccgatccccatttgcggggcatcgttacgcagcccggccccgtagggagcgcaccgccccctccgtatcctcgcggctacgccgggtttcagcgtgacaccctcgccagccgcctcgcctaacaaacttgacggatttgctccacaacctttcttctagctccgtaagttcggccttgtggttttcaagagacagcgtttatgtgggtttgggacaccgttatccaaagccctaagttttgaaattgagactttgtattttctgctgttttttctgtagaagacagattcggaagaaaatcagcattagccatacccgtttcagttgtcacaacatctgttggaatgacattggttttttttcctaaactctgactccgtcttcaccctggtgggattgcagggataaacagtggtattcctaggttcccaggagccgcttgtctccctaagggggttcaccttgaccttgactgaggctgttattccttgatgacgtgccagtctcctgtggaagttgtcctaaatctatcgcctattttgagactacctttgctgttgctagttttagaaatttgatggtcttaacaaatgagaaccttggccaactctgaacaggagagattgagaatagcagaaatacagatttacaagtgtggcattttaatttacttagtaaacacttatgtggcgcttaccgtatcccagacactgttctaggggttttataaatcttgattcatccaattcttcatagaagctactggcatcccgtttaatagctaaaga

SEQ ID NO: 39362 - DNA, 1620 bp, Artificial sequence
  DNA replication origin
atgggcccacctgagtctcctccacctggtgtgtacctctaacactaagctgaacaaagaagccattcacgcggcctggagcgttctagatcttctgtatttactgctgtcttctgcagacactgtttcccagcttcctgatgtgcacttgtgaatttttctgcaacgtgagatacagttctccccaccctttcctaagaggccgagtttctacaggttcaggggtaaacccgcgccagagacgccaccgggaaagcactgaagctggtggcctgaggcctcccgaggtgagggcgctggggacagagatgaggtggcaactccatctggaggagccagaggctggcatcgggggccgcagcaaggaggggtggtgagatcccatctctgagcatgcttcatcaatgtgcccatcctaggcctgggtgagtggaggcgacagtgaggaggtgcgacccgctctgctcatggtggagtgggcgtgggtggccagtcgggtgaagaccgacgtgggcatgcatctgctcaatgccatgaggcagcggagccccaggagactcctggggttgacgtccagctgggctggaggctgggcaggagcacatgggtaaggtgggggaagggcggcccgatggaggaaacaggcatgtgtgaaggccacggggcatctccaggaatggaggccagctctggggagcgggaaaagaggggaacgggggaggccagccctggggaccgggaaaagaggggaacgggggaggccagctctggggagagggaaaagaggagaacgggggaggccagctctggggatcgggaaaagaggggaacggggaaggccagctctggggagcgggaaaagaggggaacgggggaggccagctatggggagcgggaaaagaggggaacgggggctgctgggggacaggagtcctgtgcccattgtgggggtgactttctcaaccaaagcctgtgctcactgcagagactggctggaccaagatcccaacgcggctgggtgcatccattacccaatgcgcaacaaacctcccggagccgcgtggttgaaacatgatttcttagttctcatgattctgggctggttcggaggatcttctgctgggcttggctgggctcgtggctggggcagctgggacacctgggcctcccactccctctctgcgtggtcacccctgtggtctcaggctctgaggggtggccccaacgtgtctctgttggtcaggctggctgatgcccagggccaagcccagcacccacagggagacaaacccaaggggcacggaagccacggccatggcaatggaccatgtgggtgagcagagaaactggatttggcaagcggggactgacgggggacacggggcttggcttggagggcccagggcacagccaggcaccaaggatggggtctggggctgctgaagccccaccgtggggtcctaactgggtaggcgagggagtgaggatgagaaccagggacggagaactggggtcccagagcccacagagagtaggggaagggctggggctaccaggcaaaaacctgggtgaggggctctcagcagaacagtctctccccaatgacaacctgtgtggggc

SEQ ID NO: 39363 - DNA, 1516 bp, Artificial sequence
  DNA replication origin
tcgcagactccaaccagaacatgcagtccctgcttcctgccgtgagtacccacggggggttggcctcctttacccagcaaggactccgacactgcctaagatcggaattgtgggcatgtcatctcaggtagcaaagatgactcagagaaaccaaaaataccactagagccaccagaaatgggagtgtgggcggtggtgaccaacccttcctgacagactgggagtaatgacagcgtctgaggtggccaggtcagaactgtggctcagcctcgttatgtattgaagggagggaagccccggagaagccactccaggagcagccgcagctctcgggtcgggggtggggagaggtgggatggggagaggtggggtggggagaggtggggtggggtggggagaggtggagagaggtggggtggggagaggtggagagaggtgggatggggagaggtggggagaggtggggtggggagaggtgggatggggagaggtgggatgggggccctgcgtctccctggagcctctccgggtgctttgagccactgtgaaccgtgcacatgcgctgctgtgggtgagaacggaacttaaaagagaacatgcccagcacagtaaattctcccagtgttagttcaaatattttattttgtttgattttttaaaatgcatttttccaagattaaattgtcacagtgaagacgaggtcgtgctgctgcagcctctgtcctgctgacggggttccgggacagacatgtcgccgggaatgacgtatctcctagtgacccttagtcctcggcaagtgatgacataaatgccaggatgtgtcttgcgagtaaaaatgttaaacccacctccattgacctgtcaaattgcacttcttcaccctgcagacacccacaggtcctggtggaaatttccttttcttggccaggtgtagacagcatgtgtgtgcagacctccagagctgctggttgaccttgatctgggagagtgctgagggccacttcacactcactcccttctgtgcggtgtgatccgaggcgggtgtggggtgggggtagtcggggaaggggcacatgcagcaggagcacgggaaacaggagagggatcccacctctgccgaagctcttggcacggaggggtcgtggttggggagcacagaggcgctggtcacctgcgcccgagggggacggggtgcgttcagcctggtgggccgggaaaggggttccctgctgtcccaggaggaggtccagcttttcacacccaggcacgtgtggatgaacttgatactcagtagggttgtgaacgctcacccagatgctcactctgccatctccatctgggcctggtgctctgcggtcacctggctgtgacgatggctgctgattacgaacattgaccaggtggccatgatgtgtggcggcaaatctcgggtgccctctcatccctggcctggcttgtggaggtcgctctccgtaaattaaccgtttttccctgaaaacttcctgttgcctgcagc

SEQ ID NO: 39364 - DNA, 979 bp, Artificial sequence
  DNA replication origin
ggccactggccctgggtctggacagacagcactgggctctcagaggtggggtagagtcggtgcaagcagcgggtctgagcttgcagggcgtcagtgcaggccacgtaggggaggcgtgccttgcggtggaggacgctgtcctcgtggggagcacaggaaaataacgaggaacccgcccgggcgcaggaggtagttgggtgtgggagggagggcgggaggcttcccggggtgatgtggggcctctgtcctgtcgttcagtctccatgatgcagcagcaggcggccacgtcgcactacagctcggcgcagggcggcagccagcactaccagggccagtcgtccatcgccatgatggggcagggcagccaggggagcagcatgatggggcagcggcccatggcgccctaccggccctcccagcaaggtaacgcccggccgggccaggtcgcgggcacagctgaccgccgcgggtcgtgaagtgccaggctgtgtgtgcttctcttcggggagcctgggggagtgaggcggggagcctgggggagtgaggcttggcgccttggtgttaacattgagtgtggaccctgggggtgagggccagggtgtggcccgtggagggtctgctgtccccgaggagtcagtgttgggggcaggggcggcagttgtcattaagagtgtcacaggccgggctcatgcctgtagtccgagcactttgggaggccgaggtgggcggatcacctgaggccaggtgctcaagaccagcctggccaacatggtgaaactctgtactaaaaatacaaaacataagttggatacgatgacagcgtggggtgttctcctcgggtgggtgaggccattcagcaaggccttggcttccccagtgagcgagcaggtcctctgagggaggagggcgcggcccgcactggcgctgaatgtggttcccccgcaggctcttcccagcagtacctgggccaggaggagta

SEQ ID NO: 39365 - DNA, 1041 bp, Artificial sequence
  DNA replication origin
tggcccgtggagggtctgctgtccccgaggagtcagtgttgggggcaggggcggcagttgtcattaagagtgtcacaggccgggctcatgcctgtagtccgagcactttgggaggccgaggtgggcggatcacctgaggccaggtgctcaagaccagcctggccaacatggtgaaactctgtactaaaaatacaaaacataagttggatacgatgacagcgtggggtgttctcctcgggtgggtgaggccattcagcaaggccttggcttccccagtgagcgagcaggtcctctgagggaggagggcgcggcccgcactggcgctgaatgtggttcccccgcaggctcttcccagcagtacctgggccaggaggagtactatggcgagcagtacagccacagccagggcgccgcggagcccatgggccagcagtactaccccgacggtgagcactggcggcggcctgaccccgcccaggaacgcagagcagctgcaggggcaaggagggcaaggagggcaaggagggtgtggccactgcagtgtgtcctcagtcattccagctcaggcctgggctacaggcagagtggccagacgccctgcaggagcaaggtaggggatggggtgagctgggctggcagtggtgcctggcctctgcagagagaagctgtggcacacaccgctgcactggcctccacgcggccttgcctctacttcctgaaaggctgtgggagttggaggcggataattgtagctcctagctgtagataggtggaaatgttcaagaaggcgcctcccagcttcacagagaatgccctgaaggtgacggctccacctgcagcacctctcctcctgcaccttctcatctctgcagagtattttaccgtcgtcacctttcagtctttgcatagtcccagggcttgtggaagggatactgaaagtggtcttggctgaaaacagcggttcacacctgtcattccggcactttgggaggctgaggcaggaggatcgcttcagcccaggaggttgaagctgcattgagc

SEQ ID NO: 39366 - DNA, 2025 bp, Artificial sequence
  DNA replication origin
acagagaatgccctgaaggtgacggctccacctgcagcacctctcctcctgcaccttctcatctctgcagagtattttaccgtcgtcacctttcagtctttgcatagtcccagggcttgtggaagggatactgaaagtggtcttggctgaaaacagcggttcacacctgtcattccggcactttgggaggctgaggcaggaggatcgcttcagcccaggaggttgaagctgcattgagccatgatcgcaccaccacactccagccttggtgacagagcaggatcctgtctctaaataaagtaaaaataacaataaaataaagtggtcttaaaggctggattgatccctgggaggcatccaggcagggagctggcctcagccagcaaggggcaggtgcacagacaggtgggcaggtggcagcagggcaagccaccctggccacgtgatggtcacatgcagcgaaggcctcggtaagggttggacacccctgcctgcgtcctcccaggagctagcggtggcggggagaaggcagtcgggtcactagcatggctgtgtggcaggcactgaaagcgctgatcctctgcataaatccccaggtagcttcacagtcgccccgagaaggaggcattgatgtctgcatttcagtggggaggccgaggctcaggaggttggggcatggttttggggaacacgggtcctgccggctcttgttgcctccctggccagacaacatctccccagcctgggtctcagttgcctcctccgggacctgtgcagtgcacagcctccgctgactgtcgccgtctccgtttcgcacaggccatggcgattacgcctaccagcagtcatcctacacggagcagagctacgaccggtccttcgaggagtccacgcagcactactatgaggggggtaaggagcacggctgcgtgctgggctcgagcgtaagcgccacacgcagcagagttaagacgctgcacccttaggagcacgcggtgcctgccttcagtgagtcccttaaatcacagcacagcgcgtgggaggagagacagtgtgttctggaagctggaaattcaggctgtgtcgggagccccgcttgccttatgggtgtgttcgtgagacaggaaaggattcagccggccatgctggggttgggggcacagacttggttattgggtccagccagggagcgtggggcctgcgacaggaaggattcagccggccatgctggggttggggacacagactctgttattgggtctggccagggatcgtggggcctgcgagccactctcagagcttcctcagctggaggccagcagtggctgcgctgggtgtggcctcgcgtttcttcagacacctgcaggccaggaaacgcacatctgtggctgggggcttgccgcccttcatggcggtcctgggcagtgctgcgctgggggctgcgtgtcgggtggacttgcccctttctgtggtgtctgtgcccccaccctggctgccctgaaaccccaacagaacatcccagaatgtggagttgggaagaggtacacacagcccgttccagtcccaccccgggataaagatggcccccagagaagagctgatgatcgcctgcgggattgcgcaacctcgtccgggagggaaggcgggcctgcagtccctggggagaggggcctcgtgtctgctgacgctgaccggcaggcagcagtggctgaggccttcccactgcagggctgcaatttatcaagaggtaacagtgttggtgaggcttcaccaggtacacaaagcaggcaggcactaaacggctacagatttccttgtttgggttacttcttaaagaattggatgtgtaaaggttttgcttctgagcttacacatctcagcctgctgtgaagaaataaagcacgcaagtgtaggcacatatagaaacatcacggtgtgcgctacgaatgcctgcaacgttgaaatgtcagttacacctttgtaaacctgggggaaacaaaaagtacatgaatacataatgaaagt

SEQ ID NO: 39367 - DNA, 918 bp, Artificial sequence
  DNA replication origin
cggcctaggagctgagaggcctggagggctgccgggctgcgaaccccggcgggaccgagcgctgcggccctggagtagcgagcgctcgggcggtggggagcggcgccttgctccccggtcctgccccactctctccgcagaaccgcgttttggggtcagaagtcttgtcagccaccccggtggtgctctgtcacgggatgggtgccgtgtgtgagttccgagtcaagttgttaggaatttgccttgatccagcgctctaagtattaaacattttaaagtgattattggcagtatacagttgcacaaaacaacataaatatatacacatttggatgataaaacaacaataaagttttgtattgtaaacgcgcctcagggagacgcatttccagataattcactgtccgtggctggcttctgcccagtgagagcgggttacccgttctattcccatttacgttctcgtagctgtggataccgaggaacggcgttcacacagacctgtaggtgggaattagaggggttgttgggcagtgtcactagagaaatacctttcttttgtaaaggggaggacccattataaaagggggacgggaaaggagaattcaaattgttttaaacgcaggttcgtcctcaggcagttctgttttagcagagagaacgtagcgaaacttgggcagaaaatggattcctttgaaattatcctggccttagtcccttgggaagtctgtgtaggcgaacctcagtgagaagattcctgccgtaaaatgcaggtgtcagcagcatgccagggaggccagaggatactatgtgactttgggcaagtgactgaacctctgtgagtctcagcctccactgctttagatgggcataaaaaatgtaaagtcaagaatcaggtttccgctgggcgcggtggct

SEQ ID NO: 39368 - DNA, 1432 bp, Artificial sequence
  DNA replication origin
cctcgaagctgttctctgcttttccattctgggtgttttcagaaagatgaagaagaaaacatgtctgtgaacttgatgttcctgggatgtttaatcaagagagacaaaattgctgaggagctcagggctggattggcaggtgtgggctcccacgccctcctccctccgctaaggcttccggctgagctgtgccagctgcttctgcccaccccgcctctgggctcacaccagccctggtggccaagcctgccccggccactctgtttgctcacccaggacctctgggggttgttgggaggagggggcccggctgggcccgagggtcccaaggcgtgcaggggcggtccagaggaggtgcccgggcaggggccgcttcgccatgtgctgtgcacccgtgccacgcgctctgcatgctcctctgcctgtgcccgctgcgctgccctgcaaaccgtgaggtcacaataaagtgtatttttttattggtgctgattcctgaggactttgtggggtgctcagagccttcgtgctttgaggagagactccagggagtccagaaaccactgagaagcaggcgtgaggatgagggctctgtgttttcttctaagtcgggggactgcagtggggatgaaagaccagcctgccacaccagggtttaatcccaagaagggtttcatgtgccctaccgccagacccctgcacttctcaagacctggctggcgggtgaggagatgcagcccacgccctgcacaggaggggcccgctctggccctgagaacacagacatgcagccttcctgcccccaggacaggtgcctcatctttcttggtcaggagcagggttgcaccccagcaaaacttgggacccagggaggatcatggccatgcccagcgtgtgcagggtctgggtggcaaagggactgcagtgaccagaggggagggattgggctagctggctggagctaggctggaggggctgctagaagggatgagccctggagcgaaggcatctttgggagaggagctgtcctggacaaaggcctggaggggggactgagggtgcaggatgaggacgctgggaggaagatggagggagggaaggtagcacccttcgctgtggcccgtgagcctttaatcccgaaggccgttgcacctgctccaggggccccaggagagggaggcagacaccagcccgaacccaggcagatgctggcccacacccaggtgctcagaggccacttggaaaccagacaagcccaacctaggtgagatgcaaactcggtgggccaggtgccacctcccccaacgtcccgtcccccagctccagcctccagggtcctgacgtctctgagcccactctacttccgacagtgcagccttgctaggcacgcttctgctcatatctttccttcctacccagggagagaatctcgcca

SEQ ID NO: 39369 - DNA, 960 bp, Artificial sequence
  DNA replication origin
gcaggctggtctttcatccccactgcagtcccccgacttagaagaaaacacagagccctcatcctcacgcctgcttctcagtggtttctggactccctggagtctctcctcaaagcacgaaggctctgagcaccccacaaagtcctcaggaatcagcaccaataaaaaaatacactttattgtgacctcacggtttgcagggcagcgcagcgggcacaggcagaggagcatgcagagcgcgtggcacgggtgcacagcacatggcgaagcggcccctgcccgggcacctcctctggaccgcccctgcacgccttgggaccctcgggcccagccgggccccctcctcccaacaacccccagaggtcctgggtgagcaaacagagtggccggggcaggcttggccaccagggctggtgtgagcccagaggcggggtgggcagaagcagctggcacagctcagccggaagccttagcggagggaggagggcgtgggagcccacacctgccaatccagccctgagctcctcagcaattttgtctctcttgattaaacatcccaggaacatcaagttcacagacatgttttcttcttcatctttctgaaaacacccagaatggaaaagcagagaacagcttcgaggttcctagggccccttgacacttttgggggcagagagagttggtgggaagaggggtgaaagggccaggcctgaggcttatgcaagagacagaaggcagcaaaggcagtgtcctgggcttgtccggggagagggacggtgtgcaggtgtgtgcaggggtgtgcaggtgtgtgcacgtgcagaggcaaactgctagggcaggaagcctggagcacacccaggtgcttgctttgggaagaacaccaaccagtaactgcgaagggtgggcaccagcagggggtgggcagcatgtctgggacctccagactgtccctcccggtgg

SEQ ID NO: 39370 - DNA, 962 bp, Artificial sequence
  DNA replication origin
gaaaagcagagaacagcttcgaggttcctagggccccttgacacttttgggggcagagagagttggtgggaagaggggtgaaagggccaggcctgaggcttatgcaagagacagaaggcagcaaaggcagtgtcctgggcttgtccggggagagggacggtgtgcaggtgtgtgcaggggtgtgcaggtgtgtgcacgtgcagaggcaaactgctagggcaggaagcctggagcacacccaggtgcttgctttgggaagaacaccaaccagtaactgcgaagggtgggcaccagcagggggtgggcagcatgtctgggacctccagactgtccctcccggtggagccagaatgtggggggcagggccggccacccagcctccagtccagccagtgaggggccctctggccaacccaggaaggcgcctccatggcagggtggctgccgtggcattaagagagggccacagacacggcggggctcacccctgggggaacgagccgggtagggggcagcagggccagatgcccaggagacctgggctgagagaggcgtggctgagggaggctctggtgggccactcacttccagcagtgctccagggagctgtggggctggattttgagcttctgggggcagagcagcttggtgaaggcccggcggaagctgtggtggcacagagggtagaggacagggttgacagccgagttggcccacaggagccagaaggaggtttcgtaccagtagtcagggacgcagtggccatggcaggcggcccggatgatcatcagcagcgtgtatggggcccagcagagcccaaagatgctcacgatgacggccagcgacttggccactttcctgtcccgagacagccgaaagcgctgggtgaagctctgggacaccatcttcatgcgcttctccagcgaggccgaggacgccgacggcttggagcccctcttgag

SEQ ID NO: 39371 - DNA, 1160 bp, Artificial sequence
  DNA replication origin
ccctcctttcctggagccaccaggcatggggcacaaggagagctgccacgaagggtaaagcggccgagcagagagcctggcatgggggtgctctgcccacctctcattagcaatagctgtgaacattgctcccaccgtcaccaaggtaaacgccatcaggctggtgggggagggtggcaggggctctcaggtcctcctcctcgagctgtcctacctgagacccctcagtgggatcccttggccctcctgccccctgcccccaccagctggttgctctctgccctgaggagggccctgccctctctccctcttcttcccaagaggccctgatgtcgatctgggatgctttgttctgtggcggggcgggggatgtctcccagcagtgggccaacttgtggcttcacccctgcacctccagctcccaggggtgcgagcacctgtgcaggagtggggctggacctcccaccccaacctctgcagatggctcgggcctttgcaggatcaggatgcatcatgtcagaaacagctgtgtgtgcacgtggtctggggctgatgctgagtctggtcccaagggtgcaggggccaaggacaggacccccagggagctcacagctggtagggggtggtaaacaggcagcctagcagagagtgagggttcaggttggtcccagggagcttctgaggctctcactgagtgtggcagggcaccagtccgggaccccagtggggagggttagaggaagggaggggaaagagggagggagggaggacaggaggggaaaggaggagcattgctgctgagggaagggcccacataggggcccacaggctacgggggcgcacccagcccaatattccttccgccccgcccctgaccagcctgcccttctgcaggtctcataccgggcccagcagggtgacacgcggcgggcagtgcggaagatgctgctggtgtgggtgctggccttcctgctgtacggaccagccatcctgagctgggagtacctgtccgggggcagctccatccccgagggccactgctatgccgagttcttctacaactggtacttcctcatcacggcttccaccctggagttctttacgcccttcctcagcgtcaccttctttaacctcagcatctacctgaacatccagaggcg

SEQ ID NO: 39372 - DNA, 1116 bp, Artificial sequence
  DNA replication origin
gcttcctgtcggtcacccgagcggtgagtcctgggctgcggagctcctgttcactccgcagggacagtcgggacgcccatgggaggcacctgggtggggacggccacttctgagttgtgggcagaagtgggcttggtcccactggctttgctgctgacacatgggccactcgacggccagctgcccactcggggccatggctgcagccagactgacctggcccaggcaggagacggggaatctggatgcagatggtcctgaaggcagggctgtcgctgcagcccccgccctggggcaggtccacagtccccggagttaagggaggatctggggccagacgccctgggtgacatccctcccacatgcgtgtgtgcagcgtgcacacacacacaggccccgggaaggcaggcggcagatcctggctccgcagatttccctttgtgggagcggccacctgagtcagggaccctgccccacccaggctcccgcatcggggccatgcagcccagggagccgctgctgaagtcacaccttccccttctcatctccttggcagctcacgtccccagggctttatgagggcctctgcaggactgagggcaggttgtttggttctagcctagaaaggctaagagacagggtgcaaagagcatggctttgggttcctcttgagcccatccccctgtggtctctccctcctttcctggagccaccaggcatggggcacaaggagagctgccacgaagggtaaagcggccgagcagagagcctggcatgggggtgctctgcccacctctcattagcaatagctgtgaacattgctcccaccgtcaccaaggtaaacgccatcaggctggtgggggagggtggcaggggctctcaggtcctcctcctcgagctgtcctacctgagacccctcagtgggatcccttggccctcctgccccctgcccccaccagctggttgctctctgccctgaggagggccctgccctctctccctcttcttcccaagaggccctgatgtcgatctgggatgctttgttctgtggcggggcgggggatgtctcccagcagtgggccaacttgtggcttcacccctgcacctccagctccc

SEQ ID NO: 39373 - DNA, 1559 bp, Artificial sequence
  DNA replication origin
cccgcaaagacgaggctcccgggccggggcccctcccggccgcccagctctcggccggcgccctgccccgcgtcccggagccgcgtgagcctgcggggccatggagcgcgcgccgcccgacgggccgctgaacgcttcgggggcgctggcgggcgaggcggcggcggcgggcggggcgcgcggcttctcggcagcctggaccgcggtgctggccgcgctcatggcgctgctcatcgtggccacggtgctgggcaacgcgctggtcatgctcgccttcgtggccgactcgagcctccgcacccagaacaacttcttcctgctcaacctcgccatctccgacttcctcgtcggtaaatccccagcccctggccgctggggacccaggggcgcccagcgtggccgggccagcggggactggaacacggacctgggtggctcccgcaggcacacgccccaccaggggacccggcctgggaagggggcgtccggagcccatggggtggggggcacaggcgaagttccttgccactcaggcctcgggacaggggctggggagagatgtccccgggaagggacacgggcactgggcgaggcgcaaggcgcaaaggcagcgggtgcagctctggctcctgcgctgtagccaaacaaaggctgctgcggacttaggacgcgcggagggcgcagtggggcggtttagagaaggtctgggggaggggacatggaagggggatttttagagctgtgttgggggaagggacggtggggaaggtgggggttgggggagacgctcggaggagcgtgctctcacgtgtccaggctctgctgccggctggggggcggggcacgcggagggggctggagcgccagacacctgttggggctgtgaggtgcgtctcccagacgctccaagcccgcttggcagtagtagtagcggctggcggctggcggctgcaaccaagtgccctttcagccaggagaaaggctttctccttgtctaagctgagaccgagggttgtccagcgccagggtaggggctggagtccagcgggggaggggagaaggaaattgtcttctttcctcctttgagggctgggagggctggacagaagtccagggaatcccgactccaggctctcgggggtcttgtggtggccagagttccccatgcctggatcatccctcctgcccccaggcccaggggacacagatagtgctgggagctatgtgggggtgaaggctggcggcagggcagagtttgtggctgacaccaggtggaggggtggtaagatgaggatggctagttccagaaaagcagccaccatgtgaccccaggtcccgccggtgtctgcgcttaggtccgtctgtcccctggcccctggctgcatggtcccactgtggccctactccccacaggcgccttctgcatcccactgtatgtaccctacgtgctgacaggccgctggaccttcggccggggcctctgcaagctgtggctggtagtggactacctgctgtgcacctcctctgccttcaacatcgtgctcatcagctacgaccgc

SEQ ID NO: 39374 - DNA, 1731 bp, Artificial sequence
  DNA replication origin
cctgcggtcagtcagcccgcgcactcggagccggggtctgggttgctcggcctttcccgtgccctcggccctggtgacccctgcccggtcatcatggagagccctggcgcctgtggggacccggggtgggggtgggggaaacgcctgcacccgcgctccggggacttgccctgcggggcatttcctcggtgcatgttttgggaatgtgggtctccggggcaaggaacgtctggaggagaagggatggggaggagggggtcttggaaagccggtgcccagaccaggggtccgctccacctcccgtttgcacggaccctgggtgccagcctccgtgtggacagggcccagtgcagggtccagggtgacccgcaaggcgcaggcagatgtggagttacataagggaagatgaggcgccgggcggacccagccggaggggagcgcgtctagcctgggctccggcggcctcaggctgaggagggagcagcaagccgctcggagcccagccacggacccctgtggacagaggggcagtcgccactgcagcggacagacgaggtcactgcgctcagggcgcaggtggtggctgtgttagcgcctgtgggaggggacgggggaggagaggagaggtggcaggagggagcgcccccaccaccagacacatgcgctcagatacaccgggtcaaggacagattcctcctgaaacactgagggcagacagacagacatgcccacactcagatacacagacacccacaggccagggaagcagccaccagcgccaggctgaggacccaccaagagcgagacacacatcagacagcaggcagggagggagccgcgccccaggagaaggaagcagcaactccgctcacaggagaaggaagcagccgaaggcatccctggtgcctcaaagaggccagagtgcgcgtgtctgggggaggggctgcagaggggaccccgggcgctgacatgcaccgtcactcccctacttatagcagcttccccatactgtggggacctgccccttcccctcgccccccgtggcgcttcagaaactttggggaaggaggagctgggattcctctgctgccacctcagggctgactgcagaaaggaacccccagacccgtggccccagtcagcccactatttcacggcttctaggagtctgctcttgggggaggggttcggcttccctctctgactgcttggttgtactcatcccactccacctgcaaaccctactcctcatacaggctcccccacgttccctgcaccccaccccaactcacccagtgtggagggactctgcctggaccagggaaaagttttcaaggggaaaagttccatggagctgggcagcaaggggctgtggggccatcagagctgccacccatgcctgctgcagctcttgactcactgtccccacccaaaccagaactccttgttgagaggactcctccccaggcccttctcctccccaaatacccactgaggctgcaggagatggcattgggtgggggttaagagggggccctggctctctccttcactggctggagcctcagtgtccccatcttggaatggggaatataaattggaatcccaagcagaaccaaggatgaaggggtctggaggcccgcccagccattctccctccccacccctcctcccctgtcatccacagctgcccaggcttccccgtgaactgaccagccccggagagcctgg

SEQ ID NO: 39375 - DNA, 1427 bp, Artificial sequence
  DNA replication origin
ccatgggcccaccagggtctgggctgccacaccacccaggagcagcctccagaggcacaccagcctggggcactcacctccaaggctgactctgccctgcagacacggatgacagagcagagtcctttccatggcgtcacgtctccaacaagaagaccacaggccttcggaccagggaaggagcaggaggggccccgcctggcaccctcccaagcatcctcaggggaatctgtgctttccaaactctgggctctgcagggctcaagcttctcatctctgagggacacctgcttactggggacacagctgtggatggctcccaggcactttgagctcctgagctccagcagacaagacgaggagccgcctttctgtcggggtaagtggccctgatcagcaggagaaggtggggctgctatttccaggagaggaggggtgggagggggtgggtgtgagactcagggccctcttgggtgccacggcaccccctggcctgatcgtttctgtgcatggacaagtgtggccaccccagcctgagaaggtccagtggccagggctcagggaaggagcgtgagcctccaggacctgcagtggccacagccgaggtgggagagtgcaggagggaggggacgcgtgccaggcggggccccagctcagctgcccctgtcccctgacccctgatccttcacaggcctcaccccaacacatctctccacctcccacgctgtctcggcgtctgcttcctggaggacccacagcccaggttccaattttgaaagggtggtcagggagtctccactgaggagacacacgagcaaagggggaagaaagggaggtggatattggaggaagcagagttccaggaaggagaacagcaggagtgaagggcaagggatggagcacgttcgtgttccagggacaacgaggaggctcacgcggccggagctcaggcgggggcatggggagtgcgttccaggggcaggtcttgtagccccttgagctgctgcaaggatgctgatgttttctcagacagatgctccaggagggcctgggggacgcttttacacaatcccctgactgcattggagagtggtctctaggtggatgggggcagagagaccagaggggaggcgttgcaagactccaggtgggaggcaatggtggcggtggaggtcaggcagacctgggcagattctgacatgagctggcatgtgaggtgtgagagggcagaggagacgaggcgcccagcccaactccataatttgggctcaaatgcctcaaagaaggtgctgacaatgaaccagagggagcaggtttgggggacgaagaggtgccctgtttgagggcgccaaggctgaattgccaacgggatgttcaagagatgagactggtcaaatgggcagccaggggctgggatgagaggaact

SEQ ID NO: 39376 - DNA, 1618 bp, Artificial sequence
  DNA replication origin
gtgtgtagtgtgtgtgtggcattgtgggagtgtgtgtggaagtgtgaatgaatgtgtgtgtgaatggaagagtgtggaattgggggaagtgtatgagtgagcgtgtgtgaaagtgttagtgtgtgtgagtggaaatgtgtgtgagtggaattggagtgtgtgcgtgtgtggaagtgaatgagtgtgagtgtgtgagtggaagagtgtgtggaattgggagtgtgtgtgtatgggtgtgttgagggtgtgagtatggaagtgagtttgtgtgtatgtgtgactgtgtgagcataagtatgtggaatgggggaagtgtgtgagagtgagtgtgtgtggaatggggaagtgtgagagtgagtgtgtgtgtggaatggggaagtgtgtgagagtgagtgtgtgtggaatgggggaagtgtgtgagagtgagtgtgtgtggaatgggggagtgtgtgagagtgtgtgtggaatgggggagtgtgagagtgtgtgtgtgtggaattggggaagtgtgtgtgtgagtgtgtgtgtggaatgggggaagtgtgtgagagtgagtgtgtgtgtggaatgggggaagtgtacgtgtttgtgagtgtgtgtggaatggggagaatgtacgtgtttgtgagtgtgtgagtgtggaatagggaagtgtgtatgtgtttgtgtgtgtgtggaatggggagaaatgtgtgtgtttgagtgtgagtgtgtgagtgtggaatggggaagtgtgtatgtgtttgtgtgtgtggaattgaggagaagtgtgtgagagtgagtgtgtgtgtggaatgggggagtgtgtgagagtgtgtgtgtggaatgggggagtgtgtgagtggaatggggaagtgagtgtgtgtggaatgggggaagtgtgtacgtgtttgagtgtgtgtggaatggggagaatgtacgtgtttgtgagtgtgtgagtgtggaatggggaagtgtgtatgtgtttgtgtgtgtggaatggggagaaatgtgtgtgtatttgagtgtgagtgtgtgagtgtggaatggggaagtgtgtatgtgtgtgtggaattgagaagtgtgtgagagtgagtgtgtgtggaatggggacaagtgtgtatgtgtttgagtgtgactgtgtgtgtgtgtggaattggagaagtgtgtgtgagtgtgagtgtggaatggggaagtgtgtgtttgtgtggaattgaggggaagtgtgtgtgagtatgtgtgaattgaggggaagtgtgtacgtatttgagtgtgagtgtgtggggaatggggggaagtatgtttgaacgtatgagtctttgagtgagtgtgtgcgggatgagtgtgtgtgttgagtgtgggggatgagtgtgtgagtgtgtgggatgagtgtgtgttgagtgtgtggggggtgagtgtgtgggtgtgtgggataagtgtggagtgtgtgtgagtgtgggtgaatgtgtgggtgtgtgtgagtgttgagtgtgtgagtgtgtgggatgagtgtgactgagtgttgagtgtgtgtgttgagtgtgtgagtgtgtgtggggtgagtgtgagagtgttgagtgtgtgagtgttgcgtgtgcgagtgtgtgtgggatgagtgttgagtgtgtgtgtgtatgga

SEQ ID NO: 39377 - DNA, 1647 bp, Artificial sequence
  DNA replication origin
gacccaggcccaggccccacgcccggccggaactttcctcccaaagtttccccggggcgccaggctgcggcctaggccgggcgcgcctcccagtgggggtcgaggccggggccggggccggggctggaggcggcctgcggacccgggtcctgcccggcccgccctcccctccccgccccggctccagccccagcccgcggcccaggccccgcagctcgccggggtcccgggccttcgcgtggcggcggcgggggccactcacctggacgcgggtccctcggttgccggccgagctcactgccgccccgcccccgccccgtaggcccgcgacccactgacaccgaggcggaagtgcggcccgccgcctcgccgactgacagcccgcgcccgccactcgctgcgcccggcgccgccgcgtcggccgctgcctgcccaatcagcgcccggcccgaggctcgcgccggggggtgggactatgctaatcccttcgcgaagggcctctacctgtgccccctcagagccccgcccacgcagcggagtgacggcaaggacagccagtcacagcaggagagaggcggggttatgccgcccctgagccaaaaggggagggaggcaaggaggaaagggcgtggctgcagagagcagagttgacaaacagtgagtcaggtggcccggggcgtgggtgctccgccctcaggtgcactgcgtcctggcggcagtgcgggcctgcgaggctacccaaagccctgggggctttttcctacaaatgctggggaccgtgcgatagctggggcgtagctgcttccactgtcctaccaaatcctgaatatcgtccacctcctttgcatgccattcaccgccaaccaaaatccagcgccaatttacccctccagctgcatccccgaccgtttcaccaccatacttaaaaccctttggactcccactgacctacagtggctccagggttaagcccagaagttctggaatcagacctggagcttgcattctttaccagctgtgtggatttggacaaattaattaacctctctgagtctgtgatcactcagtttcatctgcaaaccagggttcccctgtcaacatctcattgaagtcatgggtctggtttgaggtgagtggagtggcataaaccaggctggctacatagtcacagcagttggtttaggggtcagcctgtgacccagttctagccaaagaggctcagtcctgggacttttgctgtagggtcagagttcagaccggaggggaggctgaagtcaaatgactctcccatctgcccacagacctctccagagctgggttaggtgagagagggaaggggccagtcttccacatctcactacccgagaacagggctgcacgagaatgaagccagcccagaggaaagccggagcaaccacggccgggtcacgtggaccctgctgcacctcagcaggtcctttccttgacttttcagttacgtgaaccacatgcttgtttctgcttcagcccatttgaggtaaagccaagagtcctgggcttcctgtggccttgagagctctggcagatgacccgtgaccccgcagtgcgtcctgcagcaaagccagcccccgttgggcctctgcaccccctcctcaggccttgtctccc

SEQ ID NO: 39378 - DNA, 2045 bp, Artificial sequence
  DNA replication origin
gcgcgggctgtcagtcggcgaggcggcgggccgcacttccgcctcggtgtcagtgggtcgcgggcctacggggcgggggcggggcggcagtgagctcggccggcaaccgagggacccgcgtccaggtgagtggcccccgccgccgccacgcgaaggcccgggaccccggcgagctgcggggcctgggccgcgggctggggctggagccggggcggggaggggagggcgggccgggcaggacccgggtccgcaggccgcctccagccccggccccggccccggcctcgacccccactgggaggcgcgcccggcctaggccgcagcctggcgccccggggaaactttgggaggaaagttccggccgggcgtggggcctgggcctgggtcccgcggcccccgcacccttccccctgcggtcgcccggcaactgcgatcccgggacccccggcccggcccccccgagatccccagcccccctgctgccccgctgagcaggaagtggggacgggcgcacctgctcgcggcctcgccctctctcaccacctcaccgggaacagggaaggatttcgtgcgcatttagggcgatcctgtaggtgaggagggcgagttccgccgggaagaagggcagggagacgcagtcccactccgaccctggccttcttgtcccgcaggcctgtgtgcacgtcgtcccggggagggtgcccgcgagcccttgtccgttcccctgggctctgtttttgtttttaatttataaatcttagcagactacacacggttgagaacttgctacctaaaacctatctttggtaatgtaattttaagaggttccttctttcgccagttatattttggtactcagaagaatacgtctttagactttccaagtttataagcccagaccaagactgttaggtcgtcacagcacctcagcctccccgcttcatgggaggaccggcgacgaggcagtgggtgtcggggtgttgcaggctctcctggggtgagggtcacctcccaggggcgtttctatctgaaccgtcctctaggacaggccctggcctagcctggctccggcagctttgggatgactgcccggaacacctggagaaggggtcccattcggtttggttggatagacgtttctcgaatgcctgctgtgggcctggctgggtgctgtgcggccttcccaccagctggatgtgtggtgaggacagcggagagttgaggagcccggaactggtgcaggggccacatgctgggaagccacggccgtccctgctgcccttcctaactcgtgcccatggcctcttttctggctgtcagcctcaactccttcatccggacatgtagcactttgctgataagagaagcaaacgagatcattttcttgttttatgttttgagatggagtctcgctttgttgcccaggctggagtgcagtggtgcgatcttgactcactgccacctccgtctcccggcttcaagccattctcctgccttagcctcccatctagctgggaccacaggcgccggccaccacgcccgcctaatttttttatttttagtagagatggggttttaccatgttggccaggctggtctcgaactcctaacctcaagggatccgcctgcctcagcctcccaaagtgctaggattccaggtgcgagccaccgcgccctgccatgaaatcattttctaccacagtctctgacacctagtgcgcaccccggaatgccagttaccttccccttgttgaggacaggaactttgtcggtggcacttcctccctgcccagcccagtgcctgccacagtgtcgtcttttagaatgtggcaatgagtgagtgagtgactgagtctccctcatagaatttaccctgttttcttcatgtgtccatctattaatgacagctcttaccccagcagacgataatatttaataatgattgttccaggactgttacgagcatgtcgtattcactttctttgtgtgatcttcacaacagtccactgggcaggtactgacattatccttagttcattcatgag

SEQ ID NO: 39379 - DNA, 1773 bp, Artificial sequence
  DNA replication origin
gggctcaagtgatcctcctacctcagcctccctagtagcgaggaccacaggcgtgtgccaccatgccagactaattttctattttttgtagagaggaggtcttgctatgttgcccaggctggtctcgaactcctggcctcaagcattatcttcctgccttggcctcctgagttgctgggaccacaggcatgagacactgtggcctgccaatgatactattggtattttaaatttattattaggaaaattgcgtatgttttttttcagggaagtctctttaaagataactcatgcttccagcctttggctcagcgtatgtgttgagtcctcctgcctgccaggccctgtgggcctgggcactagaaccaggcagacgaggtcccaggagggaggcggggcaggtggttgactcacacctgagagccaggtggtgccttgggtgccagggagggcatctgagtgctgtggcttcagtcatggggtaggggtgggggtgtctagggattgcgtttgggcggaggggacagtcagggcagagacccctggagtagactagtgtgtgagggcccagggggccatggggatgagggtggagggggtgcaggggtctccagacgacttcagtatttgctgtgagtgacatggggcaccaggagtcatttgagcagggggtgacgggtgctgttgatgtttcctgtggcctttctggctgcttgctgagatgctgtgagggcagcaacagaagagggaggacacgggtggtggctggagggcctggctgtggtgggaggacctgagtggagccagggccctgagggctgcagaggccggaggctgtgggtgcagaggctgggaggctgtgggtgcagaggctgggaggctatgggtgcagaggctgggaggctgtgggtacagaggccggaggctgtgggtgcagaggctgggaggctgtgggtgcagaggccggaggctgtgggtgcagaggctgggaggctgtgggtgcagaggccggaggctgtgggtgcagaggctgggaggctgtgggtgcagaggccgaaggctgtgggtgcagggtgctgccgcaggcctgctcgggtgtgctgtccacaagacgccgagcagacagctgcgagccagaagtcaggcagagcaaggctctgggagtcctgggcacggggggactgtcataccctaagcattccagttgttaatgtgacaaattaacttgctccagggctgaggctttggcaggtgaaggggtaaagaggaggaacctgtgggcaggtgtggctgagggcaggaaaggagcaggtacaagctgagggtttagcagtgggagacaggtggcgtggctggagtgtttccagcaagctggtgacaaatctgttgatgagattgtaaagacagaaaaagaaatgtgtgtgagttttgctggtatacctcaaaatgcaaacgttacagccgcagtgcatgatacgtgcttagtgaagacggcagaggcattgaatttgcaggtggaagacgtgagcggaagtaggttcccatggtggcagtcaggtagcacctgcgggatttcaggggcccactgggggtcttggagcatagtccatggttcagaggccctgctgaggtcgtgtctctgtgccttgctccacagatgtataatttcaccagtttcactgtgagcctcaacgagctggagacaggcatggagaagaccctgccacccacggactgccgcctgcgccctgacatccgcggcatggagaatgg

SEQ ID NO: 39380 - DNA, 1020 bp, Artificial sequence
  DNA replication origin
cggcgccagggaccacaggcgggtttcagaggggcgctggggaactgctcaggtggggccgagcccacccctcggcgtcgcccgcccgggcgggcagagctgtcactcgtgtggctgagccaggggttaggcggaggccgaggagtgcggtccggctgtgggcggcgggcaccagggctacgcatagaagtgaccatgggttcagcgctttggggacccaggcgggagctggagtccacgcgtccgggagagcaggggtccgggagggtagagcgagggtgagaaccgtgatatggtctcagctgtatacatctagtcccgcaggggtccgggagggcaggggtcaggaaggggtgggtccgggaggagaggggtcccgagaggggaggggctcctggaggggagggatctgggaggggtgagtccgggaggggaggggttcccggaggggagggggcccgggaggggagagggtcccggaggggagggatctgggaggggtgagtccgggagggaggagtcagggaaggcctgagtcccagacgggtagggtcctggaagggaggggtcctggagggcaggggctcaccctctggacgcctggatgggaaaggccacagggtaaaaaggcggcagtcgcccgccagtgttgtgtaactttgagtcactttgacacaaactaaagcgaagacaacagatagtgtttgtggcgccccagccggctgctgaagggacacgttctttgggatttgcctacagcgacgccaggcgggggctcttagagggctcaggcgcggtggctcacgcctgtaaacccagaactttgggaggccgaggcgggcggattacttgaggccaggagttcaagaccagcctgggcaacatggtgaatgaaaccccgactctactaaaaatgcaaaaattagccaggtatgctggcacatgcctgtaattccatctactcaggaggctgatgcacgagaatcgcctgaacccgggaggtggaggttgcagtgagcc

SEQ ID NO: 39381 - DNA, 1555 bp, Artificial sequence
  DNA replication origin
gacgagaaggtggccggcgcggcgggtggggcctgcgggggccgggccgggcgggggttctggggtctcgggcgccgccccggttccgcctgcggctctgaacgtggggctcggcgggagctcgggcgggtctgccccgcggagcgggtcgccggggtggcgcgtcgaggctggtgccccgcggagacggcgtcaagcctagggccggccccactaggcttggcggggctgccccggcccagcgccgagtgcgggcggtgcgatcgtcgtgagcggggcaaacgcggaaaggcagcccggcgtgtctgagtctgccttaggcagctctgggcgcaggccccctgctcgcaaacaccccagggggcgggagcttgccggaccgcaggcgacagtgaccgccgcgtctcagcgtcctctccgcgctttcaggatgacgacctcaggcgcgctctttccaagcctggtgccaggctctcggggcgcctccaacaagtacttggtggagtttcgggcgggaaagatgtccctgaaggggaccaccgtgactccggataagcggaaagggctggtgtacattcagcagacggacgactcgcttattcacttctgctggaaggacaggacgtccgggaacgtggaagacgtgagtgtccctgagccgcagcagcaggacaggcgacttctcgggccctcggagtcctcgctttggagttcgcggtgggggcttggccgcatctggggaccgctcgtggggccgtcatcgactgccctgctgatgggtcgtcctggtttccgcggtgacaggggcatctcggccactgtgtatcttgaactgtccgtgtgaggtgcctgggttggaggtgtggccctggagagcccggagctctgtgcctggccttgaactgtccgtgtgaggtgcctggggttggaggtgtggccctggagagcctggagctctgtgcctggcggcttcactcagtcttctttgtttttcaaactcttagttgttctttgttacatttgagagcagttcagcgttgactttttaactactctgggaatgttgtttccagcacgtctcagaaaccccgttgccatctgaaaggcccctttccctgctctctcccccggccttgcctttcatgggctgtctctgaccctggcttctctgccttgtggagaccctgccagcgaggggtctggcggcttagctgccccttgcgcaccccacccggttagacccagggctcagtacgctctcctgagactgggcacagtgatgccatctgcgccactgactctctcttcccctggcttgccaggacttgatcatcttccctgacgactgtgagttcaagcgggtgccgcagtgccccagcgggagggtctacgtgctgaagttcaaggcagggtccaagcggcttttcttctggatgcaggtatggggcaggccttggggttgtgcctttttgttgccctgcgattcggttaggaacttgcttacagtgtggtgcaattggcttttataaaccagcaggcgccggccacacccggc

SEQ ID NO: 39382 - DNA, 1157 bp, Artificial sequence
  DNA replication origin
ctgcaggggcctgaccaggggccggggttggctgtgtcctaggcggctgggcagccactggcccccactgccccgtggacctccacagagcgagtcatggcgacgggggaccggttcaccgccagcctcctcatgcagccgcagtaggcggggggccagggctgcacggccatgggctctgggggcacagggaagatggaagaaggctggttggtgggcagctagagacccacaggcccttcccaaacgtcagtgccccacccagcccctgtctcattccacatcataggagggtggtaggggggtgggaggagggtgggagggggcagggggtggaggggtggggggagggtggtaggttacgcagcacctagtcctgaggggcagctcccccacccttgatcaaggccgcactcaccaggcaggcccccgaggtacagaggggctggggcaccagctgcagccgccagcaaggggcccacggtgtggttgctctgcgcgtccacctccagccggagcacattcccgcttttcatcactgggagaaagggggactcctgaggccaggtggtcctcagcccagcctctctccagccccaaaagaagccaccccacccagagtcccgcctggctcccgctctgcagaagggtgggggtggcagagtgccctggccacaggaggggcctcacccgctagccggtgccactggccatcacacagcactgaggggcgggtcactgacgtggagaactcccctgctccgtcatccgcccgcagcaggacctggcggggtaggaagggagggtcaggctatgcccccgaggtcaccagaatggggaggcaaaccctgccctggcacgccacctctgccaggcttacttgcttctcggtcacctgcaactgcaagtaggggggcgtccgggcctggcccaagtggaagatcagtccggtgactgccaggggccgcacctccagttccaggcccacatcaggcagtgtagctcctgggaggtctgcggggaggggttgtgatggagaagaaagggggggcccctccccagaacctcctggagccccctgccctgccctgctgaggcctgggatgccagcacccacagacctaaagtgataactcccccgctgcctgggaagaaca

SEQ ID NO: 39383 - DNA, 2315 bp, Artificial sequence
  DNA replication origin
cggtggggaagagccgtcgcaggctgtggggaagcggggatgcgggtcagggcgccacctccaagcccagcctaccgccccaacagcctggcctcggagccccagctgcgcacagtgcttacctcgggggcagctggtcgggcggcacgccccccaggtagtaggcgtcggccagctccagatcattgtcctgctccacgctgtacaccgtggcccgctccacacgcaccagcacacgcttgcggctgccccccagcaggaacacctggatctacaggaccagtgggggctccagggccagctgtgtccctgcggcctgccccgcccccatcgttccatctcctctccctgccaccctggtccccaccctggccctaccgccttgctggccgaggtcaggggcggtgggggctgcagtgggacggcctttttcaggccagccccaaagtcatacaacagcacgaggctgccttcttgcacggccaagcacaggaactggctctgcagaaacagggcagggttagtgtggggcagggtcagtgcaagtggggatggcaggacgggtgtgcctggcgcacctgctgcttcaggaagaagagcaccccgctgtaggacacgagccgcagctcctgctcgaagcgcttggtggtgctgatctgactgtcgaagctgatgcgggcgaagccggtgccgtccaggtaggagccgtccgtgagccacgggtccccggtcgacttggagctgcaggtcggagattctggggtcagcggagggtggggtggggtgggtggagacggggagggcaggccacacgcaccgggcacaaggcctgtccacagccgtgtccagctggaaggtcctctcgaagttgtagaggctgaccacctcctcattcagcgtgtccatctcgatgcagccccggtagccggggaagcgaagcaggggagggggctgtgggcacagggctgggtcagggcacctggcctgaggcgcctcccctccaggatggaccaaggggacttcagactacagcaggacggactgaggcaagataccaaaagaacccgcggctctccaggacacaagcgactcggggctgcggagcccctcccaggctgccccaggccgggcgggctcaccgtgaaggtactggggtaccccccgacgtagaagacgaagtcgtctggccgcaggttgagcagcccctctgccccaggggccaccgtgtcacccttggtttcctggatcatctgtctctccactgtgacggacatgtggccaaactggagagtcctgagggcagaggcgaggggtggcgagtgggcacggagagatgaggggtggcgagtgggcacggagagatgaggggtggcgagtgggcacggagagatgaggggtggcgagtgggcacggagagacgaggggtggcgagtgggcatggagagacgggtggcgagtgggcacagagacgggtggcgagtgggcacagagacgaggggtggcgagtgggcacggagagacgagggatggcgagtgggcacagacgaggggtggcgggtgggcacagagacgaggggtggcgagtgggcacagacgggtggcgagtgggcacagagacgaggggtggcgagtgggcacagagacgaggggtggcgagtgggcacggagaggcgaggggtggcgagtgggcatggagaggtgaagggtggtgggtgcacacggagaggggagagatggcgaacgggcaagggccctgcagttggaggcatccggcctctctcctgggcctcccacctgtccaggctgacagctgcgaactgctccccaatgtcctcatcgatgcttaggactgcagggcccgcctcacccagctgatacacccagtgcaccttcttgtcacgcagagacacacccatgtagtccccagtggcctgcggcagtgacagacacacagtcgggatggggaccggggaccagggaccaggcaccgctcatttccaaacagagcctgagctcgggccgcatccacccagccagcctggtacctggcggctgcccatgtacatcacaaagcgatcctcggtaccctgcccaggctcaggctctgggccctgcaggtagaacttgagggcagtgtaggcagcaaggtcggcaagatcccgtggggtgcgcagctgcacccctgagcgcccgttgaacttcatgggcaccttgacctgcggggcacggtccatcagcgtccaccaccaccctccctgatgtccaccttcccctgggactctcacccaccttactggcagccccccgggcctggg

SEQ ID NO: 39384 - DNA, 1061 bp, Artificial sequence
  DNA replication origin
tgtccatctgtctgctgtgtgtcagccttggtcctcctggggtcagaagggtggaggtgggctgcaattgtatactgggggtgaagctgcctgggagctgaagctgcctcccccgcagtgtgggctgccctccagggtgccaggacccagctccgagatgtccgggccaagaaggaccagctggaggcgcacatccaggcggcgcaggccatgcttgccatggacacaggtatgcggagcctgggcccggctctcgcagccggccgaccatgaggctctgtgacagtggcgctggccacatgtggttggtgagcactcactgtgctgtggaagagacccccacagtgggcagctggggccagacacagaaagcctaccagggaggtgccagggctgcagatagcacagacagccccagccgtcgggagcctggcaagcttggaagtgctttgggtagaaatggagttataggtgggagggctgtaggccttgggggggattggggcacaccctgcaggaagggcacccaggagggcacagtggtcagcgtggctggaaccaaggggctggcaagaccttgggcggtgaggaccagggctcccaccctgagaggcttggagcagaggacgatgtgcctcacccagtttctgagggacccctgtggctgcggactgttcccagcaagcccaggagagatggtgggggccaggtggtgggaggtgacatggggcacatgtccagggaccagctgtggcctgagaggctgggtgcctgtcctggcatggagggggcgtctggtggaggcatttaggatgggtttggattgcactgagcagcggggtgtgagggtctcacacgatccatagggggttggatgtccctgttgctggcccaacagaaagacttggggacatgaagccaggatggtccccgctggcccctgctgagcctgccctctgcccaccacagacgagacaagcaagaagatcgcacatgccaaggctgtggctgctgaagcccaggacaccgccacccgtgtgcagtcccagctgcaggccatg

SEQ ID NO: 39385 - DNA, 1858 bp, Artificial sequence
  DNA replication origin
aatcccagctactcaggaggctgaggcaggagaatcgcttgaacccgggaggcagaggttatggtaagccgagatcgagccattgcactccagcctgggcaacaagagcaaaactgtgtctcaaaaaaaaaaaaaaaaaaaaaaaaagacatttgagtgatattatacactgtaaacaaatgtattaggtagtttagatagtaattcagtgacttggtcaacccctaagactctcgagctcctgtcccctgcactgacacatgtacgaggcatgaagtaacatctgctgaatgaggacaagcgaaccgcggggaacacaggtgaaagcctcccggggccctggggggtcttggggctcctgcctggccgcctagccgccgtgcgtcctgcccgaggcttgtgctctgctgctccagcacctccagctgctgtgccgtctcatggcgggggcccagggggctccggagctggctctgtgggaggcgaaaggtgaaggcctgcactggcccgggttggggagggaaggccaggacgctcagtacctgcaggtcagcgatggaggcgttcagcctgtgcagacgggcccaggccatggagctggcattgatgccacgcagttgctcgtgaatggcggggaggagggcgccggcccgttccaggtcatccaggagcaggaccacacagtggtcacacactgcaggcgatgtggggtcacaggtcagtgtcattgggtcaggccaggggagaatgatcagctggggccctggggtcattagggtggggagggctcagccagaggtcatgaggtcagcttagggacacaggacctgtggggaggtcccagagttctggcagagtcatagggtcaggtaggagtcagatgggagtgaagggcatggggtcacccagggagaaggtagggccagcacaaggggttggggccggaggtggggccagtgaaggggcggggccggtggaggcagggtcagtgaaggggtggggccagtggaggaagagggggccagtggaggaggcggggcctgtggaggggtggggccagtggaggcagggtcagtgaaggggtggggccggtggaggaagagggggccagtgaaggtgtggggccagtggaggaggtgcagccagtggaagaggtggggccagtgggggtggggtcagtggaggggtggggtcagaggacgggtgggttcagaggacgggtagggtcagtggaggggtagggccagcagaggggtagggccagcagaggggtggggtcagtggaggggtggggtcagtggaggggtggggtcagtggaggcagggtcagtgaaagggtggcgccagtggaggaagagggggccagtggaggcagggcctgtggaggggtggggccagtggaggtggggtcagtgaaggggtggggccagcggaggaggtgcagccagtggaagaggtggggccaatgggggtggggtcagtggaggggtggggtcagtgggggaggcagggccagcagaggggtggggtcagtggaggggtggggccagtggaggggtggggtcagtgggggaggaagggccagcagatggggtggggccagggcacacaggaaggctagggacagtagaggggtgcagccagcagtggagctgcagcgctcctcagcgtggttggagttggacaggcatgggtctctcgggaaatggaaggcagctgggaccactctgggaggtcgacgttaacactggggtcaccaggctgtgtgggacttggattcctactccatcaggtgtggggaagtggggtgttgaggacacaccttcacagtggatgctgtggcccacaggcccgcctg

SEQ ID NO: 39386 - DNA, 717 bp, Artificial sequence
  DNA replication origin
caccttcaccatcagaccctccccccaacccatgaccagcgccccccccacctcacgatcacatcccctctccccccacaatcagtcccccctcatggttagacaccaccaccaatgccccaccactggcagcggacaccagccgtcagagcagggcaggccatggcagggagtctgcaggtccctcgggcccaggggaggcagctggggagtggggccaggctgggacacgagtgggtagccgggtggtccgggcggcctggaggagacacagcaggaggcagtgaagtgagggcttaggagggtgcctaggggctccctgggggggtgagagggcccagggctgcagtcacggaccccttctgcagggtgcgactgtaccccatgtgggacagaggcctgcgacccccacagcgggcactgcctgtgcaaggcgggcgtgactgggcggcgctgtgaccgctgccaggtagggctgtggggtaagcagggctgggtgggtggggcctagggactagagttggggcctggggagaatctgataggtggggctgaggggcagtgtttgatgggcagagcctcagggggtggggccagatgggcaggacccctggcttccaggttggtctgggacagtcttgagggctgggcagggcagtgaccagcctgtgccacaggagggacattttggtttcgatggctgcgggggctgccgcc

SEQ ID NO: 39387 - DNA, 835 bp, Artificial sequence
  DNA replication origin
ctaggccccacccacccagccctgcttaccccacagccctacctggcagcggtcacagcgccgcccagtcacgcccgccttgcacaggcagtgcccgctgtgggggtcgcaggcctctgtcccacatggggtacagtcgcaccctgcagaaggggtccgtgactgcagccctgggccctctcacccccccagggagcccctaggcaccctcctaagccctcacttcactgcctcctgctgtgtctcctccaggccgcccggaccacccggctacccactcgtgtcccagcctggccccactccccagctgcctcccctgggcccgagggacctgcagactccctgccatggcctgccctgctctgacggctggtgtccgctgccagtggtggggcattggtggtggtgtctaaccatgaggggggactgattgtggggggagaggggatgtgatcgtgaggtggggggggcgctggtcatgggttggggggagggtctgatggtgaaggtgggggcctgatcatgggtaggggaggggggatgtgatcctggtatggggagggtctgattgtagtagggagaaagggtgtgatggtccgggggaggcctgatggtgaaggggcctgatcgctggggcgggagggcctgatcgctggggcgggaggaccggatcatagcgggggagaaagggttgaccatgaacccagaaggctggctccgacttgtcctggctgggccccagcatcaggcacacagcctacttacggggtacgcccagcaggcctccctcctccccgcgcaaccctccccagggtgcatccctcccagcccgacg

SEQ ID NO: 39388 - DNA, 1123 bp, Artificial sequence
  DNA replication origin
tgaagagcaagttggggtcaccgttgccgctgcagtcgcatggctggcaggagctgcccagcaccagtgggttcccaaagaatccgggcgcacacctgggagcagggtggggaggggccgtcagtggcccgtggcgcccaccctcgcatatcctggggtcagcactcaggccctgccccactgccctagccccagctcaccgctcgcaggaggcacctgcataaccaggtttgcagaggcactgggtgcggccgcctcgcaggacacagccctcggcgaagctgcaaagaccagcagcgtcagtcactaggcccctggcagtgcccgggcccgggcgagcacactgtgctccggctggaacacacgccaggcgtcgggggcccagacctcacggacacctccagctgtccaggcctctgcagagggcagtgggaacccaccccgctgctgggtgaagggagcctggcaccatcagggcctcgtcccgggaggaggctggcttacttgttggaaggcactgagagggggcaggggcagctgacacagggggcgctggggtcgtccctgctgctcacgaagccagcctggcagcgctcacagtgggccccttcggtgttgtgctggcagtcctggggcagagtggacagtcagagctatggtggacacccacatcctactgccgagtctgtgcagctcccaccacccctgcctcagactctgtgcccaaggccagatggtcccccactgggcaacacccttccccagacctcagttgacctggaagtgcagcccctggtcttccctggcacacttgactgtgccttcagtgaatgctgcccccctggccccaccagcccctactcaccacacagacgccagagccagggaggcagcggtctgagtgtccatggcactgacaagggacacatcggcccaggaagagacctttgacgtcccgatagaagccgggggcacattcctgagggtgtacgggggcaggtggcatcagcgattgagaggacgaggggccccaccctgcaagctcacaagtcagaccctcagggatcctgcaggcacgaggcactgggaacccgtggagcatggtcaccgctgggtcagaggc

SEQ ID NO: 39389 - DNA, 905 bp, Artificial sequence
  DNA replication origin
ccctactcaccacacagacgccagagccagggaggcagcggtctgagtgtccatggcactgacaagggacacatcggcccaggaagagacctttgacgtcccgatagaagccgggggcacattcctgagggtgtacgggggcaggtggcatcagcgattgagaggacgaggggccccaccctgcaagctcacaagtcagaccctcagggatcctgcaggcacgaggcactgggaacccgtggagcatggtcaccgctgggtcagaggctggtcaggaactcctggcctcggccggctggaggtgggccagcacctggctgctgtttgaggacatagctctcaaagccacacggatgtcctgtctcgggaatgaccaggccttggggctggtgaccacccactccatgtggaccagggcctactctttccactccttctaggaggtattcaaccacaaacctcctcatacagaaggagcaaagttacagcagacagacagattagcagggcagattagcagctggacagacacacagtgggcgagggatgggcagaatgacaggcagacgccaggatggtcggtgggggatgtccaggtgacccagtggtgggggctggggtaggtgggaaaggggtatggagggtgtgtgcatggaggggcaggcggatgaggggcaggcaggcggacgaggggcaggcagacaggcagcaggggacaggcaggcccatgagttggccagcagcctgtgaaaagcaggggcaggaagagaggtgagtagggtgacaggaagtggaggcagcaaggaagggaacacagggaggatgctggagggaagggtgtgcacaggtgagccgcctcgcagtctggtgctgtcctaacctcacctggcatgagtccccccggt

SEQ ID NO: 39390 - DNA, 906 bp, Artificial sequence
  DNA replication origin
atgtccaggtgacccagtggtgggggctggggtaggtgggaaaggggtatggagggtgtgtgcatggaggggcaggcggatgaggggcaggcaggcggacgaggggcaggcagacaggcagcaggggacaggcaggcccatgagttggccagcagcctgtgaaaagcaggggcaggaagagaggtgagtagggtgacaggaagtggaggcagcaaggaagggaacacagggaggatgctggagggaagggtgtgcacaggtgagccgcctcgcagtctggtgctgtcctaacctcacctggcatgagtccccccggtagctggcggggcacaggcacagctccacattgctggccagggccccctggcctgctgggctggccacctccagtgccaccctgcgcaggaagacagccgaggagatctgtgagaagagggcacggatctgcagctgctccaggctggccagcaccatcatgagctcctcgcgggacacagtgttgcgcgtctccgtatgccggaagttcccctgtgggtccaggatggcacctcagtggggccacactcaatgggacagaacagggagcctagaacagaccccccaaccctgtaggggatggaggggcacaaagaccatggggcaggaggaggtacacacaggtagaaaaaccagtctcccatgaggccagccagcacctagatccctgcctcacaccacacatcaaaccagctccagatgccttaagaattgaaatacacaaagagaacagccaagcttctagaagaaaacataggcaggtcctttctgatcaagtagtgacaaatactttcttaaacaagatgcaaaaacgcttgctgccaaggaaaaaaggataaattcaagtacattaactataaggccgttcat

SEQ ID NO: 39391 - DNA, 850 bp, Artificial sequence
  DNA replication origin
ggagtcctgccctgacacccccgtccctctagagactatggccctcacctggggctcacgcagcagggtgggctctgcatcagggtccacagcggtggggggccgaggtcggggtccagctggggacatggctggagtgagatcctgcgcgtgggtcagcgggaggccgggcggcagcgggatcacctggcagtccctgaggatgatgggctggggcggctttgggaagcgcgagggcagacaggcggcactggtgagagcacagtgggtgagtcagagccggccctgccgccgggccctcggccgcgcccctcccagccccattacctgccattacctgttggggccaaaggcgccgtggctgctgatgcagctgacccggggctccacgaactccgggctgaactcctcaatgggcaccagagtgaccccgtgctgcaggcagagggacgagatgctgcaacgcccgtggtgcggggaggatagggggtgcaggcggtacgatgggggggtgcaggcggtacgatgggggggtgcaggcggtacgatggggagtgcaggcggtacgatggggggggtgcaggcggtacgatgggggggtgtaggcggtacgatggggggtgcaggcggtacgatgggggggccggtcacacagctcagacccaggaaactgcaaacccaggcgtccgaccgagccctgctctttccaagatgcccttgctcctcctccagctgcacaaaccccaaccgcagaccagcgtgttggccagttcctgggcccacaggcctatgcggctcctcccatagccctcttcctccccctcgccctcccatccgtcactgttccccc

SEQ ID NO: 39392 - DNA, 743 bp, Artificial sequence
  DNA replication origin
cacttgtcgccagactgctgggcagagggacggtatgtgcaggcctcagtcacccgcagctgcaggagcgccgcctcgtagtatgcgctaggcagcagaaccacgtagtcctgcagggtggaggtggtgctgagagtggtgggccccaccccctgacccggcccccagccctcactctggcccctgcctcaccaggagcaccccttcggcctccacacgcagggcccaggtgccagggttcagcacaaagggctctccgaagcccctctggggcacggtgatgaaggcaggctccgtgctgggtgggaaggccacgggctgactctgtgctgtgcctgggcgggggcaggggtgagactcctgagcccagcccttggggccaccccaggctgcaccccctacagggttggggataggctggtcctaccacccacatgagccagaggaaggtggcggggcttgggagtggggtggggtggggtgggctgggctggtggggcaggggctgtggcccagggaccccactcacagttggcgcaggtggccgacctgccctcctctcgcacagagacccgcccgctcacactcatggccccccggttgacgtatcggaagacgagccagaaaaggtcaggggaggtcaggttcagcctggccacgatcctgggctgggtgggcatggagcgtcgggtcactctccctgaccactgccagcctgaggcctgggccttcaaggggcctgc

SEQ ID NO: 39393 - DNA, 794 bp, Artificial sequence
  DNA replication origin
acggcgtgaccctcaggtgtggcagcctcctccagctccaggcgcaggtggtgcaggtccgggaggtagtggtccctcgcaggcctggccacagcaggggctggtcaggtgcagcttggccatcctacctagccctgcacagcggccccgggtctccagggagggtgaggcctcacgtgggcccatggtgagggacacggagaggcccggaggacaagctgcctgccccgctccccaccacccagtggggaaggggtacccactcgctgcaggtggggccctgggtgttggggcggcaccggcagacgcccgtcctcggttcacagctctggcccagtgcaccgccaatgtcacaccggcagcctgcagggagaaggtgggaggtcagaggctgcctggcccccacccagcctcaggggcccctcacagccagactgagaagcctgcctggggctctctggatgatggagagtcagggctcagggctcagggctcagggcgagggcgagggcgagggtgagggcgctgggatctgttagtgccgtctgcccaggtgtaggacaggggagaggaagccacgcatctgggtgggagctgcaccccctctcccacaccctggcacaggctggcaccaaggggcagccatccatcacccgggcttcatgctgcccaggctgcacttgtccctccgggccttgggttccccagcataaaccgaggggaggcagggctgtggtctgggacgagcgagtgggcactcactgcggcagccaaaatagtcagcctgatccagt

SEQ ID NO: 39394 - DNA, 1608 bp, Artificial sequence
  DNA replication origin
cccaagtctgctcgtgtgtgggagatgggtgaggacccaggccaagctaaaagtcccgagtccggtgagaccagggcttcctgcctgctgctcagttgccatggcaaccccagggcctgtctgctccttaggctggtcctctgcccccactgcaggtgactcctgtgagtcacaggtgagggccctcagccctcaccaccccttgtcagggctctatggctctatggtttgtgggtgggagagcagggcgcccgctctgacctgcagtcttgtcctctcccaggcacaggttccctgtatgtgccgggctcacgtggaggggccgagctgtgaccgctgcaaacctgggttctggggactgagccccagcaaccccgagggctgtacccgtgagtgtgccctggagtattggggtacaggggttccttggggaactgtgcccacaagtatatcctggagggagtgttggggtgcagggttcctggaggggctggagccagtgagtgtgccctggagggagtggtgggatatggggttcctcggggattgtacccatgagtgtgccctgaagggaatgttggggtgcggggttcctcaggggggctgcgagtgtgccctgagggagtattgggggtatgagggttccttggggggctagagcctgtgagtgtgccctaaagggagtattggggtataggggttcctcggaggggctgcacctgtgagtgtgccctggagggagtgttggggtgtggggttcctcaggggatggcacccatgagtgtgtcctggagggagtgttggggtgtggggttcctcgggattgcacccatgagtgtgtcctggagggaatgttggggtgcaggggttcctgggggggtactggagtccatgagggtgtcctggagggaatgttggggtgcagggggttcctgcgtgggactggagtccatgagtgtgccctggagagagtgttggggtacggggtttcctcggggtgctggagcctgtgagtgtgctctggagggggtgttagtgtgtgggggttcctcggaggggctgcacccgtgagtgtgccctggagggaatgttggggtgtggagttcctcaggggattgtacccatgagggtgtcctggagggagtgttggggtacaggggttcctgggggggggctggagtctgagtgtgctctagagggagtattggggtatgggatttccttggggggctggagcctatagtgtgctctggagggagtgttggggtataggggttccttggggaactgtacctgcaagtgtatcctagagggagtgtcagggtgcaggggctcctgggggtgctggagcctgtgagtgtgccctggagggggtgttagggtgtgggggttcctcggggggctggagccaggctctcctgccccaccaagcatctgagtcctgccctgctctccccaggctgcagctgcgacctcaggggcacactgggtggagttgctgagtgccagccggtgagtctgaggaccaaggtgtgggggatttgggggcacactggtcaggaccctcccctgccccacttcacctcctcccttggcccccagggcacc

SEQ ID NO: 39395 - DNA, 943 bp, Artificial sequence
  DNA replication origin
gcgagtcgagagggtggttgggagagcggtagaagccgggcaggcagcgctcacagttgacgccggtggtgtggtgctgggagtgcaatggccgttgagtctggggaggtccctgccccacctcagggccagcccattcccagccctctagcccagcccacctggcagtcgatacagacacccccaccctgataggtgccatccaggctctggctggcgcggcgccggtccacctcagggtcgtagtaacagtcggtggcatggccgtagcagttacaggctagagagaggggagcgcagctgttggcacgccctccacaggcccgggcaccggggccctctcatgggccagggtgtgggcaggacacacgtgtgtgggaggaggcactcacactggcactcgttggcactgttggcagtcgcaggcttccacggctgctgattgaagccggggcagcagcggtcgcaggtgcccccgcaggtgttgtgctggcaggtgcactgcagcctgtggggtacacaggaggggggatcaggcccatcctggaggcaggtggcaggtgctcagtcccttccctgaaggggcctgtgatcccctcgatggcttggcttgccacatggacacggccccccgctgctgtttctccagctgtccggcagcaagcgctcgcccagactcagcgtccccgagcctgtggctctgacgcaacttccccaggctcagggaatggacacaaggaaagaggcggtggaggacagggtctcacagggcctttgtggaggcgggactggggagcaggtgtgcactgaccgggtggggcctaggacagggcacctcaggggtcagtagagtcccccttgcctgcaggtcaggatggagacctgcgttctccaaaactgagttatgccctttccacttcggccaggactcgagcgtaagccc

SEQ ID NO: 39396 - DNA, 1229 bp, Artificial sequence
  DNA replication origin
aggggcctgtgatcccctcgatggcttggcttgccacatggacacggccccccgctgctgtttctccagctgtccggcagcaagcgctcgcccagactcagcgtccccgagcctgtggctctgacgcaacttccccaggctcagggaatggacacaaggaaagaggcggtggaggacagggtctcacagggcctttgtggaggcgggactggggagcaggtgtgcactgaccgggtggggcctaggacagggcacctcaggggtcagtagagtcccccttgcctgcaggtcaggatggagacctgcgttctccaaaactgagttatgccctttccacttcggccaggactcgagcgtaagcccaaaacctccctgagccagaagggaaaggggtccatttgcaccccccaaggctcagatttcgcttagcaggcaggactcctaggcatcctggtcacctccctagggccaagtggccaagaactgcttccttcttccagctggggtggacactaagtcacagggctggaatcttgccttacgtcccgtgggcagggtgacagctggagagagacaaggcctgaggttggaagcacctactgctcagtattagccagaccacagcgggagtccctgccccagatcaggctctgccggaggctgcagggccgtgcgttccctgagcaggaccccagaagtcagtccagtccatgaggattagacccagagcctcaaatggtccagctctagtcctgtcctccacggggcccacctcacagggcctcgggaatcaatactgctttccctcagaatccagaaacatctgggagggccataccctcaatgagaggaattgggaaataaactgcccgtcagcacaggtgatcaacaaagaagctgctctgtcgtcacaccagccccaagtacctataagcaagggcctgaactggtgttccatttttcaaaaatccacatagtcaagaaattgataggaaaagtggtgccgggctggcgataccctggggtgtatagcaaaagctctcccaaaaccatcccaatcccagggcacgccagaagcacaaagataaaccctgctaaagaccttgcagagaaacaatgtggcaggtcagcagaaagagccccaagaacctcacaaaatggagtaatctagtagaagccagggaagaatgttaaaaatggtcataaagaaatctaaaacataggccggg

SEQ ID NO: 39397 - DNA, 1863 bp, Artificial sequence
  DNA replication origin
ctggggaggggtgcccggtgtgaggtgggggcaggggccccatcttaggagctgctgacctgtcagagggactagggggttggacctttggacctgcctggtggcagggaccactgtctggccaccaggcctggctggacgtgagggctgtggggacactggggtgtgttcctgcctccaccctggccagtccctgcctgggccgcaggtaggcctctccctagcttgctccatctgcagccacagagcttgcaggaccatgggggaaccccaaactcctgcggcagggaaggggaggaggcagcgcgttggtcccgagcccaggcggggagcccttccaggagggctggttcccgggggctcatctccatccctggggagccctctcccctgggttcgtctgccccacacaggcaaacccagaggtgccccctgtgcggcgagggtgccacatcccctgctgtggcctcacctgaggggcagaaaatgagccaggcccctgggagcatgggaatccaggcgcccctggctcccctgacgccctctcggcccacaggtcttccacgtggcctacgtcctcatcaagtttgccaactcaccccggccggacctctgggtgctggagcggtccatggacttcggccgcacctaccagccctggcagttctttgcctgtgagtctctgccgccgtggggcctggggggagaggcaggggggtccctgggcaggccctccgtgaccaggcttctgaaggtctccgaatacccagccctgccctcacacccggctgctgcggtcatgactgtcagacgaggacccgaaggctcatggggatttattggctcctgtccctggcgtcgggcacagccaagtccaggggctgtggcgccaggaatctctggtgccatctcttggctgcctctggatggcttcatgcaccggcagctcccgtggtgacaaaaggggcctggcagctcccacctcacctcctgccagcctagccacctgcgtcaagagtactggagtcctagcccggatgctggccgtccctggccccgtgccaccctgaccagtcatgctggtgggagtgggtgctcctccccaatagggcaggcctggtcacgtgtcccccaaaattccctggcctgagaatgggggaggggcgggtcagtgatgggcagtaggcgtctgtccccaaggaagggggtgaggatggtcgtcgaggggggtcactcgcactcaaagcgtgcaagggagagcggtggggggcagtgcagtccaacgggccaggccccttcagccagtgagctgtggtctctgtcacgcggcctcttggcctgtgggagcctcagtggcaaggcccggagacgtcaaggggcccgggcaccgcggggacccaggcttttctggtgatccagcgccctcccctcccgccattccccgcagcctccaagagggactgtctggagcggttcgggccacagacgctggagcgcatcacacgggacgacgcggccatctgcaccaccgagtactcacgcatcgtgcccctggagaacggagaggtgggccggggaggggcagggcggtacgggggctggagaacggagaggtgggtaggggaggggcagtgccgagcggggctggagaagggaaaggtgggcccgggaggggcagtgctgagcaggggctagggccacactggcgtcaccgcatactgcccacagatcgtggtgtccctggtgaacggacgtccgggcgccatgaatttctcctactcgccgctgctacgtgagttcaccaaggccaccaacgtccgcctgcgcttcctgcgtaccaacacgctgctgggccatctcatg

SEQ ID NO: 39398 - DNA, 1735 bp, Artificial sequence
  DNA replication origin
cgtactcctggggctcttgcccaccccctgtgaggcagtggtcaccgggcagaggcctcctctgggaaccgtggccctcccagggcaagctgggtagtggggactggagggtgcagtggctgagaggcgggtccggctgccgtcctggagacgtgcctgccccaaaatagccgatttttaaaaataactcaggcagcttttgtttggcttttgctttaaaagacttttttttttctttctgcacagaaccatgtagcagcggaaaggtcagcactggcagctgagctgagcggggcgtggagggggaagggcggtcccgaagccaggggtctgcgctcgctccgggtcatggcgagggcggccggtgtggccctgggagccgcgaccaggtcagagacagatgggagtcctccagcgcgggcttcccttcctgtgaccatctgtgcagccaccaggccctcgaggacagctgtccagggcccctgtctgacagacagatggttgggatgggggacagacaggaggccaggatcttcctgtgcatcccaggggtggggagggcgaagtgtctgtgtccccctcatcctgctgatcagtgtcttcaagtcaatatttgtgcaagtgctctcagctgggaaaaatgtgactggcctgctgaaggggagggaggaggacagatcgggccgaggagagcgcagcctccatccaggcactcagggaacagcgggggcggctcccagggggctcagtcgggacctttagtctccttcggagcctttggtgggaggggctgtgttgccagctccccgagaacagcctgtgtccctgcccctgtccacctctagcgggtccttccctgtccaggcacaggggccactggcccccacctggggctctctggaatgcttgtggtcaggcccacagggggctgctgaggcccgggtgtggggctgggtatagggtctgtccctgaagaggctcatacccctccctgctgggcagggcatgtctccctgccccccacccacagggaggtagacgatgacctcagagcctggcagccggtgaataggcctgtgccccgccccaaccccggaaggctgcgcttggctcccacagtccccgcaacgccaagccctccgagaagggtgggatttggacctgggatgtctggagtcctggaaccttgccccctacctggagtctgggcagctggtgcccccaagggctgaagctatgaggggtctgtggtcttttcatgggggaccccacagcagtctcagtccggctcagtccagtggggtgactgtaggtcttgtgcagctctgggggaccccactctcccccttggggccctaggcttccaggcctacctggccaacagcacccagctgttcccgggcgtacctgctgtggggagaaactctccggaggagtgggcactggcgggtcagggtcccgaggaggtgtggtgggtggccctggggtgtggcatgaccctcggaggcctgctggcctttttagggcccacctgggtgcccacctgtgagcagaggaggggctggtccccactgccgcccacaaagagttgggctgagtactgaggtctcccaaggtctccatcgtggaccctgtgggcccgtcaggggaggtgtgggccgggacaggcaggccacacctgtgctgtgggtccatgagttgcctctctcccccggcacccgggcctcctcgcaca

SEQ ID NO: 39399 - DNA, 981 bp, Artificial sequence
  DNA replication origin
gggggttcttgcgtatctccttgcatcctccggaagcttctggaactgagcggccacatcactggcctcaggctccttcttccgagaaccacacccaggccccaggccccaggccccaggcccagggaagggtgagcgcgttcatgactgcccaggcacatggccagcgggtcctggcttgagctcccccaccccctggctctgccgcagggtccaggcccttgccccactacaccagcacgctagcccagcgggcccaggttgtaaggagctgggcagggtgagtggggctggctctggcctgtgtcccctccctctccagtcggcccctgggtggcctgaccgtgggggcggggctctccccagcagaggagggcattgcctcccgcctccctcagatgaggagtgaggacgcacgggcccccttccggtagggaggcccctgctttgttctctgtagagcaggccacgctgcaggtgctacaggtggggtagcggctttgtcccagtccccgaggcccagagctgcagggcaaatggggaggcccaggtgggggtcaaggtgtgggggaactggggctggcagggtataagggggcagttaggcatgaggctagaagtattggttgggggcgagcagtgccaggtgagggcctgtgcccctggggatggtggagacccatgggagggcagagtggacaggtagggccggagaggggaggcagtcagctgtcccctccaagtgggggtacaaggaggcaaagctctgctgaagtcattggccactggagtgtgagtttccctaggcacttggggaaactgaggtggggttatgagagggtcagggccagtgtggagtgcccaaggtcccagtgctggggtctggaggactgtggggttggccatgctgtctgcagtctgggttcccgggctggttcctcctctgtaaatgggaggagcaccgcaggaggaggacctgcc

SEQ ID NO: 39400 - DNA, 3765 bp, Artificial sequence
  DNA replication origin
gtggagaggggcatctgccttgggtgggaaaatctcggtgggcctctctagcggggtggcgtctgagcactacgtggtaagggggggggtgtgctctaggcagagggggtgccagtgcaacgagccctgggggcaggaagagtctcacagtaaaccacaaggtggatcaatgtgtctagagccaaagggagcaagaaggggcaggagtaaggcaaagcatggctacccctccctgctggccctgccaggggctccagagaggcttggacaaaatgcagcaagccagggggcggaagggggagctgcagacagaaggaccgtcagggccgggatccaggcggccagacccccccccacctccagatcttgcccacagccttctggattagggtctccagagagacagaattaagctgttccggaggcctgtggggaccggccccagagtggacgtgtggacagcggcaggtgggcctgggcctcctggctgctgcttccgagtcctgggaagaggccaagtcacagtaactgctgagcctcaatgtccccatccaaagagtggggataaggctgcacctgcctggggccaccgtgaggagtaatggctcacacacacagcctggcagccgcttctgtcccgggcctgccatctgctgggggcctgtcctgcatgggtgagtggggaagagaggaggctcccagcagaatcctggcctgcatcctggcaggggaggggtagtgctgggagccggggcagggatgaggagagggggcagagctgggtcctggctgctcccccgcccccccaggaaaccagatctgctgtttgtccacacaaaggcgccctcccaggcttggggttgattgaggccccagaggcctcaatctgagtttgagaaagtcagcggccctaccccgcccagcctcccttggggggccagacctcatcctaggaggaggaggcaggagctggggagatgccttctccccacccccaggcccagcacctacagagggcccaaccccctcgcccagagtgtgccctctgcctccactgagcaccagggcaacacccggtacccctcccacaggctcccaagaccccgccctggtgtttggattgccccatctcagaccttgccccagaccacccaagatgcagctctgcagcccccagtgtggccactgctgtatttcctttactgcatgtatgagacctggaattatctgggggcctccccggggtcccccagagctctgcagtggcagggtccacaccctccttattcccgctgtgtccccagctcaccacctaagcattctcgtggatggggctagagcaactgaagacacccagttaagcgccacgacccctacccgcaggccgcactgcaagctttgatggtggcccccaaactcaagagctcaatgacagcacggcgcacacaggtcctgctcagggtggggccaggggctcctggagaaggtaggtgtgggcggcgccctctggctgggacagccggacctcccagggaaggctgcttgctggtcaagaccctcccagacacacgagcagcagagggaagctgggtggaaggttgcgggtcaagggtcagcctctactcttccaggaggtcagggaagcacctgctcagtccctgcctgggccagcgttggtccagttattgggaggcagttccagtccccattcggccactcactgagccacagaggacagggttgggaaaaccaggctcccccacctccgctgcggagggtcccgtgagaacagagctaggaaacagcagaagggccgataaggacttccccttccaatgagtcaccatgctggcctggctgcccagtccccaccttcccaggctgggccggccagggatcccctgatgcccacctggggctgtgagggccacaacctccccctgccctctgcctgctccagctgcccagcagggttcaccccgacccccatctgggatgcccagctaatgtgcatctcctacagagggtccctgagagcccctggcctgcagccttgagaacacactgcccagccccaggccccatagccttagtgagccccctcagatggagctgcggcttcatcgcctgggcacctcctgtgcctgcctgccttgccccaaccgcagctccactccagaccggccggcaaggacttctcacacgcccaatccgcggccagggcggtcagcagacccgcggctctcagatgaaggaggcatccaaggtcatacccgtccagctcacgtctaccagctgatctttctacatatctggcagcctcagcgggcactcactgctcagagctcgagactttggaagcgaagggttcacctctattgctagacatgagctgggcgaggccggctggtttctcatccaagctggctctgaggcatggagcaccacagcccacagctgccactgaaactgtggccacttcccaggctcctcgggccaagctcacagtctcaggtgaggggggccagcacgctgtgcccattttaaagacagcttgaggctgacagagggaagccacacagctgaggcagaggagaggggcgttgactacaggctggccctttactcacgagacgggggtaataagcccccacagaggagacagatctgagagggggcctgtggcccccagccacgcagcatgggcaggctgtgggggggtggtctgaggttcacagggcacctggagcctcccctgccagaacggcaaaatctcagctggggacactcagccaggccctctgtggtgaggtgtggcagcaggtaaggagacagtcacaggccctccgtcctgagacccggcccctctgagttgaccagataagggggcagccaggaggcacccaggttcccacagctaacccccgctggaccctgttctggctggggggctccaagcaggtgtcagcagctttccagggctcagatcccccatctgaagtgtgggcttgagacctcctatctcagaggactgtgctgggcttaaggagagaacggtgagcccagaagcctggggaggctccttccccctccaccagggccaagggggtggggcaggcagagggggcgggcccagcccaggctcctccattcatccccataacgtcttgctccagggccctctgcccccacccagcaaatctccagctactcgcccctgccccagcctctccttccgggaaggcagaggtaccagggaggagacagctcaggttacacaggccctcagggcccctagactctccctaaggtggggctgaggtggggaatgggcctagagcggccggttgggagccgttggagctgactttgctgctcctcacccaaggctgaccccaggcccaacctaagtctacagggccccaagagccttggttttcaggtgaggtgtccatgcatggagtccaccaacagaacccgcctacaggtttaaggcttgttggggaggggacatgcaccccagggggtcttcagggcctgaacccacatctcccagggagactgaagcccccggaccctaccacctgctgggcagagatgctgcccctcctgggagccacgtgttcccagccccagtcaaaacttcgcagctggccctcccctactttggaggtctcctcgagtccctagactcctccgagaggggctagtgggagcctcaggtggctggcccctcccaccccatccagaggccaacaggttcca

SEQ ID NO: 39401 - DNA, 1180 bp, Artificial sequence
  DNA replication origin
gcttaaaaatactctcagatagggaaataggggcaggagggactggcctgcagctgcagccccctttagaggacgggggcggtgctcatggccccacagccgccaaattggctcttaaggaggtcgggggctctggtcacagctgctgagcacctgctgggtgcctggaagcacctgtgctccggggcccggtggactccaccagctctctcggcctggcctccaacccgctgcacagccgcgcacgcgttcctgccacgatcggcggctcgaggacgcctggcaaacagcacaggacctagaggccgagatcaggtcttcgtctgcctttgggtggctgcggccctgggtctcctacttcccttgggctccggggccaaatctgcctccagggaagccccgagggggtggcggcggggtggggctgcagctgccgagctggcagcaaacccccatccctgagccaggccagctgggcgggccatggtcccagatgggctgtggggctcatctctcgctgggttccctggacagtcccggggggctgggtgggtttgtggggcactggccagccggttctggtgggggttctgagctagcagctgtccctggagggtgcacctccttgcacaccttcctggcgccctggcctcctgcaaatctcaaatcccaagagggtgtatggccctttctctacggagtcgggagggcgatgggaccctctctccctcctcctactttccggcccggcaattcttccataacttcactattagttctcccacctgggggaggggggagaggaggcggctccccttggcaggagaagctccaagtgggggaggggctggctggagagggggcggagacatcaaggaatctgcagtccaggcgcagagtccggctctgagctgctttagatcccgtgtgaggcagagagtggcctctgggcagtagcgggtccccaggtgggggcttggccccaggcagtgtgctctggctctgggctcccccttgacagcttggggctctgacagcctgggggactggaggtggagactcctgagaccctgagggcttcttgggatccctggagggtcgggtggttggaggggtgggattgcgagtggcggggcagggggagaggtgggggtggggagagcactttaagcctcctagc

SEQ ID NO: 39402 - DNA, 1202 bp, Artificial sequence
  DNA replication origin
ccccttggcaggagaagctccaagtgggggaggggctggctggagagggggcggagacatcaaggaatctgcagtccaggcgcagagtccggctctgagctgctttagatcccgtgtgaggcagagagtggcctctgggcagtagcgggtccccaggtgggggcttggccccaggcagtgtgctctggctctgggctcccccttgacagcttggggctctgacagcctgggggactggaggtggagactcctgagaccctgagggcttcttgggatccctggagggtcgggtggttggaggggtgggattgcgagtggcggggcagggggagaggtgggggtggggagagcactttaagcctcctagcggccagatcaggccaagctgccaggcctccgctgtcccccggcactggccaggaggggagcgggggccggccctgagaatgcgctgtgtcagccggagctgccagcaccagcagggttaatcaccgggctcactgcttcccggcagacagctgccccgggagcaactggcaggcaggcgggcagcgcagtggacaagagaatgtggcccaggggctgggtaaagagcccacactctgcccccaccctgtgtctgctggtgcacggactgggaaggaggcagctggggcaggagctgagcgtatggagggcgggggggctgtcccagccgggctacacacagggggttggggaggtgagcagggagaggggcagctcatctctgcacacccccacccctgctgtctttgtcatggttccagtgagtcatcaccaaatggaccagcgagcctgtctccttgtctttctgagtcctgcgcagcccagccacctcttctatttacaaatggggaaactgaggccaaaaaggccagggtcaatcaagagcacacaagttagtaaagcaagaggaagtttgtccatcattcatttcttactcctatttactgggcatctttcgggcacccgcccgtgacgtagtcctcctccctgcaacaggtcagacggcaccccacccccaaacacgtcctgtcctgaatccacaggagggagctgcccagtctgggagtggaggggagggtaaaaggaggtggctcgccaggggagggccgtggaggagcctctgtcccaccaggctctggctgccctccagggacaatccaagatccagagcccct

SEQ ID NO: 39403 - DNA, 1099 bp, Artificial sequence
  DNA replication origin
aggaagcagctagtcacccggcagagatatcggcgggcaaggaggggcctcggcgagcgcttccgggtcacgccaccacagcgagtctgcgcggtgcgtgcttgccggccgtcgccgtgacgcacttccgcttccggcaaggaggttctcggaccccagcctgctggccctggggcgcggggcgtcgtgggggtcgttgtcgttgagggtcgttgccgtgtgtggcgtcttagcctggcccctgggttgtgccccacggacgcagtcgacccctctgagcgcctcgggagccccgaatagcagctgggagaaggggcgaggactgagcctcgctgcccgctgccggccgggctagagatacgggcgtgccccccattgtgcgcctcccgccctccggtcccctcaccctgcggccacctggggcgtggggcggtgctcctgcccgtgcacgtagccgctgcgagcggaggcctgctcacctggtgcctgctactcactcccccgggccggtgggcgaaggacacccgcaggaactcggcagaggagaaattcagacggctcccgagggtaggaaaagaccccggcccaccgtggaatctgaaacacccgaccactctgccatcccatgtttcaccagtcagacccccagggcagggcaggggaagcagaatgcaaactggggcaccgtttccctgaagcgtgttggccgcgtttgtcgtagtgctagaggtgcatacccttggaccccgaaaacccattcctgggaatttgctccaaggaagtaaagatgttacaaagatggacccacgaagtatggtcgttggttatgggtggggtcttgaggaaggccttgttagtagcctgaaccctgttgccaggagaagctccaaaccggtagacggagggagcagcgcggcctatgttggggtcttctctgggcgggggacatgatcctaggatgtagaactagcctcagaaaacttaagactcagtggccaggtgcggtggctcaggcctgtaatcccagcgctttgggcggaggtgggtggatcacctgaggtcaggagttcgagacccgtctggccaacatggtgaaacc

SEQ ID NO: 39404 - DNA, 1350 bp, Artificial sequence
  DNA replication origin
aggcgctcagaggggtcgactgcgtccgtggggcacaacccaggggccaggctaagacgccacacacggcaacgaccctcaacgacaacgacccccacgacgccccgcgccccagggccagcaggctggggtccgagaacctccttgccggaagcggaagtgcgtcacggcgacggccggcaagcacgcaccgcgcagactcgctgtggtggcgtgacccggaagcgctcgccgaggcccctccttgcccgccgatatctctgccgggtgactagctgcttcctttctctctcgcgcgcggtgtggtggcagcaggtgtggcgcgcggcgcgggcttcgggctcagggctggggctggggcgggagtgggggcttggacgcgggggacggggtgcggggtgctgggtgcggctggggccgtgaccctaggggccggtttgcgccgggagccggggcacggttccggccgtactcacggcgccgcgcggtgactccccaggcgcagcccagcctcgaaatgcagaacgacgccggcgagttcgtggacctgtacgtgccgcggaaatggtaagcgccccccacatgcctctcttccgtccttacctaaccaccacgtcccctcgcctgcccttgttcccccacacccctcccgtccttacctcgtcacgtccctaacttgtcctgcccccgacgttactcttttccattcatatacccccaacctccctcgtcccctctttcattcttaccgcccaagtcccctctgctcactgcgccctttctccacagctccgctagcaatcgcatcatcggtgccaaggaccacgcatccatccagatgaacgtggccgaggtgagctgggagcccgggaggcgggaaggttgtgatatatgtgcgggaaaggcaggctgtcccattgtggaggagcccctggggtgaaggtacaggcagaggctggctttgaggattggtgtttcccaaacctgggggagtggtttgtgacccttcttctctttctaggttgacaaggtcacaggcaggtttaatggccagtttaaaacttatgctatctgcggggccattcgtaggatggtgagtgtttccctgggctttgctcatcacttcgggacatcgtggactttaccgtgcgcattggagtgtgtgatggtgcctgagtagatctgctggcagagtagtttgagccagctggactgggctggccgcctgccgcttcttgagggtggaagaggggtgctctgagaagacactcaggcagcagactctgcctctcactaggaggtgcccccccgaccccgctccaccatagtcaggctgcaggctgccccggg

SEQ ID NO: 39405 - DNA, 1089 bp, Artificial sequence
  DNA replication origin
gggaggggaaccccggtagctcctgtagggaatccactctgagagcttgcgggggccaggcttagtgacggtggccacccggcctcctgggctcaagtccccttggacagcatgggcagtttcccagcacctgaatttaggcagaaggaattttccatggaaatgtctgtagctctggaagcagcagtaccttgagccccgctccccggccccgtctcccctgactccgtccccctgcaggatcgtgctcatctgtgccaagcggtccctgtgcgcggccttctcggtcctgccctatggggaaggcctgcggatcaggtgagtactcagcgcttgcctcgcatgcggtgtccatctaggcagaaggcaaggcctggtctcggccaggcccaggaggcatcagcgggcactgcgcccccaggtgcggctgcccccgggctcatgcgaggctcagcatgtcaacctccagcaaagctcctcaggaacccggggccgtttcgggtcctcactctccagaggagccggtttctgttcacgctgtcgatgtacaggtggctgggctgtcccacctcctgtggacagagccacttggtgctgtgaccatccaggcagtcgtatccgtgcgtaattcagggaaggaggaaacagctatggggtggggattatgtgtggccctggcttaaaaacagtggtggagaaacctgaccaggcgtgggcacatgtacctagtgggctagtgaaggtgggcgccaccccgggggctctaccagccagtgtctgtactggggaagcggggctcaaaaacccctccttccatgaaagcactcctgacgtgcgccttcctggtcacaccagtgccgcctttctttcccgaggggctgtgctgacattgttcccgagagcacctcgggccagcggacaggtgggctgggctgccagagcctgagttcagcgcagaccacagccccttgcctctcccatgtttgcagtgacctgagggtggacagccagaagcagaggcacccgtccggcggcgtctctgtgtcttccgagatggtctttgagctagaaggtgtggagctaggagca

SEQ ID NO: 39406 - DNA, 1324 bp, Artificial sequence
  DNA replication origin
agtgccggccccatggatggggcagggtctgtccccactcactgctgtccttagtgcctgccctcctgcctggacttcaggagtctcccaggtgtttcccataagcgaaacgtgcaggcaaatatttgttggctgaatgactgtacaacgcacttccttgaagacccctcagggcacaatgcccactgctcctcagaccctcaacactcgggaccaagcgaggccatcctgatgcggagacatgacgtggttcagtaactctcagggtcacgcaactccaagtgcagagctgggtcttgaacccaggtctgtcggggactccaaagctttgttctctcccttataccgggagccatgaatgtgtgcctgagcaccaaggcattccaaaagcacagcttaggagataaggtcccatgccagttgatacaacgttgcagtattggaaaaccactccaattgcgatgacaatgatgggcgatgtggcgtggcacgtctgaggatcctgcctgccctgcagggctgttggcccccagaagggagcagttggtggtggtgatggcggtggtggtgatggtgatggcagtggtgatggtggtggtggtgatggtggtgacggtagtggtggtgatggtggtgacagtggtgatggcggtggtggtgatgatggtgatggttatggcggtggtggtggtggtgacagtgatggtgatggtggtgatggcgatggtggtggtgacggtggtggtggtggtgacggtggtggtggtggtgatggtggtggtggtggtggttatgacggtggtgatggtggtggtggtggtgacggtgatggtggtaatggtggtggtggtgatggtgatgatggtggtgatggtgatgtgatggtggtggtggtgacggtggtgatgatggtgatggtggtggtgatggtgatggcggtggtggtggtggtgatggtggcgatggtgatgacggtggtgatggcagtggtggtgacgatggtggtgatggtgatgacggtggtgatggcggtggtggtaatggtgatggggccctctgcagggtgctgtgtggtttattaaatggagcaacttggcccccaggcttggcatggggcattctcagcgtgtcaacagtagcctttttattaagtgtcacccaatctggactccgggccaagggcaggtgtactgctgggggtcacttctgggaactctccaggctccaggccagcgccgtcctcagggtcccatgggccttcccccagcaggaccccggcttacacacaagacctggtgcactcaggccccctctctggtggagc

SEQ ID NO: 39407 - DNA, 1585 bp, Artificial sequence
  DNA replication origin
gtgggctctgggcccaggactggctgcttgttgcggttccttctcaaagggagccactgtccacaggtccaagtgcctgctgggcggctgttcccagaggcagcccctgcaggtgtgcagcaaaggggccgacacagagctcttgggtcaaggctggcacgtgctccttgcttacctggaggtcatcagagttgccccacgcccctggccttcgggcaggtggaggcattgggttcctctaaggtctttggttggggaagtttgggcccagaacacagcactctgtcctcaaagactatgacgtcacatgcaggttgcgtcacacgcaggtcgcggtgcactccatccttggaagtgttcctggccgtagccaggctgagggtgcctgcagacccaggcctgtccacaagatgtccccccacggacatgcctggccgctgctccagggagggtcagagggatgattggggcagagggatggatttgcccaaatgtggcagccaggccccatgcatttggcatggccagctccttcaggaaggcgggagagatggaacaaggtggtgactctccagggcagagcggcaaggccctaaggtgtggactccaggggaagcgggctcaccccaacgggccgagctccgcaggtgtggtgggcttttccctaaccccgggccctgttgtttgacatggaaacagctttctccctcagtcctgcatgttgagtgtccagaaccggatggtgacaccaggcagactgggtgctgtcataggccctccttccacagagttcatgcacccctgtgtgcaccaggcctggcgtggagtggagcccacttgagtggagggaggcagagcgtggcgacgcgcagggaagtgcctgtgactgagaaggcaccccctgcaggcccagagcctccatggtgacagttctgagcgcagcatgctgcccacgtgcagcacatccctgccctgtgggattgttagaaggtgcgctgtggccggcatccctgggacaggatgggacgtggcatgggctgggtgcctgcagtcctcctgccgtacccaccatgggcccaagcgccaccaccccttgccttgcccagggctgtctcctcccttccctcctccttggcccccatgtccctgttcaggtctttcctgaaccccactctgttcctggagggggaggcgtccctcctggggctctgctgccaagttcgtggtgctgaccttgtttctgagggccatggcccctccctgataggtagaccccagcgtgaggacgtccatttcaccctgcgttccctgggcctggctgctgatcgagggaagggtggctgccccggcaaaaggggctgctagctcctggcttgagagttctaggatgagttggtttcaggaaatggagagaattctgaaagtcctgaaggcagccctgatgttggtcttgtgagtgtggtggtttgacctgggctctgggaacagacttggcttggaatcccagctgcactgttcagtacctctgtgaccttgagcaggtgacatggcctctctgagcctcaatctcctctgagaagcgggt

SEQ ID NO: 39408 - DNA, 1437 bp, Artificial sequence
  DNA replication origin
ccgtggggggacatcttgtggacaggcctgggtctgcaggcaccctcagcctggctacggccaggaacacttccaaggatggagtgcaccgcgacctgcgtgtgacgcaacctgcatgtgacgtcatagtctttgaggacagagtgctgtgttctgggcccaaacttccccaaccaaagaccttagaggaacccaatgcctccacctgcccgaaggccaggggcgtggggcaactctgatgacctccaggtaagcaaggagcacgtgccagccttgacccaagagctctgtgtcggcccctttgctgcacacctgcaggggctgcctctgggaacagccgcccagcaggcacttggacctgtggacagtggctccctttgagaaggaaccgcaacaagcagccagtcctgggcccagagcccacagtcactcctggaggtgagggctgtgggaggcagggtcacccaggtcctgtggtctctgggagaaggacacagggtgtcgggcagccaggggccatctgggcagggggcacacgctggacaggcagggctcatggttggggttgccctgggatgggctgaggtggttcccagaaatggaatcaaggcagggggagcagtggagacccagggtgtgacagacccaaagataccgagctgagagtgatgtggggaagggcggggctcagcagggaagtgacagggagaggaggggtgccagagaccagtggctgtgggatgggagatgtggctgtgcaggggcctctgggaacaggtgtcagtgacagtgccaggaggaccccggcccacatgctgggtctgaggaggtgggcatggacggtgtggcccggttcaaagaatgcgaagagatgcacagggctgtccatgtgtccctgtgtcccgggcactggtaccagtggatgggggtgggggcatgtccagaacccacagggctgggggtctcaggggtaataagggctgaaccctaaaacccatttcagagcactgacaacgtggagatccagaccccgtattcaggggctgggagaattcaggggacaatgaaccctatgtgtggggggtgacagggcctgaggaaaccctcagccagcccaggaacccccagttctgtatccaggactgacaaggtcccaggtgaacccaacccctgtgtcctgggctgatgagggcccagactgaccctgacccctgtgtcctgggttgacaggggctcaggtcacctgaacctctgtccagggctgacaaggccccaggtgaacccaacccctttgtcctggcctctgtccagggctgacaaggccccaggtcacctgacccccttgtcctgggctgatgaggccccaagtaatcctgacccctagtcctgggctgatccggcccccgtccccgtccctgtaccccgcgtcctgggctg

SEQ ID NO: 39409 - DNA, 2554 bp, Artificial sequence
  DNA replication origin
gccgggcccggggctccaccggccgcggccgcggccatcctcagactgcgcccgccgccgcgaagcgccccaccccctgcccgcgcgcccgcgcgcccgccgcccattggccgcggcgcgcccacatgcaaatgtatcgccgtcgcgctctcccattggccagcgaggtgccgcgctcagggcgctcccctgggtcctagaggcggtcggacgcagcagcagggagtcgggagctgcgcgcctccccgccggttcgagtccccgtcttgggacctgcggccgcggggctctcgctttctgttccctttgctgtatggcggccttcgcggatggcctccatcgagcgcacattttaaggctccggacccagggcggcgtgggtgaggccccagcacacttccctgtccggaggtgtgtctgggcggcgcttcagcgggcgcagggcggcccctggaggagccccaccgcttcccggaagggcccgcgtgccatctggcctccttcattgacagaagggaacgagggtctgagtggagaaggcacctgcttgggatcaaagccccaggcagagtcctgcacttcctgcagtagcaaagtgaccttgagcctgccttgtgcccaggcctgtttcctctctgtgcctgggtgcccctgacttcagaacctgtgagcccgtggcaccgggatggtcagggcctgcctctggagcccgggagcctgtctgcagtctggaggggaacccgctgtatctttgtggagggactcaggaccttgcacccacctctgtgtcacctgcctgctctgtccagctttctttcatgggtttacgtatctttaaagaggggacaatgatttcagcctcagggtactgtcaggatgaaactggctcagtgagggggtcgggctgtggccggaggccaggcacatgcagtggtcagtccgcgaatgcgctgcagtacctcgcacctgcccgcatgcgcccagcctctcctgtgctgggtgctggggacccggtgggaccgacaggcacagcgctggccctaggagcacctggtgtgtggggaggcagcatgatggccaacaaggcagtgggcgagtgggcaagacagggtcttcatcaccacccctagcatgggcccctgcccttcaggcccctacccacctcccgcctgcctgctccctcctgtgggccttcacgggccaccattggggctcacgcagcatgcagcacctccatttcctttccctccgcccttccaagttggcctccaaggcctctgccaggcctaggggaaggtgggcagctgtcctgtctaggagaacgcggggctgggtggcatagcagaggggtggctgcggattctggatccacagaatggggtgctgacttgtgtgcctgggggctcccgtgagcggggagtgagtgtgtccagcgctgtagggtgctgaggctggggcaggcacacagtgggccctccatccctgctggctatcaccaggaggaggggcctgacaggggagggtgggccatacaccagcagcttgcagagaatctggtgtcagatgagaacagaaaggggcgagtgagggtggagggcaggacgcaggaggcaggaggcagctgtccgtgctggctgcagcgccgggtcctggggatcggctgtgcagtaggggggcccctagccagttcttctttgctggcgctaagctagactttgagggacaaggaggaatgctgaggaaggaacggggtctcttcctgggtctggtgaacccccttgctaggctcccgctgccagtcttctcccctccccagggtgtcgatgggtggccaaaagccaacctggcctgcgggcagtgtgtagggaacacacggcttttgtttcgtgtgattctggagaaattaaagcaacctttaacacacctggacttccctcttgggagttcagtccctctggcctctcaggacaacaggcagacatgtcacaggctgcaggtgggaggcagtgccccctgagtcaggcccgcaccccagtctggcccaggcctcacccagcccagtcgttggcccgtgtcctgccatccctgtgatgcgtggttttaaatgcccagctcaccttggtgctttggctgcagagggccctgctcatgagtttcgctccttattttctttggctctcaccctgaactctgagcaggtgtcaagcgcagggctctgtctggatgctcctgactgcaggcctggcccttgggctgacttcttagtttcccccttgccctggcacccctccgtggcccccacctttcctttctgcctgatccttgtccatttttctagagttggggtctcagcaaacttcccagaacatcctagctccttgcctacttggcacactcctgttcatccctcagaacccaaatttgggttgcaggtgccacctgccttgacctcccagggacacctgctctcctccccgtcccccaacactggccatgacttggtgccattgctcctttgcccaccgctccctgatgcccagcagaggtgtcagtg

SEQ ID NO: 39410 - DNA, 1198 bp, Artificial sequence
  DNA replication origin
ggctgagtgacccatgctggccggccggcttgggagtgtcctggccccgggcccggccccactccgagaggtccaggggcttgtctagggcacagtcctgcgtggctgcagcctctgtcctctgggcgcggcccgggcctgcaggctgtgtgtgccgccctccagacaggcctgctgcggccagagctgccctggtcccctcattctcagggccctcagagtctgagccgactggtagggagggcagcatctccccgggtgtgggctggccccttggcctgacactgcctgccctggccctagcccgcagctgctgctgggccaggagcaggtgcagtgccccctccaggcgaaggtcctgcatgcccgccagggcactgggcagccccagcagttctgtgggctcctcccaggcctctgcttctctggccttcaggtcctggagccgggggtcgctgggggctgcagcaggggccagggggctgctgtgggggctctgaaggtgcagggacagggggcggtttaggaggcagagccggtccaccttcggggagagcttcggggcctcatgggtcatggcggagggccgggaggcccgcaggaagctgtgagggaggagaagccgaatgaccatggctgtgtggagccgtgaccgtcccagcgagccctgagagggagagacgacaggcacccactccacaggcgaggaaactgaggtccagagaggtgcagcaagctgcatgggtcccatggcaggtagtggagggaggggaggctcagcccccagctctggaggccatgctgtgtggacctggccagaggtggcctgtggtctgggctccaaggtggggccagatgccgaggcctccgtgtcttcttggcagggacatcggccccctgctcctcacctggagggtcctagccacctgtccaccctccacaccctacttgttctcagacaatgtccacatcccctgcccccacgccccaggcctggccactctggaggtgtccacgtgggaactttgctccaggctgggtgcccagaaaaagccaagccagagaagttcagggctgtgagggataatcagagggactgccctgggaccaggggctgagagaagagctcatctgaggctactctgggtgagggtggggcaggcgggcacctgtccagggagaggccacgctcatacgc

SEQ ID NO: 39411 - DNA, 900 bp, Artificial sequence
  DNA replication origin
accgggggggtggtgtgtggacaggacagacgtcacagaggagcgtgcagatgactgggggggcgttgcgtggacaggacagacatcacagaggagcgtgcagatgactggggggggtgcgtggacgggacagacgtcacagaggagcgtgcagatgactggggggggtggtgcgtggacggaacagacgtcacagaggagcgtgcagatgactgggggggcgttgcgtggacgggacagacgtcacagaggagcgtgcagatgactgggggggctgcgtggacgggacagacgtcacagaggagcgtgcagatgactgggaggggggcaccgggttaggcgttgcccccagaccaaggctgcaggtgccgaatcgcgctgcccccccaggctggatggtggggacagcgtgtggcttcctggatggaacaggaccccactttagctgtttcccaccacagggacgcccagaggatcgaggagctcttctccaagaaccaccagctccgggaacagcagaagacactgaaggagaacctgcgggtgctggagaacaggtgggcctgggaggacacctcgcagcatggccaggaccggtgggctcaggagaggaggaggtgacagggctcctcggagaatgagtttgggaaactccaggataaactgaaccaggaaggtttccccactgcaggacatctcagagccttaaggaaattgcattttcaagatttctccccaaactcagtggaacatgggacacctagcccacggggtgggaagaggcctggggctctacggaatagtttgcaaagggcaggggcacttcccagcagtggggcagtgagtgtcccaggccctctgtggcttccgtgccatccctcacaccccctgcgtccccat

SEQ ID NO: 39412 - DNA, 880 bp, Artificial sequence
  DNA replication origin
ccgtggtggggacactgaaggtgaagcagcagctgggcctgaccccccgcccctctgcttgctcccccaggcctgcagaacaagcttctggaactgaactcagagaggtgccggtgagtcaggccaagcagggcccctcctcacagggaccacactggccacttcatccccctgaagccccagtgtgccagcactaccaccgtcctatggtgcagaagggaaactgaggctcagtgtgggggcggggggagtcacttgtccaaggtcacacggtgagcaggcagcgaagccagcacttgaacccagttgcgtcggcctcccaggggcggggcaagccccctactcggggcttctcccaccccaggatcatgatcagaatatcaacaatacgttcacggtgagctggggtcatgtctggtcagacactggcgggcgggcaggctccctgcgttctggcttatagacccggctatggtcctgcctgtgctgtggcactaaagtggtgcgtggacaggacagacgtcacagaggagcgtgcagatgacagggggggcggtgtgtggacaggacagacgtcacagaggagcgtgcagatgactgggggggcgttgcgtggacaggacagacgtcacagaggagcgtgcagatgactgggggggcgttgcgtggacaggacagacgtgacagaggagcgtgcagatgactgggggggcgttgcgtggacaggacagacgtcacagaggagcgtgcagatgaccgggggggtggtgtgtggacaggacagacgtcacagaggagcgtgcagatgactgggggggcgttgcgtggacaggacagacatcacagaggagcgtgcagatgactggggggggtgcgtgga

SEQ ID NO: 39413 - DNA, 1461 bp, Artificial sequence
  DNA replication origin
aaagctgtgcagacatagagacacagctacacatgcagttgcaggtacacggaaacacacacagccacagcagccccctctgcccggaagcggctcccacacgcagatgctggaaggttccaggaagaggtaggagccactctgaagaggtcacaggccccctccctccctgcctgcctcccctacccacaggtctcaggaggtccttggtaggcagtgggtatcttgtggtctcacggactaaggccagaattaaggggccgtggggcctttgcaggctgggcctggggacctgggctggagcactcatcgtcaaaccctcccagacctttccaaattcccagtggcctggagagctcccaggcagggctgggcggagtgagcctgggggcgctgtgactgtctgtctgtcctcccctgacccttccccctcctcccacagattggcctccaggcctgggaggttgggataccggtcaagtggctgggcctctgcaagccagtgtttgtggcacacaaaccgctgcagttcagacttcttcaccgggtggcttgtgcttcacgcggtcgggtgggggagtgtgtgtgtttgccgtgtgtgtgcacgcccgagccagtgtgcatgtgtgtgccgtgtgtgtgcatgatagccagtgtgcgtgtgtgtgtgccatgtgtgtgcacgcccgagccagtgtgtgtcccatgtgtgtgcacacctgagccagtgtgcatgtgtgtgtgccatgtgtgtgcacacccaagtcagtgtgcgtgagtgtgcgtgtgtgtgccgtgtatgcgtgattgccagtgtgcatgtgtgtgtgccgtgtgtgtgcatgcccaagtcagtgtgcatgtgtgtgctgtgtgtgtgtgatagccagtgtgcatgtgtgtgcacacccaagtcagtgtgcatgtgtgtatgccatgtgtgtgcacgcctgagccagtgtgcatgtgtgtggcatgtgtgcatgataggcagtgtgcatgtgtgtgtgccagagccagtgtgcatgtgtatgtgctgtgtgtgcatgctcaagccagtgtgcatgtgtgtggcatgtgtgcatgataggcagtgtgcatgtgtgtgtgccatgtgtgtgcatacccgagctagtgtgcgggtgtgtgccatgtgtgtgcatgcctgagccagtgtgcatgtgtgtttgctgtgtgtgcacacccgagccagtgtgcatgtgtgtgtgccatgtgtgtgcatctgtttttgctctgtgtgtgcgtgcccaagccagtgtgcatgtgtgtgtgctgtgtgtgtgcatacccaacctactgtggaaccactggtgcgtcacctgaacaactgtgtcggcctcctccctgcctggcctcctgctcaaccttccctgaaccccctgcctccccccatctcttccaggaccactctccatggtggccatccctgggaagctctgg

SEQ ID NO: 39414 - DNA, 1231 bp, Artificial sequence
  DNA replication origin
acggccagcccagcccaagtggatcacagagcggaacagccatggctgcatctgggttctcaaaggtcagcctggagacgcccacgtgagggtcctgtgtgcaacatcattctacagaaccgtcccgaacaggaccgcctaaccccatcccatgacgggtggaatatggtggccgcccagccccatgcccatcccagcgtggccaaaccacccaagccaggcttgagggtgcattgaacacagaaagaggcacttgccctggggccctggaagtcaggtggtgggcgtctttgggggtggggctggggtgcctctaactgagggtggcaggccttggaccccgagagaggccttgggaccccgagagaggccatggggcctggggtggggacggggactggggtggggatggcgactggggtggggacggggactggggtggggatggggcccggagtggggatggggcccggggtggggatggggaccggggtggggatggggaccggggtggggatggtgactggagccacttggaaggagggtgtcctaactcttgccgagcccttgcacctgtgatcaagcattagtgccgagcctggtggggcagcaaggggtgtgggacagagtgtggcctgtgttcgggggtggctgcagcgtccccaggggcccctgacagggctagtggggctgcatggagggcggagcaccaggatgctgggctgcagaggctcagtccacagacccgcctgggctttggggcctccagccaccctcggagggagtgggggtgacagttggcggctctgtgttgggtgggtgagggatcctgggactagggagacttggggctttcctggtgggaggctgggagggatgtctttgctggtgaaggggaccaacaggacgctgagctccagaggtggggacagcatggagcctgccggaagcaggtcacgtggccagcatcagtggttctgaccctgtttcccgaactccgtacacactgagaccttcctgacagcccacggaatcttgaccacaccacgaagacctcgctccagatggggaaactgaggctcaaacagatcaagcctcccgtctcagtcacccagtgggaagtgggatctgggttgtgcccagctcctggggctgtgggtctgcatgctctgcctgtgtggactggggcgtcctccccatggctctggtgcacccagctgcactggctttt

SEQ ID NO: 39415 - DNA, 867 bp, Artificial sequence
  DNA replication origin
ctggggcgtcctccccatggctctggtgcacccagctgcactggcttttcctggccaagggggcccctgggaggaagatgtcagagccggggcctccctgggctcaagcagctgaggagggccaggagggggcggagctgcagctcctgaaactccccccagacccgcccaacaggccactcttccctggcccccagcatctgccatgtgggctgggccgacgcccataaaggagccgcccaagggagcccatggtgcctgcgggcctgggagaggtctctggggtccacacgagaggtgggcttccttcccagtgaagtcactgtggtgcagaggctgggacggagcctctgctgtgcctcccactcacaggatcctttctgtgcccgaaaccacctgcagcactcctagagtgctggagagctccggggaagggatgggaggtggagggaagttgcaagccttggtgcttttggggagaagaaatgaaccaggattgtagaaattcacccagacccgcacccgcagccttgagccaggggtcagcagcggggtcagtggggctggctttttcttcccgagtcagccttctctgggtttgttgggcttgccaagggcagctaggggtgctggggctgggggaactcggaaggagggtctcctccaggcctgggtgggggctgcagtggggctgtgatgggggagcaagcctaccggggcggggaggggctgggctgaggctcatggggggcttcacagggctggggtgagagagctgagctctggtccagggtcaccctcagccactcctcccactcccagaccctcccactcgggagtccaggctggagggtctctgtgggtgct

SEQ ID NO: 39416 - DNA, 1125 bp, Artificial sequence
  DNA replication origin
cgatgtaaacccattttgagggcgagcacatggattctcagagacgctgaatcactcgctccagggcatgcggccactggggctgagagccaggggtgagtccaggccagtctgctcatggtcagccctgggtgatggtcagtcagggtcagggtcggtcggggtcacaaccagccaaggtcatagtcagggtcatggccagccaggatcagggttggttggggtcacggtcagtcagggtcttggtcagggtcatggtcagctggctggggttgaagcaagactttcaggttctctctggtgtgctgcaggcccccaggtgggttaggaagccccaccgtggcagagagacgtccctggaccctggggtccaatgcgcttgccgtgcaggtggaggaactgatgcccggagcagagatgaccctgcctctcaccaagtccacactgtgctgtcgtagtggggctggtgggaccttggtaacgctggggccccccatgccctgcggattcctgcatttgtgggggccagaggggaaagtggggctagtagaacagcttggacacaaggacactgcccaggaataaccacatgtctaccgtggaagattttaaatcctgggaaataaatacacaccaccaatgaagaaacagtcacccacagccggccacccccagttatactactactatttccattatatgtttccatgtgtatacatttgtctatgtatctatgtgtctatctgccaatcatctatctattgttacggttatagttattttctttttcctccttttacaaaaatgggggggtcatcttgagcttctccataaactgctttcttcactttcacaatatttcatgggtgcattctctcatttttgaatttcacgctatcatttttaaagctgcctaaagtcgcatgggatcaatgagctgctctggttgggcactgggctgttttcccttttatctgggggcctcataaacaacccggaatgaacatcttcgtatggacatctctaggcacatctcatccgaggttatgtcttgggaatgctccccagaagtcgaacctgtgggggctatgccacatccatttctttcttcttaaatgagacctt

SEQ ID NO: 39417 - DNA, 1169 bp, Artificial sequence
  DNA replication origin
cccaggccaggccacgctggctcaagcagcagctctacgcagcctcgctgtgtggccttgagcaggccactaccttctctgtgcctcgtgtgggtaaaacagccctgggagtgtcctgggcagctcagcgtaaggcgtgagtagaagaggcgtggagcaggatcccacggccctgcctgtcactgcggagaatgaaagccccccaagcccatcagtccgggggctccatggcagagccccgtttctgggtgatctgctgaggaaacctcctgtctcactgctccatggagaaacctgctgccaggtgagaccggcacccaacagcggactctcaggccagaaggacagatgtcctgctgggaacctcagccacctcgcggtgaagctgggggcgctgggatgatgccacagctcgagggccctcgcggtgaggctgggggtgctgggatgatgccgcggctcgagggcccccgccgttagaattctgtttagaaggagaatgtgttcctgtattactcgtgtcattaaaaatcagtttaggagcccaggcgccgtggctcatgcctgtaaccacagcactttgggaggccgaggcagacggattgcttgagctcaggagttcaagagcagcctgggcaacgtggcagaaccccatctctacaaaaaaatacaaaagaatgatctgggcatggtggtgtgcacgtgtggccgcagctacagctgtagacagcaggatgggcacatgtggcccgggatgaacccaagattccttcctcagtgccagcagccacagttgccaagaggctggagaaggggctacacttagtgggacattctctctgaaacccccgaggcatgctggggatcacttttacagccatgagtaatatcaaactctgagtgacgggtctactgatcagccccagccctacagccccagaagctggccaggctgctcccttcctccaccctccttctcctgccccaggcatgggggacgaggcccagcctggggactggtggctggcaggtatgggagtggcttctccatccacctctcccatcccctggggcaccaagccctttgcacggttagctcctgaatcctcatcccaaccctgagatgaaggggctggttcatccccttccccgctgcacagatgaggcat

SEQ ID NO: 39418 - DNA, 2809 bp, Artificial sequence
  DNA replication origin
cagcatgcctcgggggtttcagagagaatgtcccactaagtgtagccccttctccagcctcttggcaactgtggctgctggcactgaggaaggaatcttgggttcatcccgggccacatgtgcccatcctgctgtctacagctgtagctgcggccacacgtgcacaccaccatgcccagatcattcttttgtatttttttgtagagatggggttctgccacgttgcccaggctgctcttgaactcctgagctcaagcaatccgtctgcctcggcctcccaaagtgctgtggttacaggcatgagccacggcgcctgggctcctaaactgatttttaatgacacgagtaatacaggaacacattctccttctaaacagaattctaacggcgggggccctcgagccgcggcatcatcccagcacccccagcctcaccgcgagggccctcgagctgtggcatcatcccagcgcccccagcttcaccgcgaggtggctgaggttcccagcaggacatctgtccttctggcctgagagtccgctgttgggtgccggtctcacctggcagcaggtttctccatggagcagtgagacaggaggtttcctcagcagatcacccagaaacggggctctgccatggagcccccggactgatgggcttggggggctttcattctccgcagtgacaggcagggccgtgggatcctgctccacgcctcttctactcacgccttacgctgagctgcccaggacactcccagggctgttttacccacacgaggcacagagaaggtagtggcctgctcaaggccacacagcgaggctgcgtagagctgctgcttgagccagcgtggcctggcctgggctccaaacggcctgcacctgcccttccctgaggacggtgttagatgtaggcacgccactcacccatccaggtctcacctcctggtgtttggaggaccctaggtggggtggggcccgggggtctgtgttcacactgcccagcagcaggggaggcacacagtgggctctggactgtgggcacttgccagctatacttggggacagagtgggtcctcctcggcaccctccatcatgtattcacacacgggtcattcgctcgttcacacgctggctcctctgcccagcatgtgccatttgctcagctcagcgtgggcggcagaggggcacaggtggcgagggcagggcgggggccgggggccacaggtggtgagggcagggcagggcggcagaggggcacaggtggcgagggcggggcgggggcggcagaggggcacaggtgctgagggcagggcgggggcggcagaggggcacaggtggcgagggcggggtgggggcggcagaggggcacaggtggtgagggcggggtgggggcggcagaggggcacaggtggtgagggcagggcgggggcccggggcctgctctccagagccacacaaacctggccagatggctcctgactgggacctcccagggcacatcctcctgtccctccttctctgtgctcgctgccaaccaccacccaaagcagcagccccaggagggaccagggccccctcttatcagcagcctcccccaggcctggccgcagcgttctccctggaaaacctgagtctccactccctgctgctggctcccaccaggccccttcctcaccaggggcatcagcagacgcctccgcctggcagcagacaccggcacgaccctcaccccgcctgggtggccaagctgctctggggagctggctggaagactacgtggaaaccccaccccatctatcactgagccggggtctgcctgtgggcctgggggctctgacggggaaggctcagcttctctgcatgctgactcagcccttcatctgtggggctggaacgacagccacaggggtgtggctggccagggttgagatggggagcaaagcccctgtccccattccctatcggtttcatggaggagactgaggtgtggtgtcccagaccctcccctcccctcctcctgtcccctggggaggtcaccaggggcagcgtcctgcccctgcacccagctctctgttcccacccataccttggagccatgcgcagcctcccgcccacccatgaagatgtagccctggcctcaacccagcccgggtcaccgcacatttgtccatgtggtcgttcattcgtatagcaactacgaataatcctctatagcctggcgcgccctcgcctgtgggcttggaaatggggaatcggggtcccgtggagccatctcctccggctcagtggccccaagtcaggctggctggtccctgctgagctgtggggccggcgtaaagctcacgtggactgtgaatacctgggtcaaacggaagaacaactcgccacgtgttatgctgataacgggctgagctgatgacatttccgacgcgctgggttagcgtacatcgttaaaataatctgtttctttttccttttcttagcacggccactagcacgtttgaagtcacacacagggtagcgccggcctggacagaggcggacatctgacaagcgggccaatgaggatgacatctcggacggtagtcactgctacaacgaaagtcagtgccccaccttgcccagccgcagggtggaccctaagcagctcgccccacccagccggtcctgcctgctctgtccctcccaaccctgcaatgggcagatttctggggggcagtctctgacccactgtggcccaggtacagaaccccgccttcaagtctctgggcctcagttttctcatctgtgtgttggggacaaagacgccg

SEQ ID NO: 39419 - DNA, 968 bp, Artificial sequence
  DNA replication origin
gaagaacaactcgccacgtgttatgctgataacgggctgagctgatgacatttccgacgcgctgggttagcgtacatcgttaaaataatctgtttctttttccttttcttagcacggccactagcacgtttgaagtcacacacagggtagcgccggcctggacagaggcggacatctgacaagcgggccaatgaggatgacatctcggacggtagtcactgctacaacgaaagtcagtgccccaccttgcccagccgcagggtggaccctaagcagctcgccccacccagccggtcctgcctgctctgtccctcccaaccctgcaatgggcagatttctggggggcagtctctgacccactgtggcccaggtacagaaccccgccttcaagtctctgggcctcagttttctcatctgtgtgttggggacaaagacgccgcccggccatctcaccaggctgccgagcagcgtggaagagctctggctgtgaggtcagaggccctttgtttgaaaggtccaggcccataggggtgcatgggttgtggtcttgggtgatattagaaaagctaagtcctctctcctgggcagatgacaccagagggagggtgcgaaggtggtggagaggccggtggcctggtgtgggctgtcataggaaagtgccgcagaccaggtggccgaaacagtggaaatccgttgtcttgcagttccagagttcacaagtccgtgtaatggaggcatcggccggcctggttccttgagagggggtgagggatctgcttcccacttccggcttctggggctgtgccgcagtttctgctgctcttctgcttgtggaagcatcatggtctctgtcttcacctcacacctgctccctgtgcccgtctgtgcccaatttccccttttctcagggcccagacatcttagataagggctcaccccaacctagcatgacctcatcttagccaatt

SEQ ID NO: 39420 - DNA, 1920 bp, Artificial sequence
  DNA replication origin
ccagctgacctagagcagccaccaagggagctgaagccaatgccttcccccaggtcagacggggtcccgctccgagcctcagctgtggctcttcagcaccccaggcccacctgctccccaccccagcccctcctccacctgggggaggcctggtggggcccaggcctgtggggtcctatttggccggtgccatcttggcatcatcccccaacacacggtggaatcaggggtctcacctgggccatgggggcctgggtggtgacattctgatcagagcaggtggaggcagtgcaggctgtcctaggccccccaccgcgcccgggcctcacagcctcctgaaggatgagcgcatgcatctggggagggtgggcctttgtgaggggagagagaggagagagaagagagagaaggagagagggagagaggaagagagggagagagagggagagagggagggaaacagagagggagggaaaaggagtgcgagagagacagagaggcagggaggggggagggagagagggagggaggatgacaggaagggagagaaggaggagagggaaagagagggaaagagagagggagggggaagaagagggaaagtggggagggagagagagggagaggaagagagagggggagaggagggagagagagggagggatggagaagagagagggagagggagagagaaggagggaaagggggagggagagagaaagagagagaggagggagaaggagagggagagaggggggagagagataggggaggaagagagagggagagggggagggagagagggagggaaagggggagggagagagaaagagaaagagggagaggagggagaagggggggagagagatgggggagggagagagagggagagaggggagagagggagggtgagagtggggagagggagaggggaagaaagagagaaggagagcggggagagagagggagaagggggaggaagagagggagaaggagagagagaaggagggagagagggagagggagagaaagagaaagggaaggagagagggagggaaggaaagagggagggagagaaggaagcagagagggaaggagagagggaaagagagagggagggagagggagagagaaagagatggagagagagagagacagagagagatacatggagagacaaagagcggaggagggcagaggagagcggcctgcctaccttgaggagggcagagggtggagactaatttgcaccttagtcgtgccctcaggctgtccctgtgagaatgccagggtggtcctagcacccaacaccccagcatggcaggcccaggtgtctctcgggctcaggtttgcctcaggcccccctggctctaggaagcccccagccctcctcagtccttctcctcagccttcgctgtgcccaggttgtgtgcctgggaggtgggtgtccgtgttattctagggatgctgctgtcctttgggggtgacttcttactgcctccacttttcaaagcaggaaactgaggttcagagaggttcagggcctgcctgaggccacacagcaattaccagcagaatggtgcaggctctggagcctctttggatctccacccagatcaccctctggggcctcgggcgggcggggctcctccgtaggtccctgtgatgcaaacgcctggggaggaaacgggaccattttccaggcacgggtcagggtgccggggaggcaggctgggcgggatgtgctgggagctggaaaggccccgggttgggtcggagtcagggcagatctgggtgtggctggggctgcggaggaagtctaagggagcagggagccctttattgcactgcctcggtgacatttcacctgccctgtgctaagtggggataactggtcacccgcctggctgtgctcacacc

SEQ ID NO: 39421 - DNA, 1342 bp, Artificial sequence
  DNA replication origin
tgggagctggaaaggccccgggttgggtcggagtcagggcagatctgggtgtggctggggctgcggaggaagtctaagggagcagggagccctttattgcactgcctcggtgacatttcacctgccctgtgctaagtggggataactggtcacccgcctggctgtgctcacaccctcaggccagcccacggcagccccatgtggtccctggcccacggactggctgcccttccctggggcttggccactgaggcccttgcaggagccctcgaatgggacccccggtggggactgtgtggtcccaactgcccaatggggctctatggagcacctgctgtatgccaggccctgtacaggccccttcgtgtggtaatgaacatggtctgcacgggactcatcctcctggggctgggattcagtgacaactgcaaactgccagcgacaccaatagctaaggagtcgtgagggtggctgagctccgggaggggcgctgagggccacgcggacccacattggcctggaaggatgatgggacccacggggtgggggacacagccaggcagagggcgcccaggtgggagaagtgtggagccctggcctgggcatgtgagggtggggaggtggggggtgagctcgggggttttgtgtgaagcaggtgggcagagcctcgagggccactggggcgggagtcttggaggccctgaggagccctggggactttgtgggaagggagtgggcagatggcagcgtggaattggtggggagagaaggacaccgccaaggttgcccagacgggtttgcagaccccagggcaggggggtggggtcaagtgaaggaactgtcaccctctctggaggcaggtgcggctgacattggctgcctggggacaccaaggacagccccaaggtcctatggggtcacatagaagtcctgctgcctgagtggggagcgaggtggaggctgatggcagggacctcccgtgggcctgggggccaggacagaggctgccctgtaatgattcctgaccttccctgagcactagccatcagtggttccggggtagaccctgctttttttatttttccttttttttgggtctgtagctggatttaactgtaaagagcaataaattacaaatctggaaaaacatcccttgtccccacaaaggacacagctgtccccaaatgacaaatggctctgaattaacattatttagtatttataacttccgccggacagaacttacagatgttactggcaaatcctgcctgcctttggggtatttttagagcctattgtccatccttacgaggttcctctaacctcgtctctaccaaggagg

SEQ ID NO: 39422 - DNA, 1212 bp, Artificial sequence
  DNA replication origin
cagatgaagcaggggcagcgttcccagagcctttggcaactgcctgcagctgtggctgggggttgagggggccttgagtttgggggctggctggtactcagggctgcagggaggcccccactctcccactcaggccttcgacaggacggcctgtgcccttggcagcagcctgggggaagggtaggcaggagatggtcagcaaggccggccctcatctgatcatagagggcagtaacagatggggaaaccgaggcaggctataacagatggggaaaccgaggctggctgtttctgcccatggcagtaacagacggggaaaccgaggcaggctgtaacagacggggaagccgaggctggctgtgtctgctcatagagggctgtaacagatggggaaaccgaggcaggctgtaacagacggggaagccgaggctggctgtgtctgctcatggcagtaacagatggggaaaccgaggcgggctgtaacagacggggaagccgaggctggctgtgtctgctcatagagggctgtaacagatggggaaaccgaggcaggctgtaacagacggggaagccgaggctggctgtgtctgttcatagagggctgtaacagatggggaaaccgaggtgggctgtaacagacaggaaaactgaggctggctgtgtctgctcacgtaagtaacagacacagacggggaagccgaggctggctgtgtctgctcagccctcgtccaggatggattcttttcccctagtgtggctggctcacttgtgcctgctgtctggctctgtcctggctagagaatctgggggcatggctttgagtgtggggggcccattctcatgggctgcgtcctgtgcctgaggcacactgatggtctggccctggctgccgccgggagggcaggagagagctcctgcagagccaccactgtgatcctggcaagagaggccggggacctggaccaggcaggggctgtgcaacctgagggaaggggaccgatggggtcagggtaggggctgggggtagaaacagcagccccccaggagaaccaggtctggggacaagtggctgggaagggtggtgccaccagcagagctgtgctctgagattcgggaaagggcttcaagtctgaggtgcctctggggccctgggctggagctcccgagctcccaaacaccacctccctccaagcaccaacttgtgcggccagt

SEQ ID NO: 39423 - DNA, 1486 bp, Artificial sequence
  DNA replication origin
ctgcctgtcccctcagtgtccgacttcttggaggagttcccgggtgagggtcgtgagtgtgtcaactgcggggccctgtccacaccgctgtggcgccgagacggcaccggccactacctgtgcaatgcctgcggcctctaccacaagatgaatggcgtcaaccggccgctcgttcggcctcagaagcgcctggtgagttcgggctgggcagaggggcgcctgggcgcagtgctcccccgaggggacctcttgcaatccacccaggtgacaccagagcccctggggtagggggtagggagtgtcccaaaaacagcctgggtgcccgccccggtgggtcaggtcaggccggctcaggtcttctttgagagcgctcagggcagggcaggggatcccagtggggatgccaggggccaccagctcatagcgcccagccctggagcgctctgggggccaggagcccaggctctggagcaacggtgtcagccaggctcagctgagtgctgggtccaagaaggcctgctgccaggagccaggagctcagccctacgagtcggtggtggctggctgtggcctggccctgtctcggaggcctcaaggtgaccctacctgggatgaggcttgagggaaggtggctgctggatacttgattgaagggccttgaaatctgaaactggagagtctttgggtctgtagtcccctcggggagcactttctacccatatttcagggaccgcagggacaccaggtttatgcctgtcctctgcctcatgggctaaacttgttttcacttttggttcttcctggcttgtggctgagcagggagtgggggactccggagcctggacttttgccccaggcagggcacagtccccagaggctggaagaggctgaaagttgctttgttctatacgtttccccaggcaaacctttactttcgagtaattgtacaaataaggatttggggtgttgatgtcgtttgcaagttatctaaaattggggaggccacagtggcacctgggtcagaaggctgagcaagggtatgttcctgggcaccaagtcctcctccgctggtggtgtggactccgtgcggggtcgatcagccagctcccgccgtcaccctgggtggaggccagccctcctgccgctgtccttgccgggtggctgttctagatgcctggattcgcgtgctatgccggtgcagctctgaacatccctcagttacaggctgaggggaaatcctggggccctgggctgtgggggaccaggacctgagcgtgggaggtcccagtggagcaggtggtgggaagcaggaccacaggccgggggcggccgtcacttctcttccttggagctggcctagggcctggggctctgcaggcccagcctcctcccatgcctgcctctcggagggaaggctcctaggagtccatccccctcttggcttgtgtgccgctgtgactctgcctgtgctcccaggtgtgctgtt

SEQ ID NO: 39424 - DNA, 1206 bp, Artificial sequence
  DNA replication origin
cttttttctttcttccttcctttctttctttctttctttctttccttccttccttccttccttccttccttccttccttccttctttctttctttctttctttctttctttctttctttcttttctttctttctttctttctttctttctcggagcacaccgggtggacccaggcgtggtggccatgaaagttcttttttctttcttccttccttccttccttccttccttccttcctttctttctttctttctttctttctttctttctttctttctttctttctttcctccctccctccctccctccctccctccctcccttccttccttttgcggagtctcgctctgtctcccaggctggagtgcagcggcgcgatctcagctcaccgcctcccaggttcaagcgattctcctgcctcagcttcctgagtagctaggactacaggcacccgccaccacacccggctaatttttgtatttttagtagagacggggtttcaccatgttggtcaggctggtctcatcgagctcctgacctcagatgatccgcccgcctcagcctcccaaagtgctgggattacaggcgggagccaccgcatgaaagttcttccttgcagaaacgggccctcaactcctgtcagtcagggctcggagaggacgctggtgaagggtgaagacctgggaaggcaggaaggcggcgatgtggggccgtcggggtgggtgtcactggatcccccccacgggggtctggacagccggcgctgtccgtctgggaagagctggggtgccccacatgcgcccttattcctggcctttcctcttcgcccacagcagataaggattcagggtgcttgtggaggcgtccagggtccctgcgtctgggaaggcagcaggctgaagcccctggtctgtggtggacttgggaccccacagacggttccgcagcaggttcaggcctgtgcaggagagggtgcagcgcggcaggctggggtgggggtcggctgccattggggtagggagctaggcgaccttccgttacccctttaccagctcccagcccctcctcgccagcttcccaccagatgctccctcctttcctgtcctcagaagcctggttgctgcttgccctgtgtggactcccctgccttctgctctcccggcactctgggtctccgcgagggtctctctttgaccccacacgtgc

SEQ ID NO: 39425 - DNA, 727 bp, Artificial sequence
  DNA replication origin
actgggtactaagggcgtctgacccgggatgggcatgcagcaggcattgggctaatgctgtctgagataaaacccagtgcagggatggaggctctgagctgtgtgcccagggccctgagagccggggagccaggggaagtgacaaagaccaggaaggaatttctggccctgccatgggtgacccctctctcctgaaggcttccctggttcactgggacccagggacctgccatggctggcctgggaagacacacctctaaggcggggaccccacccccagtgagataagagggtgggcatgttaaccccctggtgaccatacagagttaagttccatgagtcctgggctgtgaggggcttctgggggcctgagtggcctggggtgcggctgggctgagagggggcaggtgttggggggtggctggggtgagagggggcaggtgttggggggtggctggggtgagagggggcaggtgtttgggtggggctggggtgagagggggcaggtgttgggggggctggcattggggttgggggaggaaggctcaaaccatcaggctctgggtttcgtttcctgctgtcattttcctagcagtgcccacataacccccatcctgcccgcccccagcttgggaacccttaactcagacatacttatcaagggaaagaaaacagtctcattgttcaggaggataaggaccagctcccaggagacgcctcagacacg

SEQ ID NO: 39426 - DNA, 934 bp, Artificial sequence
  DNA replication origin
aggctctgggtttcgtttcctgctgtcattttcctagcagtgcccacataacccccatcctgcccgcccccagcttgggaacccttaactcagacatacttatcaagggaaagaaaacagtctcattgttcaggaggataaggaccagctcccaggagacgcctcagacacggcccctgtgggtggagtcctgggtacatggcctcccccaggggccttgttctctgcccaggaacggccccagggagggcccttcccagaagcagtcctgggcagggcccccttgaggagcagccctggcaggtgggtcctcgccttgtacgctgcctgcaggtgctggatgctccacatgtgggcaccggggatggtcccacttgaggctttgagctccggcgaggccaccctctgtccagccagggggagggtgcctctgagaagggggctgtcagagttgcctgaggagggggctgggatgacccctatcaatcccagtcctggggttccttggctcttgtccctccctgcaagtggggaggccatgagaagttgtggggaaaggccccagagaccccagggcagggaaggaggcctgggggctgtgctggggcctggaagggggaggccttgtgctgctccctgtggtctgacgggcaggaggttagagggaggggcaggcctgcttccagcagggtggtcagtgcagggcagtcagcgcagggcggaggtctgttttctccttggttatttcaggtaaaccgcatgccccgggcccccagagtgggagaaaagccagttcatggccctctccccaccttcagcactgcccctccccccagtctccaccctggcagggctgtggggcccggggcatcagctgagcccactgggcccacagcaccctcaggacctcgccaccccttgggacccacagggt

SEQ ID NO: 39427 - DNA, 1141 bp, Artificial sequence
  DNA replication origin
cctgcaagagaagggcctgcaaatagaaaagggggcagtgaggacgcctggcacagattagaggctcaaagttggctccaggtaggcagagaggaaggagagagggagggagacaggagcgtaagtgcaggcggtgggtccccaggtcatacccttcagaagagcagagtagtgtgagggtgggagtcgggctcacagctgaagtggggagcaggcacagagaggaggttgcttaccagccgcaggccctaaaacccatctggagtttcaagacacacgtcttctcactggctgggcatcccctcctccagagctctctggggccactgtcctgggcactgcacctgcacgcaggcattccttccagccttcctctggggtgggggttcagagtcacacagctctccaggctacgctgctccccccacctcaggactcagtttccccagaggtgacaaaaaggttggaatgggccagtttctgtgatcactctgtgtccagagctccctgtggcatgggaaggaacaggcaggggcgctgggcacagcaggagcaagggggacagggccagtgtgagggtgaggggcgttgtattcgtcagggttctctagagggacagaactcacaggacagatgtatatataaaggcggctttattaaggagtattaactcatgtgatcacaaggtctcataataggccgtctgcaggctgaggagcaagaagagccagtctgagccccaaagctgaagaacttggagtccaatgttcgagggcaggaagcatccagcacagagaaagctgtaggctgggaggctaggccagtctagccttttcacgtttttctgcctgctttatattctagcagagctggcagctgattagatggtgcccacccagattaaggatgggtctgcctttcccagccactgactcaaatgttaatcttctttggcaacacactcacagacacacccaggatcgatactttgcatccttcagtccaatcaagttgacactcagtattaaccatcacaggaggggaagggcagggcaggtgccaggggcgggataagggggcagcgtgagggtgagggtgaggggtgggcagggcaggtcaaggaggcagggcaagtgtgagg

SEQ ID NO: 39428 - DNA, 956 bp, Artificial sequence
  DNA replication origin
ccggagagctgcagggaacctcagaagactcaggcctccacctacagcaggaggggcttgggagaggggccatctcctccatctgcagaaatgacagatagattccagggctgcaggaacccctgtgccacgagagaaagaaacttggcactttggggaagaaagaacagaggctggagcagtgaggccatcagggtggaggcccgccccgcacagtggccactctccctgcaggcctccaggcctccgctactgctgtgccttttccaggaaaactcctactcagcctctgaagcacagcacagaagcccatttcccttgggaagctcctctagatcccccccgccatgtcacactgggaaagaatccccatccacaccacagcaggggcacagtgggcacctggcagggccagggagaggctcccctgggagcctggtgggggtggggtgggtgggtgagggttcagggggccttcctgcaagagaagggcctgcaaatagaaaagggggcagtgaggacgcctggcacagattagaggctcaaagttggctccaggtaggcagagaggaaggagagagggagggagacaggagcgtaagtgcaggcggtgggtccccaggtcatacccttcagaagagcagagtagtgtgagggtgggagtcgggctcacagctgaagtggggagcaggcacagagaggaggttgcttaccagccgcaggccctaaaacccatctggagtttcaagacacacgtcttctcactggctgggcatcccctcctccagagctctctggggccactgtcctgggcactgcacctgcacgcaggcattccttccagccttcctctggggtgggggttcagagtcacacagctctccaggctacgctgctccccccacctcaggactcagtttccccagaggtgacaaaaaggttggaatgggccagtt

SEQ ID NO: 39429 - DNA, 1092 bp, Artificial sequence
  DNA replication origin
gggtgggtgttgggatgggtctgtgttggggatgggtgcgtgttggggatgggtgggtgtttggatggttgggtgttggggatgggtgggtgttggggtgggtgggtgttgggatgggtccgtgttggggatgggtgcgtgttggggtgggtgggtgttggggtgggtgggtgttgggatgggtgggtgctggggatgggcgggtccgtgttgggatgggtgggtggtggggatgggtgggtgttggggtgcatgggtgttggggtgggtgggtgttgggatgggtgggtgttggggatgggtgagtgttgcattgagtgggtgttgggatgggtctatgttggggtgggtgggtgttggggtgggtcggtgttgggatggttgggtgttggggtgggtgggtgttgggatgggtgggtgttggggtgggtgggtgttggggtgggtgggtgttgggatgggtgggtgttggggtgggtccgtgttggggtgggtgggtgttggggtgggtaagtgttggggatgggtggttgttggggttggtccgtgttggcaatgggtgggtgagttttggggatgggtgggtgttggggtgggtcggtgttgggatgggtcagtattgggatggccgctggagggtgggggcagctgggacctaccttggctgacccctccccagaccctgacagtctgagagaggtgggcttggcatgcagcgggcagcagaggagagcagttagggaagtgaggctggggaaacagggagggagagagacagctgcgatgtcattacaagtcagtcaccaacagtttccaggtagggaaggcatctctttatggcagcaaaggtgccaggaaggtgggctggggtcttccagcagcttccagagctgagagcagctgctcaggggtctcaagtgagtgtggtgggctaggccacccacggttatgctgcccattccatccccctgcctggggaagggcagggcaggaacgaaggggggtccttggtctcggcatggggcagggacccccgatgtgggagcaatggacacatcccagtcctctctccgtctctgccttgtcaagcag

SEQ ID NO: 39430 - DNA, 1158 bp, Artificial sequence
  DNA replication origin
gacagtctgagagaggtgggcttggcatgcagcgggcagcagaggagagcagttagggaagtgaggctggggaaacagggagggagagagacagctgcgatgtcattacaagtcagtcaccaacagtttccaggtagggaaggcatctctttatggcagcaaaggtgccaggaaggtgggctggggtcttccagcagcttccagagctgagagcagctgctcaggggtctcaagtgagtgtggtgggctaggccacccacggttatgctgcccattccatccccctgcctggggaagggcagggcaggaacgaaggggggtccttggtctcggcatggggcagggacccccgatgtgggagcaatggacacatcccagtcctctctccgtctctgccttgtcaagcaggaagccttcttggggccatgggtccctaatgcttttctacgcccagctcaggtcctggggatcaaggagccgcaggctgggatgggcgagcctctgcaggaaggtcctggtttatttttgcggtcgctgtgcaggtcaagagtgatgctgcttcacctcttgtggccaccatggtgggttcctttagaaagatttatttaaggacgtcaaagaaactgagcagcagctgcctctgagaacctggcgtagggaggtctcatcttcctggggttatacccgttcaaacgcagagacagagaagaaacaggaagaactgatcgtgcacaatagattcccccaagttaaaggtgcggggatctagagaggagcgttcagtaagccccgcacgggcgtgctcagctctgtcccgcatcagggagccaggccaggaaccgaaatcgggatgtgggccgacgcttaacctggacagttgtccccttggcgtagaagacaccagcacaccccctccactttggacagatgccgtgaccagcccggagccccagcagctccattcacaaggtgcttgggaaaataaatttaggtgtctccattcgtaactcagcaatgtgattgagcgtctgtgggagaagccttattcctgcaacggctgtgtgtgtgtgatgggccggagcccgggggagtcaggagctcagactcaagtgaagctcagagtgaacaggaagggtcacagccgcaccgtcccccaac

SEQ ID NO: 39431 - DNA, 1603 bp, Artificial sequence
  DNA replication origin
gttcagtaagccccgcacgggcgtgctcagctctgtcccgcatcagggagccaggccaggaaccgaaatcgggatgtgggccgacgcttaacctggacagttgtccccttggcgtagaagacaccagcacaccccctccactttggacagatgccgtgaccagcccggagccccagcagctccattcacaaggtgcttgggaaaataaatttaggtgtctccattcgtaactcagcaatgtgattgagcgtctgtgggagaagccttattcctgcaacggctgtgtgtgtgtgatgggccggagcccgggggagtcaggagctcagactcaagtgaagctcagagtgaacaggaagggtcacagccgcaccgtcccccaacccccaggcggtcagaatccagagcgtgggcccagggctgcccctgcccgtcggtccccggagaaaacgcccggtgtgtgcggagcttcaccaccagggggagtccgaggccgtgtccaacgtgggtgtgcgggagggcggggggagggtgtgagccagcgtgtctgtgtgtccatgagtgtgagggtgtgtgcaggcgtgtcttactgtgtatgtgtgggtgtgagggtgtctgtgagcctgtgtgcgtgtgcgggtgtgtgcaggcatgtcttactgtatacgtgtagttgtgagggtgtctctgtgagcgtgtctgtgcatgtgaaggtgtgtccatgcgtgtgagggcgtgtgcaggggtgtatatgtgtgagtgtgagggtgtatttgtgtgtcttactgtatatgtgtgtgagggtgtgagccagcgtgtgtgtccatgcgtgtgaaggtgtgtgcaggcatgtcttactgtgtatgtgtgggtgtgagggtgtctgtgaacttgtgtcatacatatgtccatacgtgtgagggtgtgtgcaggcctggcctcctgcactagtgtgggtgtttgtgtgtgcaggtgagagggtgtctgcctctgctgtcgtgggttgggattcgtgtgtgcaggtgagtgggtgtctgcgtgtactgctagtgtgggtgttcgtgtgtgtgtgtgagcgggtgtctgcgtgtactgctagtgtgggtgttcatgtgtgcgggtgagcgtgtgtctgcgtgtactgtcgtgggttgggatttgtgtgtgcgggtgagtgtgtgtctacatgtactgctagtgtgggtgttcgtgtgtgcgagtgagagagtgtctgcgtgtactgctagtgtgggtgtttgtgtgtgcaggtgtgtgtctgcgtgtactgctagtgtgggtgttcgtgtgtgcgggtgagcgtgtgtctgtgtgtactgctagtgtgggttgggatttgtgtgtgcgggtgagcgtgtgtctgcgtgtactgtcgtgggttgggatttgtgtgtgcgggtgagtgtgtgtctgcgtgtactgctagtgtgggtgttcgtgtgtgcgagtgagagagtgtctgcgtgtactgctagtgtgagtgtgtgtgcaggtgagtgtgtgtctgagtgtactgctagtgtgggtgttcatgtgtgcgggtgagcgtgtgtctgcgtgtactgtcgtgagttgggagccgtggatg

SEQ ID NO: 39432 - DNA, 1610 bp, Artificial sequence
  DNA replication origin
atgggaggctttacaccctggggcagaaggcaccccagaggatcccggacacccctgcactggggccagggtggtcccaccgcatgctgcagtgggagggtgaagcctcagcgccaggcagtagggaggtgcctggctaagtgggggatgggctggggcgtggcagagccaggacagcctgaccctcacagaaagctgagtcagactgcagcctgctggcctgggccggcctgggggcccagaggccatttacagggtccctgaaaaggccagaaaacacttgctccctgacatgggaaattccatctgcgaggccaagcctttcatgctgtacctttccaagacatcttcatcagcatcagggcccctgccagaggtgggcctggcccttcctgggtcaggttgtggttacttcacccatctcagcctcggtttcctcatctttaaaatgggggcatggcagcacccagcctgcctttgtcaggtgttggtggcatcaaagggccctggacagacaggcatgctggcacacaagtgtgaacagaggctgtatctcccccaggaggggtggaggtcaggagggcgagagggcatcgggaagagcgaacagagaggcttacgggggacagctttgctcgggcaccgtgggcctcttccctgccttcctgccccaactcaggccctggggcagcagggggagctaagggttctgccttgcccctctggcacacccagcccggactcccacctgggcctgaccttcctcaccatcagggcaggtgagaggacccacaagaggggatattcctagggaacgtgctgagttctgggagtagttaatcagcagaaggatggaggagtggaggggtagaggatggaagggtggagggagggaaggatggaggggtagaggatggaagtgtggagggatggagaggtggaggatggaggggtggagggatggaggggtggaggggtggagggtggagggatggaagggcggaggggtggatgggtggaggggtggagggtggagggatggagaggtggagggtggagggatggagaggtggagggatggagaggtggagggatggagaggtagagggatggaggggtaaggggtggaggtgtggaaggtggaggggtagagaggtggatgatggagggatggaggggtggaggggtggagaggtgggggtggaggtgtggaaggtggaggggtggagaggtggaggatggagggtggaggggtggaggatggaggggtggaggggtgcagggatggagggtggaggggtggaggggcagaggatggaggggtggaggatggagggttggagaggtggaggatggaggggtggagagtggtgggatggaggggtgaagggatggagactggaggggtggagggtggaggggtggaggatggaggggtgaagggtggtgggatggaggggtgaaggtatggaggctggaagggtggagggtggaggggtggaggatggaggggtggaggagatggaggatgtaagggtgaagggatgcaggatggaagagggacgggtggagggatggaggatggaggggtggaggggtgaaggatggag

SEQ ID NO: 39433 - DNA, 1170 bp, Artificial sequence
  DNA replication origin
acagctgagctggcagctgccctggccggcttttgtgtgctgtgctggggcggccccacaggacacccacgtcctgtagtcccaaggagacctcactggctgggggcccagggatcctggggcggacctgctgttcttcctgggggcatgggggaggctgtgcggggcaatggaggaggctgtgaggggggtgtgggaaagctgtgtggggggcatgggggaggctgtggggggatgggagaagctgttgggggtgcatagggaggctgtggaggtcatgggggaggctgtgcggggggcatggggaagctgtgtttggggcatgggggaggctgtggtggggaatgggagaggctgttgggggtgcataggctgtggggtcatgggggaggctgtgcgggggatgggggaggctgtgagggggtgtggtgaggctgtgaggggggcatggggaggctgtgggggggatgggagaggctgttgtgggggcatgggggaggctgtggggggcagggggaggctgtgtggggagccggacctcatggcaccagttctgcaggatgtggggtgacttggctagttttggaaccccccgccccgtggctctcggtgaggggtgagtggaggggaggcagtgaggaccctgcagctgaggcgtgtgccccacaggctgaaggtcacccagggcagccacggaacagaagatggcctgtgatggccgtggcacaggtgtggctgtaacagcccggccacctgagatcagagctcttctctgtgggaatcggtctagaaggtcgggggtcgggtgggcgctgcctccttcttcttccttctcccaggaccccaccctgcgacccccgcacacaggcacaggccccaccctccccacttcccaaaacccactcctcccccgttcagcgcctgtcgagccaccgtgaggccctggctgagcactgctcgggtgaggacaggctctcagcatcaacccacttgcagatcagaaagctgagcctggcaccttctcagagctgaacgtggggacagggctggaacgcagaggggctgtttccacagccctcacgacgaacctatccctgctgcccccactgccccactcattcattcattccaccaggcctccgcctgcatccttggttcagtcattcacaa

SEQ ID NO: 39434 - DNA, 1040 bp, Artificial sequence
  DNA replication origin
gggccggattctccccacaacccctcctgtgccagaactcggacgcatacctgggtggctcttgggacccatggctctggatgcctggcccagaggagcggggccagttgagaaattattcttggtgctgggggtggcattgagtctctaggggtccaaaactctaaccacactgacttgggtggggcttagcctgccggggtccccagcgccaggccccatttctgctaaggtccagagccctctgtcgctggccaccctaagccctggtggatgcggtggagaggacggactttctggggccatcagctgtggctgagggctgggtatctcctagcacccccaccccctccattatctgtgagtcttggaggaagtggaggcggagggcaggggtcctcagctccgctttgttgatggggtccccagaggtcagggactttcctgaaacccctttgagtgttggggtctggagtccaaaccccgggctcttcccctcaatgacccctcgagccccgccaggagcctcacctccgattttgggggactgttcctggtatagagtggattgggagcaggagtccccaagaacctggggcccttcagcttttgtagacaccagcctcggcctctctggagccatatgtggaggcccatgcacaccgggtggggtctccggaggccgaggtaaaagccccacaagaattctgctgactctcacacactgccctctgcctcccccaggcctcgtcccactggccacgcacaggcagctgggtctgggtgtgatgggcaagtgcacgtgtccattggggatgtctggggaatgaggcaaacagacccccaacccccgcagccctcggtgcagcccctcagccccagggcagaacacggtctttctcggccagcgggggatggtgatgggcctcagggccgttcctgctttgctcctgtcatattctagttattttattacaactatggctttctggatcccaaaccatgtacacatgaggatctcaatcctgaagataacataa

SEQ ID NO: 39435 - DNA, 1650 bp, Artificial sequence
  DNA replication origin
gagaagggacgccagggtcttgagactgttaaataaagcacaatctccgggaagcagagaggtcgagcatcccctaaccccagctagcacccggcagtgaccagccagccccgagccagccctttagagcccctaaacccacagcaaggctgcctgtggcggaggagctgggccctggaccctggtgcttgcaggccatggcggggggagtggggggggctctctcgcacgtttccttacttgtcccaggggccagatcctcccggctcgggggatgtcatgcaaggcagtgaggacccagcgggtccctgctcaggtggagataaagaggaaggcgatggagaagggggcatccatgggccctgcaccctgtcacctgggtgccatccgagagccactgctaggtccctgtggcagcgtcctgtgccacccctgacgcagatgagggacagggacggcccaccagcagtgagaaagagacacacccattgtggaagctcggatggccgttctgacgggaaagtcacctggggttcccccagtgtttctactactgtttgggagtggacggtggtcgttgtgggtggctgattagtgcttgtgtctcttcagctccaacgcgagtggttgacttcccgggcttgtcagtctctggtggctgctgtggcaaacggacccaaacttagtggctcgaagccacctggctttactgtcttacagttttggagaggtctgcatgggtctccctgggtcaaaatcaaggtgtgggccaggctgcttccctctggagacttcaggggaggctcgctccctcctcccctgcctctggaagtgcctgcgtcccttggctcgtggccccgcctccatcttgaaggccagctgtgcagcatggcccatgctccctgctccattgcacgcctcctaccttccctgaccgcttgagccccttgcgatgatctgcactgggcccacccagggtcacctcccatcccatgtccttcatcccatctgcaatgtaaggtgacatggccacctgttcgttctgcagattagaatgaagacatctttggagccattattcttccttccactcagggaagaactttcagtgggtagcagtgccttggctaccatgatgggacggccgggtggctgtcatttcttgggacccccgccctaacacacccctggcgacatgctgagcctcactgcatctttgcaaaccttggcaagtctcctgttgtgcctctggggaagcctctcagtggaagggccatgtcccttttggatgtcatctcaccacatcactgcttctgctacaggtctctcctctgctggttcctgacaggaaggaggtgctgccagcgctgaccccacagggagggtctgcggagaggtagccgggatgatggggtggctctggggacctggggagccaggcctggctgcgtgatgctgcatttctgctcgctcagcctcccctgcccagccactgtggagcaggtgttggtggggtgggcagtggctgcagcctggctccctttaatgtctaccccaagcgggccattcggcctgtccctcctccgtgctcctttcccaagcttcagggtggggggcatcggacccaagttcctctccttggggcaaccc

SEQ ID NO: 39436 - DNA, 1108 bp, Artificial sequence
  DNA replication origin
cgtccaggatggcagcagtgagctagaacagtcaccagggcagctgacagagggcaggggacccctccacgtccagcctgtccagaaccccctggtccccggcaccgcctgggtcttccctggtttctccaggatgccagacagacgcaggggacttgcttgtgagagaggccagttccaaggaggcctgcgggaaacaagccctcactccccaccccaaggagggtctttctcccttggtttctgcctccctgaggtctcctcttaggtcagaggagggagttcccacgggtaaagcactgagggcggtcgaaagccccgaaggccaccctgctccttccttgctggtctgggtgacgaccctacagaggggtgggcctctcaccgaggggcaggggtgctgagagcaggcaccggggcctggatgagctgctgcccctgcccctgccctgttcagcctggccaagcgatcccggggctctcatggggtcccacgtttgaagatgcaggggtggttgagggaagggtcccatctaggaaagggagagggctgtggcagggccaggggaacagtccagtcatgggggaagaaggaggcgggtgggagctgccaggctgggagtgacgaggcatccctgcttgggatctgataaagcttccaggggcaggggaggagggtgcagtgtctgtgggtgggggcagggggaccggcaggggcagccacaagagaaggaaaccggatgggaagggacaagaagggtgacacccacaggggcgggagccccaggctgggtcatggagctcacactaggcctgaacgtgtgctgcacatcttggccagaacaggtagctctctggctgtgggggatcaggtggggggtccggttgctcccaggaggtagagagcattcttgaaattgcctcctggggactcttaagtcaaaacagccactctggtgacccctgctcccatcccacagacaacaggggctagaacatcgggattggcgtgaaattctgcatctgtcttctcgcttgacccttgcagtggctcgtgggactggatggaacccactgacagctggaggctggaggcagctcttgggac

SEQ ID NO: 39437 - DNA, 1097 bp, Artificial sequence
  DNA replication origin
tcgcctctgcggggacaccggctcattggcctcctgaggctgtgcgtggacactgggcccctcgagccaggcggggacacttctacctggctagttaatgccactcggtgttagaagcttgaggcaatgttgccatcattttaagtgcctgccgatttctgtcgtccagttggtcatcaggacacacatatattttgaaggggcccttctgatgtatctattggtggagctagttaaagagcccgacccgatggtggagtgtgggggcagtgaggccatcaggtttatccagctggtgaggtaacgccccaggcggaggctcaggacggcccggcgccccacgtcggggactgggctggagggtggcagcgcccttcaacaccctgcagagggtggggtgagatcacagtggtgggggcactgctggggacgggggggagggtggggacaggcaggccggacaccctggacccccttgagggcctgcaggggtttgagaaggcgggagggaagcagagcatggggaagaaatgcaggagggaaggagggagggaaggaaggctcgttcttttcccttctagaaatcatgaattggttattagaaatcacttcagggccttgctgctggtggggaggaggcggcacctgcaggagaggctggccctgggtgagtctcacgccccacaccctgctctgcaccagggcgcagaccctccctgagtagcagcccccaggccccagcctggcactcatccatctccagcccagagagaggcccggggcagctgtggggccaggctccccaagagggtggctgaggggtggggaccgggagacagatggcgtccgaggctgtcctgcgtctgcctgtgggcctgaagatggatttgagcgcctactatgtgctagggagtgtgctagtcttggggagtcagccacacaggactaagggctctggggcagggacggttgctgcagcctctgacctccaagaattgcagttgagggggtgggggtcagggggctcctgactcactagtcgcatgcccttcacatgtgacttctgcatgccttgtcacctggactgtcactgctgg

SEQ ID NO: 39438 - DNA, 1307 bp, Artificial sequence
  DNA replication origin
gggccattgtggcctgcacccccgaggaggaggacaccgccccctacgggtaccctgagcctgctgccatatttgtaaatgctacacgcagggaaccaaaaagtccccggcccaaatgaaacaaaaccccagagagcacctgcttgggcccacgagaaaaagccatcttggcgtcccatccgcaataggactcagcttggcagcctgcactgcgcagcgttcagctcctttccaaatgagtttggcgttttttataaaaagcacctttataacaatcccagaatgaatatttatagggcagggatgagggaaccggctaattgtggctgagatcttgccggatcaacactcctcggctcccagaggatgtgcacaggagattaaagctgttcccttcatccctgggctcagggctgggctccgggtgcagggtggagacccagaaggaaccctctaacccttagcagatcataggctaatgccatgaccaagggcatcaggggctggggatgttcttagaaatagggcccttgggaggaggtgggaggccaaggctaagggcaaaatgagaatctgagaatttggccagtgccattgggcctcctctgctgggagctgagaattcagcctctgccatcgggcctcctctgccgggagctgagaattcggccgctgccattgggccttctctgctgggagctgttacaagcttcgggtggggtggatgatgaggaggcaagacccagtgtgggcgtccatctgggtgtcttggacaggacagcccaggacccctgctgtccaccctggagagcagaagctctgagctctcccccagccacctccttctgtgcagtccctgggagaggggcagggaataggtgcccagagtgggaccaggcgtcgtttggttctggagctataggcagctgcaagagatgctggtgaaatctgcagagatgaggtcccctctgagccttggggctttgctggcagcatcgctgtggcctaggacacagggaacagaagtgggtggctaggatcaggcccttctttctccctggaaatggaaatctgtctcaacccagaaaaatactctgcaagagctggtgaactcgctggggtgagggacctgctagctcccttccctgcctgtggtccttgtcccctgcaggactggccctgagtggctgggggctgggcaccattcctgattgtccagcagtgctggactggggagggtcctcaccatgggtatgtccatggaggggggctcctccctcagccccagcactgctccccaaccctga

SEQ ID NO: 39439 - DNA, 1456 bp, Artificial sequence
  DNA replication origin
tctcacacggctcccactggccacggtggctgccaagctctcagaaacggggctggtgcccctgcagacctggattttttagtcagtgcagctttgatttgtttcagcttcaggaggctcatgtagctggcgccgtatgggacagcgggggagagagaaaatgcacagcccagggaatgtggagacaggcccagcgccaggcatgggggccggaaggagcagccggggagcagggggcagggcctggagtcccgccttgcaggtcagaggtcagaggtcagggaaggcctgggtgggggtgaatgaacaggccccccagtgatgtcagaggggcaggcggggaagggtcccggaagagcaccccggggagtgtgtacaggaaggcaggagcccggaggcgggaaggggggcctggtgtgtccagcgggcagcaggaggccagcatggctgccactggggcagtggcagtggatgggtggcctggggctgggcttcgggcagggtcagaccacgtcaggccttgtaggccagtgccagggctgcaggtgtcctgctgaggggcacaggcctgggcaggctggcacggctatagcagggtccttatggcttatctgctgagggtgagggtggagggcagaggctggagcatcaggggccctgcccagctgcggtgccctggggagggctgcccagctctggctgtgccttgaaagtttgcccgaaagattcactgttggagcagatgtggtcacaagagcaaggggggatgtcagatggcctgggccctgaggaacagagtgcatccctaggagggggacggcccgtcaccagggagccttctgagaccattttgtaggtggggaaactgaggctcaggaggaaaagccagttgcccagcacgcgaagacccagagcctatcttcctgcccctacatccttgtctgtccccagatctgaacctgccccagccccaggactctgagtgcagcaagaggggagccgggctggagagtggggagcacggagactgtggcctggatggtgccagagcaaacaggagagaggctgcccaacgcagaggctgcagcacagaccagagggtcccggggctgactgggtgggggcagctcccagcgagaggcccctgggatttgggtaagtagaggcacatgcagactctggccacagggcacctcgcgcacgaggggagttcaccacacaagctgagcggagggcggacgcaggagagcagcggtttctcggaagccaagggcggtcatggagccccacgccacagcgcttcccacggggccacaccatccggtctgcggagggggctgcattgccgggaaggaccatctgattctggattccagcctcaccctgggccaccgctgagtgtcccaagtggccccttagcccccagggccaggcggcatcccaatcccctagggat

SEQ ID NO: 39440 - DNA, 1941 bp, Artificial sequence
  DNA replication origin
cccgagatccccccgctatttttagcccagccagtacagaggcgcctcctcagtagccgggcagcagcctccatgccatgccagccggctcctagggtgccctggggagacccgggcatctcccaggctgcagggccgggggtggggggggcgggcagaatggtacggcctccttcgctgctctgagcctccagtgggctgagcccacccaggccaccaggagtgggtggccccctccacagtcccatcggctctgcccttttgcctagaattggggccaggatcaggtggtgacagagccacctgggtttccggagactctcaagccaaccccaagtcatgacaaatgccagtcgccttggacagaggcaaggtcaacctgcttgccgcccccagccaggccctgccaccaagggtgtgtgatggggagaccccaatcccgggtgctggacgggctcaggagctcccccttccgggatttcacgcccgaattatgtaacagacgagggcctgggacggggcctgacggggatctgtccttgcagggcctggacgcagagaccagaggcctgaactggcagactgtcctcacaggctgtgtgacgctggctggtcgtcccatctctctggggccccacaggactggggaccaggtcgtggaatgacagtggaccacagtggtccggggaccccgctcgttggtggcaggcacaggcccgtgtgatggggacaatgagctttggtatttgtgagtcctgtccagagcataggtcctcctgttcagaagccacctcataaatgtccccagtgcctcccggacttaggaaggcatccccttgtggttctggccagttagggacacagggccggggagtctatgccgctcagaacaggctcagctgcatctaatcccaggggagcccctgaggagcctgcacaccccccaggctggcccacaggagctgaggcagggctctcctccaggttcacctcctgggctcacggccccttccccacatcccaaggccggctctgcagagtcatggggagaagccggagccccagccacactcgccacacacgccgacacccactctggtgtcctccggccagcgacagcgagggacagagggacgccccctgcacctgcccagtgcagaggcttcttgagtgatgccaggcccttctcccagccctgtacgccccgctaaagaccccatgtctcaccataaaggaggccaggaggttttaagcttctacctggtctgagcacttttctggaaactaaatagccactcggcttcccactggcagcgggagagcgtggtgtgaggtgtggtgtccaaactccccctgcaaggcccctcccctgcagcccacttcctcctgcctgccgtctccaggcagggttgaggggggcaggccaggcctgcagctggggtcaggggcatagacagccacaatgggggaggtggggagcagtctgcaggcctgggcaggcggctctgtaaaggatgcgggtgctttgtggtggtgagagagagggtatgcagcagacgtggccataaatcaccctcctcacggcagccccacacccacggaccagggcacgggcacagggccatctccttccaggagaagggctggtgtgggtggccagatctgacagcccccaggccgtaggacagagccagaagacagagcagttcccccgtttacccatagcaccagcctcacagtaacagccggcacacagcacttaggctgcctggtgttccagaagcttctgcaggggctctatgctgcactcaaggcatccctaagaggagagcattttgctgtccccactttacggagaaggaacgtgggctcagggtgggtgcctcactctcccaaggtcccataccaagcactgatcggagctgggtgtgttctggcccc

SEQ ID NO: 39441 - DNA, 1128 bp, Artificial sequence
  DNA replication origin
tggagttttctcttggctcgcggcatcatccacatttggaaaactgcagagccagcagccggcagggcctggagggcgcgtccagctgggaggcaggaactttgacttgcgggcattttgcaagaaagcagcggccccccacgcgggcagtggatggcatgggggcttcggggctgggctgggggcgcgattcacctgccgctccgcaacaaagccccggcagccgggcgtggggctaaacttaccttgaacttgcagtatcccccactgaggtgctggtggggggcagggattcccgagctgagcggcggcgaggctgcccccggccgggactcggcacttctgcagctctcccagccacgtcagggtcaggaggcgtttacaggggcagggcggcgaggtggggggcggggggcacatgtgggcggagactaggggggcttcggggagagcagccctggtggtcggcgtctgtgcaggtccctgctggggagcttgacttcccgcgtggcctcccgcggcgctgatgccgggggccgggcggtattcaccgctgaagagccccggaggaggccccgggcacaggagccagctcggctcacggtggggtctgcttggaggcggctgggtgctctttttctatgcagacgggaaactttttgaaaagtgactacaattcatttgtgagtgggcagaagtcctgtggactctggctgggtctggggtgactctcctgccctttgggactcccagctttccccttgacccccagaccccgtccagatgaatgcctcacaggtcgtgggggcttgagccaggctgcgggagtgtcccaggctctgagagctcatgtgccagggagctggggacgttgaggaggccttttccctggactccggggacggttattgcggaggtcttgggagggcacagatgagcggcggaacccaggtgcccccgaagttgaagctcaggctgcggtgtcgggtgccctttttgtatccttggctacgtgaaaatgataaatcacagcagctacgtggaaatgggacatcagcttctgcttctgtctgccatttgctccttcctttgtagaggggatgcctccagagccttaagcacaacccc

SEQ ID NO: 39442 - DNA, 2083 bp, Artificial sequence
  DNA replication origin
ccccacccacccccacgtgaaactccaacccagccatgcccagctgcagacccactgccacacagccacagcatgctcagtggcctctgcacactgcaggctctgcggagacattgccctgccctgggtggtaagagagaaccaactcgctccgggctgtcccctcgcatggacgggctgcctggaggagcaacagagtcatgttggacctctcttcctgatgaggacaacgggaggtcctttcatgtcccggggctgctgtcccaccccacgccagggtcagtggcaggacaggggccagggcccagctggaccccaccgcttagcaagcctcctgtgtctgtgcccggcctgcacccccaactggcgcctccctggcccccgtcccccccaggcacctgcaaagccttctttccacctctcaccaccgcacgtgccaggctcgccctgggccactgcgaggcctcgaaaccctgcaggcctcctcctcctcctcctcctcctctccccgctcccagcaggttcggggcggcttcccttcctgctggtgagggcctaaccttgaggtcccattggtctccttctggctctttctccacatttttcagagtctggcttcacggctggtcatagaagttggcagggaaggaggcagcctctgcttcccactcagagacatttttaaacgcaatgaaaaacatatcgatacaattaagtattccaaagtgcttagtttgccactcgctaagtttacttaaaccctctttaacaggctcattaggagctggtgagcaccgggaaattcattaacaggaaggcggccccctgcatttgactgtaaattggtattgatcaggggctggtggaggctgggcggctggccacaaagagccaggtgtgggaccagcctcccgggggtgccacggcagtggcgctgggcaggtgacggtggctgctgacccccggtgcccatgtaagctgctggctctgcgcagctgccgcttcaggtgggccgcactgcgcggcggttcagggtggtgacgctgcgaggcggggacgggggagagggtgaagaagagcgagagaaggagggagagaaccgggggagcgacgctccctcgcccactgggtgtctgctgtggccaggctgaggcacctagggagttgcccccctagtggacggcctctcaggagatcctgaccaccctctgggaacctggactcctccaagcatcgtctttctcgcctgcatcttcggagagaggtgctgagcccttcctcatggatacggggtcccgggaggcagccttcaccagggacctgcccaggaaaccagcagatgcccaggtaagcccccaggacacctctcgggtctctggtctgcagttcctcgtctggcctcaggagcaaggagttgtccagctcccggagaaggaggaggctggtcctgcgagtggggtgctgggcagggcgccccccaaggttcctctctccacccagccctctctgggcttggctgggatgaggtgacccagggggacaggaaagtgttggctttgaaagtttgggacatggatgatgcctccctgctctggggtgagggtggaggggcagcctgtctcttccatggacgcaaaaccgagctactgctggggccagggacaggcgctcgagactttctggggctcactgtccacttctgcctttctggatcgtgtgagtgtgtgagacagacagagagagatggattcagggatggaggggcgccgaggtcagaagggggcagggagtcctgggcccctgggggtggctggacaccaggcagcagtggcaggaaggctgtcctgctcacacagagagggctccggcagtagactccagggaagaagttacactgcctctgagctgccttctctacatcgcagtggggtcagcttctaccggggcggcgtcccggggtcttggaactgcatgcagactgcctgcttgggaaacatacttctttatatgcccatatggacctgctaagctatggaatgtaaagaagtatgtatctcaggccgggacctctctcgccgcactg

SEQ ID NO: 39443 - DNA, 1741 bp, Artificial sequence
  DNA replication origin
ggggccagggacaggcgctcgagactttctggggctcactgtccacttctgcctttctggatcgtgtgagtgtgtgagacagacagagagagatggattcagggatggaggggcgccgaggtcagaagggggcagggagtcctgggcccctgggggtggctggacaccaggcagcagtggcaggaaggctgtcctgctcacacagagagggctccggcagtagactccagggaagaagttacactgcctctgagctgccttctctacatcgcagtggggtcagcttctaccggggcggcgtcccggggtcttggaactgcatgcagactgcctgcttgggaaacatacttctttatatgcccatatggacctgctaagctatggaatgtaaagaagtatgtatctcaggccgggacctctctcgccgcactgaggggcactccacaccacgggggccgccgcggccgacagccagccaggcggctgtggtgggggtgaggctggggcggcaggctgcctgggcgttggtggacggtcgtgtccccgccagcattgttctgtcactttgcctgtgtcagcaggtggaagtgctcaccagacattaaatattcagcttgctgactgcggcagaggggaggcggcctccggcaggcgcggggtccagcgcggggctggtgagggctggggggtcggggccgtggctggaaagcacggagtggtggcggcggctctgggggctccactgatggccatcctggaagaggccatcagccggcagaaagggccacgtgtggccagggcagaaactgctcagaggcacaagacaagagcgagtttggaaaagggcaggtggctggatgcagaaaggagggagaggctgggcagcacatggtagagtctgcggagggaaggcacctcctgcacctgcatccagccctcccggctgtagggcaaggcagaggaactcggaggcatgtagcctccaaggaaggcgcagcccacacgagatgctggggacgcgggcagggtcagggccaccactgcccttaggccccactcctctgccgagggcacctgggacagggtcagaggagctgagtctgtgcagccctgaacccacagcccaccccaggggcctgggagccgttcgattttgccaaatgtctggttcatgccgccccaacctgtacccccaccaaagccccggttcagctttctctctgttccgccgaatccaacctgaggcatgttttgctgtgaatgcaggtgaggctttggcagaaagcagcgtgtggcccagggccccttgccccacctgtcgggggcctgagagccatctgctctgccgccatcccagtcctgacccgagaaaggactgggaggatgtcctggggcccaggggatgagggcaggtccggatccgtccgtgaaacccttttccccagtgctggtccttcaaggagaggatgggcggcgggttctggggtcttaggcagcggctgggctgctgtgtgaggggcgtttgcccggctcgtttctgagtctcagattggaggcgtttgccacctgggatgaggccaggtccctgcctgggcacccccaccctgccacaggcctcaggattaatttctggggtgtgtgtcctctctgccttggcactgctccagccacagcggtgcccctgtgccctacctcccgcaccctggccttcggcaggaatgaggcgggaagggacaggcag

SEQ ID NO: 39444 - DNA, 1160 bp, Artificial sequence
  DNA replication origin
tgccctacctcccgcaccctggccttcggcaggaatgaggcgggaagggacaggcaggcagccccctcctgcagcggctggaggccttgggtctgggggcagccaggtcacctgagcagctggggccagcatagggagcgctggataaagggattgggggccgttctgagctttcaggtggctcccacccctcagggagcctcgaggtgactggaggggagggcctggcagtcagggctcctggccttcaggtcttccttctggaaacttcgttctcccagcctcagccccatctggcgtagcagcaagggggcgggtgttgacctcgggcacagcctcctctcggcctctggacccggagggtcagtgcccagcatccgctgacgtcatctcttccctgcctgctcccagctccggccacagggagggaagtagccgggcgtgtggccaccgaggctgccggtggccacagacacaccgttcttttcccctagatgcggctgttgtacattaaagctttattgcaggatgtggtgtttaaataaaagcattagtgttttggaattaggtttgactgagcagtaaaactggagagttcacagggagagagctgcggcctgcttggcggtaaatcacctccagtctctgatctgctgaattaaaaatgagcattgcacggacaccgcccatggcagcccgagcccctctcccctgcacgtgtggcctgatggtgctccctggggatcctgctgctttcctggagacactgggacccggggctggagtctcccatgcgtgaatctctaaagcttggctcccgggcagcagccaggacgggaaccccaaactggcgtggggcatggacacgctgggactttcccctgtgggggtctttgtgcctgtccgtttgaaggaggggagagcaggcagggcgggggcacagaccctcactggctatgtcttgcccgcagggactctcctgagacggcttaggcacgctaccatgggggccgggactctcagagggaaatgagcctggactgggctgagggggctggacatgggacacccaccccctcgcctgccagctcgggaacccaggtgggtttgtgtggccatgaggaggtggccagtgccggtgtctctcactccctagagca

SEQ ID NO: 39445 - DNA, 1249 bp, Artificial sequence
  DNA replication origin
tgttttaaaacctgtttaattgtttggttcataaagtgcactagcggtaggagctgcagccttgttctctgtagcactggagtcaagagaggggcaggaggacccagagtgggttttccggagaatccacatcccaggctccaaccccagttctgctgtcctggtgaacggtaaagtcaccagaaacgcctgggccacctctctgccaggtctgggcacccagccggggacacagaggggaccagccaggagctgcccctcccttggcgagcttgcctttactcggggggcgcagggactcctcactcgatgaggaaaccacagtggcagctggccccagagaaggccaggcagggctggccctcccctacccggaggctgctggagccctcggggcccggggatctgaggccccaggagctaggggcggtcgctgtggtgaggggatgggtcttggcaggaaggcagcccatgcctgggaggcgggaggcagcacagctcagtttggggaaggcaagctccaaggccggagagcgtggggtgcgggggtctaggaagggtgagctctgtgaagcacctgacctttgagccatggggcccttggggaggttttggggcttgtggggtgttggtttcttggcctttttagagagaaaagaaaaaaatacttacaaggaagttgaggagcctcagggacctcccttgtcagccctcgccccatgctggtgagaccccagggttcagaggggaaggggctagaggatctgccagtgagtgggagctgctgcctgagggagcagagcagaacaggggggtgcccgggtccacaggggtccccgacgtcctgcccgaaggatggacctagttccggcacgtcccaagaacacgaattgtgggcctgttccttcacatttgcaagaaaaggtgttgatcacacccttggcaaagaatgactgggaacctccctaagccaggccacattggggtgagggtacctggaggctggctgccacctcatggggcagcatgaagagagaagggcctgggccccggggcaggggacgctgctgtgagccccagtgtcctcctgaggggcagcacaggactggccttgaggtacagtggggtgtatgggagaagacggtggctgtcggtgctcagggccgcacctggcacttggccgctcggtgtctattcacagctcacgcccaccaccgtggcggctgcaacgccaagcttgatgcctcat

SEQ ID NO: 39446 - DNA, 2054 bp, Artificial sequence
  DNA replication origin
gggacgctgctgtgagccccagtgtcctcctgaggggcagcacaggactggccttgaggtacagtggggtgtatgggagaagacggtggctgtcggtgctcagggccgcacctggcacttggccgctcggtgtctattcacagctcacgcccaccaccgtggcggctgcaacgccaagcttgatgcctcatccaaggccgcagtggcctccccgtgggggttttgcagcctgccccagtgctctgctgcctttcgggtgaaatgaccagtttgtttgctatgttgattggcaaatgccagacctcccagctcctgatgggatagaatcgcggctgggactcgaatccccggcttgatcttgtcaaatcttctgctccattaggaatattgacaggcgataaatggacaagtgtgtgccggcttcgaggtctttgagccgtcctcactccagggccagggaggggtggactctgggagccttgaggtctgccctgcaccctctgtgctactggagtaaggaggagagaggtttgcagagtgtgggctgatggcccggaagcctctctgttttggggcgcgaggctgagaaggctggggcccagccccgacttataggggactttgaggaggtggtcctcctacacggcacagatctttctggagggcaccgtggcagggacagtcagggaaggcagctacggacgggtcagagcaggcctggcagaggctggggtggggggtcgtccagctcagtcactcccagaggggacttggagcgtgggcatggtgctgtgcgaccgtcccttttgcctgaggggcctgagcttctgtccctgcaatgtcaggagggggacagaaaggccagaggacaggcaggcagggcagccccaggtgtgcaacgggcaggcaggtggcacaggccctagtgcgcagcgcccactctgccaacctggtgggcgaggagcaggtgcgttcacctgtgctgcccaggacggcctgtgctcccggatagaagctcacacacatgggtgccacatccccagcactgccggagacactctccctcacctgtcacggctcctgatgaacgggggctgcagggagactcattttataaaagggaacttgctctcaaggcactgaaggtgacattggtgtgggggacgcgggagccaggcaagagtgatgtcacgttcggacctccgtcctgacactccatcctcacagttcccttgggcatggaaatgcccctcagcaagatgcgggcagggctgcaggtctggggcatggggcccagggtcaggccacgaaggccccctcaggctgtcctcccaccaccatgcaatgtggacgtccctggaatcttcccgtcctgcctacccagagataccatgtggtgtcagagtccatcccgtcccacccaggccatggcaagccaggcaggacggggtcctgggtgggctgccccatggttagccagggcccaaggctcactgggaggtctgtcctgcctctgctccagctatgagcatggtctgggaggagtttgcaggggaataagggcctcaaacctgcaagatcactgtgcccacagatgtgagccccctggggcggggcccgatggtctgagctgtatcccacagctgaggctagtgctgggggcagtgggcacttggtgaagcgagggctgtggaggaatcgggcggtgacaggcagagagcagtgagtgtcagttccagagcatggaggccgcctggcacccccgaccctccccagacccctgcgggtccccgatgggggagcccgggcagagcgagagggtggtgagttgcgtgtgagcgggtgtgtgtgtctgtgtatgtctgagtgtgtgtgtgtgttggggcgtgtggcccttcacaccagtccctgcagagcttgagggaaactccacggggtgggggccctccgggagttggggtaagggcctgatgctggccgcgaagccccatctccatcgggactgcttggtggagccgccttcttcaccgacgtcgctgttcctcggatctggg

SEQ ID NO: 39447 - DNA, 883 bp, Artificial sequence
  DNA replication origin
ggggaggcctgggccggtggcatctctccagatggcctgaggggtgctgggcctggcagggagactaccaaacaggagcccctcagcatggcccgtggctggggaggtgcctgtgaaggttgctggggcccccaggggctccccatctccccaccctcttgcgggaggcagtgacgcccatgtgcagggaagctgggccatcaacgggcacagctgcagtgagcagagatctgcaagggggtctgcaggccaggtggcacccaggacccattgtgggggtccccgaccatgtgcccttcccttggcaggggctggcatgaaggggctcaggctgctgggcgccagcagattggaggcctgggcaggcacgggggctcctgctgggcatctctaggcctggggttccagggcctgtcaggagtgacccctgacttctgcccagagttgcagacgtggggcctcccctcaggggccaccagctgccggccccagggcaggtgaggcgagggtcaggaccctgggagggatgagcagagggaaggggcatggtaggcagaagggcagacaccccctggactgatggacggatagaagaccaggtctgaagacagtggccctggctcaggaagccacggctccctcctcacaccctgcccagctttagtgcctctaattcctagggtcagcttaaccctaaccttggcaccgtgttaccacccctcttcacacagagtcgctatgtccccagatagtgggagtggccgagaggctggggtagtggacggcagcccagtcttcagcacagggctggggctggagtttgaagaccagagtgtgcgggatccatgggctctgctcccgaagggctgcatggcctcagcct

SEQ ID NO: 39448 - DNA, 858 bp, Artificial sequence
  DNA replication origin
ccagggtcaaggaagtggggtcagggatgggacacagcccactggaggaccgcagtttcggatcccaggatcccagcaacctcgggttggggtgcacgggagccagctctgccaggctgggcatgctgcggagtgcctgggcatcagagagggtgaggagctcaccacagtcacacagccagccctgggcgagcccagagcagaatgggaacacagggctgtctgccccagggctgcgtcttcccctcaggaatgagcggcccttggctggacttggctggacttggctgggctgagtttgggaccctgagtttgggggctcctgccttcagtgcccgcgcctggtctccatgctttgctgtgtgtttagctgcgtggggggtccctggagcatcttgccttaggggctcaaggggagagggggcagcagaaggggggcccatgctggggaacgggctttatgtttcctggcgctctgccatctgtcttttcatctccctgggaggggtgagaatgtggacctgagtgagcagtggacattgccagctcagtgaccgagaggatgggtctaagtgtccggtgctgtgggaaagcctctccccaccaggtgcaaaggtgacaggagttggcccatcccaacctcggctgaggatctgcagatcctgggtcctgtatcactgtaagacaagtccaagagctcattagaaatgcagattccaggccccgtacccacccctaccccagtcagagcctccagagcaagggcctgggaacctgaatttttaccgagtgtgtttggtgagtcttatgaacaagccacatcaacctggtcctcttgatgcctgctggccccgcacc

SEQ ID NO: 39449 - DNA, 1521 bp, Artificial sequence
  DNA replication origin
cacatgtgcaaacacacacacgtgcaaacacacacacagaggcacatgcacattctcacacaggcacacacaatgcacacatgcacgatgcacacacaggcacacacgtgcacacccagacacatgcttacacatgcacttacctgcacattcccacacacggacatgcaggcacacccctccacacacacataaacgcacatgtatgcacagcttctcacagatacacaaagcaatgcaggtactcatgtatgtatacatgagtacacatgcatgcacacaggcacacacatgtgcacaaacatatatatgcacacacccacacatgcacaacacacacacataggcacacatgtgcacacactcacatgcacacacgctcccatccccccaccacacaatcacacagacgcctaatgcctcgcagcaggtgagaccacccatcagtaggattaggggccaacagagggttccggcagcagacgcaggcagtttggagaaggggctgggtgtgagctaaggcagacaggggaggctgagtgagggaggaggttgggtccctgaggtgggggagggggatgggtgggaggtggctgagggagcttccctgagaagctcagaatgaggcagtcacatggggggttgtttgggctttcccaggtgaaccctgtgcttcccccttcccttccctctccctctgtgttcccctccccaaagctatggcccctcaccacccctctgccctggcacctcaatgagaccctgtggaagttcctgtagacaggaagtgggatgggacctgtggggaggtggggcctgtggggaggtggggcctgtgagaaggcggggcctgtgggaaggcggggtctgtgggaaggcggggtctgtgggaaggtggggtctgtggggaggcggggcctgtgagaaggtggggcctgtgggaaagtggggcctgtgggaaggcggggtctgtggggaggcagggcctgtgggaaagtggggcctgtggggaggcagggagccacgacagcctgccagctttgcctaactttttataacagcttgattttaaaaatgtttcaagtctgtttcagtctgtaggtccctcctgttgctctctctttttttttttataatgtgtctgctgaaggaccaggtcgtttggcctggggtgtgtcatgcatcaggattgctggtggcgccctcttggtgcagttctgcctgttcctctgtcctctgagcttcctgtgtgctggtggctggacccggagactcctcccactcaggctgcatccctgcagcaggaacccaggttctgttttgtccccccatcaggaggacacaggtcagggctgtgcactcctggaatggtggccaggcttgctctgtgcctcaagccactaatccatcaaggttgcaagacggtgatgtcctgagtctggaagttctttttcacttatttgtcgggatacctttatggaaactcttctcctccacgcagtctcatccccagtgccactg

SEQ ID NO: 39450 - DNA, 1489 bp, Artificial sequence
  DNA replication origin
agggagacagagacagagagagacagagacagagggaaagggagacagagacagagacagaaggagagggagacagagacagagggagacagagagagagacagagggagagggagatagagggagacagggacagagagacagagacagagggagacagggacagaaagagacagagacagagagagacagagggagagggagacagagacagagggagacagcaatagagggagagggagacagagagagacagagggagagggagacagagacagacggagacagagagacagagacagagggaggcagggacagagggagagagagatagacagagatagacagagagacagggacagaggcacagggagacagagacaaggagacagaaggagacagagacagggagagacagagacagggaaacagagacagagggaagcagagacagcgacaggaagagaaaggaagggaagggagcagagctggggggtcagaggtctgggctggtgagggcacttagaggcccatgtccagcctctccggctgtcaggtggaggctggctgcctggtggctgtgtgctggttctggaatcttctgcctgagtttgaagcccagcttagccatttcatggctacgtgacctcagaagtcacgaaagttgccgtagcctcaatatcctactctgtacaatgggctaataacagtgacctgcatggaagggtccccgtggaggtggagtctcacacatgtggggggctctgggccacacggccgtgacgcctgccactcccctgggacctcttctgctgggctgtcacggtgcgctccgaaagacaccccctgcagaccttcacttgtgcagcaagctcatggcccgccccagcaggaggcggggctgcaggtcaggctgtggagtggcggtcttgcctgagctgcctgaacccgcctcgtggacctgccccgctctcctgtcccccggggaggcccttggtgctaatgggcaccagacaccagaggaggtgctagagagacttttcagggcaggttgggtggagattcttccgggtttctcagaaaaaattaattctcccaagctccactgtgcggtctgcagctggagacccgctgacaccccccgtggacgactgcagccagcgggtgcagtgccaggcttcctaggggtgctgaatccgcctggctcaatgcagccctcaggctgtggagttggggccgggagcgatgcttgggaacgcagcagtgtctagaatttattccagcactttccaaggaaagaaattaagcaaaacccttagggggcaataataataacagctactctgggtgcctgcttttgccaagtgctgtgtgcctgcccgtcccagctcccctgcaaggtgacggggctgccgcatccattctgcagatgacaaaaccaaggcagagcccagggcacagaacagctcggggcctgtcaccaggagaa

SEQ ID NO: 39451 - DNA, 2858 bp, Artificial sequence
  DNA replication origin
ggaataaaactaaacctactgactcctcctgtccccacccccaaatagcctcattcagcagtttctccgaagccttcagagcagttttcattcaaacttgcatgtaattgttgctgctttaaagagaatcgcccacagcacgtaacacacagcctctgggtgcacgcaggcccaggggacgctcgcaggcccggcatggggtggggggcatgcaagcccggggggtgcccgcaggccgggtgcgggggggcggtggcgcacgcaggctcaggggacgcacacaggctgggtggtggtggtggggggtgatgcacgcaggcccggtgtgaggtggggggacctggcgtggggtgggggagtacgcaagcccagggggtgcgcgcaggctgggggggtgcatgcagtcccagcgtggggtggggggcatgcaagcctggagggtgcatgcaggtccagcatgaggtggggagcatgcaagcctgggggggtgcgcgcaggctgggggggtgcatgcagtcccagcatggggtggggggcatgcaaccccaaggggttgcacgcagaccctccgcaagcgctgcagctactgctgtccctggtgtggctgtgccaagatttactcaccgggtccccactgtcattgcggacaccagccgagggagcctcctcagcccaggagctccctcctagggatgcgtccaggcagggagggcatgcccgtgagggggaggcagctgggcctgggcatccacaggcctcagggtcaggggttgaggagggactaggcttccctgtcagccccgtgcagagctccccaggttgactggcccatctctccctcctgcagggagctgagcgccatcctccctcccctgtggacagcccgcgagggcgcctttcccgcccatgttctagaggtcacctgcacagcaggggtgccggggcccagccaggcgccaggctgcaggggtgccaccctcaaccctggtggtaccacccctgctctcacccctgctaccatgccttgcccattcctggagggcctccccgctcccagatcccacccgtcactgggatccccagatggctctctttgtcctgagccctcccacctccctgctccacagcaaatttgcctgttatattcccacccccacaaggtgtggaacctcaagggcaggtgctgcctcaggggcgcagagccatgctgcccaccgccccatggtgcccacacagcgtgagtgaggcacagggttgctgggcaggggctctgctggtactgggatgagctgatgctgccccaaggcccctcccactgtggcaggactggcatggaactggatctgtgcagaagccccccatgggggtgggcctggcagaagcagccccctccccatgttgacagcattagcctgaggcttaatttcgtggaaatctctgccaagggctgaggttaaaagtgtcctccagggacaagcctctcctctctaaatgagcccaagtcctccatggtccctcctttccccagcaaacctcactcatgggacaaaggctggcagggcccacaccactgcagggtcttgccgagattcccgggagatgcgctcaggggcgagaggcccagttcttggaagctgccaaaatggaataaaagcagctccaaagacttttgttctccagctcagctcggggccaagtcacgccacccaggagagcccctgaaggtcgaggacatgagggtgtgcagtaagccgggggctccgagggtgtcccagcgtgtgtgcaagggggacagggccctgcagatgtcccagagagggactgaggccatgtgctcaggggcctcccaataaatacccgggagtcgctgagacagagacagagacagagacagagacagagggagacagggacagagggagagggagacagagacagagacagagagagacagatacagagggagagggagacagagacagacagagacagagggagagggagacagagacagagacagagggacggagacagagacagacagagacagagagacagagacagacagagacagagagacagagacagagggagacaggacagagacagagagagagacagagggagagggagatggagacagggacagagggagagggagacagggacagagggagagggagacagagacagagacagagagagacagagacagagacagagggagagggagacagagacagagggagagggagacagagacagacagagacagagggatggagacagagacagacagagacagagagacagagacagacggagacagagagacagagacagagggagacaggacagagacagagagagagagacagagggagagggagatggagacagggacagagggagagggagacagagacagagagagacagagacagagggaaagggagacagagacagagacagaaggagagggagacagagacagagggagacagagagagagacagagggagagggagatagagggagacagggacagagagacagagacagagggagacagggacagaaagagacagagacagagagagacagagggagagggagacagagacagagggagacagcaatagagggagagggagacagagagagacagagggagagggagacagagacagacggagacagagagacagagacagagggaggcagggacagagggagagagagatagacagagatagacagagagacagggacagaggcacagggagacagagacaaggagacagaaggagacagagacagggagagacagagacagggaaacagagacagagggaagc

SEQ ID NO: 39452 - DNA, 1199 bp, Artificial sequence
  DNA replication origin
ctctcaaactcaaagccatctctggcttcccaagccccagtttccgtgggtccctcatggctgagaaacacaacatgaattcagagggaagagaagagctgagaactggctcagaggcagaggccaccccccagcctctcgtgttccaccctgtcctcagcgatggggacacagaggccagagaggcccctgccttcttcaaggtcatggcttggaacaatgagcagttccaaaattcacatatgtccttctccaggctccccagctgcccttcagagtgctggatttctccacctttccaccgtcttcaccgccttccactgcctttccactgcctttcaccccacagtctctcccgtcggggctccttcctctccgtccctccgagggtccgctgcccttccgcgggatgggatggatccttccagcccgggggcggcaaaaggtgcaggtgggggcggggcgcgggggcggggcgggggctacaatttgttaggctccatgtgactgtgtgctgagctcctctaagaggcctgggggctgggcagtgactggcgtgtgccccggagtgcgggggcagggggcttgcctctcactccacgcccaagttcctgggtgaatgcgttctgggcagcctgggtttgtgggtctgaatcacagaacttcagatcacacctaggctggaggccaaccccggctgcagactcgggggaacgtcctgagcgctttctttttaaacagctttgacatgtgcagcaaataagagttgagtgagggatccgcagtgcccttgtgacgtcctcctggagaaggggcattcaccaccctcgcgggctgggttcctggccacgcctgcccacctgccggcccgcctggggcagctctggcaaacccggggtgacctgggggggcgtggaggagtggcccgatttctcccgacctgggatctgtacctcctcgcctgagactttctttccaaaatttctaaataagagcagccctcacagctagtttcacattcccaccatcaagaaaagtgtggaataaaactaaacctactgactcctcctgtccccacccccaaatagcctcattcagcagtttctccgaagccttcagagcagttttcattcaaacttgcatgtaattgttgctgctttaaagagaatcgcccacagcacgtaacacacagcctctgg

SEQ ID NO: 39453 - DNA, 937 bp, Artificial sequence
  DNA replication origin
caaggacttatgcatgactgtccatagcagttttatttgtgatagcaaaaacctgggggaaaaaccaaaatgtctaccaacaagtgattggatgaacaaatcatggtgcatccatacaacgcagaaataaaaaggagtggaattttgaaacacatgacaaaatcaaacgtgaaaataattatgctgcgtgaaagaaggcgtgtatacatgtgacttcgttcatatggaattctgcaaaatgcagttgtctgtagtgacatcggtggttcctggggacaggggtgggaggacacaggcaggaggacatgctgtgggtgacgaggttcaccgtggaccatgggaagggtttcgtgggtgtgcacataggtcgaagctttccaaatcatcacttttacatgtgcagttgattgtgtcaaataatcctcagtagagctggtcaagatagttgaaactatattcaaaactgggaaactgaacataatgaccccaattgcacatttctgttggaaaattagaagttctggtaacactaggcctgtattcaggtgtggtgtggggagtggggtgtggcttccaagggctgggcgtggctgtgttgggttgggcgtggctgggctggacacggctgagctgggctgggcgtggctaggctgggctgggttgggtgtggttggtcatggctatgttgggctgggtgtggctgggtgtggtgtggcgtggctggactgggcatggctgcactcagctgtgttgggctggatgtgactgggcgtggtgtggcgtggctgggctgtgcgtggctgcactcagctgtgttgggcttggctactgccctctgcacaggcctcaccgctcctcactgtccacgcgctctgtggtccagcatcatttctggtctcgttggctctgcggattgtgtcccttatgcctggccagc

SEQ ID NO: 39454 - DNA, 1870 bp, Artificial sequence
  DNA replication origin
tggcgcttgctgcctggcacacagcaggtgactacactgcatggcttataaatgtggcctctgccaggaaatcctgggaaagagccagggaggtgacgttttatccacgagcctgctatggcttagcctagccctcccctaactgtgaccaagctctggatgagacacagacaactactgaggacctgcaaagtaaggagactgcagggcggaggcggaacttggaggagtgacctgccgtggagtttctggtttcctccttgtggctttgtctggagggcaagccccactctcagatccacatggcaacacaagcagctaaaacgcagatagaaaccccaacctgggaaaaggagtcctacaggtaagaaaggggtggaaccccagaatggggagagccggggaagaagagaggggtggaaccctggaagggggagagccggggaagagagggggcagaaccccagaagggggagagtgggggaagagagggggcagaaccctggaaggaggagagcaggggaaaagagggggcggaaccctagaagggggagagccagggaagagagggggcggaaccccggaagggggagggctggacacggcaattgcctaattctgtgcatgaatccgcataagtctcacagtgccacccagcagtgccaacccagcaaaggtcttgagaaccacactgagagaggtggggtttgggatgaacctggctgctaaagtggaaacagcaacgttccccgagggctaggacagcacccagagtccacacggtgtgctcagacgtaaaacaaaattactcaatagacacaaaactaggaaggtgtgatcatcctcaagagaacagacaatgctcagatgccagccccaactgacacagatgcctacagcagccgcggtaactgctttgcgagttgcacgcatacacagcacacgcacacacacctcagaaaggagcattagatgaaatgaataataaacctcacagagaggtaggaaaaaaaataaacaaatgagtatttttgaactaaaagaatagagtatctgcaattaaaattgtactgatggactcaatagcagaatggagacaaaggaaagccagcgaacgtgaagacagataaatagaaaatatccactccgaagaacgaagataaagaggaaaaacaagaacaagcatcacgggccagctggggtcgtatcgaaaggcccagcacatacctggttccagaaagcaaggaggaggttggggcagaaagttatttgaaggaatattggctgaaacatcccaagtctggtgaaatacataaatgtaagcattcaagaagctcagtgaaccccaaagaagataaacagaaaggaaaatagacccagacatagcatcatcaaattgctgaaaactgaagaaaacatctggaaagcagctagagaaaaacaacacatttcgtacacaaaagcagtgactccagtgactacagaattcttgccagaaaccacggcagccaggagacagcagaacgatgtctttaatgcatgaaaggaaaggtttctccttgcaaggtgtttgttcatttcttccaagttgtggaatatatgggcagaagattggacaccatccccctcgactcttttttcccatctgtagggtctgcggtgatgtcctttttagcctccatgtttgtaatgagggtctctttgttttggggtcagtctggccagcagcttatcaattgtattgatcttttcaaagaatcagcttgggtttcatttattttctctattttctgtttttgttttttgttcagctgatttccaccctgatctttattaccttctactttccgcatgcgttttgtaatttatt

SEQ ID NO: 39455 - DNA, 907 bp, Artificial sequence
  DNA replication origin
cccctccgcttccctgagtcaccgccatccggccagactgcccaccaccggctctgagctcatcggctctgcggtcaatcacttccctctggagctgggcaaggcactggggaaacgtgggcctgagcaggactttgcagccaaggccactggactagcttgagagtcctgggcagcatccaggcacgggctccaggccttctgccccagctcgaggtgccatagcaggtgcctctcatgggattggggcaagtggcacagtcttgaggctcccccagtcagacccttcccccttctccccaggccatggtgggcaggtggccacttccgttgctgcctgtgtctgaggacattggcccagggttggcaagaagaggaaggtgttgcatcaacatgcagcacattcacctgacaaggagctggccgcagcctccgctgccaaacggtgacggtgctggctggtgcccccaggagctgttcaccacctcccgggctaatggcgcttgctgcctggcacacagcaggtgactacactgcatggcttataaatgtggcctctgccaggaaatcctgggaaagagccagggaggtgacgttttatccacgagcctgctatggcttagcctagccctcccctaactgtgaccaagctctggatgagacacagacaactactgaggacctgcaaagtaaggagactgcagggcggaggcggaacttggaggagtgacctgccgtggagtttctggtttcctccttgtggctttgtctggagggcaagccccactctcagatccacatggcaacacaagcagctaaaacgcagatagaaaccccaacctgggaaaaggagtcctacaggtaagaaaggggtggaaccccagaatggggagagccggggaagaag

SEQ ID NO: 39456 - DNA, 953 bp, Artificial sequence
  DNA replication origin
gtgtttgggagcatttggctgtcacaggctctgacctcggcagggccaggggcttcctgggaacatgactctgagccgggatctgaggattagcaggtcctgcccagtcgagggagggcggggcatggtgagcggccgagcaagggccccgtggcaggaaggagctggacacacacagaaaaatgccagggggtagtaggagggcatcggggtggggaggcggaccgtgtgggtgatgccaggctggccggcggggatcggggtgcgcaggacctgccaggctgcgaccccagggcagcggaggcacgggaggggtggagggggaggcacgggaggggtggagggggaggcacgggaggggtggagggggaggcacgggaggggtgggggaggcacgggaggggtggagggggaggcacgggaggggtggggggaggcatgggaggagtggagggggaggcacgggaggggtgggggaggcacgggagggtaggggaggcacaggaggggtgagggaggcaccggaggggtgggggcacagggtctgcctcttgcacttgagtgctcttccccccacccccaggcctggacgtgggcggtgacggcttttgcatgggtcctccgggcagcaggcagggcttgcacaggggtatggggcttgggaggggcatggtgctgccatctgtccagaagaggggtctagggcgagcagagccccccgccccccgagtgctaacagcctcctggggaggagactctgtgcccacaagggcctggacgcctgggctcagtcaagtccgcccctcatggtggggcttcccaggctcttgtgccctcggtgtgcagtgcccacctgatccttcgctcgcccaacctcagagcccctgcttctcccacagacactgataacactcatctcgtggctgtcaacccagaagggatgcctgcaggtg

SEQ ID NO: 39457 - DNA, 1735 bp, Artificial sequence
  DNA replication origin
ctgtcatcataaccctcattatttatatctctaaatggtctgagaggtgttaactcgtgcagtggtttggatatgtccccccatacgcttgtgctggaaacttaggccatgagggcagagcgaatggattaatgccattaccttgggagtgggttccttataaaaggacgagttcagcctcctcctgctttctctctcctgccttctcttctgacttcccccatggggggatgcagcaagagggcccttgccagacgccaaccctcaatcttagattttccagcctccagaagtgtgagtcaatgcacttctgttctttataaattatccagtctgtggtattctgttatagcagcacaaaacaaatgtggacaattccctttgaacaggcctcattcccagtgatagaggcactgtctgggggtgttcctgcctcctgggtcttggcttgccacttctagggggtgagcttggagtatcaaagcctgtttacactgagccaagaccctctcttgctttgtaggcaaactacgatgatgatagtgatgatgctggcaatgatggtgatggtattggtggtggtgatggttgtgatgatgatggctaccatgagaatggtggtagtggtggtgatggtgatgattgtgttgaggatgatggtggtaatgatggtggtgatggttgtaatgagggtggtggtggtggtattgatggtggtggtgatggttgagatgatggtggtggtgatgatggttgtgttgaggatgatgatgggattggtgatgatggtgatggttgagatgatggtggtggtgatgatggttgtgttgaggatgatgatgggattggtgatgatggtgatggttgagatgatggtggtggtgatgatggttgtgatgagggtgatgatgatggggttggtgatggtggtgatggttgagatgatgatggttgtggtggtggtgatggttgtcatgaggatggtggtggtggtgatgatcatggtgatggtaatagttgaaatgatgaggttggtggtggtaatgatgatggtggtagtgatggtgataagagttatggtgatgatgacaatgacaatgatgtatgaaggtcttcctcatgccagccctcctcccaacacatggtaaagagctcgaactttatctaaagagcaacagagaaccgcagaaattttaactgcgtatgacataatttgatgtgtgttcttaggagatcttgtggcatggagagggactgatggagacaggagaccaggtaagaggtgatgggcaggaggggtggcaaggaggccacagacttgagaaaagttttggagctagggctcaggactcactcttaggccagaggtggcagacgagggaaagaggccattctcgaggtgaggaggacaggtggggcagggagagccaactggggaaaagccgaaaaatttctgagttagacaggaaaactctgagacacctgctgggtgccagacgtgatagtggatcagcagctggacatggaactctgggttttgggggcaattaggcttagaggtgagaaatccagggtcatctgtggaggtgaggtggcatttacctagaccaaggctggtgccctctgggtgaggctgctggtgaaagtgaccgtgggctggaagagcaggagggggagggggtgttggcacattgcttgtaccctggggctgccagcagtgcccagggagcttgag

SEQ ID NO: 39458 - DNA, 708 bp, Artificial sequence
  DNA replication origin
ctgcggtttgggtggccgcagttgtgcctggggagctctggccaactctgtggagtgtggcaccaccctgggggccagctgtgcctcaggacccctctctgcccatccctccatgtccaaccatgctgctttcctgccagtgggtgacttggcccagccccactgcggtggctcccaggggcagccggctcggtggggtggggggtcccaggagtggggactgcctgcctcctctccgtgtcttccctgcagtggcagtgggcaaagtgcaggtggcgaggtggtctcaaccacctttgcacaaatgaacccgacacactcggggccggccccgcaagtcccgctgtgccttccaccaagtgctcaggggttcccgagacacagtggggagtgaggttgaggccgtggtggaggccctgggcctgggagtgggtcctgcccggctgtgtgagggtgggggtggtgcagtcggctgcctcggggacgtggggcacggggatctcatcaccgccattgctgctcctgcagccactcctgccaccactgccggcaccttcctgctgcagctggtgtgatggcagcagccgctccagacactccacatgctgcagccatcactgcctttggcatgttgaagggtacagttcagtggcaccgagcccattcacaacgtgaattcatcaccaccatccatttccagaacacttt

SEQ ID NO: 39459 - DNA, 1019 bp, Artificial sequence
  DNA replication origin
cctcccctgcagctctggcgcaggcagcagccactcaggcgtcattggctaagatcaagaggatgtgccgtcagtacaggaggcgagaatgaaccaagacccttgcagctcctcagacacaggaagcgcttccaggctcggggagtggggtcctcaagggagggggggcagaggcaaggctggggcaccaccaaatgccaagtgccccagtctgacactcagaaccagcccaggagaaggggaagttggctgagaacaaccaggcccagccaaggcccccagcctccggccccgggacggtctccctgaagctcctagcgtacccccttattttctcccggaaattgtcccatgtcacctggcctagcctgccctgcctgccgggagcctccctctcctgggaccccacccccatccagaggccctacccagagccacggggttgtgaggggtgggtcagcttctctgggggctccaggcctggggttcagcggcgtcctcctgctggtggtagtaggggtgctgggggcatgagcctcctggactgagcgggggaacccaggggcatgctggccaagggcagtcctggacaggggtcagcggggtttggggggtggcagagagggagggcctgagctgtgtgttggatggtgacacctctggtcaggtggaggaggggcgggagacagagacagagacggatagtgagggtgggaggcaccagcgggttggaggccccgtcttcccagcccctgacggaccatcctgggagatgcctggtgtggtggggcctggctcgggacagatgtgccctgggctgtgattgtggtgattcctgctgggtgtaaggggccacccggggagccggcacccactcgggaggaatgcaccctgccttaggacaggcccatccaaagaaacagcgcttctctctcggtggactttttaagacaaagaaataggtgctcagtggaccaagtgaggagcgtttagaaggtggcaccttgtcccgctgccct

SEQ ID NO: 39460 - DNA, 1151 bp, Artificial sequence
  DNA replication origin
gccgcccccgccgcagagggaggggcggggtttcctgcgcggggcccgcctcaccccccacggccaatggcagcggcgaccgccccctcctcccccccagggcacagaggcgggaacgcgcggcgggggaccagggcgtctctctccggagcgctgccgcctcctggactccccgctccagctccaaggaccggcatcgctgccgcagccgggaggccgagaacgcgcggtggcgacgccgccccaggccacgcggcgaggcggttccgaacggactcgggattcgctcctgggcgctgtggggccgagtggagccaagcggccgtttttcagctccgcccttccgaaaggctgccgcagggtcggggccacgtggggcccgcggcagaggggctgggggaacgccacgggcggccctggtgaaggtgcccgccggtctcggcctgacccccaggccctgttctggcacgcgccccacctgcgcgcacagtgagaccggcgccctagcctgggaatccggggaatctccagcccgttgccttttccataaccccgtcttctttttcacactagctctgagggtggaaggcagggaggtgccagccacgttcccttccacagagggaactccctgttggaattcctaccccggcttcctgccgtctgtcctggaacacattgctccaggcctccgagcctcagtttcctcgtttgcaaaatgggggcgataacagagcgtcctcaaaggggataagacggaagaagttggctcatatcagggctcataattgttgccaagtattaacaggtaaccacaatcacactccacaaagcttcccttttagtgtcagtgaaattaatttaaaagaagtttccgaaagtcaagtgtgtgtgtgtgaatcctgagataagtcaggtaaggggggaaatgaccacctcacggccccaggctggtgaggaagtcctagccacggaggcggtgctgcaggacctggcctggtggcatagcgtggcgggcgggttcaccgtggagagacgaaggaggtgctgcggcttgtgagaaaaggcccacaaccccatgcagttatttatgaaatggttttccttcctccagggcttggggctcctgcccactcgtatcaggtcccggg

SEQ ID NO: 39461 - DNA, 1678 bp, Artificial sequence
  DNA replication origin
ggccagagcgtggagcgctgcgcggcgcggcggccgggccctcgagacggggacggtgagtgcgcggggagcggggagctggcgcgggtgcacagggcccgacctgctggcgtaggagcgcggcaggtgccgccatcgtgggcaggggctggagcgccggggggatgcgcgcgggggcgggaggcctgggcaccggccgagcgccccgagcctctccgcgggggagggcaggaccgagcggaatcggaggccaaattcgccgcttcccgccgccggctgcgcaggtaggagctcccgagtcgcccgcaggaggaccgaggcgaaggggccccacgctgcagcgggtgccggggggaagcgggtgagcaggggctgcggccctggcagggactgtcggagtggccggggcaggtgacctgggcaggtggcccggagcgcgcgcaggcgcaggccccacagatccagctggggacgaacgcgcctccgcggagctccagagttgcggagtcacccacctgcggcggccgctgctgccgagtcaaggaggaaaccttcatgcacggaagtttctcgggggcggccgggctttgttcgcgccagaggcgctcgagacatctccgggaggggagcgcgggcggagcgcacagggctagtttccagcagcggcggcgcccctttccctgccccaccacgcgacgtcctggccgtggcttggggggacccgggcgccctccaggtgcaggcagagggtcgggtgccctcgcgttgctgttgggctcccctgaccagggaggatggaaaggaaggagcaggcaggcttagctgccctagaccggccctagaccgggaacctggaagcagatctgacttccacttccaagggagaaaccgcctcccgcactggcgccccgaggggagagagaagcccagctaggtttccgcgtggtccgcgtggttggtgaaccctcaggctggggggtgccccgcttggcgtgcaaggccctctttggagctgccgtgggacctggctatgcgtcctgtttctgtctggaggcggctggaacgcggtagttttccacatccatgcaaccagcttgtcagctgctgctcctcagctgtggtttttggaacttgggttacctccatctaatcagaaactggctctgcagagcccggtgtcagcgacgttttcattcccagcagcgggagcaaatggatctcagaggacagctccttggccttagccggctccgcttgtgaatctggtaataatgacaaggacagtgacagcaggggttaggtgttgagtgctggaatgtgccgggcatggtacccctgctttgagcatcgtctcattcagtccctagcaaccccacgaggtggccattatcactcccactttatagatgagtaaactgaggcaccaagaggttaagtgattgactctaggccacacagcttgtaagtgctgaagaggtctgactccaggtttgtctgatccaggcttgggctcctgttttacgactctgttcttaaagaggcaaaaggcgactgcagggtcaggccggagacccagaacagcgtcccaagagctgggcctgcggttactgggccagagtgtctgttctgggttgtcagtgatcgcaggacaccagtaggatgttgctcgggccgagac

SEQ ID NO: 39462 - DNA, 1696 bp, Artificial sequence
  DNA replication origin
tccaactccacctcatagcggccagccgtgaagtggggcagcgcgaacaccagcgaccccgtgcccataagcagcacgccccagcccagccagcgcggcttgtgccctgagcccccgaagtagctgacgaaggtgaggcagaggcaggcggcaatgtcgtaggagctggcgatgagcccgctctggtagctgtgcaggtcatagcggcgctccagggaggtgatgactgtgttgatgaagccattcacagtcatcccctgcaggaatgcggccgcacacaggaagaacaggatgcccttgggcgtgttgaggacctgcaggcacggcggtgcgaaggcccaccagccgcacgccacgctctgcccggccgagacgtaccgcacctcatgggtcccccgggcgccatgcttctcggcccagagctggcagaggggctgcttgctggtgtccagggggctatgggcagcggagcggagggagccggggctcaggggtgtgcccggggatgccctcctgctgggtggggtgtggtcaagcccgttttccatggctgagttggggctggggaaggtgagcggcttgtcccccagctgatgcaggggcatctccgcgcctccgcctggtgacctcgaggcttcagccacgcagtgggagtggcctcagcgggagtggccaagtggtatccgaggggctggtgtgtcctgtgagaagaatgtctggttagcaagctcacgtctctccacgggtacagcacatccaggagggaacattccagcacacccatcacgggggtggctcaaagctctgcctgccttgtctcaagagcctcccaaatccagggtggcgtctggccaggcccacacccaggcactgtgtctcccagccacagctccgctgcggaaaggtggggggctgtgcccagcttgctcacagggactcaattcctgccctttttagaactgttggaaggagaagctgccgcttcagcggtgtggcgtcagggctgtgacgggggcaaggcctactgagatggggccacgcggtggagagtggagctgagacgcagaggccgagtcagacactggggtcccaggtcaccccgccctggccccgctcgctgtgtcagccacgtcccctgccatttgcagccaagtggccctgatggactccaccttggtcctggagcctgaccttgttcttccttaagttcacacccggcagctctctgcaccctttggcgtgaggaaggagctcctctccgtgcagagtttgggaggtgcaggaatgagctggaagcagcctcctgggccacgtgagcccccagcaccggaaacacccccggccgccaagctccggccgctgctgggtcagcctgtggctaacaggagttgcagtcggcagccatgtagaccagttaccaggagaacgtgcccacgtgccaccttccttctgaaccctgcgctgcccctgccccactgccctcaccagccctgttccccaccatcccgaggctccacagggcaccgcctcactccccacaccaattcctggagcaacagctcccccctactgcccaaggccttctggggaacccaggtggctgtagcctctctgcatcttaagggctttccccgtcagaaataaaccggcgaataaacagggctgctatgatgcggaacacctgtgccgcccccgc

SEQ ID NO: 39463 - DNA, 1283 bp, Artificial sequence
  DNA replication origin
tgggccgagaagcatggcgcccgggggacccatgaggtgcggtacgtctcggccgggcagagcgtggcgtgcggctggtgggccttcgcaccgccgtgcctgcaggtcctcaacacgcccaagggcatcctgttcttcctgtgtgcggccgcattcctgcaggggatgactgtgaatggcttcatcaacacagtcatcacctccctggagcgccgctatgacctgcacagctaccagagcgggctcatcgccagctcctacgacattgccgcctgcctctgcctcaccttcgtcagctacttcgggggctcagggcacaagccgcgctggctgggctggggcgtgctgcttatgggcacggggtcgctggtgttcgcgctgccccacttcacggctggccgctatgaggtggagttggacgcgggtgtcaggacgtgccctgccaaccccggcgcggtgtgtgcggacagcacctcgggcctgtcccgctaccagctggtcttcatgctgggccagttcctgcatggcgtgggtgccacacccctctacacgctgggcgtcacctacctggatgagaacgtcaagtccagctgctcgcccgtctacattggtgagtggggctggcggggtaagtgctggcaggggtggctgagggcagtgttgcaggagtgagggtaactggccggagccagccccgccccctgccttcgtgtaccccttgtctgcatggccctggggctgctgcaagagttggcaggggaggagggtccgccctgaggcccaaagctgatgtaagggactccggctttctcatgtggaccctgctcagggctccaggccgctgtgcccgggagcctcagtgcaacccctgcgtggtgtccagcccaccttgccaggaccaaggggcacagtcactaggcgctgggtggcaccaggtccaatggcggcagacctcatgctccggctgggaacctggcacttgcctgggaaggagtttgatgtgggataagtgacgagggacagagccccaaggccacacccatgtttccctgaaagcaccatgttggctccatcagccacatagaggtggagggacagagccctgagaccacacccacgtctgcccgtaagcaccgtgtctgctccggcagccacataggggtgtggaaaagaccgagcaaatctggagagtcagaactttaaggggaaaaataacatgaagcagctcatggctgcttcacagctatctaagagtaaagatctatgttataactctatgctag

SEQ ID NO: 39464 - DNA, 839 bp, Artificial sequence
  DNA replication origin
atgcagaatggcgggtgcggggcttctcccaggcacggggccccacacggccctccgcagcccctgggtggtgcacagcggccctgacgcctctgcctctctcgcagccatcttctacacagcggccatcctgggcccagctgccggctacctgattggaggtgccctgctgaatatctacacggaaatgggccgacggtgagtggccgcgcacccagctgcctgcgctggagaggcccacgtgtctctggaagggggttcagagtcagcagggcccactctgagtcaggccgggcgcggcgcaggtgctgggcaccccccgggctggagggagtcaaggctggccttggctctggaggactcggaggatctgtaggggccttgggagtcggccccagggcaggaggcagggcaggcaggcagtgcccgaggcctaagcgcttgcaaagcccagcgagccctggccactagttccctaatgaaactgagatttttctgtttcttttcctttctttgtatcttgtgtgtgtgaccctagtttctgtaaatgtaagcaggagaaagcaaggaggggtggagggagaggcagagagagacagagggaaagacacgtagagacagaccaattcacagagacagatggagatagagatacagagggacagaaagaagacagcgacaggcagagagagacagagacagatggagatggggaggcagaggagacatgtccttgctgaccgccagtgctctgtgggtttgggccccccattcatcccttgcccatcctgcacttgtgaagtttccaaggtcctctgttactcggcctgggcaccgct

SEQ ID NO: 39465 - DNA, 750 bp, Artificial sequence
  DNA replication origin
gagcgcggtagattggcggtggtggcccacatgcctggcacctctgccatggcccagggtactctgtgaacgctggcaggaggagcagctctgaggaggggtccccactttctgcagacctgcccagcctgggaaggccagcctgcctctggcaccgagaaacccccagctgcactgttccaggaggtcctgaggcaccagtgcctggctcatggaacagccaggtccaaacccttcctgcaccaagtcacagaagccaagactaggtggctagggggtggagcccaccgtggacccttccacctacggagcatgtcccacaaagagggcaggaccaccactctcccggcctgtggacagagtcgctcagcccccgtggcgctctccacacctgctctggcagcgggggtgggagggcactcactgccatgtgccctgtctgggtctttctagaagatgcccttgaagactctgtttctgagaactgacataaaagcagaggacccccaagattcagttttctcaccaaacaaggtggcagcttctgaggcactcaggctgaactgggactccaagaacttggggctgaacgtggacatgccggtgatgagagtggcctcggtggccccggccaggcagagcaggatgaacgtggggttcttcagcaggagccagatggagctgggcagaggtgggggtgtggagaagagactgagggtcagagtggtgggcagaggtcggggtgtggag

SEQ ID NO: 39466 - DNA, 913 bp, Artificial sequence
  DNA replication origin
cagccagggactcaggcagggggccgtggtgggagagggtggtggatcagccgggtccactttacaggtggggaaactgaggcatagagggatcaattcctgcctgcatggcagcactcaacaccacacctgagtgcttagctgttgcgctgatagagccctaggagggacctctgtccagagcccacagcggggatgcctcagaggggaaggggaaggggaaggggaaggggaagggggagcgggggggcggggcggggcggggggaggaggagagcccagagtgctccaaggtcagcggcccctgccccagtgggaagccaatgactcctccactgacccccctccagggcagccacaccccctcctcccccaggggcctctgccgagtccctgcaggctgtgacaaggacatttgtcgaagcctgagtggccaccaacagtaaaaaattgcgattagctggcatctagcttctgggctgacaagtgaggagggcacaggtgaggggacaggtggagaggggacaggtttggggggacaggtggggaggggacagatttggggggacaggtggggaggctctccaaggggcagtagagctgacctctggggggctgttgagtgtgggaatgtgggcttgtgaggtcagcccagaggggccaggccaggatgggcctgtgggggagggaggggagccctcatctgatgccctcttcctgtccagatagtggaccctggaagggtagagcgcggtagattggcggtggtggcccacatgcctggcacctctgccatggcccagggtactctgtgaacgctggcaggaggagcagctctgaggaggggtccccactttctgcagacctgcccagcctgggaaggccagcctgcctctggcaccgagaaaccccc

SEQ ID NO: 39467 - DNA, 836 bp, Artificial sequence
  DNA replication origin
gaaagccattgctggacacaacccaagtcaggggaccgggtttgctggagtgggtggcagggggcatgcatcccccaccccagccatctgctggctctggagccctgctctcacccagttggtgtctcctgggccctgcgtccattccattttgccttcaaaagcctgagctgctgctcttactcactcaagagagcctccagtgtccaatgtgagccccaaaccccgagaaaatataggcagaattgtgtttgctgtgtgcacacagactgagcttttgcttaagaacctggtggggctacaggtgagcggggttggggtgagcagggtcaggggtgagtggggtcattggtgcacgggcagggttgcacagggctggggggtgcatgggtaagtcctagcactgagtggtgtagggggcagcctccctcccaaagaggcctcgtggggggccgcgggcaggacctgggcgaggtgttctcgtagggaccccagggatcctccttgccctctgggatgggctatctctgctgctcagtggacgcccagcttctgcggcttgcatatggggtggcgtgtgagtcagccccttctatgtatgtgtgcacgtgtgtgtgtgtgtaggtctcttatgctgctgagagcctggaaggcaatgaagttggtggtgctgggacctggaaagcaatgaagctggtggtgctgggacctggaaagcaatgaaactggtggtgctgggacctggaaggcaatgaagctggtgggggtgggtaaggcccgggggtggctgcagcgcggcactagtgcctggtaggacatggccgggaggtgagtgg

SEQ ID NO: 39468 - DNA, 956 bp, Artificial sequence
  DNA replication origin
ttggaaaggggcggtccccaggaggggctcaatgcggggtggagacagctgctcaggtgagtgctgtgctgggcacccggctcgctgggccctgctggggctggggtcccctctgccacgtcccccgtagggacctgctgctcatccagcctgggaggccatgggccagcacctgaggaggctgagcatctgtccgtctgtccgttcgggcagctggtatcctcagtgcctagggtgatgtctgcgagccctggcttctgcacgagcaccggtgtgatggaggaaggactgatggagagagggagccactctgcccaagagacaggcctgcgaggcacggggcacagccggggacaggcctgcgaggcacggggcacagccggggacaggcctgcgaggaacgggacacagccggccagggacaggcctgcgaggcacggggcacagccagggacaagcctatgaggcgcggggcacagccagggacaggcctacgaggcgcggggcacagctggccacgtgcaggccagggaaaaatgggatgagggtttggagatgagggcctgacttgattccttagagaccgtccatttatgggaaagaatggggcgcctccggccacctgctggctccaagactaaccacaggaggaaatgtcagaggaaattaactgtgctcgagcttttgtgatgagcctgattttccagcttctagaaagctgtgcttccatgctgaggcttgtactcgttcggtttattgggaagaattaaagggcttctcggaaaatgttaatgtctccttcccaccagcctggccaccccagcttcccccaggccctgaaagttaggtctcccctgtgtttggtgcttctgacattgcagagggactccttcctcctggcagctctgccttcaagcccagaaagccattgctggacacaacccaagtcaggggac

SEQ ID NO: 39469 - DNA, 1625 bp, Artificial sequence
  DNA replication origin
tgactggatcctgggggcggtcacccccatgctgttctcatgattttctcacaagatctggtggtttgataaggaactcttcccccttcattcagcacgtctccttgctgcggccttgtgaggcacgtcctcgcgtccattcgccttccgccacgattgtaaattacctgaggccccccagtcatgcggaaccgtgtctattaaaccacttttccttacccattatccagcctcaggcaggtgtttgtggcagtgtgaaaacagacgaatacatgcggtgaggctgtgcggtacagctgtagagtgaggatgtggagtgagtgcggagtgggtgtggggtgtggggtggggtgtggggtggggtgtggggtggggtgtggagtgggtgtggggtggggggtggggtggggggtggggtggggtgtgggtggggtgtggggtggggtgtggggtggggtgtggagtggggccgtggactgcagctgtgctatgcacagctatgcagtgaggcttctggaattggttgtggtgctcaagtttttaactggcctgcgtgtactttaatgtccaaacatgacctgccctttctggggtttgccttaagtgtcactgaggggaagagaaactgaccgatggtgcagcgaacggttctcctttccctgagaaagtcctggccacttctctcctcacgggaggcggcctctgagccctggcctgtcctgcctgataagacagtcctggttacctgtggaccttgggccaggctggatggtctgtgctattgatgggatttgtggtgggcattttgggccacatggtgtcagctgcacctctggagggatcagagaccaagctgccacacgtggtcgcttggcagagcccgtgggactgagccccagcaaagccctgaaccccaaggcaggccatcggctcggggagaagcaagtgctgtcaggccgcccagtggggagagcagcagcccatgcctggaccctcctggactctgccagttcccttcaccgattctagccggtgccccttcgctctaatgaacgtcaactgtgagcacagcaggtctgtggcactgcgtgagccttctggagaatcgcggagtctaagggtggtttggggacaccagagctgcagggggtaaggcagtgattgaaggaaaaatagaactcgtctgatttgttcccctagggattcaggctatttaatgagccaaatagtcataaaccatgtttggggactgtacagataatagtcttctagtgactggcaaagcctgctgcctgcagtgccgggtgtggaggcttttggtccctggtcctaccacaatgggctctttattccaatagcttctttcctcacccggcaaaggggctgggctgctgcgggatgaatgcctggccagtggtggggacatgtcttacaggcagcacagaacacacctgagaggataaaagctcatgtggtctcagcacctgccgatggagtcggggggtgagagagaataagaacacccgaaaaaatcagggagctggggacagggactggtgtctagaacaaggaggagcaatctctcattccctatctagaaagcacagtgggaggaggtgctcggg

SEQ ID NO: 39470 - DNA, 943 bp, Artificial sequence
  DNA replication origin
cagccccagcacgcatcctcccaggccctgcaggctttgcacactccctccctctgagtgtcctcacagggtgccccggcccctggctcgggagccaggtgagggcaagattcctgtcctttccgtgtcccccccagcacctggtggcactggcataggtggccaggcacaagcttgcccccccctccatgtctgggttgcccaggggcccccagggcactactgtcccttctctgggccctccccgccccctcccctgctccctcctccccagaacccctgggagaggttgggtagagctgctgccccatgtgtgcagggctgggaggagctgctcgagtgcagcccagggaaccagcctggcctttgtgcacatggctggctgcacctgctgtgctgggagcaggaaacctgggcaggctggggcgggggtcgcagggtgttgagggaagcgggaggctgaggaaccccctcccgggcccgcccagctaggagaattcaaggcttctgagccggtggctggcagcgggactctgtgattattcgtccgttctcgccctgctttggacttctctgttcaaccggagcctgatactcttgtcagggggctgcagctcacaaacatcagagcttagaaatcttggcatcaaaggaaacgccagtgatccctttgctggaagccagtagataggattgaatgttggccctgctacttcacatttgggcgagtgtgcttagcgtctctgtgcctcgattgagtcgtctgtaaaatgggaatagcggctgaatgaagggcagggctgttactgatgggtctccacggggaatgaacgaggtcgaatgggctgtcgggtgtgaggtgaggtgttccatccaactagaataggctggagtaggccagatttgtcctctggaagacacgattcaccagttaagtacacag

SEQ ID NO: 39471 - DNA, 1332 bp, Artificial sequence
  DNA replication origin
gacaagagtatcaggctccggttgaacagagaagtccaaagcagggcgagaacggacgaataatcacagagtcccgctgccagccaccggctcagaagccttgaattctcctagctgggcgggcccgggagggggttcctcagcctcccgcttccctcaacaccctgcgacccccgccccagcctgcccaggtttcctgctcccagcacagcaggtgcagccagccatgtgcacaaaggccaggctggttccctgggctgcactcgagcagctcctcccagccctgcacacatggggcagcagctctacccaacctctcccaggggttctggggaggagggagcaggggagggggcggggagggcccagagaagggacagtagtgccctgggggcccctgggcaacccagacatggaggggggggcaagcttgtgcctggccacctatgccagtgccaccaggtgctgggggggacacggaaaggacaggaatcttgccctcacctggctcccgagccaggggccggggcaccctgtgaggacactcagagggagggagtgtgcaaagcctgcagggcctgggaggatgcgtgctggggctgcctctcccaaatcctgctggggcgcaggctctcagggtggcttctgatgacaaatccaggcagtaataaggggcccagggcatcacatcccatagcgtcatgagaccagcccagggtgccagatgcagggccctgagtggggagggtgctgctctgggcacctgctttctgccctccctcattcacccctccccagactttgatgaaaccatctgtggctcccggcctctgcaggacccagcccctcagctcctcagcccctgcaggtgtccctcggtactgcctcacgccatcctgccccaggtgataactatgccctgagcccccaccatttccactgggcacatcccagaaatacgcattcacagaccaggcacgcccatgactgcggccagattttaaaaggaatcaccagaaatgtaatctccagtggtcctagagccccctgggcacccagcttctggcaccctgtggacacccaggagtgggggtcggcccaaccagctgcgcagccgcccagccctgccagcggggagcttcctccctccctgccctccggatacaccctcaccccaactgagcgagcccagggttgggggaggtgcatagttcccttcctagccggtgcgagaaattgcggagaacagggaagagggtggcaggaagggtctggtgcacgatacccgccgcgcccgctcggaatcctggttccctggagcgctcaccccag

SEQ ID NO: 39472 - DNA, 944 bp, Artificial sequence
  DNA replication origin
gggcctggggaaccgcgcggtttggagatcggaggcacctggaacccgtggcaagcgccgagccgggagacagcccgaggaaccacgggttctggagctaggagccggaagctgggagtccggaggagagcggagcccggagcccggagcccggggcggcgcgtctgggtctggcgcttcccgactggacggcgcgcccgctggtcttcgccacgcgccctcccctgggctcccgttcatcggtccccgcctgagacgcgcccactcctgcccggacttccagccccggaggcgccggacagagccgcggactccagcgcccaccatgcgcctcaacagctccgcgccgggaaccccgggcacgccggccgccgaccccttccagcgggcgcaggccggactggaggaggcgctgctggccccgggcttcggcaacgcttcgggcaacgcgtcggagcgcgtcctggcggcacccagcagcgagctggacgtgaacaccgacatctactccaaggtgctggtgaccgccgtgtacctggcgctcttcgtggtgggcacggtgggcaacacggtgacggcgttcacgctggcgcggaagaagtcgctgcagagcctgcagagcacggtgcattaccacctgggcagcctggcgctgtccgacctgctcaccctgctgctggccatgcccgtggagctgtacaacttcatctgggtgcaccacccctgggccttcggcgacgccggctgccgcggctactacttcctgcgcgacgcctgcacctacgccacggccctcaacgtggccagcctgagtgtggagcgctacctggccatctgccaccccttcaaggccaagaccctcatgtcccgaagccgcaccaagaagttcatcagcgccatctggctcgcctcggccctgctggcggtgcctatgctgttcacca

SEQ ID NO: 39473 - DNA, 1443 bp, Artificial sequence
  DNA replication origin
tccgacctgctcaccctgctgctggccatgcccgtggagctgtacaacttcatctgggtgcaccacccctgggccttcggcgacgccggctgccgcggctactacttcctgcgcgacgcctgcacctacgccacggccctcaacgtggccagcctgagtgtggagcgctacctggccatctgccaccccttcaaggccaagaccctcatgtcccgaagccgcaccaagaagttcatcagcgccatctggctcgcctcggccctgctggcggtgcctatgctgttcaccatgggcgagcagaaccgcagcgccgacggccagcacgccggcggcctggtgtgcacccccaccatccacactgccaccgtcaaggtcgtcatacaggtgagcctcagtaaccagccccggggctcccctctccttcaccccaaaagcagtgccagtggtgtgccttctgggtagggagtgggagagatgtcacagagacagtctactcctgcgaggctgggaaggcggttggggcagcttgggggcagctccagagttgccaggctcagcccctatcttcttccctcctgttgaggggatggagcccctgcctgtgacctctctggtgttggtggctgggcctcggacatctctgaattccttaagcctaatggaaacatgtgcgctggcacctgcgtctccaaaggaagagtaacactttcatcagcttctcaaaagactgtgccaccaacaggtgatgttccttcctctgcagagaagcccccagactggctctgccggtgcctcccagctgcctgccctgacccaaacttgggagtcagaacagaacctgatgccgtgttgggccagttcctagtttagcctcagctttcccatctgtgtgatggggtagtgatagcattgacctcagaaggtagagcattggagagaggacgcgtgggaagtgtttgcatggcccctgacacatagaagggctcacaggcactattattgcgggatggtggggacgatgtttctgcggggaaggttgtgaggatctgcgtgtggcggcggtgttgtggtgaggtgtgtaaaactggagccgagtgactaagggccctccaagggtctgagcaaagcgccgtgggaatgcgggtgggaagcccccttgggaatcagtttggctgaggttcgtggcacggggggttccagtgctggaggggagggctgatcaaaccaaagccccgagcaggaggctggtgtccagggaggaagtcagggccggtcgggaactttgaaaggcatcttggaaatgagcagccttagaagtgtggggtttcctccatttctggtgggctaaggaagccagagggtgaaggatccgggcagagtcgcctacctctgcccagctagaggggccagggtggctggctgtccccccaactccccacacac

SEQ ID NO: 39474 - DNA, 715 bp, Artificial sequence
  DNA replication origin
gaaaaatggaaactacgttctccaagggtgccttcagcaacgctcggccagcatggcgtctgcagggcgtggggccgctgtcctacggttgatacgtcacaggcctctgcgattggacgagtgcctgtggccggccgtagcgtgacttggccaaatctgcctcgcagcctctgagcaacaaggctgggcaggtggtgctttgggaggcaaagtgatgtcccccaggtgcccaatcccaagtacctggcagagagcccacgcacgcggggaggacactttccggggggcggagccgagctgtcctcacgcccctgtgcttttcggctgtttgtttttgaggactgcaggaggctggtgagctcctggccttttgccaggggagcagggggatcggggttctgagcggggggatcggggatctgagcggggggatcgggggtctgagtggggggatccggggtctgagtgggggcatctcctgggtgggcagtgacagcgctgacccctccactgcccaccttctgaaggactgagtggctgtcgcccctggggcccctccacgcggactggggagaggttccccctggccaatgccaatcaaagacaggagcttggggagagcagataaagcctcaaagggagggagaggtcatttctcactgtgtttaccccacaggccgtgcctacttctgcctctggtgaggggagggactct

SEQ ID NO: 39475 - DNA, 1245 bp, Artificial sequence
  DNA replication origin
agagtccgctgtggtacggccgctgggcagtggctctgagccctccgcctccagcatcgaggtgactgaggggatagcacagagagggtggctggacgtggatttcctggaggggaggcgggagtgcctgagccacaaacaggtttcatcacaaaacctgtgtctggcgtggtggcagggggacctgtgggctgaaagcagcagcccctggatcagcaaatggccccggcctcagaactgcacagcagcggccaccagggccacagccgagggccagagtgggagaagagcaagggcaggcgggtatgggtgccatggcaagggtggggccaagtgggcaaagggacagacctgtgttcccggcgctcccggcgtgggccgacccagcacctggggcctgcactcactcacctcctgtcacagcagatggtgctggggacccagcgaggcctcagggctgccccaggcccacggtgcctgcagggccaaggaagggccagtctaggcccggccccatcatctggctctttactccccctcctggggctccttatgaccacaaggacgagccttgtggatgaggggtgtggactggacagcagggagggcttcctggaggaggggctgagtcggctttgaagtcaggggaagggagtggtgcacaggtccccccgagtctcccagcatccgagccttgatcaacaggagggagatgggtaccttggggtcggtgctctctctttccctccccggctactcagctggaccccagggtcacctcctccatgaagccctgtttccccatccctgcggtcagtgtgtgcggcagccccaccctgaggagggggtggagctgggtgggtgcagacactactggtgatgaacagacagacgtccccgcaggaggggacggagcttccgtttccagcaccagcttcattcccggggatttttactgttcagtttctaaaaatggcagaagttcatttcttaacatccccttggcaaggctgcttccatttcggtgaaagtggaggccgtttgtggttttctctgcctgccggaggctgggccacggtgtctgcggaagacgctgtgtgcacagctgggctttctttgtgtgtgccagcattgctcaggaaggggaaggaaaaggaaactgagtcgcgaagggcaggccaacacccggaggccaagcaggtttcacggcagccacttctgccaaacgccagaggcacgtccacc

SEQ ID NO: 39476 - DNA, 1162 bp, Artificial sequence
  DNA replication origin
ctgattggctccaggagaagcctgtctctagagagagacaaatgtacggctcataggctcgccgggagattttcatgatacttcgctggtggtcatcagcctgtccttccaccctgcaggaacgcagcggcagctgaggcctttttaggaaacgaggcctccccatggctcgggctattactgctggcagctgggaggctgaccccacagctgcaggcttctccccaagccgggctgcagacctgagcagggagtagtttgcctgactcttcttggaatgttccagaactcagtggctgcacctgccttgtctgtccctgtccctgggttcatccaggccggccatctagcaccctccgtcaccctctgcgtgcacctgggttcatccaggccggccatctagcaccctccatcaccctctgcgtgcactgcgtgcccaggcccgcctcgtggagccttcaaaagccctgacggtgcacctgatgcatccaaggcacctggcataggcagaggagggggaggggggcagacgtgggcagatgggcactgcagggaaagggatgcggctgttgcggaggaccagggggcatgcagcgtggtctgggggagataaggggccattttccagaggagggagctttacgcagaggctgcagggctgaagggcatctgtgggccaggaggaaggaggtaagagtgtgtgaggtggtgcaggggtgtggggggtggggaggaccgggggcaggggtcaggtcatcaatcctggacttggagcagctcagaagtgggaagcagcagcaggaggtaaagcaggaggccgctgcagccacaactgcattctgggtttgctctcaggggtggggccagggagggacccaggtgtggcctgcatccggggctggacctggcgatgggcagatgtggggacgagagcaggtgggaaggaaggaggatcgcagcgcccaggcagggacggcatctctctccaggctctcctcaggccgagtggggcaaggccacagagggctcgtttaagtgcaggcgtggatgctgcatcccatgctcggcccctccctgcaagtaggacaagtggccccacagaggtcacgtgcctgccgctgtgcctgatgagcaggggtgcagccgtgagtcaaggggctct

SEQ ID NO: 39477 - DNA, 941 bp, Artificial sequence
  DNA replication origin
gggagggagggatgatgggtggagggagggaggatggatggagggagggagggatggatggagggagggaggatggctgaagggagggatggagggagggagggagagatgatggctggagggagggaggatggctggagggagggagggagggagggatggaatgagggatggagggagagagggatgatggagggagggaggatggatggagggagggaggatggatgaaggcagggatggagggagggagggagggatggaatgagggatggagggagggagggatgatggagggagggaggatggatggagggagggatggacggagggagggagaatgcatggagggagggagtgatggacggagggaggatggatggagggagggatggagggagggaggatggatggagggagggagggatggagggaggatggatggatggatggagggatggatggagggatgatggatggaatgatggatggagggagggagggtggatggagggatgaagggaggaagggagagagggatggatggatggagggagggaggaaggaagggagggagaggtagaggaatgaatggagggaaggagggagagagggatggatggagggagaggtagaggagtgaatggagggaaggagggagagaaggatggatggatggagggagggatgaagggaggagggaggggtggagggatagaaggaggaagggatggatggatggagggaaggaaggatggatggagggagggagggaaggatggatggatggagggagggaaggatagatggaaggatggagggagggatggagtgcagaatggcactcacccctcgggggagctggcacccttgggtcttggcctgacagctccatccctatgtctttaaaccttgcccaggcttggggtggttcagcgctc

SEQ ID NO: 39478 - DNA, 1029 bp, Artificial sequence
  DNA replication origin
cttgcttcatgcagccctggcacccgcagcagggtaagacgagatcccagaggaggagtcttggccgcagaactgcagggccaaggcaccagccgctcgggggcctggagagctcaggtcacaaacttgaagtcagctgcccaggaagcagcctcagctgggggtcacaggccaactgggcagtgcccttggccacacctgtggaaggaggacagaggagggcagggcggaggagggaggtgctgggctgcaatgtcacctctacagacctcggctgatcccaagggggtccacagtggatatggtccttcaggggtgcccttgaaggcaggaaggggacaggactttatactgttcctcccaccccttcgagcagtcaccaactgcagcccagatgaggtcaacaggtacagaaaggagggggtgggacaggaaggaggggcgggacaggaaggagggggcgggacaggaaggaggggcaggacaggaaggagagggtgggacaggaaggaggggcgggacaggaaggagggggcgggacaggaggaggagatgggaacagggaggtggaacgggaaggaggaaatgggacaggaaggaagagatgggagcaggaaggagataggactggaaggaggagatgggactggaaggaggaaatgggacaggaaggaggagatgaggcaggaaggaggagatgaggcaggaaggagatgaggcaggaaggaggagatgaggcaggaaggaggagatgaggcagaaaggaggagatgggacggaaaggaggggataggacagaaacgagggatcagggtcctattctaatctcctgggggcatgattgcagggggtgacatgattacttccagccagccctacatgagccacctcgtccatggagtcagccccgccagggcagcagagccctgggttcgcacagggagccagggtggcgtggggcctgcattgcagactccatttgtccacatcaatcacttctctacggcccaaatcacccttagttgccca

SEQ ID NO: 39479 - DNA, 1908 bp, Artificial sequence
  DNA replication origin
agaaactccacttagaacccagagccgatctgaggaatgattcatgcagctagacttatacaagactgatctataagctggaaggcttgtatgttcactgaccatgggaaagcctttccagggcctgagcgtttcccacttgggatccaagtcctctgttcctgggatcaagatatttgggaagccacatccatcttttgaaggaaatttgagcaacagggatcaaagagtgaggatcattcattccatccccgtaagggagggaatgggtcagtaggttgtgtagccagtccacaaatggtcactgtccacctgctgtgtgttggccttgcctgagaggtgggggacagtggtgccacgccattcccagccctggccccctggagccagctgatagcctggcaggggaggcacacgttgaacaaattatcatccgtgattcacaatgacaagtgtgcaaagtgtatcccacaaagcacttattgagtgagaaacacaggtgtgtggccacagagaccaaatgggaccctcacagctggggcggtgaccttggagctgagagtgaaggctgcgcaggagagagacaggcaaaggggtgggggcaggcatttgcaccccagggggctgcagggtgatttgcaaggggagcccaggtgagggtccacagggactagagcaggccaagaagggaggttggtcaggggtcggctggagccaggcttctgagggttgattcccggctctgccctcaacccaggcagttccccactctactcatctctgactcctcccctcaaagcaggcgtgacagcggcacctgcctcagaaaggagggggcgtgtggggaaagcaggtatttcatgacgaccgcccagcatagagccctggagacagtacccctgcccaggttcccactggagcaggcagacagccccggctgggatgagccaagcgtgtgtctccatgtggacccggcccaatgtggggctcagcaccctcgggtctcctggtccgggctcctgtctcacgcttttatgccatcttttctcaataggcacaggggacccccaagggaggaggcgctccagactgaaggaggagagtacctggcagggacgggtggagaggcgcagggaccccaaggtgtccagggaacagtaaggagatgagtaacggtgagggtcccgtctcccgagcgtatctgtgctaaggggctgtgggctgggcttcattcctctttagagcaaggctgaggccagggccacctaggggccagggtagaagacgtaccacgtgacagcagtggcctagacccctcacgaagtctcactgggccatatctccaccagggcatggcagggaccggtatcaccagcggccccctgcacagatggggaagctgaggcccaggtcccagtcagccaagccagctcttggaccactcagcggtcccagcaggtgaggctgaccagagcctgcctgggctaagaggctgcgttcaccagtgccagctgtggttggtcaccaggatgcctgagcgcgctggcacaggcccagggcaccctgcagagcaaccaaccctcaccgagatccccagggaaggggctgttgttggcccattgtacggaggagggcactgaaccctcaagaggctcagggcctcgcccggtcacacagctggaaggcgccagagccaggaaagggacccggaagcccgacccggagcctacacccgcagaggcgaaaacatctgcgtagcggctccctggccagtgggccgtggtgggcgtggccgagagggaatggggcggagagaagcccgtgagggcagggcggaggcggaggcggaggcagaggcggagcgggcggagccggaggccgcggcggccttgattggaggccgcctta

SEQ ID NO: 39480 - DNA, 1149 bp, Artificial sequence
  DNA replication origin
ggaggcagtgagccgagatcgcgccattgcaatccagcctgggcaacaagagcgaaactccgactcgaaaaaaaaaaaaagatgtacagatatggctaatgagcaccatcggtcacgcgaaactagaatcagcccgcgtggggaccccctgccccgccgagaccgccacaaccacgcggccggggtgacgagtgctgcgagggtcagggctcgggaccctcgtgcggtcgtgctgtgcggtcagatgggccgctgctgcgaaagacagtctggccgttccttcaacgatggaaccgtctccctaggaagcagcagctccgtggcgggcgcccgcggcagtggaacaagacacaggttcaggctgggacccgcagccgcgaggcaagcgccgcccccaacccggggctgaacctgcgaggggcgcccggagcgcgggcacccgcacggcgcagccgcgttcagcctaaaagcagcgagcgcggactgcggcagcgtgggtgcgggctgagacgaaagtcagagaattcagacacgaaaatacacagcatgggaatccattcacaggaagagccagaactggcaactccataggaatagaaagtagatgcacggttgccggggacgggggagggggagggaaacgcgagtcactgcggatggggaccggcttcttttttgtttgtttttgaggcagagtctcgctctgttgcccgggctggggtgcaatggcacgatctcgcctcactgcaacctctgcctcttgggttcaagcgattctactgcctcagactcccgggtagctgggactacaggcgctcaccacggccggctaatttttgtatttttagtagagacgcggtttcactatgttggccaggctggtctcgaactcttgacctcaggtgatccttcctcctcggcctctcaaagtgctgggattacaggcttgagccaccgcgcccggccgggcccagcttcattttaaggaggtgaaatgctctggaattagatagtggccacggttgctcgcaacaaaaccccaccgaatcgtgcgctttaagcgggtgaacttaacggtctcaataaagatgttaaggaaaaaacaaaaccagaaaccccacaattactgcaggcatagggctcgctgcc

SEQ ID NO: 39481 - DNA, 1733 bp, Artificial sequence
  DNA replication origin
ctgcgcggagctcgtggccgcgcctgctcccgccgggggctccttgctcggccgggccgcggccatgggagaggccgaggtgggcggcgggggcgccgcaggcgacaagggcccgggggaggcggccaccagcccggcggaggagacagtggtgtggagccccgaggtggaggtgtgcctcttccacgccatgctgggccacaagcccgtcggtgagcgcccaggctgcggacgcgcgtgggggcggggcgggcaaccggcggggcggggcggggcctgcgctcgcgacaccctcgcccccacgctccccgccgagcccgggccgtgacaccgccgccacacccgtcccgggacccccgccccctcccacgcgcccttcggaccccgccccggaccccgcccacgacccctacccccgtgagaccgcgaggtcccagcccgcagtgccccacccccacccccgccccgggacagcccaccccctcccacacacaccacccagccctgcccccccacagcccctccacaccctggccctccccatctctccgcagccacccttgcccctccagtccccagggcagcccgtcccctccatcccctttctcctcaccgctcaccggttatcccgccgcccctcctcccctcaggtgtgaaccgacacttccacatgatttgtattcgggacaagttcagccagaacatcgggcggcaggtcccatccaaggtcatctgggaccatctgagcaccatgtacgacatgcaggcgctggtgagcccaaccgccctccctgtgccgcccgatgggggcacgaacccgcacaccgctctctgagagtcagcctgagctgggcagaggcccctccatgtctgctggggtctgctgggcagagtagaggcccctccatgcctgctggggtctgcagtgagctctcagggtcagcctgagctgggcagaggcccctccgtgcctgctggggtcccctgggcagagacccctgcagtgaggctcgtccttaaggaggacatcccggggctccagagcctgtcatggaaagcacaaacacagtgctagcagctggctagcttttcaggggctctgctttagactgggtgctgggccagagtctccagctgagaccctggggagggagggaaggatgcagagtcccgggcccttaggccattgtcagcctcctgggaggcccccgaagtgctttaggcagagggtgaccctatctgagtcacaccaaggtgaatttggtgacttctgtgggagtcagacaagtagagttccagtcctcgcagagcttggagctggcactgtgtgacgggcgagcgggttaactaggtaagcagggtggccagaagagacaggtgggtgttccaggccctgtggcagcaggaggtggtgggtccaggagctcaaagaaggtggtgtacttggagagtggggtgggggtcaggggtcaggtgaccaggaggagtggggacctgtgctggtggagagtctgtgccagccacgttggactcagggccacaccggccatcagtatgacataggtctctccctctggtctgtgcgacctcaggagggcagtgcctggcaagcactctcttcttctttgcctggttctgtgcctgtggcgctcccaaccgacaccctcggtgtccatgggctcctgccacgtggatgagaactcgaggtgcctgcggcctttccccagggctgt

SEQ ID NO: 39482 - DNA, 1383 bp, Artificial sequence
  DNA replication origin
ctcgcagagcttggagctggcactgtgtgacgggcgagcgggttaactaggtaagcagggtggccagaagagacaggtgggtgttccaggccctgtggcagcaggaggtggtgggtccaggagctcaaagaaggtggtgtacttggagagtggggtgggggtcaggggtcaggtgaccaggaggagtggggacctgtgctggtggagagtctgtgccagccacgttggactcagggccacaccggccatcagtatgacataggtctctccctctggtctgtgcgacctcaggagggcagtgcctggcaagcactctcttcttctttgcctggttctgtgcctgtggcgctcccaaccgacaccctcggtgtccatgggctcctgccacgtggatgagaactcgaggtgcctgcggcctttccccagggctgtcactgtgccctctgcatgccgccttggggaacgcagtctcatggtgagactgcaggccgtgctgggcaggcggagcccacaggtgtgtgtcaccagggctgcccggtcctcagggcccgccttagtgatgctggccccggtgggtcttcctgactcctgcatctgctgccgctggttctgccctccctgggtctgtctggaaagcccagctgtggcaggcgctgttcacaaaaagaagaaatgccctttgcccttgccccgcccgccgcagcctccaacacagtgatgtgtgctcattggcctctccccaagtggctcttacacggctctagtgacttcttgaaactgcatcttcacccttgtttcttaaacaaaactctctatttgatatcagcatgagtctgagattcttccattcccgaatccagagaggaacttcgtccttccagaagagatcattcaggaggtccgagaaggtgaggctcgggaaaggttgggcttgggattcagaaaaggccagaccctggccaagggcagggaggtgagggtgaggaccccgggcctccagggaggtgtgagggtccagcgcagaccccgccctacctgtgcttgggtggtcttggaacctccgggattggagaggactttgtttgagagcagtggctggacggaagctgaggcctgtgtgggcagcaagcgtcggagcagtccctggcctgaccatcccccagcgtcggccaccaccgtgggttttcggtgagcgtcagctgtctcctccacaggaaaagtgatgatagaagaggagatgaaagaggagatgaaggaagacgtggacccccacaatggggctgacgatggtgagtgtggagctcaccctgccctgatgccctttggggctcagcaccccaagactgccttcaggcagggcacagtcaggtgggcgtagagcct

SEQ ID NO: 39483 - DNA, 1259 bp, Artificial sequence
  DNA replication origin
atgtccagcgccccagaacttcggggcatcaccactgtcgtttcaagaaagtgtgatgcatgtccacaggttccagccaggtgagactgcacctgctaacagtggtcaacaggtcagcaaagattagggcccagcacccagagggtccttaacctgtacttgtggccaggattggaagacttgcgttcacggctgtccctggcacacagtacaaggaatgtcaccagttcccaggcccagcaggcctgcagggctaggagatggcagtgtcccctaggggctgggctggggccttctccacctttccaccaccatcattacagggacaactctgcgaggagctatcctcatggccaagtccaaaatccagatttagttttacctaaatgttttgaaatgaattggtatagcagttacagaagaaatttatctggagtggccactcctgatttttatttcaagaggtcaccaaccttgccatgtatctgccagcagatgtcaaaggtggatgagcaagggacccgcggtgctgggaaatggcaggtgaaagtgactttgtgttgccccatatctgccagtgcttagagagagggccctgaggaggcgctgaactggcatcagctgtgttgaacagtccccagggtgaccctcccggtggcccaggcttcgtgtggtcctctcccctaagtgccttcttacaactgagagatggcggcaaaggtgaaggaagccacggcttgcccatgtcatcctggttatataagactcggcaccctagagagaaagactcccctggtggctttgaaaagaaaacggccgtgctttgcactgcctatggagggacaggggtccgccagcagcttccaggagctgagtaaggcccccagcccgcagcagaaggacagagacccctacacacccagcttagggagagaggcccctgtggacacgtggcccctccgggggttatcctccaagggacattcttctgatggggacatcctctggggggatttctcttgggggacagaaatattcctggaagaggggattctctgcggggcaggcatcctccggggagagaatcctgctgggaggacatcgtcgggaagacatccttcctaggtacccggctcatcttccggggagaccgtcctctggggggcgggcaggctttggggacattttcgggagggaggatctcctagggcgggcatccttgcgagacggggtggggcgaatcctcccgggtgggcatc

SEQ ID NO: 39484 - DNA, 3644 bp, Artificial sequence
  DNA replication origin
ccgcgggcggcgcggcccagctcgttccaggtgcggccccgcggcgcggaagaggcctggggtccccggcgccccccgcccggctgcgtggacgggagacccccccatcccgggcggagacacctggagcctcctggagctcccgcagccccggggacccccccccagaccggccgacccccagccccagggcccggcggggaagtgcgggggccgcgcgtgggtgacagcggagctgagcctcccgggccccatcgtgtgtgggcgccgttccccccgggggtgcctcgggcgcgtcccgcccccagccgccgtggccgcccctgatggaacccctcccgcctcgggcccgcgcctcggcctcctggcggcccctgcgcaggccccgcggcctggggctggggctggggctggggctggggctggggcccgggccgggtctggcctgggaggcttcgcgtctgcacctgcgggagcccggggcgggccgacggggcctccgcttgttacttttgttaccgccgggcgcctgtcatcgccggggttacttttgttgccgcgctgggaacgccacactgtcgcagtccggcccccctgtcggggagctgggattgatctgggagcggccttccagctgagctgcccgggttgcggagggccgggaagtgcatggaactcgacggctccgcatggattctccccttggcacccagcactgtttgcgtttgcgcctggccatggtggagcgggcagtgagagagcacggaggggctccgccctgtcgccgggagggcagcggccaggcaggctgggcaggggggtggggtctggctctgtcccacaggacggtgtgacccctgggtgggctcttgacgggctttcctcactggagttcctcaggccgctctcctgaagcggtgctcagaggccctgaccatcctgccaggcgcccgtgacccctgacctcttccctctgcctcctgctgtggcttctgtccacaagcccctccccttcccctttggacccctcaggcctccccagctgcctgcgctggaccctggcggggctgtttcactttttcctgggcagtgtcatgtatgcacctgtgggctgactgtgtggccacatccagtcaggacccagcctccagaactgacccagggaggctcccgctggccccaggaaggagaagtagaaactgatgatcaggcggggcgagagaaccacaccagcggccctgttgagaaatcaggccgagaggtcggtggcggtggctcaggcctgtaatcccagcactttcggaggcctgggcagtcggatcaccagaggtcaggagtccaagattagcctggccaacatggtgaaactgttgtctctactaaaaatacaacattagccaggcgtgatgggcacctgtaatcccagttcctccagagattgaagcaggagaatcgcttaaacctgggaggtggaggttgcagtgagtggagattgcctgggaggtggaggttgcagtgagtggagattgcctgggaggtggagattgcatgaagctccatctcgaggggaaaaaaataagaaagaaaaatcaggcagagaggcaacgccaggtcccagctggagctcagcggggagccaggggatacagtggctgaccgggcctcctaaccccccttctagcactcccccaggatcctgggtcccaattgttgccctggacaaatacgcccattcctgccctacccaccgagtgaggctcagccccaggccccccaccctcatcacaaggtcagggctgtgtcccaccatcctcatcactaggtacttccggccctttgctcagccccatgatgcttggcctgcagagatgggggctgaagggcttggggcatcaaggggacctgacatcttgctgagaagccatcactagacagggctggaggctggagactcagggcctgccctcaccgtggccagtgaggcgtggggttgggcagggaaggggcattcattcattagaccctgccagaagcacctgggtccccttctggggctacaggtggtgaggccactgcccccaagaacacagcctggtgactttagtgtacaaagcagggggagtctccaggggcacagaacagaggctaaagccagggtggaggtggccagcaggcctaggaggaggagagggtcagggccacaccccaggggaggtgcatgtcagccaggggccaccctaaggtggaagccaggagtcccaaaggggcctagagaaggagcagccccccacctggctaccgcagccctctctggttctgtgcagggtattgggatgcgttactgaggcccaaatctgccccactgggaacccccaaaaaagagccagggcaggagaatgagagggaggagccatgaaacccccgccctttaaagacagctctgtggcagctggcccaggccctgcagccctcaccacgttgggactcacttgggggtctcccatgggggtcctaatcccatctcttttcttcccagtccagaatgacagggtccagaaactggcgagccacgagggacatgtgtaggtatcggcacaactatccggtacgtacctgcccctgccccgggacacagaaccctcccgccagctgctcttctcaggcagaatgtcccaggttctactggaaggctggcctggcttgctgtgccagggccacagttctgggcaggaccctgcctggggcacagcctggtatagattcagagccctgcccttcccctctcgcgggagaccgggggcatccccctacttttctgagcttcagcacaccgtcgccttgcaaacatggccatagtgccagcctcgtgatgcacacgtgtggggtccgtgataccgcccacacagcaccccacccccatgccagccctgtctcctgcaggttgtcctcagccattaccctccacacccctgaatcacggaaacccctgtgctgccttcagggtgctgaggaggggacctgccaggcctggcctggctggcgaaatggggaaggggggtccctggggcttggaggcagctgctgtcctctgaatggcccccacctgcagagtgaggagccaggcgggctcttggggtattgggccagcctggaggtttgcagatgcgcctccccgaaagacacggagggccccagggcagcttgtgtctgatggatccctgctgtcccctttctctggctcttcaggatctggtggaacgagactgcaatggggacacgccaaacctgagtttctacagaaatgagatccgcttcctgcccaacggtaggtgcctcacaaccactggcagccggcgcttccatccttgcctggcaggggtggtccactgggccctggtttgggatgtacccggcgattaccagggccacggctttcaaatagccccacagtgccccctggaggcggccagagggactccaggatccccggcttgggatctccgcagtggtgtttgggtcggggtgggctatctctgtaaagagccagagactgaatatctgcagcttttcaggccacacagtctctatcaaaactactgaactcctgcacgacctcatgaaagccacatgtaaaccaacgagct

SEQ ID NO: 39485 - DNA, 1617 bp, Artificial sequence
  DNA replication origin
cagtggtcctcaccccaccaggcatctagagaaactcaatttccgaggctgtttgtccccatgcgggagtctggggctgagcccctgagagacccggagtggcgggacctgcctttctcaccactggtttaggctggagtggggtcacccaagtgtggaagctgcccctgagggatgcagggacttagagagccgaggggcccctcctggcactttcccatggccagcgacttcctctcaggggagggcggcagcctcaggccctggtgagagctcggagcagctcagaggagagatggaggcatgagtgtgtctcttgtcactttaccctaaaagtctgagtccaggctaggtgccgtggctcacgtttgtaatcccagcactttgagaggctgaggcgggtggatcacctgaggtcaggagtttgagaccagcctggccaacgtgacaaaaccccgtttctactaaaaatagaaaaaaattagccaggtgtggtggcaggcaactgtaatcccagctactcgggaggcagaggttgcagtgacttgaggtcacaccattgcactccagcctgggcaacagagcaagactctgtctctaaataaatgtctgtctgtctgtctgtctagtccaggcctctgagtgagtcgggacccacggccacccccacactcaggaaccggggcttcagggatggtgcctgagctctccaagggggtcttttccaggtgtttaaaagctcccaggagatccaggagcggcttgtccgggcctacgagctcatgctgggcttctacgggatccggctggaggaccgaggcacgggcacggtgggccgagcacagaactaccagaagcgcttccagaacctgaactggtgaggcccggctgctcccgcccacccccaccccggcgcagaacagggccacgtcaggtttcgggcaggtcacagagcgctgctgcagacggagaactccagggctgtttgggcaatggaccaaggccctgagtcccctccttgctgcctgtagagccgggcggtccctccccgatagggttggtgagaaggtaaagaatgctcttcctgcacccaggaggtggcagtccacatagagaagcaagcaggggtgatggagaacctgcaggcggtacagccagttctcacagggtgttcgaggcgcctgtaccctgcaggggccccttgtggctctcatccagccagctcctccccaccagggggactcggggtacagccaccctctaggtgatgcgtcagcatccccctaacccccgtgtgtctagggcccacaggccattttcacagggatggcatgagtcctcccctgggcccagagaggtaaatggagagagagactgaatcgtgggccagggtggggagacctcgtggagccgggtgggagggcaggccagggcggggtgcggcccagcaggaggggccccagccattgacctctcctgacccggatctctcgcaggcgcagccacaacaacctccgcatcacacgcatcctcaagtcgctgggtgagctgggcctcgagcacttccaggcgccgctggtccgcttcttcctggaggagacgctggtgcggcgggag

SEQ ID NO: 39486 - DNA, 3823 bp, Artificial sequence
  DNA replication origin
agaccttggcccttgccgggtcccctgccccatcggggcaccccaaggctggacacagtgagaacggggttgaggaggacacagaaggtcgaacggggcccaaagaaggtacccctgggagcccatcggagaccccaggccccagcccagcaggacctgcaggggacgagccagccgagagcccatcggagaccccaggcccccgcccagcaggacctgcaggggacgagccagccgagagcccatcggagaccccaggcccccgcccggcaggacctgcaggggacgagccagccgagagcccatcggagaccccaggccccagcccggcaggacctacaagggatgagccagccgagagcccatcggagaccccaggcccccgcccggcaggacctgcaggggacgagccagccgagagcccatcggagaccccaggcccccgcccggcaggacctgcaggggacgagccagccgagagcccatcggagaccccaggccccagcccggcaggacctacaagggatgagccagccaaggcgggggaggcagcagagttgcaggacgcagaggtggagtcttctgccaagtctgggaagccttaaggaaaggagtgcccgtcggcgtcttggtcctcctgtccctgctgcaggggctggggcctccggagctgctgcgggctcccctcaggctctgcttcgtgacccgtgacccatgacccacagtgctggcctcctgtggggccactatagcagccaccagaagccgcgaggccctcagggaagcccaaggcctgcagaagcctcctggcctggctgtgtcttccccacccagctctcccctgcgcccctgtctttgtaaattgacccttctggagtggggggcggcgggcagggctgcttttcttagtctgataccaagcaaggccttttctgaataaattcatttgactttgagtctttggtatggaccggggtcctgttgggtggctggtagggctggtgtcacagctgatgtccctccaggctccagtggcctggcccggcgaccgcctcacattgctccaccaggtgcctgtgggggcagagtggtggcccagccctccccacacacccacttggccacacagtccccaggcatgaacaggtgggcaggctgcagcctcccagagcctctgaaggtggaaccgaggtccctcagcaggcttttgccacctgttcaagatgagtctggggcttcccttggggttggccggggcagtgcttgtgcatggtggggtctggaccaggcctttctgcctgctgtgatctgggatgcgctgctgtgcctcgggcaggcttggcagtactctctggcgggccccttggctccctcaggtctggtggagccaggtgtgcccccagggcagtccctccctgcagtctgcccttgtcaccctgggccaggaccccccgcttcccggttcccctacatttctacatcagcagggtaaggggctttttgtggggcctcagaggaggggccggacacttgtctttgctcagtgaaggacagggcagacctggggcacccctgggtgggagggttaaagctgtagaccctggtaccacttcaggtaaaatgcccagctcccatctggtggcacaggatacacgagccggaagtcactgggaggagacacccgaggttcaataatcccccagagctgcgtggggaagctgtgggacccctggtgcctcaagtgtggctcaggggattcctgccatggagggaaactgaggcagtgagctggacatagggctagaagtgcagtcactggggcagcgcccggcagatccagcgtccccagtccaggccgttgtggggctggagtcggtgaaaatcagcgcctgaagtgaggagcctgttggagcagccctgggggccgatgcctggcggtgggcacctggggacagcaggcagtgctggccagccaacccgggcttcagggagagtgatgacccacaacaggcgggcagcaggaggctctgccccactcaaaagtgagccgggggaggctgagctctgacagtgcccaccctctgcctaggatctgcctggagctgggggtggttttttgaggggcttgaaggtggttcgggggggacaccaagcaggtgtcccaggcatgaggtggctcccctggcctgaggtgaaggccagctgtgttttgtctgatttgggtcagatagcagtccttgctgactgcatgctgggcatcatggggataggcaaagtggggtgtggggccagggaccaggggagagccactgaggagggggctggccacagggtcatcttgccaggtggaactggtagggaggacttatcctgtcccccagaccctgggcttggggtggggctggtgctgggagcccctaaggccccctgctgtctgggctgacctgctccacccacctctccccgtaatcaaaagtcctctgttaggaagctctgtgccaggatgacttggactcctcaggagggtgggccttttcagctcctcccacctcgcctgatggaattcgcacacacccctcccagcccagccaccgcgctcacccagcagtgaagggagaatctccctccactcacttcaccgcgggagagattagagcgacactattattttgagacagggtctcactctcttgcccaggcaggagtgcagtggcgccgtcttggctcactgcagccccgaccttacaggctcaagcgatcctcttgcctcagcctcccgtgtagcgtggactacaggcgagcaccaccatgcccagccgatgttttaatttttggtagacatgaggcctccctctgtctccaagctggccacgcccggccgatgtttcaatttttggtagagatgaggcctccctctgtcgccaggctgactgcgcccggccagagtgcggtgctcctgctgagcagttttgcgcccactcccctctcatcccctcccgcccttgctaactcacagcattgcaacagtcatgagtccccacctgccgaaaggaagctcctgcagccccctacaacccccagggcagcctttctcgggaattttcaagattcctgggggaggggctggcatctgcgccttcactgagcctacaggcaactggaagctttgagtcccctagggcagcgactgccctggcagcctgaggcagagcttggccggacctggcgacccctgagcttctgggaaatggacatggccagcaccgccttcaggttcctgcccagggcacggttccttcaggccggggatcccggggaggggttcttcccctcggccagggtcatcgttttgcgatctctcctgggagtctgggtttggagtctggtcttagccggtagcaactgacgtggcctgaccacccggcccgtccaggtccacgggtgaggggccgcggtgggggtgctcccagcccagcaggcagcgctggacagtgaccccggagcgggaaccagggctgcgctgggcactgaccgggccctggtaccggggattcaccctccccggggtgttcctgggccttgggtcgcctgggtccgctccggcgcctggggaggggtctgcggcttcggaaactcgcgggtctcccctgcccctccctgaaggcggcccttcagcgccgcgcgcttccgcccccacactcgggttgaggagcaaggagagaaaagagcgtctttctctcttgctcaaagctgcgtgtgtgcaacgcgccagtcccaggataattttaactcgcggccggagagaacgcgccgcccgcccggc

SEQ ID NO: 39487 - DNA, 1742 bp, Artificial sequence
  DNA replication origin
cagctcagactccgctcagccatggccgggccgcgcgcgtgcgccccgctcctgctcctgctcctgctcggggagcttctggcggccgccggggcgcaggtgagcgcgagctccgggctctgaggctggacgtggagccgcgaccgccccagccccgaacccgccactccggggtgcccggcgcagcctcgacgcccccagcccgtgtcgccgtcggggcgcggagtcgccagcgcctcgggatgagccccgtccggccgcgtcctcgatgggtcctcgctggcccgggtcggccggcgccgccgcctcctctgggagcacaagggggcctttgttcccgccgccggagggaggcgggggacacactgcgcgggggcgccgggctccgcccgaggctttgggtctcaccgaggagagcggcggtcgtcgcaggccccggagccgctcgggacccgggaggaggggacgccgggtcaggcccacgggggcacctgcgctccttaatgagttttctccgtttcagagagtgggactccccggcccccccggccccccagggccgcccgggaagcccggccaggacggcattgacgtgagtttgggggtggggagggccccgagcgctctggggttctggctctggcccccacctccctgagctccccggcctgatggagagaaaaccaggccccacctcccagagccggggtgacatcaggggacagccagtgccttcacgggatgggggtggccctgcggggactgctggtgggtaggggtggagggtgtcatgtggtggtcctccacccagaatgccggcactgaggtgtgtgtctctgggtcccctgaggggcccgtgcccctgtgttcggggttctggcctctggctgaagtggggagaggcacgtcctttgggtggttgggggccgggggtcttgttggaggctgctgggctctggagccagccatggagggggcttaggagccgactcagtcctgagatgatgtcccctatgggtatctcaggactggtgtgggccaagcagcaggaggaggcggctgaaattctacaattgtgcctccctcggagggaccgtctggggtgaacctccccatgtgaccaccaccagggcaggagtcccctcagggcctgtccacgctgtgtggtccccgtggagggctgtggagggctgcaccaagagccccccatgacccaccctctgcccccctgcccagctcggcctcaatggccacagcctccttccagtctgtccagttcacccctttgcccagtgctgccccacacatgggagggtgccctctaggtagggatcgggggctcaggggccccttttgtctgctggggctgggcctctggggctgatttggaggccagcgctgctcttttccccgaggcggggttcttgagggacccctgattttcagggttacatgtgggtgtctttcctcacagggagaagctggtcctccaggtctgcctgggcccccggtgagtgtccctggctggggagacagcctttttccagtctggagagaaagggggaactcagaacagaggggtcattgatatcctgtctcatcctgccggagcccgggttgcctgaggggaggcctcagagggcttggagcaggcctggagccagcggggcgggaggggagtgtgtgggctcagcctctgcatgttcagggcagggcctggctttgaagctttctttggacca

SEQ ID NO: 39488 - DNA, 1579 bp, Artificial sequence
  DNA replication origin
agagaatgctggcttcgggtttgtactcagaagccacaaggggagaaaggcacccttgggtggtggtgccgctccgtcagggtaaaggattcagtgtccaacaggcaggcacaggggactctgcaggctgcgtgcccgggggtccctggtggtggtctgcccagggccctgggggcttcagggacattctgaggaggcacctggggtgggttcccccaaaccatcccccttctccctgccatggtctggataccaggacaactctgaccatacgtggaggtgaggcagggaggcaggcacaggggactggccacttggcaccctgcccttctgcccctccaccccaggcacgggcagggcagctgtccttggaactaccagctccttggccttgtggacacagagcagccagaggtggccaggggacctcacctctgaacccaagccactgggttcggcgcaggcacttacccgttccccaggggcacccttgggtccagggggtccatctcgtccagtcagaccctggggagaggcagagggcgagctcgaggggccacatgggaagcacatgccaccccccaggcaaaaatggaagcacggacccttcccttggtgagtccagagaggcatagaagacccttagggtggcagcctcctctcttggccctgtccactgtctgcctgctgtagccagaggctctgggaggagggagggggcagccagcgggaagccagcaacggaggcacctgctgtagtcaggcctcggggaccaacccagcaggactggacagctcacttctcaggcccggcttcctccgaacaaaactccgtggccctggggccaggcctggagcccaagatgactaagtgaggccagcagtgggcagaaggtcctgacaatgggcactcattcctggacaagcaaggagggctggcgggacttccgactccactgggctggctctgtcccctgccagatgctggtggcgtctgggatgaaggccaaaggacccctgttggggacttctggagacttctctcaggactgggcttcccgcctgagcaggcccagctggacaacagcaattagggccggactcctccagggacccggagcggggagtggggcatggcggggaggggcaggcgcactcacatccacacccggcagtcccggcagcccagcctctcctggtttccccggctttcctggggccccctttggtccctgtgcaggaggaaagggcagagatgtgaaggcggggtctggcctggagcccaggccttcagcaatgaagcaaaatgctttccacttccccccagcccaaccatacgggatgggcccctctcctgggtcccccctactgtctggcagacccggctcagctggggcacgtgtgtcctgcttgcccacaccttgctggcccaggaaggctgcccgccccatccctcagtggcatctgtaagaccttcgtctggtcacctcggcctccctggctaagggccagcaggcatctctgtcggacccccagtgggcccagacagggctctgagccccaggaccctcaacccctg

SEQ ID NO: 39489 - DNA, 1909 bp, Artificial sequence
  DNA replication origin
agctgcctcctgcccagcacagggtggtgcttgggtcccagtcacccgtgactcaccttgaaccctggcattccagggggccctgggggacctggcgggcagatacttgggcactgtcggaaaacagagcagtcagacccctcccagccaaacagagcaggacgtccgacgcaggggtcagcgcccgcgggaccccaggaggccactctgcacggtgacgggaccccgggaggccactcctcatggtgacaggaccccaggaggccactccgcatcagtgacgggaccccaggaggccactccgcacagatgatgggaccccaggaggccactccacgtgggtgacggggccccgggaggccactccgcgcgggtgtcgggacactctgggtgacaggaccccaggaggccactccacacagagacgggaccccaggaggccactccgcgtgggtgacggggccccaggaggccactccgcgcgggtgtcgggacactctgggtgacaggaccccaggaggccactccacacagtgacgggaccccaggaggccactccacacagtgacgggaccccaggaggccactccgtacaggtgatggcactgggacaggacacagacagggtctccttcagcactggccaagtgcagcaggggctgcatggagcagccggccccacggcagacactggctatcaaagcagccattcagcacagtcccggccggcactgcagggggccttgcagcagcctcaggtcgggcccatcctcagcacaggaatgtgctcggcatggggcttttaggaggggcactgtgagcccaggcaacaggtctgatgctcaggaaacccagggctgcttctagatgatcctacagctgcaatgggcaggccaggccaagggtgcagacccgtatcttcagcccctgccccactcagcccacgatcgggggcccaaccacgcaccacattctggaaggttccctaaagcctcccttctgggacacaggctggccaggcacctaggccccggggtggggtgaggagagaggctggtagacagcgtcggtggtcaggtcagagtgggccgagcttttcccttcaaaactatcaaacctctctatggaaacaaggcgctgactgccaccacggacggccaaacagagaggagagatggatccgtggcctccgaagcccattttctttcctcttcatttttttgagacaggcttgagcttggctgctcacgctggagtgcagtggcttgatcacagcaccctgcaaccactgcctcctgggctcaagtgatcctcccaccacagccatccaagtagctaggacaacaggcacgccaccacgtctggctactttaacaattttttgtagagacaaagatctcactatgttgcccaggctggtctcaaactcctgagcttaagcgatcctcctgtctgggcctcccaaagtgctgggattacaggcctgagccactgcgcctgacctgagcctgttttcttttcaggcaaatgacaaggctcaaagatcaagataaaggtgggtcccagactccagttctgtcgccatctgtggccaagggcgccctctgcggatgacgcaggggagctggatggctctgtgacatgattgtgattcattacatttgtacagctccatgcgcctggtggcttcatgagggacagtgcaggtctagacggtggtgaggagggtgggaagggggagggggaggtcccagccagcctctctgccaggttgtgcccgagctgtctgctctgagctcctgtccccagggagggctcgggccctgccttcttgccagtatggacaagcccctctccaggccagaacccctccccccaaggtaggcaccccccagcacccttaacaaat

SEQ ID NO: 39490 - DNA, 1144 bp, Artificial sequence
  DNA replication origin
tgtggccaggctgggactggccataggcgtcagagactgcgggggagagctagcctcaagctcccaccccagcccagccctggcccgctcctgaccgcagagcgccctcatgtgggtcctagcgcctctcaggcctcagtttccccatgagggcccagacccgcggtcctgtgcgctgccgtgtggcgggccctgggctgactgaccctgcaggcctcacttcagtgttgccagggagggggtgtcggggggtctgggtggggcagtgaccccacatttgcttgcagggacccactggctacaaaggcgagcagggggaagtcggcaaggacggcgagaaggtgaagctgccgcacagcagctggggaggagctggggactggaggctgggctccggcgggagggaggggctgggctccggcgggagggaggggctgggctccggcgggagggaggggctgggctccggcgggagggaggggctgggctccggcgggagggaggggctgggctccggcggtggggagggaccgtttcatgggtgcacctgcactggcaccttctgtgcctgtcttccagacagggcctggctggtcagagctgggtgatttaggcagggtccctggacagaccccgtcctgcctggcctcgctgtggaagctccctggtttgtgtctgtggccggggcgaggggcatctgtgaggatggctggctttagcctgtagcctcccctcacctgtggtcgctgtccgtggagggtgtctgtccatggtcacctgcaggccgggggaccaggtctgggatgccctttagcgtggctggagtgatcagatgaggagaccccaggtgcacatcagaggggtccctgcttggccacgaggaggggcctggacagggctgaagggccttgtgggaacagtgaccacggaccccggcccggcagggcgaggccaccgagactcgcgggactgctctggaactgtgggcaagtgtccccttcacagagcctccaaggcccagctgtgaagggggcaacacccccagctgcttgggcttgagtagggtgactggaggcaccgaaaggtgcaaggagagccagactgggccgctgaccaccctatcccctctgtttcagggtgaccc

SEQ ID NO: 39491 - DNA, 1145 bp, Artificial sequence
  DNA replication origin
gggggccagctccggctggggggtgtttggccaacacccaggcacaggagcgcgacctggctgggggtcccacctctgccaaggctgctgacctcaaggctggtgccccctccctctgggggacctgagctgaggctgagggctcatggaagacaccagggctcccaggggtaccccgagggccttggccctgggtgctccccggggtggaggtgcagccccagcctctgcatctgtgcctctctctcgcagggcccccggggattacgaggactgccagggccactcgggccccctggggaccgggtaagtcctgcagcccctagtgggggccggccaggtggctgggggcctggttgtctgcacctccagacttcagatgggccccgtgagtgacactctgaagcagccggcaccctggctctggccatcgccactgtggcgcaggccttgctctgggcccctgttctcgcatgtgcctgggcgagagctgacagtcggcgctcactgatgcccgcacgcggtcccaggctgctgtgagggctattcacgcgtgtgcccgggcgagggctgatgaactctgctcgctgacacccacacacacggtcccaggctgctgtgagggctgttgtggcttaggccagagcaggaggggaagcagggatttggagactactaggtggcatcttgggggaacttgctggggagccctagaggaagggctgcttgtgtctgggccgcccctgagggagcactggggggatgccagccaggcctcagacaagaggaccccggatcccctctctcctctgcagggtcccattgggttccgagggccgcctgggatcccaggagcgcctgggaaagcggtacgtgtgtcagtggacggtgggcgccatgcctcgtgacctctctcccctttccctctgctcctctcagacgcccccagccccactggggcccctcttctgtggctgagctgttccctggacaccctgggagggcttgtggcatgggtacgggggtgcttaccaatggaatccattctttgtgagacattcgcctcctttctggttctggacgtggaatgaggggtcaccatcgtccctctggcacctccagccatctctgaccactcctggagg

SEQ ID NO: 39492 - DNA, 1224 bp, Artificial sequence
  DNA replication origin
actgggagctgcaagggcctctccctgtctgcgtcccaggggactgtggtggggggtgggggattgtggtagggggtgggggactgtggtgggggttgggggactgtggtagggggtggggactgtggtgggggttgggggactgtggtaggggttgggggactgtggtgggggttgggggactgtcatgggggtgggggactgtggtacatgggtagagggggtgcaggggagcttcctgctgagagggccacttacccggtcgcccacgtcacctcggaggccctgggggcctggaaggccggggtctcccatgctgcccttctggccctggggaaggaggtcctggctcgtcagtgcccataccctgtcgggtctggcccgtctgggtgtgccgccccccatgccaggcccttgccccaacctcacccacctggaagcctcggacaccaggggctccgggagggccttgtgggccgagggccccctggaagacaaaggtgaggtgtgagcggatgtctcagggttcgaggagtccccaagaggccccagggagcctggctcagccttcccccagagtgggtggacacaggagccggttctaagccacctggctgggttgctggggacaaaggcagggctacctcccagggcagtttagggggtctcagaactcaggcataccctggacccaatttgtcaggccagactcggggccaggcacccatgcccctggctccccccaccagggccctgtggctggtgctgtcattatctcagtctatgggggcacaaggctgggctcagcatagaaggcttgaaaacagggcagctccggcctggccccgaccgtctcccagcgggtgagggacaagaagatggggccccacacctcctggcatcctaggcttttgtgggcctggcccatcaaggcaaccaaatgccaccccggcctgctcagaaactggggccatgtgccaatggctcagtgctaacccccgaccccgggccatgtccctgcactcaccgctgagccccggtggccagcctcaccgcgctccccaggcatgccagcatctccctacagggaaaggaaggagggtgtcagggcagggtctgcacacaggctggatggggaggggtctggggcgccgcagatactcacagggacgcctggctctccagaggggccggcctcacccagctccccagctctgccctgta

SEQ ID NO: 39493 - DNA, 988 bp, Artificial sequence
  DNA replication origin
tccactgtgcttcgggcgtccttgtcacttgcttcctcacgttgaattttatgagcttcgagagcctgatttctccccgacccctcctaacacggctccttggcaggctgaggtgtcgcagatccccggtgtcccctgggccccaatggcacctggaagcccaggatctccgggaggcccaggctcgccgggagcaccgtcctggccgtccttgctggtgccgggcacgccttggggtccttgggacagagcagaaaggtgagttcagctgcagcccggactgaaagcagggggacttgacatccagctgtgggcaagccctgctcttccatctgctcactcttcacttggggagaggccacagcgggtggggaggccgagggaacggcacacaaaggctctccgcggggctggcggtcgggagtgtccggggaaggccaggcgcggccagccccaggcaggggtgcagagccgtcctgaggacacccgcactctgacttacgcgggtttggtgggggctgtgtgagtaaggagtggatttggagtgagcagggggcccggagtggggggttgtggggtggctttggtgagtgatgacagtggaaacatgggaggcctgggtgtgagggaagagggagtcagccgcctaagtggggggtgtcagagcccttcactgagatgaggtgacaaagtccagaatggtgcgggcatggtgtgggcatggtgcgggcatggtgcggccgggaggctgctgtccaccagcaagtgcaacacagatgctgttcagagccacaggcggagagacgtggctggggcctgggacccctgtgcgtttggacaccaggtagaggcagagctaggtcagcaaaggagagtccaggagcatggggcacccagagagcagtgtgtgtgcgtggaggggagaaggggagagggctccagggcacccagagagcagcgtgcgtgcatggaggggaggacagggctc

SEQ ID NO: 39494 - DNA, 1080 bp, Artificial sequence
  DNA replication origin
aaaaagccgaaacacatgggttcttaattgtttctttagtgactgcccccttttacttggatgcatatttttgtccttgaagacgtaatacatgagagttttaagtgatttctctacattattttggtacacatttcactcagcaggtcttttccagtgtgaccaggcactgctgaaggtgctggggtaccctgcgcaagatagaggcatgtctggcatggagggaggcaggggacgagtaaacgtgaagacagtgggagcagggccttgcgggtggaaggtgctgctgcgagccagccggactcgggggctgctttggattgggtgatgttgggtggtcgagggaggcgcccaaccaaggcccaatgatgacagggagctggcagccaggacctgccggctgcagagtctgaggagtgcctgcctgccagccagtgttgctgggcagggcaccggggcaggctggggcctggtggaccgctagtcctgagggttgggggcctcggcagtctttgggcagtgagtgacatgacccatatcaccctgctgctgggggacactggatgctagggagtaggagctgggctggggtgagagtggaaaccaggagtctgcagtagctggaagatgtggcttgccgggcgatggctgccagggggcggcgctggggaggaggaaaggcacaaggcttcttgtgtttgtggcggtaccagttgggggttgtgatgggaaaaaggcgtcagggtttggcctcggtggctgggtggatggggctgtttactgagagggaagactcagagaagcaggatctcggcattctgggggcgtcaggtggggacatcgggaggcaggggatagataagtatggggtgagggcagggcggcgtcagccatcagtgattcacttctgttcgttttctagtgaacataggaattacagtgaacacctgtacacccatgcttcagtctcagcaatgaacatttaccgtatttactttgtacacacgcacaatttcaaagacaattatagacacgaaccttcatctctaaatatttctacataaatctccaagacaggcc

SEQ ID NO: 39495 - DNA, 1634 bp, Artificial sequence
  DNA replication origin
cggcgggcggtcaggggggcgcggcgcccgtgtaccccgtgctgtgcccgtccgcgctggcggccgacgcgccctgcctgggccacatcgacttccaggagctgcgcatgatgctgctaagcgaggcgggcgcggcggagaagacgtcgggcggcggggacggagcgagggcccgggccgacggcgccgccaaggagggcgcgggcgcggctgcggctgcggctggacccgacggcgcgcccgaggcccgggccaagccggccgtgcgcgtccgcctggaggaccgcttcaacagcatccccgccgagccgccgcccgcgccgcgcggccccgagccccccgagccgggcggggcgctcaacaagtgcgtgcccggcggccgggggctggcggggcccgggtggaggccgaggccggggccggggccggggcggaggcaaagggggccctcgctgtgcacgcccccagcctgccctcccggcggcacagggcgcggacctcaccgggtctggggccgccccgaaaggctgtgtgcgctgtgcgggccccggggagcaggtacttccagaaactaaacaccccctccctcagtggccccgcctggagtggggccgagcgcgcagaattcctgggaaccatgtgctccgggtggcactcttggatgtcagggaagcctaggaaggcccgacgggggtttgcaggctttgagctctaaaatgaggctccagcctgcagccgcccccttggcgaccctcagggatggctgtggaaggggctgcgtccgcagttttctgctcatcccagcctgtagttgcccatcgtggtcacactggaggatggcaaaagtgagattggtgtcaggatgtgatgagagcagggaggtggcgcagttttgcttttcctccataggaagaggaggacttccacagcagcgatagttgctaattgttgtgtagagatttccaggatgagagttgggttgctgtctggaaaaactagccagagccatgggagtgggatggtggatgcttgtctgccacgtattgctgacacttctgggctttcttttgtcttggcagtttggtaactctcattcgacatccatctgaactaatgaatgttcctcttcagcaacaaaacaaatgtacagcattagtgaaaaataaaactgcggctacaactactgctttgcaatttacatacccactgtttactacaaatgcttgctctactagtggaaattctaatctttcacagacacaggtagggaacatgatttgtgaagctttgctcttttgtattaaatgggtaaattttaacttattttggttaggtcccaagtacttttttttcccttcagtgagcttaataaccttttaagccgggcgccaaggccgacacctgtaatcccagcactttgggaggccgaggtgggtgggtcatttgagttcaggagttcaagactagcctggccaacatggtgaaaccccgtacgaaaattaaccaggtggtagtggcggacacctgtaatcccagctgctcaggaggctgaggcgggagaatcgcttgagcctgggaggtggaggttgtggtgggctgacatcgcgaccctgcactccagtctgggcgacaga

SEQ ID NO: 39496 - DNA, 1723 bp, Artificial sequence
  DNA replication origin
agctcagccccggctcgcccagcgccgcgtccccgccgcccgcgccctcgacggccgcctcgccgcctgccgcgcctgcctccggcggcggctcccgcggtccggggcccgacatggcggcgcggcgcggcccaacggcggcgagggcgacgcgggcggcgggcggcgggaggcgggaggcgggaggcgggaggcgacccccggcccgagcactactctgcgccggccacagccggcgcgccgttgggggagggaaaaccgctgagtgccgcgcacagcgcctgcgccgccccgccccgcaacggcaaccccacccctgcgccagccccgccccctccgttacccgccgccgccggccccgcccccgcccaaccgcccgcacgcccggccccgccccacgtcggcggatgcttgcgcggagggcccgcccccacggcccagccacgcccccacagctaggccacgcccccagctcaggccacgcccggttcccagccacgcccctgctgcccggccactccccgctgaggcccggcgagggcggctgcgctggaatcagcgtgatacctacgcggtgacaccctggggagaagccacgtccgtgcgtgcacgtgcgccccattacagcggcaggaatgaagacgttgtcaaaacagctccctggacccacagtccacagtgcccaggccatccgcttcatccgcgtaaaatgcgcagcgcatggccgggttctgtggctcatgcctgtaatcccagtactttgggaggccgaggcaggtggatcaggaggtcaggagatcgagaccagcctggccaacatggtgaaaccccgtctctactaaaaatacaaaaattagctggacgtggtagtgcgtgcctgtaatcccagctactcgggaggctgaggcaggagaatcgcttgaacccgggaggcggaggttgcagtgagtcgagatcttgccactgcactccagcctgggcaacagagccagacttcatctcaaaaaaaaaaaaaaaatgcacagcgcgacggtggtggtacattcccagcgctgggcccgcctccaccgctgcattcaccaccggtctcctgtagcagtcagcacactgcccctcccccgcctgcagccactaatcttctgtgtccaggagtttgcctaggctgggccttccctgttaagggaactatgcaatatgtggtctttaagagacttatttttgcaatcttgaaataattcctgtacttaacctctcacccacattcccatctcactcagtggttgtctgttctctgtctaggcattaggacacttaaaggcctgtgacttgcacatcgtcttctaagccgggtctgaatctttcgctcatttcatcacagtttagacacagaccaatatattacaatgattcaacgatgggctatgaaagctcagccatgcaaatctaaactcacacatgtatacatgaaaataatatatcagttttgggcaaaacatcaggtttcagaaaacactaccaaggaggaaagcaaggacttaaaactctcaaggacatggcaacagaagtcgtctaacgtaaaacagagagggaaggctaagagagtgagcagagcatcagtgagctgtggggccgcttcaagcagtgtgatttgaagtcccctgggggtggaaggatggggagaaagacattttaagaagtaatgattgccaggtgaggtggctca

SEQ ID NO: 39497 - DNA, 2085 bp, Artificial sequence
  DNA replication origin
ctgaactcatgctgagcccagggtgagaccggccgggtgcgggtccccacatccttccgtcacggggcagctgtctcgctccctgtggggacccagcaccatccagctctggagacgatgggcaggaaggtcgggaggagggactcacccccttcagaccctctcctggggctgagtgggagcccgagaccactgcaacagcctcaactgcggtgaaggagtctcatggttggggagtgagccccgaggccccagcccatccaggctgcagcagagtgtgcacccgccgactgcggggcgtgctgctgctgaggatgcaggtgggcaggtgggcttggcggcccagacccagcagtgccagtggaggagacgcggtggcccacgtgcctgcacacagcgcggctgcagggacaggctcggggagctggcgcctggcctgcgagcttcctctggtcgcctgtgggccagagcttggcttccgaacaagcgtatgggtccacagcccagccatgagcagacgccggtgggacgttcccgcgcagaccggtgcaggccccttggccaagtgtctggtggggcagcaacagctctgagcagcctcctccaacagctccagaccgtgacctgtgcagccaaagggctcactgtggaaacatggcgaggaagacctagctccagtatgcccctggggtcggccgcgtcccggtcagccacaccaagcaggaaaaggcccaggccccggagccctggcacccacaggcccacaaggcaccacagggtcactgagctgtagctccctgttctagcacagaggccgaggcagctgtcgggggaaaatggaaagagccatctcactcgagaactcggcacgggggcctccaacggggggtaacacccaaagcagccagcaccctccccacaccaggcatcagcgagtcccagggaggaggcggcagtggggatcgtggctgtggctgagctcagggggcctaaccagaaggggagaaaaggaaagaccacatgagacatgcccagacggacagtgacctcagccctcagtggcagggcagcgccagtgaacaggctgagccagggcgagactggctgggtgcaggtccccacatgctgggtccgtcttcctgtgggacacctagcaaaagggagaagaaccaagcctgcccaaaacgtcacacccagcagtcactgctgtcgttaatttggtattttccttaatctttttctctctgcatctaaattttgacaaaatcggggtccctccaggagcacgctgtggcctggggtttgctcctcctcctccggctgctctgctgctcccagccgacctcactccagggctcaggggaccatgtggggaccctgccattggctgagtatgtctgttccacaggaggccgggaggctcactgggcctcctcagaggaaaacctgaaccaactccgtcgtccgcctccataaaccacagctctgcctggcatctgggcctcctgaaatgaatgtcctttcagctccagggtctagtaattcctaaaaggcctgattatttcccattcccgttgcacagactcctgataaacagaggaagattcctttgggaaggggcggtgggaagattagctgcatgtttttggcatttagcagggccccttcctctcggagactcagtctgtccttcattccaggggcctgggtctgtccagagtctggaacttggccgagggccccggactctgtgttggggcttccagtcagagcgcaggactcctgctctcggacctacagcctttctgccagcacagaacggggacgcctttggcaggatgtccttttttttcagttctagggaagctgcgcccatcaggcaacgcaggaactatgtgggtcagatgactgcgcctctgctgccgctcacggctgtgctgggaatcacgtccggcaggatagctcccgccagcccagagcgccaccatccccactgcattgggagcccagctgcatggcagcagttcccgccgcagtttttcgcctacagaaaagaatgatcatggagctcttccccgatgtggg

SEQ ID NO: 39498 - DNA, 1419 bp, Artificial sequence
  DNA replication origin
cgccttgatgtctccaccaccaaagtcgtccttgcccaaggcagagctgttccagcaagagcagcagtctgcagacaagcccgcctcactgccccccgccagccaggcgtcaaaccacagggacccccggcaggcgaggcgcctggccactgagaccggtgagggggagggggagcctctctccaggctctcggcacgtggtgcccagggtgccctgcccgagagagatgcttccaggggtggcctcgtgggccaggcgcccatgccagtcccggaggaaaaagagccagcctcttccccctgggcttcgggcgaaaagcccccagcggggtccgagcaggacggctggaaggcagagcctggggagggcacccgccccgccacggttggagacagctcggccaggcctgcccggagggtgctgctgcccacaccgccttgcggcgccctgcagcccggcttcccgctgcagcacgacggtgagagggaccctttcacctgcccggggttcgcgtcgcaggacaaggctctcggctcagcccagtatgaggacccaagaaatcttcattctgctggaaggagcagcagccctgcaggtgaaacagagggggacagagagccacaggccagacccggcgagggcaccgccccgctccccccaccaggacagaaagtggggggctctcagcccccgtttcagggtcagcgggaacctggacctcatgctttggggatgtcagggcttcacggccccaatttcccgggaccaagggggccagcccctccgtttccagaagagaatatcgcttctaacgatgggccacgagggcctccgccagccagattcggagcccagaaggggcccatcccttccttattctcggggcaacatgggccacctccttatggggacagcagaggcccctcaccctcttaccttggtggaccacgaggagtggcaccatcccaatttgaagaacgcaaggatccccatggggagaagagggagttccaggacgccccgtataacgaggtgacgggcgcccccgcccagtttgaagggacagagcaagccccatttctgggaagcagaggcggcgcgcctttccagttcggaggccagagaaggccactgctgtctcagctgaaaggcccccgaggcggcccccctccctctcagtttggaggtcagagaggaccaccccctggtcatttcgtgggcccaagagggccccatcctagtcagtttgaaactgcccggggccctcatcccaaccagtttgaaggacccagaggccaagcgcctaactttatgccaggtcccaggggcattcagcctcagcagttcgaagaccagagggtccattcaccaccaagattcacaaaccaaagggcgcctgcacccctgcagtttggtgg

SEQ ID NO: 39499 - DNA, 1009 bp, Artificial sequence
  DNA replication origin
acctgcagggctgctgctccttccagcagaatgaagatttcttgggtcctcatactgggctgagccgagagccttgtcctgcgacgcgaaccccgggcaggtgaaagggtccctctcaccgtcgtgctgcagcgggaagccgggctgcagggcgccgcaaggcggtgtgggcagcagcaccctccgggcaggcctggccgagctgtctccaaccgtggcggggcgggtgccctccccaggctctgccttccagccgtcctgctcggaccccgctgggggcttttcgcccgaagcccagggggaagaggctggctctttttcctccgggactggcatgggcgcctggcccacgaggccacccctggaagcatctctctcgggcagggcaccctgggcaccacgtgccgagagcctggagagaggctccccctccccctcaccggtctcagtggccaggcgcctcgcctgccgggggtccctgtggtttgacgcctggctggcggggggcagtgaggcgggcttgtctgcagactgctgctcttgctggaacagctctgccttgggcaaggacgactttggtggtggagacatcaaggcgtccgacaccgagaagtgggccatggagaccccgacggcggccctctgctgcctgagagcttcttcttgctcctccagctgtctcttctgctcctcgatctgtttgttcagctcttctagcatcttctgttgctccaccagggagggcgtcgcagccccggccaccggctcggcaggcctctccacggagttccttctcacgtcggcacacatcctgttgggcaggtcatcaacagtcactttcgcttcttctaagatggtctcatcctcggggtcataggccacctcttcccgctcggctgcagctgcttcaggagccctttccacctcgtggcgccgccctcgctccacaagctgagtgtcgaaggccctctccgggtcgtactcctcctcagggtcgtatggcctgtcg

SEQ ID NO: 39500 - DNA, 1321 bp, Artificial sequence
  DNA replication origin
agccccgcagcgtctcggtggccggtctcgtcctccgcccgccgcgcgggggcgccgctctagccccgcgccatctcggtggccgtccgcccactccgcggcgttcggggaaatggctgcgagaccctagaggcctgcggcctgcggtaagtggcgtcccgggcgccgggtagaagagccggccgccgcttgggccgccctcgggagcggggcggggccggcatcggagcccggctggcgagagccgcggatcccgcacaggccgctcccgccgagaagatggcggccgcggaagggaaggagcgggcgggcgggcgggcgagcgggcggggccggtcagagccgccgcggcctggggcgcgggcctcagacgccggccctggtgggctgcgtgaggtcgaggggactggcgagcactcggtggtcgcggctggaacggttccgagggtgggagtcggggcggccgctcgcggggaagagcgcagggctggcctgggcgagtgcggcccggggctcgggggctgcgtagctggcttgtaagcgcagctggtttccctaggcattctcggggacctcggcgcttcctcccgggccttgggtgcggtcggggtggccggcttagcttctggcgtgccttcgggggattccggcactgcaggggcggctggcgctgcaggaagcgcgaagagcccggattcgcttttctgaagagtgtgtccttacctccccgcgctggttttcagtttttttgtggaatagtttgttgcgttggtttgtactggccgtatttgtgacacattttgccttccagtgaccccggaagccgaaagggcccgctcttgcgctcggcgggaggggtgctcgtgctgcctccgctgcggcgtccggggctccttctcgcggttctgagacagtggaggtcaaggccggcttttctgctctaaataaaggactttaatatataagtttagagtttgggccacaggtagcagtagcttactgcgttaccagttattgaaaatactctttaacttgtgcctgggccttcgatatccgtgtcatctgtctgctgatggaatgagatttgagcctagtgtactcagggacttagaggagggaaaggcagatgggaacgtcttttcggtatattcacataactttgctatataccccgtgttccatggtttccgtagggccacatatgacttggttgaaatacagttctgagaaaggtccttagcagtgccttttaaggagtaaatacagtctttttttaaatgagcattcattgcttactgttagcacgagggatacagcagtg

SEQ ID NO: 39501 - DNA, 1766 bp, Artificial sequence
  DNA replication origin
agtcccctcgacctcacgcagcccaccagggccggcgtctgaggcccgcgccccaggccgcggcggctctgaccggccccgcccgctcgcccgcccgcccgcccgctccttcccttccgcggccgccatcttctcggcgggagcggcctgtgcgggatccgcggctctcgccagccgggctccgatgccggccccgccccgctcccgagggcggcccaagcggcggccggctcttctacccggcgcccgggacgccacttaccgcaggccgcaggcctctagggtctcgcagccatttccccgaacgccgcggagtgggcggacggccaccgagatggcgcggggctagagcggcgcccccgcgcggcgggcggaggacgagaccggccaccgagacgctgcggggctagagcggagcccgggctgcgaagcccggccccggactgcgcgcatgcgcccgtctttcatacctgcactccggacgcgcccttcgggtctgcactgacaatgacttgcttgcatcctttgtggacaccttatttccccgactccaagagtgaaagctggggcagtgcccttgcggggatccctcggaacagcccgggcagggcgcaggcggaacgtggatgctagccccgagggactgcactccgccaggatttcgctcttaagaccgataaacccttcaagtcggtggggatagaaagctcctgggctaaatttgtaagaggtgtaggggggcggggacaggggataaaagaagaaaaggcccaggttttctcttccagattgtgtttctcaaaacgcaggcccctgacggcctcggctgggaatggcagcgaggggcgaggtccaggtgtgggcggggtttctctccaacttgaagaccctacctgctgcctccccaccccaagctcggctccagaaaccaggagcgtgggggtgggggggagagaaaggagcacagcgaggaagggaggcgggcacgctggacctctaggccccagggaccttggcggtgtggtcccaaagctctgcctcctcccaccatgtcaatcctacactcagaactactgaccagtagctagaactcaaagaacgcatggacatgtttgcccacaggggttggagggaaagattagacacttactatcaagagaggggaaagtgaggtatggtagatgtcaaccttccatgtggattttcttcagttcgctcaatagtaactagagtgacactctatcacctgtctgtccccagatactgcaggaaagagactgggagggggcaggaggggcagctgttgcctcgaggcaccatgggcactggccacttgctccgagggcagggacctggggggggtggaggtggccccattacttgtttctgcttctgtgaacagtgatacgctacctggaagcatggaccatctagcctttggcgttggccctggccaagagtaaaaggggcccagagtgccgtaaagctgcccctaatacagaggcttctgcgatgcttccatggatgaaccaggggctttgaggcaggtgtgctttttaataataccgctgaagattacagggtctgctagtttctgaggcagacttagttttcttcaaaggaatacaacgcagcttgtttttgctggtgtggcccattaggaccacattaatagaatctggcagggatgggcttgacagtcttccatcttgagtgtgatctcaggttgcaaagagggctttttgctctcagacatggggtagtgg

SEQ ID NO: 39502 - DNA, 955 bp, Artificial sequence
  DNA replication origin
gcgtcggccctctggcaagatggctgctgcggaggcgttggagcgcggaaatctggaaccgggatggcgacgtctacactgagtcggaggcgaaggtcccagcttttttcctgtcgtttgcgtgaggccgcacggggtggggcgggggaaaggcgccgggtgtccgcggccgcccctcagacggggagggagtcccctcccgaccggcggccttccagggctagtgtccctgaggtccagggagagacggctgacccgagaccgggctgggcgagagctgtgctgtctgcgcgttgaagcgagttcccccgctttactcgagatgttgttgagcgcgtcctcactcgaggccaggtggggaatcagaagggccctgccctcagggcgcctcccatgggctacgccgaagggcgggacgcggccagggcgcgcgggacaaaggagaccccacttgcttgcggggcggagtcccggcggcggcgcggggcagggccggggttactcggtgactggagaccctcccggcaggagcgcgggttgaggccgcacttgggtatttgcgcgtttacttgcttattgcctgtccgctcaggaggaatgcgaagtctgtcattgcagggtcccatgtttccgttgctgggaagtaccttaaaatatttgatagagccgaaggaagaaatagagtccttgaggggcagctcctgatttcatctgtgaggaattcacgggacggcttctttctgaagtcaggggtgaggtggtttcgtgtgtttgcttacaagcgagctgaacaacgtgtaagctatgtcggtcggtctactcagcgacagtaagtccagttcggcaaataggttggaggagactgattttggacattttccgttaatcgaaagagctaaatctgcaggtataaggtcttgacaaaattatgcttcatatgcagaggcagtacatg

SEQ ID NO: 39503 - DNA, 1042 bp, Artificial sequence
  DNA replication origin
gccgcccctcaggctggccgggaccgccccagaacaccagcgcctgaggccgcgcgcctggaggctgagccctgactgccccctgggcaccggcgcggggcggccgtccgggcctggactcactgcgcgccccaattccgcacctgccagcgccggcgcttccaaggcccccagagcgggggcggcgcgcaccccggccacatcccgcctgcccgcccggcccggccccgggagacgctcggcccggccgcccgggcccgccgccgccatcttaccgtgcggaacctgcctcccgcgctgcgcggtctgggcggctgcggctccgcagcctctcctgggctggggagaggtggcggccgccggggcgcccgagtagaaggaggcagaggtgggggccgcggcggaggcgggggcgggggcgggggcggggagcgggagggcaggcgcaccggaggccgcccctcagcacctctcgcgacagcaagagagcgcgagagcgcgagccgatgaccaatgaagcgcccccgcgagggggcggggcggacggcctcccggaagcgcggaacctcagcttccgtacttgcgcagaactcccctcgcggcgaccacgcactacgggttggcgccagagtcaaaaggcgtcggccctctggcaagatggctgctgcggaggcgttggagcgcggaaatctggaaccgggatggcgacgtctacactgagtcggaggcgaaggtcccagcttttttcctgtcgtttgcgtgaggccgcacggggtggggcgggggaaaggcgccgggtgtccgcggccgcccctcagacggggagggagtcccctcccgaccggcggccttccagggctagtgtccctgaggtccagggagagacggctgacccgagaccgggctgggcgagagctgtgctgtctgcgcgttgaagcgagttcccccgctttactcgagatgttgttgagcgcgtcctcactcgaggccaggtggggaatcagaagggccctgccctcagggcgcctcccatgggctacgc

SEQ ID NO: 39504 - DNA, 1772 bp, Artificial sequence
  DNA replication origin
gtgaacccgggaggtggagcttctagtgagccgagatggtgccactgcactccagcctgggcgacagagcgagactccgtctcaaaaaaaaaaaaaaagaaaaaaaagaaaagaaaaagagagttgcaggagaggccaaatctgccgtgagttttatcaggaacaacaagacaaaatacatgacatgtgctttagcaacaaatatgtacgtggcaaacctattttgtttgtttttttttaaataagggcatgaaagctgacactcaggagggggttacctgtgggaggggcaaatggctgaagccccagaggcagctgttccggctttgggagaatgggtggatacctgagacaggcaggggcacgccaccgtccactctgtctttctcttttgccactgatacatacgttacacatactactttatacgaagtactgctaaagtgtttcaataaattaaaaaactttggtctcttggctgaaaatgggatgaatgcagggtggtgagatctgagcagccagtcccttagggagacacccaagcgagagagaacatcggcagaagagatggagagcaaggtgagatcaagatgctttggccagagtcaatggctgctgctagacagattaccggacaaaagagagggaagaatagaagatggtcacaggtttcaagcatgagaggccctgcaagatggggccacaaataaggaggaaggactggaagaagaacaggtttgagaagcagggcaagtttgacgtgactattagacatgcgtctggagaaatcaagcaggtgtctgaattacagatcctgagctcagagctgaaaacatgaattagtgaaataaggggcggggggggcggtgctggggcacagggatatttaaagccaagaattcagcaaagaccataggaagagcgtagatagggaatgagaatcgccattacttggaggatgccaaccttgaaggtaaagcagagaaagtggcaccagcagaagaaaacttgatgtggagcggcaggtaaagtggaggagaaaccaggagtcgctgtcacacacgaacacccatctttcgttgtcaactgcaaaactcactgagaccaactttttattcacgacaattaatggtaacttaaggactcattttctttttcttttttttttgagacagagcctcgctctgtcgcccaggctggagggcagtggcgcgatcatggctcaccgcagcctcgacctcctgggctcaagcgatcctcccacctcagcctccagagtaactgggacaacaggagcgcaccactctgcctggctaatttttttatttttagcagagaagggagtctcgctgttgccacggctggtctcgaactcgcgggctcaagtgatccgcccacttcgacctccgccaccgcgcccggccctaggaccaacgttaagagctccctaggaaaaggcaccttttctctcggcccattcggtgatcggcactcacagcgcttccactccgggcagttacgtgcgcccatgaaaagcaacaactttgtagaactggccagtcctgttagcaggaagaactcggtagtctcaaactccagcataaaaagattcagcagaagaaaacacccgtgtgctgaagactcctactttccatgccacactttacatcctcacccgctcggtttctgctttaaagcagcagattttattaaaaagacttcgttacggacgtcgctcctccacagagacagctaccgccgcccctcaggct

SEQ ID NO: 39505 - DNA, 1625 bp, Artificial sequence
  DNA replication origin
ggtcgccctgactgtccgacgcgccctggctcagccccagcagaggttagtgtgggggcagagggggattcccagcagcaggccggtcagactggggcttcagagaagggccctggtggtaagcctggtccaagaggtgccagcccatcccttggacacgacacggagccatggggccgtctgtcctctgtctataaaatggggaatgatggcagtccctgccttaccgatcaaataaaatcagggataaagtcttaaccaagtgcaaagagagtaaaagtacagggtcactgatttttaaaatggatctttcggggcagggatgggtccactcctgagcccttggaccaagcctgggagagctggacaaatccagcgctggcccatgtcttctcagcagatgcctgtgaaggttgtcattggcccctgggttcctggacaaaaggtgtcctgaggacccatcacaggccaggttctgggctcgggggcaggggtgacggggtggggcccccactctgtgtgctcctgctgccatgccaaggatgaagccagcaggggaaggcctcaaccatgcagcctttccccaggaggcggcagggcctgctcctcaggcgttgcccccacctccactagggcccacctcagtccatcctccacgcagcagccaccacccaggggccgagggagacacgtctaaggcagggccttgcacttagaacagacccacatttaccccctccctccccctagccctcaggtctccaacagcccaacccactgcactgcagggcctgctcccagggccctctgaacagaaagacacgggcaccctgaaaagcaaggtcatactttcatccatcctgacgtagggtaggtgaaaagatggtggcagagagaggtttattgccccaaacagccctagcccatagccaggaagtttggaaactgttgctaaacgtatcgctgtcaacagcaccctctttgaggtgattcgcttccattcactctgtgatggtgatttcctaccgagatctgtgatcatgctgcagcagacatttgccatctggttacccaaagtccccttcctcctggagctgatgttctggggcaggtagacaaaaatcaaagtagtgaaaggggtagggaaggggtgttacttcaaataggttgggctgaggaggcacccctggacacctgagtgaaggctggatgagctgaagaaacgggccatgcagggatggctgggtgggtgaaggggccatctcacagggacattataaagctgggtgctggtagtggccagatggaggctctccacgcttctggtggattctgagagctgccccgcacccaagcatctttgaggcctaaggtgaaaaattatgtagggacaatagacagtcaacacctgggttttcaaggacacagggtgaccttgcggacagggcagtcacagccagcacccactggcctctgcttctggaaggctgcgtgcctccctcttgttgggcctggcccacctaacttcttgtttatttcaagtgctgctatagggagacgatgctagagattttcctaaagcaaatccacacctcactacgtatggcgcccgttgctcagcctct

SEQ ID NO: 39506 - DNA, 1262 bp, Artificial sequence
  DNA replication origin
cacctcttggaccaggcttaccaccagggcccttctctgaagccccagtctgaccggcctgctgctgggaatccccctctgcccccacactaacctctgctggggctgagccagggcgcgtcggacagtcagggcgacccagccagggcgaccgttggccccgctcctatggggcagcagggaccgacgtcagcagggtggggcgggcacccgagtggtatgccccgccctgccccgcctgcccgccctggtggccgtctgggggcgacaagtcctgagagaaccagacggaagcgcgctgggactgacacgtggacttgggcggtgctgcccgggtgggtcagcctgggctgggaggcagccccgggacacagctgtgcccacgccgtctgagcaccccaagcccgatgcagccacccccagacgaggcccgcagggacatggccggggacacccagtggtccaggtgtggcgggggtgaggggagggggggtgggagcggtggagatggggccgtggggagggagctgagatactgccacgtgggacgatgctaggtggggagggctgagctgggcgggctcctctggctgtggggccccctgtgttccttgtgggaggtggaaggaagtgagtgccctgtccttcctccctgccatgagattccaggaccggacctggcaagtgccctatcccagccagtgttcctggggctcttccaggcagggctatgttccccaggccaggggcattgtcctggacagtcaggaggcatacccctcgccaggtggaaccaccctgtgtatgcatgaccctgacaagcaggcgccaggacagtcaggaggccaggtagggggcacgggctggagcctgcagctggacggggttggggggggtcctgccaccacgtgccagctgtgtgctgaggacgagctccccgctggcttcagctctcggagcatttggtggtggggagaagcagggcctgggcaggtcgcctggccaccagcactgctgcctgtaggaggctccctgggcaggtgacgcctcagaaaccgggcgagatggtgaccgcgggccattggtcagctggggagggcctctgccagggagctcctgagagcagcccccacactgctgaaccccttggctctgggtcttgggctgaggccttaagtggctggaccctgggcctagactcaggccctgtgggttccagagcagtctcctgcctgcactgagtccccagggtacctaccctg

SEQ ID NO: 39507 - DNA, 1376 bp, Artificial sequence
  DNA replication origin
agtcctgacacggctggggcgcaggggccgggacgtgggcgggaatgagagggaacctgcctgggaaggctggggaggagcgtccaggccccgtggtcatttgcggaggtagcgagtggcagggcctgcttgggtggattctgagcctggaggcctctatgcaggccagcacagacagcctcgggcaggagactcccagccgcacacaggctcctggtcctccagctcggtgcccgccctcctgggaccttgctagaaggcagaacgtgctgtcagtgccacgtcagacccggctcccaaagcccccccacctcagatcctgatgctggcccacgaggagctcccatttctgggtctggattttcagaacccccccaacaaaccactctgctgctaggttggagccctgcgggcagccgaaagccaggaggaggcagcagggcccacggcacctctcatcagcgcccttgtgccctggaagcaggggctctggccagctggggctgtgtgtgggagcatgtgtgtctgtgtgtgtatttatgagttgtgtgaccctgtgtttgaatgtgtgtaggagtgtgtctgtgtgtgtatgagttgtgtgaccctgtgtttgaatgtgtgtaggagcgtgtgtgtctgtgtgtgtatttgagttgtgtgaccctgtgtttgaatgtgtgtgggagcgtgtgtgtctgtgtatttatgagttgtgtgaccctatgtttgaatgtgtgtgggagcgggtgtgtgtgtgtatttatgagttgtgtgaccctgtgtttgtgtgtgggagcatgtgtgtctgtgtgtgtatttatgagttgtgtgaccctgtgtttgagtgtgtgtgggagaatgtgtgtctgtgtatttatgagttgagtgaccctgtgtttgaatgtgtgtgggagtgtgtgtgtctgtgtatttatgagttgtgtgaccgtttgtgtgtggaagcatgtgtgtctgtgtgtgtatttatgagttgtatgaccttgtgtttgagtgtgtgggagcgtgtagtgtctgtgtgtttatgagttgtgtgaccctgtgtttgagtgtgtgtgggagcatgcgtctgtgtgtgtatttatgagttgtgtgaccctgtgtttgaatgtgtgtgggagcgtgtgtgtctgtgtatttgagttgtgtgaccctgtgtttgagtgtgtgtgggagaatgtgtgtgtgtgtgtatgagttgtgtgaccctgtgtttgagtgtgtgtgggaggatgtgtgtctgtgtatttatgagttgtgtgaccctgtgtttgaatgtgtgtgggagcgtgtgtgtctgtatttgagttgtgtgaccctgtgtttgagtgtgtgtgggagaatatgtgtgtgtg

SEQ ID NO: 39508 - DNA, 1185 bp, Artificial sequence
  DNA replication origin
ttcttttgtttgtttgtttttgtttgttgagacagggtcttgctctgtcgcccaggctggagggcagtggtgcaaccatagctcatggcagccttgacctcctgggcttaagccatccttccaccccagcctctggggtagctgagattacaggctcgtacacccacacccggctaatatttctttttcctttttgtagagacaaggtcttgccatgttgcccaggctggtctcaaactcctgggttcaagcaatcctcctgccttggcctcccaaagtgctgggattccagccactgtgccccgctgagaaaactcattcttgttgtttaggctgccctgtcacaggaccccgctagggcagcagaggtaactcacacgacaccgtcagacccaccccagcaccaggcctgtctgtgtgggagttccagattccattcatggaaaacgttcctataggcagccataaaaatagatggcaaggggagaaggggccagaaagacctggagcctctctgctgggggaaggttgggggcagatgtgggtgtggggctggtgtgggtgggtcgggggccccagaggcagtcctgtgcctgctgggggaaggttcggggacaggtgtgggtgtggagctggtgtgggtgggtcgaggacaccagaggcagtcctgtggcacctgtgctggggtgggagcacacccccaagacccccacatcacagaggctggtgtgggtgagtcaggggccccagaggcagtcctgcgcctgctgggggaaggttggggggaggtgtgggtgtggagctggtgtgggtgggtcaagggcaccagaggcagtcctgtggcacctgtgctggggtgggagtgcacctccaagacccctgcatgacagaggcacagggaaaacagtaaaatacatttccagcctgagctctagctgaaggttctccaagccggaggaaggagggaagatgtgagccactgcaggtttggaggatggtaattaatgttaaaggcatcaataatttaatgggacaggctgtattttatcctgcatgtctctggcatttttagtggcctctcagatttgtccttggcatggacactattggctgaggacttcttcctgaagcaacgctgaggtccagctgccgcctcagggggtgggcggaggtgaagtcagtgct

SEQ ID NO: 39509 - DNA, 1490 bp, Artificial sequence
  DNA replication origin
aaacgtagaaatggaaaatgtttgaaaactgggtacgtgaccgctgatccttgagttccctggcttagcaagggaatgtccaagaaagtccctcctaaaaccatccgctccatgggatgctggcaaaaacacagagacagaccgtcctagggtcagcgtgggggcagcggtcagccgcgccggtgccttcccgagcctgtagccagattgtctatttggggagaaaatggtggcacggggagcacgtaaacagcctaaagggcggaggcaactccttcgctgaaaacccctcaggccccgtgagaagcccacactgagtgtccacaggaaacaccccggcctccgagggtccccccgtccctgggcactgccatccaccaagctcggccccccaggacaacggggtgaggaagtgctgcccgtgcccagctccggaggggtccctgaggaggaggggcccggctgctcagggcttgtctccagcttccccatgctggctcaggctgcgggaacagaggacgcttggggacaggaggagctgccgaagcagaactgagactcaggggccatggagggggcggaggctgagtcttcctgggctgggcggggggacctccagcctccaattgcccaaatgagcttcaggaaaggcttcgggccttgctcgggtgagcaatcctctcatccttgcctgggaccatcctggccctgggggaggaaggaaggaggatggcctgggtatgaatggcagggagatgcccaaaggaagtagccaatcccagatcccactctcagccacctgggacaggcgaggtggtgtctggggctggaagcagggagcagttttcttggcctctggggctcacagccccctgctatgtgtccctggcgaggcccagggagcggggtgccgagcagaggtgtctcagcagagggagatgggggtgggacagccgctgcccttgacaggagaccctacgacccggcaggagaacgcttcccattagggggcccaggggaacccgcggtgcacagacgcccagcagctcgaaggatactgaccaaaccccagaggatgcctgggctcactcgtgtgttttactttctcagataacggtatgcggtttctgtgacgtctatcaaggtgacatcctaaaaccagaaagaggaagtgcgccaggaggggagatggcccacgggagctgtgagaccccaccctggcctcgtacccactcagggaccggccgccccagcagggtggtggggacggttcgggggccagttccacgtgctccactttaacaggggcatcagcagctccccgacaccaggcaggctcttaggacccctccacagcctcggtccctcctgatcctcccgtgggtcacagttccagccattctagtgggcgtggccacagtgccagccaatctagtgggcgtggccaccgtgccagccattctattgggcgtggccacagtgccagctat

SEQ ID NO: 39510 - DNA, 2196 bp, Artificial sequence
  DNA replication origin
gggagctggctgacatgggtgaggccaccccagttcctcgcccgtcttggtcccagagtccttctgagaggacccgctgcccacactcgtctggggtggatggaggcaagtgtctccttcctgatgttagaacacgaaacctgacaggtgcttggacctgggggtgaggtggcccctgctcaggtgaggtgctcaggagaggcaggcaccaggcagtccctcggggccccacaaccacagtctttcatgcaaacttgttgatcttgacacctgcttggcccagctctgtcaaagtccctctccctggtttctgcccaggcaggctaggggacaccacaggtcatctcttcacaggagctggcgctgtgggaggtgagaccttccaacctgcgtccagccctctgctggaccttgtcaggcctgaggacacctctcctaggcctagaaatgacctacagtgaggaaacctggggagaggggccggggagcaagagcaggcacttcgggctctgaggatgaggtgggatggaggagagcctggggctgtgcagcagggcaagtggtattgtgcagctgggcagtgggacagaacaggtggactggggtgcaggtggactggggtacagtgggaagggggcataggtgggcagagggtgcaggtggtcagtggtgcaggtgggcactgttcaggtgggcagagtgctggtgggtaggggtgcaggtgtgcagggggtgcaggtgggcggggatgcagatgggtgggagtgtagatgggcagaggtgtaggtgggtgcagtacaggtgggaaaagggtgatggggcagagggtgcaggtgggcagagggtgcaggtgggcgggggtgcgggtgggcgggggtgtgggtgggcagagggtgtgggtgggcaaagagtgcgggtggactagggtgcaggtgggcaggggtgcagttgggcagggggtacaggtggctggagtctgacatgggggtgatgtaggcatgggggtgcagtggcctgtgggtgtaattctccactctgccctttattcaaatgcaaatgtccagccctgtgagttcagagccttggaactaggaaactgattttaacaggggaaaatgtgaccctagaacaggactatcctcctgaacactgtgccagttggtgtctgcgaactccgccctgttgtgcattctcacttctaagaggttgtccacccctcctgggtgtctgtgggcctcatctgctgagcccaggggtggcaggagccacgtcttcaccgtcatttcacagaccaggatacggaggctcacagtagtcagcggcttgcctggtctctcgggcattggttcaggctctggcccctgccttgcagggatgccccagtctcctatcccagcctgcaccctcctgggggccacgccagcatggtggggcgagagggttctgcagagagagcctgggggcacgtttgggatcttagccctctagtgcccttccattttctactggggcaaggagcgtgaggctccagcatcccctccagaacgttcttgtggaagctccgctttgtttcagaacaatggaagcttaacataaatatgcagaggaaatgtgacgtcacagtttttattgggacctggaatcactcctgtgatagagtcattacctgggttaagctcattaagttaattaacgtgagcgttattattgctgataaaagatagtctcaggggattggtagagccagcgtagcatgcaggggtgggcacaggggggatggggatgggggactcagcagagacagctgggggacccggggacccctgctaaagctgcaaaacacaatcacattctcacacccgggctgcccccaccctgaggacacgggtgaacacggagctcgggggacacgaccatccagcgtcatgaaagccaggcgtgcgagccaactacttgtacctgcaggacaggaacagtgaggatagagcgatgggcacagacctcaccccgaggacagaggtcattgtcaccaaagacccccgagagaggacggcgattggtcttgaagggtcgatgatggacattccttcgtatgtggcccctcttttgggatgttcgcttctaactccagagctcggagactcatctgaaggttgaatttagaccccatcattatttttacatgtgtggaaggat

SEQ ID NO: 39511 - DNA, 2132 bp, Artificial sequence
  DNA replication origin
aggtggttggaccatgggggtggcttctaatggcttctaaccatccctgagtgctgtctcatgatagaattctcacgagatctggtggtttgaaagtgcccccacgccccactctctcttcctcctgcaccagccaggtaggacgccctggcttcccctacaccttccgccatgactgtaagtttcctgaggcttccccagccacgcttcctgtacagctcggggaatcatagccaattaaacctcttttctgtataaacttcccagtctcaggtagttctttatagcaatgtgggaactactaatacaacatacatccttttttttttttttttttttttttttttgagacagggtcttgctctgttgcccaggctggaatgcagtggctccatcgtagctcacttgctgcagccgaacacccccgggctcaggcgatcctcctacctcagtctcctgagtagctgggaccacaggtgtgtaacaccacacctggcctgcatgcatccttagaagagagaggcaggggagtttggggacgaacgcacacagaggagaaggtgatgtgaagacagatggggccatgtcacctgtgtgcacagcagtgctccgactcatgctctggcctgcccgtgctgagggacagaacccacagggaaacccatgcctctcccatgagatagaaactggccatctcctctccaaatggagattggacagactgtgttccacggacgggagcgagggcagcagcagctaaaccaggcctgtctccacctcccacacaggcagcagtctccaggtggaagtgtggaagtgtgtgctcctgggtgtgtgtgcagacgtgtgcacacgtgtatggatgtgaccgtcgggtactgggatgaaggggccaagagggatggaggaagaggagggcgctaagaagtgggtctgtcgtgggcctagcttgctgtgctgcttgactggggtgtgaggtacacccctcccctccccaggcatggctggcttcaccgtgcgtgacctgagcagctgcccagggccctgtgatgagaagggacctctgcttggtttaattctccgaagttgccatattgaaatctttaacagttttggaacaagggccccatattttcattttgtgctgggactgcaaattctgtagccagtcctgcccccaggaaactcactggaaaggtgtttacagcatcctttggaggaagggccgcagggcagggtcagccctggaactttggtggcatttaataactgcaaccacatttaaggtgctggcagctgcaggattttacctggttagtgtggcgggggaggctgggagcaggggagcctgggaggcaggcagaggctgggaggcaggggaggctgggagcagaggaggctgggaggcaggggaggctgggaggcagggaggctgggaggcaggggaggcttggaggtggggaggctgggagcatgagaggctgggaggcaggagaggctgggagcaggggaggctgggaggcaggggaggcttggaggcaggggaggctgggaggcaggggaggctgggaggcaggggaggctgggaggcaggggagggtgggaggcaggggaggctgggaggcggggaggcttggaggtggggaggctgggagcaggagaggctgggaggcaggggaggctgggaggcaggagaggctgggaggcaggagaggctgggagcaggagaggctgggaggcaggggaggctgggaggcaggagaggctgggagcaggagaggctgggaggcaggggaggctgggaggcaggggaggctgggaggcaggggagggtggccagatgtagcaagtaaggacacaggatgcccccagttaactttgagtttcagataactagaaatacatttgtagggtaaatatgccccatgcaatacttgggacctagtcactgtttttgaatctggcaccccagctgggcgtgttcggccaggtgggcagggaatcccaggggtttccaggtgggctttgtccgtgggcaccgagtggggggcctttgcctgtagtagaccctgggggccagaccgccgcttctgtgcggagctgcctgtcctcctcccgctgaggttctgagg

SEQ ID NO: 39512 - DNA, 1012 bp, Artificial sequence
  DNA replication origin
gcggcggcgcatgcacgacctaaacgacgcgctggacgggctgcgagccgtcatcccctacgcgcacagcccgtcggtgcgcaagctctccaagatcgccacgctgctgctcgccaagaactatatcctcatgcaggcgcaggccctggacgagatgcggcgcctggtggccttcctcaaccagggccagggcctggccgcgcccgtaaacgccgcgcccttgacgcccttcggccaggccactgtgtgccccttctccgcaggcgccgccctggggccctgccctgacaagtgcgccgccttctccgggacgccctccgcgctttgcaaacactgtcacgagaagccgtgaccgcgcgggcccccggccctcccgcacgcgtcctccgatcgcccctgtgactgtctctctgcccggacaggaaaggcctggagggaccctgcagaccaggaggagggggcccgacttcgcttccagcctgtgcgcggtggacagtttagcgcagcgggaagcgccaaggccgtcggggcgcgggattgagctcgagagccggacgctggactctgcgcccgggaactcgcggcacccactgggtattgtcgggacccagcaagtctaggaacgggggtgggtagagcatccttcgggcactgccgttcgtccccaaaagaagaccaccgcggggtcccagggccacggcgaggacgggcactggtcagattccggacaggcggtcctggccccgggcgcacgaaaggtggagacgaagaaaagccggacttactggctcctgatcctcttgcagtgggcctcgcgctcccgctccagccggcccttcgtgctaaactgcagggcagtgctctgttcctgaggacgcgcgtggccggcacctcccacctcggtgactccgagactccgcagccctgcggagagcccacgatggccgtctgcagaggagctggaccgcgggcgcaggaagaccccggggaaggccttttccaagtaggagtt

SEQ ID NO: 39513 - DNA, 2228 bp, Artificial sequence
  DNA replication origin
tacctccccctcgcccccgcttcggttttaagccgcggaggcgcccggtgggacctcgctgctgtccaatcaggggggaccgggtgagctcctcttcctggagccgggctccaccagcgccgcaggctcacaggccgggggtgggggctctggaccgaggggcggcgcggggcggcgcggggcggcgcgcgcggtcctggagcgctagtacttgcttctcgactccccggccgccgcctccggccgccccggggattccgccaccaaacgcacgcgtcccaggtgggcacccgcctcggtccgtctttgagtctgaccctagcgcaagagtccctggcgacacgcaggggccagagcgggggggcgcgccgcaatagcagcagcgccagcgccaacaccctgtcccgctgaggggccgcttcgggtcggggtcagggtcgtgggcgctctggtgcagccgcggcgcagcgtgtacccggagcccgcacactccctgctcggggcgccctgtggccaggcttgaggggcagagtgagagggagtttctagaacctgttgaaaaacgccacgagcgttgcaggccggggagggcgggaaggtggagggcagcgcggcctggggctccccgggggtgggaggggagctctgtgagctgcaggaccgcctcttccctgccagccgcttcctgggcatctatcagcgaaacgcgtgaggcttggtgggctttcccggagcctccgaacccctggggtccagccacactggatgggaatgtggccagcctcggactcgccttttcagtcctcttccaaccccgcatgaaggccagaaccccagcccttctcccaggtgggaacctgcctggaggcccggccgagtgctgaggctagagtgtgctgagggatagtggcttctccggtcctggcttgggtgggagactgggccaccctggcctatggcacgaggtggagcggcccgtcgggcccttctgtgtgacctgggaagggccgcataccctccctgttctccaggctccgccccaggaggagccacagcgatggggcagtgtgcgcagccccgggaggggagtgggagctgcacgtgtgtggggcggatgtgctgtctggaaggttctgggaacgcagcagtgaccggcctgtccggtggttccctgccaggtgcggggtgtgaggagacagatgcatggataagtctccgtgggaaactcaggcctttgtcctggcggaggggaatgggtctgaggcagcctctgccgggctggcggcctgtctggctgcgcgtcctgcagcaccggcctcacccccagcacacgcccgccaggagcgcaggggccccgaggatggaagcgtctgtctgaggcgctgtcctgggaccccaccccgccttcggggctgatgcacagaccgggaattgaggatacctggtgtggaggaggccgctgtgtttgggcctgggtctgaagggtgagtgggtgtcattgtggccacgggccggggtcgggggagcattcaggtggccggaggaggcctggcacagggaagggcagtgaggggcccgggtggggccaggagatagaggggcgggaccaggcctgtgggacagtttgaatcacgcggggagtttggtctttatgggaagaaaggcgccgtggccattcggagagccactctggcactgctgccggtgcggtccggggctgcggggcctcctcctgggcctgaactgcagggctggtgggggccatgggggaaggtggctccacaggtccccggagctgggggagcaggaggatggggttgaccaggagggaaagctatggagctggagaatgcaggaggcccccgaggggaggtgcagccagcgctggtggggaggcctctgaggggtacgcggtaattgacatcacgggtgtgggtgagagtggctttcaaagcatcggctggagcagggtccccattaaagccagagacgctgacgccatggggctggggttggggctgggccggggctttgggaggtccgaactccccagcagggagccagggctctgggccagttcccaggcccagttaatcttcagtagaatcgatcgaccttggctcagagggttggaggcagggatgggcagggggtgaggggtgaggcgcacgaaacagcacccgggtgaggcccctgctgcggcccctgcgggaccagccacgaattcc

SEQ ID NO: 39514 - DNA, 1215 bp, Artificial sequence
  DNA replication origin
gtaggagtttagaaacctcaattgccttttcaaaccgggcagtagcgcacgcctgtaatcccagcactttgggaggccgaggcgggtggatcacgaggtcaggagatcgagaccatcctggctaatacggtgaaaccccgtctctaataaaaatacaaaaaattagccgggcgtggtagcgggcgcctgtagtcccagctactcgggcggctgaggcaggagaatggcgggaacccgggaggtggagcttgcagtgagccgagatcgcaccactgcactccagcctgggcgacagagcgagactccgtctcaaaaaaaaaaaaaaaaaaagaaaagaaaaaaaaaccacataaaatagtaaatgtttgcaagaatacgaagagattggagcccttgtccgttgctgttggaatgtacaatggtgcagctgctgtgggaagcagcgtgtgggaacctctgaagaccacgtgagaactccctgaaagaactgaaagcaggggctgaacaggtgcgctcatcgctcccacgggccaaacgctggaaataaacaagatggacgcgaacgtgcggagaccgcatgaggtcatttcctgaggtacttggagcagtcaaatgcagaggtgggcggcggagtcgtggtttccagcgggtgggggaggaggggagccggggttactggggacagagtttcagtttgggaagatacaaacattctggagttggatgggggcgtcggctgcacaacaccgcggttgtgtacaatgcccctgggctgtgcacctgaaaatggtcacaacgatcaacttcatgtgatacacattttgacagagcacatatacacacgaaagaaaaggtggagtcttcaaatcccagggcctgggcgttgtccctagaagccaaacagtgtgggtcccagggtcggggcaggggcctgcggtaggatttctttcctcctccctgttttgatctctagaagaccctacgtcctgtggaaggggagcactgaggaggcgccgtctctgggagaggcagggtgggttgttccagttactagcaccattgccctgcaggcaagaagctggctggcccaagaccacccagcgggggctccctcccgctccccccacccagcctgacctcctggtgcgcccactgtgccccaccagacctcccttccccaatcccagcagcatggacagcagtgacgcccacagg

SEQ ID NO: 39515 - DNA, 1364 bp, Artificial sequence
  DNA replication origin
gaccctggcatgatccaggagcccccatacaggggagcgagtgcagaaatggggagtcccacagggcagtgtctcagtcacctgctgcctggagcaaactaccccagagcttggtggcttaaaacaacccccactttacagtcacaactctgggtgcaggactagagaagggtcggggtggccgtgtccgcttcatgaggtgtggctgggttgacctcgtggctgcatcccgtggggctgggctgggttgcaaggtccaagcagggtcaccaatacacaggggaccttgggtgggccatgggctgggcacaccctccacgtggcctctctccatgctgcaggagaagctggactggagatgccgggcagtgagcgagcagaagccgaggccatcacacccagaaaggatgtgacgcctctgcggcatctgtcatggccacgggggccccagcagcccagatgcaggggtggagcaccgggtgagaggagctgcaggcctgggcggggcggggggaggtggaggcagggagaggcagggagaggcagggagaggcagggagaggcagggagaggcagggagaggcagggagccctgtgcagatgggacctgtgatgcggctgactgggcaggggtgggggaggtggagacagggaaaggcagggagccctgtgcagatgagacctgtgatggggctgactctgggtgtcgggaaggtggagcacggggatttcaaatgcactggatgagcgtgagcgaaggcactcagagtggtggcgaggctctcgcttgagcagcaggaaggaagatggggctgccccagcgcgccagggatgtggggaggcccagctgcccagagggcagtgagtgggagcccaggaaagcccaggacccggggacagagccaagcccgaccccaccccaggtgaaacaacctggttcacagctgggaccccagaggcacacccgtcccccaaatagcaaggagccaggcaaaatctcaggtcccctctcccacaccacccaccagtggagacatgaggctgcctcaggagcccatgtggcatttctgtgcatatctgttgccacacagccaggggcaccctgcccagaaaagcctggcgtggtcccgcgtcctcaggcggtgaggaggggccacctgcagctgcctcatctcatccccagcctctctagagtactctacatccagccccgtagtcaagaccctagaagcccacccagctctccacacacagaaacccaccaggccattcacggagcacggccgagcacagggaggtgacgtggggctggacatctcatctgactcccccagcgggatgcctcctgtcttcaatgagggccg

SEQ ID NO: 39516 - DNA, 1303 bp, Artificial sequence
  DNA replication origin
ggctcctggatcatgccagggtcacgtctgataaacccaatgttagttgaaagcctccagatgaaaggcactcagtgcactccgcctcctgaatatcattgttcggcctcccggccttcaccatgtgcagacgctgacgtcagcacattcgacaaagtccccaattcccttgctctgtttctaaggccccgccacccccacgctgtggctgcgcttccttgtcctcatccttgtccacctgtgttctttccaggtgccctgagtggactggaggggcacagggcagcctggcacctgctgagcccttgctggggccatgctgtcctgagcccctgctgagcaccttatggggacatgagtgggggctcagtctgggaaggaggaggggaggcctggggagatggtctgactagctctgcccagcccctcggtgctgtctggggacaggctggggtccagggcctccccagatgatgggaccagtgtctccagggctctgcaggctggtcggggcggctgacctgggcatttcttcttctggctgccgggaggcagcaaggccccaggtttgcatctcagtggccaagtctgggcgaggcttttcggggagcaggggtgcagcggccaagtgtgtctttggccactctggggccacatcaacgggtcctggggtccctgaagcacccgggaggcagccaggagggcgccagtgctgggctgtgcagggtgggcctgaagaagggggtggtgcctggcggtgatggagtgggcccgtcccatcccccaggccggcagccctgcctcaggagagccctcagtgggctgcagaggggcctcccacggtgagagaggacggggagggactggagtgtggttcatgtggtggcctgctggtgcagggctgggctccatgttggcagggcttgcgggggcggtgctgggcttcacagtggcaggacttgcagagggggcctgggctccatggtggcagggctggtgcagggctgggctccacagtggcagggctggggggtctgtgcccacaaggccacatcaggcacaggggaccagcccccaggacagaggtcaaggcctggattttgtggcccaacctggacccctaactctctccttgccccacagtgagtaaaccgaggtgcagtcatggcgcctgcctcctgccgtgtgtttaggtgaatgaggtcaggccgggtactcacctgtgcatccccgctgctgggaccacagcaggtgcacccacggaccccagccccactccgaccgcctgtgtcctcaccctctg

SEQ ID NO: 39517 - DNA, 1130 bp, Artificial sequence
  DNA replication origin
ggccgtgttctgtgagcacaggagtggtgcgaggtgggactgccctcccatgctgtccttgaaggggctttgtgtcccaggccgcagtccctgcccggactgcacagcagctctcctgggccctgtacacacctggaaaccaggggccgcaaggagccaggcccggagcctggggtgtagactgagctccaccagaaaagcccctccctcacgtgggcaggggtcagagggcggcccacgcagccctgcacgcacctccaggaagcgagatgcgacgtccaggtcttccttgttcagcaccagattgtccacgaacatccagaagaagggcctggggctgcctggcttgggccgtgcgtactgcaggagccggtggaactggaacaggtaccagcctggagtggggtgagggggcagggctgagggggggccgggggggctggtcatggggacgctgttcaggtgcatctgggcaggggcctaaggaaactggggcttgagagaagggctgagggggtcgaggggacgcaccggcctgggtctgagggatccccctgcccctgtccctccagcagcaatgaagccctgcccagtgctggggccacagaggtgcatggacccctcctcccccaggcaggcctagagtggggaagagacagacaggcaaccccgagggaggagctgacgcagagcgcgtgccgcggcacaaataccgccttttagaggaagctccagaggacacgtgagctgcagtgatgtgggcacgctgggggctgcatggggtcagcgggaggcttgggggcacagggaagcctgcagtgatggggactcttactctgttgctctcttactctgatgaggggtgcatgggtgtggagctagctcagaactcatccagtcggacacactgaatgcgtgcaacttactgtatgtcagtggtgcctcgataaagctgtttttgaaaaatgctgacaatttgcagtttctgccctggcatggaggtgtgaggagagaggagaggagacaggggtggtggggacaggctgccagaactgaagcatcactcactgggaggacggtcacaggtgtggcccaggggaggtgtggcgccgtacacaagatcgaagggt

SEQ ID NO: 39518 - DNA, 1101 bp, Artificial sequence
  DNA replication origin
acgcatagagcctccgggggccaaggagcctctggggccaggcagcaggtgaggcatggcctgtaatgcacacaggtgttgctgggtctgcccccaccttcacccccgctcacccagccccacagagcctggcatggcctcccaggaagtgacatggcggggaacaggcttagggttagggggaggctgtgcgaaggctggcatgcaggtgagagggcttctgaagagaaagcatgctggaaaagtgcttcggctcagccccacccaaactcaaatccaggggaagccaggccagcaagacctgcaggtgccatgccttggcaggtgccaggcaacaggatcgtgcctcggtggtgacgtgggagatgctggaaccggggaggtgagagggagtaagtttccagaactcactctcaggcaggaggagatcatgactcagctgagccagaaagcgctcgttccacacgaatgcacgtatgagcgaggcacgccaggcgagtgtgggagtgaggggatggatgggcggttggctggaggtcgtgaggtctgggccgcctggaaaggctgttgaggggcgggggcagctgggagaggctgtgggggcagcagaagggggtgcttagccgcagagagggcacgtggggaaaggccatgtgttcaaggccccaaaaggtggggagggcagcccaggagtgcaccgcagggggtgcaagcgtgtgggtgggtgagactgatgcgtgtgtgcctgtgtgattgtgagcacatgtgaacgtgtggatgcaggtggtagtcgtgagtgtgcttgtgtgagcatgtgactgagggagcatgtgggtgtgtggatgagcgtgactgtggggatgactgtgtgtgcatgcatgagcacacaggtgtgtggatgagcgtgaccgtgggaatgactgtgtgtgtgtgcatacatgagcacacaggcgtatggatgagcgtgcaagtgagtcatgtgagtgtggctgagtgtgagcacgcatgagcttgtgggtgtgcaagggaggtggggaggccacacggaatgaaagcctgggggctgcagccgattcagggccaggccgccatggcgcatat

SEQ ID NO: 39519 - DNA, 1072 bp, Artificial sequence
  DNA replication origin
gaaccgcgcgcctctgggcctgcggctgaggtccggggctgcgccgcgccgatgagctgacgccgggccgagcgctccacccccagggccgggcgcacctgaatcccctccacccgcgggactgcggagagggggacggcccccggataccgcgtgggggctttgggaggatggggaatgggtcctgggggagcagagcctcccaaattaaggcctcccaagagcgcggccggtcatccgcggcggcgaagggaaggtgccctgtcggtgcgtccggaccccgcagccccccagtgccgcccgggggcggtgggagaggggccgacaccgcagggcccgccgtgctgtggccgagggggcaggtccaggctctgcttcccgggcagacgccggagaccccagcaagccaagtgctgcgggcagccccccccccgcccccccgagagaggggacgccgcgtggaggccacagccaggcaggggcaggaaggcagctgggccagaaggggacactgaggcaggccgaggcggccgcgggggagggtgccaggaccagcccaggaacctcggagaccacggtaagcggtggctggttcagatcccaactccggagctgtgtgaccccagaaagttccttagccccttggtgcctgcatcccctgacgtgtgacatatacatgaatggggctgttgtaagtgaacgcacacagcacaccggcacatgtgtcacaacacttagatgggtttagatgaagaaacagggaaacctttgggaagtttcctgtagtcaaaggaaggttttcgttttccccctcaaccgtgactgtttcttgggccggcaggataggcttttgttctaggggtgtggagagagggccccttggcagcgtccagggccaactgggaaccaagcaggaatcgtatttgtgcagcctggagttcgaggctctgggtgcgagtcgtagtgcttaagcaggaagcagctgcctgatgcccctagccccaggccgccctgctctgccgtttcgagggcgtgggggtcttctgatctccaccttgatgcacctccaggc

SEQ ID NO: 39520 - DNA, 928 bp, Artificial sequence
  DNA replication origin
cgcggagaacttgggccgcgggagacctcggagaggagcaacctcggggcgcgggagatcggctctaactgcgctcccgccgcgcccgaggctctgagcgcccagcgcgcggtgtgctggaggcagccgtgtccccgccccgtccccgccccgcccccggcctggctcctctggcgaccgagaccgccccgggacaggaggcggggcgctgcgcggcggctccggaaagttcggctctgcccaggcgtgtgcccgtcggccggaggcgggacagaggcaggtcggcctgtccgcctggacgcggacctgggcgccgtaggtgccctgggaagcgcaggggtggggggtacccggcaggaaggtggccaggggtgctgcgggtgccggcgcagcgagggagggcaccgtgggaggcaagggccgttccccgcgccgcgcacaatgcgccggtcctgcggccctccccgagcaggagtccggggacccaggccccaaggctgggagagcgccaggcccctggccggctgcgctccgatgatctccaggacttaaggcgagtgagctcagcgactgctgaggaatgaatgactgaatgaacgcatgcatgaatggaaggagggagggaaagtgggcgggctctaccctctgggccagccccagcccgcccccacctagccttgctcccctagccttctaggggtgtgaagggcgctggcgcagcctctttgcttaacactggctctgaggatcccccgccgagaaaccgaggcaggcttgcggctctgggctcgtcagccttggcagtggcgtctggcctggagtctggggcagctggtttgggaaaggctgcaccacgcaaccgagggtgggacccagagtccctgctccttccccaccgcacccagcccaccccgccctccctccctga

SEQ ID NO: 39521 - DNA, 1679 bp, Artificial sequence
  DNA replication origin
gggcggggacacggctgcctccagcacaccgcgcgctgggcgctcagagcctcgggcgcggcgggagcgcagttagagccgatctcccgcgccccgaggttgctcctctccgaggtctcccgcggcccaagttctccgcgccccgaggtctccgcgccccgaggtctccgcggcccgaggtctccgcccgcaccatgcggctgggcaggtgagccggggaaggagcggaggcgccgcggtcaggggcggggtggctcggcccgcgcgtccccagctcggctcggacgcggggcctgcggggctcgcctggaggtgccgggctggcagtgcgggtccgaggagcgggcggcggaggcgccggggcggccggcggggcgtggacggcagtgggcggcggggcctggcaccgggacccatggcaggacgcacagccgtgcgggggcgggctcgggggcggggtccctgccagggaaggaggaccgcgaacgctggaaggagggagggaaggcgggcgcaccctgcacgccggggcacgggcgctgccccttccactccctggcactgctgatttcctagaagaagggagaaggagggaggtgaccggccgagcgctctccaaggccagctggtgcccacggtctgcggacacgccctcccccacacacgtgggattccccgcagcccggcagccgatccacactggggaaggcggggctgcctgaaccaggagtgacagcttcctcctggatttttgcgaaaatatccaaaatatactcttcgcaacccacgttgtagggtccgcagcctgtgctcccctgggtgaacctgtgaggcccctgaccccagggatgcctcccgcacagctcagagctgggccacaccggagtcacactccccaggtcccctccccattagaagtgtatgcagttatgatcctgccctagagagaaagaatttaaaggtcccggaatgtcatagccctcccaaatgtcttagccctccgccacccacaccttcaggtaggcggccctgtccatgctgggtcttgaggcaagctcggggtgggggtaggttagatgcaggggtgctgagggtccaaggaaaggacacagaggccgctgcttaggcagcacccagggaggggacaagccagaaacagcctggagcaggcaccccccaccctggcccaggaagcccccagatgtcctgaggaggcctccatagacaggaggggccttgtgggctggtgatgaatatgggcactgtgggagacaaatgggggcacagaggagttctcacagctgtcgtttagatggtggctctggggaaatgcttgaaggggctaagggtggaggcagggggcctgctggaggccatcacagccatcttgccagccagaatggtggccccaacagggggagtgggagagagaggaagggccgcctgcagacttcaagagcccctggtggccaggggccgccttggtgcatgtgtgctcacttggcacagacacacctccatgcagactcagatgacagccatcgtgggtggggcaggggtttctgtggctccagggctcagggacagcccactgggaggttcccacaagaccaacctttgacttacaaagcccccaagctttcccaggcagaggccacagagaagagggatgagcgtct

SEQ ID NO: 39522 - DNA, 1683 bp, Artificial sequence
  DNA replication origin
aggaaatgacatcggagagagagacaagatcacagagaatccagtcagtaccggcgagaaaaacgcggccacgtggagcatcctggctgtcctgtgcctgcttgtggtcgtggcggtggccataggctgggtgtgcagggaccgatgcctccaacacagctatgcaggtagagacggccccatattgtggatgttagtgtttgtcctgttggtgtgaatgtttgcctgctttaacttccctcactgatactgatttagcttgaaactttattgtggtaggctgggcacggtggctcacgcctgtaatcccagcactttgggaggccgaggcgagtggatcacgagatcaggagatcgagaccatcctggctaacacggtgaaaccccgtctctactaaaaatacaaaaaattagccgggcgtgtggcaggcgcctgtagtcccagctactcatgaggctgaggcaggagaatggcgtgaacccgggaggcggggcttgcagtgagccgagatcacgccactacactccaccctgggcgacagagcaagactctgtcccccccaaaaaaacaaaggaactttgttgtggtagcactaatattcatgaggcttagcaacccgaactatcccacaaagtggttttgaaacccagcatctctgacattcctgacactgccaagccagaagggcgctgcgaggtctgccctgcaggtcgggtgggcagggtggcttctgcatgtagaggccggggtggtggtcatttccagggaagccgctgaggctgccttgagcactcctgccctgtgggtctgtgactctggccagctccgcgacagagcccggaggtctgtgtttcagccatgtaagacacagcagcaggacgcagtggcgcaggaagccctgaacgttggctgcagtgatggtcctgatgacggggggggctcttcccagaaccccccaagggtggcagtcaatggagtgcaggcgcagtggccacggagtaggggcggctcctgtgggctgcccctggctttcccatttgtggccaatctcagtcatcccagaaacatcttccacggccatgatgccactgctggctgggccgcagaagggccccagatccaggtcacagcattttaagtgcttcccaggcacgtacccctttaagaggatctttctcaaaagccacgtggcctggggagcccctcatctgtgagtgttttccccgcctggagctgggagcctcggggagacttccaagtagggtgtttagggggctgctgagagctcaggaacaccaggggctttagggacaccccccgtcgctgctgccctgaccattttggtttgtcctccaggtgcctgggctgtgagtccggagacagagctcactggtgagtttgccgtgggaagcagcaggttctggggggcccaggggaggcttggctgccagctgtctttcagagtttcaaaaaactttcagaaggcagaagtcccttgccttgaacaactgttgttcctggagacgcagcgaagccctcgatggtgcgcacggcatttcctgcagcctccccttggcatgggatggcatcctggtgtgcactttgtcacactgcgatgggattttcccaacatgcacagaagcagagagacgagtgctagactcccgcgctccccagtgccc

SEQ ID NO: 39523 - DNA, 1818 bp, Artificial sequence
  DNA replication origin
acattcacctaaaggcccaggtagggactttttttgcagaaaaccaatttcttgtaacaagtactggaacctcattgtagccttgagtcctcactcctccttttgttctaagtctgggtctgagaagtgcaggcctcacacagctgtcagttccaagtgaccagggctgtaacaggtcctggctgaccctgggaatgtcaggggattctgggaagtaagaaggaggggcatttgcccatagccccggggcagacaatgtgtcccgagggccaggccaggctgtctactccatctccctggggcgagtgcacctcgggtcacctggcagcatcctttccagcccttctggagacagtcagcagctgattcattccgggaaccagcatggcaggtgccggggctggtcagggcccagggctgtacccctcagcactgcccccttgggactgttgggctccgaggagcctggcgctggggtcggaggtcttcatcaggaccctggggaccctcagggttgagtggggtggggctgctgagggtggtgggggccgggggagccacctctcactttggggatcattgctgaggtgagaagggggactgtggccaccaggtgataccctctccatgcacctaactgctgctcaggactctggggaccgtgttgccaggcctgcgcctgctggacatgggcgtctccagccctgctgggctgtgtctttctcgctgcagagccaagagccccggcagcccctgtagccaaacacggccctggcacagcctttcttctggcaaactccacccgtgcgtcttccaaaggtggctcaacttttcaccggaacagccgagggacattgttcctcccagggaatgtggcagaggacactgaagcccagtggggacttccgggggctcctcggtgtggacggctaactacacttgtgggcacacacatgagtgggtcctgtggcttccgggcgggaggcaggttgggagcgttcagggcagaagagctcctgtgaccgtgtcccctgcaaacagcctcgcgtgaccccagcagcacagaggccgtcctggaagagcggacgcccagtcttctttttaaaccaaacacccttcggtctcaggatcccgcatcccacgggaagacccacagtgggtctggggtactgggaagagcctggtgctgaatcccgcacgctccgggtagagacagcccatcaccagtcccttcctgtgggtgactggcagtgacagcggggagcccactcacttggggacatttgcctttggtgtggatgacgcttttgaaagggcctcattccaggatcacagccaacgccagcaggttctccctgggatccagcagtggtccttctgggggctgccccaagtgctcccctgcagtctgggagtccatgctcaagctgccacctggcctctcacggtggcgtctcacggaagccctgtccacgctctgggcggtgagctccggtcaaacgtggccttggaagggagatgaaggagagagaggaacatgaagcacccctttcccttctgcaggcagacgccggttttctcaggactcagcttggtggaaacacagggtttaaagcttcggaaacagcggcctgttcagggaacttcgactggctccgacgggaacaggccggccgtgtttttagcaagctgtgttcctgcatcatctggatgggccgacctggccttggaagtgcgtttctgcggtcggccatcagctcgcctgggtccacaggtgacaccacagcgtggtggctgcgcacaccctgagcccactgt

SEQ ID NO: 39524 - DNA, 973 bp, Artificial sequence
  DNA replication origin
ttaacgccgccaaaccaagtcctgatcctgagaggctggctcaggatgaggatgggcggtggtgtcatgcacaggcacctgaggtccctggctgctgtggcacggagaggcccccacggaaggactccgcaggtgctggagctcgctccctgcatggatggctgcagcctgggcagggataggggagcaaagctgcaggcccggctcatcatggaaattcagaccggtgagccatggaaggacatcgccaagtccatgtagggtgagctggggacagcatggggagtgggaggggggacagtggggagaggggagagcggggtgagctgggtacagcatggggagggggacagtggggaggggggagagcggggtgagctggggacagcatggggagggggacagtggggaggggggagagcggggggagcctggggacagcatggggagtggtgggggtgggggaaggtggagggagggcagtgcatggaggacagtggaagagggaggcagtggtgacagtggagagggaagacagtggggaggtagaagggaggagggtaggacagtccagcccccattggcaggggcagctggggagagcaggccccgcctttgtgtgccccagggcctgggcctgcctggttaagagtctgcacactcctagagctggagcttctcaatgtcgctcttggaaggtgaccccacactccgctggggataatgcagggggcccaggggtcctccctgggaaaagtgtgctgtgccccgccatagggttcgtggcagaagcccctcccctgagctcaggcctcacctccggccactgaagacaaggagatgcagagaggaggcctctggagtcttgccccttacccctgcacccctgcagcacaggcagggtgtggtggccgtcttggaggcacccgggcctggacagctattccaaagccatagctgccctccccagggt

SEQ ID NO: 39525 - DNA, 2018 bp, Artificial sequence
  DNA replication origin
actacaggcatgagccaccatgcctgacttatgttatgattttaaaaagtaatccatcaacctgaagagaagcccactgtccttcacctttggaagttcctacccaccatgggtaagatttctgcatggagaggccctgctcccccaacctctctcttgagtcccctgctcagctggcattccccacctactgtggaagaacattctgggtttctccgtcagccccaggcccaccccttggggagatgactggtgacttacatgtgtctgtctctccagctaggcatggtgccacagcaaggggtgtaaatactgcaggccacacattcccggcacccaggacaggagcaaacaaaaggatagatggttggctggctggatggatgaatggagggaaggagggagggatacaggaatggagggatggagggagggatgacggagggagggatgggtgggtgggagggatggatagatggaaggatggaaggaggagggatggatggatgaagggagggaggaatggatgaatggagggagggagagagggagggatggacaagaggtagggaaggatggacgggagggaagaatggagggagggatggatggagggatggaggaatggatggatggaagggaaggatggagggatagaaggatggagggagggaggaatggatggatggagggagggatggatggatggaggtagggagggaggaatggatggatggatggagggatggatggatggaggtagggagggagggatggatggatggaggtagggaaggaggaatggatggatggatggagggatggatggatggaggtagggagctagggatggatggatggagggagggagggggtggatgggagggagggatggatggatggagggagggagggagggatggacaggagggaaggatggatggatggagagatgagggatggatggatggagggatggatggatagatgaagggaaggagggagggagggagggatgaatggatggaaggatacaggacacaaggtcataggtttgacaaatgtcacctcctcagaagcctccctaacactcacagtttgataagtcccctgtttgattctctcccagagcccaggtcactccaacactgtctggtttacctgccttctgcatggcttgccctctgtctccaattcctggaacaggtcccaccacctgacacctgacatctgtcagggacacatgaatgtggaatggatggatggatgcctgtgaatgaatgtgggatgagtgaaaagtgagtgaatatgggatgaatgaatgagctagtgaatgtgtgatgaatgtgtgagtgagagaatgtgggctgagtgaatgtgggacgaatgagtgagtgaatgtgtgatgaatgtgtgagtaagtgaatgtgggctgagtgaatgtgggatgaatgagtgagtgaatgtgggccgaaagagtgagtgagtgaatgtgggatggatgagtgagtgaatgtgagatgaatggatgagtgggtgggtgaatgtgggatgaatgggtgcgtgaatgtgggatgaatgaatgaatgagtgaattttggatgaatgagtgagtgaatgtgggatgaatgaatgagtgagtgactgagctgaatggttgagtgaatgtgggatgaatgaatgagtgagtgactgaaatgaatgggtgagtgaatgtgggacgaatgaatgagtgagtgaatgtgggatgaattaatgagtgagtgaatgtgggctgaatgaacgagtgactgaatgtgtgatgaatgagggaatgtgtgttgaaggaatgactgaatgtgagatgaatgaatgagtgggtgaatgtgggatgaatgagtgagtgaatgtgggatgaatgaatgaatgtgtgatttgggatgaatgaatgagtgaatgtgggatgaatgaatgagtgagtgaatgtgggatgaatgagtgagtgaatgtgggatgaatgaatgaatacaaagcccccc

SEQ ID NO: 39526 - DNA, 952 bp, Artificial sequence
  DNA replication origin
tgcctcttcctttgatgtccctaccctatgcccctctcttcaggcctgttctgcctgaccccgctacctccatccggctgccttccatgagcagcagctgccttccccccacacccttccttggtggccccgcccctctgatctccgtgagccaggatctcccccaggatccctatttcccacgggcttttggcaatgggctgctcaccccctccttcccctcctcctcattcatctgccatctgtgaaatgtggaggaggggcctgccctgtgccaggatctgtgccctagacacttccccagccaggcccaagggctgagcgtgaggctggcaggtctgcacttgaggtggatggtgagggtgccctcgcccacctgcagccattgtctgctgagtacctgtggtgcagatggggatggctgcaggggggtctcagctcacgcagtattgcggccatgggtgctggacattggtaggtctctctgagcagagcccgatggaagtgagaagggcgtgcgttaggggagcatttggagagggagccacgggtacagctgccctgcaagctccagcgcccatgggaaaaagggaccgagggggagaggggaggggatagggggaggggaaggggatggggcgtcggtggttgcttgggctcttagggtgggggtgatgcctgcagtcttggtgttgaagggaagaccagggaagagggaaggcaggaggcctgggagagaaagggaagagctgttgggtgctggcggagtggagcgggctcttgcatcactccatcccaggctccaccctgcctgcacctggaggcctccctcacctggctcctctgtgctccagacccctcccctttccaggtccaggattccccctgcccaaacagcactgaccaggcccccagggcctgtgcctgcagcccccagggacgggtgggcgta

SEQ ID NO: 39527 - DNA, 1074 bp, Artificial sequence
  DNA replication origin
cccctgctgaccctcccaggaggcgttgctggaaatccaccctgagaattctgctccaggagctgaaccagcggtatcagcatcttaaagcgctgacctacctctcggctgtgtgatatctaggggtccgtcccagaccagcatccccagggctgacgggtctgcagggcacagagatgtgggatctgctgtgtctctgccccacagtggccatgccgggacacagagctgctgcttggggaagggacagattcagacacagtagtgggttaacctgaggccctctcaaaagacatgtccacctagaacctcgggaagggacacgtccgcctggaacctcgggaagggacgcgtccgcctggaacctcgggaagcgacgcgtccgcctggaacctcgggaagggacacgtccgcctggaacctcgggaagggacgcgtccgcctggaacctcgggaagggacgcgtccgcctggaacctcgggaagggacgcgtccgcctggaacctcgggaagggatgcgtccgcctggaacctcgggaagggacgcgtccgcctggaacctcgggaagggacgcgtccacctggaacctcgggaaggcctttgcagatgtgatcgagttaaggatctcaagattcaagataaggtcaccccaggttgcctgcgtgggccctgagtccagtggcgtgtcctggagggagaccagcagaggtggagggcacgtccatgggctgagaagggcaggactgtgacaggagggaggtgcagggcggatccccagagccactgcctccccacgcttgacctcaggctcctggccccagaaccatgagggaataaactgtccttttaagccctctgctgtgtgatgattggcagtgccagcaatgggagctgatacagaccctgatcggggacccagacacctggcagcttgggctgggccccttcgagttaaagctggccttgctgctacctgtccctcgctgagtcctcgctgcgcactgtggctgcacctggcaagcacagggagcccctggggtcctgtgggtgcagacatgggtccctcggtctg

SEQ ID NO: 39528 - DNA, 1437 bp, Artificial sequence
  DNA replication origin
atggtagggcagagggaagttttctgtaaatgccactggagaaagtatcacacggccctcgcggtcccaggggctgggccagggcaggctgtggcctcccagggagttttacagatgctggatcacaggggtgggcccatgagaagcgggcggcgggctcctccgccctcagacttgcaagcacggaccacggccgcctatgctggcaagaccgcgatcatgctttttcatttctcagggttcagtaatctgcctgcatctcttctccagcagcagctgcacattacgccatggggcatcaactccgaggagcgcttggcacgcgccttcctcctcccagcctggaatcatcgcccgggcccttccctctcagggcggggacctctctagggaaaggaagggctttccagggcagcccctccagcctgcatctcctgggagggccccagagagggcactgggcagcttcacttcaaatcgggggcattggggctgagcccgaagcaggagggcagcaagggtcctgacattgtggacttggccagggaggggccagtccctctcagccacccacagctacctgtcccgagagtgtgaggattcgggtctttggtgggctctggggaaggggctgcaaggaagcgggcccagaacctggtgctgaggcccaggacccatgcagggacgtggggcaggacagagaggggcagggcaggggcagggacaggggcagggatgcgggataggacaggggtacggacagggatggggcagggacgcagggcaggacaggggcagggacggggcgggacacgggacaggacaggcgcaggggcagggcagggatgcagggcaggacagggatgagggcagggacgtggggcagggacagggacgtggggcagggacagggacatggggcaagacagggacggggcagggacgtggggcagggcagggagaggggcagggacgtggggcaggacagagaggggcagggcaggggcagggacaggggcagggacacggacagggcagggatgcggggcaagacagggagggggcagggatacgaggcaggacaaggagggggcagggactcagggcaggacagggcaggggcagaggcaggacagggacggtgcagcctccgctgctgccctctcggggagcctggctcccaccctcacccagccactgctcctgggcacagagctgaaggggaactggaggctgcggcgttcctctctccgtccccctctctctggtgactcatgtgataacgaaccgaccttttggagacattctgtgccctcaacaaaagcggcccctgtctggaaacccccccgaggagactgacttcctcccctgctgcctgggctgcggtagctcttccggcacctgctcttcaggcacctgccctgtgctggcccctcc

SEQ ID NO: 39529 - DNA, 1925 bp, Artificial sequence
  DNA replication origin
gggggtgtgcgggggtgatggtgagggaggccgtgcatgcgtgggggcagggagtgtgtgggactctctgtaccttctgctccattttgccatgaagctaagactgcactagaaaataaagtctatttaaaacaaaacagaaaaggtgatgttgagggagccctagaggaagacgctggccagcagtaggtgggaggggcctgggagagggcgggcaccaaggtgggcgtgtcaggtccgtgagccttgggcctcgcagcacgcactggcctgctcatgcccagagcccaccacctcagagcccgggcctggccggggaaggtggagggcacccatgaggcccccatcctctctcctgacactcccagtgcagtggggagacagatgacaaagctgtgatacatgtgtactcacagacctcgagatctgtgcagcgagtggcccagggacccctcctcagccagggcgtgctgggaagtcctctctgcagagtgatgctgagagccgagagacaaggggagccagtaatacaaagaggggggctggtcgtcccaggagggagggatggaaggtgtcaggaccagatgtggggagtaggcatgaacccggtctaggcacaggagaggaagggggtggcttggacatatttggaggcaaaacccatagctggcggcagagggaggggcagggagaaacaggcggctgggaccagtttctcatggggatctgggcacatgatggcccccaagacagagacaggaagaagtacgcgtggggggcccagtctggatatgctgagtgggcggtgccccactccaagtgtagtgcacagagaagggctggagttacaggcctccttgggcaggggtctgagacagcaaggagctcagggggagaaagggaaggagcagccttcaagagagcctggaggtcagagtggaagacgtccatccccaggtaatgagggactgggagggacagtcagaccaggtctggggagaagaacaccaggaaggaagaacaggtgggaatggagaagcagctgggagtggtgggggggttgggggttgagtgtggaggagctgggagtggtgggggagctgggggttgagtgtggaggagctgggagtggtgggggagctgggggttgagtatggagcagctgggagtggtgggggtgctgggggttgagtgtggaggagctgggagtggtgggggagctgggggttgactgtggaggagctgggagtggtgggggagctgggggttgagtgtggagcagctgggagtggtgggggtgctgggggctgagtgtggagcagctgggaatggtgggggagctgggggctgagtgtggagcaggggactgagtgtggagcagctgggagtgctgggggagctgggagtggtggagaaatggagaatgaagaaaggattatcagggaatggggcatgtccacaggtgaagctctggtgacctggacaggaggtgaggaggtaccctggaaggaaataagagggacagggcaaaggggtggggcatgtggagaccagagagggcttcaggagaggatagcccagactctgatggcaccaacaggaagcagcttggtgaggggccgcctgcccgtggtcagccccaaagacagttctgccacgccccctggtggcagcacctaaagccacaaccacgttccagggtgcacagcctgtgggatgcagaggcctctgggatggcaggacgggctggtcccgggaaccatgcatgtcaccagcgcccctccctccccacgccctgaccttgaacccctggttagctcctgttcccactggaccccttgtccccttccttgatcactttatgcatgcctggcactgccatcctccttcccagcatgtccacacccccaccactgccaggggga

SEQ ID NO: 39530 - DNA, 1291 bp, Artificial sequence
  DNA replication origin
ctcagggctgtgtgggtctgaaatgatccgctccccagtcgcctccgtgttggggcccgggtggggattggggatgagggtgtcatgggcgaggctgcgtccccgccgcaggctgtgtctgtggcatcacctgtggcagggcagggcctcatggcccttgggcattctcagtcctgactcctcacagtggacgcgagaaagacctttctccgtttttcccgtgctatgtatctggggtggcccctggggtagctgtgcggtggtgacctctggcgtcctgcagggggcgatgcgctgctggtcagcctggtctgcaggtctgtgctgcaccacttccacttcaagggctctgtgcacagtgtgtccttctcccctgatggcaggtaagggggacagcttgggggcaggagggttcggccgtgcatgccgacggtgaggcccactgcccagctcgtttccctgggccccgggttgtgacgttgggttgggcacacggcccaagctctggcattggtgacccccttttctggaggagaaggcttggtgcggccaggctgccctccctccagggctgtttcttccctgacttttgcttcctctgctccttggcctccatcctgcaggaggcgggactccagaaggcccaggtgggtgcaggctgagactccacagtggccttagggccattgctggtcttgaatatcaactatgtccgcgttccttccataggaagtttgttgtcacaaagggtaacattgcccagatgtatcatgcccctgggaagaagcgggagttcaacgccttcgttctggacaagacctattttgggccctacgatgagaccacctgcatcgactggacggatgactccaggtgcggcctcagaggcttcgggggagcggggcttgagagaggccccttggacaggtcacccccttgggccctgcagcttcgttccgcaatggcatctcggcctcctttggggctgggcgctgcccacaccatcaggactggctgggtggctgtggtcgagtcttcgcggctctgaagtgtgtgctgtggccgagcctcctgcccctgcactgccctttcacctgtttgtcccagaaactgggaatgctgtggttggctcgggcagcgtctgggaggagttaggaaggcagacagggcagggacagcgtctgggaggtgtgaggaaggcagacagggcaggggctgtgccggggtgtcttcctgtgcctggaggcgtctcagctcactctgagaccacgtggggctgtagcggtctccg

SEQ ID NO: 39531 - DNA, 1203 bp, Artificial sequence
  DNA replication origin
ccagcgctggagcgcgcctaagaggcgccctgcagtgtggctccggggtgtgggcggggcccggagaaggccccgccttgggaggggttgggcctcgcgttcaaactccgcctcggggcggggcgagggcgacgcagctcctgcctcctgggccgctgcggacggtggtgcgcgaccccgtcccgggcgcgcgcgctgtgggcggtgcacgccgtcgcttcccggaagtgcgtgctgtgggcggtgccgcgcggacccccgggaagtgtctctgtgggcggccgccgggttgagctgcggcacacgtgcgacagccgtgatgaagttcgcttaccgggtgagcgcgggcggcgggcggtctgttggatcggcgcggctcttccggtggacggcgcctgagctggctccgggcgggctgggggcgcgtggtctgcttttgcggcgtctggccgcgtgggggtcgccggctgtctgcgcgcccatggcctcggggacgcggggctgtggtggggctcctgggagagctgggacggaggcgccgacggcttctcggagggaacagggacatttgtcggggtcccgggatatttttaacctgagtatggcccaacctaaaggctggagttggtgcagtcggggagggcacagcaccctcgggagggatgaggaggtgggacggggcggggacgcgggcgcgcgcaggcggggtgagaacagcagggacccggggcccgggactggtccctaacgagcgagcgtccaggtgagcggaagggcggggaacccaggtgtgagctctgtttcccgaggccggagggaattcctgaggcggacgccctcagctttgagagccagggaagacttgtcccagatgtgaagtgcaggaggcgggtgagacaggtaataagagggggccgcggagccggcctgggggtctctgaagcgtttgctacagctggccggttatggggacgcctgtgtttcccacagtggccctgaccgttgcgcttccagggttgcacgggccgcctgctgctgagcccaccgtgtactacacttgtcctgtccgaaactgggcatggtactggcccctcagagtgctgctcctgtgtcccctgtgctggtggagccaccgctgtgtgcccagcaccaaaccagaaaccatatccacgtcctcacaggccaggacttcatccgctccac

SEQ ID NO: 39532 - DNA, 2661 bp, Artificial sequence
  DNA replication origin
tatcagagtgcagtggaatggaaaggaatggaatggattggaatggattggagtggagtggagtggaatggagtgaaatagagtggagtggaatgaagtggaatggaatggaatggagttgaatgtaacggaatggagcagaaaggaatggaacggaacttaaaggaatctagtggagtggagtggagtggagttgatcagagtgcagtggaattgaatggaatggactggaatggaatagagtggagtggaggggagtggtaagaagttgaatagagtggaatgaaatagagtggagtggaatggtatggaatggaatggaatggaatggaatggaaaggaatggaaaggaagagaatggaatggaattgaaaggagcagagtggagtggaatggagttgattggaggggatcggagtggaggggaatggaatggaatggaatgaaatagaatggaatttaggggagtggcgtggggtggattgagtggagttgagtgcagtagtgtggaatggagtggaatggaatgtagtggagtggaatggaatggaaaggaacagaaaggaatggaatggaatggaatggaatggaatggaatggaatggaatggaacagagtggagtctaatggagtgaaatggagtggagtggagtggagcggaatgaaatggagtggaatggaacagaatggaactgaccagaacggaatggaatcgaatggagtggagtggagttgagtggagtggatcggagtgcagtggaatgaaatggaatggaatggaatggaatgtattggagtggattctagtggagtggagtgtagttgaatggagtggaatgaaatgcagtggagtggaatggaatggaatggagtggaatggaatagaatagaacggaatggaatggaatgaaaaggaatggagtggagtggagttgactggaatggattggattgccatggaaaggaaaggaaaggaatggaatggaatggaatggaatggaaaggagtgtagtggaatggagtggagtggagtgcagtggattggagtggaatggagtggagtggagtgcagtggagtggaaaggagtggagtggtgtggaatggaatggagtggaatggaacggaacacaaacatgaacagagtggaaaggaatggaacggagtggagttgagtggagtagagttgagtggaatggatgggaatgctttggaatggaatggaaaataatttaatgaaatttagttgagtggagtggattttattggagtggagtggaatggaatggattagagtttagagcagtggcgtggagtggagtggaatggagtggaatggagtggaatgaaatggagtggagtggagttgagtggagtggatgggatagcagtggaatggaatggaatgaaatgcaaattgaatgaaatggagtggaatcatgcaatgaaatgtgagctaagattgtgccactgcactctagtctgggagacagagtgagatatagtcgaagtaaaagaatggattgaaatgcagtagaatataatggaatggagtggagtggaatggaatgaagtggaatagaatggagtggagtggaatggaggggagtggattggagtggagtggaatggagtggaatggaatgaaatggagtggagtggagtggaaggaatagagtggaatgaagtggagtggaatgaagtggaggggagtgagtggaatggggtgcagtggaatggaatggagtggactggagtggaagggagtggaatgaattggaatggaatggattggaatggaatgaatggagtggaatggagtggagtgtattggagtggattgtagtggagggaagtggaatggagtagaatggagtggaatggagtggagtggagtggagtggaatggaatggagtttaatggaatggaaaggaacgtaccagaacagaatggaatggaacggaatagaatggagtggaatggagtggaattgtgtggagtggatcggagtgcagtggaatggaatggaatggaatggaatggaatggaatggagtggagtggggtggagtggataggagtggaatggaatggagtggtgttgagtaaactggaatagagtggaatggaatggagtggattggaatgcaatggaaaggaacagaatggaatgaatggaacagaatggtatagaacggacggaaaggagtggagtggaatggagttgagtggagtggatcggattgctgtggaatggaaaggaatggaatggaatggaatggaaaggaatgtagtggaatggagtggagtggagtggaatggagaggagtggaatggagtggagtggaatggagtggggtggagtggagtgcagtggagtggagtgcagtggagtggaatgtagtggtttggagtgtaatggaatggagtggaatgcaacgtaacagaggagaatgcaacagaatggaatggaatggagtggagtggagtagagttgagtggagtggatcggactgcagtgtaatggagtggaatggaatttaaagtaatcgagtggactggagtggagtggagtttagtggagtgcggtagaatagttgtctattaggtccgcttggtgcagagctgagttcaattgctgggtatccttgttgactttctgt

SEQ ID NO: 39533 - DNA, 955 bp, Artificial sequence
  DNA replication origin
gccccgtctgggagggaggtggggggtcagccccccgcccggccagccaccccttctgggggggagagaggtgggcgggtcagccccccgcccggccagccgccccgtccgggaggtgaggggtgcctctgcccggccacccctactgggaactgaggagcccctctgcccggccagccaccccatccgggagggaagtgggggggtcagccccccgcccagtcagccgccccgtccgggagggaggtggggggtcagccccccgcccggccagccgccccatccgggagggaggtgagggggtcagcccctcgcccggccagccgccctgtccaggagggaggtgggggggtcagcccccagcctggccagccgccccgtccgggaggtgaagggcgcctctgcccagccacccctactgggaagtgaggagcccctctgccctgccaccaccccgtctgggaggtgtacccaacagctcattgagaatgggccatgatgacaatggcggttttgtggaatagaaaggggggaaaggtggggaaaagattgagaaatcggatggttgccgtgtctgtgtagaaagaggtagacatgggagacttttcattttgttctgtactaagaaaaattcttctgccttgggatcctgttgatctgtgaccttacccccaaccctgtgctctctgaaacatgggctgtatccactcagggttgaatggattaagggcggtgcaagatgtgctttgttaaacagatgcttgaaggcagcatgctccttaagagtcatcaccactccctaatctcaagtacccagggacacaaacactgcggaaggccacagggtcctctgcctaggaaaaccagagacctttgttcacttgtttatctgctgaccttccctccactattgtcctgtgaccctgccaaatccccctctgcgagaaacacccaa

SEQ ID NO: 39534 - DNA, 1211 bp, Artificial sequence
  DNA replication origin
gcggggggctgacccccccacttccctcccggatggggtggctggccgggcagaggggctcctcagttcccagtaggggtggccgggcagaggcacccctcacctcccggacggggcggctggccgggcggggggctgacccgcccacctctctcccccccagaaggggtggctggccgggcggggggctgaccccccacctccctcccagacggggcggctggccgggcagagaggctcctcacttcccatcaggggctgccaggcagaggcacccctcacttcccggatggggcggctggccgggtggggggctaacccacccacctccctcccggaggaggcggctggccgggcgggcggctgaccccccacctcccttccggatggggtggctggccaggcggggggctgacccccccacctcactcccgaacgaggtggctgccgggcggagacgctcctcacttccgagacggggtgactgccgggcggaggggctcctcacttctcagacggggtggttgccaggcagagggtctcctcacttctcagacggggcggccgggcagagacattcctcacatcccggacggggcggcagggcagaggtgctccccacatctcagatgatgggcggccgggcagagacgctcctcacttcccagatgtgatggcggccgggaagaggcgctcgtcacttcctagatgggatggcggccgggcagagacgctcctcactttccagactgggcagccaggcagaggggctcctcacatcccagacgatgggcggccaggtggagacgctcctcacttcccagacggggtggcggccgggcagaggctgcaatctcggcactttgggaggccaaggcaggctgctgggaggtggaggttgtagcgagccaagatcacgccactgcactccagcctgggcaccattgagcactgagtgaacgagtctccgtctgcaatcccggcatctcgggaggccgaggctggcggatcactcgcggttaggagctcagcccggccaacacagcgaaaccccgtctccaccaaaaaaatacgaaaaccagtcaggcgtggcggcgcgcgcctgcaatcgcaggcactcggcaggctgaggcaggagaatcaggcagggaggttgcagtgagccgagatggcagcagtaccatccagcttcggctcggcatcagagggag

SEQ ID NO: 39535 - DNA, 1090 bp, Artificial sequence
  DNA replication origin
cagcccctgatgggaagtgaggagcctctctgcccggccagccgccccgtctgggagggaggtggggggtcagccccccgcccggccagccaccccttctgggggggagagaggtgggcgggtcagccccccgcccggccagccgccccgtccgggaggtgaggggtgcctctgcccggccacccctactgggaactgaggagcccctctgcccggccagccaccccatccgggagggaagtgggggggtcagccccccgcccagtcagccgccccgtccgggagggaggtggggggtcagccccccgcccggccagccgccccatccgggagggaggtgagggggtcagcccctcgcccggccagccgccctgtccaggagggaggtgggggggtcagcccccagcctggccagccgccccgtccgggaggtgaagggcgcctctgcccagccacccctactgggaagtgaggagcccctctgccctgccaccaccccgtctgggaggtgtacccaacagctcattgagaatgggccatgatgacaatggcggttttgtggaatagaaaggggggaaaggtggggaaaagattgagaaatcggatggttgccgtgtctgtgtagaaagaggtagacatgggagacttttcattttgttctgtactaagaaaaattcttctgccttgggatcctgttgatctgtgaccttacccccaaccctgtgctctctgaaacatgggctgtatccactcagggttgaatggattaagggcggtgcaagatgtgctttgttaaacagatgcttgaaggcagcatgctccttaagagtcatcaccactccctaatctcaagtacccagggacacaaacactgcggaaggccacagggtcctctgcctaggaaaaccagagacctttgttcacttgtttatctgctgaccttccctccactattgtcctgtgaccctgccaaatccccctctgcgagaaacacccaagaatgatcaattaaaaaaaaaaaagaaaactgataatgcttaaaattaaacatggtgcaacgtatcactgactaaaaactgatataagaaaa

SEQ ID NO: 39536 - DNA, 1193 bp, Artificial sequence
  DNA replication origin
gcggggggctgacccccccacttccctcccggatggggtggctggccgggcagaggggctcctcagttcccagtaggggtggccgggcagaggcacccctcacctcccggacggggcggctggccgggcggggggctgacccgcccacctctctcccccccagaaggggtggctggccgggcggggggctgaccccccacctccctcccagacggggcggctggccgggcagagaggctcctcacttcccatcaggggctgccaggcagaggcacccctcacttcccggatggggcggctggccgggtggggggctaacccacccacctccctcccggaggaggcggctggccgggcgggcggctgaccccccacctcccttccggatggggtggctggccaggcggggggctgacccccccacctcactcccgaacgaggtggctgccgggcggagacgctcctcacttccgagacggggtgactgccgggcggaggggctcctcacttctcagacggggtggttgccaggcagagggtctcctcacttctcagacggggcggccgggcagagacattcctcacatcccggacggggcggcagggcagaggtgctccccacatctcagatgatgggcggccgggcagagacgctcctcacttcccagatgtgatggcggccgggaagaggcgctcgtcacttcctagatgggatggcggccgggcagagacgctcctcactttccagactgggcagccaggcagaggggctcctcacatcccagacgatgggcggccaggtggagacgctcctcacttcccagacggggtggcggccgggcagaggctgcaatctcggcactttgggaggccaaggcaggctgctgggaggtggaggttgtagcgagccaagatcacgccactgcactccagcctgggcaccattgagcactgagtgaacgagtctccgtctgcaatcccggcatctcgggaggccgaggctggcggatcactcgcggttaggagctcagcccggccaacacagcgaaaccccgtctccaccaaaaaaatacgaaaaccagtcaggcgtggcggcgcgcgcctgcaatcgcaggcactcggcaggctgaggcaggagaatcaggcagggaggttgcagtgagccgagatggcagcagtaccatccagcttcg

SEQ ID NO: 39537 - DNA, 1279 bp, Artificial sequence
  DNA replication origin
ctttaggagatgtcatattttcttgctttttcatgtttcctgtacccttgcattagtatctctgtggtataatggtcatttcttctaagttttttgaatttactttcgtaggagaggacattttcccgaagatgtatctgtggtattggtaggtagggcactttggttttgaatctgggtgtgtgcagtagtgtagtctctgtatgatttctttggctgtaaacagcattaatgatatctatgattttcttaatggcttagggtatggttgttagtggaggctgtggtgaaattttgctgttgacctgggtgccaggtaggccagtcttttggccccagtggtggcagtggtggactgagcatgcctgtcctcaggccccagggtggtgtacactggcaccagtgttagtaggtccaggcaggccagttcttgggcctccaggtggcttctttgggtactaggaatggcagtggtgggttgggtgggtgggtgggttcctgagcccctgagcagcaggtgtggtgtggttgatggcaacagcagttgtggtgtgggtgatggcaacagcagtggtgggacagccctttggggtcttcatctctggtagcttatgctgggctgttttccaaagtgctgatgtttgtgacggctgtgacaggttgggtgggctggtccttggacctgcaggtggcacatatgggtgggtcgcagcggtggtggtagcagcaagctgagtgggcctgacccactctgggagactctgctgagatgctactggtgatccccaggcccctggacagtgtgatctggttctagggagggatggtggaggcaggctggctggacctgccctcaggtcccttggtggggagtgtagttattggctgtggtaagtagcatcgaggtgattcctaggcctcccgtggaatgctcaggtaggggtggccagagtttcattgtgtccctgctactggggagggcagggtttctttccctgggagcagctgtagtcaggcacctagggggcatgggctttgattgcacctcacctcaggcctgcagcagctcatagtggtagcagttgcaggtagtcgactttgaccttggagctcatgaaaatacatggctacccatctgcagggatggtgtgggggatcactccctgtggctcccacctccaccctggtggcggggcaggctgcagttcattgggggttgtactctccaagtggtgccatgccacagcagcttaggatttggggggttgtggcacccagc

SEQ ID NO: 39538 - DNA, 1123 bp, Artificial sequence
  DNA replication origin
cacctgtgtagacacgtgcatgcacagacatgtttctgtactcgaagtgggttctgagacagtgagcagcaggcacttgggtttttggccaggagcgctgctgtgctaaggctgggagggcctgggtccctgcaggcgtcgcggccttccttcttacagactcgctctaggtcgcccctgctgttgacacccgtgtcagtgcagacacagccctcccagctgggcagccgagtccgaaggctgcctgcgcgctggcccttccatctctgctcctgcacacggctcctctgcagacctacctcatcgctgtcacctgctctctcccgttccagaagccacccctgagccacgggaagctcccagcacctgctcttttactcccaatttgctcctcctcttccgccctcctcttttatttctatttggagaagtatggaaagtcaaaaagtacagtgaataagagcaacccccatattcccgtcacccagaatgaataacctgttatgtgtgtagggtggtgggaggtggtatgcatgtgtgtgtgaggggtggggggtgcatgtgtggtatgtagagtgtgtgtgcgcgtgtgtggtgtgagggtatgtgtgtggtatatgtgtgtagtgtgaatgcagtgtgtggtgtgtgcatgtatgttgtgtggtgtctgcgcatgtatggtgtgtttggggtgtgtgtggtgtcagcgtgtgtgtgggctgtgtagggtgtgaatgtggtgtgtgggtgtgtgtgtggtatatgtgtgatgtgtgtgcatgtatggtgcgtggagtgtgtggggtgagcgtggtataagtgtgtgatcacgtgtggtatacatgtgtgctgtgtgtgatatgtgtgcatgtagtgtggcgtgtatgcatgtatggtgtgtgatgtggctgtgatgagtttggtgtgagtgtgcatgtgtggtgtgagcgtgtgtggtataagtgtggtgtatgctgtgagtgtggtataagtgtgtggtatgagtgtgtggtgtgtgagcaggtggggggcaggaagggatcaagccagcattgttgttacagcactgacttccccataggtgatttccgctgcatcccagacaccccctagctggccc

SEQ ID NO: 39539 - DNA, 857 bp, Artificial sequence
  DNA replication origin
gccgcagtttgcacccaggcctgtgcggatgccccccgactgcccgagatgctgcacctgccactgctgggggtgtacctgcctatgcccactcacaggggcacctccagggtagctgcctggtgcaggcattggctctaagcagagcagcactatgggcccatctggggctggctcttgcctgggcctgtgagcaccatcacagccagccgatctgggagtatccagggtgttcttgtcattgcggacactgaatagccattggtgggtggcgatgggggcttggaagccgagcatcagtggcaatgagaagcaggccctgtggtttaattccgaagcacatgaacccacagagccgccaacagtcgttattcggcaggagggggtacagagacagcagcctgcggagcgttctaggcaggacagggcagcaaacctgacatgcggagctgggggcaggggtaatggggccagggggtaatggcaggtgaggccatggcctagagggttgccatgcttggtgcaggggaggagaggcccaggtgtggctgcagtggcagcaggagtcagtgtggctgtgcccagtgggatgttgtcagagaatggacctggctgctgggaaaggtgattgtgtttgtctgagccacactggactcttctctgaccagcaagcacattctggagatgcggggcagagacgaggcctccgtgagaacctttgaggtgtgagggccttgatctggggtgcagcctccagctttctgcttacagagcaggacctgcaggagctcgctgactgcctgcacagtggaaggaagacctgtttcttttactttccttgaggagaaaaaattaaa

SEQ ID NO: 39540 - DNA, 937 bp, Artificial sequence
  DNA replication origin
cctctactccacacggtgataagtgagtggctggagcaagccgcaaggagcttttgagcgcacaccagagctgcttctgctacctccaggcctctgatggctgcggctgcagacacagccagcctcgcagcatgtaagagtgggcaaggatgacacacgggcacagagagaccaggctgggcttcaggaagcaggtctgcgtgggatggaagtgcttagaaagtcatttctggaaggccgacaccagtcggcactccctgagcgaaaggacttgggaacacgtggatgcacttcttgtatctccaaggaaatgctccctgaggatttgcgacgtggaaatgcaacgggctgtggagtgctgcgcaccccgcacctcgagcagtggtttagctcagctcggggtttgtggcttcagggggtcatagtccacaggagtgccagggggttgggcgggtgggacagaggaggcgagaagtggttgcggacactctgcatgagcaggacacgcacacaccacacacacacataccccacacacatatacacaccacacaccccatatacacacaagtacacacacgaacataccacacaccccatatacacacaagtacacacatgaacacaccacacacacacacaatacggctctgcaaggaaacgtgtgaggggtgtggtgtgtgtgcactgtgtgtgaggtgtgtggtgtgtgtgaaatgtatgtgtgaggtatgcagtatgtgtgtgaggtagtgtgcgatgtgtgtgtagtgtatgtggttgtgtgaggtatgtggggtgtgaggaatgtattgtgtatgtgtgatatatactgattgtgtgtaagggatgtggagtgtgtggcatgtgtgtaaggtaggtgtgtgttgtgtatatgtgagctgtatagtgtcgggggggtgtgaggtatgtggtg

SEQ ID NO: 39541 - DNA, 928 bp, Artificial sequence
  DNA replication origin
ccactccagcacatggagaacgcggcaggacaagctggtgtctccgtggggtgcccccgttgtccccacgtctcacatacactcgcctgatgggtggccttccccacatccgggaccctggctagagtctgaaaggcggctgcccacgtcccagctgcccctgagcagggaggccggcaggggatgcacggcgagttctctcagtggtcggccgggccccagccccctgggtgctgcgaggggaccctgtgagcctgctgatggccagtgagccgcggtcctctggtcctagccggcctcgggtctgtggtcctccgggcaggacgtgtctggcaggccagaggcggctcctgtgtgcgcggaacagccgcttttacaggggcgtcggctcgtggcgctggcagggcttctgtcgcaccagccctcggcccgcggcaaatgccgaatgccggtgctgggaacggaagtgggaaatgacggggggtgcgggggagcggccctgactgggactgtacggggacgcatgggggtgcgggcacttgagggaggaagcagcagagggaggtgtgtggatgtgtgtgtgtgcgtgactggggtgtgagcgtgcccactgtgggtgtgcccgtgtgtgtggctgtgaggcgtgagtgcaggcgtgaagtgtctgggagtgggagcgggcatgagtgtgtgccacgggcctgctgttgggtccttggaggccacggttgcccctgaagggactgcaagctcttttttgatttgtagttatttgagaagtctatacaggaagaaaattaaaccgcatttactaaatacaataaaattacaggaagacagaattgtccccaaattacaaacatgtggcccgagttgctccacgacagctcagccccagaccatgcagtggagatggcagccccgagcc

SEQ ID NO: 39542 - DNA, 1147 bp, Artificial sequence
  DNA replication origin
acagacccgcctgccccctccactccgcgtggcccaggggagccaggcctggaaggatgtcgtgggcgacgctagcttggagtgactccttttatggggaaactttggaacttcatctgagaaagccttgtgctaacccagggccccgcctctggccagggcaagacaaggaagccatccacagtcttcaagactgttgctcccgggacggtgccatttcctgtgggagcttcaacactcagaactcaccctggcatgcaggaggctcacatgacgcccttgtcaaagaagctgatgggtgatttaattagtgaacaaatgattcacgagcaaagaaccaaaatctctccgtgtgtgcctgcatctgtgcttgcgtgtgtgcgtgtttgtgtatgcttgtgtgcactacacgcaagtgtgtgtatctgtgtatatgttttcttgtgcacgcctatggatttggttatgtgcagatatttgctttgtgcacgtgggcatgcgtaggtgtgtgcatgtgggtttgccgtatgcatgtgtgtttgtgttgtcaggtgaatgcaggcatgtactcgtgtgtatgagttactgtgtgcatgtgtgtgattttgtgagtgcttgtgtttgtgtatgcgagtttgtgtgtacatgtgtttgtgtgtgtggatccatgcgtatgcacgtgtctctgtgggtgggtccgtgtgtgtgcacatgtgtgctctcctttaagctcacccctggccaagcctcttggagcccagggctgcccaggaactttgtggagcatttaggggtgtttcagtcaagttggaaacaggctggggagggatggatttgttgtgacctggaggagcgggtagatgacctcacccagttgcacacagagggcgtgggttaggcaccatgtacttaaacttggcattgaagtagaatggacattctggaaggagacgtgacagggattttcacccccacaaacgctcacaagggaactgcccccagggagctgtccagatacccctccaaccctccagtcacccccactcccctggaagcattatccactgcgggcactttgtgtggccagaatggagaaccctgcagcttcttcatgtggcgtttcctctgcccaccctcccagctccag

SEQ ID NO: 39543 - DNA, 2846 bp, Artificial sequence
  DNA replication origin
ccccagcgagagtcagccaggccccaaacagagccaggggttcccccgggggggagtgctcacttaggaagagcaccatggacagcctggcaggaggtcaccctgtgctgagcaggcagctctggagtaaaccacctgcctctctgtaggaagaaggaaaccgcatccgcaaacggagcaaaggtccccagaggcagagcagaagcctctgggatgctgcagctttgtgcagacactggggaccaggactggagcaggtgctggccgtgctctttatcctgggcactctgccagggccacacggagcgtggctcccgggagatggagacgtctgagtgtcagctcaggtctcggtgtttccaggtgacatgctggctgctagtgtagagcatggtaaaccatctttttttttttttggttactatttacttatgcaaaataatgtgagtttctgccatttgcaacaagtgtgccagctgcaatgagtcagcgggtggacacaggtgagcatggccagactgtgccagaacatggtgacagacagacatgcttcgaagttcactgtgggaagggacaggtccccagagagaggtgagacggtgcaacgcgagggtgagttcggagtcgtcctccagatgtccacaaaggctcgagaggccctgctgtgtgtcaggcactgcgtgaaggttgtgggcacagtaggagggacacaagacaccttctctcgaggaccgttggttccagttgcggagacagtaacagcataagatgatgagtaagaaaagaatgctggcaggaaagtggccatggagggaactgcttccgggcctctccgtgggatttgccaggcgtggactgagcgaggaccttccctgagaacaccaactgctccaggagagagaagaggtggagccccggcggggggcatggggcaggaggcagccacccacaccttccctctctgaatgctgagcagaggctctcagcagaggggaagaagagcagaggccacgattgggaagacagacccagtgggggtccttggcgccgtccacatccatctgcaacctgctgcccagcgcctgcctgcccggggtgtgcacagagcagtgtggtctgtcccggcttcacggcctgacacggccaggcgaggatgacagggaaagggaggcagggacttggggctgttggagccaagctgaggagcaaggagctgcgatgggaagcgggtggcaggaaggagcgtgaggcctgtgggtggaaggtctctggccttggagattgaagcgtttcacttgtgcatctcacagcccagagaagccaagcccggaccatgggggagagaggaggacccccgtctcagggcgggctgaggagacgctctctccacggcttccggatgggtctccctccatctcagctgcatctatgggaaaacgatgaaatgctccctccactgccgggccttctcttataaagcaggtttcttcgaagtataaaaattaatagaaaaggttccatagaaaatcaagaaagtaagtatgtaaagatgaaaacaaaaagcaccggaaatgctcttcatagctgacgttttcttattcactttttattaaaacaggatgaggcgtcctgccttttccagccttatctaggaagtgtcttgccaggtcaccaaatggcaagcagaaccgtaagctgaagttgtctgcctagaattccactgtggcaatgttcagcatcccgactggacagctccgtgcggcggcatcgggggcgcggcggcatcgggggcgcggcagcatcgggggcccttttcatgccattcaaggccccgtggaaacagacaccacagctcagcatgagactgtggccccacctgacctggctcatccatccccagcctctcgtggtccccggccctatgccgacatttggcactcgatgagccatttctccacatttcaggagccttgttttaagacagcctggctgtctgagagccaccggagtcgagactggatgcccggcctggtgcccgtgggccagcaccgcctgaggaggaggggtctctggaggccacaggcagagccactgagagggatctttaagcagagggccccacacacctcctgggacccacgggtgtggctgccatgcagggtctgggagctacagagagtcgggaaccaagggcgcggtggctcacacctgtaatcccagcactttgggaggccaaggatcacgaggtcaggagatcgagaccatcctggctcatacggtgaaaccccatctccactaaaaatacaaaaaattagccgggcgtggtggcgggcgcctgtggtcctagctactcgggaggctgaggcaggagaatggagtgaacccgggaggcggaggttgcagtgaacccagattgcccactgcactccagcctgggcaacagagcgagactccgtctcaaaaaaaaaaaaaaagaaagaaaaaaagtaaaaacaagagagtagggagccaagtccctgggttgccaagtcaatccgtggaagcccctgacttcgagcaggacacagggccctaaggacagccccagcccctgcagtgtggcctgcaatgggtgtcattcattttgacctggctgttgtggttttgggtggtattgttatttgtttgaaaagaaaacacatgggctgcgtatggcatgagcaagtacagacgtcattgggatcggctaatgaaaatgacagagtactctaaagtgacaccttacagggacgtggtgatgtggcaccaggcccagtggcaccagcacaccaccgtctcgctggcatttccaccgtggtccctgttaa

SEQ ID NO: 39544 - DNA, 1494 bp, Artificial sequence
  DNA replication origin
cgagggcgcgcccgcccctccacgctcgggcactcgggccgggtcccgcgggcgccttgtgctcgctccctccaggaggggacggctctcgggcaggggtcgccggcccctccacgcggcctgcgttcgtccagactcagagcctcgggacgtgcgggggcccgggggcctcgcgggctcgcgcgtggggctggcggcgcggatgccctggggcgctgcagaccccgagaggccgcttgcccgcggggacgtcagccgcttttgctgttaaaatctgaaatgttcagcaagttagaaacttgaaacctaaggaagcgtgaccggccgctctggaagcccccgccgcgcggccggtcccggccccggccctcagcggcgctggcgtctgcgcgtcccggggctgcccccgcagcatgtggggctgggaccctcttcccgcgcgggccccgggcggacgctgcgggcggtgacggagccaggccggccgcctgggtaggggacgggggcgcgggaccacttgcttgcccgtggccgatgcctcatccgaacggaaaacgttttcttcaggggagacagaggctgtgggcgaaggtattttttaagcctgaggacccatttgggagttagattctggatcgagcctagggtcagttttccttgtgttaaataacactacttcacagaagggggaacgagaattcagggaagttggcacaaaacttggaacccttctcgggaggctttcctgcctggacggacgcctgggaggagggcccggagaaacgaggatgagcttctcctcattcgcccgagggtctgaccacagatttcccaatcgacacacacacacacacacacacacacacacacatacacacacacgggttgtttgggagtcagttggttttcaaaggctttcaaggaaatgaagagtcccaaagttttccttaatcgttcagagtgtttttctttgtcccaggtttatataccaagaatacgggggaatatttttagttcctttcagctgaacagtgtacaactgccttttttccttttggaggtcccaacaccctgttaatccgctcctaggagaactaaacaaaaacaaggctggacgtcgtgtctcccgcctgtaatcccagtgctttgggaggctgaggcaggaggatcagttgagctcaggagtttgagaccggcttggttaacatagcaagacctcacctctataaaatacttttaaaatagccaggtgtggtggcacacgcctgtggggccggctacttgggagcctgaggtgggaggatggcgtgagcctgggaggttgaggctgcagtgagctgtcattgcaccactgcactccagcctgagcaagagaacaaggccctgtctcaaaaaagaacaaagataaaaggcggggtgggggagaaaccaggcccctgatcacactcaccattcagtccctcagcctgtgacttgaaatactgccccccgcat

SEQ ID NO: 39545 - DNA, 953 bp, Artificial sequence
  DNA replication origin
cgggggtggggaccggacggatcgcgggcggcgggggcagggtgtgggagcggggcaggggacggtcctgggatccggatcgagccgacctcgggtggcagggccaggtgtgggagcgggtccgcgcccagaggtgctaaaggggtcgagggtggggacggaaccgacagcgggcggcgggaggcgagtgtggaatcccggctcagggggtcccgggatcgggacggaaccggactcgggcggcaggggcctctatgagagcgggtccgtgcgccccgcggggctcaagagggtcgggggtccgggtggagcgggcggcgggggcgggtccacacctcccacggggctggaggggcccgtggatagagtgggggcgacaggcgtgggagcaggtccctgcgtcccgtggggactgggggctccgcgggcacggatggagccgaccgcgggcggcgggggcgctggtgggctctgagctctgtgcggccccgcaggtgcgcgcggagccatggttatcatgtcggagttcagcgcggaccccgcgggccagggtcagggccagcagaagcccctccgggtgggtttttacgacatcgagcggaccctgggcaaaggcaacttcgcggtggtgaagctggcgcggcatcgagtcaccaaaacgcaggtgcgtgggggcggtgggacccagccggcggggcctccccactggacccggggcgacccgacctttggcgggtggaccccatgcagattcactgctccaggcttgattgtcgtggtgggtaaatagtaaccgtttttagttcggtaaagaaaaataatgctttatattatgttgctgcataatttggacatatattgggagaaagcagagaggataatagcaaaaaaaaggaccaacctaagattgcagtggttcatggactcagagctaaaccctgtaaagtgagcct

SEQ ID NO: 39546 - DNA, 1072 bp, Artificial sequence
  DNA replication origin
gcacagccgccctgcctgtggccccacctctgatcttgggaggagtctgctgttcggaggcgggcgggtcctgaggaaggtgtccaggtctggctcttcagagaccaggagggctgggctccgggtcctgcctgtgcagctggtgtggcgcctggcagagaagagagagggggagagggaggggagaggggaggacagaagaggaaaggagagagagaggagggaggcagagagggagaagagagggaggcagagagggagggagggagagaagagaggagaaagaggagggagggaggagagaggagggagagaagagaggagagagaggagggaggagagaggagggagggaaggagagagaggagggagagagggagagaagagggagggaaggagagaggagggaaggaggagggagacgagggagggaggagggagataggagggagggagggaggaggtagggaatgttcagtttctttcctcaggggaactgctggggtctcagtctgactcacttttttctaattattattatttcacgtatttgaatgtgatttctgttaaaaaaaaaaaaaaaaaagaaagaaagaaagaaacaagaaacaagaaaggacttagaaaaagtactcagggaacccaggtggccagaaatgctccattccccttttgtcctttgcagtgttctggtctggaatgaatgggcttccccagcagattttaggggcttttctttgaaatttgaaggggaaggtaccttcctatgatcacagagcatgttcccttccagccaagaggttaagtggaaagcccggggccctgggttccagagcggggggccggaagactgtgaggctcaggggagaacgcaaatccgtctcagcagaaatgtgccccagaacaaatcagctccaccgagctcccagtgacctgaaccaaatgcgtcgtctttggtgcgaacttcaaggagttctgccgggcaccgacctgggtcaccaccatcagaattgacgcacagaacacgcctgtcacccagaaagctcccctgggctctccgctccgtgccctt

SEQ ID NO: 39547 - DNA, 1693 bp, Artificial sequence
  DNA replication origin
atttttagtagacggggcttctccatgttggtcaggctggtctcaaactcccgacctcaggtgatctgcctgcctcagccttccaaagtgctgggattacagacatgacccactgcacctggccaaggccaatttttagatacccattttagacacccatcccaggctgtgttcaggaaaaagtgaggtggggtgtcaggagctgtgtgagccttgtggtgctgagtggccatgggcaagcccctgccctctgggcctcggctgggacacaggtgtccctcccctggctggaatcatgcccagcatgggcccatccggctccgccctgccccccggcctcacctgagctcaccacacacaggcccatcagggaagcgggactgggcactccctggcacccccgagagccggggccaggcagagaggccacacaggcccacctgtgcccaggtaggcaggtcccgtagaacctggacaggtgcatgacctgggcaggggtgacagcagaaacacagctcctcattaaagagaaaacctcatcctggatgtgtgcgtgggtgtgagtgtgcttacttgtgagtgtatgggagaatgtgtgtgtgggtgtgaatgggtgtgatgtcagcgagggtgtattttgacagagagtgctgctaggtgtgtgagtgtatgtatgaaatcacctctaattgtgcatatgactgctgtgagatgatgttgggtgtctgatgggtgtgtggtgtgtgcgagatgatgtgtgggtgtctggtgagtgtgtagtgtgtgtgagatgatgttgggtgtctgatgggtgtgtggtgtgtgtgagatgatgtgtgggtgtctggtgagtgtgtggtgtgtgagatgatgtgtgggtgtctgatgggtgtgtggtgtgtgtgagatggtgtgtgggtgtctgatgagggagtgtgtgctgtgtgtaaccatgtgtctctggtatgtgtgttatgtatgtgagtgtgtggggaggttatgtctttgtggtgtgtattgtgtgtacccatgttgtgtgtgtttctctgtgtgtccatggtgtgttcacaacgtgtaccagtggtgtgtgtgtccatggtgtgtgtgtgtgtggtgtgtgtccctggtgtgtgtggtgtgcgtccctggtgtttgtgtgtccctgatgtgtgtgcatccctggtgtgtgtatgggtccctggtgtgtgtgctgtgcgtccctggtgtgtgtgcatcccttgtgtgtctgtccctggtgtgtgtccctggtgtgtgtggtgtgtgtccctggtgtgtgtgtggtgtgtgtgtccctggtgtgtgtgtgtccctggtgtgtgtgtttgcgggggtccctggtgtgtgtggtgtgcgtccctggagtgtgtgtgggtccctggtgtgtgtgtgggtccctggtgtgtgtggtatgcatccctggtgtgtgtgtggtgtgcatccccggtgtgtgtgtgtgtgtccctggtgtgtgcaggggtccctggtgtgtgtggtgtgcgtccctggtgtgtgtgggtgtccctggtgtgtgtggtgtgcgtccgtggtgtgtgtgggtgtccctggtgtgtgtggtgtgcgtccctggtgtgtgtggtgtgtgtccctggtgtgtgtgtgtctgtccctgacgtgtgtgtgtatctgtgcacacggctgcccacccacaggc

SEQ ID NO: 39548 - DNA, 1341 bp, Artificial sequence
  DNA replication origin
tcttctacctggtgttccgatgctgttttacttggttaacttcttgcccttcgggaatttaaggaacctttactgatgagcttgaaacgtgcgtcctggtgggtggggggccctgcgcgtcctcgaggaccgaccccgagggcgtgtgtcgcgggcccgggagggggcgccgcgccggggcgggactcgatggccgcgctctgtggccgccggacgccgtgcgcagcgccccgcgtgaccgcgcccagagccgggtccgaaccccgagccgaggcgcagaacagtcgccttgcgcggctccggtgcggcccacggccaggggctgccgggcgctctcggggacggggccgactccgcgcagggtggtagcaggggcgccccgcggggctccttcgccaggtcccggaggccgcgggcggggccgtttcccaaacatcgtgctctggactttcagaggctgaacctgatccccccgccctatggctaaatgggggatcccaggcccccgagtctccccccggacctgcagcgaaagacacggacggtgcccatcagctctgggcagaggaacgtgctgcgcctccgcagcgtccccggctcaggtcagagcgatgttccgcagcctcctccggcccgcgcagctccgccgcggtctctgccacgtggggctcacagtaggggagggagtgagacgtgaattagaattaaatgtccactggcaggaactgacacgaagaacaataaagccggcgatgtggggaggggacagggatggagttacatcatgaaggctctggaaggtggcattggaggccgggatcgcgccactgtcctccagcctgtgcgactgagcgagactgtctccagaaaaaaaaaaaaaaaaaaaaaaatcctgtccagtctttataagaagagagacgtggacacagacacgcggagagaaaaaggccatgtggagatggcggcagagatgagatgtgctgccaccagacgagaaatggcagggatggctggcggcctccacagggctgggaaaggtggccagggcctccctcagagccttcagccagcctgcgggagagaaagatgataaacggtgttgtttttgttgttgttgtttgagacagagtctgtgtcacacaggctggagtgcaatggtgagatcttggctcactgcagcctcagcctcccgggttcaagcgattctcctgcctcagccacccgagtagctgggattacaggcacgcaccaccatgccaggctaatttttgtatttttagtagagacggggtttcatcatgttgaccaagctggtctcgaacccctaacatcaggtgatcc

SEQ ID NO: 39549 - DNA, 1604 bp, Artificial sequence
  DNA replication origin
tgctgctgggtcccccctcacagatgcagagaccgcacaggcggcagagtcagatggacgcagcttccacacgggccccacctaggccatctgcgccccagcaagggagacgccagcccagcatgcctggctcagcgcagtgccaccacaggcccgaccctcacccccccgccccggggaagaaaaagtaagagtttcacagagatcagagaaagaaaaggcacgcctcccacagctgagcaaggccatggggcagggctggcccctgtgcccaccagccctcgcaggggccgtcccacctgggagaggcctcaaggccattggctgcctcgacgggaactgcagccgagtggggcctgcagccggggcctcgggcctgtcgcaggtgtggagcccggccgcctgaggacgttctgcagggtgggcagcgctggggacggcgcagggggaccatcccctccggcccaggggctgggcaggacccagtgtgggctgcatggggctcctgagggtggagaaggggtgggaggccaagggaacagagggacagatgtgcgggatctggggtgcgagggcagggctccaactggtctgggagcgtgtgtgggggtgtggtgtatatttgatatgtgtggtgtgtggggggtgtgtgttggatatgtggtgtgtgatgtgtgtgtggtgtgtggggtttctgtgacgtgtgtggtgtgtgtgtggtatacgtgtggtgtgtggggtttctgtgatgggtgtggtgtgtgtggtgtgtctgtgacgtgtgtggtgtgtgtgtgtggtatatgtgtggtgtgtggggtttctgtgacgtgtgtgtgatgtgtgtgtggtgtgtggtgtacaatgtaccgtgtgtggtgtgtgtgtgtgtgatgtgtctggtatgtgctgtgtgtgttgtatatgtgatgtgtggggtgtgtgtgtggtgtgtgttgtatatgtgatgtgtgtggtatatgtggtgtgtgatgtgagtggtgtgtgtgtggtgtttatgtgatgtgtggggtgtgtggaatgtggggtgtgtggtatatgtgtggtgtgtgatgtttctgtggtgcgtgtggtgtgcgatgtgtgtgatgtgtgtgtgatgtgtgtgatgtgtgtgtggtgtgtgtgtggtgtatgatgtgtgtgcagtgtggagtatctgtggtgtgtgtctgtgtggtgtgtgtgatgtgtatgttgtgtatctggtgtgtgtgtggtatatctgtggtgtgtgtctgtggtgtgtgtctgtggtgtgtgtggtgtgtgttgtataggtggtgtggggtgtgtatgtgtggtacatctatagtgtatggtgtgtgtgtggtgtgtgttgtataggtggtggggtgtgtgtgtggtatatctatagtgtatggtgtgtgtgtgatgtgtgtggtgtgtgtccgtggtgtgtatgcgtgggggtgtgtaagccactgtctcggagatcatttttctcaaatatctctacagatcgagccctgtcgggaggtttttcccggcctctgcgatggctcctccgtggctccccggcattgtttccgcggcccagcttaagcctgtcctcagcgatt

SEQ ID NO: 39550 - DNA, 1560 bp, Artificial sequence
  DNA replication origin
aaacacagtcccattctgagcctttgggggtaggaccccatataattttcagggagtcaccttccagcccctaacaaggtccaggcaggacccgcagtcaagcaaggctgcaggcgtgagtgacagctccattcactgtgcagccggtgggacgggacccggagctaccagatgttgcggtgggcccgcctccctgcaatggctgccaggctgtgcagagcaaaggtgtccgctcagctggtccgggacagacccaggaggagcagggagccccagacaccccgattttcaaaaacatccagccgcagccccaaagcacagtgggtcatgttgttgccaaccacagggcacccccttctgtacaaatggggactcgatggcacaacagccgggcaggtcctgctggagggaggaggagggggggagtctaggggagccactcccaggactcagaacccgtcacaccacggcctggccagaggaatacaaagagagacaaagggcatggtgtgttgaggggtgtgtgtgtgtctgtggtgtgtgtggagtgtgttgtgtgtggagtgtgtggtgtgtgtgtgtggagtgtgtggtgtgtggagtgtgcggtgtgtgtggagtgtgtggagtgtgcggtgtgtgtggagtgtgtggagtgtgtggtgtgtgtggagtgtgtggtgtctgtgctgcgtgtggtgtgtgtgtggagtgtgtggtgtgtgtgtggagtgtgtggtgtgtggagtgtggagtgtgtggtgtgtgtggagtgtgtggtgtgtgtggagtgtgtggagtgtgtggagtgtgtggtgtgtatggagtgtgtggtgtgtggtgtgtgtgtggagtgtgtggtgtgtgtggagtgtggagtgtgtggtgtgtgtggtgtgtgtggtgtgtgtggagtgtgcggtgtgtgtggagtgtgtggagtgtgcggtgtgtgtggagtgtgtggtgtgtgtggtgtgtgtggagtgtgtggagtgtgcgttgtgtgtggagtgtgtggtgtgtgtggagtgtgtggagtgtgtggagtgtgtggtgtgtgtggtgggtgtggagtgtgtggtgtgtgtggagtgtgtgttgtgtgtggagtgtgtggagtgtggagtgtgtggtgtgtgtggagtgtgtggagtgtgtggagtgtgtggtgtgtgtggtgtgtgtggagtgtgtggagtgtgtggtgtgtgtggagtgtgtggagtgtgtggtgggtgtggagtgtgtggtgtgtgtggagtgtgtggtgtgtgtggagtgtgtggagtgtggagtgtgtggtgtgtgtggagtgtgtggagtgtgtggtgtgtgtggagtgtgtggagtgtggagtgtgtggagtgtgtggagtgtgtggtgtgtgtggtgtgtgtggagtgtgtggagtgtgcggtgtgtgtggagtgtgtggtgtgtgtggtgtgtgtgctgttcagtgtccgtggcacgtgatgtcactgggcgtcactatggccgcccacgctaatgcctgttgctgactttttgaaaacccggtggtgtcagtgtctgtgt

SEQ ID NO: 39551 - DNA, 1459 bp, Artificial sequence
  DNA replication origin
cctccagcattcccggttgctggaagcctctgagctccagtctctgcctccgccttcccctcccgtctgtgtcctttccccttaaaggacatcagccattgggtttagggtctgctctcatccaggacgatctcaccttgatgcttcactgaattacatctgcaaagattctgtttccaaataaggtcacatgcccaggttctggggtttggaacttagacacatgttttgggggacactgttccacccatgacaagtatggatgacgtccctgagatcctgtgtccttgcatttggggacgcttcacatacgccattgtacacgttcctctcaggaacctctgaggttggcgggactgtttttgatattcattgcgcatgtgtgtccccgtgggtgtgtatgtgtgagaatgtgtgagtgtgggtgtccctgtgagtgggggtgagtgtgagtgtgtgcgtatgaggttccacatacatatgtgagtgtgtccctgtgagtgagtcccctgtgaatgggtgtaagtgagcatgtgtgtgtgagtccctgtgcatgggtatgagcatgtgtgtgtccctgtgtgaatgaatgtgtgtgagtccctgtgtgtaacagcatgtgtgtgtgtgtccctgtgtgtgagtgaatgtgtatgtgtgcatgtgtgagtgtgttacgagtatgggtgtccctgtgaacgtgtgtgagtgggtatgagtgtgaatgtccctgagtggttgtgtgtgtgtgtgtctgtccctgtgtatgtgtgtaagtgtgtctgtccctgtatgtgagtgtgggtatccttgtgagagtgtgtgattggtgtgagtgtgggtgtcctcattagtggtttgtgtgtgtgtccatccctgtgtatgtgtgtgtaagtgcggctgtccctgtgtgtgtgtgtgtgggtgtcctcatgagtggttgtgtgtgtgtgtgtggggggggtctctgggtttgtgtatgggtgtgtgtgagtgggtgtgtgtgtgtccttgtgagtggttgtgagtgcgggtgtccctgtgagtggttttgtgtgtgggtgtgtgtatgactctgtgagggggttatgtgtgtgtgtgggagtgtggctgtccctgtgagtgtgtgagtgtgggtgtccctgtgagtgattgtgtgtagatgtgtgtgtatgagtgtggtgtccctgtgagtgattgtgtgtaggtgtgtgtgtgagtgtgggtgtccctgtgagtgattatgtgtaggtgtgtgtgtgtatgagtgtgggtgtccctgtgtgtgtaggtgtatgtgtgtatgagtgtggtgtccctgtgagtggctgtgtgtgtgagtgtgtttgtatgagtgtgggtgtccctgtgagtggctgtgtgtgtgagtgtgtgtgtatgagtgtgggtgtccctgtgagtgattgtgtgtaggtgtgtgtgtgtatgagtgtggtgt

SEQ ID NO: 39552 - DNA, 1025 bp, Artificial sequence
  DNA replication origin
tctagaggccacgcgcatttccactgccaaagcaataacacaggagatggaaagaaattcttggccaggcgcggtggctcacacctgtagtcccagcactttgggaggccaaggcgggcagatcacgaggtcaggagatccagaccatcctggctagcaaggtgaaaccccgtctgtactaaaaacacccaaaaggtggccgggcttggtggcgggctcctgtagtcccagctactcgggaggctgaggcgggagagtggtgtgaacccgggaggcggagcttgcagtgagccgagatcgcgccactgcactccagcctgggggacagagcgagactacgcctcagaaaaaaaaaattttgccttcactatatgcctaagtaatttctctattagagctcagagtcgtggggcccacaccgccagctgacacatgaaaatgtggcaatgatgtggtggtgtctctgtgtggcagcgtggtggtgtgtctgtgtggtggtgtgtccgtgtggcagagtgtctgtgtggtgctatgtccatgtggtggtgtgttcatgtatctgcatggtgatgtctccgtgtgacagtgtgtttgtgtatccatgtgacaatgtctgtgtgtccttgtgtccacatggcagtgtctgtgtggtggtgtctgacagtgtggaggtgtgtccatgtgacagtgtggcggtgtgtctctgtgtggcagtgttcatgtggcagtgtgtttgtgtgttcctgtgatggtgtgtccatgtgacagtgtagtgatgtctcttgtgtgtctgtgtgtccctgtgatagtgtggtggtgtgtccatgtgatgtctccgtgtgtctgtgtgtccctgtgatagtgtggtggtgtgtccgtgtggatttctccgtatgtctgtgtgtccgtccatgtgaatgtgccagtgtgtccatgtgacggtgtgtccgtgtggtaatgtctccgtgtgtctgtacatgtgacagtgtggtggtgtgtgcgtgtaacaatgtggcggtgttccc

SEQ ID NO: 39553 - DNA, 1175 bp, Artificial sequence
  DNA replication origin
atccaaggtgcagcggggcgggggttctcttgttcaggagtccaggacgtggcagagccggagtcctccgtgtaggagtcctccggtgctggagtccagagcacagtgaggctgggtcctcccgtgccatagtgtagggcatggcgggacagggatcctgccctgcgatagtccagtgcttgagtccgcagtaaggcaatggtcctccaatgctggagttcacggcgttgtggggtcggggtcctttggtgacttagtccagggcgtaccagggcgggggtccacagttgccatagtgaggatcttggaggaaggtggttcctgccttgctgtagtccggggagcagggggcaggggtcctctcttgtcagagtctctggcgcggggtgggggtggaggtgggggttttcctatgcgatagcccacgggtcggtgaagccgggtcctcccgtgcctttgtccagggcgcaggggggcgagggtcttcggtggtggagtccgcggagcggcaggacgggggtcctccagtgccatattccagggcgcggcggagtgggggacctgtcctgcagtggtccagggcatgtgggagtggtggtcctgctgtgcctcagtccagtgcgcggtgggacggcggtcctgctgtgctgtagtgcaggacgcggtggcgcaggggtagtccagagagcgccgtggcagggggtcctccagtgctggaatccagtgcaaggcgggtcaggggtcttaccgtgccgaagtcggtggcaagggtcctcccgtgccatagtctagggggcgacggggcaggtttctctagtgcaggtgtccagggtgtggcagggcaggagtcctcttgtgcaggagtccaggacgtagccgaggagtcctccaatgtcagagtccagggctctgcggggccgggttcccccatgccagagtgtagggcgcgttcaggtgagggtcttggcgtgcagtaatccagggtgcggtggggcaggggtagtccagacctccatggcgggcgtccctctgtgcaggagcccagtgcctggcggatcgggggtccttctgtgctgtagtccagggcaccgcaaggtgtgggtcctctggtgccctagtccagggggcggcgagtcagaggttctcccgtgtctcagtctagggcctggtaggac

SEQ ID NO: 39554 - DNA, 2222 bp, Artificial sequence
  DNA replication origin
ttctctttctaatgagaatggaaaattggaaaggcctgtaaaattggaaagcctgtaaaaggccgtagagtggagatgtataaaaatgtacagtcacacatgttttaggggtcgaaaccatggacttttatctcgctcaccaacttcctcacacatacagctcactccctgtggcctcagccatctcaggcactacagaatcctcactgcttgaaattcacttacggagtccaacaaacaactttctttaaaaaaaaaaaaaaggcagtaaaatctcagaattcctgtgcaatgcttgcaacctgcccacttattaaataaacagaacaccaaactaaccaaaagctatgcaagtggcaggctgccctgagcagagccctgcctgtctgccagggactatggtggcacaggagcaggtcgtgatcatgctggaagaaatgagaggtggtttcattccctgactttcaaactctcatctcgggagcccccagtcctaacactgtattcagcagctggagttacctggccatgtaaaaggacaagggaaggcagaccgtcctcaacttcttcctgtgtttctagcaaggaaggaacgcaatggcttcagtccctccacctctaggtaacaaggcaaaggcctccgtaacccaggcagacaggatgtggggaaggtcttgtgtcttttcctaactcagaatttctgagtcagtgggcttcccggagaaagactgtcctcttggcatgtgaccctgaaggcttctagcaccaaaggctcgctaacacctcagaccctgtcttcaggtaaaggggatgggaggcagaacccttctcctgattggtgcctgaaggaggcaagaacgagcatctgctataccccagcctgatttcccccgtctcagcaggagaggggagaggtgagggtgcagatgttctgggcaggtcagtgcagttcgatgaatgcctccagatcttccgggatgaagcccttgtaagggatcttgttcttatccagggcctgggctgcaaggcactgcagcgtcacgtagttgaagggctgcatggtacccctggccagcagcttctcttccagcagctcgtaggccgtcttcttgaaggcgttggtggcgtccatgtgggcccctgcttcagtcagggcattcacgatggccgggcagttgttctgggctgctatgtgtagcggggtgttgttgtcaaaatccctgctgtcccggtcggccccgcagtcgaacagcactttgaccacgtgcaacgaggggaatctgcccacggggtagcggcccacgtttgtggtgtccttgtccacagccatgtgcagaggcgtgaagccgttcttgcccctgggtgcgcacttgagcaggcgatagatggtctggtgcttcagttgctcctggctgggggtgcactccactttctccagcaggtagagcaggtggaggatgatggccagcgccttgttgaactgggccgagtctctaggctccctgagcagctgcagggcccattccacttcccggacccctttggtgaggacccccatgaggtctgcaaagccgatctgggtgcccaggctgcctttggcagccgggtcctgcagcacgtaggagaagagttcggcgaaggagaggaagctgctggcgctcatgggggtcagaggctccaggttgctctgttgcatgtccagggcgtacttccacaagcggatgtagcactcgatattccccgagtcggcgtacactgcgcccctgtaacggatacaataggaagtgtcggggtgcgagggactgaggatgcgctcccggatcaacaaggcctgcatacgcatctcatcggcgtcggtgatcagcgcctccagctcctcggtggtgttgacctccctggaatagtcataggccaggaccagctgtgggggctccagtttgggcaggtactcacccccctggtgacgcagctccatggcccgcctccagtgtttaagggccccaagcagatctcgtttcttatccacataggtagatcccagcaattccaaggcttccatggcagcttcccggctggtgggacagcagctttggtaagattccccgttcagtacctcaggggagaagatgcagcacggagccccctgaggctgcgcacacccctggctggtggaggagccttcttggggcagcctaagctgagcctctacccctatgagctgc

SEQ ID NO: 39555 - DNA, 2664 bp, Artificial sequence
  DNA replication origin
cagaatgcttctgggtagtggagtggagaaaagtggagtggattggagtggtaaggattggaatgcaatggagtggagtggaatggaatggaatggaacagaatggaatggaatggagtggaacagagtggagtagaggggagtggaatggagttgagtggagtgtatcagagtgcagtggaatggaaaggaatggaatggattggaatggattggagtggagtggagtggaatggagtgaaatagagtggagtggaatgaagtggaatggaatggaatggagttgaatgtaacggaatggagcagaaaggaatggaacggaacttaaaggaatctagtggagtggagtggagtggagttgatcagagtgcagtggaattgaatggaatggactggaatggaatagagtggagtggaggggagtggtaagaagttgaatagagtggaatgaaatagagtggagtggaatggtatggaatggaatggaatggaatggaatggaatggaatggaatggaaaggaatggaaaggaagagaatggaatggaattgaaaggagcagagtggagtggaatggagttgattggaggggatcggagtggaggggaatggaatggaatgaagtggagtggagtggagttgaatggaatggagtggagtgaaacggaatggaatggaatggaatggaacagaatggagtggagtggagtggagtgcagtggagttgagtggagtggttcggagtgcaggggaatggaaatgaatggaatggaatggaatgaaacaggatggaatgcaacgaagaaatgaaatgtgagctaagattgtgtcactgcactccagtctgggtgacagaggtagaccagtcgaaataaaggaatggaatggaatggagtagaatggaatggaatggagtggagtggaatggatggaatggagtggagtggattggagtggagtggaatggagagtagtggagtgtggtggaatgagtggagcagaatggaatggagtggaattgagtggaatggaatggagtggaatggaatggaatggaatggagtggaatggaatggaatgcattggagttgaatggaatggaatggaatggaatggaggggaatataatggaatgtagtgcaatgaaatgtactggagtggagtgcagtggagtggagtggaatatagtgaaatggagtggagtggaacggagtggagtggaatggaatggaatgaaatggaacggaacagaacggaagagaatggaatggaaggggacagagtggagcggaatggagttgagtggaggggatcggagtgcagtagaatggaattgaatggaatggaatggagtggagtggagtggaatggaatggagtggagtggaattgaatggaaaggaaagaaatggaatggaatggaacggaatagaatggaacggaacagaacagagtggagtggagtggagtttagtggagtggatcggagtgcaggggaatggaatggaatggaatggaatggaatggaatggaatgaaatggaatggaatgcaactatgaaataaaatgtgagctaagattgtgccactgcactccagtgtgggtgacagagttagatccagtcgaaacaaaggaatggaatggaatggagtagaatggaatggaatggagttgagtggaatggaatggaatggaatggagtggagtggagtggaatggaggggagtggagtgtagtggaatgagtggagcggaattgagcggaatggaatggagttaaattgagtggaatggaatggaatggaatggagtggaatggaatggaatggagtggaatgtaatggaatggagtgcaataaaatgtagtgtagtgtagtgtagtgtagtgtagtggaatggagtggaatggaatgcagtgcagtgggatggaatggaacggaatggaagacaatgaagtgcagtggattgtaatggaatggagtggaatagaatggagtggagtggtgtggagtggaatggagtggagtggaatggagtggaaaggaatggagtggagtggaaaggaatggaatggaatggaatgaaatggaaaggaatggaagggaatgaaatggaatggaacagaatagattggagtggaatcgagtggagtggagtagggtggagcggatcggaatgcagtggaatgaaatggaatggaatggaatggaatggaatgaaatagaatggaatttaggggagtggcgtggggtggattgagtggagttgagtgcagtagtgtggaatggagtggaatggaatgtagtggagtggaatggaatggaaaggaacagaaaggaatggaatggaatggaatggaatggaatggaatggaacagagtggagtctaatggagtgaaatggagtggagtggagtggagcggaatgaaatggagtggaatggaacagaatggaactgaccagaacggaatggaatcgaatggagtggagtggagttgagtggagtggatcggagtgcagtggaatgaaatggaatggaatggaatggaatgtattggagtggattcgagtggagtggagtgtagttgaatggagtggaatgaaatgcagtggagtggaatggaatggaatggagtggaatggaatagaatagaacggaatggaatg

SEQ ID NO: 39556 - DNA, 1203 bp, Artificial sequence
  DNA replication origin
atttaggggagtggcgtggggtggattgagtggagttgagtgcagtagtgtggaatggagtggaatggaatgtagtggagtggaatggaatggaaaggaacagaaaggaatggaatggaatggaatggaatggaatggaatggaacagagtggagtctaatggagtgaaatggagtggagtggagtggagcggaatgaaatggagtggaatggaacagaatggaactgaccagaacggaatggaatcgaatggagtggagtggagttgagtggagtggatcggagtgcagtggaatgaaatggaatggaatggaatggaatgtattggagtggattcgagtggagtggagtgtagttgaatggagtggaatgaaatgcagtggagtggaatggaatggaatggagtggaatggaatagaatagaacggaatggaatggaatgaaaaggaatggagtggagtggagttgactggaatggattggattgccatggaaaggaaaggaaaggaatggaatggaatggaatggaatggaatagaatggaatggaaaggagtgtattggaatggagtggagtggagttgactggaatggattggattgccatggaaaggaaaggaatggaatggaatggaatggaatggaatggaatggaatggaaaggagtgtagtggaatggagtggagtggagtgcagtggattggagtggaatggagtggagtggagtgcagtggagtggaaaggagtggagtggtgtggaatggaatggagtggaatggaacggaaccaaactgaacagagtggaaaggaatggaacggagtggagttgagtggagtagagttgagtggaatggatgggaatgctttggaatggaatggaaaataatttaatgaaatttagttgagtggagtggattttattggagtggagtggaatggaatggattagagtttagagcagtggcgtggagtggagtggaatggagtggaatggagtggaatgaaatggagtggagtggaatggaatgaaatggatcagaatgctatggaatggaatggaacggaatggagtggagtggagttgagtggagtggatgggatagcagtggaatggaatggaatgaaatgcaattgaatgaaatggagtggaatcatgcaatgaaatgtgagctaagattgtgccactgcactctagtctgggaga

SEQ ID NO: 39557 - DNA, 1587 bp, Artificial sequence
  DNA replication origin
aacagagtggaaaggaatggaacggagtggagttgagtggagtagagttgagtggaatggatgggaatgctttggaatggaatggaaaataatttaatgaaatttagttgagtggagtggattttattggagtggagtggaatggaatggattagagtttagagcagtggcgtggagtggagtggaatggagtggaatggagtggaatgaaatggagtggagtggaatggaatgaaatggatcagaatgctatggaatggaatggaacggaatggagtggagtggagttgagtggagtggatgggatagcagtggaatggaatggaatgaaatgcaattgaatgaaatggagtggaatcatgcaatgaaatgtgagctaagattgtgccactgcactctagtctgggagacagagtgagatatagtcgaagtaaaagaatggattgaaatgcagtagaatataatggaatggagtggagtggaatggaatgaagtggaatagaatggagtggagtggaatggaggggagtggattggagtggagtggaatggagtggaatggaatgaaatggagtggagtggagtggaagaaatagagtggaatgaagtggagtggaatggagtggaggggagtgagtggaatggggtgcagtggaatggaatggagtggactggagtggaagggagtggaatgaattggaatggaatggattggaatggaatgaatggagtggaatggagtggagtgtattggagtggattgtagtggagggaagtggaatggagtagaatggagtgaaatggagtggagtggagtggagtggaatggaatggagtttaatggaatggaaaggaacgtaccagaacagaatggaatggaacggaatggaatggagtggaatggagtggaattgtgtggagtggatcggagtgcagtggaatggaatggaatggaatggaatggaatggaatggaatggaatggaatggaatggagtggagtggggtggagtggataggagtggaatggaatggagtggtgttgagtaaactggaatagagtggaatggaatggagtggattggaatgcaatggaaaggaacagaatggaatgaatggaacagaatggtatagaacggacggaaaggagtggagtggaatggagttgagtggagtggatcggattgctgtggaatggaaaggaatggaatggaatggaatggaaaggaatgtagtggaatggagtggagtggagtggaatggagaggagtggaatggagtgtagtggaatggagtggggtggagtggagtgcagtggagtggagtgcagtggagtggaatgtagtggtttggagtgtaatggaatggagtggaatgcaacggaacagaggagaatgcaacagaatggaatggaatggagtggagtggagtagagttgagtggagtggatcagactgcagtgtaatggagtggaatggaatttaaagtaatcgagtggactggagtggagtggagtttagtggagtgcggtagaatagttgtctattaggtccgcttggtgcagagctgagttcaattgctgggtatc

SEQ ID NO: 39558 - DNA, 1263 bp, Artificial sequence
  DNA replication origin
cctccctcccggacggggcggctgactgggcggggggctgacccccccacttccctcccggatggggtggctggccgggcagaggggctcctcagttcccagtaggggtggccgggcagaggcacccctcacctcccggacggggcggctggccgggcggggggctgacccgcccacctctctcccccccagaaggggtggctggccgggcggggggctgaccccccacctccctcccagacggggcggctggccgggcagagaggctcctcacttcccatcaggggctgccaggcagaggcacccctcacttcccggatggggcggctggccgggtggggggctaacccacccacctccctcccggaggaggcggctggccgggcgggcggctgaccccccacctcccttccggatggggtggctggccaggcggggggctgacccccccacctcactcccgaacgaggtggctgccgggcggagacgctcctcacttccgagacggggtgactgccgggcggaggggctcctcacttctcagacggggtggttgccaggcagagggtctcctcacttctcagacggggcggccgggcagagacattcctcacatcccggacggggcggcagggcagaggtgctccccacatctcagatgatgggcggccgggcagagacgctcctcacttcccagatgtgatggcggccgggaagaggcgctcgtcacttcctagatgggatggcggccgggcagagacgctcctcactttccagactgggcagccaggcagaggggctcctcacatcccagacgatgggcggccaggtggagacgctcctcacttcccagacggggtggcggccgggcagaggctgcaatctcggcactttgggaggccaaggcaggctgctgggaggtggaggttgtagcgagccaagatcacgccactgcactccagcctgggcaccattgagcactgagtgaacgagtctccgtctgcaatcccggcatctcgggaggccgaggctggcggatcactcgcggttaggagctcagcccggccaacacagcgaaaccccgtctccaccaaaaaaatacgaaaaccagtcaggcgtggcggcgcgcgcctgcaatcgcaggcactcggcaggctgaggcaggagaatcaggcagggaggttgcagtgagccgagatggcagcagtaccatccagcttcggctcggcatcagagggagaccgtggaaagagagggagagag

SEQ ID NO: 39559 - DNA, 1135 bp, Artificial sequence
  DNA replication origin
gtgaggggtgcctctgcctggcagcccctgatgggaagtgaggagcctctctgcccggccagccgccccgtctgggagggaggtggggggtcagccccccgcccggccagccaccccttctgggggggagagaggtgggcgggtcagccccccgcccggccagccgccccgtccgggaggtgaggggtgcctctgcccggccacccctactgggaactgaggagcccctctgcccggccagccaccccatccgggagggaagtgggggggtcagccccccgcccagtcagccgccccgtccgggagggaggtggggggtcagccccccgcccggccagccgccccatccgggagggaggtgagggggtcagcccctcgcccggccagccgccctgtccaggagggaggtgggggggtcagcccccagcctggccagccgccccgtccgggaggtgaagggcgcctctgcccagccacccctactgggaagtgaggagcccctctgccctgccaccaccccgtctgggaggtgtacccaacagctcattgagaatgggccatgatgacaatggcggttttgtggaatagaaaggggggaaaggtggggaaaagattgagaaatcggatggttgccgtgtctgtgtagaaagaggtagacatgggagacttttcattttgttctgtactaagaaaaattcttctgccttgggatcctgttgatctgtgaccttacccccaaccctgtgctctctgaaacatgggctgtatccactcagggttgaatggattaagggcggtgcaagatgtgctttgttaaacagatgcttgaaggcagcatgctccttaagagtcatcaccactccctaatctcaagtacccagggacacaaacactgcggaaggccacagggtcctctgcctaggaaaaccagagacctttgttcacttgtttatctgctgaccttccctccactattgtcctgtgaccctgccaaatccccctctgcgagaaacacccaagaatgatcaattaaaaaaaaaaaagaaaactgataatgcttaaaattaaacatggtgcaacgtatcactgactaaaaactgatataagaaaacattattccaaaaaacatttgggt

SEQ ID NO: 39560 - DNA, 846 bp, Artificial sequence
  DNA replication origin
atggaatttaatcgaaaggcatcgaatggaaagcagtggagaagagaggagtgaaatggaggggaatggaaaggggtggaatggaagtgagtggaacggaatggagtggaatggagtggaatggaatgagaaggaatggaattgaacggaatggagtgcagtagaggggagtggaaatgaaatgcaatggcatggaatggaatgaaatggaaatgaatggaatgaatggaatagaattgaatggaatggaatggaatggaatggaatcgagtggaatgaaatcgaaaggcattcaatgcaatcaaatggaatgcaatgaagtggagtagagtggattgaaatggagtggaatggaatggggtggaatggcatttaatggagggtagtggagtggagggaaatagattggaaagagatggaatgggaagtaacggaattcaacggagtggagtggagtggattagaatagactggaatcgaatggactggaaaggaacggaaaggaaagaatggaattttatggaatggactcgaatggaattgaatcaaaaggtatggaatcaaatggaatggaatcgaatgtaatggacgcgaatggaatgtaatcgaatggaatggaatggaacggaatggaatggaatggaacggaatggaacggaatggaaaggaatggaatggagtcgaatagaatggaagggaatggagtgtaaaggaatggactcgaatttaatggactagaatgcaatggactcgaatggaatagaatcaaatgggatggcattaaatggaatggaatgggatggacccaaatgtaacggactcgaatggaatggactcaaatagaac

SEQ ID NO: 39561 - DNA, 1757 bp, Artificial sequence
  DNA replication origin
gttgagtggaggggagacgagtggagtggagtggaatgaaatggattggaatggaattgaatcaaatggaatggactggaatggattggattccagtggaatggctggaatggattggactcaaaaggaatggactcaaatggaattgagtcaaatataacggaatggaatgcaatggaacggaatggaatggaatggaatcaaatgccaaggaatcaaatgcaatggaatcgaatggaacggaatcaaatagaatgggattgaatggaatggaatcgaatggaatggattcgaattgaatggattcgaaaagcatctaatggatttgaaaacaatgtggtgaagtggagaggagtggaatgaagtggaatggaatggggtggaatttaattgaatggagtggagtggagtcaggtgaaatggattggaaaggaattgaatgggaaggaatggaattgaacggaggggagtggactggactggaatgcaatggaatggaatggaatgtattacagtggaatgaaatggaatgaatggaaatggaattgaatggagaggagtggagtggaatggaatgtaatagaatggaatggaatgaattggaatggaatgtagtggagtagaatggagtggattggaatgaaatggaatggagtggaatagaatggaatggggtggagtggagaggagtggagtggattgcagtgcgatggaacacaatggaaaggaatggaattgaatagaatggaatggaatgaattggattggaatgtagtggagtggaatggagtggagtggaatgaaatggagtggagtggaatagaatagaatggagtggagtgcagtggagtggattgcagtgggatggaatagaatggaatggaatggactggagcagaatgtagtgtaatggagtggagtggaatggagtggagtggagtggagtggaatggaatgaaatggaatggacgcgagtggaatggactcgaatgtaatggacccaaactgaatggacctgaatgcagtagactggaatggaatggcctcgaatgcaatggaatctaacggaatggaattcaaaggaatgaaattgaatggaatggaatcaaatggaatggaactgaatggaatcgaatgacatcaaatggaattgaatgggatgccgtgaagtagagtggagtggagtggaatggtgtggaatggaatagggtggactggaattcaatggagtggagtgcagtggaatctaacggaatgtgataaaatggaatttaaaggaatggaattgaacagagtggagtggaaagcaatggaatggaatggagtggagtggagtgaagtggagtggagtggagtgcagtggagtggatttgagtggaatagagtggaatgtagaggaatcgaggggagtggatttgtttggagttgagttgaatggaatggaaaggaatggagtggagtcgagtggagtggaatggtatggaatggagtggaatggaatggaatggattggaatagatttgaatggaatgcaatggaatggaatggaatgcattggaatggatttgaacggagtggagtggagtgcaatgcaatggaatggaatggagtatagtggaatggaatatgaaggaatggaatgcaatggactcgagtaaaatggactggactggaatggactgggagggaatggagaggaatggaatggactcgaatgaaaagcacccaaatggtgtggaatcgagtggaagggaatc

SEQ ID NO: 39562 - DNA, 2247 bp, Artificial sequence
  DNA replication origin
tggagtggagaggactggaatggagtggaatggaatggagtggaatggaatagaatgggctggagtgtattgcattggaaaggagtggaatggaatgggaaggaatggaattgagcagagtgaataggagtgtagtggaatgcagtggaatggaatggaaggaatagaagggaatggaatggaagggaatggactcgaatggaatggaatagaatgcaatagaattgaatggaattgattggaaacgaatggaaacgaaacgaatggaatggaattgaatggaatggaaacaaatagagtggaaaggaatggaatggaatggtctcgaatagagtgaaatggaatggaattgagtgcaatggaatcaaaaggaatggaatggaatcaaatgaaatggaatggaatcaaatgcaatggaatggaagggaatggattggaatggaacggaatgggatggaactgaatggaatggaagggaaatgaatggaatggaatctaatggaatggaatcaaatgaaatggaatgcaatcgaatgcaatagaatcgaaaggaatggaaaggaatggaacggaatggaatggaaatgaatggaatggaatggaatcgaatggaatggaactgagtggcatcaaatggaatgcggtgaactggagtggagaggagtggaattgagtggaatggaatggagtggaatggaatagaatggagtggagtggattggattggaacagagtggaatggaatgggaaggaatggaattgaaaagagtggagtggagtggagtggaatgcagtgcaatggaatggaatggaatggaatggaatggaatggaatggaaatgacacgaatggaattgaaaggaatggaatggaatggaatagtatcgaatggaatcgaatggaattgaatgcaatggactcgaaaggaatggaatcaaatggaatggaaaggaatggaatggagtggaatggactcgaatggagtagaatggagtacaacggaatcaaatggaatggagtggattcgaatggaaaggaatcaaatgacatagaatggaattgaatgcaaggaatcaaatggaacacaatcaaatggaatggaaccgaaaggaatggaatcaaatggtatcgaatgaaataaaatggaatggaatcaaatggcatcgaaaggattcgaatggaatgtggtgaagttcagtggagtggtgtgcaatggaaagaattggaatgcaattgaatggagtggagaggagtggagaggaatggagtggaattgaatgtaacgggaaggaatggaattgaatggagtggagtggattggaaagaaatggaatagaatggaatggagtgaaaaggaatggagtggagtggagttgagtggagaggaatggaatagaatggaatggagtggaatagattgaaacggagtggaatggagtggagtggaatggaatggaattgagtggaattgaatggaatagaatggaatggaatcgaatggaatggagtggcgttaaggggagtgaattggagtgaagggttatggaacggaatggaatggaatggaatggaatggaatggaatggaacgaaatgtattggaatggaatggactggactcgaatggaatggaattcaatggaagggaatccaaaggaatggaatcaatgaatggaatggaatggaatggaatgcaatggaatggaatggaatggaatggaatggaatggaaaggaattgaatgcaaaggaatgaagtggaacggaataaaatggaatggaatggaatagaatggaatagtatcgaatggaatggaatggcaaggaatcaaaaggaatggaatgcaatcaactgaattggaatggaatagaatggaatggaatgggatagaatggaatggaatggaatggaatggaatggaatggaatggaagggaatgtaattgaatggattagaacggaattgaattgaatgtaatcaaatggcatggaatggattgcggtgaatcggagtggagaggagtggaatggagtggaatggagtggattggaatagaatggagtggagtggattggaatagaatggagtggagtggattggattagaatggagtggaatggaatgggaaggaatggagtaaagcagagtggagtggagttagtggaatgcagtggaatggaatggaatggaaaggaatggaatggactggaatcgaatgaaatggaatggaatggaatggaacagaagg

SEQ ID NO: 39563 - DNA, 1071 bp, Artificial sequence
  DNA replication origin
cagaatggaatggaatggaatggaatggaatggaatggaatggaatggaatggaaacgaatggcatcgaataaaatgtggtgaagtggagtagagaggagtggaatggacgggaatggaatggtgtggaatggaattgaatggagtggagtggattggagtggaatggagtagagtggaatgataatgaatggaatttaacggagtgcagaggagtggagaggaatggagtggaatggaatggaatgggaaggaatgtaattgaacggaaagtagtggagtggatgggaaagcagtggaatggaatggaatggagtggagtggaatggaatagaatggaatggaatggaatggagttgaatggactggaatagaatggaatggagtagagcagaatttattggaatggaatggaatgaaatcgaatagaatgaagtggcacaaaatggagtggagtgaagggaaatggaatggaatggagtggaatggaatggaatggattgtaatggaatggaatggattttaatggaatggattggaatggactggactcgaatggaatggaatagaatggaatggaatccaaaggaatggtattgaaaggaatggaaacgaatggaatggaatggaatggaatagaatggaatggaaaggaattaactcgaaaagatttgaaggcaatggaattaaaaggaatggaatagaatagaaaggaatggagtagaatggaatggaacgaaatggaatggaatgcaatggagtggaatggaaaagaatggaatggaatcaaacagcattgaatggattgcggttaagtggagtggagaggactggaatggagtggaatggaatggagtggaatggaatagaatgggctggagtgtattgcattggaaaggagtggaatggaatgggaaggaatggaattgagcagagtgaataggagtgtagtggaatgcagtggaatggaatggaaggaatagaagggaatggaatggaagggaatggactcgaatggaatggaatagaatgcaatagaattgaatggaattgattggaaacgaatggaaac

SEQ ID NO: 39564 - DNA, 1059 bp, Artificial sequence
  DNA replication origin
aatggaatggaatggaaagatattgaattgaatggaagggaatggaatcaaatggtatggactggaatggaatggactcaaatgtaattgactggaatgaaatggactcgtatggaatggatttgaatgcagcggactcgaaaaatattgactccaaaggaatggaatcaattggaagagaatcgaattgaaagcaattgaatggaatggaatcgaaaggaaaggaataaaaaggaatggactggaatggaatggaatcgaatggaatggactgaaatggaatggatacgaatggaatggaaaagaacagaatggaatggaatggaatggaaaagaacgcaatggaatggaatggaatcgaatgcaatggaatgaaatgaaatgcaatggaatggattggactccaatgtaatggcctcgaatggaaaacattcaaattgaatggaataaaatggaattgaatcaaatggaatgggatcgaaaggagtgggatcgaatggagtgggatcgaatggagtggaattgaatggaatggaatggagtaaaatggaatggaatggaatacaatggactacaatggaaaggactcaaatggaatggaaacagaaggaattgaattgaatggaatggaatcaaatggaatgggatccaatggaatggagtggagtgcagtggaatggagtggaatggaatgggaaggaaaggaatagaacggatttgagtggaacagagaggagtggagtagagtggagtggagtggaatggaatgtagtggagtggagtggattggaatgtagtggggtggagtggaatggagtggagtggtttggagtggaatggaatagaaggggaaggaatggaattgaacggtgtggattggatgggagtggatttgaatggaatgcaatggaatggaatggaatggagtggaatggactggaatgcagtggaatacaatgggtatggggtaatggaatgtagtggagtggagtggaatggaatggaatggaatggaatggactcgagcgcaatagacttgaatggaatggactcgaatgg

SEQ ID NO: 39565 - DNA, 2806 bp, Artificial sequence
  DNA replication origin
cactattggcctccaagtgtacaaaaatatccctttggagattctacaaaaagactgtttccaatatgctaaatcaatataaaagttgaagtctgtgagatgaattcaaacatcacagagcactttctcagacaccatctttctagttttgctgtgaagatatttactttttcacctcaggcttcaaagtgctcacaaatatccttttgtagattctacaacaagacttttaccaaactgctcaatcaaaagaatggttaaactctgtgaggtgaatgcacatatcacaaaaaagtttctcagaaatcttctgtctagtttttatgtgaagatcagagtgcagtggaatgaaacggaatggaacagaatggaagggaatggaattgagtggagtggaatggaaaggagtagagtggagtggtgacaattggagtggagtggagtggagaggagtgcaacggaatggaggggatttgaaaggaatgggatggaatggagtggagtggagaggagtggagtcaaatggaatagagtggactggaatggagtggagtggaaaggagtggattaaagtggagtggagtagagtgaattggagagtggagtggagtggagttgaatggagtgcaatggaatggaatggaatggaatagagtggaaaggaatggaatagagtggaatggaatggagtggagtggagtggaaaggaatggattagagtggaatggactggagtggagtggaaaggaatggattagagtggaatagactggagtggagtggagtgaagaagagtggaagggagtggaatggagtgaaatggagtggagtggaatgcagtggaggggaatggaatggaatggaacggaactgaatggaaaggaatggaaaggagtggaatggagtgcactggagtgcagtggagttgagagtagtgtatcagaatgcagtggaatagaatgaaatggaatggaatggagtggagtggattggagtggagtgaagaggagaggaaaggagtggaatggcatggattagagtgggatggaatacaatggaaaggaatggaatgcgacagaatggaacggaatggagaacagaagagtggagttgagtggagtggatcagagtgcagtcgaatggaatggaatggagtggagaggagtggagtggaatggagtggagtggagtggactggaatggaatggaatggagtggagtgtaatgtaaaggactggagtggaatgaaatggagtggagcggagtggaatggaatggagtggagtggaatggcatggagaggagcagaatggagtggagtggagtggaatggagtggagtggggtggagtgcagttgagtggagtggagttgagtggagtggatcagagtgcagtcgaatggaatggaatggagtggagaggagtggagtagggaggaatttaatggaaaggagtggattgaaatgaagtggagtggaaaggaatggaatggaaaggaatggaatgtaatggaaaggagtggaatggaacggaatggagtggagtggagtgcagaggagttgagttgagtggatgagagtgcaatggaatggaatggaatggaatgaaatggaatagagtggagtggaatggagtggagtggagtggaatggaatggaatggaacacagtggtgaaaggaaatgagagctaagattgtgtcactgcactacagtctgggagacagagttacagccaattgaaataaaggaatggaatggaatggagtagagtggaattgaatggagtggagtggaatggaacagaaaggaaaggagtggaatggagtggagtggacagtaacagaaaggagtggaatggagtggagaggaatggagtggaagtgaatgaaatggaatggagtagaaggcaatggaaattaatggaatgaattggaatggagtataatggagtggagtggggtggaatggagtgcattggaatggagtggaatgcaacggaatggaatgcagtggaatggaatggagtgcagttgagtggaatggaatggagtgcagtggagtggagtgcagtggaatggagtggaatgttgtggaatggagtggagtggaatggagtggagtggaatggaatggaatggtacagaatggaagggaacagaatagaatggagtggaggttgagtggagtggagtggagttgagtggagtggaccggagtgcagtggaatggaatggagtggagtggagtggagtggaatggagtggaatggagtataatggagtgaaatgcaatggagtgcagtggaatggagtggaatggaatggaatggaattgaatggaatggaatggaacagaagggaaaggagttgagtggagtagtgtggagttgagtggagtggattggattgcagttcaatggaatggaatggaatggaaaggaatggagtggagtagagtggaattgaatcaaatggactgaaaaggaaaggaatggattgaaatgcggtggagtggaatgaacttgaatggaatgtactggaacggaatggactcgaagggaatggactcgaatcaaatggaatcaaatggaaagcaatggaatggaatggacttgaatggattggacaggaatggaatggactcgaatggaatggaatcgaatggaatggaatagaatgaaatggaatagaatggaatggagtgaaatggaatggactcgggaggaatggactcgaatggaatggactcgtgtggaatggacacgagtcaaatggactagaatggaatggacacgagtggaaagg

SEQ ID NO: 39566 - DNA, 1068 bp, Artificial sequence
  DNA replication origin
ggcagcccctgatgggaagtgaggagcctctctgcccggccagccgccccgtctgggagggaggtggggggtcagccccccgcccggccagccaccccttctgggggggagagaggtgggcgggtcagccccccgcccggccagccgccccgtccgggaggtgaggggtgcctctgcccggccacccctactgggaactgaggagcccctctgcccggccagccaccccatccgggagggaagtgggggggtcagccccccgcccagtcagccgccccgtccgggagggaggtggggggtcagccccccgcccggccagccgccccatccgggagggaggtgagggggtcagcccctcgcccggccagccgccctgtccaggagggaggtgggggggtcagcccccagcctggccagccgccccgtccgggaggtgaagggcgcctctgcccagccacccctactgggaagtgaggagcccctctgccctgccaccaccccgtctgggaggtgtacccaacagctcattgagaatgggccatgatgacaatggcggttttgtggaatagaaaggggggaaaggtggggaaaagattgagaaatcggatggttgccgtgtctgtgtagaaagaggtagacatgggagacttttcattttgttctgtactaagaaaaattcttctgccttgggatcctgttgatctgtgaccttacccccaaccctgtgctctctgaaacatgggctgtatccactcagggttgaatggattaagggcggtgcaagatgtgctttgttaaacagatgcttgaaggcagcatgctccttaagagtcatcaccactccctaatctcaagtacccagggacacaaacactgcggaaggccacagggtcctctgcctaggaaaaccagagacctttgttcacttgtttatctgctgaccttccctccactattgtcctgtgaccctgccaaatccccctctgcgagaaacacccaagaatgatcaattaaaaaaaaaaaagaaaactgataatgcttaaaattaaacatggtgcaacgtatcac

SEQ ID NO: 39567 - DNA, 1208 bp, Artificial sequence
  DNA replication origin
gggcggggggctgacccccccacttccctcccggatggggtggctggccgggcagaggggctcctcagttcccagtaggggtggccgggcagaggcacccctcacctcccggacggggcggctggccgggcggggggctgacccgcccacctctctcccccccagaaggggtggctggccgggcggggggctgaccccccacctccctcccagacggggcggctggccgggcagagaggctcctcacttcccatcaggggctgccaggcagaggcacccctcacttcccggatggggcggctggccgggtggggggctaacccacccacctccctcccggaggaggcggctggccgggcgggcggctgaccccccacctcccttccggatggggtggctggccaggcggggggctgacccccccacctcactcccgaacgaggtggctgccgggcggagacgctcctcacttccgagacggggtgactgccgggcggaggggctcctcacttctcagacggggtggttgccaggcagagggtctcctcacttctcagacggggcggccgggcagagacattcctcacatcccggacggggcggcagggcagaggtgctccccacatctcagatgatgggcggccgggcagagacgctcctcacttcccagatgtgatggcggccgggaagaggcgctcgtcacttcctagatgggatggcggccgggcagagacgctcctcactttccagactgggcagccaggcagaggggctcctcacatcccagacgatgggcggccaggtggagacgctcctcacttcccagacggggtggcggccgggcagaggctgcaatctcggcactttgggaggccaaggcaggctgctgggaggtggaggttgtagcgagccaagatcacgccactgcactccagcctgggcaccattgagcactgagtgaacgagtctccgtctgcaatcccggcatctcgggaggccgaggctggcggatcactcgcggttaggagctcagcccggccaacacagcgaaaccccgtctccaccaaaaaaatacgaaaaccagtcaggcgtggcggcgcgcgcctgcaatcgcaggcactcggcaggctgaggcaggagaatcaggcagggaggttgcagtgagccgagatggcagcagtaccatccagcttcggctcggcatcaga

SEQ ID NO: 39568 - DNA, 2003 bp, Artificial sequence
  DNA replication origin
aactcgtggaggaattcccagcgggatgggagaaagaagctcaatcagagaggtggaacatcgagcaggggcgccaaccctacctcgcaacccccagcgctgcatcttggaaagcctgctgttggggaacgacccctcccaaatgcacggccgacgccaatgttatctcgcgagagacagccctgcatgccctggggctccggggcggggggcctgagcaggcccgggaactaagtccccgggggcaaaaggaggaaagaaggaaggtagaggtccagggctgaattatacaggacacgccacaacgctagttttcccgcacactggttgagagccccttgtgtggagggctgactttcaataggttgcagtgagggagttgctctgctccataggaaaccctgacccagaagcagggcgtttaccaatagtttagtatcagattccccataagcatgttatgtgacgggccagggagcaaacgcctttctggccgcaccccgttttttaggatggggggccgcaccccattttttaggatgataagaccggagcaaggtcttggcgcacagcggggcggagcgtccggccggtggcaaaggctggggactggctatctgaggccaaccgagtcttgccagcgctgctgcatcctttcttctgggcgggattctgatttagaggcgttcagtcataatcccacagatggtagcttcaccccattggttcctcagtcaagcacatacaccaaatgtgtgaaactttgattcctctcatactcagcaggattaccatggtagcaacacatgggcaacaacacatggagaacacacgcagtaaaactaacctgtctcacatgggtctaaccatgatgttttccagggcatgcactccgcttttagatgaatccattccactttgccttgcccttcacaaagaaaagagaactcgctggccacagtggctcacgcctgtaatcccggcacattgaaaggctgaggctgacggatcacctgatggcaggagttcgagtccagcgtggccaacatggttaaaccctgtctctatgaaaatacaaaaattagctgggcataataacgggtgcctgttaacccagctcctcggtaggctgaggcagtagaatcgcctgaaaccaggaagcggatgttgcagtgagccgagattgctccattgggctccatcctgagcctctaagcgagactccatctcaaaaaagaaaaaaaaaaaaaaaaaaaacgagaactctctctagggctcccacctgcttttgcagaatcagagaatgtgattgccggcaaaggttgaggggagggcgcaggggaaagaagggggaggagcaaaggctggagacacaatagctcactctggaacctttccaagtttagtggggacaattttgaaactagctgactctggaaattacacataattcatagtattattgcttctttgaaaggtgagcggttcatgattttttttctcagcatttattcatttacttgtaataagtgcatttagtttcatacagtttacatacaaccggtttgactgtatctgcagagatttaggatagtttttcttaatggtaagccctagggtggagctacaatgcactttccgttgtgaaccctgaaaacttgagagaggtctcagttaatttagaaagtttacgtaaccaaggttcaggacgcatacccgtgacagcctcaggaggttctgaggacatgtgcctaaggtaaacagagaacattatcgttttatacattctagggagacatgagacatcaatcaaagtatgcaagatgaacattggttcggtctgcaaaggcgggacaaattagcaaacgcgggaagactgaaagtgaggaggggacttcctggtcaaaggtagttaagagacaaatggttgcattctttggagtttctaattagcctctccaaaggaggcaatcaaatatacatttatcgcttgaaaccaggag

SEQ ID NO: 39569 - DNA, 2604 bp, Artificial sequence
  DNA replication origin
gcccggggccctctggtcaaccccaggacacacgcgggagcagcgccgggccggggacgccctcccggccgcccgtgccacacgcagggggccggcccgtgtctccagagcgggagccggaagcattttcggccggcccctcctacgaccgggacacacgagggaccgaaggccggccaggcgcgacctctcgggccgcacgcgcgctcagggagcgctctccgactccgcacggggactcgccagaaaggatcgcggcagagggaccgctccccggcacccgggggacgggggcgggacggtccccggctccccacggggactcggaaacgaattcggccgccgcctcagacggccaggatgagcgcggacccgcgaccgggccgggaagggcgtccccagcctcccgcgccacgcgcggcgggtccccgcgggtcgcggctcgggcctcgggagctacggcgcgctggtcgaccggcccgggcagccccacgcccgccgcgggcccagaagcgcagcgacagcctctcccccacataaacctgcacgccagagctgtgactcacaagcgacgcgccacagctctggcgccaccgggccagccgggctgacgaccgcgggctttccggagctctgcctagctcacagcggggacggtcccctccctcggcagctgccaccgcagctccggaagccgagagcacgatctcaaagcggccgccagatggagcccgacaaccgccgcggacgtcagcgagacagatccggctggcagggcggcccgtggaccgcgaaagcgaaaccgtgagtcgagaagctcttcccgaggccgaaaacgcagcccctctgccccaaccccacacaaacggtgcccaaaacgcgtctctgcctcgaccgcgacagagtcagaagacaacccacggcgcgtgggtgtttggagatgcctctcggaagcagggagggagggagggagggagggagggagggagaaagaacacacaaggactcggtcgcgggtcgctgcagacacacggagaggcagaatgcgtaggctcttccggaatccacgcagagacagacggggggaggggagtggggaaaagagacagatggcgaaagggaaggagggagggaagggagcagggagggagggagggagggagggaggaagacaatggagaaaagagagacaatttagaaaacgtagatacacaaagtaaacttctgaaacactccattttttaaaagacagacgggaaggaaagaaacacgaaaaagagagaaagaatgaggaaagaaacgaaggaaagaagggaaaaagaaacagagaggaaagaaaaaagaaggaaacacagggaacgaaagagaaataaagcacgaaggaaaaaaggacagaaagagagaaagaaggaaaggaagagaggaagaaaaacctaaagaaggagagaaaggaagaaaggaaggaagaaaaacacgaaggagaggaagaaagaaaacagagataactacgtacgctcgttcatttacacacataaatacgacgcttttcatacgtaaaataaacgtctttatcgacgatcccttctttatagagcgatgtgtatttatttgtataacacagacacctacatctatcatacagaagtctatttccatacaaccgatacgtatttaccatacgcaagagtattcaatgcagagatacacgttgtcgttgtttgcatataagcgtacagaaacgtttacattaatacatataagtaaacgcgtggaaacgaaagaaataaaaaagcgaaatgagtcaacaggccgggcacggtggctcacgcccgtcatcccagcacttcgagaggccgaggtgggcgcatcacaggaggtcgggagttggagaccagcctgagcaacatggagagacacggcgtgcctactaaaaacacaaacatcagccaagccaggcgtgggggtgcctccctgtaatccccgctaatcgggaggctgaggcaggagaagcgctcgaacccgggaggcggaaggtgcggtgagccaagaccgcgccattgcactctagccgtggaaacaagagtgaaactctgtctcaaaaggacgaaacagaaagaaagaaagaaaggaaggaaggaaggaaggaaggaagaaagaaagaaaagaaagaaggaatgaatgaaagaaaagaaagcaagaaagaaagaaagaaagaaaaagaaaagaaagaaagaaaagaaagcaagaaagcacgaaagcaagcaagcaagaaagcaagaaaacaaggaagcaagaaagcaagcaagaaagaaacaaaagaaagaaagcaagaaaacaagaaagcacgaaagcaagcaagcaagaaagcaagaaaacaaggaagcaagaaagaaagaaacaaaagaaagaaagaaaacaagaaagcaagaaagcacgaaagcaatcaagcaagaaagcaagcaggaaagaaacaaaagaaagaaagaaatcgagaaaacaagaaagcacgaaagcaagcaagcaagaaagcaagcaagaaagaaacaaaagaaagaaagaaagaaagaaaacaggaaagcaagaaagcacgaaagcaagcaagca

SEQ ID NO: 39570 - DNA, 1038 bp, Artificial sequence
  DNA replication origin
agccggatctgtctcgctgacgtccgcggcggttgtcgggctccatctggcggccgctttgagatcgtgctctcggcttccggagctgcggtggcagctgccgagggaggggaccgtccccgctgtgagctaggcagagctccggaaagcccgcggtcgtcagcccggctggcccggtggcgccagagctgtggcgcgtcgcttgtgagtcacagctctggcgtgcaggtttatgtgggggagaggctgtcgctgcgcttctgggcccgcggcgggcgtggggctgcccgggccggtcgaccagcgcgccgtagctcccgaggcccgagccgcgacccgcggggacccgccgcgcgtggcgcgggaggctggggacgcccttcccggcccggtcgcgggtccgcgctcatcctggccgtctgaggcggcggccgaattcgtttccgagtccccgtggggagccggggaccgtcccgcccccgtcccccgggtgccggggagcggtccctctgccgcgatcctttctggcgagtccccgtgcggagtcggagagcgctccctgagcgcgcgtgcggcccgagaggtcgcgcctggccggccttcggtccctcgtgtgtcccggtcgtaggaggggccggccgaaaatgcttccggctcccgctctggagacacgggccggccccctgcgtgtggcacgggcggccgggagggcgtccccggcccggcgctgctcccgcgtgtgtcctggggttgaccagagggccccgggcgctccgtgtgtggctgcgatggtggcgtttttggggacaggtgtccgtgtcgcgcgtcgcctgggccggcggcgtggtcggtgacgcgacctcccggccccgggggaggtatatctttcgctccgagtcggcattttgggccgccgggttattgctgacacgctgtcctctggcgacctgtcgctggagaggttgggcctccggatgcgcgcggggctctggcctaccggtgacccggctagccggccgcgctcctgcttgagccgcc

SEQ ID NO: 39571 - DNA, 764 bp, Artificial sequence
  DNA replication origin
cctggagcgctccgggttgtccctcaggtgcccgaggccgaacggtggtgtgtcgttcccgcccccggcgccccctcctccggtcgccgccgcggtgtccgcgcgtgggtcctgagggagctcgtcggtgtggggttcggggcggtttgagtgagacgagacgagacgcgcccctcccacgcggggaagggcgcccgcctgctctcggtgagcgcacgtcccgtgctcccctctggcgggtgcgcgcgggccgtgtgagcgatcgcggtgggttcgggccggtgtgacgcgtgcgccggccggccgccgaggggctgccgttctgcctccgaccggtcgtgtgtgggttgacttcggaggcgctctgcctcggaaggaaggaggtgggtggacgggggggcctggtggggttgcgcgcacgcgcgcaccggccgggcccccgccctgaacgcgaacgctcgaggtggccgcgcgcaggtgtttcctcgtaccgcagggccccctcccttccccaggcgtccctcggcgcctctgcgggcccgaggaggagcggctggcgggtggggggagtgtgacccaccctcggtgagaaaagccttctctagcgatctgagaggcgtgccttgggggtaccggatcccccgggccgccgcctctgtctctgcctccgttatggtagcgctgccgtagcgacccgctcgcagaggaccctcctccgcttccccctcgacggggttgggggggagaagcgagggttccgccgg

SEQ ID NO: 39572 - DNA, 2339 bp, Artificial sequence
  DNA replication origin
gccggcggggctcggagccgggcttcggccggccccgggccctcgaccggaccggtgcgcgggcgctgcggccgcacggcgcgactgtccccgggccgggcaccgcggtccgcctctcgctcgccgcccggacgtcggggcgccgcggggcggcggagcgccgtccccgcctcgcgcgcccgcgggcgccggggcgcgcgcgcgtggccgccggtccctcccggccgccgggcgcgggtcgggccgtccgcctcctcgcgggcgggccgacgaagaagcgtcgcgggtctgtggcgcggggccccggtggtcgtgtcgcgtggggggcgggtggttggggcgtccggttcccgcgccccgccccggccccaccggtcccggccgccgcccccgcgcccgctcgctccctcccgtccgcccgtccgcggcccgtccgtccgtccgtccgtcgtcctcctcgcttgcggggcgccgggcccgtcctcgcgaggccccccggccggccgtccggccgcgtcggggcctcgccgcgctctaccttacctacctggttgatcctgccagtagcatatgcttgtctcaaagattaagccatgcatgtctaagtacgcacggccggtacagtgaaactgcgaatggctcattaaatcagttatggttcctttggtcgctcgctcctctcctacttggataactgtggtaattctagagctaatacatgccgacgggcgctgacccccttcgcgggggggatgcgtgcatttatcagatcaaaaccaacccggtcagcccctctccggccccggccggggggcgggcgccggcggctttggtgactctagataacctcgggccgatcgcacgccccccgtggcggcgacgacccattcgaacgtctgccctatcaactttcgatggtagtcgccgtgcctaccatggtgaccacgggtgacggggaatcagggttcgattccggagagggagcctgagaaacggctaccacatccaaggaaggcagcaggcgcgcaaattacccactcccgacccggggaggtagtgacgaaaaataacaatacaggactctttcgaggccctgtaattggaatgagtccactttaaatcctttaacgaggatccattggagggcaagtctggtgccagcagccgcggtaattccagctccaatagcgtatattaaagttgctgcagttaaaaagctcgtagttggatcttgggagcgggcgggcggtccgccgcgaggcgagccaccgcccgtccccgccccttgcctctcggcgccccctcgatgctcttagctgagtgtcccgcggggcccgaagcgtttactttgaaaaaattagagtgttcaaagcaggcccgagccgcctggataccgcagctaggaataatggaataggaccgcggttctattttgttggttttcggaactgaggccatgattaagagggacggccgggggcattcgtattgcgccgctagaggtgaaattcttggaccggcgcaagacggaccagagcgaaagcatttgccaagaatgttttcattaatcaagaacgaaagtcggaggttcgaagacgatcagataccgtcgtagttccgaccataaacgatgccgaccggcgatgcggcggcgttattcccatgacccgccgggcagcttccgggaaaccaaagtctttgggttccggggggagtatggttgcaaagctgaaacttaaaggaattgacggaagggcaccaccaggagtggagcctgcggcttaatttgactcaacacgggaaacctcacccggcccggacacggacaggattgacagattgatagctctttctcgattccgtgggtggtggtgcatggccgttcttagttggtggagcgatttgtctggttaattccgataacgaacgagactctggcatgctaactagttacgcgacccccgagcggtcggcgtcccccaacttcttagagggacaagtggcgttcagccacccgagattgagcaataacaggtctgtgatgcccttagatgtccggggctgcacgcgcgctacactgactggctcagcgtgtgcctaccctacgccggcaggcgcgggtaacccgttgaaccccattcgtgatggggatcggggattgcaattattccccatgaacgaggaattcccagtaagtgcgggtcataagcttgcgttgattaagtccctgccctttgtacacaccgcccgtcgctactaccgattggatggtttagtgaggccctcggatcggccccgccggggtcggcccacggccctggcggagcgctgagaagacg

SEQ ID NO: 39573 - DNA, 596 bp, Artificial sequence
  DNA replication origin
ggcggcggcggcggcgcggccccggccggggagcggagtccgcggtggaggcgcgggaggggccgggcccctcccgacgggactcccccgcgggcccaccaccgcccccgacccacgggcggacgggcgatccccccaaggggtctttaaacctccgcgccggaacgcgctaggtacctggacggcgggggggcggacgaggaggcgggggaggggaccggcgtccggcccccgaccctcgagacgccctagcgggaaggccggggagagcgagcggggccgtgcccggcggcgcggagcggcgcggcggaggcgacgggaatccggccggccccgaagacggggagccggcgcggcggggccggacgacgggccccggcggggaggagggcaccgagacccccagacccgccgcgacgccgccgagaaccgcccccgcgcccgccgacacccacgccgtcggggccgctgccggggaccgctccccgccgcccgccggccccacgacacgcgcacaccaacgacacgcccttctttctctttctctctctctctctctctcccccgtctccctcccgagttctccggctctcgcg

SEQ ID NO: 39574 - DNA, 854 bp, Artificial sequence
  DNA replication origin
cgccgcgccggctccccgtcttcggggccggccggattcccgtcgcctccgccgcgccgctccgcgccgccgggcacggccccgctcgctctccccggccttcccgctagggcgtctcgagggtcgggggccggacgccggtcccctcccccgcctcctcgtccgcccccccgccgtccaggtacctagcgcgttccggcgcggaggtttaaagaccccttggggggatcgcccgtccgcccgtgggtcgggggcggtggtgggcccgcgggggagtcccgtcgggaggggcccggcccctcccgcgcctccaccgcggactccgctccccggccggggccgcgccgccgccgccgccgcggcggccgtcgggtgggggctttacccggcggccgtcgcgcgcctgccgcgcgtgtggcgtgcgccccgcgccgtgggggcgggaacccccgggcgcctgtggggtggtgtccgcgctcgcccccgcgtgggcggcgcgcgcctccccgtggtgtgaaaccttccgacccctctccggagtccggtcccgtttgctgtctcgtctggccggcctgaggcaaccccctctcctcttgggggggggcggggggacgtgccgcgccaggaagggcctcctcccggtgcgtcgtcgggagcgccctcgccaaatcgacctcgtacgactcttagcggtggatcactcggctcgtgcgtcgatgaagaacgcagctagctgcgagaattaatgtgaattgcaggacacattgatcatcgacacttcgaacgcacttgcggccccgggttcctcccggggctacgcctgtctgagcgtcgcttgccgatcaatcgccccc

SEQ ID NO: 39575 - DNA, 653 bp, Artificial sequence
  DNA replication origin
gccgagggcacccccgcgccgccccgccggagcgggacgaccggagggaggggcacgggccgggggcgggacgggcgccgcacgccccgacccgtctcccccgcggaggtcggggggacgggtccgaggacgcggcgccgccgccgccccgacgcggaagtcgggacggggccccggcgcggcgcggcgcggccgagccggaggcgggcgcgcgacggcggacgacaccgcggcgtcccgcgggtcgccgccggggacacgcgaaccccggcgccgcggccacgggcgcggccgggcgggccgcggggcgggctcccggccccggccgacgcgccgcgaggcgagccgggcgggcgggcgcgcgcgcgtacgcgcggggagggcgaggaggacgggcggggcctcggaggaggggcggcgggggaggaggaggggcgcgggagcggcggtcggccggacgccgggccgccaccgggggcgggcggcgaaccgcggcgaccgggacgcgctcccccgaccctctctccccgccggcacccttccccttccggacccgccttcctcctcccccaccaccacaccgcacgcaacacgcccccaccgccgacgacgcgcgacgacgacgacgacgggcacgggaccttccacccggc

SEQ ID NO: 39576 - DNA, 674 bp, Artificial sequence
  DNA replication origin
ccctccccgcgcgtacgcgcgcgcgcccgcccgcccggctcgcctcgcggcgcgtcggccggggccgggagcccgccccgcggcccgcccggccgcgcccgtggccgcggcgccggggttcgcgtgtccccggcggcgacccgcgggacgccgcggtgtcgtccgccgtcgcgcgcccgcctccggctcggccgcgccgcgccgcgccggggccccgtcccgacttccgcgtcggggcggcggcggcgccgcgtcctcggacccgtccccccgacctccgcgggggagacgggtcggggcgtgcggcgcccgtcccgcccccggcccgtgcccctccctccggtcgtcccgctccggcggggcggcgcgggggtgccctcggccgcggctctctctcccgtcgcctctccccctcgccgggcccgtctcccgacggagcgtcgggcgggcggtcgggccggcgcgattccgtccgtccgtccgccgagcggcccgtccccctccgagacgcgacctcagatcagacgtggcgacccgctgaatttaagcatattagtcagcggaggaaaagaaactaaccaggattccctcagtaacggcgagtgaacagggaagagcccagcgccgaatccccgccccgcggcggggcgcgggacatgtggcgtacggaagac

SEQ ID NO: 39577 - DNA, 721 bp, Artificial sequence
  DNA replication origin
gagagcgcggcgacgggtctcgctccctcggccccgggattcggcgagtgctgctgccgggggggctgtaacactcggggggggtttcggtcccgccgccgccgccgccgccgccaccgccgccgccgccccgacccgcgcgccctcccgagggaggacgcggggccggggggcggagacgggggaggaggaggacggacggacggacggacggggccccccgagccaccttccccgccgggccttcccagccgtcccggagccggtcgcggcgcaccgccgcggtggaaatgcgcccggcggcggccggtcgccggtcgggggacggtcccccgccgaccccacccccggccccgcccgcccacccccgcacccgccggagcccgccccctccggggaggaggaggaggggcggcgggggaagggagggcgggtggaggggtcgggaggaacggggggcgggaaagatccgccgggccgccgacacggccggacccgccgccgggttgaatcctccgggcggactgcgcggaccccacccgtttacctcttaacggtttcacgccctcttgaactctctcttcaaagttcttttcaactttcccttacggtacttgttgactatcggtctcgtgccggtatttagccttagatggagtttaccacccgctttgggctgcattcccaagcaacccgactccgggaagacccgggcccggcg

SEQ ID NO: 39578 - DNA, 1119 bp, Artificial sequence
  DNA replication origin
tctcccccctcccggcgcccacccccgcggggaatcccccgcgaggggggtctcccccgcgggggcgcgccggcgtctcctcgtgggggggccgggccacccctcccacggcgcgaccgctctcccacccctcctccccgcgcccccgccccggcgacggggggggtgccgcgcgcgggtcggggggcggggcggactgtccccagtgcgccccgggcgggtcgcgccgtcgggcccggggggaggttctctcggggccacgcgcgcgtcccccgaagagggggacggcggagcgagcgcacggggtcggcggcgacgtcggctacccacccgacccgtcttgaaacacggaccaaggagtctaacacgtgcgcgagtcgggggctcgcacgaaagccgccgtggcgcaatgaaggtgaaggccggcgcgctcgccggccgaggtgggatcccgaggcctctccagtccgccgagggcgcaccaccggcccgtctcgcccgccgcgccggggaggtggagcacgagcgcacgtgttaggacccgaaagatggtgaactatgcctgggcagggcgaagccagaggaaactctggtggaggtccgtagcggtcctgacgtgcaaatcggtcgtccgacctgggtataggggcgaaagactaatcgaaccatctagtagctggttccctccgaagtttccctcaggatagctggcgctctcgcagacccgacgcacccccgccacgcagttttatccggtaaagcgaatgattagaggtcttggggccgaaacgatctcaacctattctcaaactttaaatgggtaagaagcccggctcgctggcgtggagccgggcgtggaatgcgagtgcctagtgggccacttttggtaagcagaactggcgctgcgggatgaaccgaacgccgggttaaggcgcccgatgccgacgctcatcagaccccagaaaaggtgttggttgatatagacagcaggacggtggccatggaagtcggaatccgctaaggagtgtgtaacaactcacctgccgaatcaactagccctgaaaatggatggcgctggagcgtcgggcccatacccggccgtcgccggcagtcgagagt

SEQ ID NO: 39579 - DNA, 1115 bp, Artificial sequence
  DNA replication origin
  misc_feature (113)..(113): n is a, c, g, or t
ggtagggcggggggacgaaccgccccgccccgccgcccgccgaccgccgccgcccgaccgctccccgcccccagcggacgcgcgcgcgacgagacgtggggtggggggggggncgcgccggcgcccgccgggctccccgggggcggccgcgacgcccgccgcagctggggcgatccacgggaagggcccggctcgcgtccagagtcgccgccgccgccggccccccgggtgcccgggcccccctcgcgggggaccgtgcccccgccgccggggccccgcggcggccgccgccggcccctgccgccccgacccttctccccccgccgccgcccccacgcggcgctcccccggggaggggggaggacggggagcgggggagagagagagagagagggcgcggggtggggagggagcgagcggcgcgcgcggggtggggcgggggagggccgcgaggggggtgccccgggcgtggggggggcggcggcgcctcgtccagccgcggcgcgcgcccagccccgcttcgcgccccagcccgaccgacccagcccttagagccaatccttatcccgaagttacggatccggcttgccgacttcccttacctacattgttccaacatgccagaggctgttcaccttggagacctgctgcggatatgggtacggcccggcgcgagatttacaccctctcccccggattttcaagggccagcgagagctcaccggacgccgccggaaccgcgacgctttccaaggcacgggcccctctctcggggcgaacccattccagggcgccctgcccttcacaaagaaaagagaactctccccggggctcccgccggcttctccgggatcggtcgcgttaccgcactggacgcctcgcggcgcccatctccgccactccggattcggggatctgaacccgactccctttcgatcggccgagggcaacggaggccatcgcccgtcccttcagaacggcgctcgcccatctctcaggaccgactgacccatgttcaactgctgttcacatggaacccttctccacttcggccttcaaagttctcgtttgaatatttgctactaccaccaagatctgcacctgcggcggctcca

SEQ ID NO: 39580 - DNA, 890 bp, Artificial sequence
  DNA replication origin
  misc_feature (234)..(234): n is a, c, g, or t
ggagcgccgcgtgggggcggcggcggggggagaagggtcggggcggcaggggccggcggcggccgccgcggggccccggcggcgggggcacggtcccccgcgaggggggcccgggcacccggggggccggcggcggcggcgactctggacgcgagccgggcccttcccgtggatcgccccagctgcggcgggcgtcgcggccgcccccggggagcccggcgggcgccggcgcgnccccccccccaccccacgtctcgtcgcgcgcgcgtccgctgggggcggggagcggtcgggcggcggcggtcggcgggcggcggggcggggcggttcgtccccccgccctacccccccggccccgtccgccccccgttcccccctcctcctcggcgcgcggcggcggcggcgggcggcggaggggccgcgggccggtcccccccgccgggtccgcccccggggccgcggttccgcgcggcgcctcgcctcggccggcgcctagcagccgacttagaactggtgcggaccaggggaatccgactgtttaattaaaacaaagcatcgcgaaggcccgcggcgggtgttgacgcgatgtgatttctgcccagtgctctgaatgtcaaagtgaagaaattcaatgaagcgcgggtaaacggcgggagtaactatgactctcttaaggtagccaaatgcctcgtcatctaattagtgacgcgcatgaatggatgaacgagattcccactgtccctacctactatccagcgaaaccacagccaagggaacgggcttggcggaatcagcggggaaagaagaccctgttgagcttgactctagtctggcacggtgaagagacatgagaggtgtagaataagtgggaggcccccggcgcccccccg

SEQ ID NO: 39581 - DNA, 1080 bp, Artificial sequence
  DNA replication origin
gccgccccggcggtgaacggggaggaggcgggaaccgaagaagcggggcgcgccgaccggggtcgcgcgccctcccccccacccccaccaccacgcccgcggtcggcgggagaggccgggagggaggaagacgaacggaaggacggacggcgccggacgcgcacgccccgccgggccccccgcacgcacgcgcgcgcgcgcgcgcggacaaacccttgtgtcgagggctgactttcaatagatcgcagcgagggagctgctctgctacgtacgaaaccccgacccagaagcaggtcgtctacgaatggtttagcgccaggttccccacgaacgtgcggtgcgtgacgggcgagggggcggccgcctttccagccgcgccccgtttcccaggacgaagggcactccgcaccggaccccggtcccggcgcgcggcggggcacgcgccctcccgcgcgcgcggggcgcgtggaggggggggcggcccgccggcggggacaggcgggggaccggctatccgaggccaaccgaggctccgcggcgctgccgtatcgttccgcctgggcgggattctgacttagaggcgttcagtcataatcccacagatggtagcttcgccccattggctcctcagccaagcacatacaccaaatgtctgaacctgcggttcctctcgtactgagcaggattaccatggcaacaacacatcatcagtagggtaaaactaacctgtctcacgacggtctaaacccagctcacgttccctattagtgggtgaacaatccaacgcttggtgaattctgcttcacaatgataggaagagccgacatcgaaggatcaaaaagcgacgtcgctatgaacgcttggccgccacaagccagttatccctgtggtaacttttctgacacctcctgcttaaaacccaaaaggtcagaaggatcgtgaggccccgctttcacggtctgtattcgtactgaaaatcaagatcaagcgagcttttgcccttctgctccacgggaggtttctgtcctccctgagctcgccttaggacacctgcgttaccgtttgacaggtgtaccgccc

SEQ ID NO: 39582 - DNA, 1818 bp, Artificial sequence
  DNA replication origin
acctctcctatggaaaatgccagggcggcggtgggagcctcggctgggggagaagcggggacaagggggagagggaaggaggccctcgggaggtttcggcaccgaaaacccactcagccaagctccctccgtgtttccgggtccaaggtacaccccgggagacggcaagagaaacgttcacaccgtgctttccgtcttcgtgtttatttctttcatcttttccattttacgagagatgctcatttcaacaaccagacggcggatgtgacgggagaagcgtcaaggccaggagtttgagaccagcgtgagcaacagagcaacacacgtaggagagcccagctgaaagaaatgaaagaggaggaggaggaggaggaggaggaggaggaggaggaggaggaggaggacgacgacaagggggggtggggggggaggagaaggaaagaaaagaaaagaaaaaaaagaaaaaggaaaacaaccaccaccaagaaagttaagattctccaacggtcggaagttgaagaccagcctgaccaagatggagaaaccccatctgtagtaaaaatagaaaaattagccgggcacgatggctcatctctgtcattccagctactcgggaaggctgaggcaggagaatcacttgaacctgggaggcggagggtgcggtgagccgagagccgccatcgtactccaccctgggcgacaagagtgaaactccgtctaaagagaataaaaagaaagaacgaaaaggcggatcggtgagatgcgtctggaaattttcttcgttcgcagtccccgtattaaaaacggaaagaaccgacccacgacaaacacgaccagagcgtaccgtgcccacgcgtgtcatcacagcactccgggaggccgatgcgggaggatctctggagcctaaaagttcgagatcacctcgacacgtgagatgacgcctacaataataataatcatagaagtttgaaaagagaccacgtgtgcccagagcatggacaataaagcgagagcacatccgtactaaaaagaagacgattgataggcaggcaggcaggcaggcaggcaggcaggcaggcaggcaggcaggcaggcaggcaaatgtagaaggagccaggcgcagcgtctcacgcctgtaatagcagcagtgtgggcggccgaggcaggcaggcggattgcttgaggacaggagttcgagaccagcgtgggcaacatgatagaaccccgaaacccatctcactcacatacatacatacatacgtacatacatagatacacacacacacacacacacacacacacacacacacacacacacacacacacacacctacctacggaaaacatgagaaacaacataaaagtcagccggtgtggtggtgcgcgcctgtagtctcaggtaatggggatgggagggatcagaggcagaacgaccgtttggtcggtccaaagcgttgaggttggggtgatcctgggcggcagagacagaggaagaccctgccagtaagggagggaaggaaggaaggaaggagggaaggaaggaaggaaggaaggaaggaaggaaggaaggaaataaacaggcaagcaggcaagcaaacgatgaacgtgacaatgacacagaagaacccatgagaataaacgagcaaataacagggtatgaatgaagctaaaaggcaattgagatcgcaatcaatcgttttctctgcaccccaccccaccgcagcccacgtaagctggagtggaagtgtgcgatcacagcccacgttaacctctccctcccgggcttaagagatccctgtagtcccagctatttgggag

SEQ ID NO: 39583 - DNA, 909 bp, Artificial sequence
  DNA replication origin
accacgaggacccggaaatagtgtttgatctgtgtccctgcctagtcacctgtcttgtgtgtcgatgactgaggattccacaaatgaaggtcagcggtatctattgagctgtttctccctctcgtgcgtctcatctgtgtgctggagaaagggaagagaagaggttccgatgggaagttgtcttcacgcctgaggcagctgaaggcagaccgaagggaaggagggcatcctaggtgacatttccatacccacgcaccctttacaatgctggggctgccagtccaccctgtacgtcaacccacccccaagaacagcacggtccggggtggtccagtctgatcccaaccggcccacccggggcatccggtggaagtcttcgccggaggatccgaaggcagcatcaacgcggttcccctggggtcgcccggcaaaggccagccgggggagggtagcgggacgtgacgggggggtgggggtcgcatccgcctcagagctccctggaaggtggcaggtagccggtggggcacgccgagccagagacgtccggcaggatatagatctggaaggcgtgtcagtcctctcccatacctctcctatggaaaatgccagggcggcggtgggagcctcggctgggggagaagcggggacaagggggagagggaaggaggccctcgggaggtttcggcaccgaaaacccactcagccaagctccctccgtgtttccgggtccaaggtacaccccgggagacggcaagagaaacgttcacaccgtgctttccgtcttcgtgtttatttctttcatcttttccattttacgagagatgctcatttcaacaaccagacggcggatgtgacgggagaagcgtcaaggccaggagtttgagaccagcgtgagcaacagagcaacac

SEQ ID NO: 39584 - DNA, 995 bp, Artificial sequence
  DNA replication origin
gcaaacggggaaggggcatatctccttgaccggtgactgcccaggatacagtgggtcacggccgaccgaagcctcgacctgtggggcctcaagtgatcttctcctcgtctcagcctcccgagtagccgcgactacaggcggccatcaccgcgcacaactcatcttataataacatcatgattctctcgacacggggtctcgctccgtcatccaggccgcatcgccacggcacgatctcagctcatcgcaacctcggcctccccggttggaacaagtcgcccgccccagtctcccgagcggtcgtgattccaagcccacgccaccaggcccggctaatcgttctatttttcagagagacggggtttcgccacgtcggccagcctggtctcgaactcccggccccaagcgatccacccgcctcggcctcccaaagtgccggagtgacaggcgtgagctagcgtgcccggcccagatcatctttttcatcaattgtagagaaggggtttcgtcagccaacgggtggagggtggggcgggttttactcagcctgcgtactgtgaaaaggggaagtgagtgtgctctgtgaactagatatggaaattgtgtgtgtgtgtgcgcgcgtgcgcgtgcgagagagagagagagagagagagagagagagagagagagagagaccaatcccaccacgaggacccggaaatagtgtttgatctgtgtccctgcctagtcacctgtcttgtgtgtcgatgactgaggattccacaaatgaaggtcagcggtatctattgagctgtttctccctctcgtgcgtctcatctgtgtgctggagaaagggaagagaagaggttccgatgggaagttgtcttcacgcctgaggcagctgaaggcagaccgaagggaaggagggcatcctaggtgacatttccatacccacgcaccctttacaatgctggggctgccagtccaccctgtacgtcaacccacccccaagaaca

SEQ ID NO: 39585 - DNA, 711 bp, Artificial sequence
  DNA replication origin
tgcagtctaggccacgagagtgaaactctgtctcgggggaaaaaaaaacaattaaaaacggtgtgggcacagtggcgcgtgcccgcggtcccaggctctgtactctggaggctgaggtggaaggatcgctcgagtccaggagcgtccacgctgcagggagtgagttacgacggcaccactgccggggtgacggagcgagatgccgtctctaaatcagtcaatgagatcactggaaggcgctctctgcgtctcactttccaagagggtctctttgggccaagcaggcatggtgcctcccgccagtcatcccagcactttgggaggctgaggcgggaggaaagaaggaagggaggaagggaggaaagaagaaaagaagaaaggcaggaaggcaggaaagaaagaggggaagagagaaaaagaaaaagaaagaaagaaagaaagaaagaaagaaagaaagaaagaaaagagaagcaaaaagaagaaaagagaagggaagaaaagaaaagcaaacggggaaggggcatatctccttgaccggtgactgcccaggatacagtgggtcacggccgaccgaagcctcgacctgtggggcctcaagtgatcttctcctcgtctcagcctcccgagtagccgcgactacaggcggccatcaccgcgcacaactcatcttataataacatcatgattctctcgacacggggtctcgctccg

SEQ ID NO: 39586 - DNA, 639 bp, Artificial sequence
  DNA replication origin
aggcgcagtggctcacgcccgtcacgccagcactttgagacgccgggcaggagggttgcaaagaaatgatgagaccccgtctgtgggaaaacatttaaaaatgaaggccgggcgcggtggctcacgcctgtcatcccagcacttccggaggccggggagggcggatcacctgaggtcgggagttcgaaaccagcccgatcgacatggagaagccccgtctccactaaaaatacgaaatcagccagacgtggcagcgcatgcccgcaatcccggctactcaggaggccgatgcaggagaatcgcttgaaaccgggaggcagaggttgcggtgagccaagatcgcgccaccgcactgcagtctaggccacgagagtgaaactctgtctcgggggaaaaaaaaacaattaaaaacggtgtgggcacagtggcgcgtgcccgcggtcccaggctctgtactctggaggctgaggtggaaggatcgctcgagtccaggagcgtccacgctgcagggagtgagttacgacggcaccactgccggggtgacggagcgagatgccgtctctaaatcagtcaatgagatcactggaaggcgctctctgcgtctcactttccaagagggtctctttgggccaagcaggc

SEQ ID NO: 39587 - DNA, 3796 bp, Artificial sequence
  DNA replication origin
ctctacacgtcacctctaagtgtgtgttcccgtgaggagtgatttctaagaaatggcactgtacactgaacgcagtggctcacgtctgtcatcccgaggtcaggagttcgagaccagcccggccaacgtggtgaaacccccgtctctactgaaaatacgaaatggagtcaggcgccgtggggcaggcacctgtaaccccagctactcgggaggctggggtggaagaattgcttgaacctggcaggcggaggctgcagtgacccaagatcgcaccactgcactacagcctgggcgacagagtgagacccggtctccagataaatacgtacataaataaatacacacatacatacatacatacatacatacatacatacatacatacatccatgcatacagatatacaagaaagaaaaaaagaaaagaaaagaaagagaaaatgaaagaaaaggcactgtattgctactgggctagggccttctctctgtctgtttctctctgttcgtctctgtctttctctctgtgtctctttctctgtctgtctgtctctttctttctctctgtctctgtctctgtctttgtctctctctctccctctctgcctgtctcactgtgtctgtcttctgtcttactctctttctctccccgtctgtctctctctctctctctccctccctgtttgtttctctctctccctccctgtctgtttctctctctctctttctgtctgtttctgtctctctctgtctgtctatgtctttctctgtctgtctctttctctgtctgtctgcctctctctttctttttctgtgtctctctgtcggtctctctctctctgtctgtctgtctgtctctctctctctctctctgtgcctatcttctgtcttactctctttctctgcctgtctgtctgtctctccctccctttctgtttctctctctctctctctctctctccccctctccctgtctgtttctctccgtctctctctctttctgtctgtttctcactgtctctctctgtccatctctctctctctctgtctgtctctttcgttctctctgtctgtctgtctctctctctctctctctctctctctctctctctctctctgtctctcactctctgtgtgtatcttctgtcttactctccttctctgcctgtccgtctgtctgtctgtctgtctgtctctctctccctttctgtctctctctctctctgtccctctctctttctgtctgttcctctctctctctctgtctctgtctttctctgtctgtctgcctctctctttctttctctttctgtgtctctctgtctctctctctgtgcctatcttctgtcttactctctttctctgcctgcctgcctgtctgtctgtctgtctctctctgtctctctccctgcctttctgtttctctctctctctccctctctctctccctctctcgctctctctgtctttctctctttctctctgtttctctgtctctctctgtccgtctctgtctttttctgtctgtctctctctttctttctgtctgtctctgtctctgtctctctctctctctctgcttgtctctctcactgtgtctgtcctctgtcttactctccttctctgcctgtccgtctgtctgtctgtctctctctctctccctccctttctgtttctctctcgctctctctctctctctctctctctctctctgcctgtttctctttctctctctgtctgtctctgtctttctctgtctgtctctttctctgtctgtctgtctccttctctctgtctccgtctctgtctctctctctctgtctctctctctctgcctgtctcactgtgtctgtcttctgtcttattctctttctctgtctgtctgtctctctctctcccttcctgtctctttctctctctctctctctttctgtctgtttctctctgcctgtctccgtctttctctgtctgcctctctctttctttttctgcgtctctctgtctctctctctctgtgcctatcttctgtcttactctgtttctctgcctgcctgtctgtctgtctgtctctctctctctctgtctctctctctttctgtctgtttctctctgtctctctgtccatctctgtctttctctgtccgtctctctctttctccctgtctctgtctctgcctctgcctctctctctctctgtctctctctttctatctgtttctctctgtctctctgtccatctctgtctttctctgtctgtctctctctttctccctgtctctgtctctgcctctctctctctctctctgtctgtctctctcactgtgtgtgtgtctctgtctctgcctctctctctctctctctctctgtctgtctctctcactgtgtgtgtctgtcttctgtcttactctccttctctgcctgtccgtctgtctgtctgtctctccctctctctccctccctttctgtttctctctctctctctctctctttctgtctgtttctctctttctctctctgtctgtctctttctctgtctgtctgtctctctctttctttttctctgtctctctgtctctctctgtgcctgtctctctgtctgtgcctatcttctgtcttactctctttctctggctgactgcctgtctctctctctctctctctctctctctctctctgcctgtctccgtccctccctccctgtctgtctgtttctctctctgtccatttctgtctgtctctttctctttctctctctttctttctctctgtctctctctgtctctctctgtctctctctctctctctctctctctctctctctctctctctctgcctttctctctcactgtgtcggtcttctgtcttactctctttctctgcctgcctctctgtctgtctgtctgtctctctccctccatgtctctctctctctctctctcactcactgtctctccgtctctctctctttctgtctgtttctctctgtctctgtctttctgtgtgtctgtctgtctctctctctatttgtctttctccctccctgtctgtttctctctctctctctctctctctctctctctctctctctgtctgtctgtttctctctatctctcgctgtccatctctgtctttctatgtctgtctctttctctgtcagtctgtcagacacccccgtgccgggtagggccctgccccttccacgaaagtgagaagcgcgtgcttcggtgcttagagaggccgagaggaatctagacaggcgggccttgctgggcttccccactcggtgtacgatttcgggaggtcgaggccgggtccccgcttggatgcgaggggcattttcagacttttctctcggtcacgtgtggcgtccgtacttctcctatttccccgataagctcctcgacttcaacataaacggcgtcctaagggtcgatttagtgtcatgcctctttcaccgccaccaccgaagatgaaagcaaagatcggctaaataccgcgtgttctcatctagaagtgggaacttacagatgacagttcttgcatgggcagaacgagggggaccggggacgcggaagcctgcttgagggaggaggggtggaaggagagacagcttcaggaagaaaacaaaacacgaatactgtcggacacagcactgactacccgggtgatgaaatcatctgcacactgaacacccccgtcacaagtttacctatgtcacagtcttgctcatgtatgcttgaacgacaaataaaagttcgggggggagaagagaggagagagagagagagacggggagagag

SEQ ID NO: 39588 - DNA, 2198 bp, Artificial sequence
  DNA replication origin
gggcgtggggcgtgggtggggtggccagagccttgggaactcgtcgcctgtcgggacgtctcccctcctggtcccctctctgacctacgctccacatcttcgccgttcagtggggaccttgtgggtggaagtcaccatccctttggactttagccgacgaaggccgggctcccaagagtctccccggaggcggggccttgggcaggctcacaaggatgctgacggtgacggttggtgacggtgatgtacttcggaggcctcgggccaatgcagaggtatccatttgacctcggtgggacaggtcagctttgcggagtcccgtgcgtccttccagagactcatccagcgctagcaagcatggtcccgaggatcccagctcccagcagaggcacttttggtcacacaggatcctgggcaggaaagttctcagcaggcttaggcctcctagccaaaaagccaaaaccacttctgggatttttttcaaagagccagtggttccacaaggggccgtgggtagttgtggaaatggagagaagtgtttgcacgtacatatttgagacaggacggacagggctcggtcacagatcacttaggacacgggcagatgcacattgagaaaactcttccggcatcctaggggaacagaggtacgatttttcgagacagtcgagggagaagccaccccagattttaggattggatctttattcatatgtagtttctatgaggtatccaagtccagaaatcaactcgccagttctgtacagcattctgtagggagatcaaatctgggatgtcagaagtgaagaattcaggccttggtaagggattagattagatgtacttgagcttcttttgcaaaaaaagagagggcgggggatagcgagagccagagaccgagacagacagacggacagacagacagagagagagagagagagagagagacagagagacagagacagagacagacagagagagacaacgatacacagagagagaaagacagaaagagagagagagacagataaagagacagacggagagagacagataaagagacagacggagaaagacagagatggacagagacagagagaaacagaaagagagagaaacagacaggaagggagagagacaggcagagagagagagtaagacagaagacagagtgagagagacaggcagagagagacagagagaaggaaagagagagacagtcagagaaagacagagacggagagagagaaacagaaagagagagagagacagagacagagagaaacatacagacagggagagagagagagagagaccgacagacagacagagaaagggagtaagacagaagacagacacagtgagagagacaggcagagagagagagagagagagaggcagagagagagaaacagacaggcagagagagagagacacagagagagagagagagagaagacagacagagaaagagagagacagagacagacagagagacagagagagggggaggaagggcgtgctcaagaaataatcacacatattttataatgcttttgatcccataaacggtggccggggtatactttgaaaacaacgacaacgacaacaacaacgacaacgacaacagcaacgacgacaacaacaacaacaacaacagcaacaagagcagcagcagcattcgcctacggatttctagaaaataagatgtcatgatgaaggatagtaaacatcaaccggctctcactgcacgttgagagagtcacaaaagcgctagttcacaacaggaaaaaacggcagctaacgtgtcttggggaaaatagacgtcttcctgaaaactggggatttctacttcacctgaaaagaaagacatacgagaaaggaaaaacacgaacaaaacaaaacagaacgaaacaaaacaagccaacaaacacgggccaaggcgccgtccctggaaatcttaagtgagcaaagttattagttttcagaaagcgtttctattttgggcaagtactgagaaggcccagactagagccgtggcgcccttcgcattgtgaaactctgctggccggagggcggagaaactaaaacatcgtgataaaaggtgaccgagacccagccagggtgaagctttcctagggagggaggcctgaggcgggaagcagcggggggaaaagcctcacaactgcagacccgcc

SEQ ID NO: 39589 - DNA, 717 bp, Artificial sequence
  DNA replication origin
aagcggtgatggcctaaggaagcccctccgcccaagaagcgatattcatttctagcctgtagccacccaagagggagaatcgggctcgccacagaccccacaacccccaacccaccccacccccacccctcccacctcgtgaaatgggctctcgctccgtcaggctctagtcacaccgtgtggttttggaacctccagcgtgtgtgcgtgggttgcgtggtggggtggggccggctgtggacagaggaggggataaagcggcggtgtcccgcgggtgcccgggacgtggggcgtggggcgtgggtggggtggccagagccttgggaactcgtcgcctgtcgggacgtctcccctcctggtcccctctctgacctacgctccacatcttcgccgttcagtggggaccttgtgggtggaagtcaccatccctttggactttagccgacgaaggccgggctcccaagagtctccccggaggcggggccttgggcaggctcacaaggatgctgacggtgacggttggtgacggtgatgtacttcggaggcctcgggccaatgcagaggtatccatttgacctcggtgggacaggtcagctttgcggagtcccgtgcgtccttccagagactcatccagcgctagcaagcatggtcccgaggatcccagctcccagcagaggcacttttggtcacacaggatcctgggcaggaaagttctca

SEQ ID NO: 39590 - DNA, 727 bp, Artificial sequence
  DNA replication origin
ccccgtgtctaccaaaaaaaaaaaaaaaaaaaaaaaaaaaaaaaaaaaaaaaaaaatgagccggccatggtggcgctgagacaggagaatcacttgaacccaggaggcagaggttccagtgagctgagatcacgccactgcactccagcctgggggacagagcaagactccatctcagaaacaaacaaacacacaaagccagtcaaggtgtttaattcgacggtgtcaggctcaggtctcttgacaggatacatccagcacccgggggaaacgtcgatgggtggggtggaatctattttgtggcctcaagggagggtttgagaggtagtcccgcaagcggtgatggcctaaggaagcccctccgcccaagaagcgatattcatttctagcctgtagccacccaagagggagaatcgggctcgccacagaccccacaacccccaacccaccccacccccacccctcccacctcgtgaaatgggctctcgctccgtcaggctctagtcacaccgtgtggttttggaacctccagcgtgtgtgcgtgggttgcgtggtggggtggggccggctgtggacagaggaggggataaagcggcggtgtcccgcgggtgcccgggacgtggggcgtggggcgtgggtggggtggccagagccttgggaactcgtcgcctgtcgggacgtctcccctcctggtcccctctctgacctacgctccacatcttcgccg

SEQ ID NO: 39591 - DNA, 956 bp, Artificial sequence
  DNA replication origin
aaatggatacctctgcattggcccgaggcctccgaagtacatcaccgtcaccaaccgtcaccgtcagcatccttgtgagcctgcccaaggccccgcctccggggagactcttgggagcccggccttcgtcggctaaagtccaaagggatggtgacttccacccacaaggtccccactgaacggcgaagatgtggagcgtaggtcagagaggggaccaggaggggagacgtcccgacaggcgacgagttcccaaggctctggccaccccacccacgccccacgccccacgtcccgggcacccgcgggacaccgccgctttatcccctcctctgtccacagccggccccaccccaccacgcaacccacgcacacacgctggaggttccaaaaccacacggtgtgactagagcctgacggagcgagagcccatttcacgaggtgggaggggtgggggtggggtgggttgggggttgtggggtctgtggcgagcccgattctccctcttgggtggctacaggctagaaatgaatatcgcttcttgggcggaggggcttccttaggccatcaccgcttgcgggactacctctcaaaccctcccttgaggccacaaaatagattccaccccacccatcgacgtttcccccgggtgctggatgtatcctgtcaagagacctgagcctgacaccgtcgaattaaacaccttgactggctttgtgtgtttgtttgtttctgagatggagtcttgctctgtcccccaggctggagtgcagtggcgtgatctcagctcactggaacctctgcctcctgggttcaagtgattctcctgtctcagcgccaccatggccggctcatttttttttttttttttttttttttttttttttttttttttttggtagacacggggtttcaccctctttcattggttttcactggagattctagattcgagccac

SEQ ID NO: 39592 - DNA, 2016 bp, Artificial sequence
  DNA replication origin
gccgggccggggacgccctcccggccgcccgtgccacacgcagggggccggcccgtgtctccagagcgggagccggaagcattttcggccggcccctcctacgaccgggacacacgagggaccgaaggccggccaggcgcgacctctcgggccgcacgcgcgctcagggagcgctctccgactccgcacggggactcgccagaaaggatcgcggcagagggaccgcggcccggcccggggaccgctccccggcacccgggggacgggggcgggacggtccccggctccccacggggactcggaaacgaattcggccgccgcctcagacggccaggatgagcgcggacccgcgaccgggccgggaagggcgtccccagcctcccgcgccacgcgcggcgggtccccgcgggtcgcggctcgggcctcgggagctacggcgcgctggtcgaccggcccgggcagccccacgcccgccgcgggcccagaagcgcagcgacagcctctcccccacataaacctgcacgccagagctgtgactcacaagcgacgcgccacagctctggcgccaccgggccagccgggctgacgaccggggctttccggagctctgcctagctcacagcggggacggtcccctccctcggcagctgccaccgcagctccggaagccgagagcacgatctcaaagcggccgccagatggagcccgacaaccgccgcggacgtcagcgagacagatccggctggcagggcggcccgtggaccgcgaaagcgaaaccgtgagtcgagaagctcttcccgaggccgaaaacgcagcccctctgccccaaccccacacaaacggtgcccaaaacgcgtctctgcctcgaccgcgacagagtcagaagacaacccacggcgcgtgggtgtttggagatgcctctcggaagcagggagggagggagggagggagggagggagggagaaagaacacacaaggactcggtcgcgggtcgctgcagacacacggagaggcagaatgcgtaggctcttccggaatccacgcagagacagacggggggaggggagtggggaaaagagacagatggcgaaagggaaggagggagggaagggagcagggagggagggagggagggagggaggaagacaatggagaaaagagagacaatttagaaaacgtagatacacaaagtaaacttctgaaacactccattttttaaaagacagacgggaaggaaagaaacacgaaaaagagagaaagaatgaggaaagaaacgaaggaaagaagggaaaaagaaacagagaggaaagaaaaaagaaggaaacacagggaacgaaagagaaataaagcacgaaggaaaaaaggacagaaagagagaaagaaggaaaggaagagaggaagaaaaacctaaagaaggagagaaaggaagaaaggaaggaagaaaaacacgaaggagaggaagaaagaaaacagagataactacgtacgctcgttcatttacacacataaatacgacgcttttcatacgtaaaataaacgtctttatcgacgatcccttctttatagagcgatgtgtatttatttgtataacacagacacctacatctatcatacagaagtctatttccatacaaccgatacgtatttaccatacgcaagagtattcaatgcagagatacacgttgtcgttgtttgcatataagcgtacagaaacgtttacattaatacatataagtaaacgcgtggaaacgaaagaaataaaaaagcgaaatgagtcaacaggccgggcacggtggctcacgcccgtcatcccagcacttcgagaggccgaggtgggcgcatcacaggaggtcgggagttggagaccagcctgagcaacatggagagacacggcgtgcctactaaaaacacaaacatcagccaagccaggcgtgggggtgcctccctgtaatccccgctaatcgggaggctgaggcaggagaagcgctcgaacccgggaggcggaaggtgcggtga

SEQ ID NO: 39593 - DNA, 967 bp, Artificial sequence
  DNA replication origin
gctgcggtggcagctgccgagggaggggaccgtccccgctgtgagctaggcagagctccggaaagccccggtcgtcagcccggctggcccggtggcgccagagctgtggcgcgtcgcttgtgagtcacagctctggcgtgcaggtttatgtgggggagaggctgtcgctgcgcttctgggcccgcggcgggcgtggggctgcccgggccggtcgaccagcgcgccgtagctcccgaggcccgagccgcgacccgcggggacccgccgcgcgtggcgcgggaggctggggacgcccttcccggcccggtcgcgggtccgcgctcatcctggccgtctgaggcggcggccgaattcgtttccgagtccccgtggggagccggggaccgtcccgcccccgtcccccgggtgccggggagcggtccccgggccgggccgcggtccctctgccgcgatcctttctggcgagtccccgtgcggagtcggagagcgctccctgagcgcgcgtgcggcccgagaggtcgcgcctggccggccttcggtccctcgtgtgtcccggtcgtaggaggggccggccgaaaatgcttccggctcccgctctggagacacgggccggccccctgcgtgtggcacgggcggccgggagggcgtccccggcccggcgctgctcccgcgtgtgtcctggggttgaccagagggccccgggcgctccgtgtgtggctgcgatggtggcgtttttggggacaggtgtccgtgtcgcgcgtcgcctgggccggcggcgtggtcggtgacgcgacctcccggccccgggggaggtatatctttcgctccgagtcggcattttgggccgccgggttattgctgacacgctgtcctctggcgacctgtcgctggagaggttgggcctccggatgcgcgcggggctctggcctaccggtgacccggctagccggccgcgctcctgcttgag

SEQ ID NO: 39594 - DNA, 751 bp, Artificial sequence
  DNA replication origin
cgggttgtccctcaggtgcccgaggccgaacggtggtgtgtcgttcccgcccccggcgccccctcctccggtcgccgccgcggtgtccgcgcgtgggtcctgagggagctcgtcggtgtggggttcggggcggtttgagtgagacgagacgagacgcgcccctcccacgcggggaagggcgcccgcctgctctcggtgagcgcacgtcccgtgctcccctctggcgggtgcgcgcgggccgtgtgagcgatcgcggtgggttcgggccggtgtgacgcgtgcgccggccggccgccgaggggctgccgttctgcctccgaccggtcgtgtgtgggttgacttcggaggcgctctgcctcggaaggaaggaggtgggtggacgggggggcctggtggggttgcgcgcacgcgcgcaccggccgggcccccgccctgaacgcgaacgctcgaggtggccgcgcgcaggtgtttcctcgtaccgcagggccccctcccttccccaggcgtccctcggcgcctctgcgggcccgaggaggagcggctggcgggtggggggagtgtgacccaccctcggtgagaaaagccttctctagcgatctgagaggcgtgccttgggggtaccggatcccccgggccgccgcctctgtctctgcctccgttatggtagcgctgccgtagcgacccgctcgcagaggaccctcctccgcttccccctcgacggggttgggggggagaagcgagggttccgccg

SEQ ID NO: 39595 - DNA, 2297 bp, Artificial sequence
  DNA replication origin
gccgggcttcggccgggccccgggccctcgaccggaccggtgcgcgggcgctgcggccgcacggcgcgactgtccccgggccgggcaccgcggtccgcctctcgctcgccgcccggacgtcggggccgccccgcggggcgggcggagcgccgtccccgcctcgccgccgcccgcgggcgccggccgcgcgcgcgcgcgcgtggccgccggtccctcccggccgccgggcgcgggtcgggccgtccgcctcctcgcgggcgggcgcgacgaagaagcgtcgcgggtctgtggcgcggggccccggtggtcgtgtcgcgtggggggcgggtggttggggcgtccggttcgccgcgccccgccccggccccaccggtcccggccgccgcccccgcgcccgctcgctccctcccgtccgcccgtccgcggcccgtccgtccgtccgtcgtcctcctcgcttgcggggcgccgggcccgtcctcgcgaggccccccggccggccgtccggccgcgtcggggcctcgccgcgctctaccttacctacctggttgatcctgccagtagcatatgcttgtctcaaagattaagccatgcatgtctgagtacgcacggccggtacagtgaactgcgaatggctcattaaatcagttatggttcctttggtcgctcgctcctctcctacttggataactgtggtaattctagagctaatacatgccgacgggcgctgacccccttcgcgggggggatgcgtgcatttatcagatcaaaaccaacccggtcagcccctctccggccccggccggggggcgggcgccggcggctttggtgactctagataacctcgggccgatcgcacgccccccgtggcggcgacgacccattcgaacgtctgccctatcaactttcgatggtagtcgccgtgcctaccatggtgaccacgggtgacggggaatcagggttcgattccggagagggagcctgagaaacggctaccacatccaaggaaggcagcagccgaaaagattacccactcccgacccggggaggtagtgacgaaaaataacaatacaggactctttcaggccctgtattggaatgagtccactttaaatcctttaacgaggatccattggagggcaagtctggtgccagcagccgcggtaattccagctccaatagcgtatattaaagttgctgcagttaaaaagctcgtagttggatcttgggagcgggcgggcggtccgccgcgaggcgagccaccgcccgtccccgccccttgcctctcggcgccccctcgatgctcttagctgagtgtcccgcggggcccgaagcgtttactttgaaaaaattagagtgttcaaagcaggcccgagccgcctggataccgcagctaggaataatggaataggaccgcggttctattttgttggttttcggaactgaggccatgattaagagggacggccgggggcattcgtattgcgccgctagaggtgaaattcttggaccggcgcaagacggaccagagcgaaagcatttgccaagaatgttttcattaatcaagaacgaaagtcggaggttcgaagacgatcagataccgtcgtagttccgaccataaacgatgccgaccggcgatgcggcggcgttattcccatgacccgccgggcagcttccgggaaaccaaagtctttgggttccggggggagtatggttgcaaagctgaaacttaaaggaattgacggaagggcaccaccaggagtggagcctgcggcttaatttgactcaacacgggaaacctcacccggcccggacacggacaggattgacagattgatagctctttctcgattccgtgggtggtggtgcatggccgttcttagttggtggagcgatttgtctggttaattccgataacgaacgagactctggcatgctaactagttacgcgacccccgagcggtcggcgtccccccaacttcttagagggacaagtggcgttcagccacccgagattgagcaataacaggtctgtgatgcccttagatgtccggggctgcacgcgcgctacactgactggctcagcgtgtgcctaccctacgccggcggtgggggtaacccgttgaaccccattcgtgatggggatcggggattgcaattattccccatgaacgaggaattcccagtaagtgcgggtcataagcttgcgttgattaagtccctgccctttgtacacaccgcccgtcgctactaccgattggatggtttagtgaggccctcggatcggccccgccgggtcg

SEQ ID NO: 39596 - DNA, 593 bp, Artificial sequence
  DNA replication origin
gcggcggcggcggcgcggccccggccggggagcggagtccgcggtggaggcgcgggaggggccgggcccctcccgacgggactcccccgcgggcccaccaccgcccccgacccacgggcggacgggcgatccccccaaggggtctttaaacctccgcgccggaacgcgctaggtacctggacggcgggggggcggacgaggaggcgggggaggggaccggcgtccggcccccgaccctcgagacgccctagcgggaaggccggggagagcgagcggggccgtgcccggcggcgcggagcggcgcggcggaggcgacgggaatccggccggccccgaagacggggagccggcgcggcggggccggacgacgggccccggcggggaggagggcaccgagacccccccagacccgccgcgacgccgccgagaaccgcccccgcgcccgccgacacccacgtcgtcggggccgcggccggggaccgctccccgccgcccgccggccccacgacacgcgcacaccaacgacacgcccttctttctctttctctctctctctctctctcccccgtctccctcccgagttctccggctct

SEQ ID NO: 39597 - DNA, 869 bp, Artificial sequence
  DNA replication origin
cccgccgcgccggctccccgtcttcggggccggccggattcccgtcgcctccgccgcgccgctccgcgccgccgggcacggccccgctcgctctccccggccttcccgctagggcgtctcgagggtcgggggccggacgccggtcccctcccccgcctcctcgtccgcccccccgccgtccaggtacctagcgcgttccggcgcggaggtttaaagaccccttggggggatcgcccgtccgcccgtgggtcgggggcggtggtgggcccgcgggggagtcccgtcgggaggggcccggcccctcccgcgcctccaccgcggactccgctccccggccggggccgcgccgccgccgccgccgcggcggccgtcgggtgggggctttacccggcggccgtcgcgcgcctgccgcgcgtgtggcgtgcgccccgcgccgtgggggcgggaacccccgggcgcctgtggggtggtgtccgcgctcgcccccgcgtgggcggcgcgcgcctccccgtggtgtgaaaccttccgacccctctccggagtccggtcccgtttgctgtctcgtctggccggcctgaggcaaccccctctcctcttgggcgggggggggggggacgtgccgcgccaggaagggcctcctcccggtgcgtcgtcgggagcgccctcgccaaatcgacctcgtacgactcttagcggtggatcactcggctcgtgcgtcgatgaagaacgcagctagctgcgagaattaatgtgaattgcaggacacattgatcatcgacacttcgaacgcacttgcggccccgggttcctcccggggctacgcctgtctgagcgtcgcttgccgatcaatcgcccccgggggtgcctcc

SEQ ID NO: 39598 - DNA, 657 bp, Artificial sequence
  DNA replication origin
cgcgcggccggcggcacccccgcgccgccccgccggagcgggacgaccggagggaggggcacgggccgggggcgggacgggcgccgcacgccccgacccgtctcccccgcggaggtcggggggacgggtccgaggacgcggcggcggagccgccccgccccgacgcggaagctcgggacggggccccggcgcggcgcggcgcggccgcgagccggaggcgggcgcgcgacggcggacgacaccgcggcgtctcgcgggtcgccgccggggacacgcgaaccccggcgccgcggccacgggcgcggccgggcgggccgcggggcgggctcccggccccggccgacgcgccgcgaggcgagccgggcgggcgggcgcgcgcgcgtacgcgcggggagggcgaggtaggacggcggggcctcggaggaggggcggcggggaggaggaggggcgcgggagcggcggtcggccggacgccgggccgccaccgggggcgggcggcgaaccgcggcgaccgggacgcgctcccccgaccctctctccccgccggcacccttccccttccggacccgccttcctcctcccccaccaccacaccgcacgcaacacgcccccaccgccgacgacgcgcgacgacgacgacgacgacgggcacgggac

SEQ ID NO: 39599 - DNA, 665 bp, Artificial sequence
  DNA replication origin
cgcgcgcgcccgcccgcccggctcgcctcgcggcgcgtcggccggggccgggagcccgccccgcggcccgcccggccgcgcccgtggccgcggcgccggggttcgcgtgtccccggcggcgacccgcgagacgccgcggtgtcgtccgccgtcgcgcgcccgcctccggctcgcggccgcgccgcgccgcgccggggccccgtcccgagcttccgcgtcggggcggggcggctccgccgccgcgtcctcggacccgtccccccgacctccgcgggggagacgggtcggggcgtgcggcgcccgtcccgcccccggcccgtgcccctccctccggtcgtcccgctccggcggggcggcgcgggggtgccgccggccgcgcgctctctctcccgtcgcctctccccctcgccgggcccgtctcccgacggagcgtcgggcgggcggtcgggccggcgcgattccgtccgtccgtccgccgagcggcccgtccccctccgagacgcgacctcagatcagacgtggcgacccgctgaatttaagcatattagtcagcggaggaaaagacactaaccaggattccctcagtaacggcgagtgaacagggaagagcccagcgccgaatccccgccccgcggcggggcgcgggacatgtggcgtacggaaga

SEQ ID NO: 39600 - DNA, 702 bp, Artificial sequence
  DNA replication origin
cggccccgggattcggcgagtgctgctgccgggggggctgtaacactcggggggggtttcggtcccgccgccgccgccgccgccgccaccgccgccgccgccgccgccccgacccgcgcgccctcccgagggaggacgcggggccggggggcggagacgggggaggaggaggacggacggacggacggacggggccccccgagccaccttccccgccgggccttcccagccgtcccggagccggtcgcggcgcaccgccgcggtggaaatgcgcccggcggcggccggtcgccggtcgggggacggtcccccgccgaccccacccccggccccgcccgcccacccccgcacccgccggagcccgccccctccggggaggaggaggaggggcggcgggggaagggagggcgggtggaggggtcgggaggaacggggggcgggaaagatccgccgggccggcgacacggccggacccgccgccgggttgaatcctccgcccctttactgcgcggaccccacccgtttacctcttaacggtttcacgccctcttgaactctctcttcaaagttcttttcaactttcccttacggtacttgttgactatcggtctcgtgccggtatttagccttagatggagtttaccacccgctttgggctgcattcccaagcaacccgactccgggaagacccgggcccggcgc

SEQ ID NO: 39601 - DNA, 1118 bp, Artificial sequence
  DNA replication origin
ctcccccctcccggcgcccacccccgcggggaatcccccgcgaggggggtctcccccgcgggggcgcgccggcgtctcctcgtgggggggccgggccacccctcccacggcgcgaccgctctcccacccctcctccccgcgcccccgccccggcgacggggggggtgccgcgcgcgggtcggttagcggggcggactgtccccagtgcgccccgggcgggtcgcgccgtcgggcccggggggaggttctctcggggccacgcgcgcgtcccccgaagagggggacggcggagcgagcgcacggggtcggcggcgacgtcggctacccacccgacccgtcttgaaacacggaccaaggagtctaacacgtgcgcgagtcgggggctcgcacgaaagccgccgtggcgcaatgaaggtgaaggccggcgcgctcgccggccgaggtgggatcccgaggcctctccagtccgccgagggcgcaccaccggcccgtctcgcccgccgcgccggggaggtggagcacgagcgcacgtgttaggacccgaaagatggtgaactatgcctgggcagggcgaagccagaggaaactctggtggaggtccgtagcggtcctgacgtgcaaatcggtcgtccgacctgggtataggggcgaaagactaatcgaaccatctagtagctggttccctccgaagtttccctcaggatagctggcgctctcgcagacccgacgcacccccgccacgcagttttatccggtaaagcgaatgattagaggtcttggggccgaaacgatctcaacctattctcaaactttaaatgggtaagaagcccggctcgctggcgtggagccgggcgtggaatgcgagtgcctagtgggccacttttggtaagcagaactggcgctgcgggatgaaccgaacgccgggttaaggcgcccgatgccgacgctcatcagaccccagaaaaggtgttggttgatatagacagcaggacggtggccatggaagtcggaatccgctaaggagtgtgtaacaactcacctgccgaatcaactagccctgaaaatggatggcgctggagcgtcgggcccatacccggccgtcgccggcagtcgagagt

SEQ ID NO: 39602 - DNA, 1072 bp, Artificial sequence
  DNA replication origin
  misc_feature (1042)..(1072): n is a, c, g, or t
cgtggagccgggcgtggaatgcgagtgcctagtgggccacttttggtaagcagaactggcgctgcgggatgaaccgaacgccgggttaaggcgcccgatgccgacgctcatcagaccccagaaaaggtgttggttgatatagacagcaggacggtggccatggaagtcggaatccgctaaggagtgtgtaacaactcacctgccgaatcaactagccctgaaaatggatggcgctggagcgtcgggcccatacccggccgtcgccggcagtcgagagtggacgggagcggcgggggcggcgcgcgcgcgcgcgcgtgtggtgtgcgtcggagggcggcggcggcggcgggggtgtgtggggtcctcccccgccccccccccacgcctcctcccctcctcccgcccacgccccgctccccgcccccggagccccgcggacgctacgccgcgacgagtaggagggccgctgcggtgagccttgaagcctagggcgcgggcccgggtggagccgccgcaggtgcagatcttggtggtagtagcaaatattcaaacgagaactttgaaggccgaagtggagaagggttccatgtgaacagcagttgaacatgggtcagtcggtcctgagagatgggcgagcgccgttccgaagggacgggcgatggcctccgttgccctcggccgatcgaaagggagtcgggttcagatccccgaatccggagtggcggagatgggcgccgcgaggcgtccagtgcggtaacgcgaccgatcccggagaagccggcgggagccccggggagagttctcttttctttgtgaagggcagggcgccctggaatgggttcgccccgagagaggggcccgtgccttggaaagcgtcgcggttccggcggcgtccggtgagctctcgctggcccttgaaaatccgggggagagggtgtaaatctcgcgccgggccgtacccatatccgcagcaggtctccaaggtgaacagcctctggcatgttggaacaatgtaggtaagggaagtcggcaagccggatcnnnnnnnnnnnnnnnnnnnnnnnnnnnnnnn

SEQ ID NO: 39603 - DNA, 954 bp, Artificial sequence
  DNA replication origin
tgaggagcctctctgcccggccagccgccccgtctgggagggaggtggggggtcagccccccgcccggccagccaccccttctgggggggagagaggtgggcgggtcagccccccgcccggccagccgccccgtccgggaggtgaggggtgcctctgcccggccacccctactgggaactgaggagcccctctgcccggccagccaccccatccgggagggaagtgggggggtcagccccccgcccagtcagccgccccgtccgggagggaggtggggggtcagccccccgcccggccagccgccccatccgggagggaggtgagggggtcagcccctcgcccggccagccgccctgtccaggagggaggtgggggggtcagcccccagcctggccagccgccccgtccgggaggtgaagggcgcctctgcccagccacccctactgggaagtgaggagcccctctgccctgccaccaccccgtctgggaggtgtacccaacagctcattgagaatgggccatgatgacaatggcggttttgtggaatagaaaggggggaaaggtggggaaaagattgagaaatcggatggttgccgtgtctgtgtagaaagaggtagacatgggagacttttcattttgttctgtactaagaaaaattcttctgccttgggatcctgttgatctgtgaccttacccccaaccctgtgctctctgaaacatgggctgtatccactcagggttgaatggattaagggcggtgcaagatgtgctttgttaaacagatgcttgaaggcagcatgctccttaagagtcatcaccactccctaatctcaagtacccagggacacaaacactgcggaaggccacagggtcctctgcctaggaaaaccagagacctttgttcacttgtttatctgctgaccttccctccactattgtcctgtgaccctgcc

SEQ ID NO: 39604 - DNA, 1191 bp, Artificial sequence
  DNA replication origin
tccctcccggacggggcggctgactgggcggggggctgacccccccacttccctcccggatggggtggctggccgggcagaggggctcctcagttcccagtaggggtggccgggcagaggcacccctcacctcccggacggggcggctggccgggcggggggctgacccgcccacctctctcccccccagaaggggtggctggccgggcggggggctgaccccccacctccctcccagacggggcggctggccgggcagagaggctcctcacttcccatcaggggctgccaggcagaggcacccctcacttcccggatggggcggctggccgggtggggggctaacccacccacctccctcccggaggaggcggctggccgggcgggcggctgaccccccacctcccttccggatggggtggctggccaggcggggggctgacccccccacctcactcccgaacgaggtggctgccgggcggagacgctcctcacttccgagacggggtgactgccgggcggaggggctcctcacttctcagacggggtggttgccaggcagagggtctcctcacttctcagacggggcggccgggcagagacattcctcacatcccggacggggcggcagggcagaggtgctccccacatctcagatgatgggcggccgggcagagacgctcctcacttcccagatgtgatggcggccgggaagaggcgctcgtcacttcctagatgggatggcggccgggcagagacgctcctcactttccagactgggcagccaggcagaggggctcctcacatcccagacgatgggcggccaggtggagacgctcctcacttcccagacggggtggcggccgggcagaggctgcaatctcggcactttgggaggccaaggcaggctgctgggaggtggaggttgtagcgagccaagatcacgccactgcactccagcctgggcaccattgagcactgagtgaacgagtctccgtctgcaatcccggcatctcgggaggccgaggctggcggatcactcgcggttaggagctcagcccggccaacacagcgaaaccccgtctccaccaaaaaaatacgaaaaccagtcaggcgtggcggcgcgcgcctgcaatcgcaggcactcggcaggctgaggcaggagaatcaggcagggaggttgcagtgagc

SEQ ID NO: 39605 - DNA, 2624 bp, Artificial sequence
  DNA replication origin
cgcccggggccctctggtcaaccccaggacacacgcgggagcagcgccgggccggggacgccctcccggccgcccgtgccacacgcagggggccggcccgtgtctccagagcgggagccggaagcattttcggccggcccctcctacgaccgggacacacgagggaccgaaggccggccaggcgcgacctctcgggccgcacgcgcgctcagggagcgctctccgactccgcacggggactcgccagaaaggatcgcggcagagggaccgctccccggcacccgggggacgggggcgggacggtccccggctccccacggggactcggaaacgaattcggccgccgcctcagacggccaggatgagcgcggacccgcgaccgggccgggaagggcgtccccagcctcccgcgccacgcgcggcgggtccccgcgggtcgcggctcgggcctcgggagctacggcgcgctggtcgaccggcccgggcagccccacgcccgccgcgggcccagaagcgcagcgacagcctctcccccacataaacctgcacgccagagctgtgactcacaagcgacgcgccacagctctggcgccaccgggccagccgggctgacgaccgcgggctttccggagctctgcctagctcacagcggggacggtcccctccctcggcagctgccaccgcagctccggaagccgagagcacgatctcaaagcggccgccagatggagcccgacaaccgccgcggacgtcagcgagacagatccggctggcagggcggcccgtggaccgcgaaagcgaaaccgtgagtcgagaagctcttcccgaggccgaaaacgcagcccctctgccccaaccccacacaaacggtgcccaaaacgcgtctctgcctcgaccgcgacagagtcagaagacaacccacggcgcgtgggtgtttggagatgcctctcggaagcagggagggagggagggagggagggagggagggagaaagaacacacaaggactcggtcgcgggtcgctgcagacacacggagaggcagaatgcgtaggctcttccggaatccacgcagagacagacggggggaggggagtggggaaaagagacagatggcgaaagggaaggagggagggaagggagcagggagggagggagggagggagggaggaagacaatggagaaaagagagacaatttagaaaacgtagatacacaaagtaaacttctgaaacactccattttttaaaagacagacgggaaggaaagaaacacgaaaaagagagaaagaatgaggaaagaaacgaaggaaagaagggaaaaagaaacagagaggaaagaaaaaagaaggaaacacagggaacgaaagagaaataaagcacgaaggaaaaaaggacagaaagagagaaagaaggaaaggaagagaggaagaaaaacctaaagaaggagagaaaggaagaaaggaaggaagaaaaacacgaaggagaggaagaaagaaaacagagataactacgtacgctcgttcatttacacacataaatacgacgcttttcatacgtaaaataaacgtctttatcgacgatcccttctttatagagcgatgtgtatttatttgtataacacagacacctacatctatcatacagaagtctatttccatacaaccgatacgtatttaccatacgcaagagtattcaatgcagagatacacgttgtcgttgtttgcatataagcgtacagaaacgtttacattaatacatataagtaaacgcgtggaaacgaaagaaataaaaaagcgaaatgagtcaacaggccgggcacggtggctcacgcccgtcatcccagcacttcgagaggccgaggtgggcgcatcacaggaggtcgggagttggagaccagcctgagcaacatggagagacacggcgtgcctactaaaaacacaaacatcagccaagccaggcgtgggggtgcctccctgtaatccccgctaatcgggaggctgaggcaggagaagcgctcgaacccgggaggcggaaggtgcggtgagccaagaccgcgccattgcactctagccgtggaaacaagagtgaaactctgtctcaaaaggacgaaacagaaagaaagaaagaaaggaaggaaggaaggaaggaaggaagaaagaaagaaaagaaagaaggaatgaatgaaagaaaagaaagcaagaaagaaagaaagaaagaaaaagaaaagaaagaaagaaaagaaagcaagaaagcacgaaagcaagcaagcaagaaagcaagaaaacaaggaagcaagaaagcaagcaagaaagaaacaaaagaaagaaagcaagaaaacaagaaagcacgaaagcaagcaagcaagaaagcaagaaaacaaggaagcaagaaagaaagaaacaaaagaaagaaagaaaacaagaaagcaagaaagcacgaaagcaatcaagcaagaaagcaagcaggaaagaaacaaaagaaagaaagaaatcgagaaaacaagaaagcacgaaagcaagcaagcaagaaagcaagcaagaaagaaacaaaagaaagaaagaaagaaagaaaacaggaaagcaagaaagcacgaaagcaagcaagcaagaaagcaagcaggaaaga

SEQ ID NO: 39606 - DNA, 1030 bp, Artificial sequence
  DNA replication origin
tctgtctcgctgacgtccgcggcggttgtcgggctccatctggcggccgctttgagatcgtgctctcggcttccggagctgcggtggcagctgccgagggaggggaccgtccccgctgtgagctaggcagagctccggaaagcccgcggtcgtcagcccggctggcccggtggcgccagagctgtggcgcgtcgcttgtgagtcacagctctggcgtgcaggtttatgtgggggagaggctgtcgctgcgcttctgggcccgcggcgggcgtggggctgcccgggccggtcgaccagcgcgccgtagctcccgaggcccgagccgcgacccgcggggacccgccgcgcgtggcgcgggaggctggggacgcccttcccggcccggtcgcgggtccgcgctcatcctggccgtctgaggcggcggccgaattcgtttccgagtccccgtggggagccggggaccgtcccgcccccgtcccccgggtgccggggagcggtccctctgccgcgatcctttctggcgagtccccgtgcggagtcggagagcgctccctgagcgcgcgtgcggcccgagaggtcgcgcctggccggccttcggtccctcgtgtgtcccggtcgtaggaggggccggccgaaaatgcttccggctcccgctctggagacacgggccggccccctgcgtgtggcacgggcggccgggagggcgtccccggcccggcgctgctcccgcgtgtgtcctggggttgaccagagggccccgggcgctccgtgtgtggctgcgatggtggcgtttttggggacaggtgtccgtgtcgcgcgtcgcctgggccggcggcgtggtcggtgacgcgacctcccggccccgggggaggtatatctttcgctccgagtcggcattttgggccgccgggttattgctgacacgctgtcctctggcgacctgtcgctggagaggttgggcctccggatgcgcgcggggctctggcctaccggtgacccggctagccggccgcgctcctgcttgagccgc

SEQ ID NO: 39607 - DNA, 749 bp, Artificial sequence
  DNA replication origin
gggcccttgcggtgctcctggagcgctccgggttgtccctcaggtgcccgaggccgaacggtggtgtgtcgttcccgcccccggcgccccctcctccggtcgccgccgcggtgtccgcgcgtgggtcctgagggagctcgtcggtgtggggttcggggcggtttgagtgagacgagacgagacgcgcccctcccacgcggggaagggcgcccgcctgctctcggtgagcgcacgtcccgtgctcccctctggcgggtgcgcgcgggccgtgtgagcgatcgcggtgggttcgggccggtgtgacgcgtgcgccggccggccgccgaggggctgccgttctgcctccgaccggtcgtgtgtgggttgacttcggaggcgctctgcctcggaaggaaggaggtgggtggacgggggggcctggtggggttgcgcgcacgcgcgcaccggccgggcccccgccctgaacgcgaacgctcgaggtggccgcgcgcaggtgtttcctcgtaccgcagggccccctcccttccccaggcgtccctcggcgcctctgcgggcccgaggaggagcggctggcgggtggggggagtgtgacccaccctcggtgagaaaagccttctctagcgatctgagaggcgtgccttgggggtaccggatcccccgggccgccgcctctgtctctgcctccgttatggtagcgctgccgtagcgacccgctcgcagaggaccctcctccgcttccccctcgacgg

SEQ ID NO: 39608 - DNA, 2330 bp, Artificial sequence
  DNA replication origin
ctcggagccgggcttcggacggccccgggcactcgaccggaccggtgcgcgggcgctgcggcgcacggcgcgactgtccccgggccgggcaccgcggtccgcctctcgctcgcgcccggacgtcgggtgcccgcggggcggcggagcgccgtccccgcctgcgcgcgcccgcgggcgccatgcgcgcgcgcgtggccgccggtccctcccggccgccgggcgcgggtcgggccgtccgcctcctcgcgggcgggcgcgacgaagaagcgtcgcgggtctgtggcgcggggccccggtggtcgtgtcgcgtggggggcgggtggttggggcgtccggttcgccgcgccccgccccggccccaccggtcccggccgccgcccccgcgcccgctcgctccctcccgtccgcccgtccgcggcccgtccgtccgtccgtccgtcgtcctcctcgcttgcggggcgccgggcccgtcctcgcgaggccccccggccggccgtccggccgcgtcggggcctcgccgcgctctaccttacctacctggttgatcctgccagtagcatatgcttgtctcaaagattaagccatgcatgtctaagtacgcacggccggtacagtgaaactgcgaatggctcattaaatcagttatggttcctttggtcgctcgctcctctcctacttggataactgtggtaattctagagctaatacatgccgacgggcgctgacccccttcgcgggggggatgcgtgcatttatcagatcaaaaccaacccggtcagcccctctccggccccggccggggggcgggcgccggcggctttggtgactctagataacctcgggccgatcgcacgccccccgtggcggcgacgacccattcgaacgtctgccctatcaactttcgatggtagtcgccgtgcctaccatggtgaccacgggtgacggggaatcagggttcgattccggagagggagcctgagaaacggctaccacatccaaggaaggcagcaggcgcgcaaattacccactcccgacccggggaggtagtgacgaaaaataacaatacaggactctttcgaggccctgtaattggaatgagtccactttaaatcctttaacgaggatccattggagggcaagtctggtgccagcagccgcggtaattccagctccaatagcgtatattaaagttgctgcagttaaaaagctcgtagttggatcttgggagcgggcgggcggtccgccgcgaggcgagccaccgcccgtccccgccccttgcctctcggcgccccctcgatgctcttagctgagtgtcccgcggggcccgaagcgtttactttgaaaaaattagagtgttcaaagcaggcccgagccgcctggataccgcagctaggaataatggaataggaccgcggttctattttgttggttttcggaactgaggccatgattaagagggacggccgggggcattcgtattgcgccgctagaggtgaaattcttggaccggcgcaagacggaccagagcgaaagcatttgccaagaatgttttcattaatcaagaacgaaagtcggaggttcgaagacgatcagataccgtcgtagttccgaccataaacgatgccgaccggcgatgcggcggcgttattcccatgacccgccgggcagcttccgggaaaccaaagtctttgggttccggggggagtatggttgcaaagctgaaacttaaaggaattgacggaagggcaccaccaggagtggagcctgcggcttaatttgactcaacacgggaaacctcacccggcccggacacggacaggattgacagattgatagctctttctcgattccgtgggtggtggtgcatggccgttcttagttggtggagcgatttgtctggttaattccgataacgaacgagactctggcatgctaactagttacgcgacccccgagcggtcggcgtcccccaacttcttagagggacaagtggcgttcagccacccgagattgagcaataacaggtctgtgatgcccttagatgtccggggctgcacgcgcgctacactgactggctcagcgtgtgcctaccctacgccggcaggcgcgggtaacccgttgaaccccattcgtgatggggatcggggattgcaattattccccatgaacgaggaattcccagtaagtgcgggtcataagcttgcgttgattaagtccctgccctttgtacacaccgcccgtcgctactaccgattggatggtttagtgaggccctcggatcggccccgccggggtcggcccacggccctggcggagcgctgagaagacgg

SEQ ID NO: 39609 - DNA, 596 bp, Artificial sequence
  DNA replication origin
ccgcggcggcggcggcggcgcggccccggccggggagcggagtccgcggtggaggcgcgggaggggccgggcccctcccgacgggactcccccgcgggcccaccaccgcccccgacccacgggcggacgggcgatccccccaaggggtctttaaacctccgcgccggaacgcgctaggtacctggacggcgggggggcggacgaggaggcgggggaggggaccggcgtccggcccccgaccctcgagacgccctagcgggaaggccggggagagcgagcggggccgtgcccggcggcgcggagcggcgcggcggaggcgacgggaatccggccggccccgaagacggggagccggcgcggcggggccggacgacgggccccggcggggaggagggcaccgagacccccagacccgccgcgacgccgccgagaaccgcccccgcgcccgccgacacccacgccgtcggggccgctgccggggaccgctccccgccgcccgccggccccacgacacgcgcacaccaacgacacgcccttctttctctttctctctctctctctctctcccccgtctccctcccgagttctccggctct

SEQ ID NO: 39610 - DNA, 865 bp, Artificial sequence
  DNA replication origin
ggccccgccgcgccggctccccgtcttcggggccggccggattcccgtcgcctccgccgcgccgctccgcgccgccgggcacggccccgctcgctctccccggccttcccgctagggcgtctcgagggtcgggggccggacgccggtcccctcccccgcctcctcgtccgcccccccgccgtccaggtacctagcgcgttccggcgcggaggtttaaagaccccttggggggatcgcccgtccgcccgtgggtcgggggcggtggtgggcccgcgggggagtcccgtcgggaggggcccggcccctcccgcgcctccaccgcggactccgctccccggccggggccgcgccgccgccgccgccgcggcggccgtcgggtgggggctttacccggcggccgtcgcgcgcctgccgcgcgtgtggcgtgcgccccgcgccgtgggggcgggaacccccgggcgcctgtggggtggtgtccgcgctcgcccccgcgtgggcggcgcgcgcctccccgtggtgtgaaaccttccgacccctctccggagtccggtcccgtttgctgtctcgtctggccggcctgaggcaaccccctctcctcttgggggggggcggggggacgtgccgcgccaggaagggcctcctcccggtgcgtcgtcgggagcgccctcgccaaatcgacctcgtacgactcttagcggtggatcactcggctcgtgcgtcgatgaagaacgcagctagctgcgagaattaatgtgaattgcaggacacattgatcatcgacacttcgaacgcacttgcggccccgggttcctcccggggctacgcctgtctgagcgtcgcttgccgatcaatcgcccccgggggt

SEQ ID NO: 39611 - DNA, 646 bp, Artificial sequence
  DNA replication origin
agggcacccccgcgccgccccgccggagcgggacgaccggagggaggggcacgggccgggggcgggacgggcgccgcacgccccgacccgtctcccccgcggaggtcggggggacgggtccgaggacgcggcggcggagccgccccgccccgacgcggaagctcgggacggggccccggcgcggcgcggcgcggccgcgagccggaggcgggcgcgcgacggcggacgacaccgcggcgtcccgcgggtcgccgccggggacacgcgaaccccggcgccgcggccacgggcgcggccgggcgggccgcggggcgggctcccggccccggccgacgcgccgcgaggcgagccgggcgggcgggcgcgcgtacgcgcggggagggcgaggaggacagggcgggccctcggaggaggggcggcgggggaggaggaggggcgcgggagcggcggtcggcggacgccgggcgccaccgggggcgggcggcgaaccgcggcgaccgggacgcgctcccccgaccctctctccccgccggcacccttccccttccggacccgccttcctcctcccccaccaccacaccgcacgcaacacgcccccaccgccgacgacgcgcgacgacgacgacgacgggcacgggaccttcca

SEQ ID NO: 39612 - DNA, 664 bp, Artificial sequence
  DNA replication origin
cccgcgcgtacgcgcgcccgcccgcccggctcgcctcgcggcgcgtcggccggggccgggagcccgccccgcggcccgcccggccgcgcccgtggccgcggcgccggggttcgcgtgtccccggcggcgacccgcgggacgccgcggtgtcgtccgccgtcgcgcgcccgcctccggctcgcggccgcgccgcgccgcgccggggccccgtcccgagcttccgcgtcggggcggggcggctccgccgccgcgtcctcggacccgtccccccgacctccgcgggggagacgggtcggggcgtgcggcgcccgtcccgcccccggcccgtgcccctccctccggtcgtcccgctccggcggggcggcgcgggggtgccctcggccgcggctctctctcccgtcgcctctccccctcgccgggcccgtctcccgacggagcgtcgggcgggcggtcgggccggcgcgattccgtccgtccgtccgccgagcggcccgtccccctccgagacgcgacctcagatcagacgtggcgacccgctgaatttaagcatattagtcagcggaggaaaagaaactaaccaggattccctcagtaacggcgagtgaacagggaagagcccagcgccgaatccccgccccgcggcggggcgcgggacatgtggcgt

SEQ ID NO: 39613 - DNA, 700 bp, Artificial sequence
  DNA replication origin
cggcgacgggtctcgctccctcggccccgggattcggcgagtgctgctgccgggggggctgtaacactcggggggggtttcggtcccgccgccgccgccgccgccgccaccgccgccgccgccccgacccgcgcgccctcccgagggaggacgcggggccggggcggagacggggaggaggaggacggacggacggacggacggggccccccgagccaccttccccgccggccttcccagccgtcccggagccggtcgcggcgcaccgccgcggtggaaatgcgcccggcggcggccggtcgccggtcgggggacggtcccccgccgaccccacccccggccccgcccgcccacccccgcacccgccggagcccgccccctccggggaggaggaggaggggcggcgggggaagggagggcgggtggaggggtcgggaggaacggggggcgggaaagatccgccgggccgccgacacggccggacccgccgccgggttgaatcctccgggcggactgcgcggaccccacccgtttacctcttaacggtttcacgccctcttgaactctctcttcaaagttcttttcaactttcccttacggtacttgttgactatcggtctcgtgccggtatttagccttagatggagtttaccacccgctttgggctgcattcccaagcaacccgactccgggaagaccc

SEQ ID NO: 39614 - DNA, 1117 bp, Artificial sequence
  DNA replication origin
cccccctcccggcgcccacccccgcggggaatcccccgcgaggggggtctcccccgcgggggcgcgccggcgtctccttgtggggggaccgggccacccctcccacggcgagaagactgtcccacccatcctccccgcgcccccgccccggcgacggggggggtgccgcgcgcgggtcggggggcggggcggactgtccccagtgcgccccgggcgggtcgcgccgtcgggcccggggggaggttctctcggggccacgcgcgcgtcccccgaagagggggacggcggagcgagcgcacggggtcggcggcgacgtcggctacccacccgacccgtcttgaaacacggaccaaggagtctaacacgtgcgcgagtcgggggctcgcacgaaagccgccgtggcgcaatgaaggtgaaggccggcgcgctcgccggccgaggtgggatcccgaggcctctccagtccgccgagggcgcaccaccggcccgtctcgcccgccgcgccggggaggtggagcacgagcgcacgtgttaggacccgaaagatggtgaactatgcctgggcagggcgaagccagaggaaactctggtggaggtccgtagcggtcctgacgtgcaaatcggtcgtccgacctgggtataggggcgaaagactaatcgaaccatctagtagctggttccctccgaagtttccctcaggatagctggcgctctcgcagacccgacgcacccccgccacgcagttttatccggtaaagcgaatgattagaggtcttggggccgaaacgatctcaacctattctcaaactttaaatgggtaagaagcccggctcgctggcgtggagccgggcgtggaatgcgagtgcctagtgggccacttttggtaagcagaactggcgctgcgggatgaaccgaacgccgggttaaggcgcccgatgccgacgctcatcagaccccagaaaaggtgttggttgatatagacagcaggacggtggccatggaagtcggaatccgctaaggagtgtgtaacaactcacctgccgaatcaactagccctgaaaatggatggcgctggagcgtcgggcccatacccggccgtcgccggcagtcgagagtg

SEQ ID NO: 39615 - DNA, 1115 bp, Artificial sequence
  DNA replication origin
ggtagggcggggggacgaaccgccccgccccgccgcccgccgaccgccgccgcccgaccgctccccgcccccagcggacgcgcgcgcgacgagacgtggggtgggggggggggcgcgccggcgcccgccgggctccccgggggcggccgcgacgcccgccgcagctggggcgatccacgggaagggcccggctcgcgtccagagtcgccgccgccgccggccccccgggtgcccgggcccccctcgcgggggaccgtgcccccgccgccggggccccgcggcgggccgccgccggcccctgccgccccgacccttctccccccgccgccgcccccacgcggcgctcccccggggaggggggaggacggggagcgggggagagagagagagagagggcgcggggcggggagggagcgagcggcgcgcgcggggtggggcgggggagggccgcgaggggggtgccccgggcgtggggggggcggcggcgcctcgtccagccgcggcgcgcgcccagccccgcttcgcgccccagcccgaccgacccagcccttagagccaatccttatcccgaagttacggatccggcttgccgacttcccttacctacattgttccaacatgccagaggctgttcaccttggagacctgctgcggatatgggtacggcccggcgcgagatttacaccctctcccccggattttcaagggccagcgagagctcaccggacgccgccggaaccgcgacgctttccaaggcacgggcccctctctcggggcgaacccattccagggcgccctgcccttcacaaagaaaagagaactctccccggggctcccgccggcttctccgggatcggtcgcgttaccgcactggacgcctcgcggcgcccatctccgccactccggattcggggatctgaacccgactccctttcgatcggccgagggcaacggaggccatcgcccgtcccttcggaacggcgctcgcccatctctcaggaccgactgacccatgttcaactgctgttcacatggaacccttctccacttcggccttcaaagttctcgtttgaatatttgctactaccaccaagatctgcacctgcggcggctcc

SEQ ID NO: 39616 - DNA, 891 bp, Artificial sequence
  DNA replication origin
cgccgcgtgggggcggcggcggggggagaagggtcggggcggcaggggccggcggcggcccgccgcggggccccggcggcgggggcacggtcccccgcgaggggggcccgggcacccggggggccggcggcggcggcgactctggacgcgagccgggcccttcccgtggatcgccccagctgcggcgggcgtcgcggccgcccccggggagcccggcgggcgccggcgcgcccccccccccaccccacgtctcgtcgcgcgcgcgtccgctgggggcggggagcggtcgggcggcggcggtcggcgggcggcggggcggggcggttcgtccccccgccctacccccccggccccgtccgccccccgttcccccctcctcctcggcgcgcggcggcggcggcggcaggcggcggaggggccgcgggccggtcccccccgccgggtccgcccccggggccgcggttccgcgcggcgcctcgcctcggccggcgcctagcagccgacttagaactggtgcggaccaggggaatccgactgtttaattaaaacaaagcatcgcgaaggcccgcggcgggtgttgacgcgatgtgatttctgcccagtgctctgaatgtcaaagtgaagaaattcaatgaagcgcgggtaaacggcgggagtaactatgactctcttaaggtagccaaatgcctcgtcatctaattagtgacgcgcatgaatggatgaacgagattcccactgtccctacctactatccagcgaaaccacagccaagggaacgggcttggcggaatcagcggggaaagaagaccctgttgagcttgactctagtctggcacggtgaagagacatgagaggtgtagaataagtgggaggcccccggcgcccccccgg

SEQ ID NO: 39617 - DNA, 1076 bp, Artificial sequence
  DNA replication origin
gccgccccggcggtgaacggggaggaggcgggaaccgaagaagcggggcgcgccgaccggggtcgcgcgccctcccccccacacccccaccaccacgcccgcggtcggcgggagaggccgggagggaggaagacgaacggaaggacggacggcgccggacgcgcacgccccgccgggccccccgcacgcgcgcgcgcgcgcgcgcgcggacaaacccttgtgtcgagggctgactttcaatagatcgcagcgagggagctgctctgctacgtacgaaaccccgacccagaagcaggtcgtctacgaatggtttagcgccaggttccccacgaacgtgcggtgcgtgacgggcgagggggcggccgcctctccggccgcgccccgtttcccaggacgaagggcactccgcaccggaccccggtcccggcgcgcggcggggcacgcgccctcccgcgcgcgcggggcgcgtggagggggggggcggcccgccggcggggacaggcgggggaccggctatccgaggccaaccgaggctccgcggcgctgccgtatcgttccgcctgggcgggattctgacttagaggcgttcagtcataatcccacagatggtagcttcgccccattggctcctcagccaagcacatacaccaaatgtctgaacctgcggttcctctcgtactgagcaggattaccatggcaacaacacatcatcagtagggtaaaactaacctgtctcacgacggtctaaacccagctcacgttccctattagtgggtgaacaatccaacgcttggtgaattctgcttcacaatgataggaagagccgacatcgaaggatcaaaaagcgacgtcgctatgaacgcttggccgccacaagccagttatccctgtggtaacttttctgacacctcctgcttaaaacccaaaaggtcagaaggatcgtgaggccccgctttcacggtctgtattcgtactgaaaatcaagatcaagcgagcttttgcccttctgctccacgggaggtttctgtcctccctgagctcgccttaggacacctgcgttaccgtttgacaggtgt

SEQ ID NO: 39618 - DNA, 1817 bp, Artificial sequence
  DNA replication origin
ctctcctatggaaaatgccagggcggcggtgggagcctcggctgggggagaagcggggacaagggggagagggaaggaggccctcgggaggtttcggcaccgaaaacccactcagccaagctccctccgtgtttccgggtccaaggtacaccccgggagacggcaagagaaacgttcacaccgtgctttccgtcttcgtgtttatttctttcatcttttccattttacgagagatgctcatttcaacaaccagacggcggatgtgacgggagaagcgtcaaggccaggagtttgagaccagcgtgagcaacagagcaacacacgtaggagagcccagctgaaagaaatgaaagaggaggaggaggaggaggaggaggaggaggaggaggaggaggaggaggacgacgacaagggggggtggggggggaggagaaggaaagaaaagaaaagaaaaaaaagaaaaaggaaaacaaccaccaccaagaaagttaagattctccaacggtcggaagttgaagaccagcctgaccaagatggagaaaccccatctgtagtaaaaatagaaaaattagccgggcacgatggctcatctctgtcattccagctactcgggaaggctgaggcaggagaatcacttgaacctgggaggcggagggtgcggtgagccgagagccgccatcgtactccaccctgggcgacaagagtgaaactccgtctaaagagaataaaaagaaagaacgaaaaggcggatcggtgagatgcgtctggaaattttcttcgttcgcagtccccgtattaaaaacggaaagaaccgacccacgacaaacacgaccagagcgtaccgtgcccacgcgtgtcatcacagcactccgggaggccgatgcgggaggatctctggagcctaaaagttcgagatcacctcgacacgtgagatgacgcctacaataataataatcatagaagtttgaaaagagaccacgtgtgcccagagcatggacaataaagcgagagcacatccgtactaaaaagaagacgattgataggcaggcaggcaggcaggcaggcaggcaggcaggcaggcaggcaggcaggcaggcaaatgtagaaggagccaggcgcagcgtctcacgcctgtaatagcagcagtgtgggcggccgaggcaggcaggcggattgcttgaggacaggagttcgagaccagcgtgggcaacatgatagaaccccgaaacccatctcactcacatacatacatacatacgtacatacatagatacacacacacacacacacacacacacacacacacacacacacacacacacacatacctacctacggaaaacatgagaaacaacataaaagtcagccggtgtggtggtgcgcgcctgtagtctcaggtaatggggatgggagggatcagaggcagaacgaccgtttggtcggtccaaagcgttgaggttggggtgatcctgggcggcagagacagaggaagaccctgccagtaagggagggaaggaaggaaggaaggagggaaggaaggaaggaaggaaggaaggaaggaaggaaggaaataaacaggcaagcaggcaagcaaacgatgaacgtgacaatgacacagaagaacccatgagaataaacgagcaaataacagggtatgaatgaagctaaaaggcaattgagatcgcaatcaatcgttttctctgcaccccaccccaccgcagcccacgtaagctggagtggaagtgtgcgatcacagcccacgttaacctctccctcccgggcttaagagatccctgtagtcccagctatttgggagg

SEQ ID NO: 39619 - DNA, 926 bp, Artificial sequence
  DNA replication origin
aatcccaccacgaggacccggaaatagtgtttgatctgtgtccctgcctagtcacctgtcttgtgtgtcgatgactgaggattccacaaatgaaggtcagcggtatctattgagctgtttctccctctcgtgcgtctcatctgtgtgctggagaaagggaagagaagaggttccgatgggaagttgtcttcacgcctgaggcagctgaaggcagaccgaagggaaggagggcatcctaggtgacatttccatacccacgcaccctttacaatgctggggctgccagtccaccctgtacgtcaacccacccccaagaacagcacggtccggggtggtccagtctgatcccaaccggcccacccggggcatccggtggaagtcttcgccggaggatccgaaggcagcatcaacgcggttcccctggggtcgcccggcaaaggccagccgggggagggtagcgggacgtgacgggggggtgggggtcgcatccgcctcagagctccctggaaggtggcaggtagccggtggggcacgccgagccagagacgtccggcaggatatagatctggaaggcgtgtcagtcctctcccatacctctcctatggaaaatgccagggcggcggtgggagcctcggctgggggagaagcggggacaagggggagagggaaggaggccctcgggaggtttcggcaccgaaaacccactcagccaagctccctccgtgtttccgggtccaaggtacaccccgggagacggcaagagaaacgttcacaccgtgctttccgtcttcgtgtttatttctttcatcttttccattttacgagagatgctcatttcaacaaccagacggcggatgtgacgggagaagcgtcaaggccaggagtttgagaccagcgtgagcaacagagcaacacacgtaggagag

SEQ ID NO: 39620 - DNA, 983 bp, Artificial sequence
  DNA replication origin
agcaaacggggaaggggcatatctccttgaccggtgactgcccaggatacagtgggtcacggccgaccgaagcctcgacctgtggggcctcaagtgatcttctcctcgtctcagcctcccgagtagccgcgactacaggcggccatcaccgcgcacaactcatcttataataacatcatgattctctcgacacggggtctcgctccgtcatccaggccgcatcgccacggcacgatctcagctcatcgcaacctcggcctccccggttggaacaagtcgcccgccccagtctcccgagcggtcgtgattccaagcccacgccaccaggcccggctaatcgttctatttttcagagagacggggtttcgccacgtcggccagcctggtctcgaactcccggccccaagcgatccacccgcctcggcctcccaaagtgccggagtgacaggcgtgagctagcgtgcccggcccagatcatctttttcatcaattgtagagaaggggtttcgtcagccaacgggtggagggtggggcgggttttactcagcctgcgtactgtgaaaaggggaagtgagtgtgctctgtgaactagatatggaaattgtgtgtgtgtgtgcgcgcgtgcgcgtgcgagagagagagagagagagagagagagagagagagagagagagaccaatcccaccacgaggacccggaaatagtgtttgatctgtgtccctgcctagtcacctgtcttgtgtgtcgatgactgaggattccacaaatgaaggtcagcggtatctattgagctgtttctccctctcgtgcgtctcatctgtgtgctggagaaagggaagagaagaggttccgatgggaagttgtcttcacgcctgaggcagctgaaggcagaccgaagggaaggagggcatcctaggtgacatttccatacccacgcaccctttacaatgctggggctgccagtccaccctgtacgtcaaccc

SEQ ID NO: 39621 - DNA, 752 bp, Artificial sequence
  DNA replication origin
cagtctaggccacgagagtgaaactctgtctcgggggaaaaaaaaacaattaaaaacggtgtgggcacagtggcgcgtgcccgcggtcccaggctctgtactctggaggctgaggtggaaggatcgctcgagtccaggagcgtccacgctgcagggagtgagttacgacggcaccactgccggggtgacggagcgagatgccgtctctaaatcagtcaatgagatcactggaaggcgctctctgcgtctcactttccaagagggtctctttgggccaagcaggcatggtgcctcccgccagtcatcccagcactttgggaggctgaggcgggaggaaagaaggaagggaggaagggaggaaagaagaaaagaagaaaggcaggaaggcaggaaagaaagaggggaagagagaaaaagaaaaagaaagaaagaaagaaagaaagaaagaaagaaagaaagaaaagagaagcaaaaagaagaaaagagaagggaagaaaagaaaagcaaacggggaaggggcatatctccttgaccggtgactgcccaggatacagtgggtcacggccgaccgaagcctcgacctgtggggcctcaagtgatcttctcctcgtctcagcctcccgagtagccgcgactacaggcggccatcaccgcgcacaactcatcttataataacatcatgattctctcgacacggggtctcgctccgtcatccaggccgcatcgccacggcacgatctcagctcatcgca

SEQ ID NO: 39622 - DNA, 635 bp, Artificial sequence
  DNA replication origin
gcgcagtggctcacgcccgtcacgccagcactttgagacgccgggcaggagggttgcaaagaaatgatgagaccccgtctgtgggaaaacatttaaaaatgaaggccgggcgcggtggctcacgcctgtcatcccagcacttccggaggccggggagggcggatcacctgaggtcgggagttcgaaaccagcccgatcgacatggagaagccccgtctccactaaaaatacgaaatcagccagacgtggcagcgcatgcccgcaatcccggctactcaggaggccgatgcaggagaatcgcttgaaaccgggaggcagaggttgcggtgagccaagatcgcgccaccgcactgcagtctaggccacgagagtgaaactctgtctcgggggaaaaaaaaacaattaaaaacggtgtgggcacagtggcgcgtgcccgcggtcccaggctctgtactctggaggctgaggtggaaggatcgctcgagtccaggagcgtccacgctgcagggagtgagttacgacggcaccactgccggggtgacggagcgagatgccgtctctaaatcagtcaatgagatcactggaaggcgctctctgcgtctcactttccaagagggtctctttgggccaagcag

SEQ ID NO: 39623 - DNA, 1700 bp, Artificial sequence
  DNA replication origin
gccagagaaagagagtaagacagaagataggcacagacagagagacaggcacagagagagacagagagacagagaaaaagaaagagagagacagacagacagagaaagagacagacagagagagaaagagagaaacagacagaaagagagagagagagagagagaaacagaaagggagggagagagagggagagacagacagacagacggacaggcagagaaggagagtaagacagaagacagacacacacagtgagagagacagacagagagagagagagagagagaggcagagacagagacacacacacagtcctgaaagacgacgagagagagagagagaggccgagaccgagaccgggagaaagagagagaccgaccgagaaagaccgagatggaccgagagaccgagagaaaccgatagaaagagagagaccgagagagagagaggcagaggcagagacagagaccgggagaaagagagagacggacagagaaagaccgagatggacagagagacagagagaaacagacagaaagagagagagacagagagagagagagacagacagacagacaggcaggcagagaaacagagtaagacagaagataggcacagagagagagagacagagagacgcagaaaaagaaagagagaggcagacagagaaagacggagacaggcagagagaaacagacagaaagagagagagagagagaaagagacaggaagggagagagagagacagacagacagagaaagagaataagacagaagacagacacagtgagacaggcagagagagagagacagagagagagagacagagacggagacagagagaaggagacagacagacagagaaagagacagacagagaaagacagagacagacagagagagaaagagaaacaggcagagagagagagagagagagagagagagagcgagagagaaacagaaagggagggagagagagagagacagacagacagacggacaggcagagaaggagagtaagacagaggacagacacagtgagagagacaagcagagagagagagagagacagagacagagacagacagaaagaaagagagagacagacagaaaaagacagagacggacagagagagacagagaaacagagagaaagagagaaagacagagagagcgagagagggagagagagagacagtgagaaacagacagaaagagagagagacggagagaaacagacagggagagggggagagagagagagagagagagagaaacagaaagggagggagagacagacagacaggcagagaaagagagtaagacagaagataggcacagagagagagagagagagacagacagacagacagagagagagagaccgacagagagacacagaaaaagaaagagagaggcagacagacagagaaagagacagacagagaaagacatagacagacagagagagacagaaacagacagaaagagagagagagaaacagacagggagggagagagagaaacaaacagggagggagagagagagagagagacagacggggagagaaagagagtaagacagaagacagacacagtgagacaggcagagagggagagagagagacaaagacagagacagagacagagagaaagaaagagacagacagacagagaaagagacacagagagaaagaca

SEQ ID NO: 39624 - DNA, 3848 bp, Artificial sequence
  DNA replication origin
ctgctggccggagggcggagaaactaaaacatcgtgataaaaggtgaccgagacccagccagggtgaagctttcctagggagggaggcctgaggcgggaagcagcggggggaaaagcctcacaactgcagacccgcccgcttgcccacgcgggtcaaggggctatgccatcggcccaagctgcctccggggaagtgggaccgtgccgcccccatcttcaaaaacggtggcccccgagtgaggcctgacgcccaccgatgcaaatgtcagcctggcaagaatgagatcgccggcaaggggtgggggaaggggagagaagacggaggcacaccggggtggctctggaaggtttccaagcagggtgttgggaggcggggggggggggggcggtttgggggaaacccacctaaccgactcactaaattaaggtgaagggacgtgggtagtggggggagccggggggcaacttgaaaattaaactgacccttcccaaagcccaagtagaagagtctaggcgccaaaacacaaagaaaagtaaagcgccgatcaaagaacaatagggcccccgccagggcggaggttccctaggcgaggttccctaggcaacgagggagagagggaggggcctccagaagggagagagagaaacccgttgccccaggctcggtgaagtcggcgagacctccctccgtgtcacgtcgactttcaataacagtggccgctaggtgatgcccgaagacaaccgatgcctgcctgcaaatgtccgtcagcagggaaaagaattaatgaattaattaatttccgtatttatttagagaccgagtctcactcactctacagcctgggccgtagtgcagtggcgcgatctcggctccctgcagcctccgcttccctggttcaagcgattctcccgcctcagcctcccgaggagctggcattacaggggcctgccccaccgctcccgactcagctttgtatttttagtagagacggggtttcgccgtgttgcgtccggccttaacagtttatgttgaagtcgaggagcttatcggggaaataggagaagtacggacgccacacgtgaccgagagaaaagtctgaaaatgcccctcgcatccaagcggggacccggcctcgacctcccgaaatcgtacaccgagtggggaagcccagcaaggcccgcctgtctagattcctctcggcctctctaagcaccgaagcacgcgcttctcactctcgtggaaggggcagggccctacccggcacgggggtgtctgacagactgacagagaaagagacagacatagaaagacagagatggacagcgagagatagagagaaacagacagaaagagaaagagagagagacagagacagagacagagagagagagacagacagacagacagggagggagaaagacaaacagagagagagagagagagagagagagacagacagacagacagacagacagagaaacagacagaaagagagagagagacggagagagagtgagtgagagggagagagagagacatggagggagagagacagacagagagagaaacagacagaaagagagagagagacggagagagagtgagtgagagagagagagagagacatggagggagagagacagacagagagagaaacagacagaaagagagagagacggagagagagtgagtgagagagagagagagacatggagggagagagacagacagacagagaggcaggcagagaaagagagtaagacagaagacagacacagtgagagagacaggcagagagagagagagacagagacagagagagagaaagagaaagagacagacagagatggacagagagacagagacagagagagaaacagacagacagggagggagggacggagacaggcagagagagagagacaggcagacagccagagaaagagagtaagacagaagataggcacagaaagagagacagacacagagagagacagagagacagagaaaaagaaagagagagacagacagacagagaaagagacagacagagagagagagaggcagagagagaaacagacagacaggagagagagagaaacagaaagggagggagagagagggagagacagacagacagacggacaggcagagaaggagagtaagacagaagacagacacacacagtgagagagacagacagagagagagagagagagagagagagagagagagagaggcagagacagagacagagagaaagagagagacagacatagaaagacagagatggacagagagacagagagaaacacccagaaagagagagagagacagagaaagagaaagggagggagagagagagagagagagagagagagagacagacacacagacaggcaggcaggcaaggaaacagagtaagacagaagataggaacagagagagagagagagagacagagagacgcagaaaaagaaagagagaggcagacagacagagaaagacagagacagacagagagaaacaggcagaaagagagagagagagagaaaaacagacaggaaaggagagagagagagagacagagagagaaagagaataagacagaagacagacacagtgagagaggcagagagagagagagagagagagagacagagacagagacagagagaaagagacagacagacagagaaagagacagacagagaaagacagagagagaaagagagaaacaggcagagagagagagagctagcgagagagaaacagaaaggtagggagagagagagagagacagacagacagatggacaggcagagaaggagagtaagacagaagacagacacagtgagagagacaaggagagagagagagagagagacagagacagagacagagacagacgacagaaagaaagagagagacagacagacagaaaaagacagagacggacagagagagacagagaaacagagagaaagagagaaagacagagagagcgagagagggagagagagagaaacagaaaggcagggagagagacagagagagacagacagatagacaggcagagaaagagagtaagacagaagataggcacagagagagagacagagagacacagaaagagaaagagagaggcagacagacagagaaagggacagacagagaaagacagagacagagagagagagagagagagagagagagaaacagacagaaagagagagggacagggagagagagagacagacagacagacggacaggcagagaaggagagtaagacaaaagatacacacagagagggagagacagagagagagagagacagagacagagacagagagaatgaaacagacagacagagagagacagtgagaaacagacagaaagagagggagacagagagaaacagacagggaggggggagagagagagagagagagagaagcagaaagggagggagagacagagagagacagacagacaggcagagaaagagagtaagacagaagataggcacagagagagagagagacagacagagagacacagaaaaagaaagagaggggcagacagacagagaaagagacagatagagaaagagagaggcagacagagagagacagaaacagacagaaagagagagagagagaaacagacagggagggagtgagagagagacagacggggagagaaagagagtaagatagaagacagacacagtgagacaggcagagagggagagagagggacaaagacagagacagaaagaaagaaagagacagacagacagacagacagacagagaaagagacacagagagaaagacagagacg

SEQ ID NO: 39625 - DNA, 3108 bp, Artificial sequence
  DNA replication origin
cccgcaagcggtgatggcctaaggaagcccctccgcccaagaagcgatattcatttctagcctgtagccacccaagagggagaatcgggctcgccacagaccccacaacccccaacccaccccacccccacccctcccacctcgtgaaatgggctctcgctccgtcaggctctagtcacaccgtgtggttttggaacctccagcgtgtgtgcgtgggttgcgtggtggggtggggccggctgtggacagaggaggggataaagcggcggtgtcccgcgggtgcccgggacgtggggcgtggggcgtgggtggggtggccagagccttgggaactcgtcgcctgtcgggacgtctcccctcctggtcccctctctgacctacgctccacatcttcgccgttcagtggggaccttgtgggtggaagtcaccatccctttggactttagccgacgaaggccgggctcccaagagtctccccggaggcggggccttgggcaggctcacaaggatgctgacggtgacggttggtgacggtgatgtacttcggaggcctcgggccaatgcagaggtatccatttgacctcggtgggacaggtcagctttgcggagtcccgtgcgtccttccagagactcatccagcgctagcaagcatggtcccgaggatcccagctcccagcagaggcacttttggtcacacaggatcctgggcaggaaagttctcagcaggcttaggcctcctagccaaaaagccaaaaccacttctgggatttttttcaaagagccagtggttccacaaggggccgtgggtagttgtggaaatggagagaagtgtttgcacgtacatatttgagacaggacggacagggctcggtcacagatcacttaggacacgggcagatgcacattgagaaaactcttccggcatcctaggggaacagaggtacgatttttcgagacagtcgagggagaagccaccccagattttaggattggatctttattcatatgtagtttctatgaggtatccaagtccagaaatcaactcgccagttctgtacagcattctgtagggagatcaaatctgggatgtcagaagtgaagaattcaggccttggtaagggattagattagatgtacttgagcttcttttgcaaaaaaagagagggcgggggatagcgagagccagagaccgagacagacagacggacagacagacagagagagagagagagagagagagacagagagacagagacagagacagacagagagagacaacgatacacagagagagaaagacagaaagagagagagagacagataaagagacagacggagagagacagataaagagacagacggagaaagacagagatggacagagacagagagaaacagaaagagagagaaacagacaggaagggagagagacaggcagagagagagagacaaacagacaggcagacagacaggcagagaaagagagtaagacagaaggcagacacacacacacacacacacacacatacacacacacacacacacccccacagagagagagagacagagagagagacagagacagacagagagacagagagaaagagacagagagagaaagacagacagagagaaacagacagaaagagagacacagacagagacagagaaacagccgacaggggggagagagagagagagacagacagagagagacagacagacagacaggcagagaaagacagtaagacagaagacagacacacagagagagagagagagacagagacagaaagaaagacaaagacagagagagagagagagagagaaacagacagggggagagagagagagagacagacagacagggagagagagagagagagactaagacagaagacagacacagtgagagagacagagacagagagaaggaaagacaaagacagacagacaaagagacagacagagaaagacagagacggacagagagacagagagaaacagaaagagagagagagacacacagagagagagagtgagagagacaggcaggcagagagagagagtaagacagaagacagagtgagagagacaggcagagagagacagagagaaggaaagagagagacagtcagagaaagacagagacggagagagagaaacagaaagagagagagagacagagacagagagaaacatacagacagggagagagagagagagagaccgacagacagacagagaaagggagtaagacagaagacagacacagtgagagagacaggcagagagagagagagagagagaggcagagagagagaaacagacaggcagagagagagagacacagagagagagagagagagaagacagacagagaaagagagagacagagacagacagagagacagagagagggggaggaagggcgtgctcaagaaataatcacacatattttataatgcttttgatcccataaacggtggccggggtatactttgaaaacaacgacaacgacaacaacaacgacaacgacaacagcaacgacgacaacaacaacaacaacaacagcaacaagagcagcagcagcattcgcctacggatttctagaaaataagatgtcatgatgaaggatagtaaacatcaaccggctctcactgcacgttgagagagtcacaaaagcgctagttcacaacaggaaaaaacggcagctaacgtgtcttggggaaaatagacgtcttcctgaaaactggggatttctacttcacctgaaaagaaagacatacgagaaaggaaaaacacgaacaaaacaaaacagaacgaaacaaaacaagccaacaaacacgggccaaggcgccgtccctggaaatcttaagtgagcaaagttattagttttcagaaagcgtttctattttgggcaagtactgagaaggcccagactagagccgtggcgcccttcgcattgtgaaactctgctggccggagggcggagaaactaaaacatcgtgataaaaggtgaccgagacccagccagggtgaagctttcctagggagggaggcctgaggcgggaagcagcggggggaaaagcctcacaactgcagacc

SEQ ID NO: 39626 - DNA, 732 bp, Artificial sequence
  DNA replication origin
catctgcccgtgtcctaagtgatctgtgaccgagccctgtccgtcctgtctcaaatatgtacgtgcaaacacttctctccatttccacaactacccacggccccttgtggaaccactggctctttgaaaaaaatcccagaagtggttttggctttttggctaggaggcctaagcctgctgagaactttcctgcccaggatcctgtgtgaccaaaagtgcctctgctgggagctgggatcctcgggaccatgcttgctagcgctggatgagtctctggaaggacgcacgggactccgcaaagctgacctgtcccaccgaggtcaaatggatacctctgcattggcccgaggcctccgaagtacatcaccgtcaccaaccgtcaccgtcagcatccttgtgagcctgcccaaggccccgcctccggggagactcttgggagcccggccttcgtcggctaaagtccaaagggatggtgacttccacccacaaggtccccactgaacggcgaagatgtggagcgtaggtcagagaggggaccaggaggggagacgtcccgacaggcgacgagttcccaaggctctggccaccccacccacgccccacgccccacgtcccgggcacccgcgggacaccgccgctttatcccctcctctgtccacagccggccccaccccaccacgcaacccacgcacacacgctggaggttccaaaaccacacggtgtgactagagc

SEQ ID NO: 39627 - DNA, 641 bp, Artificial sequence
  DNA replication origin
aatggatacctctgcattggcccgaggcctccgaagtacatcaccgtcaccaaccgtcaccgtcagcatccttgtgagcctgcccaaggccccgcctccggggagactcttgggagcccggccttcgtcggctaaagtccaaagggatggtgacttccacccacaaggtccccactgaacggcgaagatgtggagcgtaggtcagagaggggaccaggaggggagacgtcccgacaggcgacgagttcccaaggctctggccaccccacccacgccccacgccccacgtcccgggcacccgcgggacaccgccgctttatcccctcctctgtccacagccggccccaccccaccacgcaacccacgcacacacgctggaggttccaaaaccacacggtgtgactagagcctgacggagcgagagcccatttcacgaggtgggaggggtgggggtggggtgggttgggggttgtggggtctgtggcgagcccgattctccctcttgggtggctacaggctagaaatgaatatcgcttcttgggcggaggggcttccttaggccatcaccgcttgcgggactacctctcaaaccctcccttgaggccacaaaatagattccaccccacccatcgacgtttccc

SEQ ID NO: 39628 - DNA, 1092 bp, Artificial sequence
  DNA replication origin
cgggagcagcgccgggccggggacgccctcccggccgcccgtgccacacgcagggggccggcccgtgtctccagagcgggagccggaagcattttcggccggcccctcctacgaccgggacacacgagggaccgaaggccggccaggcgcgacctctcgggccgcacgcgcgctcagggagcgctctccgactccgcacggggactcgccagaaaggatcgcggcagagggaccgcggcccggcccggggaccgctccccggcacccgggggacgggggcgggacggtccccggctccccacggggactcggaaacgaattcggccgccgcctcagacggccaggatgagcgcggacccgcgaccgggccgggaagggcgtccccagcctcccgcgccacgcgcggcgggtccccgcgggtcgcggctcgggcctcgggagctacggcgcgctggtcgaccggcccgggcagccccacgcccgccgcgggcccagaagcgcagcgacagcctctcccccacataaacctgcacgccagagctgtgactcacaagcgacgcgccacagctctggcgccaccgggccagccgggctgacgaccgcgggctttccggagctctgcctagctcacagcggggacggtcccctccctcggcagctgccaccgcagctccggaagccgagagcacgatctcaaagcggccgccagatggagcccgacaaccgccgcggacgtcagcgagacagatccggctggcagggcggcccgtggaccgcgaaagcgaaaccgtgagtcgagaagctcttcccgaggccgaaaacgcagcccctctgccccaaccccacacaaacggtgcccaaaacgcgtctctgcctcgaccgcgacagagtcagaagacaacccacggcgcgtgggtgtttggagatgcctctcggaagcagggagggagggagggagggagtgagggagggagaaagaacacacaaggactcggtcgcgggtcgctgcagacacacggagaggcagaatgggtaggctcttccggaatccacgcagagacagacggggggaggggagtggggaaaagagac

SEQ ID NO: 39629 - DNA, 988 bp, Artificial sequence
  DNA replication origin
agatcgtgctctcggcttccggagctgcggtggcagctgccgagggaggggaccgtccccgctgtgagctaggcagagctccggaaagcccgcggtcgtcagcccggctggcccggtggcgccagagctgtggcgcgtcgcttgtgagtcacagctctggcgtgcaggtttatgtgggggagaggctgtcgctgcgcttctgggcccgcggcgggcgtggggctgcccgggccggtcgaccagcgcgccgtagctcccgaggcccgagccgcgacccgcggggacccgccgcgcgtggcgcgggaggctggggacgcccttcccggcccggtcgcgggtccgcgctcatcctggccgtctgaggcggcggccgaattcgtttccgagtccccgtggggagccggggaccgtcccgcccccgtcccccgggtgccggggagcggtccccgggccgggccgcggtccctctgccgcgatcctttctggcgagtccccgtgcggagtcggagagcgctccctgagcgcgcgtgcggcccgagaggtcgcgcctggccggccttcggtccctcgtgtgtcccggtcgtaggaggggccggccgaaaatgcttccggctcccgctctggagacacgggccggccccctgcgtgtggcacgggcggccgggagggcgtccccggcccggcgctgctcccgcgtgtgtcctggggttgaccagagggccccgggcgctccgtgtgtggctgcgatggtggcgtttttggggacaggtgtccgtgtcgcgcgtcgcctgggccggcggcgtggtcggtgacgcgacctcccggccccgggggaggtatatctttcgctccgagtcggcattttgggccgccgggttattgctgacacgctgtcctctggcgacctgtcgctggagaggttgggcctccggatgcgcgcggggctctggcctaccggtgacccggctagccggccgcgctcctgctt

SEQ ID NO: 39630 - DNA, 736 bp, Artificial sequence
  DNA replication origin
gttgtccgccgccccttccccggagtggggggttggccggagccgatcggctcgctggccggccggccggcctccgctcccggggggctcttcgtgatcgatgtggtgacgtcgtgctctcccgggccgggtccgagccgcgacgggcgaggggcggacgttcgtggcgaacgggaccgtccttctcgctccgccccgcgggggtcccctcgtctctcctctccccgcccgccggcggtgcgtgtgggaaggcgtggggtgcggaccccggcccgacctcgccgtcccgcccgccgccttctgcgtcgcggggcgggccggcggggtcctctgacgcggcagacagccctcgctgtcgcctccagtggttgtcgacttgcgggcggcccccctccgcggcggtgggggtgccgtcccgccggcccgtcgtgctgccctctcggggggtttgcgcgagcgtcggctccgcctgggcccttgcggtgctcctggagcgctccgggttgtccctcaggtgcccgaggccgaacggtggtgtgtcgttcccgcccccggcgccccctcctccggtcgccgccgcggtgtccgcgcgtgggtcctgagggagctcgtcggtgtggggttcgaggcggtttgagtgagacgagacgagacgcgcccctcccacgcggggaagggcgcccgcctgctctcggtgagcgcacgtcccgtgctcccctctggcgggtgcgcgcgg

SEQ ID NO: 39631 - DNA, 721 bp, Artificial sequence
  DNA replication origin
tccctcaggtgcccgaggccgaacggtggtgtgtcgttcccgcccccggcgccccctcctccggtcgccgccgcggtgtccgcgcgtgggtcctgagggagctcgtcggtgtggggttcgaggcggtttgagtgagacgagacgagacgcgcccctcccacgcggggaagggcgcccgcctgctctcggtgagcgcacgtcccgtgctcccctctggcgggtgcgcgcgggccgtgtgagcgatcgcggtgggttcgggccggtgtgacgcgtgcgccggccggccgccgaggggctgccgttctgcctccgaccggtcgtgtgtgggttgacttcggaggcgctctgcctcggaaggaaggaggtgggtggacgggggggcctggtggggttgcgcgcacgcgcgcaccggccgggcccccgccctgaacgcgaacgctcgaggtggccgcgcgcaggtgtttcctcgtaccgcagggccccctcccttccccaggcgtccctcggcgcctctgcgggcccgaggaggagcggctggcgggtggggggagtgtgacccaccctcggtgagaaaagccttctctagcgatctgagaggcgtgccttgggggtaccggatcccccgggccgccgcctctgtctctgcctccgttatggtagcgctgccgtagcgacccgctcgcagaggaccctcctccgcttccccctcgacggggttggg

SEQ ID NO: 39632 - DNA, 2293 bp, Artificial sequence
  DNA replication origin
cttcggccgggccccgggccctcgaccggaccggtgcgcgggcgctgcggccgcacggcgcgactgtccccgggccgggcaccgcggtccgcctctcgctcgccgcccggacgtcggggccgccccgcggggcgggcggagcgccgtccccgcctcgccgccgcccgcgggcgccggccgcgcgcgcgcgcgcgtggccgccggtccctcccggccgccgggcgcgggtcgggccgtccgcctcctcgcgggcgggcgcgacgaagaagcgtcgcgggtctgtggcgcggggccccggtggtcgtgtcgcgtggggggcgggtggttggggcgtccggttcgccgcgccccgccccggccccaccggtcccggccgccgcccccgcgcccgctcgctccctcccgtccgcccgtccgcggcccgtccgtccgtccgtcgtcctcctcgcttgcggggcgccgggcccgtcctcgcgaggccccccggccggccgtccggccgcgtcggggcctcgccgcgctctaccttacctacctggttgatcctgccagtagcatatgcttgtctcaaagattaagccatgcatgtctgagtacgcacggccggtacagtgaaactgcgaatggctcattaaatcagttatggttcctttggtcgctcgctcctctcctacttggataactgtggtaattctagagctaatacatgccgacgggcgctgacccccttcgcgggggggatgcgtgcatttatcagatcaaaaccaacccggtcagcccctctccggccccggccggggggcgggcgccggcggctttggtgactctagataacctcgggccgatcgcacgccccccgtggcggcgacgacccattcgaacgtctgccctatcaactttcgatggtagtcgccgtgcctaccatggtgaccacgggtgacggggaatcagggttcgattccggagagggagcctgagaaacggctaccacatccaaggaaggcagcaggcgcgcaaattacccactcccgacccggggaggtagtgacgaaaaataacaatacaggactctttcgaggccctgtaattggaatgagtccactttaaatcctttaacgaggatccattggagggcaagtctggtgccagcagccgcggtaattccagctccaatagcgtatattaaagttgctgcagttaaaaagctcgtagttggatcttgggagcgggcgggcggtccgccgcgaggcgagccaccgcccgtccccgccccttgcctctcggcgccccctcgatgctcttagctgagtgtcccgcggggcccgaagcgtttactttgaaaaaattagagtgttcaaagcaggcccgagccgcctggataccgcagctaggaataatggaataggaccgcggttctattttgttggttttcggaactgaggccatgattaagagggacggccgggggcattcgtattgcgccgctagaggtgaaattcttggaccggcgcaagacggaccagagcgaaagcatttgccaagaatgttttcattaatcaagaacgaaagtcggaggttcgaagacgatcagataccgtcgtagttccgaccataaacgatgccgaccggcgatgcggcggcgttattcccatgacccgccgggcagcttccgggaaaccaaagtctttgggttccggggggagtatggttgcaaagctgaaacttaaaggaattgacggaagggcaccaccaggagtggagcctgcggcttaatttgactcaacacgggaaacctcacccggcccggacacggacaggattgacagattgatagctctttctcgattccgtgggtggtggtgcatggccgttcttagttggtggagcgatttgtctggttaattccgataacgaacgagactctggcatgctaactagttacgcgacccccgagcggtcggcgtcccccaacttcttagagggacaagtggcgttcagccacccgagattgagcaataacaggtctgtgatgcccttagatgtccggggctgcacgcgcgctacactgactggctcagcgtgtgcctaccctacgccggcaggcgcgggtaacccgttgaaccccattcgtgatggggatcggggattgcaattattccccatgaacgaggaattcccagtaagtgcgggtcataagcttgcgttgattaagtccctgccctttgtacacaccgcccgtcgctactaccgattggatggtttagtgaggccctcggatcggccccgccggggt

SEQ ID NO: 39633 - DNA, 591 bp, Artificial sequence
  DNA replication origin
gcggcggcggcggcgcggccccggccggggagcggagtccgcggtggaggcgcgggaggggccgggcccctcccgacgggactcccccgcgggcccaccaccgcccccgacccacgggcggacgggcgatccccccaaggggtctttaaacctccgcgccggaacgcgctaggtacctggacggcgggggggcggacgaggaggcgggggaggggaccggcgtccggcccccgaccctcgagacgccctagcgggaaggccggggagagcgagcggggccgtgcccggcggcgcggagcggcgcggcggaggcgacgggaatccggccggccccgaagacggggagccggcgcggcggggccggacgacgggccccggcggggaggagggcaccgagacccccccagacccgccgcgacgccgccgagaaccgcccccgcgcccgccgacacccacgtcgtcggggccgcggccggggaccgctccccgccgcccgccggccccacgacacgcgcacaccaacgacacgcccttctttctctttctctctctctctctctctcccccgtctccctcccgagttctccggct

SEQ ID NO: 39634 - DNA, 860 bp, Artificial sequence
  DNA replication origin
ccgccgcgccggctccccgtcttcggggccggccggattcccgtcgcctccgccgcgccgctccgcgccgccgggcacggccccgctcgctctccccggccttcccgctagggcgtctcgagggtcgggggccggacgccggtcccctcccccgcctcctcgtccgcccccccgccgtccaggtacctagcgcgttccggcgcggaggtttaaagaccccttggggggatcgcccgtccgcccgtgggtcgggggcggtggtgggcccgcgggggagtcccgtcgggaggggcccggcccctcccgcgcctccaccgcggactccgctccccggccggggccgcgccgccgccgccgccgcggcggccgtcgggtgggggctttacccggcggccgtcgcgcgcctgccgcgcgtgtggcgtgcgccccgcgccgtgggggcgggaacccccgggcgcctgtggggtggtgtccgcgctcgcccccgcgtgggcggcgcgcgcctccccgtggtgtgaaaccttccgacccctctccggagtccggtcccgtttgctgtctcgtctggccggcctgaggcaaccccctctcctcttgggcgggggggggggggacgtgccgcgccaggaagggcctcctcccggtgcgtcgtcgggagcgccctcgccaaatcgacctcgtacgactcttagcggtggatcactcggctcgtgcgtcgatgaagaacgcagctagctgcgagaattaatgtgaattgcaggacacattgatcatcgacacttcgaacgcacttgcggccccgggttcctcccggggctacgcctgtctgagcgtcgcttgccgatcaatcgcccccgggg

SEQ ID NO: 39635 - DNA, 620 bp, Artificial sequence
  DNA replication origin
cacccccgcgccgccccgccggagcgggacgaccggagggaggggcacgggccgggggcgggacgggcgccgcacgccccgacccgtctcccccgcggaggtcggggggacgggtccgaggacgcggcggcggagccgccccgccccgacgcggaagctcgggacggggccccggcgcggcgcggcgcggccgcgagccggaggcgggcgcgcgacggcggacgacaccgcggcgtcccgcgggtcgccgccggggacacgcgaaccccggcgccgcggccacgggcgcggccgggcgggccgcggggcgggctcccggccccggccgacgcgccgcgaggcgagccgggcgggcgggcgcgcgtacgcgcggggagggcgaggaggacgggcggggcctcggaggaggggcggcggggaggaggaggggcgcgggagcggcggtcggccggacgccgggccgccaccgggggcgggcggcgaaccgcggcgaccgggacgcgctcccccgaccctctctccccgccggcacccttccccttccggacccgccttcctcctcccccaccaccacaccgcacgcaacacgcccccaccgccgacgacgcgcgacgacgacg

SEQ ID NO: 39636 - DNA, 667 bp, Artificial sequence
  DNA replication origin
ctccccgcgcgtacgcgcgcccgcccgcccggctcgcctcgcggcgcgtcggccggggccgggagcccgccccgcggcccgcccggccgcgcccgtggccgcggcgccggggttcgcgtgtccccggcggcgacccgcgggacgccgcggtgtcgtccgccgtcgcgcgcccgcctccggctcgcggccgcgccgcgccgcgccggggccccgtcccgagcttccgcgtcggggcggggcggctccgccgccgcgtcctcggacccgtccccccgacctccgcgggggagacgggtcggggcgtgcggcgcccgtcccgcccccggcccgtgcccctccctccggtcgtcccgctccggcggggcggcgcgggggtgccgccggccgcgcgctctctctcccgtcgcctctccccctcgccgggcccgtctcccgacggagcgtcgggcgggcggtcgggccggcgcgattccgtccgtccgtccgccgagcggcccgtccccctccgagacgcgacctcagatcagacgtggcgacccgctgaatttaagcatattagtcagcggaggagaagaaactaaccaggattccctcagtaacggcgagtgaacagggaagagcccagcgccgaatccccgccccgcggcggggcgcgggacatgtggcg

SEQ ID NO: 39637 - DNA, 702 bp, Artificial sequence
  DNA replication origin
ggtctcgctccctcggccccgggattcggcgagtgctgctgccgggggggctgtaacactcggggggggtttcggtcccgccgccgccgccgccgccgccaccgccgccgccgccgccgccccgacccgcgcgccctcccgagggaggacgcggggccggggggcggagacgggggaggaggaggacggacggacggacggacggggccccccgagccaccttccccgccgggccttcccagccgtcccggagccggtcgcggcgcaccgccgcggtggaaatgcgcccggcggcggccggtcgccggtcgggggacggtcccccgccgaccccacccccggccccgcccgcccacccccgcacccgccggagcccgccccctccggggaggaggaggaggggcggcgggggaagggagggcgggtggaggggtcgggaggaacggggggcgggaaagatccgccgggccgccgacacggccggacccgccgccgggttgaatcctccgggcggactgcgcggaccccacccgtttacctcttaacggtttcacgccctcttgaactctctcttcaaagttcttttcaactttcccttacggtacttgttgactatcggtctcgtgccggtatttagccttagatggagtttaccacccgctttgggctgcattcccaagcaacccgactccgggaagaccc

SEQ ID NO: 39638 - DNA, 1109 bp, Artificial sequence
  DNA replication origin
ctcccggcgcccacccccgcggggaatcccccgcgaggggggtctcccccgcgggggcgcgccggcgtctcctcgtgggggggccgggccacccctcccacggcgcgaccgctctcccacccctcctccccgcgcccccgccccggcgacggggggggtgccgcgcgcgggtcggggggcggggcggactgtccccagtgcgccccgggcgggtcgcgccgtcgggcccgggggaggttctctcggggccacgcgcgcgtcccccgaagagggggacggcggagcgagcgcacggggtcggcggcgacgtcggctacccacccgacccgtcttgaaacacggaccaaggagtctaacacgtgcgcgagtcgggggctcgcacgaaagccgccgtggcgcaatgaaggtgaaggccggcgcgctcgccggccgaggtgggatcccgaggcctctccagtccgccgagggcgcaccaccggcccgtctcgcccgccgcgccggggaggtggagcacgagcgcacgtgttaggacccgaaagatggtgaactatgcctgggcagggcgaagccagaggaaactctggtggaggtccgtagcggtcctgacgtgcaaatcggtcgtccgacctgggtataggggcgaaagactaatcgaaccatctagtagctggttccctccgaagtttccctcaggatagctggcgctctcgcagacccgacgcacccccgccacgcagttttatccggtaaagcgaatgattagaggtcttggggccgaaacgatctcaacctattctcaaactttaaatgggtaagaagcccggctcgctggcgtggagccgggcgtggaatgcgagtgcctagtgggccacttttggtaagcagaactggcgctgcgggatgaaccgaacgccgggttaaggcgcccgatgccgacgctcatcagaccccagaaaaggtgttggttgatatagacagcaggacggtggccatggaagtcggaatccgctaaggagtgtgtaacaactcacctgccgaatcaactagccctgaaaatggatggcgctggagcgtcgggcccatacccggccgtcgccggcagtcgagag

SEQ ID NO: 39639 - DNA, 1116 bp, Artificial sequence
  DNA replication origin
tagggcggggggacgaaccgccccgccccgccgcccgccgaccgccgccgcccgaccgctccccgcccccagcggacgcgcgcgcgacgagacgtggggtgggggggggggcgcgccggcgcccgccgggctccccgggggcggccgcgacgcccgccgcagctggggcgatccacgggaagggcccggctcgcgtccagagtcgccgccgccgccggccccccgggtgcccgggcccccctcgcgggggaccgtgcccccgccgccggggccccgcggcgggccgccgccggcccctgccgccccgacccttctccccccgccgccgcccccacgcggcgctcccccggggaggggggaggacggggagcgggggagagagagagagagagggcgcggggcggggagggagcgagcggcgcgcgcggggtggggcgggggagggccgcgaggggggtgccccgggcgtggggggggcggcggcgcctcgtccagccgcggcgcgcgcccagccccgcttcgcgccccagcccgaccgacccagcccttagagccaatccttatcccgaagttacggatccggcttgccgacttcccttacctacattgttccaacatgccagaggctgttcaccttggagacctgctgcggatatgggtacggcccggcgcgagatttacaccctctcccccggattttcaagggccagcgagagctcaccggacgccgccggaaccgcgacgctttccaaggcacgggcccctctctcggggcgaacccattccagggcgccctgcccttcacaaagaaaagagaactctccccggggctcccgccggcttctccgggatcggtcgcgttaccgcactggacgcctcgcggcgcccatctccgccactccggattcggggatctgaacccgactccctttcgatcggccgagggcaacggaggccatcgcccgtcccttcggaacggcgctcgcccatctctcaggaccgactgacccatgttcaactgctgttcacatggaacccttctccacttcggccttcaaagttctcgtttgaatatttgctactaccaccaagatctgcacctgcggcggctccacc

SEQ ID NO: 39640 - DNA, 896 bp, Artificial sequence
  DNA replication origin
cccgggggagcgccgcgtgggggcggcggcggggggagaagggtcggggcggcaggggccggcggcggcccgccgcggggccccggcggcgggggcacggtcccccgcgaggggggcccgggcacccggggggccggcggcggcggcgactctggacgcgagccgggcccttcccgtggatcgccccagctgcggcgggcgtcgcggccgcccccggggagcccggcgggcgccggcgcgcccccccccccaccccacgtctcgtcgcgcgcgcgtccgctgggggcggggagcggtcgggcggcggcggtcggcgggcggcggggcggggcggttcgtccccccgccctacccccccggccccgtccgccccccgttcccccctcctcctcggcgcgcggcggcggcggcgggcggcggaggggccgcgggccggtcccccccgccgggtccgcccccggggccgcggttccgcgcggcgcctcgcctcggccggcgcctagcagccgacttagaactggtgcggaccaggggaatccgactgtttaattaaaacaaagcatcgcgaaggcccgcggcgggtgttgacgcgatgtgatttctgcccagtgctctgaatgtcaaagtgaagaaattcaatgaagcgcgggtaaacggcgggagtaactatgactctcttaaggtagccaaatgcctcgtcatctaattagtgacgcgcatgaatggatgaacgagattcccactgtccctacctactatccagcgaaaccacagccaagggaacgggcttggcggaatcagcggggaaagaagaccctgttgagcttgactctagtctggcacggtgaagagacatgagaggtgtagaataagtgggaggcccccggcgccccccc

SEQ ID NO: 39641 - DNA, 1089 bp, Artificial sequence
  DNA replication origin
ggacgagccgccccggcggtgaacggggaggaggcgggaaccgaagaagcggggcgcgccgaccggggtcgcgcgccctcccccccacccccaccaccacgcccgcggtcggcgggagaggccgggagggaggaagacgaacggaaggacggacggcgccggacgcgcacgccccgccgggccccccgcacgcacgcgcgcgcgcgcgcgcggacaaacccttgtgtcgagggctgactttcaatagatcgcagcgagggagctgctctgctacgtacgaaaccccgacccagaagcaggtcgtctacgaatggtttagcgccaggttccccacgaacgtgcggtgcgtgacgggcgagggggcggccgcctttccagccgcgccccgtttcccaggacgaagggcactccgcaccggaccccggtcccggcgcgcggcggggcacgcgccctcccgcgcgcgcggggcgcgtggaggggggggcggcccgccggcggggacaggcgggggaccggctatccgaggccaaccgaggctccgcggcgctgccgtatcgttccgcctgggcgggattctgacttagaggcgttcagtcataatcccacagatggtagcttcgccccattggctcctcagccaagcacatacaccaaatgtctgaacctgcggttcctctcgtactgagcaggattaccatggcaacaacacatcatcagtagggtaaaactaacctgtctcacgacggtctaaacccagctcacgttccctattagtgggtgaacaatccaacgcttggtgaattctgcttcacaatgataggaagagccgacatcgaaggatcaaaaagcgacgtcgctatgaacgcttggccgccacaagccagttatccctgtggtaacttttctgacacctcctgcttaaaacccaaaaggtcagaaggatcgtgaggccccgctttcacggtctgtattcgtactgaaaatcaagatcaagcgagcttttgcccttctgctccacgggaggtttctgtcctccctgagctcgccttaggacacctgcgttaccgtttgacaggtgtaccgccccag

SEQ ID NO: 39642 - DNA, 1789 bp, Artificial sequence
  DNA replication origin
atacctctcctatggaaaatgccagggcggcggtgggagcctcggctgggggagaagcggggacaagggggagagggaaggaggccctcgggaggtttcggcaccgaaaacccactcagccaagctccctccgtgtttccgggtccaaggtacaccccgggagacggcaagagaaacgttcacaccgtgctttccgtcttcgtgtttatttctttcatcttttccattttacgagagatgctcatttcaacaaccagacggcggatgtgacgggagaagcgtcaaggccaggagtttgagaccagcgtgagcaacagagcaacacacgtaggagagcccagctgaaagaaatgaaagaggaggaggaggaggaggaggaggaggaggaggaggaggaggaggaggacgacgacaagggggggtggggggggaggagaaggaaagaaaagaaaagaaaaaaaagaaaaaggaaaacaaccaccaccaagaaagttaagattctccaacggtcggaagttgaagaccagcctgaccaagatggagaaaccccatctgtagtaaaaatagaaaaattagccgggcacgatggctcatctctgtcattccagctactcgggaaggctgaggcaggagaatcacttgaacctgggaggcggagggtgcggtgagccgagagccgccatcgtactccaccctgggcgacaagagtgaaactccgtctaaagagaataaaaagaaagaacgaaaaggcggatcggtgagatgcgtctggaaattttcttcgttcgcagtccccgtattaaaaacggaaagaaccgacccacgacaaacacgaccagagcgtaccgtgcccacgcgtgtcatcacagcactccgggaggccgatgcgggaggatctctggagcctaaaagttcgagatcacctcgacacgtgagatgacgcctacaataataataatcatagaagtttgaaaagagaccacgtgtgcccagagcatggacaataaagcgagagcacatccgtactaaaaagaagacgattgataggcaggcaggcaggcaggcaggcaggcaggcaggcaggcaggcaggcaaatgtagaaggagccaggcgcagcgtctcacgcctgtaatagcagcagtgtgggcggccgaggcaggcaggcggattgcttgaggacaggagttcgagaccagcgtgggcaacatgatagaaccccgaaacccatctcactcacatacatacatacatacatagatacacacacacacacacacacacacacacacacacacacacacacacacatacctacctacggaaaacatgagaaacaacataaaagtcagccggtgtggtggtgcgcgcctgtagtctcaggtaatggggatgggagggatcagaggcagaacgaccgtttggtcggtccaaagcgttgaggttggggtgatcctgggcggcagagacagaggaagaccctgccagtaagggagggaaggaaggaaggaaggagggaaggaaggaaggaaggaaggaaggaaggaaggaaggaaataaacaggcaagcaggcaagcaaacgatgaacgtgacaatgacacagaagaacccatgagaataaacgagcaaataacagggtatgaatgaagctaaaaggcaattgagatcgcaatcaatcgttttctctgcaccccaccccaccgcagcccacgtaagctggagtggaagtgtgcgatcacagcccacgttaacctctccctcccgggcttaagagatccctgtagtcccag

SEQ ID NO: 39643 - DNA, 932 bp, Artificial sequence
  DNA replication origin
caatcccaccacgaggacccggaaatagtgtttgatctgtgtccctgcctagtcacctgtcttgtgtgtcgatgactgaggattccacaaatgaaggtcagcggtatctattgagctgtttctccctctcgtgcgtctcatctgtgtgctggagaaagggaagagaagaggttccgatgggaagttgtcttcacgcctgaggcagctgaaggcagaccgaagggaaggagggcatcctaggtgacatttccatacccacgcaccctttacaatgctggggctgccagtccaccctgtacgtcaacccacccccaagaacagcacggtccggggtggtccagtctgatcccaaccggcccacccggggcatccggtggaagtcttcgccggaggatccgaaggcagcatcaacgcggttcccctggggtcgcccggcaaaggccagccgggggagggtagcgggacgtgacgggggggtgggggtcgcatccgcctcagagctccctggaaggtggcaggtagccggtggggcacgccgagccagagacgtccggcaggatatagatctggaaggcgtgtcagtcctctcccatacctctcctatggaaaatgccagggcggcggtgggagcctcggctgggggagaagcggggacaagggggagagggaaggaggccctcgggaggtttcggcaccgaaaacccactcagccaagctccctccgtgtttccgggtccaaggtacaccccgggagacggcaagagaaacgttcacaccgtgctttccgtcttcgtgtttatttctttcatcttttccattttacgagagatgctcatttcaacaaccagacggcggatgtgacgggagaagcgtcaaggccaggagtttgagaccagcgtgagcaacagagcaacacacgtaggagagcccag

SEQ ID NO: 39644 - DNA, 962 bp, Artificial sequence
  DNA replication origin
aggggcatatctccttgaccggtgactgcccaggatacagtgggtcacggccgaccgaagcctcgacctgtggggcctcaagtgatcttctcctcgtctcagcctcccgagtagccgcgactacaggcggccatcaccgcgcacaactcatcttataataacatcatgattctctcgagacggggtctcgctccgtcatccaggccgcatcgccacggcacgatctcagctcatcgcaacctcggcctccccggttggaacaagtcgcccgccccagtctcccgagcggtcgtgattccaagcccacgccaccaggcccggctaatcgttctatttttcagagagacggggtttcgccacgtcggccagcctggtctcgaactcccggccccaagcgatccacccgcctcggcctcccaaagtgccggagtgacaggcgtgagctagcgtgcccggcccagatcatctttttcatcaattgtagagaaggggtttcgtcagccaacgggtggagggtggggcgggttttactcagcctgcgtactgtgaaaaggggaagtgagtgtgctctgtgaactagatatggaaattgtgtgtgtgtgtgcgcgcgtgcgcgtgcgagagagagagagagagagagagagagagagaccaatcccaccacgaggacccggaaatagtgtttgatctgtgtccctgcctagtcacctgtcttgtgtgtcgatgactgaggattccacaaatgaaggtcagcggtatctattgagctgtttctccctctcgtgcgtctcatctgtgtgctggagaaagggaagagaagaggttccgatgggaagttgtcttcacgcctgaggcagctgaaggcagaccgaagggaaggagggcatcctaggtgacatttccatacccacgcaccctttacaatgctggggctgccagtccaccctgtacgtcaacccacc

SEQ ID NO: 39645 - DNA, 727 bp, Artificial sequence
  DNA replication origin
gccaccgcactgcagtctaggccacgagagtgaaactctgtctcgggggaaaaaaaaacaattaaaaacggtgtgggcacagtggcgcgtgcccgcggtcccaggctctgtactctggaggctgaggtggaaggatcgctcgagtccaggagcgtccacgctgcagggagtgagttacgacggcaccactgccggggtgacggagcgagatgccgtctctaaatcagtcaatgagatcactggaaggcgctctctgcgtctcactttccaagagggtctctttgggccaagcaggcatggtgcctcccgccagtcatcccagcactttgggaggctgaggcgggaggaaagaaggaagggaggaagggaggaaagaagaaaagaagaaaggcaggaaggcaggaaagaaagaggggaagagagaaaaagaaaaagaaagaaagaaagaaagaaagaaagaaagaaaagagaagcaaaaagaagaaaagagaagggaagaaaagaaaagcaaacggggaaggggcatatctccttgaccggtgactgcccaggatacagtgggtcacggccgaccgaagcctcgacctgtggggcctcaagtgatcttctcctcgtctcagcctcccgagtagccgcgactacaggcggccatcaccgcgcacaactcatcttataataacatcatgattctctcgagacggggtctcgctccgtcatccaggccgca

SEQ ID NO: 39646 - DNA, 678 bp, Artificial sequence
  DNA replication origin
gtagagcgatggtggtcgtgagtcattccccggagtccaggcgcagtggctcacgcccgtcacgccagcactttgagacgccgggcaggagggttgcaaagaaatgatgagaccccgtctgtgggaaaacatttaaaaatgaaggccgggcgcggtggctcacgcctgtcatcccagcacttccggaggccggggagggcggatcacctgaggtcgggagttcgaaaccagcccgatcgacatggagaagccccgtctccactaaaaatacgaaatcagccagacgtggcagcgcatgcccgcaatcccggctactcaggaggccgatgcaggagaatcgcttgaaaccgggaggcagaggttgcggtgagccaagatcgcgccaccgcactgcagtctaggccacgagagtgaaactctgtctcgggggaaaaaaaaacaattaaaaacggtgtgggcacagtggcgcgtgcccgcggtcccaggctctgtactctggaggctgaggtggaaggatcgctcgagtccaggagcgtccacgctgcagggagtgagttacgacggcaccactgccggggtgacggagcgagatgccgtctctaaatcagtcaatgagatcactggaaggcgctctctgcgtctcactttccaagagggtctctttgggccaagcaggca

SEQ ID NO: 39647 - DNA, 3770 bp, Artificial sequence
  DNA replication origin
ggcagggcccgcgcttttaaaggctgaaatcccggcggctcaggcctgtcgtttccagcactttgggaggcccaggaaggtggatcatttgtggtcaggagttcgagaccagcgtggccaacgtggagaaaccccgtctctactaaaaatagaacgatgagccggccgtcatggtgcgcacctgtaatcccagctaccgaagaagaatcactggaacccgggaagcagaggtttcagtgagccgagagagcgccaccgcaccgcagcctgggtgacagagcgagagagactcagtccaaaaaaaaagaaagaaaagaagaagaagaaaaaaagaacgggcccaaatactgcattgtcgctgaacgttctcccaaaaggccagaaaccccctgactcaggtcaaggaggtggtggttggttttacttctctttctctctctctctctctctctctctctctctctctctctctctctctccccccccctctcccccctctctccccgtctctctctctctctcctctcttctcccccccgaacttttatttgtcgttcaagcatacatgagcaagactgtgacataggtaaacttgtgacgggggtgttcagtgtgcagatgatttcatcacccgggtagtcagtgctgtgtccgacagtattcgtgttttgttttcttcctgaagctgtctctccttccacccctcctccctcaagcaggcttccgcgtccccggtccccctcgttctgcccatgcaagaactgtcatctgtaagttcccacttctagatgagaacacgcggtatttagccgatctttgctttcatcttcggtggtggcggtgaaagaggcatgacactaaatcgacccttaggacgccgtttatgttgaagtcgaggagcttatcggggaaataggagaagtacggacgccacacgtgaccgagagaaaagtctgaaaatgcccctcgcatccaagcggggacccggcctcgacctcccgaaatcatacaccgagtggggaagcccagcaaggcccgcctgtctagattcctctcggcctctctaagcaccgaagcacgcgcttctcactttcgtggaaggggcagggccctacccggcacgggggtgtctgacagactgacagagaaagagacagacatagaaagacagagatggacagcgagagatagagagaaacagacagacagggagagagagagagagagagagagagagagaaacagacagggagggagaaagacaaatagagagagagacagacagacacacagaaagacagagacagagagaaacagacagaaagagagagagacggagagacagtgagtgagagagagagagagagagacatggagggagagagacagacagacagacagagaggcaggcagagaaagagagtaagacagaagaccgacacagtgagagagaaaggcagagagagagagagagagagagagagagagagagagagagagagacagagagagacagagagagacagagagaaagaaagagagagaaagagaaagagacagacagaaatggacagagagagaaacagacagacagggagggagggacggagacaggcagagagagagagagagagagagagagagagagacaggcagtcagccagagaaagagagtaagacagaagataggcacagacagagagacaggcacagagagagacagagagacagagaaaaagaaagagagagacagacagacagagaaagagacagacagagagagaaagagagaaacagacagaaagagagagagagagagagagaaacagaaagggagggagagagagggagagacagacagacagacggacaggcagagaaggagagtaagacagaagacagacacacacagtgagagagacagacagagagagagagagagagagaggcagagacagagacacacacacagtgagagagacagacagagagagagagagagaggcagagacagagacagggagaaagagagagacagacagagaaagacagagatggacagagagacagagagaaacagatagaaagagagagacagagagagagagaggcagaggcagagacagagacagggagaaagagagagacggacagagaaagacagagatggacagagagacagagagaaacagacagaaagagagagagacagagagagagagagacagacagacagacaggcaggcagagaaacagagtaagacagaagataggcacagagagagagagacagagagacgcagaaaaagaaagagagaggcagacagagaaagacggagacaggcagagagaaacagacagaaagagagagagagagagagagaaagagacaggaagggagagagagagacagacagacagagaaagagaataagacagaagacagacacagtgagacaggcagagagagagagacagagagagagagacagagacggagacagagagaaggagacagacagacagagaaagagacagacagagaaagacagagacagacagagagagaaagagaaacaggcagagagagagagagagagagagagagagcgagagagaaacagaaagggagggagagagagagagacagacagacagacggacaggcagagaaggagagtaagacagaggacagacacagtgagagagacaagcagagagagagagagagacagagacagagacagacagaaagaaagagagagacagacagaaaaagacagagacggacagagagagacagagaaacagagagaaagagagaaagacagagagagcgagagagggagagagagagggagagagagagagaaacagaaaggcagggagagagacagagagagacagacagacagacaggcaggcaggcagagaaagagagtaagacagaagataggcacagagagagagacagagagacacagaaagagaaagaaagagagaggcagacagacagagaaagacagagacagagagagagagaggaacagacagaaagagagagggacagagagagagagagacagaaagggagagagagacagacagacagacagacagacggacaggcagagaaggagagtaagacagaagatacacacagagagtgagagacagaaagagagagagagagagagagagagagagagacagacagacagagagaacgaaagagacagacagagagagagagagatggacagagagagacagtgagaaacagacagaaagagagagagacggagagaaacagacagggagagggggagagagagagagagagagagagaaacagaaagggagggagagacagacagacaggcagagaaagagagtaagacagaagataggcacagagagagagagagagagacagacagacagacagagagagagagaccgacagagagacacagaaaaagaaagagagaggcagacagacagagaaagagacagacagagaaagacatagacagacagagagagacagaaacagacagaaagagagagagagaaacagacagggagggagagagagaaacaaacagggagggagagagagagagagagacagacggggagagaaagagagtaagacagaagacagacacagtgagacaggcagagagggagagagagagacaaagacagagacagagacagagagaaagaaagagacagacagacagagaaagagacacagagagaaa

SEQ ID NO: 39648 - DNA, 3866 bp, Artificial sequence
  DNA replication origin
gtgaaactctgctggccggagggcggagaaactaaaacatcgtgataaaaggtgaccgagacccagccagggtgaagctttcctagggagggaggcctgaggcgggaagcagcggggggaaaagcctcacaactgcagacccgcccgcttgcccacgcgggtcaaggggctatgccatcggcccaagctgcctccggggaagtgggaccgtgccgcccccatcttcaaaaacggtggcccccgagtgaggcctgacgcccaccgatgcaaatgtcagcctggcaagaatgagatcgccggcaaggggtgggggaaggggagagaagacggaggcacaccggggtggctctggaaggtttccaagcagggtgttgggaggcgggggggggggggcggtttgggggaaacccacctaaccgactcactaaattaaggtgaagggacgtgggtagtggggggagccggggggcaacttgaaaattaaactgacccttcccaaagcccaagtagaagagtctaggcgccaaaacacaaagaaaagtaaagcgccgatcaaagaacaatagggcccccgccagggcggaggttccctaggcgaggttccctaggcaacgagggagagagggaggggcctccagaagggagagagagaaacccgttgccccaggctcggtgaagtcggcgagacctccctccgtgtcacgtcgactttcaataacagtggccgctaggtgatgcccgaagacaaccgatgcctgcctgcaaatgtccgtcagcagggaaaagaattaatgaattaattaatttccgtatttatttagagaccgagtctcactcactctacagcctgggccgtagtgcagtggcgcgatctcggctccctgcagcctccgcttccctggttcaagcgattctcccgcctcagcctcccgaggagctggcattacaggggcctgccccaccgctcccgactcagctttgtatttttagtagagacggggtttcgccgtgttgcgtccggccttaacagtttatgttgaagtcgaggagcttatcggggaaataggagaagtacggacgccacacgtgaccgagagaaaagtctgaaaatgcccctcgcatccaagcggggacccggcctcgacctcccgaaatcgtacaccgagtggggaagcccagcaaggcccgcctgtctagattcctctcggcctctctaagcaccgaagcacgcgcttctcactctcgtggaaggggcagggccctacccggcacgggggtgtctgacagactgacagagaaagagacagacatagaaagacagagatggacagcgagagatagagagaaacagacagaaagagaaagagagagagacagagacagagacagagagagagagacagacagacagacagggagggagaaagacaaacagagagagagagagagagagagagagagagagagacagacagacagacagacagacagagaaacagacagaaagagagagagagacggagagagagtgagtgagagggagagagagagacatggagggagagagacagacagagagagaaacagacagaaagagagagagagacggagagagagtgagtgagagagagagagagagacatggagggagagagacagacagagagagaaacagacagaaagagagagagacggagagagagtgagtgagagagagagagagacatggagggagagagacagacagacagagaggcaggcagagaaagagagtaagacagaagacagacacagtgagagagacaggcagagagagagagagacagagacagagagagagaaagagaaagagacagacagagatggacagagagacagagacagagagagaaacagacagacagggagggagggacggagacaggcagagagagagagacaggcagacagccagagaaagagagtaagacagaagataggcacagaaagagagacagacacagagagagacagagagacagagaaaaagaaagagagagacagacagacagagaaagagacagacagagagagaaagagagaaacagacagaaagagagagagagagaaacagaaagggagggagagagagggagagacagacagacagacggacaggcagagaaggagagtaagacagaagacagacacacacagtgagagagacagacagagagagagagagagagagagagagagagagagagaggcagagacagagacagagagaaagagagagacagacatagaaagacagagatggacagagagacagagagaaacacccagaaagagagagagagacagagaaagagaaagggagggagagagagagagagagagagagagagagacagacacacagacaggcaggcaggcaaggaaacagagtaagacagaagataggaacagagagagagagagagagacagagagacgcagaaaaagaaagagagaggcagacagacagagaaagacagagacagacagagagaaacaggcagaaagagagagagagagagaaaaacagacaggaaaggagagagagagagagacagagagagaaagagaataagacagaagacagacacagtgagagaggcagagagagagagagagagagagagacagagacagagacagagagaaagagacagacagacagagaaagagacagacagagaaagacagagagagaaagagagaaacaggcagagagagagagagctagcgagagagaaacagaaaggtagggagagagagagagagacagacagacagatggacaggcagagaaggagagtaagacagaagacagacacagtgagagagacaaggagagagagagagagagagacagagacagagacagagacagacgacagaaagaaagagagagacagacagacagaaaaagacagagacggacagagagagacagagaaacagagagaaagagagaaagacagagagagcgagagagggagagagagagaaacagaaaggcagggagagagacagagagagacagacagatagacaggcagagaaagagagtaagacagaagataggcacagagagagagacagagagacacagaaagagaaagagagaggcagacagacagagaaagggacagacagagaaagacagagacagagagagagagagagagagagagagagaaacagacagaaagagagagggacagggagagagagagacagacagacagacggacaggcagagaaggagagtaagacaaaagatacacacagagagggagagacagagagagagagagacagagacagagacagagagaatgaaacagacagacagagagagacagtgagaaacagacagaaagagagggagacagagagaaacagacagggaggggggagagagagagagagagagagaagcagaaagggagggagagacagagagagacagacagacaggcagagaaagagagtaagacagaagataggcacagagagagagagagacagacagagagacacagaaaaagaaagagaggggcagacagacagagaaagagacagatagagaaagagagaggcagacagagagagacagaaacagacagaaagagagagagagagaaacagacagggagggagtgagagagagacagacggggagagaaagagagtaagatagaagacagacacagtgagacaggcagagagggagagagagggacaaagacagagacagaaagaaagaaagagacagacagacagacagacagacagagaaagagacacagagagaaagacagagacgaacagagaga

SEQ ID NO: 39649 - DNA, 2831 bp, Artificial sequence
  DNA replication origin
ggcgtggggcgtgggtggggtggccagagccttgggaactcgtcgcctgtcgggacgtctcccctcctggtcccctctctgacctacgctccacatcttcgccgttcagtggggaccttgtgggtggaagtcaccatccctttggactttagccgacgaaggccgggctcccaagagtctccccggaggcggggccttgggcaggctcacaaggatgctgacggtgacggttggtgacggtgatgtacttcggaggcctcgggccaatgcagaggtatccatttgacctcggtgggacaggtcagctttgcggagtcccgtgcgtccttccagagactcatccagcgctagcaagcatggtcccgaggatcccagctcccagcagaggcacttttggtcacacaggatcctgggcaggaaagttctcagcaggcttaggcctcctagccaaaaagccaaaaccacttctgggatttttttcaaagagccagtggttccacaaggggccgtgggtagttgtggaaatggagagaagtgtttgcacgtacatatttgagacaggacggacagggctcggtcacagatcacttaggacacgggcagatgcacattgagaaaactcttccggcatcctaggggaacagaggtacgatttttcgagacagtcgagggagaagccaccccagattttaggattggatctttattcatatgtagtttctatgaggtatccaagtccagaaatcaactcgccagttctgtacagcattctgtagggagatcaaatctgggatgtcagaagtgaagaattcaggccttggtaagggattagattagatgtacttgagcttcttttgcaaaaaaagagagggcgggagatagcgagagccagagaccgagacagacagacggacagacagacagagagagagagagagagagagagagacagagagacagagacagagacagacagagagagacaacgatacacagagagagaaagacagaaagagagagagagacagataaagagacagacggagagagacagataaagagacagacggagaaagacagagatggacagagacagagagaaacagaaagagagagaaacagacaggaagggagagagacaggcagagagagagagacaaacagacaggcagacagacaggcagagaaagagagtaagacagaaggcagacacacacacacacacacacacacacatacacacacacacacacacacacccccacagagagagagagacagagagagagacagagacagacagagagacagagagaaagagacagagagagaaagacagacagagagaaacagacagaaagagagacacagacagagacagagaaacagccgacggggggagagagagagagagacagacagagagagacagacagacagacaggcagagaaagacagtaagacagaagacagacacacagagagagagagagagacagagacagaaagaaagacaaagacagagagagagagagagagagagagagagagagaaacagacagggggagagagagagagagacagacagacagggagagagagagagagagactaagacagaagacagacacagtgagagagacagagacagagagaaggaaagacaaagacagacagacaaagagacagacagagaaagacagagacggacagagagacagagagaaacagaaagagagagagagacacacagagagagagagtgagagagacaggcaggcagagagagagagtaagacagaagacagagtgagagagacaggcagagagagacagagagaaggaaagagagagacagtcagagaaagacagagacggagagagagaaacagaaagagagagagagacagagacagagagaaacatacagacagggagagagagagagagagaccgacagacagacagagaaagggagtaagacagaagacagacacagtgagagagacaggcagagagagagagagagagagagaggcagagagagagaaacagacaggcagagagagagagacacagagagagagagagagagaagacagacagagaaagagagagacagagacagacagagagacagagagagggggaggaagggcgtgctcaagaaataatcacacatattttataatgcttttgatcccataaacggtggccggggtatactttgaaaacaacgacaacgacaacaacaacgacaacgacaacagcaacgacgacaacaacaacaacaacaacagcaacaagagcagcagcagcattcgcctacggatttctagaaaataagatgtcatgatgaaggatagtaaacatcaaccggctctcactgcacgttgagagagtcacaaaagcgctagttcacaacaggaaaaaacggcagctaacgtgtcttggggaaaatagacgtcttcctgaaaactggggatttctacttcacctgaaaagaaagacatacgagaaaggaaaaacacgaacaaaacaaaacagaacgaaacaaaacaagccaacaaacacgggccaaggcgccgtccctggaaatcttaagtgagcaaagttattagttttcagaaagcgtttctattttgggcaagtactgagaaggcccagactagagccgtggcgcccttcgcattgtgaaactctgctggccggagggcggagaaactaaaacatcgtgataaaaggtgaccgagacccagccagggtgaagctttcctagggagggaggcctgaggcgggaagcagcggggggaaaagcctcacaactgca

SEQ ID NO: 39650 - DNA, 721 bp, Artificial sequence
  DNA replication origin
ggtagtcccgcaagcggtgatggcctaaggaagcccctccgcccaagaagcgatattcatttctagcctgtagccacccaagagggagaatcgggctcgccacagaccccacaacccccaacccaccccacccccacccctcccacctcgtgaaatgggctctcgctccgtcaggctctagtcacaccgtgtggttttggaacctccagcgtgtgtgcgtgggttgcgtggtggggtggggccggctgtggacagaggaggggataaagcggcggtgtcccgcgggtgcccgggacgtggggcgtggggcgtgggtggggtggccagagccttgggaactcgtcgcctgtcgggacgtctcccctcctggtcccctctctgacctacgctccacatcttcgccgttcagtggggaccttgtgggtggaagtcaccatccctttggactttagccgacgaaggccgggctcccaagagtctccccggaggcggggccttgggcaggctcacaaggatgctgacggtgacggttggtgacggtgatgtacttcggaggcctcgggccaatgcagaggtatccatttgacctcggtgggacaggtcagctttgcggagtcccgtgcgtccttccagagactcatccagcgctagcaagcatggtcccgaggatcccagctcccagcagaggcacttttggtcacacaggatcctgggcaggaaa

SEQ ID NO: 39651 - DNA, 727 bp, Artificial sequence
  DNA replication origin
aaaaccaatgaaagagggtgaaaccccgtgtctaccaaaaaaaaaaaaaaaaaaaaagagccggccatggtggcgctgagacaggagaatcacttgaacccaggaggcagaggttccagtgagctgagatcacgccactgcactccagcctgggggacagagcaagactccatctcagaaacaaacaaacacacaaagccagtcaaggtgtttaattcgacggtgtcaggctcaggtctcttgacaggatacatccagcacccgggggaaacgtcgatgggtggggtggaatctattttgtggcctcaagggagggtttgagaggtagtcccgcaagcggtgatggcctaaggaagcccctccgcccaagaagcgatattcatttctagcctgtagccacccaagagggagaatcgggctcgccacagaccccacaacccccaacccaccccacccccacccctcccacctcgtgaaatgggctctcgctccgtcaggctctagtcacaccgtgtggttttggaacctccagcgtgtgtgcgtgggttgcgtggtggggtggggccggctgtggacagaggaggggataaagcggcggtgtcccgcgggtgcccgggacgtggggcgtggggcgtgggtggggtggccagagccttgggaactcgtcgcctgtcgggacgtctcccctcctggtcccctctctgacctacgctccacatcttcgccg

SEQ ID NO: 39652 - DNA, 845 bp, Artificial sequence
  DNA replication origin
aaatggatacctctgcattggcccgaggcctccgaagtacatcaccgtcaccaaccgtcaccgtcagcatccttgtgagcctgcccaaggccccgcctccggggagactcttgggagcccggccttcgtcggctaaagtccaaagggatggtgacttccacccacaaggtccccactgaacggcgaagatgtggagcgtaggtcagagaggggaccaggaggggagacgtcccgacaggcgacgagttcccaaggctctggccaccccacccacgccccacgccccacgtcccgggcacccgcgggacaccgccgctttatcccctcctctgtccacagccggccccaccccaccacgcaacccacgcacacacgctggaggttccaaaaccacacggtgtgactagagcctgacggagcgagagcccatttcacgaggtgggaggggtgggggtggggtgggttgggggttgtggggtctgtggcgagcccgattctccctcttgggtggctacaggctagaaatgaatatcgcttcttgggcggaggggcttccttaggccatcaccgcttgcgggactacctctcaaaccctcccttgaggccacaaaatagattccaccccacccatcgacgtttcccccgggtgctggatgtatcctgtcaagagacctgagcctgacaccgtcgaattaaacaccttgactggctttgtgtgtttgtttgtttctgagatggagtcttgctctgtcccccaggctggagtgcagtggcgtgatctcagctcactggaacctctgcctcctgggttcaagtgattctcctgtctcagcgccaccatggcc

SEQ ID NO: 39653 - DNA, 961 bp, Artificial sequence
  DNA replication origin
cgcggtgggcaaaatgccgcggcggcgggggagcaaagccagggcgtcaaaaagccacggcggcggggggcaaaaagccgcggtggtgggggggcaaaaatccgcggcgacaaaaagctgcggcggcgggggtgaaaaagccgcggcgggcaaaaagccgtggcggcggggatgaaaaagcctcggcggcggcggggcaaaaagccgggtcgggcaaaaagccgcggcggcagagggcaaaaagccgcggcgggcaaaataaccgcgacaccggagcggggggggcaaaaagccgcggcgggcaaaaagccgcgtcggcgagggtgaaaaagcctcggcggcgggggggcaaaaagccgggtcaggcaaaaagccacggcggcagggaacaaaaagccgcggcggcggggtgtaaaaagccatggcggggcaaaaagccgcggcgggcaaaaagtcgcggcggcggcgggggggcaaaaatccgcggcgacgcggggcaaaatagtggatctggtgtagaaggccggcacagcttggctttgctggagtgtgatgagataggaaatgtgcagccaaagacaaaaaaagatgtaagtaggcttgactcattgcagctaagaacccagatgttatcttgagggttttaactaataagcagtttaaatcagaatggcacattctggtttttttttatatgttcacatttggcaggcatagatactgtttgaaaagagaaaagtcagtagatagaggtaacaaacttaaatatgtgccgagtctagaaacaagagactagggagataaggacctttggaaataaaatgcaagatttgaaaactggctgggggatgaggaaaaggcaggtctttaaggtcaatccctgttttgctttaagttgttagggggtggttttatcacatattgtagaatacatcatttcagttttgagcatcttgagtta

SEQ ID NO: 39654 - DNA, 1511 bp, Artificial sequence
  DNA replication origin
cgccgcgccgccgctgtccgcctctccgccgcgccgccgctgtccgcctctccgccgcggcgccgctatccgcctctccgccacgccggcaccggcgctgtgtgcctttgcaagggcggagctgcgttctcctaggcacagacccggagagcattgcgagggcggagccgcgttctgctctgcacagaccttggggcactgcctcgctttgggacaactcggggccgcatcgacggtgaataaaatccttcctgtttgcagccctgtttgtggttggtggcagcgatggacaatgcagccagccagagcgtagaaaggcatcggggtaagtgcactatccaggctgcactgcgggtggcctgggacgggttgggagccctatctcaggtgtcactgcccatcttgggtggctggttgggtgtgctatctgaggctgtgctgcctgcacctggggggtggtttgggggctcaaaccggggctgcactgcctttggcggggagccggttgggggcactatcccagacggtattgctggcaacagtgaggtgggctaagtgtgctatccggggctgcactgtgcggctgtggggtggggggtggcagtttcgggttgagggcactatggggtgctgtaatgcccatggtgcggggaggcggggcggttagggtatgttgggtgtgctattgcggggggcgacactgctggtggtagggggcaggatgggttgggggccatatcaggggctgcactgattgctttagctaggatttcaggtactatgttaaacaacagtggtgacggggggcatccttatcatgttccagatcttagaggaaaagctttccatttttccccattccatgattctagctgtgggtgtctttcctgtagtttttattatgttgcggtatgtttcttctgtgcctgtttctttgaggatttatagcatgaagggatgttgaatttcatcaaatgctttttcggtttcagttgacgtgatcatactgtttttgtcatttatttggttgatatgatgtatcacattgtatgttgagtgactcttgcatcccagggatacattcccacttgatcatgatgaattatctttttaatgtattactgaatttgattcactggtattttgttgaggatttttgcatcaatattagagatactggcctgtagtttccttctttgatgcttttatctgatttttgtatcacagtaataatggtctcatagaataagtttggaagtattccctcctgtttttcaaaatagtttgagcaggattcgtactaggtctttaaattgtttgctgtgaagccatcagcagtgaagacatcagttcctgggcttttctttactgggagactttttctgatggcttcaatctcattacttgttaccaatctgttctggtcttggatgttttcattgtttaacctaagtaggttgtatacatctaggaatttgccaatttctactaggctttccagtttattggca

SEQ ID NO: 39655 - DNA, 957 bp, Artificial sequence
  DNA replication origin
actcccacaggaacctggggatggctggagagtaactgggagccacaggagagtccctgaggcctgggggtgaagagatgaaagacacaggggtggagcaccgtgaggctcatgagtttgtaggtgattcctgggtgtggggggctgactccagctgaaatctggggttgtttggagagtagctgggagacaaaggagaccccccaagagctgggggtgagctgctggctgatggcagtaagagcatgtggtatattattgatgaacgtggggactctgaggaatcctcagaggaggacacgggagagcccaatgtcttcattgattgcccatcacggtgaggacagggaaatgggagcttgtgggattctggtgatgacagaggtgagtgtggtgaagccctaggggatggtgaatggtagctccggatccctggtgaggagcttccccttaagcaagagattctgagaggggagaggaagaagctgggtgaggctcgcatggaccttggggagtccgggctgggggaccgttcataagaagagccagacaagaccctactgttcttaggtgcagacatgattaggaaacctgcagctcccaggggcccgtaccaattttctaactcgaagaaggaaggagtgtgtgtgtgcgcgcgtgtgtgtgtgtgtgtgtgtttgtgtgtgcggtgtgtgtttgtgtgtgtgcggtgtgaggtatgtgccccttaagaaaatggaaatcaaccaaccaatgagacagacagacagacagagattcacttgcccacgtgttctgtcctgtcctctgaatccgcttccaagtcgcaagacgctgtgagctccaagtccacgcagagtccgccaaacgctccggccgctgatccgctccgcgaagatctgagtacaggccagccagggtgggtttaaatagcctcgggcgcagcctagcagcgga

SEQ ID NO: 39656 - DNA, 639 bp, Artificial sequence
  DNA replication origin
gagagactggagagtaattgagtgaaattggtgagtttggtggtgattcctgggtgcctggaacggactcccgctgaagtgtgggcgtggttggagagtagctgggacacacaggagagtccctgagggttggagataaagacgtgctagagactgaggagtaactgagtgaaattggtgagtttggtggtgattccggggtgcctggaactgactccagctgaaatgtgggcgtggttggagagtagctgggacagacgggagggtccctgagggatggtgaagacatgagagagactggggagtaacgcagtgaaattggtgagtttggtggtgatttctgggtgcctgcaacggactcccgctgaagtgtgggcgtgtttggagagtagctgggacagacaggcgactccctgagggttggagataaagacgtactagagactggggagtaattcagtgaaagtggtgggcttggtggtgatccctgggttcctggaactgacccgcgctgaaatgtgggcgtggttggagagtagctgggacagactggagggtccgtaagggctgggggtgaagacgtgagagagactggcgaggatctcactgaggtctgtgagtttgtaggtgtttctgggg

SEQ ID NO: 39657 - DNA, 912 bp, Artificial sequence
  DNA replication origin
ctggaactgactccagctggaatctagagaagttttgacagtagctgaaagagacacaagagtccctgtgggctgagggcaaagacctgagagagaccagggaggacctcagtgaagtctgtgagtctgtaggtgattccggagtgtgggaggctgactcccgctgaaatctgggcgtggtgggagaggagctgggacagacaggagagtcccagggggctgggggtgaagacatgagagagactggggagtaactcagtgaaactgctgagtttgtaggtgatacctgggtgcctggaactgactcccgctgaaatctgggcatggtaggagagtagctgggacacacaggagagtccctgagggctgggggtgaagacatgagagagaccgcggagtaactcagtgaaactggtgagtttggtggtgactccggggtgcctggaactgactgcagctgaaatgtgggcgtggttggagagtagctgggacccccaggagagtccctgagggctggtgaagacatgagagagactggagagtaattgagtgaaattggtgagtttggtggtgattcctgggtgcctggaacggactcccgctgaagtgtgggcgtggttggagagtagctgggacacacaggagagtccctgagggttggagataaagacgtgctagagactgaggagtaactgagtgaaattggtgagtttggtggtgattccggggtgcctggaactgactccagctgaaatgtgggcgtggttggagagtagctgggacagacgggagggtccctgagggatggtgaagacatgagagagactggggagtaacgcagtgaaattggtgagtttggtggtgatttctgggtgcctgcaacggactcccgctgaagtgtgggcgtgtttg

SEQ ID NO: 39658 - DNA, 1351 bp, Artificial sequence
  DNA replication origin
ccgggccccgggccctcgaccgggaccggtgcgcgggcgctgcggccgcacggcgcgactgtccccgggccgggcaccgcggtccgcctctcgctcgccgcccggacgtcggggccgccccgcggggcgggcggagcgccgtccccgcctcgccgccgcccgcgggcgccggccgcgcgcgcgcgcgcgtggccgccggtccctcccggccgccgggcgcgggtcgggccgtccgcctcctcgcgggcgggcgcgacgaagaagcgtcgcgggtctgtggcgcggggccccggtggtcgtgtcgcgtggggggcgggtggttggggcgtccggttcgccgcgccccgccccggccccaccggtcccggccgccgcccccgcgcccgctcgctccctcccgtccgcccgtccgcggcccgtccgtccgtccgtccgtcgtcctcctcgcttgcggggcgccgggcccgtcctcgcgaggccccccggccggccgtccggccgcgtcggggcctcgccgcgctctacctacctacctggttgatcctgccagtagcatatgcttgtctcaaagattaagccatgcatgtctaagtacgcacggccggtacagtgaaactgcgaatggctcattaaatcagttatggttcctttggtcgctcgctcctctcctacttggataactgtggtaattctagagctaatacatgccgacgggcgctgacccccttcgcgggggggatgcgtgcatttatcagatcaaaaccaacccggtcagcccctctccggccccggccggggggcgggcgccggcggctttggtgactctagataacctcgggctgatcgcacgccccccgtggcggcgacgacccattcgaacgtctgccctatcaactttcgatggtagtcgccgtgcctaccatggtgaccacgggtgacggggaatcagggttcgattccggagagggagcctgagaaacggctaccacatccaaggaaggcagcaggcgcgcaaattacccactcccgacccggggaggtagtgacgaaaaataacaatacaggactctttcgaggccctgtaattggaatgagtccactttaaatctaatccaggaaaagagtacaaaacgccacattctcacttgtattgggagctgaaaaatgggatcacatggacgcaggaaggggaacaacacacactggggcttttcgggagacagagcgttaagaaaaacagctgttgcatgctgggcttaatacctaggttatgggttgacaggtgcagcaaaccaccatggcactcgtttaccttagtaacaaatatgcacatcctgtccatataccccag

SEQ ID NO: 39659 - DNA, 1536 bp, Artificial sequence
  DNA replication origin
gacatggtagaggttcctgtcagcatgggcactggcagccacgtcggcaagcaggaaggtcgtgctacacagctgtggggtgacaatagcctttgtggtgatatgggccattagaggagccccttctgctggcaagagtgtgagagtagcaagtagatggacaggcctgtgtgtcaggaaggaatgcaggagggaatcttcagtagctgcgtgtggagccctcatcagaaaagtggagaaatggtcatgtaactgcttcatggaggctagtggattggccagggcttcgaactgaaggacaataatgggagtagctgataggcctgggagtgtctgagtataagtggagatgggtttggggtcactgagggctatgtgggagccatcactgtatagatacaggtcatagggaaatagtagtgtgagacctgtgagtttttagggttctcctgggtgcctggggctgactgctgcagaaatcaggggaaggctggagagaagctgggagacagagtagagtcctgaagtttgggggtgaagaggtgaaagaaatgggggagggtggcagtaagttctgtgagtttctaggtgactcctgggtgtgggaagttgactccagctgacatctggagatggttggagagtaaatgagagagacagaagagtccttgagggctgggggtgaaaacatgagtcagtgatatgggtgagattggtggtgtgtcgtgggtgcctggaactgactccagctggaatctagaaaagtattcagagtagctgaaagagatactgtgggctgagggcaaagacctgagggagacaagggaggaccccagtgaggtttgtgagtctgtaggtgattccagagtgtaggaggctgagtcccgctgaaatctgggcttgctggtagagtagctgggacagacaggagagtcccagggggctgggggtaaagacatgagagagactgggaagaaattgaatgaaataggtgagtttggtggtgattttggggtgcctggaactgactccagctgaaatctgggcgtgggtggagagtagctgggacagaagggacagtccctgagggatggtgaagacatgagagaaactggggagtaacgcagtgaaattggtgagtttggtggtgatttctcggtgcctgcaatgaactcctgctgaaatgtaggcgaagttggaaagtagctgggacagacaggagatttcctgaggtttggagataaacacgtggtagggactggggagtaacacagtgaaagtggggagcttggtggtgatccctgggatcctggaaatgactggggctgaaatgtgggcgtggttggagagtagctgggacagacaggagggttcgtaagggctggtggtgaagacgtgagagagactggcgaggatctcactgaggtctctgactttctaggtgtttctggggtgtgggagacataaaaccactgaaaactggacatagttggacagtagctgggacagaaaggagagtcgttgatgggtgggggt

SEQ ID NO: 39660 - DNA, 1807 bp, Artificial sequence
  DNA replication origin
cggagaccccggcctgcccaggtctgtgttgaggagaacactgctccgcctttgctgtatctccgaagtgtgtgcagaggagaactcagctccgccccggcgatgctctccgtgtcggtgctgggaagaacgcagctccgccctcgcaaagttgcacagcgccggcgcaggcgcaggggggtgggggccccacagcgccggcgcagtcgcggggggcggggggccacagcgccggcgcaggcgccggggggtgggggggcccacagcgccggcgcaggcgcagggaggcccacagcgccggagcaggtgcagaaagtcagaaggtccatgaggggaaggtgagacacctggggcaaagaaaaaaaaaatgcgccgcgaagcggtgtctgggtcatccacagacgaaagttttttcccatcagcccttgcgctgcgccccagggaccctggcatccctggttcacgcccagggtgcgcctcgggcgactaggggtaccccaactcggacagaagccctatgagtggaagttgaagtttgtgggaggagaggtgaggcaccaggggcagaaaaaaaaaaaaaagaggaccgcgcctcagagaagtggggcctgggtccaccacagatgaaagtgccttcccatcaggccctatgctgggcgtggtggaccctggcgaccctggttcgagcccaggttgcgcctcgggaccgcttggggtaccacaaagcgaacaaaaggtccatgaggggaaggtgaggcacctgaggcagagaaaaaaaaacgtgccaccaagaagcagtgcctgggtcccccacggatgaaagtgccatcccatcagccccttcgctgggccctggggaccctggcatccctggtttgaccccagggtgcacctcgggccagtaggggtactgcaaggtgggcagaaagcccctaaggggatggtgaggcacctggggcagagaaaaaaaaaaaaacttcgccgcggagaagcacggcctgggtgccccacgaacgaaagtgtcttcccatcagtccctgcactgggaccggggaccctggtgtcccttgttcgagctcagggtgtgcctcagccgctaagtgaaccccaaggggggctttgggcgcacaaagcccatgaggggaaggtgagttttgagggaggagaggtgaggcacctgtcacagaaaaagaaagaaaaaacccgcgccgtggagaggtggggcctgggtcccccacggatgaaagtgccttcccatcagcccctgtgctgggtaccggggaacctggggttcctggtttgagctcagggagagccttgggccactaggggtaccccaacgcggtggaaagcccatgagaggaaggtgagctgtgagggaggagaggtgaggcactagtggcagaaaagaaaaagaaaccacgccacggagaagcgggacctgggtctcccatggaaaaaagtgccttcccatcagtccctgcgctgggccccgtggacccaggcgaccctggttctaggcctgggtgcacctcaggcccgctaggtgtaccccaaagcaggcagaaggcccatgaggagaaggtgaggtttgagggaggagaggtgacgcacctgcggcagaaaaatacaaacgtgccgaggagaagcggggcctggttctcccacagacgaaagtgccttctcatcagcccctgcgctgggcctcctggaccctggcgaccctagttcaaggatcagaagagactccggcacgctagggtaccctaaggaagccagaaagcccatgaggggaaagtgagatttg

SEQ ID NO: 39661 - DNA, 832 bp, Artificial sequence
  DNA replication origin
agcgcctcagctgctgcagaaaactgcaaaactgcaagttgcacacaggcagagatgacggagcaacccctgaccctccgtgccactcaccctacccgcacacacacctgccacgcggaccctgaggccagtgcctgggcgcccaagtcaggcagtccgcacagcagtggcaccagggtgaaaacctgctgctcaataccatcccggttaccacgaagagccagccctggtggcccctgagttcttggaggaggccaagtcacagcaacccctcaagtgggcgggcgatgcacttgaccctgaggacatcaggtaccaggcccgccagctgacgccacatcggagccgcagctgcagtctagacgtggtgcaccggcagtaagtgactggacaccccaaaccaggcccgccccccagtagcgtggatcctgagaccagacccccaggcggcaaaatcaggcgatgggccccgccagcagctgctcagtttcatccatgtggatacagagtgcccagcgcccgggcccaggatccagagagatgcccaagaagagcggaagttgaggccaggtgggctgtgcgctctgcaaccctgaggccatccaagggaagctccgccgtcccacgccagtgccagatctgcagctgcaaactgtgcgtggggcactggcagcagttagggctggtgggggaaagagcagcccctgactctgcctccatgcctctacagctacctgacactagccacacagactccagggccagagcctcagcgtgaagccaggccatctgcgaagccacccaggtggcagcggagtgcccttgccagcac

SEQ ID NO: 39662 - DNA, 916 bp, Artificial sequence
  DNA replication origin
gcgctctgcaaccctgaggccatccaagggaagctccgccgtcccacgccagtgccagatctgcagctgcaaactgtgcgtggggcactggcagcagttagggctggtgggggaaagagcagcccctgactctgcctccatgcctctacagctacctgacactagccacacagactccagggccagagcctcagcgtgaagccaggccatctgcgaagccacccaggtggcagcggagtgcccttgccagcaccctatctcccttccgaggaggagcggggtgggctgcaaggccagacaggccctccttctcaggccgggctggcggcgctcctgcgatcctggggccgcccgggcgatcccaagaggacctgcgagctcatcggcacccgcccagagctgcagccccacctgccggcacgcgccaccagggaagggcttccgggagccaggcagcaaccgcggtgcaggcgcgcgcccaacggctttgcgaggctcactcggtctgagaggtgggaggctacgagtgtcgctgctgaaggctgtggtggaccgggctggatcgcggactgtggagtagatcacagatttgggatcgcggattgggggttgatcgcggattgggggttggatcagggatttggggttggataggggatttggggctgggtcggccggggtcggcggaggaggtgggtgaaaaggtgacagggaggtcggccggggtcgggggaggggggtggtgaaaaggtgacagggagctgcccccgctcaagagccggaggttggggtttctgagaagtcaccactatgaagttattcggcttcgggagccgcaggagccaaacggccaacggctccatagaacatgtctacacgggttccggataccgaatctgggactccgaactgcaga

SEQ ID NO: 39663 - DNA, 2537 bp, Artificial sequence
  DNA replication origin
  misc_feature (1)..(480): n is a, c, g, or t
nnnnnnnnnnnnnnnnnnnnnnnnnnnnnnnnnnnnnnnnnnnnnnnnnnnnnnnnnnnnnnnnnnnnnnnnnnnnnnnnnnnnnnnnnnnnnnnnnnnnnnnnnnnnnnnnnnnnnnnnnnnnnnnnnnnnnnnnnnnnnnnnnnnnnnnnnnnnnnnnnnnnnnnnnnnnnnnnnnnnnnnnnnnnnnnnnnnnnnnnnnnnnnnnnnnnnnnnnnnnnnnnnnnnnnnnnnnnnnnnnnnnnnnnnnnnnnnnnnnnnnnnnnnnnnnnnnnnnnnnnnnnnnnnnnnnnnnnnnnnnnnnnnnnnnnnnnnnnnnnnnnnnnnnnnnnnnnnnnnnnnnnnnnnnnnnnnnnnnnnnnnnnnnnnnnnnnnnnnnnnnnnnnnnnnnnnnnnnnnnnnnnnnnnnnnnnnnnnnnnnnnnnnnnnnnnnnnnnnnnnnnnnnnnnnnnnnnnnnnnnnnnnnnnnnnnnnnnnnnngatcctgtcgaaagaaacgaatggaatggaatggagtggagtgtagaggtgtggagtgatgtggagtggaatggagtggaatggaatgggatggatttgaatggaaggagtgtagtggagtggattggagtggagtggagtggaatggaatggaatggagtggaatggaatggaattgaatggaatggaatggaatggaatgttgtggagtgtattggaatggagtgaaatagagtgtaatgtaatgtagtggaatggagtggagtggagtgcagtggagaagggtgtaggggaatggaatggaatagtgaaatgaaatgtgagctgagatactcccactgcactccagactgtgtgacagaatgagatcctgtcgaatggaattgaatagagtggaatgaaatggagtgcagtggagtggagcagagtggagtggagtggagtggaatggaatggaatgggatggaatcaaatggtatgaagtggaggggaatggagttgagtggagggacgaggagtggaatggaatggaattggatggaatgggatggagtggagtggagtggggtggagagtagtggagtagagtggaatggaatggagtggagtggagtagagtggattggagtgtaatggaatagaatggaatggataggaatggaatggtatagaatggaatgatgaaatgaaatatgagctgagattgtgccactgcactccagcctgggtgacagagtgagatcctgtcaaaggaaaggaatggaatggaaaggagtggaatggaatggaatggaatggaatggattgattggagtgcagtggagtagaggtgagtggagttcacagtagtgcaatggaatggaatggagtggagtcgagtgcagtggagtgggttggaatggaatggagtggaatggaatgggatggaatggaatggagtggagtggagtggagttcacaggagtgcaatgaaatgggatggaatggaattgaatggaatggaatggaatacaatggagtggaatgcaatggaatgcaatcgaatggaattgtgaaattaaatgtgagctgagatagtgccactgcactccagcctgtgtgacagagtgagatcctgttgaaagaaattagtggaatgtaagagaataaattatactggaatggaatggattggagtggagtggagaggaatggagcttaatggagtggaagggaatgggaaggagtggaatggaatggagtggagtggagtggagtggagagaaatgaggtaaaatgcaatgggatggactggaatggagtggagtggagtggagtgaattggaatggagtggatttgactggattgcagtggaatgaagtggagtggaatggaatggaatggaatggaatggaatggaggggagtggagtggagttgaggggaatggagtggagtggaatggagtggaatggaatggaatggaatggtgaaataaaatgtgagctgagattgtgccactgtgttccagcctttttttgacacagtgagagcccgtcaaaggaaaggaatggaatggaatatggtggaatggaatggagtggagtggattggagtggagtggagtggagtcaagtggaacagagtggaatggaataggatggaatcgaatggcatgtagtggagtgggatggagtgaatttcagtggattagggtggaatggagtggaatggaatgggatggaagggaatggcatggagtgtagtggagtggactggagtgggttagaatggaattgaatggaatggtatggaatggaatggaatggaatggaatggaatggaatggtgaaattgaatgtgagctgagatagtgccactccactccagcctgggtgacagattgagatcctgtcaaaagaaaggaatggaattgaatggaggggaatggaatgggatggagtggggtggagtggagtggagtggaggggactggatttgagtggagtctagtggaacagagtggaatggaatggggtggagtggaacggaatggaatggagaggagtggtgtggag

SEQ ID NO: 39664 - DNA, 1433 bp, Artificial sequence
  DNA replication origin
atggaatggaatggaatggaatggtgaaattgaatgtgagctgagatagtgccactccactccagcctgggtgacagattgagatcctgtcaaaagaaaggaatggaattgaatggaggggaatggaatgggatggagtggggtggagtggagtggagtggaggggactggatttgagtggagtctagtggaacagagtggaatggaatggggtggagtggaacggaatggaatggagaggagtggtgtggagtggagtggattggaattcaatgggatggaatggtatggagtggagtggaatggagtggagtggaatggaatggaatggaatggaattggaatggaatggaatggaatggaatggagaggagaggaatggagtggaatgtagtgtaattggaaaggatggaatggaatggaatgccatggaatagaattaggaatagaatggaatgatgtggaatggaatggagtagaattcagtggagtggagtggagtggagtggaatgtaatgtaatggaatgggatgggatggagtggaatggaatggagtggagtggagtggagtggagtggaatggagtggaatgcaatgggatgtgatggaatggagtggagtggagttgagtggattgaaatagaatggaatggagtggagaggagtgtagtggaatggaatggaatggaatggaatagaagggaatagaatggtgaaatgaaatgtgagctgagattgtgccactgcactccatcctgggtgacaagtgagattctatcgaaagaaaggaatggaacggattagagtggaatggaatggagtggggtagagtggagtggagtgtagtggagtagagtggaataaagaggaatggaatgggatgtaatggaaaggaatgcagtggagtggagtaaagtggagtggagcggagtggagtggtgtggagtggagtggagtggagtggagtggagtggagtggaatggaatggaatggaatggaatggaatggaatggaatggcacggtgaaatgaaatgtgggctgagattgtgccacttcactacagcctgggtgacggagtgagttcctgaagaaataaaataatgtaatagaatggattggaatgaaatggaatggagtgtagtggactggagtagagtggaatggagtggagtagagtggaagggaatggaatgaaatgagatggaatggaatggaatggaatagaatggagtggagtggagtgcaaaaatcctcaataaaatactagcaagccgaatccagcagcaaatcaaaaagcttatccaccatgatcaaatgggtttcatccctgggatgcaaggctggtacaacatacgcaaatcagtaaacgtaatccatcatataaacagaaccaacgtcaaaaaccacgattatctcaatagatgcagaaa

SEQ ID NO: 39665 - DNA, 1443 bp, Artificial sequence
  DNA replication origin
gtttttttctcatccaatcaagacatgcagtccaggaacctccatgggcactaccgcagtacataaatgatgctgaagtgcgatcactttttttcaggttcctgtatcttcatgtcgagttgctcattgcccaacgtagaggactaggaatcaggattcggtggctatatgctggaggctggagccgcgggagcgcggctcgcctcattgcagttgttggcagtgacggagagatagcatcgcggctggagaggtaggagaaggaaaacagttttgggatagatagaggggagcaaagagggtagttagggccaaagggaaaaaaggatagcttagccagagaaggaattgaaaaaagatggtggtgaaaagatggtggggaaaaaggtttttgcgtagatggaggtgtaataacagggtggggagtgggagggaaggaaggttttgcagaaagacggtgggtaaaaagtttaagggtacatggagggggaaaagagggtggcaagtgggcggaggaaagagagggaggtgatgggggaaaacgggtggagcagtagggagagaaggttttgtgaaaagacagtgtggagaaaatgcagtgggggagaaaagtttttgggttgagcaaaagagggtagcaagtgggagaaggaaaaagagggtagccagcaggaggaagacaaggttttgtgaaaagacagtggcagaaaagaaagacagtgaagaaagaaaagacggtgggtgaaaagtgtttcgatagatggagggaggaaagagggtggcgagaggtagcagggatggcggttgggaaaacaacagaaaaatagtttggggtagatggaggggaaaaaagagggtggcaagcagggtaggagaaaaaacagcactagtggtaaaggggggagactttgaaaaggtggtggggaaagttttggtgtgtagatggagggggaaagagagaggtgaataggcgtggggagaaggctttgtgaaaagacgggggaaatgtttttgggtagatggagaagggaaagagaatggcaaggaggaacggggggaaagacgatgaagaaaacagtttttggttggatgaagcggggaaagagggtagtgagcagcaggagtggagagaaggttttgggaaaagacgggggaaaatgtttttgcttagataaaggagcaaaagagatggttgagagagcaaaagagatggatgagagcgggttggggaaaaagaggctggccagggataaggggaaaagacagtgggaagaaactggggaaagggtttgggtagatgcatggggaaaagggtgttgagcaggagagtagaggcagctttgtgaaatgagggtgggcaaaaaatgatgaagaagtttgggggcagatggtgaaagaaaaagagtggtgagagggagggggccaaaggccgccgggaaaaga

SEQ ID NO: 39666 - DNA, 1398 bp, Artificial sequence
  DNA replication origin
aagtccaatcagagtaggcctagaggtttttttctcatccaatcaagacatgcagtccaggaactgcatttgcataacctcatatataaaggatgctgaggtggcgtcaggtcatttcagactcttctgtgtcgagtggaggagcaactctgtgcccagcttagaggactggaagaggccgcaatcttccgcctgctggagggtggaggatggatggagcctggaacctgggtcactacctcgctgcagttggtggtggcgatagagcagtaggagagcattcggcagcaggagcttctcctgctgggctggaggactagaaggaagaggcactgccacatgctggaggctggaacctgtgccaccatggctcgcctcgctgtggttggtggtgacatcggagactgcagctcagccacagtggtagaaatgtgatggtgtaggtgagtttttccgggcctgccctgtatgcctctggggtcaagggttgggtgtcctattggggttcactgctagaggctaccatgcctgtggcagtggtctggttggggacactctccggggttgcattgctggtggtggggcaggttgcctggctatctggggctatactgcctgtggtggcaggggtggtggggggaggcagattgtgtacaatagcttgtattgctggtggctggggaaggattaggggcgctattttctgctgcactgcccgcagcagggagtgggttgagtggagttatccagggctacaatgctggcgggggggtggtttaggggcgttgttgggtgctacactgtgactggaggggtgcaccattaggagctgaactgcctgtggctgggtcagattgtgggcactattgggtggtatgctccctgaggtgtggggggagtgtttttgtcagggggtattggggttacattgcctgaaactgtagggtgtgttggatgtgttatccaggagctacactgctagtggcagggggcagattaggggtgccatgggggctacactgccagtggcattggcgagctggtgaggtggcagcagcagtgacagcagtggcttccttcttctcgtagcttccaagtaaggtatcgttttcttcttctcagactccagactctagaaggcgattttcttctgctcgagctggattgcatggtagggcctccacacccactgtggtttcccagcctgccctcatgctttgtgttgcgaagatcacgtgggactaccgggcagggagtagtaggcaccatgggggaagtgggaaacagggcactgttggtggaggtgtcaggaatgggaaccagccctttggtggggagggctggctgggtcttagtttctcctacgcaggctcccggaggaggacagccttggtgggc

SEQ ID NO: 39667 - DNA, 827 bp, Artificial sequence
  DNA replication origin
caagtaaggtatcgttttcttcttctcagactccagactctagaaggcgattttcttctgctcgagctggattgcatggtagggcctccacacccactgtggtttcccagcctgccctcatgctttgtgttgcgaagatcacgtgggactaccgggcagggagtagtaggcaccatgggggaagtgggaaacagggcactgttggtggaggtgtcaggaatgggaaccagccctttggtggggagggctggctgggtcttagtttctcctacgcaggctcccggaggaggacagccttggtgggcccagcaattcctggccaggtgtacttggccaagggcctgtttcagtgaaggcactcactcccaccccaggccccagttcctggccagcttttgccagaaggagaggttggactttggaaggtgggtgtgagtgccttcaatgaaactgatccctgacacccagtcaccagcctaacgaggtgaggctctaatggttccaatccctgagtcctgttttgggcttttctggctttgcctgcccagctgctccaagccactctgaagaaggagaaggaggagtcgcctgtggtatggttgagcagatgccgtggctctgcagcttgcctcatgcagttggtggtggagatggagaccatagctagaatggagcggtaggagggcacccacgggggcttggtggtaggagcctggtagagtgggctggtacattgagggtgactggttgtattggcattggtgctagtggtggtagcagtaggaagtctgggggccgggaagggggagtaggagcactgcagggcc

SEQ ID NO: 39668 - DNA, 785 bp, Artificial sequence
  DNA replication origin
aagtgaggagcgtctctgcccggcgccatcccgtctaggaagtgaggagcgcctcttcccggccgccatcccatctaggaagtgaggagtgtctctgcccggccgcccatcatctgagatgtggggagtgcctctgctccaccgccccgtctgggatgtgaggagcgcctctgcccggcagccaccctgtctgggaagtgaggagcttctccgcccggcagccgccccgtccgggagggaggtggggggtcagacccgcccggccagctgccccgtccgggagggaggtgaggggtcagcccctgcccggccagccaccccatccgggaggtgaggggcgactctgcccagccgcccctactgggaagtgaggagcccctctgtccggccacaaccccgtctgggaggttacccaacagctcattgagaacgggccatgatgacaatcgcggttttgtggaatagaaaagggggaaaggtggggaaaagattgagaaatcggatggctgctgtgtctgtgtagaaagaagtagacatgggagacttttcattttgttctgtactaagaaaaattcttctgccttgggatcctgttgatctatgacattacccccaaccctgtgctctctgaaacatgtgctgtgtccactcagggttaaatgggttaagggcggtgcaagatgtgctttgttaaacagatgcttgaaggcaacatgctcgttaagagtcatcaccactccctaatctcaagtacccagggacacaaacactgcggaaggccgcag

SEQ ID NO: 39669 - DNA, 784 bp, Artificial sequence
  DNA replication origin
tttctacacagacacagcagccatccgatttctcaatcttttccccacctttcccccttttctattccacaaaaccgcgattgtcatcatggcccgttctcaatgagctgttgggtaacctcccagacggggttgtggccggacagaggggctcctcacttcccagtaggggcggctgggcagagtcgcccctcacctcccggatggggtggctggccgggcaggggctgacccctcacctccctcccggacggggcagctggccgggcgggtctgaccccccacctccctcccggacggggcggctgccgggcggagaagctcctcacttcccagacagggtggctgccgggcagaggcgctcctcacatcccagacggggcggtggagcagaggcactccccacatctcagatgatgggcggccgggcagagacactcctcacttcctagatgggatggcggccgggaagaggcgctcctcacttcctagacgggatggcgccgggcagagacgctcctcactttccagactgggcagccaggcagaggggctcctcacatcccagatgatgggcagccaggcagagacgctcctcacttcccagatggggtggcggccgggcagaggctgcaatctcggcactttgggaggccaaggcaggcggctgggaggtggttgtagcgagccgagatcacgccactgcactccagcctgggcaccattgagcactgagtgaacgagactccgtctgcaatcctggcacctcgggaggccgaggctg

SEQ ID NO: 39670 - DNA, 1593 bp, Artificial sequence
  DNA replication origin
gtctgtgaattctttcagtctccctagtatgtccttggaacagaagttcacaatgtgaatctccagacgctgatctgtttgtctaaatgggagctgcatgttagtcctgtctcctctctggtgttttttctctcctacctgaaaggtacggagtttcagtgtgggatgatggaaagtgctggagtggatattggtgatgtctgcacaacaatgggaatgaatttaatgccactgagttgtacatttgaaaatcattgaaatggcacattttagttatgtatatcttaccacaataaaacatcagttaaaagaattttatttatagaccaaatatgtctgtgctctatttataactcctagtatgttaggaatcaccccaagtacatgttcctaggattaatgctttctaaaataatcctgtggtctggtacgtattctcaaggaagggattcctgttgaacccagcttgaggaattctttgctgtctactgctcagtgtctgttgactggaacgctggagatgatgcagcacacattggcccctgtggtgctcacatgatttccatgtgctttcctcgggtgggatgcagcatgggagtgccggggtgtggagtgcagcgtgtgagtgccggggtgtggggtgcagcgtgggagtgccggggtgtggggtgcagcgtgggagtgccggggtgtggagtgcagcgtgggagtgccggggtgtgggatgcagcgtgtgagtgccggggtgtggagtgcagcgtgggagtgccggggtgtggggtgcagcgtgtgagtgccggggtgtggggtgcagcgtgtgagtgccggggtgtggggtgcagcgtgggagtgccggggtgtggggtgcagcgtgtgagtgccggggtgtggggtgcagcgtgggagtgccggggtgtggggtgcagcgtgggagtgccggggtgtggaggagcagctggtgtttcacgttgctgaactaaaaccttggttgcactcagcattcagattctggggacactgtggtgacctgacacagggtagcatagagacggcattgccctcagcctgctagcagcaggagggtcggggtccatcctcagcatgtgcgggctgcccctcgtccgcagcgggaatcaaactgacgctgcatatctcttaacagtttcagattttgcctcgtcccatgtttggatgtgatgatttgggttggctctggccactggcaataccctgagttattagaaaatgtaaggagctgttcctcatccctgtttcctgtgtccttaacctttctctgtttttagtttctcagcattcaagggctgagccagtgctctttagtgaaggacttctactttgtggatatgagcaatttctccccatttctctttcccatcttgtctctaacgtggagggaagggagtgatgtttgtccacagcaccttcggcaactatcatgacatgtttgcgagcgtcaccttcttgtgctagactcatagccatgatgcatatttggcatatttggtgctcaataaatgacctcacatagacacacagcaacatgtgaaaagccagtaggaaggaagatcgact

SEQ ID NO: 39671 - DNA, 977 bp, Artificial sequence
  DNA replication origin
gggtgaagagacgctgacgaaggcgggagcgcggcggggtgaagagacgctgacgaaggcgggagcgcggcggggtgaagagacgctgacgaaggcgggagcggggcggggtgaacagacgctgacgaaggcgggagcggggcggggtgaacagacgctaaggaaggcgggagcgcggcggggtgaacagacgctaaggaaggcgggagcgcggcggggtgaacagacgctgacgaaggcgggagcgcggcggggtgaacagacgctgacgaaggcgggagcgcggcggggtgaacagacgctgacgaaggcgggagcgcggcggggtgaacagacgctgacgaaggcgggagcgcggcggggtgaacagacgctgacgaaggcgggagcgcggcggggtgaacagacgctgacgaaggcgggagcgcggcggggtgaacagacgctgacgaaggcgggagagcggcggggtgaacagacgctcaggaaggcgggagcgcggcggggtgaagagacgctaacgaaggcgggagcgtggcggggtgaacagatgctgacgaaggcgggagcgcggcggggtgaacagatgcttaggaaggcaggagcgcggcggggtgaagagatgctaacataggcgggagcgtggcggggtgaacagatgctgacgaaggcgggaatgtggcggggtgaacagatgctaacgaaggcgggaacgtggcggggtgaagcacaaggatgtgactgagaagacgacgtcgctgttggagaatatggtgactttgactgagaaggcgacgtcactcttggagaatatggaggccatgagggccgtccaaacacaggtgctaaagaaggcaggagtgtggtggggtgaagcacaaggaggtgactgaaagacgatgtcactcttcgagaatatggtgactttgactgagaagacgtcactcttggagaatatggtgacttttgatggctga

SEQ ID NO: 39672 - DNA, 2210 bp, Artificial sequence
  DNA replication origin
cctcttctttttgctatcagtttaagatgggaaagtctacctacatttttaacaaaatatcaatagaaaaaaaaaacaacagaaaaagaaacagagttctctccagcctctcagaagggctgcagtgactggcatagtaaattatgggaaagttccacattgtggctcagcatgtccaagaacaaagccatggacagtttttcacaagagaaatctcagggaatatgagcagattatatagcacaaaacatgccacagcctcaacaatgtttttgagccctgaaacaagtaacaggacaatagggttgttggaaagcttagagtctaatcttgattctaaaacatgtaatatggtcatgtgccccatgacgtctcagtcgatgacagaccacatgtacaacagtggtctcataagattatagtactgtatttttattgtaccttttctatgtttagatacacaaatacttaccattgtgttacaactgcctacagtattcagtacagtaccctgctgcttgtagcttaggagcaatagactttatcatacagattaggtgtgtgagaggctctaccatcctggtttaggcaaggacactctatgatgtttgcacaatgatgaaatcacctaaagacacacttctcagagcaaatcctggtcattaagctacacatgactgtatataagctgcagtgtgcgactgacatgtttctaccaatgattaactattcttcaatggagagcaacattccaagaattaaattgtaaaagcccgtctaataacaagtgttctgtatttctgggacaattctgtctttgcctccgagaaatggctacttcacaaactcccgtaacgaaatttcacaggtgaaaggcgcagctagccatgagcacagccaggatccatttatgtcaattaggaagtgggttagcagcccaggtgaacctggatacgagtgaaaggactagatgcagtacactagaattctcctctctgacccgtggaccaggaagaatccctctgcactgtgtaaatatgtgaaataatgggaagaccaaagaggagtcccctcagagtcccatgcttgaagccagctgctggatagccagacaccatagcttactgtggaggagcactccatccccagatgaagaaagagggtgcactgcataaggagacgctgctgattagacttcaaaggaaattctttatcagaggtgcatatacataaagtgcaaaaatcacagacaatatatagactcaagagagaagtcctgaggacccattttagggagaatttttcaagtagaggaagagacacaataggatcaaataggggggacgaaatgtgtttaaatgattcagagagaagaaaaatcagccaagggagacgtcaaggagaaaaataaggcaagtagcacagcactgtgatgatgacaatgctgaaatggaaggaggctgagggccgtccagacaagccacatgctaacgaaggcaggagcgcggtggggtgaacagatgctaaggaaggcgggagcgccgcggggtgaacagacgctgaggaaggcgggagcgcggcggggtgaacagacgctaaggaaggcgggagcgcggcggggtgaacagacgctgacgaaggcgggagcgcggcggggtgaacagacgctgacgaaggcgggagcgcggcggggtgaagagacgctgacgaaggcgggagcgcggcggggtgaagagacgctgacgaaggcgggagcgcggcggggtgaagagacgctgacgaaggcgggagcgcggcggggtgaagagacgctgacgaaggcgggagcgcggcggggtgaagagacgctgacgaaggcgggagcgcggcggggtgaagagacgctgacgaaggcgggagcggggcggggtgaacagacgctgacgaaggcgggagcggggcggggtgaacagacgctaaggaaggcgggagcgcggcggggtgaacagacgctaaggaaggcgggagcgcggcggggtgaacagacgctgacgaaggcgggagcgcggcggggtgaacagacgctgacgaaggcgggagcgcggcggggtgaacagacgctgacgaaggcgggagcgcggcggggtgaacagacgctgacgaaggcgggagcgcggcggggtgaacagacgctgacgaaggcgggagcgcggcggggtgaacagacgctg

SEQ ID NO: 39673 - DNA, 895 bp, Artificial sequence
  DNA replication origin
tgtgtttggtgctcaagggccagacaggggaggtgggggtgggctgactccagcttggttggtttcccctgaaggctgggctgacaggtgagttgtttgctatctctaggaatcagttaaccctgggaggggtagtctgtcccaggtcagcaaggccccagatgccaaggcatcaagaacacagaatataagaaactagaaggaatgcagccttgttaaaaacccctcggggaatgttgtttattttttccccgcaggcaaatccatgtggcttggctcagagggcaagttctgtctccctgtgcgtgggcggatcccaaggcctttgctaagctgccctggtggctctgattttgtcctgtgcacaaacagctgggggggggaggtggggaccaggactgtgggggtgctacacacagagccagacaagcccattctgcagctctctcctctaagggctccccccacctccctagcttacaggggctccttctcctgatcctttggccagaaggaaggggtttcttttaaagtccttgccctgaggcaccacacagatgtggctctataactggtgccacctaaagggaaacatgacaagaagagagagagaaggagggagagggagaaggaggaagatagagggaaaggaagttggagagggagagtagggagagaaaggggagagaagagaaagggaggagggaaaagaagtggggagggaaaaagagagggacagaagaggtggggaaagaggggcaagaggaaggagacaggaaaagcggagcagaggagggaggaagaggggcgggagagacggggattgagagaacacacagaatttcttccccccatgctttgaagacaggatccttttttcttctggccacagaca

SEQ ID NO: 39674 - DNA, 1544 bp, Artificial sequence
  DNA replication origin
gcttgcgccctcaccctccctgagcttctgaagggctgaggcttcctctgctgagctcgccccctcaccctccctgagcttccgcttccccagggctgcggcttcctctgctgagctcgcaccctcaccctccctgagcttccgcagggctgaagcctcctctgctgagctcgcgccctcaccctccctgagcttcggcggggctgaggccacctctgctgagctcgcgccctcatcctccctgagcttcggcggggctgaggcctcctctgctgagctcgcgccctcatcctccctgagctttggcggggctgaggcttcctctgctgagctcgcgccctcaccctccctgagcttcggcggggctgagggcctcctctgctgagctcgcgccctcaccctccctgagcttccgcagggttgaggcctcctctgctgagctcgcgccctcaccctccctgagcttcgggggggctgagggcctcttctgctgagctcgcgccctcaccctccctgagcttccgcagggctgaggcttcctctgctgagcttgcgcacttggagaagccccctctgggtggtgatttgtgtgctgcagttcactcccacagtttgacacacacacgcacacacacactcaaagtcggcaaaggcaccagcagcagtacatacatgctttcctaatagaatgctgcttttaataaacaggcaacctcttactcttttagtttttgtggacttcattgtttaaaactgtaaataaacaaagaactctggattcctcatacatactattaagtgttagtgtttcctttactggaagccttcaatgtatcagaaactgtgcagggtgatagggtacacagaggccaaatccaaggctactgtcttgcgggaactctcaagccaggtacttagagacggctgtgtattgcggacctcagccacggagggctgaatttcacagaaatcttggtatatatttgtcacatgtgttgcttaattaacatttccaaatagtaattttagtcacctctagaataatctaattatatgcacagtcacgtgtcacttaatgaagggaatacgttctgagaaatgcatccttaggtgattttgccgttgtgtgaacatcatagagtgcactcatacaaacccagacggcacagcctcctccacacccgggccacatggtacagcctgttgctcccgggatacacacctgcccagcaggggacgctactgaacactgcaggcagctggaacataatggtacgtatttatgtatctaaacataataaacagagaaaaggtacagtaaaaacatggtataaaaagtggaaaatggtacacttttatagggcacttaccacgaatggagctagcaggactggaagttgctggggtgagtctctgagtgaatggcgagtggatgtggaggcctgggatgctattgtgcacccccttataaacactagacactcatgctacactaaatttataagaaatactttttcttccttcaataatgattaacctttgct

SEQ ID NO: 39675 - DNA, 1162 bp, Artificial sequence
  DNA replication origin
acatttctactgacttatttccatgacttcctttgctccagccactgaacactcactcccggtgtgtccttactaaaatgttagttaatgtgttatctgttcatgatagtgcagctgtctgcataacttctgtgtatttgtttatttatttaatttatttttttgagatggattcttgctctgttgtccaggctgaagtgaattggcgcgatctcggctcactgcaacctccacctcctgggttcaaacgattctcatgtcagcctcccgagtagctgggattacaggcacacaccaccatgcccagctattttttgtatttttagtagagacagggtttcaccgtgttggccaggctggtcttgagctcctgacctcaagtgatctgcctgcctctgcctcccaatgtgctgggattacatgggtgagctgccactcctggccaacttctgtgtatttattgagggaggtgatttgtgtggggatggtggaaggattggggcatgtgaaagagaaggagtcctggtttgtaagttagatcatgtgagggatagggatagggagtggagcacagagtgaatgagaccacacacgtgtaagagggaatgatgagcaggcaggaagagagggttggtgtaggaaagggttggtgcaggaaaggggtggtgtaggaaagggtggtataggaaaggggtggtgtaggaaagggtggtgtaggaaaggggtggtgtagggaaggggtggtgtaggaaaggggtggtgtaggaaagggatgttgtaggaaagggtgttgcaggaaagtgttggtgtaggcaagggttggtgtaggaaaggtgtggtgtagggaaggggtgatataggaaaactttggtgtaggaaaggcttggtgtaggaaaggcttggtgtaggaaagatttggtgtaggaaaggggtgttgtaggaaagggttgatgtaggaaagatttggtgtacgaaggggttggtgtaggaaaggggttgtgtaggaaagtgttggtgtaggaaaggggtggtgtagggtgctgacatttgcataaattgcactggggtaggagtggatgatgatggaaagttggaagaatgtgatattttggtggaaataataacttagaaactgagtcatcttttagctacagagaagggt

SEQ ID NO: 39676 - DNA, 733 bp, Artificial sequence
  DNA replication origin
caccagtccccgaggcttggcagagcaggagccctccgtggcagtgcttgggtatcgaggctctgagactccggcctcacctctccacggggtcgaagggaacctctcctgatgacagcagtcgcaaagggccgaccatgatgatgaaaccccagtcggagacgggggaagcagcacgggatcccagcctcaggcctgcacggacggtgttggttggggtgagtctctccaaaagccttgccgctgtccgtgatctcgaggacgggtcggcctgcgtgcccctgggctgctctctcacccgagggtcgttctcctccagagcagaaccccggagcctcaggggttgcctgggggtgtgtgtttcaatgcctctgctgtatgactctgcgtgtgtgtgtgtgtgtctgtgtgtttgtctcccattctctcttctccctctgtctctcagtctctgtgtgtttctttcccactctttgtgggtttgttccagccgaagttgcatcagggctacgagttcggtggaggattgggggtgttgcgaaattggcagaaacctctttgttcctctggtaggcatttgaaaacgtggcttgggtcaggcacagacgtcccctacaccctccgggtcccaggtgttgtttgattttccttggcattgacggaaaggtcacccgtttcccccttccaccggcacgtgcatggaccccacccttcgtttcgccgtcgccccgtt

SEQ ID NO: 39677 - DNA, 838 bp, Artificial sequence
  DNA replication origin
cgcctctgttcctctttgcagttgtcctgtacagcgcgttcggctttccggaacccctgggcttttacaagcggggcaggccactgctctttcaaaggaggagggaggcagagggctgatggatcggtgaatttgctctgacactaggccttgagacctatggggtcattgtgtgctgcagcgaggccccgccggcctgaccagatgtggtgagcccatcctatgtcactcggagggggccagaatgggatctcaacgggagtccggagccacacagcaggcgtcctgaaactccccctccctcgctgggaatcggctcaagcaggtcctgaggacaggagccctgggggtttgggcctgtgacacgacgagacacccgcggcccccgctcccacgccgccccaaacaggacccaggacacagccgacgccggggcggcagcaggagcatcgcggccgccgcccggcggtggcgatatttaaaggggacgcagcctatctgtcaggagtggagcgtgagtcggctcagccaatgcgcatgcgtgagccgtcagctgtttctcgcgtcacagtggttcccacggttgtcttagacaccagtccccgaggcttggcagagcaggagccctccgtggcagtgcttgggtatcgaggctctgagactccggcctcacctctccacggggtcgaagggaacctctcctgatgacagcagtcgcaaagggccgaccatgatgatgaaaccccagtcggagacgggggaagcagcacgggatcccagcctcaggcctgcacggacggtgttggttggggtgagtctctccaaaagccttgccgct

SEQ ID NO: 39678 - DNA, 765 bp, Artificial sequence
  DNA replication origin
cagcctatctgtcaggagtggagcgtgagtcggctcagccaatgcgcatgcgctaggcgccagcggtttctcccgtcacagtgattcccacggttgtcttagacactagtccccgaggcttggcagagcaggagccctccgtggcagtgcttgggtatccaggctctgaggctccggcctcacctttccacggggtcgaagggaacctctcctgatgacagcagtcgcaaagggcggaccatgatgatgataccccaggcggagacgggggaagcagcacgggatcccagcctcaggcctgcacggacggtgttggttggggtgagtctcaccaaaagtcgtgccggcgtccgtgatctcgaggacgggtcggcctgcgtgcccctcggctgctctctcacccgagggtcattctcctccagagcagaaccccggatcctcaggggttgcctggtgttgtgtgtttcaatgcctctgctgtatgactctgcgtgtgtgtgcgtgtgtgtctgtgtgtgtgtctcccattctctcttctctctctgtctctcactctctgtgtgtttctttcccactctctgtgggtttgtaccagccgaagttgcgtcagggctaccaggtcggtggaggattgggggtgttgcgaaattggcagaaacctctttgctcctctgggaggcatttgaaaacgtggcttgggtcaggcacaggaggcccccctaccccacggttcccaggtgttgtttgtttttccttgacgttgac

SEQ ID NO: 39679 - DNA, 819 bp, Artificial sequence
  DNA replication origin
ggacgcagcctatctgtcaggagtggagcgtgagtcggctcagccaatgcgcatgcgcgaggccccagcggttgctccagtcacagtggttcccacggttgtcttagaaaccagtccccgaggctttgcagagcaggagccctccgtggcagtgcttgggtatcgaggctctgaggctccggtctcacctctccacgggctcgaagggaaactctcctgatgccagcagtcgcaaagggccgactatgaagatgaaaccccaggtggagaccggggaagcagcacgggatcccagcctcaggcctgcacggacggtgtttgttggggtgagtctcgccaaaagtcgcgccgctgtccgtgatctcgaggacgggtcggcctgcgttcccctcggctgctctctcacccgaggttcgttctcctccagagcagaaccccggatcctcaggggttgcctgggggtgtgtgtttcaatgcctgtgctgtatgactctgcgtgtgtgtgcgtgtgtgtctgtgtgtgtgtctcccattctctcttctctctctgtctctcactctctgtgtgtttctttcccactctctgtgggtttgtaccagccgaagttgcgtcagggctaccaggtcggtggaggattgggggtgttgcgaaattggcagaaacctctttgctcctctggtaggcatttgaaaacgtggcttgggtcaggcacaggaggcccccctaccccacggttcccaggtgttgtttgtttttccttggcgttgacggaaatgtcacccgtttcccccttccaccggcatatccctggaccccac

SEQ ID NO: 39680 - DNA, 812 bp, Artificial sequence
  DNA replication origin
gtaaagcgcgttcggctttccggaacccctgggcttttacaagcggggcaggccactgcactttcaaaggaggagggaggcagagggctgatggatgagtgaatttgctctgacaataggccttgagacctatggggtcattgtgtgctgcagcgaggccctgccggcctgaccacatgtggtgagcccatcctatgtcactccgagggggccagaatgggatctcaacgggagtccagagaacacagcaggcgtcctgaagctccccctcccttggtggaagtcggctcaagcaggtcctgaggacaggagccctgggggtttgggcctgggacaggacgagacacccgcggtcccctctcccatgccaccccaaacaggacccaggacacagccgccttcgcggcggcagcaggagcatcgcggccgccgcgcggcggtcgcgatatttaaaggggacgcagcctatctgtcaggagtggagcgtgagtcggctcagccaatgcgcatgcgcgaggccccagcggttgctccagtcacagtggttcccacggttgtcttagaaaccagtccccgaggctttgcagagcaggagccctccgtggcagtgcttgggtatcgaggctctgaggctccggtctcacctctccacgggctcgaagggaaactctcctgatgccagcagtcgcaaagggccgactatgaagatgaaaccccaggtggagaccggggaagcagcacgggatcccagcctcaggcctgcacggacggtgtttgttggggtgagtctcgccaaaagtcgcgccgctgtc

SEQ ID NO: 39681 - DNA, 874 bp, Artificial sequence
  DNA replication origin
taaagggacgcagcctatctgtcaggagtggagcgtgagtcggctcagccaatgcgcatgcgctaggcgccagcggtttctcccgtcacagtggttcccacggttgtcttagacactagtccccgaggcttggcagagcaggagccctccgtggcagtgtttgggtatccaggctctgaggctccggcctcacctttccacggggtagaagtgaacctctcctgatgacagcagtcgcaaagggccgaccatgatgatgaaaccccaggcggagacgggggaagcagcacgggatcccagcctcaggcctgcacggacggtgttggttggggtgagtctcaccaaaagtcgtgccgccgtccgtgccctcgaggacgggtaggcctgcgtgcccctcggctgctctctcacccgagggtcgttctcctccagagcagaaccccggatcctcaggggttgcctgggggtgtgtgtttcaatgtctctgctgtatgactctgcgtgtgtgtgcgtgtgtgtctgtgtgtgtgtctcccattctctcttctctctctgtctctcactctctgtgtgtttctttcccactctctgtgggtttgtaccagccgaagttgcgtcagggctaccaggtcggtggaggattgggggtgttgcgaaattggcagaaacctctttgctcctctggtaggcatttgaaaacgtggcttgggtcaggcacagtcggcacccccacctcccggttcccaggtgtggtttgattttccttggcactgacggaaatgtcacccgtttcccccttccaccggcatatgcctggaccccacccttcgtttcgccgtcgccccgtatgcctccggtgacacacattaacacc

SEQ ID NO: 39682 - DNA, 747 bp, Artificial sequence
  DNA replication origin
gtttctcgggtcacaggggttcccacggttgtcttagaaaccagtccccgaggctttgcagagcaggagccctccgtggcagtgcttgggtatcgaggctctgaggctccggtctcacctctccacgggctcgaagggaaactctcctgatgccagcagtcgcaaagggccgactatgaagatgaaaccccaggtggagaccggggaagcagcacgggatcccagcctcaggcctgcacggacggtgtttgttggggtgagtctcgccaaaagtcgcgccgctgtccgtgatctcgaggacgggtcggcctgcgtgcccctgggctgctctctcacccgagggtcgttctcctccagagcagaaccccggagcctcaggggttgcctgggggtgtgtgtttcaatgcctgtgctgtatgactctgcgtgtgtgtgtgtgtgtctgtgtgtttctctcccattctctcttctccctctgtctctcagtctctgtgtgtttctttcccactctttgtgggtttgtgccagccgaagttgcttcagggctacgaggtcggtggaggattgggggtgttgcgaaattggcagaaacatctttgttcctctggtaggcatttgaaaacgtggcttgggtcaggcacagacgtcccccacaccctccgggtcccaggtgttgtttgattttccttggcattgacggaaaggtcacccgtttcccccttccaccggcacgtgcatggaccccac

SEQ ID NO: 39683 - DNA, 748 bp, Artificial sequence
  DNA replication origin
cccctgggcttttacaagcggggcaggccactgcactttcaaaggaggagggaggcagagggctgatggatgagtgaatttgctctgacactaggccttgagacctatggggtcattgtgtgctgcagcgaggccctgccggcctgaccacatgtggtgagcccatcctatgtcactccgatggggccagaatgggatctcaacgggagtccagagaacacagcaggcgtcctgaagctccccctcccttggtggaagtcgactcaagcaggtcctgaggacaggagccctgggggtttgggcctgggacaggacgagacacccgcggtcccctctcccatgccaccccaaacaggacccaggacacagccgccttcgtggcggcagcaggagcatcgcggctgccgcgcggcggtcgcgatatttaaaggggacgcagcctatctgtcaggagtggagcgtgagtcggctcagccaatgcgcatgcgcgaggccccagcggtttctcgggtcacaggggttcccacggttgtcttagaaaccagtccccgaggctttgcagagcaggagccctccgtggcagtgcttgggtatcgaggctctgaggctccggtctcacctctccacgggctcgaagggaaactctcctgatgccagcagtcgcaaagggccgactatgaagatgaaaccccaggtggagaccggggaagcagcacgggatcccagcctcaggcctgcacggacggtg

SEQ ID NO: 39684 - DNA, 1259 bp, Artificial sequence
  DNA replication origin
ttcggctttccggaacccctgggcttttacaagcggggcaggccactgctctttcaaaggaggagggaggcagagggctgatggatcggtgaatttgctctgacactaggccttgagacctatggggtcattgtgtgctgcagcgaggccctgccggcctgaccagatgtggtgagcccatcctatgtcactcggagggggccagaatgggatctcaacgggagtccggagcacacagcaggcgtcctgaagctccccctccctcgctggaaatcggctgaagcaggtcctgaggacaggagccctgggggtttgggcctgtgacacgacgagacacccgcggcccccgctcccacgccgccccaaacaggacccaggacacagccgacgccggggcggcagcaggagcatcgcggccgccgtgcgacggtggcgatatttaaaggggatgcagcctatctgtcattagtggagcgtgagtcggctcacccaaagcgcatgcgtgaggtgccagcggtttctcccgtcacagtggttcccactgttgtcttagacaccagtccccgaggcttggcagagcaggagccctccgtggcagtgcttgggtatcgaggctctgagactccggcctcacctctccacggggtcgaagggaacctctcctgatgacagcagtcgcaaagggccgaccatgatgatgaaaccccaggcggagacgggggaagcagcacgggatcccagcctcaggcctgcacggacggtgttggttggggttagtctcgccaaaagccttgccgctgtccgtgatctcgaggacgtatcgggctgcgtgcccctcggctgctctctcacccgagggtcgttctcctccagagcagaaccccggagcctcaggggctgcctggggtgtgtgtttcaatgcctctgctgtatgactctgcgtgtgtgtgtgtgtgtgtgtgtgtgtgtctgtgtgtgtgtctcccattctctcttctctctctgtctctcagtctctgtgtgtttctttcccactctctgtgggtttgtaccagccgaagttgcgtcagggctaccaggtcggtggaggattgggggtgttgcgaaattggcagaaacctctttgctcctctggtaggcatttgaaaacgtggcttgggtcaggcacaggaggcccccctaccccacggttcccaggtgttgtttgattttcctttggcattgacggaaatgtcacccgtttcccccttccaccggca

SEQ ID NO: 39685 - DNA, 1305 bp, Artificial sequence
  DNA replication origin
tatttaaaggggacgcagcctatctgtcaggagtggagcgtgagtcggctcagccaatgcgcatgcgtgaggcgccagcggtttctcccgtcacagtggttcccacggttgtcttagacactagtccccgaggcttggcagagcaggagccctccgtggcagtgtttgggtatccaggctctgaggctccggcctcacctttccacggggtagaagggaacctctcctgatgacagcagtcgcaaagggccgaccatgatgatgaaatcccaggcggagacgggggaagcagcacgggatcccagcctcaggcctgcacggacggtgttggttggggtgagtctcaccaaaattcgtgccgccgtccgtgacctcgaggacgggtcggcctgcgtgcccctcggctgctctctcacccgagggtcgttctcctccagagcagaaccccggatcctcaggggttgcctgggggtgtgtgtttcaatgtctctgctgtatgactctgcgtgtgtgtgcgtgtgtgtgtgtgtgtgtgtctcccattctctcttctctctctgtctctcactctctgtgtgtttctttcccaatctctgtgggtttgtaccagccgaagttgcgtcagggctaccaggtcggtggaggattgggggtgttgcgaaattggcagaaacctctttgctcctctggtaggcatttgaaaacgtggcttgggtcaggcacagtcggcacccccacctcccggttcccaggtgtggtttgattttccttggcactgacggaaatgtcacccgtttcccccttccaccggcacatgcctggaccccacccttcgtttcgccgtcgccccgtatgcctccggtgacacacattaacaccaactgctgtgggattagccagtgccacgcgtggtctcatggtctccccctgggtttcgcctctgttcctctttgcagttgtcctgtaaagcgcgttcggctttccggaacccctgggcttttacaagcggggcaggccactgctctttcaaaggaggagggaggcagagggctgatggatcggtgaatttgctctgacactaggccttgagacctatggggtcattgtgtgctgcagcgaggccctgccggcctgaccagatgtggtgagcccatcctatgtcactcggagggggccagaatgggatctcaacgggagtccggagcacacagcaggcgtcctgaagctccccctccctcgctggaaatcggctgaagcaggtcctgaggacaggagccctgggggtttgggcctgtgacacgacga

SEQ ID NO: 39686 - DNA, 1293 bp, Artificial sequence
  DNA replication origin
ttcctctttgcagttgtcctgtaaagcgcgttcggctttccggaagccctgggcttttacaagcggggcaggccactgctctttcaaaggaggagggaggcagagggctgatggatcggtgaatttgctctgacactaggccttgagacctatggggtcattgtgtgctgcagcgaggccctgccggcctgaccagatgtggtgagcccatcctatgtcactcggagtgggccagaatgggatctcaacgggagtccggagaacacagcaggcgtcctgaagctccacctccctcggtggaaatcggctcaagcaggtcctgaggacaggagccctgggggtttgggcctgtgacacgacgagacacccgcggcccccgctcccacgccgccccaaacaggacccaggacacagccgacgccggggcggcagcaggagcatcgcggccgccgcgcggcggtggcgatatttaaaggggacgcagcctatctgtcaggagtggagcgtgagtcggctcagccaatgcgcatgcgtgaggcgccagcggtttctcccgtcacagtggttcccacggttgtcttagaaaccagtccccgaggctttgcagagcaggagccctccgtggcagtgcttgggtatcgaggctctgaggctccggtctcacctctccacgggctcgaagggaaactctcctgatgccagcagtcgcaatgggccgactatgaagatgaaaccccaggtggagaccggggaagcagcacgggatcccagcctcaggcctgcacggacggtgtttgtttgggtgagtctcgccaaaagtcgcgccgcggtcagtgatctcgaggactggtcggcctgcgtgctcctgggccgctctctcacccgagggtcgttctcctccagagcagaaccccggatcctcaggggttgcctgggagtgtgtgtttcaatgcctctgctgtatgactctgcgtgtgtgtgcgtgtgtgtctgtgtgtgtgtctcccattctctcttctctctctgtctctcactctctgtgtgtttctttcccaatctctgtgggtttgtaccagccgaagttgcgtcagggctagcaggtcggtggaggattgggggtgttgcgaaattggcagaaacctctttgctcctctggtaggcatttgaaaacgtggcttgggtcaggcacagtctgcacccccacctcccggttcccaggtgtggtttgattttccttggcactgacggaaatgtcacccgtttcccccttccaccggcacatgcctggacccc

SEQ ID NO: 39687 - DNA, 720 bp, Artificial sequence
  DNA replication origin
gcggcgcgacttttggcgagactcacccaaacaaacaccgtccgtgcaggcctgaggctgggatcccgtgctgcttccccggtctccacctggggtttcatcttcatagtcggcccattgcgactgctggcatcaggagagtttcccttcgagcccgtggagaggtgagaccggagcctcagagcctcgatacccaagcactgccacggagggctcctgctctgcaaagcctcggggactggtttctaagacaaccgtgggaaccactgtgacgggagaaaccgctggcgcctcacgcatgcgcattggctgagccgactcacgctccactcctgacagataggctgcgtcccctttaaatatcgccaccgccgcgcggcggccgcgatgctcctgctgccgccccggcgtcggctgtgtcctgggtcctgtttggggcggcgtgggagcgggggccgcgggtgtctcgtcgtgtcacaggcccaaacccccagggctcctgtcctcaggacctgcttgagccgatttccaccgagggaggtggagcttcaggacgcctgctgtgttctccggactcccgttgagatcccattctggcccactccgagtgacataggatgggctcaccacatctggtcaggccggcagggcctcgctgcagcacacaatgaccccataggtctcaaggcctagtgtcagagcaaattcaccgatccatca

SEQ ID NO: 39688 - DNA, 784 bp, Artificial sequence
  DNA replication origin
ttggcagagcaggagccctccgtggcagtgcttgggtatcgaggctctgaggctccggcctcacctccccacagggtcgaaggcaacgtctccggatgccagcactcgcaaagggccgaccatgatgatgaaaccccaggcggagacctggaagcagcacgggatcccagcctcaggcctgcacggacggtgttggttggggtgagtctcgccaaaagccttgccgccgtccgtgatctcgaggacgtgtcgggctgcgtgcccctgggctgctctctcacccgagggtcgttctcctccagagcagatccccggagcctcagggggtgcctgggggtgtgtgtttcaatgcctctgctgtatgactctgcgtgtgtgtgtgtgtgtgtgtgtgtctcccattctctcttctctctctgtctctcagtctctgtgtgtttctttcccactctctgtgggtttgtgccagcgaagttgcatcagggctacgaggccggtggaggattgagggtgttgcgaaattggcagaaacctctttgctcctctggtaggcatttgaaaacgtggcttgggtcaggcacaggaggcccccctaccccacggttcccaggtgttgtttgattttcctttgctttgacggaaatgtcacccgtttcccccttccaccggcatatgcctggaccccacccttcgtttcgccgtcgccccgtatgcctccggtgacacacattaacaccaactgctgtgggattggccagtgccacgcgtggtcacatggtctccc

SEQ ID NO: 39689 - DNA, 842 bp, Artificial sequence
  DNA replication origin
cccctgggcttttacaagcgcggcaggccactgctctttcaaaggaggagggaggcagagggctgatggatgagtgaatttgctctgacactaggccttgagacctatgggatcattttgtgctgcagcgaggccctgccggcctgagcagatgtggtgagcccatcctatgtcactcggagtgggccagaatggattttcaacgggagtccggagaacacagcaggcgtcctgaagctccacctccctcggtggaagtcggctcaagcaggtcctgaggacaggagccctgggggtttgggcctgggacaggaccagacacccgtggccccctctcccacgccgcccgaaacaggacccaggacacaggcgccgccggggcggcagcaggagcatcgcggccgacgcgcagcggtggcgatatttaaaggggacgcagcctatctgtcaggagtggagcgtgagtcggctcagccaatgcgcatgcgctgggcgcgagcggattctcccgtcacagtggttcccacggttgtcttagaaaccagtccctgaggcttggcagagcaggagccctccgtggcagtgcttgggtatcgaggctctgaggctccggcctcacctccccacagggtcgaaggcaacgtctccggatgccagcactcgcaaagggccgaccatgatgatgaaaccccaggcggagacctggaagcagcacgggatcccagcctcaggcctgcacggacggtgttggttggggtgagtctcgccaaaagccttgccgccgtccgtgatctcgaggacgtgtcgggctgcgtgcccctgggctgctctctcacccgagg

SEQ ID NO: 39690 - DNA, 1042 bp, Artificial sequence
  DNA replication origin
cccgtggccccctctcccacgccgcccgaaacaggacccaggacacaggcgccgccggggcggcagcaggagcatcgcggccgacgcgcagcggtggcgatatttaaaggggacgcagcctatctgtcaggagtggagcgtgagtcggctcagccaatgcgcatgcgctgggcgcgagcggattctcccgtcacagtggttcccacggttgtcttagaaaccagtccctgaggcttggcagagcaggagccctccgtggcagtgcttgggtatcgaggctctgaggctccggcctcacctccccacagggtcgaaggcaacgtctccggatgccagcactcgcaaagggccgaccatgatgatgaaaccccaggcggagacctggaagcagcacgggatcccagcctcaggcctgcacggacggtgttggttggggtgagtctcgccaaaagccttgccgccgtccgtgatctcgaggacgtgtcgggctgcgtgcccctgggctgctctctcacccgagggtcgttctcctccagagcacaaccccggagcctcagggggtgcctgggggtgtgtgtttcaatgcctctgctgtatgactctgcgtgtgtgtgtgtgtgtgtgtctcccattctctcttctctctctgtctctcagtctctgtgtgtttctttcccactctctgtgggtttgtgccagcgaagttgcgtcagggctacgaggccggtggaggattgagggtgttgcgaaattggcagaaacctctttgttcctctggtaggcatttgaaaacgtggcttgggtcaggcgcagacgtcccccacaccctccaggtcccaggtgttgtttgattttccttggcattgacggaaaggtcacccgtttcccccttccaccggcacatgcatggaccccacccttcgtttcaccgtcgccccgtttaccgcaggtgtcacacgttaacaccaactgctgtgggattggccagtgccacgcgtggtcacatggtctccccctggatttcgcctctcttcctctttgc

SEQ ID NO: 39691 - DNA, 854 bp, Artificial sequence
  DNA replication origin
cgcgcagcggtggcgatatttaaaggggacgcagcctatctgtcaggagtggagcgtgagtcggctcagccaatgcgcatgcgctgggcacgagcggattctcccgtcacagtggttcccacggttgtcttagaaaccagtccctgaggcttggcagagcaggagccctccgtggcagtgcttgggtgtcgaggctctgaggctccggcctcacctccccacagggtcgaaggcaacgtctccggatgccagcactcgcaaagggccgaccatgatgatgaaaccccaggcggagacctggaagcagcacgggagcccagcctcaggcctgcacggacggtgttggttggggtgagtctcgccaaaagccttgccgccgtccgtgatctcgaggacgtgtcgggctgcgtgcccctggcgtgctctctcacccgagggtcgttctcctccagagcagaaccccggagcctcagggggtgcctgggggttgtgtgtttcaatgcctctgctgtatgactctgcgtgtgtgtgtgtgtgtgtgtgtgtgtgtctcccattctctcttctctctctgtctctcagtctctgtgtgtttctttcccactctctgtgggtttgtgccagcgaagttgcgtcagggctacgaggccggtggaggattgggggtgttgcgatattggcagaaacctctttgtttctctggtaggcatttgaaaacgtggcttgtgtcaggcacagacctcccccccaccctccgggtcccaggtgttgtttgattttccttggcattcacggaaaggtcacctgtttccccttccacgtgttcattcctggaccgcaccctttgtttcgcc

SEQ ID NO: 39692 - DNA, 829 bp, Artificial sequence
  DNA replication origin
cttggcagagcaggagccctccgtggcagtgcttgggtatcgaggctctgaggctccggcctcacctccccacagggtcgaaggcaacgtctccggatgccagcactcgcaaagggccgaccatgatgatgaaaccccaggcggagacctggaagcagcacgggagcccagcctcaggcctgcacggacggtgttggttggggtgagtctcgccaaaagccttgccgccgtccgtgatctcgaggacgtgtcgggctgcgtgcccctgggctgctctctcacccgagggtcgttctcctccagagcagaaccccggagcctcagggggtgcctgggggtgtgtgtttcaatgcctctgctgtatgactctgcgtgtgtgtgtgtgtgtgtgtgtgtgtctcccattctctcttctctctctgtctctcagtctctgtgtgtttctttcccactctctgtgggtttgtgccagcgaagttgcgtcagggctacgaggccggtggaggattgagggtgttgcgaaattggcagaaacctctttgttcctctggtaggcatttgaaaacgtggcttgggtcaggcgcagacgtcccccacaccctccaggtcccaggtgttgtttgattttccttggcattgacggaaaggtcacccgtttcccccttccaccggcacatgcatggaccccacccttcgtttcaccgtcgccccgtttacctcaggtgtcacacgttaacaccaactgctgtgggattggccagtgccacgcgtggtcacatggtctccccctggatttcgcctctcttcctctttgcagttgtcctgtaaa

SEQ ID NO: 39693 - DNA, 769 bp, Artificial sequence
  DNA replication origin
gcttggcagagcaggagccctccgtggcagtgcttgggtatcgaggctctgaggctccggcctcacctccccacagggtcgaaggcaacgtctccggatgccagcactcgcaaagggccgaccatgatgatgaaaccccaggcggagacctggaagcagcacgggatcccagcctcaggcctgcacggacggtgttggttggggtgagtctcgccaaaagccttgccgccgtccgtgatctcgaggacgtgtcgggctgcgtgcccctgggctgctctctcacccgagggtcgttctcctccagagcagaaccccggagcctcagggggtgcctgggggtgtgtgtttcaatgcctctgctgtatgactctgcgtgtgtgtgtgtgtgtgtgtgtgtctcccattctctcttctctctctgtctctcagtctctgtgtgtttctttcccactctctgtgggtttgtgccagcgaagttgcgccagggctacgaggccggtggaggattgagggtgttgcgaaattggcagaaacctctttgttcctctggtaggcatttgaaaacgtggcttgggtcaggcgcagacgtcccccacaccctccaggtcccaggtgttgtttgattttccttggcattgacggaaaggtcacccgtttcccccttccaccagcacatgcatggaccccacccttcgtttcaccgtcgccccgtttacctcaggtgtcacacgttaacaccaactgctgtgggattggccagtgccacgcg

SEQ ID NO: 39694 - DNA, 1660 bp, Artificial sequence
  DNA replication origin
tgcgccctggcgagcgcctttccgcctcactgcattgtaaccccattcccgatcaccgggtgggatccatcatcggatcccaagaggagtccgcgcagcccagccggcaccccgaagctcctccttcaccgggaacccaagcagaagaccgattaaggaggtcctgacgacaggactcctatgggtccgaccctgggtctcccgcaggcccctctggtagtcctcttcccacccaccgcctggggctgcaccacagccgccgccgcaagctccagcaccgccaccccagtccccgcagccgcggcgtcgccgccattttttaaagggtccgcagcctgactgccgagtaagggggggtggggcgggtgagtcggcctcgccagcgcgcatgcgcgaggcccgagccgccgcttcggtcacagtgaccgccaccgttgccaagggatgggtccctgagacttggcgaagtgggagccctgtgtgatcgtgcgtcagagtcggggctgagaccagccccggccagggtagttaccgggacggtctccggaggccgggattcgcggagggtccaccagcaggaagaaaccccaggaggaagaaacctcagacagatcgccggggaggcagcgcgggatcccagcctcaggcgtgcgcggacggtgtgcgggtgagtctccccaaaagtggcggccttgtgatgtcgaggacaggtctcgctgtgtgcccgtgggctgctgtctcaccggtggctcgtagtcgcggagagcagaacccggcagcttcaggggctgcctgggggtgggtgttacctgctgtatatctgtgtgcgttatgggggtgtgtgtgcgcgtctgtgtgtctgtgtgtgtgcgcgcgcgcgcacgtgcgtgtctgtgtgcccactactgtctctctcttaagtctctctctctctctctctctctctctctctctctctctcccttctcgctctttccgtcgccctctctttctgtctctgtccgtctgtgtgtgcgtgcgccttgggacacatgttccctgtgcgccggaggctgggtttcttgcacgtcggcctttcttctggtcagcctctccccgcgtccctgcctgggtgttgtggccggttggcaatcgttttcccggcggttccggtttgggggtctgtgaaggcctgggcaacgtgggcatctgcgtgggagccgcaggggctttcattccctccccatccggagcagcctctttgctaggctagatccagacgaccgctccccaaccaaggacaacagcctcccaggcgcttattgtccacccgcaggagggtgcccgcagaccttccagaagatgcttctcacgcctctcgccctctgccctcatggagaaatctagccatagctcgacgcagggatggagaaggaagctgtcaacgggatggggcaagcctctctctcactcaaaggcagtatagaggtccaccacagaggcatatctagtatggtgcccaccacctcatcttggggctgggtgaagggcaagtggcactgcaggaaatagtagccttgttctctgtcctcaagttgttccaagattgcagcccacaccagtgcttgggcttgtgagaatggagggctctccaacagttcagaaacaagcagtctgccac

SEQ ID NO: 39695 - DNA, 2174 bp, Artificial sequence
  DNA replication origin
cagcagcccacgggcacacagcgagacctgtcctcgacatcacaaggccgccacttttggggagactcacccgcacaccgtccgcgcacgcctgaggctgggatcccgcgctgcctccccggcgatctgtctgaggtttcttcctcctggggtttcttcctgctggtggaccctccgcgaatcccggcctccggagaccgtcccggtaactaccctggccggggctggtctcagccccgactctgacgcacgatcacacagggctcccacttcgccaagtctcagggacccatcccttggcaacggtggcggtcactgtgaccgaagcggcggctcgggcctcgcgcatgcgcgctggcgaggccgactcacccgccccacccccccttactcggcagtcaggctgcggaccctttaaaaaatggcggcgacgccgcggctgcggggactggggtggcggtgctggagcttgcggcggcggctgtggtgcagccccaggcggtgggtgggaagaggactaccagaggggcctgcgggagacccagggtcggacccataggagtcctgtcgtcaggacctccttaatcggtcttctgcttgggttcccggtgaaggaggagcttcggggtgccggctgggctgcgcggactcctcttgggatccgatgatggatcccacccggtgatcgggaatggggttacaatgcagtgaggcggaaaggcgctcgccagggcgcagaaagattccccagggccgcaaggcgtgctgtcggctgcaaaggcactgacccacgagcccactgcctccctccttcctgggtggagcaggggcctgccttcatctccaaggcccgggggctccggcatctcgacgcggcttccggcgacacgggcaaagagagacagagggtagtccgagccggagccagtgtgaccacacgtggccctgatgtcccccaagagcacatgcagtgagcccgtgtctctgaggccgtagtgggcgacgacgagacggacagtgatgtccaggcctgcgcccgggggccactggagacctgcccctcaaagcggaggaaacgccaagcgcacctgaaaacctgcgagacagggcctgtgcgcgagtccagtactcctacttcgccaagtctcagggacccaacccccagcaacggtggcggcacagagaggcgcacggcgccggcgcaggttcagagagataggaggctgatgggggggaagttgaggcacctggggcagagaagaaaatgcatcgccaagcggtttctgggtcatacacggacgaaaatgtcttcccatcagcccttgcgctggtccccagggaccctggcatccgtcgttggcgcccagggttcgcgtcgggccactaggggtaccccaactcggacagaaggcccatgagttgaatttgaagtttgtgggaatagaggtgaggcaccaggggcagaaaaaaaaacaggagacctcgcctcagacaagcagggcctgggtcccccatggatgaaagtgccttcccattatgctgtacgctgggcagagtggacagtgacgaccttagttcgagcccagggtgcgcttcgggaccgcttgcggtaccagaaagcgaacaaatggtccatgagcggaaggtgggcacctgaggcagagaaagtaaagaaacgcgctgccgagaagcagtgcctgggtccctcacggaggaaattgtcttctcgtcagcccgttcgctgggcactgacatccctggcgtctctggtttgatcccagggtacgcctcgggccactagtgttaccccaaggtgggcagaaagcccataaggggaaggtgaggcacctggggcagagaaaaaaaaaacttcgccgcagagaagcgcggcctgattccccacggacgaaagtgtcttctcatcagtccctgcactgggacctggggaccctggtgtccctggttcgagctcagtgtgtgcctcagccgctaagtgcaccccaaggggagctttgggagcacaaagcccatgagggaaggtgagttttgagggaggagtggtgaggcacctgtcacagaaaaagaaaaaaaaaacaatacgcgccacggagaagcagggcctgggtcccccacgatgaaaatgccttcccatcagctcctgctctgggccctgt

SEQ ID NO: 39696 - DNA, 1051 bp, Artificial sequence
  DNA replication origin
caggagtctgggccctagcgacgcacccgggctcccacaggacgaatgtagacggtgaggccaaggacgccctgctgccctcgggactgtccctccagcccccagctttccgtggctattgggccccctctgcagaggggcaggggagcccaccctggatcctgaggcgccgagcttgagggaccccagagctccagccaggccgctttctttgaggatggtgaagctgaggtcccgaggagggcaggggcaggtcccgggcgctcctcaggcaaagggagccgatttaggggctggggtcacaggaggggcttctgcgacctctagggccctagagcccgggaggatgagagactgggggcctttcgtccacccctggggctgggcagacgctcagcctgtgcaacccgaagctgcttctgcccagtcccagccgcggcccctttaagagggggtggtgcttcagcctggcgccagggacgctgccagcatgcaggccccgacggaagccgagactgcgcttcgtgcgaggcccgggcagcatcggcggcgtggtcagagcgagtctcggagaagatgtggtggcttccgtttgttggtggaggaggtggcaggcctcggcggtaagtggagggggatgaaccccacctggaaccctctgggtctccctactccttcccggccgctccctgctttcgggccctcacttctaagtgggcatctgggcccgagtcgtcagcgttggggcggttgtgggatccgggcctcggcagcgtccacacccccgccgggaaggctatgcccctgtccgacccacgtccagcctataggagcgccctggcccagagccggcggtgaagcgctggactgggtccctccgagccccacgggcctctgagctggggtctagggttattttttatgcctcaggacctttagaaagagacctcgctagagcaggggacatctgtagtttcaattctttgaggagtttccagctatttaactgttttccatggtgtgtaccctaattttcatttccacctacagt

SEQ ID NO: 39697 - DNA, 1020 bp, Artificial sequence
  DNA replication origin
tggggaggggaggggagatcaggtgagttaaactggatttgggggggaatgttggccaagtggcaggcagggtgggcctgggcctgagggaagccatggacccctagacttgttcctgctgacagagtgccagtggctgggcaggagcatgagcaaggtgggtttgcatctgtcactggaggagcgctccgaatgcttctcaggacaaaagcaggaggctgccattgttcacaggatgtgagatctaatatggttcaggctggggcaaatcagtgaagatcaaaatccctcatcttccacaatgagggactagaatcaaaggtggatgtgctcccgcctgctcacaaagggtcctcacatgccccagggccctccgctggggcacagtccacattaggcgacacacaaacagcctgagggtgcccagtcactgagcagccccagacgctgtgccgttaccggcaggcagggccctgcaggagaccttcgcctgcccggaccagagaggctgcaggggtgctgtggggagagggccagatggccgcaacacagctgggaatggctccagaggggagggtggagagtgcgctggcccctgggaggactcagagaggagttgcgtgtgtttggcgcttgtggacatggtgtgtggcagtgtgagccaacaggccaacgggcggcaagcataggaggctttatggatccccctgaagaaccactgtgtggaggggaaatggccccctgcgaggaaagtcctagcagccggtggagcgcaaccagatgcgggcccagactgatggggtctccatgggagcccaggtgggaggtggaggagaagggagacagtgagaaggttgtcaccaggccctcactaatacccagggagaagcccgtgtgcaaaggaggtgaaggatagtggtttggtttggtttggtttggtttggtttggtttggtttggtttggtttgagatggagtcttgctccattgtccaggctggagtacagtggtgcgatctcgg

SEQ ID NO: 39698 - DNA, 855 bp, Artificial sequence
  DNA replication origin
ctagggctccgcctgagttcacattctggcctgcactgccagatctccctccagcctctcaccagctccgtcatcctctgatctgccccagaggcacatctctaagaacactaatgccatcactcaaaaacatttggctggaagccaggcacggtgtttcgggcatggtggctcatgcctgtaatcccagcactttgggaggtggaggctggtggatcacttgaggtctggagttcaagaccagcctggccaacatggtgaaaccccatctctactaaaaataaaaaactaggccgggcaccatggctcacgcctgtaatcccagcactttgggaggccgacatgggtggatcacgaggtcaggagatggagaccatcctggctaacacagtgaaaccctgtctctactaaaaatacaaaaaattagctgggcatggtggcagatgcctgtagtcccacatactcgggaggctgaggcatgagaatggcatgaacctggggaggggaggggagatcaggtgagttaaactggatttgggggggaatgttggccaagtggcaggcagggtgggcctgggcctgagggaagccatggacccctagacttgttcctgctgacagagtgccagtggctgggcaggagcatgagcaaggtgggtttgcatctgtcactggaggagcgctccgaatgcttctcaggacaaaagcaggaggctgccattgttcacaggatgtgagatctaatatggttcaggctggggcaaatcagtgaagatcaaaatccctcatcttccacaatgagggactagaatcaaaggtggatgtgctcccgcctgctcacaaagggtcctcaca

SEQ ID NO: 39699 - DNA, 846 bp, Artificial sequence
  DNA replication origin
cttaggaggctgagacaggagaatcacttgtacccggcagacggaggttgcagtgagccgagatcgcgccattgcactccagcctgggcaacaagagtgaaactctgtttaaaaaaaaaataaaattaaaataaataaaattttgagtgtccatttgttaccgagaaaataattttaaaaaacattatcctaatgcaatctacaattgtgtagaatcattgtagaatataccacagcatactgttgagttttatttgctattaagattaagtggggctgcacggccagacaggccctgctcctgaggccgggcaggctgcgcgcctgcgatcctgcgcctgtggtcctggggcagcccggaccagctcaggagaacccgcgagcccagcggcgactgccccgggctggagccccacctgccggcgcgccgcctgggagcggcttctgggagccgggcggcccccgccgtgcaagggcgctgctaatgcccttgcgaggctcagtggatctaagaggtcggaagctgggagtgtcgctgctgaaggctgtggtggacccggctggatcgcggattctgggctagatcgcagatttgggatcgcggatgggggattggatcgcggattgggggttggagcggggatttgggcctggattggggatttggggctaggtggggggcggtgaaaaggtgacacggagttgccgcggctcaggagccggtggttgggagtctgagaagattgcaggcgcccgccaccacgcccagctaatttttgtatttttagtagacacggggtttcactgtgttggccaggctggtctcaaactcctgacctcgtgatc

SEQ ID NO: 39700 - DNA, 1811 bp, Artificial sequence
  DNA replication origin
gttacaggctccagcctccaactcccccttctcctggtcctctaagccgggaacagagcagctcagcgggagataccagagaccctaaactggcgtgaggcctgctcggcatgcacatggggttacgcgcatggtttctggactacatgttctgattgggtgagagaaaatctctaggccttctctgattggactttattttcatactctaattggttgtcctaagactttcatccaatcagaacatgataacaaagtccaatcagagtaggcctccgggctttctcttatccaatcctggaaagtgtagtccacgaaccgcatatgcataacttcagtacataaatggggctgaagaagagtcaggctgttccaggttcttctgtgtctgctcaccgagctgctccgagcccggcttagaggaccaggacagactggaggctgtagcctgctgcaccgtggctggcctccctgcagttggtggcgacagacactgtagtgtggctggaaaggtaggaaggggaaaatagttttgggatagatggaagggtaaagagggtggttagtgccaaaaggaaaaaaggatggcgagccggagaagtcattgcataaagacggtgaggaaaagatgttgggaaaaaaaattggggggtagatggagggggaaaaacagggtggtaaacaggagggagagaaggtttcacagaaagatggtggggaaaaagtttttgggtagatggaagggggtaagagagggtcgtgaggggggaacggggatgagcaggaaggagagaaggtttgcaaaaatatggtggggagagaagaaagggaaagaagactgtgggtaaaaagattttgagtgatggaggggggaaaagggtgacaagtgggaggagaaaagagggtgcagagagggagggggaagagagagtggcgagcaggagggagagaaggttttgtgaaaagacagtgaggagagaagcttttgggtagatggaggggggaaagagggtggccagtgggagaagggtaaagagagtggcgagccggaaagagaaaaggttttgctaaaagacgataggcagaaaagaaagtgtagaaagaaaagacagtggctaaaaagtgtttgggtagacggagggggaaaagagggtggcaagtgggaggagaatagaaagtgtggccagaggaagtggggaaagaggactgggaaaaaggcgatggggaaaatagtttggggtagatggagggcaaaaagagggtggcaagcaggatagaggaaagaagagggcgagcgggaagaggggaaggctttgtgaaaagatggcagggaaaaattggggaggtagatgggttaaaagagcgtggtgagcaggagtagagaagaggctttgcaaaaagacggcaggaaaatgtttttgggtagatggagaagggaaagggtggcaaggaggaagggaaaaaagacgatagggaaacagtttttgggtagacggaaggggaaagagagggtggcgagcagcaggagtggggagaaggctttgggaaaagatgagggaaatgtttttggggagatgaaggagcaaaagaggatgatgagagcgggaggcggaaaaaagggtggccagagagagggagaaaacacggtggggacaagttttggggtagatgggtggggaaaacggaagtgagcggtatagtatagaaggctttgcaaaaagacaatggggaaaaaatggtggggaaaaagttttggggtagatggaggaagaaaaagggtggcgagagagggagccaaagacggtcgggaa

SEQ ID NO: 39701 - DNA, 1438 bp, Artificial sequence
  DNA replication origin
agtttagggtctctggtatctcccgctgagctgctctgttcccggcttagaggaccaggagaagggggagttggaggctggagcctgtaacaccgtggctcgtctcgctctggatggtggtggcaacagagatggcagcgcagctggagtgttaggagggcggcctgagcggtaggagtggggctggagcagtaagatggcggccggagcagtaagatggcggctggagtggtaagatggcggctggagtggtaggagtacagcctgagtggtaggagggtggctggcagctggagctgctcttgaccggctagagatctaggagaaggtggggactgtgcccaacgctggaggctgcagccttggccaccgcggctcgcctggctacggttggtagtggtgacggagactgcatctctgttagagtagtagaaaggtggcagggtaggtgtgctctctgcggctgcactgcctgcttgcggggtggtgggggagcgggtttggtgtgcttttggagctgcactccctgccgtggggggctggtgggtggcactatcaggtgttgaattgctggcagtggggcaggtttgctgcgctatcagagtctacactgcctaaggtggtggggggttggaggcaggttgtgtgtgccgtcgtgcactgccagcggaaggtggtggggaattaggggcattattagctgctacactggccgatgcagggggcgggttgggtgagctatcatgagctacaatgtcagcaacaatgccaactggcaggcagtcgggggtgctttaggggagctgtgaaatgttgcattgtccatggaggaaaggggaacttctgctcgtgttggaacgcggagggtgcacagagtttttgtggcaatcctctgaccaccgcagggccctcacacccaccatggttacccggcccttgccctcttgctctgtgttgtggggaccatctgggagccccaggcatggagtagtgggcaccatgggggctcagggtcctgtgggtggaggagtcaggaatgggaactggtacttgggtggggaggactggctgggtctgagtttctgctgttcttgctccccaactagcctcggacactgtggtgtctccagtccccaccccaggtcaggaggccagcttggtctaggaggagaggctggactttggagggtgggtgtgagtgccttcgctgaaactggccccagccacccagtgggcagcatgacagggtgaggctctaacactgccactttctgcatcctattgtaggtttttctggcattgtctgcccagctgctccaagccaggctgatgaaggaggagtcccctgtggtgagctggaggttggagcctgaagatggcacagctctgtgagtttcgttcttgttgcccaggctggagtgcaatggtgcaatctctg

SEQ ID NO: 39702 - DNA, 1216 bp, Artificial sequence
  DNA replication origin
gttggaaccagaggcttggtcagagtcaggttcagtcttattttacaagactgctttgtagttgtggtgcattctttcatcaggaggcacaaaatgtgattgtctctttttgtgacactagcaactgttggtgactaatgcctagatccgttgattcattaagggttgtaaaatgataatgttctagttgtgttactccttcattttattatctggaatactgttttataaaaagaaaagtttccatcacctcttacttggttgcccagtgtaactgttcatatgagaaaggcagaataaatgtttgcttgtttacctttctttaccagtttccagtatagtcagtaggttcactgtactttccagctgtgattaataaatttttaaaattattatttttaatgtatctgttactgtataggacagtatctggaaatacccaaagacaagatctctaaagaagtcattggctagtggtggatcagtgcagtgtggtgttgatggtggtggtggtggtgatggtggtggtggtggtggtagtggtgatggtggtgatggtggtggtggtggtggtggtggtgatggtgatggtggtggtggtgatggtggtggtggtggtgatggtgatggtggtggtggtgatggtggtggtagtggtggtggtggtgattgtgatgtggtggtgatgatggtggtggtggtggtggtggtgatggtggtggtggtggtggtggtagtggtggtggtggtagtggtggtagtggtggtggtggtagtggtgatggtggtggtgctggtggtggtggtagtggtggtggtggtagtggtgatggtggtggtggtggtggtagtggtggtggtggtagtggtggtggtggtggtggtggtggtggtggtagtggtggtggtggtggtggtcgtggttttagtggtggtggtggtggtggtggtggtcgtggttttagtggtgatggtggtggtggtggtggtagtggtagtggtgatggtggtggtggtggtggtggtggtagtggtggtgttatgcacatgggggataatatagcagaggcattaagcttgaaatcaggaaagagctctggagttatccttgagctgtgttttgaaggttgagtagcagtttgctattggaggaggtagaggttacttttcaggcagagggagcagcatttgcaaaggctctgagatgtgagagttt

SEQ ID NO: 39703 - DNA, 1062 bp, Artificial sequence
  DNA replication origin
gtaggcgccgggggtccctagagccgccggggcgcagcgagtccggcgctgggtaactgttgggtcagaaactgttcaggtagcagctgttgtgccctcccttggccccgccgctcggagacgccccgccccctgccttgaacggccgcccggccccgccccagcgcccacgtgactagcataggcgcgcccccgttccgcccgccgccgcagactccgcctccgggacgcgagcgagcggcgagcgcgcgcactaccagttcttgctcggcgactcccgcgcacgcgcgcgccgtgccaccctccccgcacccctcctcccgccatccggcttaacgtggcgggcgcgcgccgcggcagtagccgtgacaggtacccggcggggcggggggggagggggttggcccgcgagggtgtgcgcaggcacagacccgggtcctgtccccgccgccccctcctctgcaaggtgtgcctgggcgaggggaggggcccgcggcccgaacccctgggtcacccccgaattacaaacaaaaaccttaacgccattgctcgcgggttagaaggcagctgtgcgtgctcaggaaaagaagccacgcacaagagaccgcacgcggcgtggatacagtgacacgaaacacccaaaatctcttttgaaagggaaaccaggcacagtggctcatgcctataatcccagcactttcgggggccaaggcgctcacctaaacccgagagttcaagaccagcctgggcaatacagcgaaaccctgtctctacgaaaaatataaaaattagctgggcatagggctgggcacggtggctcacgcctgtaatcccagcattttggaggccgaggcgggcggatcacgaggtcaggagttccagaccatcctggctaacacagtgaaaccttctctctactaaaaatacaaaaaaaattagccgggcgtggtggcaggtgcctgtagtcctagctacttgggaggttgaggcaggagaatggcatgaatcagggagcggaggctgcagtgagctgagattgcgccactgcactccagcctgggg

SEQ ID NO: 39704 - DNA, 919 bp, Artificial sequence
  DNA replication origin
tcccaaaaatgttcatgtcctaattcccagagttacaattccctaacatacaaatatgttaggttgcatggcagtgggaaattagatttcaagtgaaattaaggttgttaaggcggcgggggcaaaaaggcgcagcagcaaaaatccgcggcggcgggggcaaatagccacggcggcaaaaagccgcggcggcggggggcaaaaagccgtggcgggcataaacccgcggaggcggggagacaaaaagctgcggctgcaggggggcaaatatccgcggggggcaaaaagccacggcgccggggtggggcaaaaagccggggcggggaacaacccatggtggcgaggggagggggacaaaaacccggggtgggcaaaaagcggcggcggcaaaaagctgcagtccaggaaacatcacttactgtccctgctagtgttgggaaagaaaggaggacactctttagaaacgtcttttacaatgagactgatagtggactgtgtcttagagccatgaaaggaaaggagaagttgtaggatttcctgggaatgtcagctaacctgagcctaggggcctgagcccaagggcagactgaggctcccccagcacagggaggtgctgcctgtgacaaggggtagtgctggcacagtgcaggctactccctagaaagatcagcttgaatatgcaggaagagcaggaccctcgggctgaggcagaggtggaatgggaagtgcatggtggtaatttagttctccagaggccagaagtaggaggagcggttggaatgctgatggcccaaagggaaaccctggactaccctggcctcccacaggactctcatagtaattgcggctccctgcagtggtgaggccagaaggagtgttgcccaatgctgtcatcatccagtccaccccccacccacca

SEQ ID NO: 39705 - DNA, 679 bp, Artificial sequence
  DNA replication origin
ttaaggctctgattaaataagaaggcagcaaaggccgggcaaaaagccgccgcaacaaaaagctgcgctgacgggcggaaaaagccgcggcggcggagccaaaaagccggggcggcaaaaagccacggtggcgggcgcaaacagccgcaaaaagccgcggtggtgggggcaaaatcagtgggagcaggggcaaaaaaacacaaaaagccgcggcggcgggggcaaaaagccaaagcggcgggggcaaaaagccgcggcgggcaaataaccgcggcaccggaggggggcaaaaagccgcagcgggcggcaaaaacccgtggcgggcataaacccgaggcggcgggggagcaaaaagccgcggcgccgggggggcaaaaagccgccgcgacggagggcaaaatagtggagatggggtagaagtccggcacagcttggctttgctggagtgtgatgtgataggaaatgtgcagccaaagacaaaagaagatgtaagtaggcttgactcattgcagctaagaacccagatgttaccttgagggtattaactaataagcagtttaaatcagaatggcacattctgatttgttttttgtatgttcacatttggcaggcatagatactgtttgaaaagagaaaagtcagtacatagaggtaacaagcttaaatatgtgccaagtct

SEQ ID NO: 39706 - DNA, 1423 bp, Artificial sequence
  DNA replication origin
agttgagtgcagtgaagtggaatggaaggctgcggaattgaatggaaaggaatgctacaaattggaatggagtggaatgcagtggaatggagtgaagtggtgtggagtggagtggagtggagtttaatggagtgaaacggaaacgaatggaatagaattgagtgcaatggcatggagtggagtggagtgcagtggtttgaaatggaatggaatggattggaacagactgcaatggaatggactggaatggaatggagtcgattggcatggacgcggatagaatggattcaaaaggaatggaatcgaatggaatggaatcggatgaaatggaatcaaatggaatgcaatcaaatggaatgcaatcgaatggaatggaatccaatggcattgaatggaattgaatggaatgctgtgaagtggggtgaagttgagtggaatggagtgaaatgtaatggaattggaaggaatggaatagaatggagtggattgtacaagattggagtggcaggtagtggaatggaaaggggtggaatggaattgaatggagtggattggagtggggtgaaatagagtggaatggaatggaatgggaaggaatggaattgaatggagtgcagtggagtgggctggagtgtaatgcaatggaatgaaatggaatagactggagtgtaatggagtggattggcgtggagtggattggaatggaatggaatggagtagatttgagtggaatgaagtggaattgagtggagtggaggggaatggagtggagtggaatggaatgggaaggaatgaaattgaatggagtggagaggagtggagtggaatgtaatggaaaagaatccagtggattggaatggaatggaatggaatgtactcaaatggaatggactccaatggaatggactcgaatggaatggaatcgaattgaatgtaatcaaaaggaatggaataaaatggcttcgaatggaatcaaatggaatgtggtgaagtggagtggagtgcagaggaatatagtggaaaggaatgcggtggaatgaatttgaatggactggagtggagtggaatgcagtggaatggaatgcaatgggaaggaatgaaatagtagggagtagagttcagtggagttgactggagtggaatgcaatggaatggaatggaatggactcaaatggaaagttctcaaacggaatggtaccgaatggaagggaatcgaatggaacggaatggaatggagtagaatcgaatggaatggtagccaacggaacggaatccaatggaacggaaacgaatggcatcgaatggaatcgagtggaatgcggttaaggaagtggagtggactggagtggaatggaatggaatggattggaattgaatggactcgaatggaatggacccgaatggaatcaaatggaacggaatc

SEQ ID NO: 39707 - DNA, 893 bp, Artificial sequence
  DNA replication origin
taatcaaatggaaaggaatcggatggaaataaatgttatagaatggagtggaatcaactggaatggaattgaaaggaatggaatggaatggagtggatacgattgaaaaggaatcgaatgtcatcggatggaatcaaaaggaatgcggtgaattggaggggagtggagtggaaaggagtgcaatggaatggtgcggaatggaatggaaaggagtagagtggagtggaaaggagtggaatggcatggaatgaaaaggaatggaatttaatggagtggagtgcaatggagtgccttgaaatggaatgcaatggagtggagtggagaaaagtggattggattggaatggaatgaaacggaatggaatggaatgcaacgtactggaatggaaagtaatcgaatggaaaagaatggaatggaatggaatggaatggaatcaaacggagtggaatcatgtggaatggaatcgaatggaatggaatcgaatggaatttaatcaaatggcatcgaatggaatcaaatggagtgcagtgaagtggagtggagtggaatggagtggaatggaatgggttggaatggaatggagtggagaggagtagattggagagcaatggaatgcaatggaatggaatggagtggagaggattggagtggagtggaatgcaatggaatggaaagtaattgagtggagaggaatggagtggaatgtagtttagtggtgtggattcgaatggagtggaatatagtggatttgagtggagtggaagggaattcacacaagtggagtggagttgagtggactggaggggagtgaagtagaatggagtggaaaggaatggagtggaatttaaaggaatggaatggagtagagtggagttgcgtgaagtttaatggag

SEQ ID NO: 39708 - DNA, 1879 bp, Artificial sequence
  DNA replication origin
ggatggaatggaatggaatggaatggtattgaatggggtggagtccagaggattggagtggagtgcagtagaatggaatggaatggaatggaatggaaaggaatggaatggaatggaaggaaatagaatcgaatggaattgactcgaatgcaacagaataaaatttaatggaatttaacgcaatggaatagaatggaatggagttgaatggaatgaaatagaatagagtggaattgaatggaatggaatcgaacagcatcaagtggaatcgaatggaatgtggtccactggagggcagtggagtggcatggagttgaatggaatggggtggaatggagttgaatggagtggagaggagaggagtggaatggaatgaaatggaatggaatatgaaggaatggaatgggacagaaattaattgaaaggaatggagtggagtggaagggaatggaatggaatggaatcaaatgaaatggaatgcagttgaatggagtgggatgcagttgaatggaatggagtggaatggagtggaatagaatggagtggaattgaatggaatggaatgcagtggagtggagtggagtggaatggagtggtgtggaatgaagtgaaatggagtggagtggaatggaattgagtgtagggcaacggaatggaatggagtggaatggaatggaactgaaaggaatgaaatggaatggactcaaacggaatggactctaatggaatggactcgaatggaatggactcgaatggaatggactggaatggaagggacatgaatagagtggaatcgaatggaatggaatcaaatggcatcgacaggaatcaaatgaaatacagtgcagttgaatggagtgcagtggaatggaatgggatggaatgtggtggaatggaatggaatggaacggaatggagtggaatggagtggaatggagtgaagtggagtggaatggaatggaatggaatggagtggaatggagtggaatggaatggaacggaatggaacggaatggaatggaatggaacggagtggaacggaatggaacagaatggaatggagtggaatggaatggaatggaatggaatggagtggcatgcaatggagtggaatggagtggaatgcagtggagaggagtggaatttaatggagtgaagtggaatggaatggagtgaagtggaatggaattgaatggaatggaatgaaatggaatggaaaggaatcgaaaggaatgtaattgaatggcatctaatggaatcgaacggaatgcggtgaagcagaatggagtggagtggaatggagtggaatggaatggggtggaactgaaattaatggagtcgagtggaatggagtggattggaatgggaaggaatgtgatggaacagagtggagtttagtgaaaaggaatgcaatggaatggaatggaatggaatggaagggaagggaatggaatggaatggagtggaaaacatggaatggaattcacaggactggactggaatggaacggaatggaatggaatggaatggaatggaatggaatgcaatcaaatggacacgaatggaatggacttgaatggaatggactcgaatggaatgaactggaatggaatggactagaatggaatgaactggaatggaatggactggaatggaatggactcgattgtaagggaatcaaatggaatagaatcgaatggcagtgaatggaattgaatggaatgcggtgaagtggagtggattgcagttgaatggagtgcaaacaatggtttggaaaggaatagaatggagtggagcggatttgattggaatggaattgaatgggaagtaatggaatttaatggagtggagtgcagtggagtggagtggagtggagtag

SEQ ID NO: 39709 - DNA, 1076 bp, Artificial sequence
  DNA replication origin
gaaaaggaaaagaatggaatggaaaggattggagtgaagtagagtggaggtgaatggagtggagtggagtggaacagaatagaatggaatgaaatggaattgaatggactcgaatggaacggaatcgaatttaatggaactgaatgcaatggaatctaatggaatggaatggaatggaatggaatggaatggaatggaatggaatggagtggaatcgaatggaatggaatcgaatggcaatgaatggaattgaacggaatgcagtccactggagtgcacaggagtggaatggagtggaatggaatggggtggaatggaattgaagggagtggagaggagcagggtgaaatggagtggaatggagtggaatgggaaggaatggaatgggacagaaaggaattgaacttagtggagaggactagaagggaatgggttggaatggaatcaaacgaaatgaaatgcaattgcatggagtgaaatggagtgctagggaatggagaggaatggaatggaattgaatggagtggaatggaacggaatggaatggattggaatggaatggaacggagtggagtggagtggaatggaatggaatggaatggagtggaatggagaggaaaggaatggaatggagtggagtggtttggattggattgcagtggaatggaatggcatggagtggaatggaatggagtggaatggagtggattgtagtggagtggagtggagtggagtggaatggaatttagtggtattaaaagaaacaggatggaatggaatggtattaaatggggtggagtccagatgattagagtgcagtgcagtagaatggaatggaatggaatggaaaggaatggaatggaatagaatgaaatagactcgaatggaatggactcgaacgaaacggaatagaaattactggaattgaacgcaatggaattgaatggaatggaatctaatggaatggaatagaatagagtggaatcgaatggaatggaatcgaatgtcatccaatggaatcgaatggaatggaatagaatagagtggaatcgaatggaatggaatcgaacggcatc

SEQ ID NO: 39710 - DNA, 1219 bp, Artificial sequence
  DNA replication origin
gaatggaatggactcaagtggaatggagtggagtggaatggagtggaatagaatagaatggattgaagaggaatagagtggagtgaagtggagtgggatggagtgcggtgtaatgatatggaatggaatggaatcgaatcgaatggaatggactcgaaaggaatggaatccaatggaatggacttgaatacaatggaatcgaatggaatggaatcgaatgaaatgcaattgaatagagtggaattgaatgtcatcgaattgaggggaatggaatgcggtgaagtggagtggagtggagtgaaatggagtggaaaggaatggggtgaaatggaatggaatgcagtggagtggagtttaatggagtggaatggaaatgaatgggaaggaatagaattgaatggagtggagtgccttggaatgcaatggattggtgtgaagaggagtggagtggaaaagagtggaatgcaatggaatgtaacataatggaatggagtggattggaatggagtagaaaggacttcagtggagaggagcggaggggagtggaatagaatggaaaggaaaggaatagaatgtaatggtgtggagtagagtggaatgaaatggaatggaaaggattggaatggaatagaatggaatggaatggaatggactcgaatggaatgcaatggaaaggaacggactggaatggaatggacaggaatggattggagtcgaggggaaaggaatcgaatggaatggaattgaatggaatgggataaatagaatgggatcaaatgaaatggaatgaaatggagtggaatggaatggcatagaatggaatccaaaggaatgcagagaagtgcagtggagttgagaggaatgcaatggaatggaatggaatggagtagactggagtggagtggattgtagtggaattgagtggagtggaatggaacggagtggagtggagtagaatatagtgtagtggagtggagtggaatgtagtggaatggaatggtgtgaaatggaatggactggagtggaatggaatggaagggaatggaatggaatggagttgagtggtgtgggatggaatgcaatggaatggaatggagtggagtggagtggaatggagtggagtggagtggggaggagaggaatggagtgtaatggaatgcaatggaatggaatggagtggagtggagtgaaatggagtggagttgagtgggttaaaaag

SEQ ID NO: 39711 - DNA, 1518 bp, Artificial sequence
  DNA replication origin
gaacagaatggactggaatgtaatggactctaatggaatggactcgaatggaccggaatcaaatggaatggaatcgactggaatggaacggaatccagtggaatggaatggaatggcatcaaatggaatcgaatagaatgtggtgaagtggagtggagtgcagtggaatggagtggatttgaatagggaggaatggaagtgaatggagtggagtggagtggattggagtggaatgtaataaaaaggaacggaaagggaaggttgtaattgaacagtgtggagtggagtggaatgtagtggagtggaatgcaatggaatggaatggaagatagtacagtcgaatggagtggagtggagtggagaggagtggattagaatggagtggaatggaaagtaagggaatgaagtggaatggaatggaatggcatggcatggagtggaatggaatggaatggaatgcaggcgagtgcagtggaatggaatggaatggaatgaaatggagaggcgtgaagtggagtggagtgaattggagtggagaagaatggaatggaatggaatggaatggagtggagtggagtggaatggaagggaatggaatggataggaatggaatggagttgagggtataataatggaagaaaacggaatggaatggaatggagtggaatggagtggcatggaatgcaatggaatggaatggagtggaatcgaatctaatggagtcgaatgaaatggactgaaatggaaatgacaggaatagaatgcagtgaaaaggtatggaatcgaatcgaatggactggaatggaatggactcaaatggaatggaatcaaatggaatggaatcgaatggaatggaattgagtggaatggaatcgaatggattcgccttgaatcaaatggaatgcagtgaagtggagtggaaaggaatagattggaaatgaatggggggaatggaattgaacggagtggagtggagtggactggaatagagtggaattaattggaatgggaagggagggaattgaatggagtggagtgtaaaacgatagagtggagtggagtgcagtgaaatggagtggagtagagtggaatgcaatagagtgttatggaatgcagaggagtggactggattggaatggagtggagtggagttgaatggaatggggttgaacgttgtggagtgcagtggaatggggtggagtgcaatggaaaggaatggagtggagtgaagtgcaggggagtggaatagaatggaatggaataggatggagtggagtgttgtggagcatattggagtcaagtggagtggaatgggaaggaatggaattgaatggaggggaaaagaacggaatcaaatggaaaggactggaatggaatgtactcgagtggaatggagtcaaatgaaatggaattggatggaattgaaaagaatgaaatggaattcaatggaatgtaatcgaatgaaagggagtcgaatggcatcgaatgaaattgaatataatgcgctgaagtggagtg

SEQ ID NO: 39712 - DNA, 2201 bp, Artificial sequence
  DNA replication origin
gaataggaaggaatgcgatgaattggagtttagtggaccggagtggaatggtatggcgcagaagggaattgaatggagtgaagtgtagtggaatagagtggaatggaacggaatgggaagaaatttaattggatggagtggagtggagagtagtatccaatggaaaggaatggaaggtagtggagtggagtggattgcaatggagtaaaatggaatggaatggaatggaaaggaatggaattgagtggaatggactggaatggaatggaatgaaatggactctaataaaatggactcgactggaatgtactggaagggaatggaaatgattggaatggaatacaatggaatggagtggaatggactcgaatgcaatgaactcgaatggaagggaatcgaattgaatggactataatggaatggaatcaaagggaatggaatcaaatggcatcgaatggaattgaatggaatgcgatgaagtggagtggactggagtggagtggaagggaattgaatggaatggaattgagtggaatggaatggaatggaatggaatggaatggaatggaatggaatggaatggaatgcaattgaattggaaggaatagaattgaactgagtggagtggagtggagtggaatggaatgaagtggaatggaatggactggagtggaatggaatggaatggggtggagtggaatcgattggaatggaatggaatgaggactggaattgaatggagtggagtggaatggagtggaatgcaaaggaattgaatggaatggagtggagtggaggtgaataaagtgtagtgtagtggagaggaatggactggaatggaatggaattgaattaaatggtgtggaattgagtcgaatttaatggaatgcaccagagtggtatggagtggagtggaatggagtggaatggaatggaatggaagggaatggaatggaatggaagggactggaatggaatggacttgaatggaagggaatggaatggaatgcaattgaatggaattgagtggaatagaattgaattgtatggaatcgaatggaagggaatcgaatggcatcaaatggaatcaaatggaatgcggtgaagtggagtggagtggattgaaacgcagtggaatggaatgaggtagaatggaattgagtggagtggagtgcattggaatgggttggaatggaatggaattggaaggagtggaattgaacggattggagtggaatgaaaaggagtggaaagcaatgcaatggaatggagtagagtggagttgtgtggagtggagtagtatgcaatggaatagaatggaatggaatggatttgaaaggaatggaatggaatggattcgaatgtaatggactggaatgaaatggtctggaaaggaatgggctcgaatggaatggactcgatggaatgcacttgaagggagtggactggaatggaatggactggaatataatggacttggatggaatggatttgaatggaatgaactcgaaaggaatgaactcgcatgtaatggactcgaattgtatggaatcaaatagaagggactcgcatggaatggatgagaatggaatggaatagaatggaatggagtcgaatgcaacggaatagaatagcatcaaagagaatacagtggaatgcgatgaagtggagtggagtcgagtggaatggagtggaatggaattgaatgcagcagagcggagtggtgtcaaatgaatttgaatagaatggaatggtaaggaatagaattgaaccgagttgagttgagtggagtggaatggagtaatatgcaaagaatggaatccagtggattggaatggaatggaatggagtggagtggaatggaatggggtggaaatagtggaattgaatggaatggagtggagtggagagatgtggagtggagtgcagtggaatggattggagtggagtggagtggaatgcaatgaagtgaaatggagtggagtggagtggaatggaatagaatttagtggagtggagtggaatggagtgaaatgaaattgaattggattgaatggaattgaacggagtggagtggaatgcggtggaatgcaatggaatggaatagaatggattggagtggagtggaatggaatggaatggaatgaaatggaatcgaatgttatggacaggaatgtaatggactaaaaaggaatgcactc

SEQ ID NO: 39713 - DNA, 1344 bp, Artificial sequence
  DNA replication origin
atggaattgaacggagtgcagtggagtgcagtggagtggagttgaaggcaatgaaatggaatagaatggggtagagtggagtagagcagagtggactggcgtggaatggagtgaagtggagtagcgtggagtggaattgagtggagaggagtcgagtggagtggaatggaattgaatgaaatggaattgagtggaatggaatggaatataatggaatggaatgcaatggaatgggaaggaatggaattgaacggaatggagtggagtggaatggaatggaatggatggaatggaattcaatggagtggagtggagtgaagtgcattggagtgcaattgaatgcaatggattgtagtggagtacagttgagaggagtgtattggaatgcccaggactggaatataatggagtggagtggagtggagtggaatggagtcgagtatagagtcgtggagtggagtgtaatggaatggagtggagtgggatggaaatgactcaagtggagtggagtggagtggaatggagtggaatcgaatggaatggaaaggaggggcgtggaatagagtggagtggagtggagtagaatggaatagagtggaatggaatggaatggaggggagtggagtggaggggaatgtagtggagtggagtggtgtggagttgagtggagtggagaagaatggagttgaatggagcagaatggaatggaatggagtggagtggtgtggagtttaatggaatgcattggagtggaatggaatggagtagaatggaatggaatggaatggacacgaattggatggacttgaatggaatgaactggaatgggatgtcctcgaatggaatggagtcgaatagaatgcacttgaatggaatggactcgaacagaatggaatcgaatggaatgtaattgaatggagtgtaatcaaacagaatggaatcggatggaatggtagtggatggaatggaatggaatggaatggaatagaatggaatcgaatggcattgaatggaatgtggtgaagtggagtgtagtggattggagtgcagtggattggaatggaaagtgatggaatggaattaaatggactgaagtggagtggaatggaatgggaaggaatggaattaaatgcagtggagtgcagtggattggaatgcaatggaatggtatggaatggagtggagtcgagtggaggggagtggagtggattgaagtgaagtgtaatgcatgtgaatggaatagaatggagtggaaagaaatgcagtggaatcgaatgcagtgtaatggaatgtagtggtggtggaatagaatagaatagaatggaatggagtagagtgaaatga

SEQ ID NO: 39714 - DNA, 1158 bp, Artificial sequence
  DNA replication origin
tgttgtgtaatggattggaatggagtggaatggaatcgggtggaatggaattgaattgaatggatgggagaggaacgcaatggaatggattggaatggcatggattggattggagtgtagtggactgtacaggagtgaagtggagtgtaggggagtggaattgaatggtgtcaagtggaatgtaataaaatggaatgtaaagaaatggagtggaatggagtggaatggagtgcaaagaaattaaatggaatggaatgtaagggataggaaaggaattgaatggagtggattggaatggaatggagtgagtggaatggaatggaatggaggggaatggaatgtggttgacaggagaggaatttaactgattggagtggagaggagttgaatgctatagaatggaatggaatggagtggagtggtgtgtagtgcagtggagtggaatggagtgaggtggagtggagaggagtggagtggaattgaatgaaatggaatggagtggagtggaaaggactggaatgtagtggaggggagtggaatggagtgtattgtaatggaatggaatggaatggaacttaatgtagtggagtggagaggagtggaatggaatgcaatggaatggaattgaatggtgtggagtggagtggagtggggtggggtggtgtggagtggaatggaatggaatggtatggaatggacacgaatggaatggactggaatggaatagaatcaaatgaaatggaatcaaattgaattaattgaatagaatggattcgaaaggaatggaatcgaatggcatcgaatggaattgaatggaatgtggagaagtggagtggagtggaatggagtggaatggaatttggtggaatgcaattgaatggagtggattggagtggggtggaatggagtggtatggaatggaatgggaatgaatggaattgattggagtggagtggagtggattggagtggaatgcaaaggaatggaatggagtggagtggagtggagtaaactgtagtggagtggagtagaaaggaatggaataaaatggactagaatgaaatggacacgaatagaatggacttaagtggaatgtaatcgaatggaatggaatagaaaggaatggaaattaatggaatggatttgaaaggaatggga

SEQ ID NO: 39715 - DNA, 1858 bp, Artificial sequence
  DNA replication origin
gagtggagtggagtggagtggaaaggaatggagtctagtggaatgtaatggaatagaatggaatggaatgtagtggaatggaatggaatggagttgaaataaatggaatggaatgcaatggaatggaatggaatggaatggattggaatgggatggaatggaaaggagtggaatggaatgtaacgtagtggaatggaaagtattggaggggaatggaatggagtggaaaggaatggaatttaacagagtggagtggagtgtaggggagtggagtggaatgctatggaatgtaatggaatggagtggagtggaaagcagtgaattggagtggagtggaatggagtggaatggagtggagtggaatgggatgaaatggaatatggtggagtggagtggaatgggatgaattggaatatggtgggtggaatggaatggaatggagtggatgggagtggaatggagtggaatggaatggtatggaattgaacggagtggagtggaaggcaatggaatggaattgaatggagaagactggagtgtagtggaggggagtggaatggaatcgagtagaatggactggaatggaatggacacgaatagaatggacttgagtggaatggaatcgaaaggaatgaaattgaatggaatggaattgaatggaattgatgtgaaacgaaaagaacagaagggaatcgaatggaattcaatggaatgcggtaaagtggcgtagaatggagtggaatgcagtggaatggaaaggaatgggaaggaatggaattgaagggagtggagtggaatgcagtggaatggagtggaatggaatgaggtggaatggaattgaactgagtggagtggagaggaatgaaatggaatggaatggaatggtgtggattggattggagtgcagtggattgtagtggagtagagtggaatggagtgcagtggagtggagtggagtggaatggaatggtgtcgagtggtatgaaatgaaatggaatggaatggaatgcagtggaatggagtggaatgcagtggaaaggaattgaatggaatggaatggagtggagtggagtggaatcttatggaatggaatggaatggagtggagtggaatggaatggagtggattcgaatggaatggaatggaatggagatgagtggaatggaatggaattgaggggaatggaatagggttgacaggattggaatttaacggagtggtgtggagtggagtggaatgctatggaatataatggaatggagtcgagtggaaaggagtaaagtggagtggagtggaatggattgtagtggagtggagtggaatggaatgaaatagaatgtggtggagtggaatggaatggaatgagtaaacgggagtagaattgagtggaatggaatggaatggaaaaaaattaaacgcagtggagtggagtggagaggaattcaatggaatggaattgaatggagaggagtgcagggaagtggagtggaacagaatggaatagaatggactggaatggaatggacacgaatggaatggacttgagtggaatagaatcgaatggaatggaattgaatcgaatggaattgaatggaatcatttgaaaggaatggaatcgaagggaatcgaatgcaattcaatggaatacagtgaagtggcgtggagtggagtggagtggaatgaagtggaatggaatagagtgggaaggaatggaattgaatggagtgttgtgtaatggattggaatggagtggaatggaatcgggtggaatggaattgaattgaatggatgggagaggaacgcaatggaatggattggaatggcatggattggattggagtgtagtggactgtacagg

SEQ ID NO: 39716 - DNA, 1886 bp, Artificial sequence
  DNA replication origin
aatggaatggaatgcagtggagtagagtggagtggactgcagttaaatggaatggaatggaatggaatgcagtggagtagagtggagtggacagcagttaaatggaatggaatggaatggaatggaatggaatggaatggaatggagtgtagggaattggaatgcaatggaatggaatggaaaggaatggaatggattccaatggaatggaatggactgtaatggaatcgactggaatggaatggattcgaatggaaagaaatcaaatggaatggaaacgaatggaatggattcgagtggaatggactggtatggaatggactagaatggactggacacgaatggaatggaattgaatgtaatggaatggaatggaaaggttatggaatggaatgaattagaatggattggactggaatttaatggactggaatggaatggagtggagtgtaatggactcgaatggaatggaattgaatggaatggattcgagcagaatggaattgaatggaatggattcgaaaggaatggaatcaaatggaatggaatcgaattgaatggataccaatggaattgactggaatggaagggatgcaaaatggaatggactcgaatggatttgactggaatggaatggaatcgtatggaatggaattgaatgcaatggaatcgaatggcatcaaatggaatcgaatggaatgcggtgaagtggagtggagtgaaatgcagtggaatggaatggggtggaatggaattgaattgagtggggcagagtggagtggaatggagtggaattgaatggaggggaaggaatggaattgaacagacttgagtggagaggagtggattggaatgcaatagaatgaaatggaatggaatggagtggagtggagtggattggagtggaattaaatagaatggaatggaatggaatggaatggaatggaatggaatgaactcaaacggaatggactgcaagggaatggactggaatggaatggacccgaatggaatggactggaatggaatggactcaaaaggaatgaactcgaatgtaatggagtagaatggaaaggaatcgtactgaatggaatcgaatggaatggaatcaaatgaaataatatggaaaggcgtcgaatggaatccagtgttatgcagtgaagtggagtggagaggagtgtaattgagtggattggaatggggtggaatggaaaggaatgcagtggagtgcactggagtgcaatagagtgggatggaatggaatgggaaggaatggaattgaactgagtggagttgagtggagcggagaggagtggaatgcaaaggaatggtaaggagtgcaaaggaatggaatggaatggactggaatggaaaggactcgaatggaacggaattgaatggaatggacgcgaatggtatggactcgaatgcaatgtaatcaaacggagtggaatcaaatggcactgaattgaataaaatggaatcaaatggaaaggaatcggaaggcaacgagtggaagggaatggaatgtggttaattggagtgcaatgaattggaatgcagtggaatggaatgaggtggaatggaattgattggagtggagtggagtggagcagaatgcaatggaatggaatggaccagcatggattggagttgagtggagtagagtggagtggagagtagtggaatggagtgtagtgtagtggagtggagtggagtagagtggagtggaatggaatgcacaggaaaggaatggactagaatggaacggacatcaatggaatggactcgaatggaatggactcgaatgcaatggaatcaaatggaatggaatagaatggaacggaattgaatgaaatggaatcaaatggaaaggaatcaaatgg

SEQ ID NO: 39717 - DNA, 1713 bp, Artificial sequence
  DNA replication origin
tggaatggagtggaacggaatggaatggaaaggaatggaattgattggagtagagatgagtggagtggggtggagacgaatgcactggaatggaatggaaaggaatggagtggagtggagtggggtggaaccgagtggaatggaatggaatggaaaagaatggcatggaatggattgaaatggaatagactggaatggaatggagtctaatcgaatggactcgaatggcacgtaatccaattgagtggactcgaaaggaatggactcaaaaggaatggactcgaatgtaatggtctcgaattgaatggaaacctagagattggaatcgaatggaaaagcatccaatggaatggaatcgaatggaatggaatctaacggactggaatcaaacgcaatggaattgaatgtaatggaatctaaaggaatggaatcgagtggaatggaatcgaatggaaagtaatcaaatggcatggaatgaaatcgaatggaatatggtcaaatgaagtggagtagagtggaatggaatggtgttcagtggaactgaagggagtggagtggagttgaatgtagtggaaaggaatgtaatgggaaggaaaggaagtgaacagagtggagtggagtggaatgcaatggaatggaatggaatggattggagtggacttgagttgagtggagtggagtggatcagattggaatggaatggagtggaatggagtagagcagaataaaatgcaatggaatgcaatgcaaagtaatggaatggagtggaatggagtggactggagtggagtggagtggaatggaatggagtcgagtggaatggaatggaatgcagtggattggaatggaagggaatggaatggaatggaatggaatataatggaatggaatggaatttaatggagtggagtggaatagaatggaatggagtggattggaatggaatgggttggaaaggaatggaatggaatggagtgcagaaaagtggagtgcagaggagtgcagggagtgttatggagtggaattgaatggaatggaatggaatggaatggaatggaatggaatggaatggacacgaatacaatggacttgaacggaatggactcgaatgcaatggacccgaatagaaaggaattgaatggaatggaatcaaaaggaatgtaatcgaatggcatttaatataatcgaatggaatgtggtgaagtggagtggagtggactgggatggagtggaatggaatggggtggaattgtattgaatggagtggagtgcagtggaaaggaatggagtggaatggaacggaacgggagggaatggaatcggaaggaagagaatggaatggagtggaatggagtggagtggaatgcaacggaatggaatggaatggattggagtggagttgtgtggagtggaatggaatggagcggaatggaatacaatggaatggaaataaaagcagtggagtggagtggagcggaatggagtggaatggaatggaattgaatgggaaggaatggaattgaatggagtggagggcaatggaatggaatggaatgaagtggaggggcttggagtggagtgcaatggaatggagaggagtggagtagattgcattttagtggagcggagtttaatggaatggaatggagtggaatggaatggaatggttttgaatggaacttaatcgaatggtatggaatcaaatgggatgta

SEQ ID NO: 39718 - DNA, 1934 bp, Artificial sequence
  DNA replication origin
tggactggaatttaatggactggaatggaatggactctaatggaatggaatcaaatggaaaggaaacgaacggaatggaatcgaattgaatggattcgaatggaatggactggaatggaatggactcaaatggatggcacacgaatagaatggaattgaatggaatggaatggcatggattcaaatggaagggactggaatttaatggattgggatagaatggactggaatgtaatggaatagaatggaatggtttcgaacggaatagaatcgaatggaatagattcaaatgcaatggagtcgaacggaacggaatcgaatggaatggattcgaatggaatatactggattggaatggacgcaaaagtaatgcactcgaatggatcggactggaatggaatggactcggatggaatgcaatagaaacgaatggaattgaatggcattgaatggaatcgaatggaatatgatgaagtggagtggagtggagtggagggaaatgcagtggaatggaatgtggtggaatggaattgaatggagtggagcggagtggagtggaatgcaatggaatgtactggaatggcgtcaattggactgcagtgtagtggattgtagtggaggggaaaggagtggaaaggagtggagtgaagtggagtggaatggaatgcagtcgagtggaatggaatggaatggaatggagtggaaaggaatggaatggaattgaatggaatggaatggaaaggaagggaatggagtggagtgtagtggactggagtggagtggagttgaatggagttgagtgtagtggagtggaatggagtggtttggagtggaatggaatggaatggcatggactcaaatggaaaagactcaaatggaatggactggaatatagtgtacattaattgaatggactcgaatggaatggactcgaatggaatgtattggaatggaatggactcaaatggagtggaatcggatggaatagaatcgaatggaaaggaatcgaatggaatggaatcgaatggaatggaatcaaatgtaatagaatcgaatggccacgaatggcatcgaatgggaccaaatagaatgtggtgaggtggagtggagtggagtggaattgagtggaatggaatcatgtggaacgcaactgaatgtagtagcttggattctagtggagtggagtagaatgtaatggaatgggaaggcgtggaagtgaacggaatggagtggagtggaatggagtggaatggactgcaatggaatggaatggaatggaatgaagtggagtggaatggaatggaaccgaaaggaatggaagggaatggaatgctatggaatggagtgtagtggagtggaatggagtgtaatggaatggagtggaatggaatggaatgaagaggagtggactggattggaatgcactagaatggaataaaatggaatggactcgaatagaatgggcttggatgaaacgaagtgtgatgtaatggagtggaatggaatgggctggaaaggaatggactcgaatggaatggaatcgaacgcaatgaaaaagagtggaatggaatctaacgcaatgtaatcaaaaggcatcgaatggaatcaaatggacttagtgaactggagttaattggagtggaagggagtggaatggaatggggtggaaaggaatttaatggagtgaagtgaagtggagtggaatggagtggaacggaatggaatggaaaggaatggaattgattggagtagagatgagtggagtggggtggagacgaatgcactggaatggaatggaaaggaatggagtggagtggagtggggtggaaccgagtggaatggaatggaatggaaaagaatggcatggaatggattgaaatggaatagactggaatggaatggagtctaatcgaatggactcgaatggcacgtaa

SEQ ID NO: 39719 - DNA, 900 bp, Artificial sequence
  DNA replication origin
ctggaggggagtggaatggaatggagtagagtggaatggaatggagtggattggaatggaatggaggggaatggaatggaatggaatggaatggaatggaatggagtggagtggaatagaatggaatggaatggagtggattggaatagaatagaatggaatggagtggaatggaatgggttggaaaggaatggaatggaacggaatggacaggagtgtagaaaagtggagtggagtggaattgaatggagtggagtggagtggaatggaatggaatactatggaacggaccggaagggaatggacccgaatggaatggacttgaatggaatggactcgaatgcaatggactcgaatagaaaggaattgaattaaatggaatcaaaaggaatggaatcaaatggtatctaatatataggaatagaatgtggtgaagtggagtggagtagactcgaatggagaggaatggaatggtgtggaattgtattgaataaagtggagtgcagtggagtggaatggggtggaatggagtggaatgggaaggaatggaatcagaaggaagggaatggaatggagtggagtggattggaatgcaatggaatggaatggattggagtggagtggagtggaatggaatggagtggcatggaataaaatggaatggaatggaaagcactggagtggagtggagtggaatggagtggaatggaaaggaatgggaaggaatggaattgaatggagtggagtggagtggagtgcaatggaatggaatggaatgaattgcaggggattggagtggagtggagtaggttggagtggagtggagtttaatggaatggaatggagtggaatggaatggaatggtttcgaatggaactaaattgaatggtttggaaaaga

SEQ ID NO: 39720 - DNA, 963 bp, Artificial sequence
  DNA replication origin
tgggaaggaatggtattgaatggaggggactggagtagagtggagtggaatggaatgcaatggaatggaatggaatggaatgcaatgcaattgagtaaaatggaatggaaaagataggaacggaatggtctggagtgggttaggatggtgtggagtgaagtggaatggaatggagtggaatggaatggaatggagtggagtagagtggaaaggagtggagtggagtggaatggaatagaatgcaatggaatggaaaggtatggactctaatggaatgaagtgggatggagtggactcgaatagaatggactggaatggaacagacatgaatggaatggactcgaatggaatggaattgaatggaatggaatcaaacataatgtaatggaatggaatcgaatcaaatagaatggaatggaatcatatggaagtgaataaaatttaatgtgatgtaatgaaaaggaatggaatggaaaggaatcaaatcgaaagtgattgaatggaatagaatcgaatggaatggaatcgaattgaatggaatcgaatgtcatcaaatgaaatcaaaaggaatatggtaaagtggagaggaggggagtggaatggagttgaagggaatttggtggaatggaattgaatgtggtggtgtggagtggagtggaatggagtggaatgtaatggaatgggaaggataggaactgaatggagtggagtggagtggagtggagtggaatgtattgcaatggaatggaatggatagtaaaggaatggacacgaatggaatggaagggacttgaatggaatggactggaatagaatggactggaatggaatggacacgaatggaatggactggaatggaatggactggactggaatggaatggacacgaatggaatggactggaatggaatggactcgaacggaatggaatcgaacagagtggaatagaatgcaatgaaatag

SEQ ID NO: 39721 - DNA, 1611 bp, Artificial sequence
  DNA replication origin
ccaagctcccttcctcccctttgttctcctaaccccatctcagcatctgcccctgaggaccaatgcaacagggcaatcagtacatccatggacttcccaacagtcctgtggtggactaacccaggggcaatggtcactgtcccctctggtgcattctttgtccccatcagcctagtaagctccaggggctggcagctggcacagagtacgaggctgcactccttgacctttctatgctgcacacagtcctgtgcccattctgtcctcagatctgccgggaccatgaccaacctgccaagagcgtgggaattggtatgtgacccagctctaggaggaggtggagcaagcgaatgtaggggaagctgctcacccagtaggtttagagggagggtggggtgggggcgcagcaggaccaggcaggtgagggtgtgtgggtgaggatgtgccggtgtgggtaggggtgtgtgggtgggggtgtgcaggtgggggtgtgtgggtgggggtgtgcaggtgggggtgtgtgggtgagggtgtgtgggtaggggtgtgtgggtgagggtgtgcgggtgagggtgtgtgggtgagggtgtgtgggtgagggtgtgcgtgtgagggtgtgtgggtgagggtgtgcgggtgagggtgggggtctgcggctgggggtgtgtgggtgggggtgtgtgggtgtgggtgagggtgtgtgggtaggggtgtgtgggtaggggtgggtgggttagggtgtgagtgctgtttggctcttctgggtggggctggatgaatgtttgggcaccggcagcagctgtcacatggcctggctgcaggtttgggacagaagccaggcaggtgggctgtgtcaggcacagctagaaactgtgccaaggaagcagaccagagcaggggccaagggaaacctctgccttagcagaagatactggggagacaggatcaatcagggaggtctttcaaggcacatggtgcttcatggagccagggcccgggacagggagggctgtaaccctggcttgcctgattggctgagcacagacagatagaagagggtgtgggcagcccgctaggtggatgcctaagtgaggaaggaatgggtggccaggtgactgagacccccaagaccaggaccccactgtcaggtctgtggcttccaaacgcctgtgggaagtgttcccctttggacactgagaccatcagcttcagcttcacacacttttccagacaaagtcccgtaggtaacctcaaaagtcacttctggccttccccagaggggaaaggagaggggtgcctgtggggaggtgaccctcagtgctggtggagggcacagcagagagactgcctgcatatgggaggcccccagcaaaccttgcccagacgtcacccctcatttgaggcaaactgtaaaattattacaatttaggccaggggcagtggcccatgcctgtaatcccagcactttgggaggccatggcagaaggattgtctgagcctgcagtgagctatgactacacccctgcacttcaacctggtcaacagaggaagacactgtatctaaaataaataggcttggcgtggtggctcactcctgtaatcccaacactt

SEQ ID NO: 39722 - DNA, 2056 bp, Artificial sequence
  DNA replication origin
ctcatgccagtttaggctctccagtatctccagccaagctactctgttcctggcttagaggaccaggagaagggggagctggaggctggagcctgtaacactgtggctcgtctcactctggatggtggtggcaacagagatggcagtgtggctggagtgttaggagggtggcctgagcggtaggagggcggcctgagcggtaggaggggggctggagcagtaagatcatggccggagtggtaggcgggaggctggagcagtaagatggcagccggggcggtaggagtgcagcctgagctgtaggagggtggctggcagctggagttgctcttgaccaactagaggtctaggagaaggtggggaccgtgcccaatgctggcagctggagccttggccaccacggctcgcctggttgcggttggtgatggcaacggagactgcatctctgttagagtagtagaaagatggcagggtaggtgcgctctctgcagctgcactgcccacttgtggggtggtgggggagtgggtttggtgtgcttttgggtctgcactgcctgccgcagggggctagtgggtggcgctatcgggcattgaattgctggcagtggggcaggttcactgcgctatcagggtctacactgcctaaggtggcaggcggttggaggcaggttgtgtgcgctgtcgtgcactgccagcggcgggtagtggggggttaggggaattattagctgctgcactggccgatgcagggggcaggttgggttagctatcatgagctacaatgtcagcaacaatgccaactggcaggcagtcgggggtgctttaggggagctgtcaaatgttgcattgtccatgggggaaaggggaaggtggggtcggggggttggttgggtgcagtaccccgggcgttcactgcccgcgacaggagcagatttggggtgctatctggggctgtgctgcttttggtccgggttgggggcgggtttgatggggcactatttggtgctgcaacacccgtggcagggatgggttatggacactatcaagtgtccaccaggggtggtttgggggcgctcagggttacactgcctgcagcagtctctgggtgtgttgtgggcacaatccgggggctaagcttgtggtggggggggcaggttaggggtggtatggggggaggctgcactgctgctgccagcagcaggttgtggaggtggccatgacagtggtggcctctgaggaaggggcccttctcctcttcctggactcaaggctctagagggtgaacaacttctgcttgtgttggagtgcagagggtgcacagagttttcacggcaatcctctgaccaccacagagccctcgcacccaccatggttacccggcccttgccctcttgctctgtgttgtggagtccatctgggagccccaggcatggagtagtgggcaccacgggggctcagggtcctgtgggtggaggagtcaggaatgggaactggtacttgggtggggaggactggctgggtctgagtttctgctattcttgctccccagggagccccgggcactgtggtgtctccagtccccaccccaggtcaggaggccagcttggtctaggcggagaggctggactttggagggtgggtgtgagtgccttcgccaaaactggccccagccacccagtggccagcatgacaaggtgaggctctaacactgtcactttctgcatcctgttgtaggtttttctggcattgtctgcccagctgctccaagccaggctgatgaaggaggtgtcccctgtggtgagctggaggttggagcctgaagatggcacagctctgtgattcatctcctatggttgtggcagccatggtgatggagacggcagctcaacaggagcagtaggagggtacctgtggaggccaagtggtaggagccttggagggtgggcaggtgcatggagggtgacagcagcgctggttcctttggcgtcggtgctaatggtggcagcagcagcagtctaggggccaggaaggggaagtaggagagctttggggcccg

SEQ ID NO: 39723 - DNA, 1526 bp, Artificial sequence
  DNA replication origin
tgtcctaagactttctttcatccaatcagaacatgataacaaagtccaatcagagtaggcctccgggctttctcttatccaatcctggaacgtgtagtccaggaaaggcatattcataacctcagtacataaatggtgctgaagaagagtcaggctattccaggttcttctgtatctgctcaccgagctgctccgagcccggcttagaggaccaggacagactggaggctgtagcctgtggcaccatggctggcctccctgcagttggtggtgacagagactgtagtgtggctggagcggtaggaaggggaaaatagttttgggatagatgaaagggtaaagagggtggttagtgccaaaaggaaaaaaggatggcgagctggagaaggcattgcataaagacggtgaggaaaagatgttgggaaaaaaaaaattgggggtagatggagggggaaaaacagtgtagtgaacaggagggacagaaggtttcacagaaagatggtagggaaaaagtttttgggtagatggaagggggtaagagagggtcgtgagtggggaacggggatgagcaggaaggagagaaggtttgcaaaaatacggtggggagagaagaaagggaaagaagactgtaagtaaaaagattttgagtagatggaggggggaaaagggtgacaagtggaaggagaaaagagggtgcagagagggagggggaagagagagtggcgagcaggagggagagaaggttttgtgaaaagacagtgaggagagaagcttttaggtagatggagagggaaaagagggtggccagtgggagaaggataaagagggtggcgaggaggaaagtgaaaaggttttgcgaaaagacgataggcagaaaagaaagtgtagaaagaaaagacagtgggtaaaaagtgtttgggtagatggagggagaaaagagggtggcaagtgggaggagaatagaaagtgtggccagagggagtggggaaagaggactgggaaaaaggcaatggggaaaatagttcggggtagatggaaggcaaaaagagggtggcaagcaggacagaggaaagaagagggtgagcgggaagcggggaaggctttgtgaaaaggtggcagggaaaaattggggaggtagatgggttaaaagagcatggtgagcaggagtagagaagaggctttgcaaaaagacggtgggaaaatgtttttggtagatggagaagggaaagggtggcaaggaggacgggagaaaaagacgatagggaaacagtttttgggtagatggaaggggaaagagagggtggcgagcagcaggagtggggagaaggctttgggaaaagatgagggaaatgtttttggggagatgaaggagcaaaagaggatgatgagagcgggagatggaaaaaaggctggccagggtgagggagaaaagacggtggggaaaagttttggggtagatgggtggggaaaacggaagtaagcggtaaagtatagaaggctttgcaaaaaggcagtggggaaaaatg

SEQ ID NO: 39724 - DNA, 1993 bp, Artificial sequence
  DNA replication origin
cttgatattgctcctatccatggtagtgcatccctggatagctcacctaccctgccacctttctaccatgctggccaagctgcaacctccgtcacctccaccaaccgcagtgaggtgagcctagatgccacaggatcaagcctccagctcggggtacatggctcccacttcctgttctctaagctgagctcccagcttcgattctgattggatgagagcaagtcttaggacaaccaatcacagcatgaaaataaagtccaatcagaataggcctagaagttttctctcatccaatcagaatatgtagtccaggaacctcatttgcataacctcacatctaaaggatgcagaaggggcgtcaggccattccagactcgtgtgtggctgcttgcgcagctgctccgtgccaggcttggaggaccaggagaaggggtagtcacttgccacagctggaggctggagcgtgtggcaccacggctcgcctcgctgtggtgggcgctggcggcagagacggcagctcggctggactggtaggagggggtaaatagtttttgggtagatggagggataaagagggtggttagcggcaaagggaaaagaggatggcaaacaggagaaggcattgcaaaaagacgctggggaaaagatggttgaaaaaagtttttgggtagctggggggtaaaaaagggtggcatgtagaaggaggaaagagagggtggtgggggggggaaaacggggacaagtaggaaggagagaaggtttacaaaaagacggtggggagaaacacggtgaagacaacagaaagacattggggaaagaaaagatgtgtaaaaagattttgggtagatggaggtgggaaagggtggcacgcgggaggaagaaagagggtgcagagagtggggggaagagagagaaggtggtgagcagaagggagagaagattttgtgaaaagtcgatggggacaagatggtggggaaatattttttttcagtagagaaaaaaagggtggtgagcaggagaagaaaaaagggtggcgagtaggaggaaggagaaggttttgcaaaaagacggtgggaagaaaagacagtggggagaaaaaactgtgggagaagtttttgggtagatggaggagagaaagggtggcaagcgggagagtggaaggacgattgggaaaacgacgatggaaaaatagttttggggtaaatggagggcgacaggaaggtggcatgtaagaggaggggcaggaatggggaaaagagggtggtgagcagaaggctttgcgaagagatggtgaggggggaaagacagtgaggaagaaagtttttgggtagatggagggggtaaagagggtggtgagcaggagggacaaaagagggtggcaagtagagggagacaaggttttgccaaaagaccgtaaggaaaagacagtggggagagaaaagtttttcggtacatggagggggaaaagagagtggcaagcgggagaacgaaaaagaggatggcgagtgggagggagacaaggttttgtgaaaaagatgggtagaaaagacagatgatggggaaagaaaagatagacggtgggtaaaatgtgggtagatgcagcgggaaaagagggtggcaattgggaggataaaagagggtggcgagagggaggagggaaagagttgggaaaaagacgatggggaaaatagttttggggtagatggagggcaaaaggaggatggtaaggatagaggaaagaagagggcgtttttgggtagatggaggttggaaaagcgggtggcgagcagcaggaatggggagaaggctttgggaaaatatgagggaaaagtttttgggtagatggttggcgaaaagggtggtgagcaggagagtagagaaggctttgcgaaatgacagtggggaaaaatagtgggagaaatgttttggggtagatgaagagaaagggtggcgagagggagggggccaaaggtggttgagaaaagaaggtggg

SEQ ID NO: 39725 - DNA, 1024 bp, Artificial sequence
  DNA replication origin
ggacccactctagaggccacgcgcatttccactgccaaagcaataacacaggagatggaaagaaattcttggccaggcgcggtggctcacacctgtagtcccagcactttgggaggccaaggcgggcagatcacgaggtcaggagatcgagaccatcctggctagcaaggtgaaaccccgtctgtactaaaaacacccaaaaggtggccgggcttggtggcgggctcctgtagtcccagctactcgggaggctgaggcgggagagtggcgtgaacccgggaggcggagcttgcagtgagccgagatcgcgccactgcactccagcctgggggacagagcgagactacgcctcagaaaaaaaaaattttgccttcactatatgcctaagtaatttatctattagagctcagagtcgtggggcccacaccgccagctgacacatgaaaatgtggcaacgatgtggtggtgtctctgtgtggcagcgtggtggtgtgtctgtgtggtggtgtgtccgtgtggcagagtgtctgtgtggtgctatgtccatgtggtggtgtgttcatgtatctgcatggtgatgtctccgtgtgacagtgtgtgtatccatgtgacaatgtctgtgtgtccttgtgtccacatggcagtgtctgtgtggtggtgtctgacagtgtggaggtgtgtccatgtgacagtgtggcggtgtgtctgtgtgtggcagtgtccatgtggcagtgtgtttgtgtgttcctgtgatggtgtgtccatgtgacagtgtagtgatgtctcttgtgtgtctgtgtgtccctgtgatagtgtggtggtgtgtccatgtgatgtctccgtgtgtctgtgtgtccctgtgatagtgtggtggtgtgtccgtgtggatttctccgtatgtctgtgtgtccgtccatgtgaatgtgccagtgtgtccatgtgacggtgtgtccgtgtggtaatgtctccgtgtgtctgtacatgtgacagtgtggtggtgtgtgcgtgtaacaatgtggcggtg

SEQ ID NO: 39726 - DNA, 1278 bp, Artificial sequence
  DNA replication origin
cctgccttgctatatccaaggtgcagcggggcgggggttctcttgttcaggagtccaggacgtggcagagccggagtcctccgtgtaggagtcctccggtgctggagtccagagcacagtgaggctgggtcctcccgtgccatagtgtagggcatggcgggacagggatcctgccctgcgatagtccagtgcttgagtccgcagtaaggcaatggtcctccaatgctggagttcacggcgttgtggggtcggggtcctttggtgacttagtccagggcgtaccagggcgggggtccacagttgccatagtgaggatcttggaggaaggtggttcctgccttgctgtagtccggggagcagggggcaggggtcctctcttgtcagagtctctggcgcggggtgggggtggaggtgggggttttcctatgcgatagcccacgggtcggtgaagccgggtcctcccgtgcctttgtccagggcgcaggggggcgagggtcttcggtggtggagtccgcggagcggcaggacgggggtcctccagtgccatattccagggcgcggcggagtgggggacctgtcctgcagtggtccagggcatgtgggagtggtggtcctgctgtgcctcagtccagtgcgcggtgggacggcggtcctgctgtgctgtagtgcaggacgcggtggcgcaggggtagtccagagagcgccgtggcagggggtcctccagtgctggaatccagtgcaaggcgggtcaggggtcttaccgtgccgaagtcggtggcaagggtcctcccgtgccatagtctagggggcgacggggcagggttctctagtgcaggtgtccagggtgtggcagggcaggagtcctcttgtgcaggagtccaggacgtagccgaggagtcctccaatgtcagagtccagggctctgcggggccgggttcccccatgccagagtgtagggcgcgttcaggtgagggtcttggcgtgcagtaatccagggtgcggtggggcaggggtagtccagacctccatggcgggcgtccctctgtgcaggagcccagtgcctggcggatcgggggtccttctgtgctgtagtccagggcaccgcaaggtgtgggtcctctggtgccctagtccagggggcggcgagtcagaggttctcccgtgtctcagtctagggcctggtaggactggggtcctggagtccacgtggtagcccaagttgccgcaggaccaggtactctggaaccacagtccagggcgctgaggggcaggagtagt

SEQ ID NO: 39727 - DNA, 2370 bp, Artificial sequence
  DNA replication origin
ggcaatgcagacccaaaccaattgtgccagttcttgctgggtggcaaagtgttgtcaggctttgtggtcactcctgatttctgtttggaagcacagttctctttctaatgataatggaaaattggaaaggcctgtaaaattggaaagcctgtaaaaggccgtagagtggagatgtataaaaatgtacagtcacacatgttttaggggtcgaaaccatggacttttatctcgctcaccaacttcctcacacatacagctcactccctgtggcctcagccatctcaggcactacagaatcctcactgcttgaaattcacttacggagtccaacaaacaactttctttaaaaaaaaaaaaaaggcagtaaaatctcagaattcctgtgcaatgcttgcaacctgcccacttattaaataaacagaacaccaaactaaccaaaagctatgcaagtggcaggctgccctgagcagagccctgcctgtctgccagggactatggtggcacaggagcaggtcgtgatcatgctggaagaaatgagaggtggtttcattccctgactttcaaactctcatctcgggagcccccagtcctaacactgtattcagcagctggagttacctggccatgtaaaaggacaagggaaggcagaccgtcctcaacttcttcctgtgtttctagcaaggaaggaacgcaatggcttcagtccctccgcctctaggtaacaaggcaaaggcctccgtaacccaggcagacaggatgtggggaaggtcttgtgtcttttcctaactcagaatttctgagtcagtgggcttcccggagaaagactgtcctcttggcatgtgaccctgaaggcttctagcaccaaaggctcgctaacacctcagaccctgtcttcaggtaaaggggatgggaggcagaacccttctcctgattggtgcctgaaggaggcaagaacgagcatctgctataccccagcctgatttcccccgtctcagcaggagaggggagaggtgagggtgcagatgttctgggcaggtcagtgcagttcgatgaatgcctccagatcttccgggatgaagcccttgtaagggatcttgttcttatccagggcctgggctgcaaggcactgcagcgtcacgtagttgaagggctgcatggtacccctggccagcagcttctcttccagcagctcgtaggccgtcttcttgaaggcgttggtggcgtccatgtgggcccctgcttcagtcagggcattcacgatggccgggcagttgttctgggctgctatgtgtagcggggtgttgttgtcaaaatccctgctgtcccggtcggccccgcagtcgaacagcactttgaccacgtgcaacgaggggaatctgcccacggggtagcggcccacgtttgtggtgtccttgtccacagccatgtgcagaggcgtgaagccgttcttgcccctgggtgcgcacttgagcaggcgatagatggtctggtgcttcaggtgctcctggctgggggtgcactccactttctccagcaggtagagcaggtggaggatgatggccagcgccttgttgaactgggccgagtctctaggctccctgagcagctgcagggcccattccacttcccggacccctttggtgaggacccccatgaggtctgcaaagccgatctgggtgcccaggctgcctttggcagccgggtcctgcagcacgtaggagaagagttcggcgaaggagaggaagctgctggcgctcatggggctcagaggctccaggttgctctgttgcatgtccagggcgtacttccacaagcggatgtagcactcgatattccccgagtcggcgtacactgcgcccctgtaacggatacaataggaagtgtcggggtgcgagggactgaggatgcgctcccggatcaacaaggcctgcatacgcatctcatcggcgtcggtgatcagcgcctccagctcctcggtggtgttgacctccctggaatagtcataggccaggaccagctgtgggggctccagtttgggcaggtactcacccccctggtgacgcagctccatggcccgcctccagtgtttaagggccccaagcagatctcgtttcttatccacataggtagatcccagcaattccaaggcttccatggcagcttcccggctggtgggacagcagctttggtaagattccccgttcagtacctcaggggagaagatgcagcacggagccccctgaggctgcgcacacccctggctggtggaggagccttcttggggcagcctaagctgagcctctacccctatgagctgctcctggccgggctgctcctggatgaggtactccacgatgttggtgtggcccg

SEQ ID NO: 39728 - DNA, 1670 bp, Artificial sequence
  DNA replication origin
gcttacccaaagcctgtacaatcattgcaccttggaagtggttaacttgctttgtatttcagaggctcggggcaaaagatccggcagccttgtctcagaagagactttgggctttggatatttgagtaaatgttgggatgagttaagacttgggggactctagggaaggcatcattgcattttgcaatgtgagaaagacatgaactttgggggaccagggacaaaataatatgttttggctctgtgtctctaccaaaactcatgtggaattttaatgggaaatgttaaaggtgggggctggtggaaggtgatttaatcctggtggagagtggaggttggatggttgggagggttggggcgattgtgggacggggagggttggggggattgtggtggtggggaggtgggggattggggggtggtgagggttgggattgtggtggggttgggggtgaaaggcaggggtgggggcggatccttcacaaatggacatttgagtaaatgctggaatgatttcagacattgggggactgtagagaatgcatcattgtattttgcagtatgagaaagacatgagattgggggggccaaaggaagaataatatgatttggctctgtgtccctaccaaaacttatgtggaattgtaatggggaatgttaaatgtggggcttggtagaaggtgatttaatcatggtagggaatgggggttggaagggggatgtgggatgtgggagaatggaggttcatggtgtgggtgagggcaaaacatggggatgggtggcaaatccttcacaaatggttaaatactatctccttaatgcagtctgtgtgatagtgagttctcatgataaatgaatgctgtcctgctgggttttggactcggattgggcctgtgtaccaattgtgttattttttctgggaaaatcttccctttggtttgagaaagcttacccagtgcctgtgccatcattataacttgaaagaaaagaattgtcttttacattcagggactcataggcagaagagattgcagccttctgttggttgagatttgaacttactacatttgagttactgctggagtgagttaagacttttggaaactcttgaaaaggcctgtttgtatttttctgtgtgagaaggatatgagatgtgggggtgtcaggatcagaataatatggtttggctgtgtttccctacaaaaactcatggggaattgtattcctgactgttgtaggtggggcctagtgggatgtgatttaaccacaaacggcagagtggtaggggtggaagagaaacaagtgtgtagggtggggagaaataggctggcagtagggtggtgagagggtggtgggcagtagaaagggggagtagcctgctgcagaggcagagcctcatggaaaacctctataccagggcagtgcacctgtggctttgcaggctttagcccccgtgtttgctcccatgggctgggctggtgttgagtgcctgtggcttttccatactgagagtgcaagctgctggtgggtctatgaatcttgggtctggaggatggtaacctcctgtgtggggcctacaagcccatatattttttctgcactgccctagtagaggttttcctagtggctctgcctctgcctcaggcttctgcctggaaacagtgggggga

SEQ ID NO: 39729 - DNA, 770 bp, Artificial sequence
  DNA replication origin
ggggtccaatccgtggctgcatggcccacggcagggggcaggttgggggagttatctggtgctgcaacgtctgaggcggggacgggttcgggacgctattgggtttctacactgcagcggcgaggggagggtgttaggggcgccatcccgggtccaatagctggcggcgggttaggggcgctatcagggggtgccctgcaggtggcggcagaggtttcagcaacaccagtggcctacaaagaaggagccttcctcctctccccagactccagactctagagggcgacctcctcctgctcctgctcctggagcgcagccagcgcacagcgtttccgcaggaatcttgagaatggcaaggcccgcacacccgcggtggttcccaggcccgccccctctcgcagctgcagccccacctgccagtgcgtgccgcctccgagcgacttccgggagccgggcggccaccgcggtgcaggcgcgcgcccaaaggctttgcgaggctcactcggtctgagaggtcggaggctgcgagtgtcgctgctgaaggctgtggtggaccgggctggatcgcggattttggattagataatagatttgggatcgccgattgggggttggattgcggatttggggttggataggggatttggggctgggtcggcgggggcaggggcggggaggtgaaaaggtgacagggagctgcctcctctcaagagcagttggttgggagtctgagaagtcaccaccatgaagttgttcggcttcaggagcca

SEQ ID NO: 39730 - DNA, 1520 bp, Artificial sequence
  DNA replication origin
atacaggaagggaaagaggaggcacctaccacaggctggaggctagagtctgtgggactgcggctggcctcgctggctcgcctcgctgctgtgggtggcagcagcggacactgcagccggccagagcgtagaaaggcgattgggtaggtgcgctatccggggctacattgcccgcggccgggggccggtaggggtgttattccgggcgtcactactttaggtgtgctatcccgggctgcgctgcctgcagcagcgggggggggggggggcaggttgggggcactatcctgggctgtactgccagcagcagtagggctggttgggggccctattgggtgctacactgcccgcgacagggggcgggttagggccgctactgtggttacactgccggcggcgccggggtggggggactggtcggggtgctgactggtctggcttcattgcccatagtggggtgggggggtggtttgggggctgcaccgcccgcggcgggggacttgttgggggcgctatctggggctgcaatgccccccgcaggggataggttaggggcagtatccggtggtacactgcaggtggggggggggcgggaaaggggggtacagggaggtgattggagggggtggtttcaggccctatcgcgggccagactactcatgatagaggggggcgttgggtgcgctattgggggctacactgccagcggcaaggggcagtttgggggcgataccccaccggtggcaggtggggaggtgtggtgggttgtgtgcatcattagggggctgtactgtggtcagtgggagcgagttaggggagctatcagctgctgcactgcctgtggcgggagtcaggtttggtgcgctatcgggaccatattctcggtagtggcatacgggttaggggagctgtcgggggctaagctgtccacggggcggggggtgcgggttgggtgcgctatccagggcatcataccccgcggctgggggatggttgggagtgctatccgctatctgggagggcactgcccatcgtggggagcgggttgggggccttaaggatccgtggctgcactattcacggcggggatcaggttgcagcgctttctggggcgtcactgccagcggcgagggagttggttgggggtccaatccgtggctgcatggcccacggcagggggcaggttgggggagttatctggtgctgcaacgtctgaggcggggacgggttcgggacgctattgggtttctacactgcagcggcgaggggagggtgttaggggcgccatcccgggtccaatagctggcggcgggttaggggcgctatcagggggtgccctgcaggtggcggcagaggtttcagcaacaccagtggcctacaaagaaggagccttcctcctctccccagactccagactctagagggcgacctcctcctgctcctgctcctggagcgcagccagcgcacagcgtttccgcaggaatcttgagaatggcaaggcccgcacacccgcggtggtt

SEQ ID NO: 39731 - DNA, 941 bp, Artificial sequence
  DNA replication origin
aggaccaggccagggtatggcagggcacagccagggaagtctagggccagagccaggtccggggcatggacagggcagggccagaaacatggcaggaccagaaaggggccagggcaagggcaggccagggaaggaccagggaaaaagcatggccagggaggggccagggcaaggggagggccagggcagaaccagggccaggacaggtacctggcagggccagggtctgggacagggccacggcagggccagggccacagccaggtctgtgctatagccaggtacaagacagggctcaggcaaggctagggtgaaggccaaggtagggccagggcagggtcaaagccaggctagggccaaggcagggccagggcacgcaggacaggtccatgaaagcatagggccaaggcagggccaggccagtgccaagaccagggcagggacagggccatggccatggcctgggcaggaccaggttcagggcaggagcaaaagaagggcaaggacagttcaggttcttggcacagccagagtccaggacagggtcagggtagggccaaggcagggtctgggccatggtaagaccagcgacagggctggggctaggatagtgacagggccagagtcagggcaaggaccagagcagtgcaagaccagtgtagggccagtatttcagggtcaggacagggtcagggccagggcagaaccagggtaaggtctcaagccaggaagggccagggccaggacaggtccagggtctgcgttagggcacgagcagggccagaccagggtaagggtcagggccagggccagggtagggacagggcaagaaacacggcaggaccatgggcaacaccaaggccagagctgagccagggctgagtcagggctgagtcagggcaaggcatggtatggccagtgcaggacaggaccagagccgg

SEQ ID NO: 39732 - DNA, 1474 bp, Artificial sequence
  DNA replication origin
ctgggggctggaggctggatcctgtggcaccagggcttgcctctgcatagtgtgtggtggtgatggagacaggcgactggcagcgagagctgttccttgcctggatacaggaagggaaagaggaggcacctaccacaggctggaggctagagtctgtgggactgcggctggcctcgctggctcgcctcgctgctgtgggtggcagcagcggacactgcagccggccagagcgtagaaaggtgatggggtagatgcgctatcccgggctacattgcccgcggccgggggctgctaggggtgttattccgggcgtcactactttaggtgtgctatcccgggctgcgctgcccgcagcagcgggggggggggtaggttgggggcactatcctgggctgtattgccagcagcagtagggctggttgggggccctattgggtgctacactgcccgcgacagggggcgggttagggccgctactgtggttacactgccggcggcgccggggtggggggactggtctgggtgctgactggtctggcttcattgcccatagtggggtggggggtggtatgggggctgcaccgcctgcggcggggggcttgttgggggcgctatctggggctgcagtgccccccgcaggggataggttagggggagtatcccgtgatacactgcaggtggagtggggcgggaaaggggggtacagggaggtgattggagggggtggtttcaggcgctatcgcgggccagactgctcatgatagaggggggcgttgggtgcgctattggctacactgccagcggcaagggacagtttgggggcgatacccctccagtggtgggtgggcaggtgtgatgggttgtgggcaccattagggggctgtactgtggtcagtgggagcgagttaggggagctatcagctgctgcactgcctgtggcgggagtcaggtttggtgcgctatcgggaccatattctcggtagtggcatacgggttaggggagctgtcgggggctaagccgtccacggggggtgcgggttgggtgcgctatccagggcatcacaccccgcagctggggtatggttgggggtgctcttcgctatctgggactgcattgcccatcgtggggagcgggttgggggccttaaggatccgtggctgcactattcacggcggggatcaggttgcagcgctttctggggcgtcgctgcccgcggcaggggggttggttgcgggtccaatccgtggctgcatggcccacggcagggggcaggttgggggagttatctggtgctgcaacgtctgaggcggggacgggttgggggcgctgttgggttctacgctgcagcggcgaggggagggtgttaggggcgccatcccgggtccaacagctggcggcgggttaggggcgctatcggggtgccctgaaggacactctggtggccgcgaagtgcccttgccagcacccgatctc

SEQ ID NO: 39733 - DNA, 874 bp, Artificial sequence
  DNA replication origin
tttctggggcgtcgctgcccgcggcaggggggttggttgcgggtccaatccgtggctgcatggcccacggcagggggcaggttgggggagttatctggtgctgcaacgtctgaggcggggacgggttgggggcgctgttgggttctacgctgcagcggcgaggggagggtgttaggggcgccatcccgggtccaacagctggcggcgggttaggggcgctatcggggtgccctgaaggacactctggtggccgcgaagtgcccttgccagcacccgatctcccttccgaggagaagcagggcgggccgcaaggccagacaggccatcctcctcaggccgggctggctgagcgcgtgcgattctggggctgcccaggcgagcccaggagaaccggcgagcccagcggcgcctgcccgcagctgcacccccacctgccagcgcgtgccgcttcccagcgacttccgggagcccggcggccaccgcggtgcaggcgcgcgcccaacggctttgccaggctcactcggtctgagaggtcggaggctgcgagtgtcgttgctgaaggctgtagtggaccgggctggatcgcggattttggagatcatagatatcggatcgcggattgggagttggatctcggattgggggttggatcggggatttggggttggataggtgatttggggctgggtcggcgggggcggggggtggtagtgaaaaggtgacagggagctgccccctctcaagagccggtgattgggggtctgagaagtcaccaccatgaagttgttcggcttcgggagccgcaggggccagatggtcctggactccatagaccacgtctacacggcttccgggtaccgaatccggcactccg

SEQ ID NO: 39734 - DNA, 901 bp, Artificial sequence
  DNA replication origin
gggctgctctccccctccacgccccagcactgtgggtctccgcgctggaccttccgccggcctccaagagcctcccgccatcgctggcgaggccatgcaccggaccgccgtggtggcaccctgctgttgagtggggacgccagaggtttccatcccctgcccagacttcgggctctctgggtggcctccattcttccgacgctccaggccttccccaggctcctgagctcccaagcttccaccacatcgcgcctgctcaggacagtttgtgctcccagccctcagggccctgggcccacggtcctgggataccctcctgtcctcctccttgccgcccgagggattgttttggttcccttgccgccccacctgcaaggccccctctttcctcacccacccagagctaccagggctgcccaggggtgaacagccgccctagccctacgagccctttctctcacaatgtcactaacagcgtcgcttgtcccgacaaggacatggcccgtggccaagtgagtgggaggagctgctttgcccggcgctgccactagagctggcagactgatcccaggagagagaggctgatggacagccagacacacctcaccaccaccacgagcaaacccacacccacagacacacatgggtgcatgcgcgcgggcacacagacacagacacacacagatacacaaagatacagcttgaaggagagcaagggaaagaggatggagagatagaaactgagggagagagaccacgatatagagagagacaggaaggagagagagagagtgacagaaagagcatgagatggaggggaaataagagaaatagagagagggtgagagagctagagagccagagtgatagagcctgggagagggagccctctgctctggta

SEQ ID NO: 39735 - DNA, 1136 bp, Artificial sequence
  DNA replication origin
gtccctggcttgcactcagggtacgtgtcacgcccatggggggggcacctcaaagcggcaagaagactcctggggaatgagaacagagcgccaggcttgaaggcccccaggggaagggaacaggacgccaggcttgaaaggggatgttgaggcattccagggaaaaacttcccatggacgacacctgcgcctggcccagggggagggggggtcgtggagtccctgtcttgcacgcagtgcgtgtctcacctaaaagcgcaccccaatgcggcaagaagggctccgggggagtggaacaggacgccaggcttgaaaggggactttgaggcagtccagggaaaaactttccacggaggacagtgacttcccggcagcccctgcgcctggccccagggggtcttggagaccctggcttgcaccctgggtgcgtgcctcgcccacaggtggcaccccaaagctgcaagaaagcccccaggggaaaagaacaggatgccagacttgaaaggggatgctgaggcagcccggggaaaaaaggggcaaggctggcgtcctctcacggacgacagtgccttccctgcagccccctattctgggcccgggagggtcctggagtccttgtcttgcacacagtgtgcgtatctcgcccacagggggcaccccaaagcggcaagaagtcctccgtgggaaagcaacaggatgccaggcttgaacagggacgtttaggtagccgggggaaaaaaagcagcgcggctggggtggtcccacggatgacagtgccttcctggcagctcctgggccgggcccggcggtgttgtggagtccctggcttgtactcagaatgcatgtctcgcccacaggagtcaccccaaagcggcatgaaggtcctcgggggaaggggacaagacgttaggcttaaaaggggatgttgaggcagcccggggtaaaaggtagcgaggcaggtccttcgaacgacagtgccttcccggcagcctctcgccctgcccaatggggttgtggagtcgctggcttgcacccagggtgcgtgtggcgcccacggggagcaccccaaagcgccaagaaggcctccgggggaagggaagaggatgccaggcctgaaaggggatgttgaggcagca

SEQ ID NO: 39736 - DNA, 1598 bp, Artificial sequence
  DNA replication origin
cccagctggcgggccactccgccccgcgcggggcatgtcccgctgtgcaccgggaaccggcgtccggtgcagacagcccctcgtcctgggaaacgggctgctgccagaaaggtggtcactccctgacccatcaggtaacgtgtttgtggggaacctgatgctaaactattggtagacgccctgcttctgggtcaggattttctatggagcagagcagctccctcgctgcgatctgctgaaagtcagacctccacacaaggttctctccacccgtgtgcgggggacctggtgatatggcgtgtcctgtgtaattcagcccatgaggtctaccttccttcctccctcctgttgcccccggggacctccttccctggcccgcttatgcccacccgccccggagccccggagcacgcagcgggtgtctcttgcgaaagcccatcggcgcccgctgtgcattcgggaggcgcccgtccccactcgcggtctttccaaggtgccgcgcggggggttgccgatgtagggttggcgcccctgctcgtcgttccacctcaccgattccacctcctccccgcaacccgctgggaactcctccaggggctgggatggagcctgttgagaatggctgacgcttgggtgttggagggtgtgcccctgcggttcctgtcccggtagtgttcacgcatgcccggtggtggccgttgggcccctctccccaccccaggtgcgcgggaatgggacatgagccagtcactgcccttgtgccttacctcctctctccgctgcccgggtcaaccagcgaacagtggaggaacggtgggccggtcagcggagttagatggcagcaaaggtgggccagattggtgggataaggatccaactaggtctgtccgcttccgtccgcgagcgccgggtccactagatgtctgcagcgagcgttggacttgacggtcaacttgggatttctaaagtagaacagataactctggtcacctcatgtttgaaaaacagatctgctcccaagttcagtggagggatgtggcatgtaggacgagggacttttccttctgacttagtctgcacggtggggcctagggctggagctgagtgcagatcgatggctccctctaccttgggttcccttgtccccaccctggaagacgggccttggcagatcctgcccttcctggcccttccttgcccttaaggcgctgtcagaaaccccatcccgagctcggatgctctgaatgactgtggctcgagcctctccggaaatatttgaaatctatcctccatgcgtggccacctaaaaccacaggagcgcgggacaatccaccgccatccacctctctgctttcgggacactccaccgccatccacctcactgcttttgggacactccaccgccatccacctcactgctttcgggagacaatgctgaaagtctcttgctgactctctcgactcgagttctttaagggcatgtggtcaggacacagtgagaacagatgtattaagtcaggccgggttcggtggctcaggcctgtaaccccaacactttgggaggccgaggcggtaggatcttttgagcccgggagctg

SEQ ID NO: 39737 - DNA, 1743 bp, Artificial sequence
  DNA replication origin
aaacaaaaataaggagttgaaaaacatgtaagtataaattaatagccacaaaagggagaagttagagaaacactatgaaaaacatctttgtcttgaggaaagatacaatctgagaagcaattctgcaggacttggctgaaagtcaatgggaggctgatcaaatgaagtgatagaaaccgtgtaatttgtcacatcaagcatctgcgacaaacccacatagaatccaaggaatgtaggtgatctgacaaaagtcctcatgtttaaaatttgccctaagtttccccaaatccaccaaaagtttcccagcataagccactttttcagatacagttttactatctgttcttgtgacactaggtgcatttgaagagttcttgggagccacgtgtggtggctcacgcccatgatcccagcactttgggatgccaaggcaggtggatcacctgaggtcaggagttccagaacagactgaccaacatggtgaaatcctgtctctactaaaaacacaaaattagccacgcgtggtggcacatgcctgtaatcccagctacttgggaggccgaggcaggagaatcgcttgaacctgggaggcagaggttgcagtgagctgagatccggccattgcactccagtctgggcaataagagcgaaactctgtcccaaaagaaaaaaaaaaaaaagctctactttttttttactgttacaatgacaataatagaggcttttctctcaaggagctctaagtgaaattaataagaattctcatgaccctagaaagagagacttaaaaagcaaacacataggccgggtgcagtggctcactcctgtaatcccagcactttgggaggctaaggcaagcagattgcttgaggtcaggagttcaagaccagcctggtcaacgtggtgaaaccccgtttctactaaaaatacaaaaattagccgggtgtggtggcatgcacgcctgtagtcccagctacttgggaggcagaggcaggagaatcacttgaacccgggaggtggaggttgtcgcagaaatcaagccactgcactccagcctgggcaatagagcccatctaattatttgtatcttttttattttatttatttttttgagacgtattttcgctcttgttgcctaggctggagtgcaatggcgccatctcggcccactgcaacctccgcctcccaggttcaagcgattctcccacctcagcaacctgggtagctgggattacaggcacccaccatcatgcccggctaatttttgtatttttgtagagaaagggtttcactatgttggccaagctgatcttgaactcctgatctcaggtgatccgccctcctcagcctcccaaattgttgggattacaggcaccagccaccgcacctggagagttctcttttctttgcaaagggcaaggcaaactggaatggattcacccgcgagcggtgtgcatgccttggaaagcattatggttagactcatgtgagacgtgttagttttactgtgtgtgttccccatgtgttgctgcccatgcgttgctgccatggtaatcctgctcagtaggagaggaaccccaggttcagacatttggtgtatgtccttggctgaggagccaatggggtaaagctaccatatgtgggattatgactgaacgactctaagtcagaatcccgccgaggaggaacgatttggcagcgccgcggagcgttttttggcctcggaaaggcggtcctctgcgg

SEQ ID NO: 39738 - DNA, 1143 bp, Artificial sequence
  DNA replication origin
gtggggccgggtcgtccctgcgcctcgccgccgcctcctccgccgccgcctcccgagttcggggctctgctgcaatgtctgcgaggctgactttgagcgcctcgctcaccgcccgcccgcagccgcgctcctccctccgccgccgagtccgccgcggcccagtccctcccctcgccgccccacgccattcagctcttcagccaagtttcttaacccttttctccccctccctcccattgtcacccggtcaggaggaagccgcgcggatccgggcggctcacaggagctgcggaaccccctctgtttcgtggatttccttctcgcctgctctccgggtgtcccagacggggctgcaagacccggaggcagcgagaggaccgcgtccccgagagaggggctgcacggcgcgcccgggccgtcccccgggctcccagctctgtccagccgcccgcgaccgctgcaggcgcctggacagctcctcctggggaccggggaaagcgctcttgggacccaggccgaatgctcccgtttgggcacagcctgggggccggggcgccccagacgctccagggtccccgcctgccttaagcgtctacctcctccccttcaccccacaacacgcgctctctgggccccctttcacccacccacccccaatttctatctccttgtaatctgtgtgtcctgctttaatgttggggggcacgggcgcgaactctgggtcactttgaccccacgcccagcacgtagtaggcgcccagcactcgtgtggagcgactctgggaggaaaactaggaaggagacctgaggagcgccccgctcagctccctggacagacgtaggacccaggagcagggttaatcctcggctgctttgtcactgcgaagtctccagcggagtctgtcagccaatctgcatcatccccgggaaggatctgacccaacaagacaagggaaaaggagcagggctgctacttcttcagcagctctcctcggttcggtctccgaataagaaataacaattacatcacgaggccggggcggcagcgcggtggagcctctcggtttcctgcagcctaatctcactgaacccgcctctaaattgggggggccacagattggtgaaacgagaaagtggaaggag

SEQ ID NO: 39739 - DNA, 1001 bp, Artificial sequence
  DNA replication origin
cgcgctctcccgtgccccggcgtcctccgcccgctcatggcccgggccgccgcggacgagcggcgctgaggcgggccgcgtggagacgtgaggcggccgccgtggccctcacagtcggcgtttcgccgcctgcccgcggtgcccgcgcacgccggccgccatcgccttcgcgcctggctggcgggggcgctgtcctcccaggccgtccgcgccgctccctggagctcggcggagcgcggcagccagggccggcggaggcgcgaggagccgggcgccaccgccgccgccgccgccgccgccgcgggggccatgaccgtggagcagaacgtgctgcagcagagcgcggcgcagaaggtgaggcgagtccgccagccggcgggccccacttctccttccgacgggctgtcctctcccgctgcggccgggcgccccggcctcgccgccgccgccttcccgggcttcctccccggtcacccccggcccctgcccatcgcctcgggggcgtcgcgcccagagcccagctgcgtgtgggaagcagagtgtagtttgcgggcttcaatccacttccttctgccgattgttttcccgtagcagacggtgccaggtattgagagcgaccctcacattcctacagtgctctgtgtggcatcttaatgaaactttattctctccccttaaatgagaaagaatagctagttgtcatcctttctgaaccgattttgtctttcaaaggtagtagtgtaccaggcctgctattttgcaaaacggtctccaccaaaatcgaattacctgcctcgcggggcaggcgtgttgaccaggtggactctagaagtaggtggtttgcttggtttcttttccttttaaggtttccctttcttcttcttcttttctgtttttttttttttttttttttttttcaatatagaaactgtccctaagagaggaaacctttctggccatgttattccaggaatcttttgtcccctaagtttgaccttgtt

SEQ ID NO: 39740 - DNA, 1253 bp, Artificial sequence
  DNA replication origin
gaaggggagagatcagatgggtctgtagaaaaggaagattagaaagactcagcgacacttggggttgggactgaggggacaggtggaagggaaagaaggaagatttgggatgagttgcattgggaacagagactagggagggactgatgtgtaaaagaatgcctggacgtcaggcacctcagactatttggctattttacaacaagaattatttagatcttgtaggatggaaaaaatggaaatgccattttctggctatttggaaccactgtcaagtttgtattggggtcaagtggcattgtagaagaaaataaggcatttaggttttaggtcaggtgtgagttgaagaggttttaagttcttgagaacactggctaagagagaagaagcaggaatggagggtggaaggttgcctatagtgacggaagcaagcccagagaaaagagagagtagagacatggagggaaggggttcaggggttcttaccctccagaaaagtgggaaaggggttggggtgtggaaataaggggttggggtgcagagataagactttggggcacagaaataaggattggggtgcagagataagaggtcggggcatggaaataagggattggggtttcttgccccctagataaatggaacttgctgctaagggtgaaggagaaggggttgaggggttcttgcccctcccccagaaaagtggagaaggggtagagacacggagagaaggggttggggtacttgcccctcccccagaaaaacaggacttgccactaagggtgaaggaccaaggcaggcatccctgcgtggtctgacacctctgaaacctgggtgaataatcagagaggcatccctgcaatgattaaacacaaagggaaggctgccatccctagtctgtgaccagcaccggagttttgggtccacggataaaacgtgtctcctttgtctctgccagaaaatgaaaggaattaaaattaagagaagggagaaattgaagtgtggcgccaagattgaaaggagaaagaggttgagggacagtgagagaggttggagaagagagttaaaagaggccgcttactggatttgaaattggtgagatgtttcttgggctcatcagtctgaggacctgaggttgtaggtggacctttctcacggagcaaagagcaggaggacaggggatcgatctccgaagggaggtcccccaatctgagtcacggcaacaaatttcatgcccatccatgtgaagagac

SEQ ID NO: 39741 - DNA, 874 bp, Artificial sequence
  DNA replication origin
aagagtaaattgctgggcaggtgggaaagggctagtcactgaacaaaactgtaagccagacaagggtgtgaggaggggaggtgataaaaggattatagggtggaggagcagaggctgaggaagaattgggacctagctcagcctggtgaggaggggagaggtcagatgggtctgtagaaaaggatgattagaaagactcagcgaaacttggggttgggactgaggggacaggtgggagggaaagaaggaagatttgggatgagttgcattgggaacagagactagggagggactgatgtgtaaaagaatgcctggacatcaggcatctcagagcctttgccgattcaagtattatttagatcttgtaggatggaaaaattgaaaatgccattttccagatatttggaactactgtcgagtttgtattgggatcaagtggcattgcagaagaaaataagatgcttagattttaggtcaggtgagatttgaagaggttttaagttcttaaaaacacaggctaagggagaagaaggaggaatgggaggtggaagcttgcccatagtgaaggaggcaagtccagagaaaagggagtagagacacggagaaggggtggggggttcttgccctccagaaaagcagagaaggggtcagggtgcagaaataaggggttggggcacagagataagaggtcagggctcagaaataagggatcagggtgcagagataagaggtcggggcatggaaatatgggatcggggtgcagagataagaggttggggttcctgcccctctcccagaaaagcgggacttgccgctaagggtgaaggaccaaggcaggcgtccctgcgtggtctgacacctctgaaatgtgggt

SEQ ID NO: 39742 - DNA, 1204 bp, Artificial sequence
  DNA replication origin
aggaagattagaaagactcagcaacgcttggggttgggactgaggggacaggtgggagggaaagaaggaggatctgggatgagtcacattgggaacagagactagggaggcaacaaagtataaaagaatgcctggacatcaggcacctcagaccgtttgcccattttatgacaattgttatttagatcttgtaggatggataaatggaaagtgccattttctggctatttggaaccactgttgagtttatattggggtcaagcagcattgcagaagaagataaggcatttaggttttaggtcaggtgtgagttgaagaggttttaagttcttgagaacacaggctaagggagaagaaggaggaatggagggtggaaggttgcccatagtgaaggaggcaagcccagagaaaagagagactagagacatggagggaaggggtttgggagttcttaccctccagaaaagcgggaaaggggttggggcatggaaataaggggttggggtacagagataagaggtcagggtgcagaaataaggggtaggggtgcagagataagaggttggaccatggaaataagggatcggggcacagagataagaggtcggggcatggaaataagggatcagggtgcagagataagatcctggggcacagaaataagggatcagggggttcttgcccctagaaaagcagagaaagggtagagacacagagagaaggggttggggggttcttgcccccagaaaagcggtacttgccgctaagggtaaaggaccaaggcaggcatccctgcgtggtcggacacctctgaaatgggggtgaataatcagagaggcatccctgcaatgattaaacaccaagggaaggctgccttcttgagtctgtgactggtgccagagttttgggtccacagataaaatgtgtctcctttgtctctaccagaaaatgaaaggaattgaaattaagagaagggagagattgaagggtggcaccaagattgaaaggagaaagtggttgaaggatagtgagagaggttggagaagagagtaagaagaggccgcttacccgatttaaaattggtgagatgttccttgggctggtgggtctgaggacccgtggtcataggtggatctttttcatggagcaaagagcaggaggacaggggattgatctcccaagggaggtcccccgatctgagtca

SEQ ID NO: 39743 - DNA, 904 bp, Artificial sequence
  DNA replication origin
tctctgcccggccgcccatcgtctgagatgtggggagcgcctctgccccgccgccccatctgggatgtgaggagtgcctctgcccggccgagaccccgtctgggaggtgaggagcgtctctgcccggccgccccgtctgagaagtgaggagaccctctgcctggcaaccaccccgtctgagaagtgaggagcccctccgcccggcagctgccccgtctgagaagtgaggagcctctccgcccggcagccaccccatctgggaagtgaggagcatctccgcccggcagccaccccgtccgggagggaggtgggggtgtcagccccccgcccggccagccgccccgtccgggagggaggtggggggggacagcccccccgcccggccagccgccccgtccgggaggtgaggggcgcctctgcccggccgcccctactgggaagtgaggagcccctctgcccggccaccaccccgtctgggaggtgtgcccaacagctcattgagaacgggccaggatgacaatggcggctttgtggaatagaaaggcgggaaaggtggggaaaagattgagaaatcggatggttgccgtgtctgtgtagaaagaagtagacatgggagacttttcattttgttctgcactaagaaaaattcctctgccttgggatcctgttgatctgtgaccttacccccaaccctgtgctctctgaaacatgtgctgtgtccactcagggttaaatggattaagggcggtgcaagatgtgctttgttaaacagatgcttgaaggcagcatgctcgtgaagagtcatcaccaatccctaatctcaagtaatcagggacacaaacactgcggagggccgcagggtcctctgcctaggaaaaccagagacctttgttcacttgtttat

SEQ ID NO: 39744 - DNA, 1876 bp, Artificial sequence
  DNA replication origin
accgcccttaatccatttaaccctgagtggacacagcacatgtttcagagagcacagggttgggggtaaggtcacagatcaacaggatcccaaggcagaggaatttttcttagtgcagaacaaaatgaaaagtctcccatgtctacttctttctacacagacacggcaaccatccgatttctcaatcttttccccacctttcccgcctttctattccacaaagccgccattgtcatcctggcccgttctcaatgagctgttgggcacacctcccagacggggtggtggccgggcagaggggctcctcacttcccagtaggggcggccgggcagaggcgcccctcacctcccggacggggcggctggccgggcgggggggctgtccccccccacctccctcccggacggggcggctggccgggcggggggctgacacccccacctccctcccggacggggtggctgccgggcggagatgctcctcacttcccagatggggtggctgccgggcggagaggctcctcacttctcagacggggcagctgccgggcggaggggctcctcacttctcagacggggtggttgccaggcagagggtctcctcacttctcagacggggcggccgggcagagacgctcctcacctcccagacggggtctcggccgggcagaggcactcctcacatcccagatggggcggcggggcagaggcgctccccacatctcagacgatgggcggccgggcagagacgctcctcacttcctagatgtgatggcggctgggaagaggcgctcctcacttcctagatgggatggcggccgggcggagacgctcctcactttccagactgggcagccaggcagaggggctcctcacatcccagacgatgggcggccaggcagagacgctcctcacttcccagacggggtggcggccgggcagaggctgcaatctcggcactttgggaggccaaggcaggcggctgggaggtgtaggttgtagtgagccgagatcacgccactgcactccagcctgggcaccattgagcactgagtgaacgagaccccgtctgcaatcccggcacctcgggaggctgaggttggcgggatcactcgcggttaggggctggagaccggcccggccaacacagcgaaaccccgtctccaccaaaaccagtcaggcgtggcagcgcgtgcctgcaatggcaggcactcggcaggctgaggcaggagaatcaggcagggaggttgcagtgagccgagatggcagcagtacagtccagcttcggctccgcatgagagggagaccgtggggagagggagacagagggagagggagagggagagccggaaaagtttcttgtatagccccggctcttagagccaggctcttcacccttattttcataaagctgcgatgcatgcttcatacataattgtgcatgttgctgcctccttctcccagctgcccgacgtgtcatctattcagtattcttaaagaaaagaattttcagccaagaattttatatctagccaaagtaaacttcataagcaaataagagccttttcagacaagcaagtgctaagggaattcattaacaccaaatgcgttacaaaagatcctgaagggagtgctaaatataggcaggaaagactgctgccagccagtacaaaaacatacttaagtacatggacctgtaatgctataaagctaccacataaccaagtctgaataataaacagctaataacgtgatgacaggatgaaatccatacatgtaagtactaaccttgaatgtaaacaagataaatgccctcaaaagacagagtgacaagttggataaagaagcaaaactgtcttcaagggactcatgtgca

SEQ ID NO: 39745 - DNA, 1455 bp, Artificial sequence
  DNA replication origin
acgcggctggagaagccggcgctcgcagcccggcccgggccgctgccggaagtgacgcgagttcacctgccgagcgggggctgggaggaggggcggagggtgcagaggtgccgccgccgccgcgagccagtcgggagcgcgcgaggcgcggggagcctgggaccaggagcgagagccgcctacctgcagccgccgcccacggcacggcagccaccatggcgctcctgctgtgcttcgtgctcctgtgcggagtagtgggtgagtaggggccatggggtcctcagcacccgcccagcccgggggcgctcgctgcccgcggccacccaggaacaatggggcgtgggggagggggcgggcgcgatttgggggcgctgctgcaggggcggcggggcgggcagaattgcacaggggcgcttttgctgggccgggcgctcctggagccgtcccgtagggagccgcgcagggcgcgcggagtgcccggggacggagccctcggcggggggtggaggcggaggggctcgggcgcggcgtgtcgggtgcgcctcgcagctctcccatagcattctctgccccggtgcgggcttgcctttctttgctctcgccgtctcccttgtcagccttcgtgtcggttctctccagcgttacccgatttcaaaaaccttgggcggcgagttttcaggtgtcgagtcgcccaggcggggaggctgaattgcaaacgccattattcaatggacatggagctgcccggtgcctcggatcggccaggctacctctaggaaagaggcgctgagcgaacgccagcctggacggtgttagtctcctggaagcagctcgcccaggcaggagctgctaaccagacgcgcattgtgaaggagaccgtggaaaatcaaaagtgggttcctgcaaaaatgtagcattggtttctgcagtccttgggcgaagtgcaaaggagaattcagtgacctcgtttttgagtttgtaatgagtcgttcattttggagataagacgggctgagttgtacagggtaattgctagaggatttgccaagtgcgtttgtcgactgctcctttctctgggaggggaaaaaaggcatgtgaaaaatgcgtggaccattaggaggcgtaatcattttgacactttaaaaaacggattttccatgtcggtgttttaaccaactgatcttgtttgtcaaactaagcacttgctgcgttttataaccaaataattcatttttaaaaatccgtaggtgggatcctaggaggcgcacttagtatagcctctggaagggtaattttttgttgttaggtgctctgaagcaggatctagtggccctttctgttgggatggctctctgcttcctgttgaaatgttaattccattgttggatgccacagctgtgagcattactcatgggatcaacattctattagcaagtctaatcttcgatctgagcc

SEQ ID NO: 39746 - DNA, 961 bp, Artificial sequence
  DNA replication origin
ttacattccgcctccgggtgggcgacaaccccgcggcttcccaccctctgtccacccccttcgcgtcggtgttttttctggagctccgcttgtttgctggagagtcgcgcctccgggaagccgggtcctcgaacccagggccgcccgccggggacagcggacccgcggggcaggcgcaccctggcgaggatgttgtcggggaggctgggcattgggcgccagggcccttccccttgaacttggggaaaaccgggattgcagaagttgggcgcagctcaaggcggttctttcaagagcgggtggagatgtttgatccctcctcacctacctctctcaaaaccccagcgggagagcctagcagcaggtttcgatggcttcagaaagtccaactcttagccccttggaaaattatttcccctcttcatggctttgtggcgccgctgaggtcgggccggggctcctcaccccacgggccagtcttctcgcgccctccaccttgggaacgtctatcaggagaaaaatgtgttcctagaaacgtttgcgattagcttttcgttacaagggagggaaaagtacaaaagttataaactcctgcgaggccgagcttgattctggattccctttgggttttatccacgcagccgtgagcagaggagccttgtggaacaaagtagaacttgaggagcagccgccgcggtgacgaggtcccaggatgacgtcaccgtgcgatatttaaaatgggagccttttgctctgagtgtgggtggaggacgcctacttactcaagacgcctgaggtcttcttggccctgcttgcctctggtggttcttgccctgactgtaactctccctctttcaccttttggtactcctagaatactggtgggagtgggcttatttttcagctgttcgagctatcatttcttcaaacggggaaaacaaaagtccaaatgagtcatctt

SEQ ID NO: 39747 - DNA, 980 bp, Artificial sequence
  DNA replication origin
gcgagccccctgcgcgccgctttggggctgcgctcactcgtgtgcgcgctcgtccgcccgccagtcctctcaacgcgcgcttggccgcccgacgacgcgggagccgcacgcgccggacgaggctcgctgcgctccctgttgcccagcgcgggcccgttgaggcggagccctcagttcccggccaggacacggtctgggccgccgaatctccggccgaagagcggcggcggcagcggcggtgaggagaccgggccggggaaaggcagacatggcggggctgtgggtatcgggggagggtggtcccgtcgcccctgcggccacgtcgaaggctcgctggcgggcggcgcaccggggacaggggaggggcaggggatggaaccaggttgcatgggctccggctcggcgccagagcggggctgcgggccgcgagggcggcccgcgaggctttccgcgggaccctcggcgggcgcctgaggaaaaagacgccgcctcagggctcctgccacgtttcccacagcgcgttacattccgcctccgggtgggcgacaaccccgcggcttcccaccctctgtccacccccttcgcgtcggtgttttttctggagctccgcttgtttgctggagagtcgcgcctccgggaagccgggtcctcgaacccagggccgcccgccggggacagcggacccgcggggcaggcgcaccctggcgaggatgttgtcggggaggctgggcattgggcgccagggcccttccccttgaacttggggaaaaccgggattgcagaagttgggcgcagctcaaggcggttctttcaagagcgggtggagatgtttgatccctcctcacctacctctctcaaaaccccagcgggagagcctagcagcaggtttcgatggcttcagaaagtccaactcttagccccttggaaaattatttcccctcttcatggctttgtggcgccgctgaggtcgggccggggct

SEQ ID NO: 39748 - DNA, 1020 bp, Artificial sequence
  DNA replication origin
cctcaccgccgctgccgccgccgctcttcggccggagattcggcggcccagaccgtgtcctggccgggaactgagggctccgcctcaacgggcccgcgctgggcaacagggagcgcagcgagcctcgtccggcgcgtgcggctcccgcgtcgtcgggcggccaagcgcgcgttgagaggactggcgggcggacgagcgcgcacacgagtgagcgcagccccaaagcggcgcgcagggggctcgcggcccggaagaggggaggggcgatgacccgggaaagggttggcgcgcgcgggatcggctcgcgcgcctgaggggcggtgccgggggcggggcttcgccgcgaggccacccccgagccccgggcctagccgcacgggaggcgacacaccctcgccctaccctgagcctggcgcagaccctcgaccgcgacggcgcggtccgcagaaccgcgggcttccctccccggcaaaaagcggcgctgaaggcctgtgggacccccgcccggccgccctacgtgcgtcagcgccttcgggggtcgcgcgggcttggtcctttcggctgtctcggcctttttgtttccccctcaggtctctccacgctgcacttgacaccctcagggcggaatggcgagttctagacccagctctctagacccggggcttcatgggggacacggactcgacgggaaggggaacttggcatttatggacagatcctcatccttcttgctgtagtcaattacacgcacgttaaccgtgcagccgccctgctgtattttaggcggttgttggcactcctagttgggcccttccctggcccctcacagcagggcctgcctcctgtggacgcttgtgtgctgccctggcaccggccactgtgttttgcataaaggagaggctccaaagatgttggccaaaggaatgaagccttgagagtccaggctttctatttctgagacactctactcaaggacttcccagatgcaaagcttcatctttgagcaaatacaaatatgga

SEQ ID NO: 39749 - DNA, 935 bp, Artificial sequence
  DNA replication origin
ggggtcagcccccctgcccggccagccgccccgtccgggaggtgaggggcacctctgcccggccgcccctactgggaagtgaggagcccctctgcccggccagccgccccgtccgggagggaggtgggggggtcagccccccgcccggccagccgcccgtccgggagggaggtggggggggttcagcccccctgcccggccagccaccccgtccgggaggtgaggggcacctctgcccggctgcccctactgggaagtgaggagcccctctgcccggccagccgccccgtccgggagggaggtgggggggtcagccccccgcccggccagccgccccgtccgggagggaggtggggggtgtcagcccccctgcccggccagcagccccatccgggaggtgaggggcgcctctgcccggccgcccctactgggaagtgaggagcccctctgcccggccaccaccccgtctgggaggtgtgcccaacagctcattgagaacgggccaggatgacaatggcggctttgtggaatagaaaggcgggaaaggtggggaaaagattgagaaatcggatggttgccgtgtctgtgtagaaagaagtagacatgggagacttttcattttgttctgcactaagaaaaattcctctgccttgggatcctgttgatctgtgaccttacccccaaccctgtgctctctgaaacatgtgctgtgtccactcagggttaaatggattaagggcggtgcaagatgtgctttgttaaacagatgcttgaaggcagcatgctcgttaagagtcatcaccactccctaatctcaagtaatcagggacacaaacactgcggaaggccgcagggtcctctgcctaggaaaaccagagacctttgttcacttgtttatctgctgaccttccctccactattgtcccatgaccctg

SEQ ID NO: 39750 - DNA, 979 bp, Artificial sequence
  DNA replication origin
ctcccagacagggcggctggccgggcggggggctgaccccccaacctccctcccggacggggcggctggccgggcagaggggctcgtcacttcccagtaggggcggccgggcagaggcgcccctcacctcccagacggggcggctggccgggcggagggctgacccccccacctcctccggacggggcggctggccaggcaggggctgaccccccccacctccctcccggacggggcgactggccgggtgggggggctgacccccccatctccctcccggacggggtggctggccgggctgaggggctcctcacttcccagtaggggcagccgggcagaggcacccctcacctcccggatggggcggctggccaggcggggggctgacccccccacctccctcccggacggcacggctggccaggcggggggctgacccccccacctccctcccggatggggcggctgccgggcggagacgctcctcacttcccagatggggtggctgccgggcggagaggctcctcacttctcagacggggcagctgccgggcggaggggctcctcacttctcagacggggtggttgccaggcagagggtctcctcacttctcagacggggtctcggccgggcagaggcgctcctcacatcccagatggggcggcggggcagaggcactccccacatctcagatgatgggcggccgggcagagacgctcctcacttcctagatgtgatggcggctgggaagaggcgctcctcacttcctagatgggatggcggccgggcggagacgctcctcactttccagactgggcagccaggcagaggggctcctcacatcccagacgatgggcggccaggcagagacactcctcacttcccagacggggtggcggccgggcagaggctgcaatctcggcactttgggaggccaaggcaggcggctgctccttgccctcgggccccgcggggccc

SEQ ID NO: 39751 - DNA, 1876 bp, Artificial sequence
  DNA replication origin
ggtggacagtttcaaagttattaagtccagccctggagagagaacctttcgctgccccggccgcctctgctagagccgccgccgccgctcccgcggtgccccagccgcccgcagcccgcgcgctcctcctcgcaaagtgactgcaagctccgctcttgccgcactatatccaggcagcggcggcggcagcggcggcagaagcagcagcagcagcggccgccgcggcggcagcagagccgggcggggagggcggcgggggcgggggcgcggcgaggggaggtgcggccgaggcgtatccctccgcgctgcacggcggccgctcttccgcgaggcgcgcggtcccgggattcgtccgcagtggagctcgaagtcacgggttcggtccccggtgcctccgcctagaggggcggccgcgatcgcgaaggcgccactcgcccgccggccatccgcaggttcatgcacgccctgagccgagaagggcgtggggatgggggcagcctggagctccttcacagccgccggctgcctcaggacagctgagctgatgctgagctgagctgagctgagctgatgctcatgcagatgctgatgctgatgctgatgctgatactgatactgcaggcgaccgccccgagcgcgccccggctcaacgtgaatgggggatctggaggcgggcggtgtgccccgcagcttattccttttgggcgtgggaggagggagattcttgtctctccgtggacctccttctccctctctcgctcaaacctggagcaggctggccccttgcgcggctgtccccttcccacgctccccaccccgccgcgacagaggggaagcaattgtaccctaaagtctacactgtctgtctcctcaggcgctaaagggtgggcggaaaaataacgtacagagtgtttcctctacatctcgacccattgctgttgggagcggcaccttacgggagagacactggagaggggacgagccgcgggaggggctgcgttcaactcagccttagcctcagctgtgtccttagaggcctgaagtctctcctggcctcactccgcgggctctgccctcggtcccagtgcgctgcactggccagatccccgccaggagtgcaccgagggaggactgcaaatgtgcaaagatgagttgggtcgcgggggggagaccttccccagatcagtgccctaccccgaacacccacgtacccgcgtgtgcgagtgtaaattgaagtgagggagccgtggcaaacgcccggaactaactctctgctccttaagattggggcttatcgttatttctcctagaagggtaggaaaacgtttgtgagattaacgtcacctctcctgcaagagcggttaagaggcagaatcaccggcccgggtgcggagcccatgtcaatctggcctggggttaccgcgacctgcaaacgctgacgatgggtcctttcatctgcactttctctctggctccttagaaaactcaactgcctcgccccggcctccacaaggaccctagctccttccttatcagtgaggacatagaaatagcgggggttggagaggggggaggtagaaatgtagagctcagaatccagccccagcctggggatttcacgctgaaaagggcagtgcattgccttcagggagggcagggggcaagagtagacacaggctaacatgcataggggagataccgtctgcgatttgtcctccccaggcagagcgctttatacagatgattcgtccacttggcatcctgggatggggttatcaggaagagaggaggggaaaggcggccctcaactcaccatcgctgaactgccttaagcaatggccctctcagcacctcacagctagagaacctcttattt

SEQ ID NO: 39752 - DNA, 1264 bp, Artificial sequence
  DNA replication origin
tgcatgagcatcagctcagctcagctcagctcagcatcagctcagctgtcctgaggcagccggcggctgtgaaggagctccaggctgcccccatccccacgcccttctcggctcagggcgtgcatgaacctgcggatggccggcgggcgagtggcgccttcgcgatcgcggccgcccctctaggcggaggcaccggggaccgaacccgtgacttcgagctccactgcggacgaatcccgggaccgcgcgcctcgcggaagagcggccgccgtgcagcgcggagggatacgcctcggccgcacctcccctcgccgcgcccccgcccccgccgccctccccgcccggctctgctgccgccgcggcggccgctgctgctgctgcttctgccgccgctgccgccgccgctgcctggatatagtgcggcaagagcggagcttgcagtcactttgcgaggaggagcgcgcgggctgcgggcggctggggcaccgcgggagcggcggcggcggctctagcagaggcggccggggcagcgaaaggttctctctccagggctggacttaataactttgaaactgtccaccggtgtcacgtcctgaacatgagcctcctcctctccttctacctgctggggttgcttgtcagtagcgggcaaggtaggagtgtggcgctttattgcatttactttccctcccccttccacccggccaagagaggcaaagagggaggcgcaggaagaatgaaatgaaagaactaaagttacagttattgctgttgttgttattattattttcgttctttctcctagctgtccctaaaattgtatctgttgtgtggagacccttaaataagagaagggaaaatacagaattggagaggggaatcggtgagcaggatatccagggaaaccgcttcttcttcttctttttttttcctctgggattatggctttctcttatttttattatcagaaattggatgagtgtgttaacagtgaaatatctgaggttgcggaaggaaagggcacgatggtgttttacagaagcagcaaaaactatcagtgttaaactcatttgcaaaatatctgctgtgtgcaagacgttcgattcttggagactcttttttttttccacccctttcccaaaaccctaattcctgactatgaagtgaatgatgatggcttatttctgttggaaactaagagaggggccgtggatattgtgtgtaagaaagcaaatggataaaactagggatgtgttgcagtcat

SEQ ID NO: 39753 - DNA, 1213 bp, Artificial sequence
  DNA replication origin
ccctctctgggctggcgaggctggggccggctccctcgcttgcggggaggtgtagagggacaggcgcgggtgggaacccgggctgcgcgctgcgctggcgggacagcgcgagttccgggtgggcgcgggctcagcgggtcccgcactgcaagcggccggcttgcaccgctggccctgcgcagtgaggggacttagcacccgggccagcagctgcggagggtgggccgtgtcctccagcactgccagtcctcccgcgtcgtgctgaaattctctccgaggctcagccgccttcctgtggggcagggctcgggacctgcagccccccatgcccgagccctcccccaaccccgccgtgggctccctcgcggcccaagcctcccctgctccgcggggcctggtcccttccaccgcccaagggctaaggactgccggcgctgcagtgcaggactggcgggcagctccgcccatggaccggcggaagatccactaggggaagaagccagctgggctcctgagtagggtggggacttggagaactttcatgtctagctagaggattgtatatgcaccaatcagcactctgtgtctagctcggggtttgtggatgcaccaatcagcactctgtatctagctaatctagtggggacttggagaacttttgtgtctagctaaaggattgtaaatgtaccaatcagcaccctgtgtctacctcaaggtttatacacgcacctatcagtgctctgtgtctagctaatctagtggggacttgaagaacttttgtgtctagctcaaggtccctaaatgcaccaatcagcaccctgtcaaaacggaccactcagctctctgtaaaatgagccaatcagctctctgtaaaatggaccaatcagcaggatgtgggtggggtcagataagggaataaaagcaggctgcctgagccagcaaaggcaactggctcaggttcccttctgtatcgtggagggtttgttcttttcctctttgcaataaatcttgctgatgcttgctctttgggtccacgctgactttataagaaggtgtgcagcttcactcctgaggccagcgagaccataaacccactggcaggaagaacatctccagacgtgccgccttaagaactgtaacactcacgcgagggtctgcggcttcattggtgaagtcagagagaccaagaacccaccaattccggtcacagaag

SEQ ID NO: 39754 - DNA, 946 bp, Artificial sequence
  DNA replication origin
tagcgcagcagcagcaggaggaggcggtggcggctcctcctcgccatcttcccggggcggcagccggctgctctgaggaggtcgagggtcccggcggcaggagcgcaggaggccgggggcccttgaacttctggggcgggaaaggagcagagagtcgggaggggaggaagaggagggacggctctagatgggatgtcagtttccccctccccggggcgccttctcagctggctgccaagaggcgggtcctccagcccagggatgggggtctgttctgttttgggggtgtgggggtaggggctagagggcgtgaaaaccagacgaggcgtccgccgggtcctagcgagggggcagcaggaggagagcagcgcccgggaaagccccggcgggtcgtccctccgcccccacgcctccgggattgatcggctttgtgtctggtccgcgcggggctgccagctgtccccagggcgaggagctgggggcgggaggcgcgggcaggctgggggtggggggattgggtgtctcggggacggggatgtatgcgggtagggaaacgcctcctgttttgccccaactcctttcttcccctcgttggctcaaaacttctttctggcttttcagcctaggggtggagatatttggaaaattctgcccaacgggcgaagctgagggggtggcgctctgaggagatggggttcgcgggctccgcctcgaactcgagaaaaaaaaaagcaatcaagactcgtgctggaagtcaggtctcagattttagtacagccttggtcccttctcagtttaagctttttgctccttggagatttgaggtgcatttgtctcgcgttcttgttctttgcttttttttcagtgtcagagttggaagttcatctaatggtgtgaaatatttatcatgtttctttcaagttacataactgctgcttgtggagtt

SEQ ID NO: 39755 - DNA, 1137 bp, Artificial sequence
  DNA replication origin
catcttgcaccgcccttaatccatttaaccctgagtggacacagcacacgtttcagagagcacggggttgggggtaatgttatagattaacagcatcccaaggcagaagaatttttcttagtacagaacaaaatggagtctcctatgtctactttctacacagacacagcaacaatctgatttctctatcttttccccacatttcccccttttctattcgacaaaaccgccatcgtcatcatggcccgttctcaatgagctgttgggtacacctcccagacggggcggccgcggggcagaggggctcctcacttcccagacagggcggccgggcagaggggccccccacctcccggacggggcggcggccgggcagaggcgcccccccacctccctcccggatggggcggcggcagggcggagatgctcctcacttcccagacggggcggggcggctgccgggcggaggggctcctcactttccagatggggcggctgccaggcggaggggctcctcacttctcagacggggtggccgggcagagacgctcctcacctcccagacggggtcgcggccgggcagaggcgctcctcacatcccagaccgggcggcggggcagaggcgcttcccacatctcagaagatgggcggccgggaagaggcgctcctcacttcccagactgggcagccaggcagaggggctcctcacatcccagacgatgggtggccaggcagagacgctcctcacttcccagacggggtggcggccaggcagaggctgcaatctcggcactttgggaggccaaggcaggcggctgggaggtggaggttgtagcgagccgagatcacgccactgcactccagcctgggcaacactgagcactgagtgaacgagactccgtctgcaatcccggcacctcgggaggccgaggctggcagatcactcgcggttaggagctggagaccagcctggccaacatagcgaaaccccgtctccaccaaaaaaatacgaaaaccagtcaggcgtggcggcgcgcgcctgcaatcccaggcgctcggcaggctgaggcaggagaatcaggcagggaggttgcagtgagccgagatggcagcagtacagtccagcttccgctcggc

SEQ ID NO: 39756 - DNA, 1073 bp, Artificial sequence
  DNA replication origin
aagctaggagcccctcgcttttccctgcgttctccgcctcgtttcaccttcctctctcacccccatcccccttccttgctccaacctcttttcgcggctgctggcggcggcagcctgggtgcgaccctagcccgagccggcgtcggggtcgcgcaccgccttccacaggcaaactttgtgcatgtccgcgtctcccttttgtgtaacttgcgagaaatgggaggggtcggagacccatagccaccccgcgccttccccaagtctggacgtcccgggagttcgctcgcaccctaagctctgtctgagaggcagaaggtccgcgggaacaaaagccgcgacaccccgccctcgccgtgggccgagccgcgttagtctcagtgcgccaccgaggctcccgcccggctcccttcccggggctgcgcgtccgcctgggagggggcagagacgctgccggggcttctggcggagcctcggggcccctctgcttcccaccctcggatcacctccgaggcttaattctgtgctgggctgtaaagtccttggcggggaggaaataaggcggagagtgggatgtgcgtctggaaagggcagtggcggatggtggggaggcacgggctctgtcctgtgcatccaaggaggcgtttgtctgattaaggcgcggcctcttccctggcagctctggggactctggtttagttcccctgggggcacaggatgctggggagggtccgaagggtcttttttttagggtgcagataaaaggatcgaattgagtgaagattaagacggagaagatggcgcctctgcagtgcagcaaagaaaagctgtgtggaggctgcagcctagtgaaatccacccaccactaggtgtataacaagtcttccccattcatccaactctcgaacattcagctaacgcctgtgcacaatgactgtttttctttacatctgaagatgcttagaagttgtttgcatgacagttgggccagaggaggctgtatttcacttcggacttcggttgggttcctgtttggcatcttaacatttgcaaccttccttacccgtttttcccct

SEQ ID NO: 39757 - DNA, 828 bp, Artificial sequence
  DNA replication origin
gactcgcctggctctgagccccgccgccgcgctcgggctccgtcagtttcctcggcagcggtaggcgagagcacgcggaggagcgtgcgcgggggccccgggagacggcggcggtggcggcgcgggcagagcaaggacgcggcggatcccactcgcacagcagcgcactcggtgccccgcgcagggtcgcgatgctgcccggtttggcactgctcctgctggccgcctggacggctcgggcgctggaggtgggtgccgcgcctcggaaggcggggggaggctgcacggtggggacgcgataccccccaagaccttaacccaagtctttaatgcagagaagccgggggtccgtcaatgggacccctctcctctccgcccccgcttgcggacgtccagcgcatccccgctttcggcccagccctgccccagggagtcgcgctccggcccgctgagagggagcgggcgaggcgctggtctccctggttccgcgccagcccggggcgagaagggtagggggcgaccctgagcccagaccccgacttagtccctgccttggaagcgggggtcgggggaggcgagagacattcagacaggggggaagggggaaggagcacgtggggaaaaccgaaaacgcagcgtccctaaagccagtccttcgctcttgaatcgttgccctttcctttctcttgggccctggggaggaggaggaggagtcgggacagcccaggaagctaggagcccctcgcttttccctgcgttctccgcctcgtttcaccttcctctctcacccccatcccccttccttgctccaacctcttttcgcggctg

SEQ ID NO: 39758 - DNA, 1320 bp, Artificial sequence
  DNA replication origin
aggcttttccctgctgtcccagcttcatgtcacttacttgctattagatttgggagttcattagcttcattttcctgatgtataaataggaataatagtaacagcctctttggcttttgtaggaagtaaatgacatgaagcgtataaacaaatactgcatgacaataaatatttgtccttatttgttgaggacatccaaaggacattcaggggcaaaagtaatccaagagtcaagactgaatgcctagtgcgggaaaagacacacaagacaacatttaggggagctggtacagaaatgacttcccaggaaggaagtctgtaccccgctggctgagccatccttcccgggcctaggcacccttgtcagcgcaatgagcaagggagagaaggcaggctgcagtgcagccctcagaagggccagagcactccctggcttcagtccttcgctccaagccctgtgtggagtgggctgtggcttggtaactaaatgctacttcaggtcaagagcaggggatatatctgggcagttctagagcattctaaactatctggacactaactggacagtggacggtttgtgtttaatccaggagaaagtggcatggcagaaggttcatttctataattcaggacagacacaatgaagaacaagggcagcgtttgaggtcagaagtcctcatttacgggggtcgaatacgaatgatctctcctaatttttccttcttccccaactcagatggatgttacatccctgcttaacaacaaaaaaagaccccccgccccgcaaaatccacactgaccaccccctttaacaaaacaaaaccaaaaacaaacaaaaatataagaaagaaacaaaacccaagcccagaaccctgctttcaagaagaagtaaatgggttggccgcttctttgccaggtcctgcgccttgctcctttggttcgttctaaagatagaaattccaggttgctcgtgcctgcttttgacgttgggggttaaaaaatgaggttttgctgtctcaacaagcaaagaaaatcctatttcctttaagcttcactcgttctcattctcttccagaaacgcctgccccacctctccaaaccgagagaaaaaacgaaatgcggataaaaacgcaccctagcagcagtcctttatacgacacccccgggaggcctgcggggtcggatgattcaagctcacggggacgagcaggagcgctctcgacttttctagagcctcagcgtcctaggactcacctttccctgatcctgcaccgtccctctcctggccccagactctccctcccactgttcacgaagccc

SEQ ID NO: 39759 - DNA, 1301 bp, Artificial sequence
  DNA replication origin
cgcccctccgaggaggacgaggagctagtggtgccggagctggagcgcgccccgggacacgggaccacgcgcctccgcctgcacgcctttgaccagcagctggatctggagctgcggcccgacagcagctttttggcgcccggcttcacgctccagaacgtggggcgcaaatccgggtccgagacgccgcttccggaaaccgacctggcgcactgcttctactccggcaccgtgaatggcgatcccagctcggctgccgccctcagcctctgcgagggcgtgcgcggcgccttctacctgctgggggaggcgtatttcatccagccgctgcccgccgccagcgagcgcctcgccaccgccgccccaggggagaagccgccggcaccactacagttccacctcctgcggcggaatcggcagggcgacgtcggcggcacgtgcggggtcgtggacgacgagccccggccgactgggaaagcggagaccgaagacgaggacgaagggactgagggcgaggacgaaggggctcagtggtcgccgcaggacccggcactgcaaggcgtaggacagcccacaggtagaagaattgctctcgtttgtctgtccattcatcctcctctcctcactttatctatcccacgcgacttcagggtagactcctgctggcaggcaggatcataagtccgcggacagaacggaggcctggagtggaggaatgtggtttgaggtttggattggtgaactcagctagaaaacatacttgcatttgcccgaataatgaataaccaagaaaaaaactgacaaacgattttctgcaaactaaagcaaagcatttaggccggggagggagagtttgtaacctgactccttccacctttagcgagttggagcttgtgcgagttctttccactctgtgtatttctttttaatgattttgtgtgcgccttttgtgcgggttgcaacgttgcgctgagttttgtaaccgctgcctgtgcgtgcatcctgcgctcacgggagggcggatgtggagagggcagaggagcaatggtgacctgggaaggtaccctgagcggctacgctaggatctctgttctgcagacttctgtcccctttcccccttataaggctgacccaggcgggctgaaggcggtggggccccttcgcagaacctgcttgggaggtctttcccgggtttgccccgcctcccagtttgcactccctctcgcggccataattctgctctcaagcactgttgaaagtcactgccggtccttcctgctacggccttctctctgtgcagt

SEQ ID NO: 39760 - DNA, 1149 bp, Artificial sequence
  DNA replication origin
gccactgcttctatcggggcacagtggacggtagtccccgctctctggctgtctttgacctctgtgggggtctcgacggcttcttcgcggtcaagcacgcgcgctacaccctaaagccactgctgcgcggaccctgggcggaggaagaaaaggggcgcgtgtacggggatgggtccgcacggatcctgcacgtctacacccgcgagggcttcagcttcgaggccctgccgccgcgcgccagctgcgaaacccccgcgtccacaccggaggcccacgagcatgctccggcgcacagcaacccgagcggacgcgcagcactggcctcgcagctcttggaccagtccgctctctcgcccgctgggggctcaggaccgcagacgtggtggcggcggcggcgccgctccatctcccgggcccgccaggtggagctgcttctggtggctgacgcgtccatggcgcggttgtatggccggggcctgcagcattacctgctgaccctggcctccatcgccaataggctgtacagccatgctagcatcgagaaccacatccgcctggccgtggtgaaggtggtggtgctaggcgacaaggacaagagcctggaagtgagcaagaacgctgccaccacactcaagaacttttgcaagtggcagcaccaacacaaccagctgggagatgaccatgaggagcactacgatgcagctatcctgtttactcgggaggtaggtccagccgggatgcgggggtcccagcgctgatatcaggaggtaggtagaagggaatcttgctggtggctttgcttctccctcaaacctcctgcagctgtggatgtgtttaactgcttcttgcaggaaatccaaccagccttcaactctgctcctgtattcacgttagccccgcagaaatttttgccttaaatgccaagacttgcttaggtgatgatgaagacccagtagtgctgcatgtcatctagtctgaggtgttgtggcataggaacgtaaacataagaaggcacaaggatgcttggggaaatgatacagttaaatggggaaaaggaaggaaaacaaagttgcctttgggatcatgggtcttcttctttccagtgaaaataaaatataaccttgtcccacctaatggaaagggctggat

SEQ ID NO: 39761 - DNA, 1251 bp, Artificial sequence
  DNA replication origin
cgcgactgggactttatgggtatttgttatttgctatgaagttaacggggcgggggatggggacacacacacacttgcttgcaggattgagtcaagtgtcggagggaggggggcccggcagcagcgccagcctgtccgggctgcggtgccagcgtgcgaacttttctttgttgcttgggaaaatgtttggattcgtgctccagaaagaggtggggtggggggggggggaaagaaaagattaaaaaaaaaaagtcggatagtggagattcagcaaatacgggaaaaggaaaaaaacaaaaaccaaaaaaccaccaaatgcaggcacgatcgctgtttcaagaaaagtaaggaaaggtaccgcgcaccgggctggcaactggtgcgcgcagcctcccgcccccgcgctgcgctggacaagccggctgtggaggttccaagctccggggcccacttcctttcttattttgtgggtttccttggctctgctgggaccaggaggaagggaagaaagagaggggaaaaagccgtaaaaattaaaacaaaaatgcaggggggcagcctgaggcgagctggtgaagcggcgtgtctgtgtcccttcggctgcggtctcctcctgcccgccgtcatccccagtcggcagctgcgagcgccgagagcagcgcgagcgctgtgaagatgcgaggaggtggaacaatgaatttatagcggcatgccatcctgcaatggcaatttcaacagttcgtcactgcacgctgcctcttaaagggagagcttcccccaccactcccacccttcccagtccgcgcctaatcagatgggggagggcaaaagaggagggtgatcgaggaaagggagacgaagtaggaggaagggactgggacccggcgaggtggtaggaggggagaggggaaaataaaaagtaatggggcaagaaaaacagatttccttggccacttttaaagccacagcggctccgggtctgtctgatatttcacaaccaattggggttggctaaccttggcttacctcatctcctgaacgggtgttttggttaaagttattgagacgtttcaagtctctccctgcctccttcttgcctgcttttctcgccctcggtgggaagttcctgccgcaagtttttcccctttgcacacccgtgcgctctggcctcgcagaccgtgcaactccatccaccagccagagcttttcagcttcccgtgcgtcccctaaccaccgcgttcccttcgcttc

SEQ ID NO: 39762 - DNA, 1295 bp, Artificial sequence
  DNA replication origin
atccattcaactctgagtggacacagcacatgtttcagagagcacagggttgggggtaaggtcaccgattagcaggatcccaaggcagaagaatttttcttagtacagaacaaaatgaaaagtctcctatgtctacttctttctacacagacacggcaaccatccgatttctcaatcttttccccacctttcccccctttctattccacaaaaccgccattgtcatcccggccggttctcaatgagctgttgggtacacctcccagagggggtggtggccgggcagaggggctcctcacatcccagtaggggcggctgggcagaggtgcccctcacctcccagacagggcagctggctgggcggggggctgacccccccacctccctcctggacggggcagctggcctggcgggggctgacccccacctccctcctggatggggtggctgccgggcagagatgctcctcacttcccagacggggtggctgccaggcggaggggctcctcacttctcagacggggcagttgccaggtggagggtctcctcacttctcagatggggcggccgggcagagacgctcctcacctcccagacggggtcacggccgggcagaggtgcttctcacatcccagacggggcggcggggcagaggtgctccccacatctcagacgatgggcggccgggcagagacgctcctcacttcctagatgggatggcggctgggaagaggcgctcctcacttcctagatgggatggcggctgggaagaggcgctcctcacttcctagatgggatggcggccgggcagagacgctcctcactttccagactgggcagccaggcagagcggctcctcacgtcccagacgatgggcggctgggcagagacgctcctcacttcccagacggggtggcggccgggcagaggctgcaatctcggcactttgggaggccaaggcaggtggctgggaggtggaggttgtagcgagccacgatcacgccactgcactccagcctgggcatcattgagcactgagtgaaccagactccgtctgcaaacccggcacctcgggaggccgaggctggcagatcactcgcggttaggagctggagaccagcccggccaacacagcgaaaccccgtctccaccaaaaaagtacgaaaaccagtcaggcgtggcggcgcgcgcctgtaatcgcaggcacttggcaggctgaggcaggagaatcaggcagggaggttgcagtgagccgagatggcagcagtacagtccagctttggctcagcatcaga

SEQ ID NO: 39763 - DNA, 931 bp, Artificial sequence
  DNA replication origin
cttcccagccgccatcccatctaggaagtgaggagcgtctctgcccggccgcccatcgtctgagatgtggggagcacctctgccccgccgccccgtctgggatgtgagaagcacctctgcccggccgtgaccccgtctgggaggtgaggagcgtctctgcccggccgccccatctgagaagtgaggagaccctccacctggcaactgccccgtctgagaagtgaggagcccctccgcctggcagccaccccgtctgggaagtgaggagcatctctgcccggcagccaccccatccaggagggaggtgggggtcagcccccgccaggccagctgccccgtccaggagggaggtgggggggtcagccccccgcccagccagctgccctgtctgggaggtgaggggcacctctgcccagccgcccctactgggatgtgaggagcccctctgcccggccaccaccccctctgggaggtgtacccaacagctcattgagaaccggccgggatgacaatggcggttttgtggaatagaaaggggggaaaggtggggaaaagattgagaaatcggatggttgccgtgtctgtgtagaaagaagtagacataggagacttttcattttgttctgtactaagaaaaattcttctgccttgggatcctgctaatcggtgaccttacccccaaccctgtgctctctgaaacatgtgctgtgtccactcagagttgaatggattaagggcggtgcaagatgtgctttgttaaacagatgcttgaaggcagcatgctcgttaagaatcatcaccactccctaatctcaagtacccagggacacaaacactgctgaaggccgcagggtcctctgcctaggaaaaccagagacctttgttcacttgtttatctgctgaccttccctccactattgtcctatgaccc

SEQ ID NO: 39764 - DNA, 1302 bp, Artificial sequence
  DNA replication origin
ctccctcccggacggcgcggctggccgggtcgggggctgacccccccacctccctcccggatggggcggctggccaggcggggggctgaccccccaacctccctcccggacggggcggctggccgggcagaggggctcctcacttcccagtaggggcggccgggcagaggcgcccctcacctcccagacggggcggctggccgggcggggggctgacccccccacctccctcccggacggggcggctggccgggcagaggggctcctcacttcccagtaggggcggccgggcagaggcgcccctcacctcccggacggggcggctggccgggcggggggctgacccccccacctccctcccggacggggcggctggccgggtggggggctgaccccccccacctccctcccggaaggggcggctggccgggcggggggctgacccccccccacctcccttccggacgaggtggctgccgggtagagacgctcctcacttcccagacggggtggctgctgggcggaggggctcctcacttctcagacccagcggctgccgggcggaggggctcctcacttctcagacggggtggttgccaggcagagggtctcctcacttctcagaccgggtggccgggcagagacgctcctcgcatcccggacggggcggcagggcagaggtgctccccacatctcagacgatgggcggccgggcagagacgctcctcacttcccacatgggatggcggctgggaagaggcgctcctcacttcctagatggcagggcggctgggcagagacgctcctcactttccagactaggcagccaggcagaggggctcctcacatcccagacgatgggtggccgggcagagacgctcctcacttcccagacggggtggcggccgggcagaggctgcaatctcggcactttgggaggccaaggcaggctgctgggaggtggaggttgtagcgagccgagatcacgccactgcactccagcctgggcaccattgagcactgagtgaaccagactccgtctgcaatccccgcatctcgggaggccgaggctggcggatcactcgcggttaggagctggagaccagcccggccaacacagcgaaaccccgtctccaccaaaaaaatacgaaaaccagtcaggggtggcggcgcgcgcctgcaatcgcaggcactcggcaggctgaggcaggagaatcaggcagggaggttgcagtgagccgagatggcagcagtaccgtccagcttcggctcggaatcagagggagaccgtggaaagagagg

SEQ ID NO: 39765 - DNA, 953 bp, Artificial sequence
  DNA replication origin
ggaggtgggggggtcagccccccgcccggccagccgccccgtctgggaggtgaggggcgcctctgcccggccgcccctactgggaagtgaggagcccctctgcccggccagccgccccgtccgggagggaggttggggggtcagccccccgcctggccagccgccccatccgggagggaggtgggggggtcagcccccgacccggccagccgcgccgtccgggagggaggtgggggggtcagccccccgcccggccagccgccctgtccgggaggtgaggggcgcctctgcccggccgcccctactgggaagtgaggagcccctctgcccggccagccgccccgtccgggagggaggttggggggtcagccccccgcccggccagccgccccgtccgggagggaggtgggggtggtcagcccccccccgggaggtgaggggcgcctctgcccggccgcccctactgggaagtgaggagcccctctgcccggccaccacccggtctgggtggtgtacccaacagctcactgagaacgggccatgatgacaatggcggttttgtggaatagaaaggggggaaaggtggggaaaagattgagaaatcggatggttgctgtgtctgtgtagaaagaggtagacatgggagacttttcattttgttctgtactaagaaaaattcttctgccttgggatcctgtagatctgtgaccttacccccaaccctgtgctctctgaaacatgtgctgtatccactcagggttgaatggattaagggcggtgcaagatgtgctttgttaaacagatgcttgaaggcagcatgctccttaagagtcatcaccactccctaatctcaagtacccagggacacaaacactgcggaaggccgcagggtcctctgcctaggaaaaccagagacctttgttcacttgtttatctgctgaccttccctccac

SEQ ID NO: 39766 - DNA, 1697 bp, Artificial sequence
  DNA replication origin
ggccccgatacgtgccccccgcgccccgcccagcccagaaagagccgcccccggcccgcccgcgccttcactggacctgtccgccggcctcccctcacaggcccgcggccctgaccgcgccaaccctcccggagaagggccggcgggacggccgagccactcaccagagctgaggcgcggcgcggcccgactgactgaagcgagagcgcccggcgggcggcgagggcagcggtcaggtgactcactccttccgcgcggccagccgccccctcccttctgcgccgctctgctgccgccacctcgcggcgccaaaaccccgcccgcccgctgaaggccccgcccccggcgccgaagccccgccctgccgccctcgaagcctctgtcagcgaacgagcgcgcgcaatagcgcggggcaggggtcgccgcggccggaagcccacgcggggggttgcagggacgggtcgtaaggggcggggcgggcctcgaggaggcggcggtggggtccccggacctccgcgcgtggcacagcccgcatcctgaactgactcccactcgaggaccacctctcctctcccttctgagggcggaacggaaaggccaagcgcctcctcgcctcgggagctgcaggacgccctaattcagccgagtcgccgcgtgcccgggtgcccgcgaacagcaggagagaggacgggcgctggccccacaggggtcgctttaccccttgaagagctcctcgctgcctgccctgggggtggtgggcgtccaggttcacagggtacttgagcttgctggggtgggggtgtgtatgaagtgcgtccagggttttgtggagcgcgtctagcagttgctctacttcttactgacagtgaaacaagggcgcccacgacaggtgttcccttttcgctgtcgctgccaggaagcttccagccaggttcagcgcccagtggtgtcagccggcccatctcgagccttggttccgctgtcatcttctggtgcttattctggtgtttatccaactgtccgttttgaaattatgttcccaagccatttaacacctctggagaaccaaagcactggctgtcagcggagcgggatgcacgcgcagcggaggggactgggcacgccaaccccacgagggttcctgcggagatgacacggaccttgaggtctgaagccaaaggacgatttgtgtgaagggattttattgttagctttggagccagcaacaagaacacagccctggagttcccggggcaaaaaggataccaagataataattcaggtattacgactaacatgactgcatttgcacccacaggctgtgggacttggggacgtttgagctacatccaaaatacatgagaaaatcacacaagtgaaattggatgagagtgcgaggggtgaagtgatacattatgacctagaattaggggaggcttcctggagcaggtgacatttgcattgggtcttgattgggaagagtggaacccagcagtctagatagggtccagaggtaggaggtacctcgcatcccaggctgcctcagttcatggtgagagtgcagatatttagtgaaacaggaggaaaggacacttggaaatacaccatgaaagaaggattgaagttcttgcagacacatgggagtgtccgaggctttattctccttccaccttgagccagtggaattgcagtgtctt

SEQ ID NO: 39767 - DNA, 1202 bp, Artificial sequence
  DNA replication origin
gctctcgcttcagtcagtcgggccgcgccgcgcctcagctctggtgagtggctcggccgtcccgccggcccttctccgggagggttggcgcggtcagggccgcgggcctgtgaggggaggccggcggacaggtccagtgaaggcgcgggcgggccgggggcggctctttctgggctgggcggggcgcggggggcacgtatcggggcccgcggggggcgccggcggccgggatcctggaagtggccgcgacgccggaaggggcgtcccgtcggcggccgaaccccctgcactgccggagctgttgtttacccgcgcgcgccgtactttacccggggcgggcgggggctgggggccgcggggtccctgccccacccccctccctgccctcgggcgccagcccggcccctcgcccgcggcccgcccgggctgtgacacatcagcaccgccctcgcggctggggccccgtattgtcctccgccgcctcccaccgcatgcccagcctcgcgtctactcagcccggtggctgtcgcgcgtggaatcgcgtaagaaaagccgagtttgtggctggggagagaaggccaccgtgctgagctggatttagcgaagactggttttggggaccggagagcccaggactccctttgttggagttttgcccacgcgttgtaattaagcctcgcacaatatggtgagagtgggcgttgattctggagacaccagctttgtgctcgtgtaatgtaacacgagtgccgttgctttctcattcttacacggcagtttcatgtcattgagtagaattgtgcggaatgcttttatggagtgaggcttctgcgttaaacttgtgctgattccaggtaaagtgtagtagtaattgtgaaagaacgtgtatgaggaaaacgagctacaatgtcatgcttggaggaacaaagaatgttttgtaggatgctttgctttttggagaattgtgtaggggtagggactgttacccatggatgatgctatgggaatttgatcatgtatttgaacaccctttacatcagagggtctgcattgaatgcagttcagaaggataaagggtggaaatcccagatgtgttagtggcagagcacttgagcgcttcacatagtcaagcagagaaatgggaagaggtcggcttgcttcttcctggtctttgggtagtggtgcaagggctgggctgggct

SEQ ID NO: 39768 - DNA, 1376 bp, Artificial sequence
  DNA replication origin
gagagctaggtgaagggcaaagggttaaggaggccttttttttttttatttgggggcttggggttttcttttaagcaggatttataaaggctggctgttgattcctttgagagaaaaaaggagatccaagttttctctggcactacacgagacagccagggaaacgcagcaacatcctgtcctgggaactgactgaagcagttattaaagtcaatggaggcagcactgagggcgtagcagtgtgtgtgtgtgtgtgaggttgtgtgtgtgacagtgtggagagtgtgagtgtacatgtgaaagagcatatatgtgtgtgaaaaagggtgtatgtgtgagtgtgaaacagtgattgtgagtgtgtgtgagactgcattatgtgattgtgagcatgtgtgtgacagtgtatatatttgtgtgggtgtgtcagactgtgtgtctgatagtgtgtgtaatgagacagtgtgtgtgtgagtatatgtaggagactgcgagtgtgtgtgtgtatgtgtgagcaactgtgtgtaagagtgtgtgtgacggtacgtaaatgagacagtgagagtatgtgagtgcgtaagtgtatgagactgtgtgagggtgttacgtatgtgagcatgtgtgagcgactgtgtaagagtgtgtgtgatagtgtgtatgtgtatgtgagagtgcatgagactgagtttatgtataagtgtgagcatgtgtgagcaactgtgtaagaatgtgtgcatatgtgtatgagactgtgtgagagtgaattgagtgttagtgtgtgtcagtgactatgtgtaagtgtgtgtgctgatatgtatatgtacgagacagggcgtgagagtgtgtgtgagtgtgtatgtgagagagacacagagagaaagaaagggaggagagagaggcagagggaggggagagaaaagagagagaccaacagagacagaaagggagagtctgaatccagtcaacgtgagtcctcccactggcaggcagataaattacctggtggtttcctgtgtctgacggcaactaaaataaggcatacaaaagcatgaactcagctgaagtgagagcattaggggcccgctcctcactggacgatgttacaaagagcccctgaaaaacattccatgttacatcacggccacaaggcaagtggctccaagggtgagtgggctcctgacattgaggacaggactgtcctgcccactggggatgatttagaacctctctctgcctcccacctcaatcataaaagcacccccacccccatgatcctaaatgtcctcaaaagggaagtagcaccccacagaaaatgaaactcctgaaataatccaagggcaaagaggagagtaagaagctggggctgtgccttgaac

SEQ ID NO: 39769 - DNA, 1006 bp, Artificial sequence
  DNA replication origin
cgcgcccctcgccacccggctggggacccgcgtggggcccgcttttgtttacagacctcgccattgggcgagagcagcgcgccgtgcgccccccagccccggcggctgccgcttgccccctcgaaacctggagaagttgttgcgcgctgtcaggtgacgccccctccccccggccgcggggcgggatgctgcaggggaaagatgccgtctcggcgccttcgcgcccagcccccgccgcgcacggcgcctctaggtcccctgcacccgggggcgcccgtgtcccagcctggggtccaggctggcggccctcggggcgccgactcggccacactcacccggttccagtcgtcgcgtctcctggtcttgcccccgggtcagccctggttgactcggagcctgccttttcccgcgcgctggcaggtcttgaaggacgtgcgcgagcccttggggacactgtgcagtctgtgcccgcctcggtgacacccgcgcggccccgcagggcagctgtgccgcatcccgagtcagagccgtccggatcgggttacccatgcacgctgacttggcgcatactttgagttggagcagaggtttagagcctgtgcgctgaggtcaaacaaacccgggttccagtacctgctcggtgtcactcacaagctgggtgatcccggccgagctattctatcttcctgtgtctcagtttgcgcatctgtaaagtggggataaggaataacctctaggggggcggggcttaaacgaccatatagattaacctcaaagcacagtgacagccacgtatgaaatattagagtcctgttgattctgtgttagaggaaatctgtaatagaggatggccccttgtcgctttccttttctgcgttcttcactcccccagccccaatttctttttattataaaaggcatgaaggactgctgttctcagcttcaaacaggacttgttttacttggccttaggtttaattagatttatctaatcgcttgcagccct

SEQ ID NO: 39770 - DNA, 1727 bp, Artificial sequence
  DNA replication origin
ttccttagggaaaaaccctctactcattttcaaatatatgtatttcccctagatggtggcttgtaacaggtaaagaaatggctctttgtcctgggatgaaaagcttctcaagggaattattctccattccaagctgttggctgaaacgaggctggttttggaaggggtgtctttggaaaatctctcaaacttgactcaaaaacctccctgtaatactgatcatggaacctggtggacgcatccgttcaagagctaccatgctacccattcttctcaaactgatgttttagaagcacttcaaatccttaaagctcttgcctataattatagctcctctataattcatggattccatgttttttcagtgccccaaatgtgccaaacactgtgctaggactgggatccagcagggaagatagataagattccggcttccatggaaggctgcagtgcaacaggcaacttcagccccgtgtcatacaggcctgtgaggggagcacagggggtggaagcactggaagtggaaatgtggcatctaaccttgacagggtacaggaggcttcccggggtctgtaagagcagtagttcagcaatgcctactgcatggatgccttggcggccaagctgggatctgaagaagggtaggaattagtgaagtgaagggaggggctgggggttgacgtgttctggggaaagaaaagagacccagagttgggagcgcaaaatgagatttttctgcttagaaggatcattctgcaaagtggagaacagatttcagggggcaaggcctgggacagaaggacgatgggagccctttactgaggtccaggtgagacaggatgggaggaatgggtttgggaggttaacaaaaatggatgggagagggttaagaagaaggaggaatcagggatgactttcaattttccggtttaggtttatcttccacagcgtgggcaattctttttgttttcaacaagatcaccccgggagcgcagaccttcccagctcccggggcgaacacgtgtgtatggaatcaaggtgtaaggaacatacatcccagcctttgttgtaaatggggaagtctagagctcttcaggagaggaggaagctccggcctcgtgtagggaaaggtttcgctcgaggctgtaccgccagcgtctccgtttccgcgttctccacaaccttgcgagaggtaaactgcaactgtagtttccggattttacagaggagcccaggaggtctgcgtgaaccctgcccgagtcacttactctgcccagcaggtaagcgtaaggcccaaaccccacgctgttattccaagttcgcttgctgggcacggtaagtgaaccctgggagtcctggactctggtgaaggccaccatgccctacctggaggctgctcagggtctaacatcctctagcatccacgggaagggattgcgttaggatttttttctctcgtaaaaaagttcctgtctccccctagagccaggcacacgcctcccgcgccagaccacttgtcccaggcacaacattttttgactcttcgcctcccccgtttcgatcccccttcctctccgccttaggtggcaggaaaatcctttacctccgaccaatcccaccgatgccgagccgcgcgcgcgcgccaactagagctccgtctgtgcacgccattggccacctccacctatgcgagatgacaggcagcttcgcggacctatcgccgaggg

SEQ ID NO: 39771 - DNA, 1120 bp, Artificial sequence
  DNA replication origin
gcgcgaggtctatgtgaccggcgggcccggagcagccgccgccgcagcgcgaacatggacgccgtcaacgccttcaaccaggaggtaaggggtgtttggggcaggggggtgccgggcctgctgcgggagccggggctcgtttctcccgccgccggaggtttaaagctttggtccgggtggggacgcttcctgccccggttccggggcggcggggcctgcgcggagcggggcctgtggcccgggagaggtcgcggcgaccacgggaactgaccccgcacccctccccccactgcccacccccggaccgcgacctcgggcttctcccctcgcccccttgcggcctcccatagcccaagtctgtgcctgttcctctaacttggccctttttcgggtctgggcgccctcgctctctgctccgcgagccccgttgtcgggttcgcagtgccgggagcccgcaaagggctaagaaagaagcgcgggcgggcgtgtggggttgggggcgggggagcgggagcatctgccggtcgtggggctggcggagaggtggcttcagctctcctgttgctcaggccgcggcgcgtcgacggctggactctgatcccgggtctgggaggagttgaagagggtgttcatcccccttctccgggattcacgcacttgggaaatagggctaataaacggagagggggtggctcgttataatttaaagtcgtgaacataaccctcttataggctctatggccccaacgtgacgcctaaaaagttgaatgggagagaagagtattcgctccgccttagtccgctagaaagctggcgttgtcctccagttccctaccctcgcaccccctcccgaggtagttaatcctcggctcccttctacgaggacatttacatgtgaaaacctctccaaactgggaacaaagctgcctgcggccttaaagttctctagttgtttctctgatcattccaggtgttgcttttggagtgtagagtccatacatcctatttgtcagaatcgatttgggaggaggagacttgaccattgatgatttaaaatgcagttacagaatgggaactattgtcatgggttgagttgtattgtcttccctttccaaatacc

SEQ ID NO: 39772 - DNA, 997 bp, Artificial sequence
  DNA replication origin
ccgcgccctcacgcactggctcacactggcccggccggcgagcgggcgggcctctctctccctctctccagcgggatggcggcagcggcccgagtccacgccgcgcggggcaccctgggacggctcaggcctcccggcgcttcctgtgcccggcgttcgccccgccccgtcgcgctggccccgccccctccccgcctcgtcccgccctgcgccgccctgcaccgccccgcgtgcagggctgctggcgcgtgacgccgggacgctgggcgctttcccgccggcggcggcggcggccgcggccgcgggccggggagacggccttgcagagcgcgggatcccagggctgcgagggtgacccagagcaagccctggcgcacgcgcgctccgctcgacgcggtgctcccggggtgcgtctctgcgaaacgctcggccctaaccggccctgcacccggcgggggcggcgggcactgagccgctggctctcggctgccgcgaacaaagggcgcaggatttaacctcggctctctgggcgtgcctttgcaggccctcgtgcgctctgctggggaaaagaaaaaaagcttctgccaatgccagtgcagctgtgtgtccgctgtagttgtgcaggttaattctgcgcgagcgaaaacaccgagaaagacgttcaggcactggatatccacgcaggccttaaggaacccctgtgcagccttgtgccacgagaggagtggattcactaactttcacgctgattcctcaaaccaagttgtttcatttttggccaaaactctttatgttgatcactttccttgagtacctactgtctgcctagtgttggagacatggaaataaacgataattgttttgcctgaaaacagcacagtttagtggagaggacagacaactgagcagatacttaccaaagcatgcttagtgttagggcacaggccctgggaaacgagaaagatgcgcctccgacaggaagtccaggctacatctg

SEQ ID NO: 39773 - DNA, 1369 bp, Artificial sequence
  DNA replication origin
aaaagcttctgccaatgccagtgcagctgtgtgtccgctgtagttgtgcaggttaattctgcgcgagcgaaaacaccgagaaagacgttcaggcactggatatccacgcaggccttaaggaacccctgtgcagccttgtgccacgagaggagtggattcactaactttcacgctgattcctcaaaccaagttgtttcatttttggccaaaactctttatgttgatcactttccttgagtacctactgtctgcctagtgttggagacatggaaataaacgataattgttttgcctgaaaacagcacagtttagtggagaggacagacaactgagcagatacttaccaaagcatgcttagtgttagggcacaggccctgggaaacgagaaagatgcgcctccgacaggaagtccaggctacatctggagggaggagaggcctgcagagcctgatgaggactgccaccatcacctcccccgaaggaggaccagctggagctgaggagcaaggtggactgagagaggagagtgagaccataaagaggctttgctcttccagagtttggattttgcccccataaggcagaggggagcccttgaaaggggaaggtggagtgatggatgcagtgttctctcagaaggatggtgcaaagtagtaagaggagacagggaaagaatgaccccagccccctgggaaaatgagggctgaaggtggtggcgatagagaaggaagaacagatgtttaggaagtggagtggaagggctgaggcagagtaactgtgaggttaataaagggggtgtcaaggaggatgcccacagcctgacttgatgaatgacctgggtggtgggtttatgagtcaacgtaggggatttatggggaagaaggcgtgggtttgagggaagacagaatgatggttaacacttgtcgcttaccatgtgccaacgtctgctgacatgctattctgtactctccgtaacaggcttctgggtgaggtgtccattagtaatgccctcattttataattcagggagtgagttaattaatgtgcccaaggtcacacagctggatcatttccctttggtgcctgtggagtttgagctgcgcctgggacaagtaagtgaggatgtctaggaggcagttgggtaaacacttgcagagtcaggagcgatggctgagatgatagaaatctgggagtcattagtgcacagctagtggtggaaggagctgaaatagatagggggaaaaagcccaggaacacgggtatgtaagggataagttggaggcaagaagaggtgaagagagagctctgaagtgatcagctctgtctggtgcttggagtagaagtccagcaagataagaattggaaagtg

SEQ ID NO: 39774 - DNA, 1331 bp, Artificial sequence
  DNA replication origin
  misc_feature (963)..(972): n is a, c, g, or t
  misc_feature (1297)..(1316): n is a, c, g, or t
cacacaagactgaatttaccgaaggaaaggggaaaataaagccgctgccccaagaccttctgaagtaatggagaaaagaagctttgacgatgatggtggtagtggtggtgatgatggtaatgatgatgatggtggtggtggtggtggtggtagtggggggtgatgatagtggttagtacaatttggatttgtgtcccaaccgaaatctcatcttgaattgtagttcccataatccccatatgtcgtgggagggacctggtgggaggtaattgaatcatgggggcagtcacccccatgctgctgttctcgtgataatgagtgaattttcacgagatctgatggttttataaggggcttttccccctttgctcggcaattcttcctgccaccatgtgaagaaggatgtgtttgcttcccctccaccatgattgtaagtttcctgaggcctccccagccatgctgtactatgaatcgattaaacctctttcctttgtaaattgcccagtctcgggtatgtcttaattagcagcatgagaatggactaatacagtggtggtagtggtggtggtagtggtggtggtggtggtggtggtagttggtgggtgataatggtggtggcagggatggtgatgatgatggtggtggtgatgatggtggtggtggtggtgatggtagtagtcagtgatgatgatggtggtggtggtgatggtgatggtggtggtggtggtggtgatggtgatggtggtggtgatggtggtgatggtggtggtggtgatgacagtggtggtggtgatggtgatgatggtggtggtgatggtggtggtggtggtggtggtgatggtggtgatggtggtggtggtggtggtgatgatgatggcggtggtggtgatggtggtgatggtggtggtggtgatggtggtggtgatggtggtggtgatggtggtggtgatggtggtggtgatnnnnnnnnnngtgtggtgttgttgttgtggtggtggtggtggtggtggtggtggtggtgttggtggtggtggtggtggtggtggtggtggtggtggtggtggtggtggtggtggtggtggtggtggtggtggtggtggtggtggtggtggtggtggtggtggtggtggtggtggtggtggtggtggtggttgtggtggtggtggtggtggtggtggtggtggtggtggtggtggtggtggtggtggtggtggtggtggtggtggtggtggtggtggtgatggtggtggtggtggtggtggtggtggtggtggtggtggtggtggtggtggtggtnnnnnnnnnnnnnnnnnnnngttgttgttgttgtt

SEQ ID NO: 39775 - DNA, 1608 bp, Artificial sequence
  DNA replication origin
gcctccgcctcgccgccgccgtctggcccgcacgggcttgggtcgggctcccgcgatcgctcctagccgtgcgctgggcggccgctcccgccggagagaagcgcgcggcgggctgccggcgccctctggaaggcagcagaagaaagccccattcagtttgaatttgcagaaatttaatccgctcgcgggcggcgggaacagatgcgagctccactccgcagcccgtgcactttcaaatccctagtagcccctccttccccgcgcgccacagtcaaactcgaccctcgctggagaggggagggcccggggaggggagcggcggagtggacggagaagccacctgagcgccagacagggagaacctgcgcggcctcggaggcgcgcgctcccgggccgcccaggtcgggccgcctccggctgcgcctcttgcccggattctgggcttgggttttctggacctttcggcggtgaaatcccccactggccgcacccacccggggcggggggaagggggaaggctctcgaactccgtggactgtgagtcgggttgcgtgcccggccctgagtccgccacacagtagggccccctggaccgggggtggaaggatagatggatggctggaagaaagggtggggaggcggccaggcgtctgcccgggctcgcacgcagcctggttggctgtgttggaggaggcgcagccacagcagtaatagtagcagcagcaatgtaggaaccagggcgtttgctgcctctgcttgtagcttacaccttctttgccttccattgaaatgatgcctgtgattgcaggaggtggaccggcgctcgcctctcttcgatgcttttgttctgcaagcgctgtgactgtgctcatcgcataaacaattgcaactgccctgacgacactggaccctctcccaggatccccaacgtcttctcaaaccgaaaatgaagaatcttgtgagggagaaggaggagggtaggtaggaggaggcatttacaaaatgctacctgttgaggtgcccgcatttgatggaaacttcaccccgatcatgcaacatcagagctgaaaggaaggatttggtcctaacaaagttcctttcattgtttattcctgagtaaacaagtatgacatcgacccatagcaatgctttgagattgggagtggggggtgggggaacaacagctgtcatcaatccagtgtctgggggtctcgctgacccatctgaagagggacgcagagaaatgcctgctttcaatacatctaattttaaatacgctactatattcatccacctacctgttacaagtcaccagcctcagttattatgacggaacatactgcgttttctgttgttctgtctcattgttcccgtttaccaatattaaagatacagcttaaaatgtttttcttgctgtgctgaagggacttctttgctcccaccggccttgactatttcagtaacgttcattcaatccttttaatgtctctaattcagtaatcaaatcttaacaggacagttgcatgggaggggaatggtaactagcgtggtgccagcagaatagatgtccagcaactgtctaaagaatgaggaatatggagctcactt

SEQ ID NO: 39776 - DNA, 1194 bp, Artificial sequence
  DNA replication origin
cctgggtgagcggcgtgccccgcgagcggctccgcgacttccagcaccacaagcgcgtgggcaactacctcatcggcagcaggaagctgggcgagggctcctttgccaaggtgcgcgaggggctgcacgtgctgaccggggagaaggtgagtctcccgggcgccgtggggctggggcacaggggcgggagtcggcggccaggaccccgcggggagcactgcactgggagtcccagtgtgcagtcccgggccaagcgccttccccctccgcccggctttcctgttgggttaaaacgcgcgctcagcatctcgcagcctttcccgaaggcggcctgcggtccgctgcccgggggttgggggcttgggaggggacggccttgccccgggaagcgtcccgcgcggccgttctgctcgtggaagggcgccgcctggcgacactagcgcggggggcgggatggggcccctctgcccttcaggccggcaggggcggcggatccgtggcgaggcgggaaccagggctagaggaggtgggctcttatgtcggggggcggggggggcaggaaagctaacagccagcctctggggggagcttagagtctgatccccgtcctgggctctcggaggaggtgggagaaggctgagatcctgcattccttcccacctgtgggctccggcagctagggaatgttttttggcagctagggaatttttcgtgctcagaggagggtttttgcctccgccctccacttgtccatccctcaacctgtgctcctctctatccactcaaccctcccacccctgccccctcatcacccaccattctcatccccgccattctcatccccttctctccgttcccccagctcctctgtgccctccagcctcagggtgggagctgcagtgaagaccctgctactggcaggaacagaactacagatacctccccccagagactgggagatgccttcttatctttctagaagaggggaaaggaaaggggacctccgcgagaccaaaaggggcacctctccagccttgttggaagttagatggttgtgaacccttgccaggcgaggggcaggtaagatggaaggtgtaacttagagctgtgagaagaaacccaagagcttggtgactcgcttttgaggccgggtcaccccaggctggagctgcccgagctcagagccaatccagg

SEQ ID NO: 39777 - DNA, 829 bp, Artificial sequence
  DNA replication origin
ggtgctgggaggtcagacaccattcctactttcatggaaagtacagtggagggtatcatagcagctaagcgtgtgtgtgatgggtgtgacagctggagaggcccggagtgaccccagccagtctggatggggaagcaaactgtaacctgaggccagtggcgggtgggaattggggttgacctggccaagagtgtgtgggagggaattccaggctgggctgggtgggagtgggagacaggaggcagagagattagcagggaggcccaactctgcccgagggatgatggtggggctgcagcaggggagtacaggaaggaaggggaaggggagggaaattgtccaaggtggaggtgacagactcttggtgatgaatgaggtgtgggaataggggcagggtggctggaggaggatgttacagtagggccacctgtggatggttactgtaggctgagctgggagccccagagaggagttggggccgggggaggtgacaggctcggaggcccacagattatccaggtggagatggccagaggcacgtcagagctcaggaagaggtgtgagcaggacaggcattggcactcatgggcagatggacagtcatgagcgtgctggaagtggaggggtggacgcgtgcctccccagcagaggaaggcctgggatagaacctcagggaggctactgggggagaagcaggaggtgtgggacctgggagggcaagcagggtgtgagaggtcagcagggagagtagcctccgggtgccagggaccctggtgaggtagtcacagggagtagtgggagtggcagtccggggcaggggctgtctggg

SEQ ID NO: 39778 - DNA, 1160 bp, Artificial sequence
  DNA replication origin
gcttaaaacaacagaaagtgattccctcacagtctggaggctggaagtccaaaatcagtctcattggagatcaaggtgtcagtagggccacgcttcctccagagacctaaggggagacttggactttgcttcttctcccagcccctggtggctgccatgggcatctcctgggcttgtggccatgttattctcttgtctccgtcttcactttgctttcttctctgcttgtccatctgatcccctccgtcttttaaagacatttttgatggcatttaggactcacccagttaatccaggacagcctccccatctgaagaccattaacttcatcatgtctgcagagtcccatccccctaaagatgacattttcaggttccagggattaggatgtgggcctatctttgggaggccatttttcgacttaccacactgggcctgcttcacggaaggccttggtacgacggcccaaggcctgggctggactgagtggtatgaggttgaggggctggactgagcggtatgaggaggaggggctggactgagcggtatgaggaggaggggctggactgagcggtatgaggaggaggggctggactgagcggtatgaggatgaggggctggactgagcggtatgaggaggaggggctggactgagcggtatgaggatgaggggctggactgagcggtatgaggaggaggggctggactgagcggtatgaggttgaggggctggactgagcggtatgaggaggaggggctggaatgagtggtatgaggatgaggggctggatggggtttccagggggtatttccccagcaccatagatcacctcattgccttgtcctttcaccttcaggaaagggaggaggatgggctagagaaagagcaagaagtgagagagtggggagaaatgcttggaaatactgcatttgcacagaagttggaaggtacaggaagaactgcctaaagaaaagcctagcatgcacccttaagcctggcatgtgggaaccaacaccaattgttaggatgactgtaatcgtacggctgtgataatgaggtctagattcatggaaagagccacctgggctgtcctttctgttcagagtggtctgcagtgtagacacttgctaaccaattgtggagcttcatagggtcctat

SEQ ID NO: 39779 - DNA, 1217 bp, Artificial sequence
  DNA replication origin
atgagcagcggcggttttttttcccatggcgctctggggcgcgggcgatttgtaggtaatggcaggcgttcggtcactgaggtgtagcagaggatgcgctggcggctgtgagtgcggcgacaagggcaaatgcagcgactcctcgctgttgggcaagagactctccgaagactcgagccgccaccagctgttgcagaagtgggcgagcatgtggagctccatgagcgaagacgcgtcggtggccgacatggagagggcgcagctggaggaggaggcggcggctgcggaggagaggccgctggtgttcctgtgctccggctgccggcggccgctgggcgactcgctgagctgggtggccagccaggaggacaccaactgcatcctgcttcgctgtcagttgggtcgagccgggcagggggggcgtggggtcgccttcttccaggggtgccgcgcgtgggcggcccgggaggaggcgggggctccttggggctgcccagggactttaagagcaaaaagtctgagagtgtgagctgtggcaggaaaaggggaggagggtcacccctccactttggctctcgggcggtgggttcttttctggggtccccgatcccagaagagcagtggttgaatcagcatcatcgtgagcattactcagaaacaaagggcgacaaagaataacacttttaaagaccctaaaaaaagagaaacaaatggtcaactagactgtaagcacttgaggtgcagccagtactattactccccatagaaattagcaggctgttggtgtatcagcggatgcctctacagcctccagtgatagagccgcagagttgacggaacacagtgctatagggaagaaagggaaggaaacttgcaataaaagcaccaacaaccccatgaaaactggcgaggaaggaggatgtagcaaaagagttcagaagaaggcaggaattagtttctaatcctggttctagcagttacctcttacctctgttgttccactgttccctcattttgatgtttttgcagtatttagggataaagtggttcacatattttttatgaattggtgtaagaatggctgttgtttttggattgtgatttttcaagatgaagttttttctgtctttgaatgccgtaaatgttccgatggcagtaattcaccaccggcttatcgacgtttctggaacgttttccttggtgtaatactgggaata

SEQ ID NO: 39780 - DNA, 1051 bp, Artificial sequence
  DNA replication origin
gactgagccccggcgccgtgcccaagctctcgcagccaggacggcgacgagctggaggtctcaaaaccggtcagatggctccggagccgggatctttagctccagctcggcttcctttgggtgctggttgtccgcagcgctgggggatctgacactgcaccggcgcaaacagccgccgagcgctaataattgggctttgttttaaagtgggccacagcatctttctgaacctctagactgtgcgcggggtgacccacgttcggacgcccagccagtggcctaggagtggcctgcgtagccccaactcaagggtatcgaggacaagtgcgcgaggggctccgtggctgcttgccgggtgcgggtacctggcgcccagcgacccaaaccctatggatcgcgcggggccggcggaagggaggagggcgggcgctaggcacacagtgttcccgaacccggcgggagggcctgccaagttcgcggcgggcgtgacgcggaaacgtagataatgaggcccagggcggggccggacgcactgccccgcgggctccagagctgcgaacgccccagagtgtgcagggaggcctgcagaaagaaaatgcggctgagggtccccgtgggacccactcagaggtgggccgtaaagatcccggaagggtggatggcattagataccacctagtactccagcaagggctgggtcaccgaattgggatctcggcctcttcttccagtctggggaaaagtgtgttaaatgctaaacatcagtgtttatcgagtgaggcccagcctgtctggcataatgatttttaaaatctacattcaaatattaaataaaaactcaacctccccaataacatttgaacataaatattagtgtgcgctctctaggttagggaaactgaagctgggagtgtgggtaaggatgcccagcacttaggagccacagggtaagtaatgtttgtccaaaactcgggtccctcctgtactttccattctgtctgttcattcatccagtttagatatgaattggtaccaacgtgtgccaggttct

SEQ ID NO: 39781 - DNA, 1454 bp, Artificial sequence
  DNA replication origin
cctacggcccccctcgcttcctccggcacggcggcaacggagatttcctctcggggaaactacgcggatccttttcggggatcctcgccccgccccagttctccgccccctcccctttgctggggcgcctgggctggcccgcgcaggggaggaggctctggcagcctgggcagggaggcggcggggggccgcggagccgctggccatcgattctccccgccatgtgacgccgtccttagccctgcgacccccagcgcgtcccgggcctgcgcctccgccccgccgcgcagcgcacgatgcttctgccgggacgcgcacgccaaccgccgacgccccagcccgtgcagcatcccggcctccgccggcaggtagagccgccggggcagctcctgcgcctcttctactgcactgtcctggtctgctccaaagagatctcagcgctcaccgacttctctggtaagagcgccctccctggctgtgtgcccccggcaccgcggagcgcccaggtgaaccctcgactgggggcagccgcaccagtggacacggcggggtaggattaaagttgaggcgtgctcacagacacttgtctggtgtgagcccttggcatatagatggctgcgagtgaagtggcgacgggggactgccactcccaagaaggaagggtgtgtaatgtattcagagtttctcgccctgctgttgacctcgtcaatttcctagcattagggacctggtcctgagccacgctcgttctatggaggctccttaaactgagccctgtgccgcgcccagcgctgtaaaatacacgtgttgtggtcggaggcgttgcgccgcgtttgtcacccgcgtagcccgtttgcccatgtaaggagactagcccaggggacacttgacctcgagtccacattggcaggtagaaagggaagcccgcggggactggaggtctggtggaaaggcagtgagggatgaggagatacttagataagagagaggagcctctctgccaaagtgtaccagggtcctccctctccaattccagtttccttcacagaaaataatgacttcctactctcgaataaactaggaggcttttctttttgggaatcgtgatccaggctctcgcagcggatctcagatagttctgagcttacaggtgtgacgccccaaagtgaaagggatttctaggttgacgatagccataggagcacatgcttaagttagcgctgcagttgcttaaggtaacacatgtccttgccgctgaagcacacctggatctccctctggcaaggctggaggccttcagccttccccagcccagcttagggagcagctctgagccccatactcctccttctccagggatcttctgccaagttcaggctttgcacagtcggtccctatcgggtcctcagtgcagagtcttttgcaacataatggtggtaaagggagtcctcctc

SEQ ID NO: 39782 - DNA, 1245 bp, Artificial sequence
  DNA replication origin
tcacgttctgaggtaccgggagttaggacttcagtatatgaatttggggaggacataagttagctcataacagccttcaaaagggtccccagtgaggctcatctcttggaattcgtgcgtttgtgcagcctcctcccaccgtgaaccagagcttgtgtgggggaccaataatgtatggtggcggtgacagcatatggcggaggggacagcgtatggcagaggtgagggtgagtgagagcgtatgggggaggtgagagcgtatggcggaggtgagggcgtacgggggaggggagggcgtacgggggaggggaggggagggcgtacgggggaggtgagggcgtacgggggaggggagggcgtacgggggaggggaggggagggcgtacgggggaggggagggcgtacgggggaggggagggcgtacgggggaggggaggggagggcgtacgggggaggtgagggcgtacgggggaggtgagagcgtatggctccaccagttcttttgcatcactttctctgggggaagccagctgccgtgttgtaaggacacataagagactcatgtggggagaaactcacgtttcccaccaacaatcagcaccaaaccacccacccatgagccagtccccttgcaagtccagccctcaggggactgcagccccagccaccatccgggctgcaacttcctgaaaccccgtgagactgagcaagaactgccagactacactatccctgaattcctgtcccacagtaataaacattttgttttaagccattaaacttggaggtattttactagaaaacgaattcacattttgatatttgaagtgggttgccggggtaatgaaatcctcaaactgtgggggtggctttgggatcaggcagtgagcacgagttggggggaccttgaggggtatgttagagaaaatgtaagggccttgaagagaaacctggtatctgtcatcttgatgtgctaaagccaagtgcgtcttcagggcagagcttcccagctcacctgtgagtggacacagacttgctgggatgtgtcccctcaggccccacctgtccccaggccattgatgccagcattcagtggcatctctctttaccccctttccatatggatgtaactgtctatgtgcttgatgatggggcggttgggaagctctgttcaatagcagagtggggtgtgtggccgacactgacctcctccgtgcctgccctgatgcagttcagttgggacca

SEQ ID NO: 39783 - DNA, 1470 bp, Artificial sequence
  DNA replication origin
aaactactcctccaaattgacaaaaaccatgtgttttatatccagtcttcaatacgcaacgtgtagtaagagctcatttctctgagcatacattcttggagaaatacaaactttcttcggatatcaaattatttactagaaaaaacatttttatgaagggaaaataatatatgtgagtttaaataggagacaggattcaaagtttcatcatttcactaaatgcatctccatctgaattgtccgtgtgatttttgtgatagagaagagaatgaggagcaagcaagagtcgatattcctgttaaaccctggctgtccttctcatccatggtgctgcgtgtggacaacatacacctggggctcacctgagcctgcttgggacgtgtgtcacttggatagttctgcaagcgattcgcatgcaataggcagtaaatgccgacgtcatgaatgaatgaagagaatactacaaagaggaaacagaaggcacttttgtccccatgtgtcattctaactgtgagagtgtgtgtgtgtgtcctgaggtgtgcgagtgtgtgtgtgtgtgtcctgaggtgcgtgagaggttgtatgtttgtcctgaagtgtgtgagagtttatataggtttctgaggtatgtgaggggttgtgtgtgtccctgaggtgtatgaggtgtgtgtgggtcctgaggtgtgtgagtggttgtgtgtgggtccctgaggtgtgtgagaggttgtgtgtgggtcctaaggtgtgtgagtggttgtgtgtgggtcctaaggtgtgtgagaggttgtgtgtgggtcctaaggtgtgtgagtggttgtgtgtgggtcctaaggtgtgtgagaggttgtgtgagtcctgaggtgtgtgagaggattgtgtgtgagtcctgaggtgtgtgaggggttatgtatgggcccctgaggtgtgtgaggggttttatgtgtgtcctgagaagtgtgatgaattgtgtgggtcctgaggtgtgtgagggtttgtgtatgagaccctgaggtgtgtcaacattgtgtgtgagaccctgaggtgtgtgaggggttgtgtgtggattcctgaggtgtgtgagggcttgtgtgtatgagcctgaggtgtgtgggttccttatatgggttcctgaggtgtgtgaggggttgtgtgtgtgtcctgaggtgtgtgaggggttgtgcttgggtcctggggtgtgtgagtgggtgtttgtcctgaggtgtgtgagaggttgtgtgtgtgtcctgaggtgtgtgagagtttgcgtaggttcctgaggtatgtgaggggttgtgtgtgtcctgaggtgtgtgagaggttgtgtgagtccctggggtgtgtgagagtttgtgtaggtttctgaggtgtgtgagagtttgtgtagcttcctgaggtgtgtgagaggttgtgtgagtccctgaggtgcgtgaggggttgtgtgtgtcctgaagtgtgtgagaggttgtgtag

SEQ ID NO: 39784 - DNA, 963 bp, Artificial sequence
  DNA replication origin
cctcctccttctcccgcagccgccgccacagccgccgggagcgtcacttccgctccagcaggcccatctcttccgcattgcgccgcggccgggggcggaagatccgccccgcgcgagggaaggggcggggcatcaggagggagaccacgcccactctgcgccgaccggctgggcctggcacccgcgggcggccccagcctcagtctccagctacctttgcctcctgcggccgcccccaggcagagctgcgatcccaccgccgggggtgcagggagagggaagatctggcctccttggtccttttgcgtgggctcttcagagcgtgagcgccggggagggactccggagaaaagcttggggggctgcgtattgctgctccccaagctgggcgtcaggaccaaccccgccgcccccacgggcctgacgggagaggaggaagggctcgggacggtcggctcgccgagccaaccaggtggcgcctgaagagctgtccatggtgtcgacagcccagcaaacggcaccgagttcctagtctgagtgtctggataggtagcagaagaaaaactaatgcctgctctgggacagttctgttcggtgccttttcttgtgtgttctggagctcacagggttctatcgaagagtgcttaggtgtatacgatggagagtgggacgtcacaaaccaggatctcaaggctgagtccaacaaaacatggccgtagggaggccacgacagctgtggttgtcaccgacggatgaatagcttttgccaaccgtggaatttagtaactaaaggcacctaacccttttatctcatcctcatttttcaacaaatggtgcttcctggctaatatcagcgtgtcccatagatttctgcttccattgaatagacctaataagaaagagaatgaagtcaaagccaacagggcagaaagaaattgaaaacctgaagaacccagcactcaa

SEQ ID NO: 39785 - DNA, 987 bp, Artificial sequence
  DNA replication origin
agtccgggcgcgccttgcagggcgcccgagctctgcagcggcgttgcgggctgaacccatccggcacaaactgcgggccactggcccctcacacctgggagtttgcggcgctggcctgcagcccggggcccacgtggcggaagctttcccgggcgcgcgctgcgcagccccgcggggccggggagacaccgctcgggagtcctccgctcggctgcagaatctttatcagctgcactttaccgcagccctggctaggacgctaggcggtggagcgccctatccaggtgcgccgccgcaccatggatcaccgcgcccggtcccgcagtcccgccatggcctggggaggcccgaagcccggggacagtggccggcccatctccggctccgcggacccccggctcaggcgggagggcaggcgggtccctgcaggcccccagggagcccgggagcctctctctggcgtcattcagtcccggggcaacctgaagcgcggtagatattggagagggggcgtctgttggggggacctggcgtcattactgatggctagcagggaggagggaacgggttgtcacctcggcctcataaggccgtgagtgagtagtccagggcctcttcaggcatttttgaaactggattaactaggggggaaattgtagcactgaagccaccgtgactgtcttttgcgctgtgtggaaactccggtaaaactctttgggcaacagtcttatcaccagctcttcaacgtgtgcagcccttctggtcctgtccctgttctgggccccaggaatgcaaagcaggtccaggcactgtgaagaccctggcggtggaggaagaggcttcccggctgtggaggaagccagacccttacaacacaagacgagaaccagacctgcgtgggggagctctggatgctacaggggctcaaggaggggtggaggggccttcccaggccaacccctgaacggcttggacaagatgctcaga

SEQ ID NO: 39786 - DNA, 1487 bp, Artificial sequence
  DNA replication origin
gtcacctcggcctcataaggccgtgagtgagtagtccagggcctcttcaggcatttttgaaactggattaactaggggggaaattgtagcactgaagccaccgtgactgtcttttgcgctgtgtggaaactccggtaaaactctttgggcaacagtcttatcaccagctcttcaacgtgtgcagcccttctggtcctgtccctgttctgggccccaggaatgcaaagcaggtccaggcactgtgaagaccctggcggtggaggaagaggcttcccggctgtggaggaagccagacccttacaacacaagacgagaaccagacctgcgtgggggagctctggatgctacaggggctcaaggaggggtggaggggccttcccaggccaacccctgaacggcttggacaagatgctcagatggacgggaggaacggcgtgtgggatgggggagctggaggcgggtgggtgggggggggaggatggggaaagcgctggcccacccagtgtgggaggggtagaggaaaagcccgcaggggccaggttgggaccccgtaggccgggttagagggcttggacttgatcctgacaggcgacagggagacatattgctacttattatgtgcacagtggccagatctctaaagaaaacaccatcccccacccccaccccccatatagtaaaccaggtggtccgcccagtgctcccagggaggtgatgggaaatcccactccataccctgcggtgaggggttccatgccctccacgtgtgcaactactccgggcccagggaaacactgggccccatccggtaacccccggcccagtcgggtttcccagttcacattataaccaaacggtcttgccagctagacagacagacacccctgacctgtttaccctgatcctctgctctcaggattaatcacaacttgtcgaagggggtggcttccagtggggtggaccgctctgtcaatgccagcgtgtgtctagcatctcctggggtgggggtgtggggaagggaggtgtaggatgaagccctagaagcctcaggcaattgtgatccggtgggctggatactgaagcccacccctgccttgacctcaattttcagtatcttcatctgtaaaatgggaacaacctgccttcctcctagccctaaaggggctgctgtcaagattggctgagatagctgtttgcaagctgagctcaatgaaagttcattgtgtccccctcagtcctatcccaatatcgtctcactgcaaaggtggggggcagcttaacttcaagggcacttcaaggatagccaggtggctgtcagcccagctttccaggatgggagcaggatcttgacagaagggttgactgggaggggcagttgctggtttgggcttcgttaggttgcatttttgtttgttgtcctttcatttccctggggcagcaccccttcctgcaagctccaggccttcctctggaatgctcctagagcc

SEQ ID NO: 39787 - DNA, 1849 bp, Artificial sequence
  DNA replication origin
tcttgtccttcttggtggacgacgcagccgccgacgacgtagacgacgaggtgctggacgaggatgacttgaagccactgcctcctagcttgtccccaggatgcgcgcccgcagagcccatagcgccgcgcagctcggcgctcagctccggcgggcagtcactcggggtggacgaggacacggtgcccccagtgaaggcgctgccgctgctgcccttactccgggccggcagaaaaaggtcatcgggctctggcgacgacgggcggctggacaccaggctggcgtccgagtccatggccccaggggaagatagtcgtcgcagctttcgcagggtcctccttccctcggacccgaaaacttccaggagaggaggagaaaagagagagaatgagagagagagagagggagagagagagagagtgagtcagtgagagacagaaaagctgctcccgcctgcaccgcagtaccacagcgcggggtcccggcacaggtggcccgtggctcctcgtccccctcgctactatctctggccctccttttagctgcacgcgggtacctataattaagctctctctatctcccctctgctctcatgcaacaggttatttcagggagcgttggtgaccctcggggtgcgggtggcattctagaggcttcgggctttcagttaggtgtgggaaaactgagcccccgggctggaataaacgagtgggaagtgagggcctttctttggggagaatggagatctagatagagaactaatgatttggttcctcaaacggatccaccttatctccatcgacaccacgcagcaaacacacgcacacgcacatgcacccagagccggcgcggggcccagagtccatgtgctgcatctggagaccacggggagctcaccagctgactggggcttgggcagaaagagctgttgtcgctccgacttctcgcttttggtgagggagatgcagcggtgagtgtggggaggacagaagagcaaagtcgctctggagaaatggcccgcagagtagggatccagaccccctgtatcggagcattctgggtcacagccgagttgaggagagtctgtccctgggatctaggctgcggctgctgtggggcggggacacttactctggatgcgatttgaggagctcgctccgaaaagcctcaggggagaacctggcaccgggcgctggtgtcgcgtcgatctataataagcatccgcacctttaggggctcggccggtttttatagcccggtggcagcggcgacggcggcagcggtggcgggggcgggggcggggaacaatgtgcgtgtcctggaggggctgcctcgccaatgagctgggcccgccggggggctgggaagctgatgtcatccgggctaattccgctcaatgaaactcgccaggccgggcacacgcctcctccctgcgcacaaccaatgggcgcccgtggccgggagattcttggggagggactggaggagggacccgaggaggcgagggggaggagaagggcggctcaagggggatggagggagggctgagcgcgcttgggaccaagggagaaagggaacgtggtcaaatttctgtaaaaaatacggccaccacagagtcaggttgggggatgggatggtttggagactctgcagagtctaacaaactaacctgatgccccacgcagccgcaccttttgggatgcgcgcggaaaaccctggcgacccaggatccggggctggggtctcctccctagctcttcctctgtctggtttcccgccgcctgttcccatctcactggtttcatcaacacgtgggcatttggcgccccaaatgtaaacgatgcccagg

SEQ ID NO: 39788 - DNA, 1133 bp, Artificial sequence
  DNA replication origin
ggcctgcggcggcctggcgcactccgcgcccctgcccgccgccaccgcgcacccggcagcagcagcgcacgccgcacatcaccccgcggtgcaccaccccatcctgccgcccgccgccgcagcggctgctgccgccgctgcagccgcggctgtgtccagcgcctctctgcccggatccgggctgccgtcggtcggctccatccgtccaccgcacggcctactcaagtctccgtctgctgccgcggccgccccgctggggggcgggggcggcggcagtggggcgagcgggggcttccagcactggggcggcatgccctgcccctgcagcatgtgccaggtgccgccgccgcaccaccacgtgtcggctatgggcgccggcagcctgccgcgcctcacctccgacgccaagtgagccgactggcgccggcgcgttctggcgacaggggagccaggggccgcggggaagcgaggactggcctgcgctgggctcgggagctctgtcgcgaggaggggcgcaggaccatggactgggggtggggcatggtggggattccagcatctgcgaacccaagcaatgggggcgcccacagagcagtggggagtgaggggatgttctctccgggacctgatcgagcgctgtctggctttaacctgagctggtccagtagacatcgttttatgaaaaggtaccgctgtgtgcattcctcactagaactcatccgacccccgacccccacctccgggaaaagattctaaaaacttctttccctgagagcgtggcctgacttgcagactcggcttgggcagcacttcggggggggagggggtgttatgggagggggacacattggggccttgctcctcttcctcctttcttggcgggtgggagactccgggtagccgcactgcagaagcaacagcccgaccgcgccctccagggtcgtccctggcccaaggccaggggccacaagttagttggaagccggcgttcggtatcagaagcgctgatggtcatatccaatctcaatatctgggtcaatccacaccctcttagaactgtggccgttcctccctgtctctcgttgatttgggagaatatggttttctaataaatctgtggatgttccttcttc

SEQ ID NO: 39789 - DNA, 1216 bp, Artificial sequence
  DNA replication origin
cagggtttgcaaactgaaggcccgctcgcgtgtctgcagggccctcggtgtgctgtaaaggagggtctgaggtccccctggcaggagagcgcgcactcgcagcagccgcgggactggcgcaggtatcatcctggttcctgcaggcctttcagttggcgacccttttcctagtgactgcccgaggtgtggaaggcacaacggggcaggggatgtggcccgggattccggctgcggccctaggccggcaggagcggcagctgtcttggcactaacgacggtccctcgcggggcgtgcgggccgccctaatgaggctccgccgcggctcacctgctccggcccttcctccgcccgcgccgcgcgcccacccgcgcccgctaattgctaaagcctgtgagccccgcccgccgcccagatgggggagtcggggacagatggggtccaggcatggggggaagcactaggagcgccacctaagggggccggggtgggggacagggggtggcagcagaggattcccggggcggcagctgagccagagtctggggactgctggagtgcgggccaggtggcctcttggggtgggccctggattacaacaaccttgccaccttcatttactggctgtgtcccctgagcaagtcacttagcctttctgtgactcagtttccttacttgtaagacgggacaataatagcaccctcctcaaatggttgtagtgagaatggaatgaactgaggctcttaaagctctctgtgccccgccttaccccggctaaacctcagtcaacgctatccgcctcctctcctagcctccacctattaatatcctgagttccctggagattcagcccggccctgactccctcctcccagctttgcctcttcagttcctcgctgcagtcctccacctccaacctcttccacagacaaacagccagtagcaatcactggggccctagaggagagatacggagtaaggatgtagctgtgggtgatccccatctctgccctgcctagaatggcctcctcacttacagggagttggggcttagccctgggatatagcccatgagctgctggctgcctccaaaccagggagtggccatgctcacccatgctgtcccacgtccctctccctagtcaggatgggactgaatacagcaaccactgctgtgaataacctggctttatcctggcttcccttacagttttgcgg

SEQ ID NO: 39790 - DNA, 869 bp, Artificial sequence
  DNA replication origin
gtcccggggaccgcgttcacgcgcgcctgggaaaccgcatagtacatctgggaggcggtgggggcggccgaggacgcccttcaggaacgccctggggtgggccggtcggcaggccgcccctccccgcggacctgcgcgcggggaaacgatggtggggccctggcccgcgccctacccctttaaacccggcttgggaacctgcggggcagcgggtggcggggcgcagccaatggaggcgcgaggccgggcgcagccgcgtgttcattggctgcttgtgccggggccgcgcggaggtgcggctggcaccgctttaggaggttattgtgagcgcctgtgccagccgcgcgggacaggccccctgagcggagtaagggcgccttttcaaggcaagcggggctgttgaaggaggactggtcgcactggtcaggctgcaactcacgtgccttcctccagcaactgtctactcaaaaacaacctccctcatatttttttttaactgtgatcacatattcataacataaaatttaccgtcttatgtttagagtactgttcagtaatgttatatgcattagtgtgcacattaaattgatttaaattaaattcacattgttgtgcaacccatctccagaactcttttcaacttgcaaccctgaagctccacccattaaacaactccccactccccccgacccaagttcctggaattcactcttctgttctgtctctatgaatttgttctactctaggtccctcatataagtagaatcatacagcacttgtcttttagtgactggcttctttcacttagcatattgtcgtcaaggtttatccatgttgtagcatgtatcaaagtttcttccttttcaagg

SEQ ID NO: 39791 - DNA, 969 bp, Artificial sequence
  DNA replication origin
tggtcaacatactgagatcccccatctctacaaaaaattcaaaaattttggtgcacctgtagtcccagcttctcaggaggctgaggtgagaggattgcttgagcccaggattctgaggttgcagtgagctatgattatgccactgcactccagcctgggtaagagaataagactccattggaagggagggagggagggagggagggagggagggagggaggaaggaaggaaggaaggaaggaaagaaggggaagaaaagaaagaaaaagaaagaaagagggagggagggaaagaaggaaggaaggaagggagagagatagagggaaggagggaaagagagagaaagagagagaaagaagaaagaaggaaagaaaggaagagaaagaaaaagaaaaagaaagaaagagaaaaaagaaagaaagaaagagaaagaaaggagggagggtgggagggaaggaaggaaagaaggaaggaaggaagggaaggaaaagatgctgagaaaagggcaaataaattccgcctgggctcagtgagggaaagtttcatagaagggtgacatttgagctgaatcttgaagagtttaaaaaaaaaacacacacacatgaggtgaaggcatggaagaaaacatgtagaaagaaggaaaacccatcattctttccactactgagcacacagcataagccagacgtggtagtaggtgctggagactctgacatacgcaggaaactatgggcgtgatggtattttattgaggaatatgctgtgaatgccatgtggcaatttagcaaatgaggctctgaaaagcagctcgtttataacttggcagttactgacatgtgaatgtcaaatacagacatgcactttgccacatttagtccttcagggttcgctgggaccagcatgcattccacaggaaacaaaaaaagagatccagagggaaaacgtgttgctaatccaagtatttgaata

SEQ ID NO: 39792 - DNA, 614 bp, Artificial sequence
  DNA replication origin
tcatgacatttgtggtcagttctagaaaagagacagtctaagcactttgagaatgcacagggatttatccaggggcctggggaggcttcctggaagaagcagtgttgaaccgatggggaagagtgttggaagagcgatggaagagtgttaggcatcggccatgggagggaagggcaggtggggaggaacctctcaggcagagggaagggcattcattaaggtggggtggtggaaggggaacagagccattgaggaactggcaggaggtcaacgtggccaaagtaaggggaagtgacgctggaaaggaaggctccgggagacgctgcagggctgtcctcagaggcagggctaaggatttgggctgtagtctgagaggaatgggaagccactggggagtttaagccagagtgataggatcagagcagctgttttgaagatgacgtgttgcagtgaggatgggggctctgaaacaggcaggaatgaaagcagggagacccgggaggggctactgcaggagttcaggtggagatgacagtggccaagattagcgtgctggcagtggaggggaagaaaagtggatgggtgttgcagaatttaggagctggattggtagg

SEQ ID NO: 39793 - DNA, 1141 bp, Artificial sequence
  DNA replication origin
gcgagagggaaccggaggggattccgggaaccgctgcagggaggcggcgttttccctccagtcagctggccacgcgctccgctcccgcgaccccgccacgctgcgttacctttgcagctctcgccttgcggctcccgagagatgctagcctcgggccccagccgcgcccggctctgggacccgacgctcgcggtcaggatgcgcctcgcgggcggcctctcggacagaagcggcgggcgggggacaaaagcggcccgtgcggccgggtggtggtccgcgggctgcgctcggggaactgttcggctcgccggcgggattcctacccgccgggaagaagcgtctttagtgcgggtgcgcgcgccgagccccggcctacgaggagcgatacggaagcgcgggcgccgcgccgccgccggcgcgggggcgggggcggagccaggggcggggccggagccaggggcgggtcctgggccgctggcggggctggagcagggccggaggcggaggccgggccgggggctgggcaggagaatagaaaaaaggtccggtcatttacaatcgtctgctgccgattgtcagctcctaaccaatcccgccttcgccgagaaagctccataggggaagaatttgggactgttttgtttactgaagtatccttaggggttagaatagtgcctggcatttagaagacacccaaagatgtgttgactgactgaatgaatgaatgaactaaagagtgaatgggttctctcctggctcccccacttgttaattgtataaacctgcatgatataattctccaactagtaaaacgaggataaaaatacctaccattgagtaaatgttgtaaatatctacaacattatccgttgtagattctcccctcttctccgcgggtctcttctccatactcctacccttccctcgaccccccactgatcaacgtgtttcgggataggcagaaagacagatgttcttcattaatttgtctgcttgttatttatagcctgtcaacttctaaaatagactatgaggccgggagcggtggctcacacctgttatctcagcactttgggaggccaaggcagatggaccatctgaggtcaggacttcaagacccagcctgaccaacatggtgaaa

SEQ ID NO: 39794 - DNA, 1092 bp, Artificial sequence
  DNA replication origin
cctggccaggcatggtggctcgcgcctgtaatcccagctctttgggaggctgaggaaggtgaatcacctgaggtcaggagttcgagaccagcctggccaacatggcgaaaccccatctccaataaaaatacaaaaattagccaggcgtagtggcacacacctgtaattccagctactcgggaggctgagggaggaaaatcgcttgaacccgggaggcggaggtggcagtgaggcaagatcaagccactgcactccagcctgggccacagcaacagagcaaaaccctgtctcaaaaaaaaacaaaaaaacaaaaaaacaaacaaacaaaaaaaaaaacggaagaagaaagaaagaaaagaaaatttgaaacctacatgcaagtagaaaagtagaagactataataaaccaccacccatcacccaactggtaccaagagagatataaatgtgcgagtcatgggcctatagcccgtgtttaatgccagggtttggctgaaatcccccaaaggaacagtgccagggaaggagagaaaaggccttgggcatcacaattagctacatagaaacctgacagagcaggagggtcccaagcagagacagcctgacagggcgggaaaccggaggggtatcccggaaggccagggaagagttcatgagaaaggaaggaggtgaccatggtgttattggaacctaggcagtcaatttagaggacagaaaaggtttcaatggatttaggtttagaagccatggagctggggcgctgggggacagaatccagatttcagggtgctcgggcctgaaccggaaggaggggaggtgcagcgggtgatgggaggcacatctgtagggagggctggcactgagggggcagacttggggtcagggagggctgtcagggcactcggggactggtgggggcctccacttgaactgatagtctccagaagggtcagatgacagccacggtgggatcttgggtcttttggggaagctactttatttagacgcccgccagcagagagctgcaggaggacagggaatcaaaagacgccgggagtctccccctgagtttagggcccagacggtctgtaa

SEQ ID NO: 39795 - DNA, 972 bp, Artificial sequence
  DNA replication origin
gcagccggcctcccagagcgcggagcctcccggaacgtcctggagactggagccccgcgggacgcccaccttcgggggccgcgatccttccggaagggccccgcgagaccccggcccagacccccgggctttccctggagcccccacccctcctgaccccccccaactctcctctcgggtgcttgatcgcacaattcgaggattcgcccctttagtcgaaatgtttgctttaatagcccccaaagtacatattaagctttcaactctcccccgcccccctccccttttttttgagacggagtcaccaggctggagtgcagtggggcgatctcggctcactgcaacctccgcctccagtcaaccccattttgaaaagggttttaaggggaaggagttagaaagggcccagtgaaggaggaggtggggctctgggggtggggggaatggcctccgagcagggggagggagagacagaaacttccagcatttctaaatggcgtggggtttgccctggagccggcggcggtgcacgagtaggaagtcctttagcagctgggcagccgcaggcccgctccccagcccgagcctgcaccatgtcgtttgacgcctgttgggagagggttttaaatctgccctgttcttccaagatgcgtcataaagctagcgcagcaaaggagggacgcggtgcagggagaccaagaatttaaaaacaggtcgtcccgggagcccactggacacgttagcaaaaatgggttttgcaacatagagcttttcttttgctcttcccacattcttgcatttcctctttgtagaactattttgaaattggccacgctcgtgaaaatacgtgatgaaatacctcgcagacaattgaattatgcattggatatttctagatacagagatgtatttatatgttacacgaaaaaagcgggcgataacttggaatcacttcaaaaagtatgcactgat

SEQ ID NO: 39796 - DNA, 1431 bp, Artificial sequence
  DNA replication origin
ttcgccgccgccgccgcggccccgccaggtgagccgggcctgggcctccgcggcgggacgcgggcgcagccgcagcatgtgggggctgggggactcccggatcgtggggtggggggaatctgccgggtgctcagagtgggtgggaatctgcggggtgctcctggtgggtgggatatgcggagtgctcagatcaggtgggaacctgcgggtgccccaggtgggggtcttgcggggtgcccagggctagaggggcccgctgggagcccgcagcggggctgggatgggcggccaggagttccagacaggagctgggcagcagcaggaagacggggggcacccctcctggcgtcctggccgccgggacacccctctccgggagaggacactcggtgcccctccgtgaagccggtaacctcggctgcgccacctcccccacccgcgcgcccgcgccgggaaagccagcgtggccccagtctccgaatttctcggaatgaacaacagcaaattgaatccagggctccggcgggggccgcctttgctggccactggttctgcagcctggcgagactgcgcttagtccccgcctggagtgcctcccgaaggcctggctggaagctagactcagtccctttgtagtagcagcggtggagcagggaccagcgtcttggacgggtgacccagactcaattccgactttggccgagggcatgtttgacactgggtgtgaaatctagacagttcccgcggtcatagagatggggcagcagcattcaggcagggctcagaactgtccgggtcccatcagtgttggggcggaagaggaagagtgtcaactgagccaggcatttatttattttattgttgtttgagacagggtgtcgctctgtcgcccaggctggagtgcagtgggcagcatctcagctactgcagcctccgcctcccgtgctcaagcgatcctcccacgtcagcctcccaagaaggtggtattattggccacgcctggccaatttttgtattttttgtagagaggaggtctcactgtgttgcccaggctgttcttgtactcctgagctccagcaatccacccgccttggcctctgaaagcgctgggattacaggcttgaggcaccgtgcccagctgagccaggcttttaaaaccggttctgtccctacccagagagcttcttacctggcggcctccttaacctctgacaccagctgaccacgcttatgagccaaacataaaaaccaaaagaaacccaggcttggtggctcacgcctgtaatcccagcactttgggaggctgaggcagcatcatgaggtcaggagttcgagaccagcttgaccaacatggtgaaacccccgtctgtgctaaaaatacatagctgggcgtggtagcgcccgcctgtaatcccaactactcaggaggcc

SEQ ID NO: 39797 - DNA, 1006 bp, Artificial sequence
  DNA replication origin
gggctgcccactgcgcatgctccgctcggaaccggcgggggcggaggcggggccgcgtcgggggcgggagctcggcgaggcgccacgtcaggggcgggcccggcgcgcgcgggaagtctctgtagggcggccggctaccctcagccgccgcgcgtcatggccctttcggtgcccggctactcaccgggcttccgaaagccgcccgaggtagtgcggctccgacggaaaagggcccggagccgtggagctgccgcctccccgccccgtgagctgacggagccggcggcccgccgagccgccctggtggcggggctgcctcttcgccctttccctgctgcggggggcagaggcggtggcagcggcggcggcccggccgctgctcggaggaaccccttcgcccgcctggacaaccgaccgcgggtcgccgcggagccccccgacgggccggcccgcgagcagccggaggccccggtcccggtgagtgtcttgtagcctggccgccaaggggctcttgtctttcgtgggttgagccagctgtgaatgggggatggaaagtcctcgcgttcgaggcaaggaaatgggcgcgaagacttcggccgcccgtggccttagggtaccccgccctgggagccgcgattctggcaaggccgggtttgtgggaagagcgctcccctggctaccccgctgcgggctgtgctcacgggacgcgttcccgaggaaagtgagggggccccagagggcagcgaggagccccttggagaggacttagaggtgacttggaaaagagctcgaaaaaccctgagagcccccatcttgcaaggacgctgttcgatggggcaggtgacaagccctgcttcccccgtgatttagggcctcccttctctcacgcactccaaattattctggagatgggggaatgtcgaggattcgtggggtcagaattcactagcatctgtcttacccaaagccttttggatctttcggtttgaaacgccggtccctgttc

SEQ ID NO: 39798 - DNA, 1312 bp, Artificial sequence
  DNA replication origin
ccgggaggccggcgggaggcgaggccgggccgcccctcgccggcggccgagggcagcgaggtcagcccgggaaggagcggccgcccggggtccccgcgagaggagggagcccgctcggcggcggggccgcggcgcccattcatccccacgcccgtcccgcggccgccaccccacggcccaccgcggcccccggcctcccagtgcgggtccgcccgccactccgccgccacccccgaggacgggaaggacaaggcagaggggcagccgctgccgtctctcgggcgcgcggcgaggggctaagggcggccggggagacaagcgccgggcgcgggacggatgccccgggcagccatcgcgcagacccccgcgccgacccccgcccccgctgcagccgcccgtggtccaggccgccgccttgcagccctctcctcacctcatctccgggcgggtccgcgctgccgccccagggacaaatcagtgccgctcacgcgccgctgggagggacgcaggagccgcagccccgcacaccatccccgcccgcctctctgtccgtcccggagcccgctcgggattcttcctcgcgagccgccgtactacggagcaaccaagctacgctccctcccctggcgcctccactcttctctacctccttcgctccctccctcgctccctcgctcccgcctatctcctcatctccctccgctgcctcccccgccccccatccaccatccatctccgcccataagtgggtggggaaaccgccagccaattggaagaaggggcccgcaccttctcaccaccccctaccactggccccgcccaccgtgcgaacccaaagagggtgagccaaagaaatgtaagacaacagagtgacaagccgaatgagccaatcagcaggggctgtgtgggggcaggattagcactctccccctcctccccatgtaggcgtaacaggagatttatggtctgaggttgcctatcgtggtttatggagattttgttgcacgatttcggtgcatctgctcgttgccgtgagagacactagataggatgcacttaattgacttaattattggaggttttcaaggagagaataatgtggaaaggaaaaaggcgaagcacaacccaaaggggttggccgggcctatggttggaatgaggaagggtgtggtcttcggctaaaatttgcataaaacggaacccatccgggcgattccaacttcgcccatttattggtagtccttggggcggggcctcgcctctttctccgcccccgagcggaacatgacgggagatgtagttccgagaccgg

SEQ ID NO: 39799 - DNA, 1176 bp, Artificial sequence
  DNA replication origin
cctcgccgcgcgcccgagagacggcagcggctgcccctctgccttgtccttcccgtcctcgggggtggcggcggagtggcgggcggacccgcactgggaggccgggggccgcggtgggccgtggggtggcggccgcgggacgggcgtggggatgaatgggcgccgcggccccgccgccgagcgggctccctcctctcgcggggaccccgggcggccgctccttcccgggctgacctcgctgccctcggccgccggcgaggggcggcccggcctcgcctcccgccggcctcccggggacccgcgttggcgggagcggcgccgcctctgcctggagccccggctccttcctcggcccctcgctcgcaagcctgcagaatcctgggtcagtgaagggcaggcaatgccgttcggccccagggcgcgccgcggggccgcccctgaaggcatttaaaggggagcgtcttccgcgccctgtgagcgcgtccccgggtccgccgcgtcccttcccttcttacgcaccgacacggttttgtggtgtggacccaagacacaattgcagtcccttgcttgcacgaatgcaatccgaattcccaaaaaaaggaaaccggcgaggaatcggccgcaccttcctgcgcttctgcttgccttgggattagaaaacaacttcggagattacatttcctatgggcaatcttttgttgtgattcagactcaagaaggctttgctttggaagaaatagattagcggcttctctgtggagttggaggctatagagatttttatagcctcttcaatatgaaagtttcctctagaactttgccatcatcagtgctattctgagggcagcagcaacctggaaatttagatacatgcaggctccggccagatgcgtttctttgtgcttgtctgttggcattcttctcttgctgctcctcttgatcaaaacgtacagataataaaggcaaggccaatgaagagggtagataataacagcaaatcccatacaaacaaatgcctctagaaattctcagttctgtcagcggggaggcagttttgctaatcccgtggaacggatgaaaagaaaggcacagagatctcatggattatgtagtggacaggatgtgagggcaggaactggggccaggacccagcaggccagctggtttgcatggtgc

SEQ ID NO: 39800 - DNA, 1047 bp, Artificial sequence
  DNA replication origin
gaaaagttaagaagagatggtataggagtagggtgggcccccaatccagtctgactggtgtccttataaaaaggggaaatgtggacacagacacacacggggagagcaccccgggtgaagatgaaggcagagatctgggcgatgcttctagaagccaaggaacgcccagggtggccagcacccccagcggaagccagggagggcctgggacagcgcctccctcacagcctcagaggaacccgccctgccgccacctccatctgggacacgtggcttccggaactgtgaggcaggacatctctgtaggcgcagcatgcttcatggtgctttgttacggcagctgtggtaaactgtgacagcctgggatttactgaatttgccaggcaaggaactggagctgcgaaccctgggaaatgctggttcaggctgttcctcaggggcctccactccctgaggagctcggaacacaggcttgcagggtgtgaggtgtggggtgtggtgtgtggtgtgtgtgtacatggtgtgaggagggtgtgtgtgatgtgtgtgtggtgtgtgtgtgtggtgtgtgtgtgtgttgtggtgtatgtgggtggtgtggtatagtgtagtgtgaagtgtgtgggtggtgtgtgtgtggtgtggtatgtgtgcgtggtgttgtgtggatgatgtgtggtatgtgtagtgtgtggtgtgggtggtgtggtgtgtgtgtgcggtgtggtgtgtgtggtgtgtcgtgtggtgtgggtggtgtgggtggtgtgttgtggtgtgtgtgtgtggtgttatgtggtgtgtgtgtggtgtgtatgtgtagtgtgatgtgtgggtgtggtgtgacatagtgtaatgtgtgggtagtgtggtatggatgtgtagtgtgtgtgttgtatggtgtggtgtgtgttgtgtgtgtgtggtgtggtttgtgtggtgtgtcatttgtggtgtggtgtgggtggtgtgttgtgtggtgtgtgtggtgtggtgtgtgtgtggtatgtgtgtggtatgtgtggtgtggtgtgtgttggggggcag

SEQ ID NO: 39801 - DNA, 1390 bp, Artificial sequence
  DNA replication origin
agcccgccggccgcggctaggggcggtgctgcagacgcggcccagagcggctcgcggcggccgcacgccccctcgcgaccctgcctgcccctaccccgcctcctgccatgcctgctacctagctctcgaaccggctggaactttccatgccttccttctcctcccgggcggcgggcgagtgagtgcccgccagtgcgcgtgcgctgcggtgcggtctcgtccgtgcgcgtgcccctcgcccgcgactccccggagctagggaccttcgcggcgcaaggcggggtcgcggccggcccgggggctgtgcggccaacggctgctcgcaggggttctggaacattcccgcccggggtcggtaggggggtgcagctctcgcccccagccacaactctcaggtctgacgcggctgaccaggccccctacccggcgaggagcgcgctggcacaggccgtgggccgcggcgcgcgggctcgggtctgactcagtcccttggcactgcgtgaccttgggcctgctgcctgtgccgaaagtggggacccgagtgagttactgcacgttaacctccgaggacggtgcctggtacacacaggcgcgatacgggcatttgtggtgtgcccctgacctgcccccacgtgtttcagcggagggcaggcgaacaccttaactctatctcatttctttaaatgtttcctccgctttcacttaaaggctaggctgagtgcctgggagaccctttagcaactgtctaaggtgggcaggggcatacgttctgcccttgccatccctttacacccacatggttctccgccctccagccaggggctctgcaagtgcagttttctccagcgcccttccttagaggttgagtaccctgcagctgaggcctctgccccttgtttgccccattaaaagctctgtacgtggagtgtttgtcaacttaaagtgctttaacgttaataggtaaagtttagtgaacacttactctgcatcaggccccatgccaaggctggtggatgtgtctcctaaaattctcacaacagccctgaggtgacaaagattctttgcttggccaaactttagtcaggcttctgaatctcatgctaggcccatctgtgcacttccttgtaaaatccagttctagcacagaacccccatcccctcatagcagatcaggttcctcatcttcctctatcccccagtcatgtcttttcaccctggcctgagttctacaagaatcctttagatcggttgagccagaatccctcttcccccgatggttactcttagtgattttacatggccataaatttctacttgccgacgctgcattcagaattggagcccactctctctccccgggtttccctgatccctgtacccatcgcgttgg

SEQ ID NO: 39802 - DNA, 1109 bp, Artificial sequence
  DNA replication origin
gaggtggtcactgatcatggggcgaacaaggggccgaggggccaggaccttggctgggccttacacagggatgctgaggcagcaacatgaatgggggtggagaaagttgtgaactgtttgctaaatattggttggatgaggaaaggtgctaagagaagtccagaaatgtcctagacaagggcagtgaaaatccaagattgaccttagatctagttgagcagctaatttgcaggactgtaatttccagaccacacagagaaaaagtctggaagtgactctatggagccaggaagacaggagcccaacttctggttccaaaagtttccatttgagagggctgcaacagacgcagtatctcttggtcagcctggggcagctgggtctcctcagcatctcctggtgagcttttaaaatgcagattccagggccttacccaggctaattaaatctgaaggtttagggcaagtacctgggcacagggctgctccatggccttggacctggacagtggaactcagatgggccctgtgcttgttttaatgctctgctgctgccatcttgaaaatccttaatgtttgttgaataagaaagcctgcatatttgtcttgtgcttggcttcagaaattaggtagccagccctttctgggcagaagtatctttttaaacatttcctcaggggattctgatgtgaagccagggctgggaatcactaagttaagccaagagtcggagggaacattcgatgagatggctgagatgcaaaggtagagagtttgcgatcatggagcaagaatttggagagcagcatcggaggcaggagggagagggggatggcagattgagtcaggaggaagatgggagagggtatgatgggagaggatggatgggtatggaattcccactctaggtttccacttggttccttggagaaggataagtgctttggcataagagaagtctgcttcagcctgaaaggaagacccagtggtgggtggggtgtggagctggagatcctttgccttgaggtcttctggggagtgcatgtgtacaaaggtgggctggggcgacggataggagagcagggcctttgcagggctgggcatgagtgt

SEQ ID NO: 39803 - DNA, 1023 bp, Artificial sequence
  DNA replication origin
ccacaggcttggtggcttaaaacaacagaaattaagccagatgtagtggctgtggttgcagctactcgggaggctgaggcaggaggaccgcttgagcctaggagcttgaggctacagtgagctctgatcgcaccactgcatgccagcctgggtgatagagtgagaccctgtctcaaaaagaaagagagagaagggagaaaggaggggggctaaggaggagagggaggggagagagagagagaaagaaagaagaaagaaagagagaaggaaggaagggagggagggaagggagggaggaaggaaagaggggagggaggagaggggagagggagggggagggggcaggggagagggagggggcggggggaagggggcaggggagggaaagggaagggaaagaggaagggggacgggaagggaaagaggccaggcacggtggctcagtggctcatgcctgtaatcccagcactttgggagcctgaggtcggaggagcacttgaggtcaggagttggagaccagcctggccaacatggtgaaactccatctctactaaaaatacaaaaatttgctgggcatggtggtgggcgcctgtaattccacctcttgggtggctgaggaaggagaatcacttgaacctgggaggcagaggttgtagtgaaccgagatcacaccatcacattcctgcccgggcaacagagcaagactccatctccaaaaaaacaaaaaaaaagagagagaaagaaaagaaaaaggataggacaggacaggacagagaagacagccaaaggcaagctgttggcagggcagcactctctccagaggctccagggaggacctgtttcttgcctcttccagcttctggtggccaccggcattcctgggcttgtggccacaccactttctcatcctgtgtcaaatctccctctgcctccctcttacaaggacacctgagattgcattcagggcccacctgagtaatctaaaaccatcttcacatctcaaaatccttaacttggtcacat

SEQ ID NO: 39804 - DNA, 915 bp, Artificial sequence
  DNA replication origin
agtgttggagacaattttttccagtgttggatacaatcctgaaattgtgttgtatgaaagtttgcccacttcgctagctattcattttaacaaatatttattgagacttcgctacgggataggtactgtcctaggctctgaggctgcatcagtaaataaaatagcatttctgcctccagggttgacattttttggaagggaaacaagcaataaagaaatatcaaatgtatcagaaagtaatgatgctataggaaaaaataagacttggagggcaggaggagggagtggagatctgggagtggaggggagattgctattttccataagatgatcagggaaggtcttactgatatggtgatattttgagcagagacaatgtagcattggttcattcaggctttgctgtctattgagtgcttactgtgttccagccactggtttaggcccagaggataaagcagggaacatttcaagctccttgctttcatggagcttaggatccagtggttgagggggagatagacaataggaaaaaggcaagtgaacaagatcatttcggatagtgataaatgcgatgaagagactgaaacagggatagagagcaaggggagggggcttggtcagagtggtcaggtcctaacactgtgggggttttgttgaagagctggtgaattggggcagtcctgagggaactaacaagggatgtccaggcctgcagccatgagcaacagctggaagctggagctgggggaggaagtcacgtggctggaaacctaggggaggagctgcctgccaggagctgtagacttgaaggtgtggagttgagatgctaaggcagggtacaggcagggaagaaattctcaggcttctgatttcattggcagaactcaaaggacagctaggaggcaagggagc

SEQ ID NO: 39805 - DNA, 1353 bp, Artificial sequence
  DNA replication origin
ggccgcggcggaggcggcggaggcggccgaggcgcgagcgcggcccggggtgacgctgcggcccttcgcgcccctctcgggggcggccgaggcggacgagggcggcggcgactggagcttcattgactgcgagatggaggaggtggacctgcaggacctgcccagcgccaccatcgcctgtcacctggacccgcgcgtgttcgtggacggcctgtgccgggtgaggaccgcgccgggcgggccgtcggggcggagggcggacacttgttgcccgaggaggcggcgcgggtcgcagcgcccagtcccggccgcgcgcggggcggggaggcagcgacgtcccccgggctgctcggccgcggacccgtcagggctggggcgtggggacggcgccccgagggtcccggtcccctagcacccccggggcgcgcggagctcactgcagagtcccacaggctcgccccggcccccgtgtgcgcccaggctggtgcgactaggggggtgaattcgctccccaaggtggggcagcgccgccgccccctgcgctctcgccatcgccccgcatttactcgctggaggagggggtcacctcattcctagggaggaggaaacagacattgagcggcgacgtgactcagtgttcataaataggacgacgtccctgcattcccaatctgcactattggaagaaaagccaatgtttgggtgaggatccgtggttgctcattagccagcggctggccagttttggtggaattgtgttggggggaaggggaccatctttcagacctttaggatatttagtcaagaaccttgcccccttgtgtgaaggtgtggcttgccgccatcggggacacccagtacatggggagtcgactccttcccccgcctccccccacccccgcaaaatccacacaatttagacactttggagggtgaggggcaggtatgagtaatcaataatggtggtggggaggaagaatttatttcaaatctgcagttattgtgcagaataaaatgtggacaacgtgggcgtcacagaatgaaaccggtctttgagagatgccccattaggagagcagctgtcaaaaaaagcagtgctttcagcgcttggctgtgggtccacaaatgctgtcaatgaactatagttgaaggctgctgccaatacaacaccactgtgaaacagaatggtgtatgtaagtgtcatttatttataatttatatgttcacttactttctgaaaggaattacaatggccgtgtgcttaggtaagcttccaggcatgctttctagagcagcaattgtcaggaactcagggtcttactgattgatcttactctaaaaccttttcctctc

SEQ ID NO: 39806 - DNA, 1230 bp, Artificial sequence
  DNA replication origin
tgctccgcctcctcctgcctctcgggggccgcagagtcctcgggctccctctgagcctccccgcggggctcgccctgcgcgccgcgtcccgggctcgccccctccacctgctgcgcgccgcttgtctcctcccctccttggggcacctcggcaccctccggggctccctcctcggcctcagtctcgccgtgcgcccccctcgtgccccgcgcctcggcctccgggcccctgtctggcccgccgcctcctgcctccttcacagcggcggcgcccctcggcgcctcctctgcgccctcgctcccctccggcccttctgcctccccgcccgcggctcctggctctccgggtctctcagccagaggcgcggggacctccggcggcccctggggacccggggcaaccccctccggctccgcggcctcggccatggccgcagatccctgtccttgatcgggactccttccttgacgctgcttaagggtcggtggcgctgggcaaggggcgtgctacggggccctctgtgctccttgaaggacgccggctccgggatcctgcggcaaaggtttagccggggcactggggccttgcgcaggacccgcagggcaaactccgcttggccccaagcctctgcgccccttctgcccagctgaaactccctggactcttcctccactgctggagcttctccccgattgcgcgtctgcttcccaccgggaccccaatctcgcccgcgggccgcggaggtgcagtgcacggctggagagggctgcttcgctcctgcgcctttggaagtgcccggcccgctgtccgctgtcctggggttgaccagaagtccttggtgccaactccatcccctggggcttgggcggggtttgtcttcccctcctccctcctttgtttgggtagcctaggagcttggccaatgacagcctttctcgtgacccttgtggatgttgatgaaaagattctggttctcctggccgcttgggtgttgttctctagaatggcttcaagttccagagtcacttaaatcaccccctccaaacacacaccccgacacccaaacacctaatccccaccttaccccaggagtgaagcatcaagctcccccggtacccaactgaagatgtccacattgtgcctgatgtccaagagcaagggtgtaaatccctgagagaagaagctggggaggctacgctggccgccttcccatgtctgcagggcccccgg

SEQ ID NO: 39807 - DNA, 2004 bp, Artificial sequence
  DNA replication origin
cgggtccccaggggccgccggaggtccccgcgcctctggctgagagacccggagagccaggagccgcgggcggggaggcagaagggccggaggggagcgagggcgcagaggaggcgccgaggggcgccgccgctgtgaaggaggcaggaggcggcgggccagacaggggcccggaggccgaggcgcggggcacgaggggggcgcacggcgagactgaggccgaggagggagccccggagggtgccgaggtgccccaaggaggggaggagacaagcggcgcgcagcaggtggagggggcgagcccgggacgcggcgcgcagggcgagccccgcggggaggctcagagggagcccgaggactctgcggcccccgagaggcaggaggaggcggagcagaggcctgaggtcccggaaggtagcgcgtccggggaggcgggggacagcgtagacgcggagggcccgctgggggacaacatagaagcggagggcccggcgggcgacagcgtagaggcggagggccgggtgggggacagcgtagacgcggaaggtccggcgggggacagcgtagacgcggagggcccgctgggggacaacatacaagccgagggcccggcgggggacagcgtagacgcggagggccgggtgggggacagcgtagacgcggaaggtccggcgggggacagcgtagacgcggagggccgggtgggggacagcgtagaggcgggggacccggcgggggacggcgtagaagcgggggtcccggcgggggacagcgtagaagccgaaggcccggcgggggacagcatggacgccgagggtccggcaggaagggcgcgccgggtctcgggtgagccgcagcaatcgggggacggcagcctctcgccccaggccgaggcaattgaggtcgcagccggggagagtgcggggcgcagccccggtgagctcgcctgggacgcagcggaggaggcggaggtcccgggggtaaaggggtccgaagaagcggcccccggggacgcaagggcagacgctggcgaggacagggtaggggatgggccacagcaggagccgggggaggacgaagagagacgagagcggagcccggaggggccaagggaggaggaagcagcggggggcgaagaggaatcccccgacagcagcccacatggggaggcctccaggggcgccgcggagcctgaggcccagctcagcaaccacctggccgaggagggccccgccgagggtagcggcgaggccgcgcgcgtgaacggccgccgggaggacggagaggcgtccgagccccgggccctggggcaggagcacgacatcaccctcttcgtcaaggtaaagctcgcttccctcaattcttaggacgacccccttccattcgaggtcttggtcatctcagatcccagagggacgcgcagggaggaacccttggtggtatcctgattgtcatcaggcgcttccatgcgcgggcggtaggcgggacagccgggatttcccggagaagagtttccagggcatttgcgggaggactcaatggtttggaagcaaagactttgggggtgggggcgacggggagtgcgatgggggccaatgaggatgtggggttgtgggttcagcatcccactgtcctttgacctgaacatcctaaccagccctcctagtcaggaggttattaacgaattaactaaaaagttaaaaaaaaaaaaaaaaaaaaagaagaagaagaagaaaagcaacgcaccctattggtgttcaaagggatttctgccaaaggaagctttaatacttgaagccaaaaaacgcagacaggtaggttcaatgtgggaggtgccttccagactcaatctcggagacccagagctggtcaatgttttcaactccaaaaaggtattccattttggtagaatcaacaatgtacgtttaggggggaatggagccttattgacataatgttttttgaacgttttaacattgaatttggaagaatacaagatgccgg

SEQ ID NO: 39808 - DNA, 1280 bp, Artificial sequence
  DNA replication origin
ggaggctgcgcgggcctgacctacagcgagatcctggccgtcgggcgccctcggccccaggacggtggccgggcccagggcccgggatcccggcgggcttgtcgcgaacaggaggcccgcgcgcccggaggcgaaggcggcggcccgcggggcccagccgggccaggcctggcgcctcagtagggcctccacacggcctcctccaggcgcgcggagggcgccatgttggtgggggagttgctgtggctgccctcggcctccaccacgtcgctctggttcgggaggctggggttgagcagcgcggagccggtggaggcgttggtgcagggcggcaggatgcgcggcggcgagcgctcgccgcccaccatggagaactggtaggagccggccgaggcgccgtagtacaggtggtaggagggcgagctggcttggaacgggcctccctgcgcttgcgacgagccggggtagggcggcggcaggtaggtgtggtagcgcgtggccgagcccatggccgacatgccgatgccgatgcccgaggtgaccggcgtcggggagtaggtgaaggcgcctggatagtgcatgcgggggtcggagatggagggcagcgcggggaactggcgcgggtcgctgaacgctgtcaggtcgggtgccgctgcagggcgggcaagagaacggagcggaagtgagtaggaggttgcggaggccacagctcttccctctgccccagggggctacccaggatgataccgcctaggaggatgggaagccacccaggatgctactgctggggaggacggggaccacccgggatgctactcccaagaggacgaggattacccaggatgctatacccagggggacagggaccacccaggatgccacctcctgagatgacgaggatcacccagcatgtcacctcccaagaggatggggactacccatgatgctatgcccaggaggtcggggaccactcaggatgccacctcctgagaggacggagaccacccaggatgacaccacctgggaggatggagaccacccaggatgctaccgcctaggaggacgggggacacccaggatgctactgtccagggagatgggtttctatcagaatttaccgcccaggaagattggaaccacacaggattgctaccacctgggaggatgggggctactgaggatgctgctgcctagggagagggtttctacccagaatctgccacccaaaaagatgaggtcacccaggatgctatgcccaggaggacggggatcaggaggct

SEQ ID NO: 39809 - DNA, 888 bp, Artificial sequence
  DNA replication origin
tatttcttaataataaaaaaacactagatacaaaacccacaaataatctggcaatagcgagaacttgaaacatcccatcttcactttgcttgacgtgtgtgtgtgtgtgtgtctgcgtgtgtgtcttcaagcctaatgggtaggtaaaaaaatagcatagccaaagctaactcttaaaaaattcaagagagctatctatccaatatggatatccatacccagagctcctcgtatcctctgtagcagtgcttttccttgtggggatctggttacaatgcagatctgactcggtgggtctggggtgggtggggcccaagactctgcatttccaacagctcccaggtggtgctgttggttcgaggcctttctctgagcatcaaggggaaaccccagttggtctgggaaggtgtgtgcacatgggggccagttgtgggtggtggcccaggtgcaggagaggcgggcagtgggctccatctggtacttaccctgcatctgactctgaggctgagggttaaaggcagtggagtggttcagggaggcacgagggttgggcgtgggggctgggtggtgtgggctgaccctcatggctgtgcgccgcagctgctccagttcactgagccgctcggaaaaggacaagctcccgggcttggtctgatcatctagtttctgccgatgtcctattgtggggagcagggaggggaggggatggggggagggaaggagggagggaagagatcagaaaaagtattgtggatttcctaaaactggggcttttcttgtctttcccctctctctcccctcaccccaacatagactcgctagagatatgccagctgaatttggggccactgtcctctcagcagaatgggccccctttcaccgcctcgg

SEQ ID NO: 39810 - DNA, 860 bp, Artificial sequence
  DNA replication origin
cctcgccggcctccgcctgtcctcccaccaccctctccgggccagtaccttgaaagcgatgggcagggtcttgttgcagcgccagtgcgtaggcagcacggagcagaggaagttggggctgtcggtgcgcaccagctcgcccgggtggtcggccagcacctccaccatgctgcggtcgccgctcctcagcttgccggccagggcagcgccggcgtccggggcgcccagcggcaacgcctcgctcatcttgcctgggctcagcgcggtggaaggcggcgtgaagcggcggctcgtgctggcatctacggggatacgcatcacaacaagccgattgagttaggaccctgcaaacagctcctaccagacggcgacaggggcgcggatcttcagcaagcagctcccgggagaccaacatacacgttcaggggcctttattactgcggggggtgggggggggcgggggtggttaggggaggagggagactaagttactaacagtccaggaggggaaaacgttctggttctgcggatcggcctctgacccaggatgggctcctagcaaccgattgcttagtgcattaaaaagtggagactatcttccacgaatcttgcttgcagaggttaagttctgtctttggctgttagaaaagttcctgaaggcaaaattctcatacacttcctaaaatatttatgcgaagagtaaaacgatcagcaaacacattatttggaagttccagtagttaatgcctgtcagttttttgcaggtgagttttgtctaaagtcccaacagaacacaattatctcccgtaacaaggccacttttatcatgcaaaactggcttcagtcccgaaaagcaagag

SEQ ID NO: 39811 - DNA, 1244 bp, Artificial sequence
  DNA replication origin
gcggctcgcggggccgggcctctccgggtgcggcgcgccggccgggtcctcctcgggccggcggggcctgctttctttttccaggtctccggaccgtggccactcgcggagccgcacaagcctgcgtgtggctgcggaaaggggtccgcacgcgggcggggccccgggccagcatgcaggcttggatgcggggcgcgggggtggcctccgactccccgcccgggctgcgtacagtagcgcgcggcgcggcggcgggggcgcgcgggccaattccaggagccggcggcggcgagccgcgccctggctgataccggaaaggcctgtgattggccgccggccgcccctatgcaaacgagctgagggaatggaattcctccggccgggcttacagtaaaagcacgttcatttccaggcactctcattcatagagccagcgggcgcgggcgggacgggcgccccgcggccggacccagccagggcaccacgctgcccggccctgcgccgccaggcacttctttccggggctcctagggacgccagaaggaagtcaacctctgctgcttctccttggcctgcgttggaccttcctttttttgttgtttttttttgtttttcccctttcttccttttgaattaactggcttcttggctggatgttttcaacttctttcctggctgcgaacttttccccaattgttttccttttacaacagggggagaaagtgctctgtggtccgaggcgagccgtgaagttgcgtgtgcgtggcagtgtgcgtggcaggatgtgcgtgcgtgtgtaacccgagccgcccgatctgtttcgatctgcgccgcggagccctccctcaaggcccgctccacctgctgcggttacgcggcgctcgtgggtgttcgtgcctcggagcagctaaccggcgggtgctgggcgacggtggaggagtatcgtctcgctgctgcccgagtcagggctgagtcacccagctgatgtagacagtggctgccttccgaagagtgcgtgtttgcatgtgtgtgactctgcggctgctcaactcccaacaaaccagaggaccagccacaaacttaaccaacatccccaaacccgagttcacagatgtgggagagctgtagaaccctgagtgtcatcgactgggccttcttatgattgttgttttaagattagctgaagatctctgaaacgctgaattttctgcactgagcgttttgacagaattcattgagagaac

SEQ ID NO: 39812 - DNA, 2033 bp, Artificial sequence
  DNA replication origin
cccagcctgcaggaagcttcagtccagcatcagcactagaagggcagcagtttagaaagtgaaagactttacccagagcttggaagctggtgccggtggtgggggcgggagggggacgggggaggcagtgggggaggcagcagtgggggaggaggtggggggggaggaggcggggggggaagaggcggggggcaggcgggggggggaggaggcggggggaggcgggggggaggaggcggggggaggcgggggggaggcagggggaggcaggagaaagggggggagggggaggcagggggaggcaggggaaaggggggaggggaggcagggggaagcaggggaaaggggggagggggagacagggggaggcaggggaagggaggagggggaggcagggggggcaggggaaaggggggagggagaggcagggggaggggggagtcgggggggccgggggaaggggtgcggggggggtgggtccgttggtggtatgtgaataactcctcctctcttctcaggcccagtcccaaggcgcagcgtgcgtcagcaagacagcagaagcaggaggagagctggcgggaagacatgcaccccttgaagacccagagagaggccgtctgtctaccgcgtagcagttacatcagactgagacacttcctgtttacaggagactataaaattcctgccccgtgctcatttggggctgacgccattttaggcctcagcccatctgcacccaggcgctcactgaaacagtgtgttgctccacaccgccttgttttgcttgttggcgcgctctcagggttccgaccaatccaagagccttgcagaaagcattaacgtgcttttctctttggcagagtttttctttgctctgatcttggagacatccctctgcctagtggaaacataaggaatacagaaagaatgcaaggagatagaccaacgtgagattctccttcatgcactcaagagaaagatgttgcaggaagagctagtctttcaggctgggctggtgacctgagaaagaatgtccagcttttcttctccacttggcatatcaagagccaggcgtggaagactaaaacaggaaatgtttataaaaactgttcagcggttcgccaacaagaagtggtaaagtagcaaaaatggggatggagatgccaggaggaaagatgccaggggtaaagtgggaaaatgggaacctgaagccaggaggtcaagccaagccaacaggtgttctgtttttcagtgagtatatcctgtctttccccatgtgtcagtttatagaaagagcaacctaacaggctgccccatataccaatccagagcttggacatgtcctagcaaattcgacagcccacaaagcagtctgggctgggggcggtggcacgcctgtaatcacagcactttgggaggctgaggcaggaggatcgtgtgaggcaaggagtttgagatcagtctgggcaacatagcaagaccctatcactacaaaaaaattaaaaattagccaggagtgccagtgcacacgtgtagtcccaactactcaggaggcaaaggtgggagaatcacttgagcccaggagttgaaggttacagtgagctatgatcacactgctgcactccagcttgggcaatagagcaagaccctgtctctaaaactctttaaaaacaaaaggcaaaaacatttcaaaggaaacctcaaagatcagctgtcccaggccacttcattctcccatagcagagaccctgagctgagaggcagtaagccaagtacctccctggccttgtggatcccagcctggggtctgcaggtagcaaaagccagccagggagagatagcagatgtgtccccaagatagtgcctgagcccaaagaacagaccagaagttcaccagttacagacaggagaatcagcatgggggggaagctgtgtaaacacgcaacctcaccacacaccctgcaacattttagggacaaacacaaggggcagcgctttgagcatgtttctctttgggctgttaccaaaagaag

SEQ ID NO: 39813 - DNA, 1995 bp, Artificial sequence
  DNA replication origin
gttttttgtttttttgagatggagtctcactctgttgcctgcgctgaagcgcagtggcatgataccagctcactgcaacctccacctcctgggttcaagtgattctcctgcctaagtctccggagtagctgagattacaggtgcccgccaccacacccagcttattttttgtatttttagtagagacagggtttcaccatgttggccaggatggtctcgatctcctgacctcgtgatctacccgcctcggcctcccaaagtgctgggattacaggcgtgagccaccgtgcctggcccaggtgtttttttttttttttaattttcttatagcctaatgttaaaactacatagaataaaaggatattaaaacaagaaaatagtgaaaggttacaacaggaagatgagaaacaccctctgaaaggtgagagggatgagcacgggagagaaatgtctgctggtgggggcaggtgctggcgtgctgtcagtggaactctagcatgtctgggggacactggcatgtgttgtgtgggggacactggcgtgttgtgcaggggacactggcatgtcgtgtgggggacactggcgtgttctgtgggggcaatggtgtgttgtgtggggacactggcgtgtcgtgtgggggacactggtgtgtacacgggacactggcgtgtcgtgcggggggacactggcattttctgtgggggcaatggcatgttgtgtgggggacactggcgtgttgtgtgggggcaatggcgtgtcgtgtggggacactggcgtgtcgtgcgggggacactggtgtgtacacgggacactggcgtgtcgtgcggggggacactggcatgttctgtgggggcaatggcatgttgtgtgggggacactggcgtgttgtgtgggggacactggcatgtcgtgtgggggacactggcgtgttctgtgggggcaatggcgtgttgtgtggggacactgacgtgttgtgtgggggacactggcgtgtgcacgggacactggcatgtcatgtgggggacactggtgtgttgtgcgggggacactggcatgttctgtgggggcaatggcgtgttgtgtgggggacactggtgtgttgtgtgaggacactggtgtgttgtgtgaggggcactgatacgtgtggtgagtcgctgtcctactgtggggggaatctgatgtgtgtggggagcactgatgtgtgtgggggtcactgtcctactgtgggggtcgctgtcctattgtgggggctgctgatgtgtgggggggttgctgtcctactgtggggggcactgatatgtgtggggaccactgtcctactgtgggggctgctgtgtgtgggggtcgctgtcctattgtgggggctgctgtgtgtgggggtcgctgttctattgtgggggctgctgtgtgtgggggtcgctgttctattgtgggggccgctgatgtgtgtgggggtcgctgttctattgtgggggccgctgatgtgtgtgggggtcgctgtcctattgtgggggccgctgatgtgtgtgggggttgctgtcctgttgtgagggccgctgatgtgtgggggtcgctgtcctgttgtggggcgctaatatgtgggggtcgctgtcctgttgtggggcgctgatgtgaggagtcgctgtcctgttgtggggcgctgatgtgtgtgggggtcgctgatctattgtgggggctgatgtgtgtgggggttgctgtcctattgtaggggccgctgatgtgtgggggtcacgtcctgttgtggggcactgatgtgtgggggtcgctgtcctgttgtgggggctgatgcatggatacattggccgggctggagaaagatgcactgtccctgcgccttccttcctccgttttgttccttttagttcccacaggactttctgtactgtgggagaaagctcttttacaagggatcccacaggtggcattcctgacaaggctgttcaaatatcagcccacaagtcatgggttctgtta

SEQ ID NO: 39814 - DNA, 1136 bp, Artificial sequence
  DNA replication origin
gagcaagactctgtctcaaaaaataaataaataagaataaaaataaaaataggcggccgggctggagggccctgccaggggtgggggtgggggtgggtgcggggagccccgcggcgggggcgggcgcggagtcacgggggtggggtcactcgcggtggctcggggaggccagctgggaggggagggggccgtgggggcggctcggctgaaccagccccggctgggcagcagcggggacgccgggggccggggccagggctttccgggcttaggtgaggccgccgtgggccccatcttccggcggtcgccggagtttgtggtgattgttgctgccgccgccacccccccggctgccatctcctcctcctgggccgccgcctcctcctcttcctcctcctcctgggccgggctgatcccctccccgctgccgcctcctcctgggctgggcccgcggtgtctcgtcccctcgcggagccgctcctgccgccgccgccgccgcctcctcattcatcctcgtgcaccataggcggcacaggcaccaagatgtccaaccgagtggtctgccgagaagccagtcacgccgggagctggtacacagcctcaggaccgcagctgaatgcacagctagaaggttggctttcacaagtacagtctacaaaaagacctgctagagccattattgccccccatgcaggatatacgtactgtgggtcttgtgctgcccatgcttataaacaagtggatccgtctattacccggagaattttcatccttgggccttctcatcatgtgcccctctctcgatgtgcactttccagtgtggatatatataggacacccctgtatgaccttcgtattgaccaaaagatttacggagaactatggaagacaggaatgtttgaacgcatgtctctgcagacagatgaagatgaacgcagtattgaaatgcatttgccttatacagctaaagccatggaaagccataaggatgagtttaccattattcctttactggttggagctctgagtcaaaagaacaggaattcggaacttttcagtaaatatctagcggatcctagtaatctctttgtggtttcttctgatttctgccattggggtcaaaggttccgtcacag

SEQ ID NO: 39815 - DNA, 1980 bp, Artificial sequence
  DNA replication origin
ccagtctccccgctgccctcccggtctccggccccgagctctccgcccccgcactgcagcagagcgcgccgcaggcccgggccgcgcgccggtaagccacctgcaccccgggccgccccacggcgccgcccaagccctctggacccggagaaggacccgcgggccggcggggaggagatgcccggctcctccggcttcgcccagcggctgaggactggacgccggacagggcgcaggcacgacttaccgcggcagtggccctgttggcgggcgcgctcacgtgcggcgcggaggagccctccgggctgggggagagagactgggcagggctgcggcgcggccgggagccagaaccgccgaggaagagccggagaaccagcggcagcggctcttccccaccgcgcgggtcggggcggagcctggaagccgggcctcggcgcttggggcggggctggaaggcggggctggacgcctggaggcgggctcaggggcgggacctggaggtgggccataggcgcgcgggggcggggtttccgcgggcggggcggaactagaagacggggcctgaccgaaggaggcgggatcaagggcggggcctggaagtgggctgtccctacaggggcggggcctcggctggccgggctaggctggaaggcggggcctgactcatgaaggtgggatcaagggcggtgcctggaggcgggccataacaacaggggcggggcctcgacgggctgggctggactgaaaggccaggcttgactcacggagtcggggtcaggggcggggcctggaggtgggccttagacgcgggggcggggcttcggcttgggagcagggcttggggagggccccggcgtactggggcggttcagtcgcctcagccgcggtgtgagggagcgggagtcttccttagcttctccgccatgggtgtcgcttcgtagccgggctgctccgggaaaggcctcgtacaggtgagcggggcggcgttcgcgcctcacctggggacccccgacacaaccgagtggaaggggacattggtcagtgcccgcccaaggtcgtccgcgcgtgtgtcggccctcggaggtgctttggagtcactcacagaaacggagaagcgggggctcctcgaagggtgcgcggcacctggttcaccccatcttttccctctggaccacgtccaagccctccacacacgtttggggcgcagggggcgcggcgggcttgggacccctgctaagttgccccagcccgcacgggcctcaggtttccgaccctgggcgacaggagaggtgagatcatttctacctggacagagcttatcacgtggactgtggctcaggaaggagaccttgacgtcaaccttagaaagcattcatatctccagacaatcaccagcccctgcctgccatcctctcgagcgctgggacctagacggtccagtccgaccgcttcagggtaggacgcacctggagggtgcgcggtaggcagtgctcacctgagcacaggccctgtccccacccagctgtggctccagccaacccgaagtgggccacttgtggatgaaggctgtcatttctgcagtggcctcgctccttttaactcccgagcgtcctttagaaatgttcagaccaggtctggagttcgtgaaggcgaggcagtggtcaatgagcttgggaggtgggggaggtcatgagcacctggaagttgtttagaacactttgtgtatatgcatgtttctaggggaggggtatattatcagcttccaaagtggatctatcacttccctggaaacactaagaatattttaatagcttgggatgctggacctgtggcccagccaggctgctgattctgattttgtctccatttggcatataccaagtgccccagatgtaaatcctctcatggtcaatttgaggaatggtcttaagatagaagcagagagaaacgaaaagattgagccatagttagcaggaa

SEQ ID NO: 39816 - DNA, 1315 bp, Artificial sequence
  DNA replication origin
tggggtaccgcccacgtcgggcgggacctgagggccgctggaggggcggggcgtctatgaggtcccgcccatgcgggggcggggcctgcggcgcgcgggaagcggcgcgcgctgcgcgggaggtgacggtgcctctgactgtccgggtccctccaggtacggcttccctggcccgggcagctccgcggctcttttggtcgcgtcggtccgggccagaggccctcgccgagggcgggcccctgggccccgggatagctccggagcggcgcgcgttggggcggcggggccccgtccacccccggccccgcgcggcctcctcccggcggcctcagtcccagcttcccgggcccagcgcccggtccctgggaaaggcggggttctcctctcgccccgccgccccggtcccctaccccgtttggccccctcttccgggaggctcctcccggggcgggcccctccccgggctctcagggcgcgcccctagcccctactaagcggggacaggccgtgcagacggccggggcccctaggtagcctttacctgggtgtttcgttttgcttttctggatgtagcggcgtatcataaacttgtggatgtcaggacccagcgaagcattttaggtggagctagcaaggtgttattgtcagatggcaacgttaacatcctttcccaatgcagtgtgcattttaaatggctcctggcccctattcagcgctcaataaccctttgctgctgttaacactgttgtttaatccatcaccagcattttgcagctttctcctgtcttgaagaagtagaacggtgcccgagaaacgtttttccccttcgagactcaggaggatgaaagtcatcacttgtgaaatagcctggcacaacaaggagcccgtgtacagcctggacttccagcatgggacggctgggaggatccacagactggcgtctgccggcgtggacaccaatgtcagggtaaactggggcagagatagacatccgggaacactgcttgaagcaatagttttcattcttttacttaaaaccagtgtcggctgggcgcggtggcttacgcctgtaatcccagtgctttgggaggctgaggtgagaggatcgcttgagtccaggagttcgacaccagcctgggcaacagccagacatgaaaaagtagcgggacgtggcagtgtgcagctgtaggcccagctacttgggaagttgaagtgagaggatcgcttgagcctaggagtttgaagcaagcaacgatcactccactgcactccagcctgggtgacagagccagacccttctcttaagtaaatgaat

SEQ ID NO: 39817 - DNA, 833 bp, Artificial sequence
  DNA replication origin
gtctccgctcgctacaacctccacctcccagccgcctgccttggcctcccaaagtgctgagattgcagcctctgcccggccgccaccccgtctaggaagtgagtagcgtctctgcccggccgcccatcgtctgagatgtggggagcgcctctgccccgccgccctgtctgggaggtgaggagcgtctctgcccggccgccccgtctgagaagtgaggagcccctccgcccggcagccgccccgtctgggaagagaggagcccctccgcccagcagccgccccgtctgggaagagaggagcatctctgcccggcagctgccccgtccaggaggtggggggcagcccccgcccggccagctgccccgtccgggaggtggggggcgcctctgcccggccgccctgtctgggaagtgaggagcccctctacccggccgccaccccgtctgggaggtgtacccaacagctcactgagaacgggccatgatgacgatggcggttttgtcgaatagaaaaaggggaaatgtggggaaaagatagagaaatcagattgttgctgtgtctgtgtagaaagaggtagacataggagactccattttgttctgtactaagaaaaattcttctgccttgggatgctgctaatctataaccttacccccaaccccctgctctctgaaacatgtgctgtgtcaactcagggttaaatggattaaggacggtacaagatgtgctttgttaaacagatgcttgaaggcagcatgctccttcagagtcatcaccactccctaatctcaagtacccagggacacaaacactgcggaaggccactgggtcct

SEQ ID NO: 39818 - DNA, 1023 bp, Artificial sequence
  DNA replication origin
cacatcttgtaccgtccttaatccatttaaccctgagttgacacagcacatgtttcagagagcagggggttgggggtaaggttatagattagcagcatcccaaggcagaagaatttttcttagtacagaacaaaatggagtctcctatgtctacctctttctacacagacacagcaacaatctgatttctctatcttttccccacatttcccctttttctattcgacaaaaccgccatcgtcatcatggcccgttctcagtgagctgttgggtacacctcccagacggggtggcggccgggtagaggggctcctcacttcccagacagggcggccgggcagaggcgccccccacctcccggacggggcagctggccgggcgggggctgccccccacctcctggacggggcagctgccgggcagagatgctcctctcttcccagacggggcggctgctgggcggaggggctcctctcttcccagacggggcggctgccgggcggaggggctcctcacttctcagacggggcggccgggcagagacgctcctcacctcccagacagggcggcggggcagaggcgctccccacatctcagacgatgggcggccgggcagagacgctactcacttcctagacggggtggcggccgggcagaggctgcaatctcagcactttgggaggccaaggcaggcggctgggaggtggaggttgtagcgagcggagaccacgccagtgccctccagcctgggcaacattgagcactgagtgagtgagactctgtctgcaatcccggcacctcgggaggctgaggctggcagatcactcgcgattaggagctggagaccagcccggccaacacagcgaaaccccatctccaccaaaaaaatacgaaaaccagacaggcgtggcggcgtgcgcctgcaatcccaggcactcggcaggctgaggcaggagaatcaggcagggaggttgcagtgagccgagatggcggcagtaccgtccagcctcggcttggcatcag

SEQ ID NO: 39819 - DNA, 1068 bp, Artificial sequence
  DNA replication origin
ggagggagggagggagggaggaagggagggagggaggaagggagggaggaagggagggagggagggagggagggaggaagggagggagggagggaggaagggagggaggaaggaagggagggagggaggaagggagggagggaggaagggagggagggagggaggaagggagggagggagggaggaagggagggaggaagggaggaagggagggaggaagggaggaagggagggagggagggaggaagggagggaggaagggagggaaggagggagggaggaagggagggaggaagggagggagggaggaaggaagggagggagggagggaggaagggagggaggaaggaagggagggagggagggagggagggagggagggaggaaggaagggagggagggagggagggaggaagggagggagggagggagggagcgagggagggagggagggagggagggaggaaggaagggagggagggagggaggaagggagggaggcaggcggcaggcacacgcacacaggctctctttgctttccaacaggaaggggctcagggtctgttttcttttcccttcctttcagatggatctttcatatctccaataactcttatctttcagcaaactccaacaggccccaaacgagctgagaaaatatccaacttcaaaggttttgcacaaatcatcttaaaggcctgacctaagcccggaaagccggaacgaagcccagaaatcagtcctcatttcatcgccgtttagccaagacacctttcccgtccacagatcacatctgcccccttctgcccccgcccaggtcccaaccaccttgagacacctgcgtgatccatcctcaaagcaatgagttaggagccgcactcctggtccttggccggtggcttcagtgttattccggggggctgggtgggggcacctgtggggactgccccgtgaggctgtggtttaatttcctttgctactttccttagctcttcagtctcagtctcagccactgaaatgtgtcttggccactggtggtacagcacagggtgacactgttgtcagcga

SEQ ID NO: 39820 - DNA, 977 bp, Artificial sequence
  DNA replication origin
aaatgtttatggagaaacttctctgtgccaggctctgtgtcagacgggaatataagtttgtgaacaaatcagataagatccccacactcaaggtgtttaaggtctactgggagacatggcaatgaaataagcaaaaaatacgtgtgtggtgtgtgtgcagagtgagtgcgtgtggagtgtgtgtggagtgagtgtgtgtggagtgagtgtatgtgcggagtgagtgtgtgtggagtgagtgtgtgtggagtgtgtgtggagtgactgtggagtgtgtgtgtggaatgagtgtgtgtgcagagtgagtgtgtgtggagtgaatgtgtggggaatgtgtgtgtgtgcagagtgtgtggagtgagtgtatgcagagtgagtgtatgtggagtgtgtgtggagtgtgtgtggagtgagtgtgtgcagtttgtgtggagtgagtgtgtgtgtggagtgaatgtatgtggagtgtgtgtggagtgagtgtgtgcggagtgtgtgtgtagtgagtatgtgtgtagtgaatatgtgtggagtgagtgtgtgtgcagagtgagtgtacggtgttagtgtgtgtggagtgagtatgtgtgcggagtgagtatgtctgcagagtgtgtatgtggagtgagtgtgtgtgtgcagtatgtctgcagatgagtgtgtgcggagtatgtctgcagagtgagtgtgtgtgcagagtgagtgtgtgtgtgcagtatgtctgcagatgagcgtctgtgcagagggagtgtatgattggagtgtgtctgtggagtgtgtgtgtggagtgagtgtatgtgtagcatgtggagtatgtatgtgtgtagtatgtggtatatgtgtgtagtatgtgatgtatgtgtgtggtatgtgtatggtgtggtgtgtgtgtggtatgtggtatgtatgtgtgtggagtgagtgtgtgttgtgtggtgtggtccgtgtgtgaagtgagtgtgtgtggtgtgtggtgt

SEQ ID NO: 39821 - DNA, 1290 bp, Artificial sequence
  DNA replication origin
ccggacttcagatctgagcggcggcggggccacgccgggcgtagggaccgcaccccatctggtcaggcactggggcggtggcactggggcggtgatgggcccgggtcgccaactctccccgccctaggccacacacacctgggctttgggagctgcgggccacactcgggcacgcacgcggcaggggctgctggagcggtcacaggggcaggctccccggtcgccagaggtctccttaattccgcaaaagggactcgggactctacccccggccctgggcgccggctcagcagggggttatttcgaagatatcattattgggagtcgcggtcctgccttttgcgcgaagtctcgggaccgcccgcgtggttagaaacgcaggccaggcaggtgggcggaagggggcgcagtgtgcacggccgccggagcggctcgcgcacctggagaaggggtcgttcagtgcgcgcacaccccccaggtaggggcctcggtgcgcaccccgccactgtcttgtgcggtgttggggtgacttgcgtgacactcaagtgagtgcctggggccgcgcggacgtctgtcctggccctgatgcgggcagcctctgcccatctcccatcctccctcccactctccgatcagccgcctctccgcccccaccctccccagattcttcccgcgcggggagtaaggaccagggctgggacccgcgtggggcgggcgagagactgcgggacccagcgcacgtgggtgttgagatgtctggtgagaataagaagccagtgctttcttagcttcgccaaagcccccagcggtatccccagctctcgcctacttagacagagtcctgatctgaatccacgcgctggagactcagccttctccggggagacctggagtggtcccgattgcggaagaaggtccaacgccctccactgtccctcgcccctgccctaagccagaattccttctaggtgctagagcaaattcctgagcagtcaaagagtgcagcacattttcgtgtgaaacgaaagactttaaattagcacgttttccagctcaagaatattttccctggacacagcatcggctgctggtaacttcagggtgactgcaaaccgtgcggtctgccaataattttggtcccgactccagtcccctcttcattttttagaggacgaaaacaaaataatctcggtgattgcaccatcgtccttcccatcctgcgagtatagacaaagactttaacctgacaacggaattcttttgggtgcttctctcccacaagcttttgaa

SEQ ID NO: 39822 - DNA, 1554 bp, Artificial sequence
  DNA replication origin
ccctgtgcctggagacgcagcgccggagcccgcgatgtgtggctaggcgcagcacctccgctgtccacgtgcggccgagccgcgtttgtttatggcagacccgccttcgggcggagcactggccgcctgggtcccggaggggggagcgggaggggggagggaccgcggcgggggcgggggcggcgaatcttgcctccgaccccgccgcggccctggagtcacaggcgcgcctccgcgtcgctgcctccagggactctcccgggagagacccgcgcgctcccgggttcggggaagtcgcggtgagtgcacacggcgcgccgcggggacccgctcctgagcgccggtcgccggaccccggagctaggatgggcggcagggagggcgagggaaggaggggtgccgaggccgcccctgtggctctcgggaaggtcaccagcaggcgcggccgagaggaggcggcgcgactcgttggccaggcgccctgccggggaggatcgagccttccgagggtgcgctggtcccgcgtcctcgccctcccggtgttgcaggtccaagagctgaaaaggggaaagccgggagcccccctccccccattacacacacacgtgaaaacggcgcgagtggctccgaagtgacccttctgccctttctgtcctcgaaacactaaggtgcaaagagattgtcgccttctcaggaggagcgggaggccgcaggggcgctcaggccaggggaagggaggggccagggagcccagccgagtggtgaggcctctcccagggcgccggcggaaacagggcccaactgccggggcggcggcaaaagcagcccgattcagcgcagccggaattttgaggaatcggcgttgggcgattaagggccaaggtcgctgagccagggtcacagggtgggcgcaggtggcgcaggtggggcccatggtgatggggcagaaggcaattggagaaagaagactccgttgcagacgcggccactgggcattctggactctccttcagggtcattttggacctaaagagtccttttgtcccccctctgccctcccctgtccggctcccgcagcctggaaatgggtgtgcggcccaggagtcctccgcgcacccctgcagcggcggtcacataaccccacctcttccaggagtgcagctttcccggccccccaggccagagacaggctcagaggacgcagggcaattccttaccttggcgtcgagatcatgtggggactctcggccgtgtgccacaggctgcagagccgtggagcagtggggtgcgtgacctggaggtcagcaggggccgggaggacaccgggccgcggatgggggcgcggagatttgggttctcggtgtcactgctctcgccactggcccgggatcatgagcctgctgctccgaaaactcgccgtcggacagcgactgagtatccgcttccctcccctggccctcccctgcgccaggaaggcctggccttcggcaaccgtgcctgcagcaggcgctcctgaccttttccagggactcctttgaaggtcaaaagttcgaa

SEQ ID NO: 39823 - DNA, 1866 bp, Artificial sequence
  DNA replication origin
gctcggagctcaggcccggcggctgcggggaggcgtctcggaaccccgggaggccccccgcacctgcccgcggcccactccgcggactcacctggctcccggctcccccttccccatccccgccgccgcagcccgagcggggctccgcgggcctggagcacggccgggtctaatatgcccggagccgaggcgcgatgaaggagaagtccaagaatgcggccaagaccaggagggagaaggaaaatggcgagttttacgagcttgccaagctgctcccgctgccgtcggccatcacttcgcagctggacaaagcgtccatcatccgcctcaccacgagctacctgaagatgcgcgccgtcttccccgaaggtgaggcctcaggtgggcggccggggacgctggggagcccggcggccccggcccaggcgggaagcgcaagccagcccgcccagaggggttgccgcggcctggcgtccagagctggggcgtctgagggaggttgcgtgagggtcttcggcttcggcgctggcttggggcgaggggccagggccttggcggcccaggcgaccaaaccctctcctggtccagggctgggtgagggcgaattacgaattgttccaggggcaggcagtcccccagcccgcacggccagcgagttctttctggttttgttctttctccctttcctccttccttccttcgccagtgcattctggtttggtttggatttttttctctctttctttcctttctttctttctttctctttctttttctttctttcttcctctttctttcattctccccttccttccttccttggccccctctctccctccctccttccttccttcctttgccaatgcattggtttgttttctttccttttctgctttccttcctttctttggaagttcactctggttttgctttctttctttccccatcccttcctttctttatccctccttcccttcctccttttctttctacgattccctttatttttccttcattcctccctctttttgtctcttctggaggaggtgaaggagggtcagcttcaggcgctgcgagtcagcggggatcacggtgaggcccaagcactgcaggctgaggccacagagcgaacacttgtgctgagccgggccctctcgtgaggctggggtgcgggaagtccgggcaggagagacccgcccccgccgttgctgagctgagacccggctgaaagagaggggtccgattaattcgaaaatggcagacagagctgagcgctgccgttcttttcaggattgaaaatgtgccagtgggccaggggcgctgggacccgcggtgcggaagactcggaacaggaagaaatagtggcgcgctgggtgggctgccccgccgcccacgccggttgccgctggtgacagtggctgcccggccaggcacctccgagcagcaggtctgagcgtttttggcgtcccaagcgttccgggccgcgtcttccagagcctctgctcccagcggggtcgctgcggcctggcccgaaggatttgactctttgctgggaggcgcgctgctcagggttctggtgggtcctctgggcccaggagctgggagggctgcgccggcctctggagccccgggagccagtgccgaggtagggagacaacttccgccgcagggcgccggacggtcggggcagagcaggcgacaggtgtccctaggccgcagggcgcttccatagcgccatccccaccaggcactctactcgaaatcggaaagctcgaccttttgcgttcgcctctgccaagcctgttatttgtgctggccgctgggtctggagctgcgcttctcggcccctccccggtggagcgcaga

SEQ ID NO: 39824 - DNA, 1493 bp, Artificial sequence
  DNA replication origin
gttggggacccctggtgctccaagagagcagtgagtgctgggagccgctaaccccgaggcgcctagcacagactcttctcaccccttatttctgaaataaagcccttccttaggtccagatgaggaccacgtgctcagtgcctcactttcgtgggagtgtatatcactttacagtatcaagacaattttctttcgttacaaatctttatttagtctctgcgtttagaccaaagtagatttttatgggctgagtgaaaaaacctcgcccgcattggtttctgatggaacagctggcagcgccacggccccgggtggggtggcctagaggcaggggtgcttgggaggaacatctagcacccgaccacctccaccaggtgggaaagggacgtttgcaccaaatctccgccggcaaagcagaggctttggggaattacagaaaaactataatgatctaaaagagaacaagttatcttgaactgtgcgggtatttgaatcatacagaaaattgtcctgtgtgcccaatgcacttttgcatgtagagccagggccttcgaggaagctttcaggagatcccgggcagcggagtctggtctggagtttcatttccgtaggtgcagatttctccccaagtcttcccgccatgggctttgcaagaagccagggcccagaggccacgctcaccgttaacactgcacagggcaaaggtggctccaggacaactgcccaaccccaggaacgacccagcagcagagaaaaggacagctgccagggtgcctttgtcgctttttggaaatcagaattcctgggtccttagttaagtcttacttcaccaaatcccaggaccttcacattttggttcttgccattgctaacagttgtaaatgctgccgccacgaggcctgggaggaaggacccgctggtgagagcacagggagtgctgctgtgatcacggtggtgatgcggggtgagcgcgatttcccgggattaaaaagccaccgctgcccccgtggtggaggctgggggcccccgaataatgagctgtgattgtattcccgggatcgtgtatgtggaaattagccacctcctcagccaggataagcccctaattccttgagcccaggaggagaaattaaaggtcatccctttttaaattgaggaatagtggttttttttaacttttttttttttaggtttttagttgccgaatagggaagggtttgcgaagccgctgccctgggccgaggtgcattttacgcttccagaggtcgaggcctccagagaccgcgatgcccagggcgttcccggggaggctgagagacccagggtgctctgggtgactgcacggcgactcctcgggaacccactcgtggctgcccgcttggaagggctttgcggccccgggaacgatctccaggatctccacggctggtcaggttccccgtccctcgtatcccgcgctgcccgggggctcctgcctttggttcagtgctcgc

SEQ ID NO: 39825 - DNA, 1130 bp, Artificial sequence
  DNA replication origin
gcgactcctcgggaacccactcgtggctgcccgcttggaagggctttgcggccccgggaacgatctccaggatctccacggctggtcaggttccccgtccctcgtatcccgcgctgcccgggggctcctgcctttggttcagtgctcgcggcaccaccgcactcaggacggcagtggggggctggggctggggctgggcctggcccagcgtgggttggggcgggggacgcgccagcagcgcccgcagctcgctccgcaggggtcgcagccaggggtcgggagctaggctcgtgggccgggagacgccgggcgcgttgtcctccggggaggttggggtgcaggcggtgcaccgaccctcgccatctggcgctgcagccaccagccacggcgcttagtggagggtctgcggccaggctcccggcggaaagattccggggagggctcgggggttgtcccagcccgcgctaagcgccgcagcctcgcccggctttcctgcttcctcggactgtgcaggggaagcctggggtctcgcggggcgcagcagtcaggtcgagggtgcagcaggaggggagtcctgacgggcaggtccctctttcccctggtgcgcaacactggttggtagcttttgcggaggtggtgaagaagggcaggaggcctgttgagcggaggagtccggggatccctaattatgtgacaggagaccctttccagttcggcctgtggcccatccctctctcaccgccggcagattggagtctgctctcggggagcccccaggtaaacccctcacagggagaaggtttcggattggaaggaggaccgcgctcgtggggcgcctgtgagagctgggaagcccaaggggtagcgtgtagggggttttttatgcgggaggagctgcctcctgggcggcggggactttctgtctcagcctgtctgcctttgggaaaacaaggagttgccggagaagcagggaaagaaaggagggagggaaggagggtccttgggggaatatttgcgggtcaaatcgatatccccgtttggccacgagaatggcgatttcaaagcagattagattactttgtggcatttcaaataaaacggcaatttcagggccatgagcacgtgggcga

SEQ ID NO: 39826 - DNA, 1205 bp, Artificial sequence
  DNA replication origin
gccgccacggctcaggcacacgcgggcgcccgggggctgcgcggccgcgccgcagaaggtgaaggaacagcgcgaggcacgcagccgccgcaccgtggcgcgcacgagctcagccggccggcgaccccagcgcgcccacaggtacaggtagcacagcgtgatgagcatggccgcgccgccggcagggcgagcccgccttgcccgcccgccccagcgccccaggcccggccccgccccggccggaagggccgcgccgcccccccgggccaggcggcgcgggggtggggacggcgggggaggcggggacccggaaggtgacgcgggcaactggaggctgcggcgggaggggcgggggggggtgaggccgcgcccggctgtgtgatggggagctccggaggccgcgcccagggctggtggcggcggcgaggggcagcgctggggcggggggtgtgcaccggggtcaggggacgccggggctgcacccggagagggggctcgagggagtggaggccggggtgcggggccgcgccagggctgaggagtgggatgggtatgttgtggatgcgggggaggggaggctccagtggctgcccgacctgtttaagccaagtccggcctcccttccttggaggggtgggaggcggattgaggagggggctctgcctatgttcatagctgccaaggccaacctttactaaccagcagcacaccgggagtcccagagcgctccacagccgctacccagtcgacttgggaaaataagataaggccgtttttattaaattatactaagccttcatgcaaaagattttaaggtcaatcacatacattcacgggatgcaataatgtttttttaaataaggacaggaaacagaaattgaagacagataagcaccaagaaggctgcctctaaaaaggctgtgccaggaaggctccctatggtgttcttgctacatgtgggtcaacagtttgactgtaagcatcctaacaccagtgggaaaaggaaaacatcaccatgatttggtgttcttgtctccaagggaagcataattagtcctgacacagaggcttctcccatagaacctcatttctttaaaaggcattatgtaaagaacgtgttctgaacagctgcgaagcacagcaaagaattccatccagtggcttcctattctggccctcgctgaaaataggtggcaagatgcagc

SEQ ID NO: 39827 - DNA, 1553 bp, Artificial sequence
  DNA replication origin
caggcgggccacgagagggcgcagcgcggcgcggcagggattcgcgggcgaccacccggcgcaggagcggccgcgtttcggcctcagaagtaagtcggggcgctgcgggccgggacaggggtgggcgttcgccgggggcgtgctggggccgggcgagggtcaggcagtccaccgcgagcctctgccagggaacagccgtctcctgagtcgaggcctcggggctgcagccgggacggccggaaagccgcctccagctgccagaagggggcggggcttccggtggagcagccatagggacctcgcggcccagggcagcgcggcctccgcgcgccgctggcgttcttccctgcgggacccgggctggctcggcccggctgtcagtgcgcacgcgcggcgacgcggcctgagaacctgggttcgcgcgccctgtccccctcccacgggcccctggccgcgtgccccgcgcccatgttaggggcagagccgcagggcctactcgccgctaaaaagcacggttgactaggacctgcgtgtggggaaaggcttcctaatgacccagcgcctaagtgcccggaaaaaaaagactgatacataataacattaaaaaacggaagctggggccgggcgcggtggttcacgcttgtaatctcagcacttcgcgaggccgaggcaggcagatcacttgaggtcaggagttcgagaccagcctgggcaacatggtgaaaccgtgtctctgctaaaaataacaaaaattagtcggtcgtgctgctggtggtgctcctgtaatcccagctactcaggaggctgaggcaggagaatcacttgaactcgggaggtggaggttgcagtgagctgagattgcaccgctgcactccagcctggacgacaagagcgaactccgtctcattaaaaaaaaaaaaaaaaaaaaaaaagatgggccagacactgtggctcacgcctgtaatcccagcacgctgggaggcctaggtgggagaatctctttgagttcaggagttggagaccagcctggccaacatggcgaaaacccctctgcaaaaaataagaaaagttcgtttcagctactccggaggctgaggtgggaggattgctttagccagggaggcagagcttgctgtcagcagagatggcggctctgcactccagcctgggtgagggagtgagaccctgtctcaaaaaaaataaataaataaataaataaaataaaataaaattaaaaggaaaaagaaaaaaaaatcccctaccattgattaaagacagatgtcaaactgggaaaaaatatttgcaacatctatcacagataaagggttaagatcccaagtatgtaaataactcaaacattgagggaagcaaagaccaaataggcaaaaaacatgaactgacaatctgcacaaaaatgacataaaactggcccttcaatgaaaagatgttccgtttctcccataggaggagaaatgcagggtactctgagataccatcacggttctaactgatcccgttgctaagtgcaaagcaacaggacagtctgtggggta

SEQ ID NO: 39828 - DNA, 2078 bp, Artificial sequence
  DNA replication origin
cctctacacggaagcgtcggcccctttcctggccagctacatcctgggcctccgcacttcagagctgtgcgttggaaccggagaactgagcgcccctcccgggaacccggctgccggctcaggagcttgcttggcgtcgccgtcgagctccggagctccgctggggatcgggggttcagcagcgccccagcctcccgctcgctgcgctccccgcaccgccaccgcgcacgcctctcagcgcgtccaccggggcgcggggccaccctcacctctccggcccgcgcggtggcggaggcctccagggagcgtccccggggcagtgacagccgcgcccccgcgccttccgggctccggccgccgcttcgggctccatggtgccggcggagcccgcgccccttgctgcggcgccggcctacgagcgcgcctagatccactcgggctaacgcgctcacctacccgcgcgccaggtttaaaaacgggggcggggcggcgcgggcaagcgctgggagggggcaggacccgaggagctccgtgaggggtgcggagggggccgcagggtacgaaggaaaagcccgggtcggaggagcggaggggaccagagaagttccgggaggggaccagggagccggggatggggaggagacgagaaaagctcaaggaggtggcgccgggtgtcaaggaggggggtccggcaggcccgggcaagggtggggacgggacaaagaaaagtcggggagggggcaccagagaaggggtgaccagaggatggaggtaccagggattggggccacgagctcgggctggagacagcgggaagtgacccaggaacccgggagaggaaagcgaggcccgcgggctaggggcgtttccgtcgggcgcactccctcggggactggggggacctgcgctcacctgctgggcttcccctgccggatgtgggatgtgaggagtcccggcttctccgtccctctgtggtccccgcggcctcgggctttggtcctgtgcgagcatcggattccctgggtttccggagaatctcgcttccaccgccttagagcggcagcgggtcttcggggacatctaccgaatcctcgggtccgcgtgcaccggccttgccttcggtgctggacagtgggctcccggacgccccgacgccagggctcgaacccgtggcgaagcgggtggggtggggcgcggcgacccttccaggagacagaaggccaggaatggaaccgagcaagaggggtgctacgagcgcacccttcccaccgatggcggccttggaaagaatgcgaatttttaataaagcctggagcggcgggcttctccttcggttagccccagccaggcttagaaagggcctcccgaccagcagaagcgaccttgcccgaccctggggacacttccccgggcgtcgctggagcgccgctgccaccatcaccagcgcacggccagggtgggagaaagcggtttcacacgtagagcactgcgacagaacaccgaaggcgctggagggccttcaactaccccgggctcctcaggggtagttactttatataatttaagttactgtgatggatgttaaaaaatcgaagaactaggccaggcgcggtggttctcacctgtaatcccagcactttgggagaccgaggcaggtggatggatcacttgaagtcaggagttcgagatcagtctggccaatatggtgaaacccgtctctactaaaaataaaaaaattagccgggcgtggtggcaggctcctgtaatcccagctacttgggaggctgaggcaggagaatggcttgaatctgggaggcggaggttgcagtgagccgagagtgtgccactgcactccagcgtgggagacagagagagattccctttccaaaaaaaaaaaaaaaaatcgaagaacttccgcaaggcgcggtggttcatgcctgtaatcccagcactttgggaggcccaggcgggtggatcacttgaggtcgggagtttgagaccagcctggccaacatgatgaaaccccgtatccactaagaaaaatacaaaaaaatagccgggtgtggtggcgggtgcct

SEQ ID NO: 39829 - DNA, 1946 bp, Artificial sequence
  DNA replication origin
cttctctggtcccctccgctcctccgacccgggcttttccttcgtaccctgcggccccctccgcacccctcacggagctcctcgggtcctgccccctcccagcgcttgcccgcgccgccccgcccccgtttttaaacctggcgcgcgggtaggtgagcgcgttagcccgagtggatctaggcgcgctcgtaggccggcgccgcagcaaggggcgcgggctccgccggcaccatggagcccgaagcggcggccggagcccggaaggcgcgggggcgcggctgtcactgccccggggacgctccctggaggcctccgccaccgcgcgggccggagaggtgagggtggccccgcgccccggtggacgcgctgagaggcgtgcgcggtggcggtgcggggagcgcagcgagcgggaggctggggcgctgctgaacccccgatccccagcggagctccggagctcgacggcgacgccaagcaagctcctgagccggcagccgggttcccgggaggggcgctcagttctccggttccaacgcacagctctgaagtgcggaggcccaggatgtagctggccaggaaaggggccgacgcttccgtgtagaggagatctcagttagccagccggggacactgcagtctcgggctcctaagccagccttgcaaaggcaatctctcaccttgctactttctcggtagccgtttctgttgtccctggattgggggctcggcgttcgctgtccctgggcaccaacccttttaaagacagtaacgttgtaggaaatcaaattagccagggaggtagggaagggaccgggtaggccggatgggccaggtagccaggcaggagaaagattccctcttttttttttttttttttttttttttgagacagggtctcactgtgtcgcccaggctggagtgcaatggcgtgatctcggctcacgggaacctccgcctcccgggttcaagcgattttcctgcctcagcctcctgagtagcagggattacacgcgcctgccaccacgcccggctaatttttgtatttttagtagagactgggtttcgccatgttggccaggctggtctcgaactcctgacctcgagtgatccagtaacctcagcctcccaaagtgctgggattacaggtgtgagccaccgcgcccagccccctttttttgtttgtttgtttttcatcctacaactctgtaaaatcatctctgtagaatcaatctccttccgtgaccaaggtggtgtgattgaaattaaccggggacaaagtagacagctatagttggggaaccccgaattgaacaattcagccaggatttgcagggagagaaatctctcaactaatgggttccctgataattgtgtgagattcgggacctcccttctcaaagcttaactggagacagagaactggggacgtagcaggagagaaaaaacacaaatgacagtaatttatccacagccctgagaactccagggaaagttcctggggggtccggtgcctctttttcaggcagacactggaactaagaatagctctcatggcatagtttgaaggcagcagaagtgcccagggttcactctctcctggcgcttgccgttccagccccgcgccgtggcgaccttggatccagacacctggagatgctgagctgaccagaactggaaggccggtaaggttcagtgcgggcgttgtaggtaacccttccagccagaaagtggcatcgtcttttaaaatacagggaccgtgaatggccttctgcgcagggccgtcccttgggcgtctaacccaggagcgcctcggggtctgggagttggaacctgaatgagtaaggtgttaatcagacctgactcgcattatagattgggctcctggtggcttctccttcctaaaaaagcatacccactataaaagcataatcgtaggctgggcgcgg

SEQ ID NO: 39830 - DNA, 1377 bp, Artificial sequence
  DNA replication origin
gctcgctggctcccacccggggagggtcgttgtgcgcctgcgccagggtgggggttgccgtcgcgcctaggcctttccctcaggttttcctcttccccactgcggctccccagtcggcgcttgcgcggagaactcagcgctgaggtggccgaggtgtcgggaggggcctgggtgggcgtatgaaggacccgaggtcgagggcccccccataccccgcctcgaatgagaaatagaagtctccacgaatgggcagggcccggggcctgggcgccgcgacctagtaggcccgcatgctggtgggcgccgcgcgagccttgttccctgccctcccctcccacagggaggccacgcttgcagagctggagcgcgcgtctatcgccccagaacccccctccctgccctatcctccgccaccccttctgttgcggggcgcgcgccagcctgggtgtctgtatgcgctcgaggcgggggcgcgggttgcggacggaggcgcgggaggcggttctgcgcggcgggggccgtacccgcggcggagcgaggaggcgagaatggatcaatggtgccacggagcacatcgctgacgctgattgtgttccttttccacagattgtctaaagccccaggaaaaatggtggaaaattcaccgtcgccattgccagaaagagcgatttatggctttgttcttttcttaagctcccaatttggcttcagtaagtactttcctgatggatggccaggggctttttctggcgttcagtgacaagggaagaatacattggttagactgtgcacacatgaactgttgattctttctccctatgtctctttttaagaaaatctgaagggatctcgtgtttgctgagtgttccgtgtgccagcactagcctaggaggttttagtctctacaaatatttatacagcaccagacgcgatggcaaagtggataaagcctggtccctgcccttaaggaggtcgtggtcttgtggaggagacagatgggtaaatctacagttaatgctcagtgtgatgagtgtcagggagcacggtggagagacattgaaaccagactggaaagtcaaggctttctacagaggcctttccccctggcactgatgctgattaggaaagagtaagagggagggaagaagtggaaaggccttgaatgagggcgtgagagggtttggacccgaggagcttgtgatgtcaccagtgtgccctgcgggatctggggaacaggagaagtaggccagagaagtcgggttgaaaggtgtgtcgtttgcgtcctggatctcccttaatttaaccccataacattccattttacagataaggagactgatgctcactaagacactaatatgcccactcacacagcaa

SEQ ID NO: 39831 - DNA, 888 bp, Artificial sequence
  DNA replication origin
gcggcggctgctgctgctgctgcccgcgtccgaggctcgcgggcggcgggcccgggtgagtgcacacccggcgcgctgccgggctcccggatgtgtcaccttgtcccgctgcagccgagatgccgggggagcggggccttccacaccccctccgtgggtgtgtggtgagtgtgggtgtgtgcgcgtctcctcgcgtccctcgctgaggtgcctactgtgtctgcatgggttgggtcccgcgcgatgagggggtgtggccgccattgcctaccccagtgggtttgcccccttggtctggtgccccttcgcgagcgaggccctgggatgccggtgcgagggtgtgagtagtccctttgtgcgcaaccccccgctgcccgtgcctcggccggtgcgtggctgacacctccgctgggtggaggcgctcgcgtgtcgcctcgtcgccccttttgtgtcggtgtccgcgctccctggcggctgcgtgggcgctctcggccttgcaggtggcccccctttgtgttactgcccctgtctgtgggctgcgcgtcccctagcgcgcgtggccgcgccttctgcaattgcgacccccgcctagagccttgctcgcgcaagtgtgcgtccttgcgtgtctccgagtgacgcagagtgtctgcgcatgggtcctgttgagtgcgtgatctcttgtgtgcggatttaattctgtcgagtgggtatctcttgtgtgcaggtttcgttggtgagcgtgaacgttcgtgcacaccccttgctgtgtgtgcgtgtcacgactctgttgccacctgttttcgtgtgaactggcagtccagtccagggcctgtccccacggaacggacccaggaggggggtaacctcgccgctcccctcgcccccgcg

SEQ ID NO: 39832 - DNA, 1160 bp, Artificial sequence
  DNA replication origin
aggtcaggagttcaagactagcctggccaacatggtgaaactccgtctctacaaaaaatacaaaaactagccaggcatggtggcatgcgcctgtaatcccagccactcgggaggctgaggtgggtggcggaggggtgtcgcttgaacccaggaggcagaggtttcggtgagccgagattgcgccactacactccagcctgggtgacaaagtgagactccatctcaaaaaaaaaaaaaaaaaaaagaaagaaagaaagaaagaaagaaagaaaataaatcaatgggaccataactgacatgaactaaggatacctcacctggaggacccgtccctagggcccacgccttggcccactcagtcaggatcagggagtaagcctggctggatctggagccaaaatgaggaccttccctaagggcctgtggcatcacttgacatcttattgccacatgggactcctggaattccaggaaatcccaataaacagaagcccaggataacgggccgttgggagtggtggaagaaagagatttggtgcagccacaactgatgaatcctggcagccaccaagagctggttgctgaggagtccaccatgctccatcatggtgtctgctgcctagatgggcctgcctcttcttcctgcagggccagcgcacacgctatgcactgcggctcctgcagctgatacgggcgccagagtggggacctggccactgtcatggttcaaccacggttagctccactccctgaaacgttcttaggcattcctgcagtggcaggaaatcaagtgaatgttgatgtattttacaaaggcttgccctattctttgcagagttattagctttaccccataacagtggtccccaacctttttggcacgagggactggtttcatgggagacatttttttccatggacagggcaggggaatgggtttggaatgattcaagtggattacatttattgggcactttacttctattattattacattgtaataatatataatgaaataattacacaactcactataatgtagaatcagtgggagccctgagcttgttttcctgaaactagatggtcccattgagaggtgacagcgtgctggaagtccgcaccgccctcgctcgctctcggtgcctcctctgcctgggctc

SEQ ID NO: 39833 - DNA, 1051 bp, Artificial sequence
  DNA replication origin
gcctgtgcgcgatcgcccgccgcctcccggccgccccgccccgccccgcgcccgcgccgactgcggcccggggagcgcgcgcggcctcccgcgccgccgcccccgcagccctagcgccccgcgcttccgcgtcggcgcccgcagccccgcccgcgccggggggaggggcgggctgccccgggcgggggagggggaggaggaggggcgccgcggccttcgggcggggacccgggaagcccaccccgcgcgcccgggcctggagggctctcaccgcggtccgggcgccgcgctcgcctctctccccgggaagcgcggcggccgcgaccgtccgcgcgtggagccggttcttcgaagggctggcgggcctcctagccggaaaatgccggcggaggccgtggtgggggcggggaggagccaccgccgcgccccagacatcgcaggaattccggacgctgcgccgggcccggcggccctgaggctggcacctggctccggtcgggccgcccaggttttgtggcgcccgagaccagcgttgggaaattaggctggagccatcatgaaaactttttcaggcagtgcacgctcgcctgtgcctgcccatctgcttccaacctctccccacctttcggggcgcagcctgcctgctccatcggaatgccctttagatgaatccccttgtgctgttactgtgtccttgtcgtccagctctctggttttcttttctatacaccttctcggtttccagagtcttaattcgcctgcttgtccttaaccatcaaaactctttattaatatcctggctttcgctgatttttattctccctaccccttctccctagctatgtattgctgggtgagctcccgaggcttgaaaacccaagtatgctgtgctggctgcgttgtaatcggtagagagccaccagctaaaaattgtattttgtaccaactctaatggcatttaataaatgtatacctaaaaagagtgtgtgtgtatatatatactattttacagcagagtcactaattgatttctaagcttgattttgccacc

SEQ ID NO: 39834 - DNA, 842 bp, Artificial sequence
  DNA replication origin
ctaggaggcccgccagcccttcgaagaaccggctccacgcgcggacggtcgcggccgccgcgcttcccggggagagaggcgagcgcggcgcccggaccgcggtgagagccctccaggcccgggcgcgcggggtgggcttcccgggtccccgcccgaaggccgcggcgcccctcctcctccccctcccccgcccggggcagcccgcccctccccccggcgcgggcggggctgcgggcgccgacgcggaagcgcggggcgctagggctgcgggggcggcggcgcgggaggccgcgcgcgctccccgggccgcagtcggcgcgggcgcggggcggggcggggcggccgggaggcggcgggcgatcgcgcacaggcctggccgccgcctcgcccccccttccccagcccctaccctccctcggcctagccgtccccctcctctcccctcccccgggcgaatcacgcgccctcctctgacactcgtagcggacccgagctccgaatttatccttcacgtgacctgagggggttgggtggttggctggggacagagggggagacggaaaggagggaacggaatctgccgttacctgagcaacaggccccgcccgccggctcggggctggggggcgggaggaggacgtcagcacgtcagccggggttttgcgttttgattgacagttgctatagcgaccgggtcggtccgtcgccattttgttggttggtttttttttaaaccctttcgcttcccgcccgaataataataaaaagccccattggagtgaggcgggggtggcggcggcaaccgcggcgggggtatccggggagactgctgctgtcgctgc

SEQ ID NO: 39835 - DNA, 1155 bp, Artificial sequence
  DNA replication origin
ggagggacctgccattttaggaggaggcgccgcgggcccagggccggccgccgggggagggagcctcaggccgggtcccggaggagcggcgggcgcgagcggagggaaagttgcggagggtgggagcgggggccgcggcctcccgggagccggggcctggggggccgtagacagcgccagaccttcactggccgcccgagcgaaggggtggaggttgtcttcctcctcctcctcctcctcttcctcctcatcctcttcccccagctcctccctcgtccctcctctcggtccccaccagtgtgggaaccgccggggtgattcgcaaggacaatgcacgggttaagaaaatggggccggctgccgggtgggcgaggacggcggggccgggccgggccgggcgccggcgaaggtcgggagccgctgcctcggcggccctgggggtccgcgctggagcgaggggcactcactggcctccgaagttgggcggggagcgcgagtgtccccggcggctcggggtggagggatgacctgcccggcagccgggggagttggtggctgaggagaggtgaattagaatagatacctgtgtatcgccacaaaacttcaccagtctatttataggcacaaacccactctcgcttcggagccaccaaagctgctgagtagctcagtacttggcgaaaggctcctccctaatctgaaatagttaaaaatggtaaaattagtgagtcagtgactctggttacttgcctgtgcctttcgcccaaccctaggtgacacgaatcccataatctgggcacagcgcaggaatgctagcaccatttggttcttgaattccgcccaaattgtcagaaaatacgccttagaacgttgttttcacaagtgccaggctctgtttttagggttttcagtggatcgaccagcttgcccagccggtaggaactgttcccattttatagatgaggagagtgagtctggagaggggcactgactggtctaaggtcatacagctgggactccaggagccagaaggctgtagccagtctggagttgtgaatcattagggtgtaactcattattagaaatactggcaaattttggagtgattcgtgtttaatgactcagggttctaacctagagatgtgtccccgtaag

SEQ ID NO: 39836 - DNA, 1115 bp, Artificial sequence
  DNA replication origin
gagttcctggcatgcactgctcccatccgatttccgcagatttcctgctggaacgttctctcgggcctcaagttttcctgagaggacgacgtggagagtggagacaaagatgctcaaaagccaggaaatcgcaggctcggaagcccccacgcatgcctctgaacgcagcgccatctcggggctgcggcgggaccaagcgggacgcttgcaggctgtcggcggcgggggccgcgagccgccggcgtaggccgctccagctggaagaccccaccgctagggttccagggggctgcggacgcttccgaggggcccaaggcgaaagaacgcagcccgcttgtcggccacgtgaccgtccccgtccgcgtccgcagcgaccacgtgactgtgcgtccgcggcgtcgattgactgggagctccctggccacgccctaagcgccagccccgggcttcggggggcggtgctgctgcggttgccatggcgtcttccgagcgcgcaggcgtgggcccagagtagcttttcgggtatttgctaccggctctcggtagggctggtcacctttgcttgctgagcttcgcgccctgcgtcctttggtccccagcaacttgcagggcagccgtccctcatgaggccctccagcgaatgccctaaagctccgaagttgctccggaggaaaacaggcttgctccgagggtgcacgtccttactgcccgtgacgtcgtggtgccttgagggcacccttctgggaagatccttgcagaggccatgtcccctctccacgacatccaagcccattcccaacttgcttttcactcctgtccccccggggaacgtctactggaccttaggacagcccctcacccccgtgcaccccccaggtggatctgcagcgaaacctctgtggtgactcacagttgctagcattggttatcttcttcctggcagaaggtggcaggctgatgctgtcgtcgttcctgtgtgtctgacaaatcacaaatatgaattcagatcgtcacagctgagtcatgcccaggatttccatgagccctgctggggtggccagcttgagctcccttccccacagcctcctccagctctgcagcgccaggcaccagtg

SEQ ID NO: 39837 - DNA, 1475 bp, Artificial sequence
  DNA replication origin
ccactgtcatcgcggggaccctcgggctgcgcctctgcccctcggtccccagcacccctgggaggagctgctgcgatgacacccagtccctgggcgccgccgcatcgccctgccctgagcggaattctccggccccaggagaggccgtgtggccataaaagggctgacctcctgattcggactccgcaggtagtcactaggggctttcgctgctcctggaagcaatttcaaaccagcaagcaggctcttatagactcttacaccaaaagaagaatttggaggtccacccctaaacagtccatcactgttacattgactcccaaattcctatgctagagttaccttaacggcaagccagacccctgaccccaacccatgtcaatagcgggggtgggggtgggggtgggggtggggtgcgccgaccctgctgcgcttgtcagcttctctaactgtggcttggctcctctgtcctcatgtgagctctggaccagcaatacctgcacccttgccagcaggttgcaaatgcagaacccagacctcctgaatctgagcctgcattttaacagggtccgtgggagattcgtgggcaccacagaactgcaggagtgctggcggagggcagggctgagtgcggaaagggagatgggcaggcccatggcgtggggactgacctttggcacagggcacgtctgagtgcagaaagggaggtggcaagtctgtggcttggggactgacctttgggtcagcggtggagaggaagggtacaggggtcctttctccaggaggtggtcctggcatgggccaggtgtgagtcccgtgacctccagaagcacatggtaggacaggccgggcaggccaggtaggccctaagctccatctattagtgcaggagggaggccctgcactttgctcaccactgaactctgccgccagccaacaccaggcacctgatggatctatgttgggtgaagcaatgaagtggacagcccagtgccttgtggaagggacaccagggagtgctgaggcctgtgggtgggcgtatgaggtgcagggcagctggcattggcctgggggctgtgctcaaagacaaactccatccacttctggctgtgcacagggccagcttggggaggtagcaagtggatgagcaaaaccaggggaaagcaaggcaccagccagagctgtgttctcagcagggttgtgttggcccaagtggggacagcagccatgtctggagacatttttgattgtcaaactggagggggtgctactggcacttagaggtagaggccaggaatgctgcacacagcttgcaaggcgcaggatggcccctgcaacagagagtgacctggctccaaatgccaatagtgctgaggttgaggaaccacgagagaaagcagcaggctctgcaggcactggtggagatttctagtgccaatagctctatgtccccttccccacctccaccagtcccc

SEQ ID NO: 39838 - DNA, 1166 bp, Artificial sequence
  DNA replication origin
tttaaatgcagcaaacagtgaaaacgtgagtaaagggctttgcatggagctcaatggtaggagcggtctcctttccatagaacaaaaggcacaggaacctaatcggaaagtagctttaaagaataacaaaagtcactgttgcaaaataagacataagtgctccaggtgttaacaggactatctgtaccttgagcctgatttgggggtgcatttgtgtggcaatagttgggtggggaggaggaagggagatagaagggagaagtagaagggaaggcaggggaggaggaaggggaggaaggagaggaggagaaggggaggaaggagggaagagaaagggaggaaggagaggaggagaaggggaggaaggagggaagagaaagggaggaaggagaggaggagaaggggaggagggagggaagaggagggagagaggaggaggggaggagggagggaagagaaagggaggaagaagaggaggagaaggggaggagggagggaggaggagggagggaagagaaagggaggaaggagaggaggagaaggggaggagggagggaagagaaagggaggagggagagaggaggaggggaggctggggaggagggaggaaagagaaataattcaaacagggagctgtcactttcctacagaccagaaacttccccaacctcagctgagcacagggactctggatccccctagcggccacagagctacagcctctgacactatgaactgaccactcaggatgcagtttttcttttcccttttcaccataaattcccccaagaggacatgagagagggcagtgtctccaagctcaagaagcaaaaaccactggagacgtaccctctggttactgatgctagtctgagctttaaattgtgggagttaagctttgtgttccctcaaaccagagcccaatctctgtaaaataaatgaatctggaataagcaaattatctttgtgatgtccctgagtcagaattctccctggggcaggccctggctttctgatgacagctggtaatgagtgagcctttccaaagggaggaatatggttttcttggtaattaacagtgatacttgcctctgagcaccctatggcctttctacagctttcatagagaaatctgagtaattaccagcaaaatcaatccaaacgct

SEQ ID NO: 39839 - DNA, 1192 bp, Artificial sequence
  DNA replication origin
ccttccccagctgaattcagggagcctgtgggctgtcccagctcacacacctgtcaccagggagaaggcaggcctgggagctggggggtgatggattcttgatgaaaagtccctgaagagatcagtttcctttcggtgacaaagtaacatgaggcaaagcgggctgcatgaggtgaaaagcaaattcctccaagcaggtgtttgcatcagtcccggtccgggagaggcccatggctctgcgtggcaggctgtcctccccaccctcgtagctgcgctctgcggagtttcagcctttaaaattcagtgttctgctgctccctctgaccatctgctcactcaatttccagagctgaggctgaggctcagcgcttcctaaacatgctgccttctcccagctgtggactgtccacgcttccctgatgagttagccatctactctgtaccctccaggctgtctaccctgcaccctccagcttttctcttggccacacatctgggcatctcttccaaatggccatttgtttgcaggtcccatttgtttgcatggccatttgtttgctctctgagggtgcagggaaaggctggcaccccaaaatccagccatgcagcctaacccagggcctgtgccatcctgggggagacttcctctcctattgccctctgccttgcctgggtagaacctgctgttaccagaggttgatgggaggatgagcagaagtgggagtggcgggaggtgggggatggagcctgaaccaggggtggaggtggtgggagggaggagcgggctcttggagccaggtggcagattgtgggaggagggcgggagggacagtgagacacagtgagatggggtggcagttggtgggaggcggggaaggcgagcggaggaagtgtgaggcaagagagtttaaaaatgtgtttatttacttttctactttgggctggagcaaaggcaagtgggggtaggtgcctttcatgttccctctgggagctgggggcctccagctttggagaggtgcttctgcacttgggtttggttggggctcctggatgtcacctgggcaccccactggcttggaaggggctgggaacacatcctgctgctgggtgtgtgggggccagggggcagtgatggagacagaggcagaggtgtgtggagcttgtggccccagtgatgatggtggccgcctgg

SEQ ID NO: 39840 - DNA, 947 bp, Artificial sequence
  DNA replication origin
gcgcacacggacacgcgcgcactcgaagactcccgcgcgctcgcacccacgcgcacctggccacgcgcgtgcattcccgcccacgcgtccctgccccgcccccggcgcgcactccgggttcgcaagtcgcgcgtcggggcggccgccctgctccgcgattggcgggagccggagcctccctgaacccggcgcccacaccatgggctgagcccgtcggcgccgagggagttagtgcgacccggctcggcgcgcacggccaaggcacgcgcgctggcacacgcgggcgcggacacgcgcggacacacacgtgcgggacacgccctcccccgacggcggcgctaacctctcggtaagtccagcgccccacgcgacctgcccggctcccacgctggctacagcggctgcggggacggggaggaaggcagcggggtggccctaggggctcactctgcagggctcttccgacggcgccgggacaggtggggcgtccagcgccgggagggacggctcgccagtgcggggtcccagggaggcgcgtgcagtcgggtgcggatggagaggagggggcaccccgaaattgacaagggccaggagagcacaccgcggggacttcatctggggccccgaccaagaggttatttgtccttgtctggagtggaaatcagggttgaactaaaaaagctgacgcttggcctaaagtagggaccaggtttgaggctgggttgtcactgtccgctgggtcctgatggtggaatgacccccgacggcgccttcccgcacaccccgcaacaccggctctgggaccagctctcagcgccaggagcggtccctttcctttcccactctcagtctcagtcttttcacctttccattcttcagcctgcagctgttaagtttatttgcctccagtttaccaccctaattgcaaaacttggcatgttaaaaaa

SEQ ID NO: 39841 - DNA, 1116 bp, Artificial sequence
  DNA replication origin
aggaagaggaggagggaggcggaggagcagaggctgggacggccggaggagagagtccggccccagcaggaaaggaacccagcacgcgactactggaggggcgaggagcaagggaaggaccagaggggaggagagggggtcaggggagggaaagtgtgggagggggagccgcgggggtgcgcgctcctcctaactcggggtcgcttttagcgagaagtgatatttttccagcctcattgaaaaccgttgcaaacattgaaaatagtaaaagtgaaaacggttgcgacactaagacgtttataaaatgaccgcggactgccctcgatgctgatgagaactgggacgacgtcgcgcagagcgtccggagggagaggcgcggtgcccgggacctcggtcgtggggaggagccggatacagccgccgggacgcggggatgccgagggcaccgcggcctggtctgaccgacgcacgcggtgacagccgcccttgggagacgacggcgtctgcaaccagcagcctccaaagggtgcagccaggaggctcagcttgtccgcctccggggctcggggctaagccccttccagaagttttcgtttctacgcgaattccgaccgcaaaatccagcttacctgagcgccgctcctcttctctcatgtccctcgggggccgtcacgaccgtcccggagcgatctctaggaacctgtcccgcagcgatctcttgcacactctccccattccgaccaagtgaaaactacccatgtccctccctctccaaactttaacagccaagaatttcagcaaacagccagaaagaaagctaagtctccccccgccccccaccccaagggaagggagggaataagcactcctttaatttgaaaaataataattaaaactccctcaacttttaaggccgagcaacataatctattaattggtcgctattaacatgcagttttattgaccatagcacacagaagtctgattgtgagggaggagtgttttcaatgaaagtggagttattttagctgcagacgtgtttacatttctgtggtttagtctataactttctctttttcttgcttcagaattctgctccatgaagcaaagccctta

SEQ ID NO: 39842 - DNA, 978 bp, Artificial sequence
  DNA replication origin
ggggggcactgacacgcagatctcggggcgctgccgggggtgcaggtgggggtggcggctgctgcgaggactctaggggcgcgcgtctgagttccgcgccggctcgttttccggttatggagtggcctccggggctggcggggtcggccggggggttcctgcgtgctagggccgctgtcttcggggtcgcctagcggcgggcgcggccagggcgcgctggcttgtttcgctcgcttttgtttttaaaaggaaacgcaggcctggtagggggtcctgcccagtggatgtcccggcgaacatgatttcgcgaacgggagtgggggcacaggagagcgtgtccgaggtggcctggcgccccggctttgagggtgacttcctggagcggcgccgggcccggaggatctggggcgcccaagacacctgaaggctgcggcaccgcgggaacctgcggggcgcggggtgccatggtcacctgctcgccgcgtccagggcccgggctggggacccctcggtcgtgcgaggagagcgtggggaacctgtcggaaatgagatctggttgcgctgggctgcctttattttctcgttcctacagcatttgaatgaagaggtaactgagtgtttgcttgtgtgtgtttgggttgcgtgtgtgttatcctattttattttttacggcaggagaccttttatgttagcctgtacacaatttcagggtagcctaaaacagtagttgacgcgctagttatttagaaagtaaagaaatgagcagtcccctttggagacaggagtaatttattttaattcgccagtaagagattatatttgttccatacaatggaagcgcctgtgcgttatctgcctgcccacaccaccaccaatcagagagataaatctccacgttaagctttattaaaattctgagtagtagcgcagcacagtaaatgttagcaccgaccatccgcagggaaatgctcagatact

SEQ ID NO: 39843 - DNA, 887 bp, Artificial sequence
  DNA replication origin
tgtggtccagacatacaatgaaatacagtccagccatggaaaggaatgaagcgctgacgcatgctacaacgtgggtgaaccttgaaaaattatggtcagtgaaagaagccagtggcagaagaccacatattgtatgattccattcagaggatttgccacaataggaagatccctcgaaacagagaaagcaccttcgtgggtgccggggggctggggggtagggggaaatggggagtgactgctaatgggtacaagatttctttttggagtgacagaaatgttttggaattagaccatgctgatggttgcccaacaatgtaatgcactcaaaaccactgaactgtgcaccttaaaatggttaaaatggtgaattttatggcatgtgaattatgccttcatctttaacaagagcatcagcctgtcttcctgctctctggtggacagtggagaagaaaggaaaggaaggaggtcaagaacaaaccctttcctcctctcccagctgaagagctttgcagacggcggggagggcctggaggggccgctctctgggcagctgagggttgcttttccacctaaagggcctgtctgccatgtccttcctggcgcatcctgagtgtcccctgggctgtggtcctgggacctcccccactcttctgcccttctgccgcgatggaaactgggcctccctgggctgctgctctgccttggaaggaaatgggggacacttgcttggctcttcagcacccgccccgtgcttccgcgtttgtgtgaagggcaaaggttttagcgatctcctgccaggctcagatccgctcctctacacggcacgccttgctctggccaaggctccattcggaggaattcgggtgcggcacagcgtcagggtc

SEQ ID NO: 39844 - DNA, 1248 bp, Artificial sequence
  DNA replication origin
aaccaaaaaacaagaaaaaggggtggttctcattctctttcttgcctgccgccatgtaagatgtgacttttgccttctgctatgatgtgaggccaccccagccacgtggaaccgtgggtccattaaacctcttttctttataaattacccagtcttgggtatgtctttgtcagcagcatgaaaatggactaatacaggctgcaccctggtcctgccttctgctgtgtttccctgaggcagcaaagcctcctatgaaacgtgtcttcctttactgtctgcctcacctcctcactccatttattccgcgtttcactgccacttctatgatgagccgctgctttggaagggtcccctaaatggtctgctgatggcttggccttctgagcctccctcactccctgtgcactggggtaggccccttctcctgcagacaggctctcaggccacagggaatgggtatggaatggcaggtgtggccggaaacatggggatgtgtgaggagtgtgtgcatgtggggtgtgtgaatgtgagcatgtgtgtgtgcatgtgatgtgtgtgtgaatgtgagagtttgagagagtgcatgtggggtgtgtgaatgtgtgtgagcgtttgagattgtgcatgtgtgtgtgcatgtgatgtgcgtgtgaatgtgtgtgagaatttgagagtgcatgtggtgtgtgcatgtgtgtgtgaatgtgtgtgagagtgtgcatgtggtgtgtgtgaatgtgagcatttgagtgtgcatgtgtgtgtgtgcatgtggtacatgaatgaatgagaatgtgtatgtgtgtattgggaaagtgagtgtgattgtgtatgtgtgagtgtatgtgagcatatgtgagtgcaagtatatgtgcaggtgttcatgtatgtgtgtgtgtgtgcatgtgaatgcatatgtgtatgttggtgaacatcagcccgagagtgtggacaccagagtgagtgagagtgtgtatgagtgagtgcaggcgtgagtgtgagcatgagtgtgagtgtgtgagtgtgagcatgagtgtgagtgttagcgtgagtgtgagcgtgtgagcatgaatgtgagtgtgtgtgcgtgagtgtgtgtgtgaggggtgaggttgcagtaggtgtcttactcatctaactttgtcggtggaacaggcgctcccctcccatcttgaggtgccctgtgcggtgagctccgggcttctgaggacaagagtgtggcagagggcgccacttatggcatgagtg

SEQ ID NO: 39845 - DNA, 1529 bp, Artificial sequence
  DNA replication origin
cctccggaggccgaggctggcggatcactcgcggctaggagctggagaccagtccggccaacacagcgaaaccccgtccccaccaaaaaaacatgaaaaccagtcaggcgtggtggcgcacgcctgcaatcgcaggcactcggcaggctgaggcaggagaatcaggcagggaggctgcagcgagccgagatggcagcagtacagtccagctttggcccggcatgagagggagaccgtggaaaggagagggagagggagacgggagagggagagggagagggagacgggagagggagagggagacgggagagggagagggagagggagacgggagagggagagggagagggagacgggagagggagctaaaattttcttttaaaataaaaaaattagctgggtgtagtggtgtgtgcctgtagccctacctacttaggaggctgaggcaggaggatggcttgagcccaggagttttaagcagtgagctatgaccacgctactgctctccagcctgggagacagagcgagacccccactctaaaaacagaaaacaaaaaaaccctcagccttggaagactttgccttccatgtgcctccaagcaaaggtaagggctctctgcagttgggagtcgggcccaaaacaagacgctgacacatgcggagaacatgagaaaagaaaacaagcccaggggattcccacggtttagaagcagaattttagccccagcacttcaggattttcaggaatttatcagcaagtaggaattagaactatcagaacacactgtgtctaaggagggtaccatctttgaaaagcagaaaggtcatgtgtttggatacgtgagtagtgggtgcaaatctcagcccccagacccgagggcctatacatgtgctttacttttctgtaactggattttagcttctctttcgggcccacgttgcaccatgacaggaagagatttctgccagttcagaaatggcccctttccctgggtgtgctcccatgtcagggactgacccagggcaatagtcttgaggaagctacagtgggaaggctcattttcaaccttttgtgttggcatctatggacacagccttgtggccattcttgccactgtggtgactgatccatgttctccaagtgctgacctcagggacctcttagggctatttctgccacagagggatgcattcagatgtgcttggcttgctgaggggtgtccagggacagtgaggaccatttcaggcttagcttcttgacaccacaggaaggtatttcttctgctcccactgcagggagcccattctgtttcttgtataattcaattataagcatgtctgatgcaaattctggggtcagacactttgctgggctctgtcctctgatcatgggattctatgatctcaccctctgcctagtcctggcttccaaagtggggtatactcagggaccccagcaacacacctgtgctctttgtctccctattctttgtccagacatcctttaattccatctctggggatgggaa

SEQ ID NO: 39846 - DNA, 1137 bp, Artificial sequence
  DNA replication origin
aaaatgaaaagtctcccatgtctacttctttctacacagacacggcaaccatccgacttctcaatcttttccccaccttgcccctctttctattccagaaaaccgccatcgtcatcatggcccattctcaatgagctgttgggcacacctcccagacggggcggctggccgggagggggcgctgacccccccccacctccctcccggacggagcggctggccgggcggggggctgagccccccacctccctcccggacggggcggctggccgggcagaggggctcctggctgggcagaggggctcctcacttcccagcaggggcggccgggcagaggcgccccccacctcccggacggggcggctggccgtgcggggggctgacccccacctccctcccggacggggtggctgctgggcggagacgctcctcacttcccagacggggtggcagccaggcggaggagatcctcacttctcagacggggcggttgccaggcggatggtctcctcacttctcagacggggcggccgggcggaggcgctcctcacatcccagacggggcggcggggcagaggcgctccccacatctcagatgatgggctgccgggcagagacgctcctcacttcctagatgggatagcggccgggacgaggcgctcctcacttcccaggtgggacggcggctgggcagagacgctcctcactttccagactgggcagccaggcagaggggctcctcacatcccagacaatgggcagccaggcagagacgctcctcacttcccagacagggtggcggccaggcagaggctgcaatctccgcactttggggggccaaggcaggcggctgggaggtggaggccgtagcgagccgagatcacgcccctgcactccagcctgggcaccattgagcactgagtgaatgagactccgtctgcaatcccggcacctccggaggccgaggctggcggatcactcgcggctaggagctggagaccagtccggccaacacagcgaaaccccgtccccaccaaaaaaacatgaaaaccagtcaggcgtggtggcgcacgcctgcaatcgcaggcactcggcaggctgaggcaggagaatcaggcagggaggctgcagcgagcc

SEQ ID NO: 39847 - DNA, 896 bp, Artificial sequence
  DNA replication origin
gtctctgcccggcagcccatcatctgagatgtggggagcgcctctgccccgccgccccgtctgggatgtgaggagcgcctccgcccggccgccccgtctgagaagtgaggagaccatccgcctggcaaccgccccgtctgagaagtgaggatctcctccgcctggctgccaccccgtctgggaagtgaggagcgtctccgcccagcagccaccccgtccgggagggaggtgggggtcagccccccgcacggccagccgccccgtccgggaggtggggggcgcctctgcccggccgcccctgctgggaagtgaggagcccctctgcccagccaggagcccctctgcccggccagccgccccgtccgggagggaggtggggggctcagccccccgcccggccagccgctccgtccgggagggaggtgggggggggtcagcgccccctcccggccagccgccccgtctgggaggtgtgcccaacagctcattgagaatgggccatgatgacgatggcggttttctggaatagaaagaggggcaaggtggggaaaagattgagaagtcggatggttgccgtgtctgtgtagaaagaagtagacatgggagacttttcattttgttctgtactaggaaagattcttctgccttgggatcctgttgatctgtgaccttacccccaaccccatgctctctgaaacatgtgctgtgtccactcagggttaaatggattaagggcggtgcaagatgtgctttgttaaacagatgcctgaaggcaacatgctcgttaagagtcatcaccactccctaatctcaagtacccagggacacaaacactctgcctaggaaaaccagagacctttgttcacttgtttgtctgctgaccttccctccactag

SEQ ID NO: 39848 - DNA, 725 bp, Artificial sequence
  DNA replication origin
cgcggtgggggtgtggccgcgagcttgggctgtgcgcggagggcgtggcctgtgcggggcgggacttattgcccgcgcggtgagggagcgtggtctcgcgcaagccggcgtgcggtcccgcggcgctgcagttgtgtccagccggtcacggggcggctatggcggccacgttcttcggagaggtggtgaaggcgccgtgccgagctgggactgaggacgaagaggaggaggaggaggggcggagggagacgcccgaggacagggaggtgcgtctgcagctggcgcggaagaggtgaggcaccgggataagggcagcgcgctcaccgcagctggaaggtgcgcgggcctggcagccgcgacggcgcctaaggccggggctccgcggtcttccgagtggcccccgcggttgccgccgctccttggctctgcttgggccctgggtctccgtgaagccgcggcgtccagcggcgccagccccaggtgtgtgtggttctcgcgtggatctgctggcgtttcgtggagtccagggtgaagccgctgtgggagggctgggttcaaatccgttctttaaaggctttctggagcgtttctggagcatttctggaggcttggtgtcttgcggactcgtgatcttcccgcttgtcacactgtcttgggccgcagcgctcccgcgggccccaccacgtttgtcgtggattgttcacggacacaccaattccctcgaa

SEQ ID NO: 39849 - DNA, 1035 bp, Artificial sequence
  DNA replication origin
agtgacgcggaggcaaagacctgggcgccgcagcagcgagtgggggaggggagggcgcgtggtccgaatccctgcgcgcaatgaggcggctgcccgggctttgtgaggcggcagcgcgacgccgggtggcccagcagcgggcgggtgccgggggcggaagcgcggccacaagagggggcgattcaccgccgccccccgtgggacctgggtcctctacgcgggaccgcaggggccccgagtcgcgggttgggcaaggtcgcccgctccgggtcgctcggaagggtcatttcacggaccggtcgtctggggccagtgcgtcttgccccgcacggaagacccctcgcttcgaggacaggaaagcttttaaagtgaggattggctcgccgcgcctcccgcagaggggaacgccgcccggacccgcgctcctggggcgggggcctcgtatgctggcgttgccggagcgtctgcggcgctgaaggctgccgagacccagccacatcccccacaagccagcagcccggcagaaaattacataaaatgcagcgcttcgccgagggggtgcgagtcgggggagcagcgcgcagctgcggctgacggctcggctggatccatccaagcatggacaggaaaacgggactgtggggagagggtggtgcagacgggccgcagaccctccttaggaagagaagccggaaactagggagtcatgtgcagttagaatcctcttggaagactagtaggatgtgaggttggagaggtggacgacgaccagaaaattcccttgtcttgccaggcttctgacctaactatgagtttcctccgcgcatccagcctgccctgctctggcccctaaagtacagcagtaacactcagtggtgtccctgccttcctggaatgcgcgttaacaattctgattcttactcatggcaataacctacacaccacatagacgttaaatgtggttcgggtcagactctagggcaggactcactgcctgcaccttgtcttggctccaccagcttgaccttgagcaag

SEQ ID NO: 39850 - DNA, 944 bp, Artificial sequence
  DNA replication origin
cccggccggcggggagggggagcccgcggccggggacgcggggggaggaggaggcgggctcccaatccggttccatccggttctcccaccgcccccgctgtgggtctcagcagctcgggcggcgggaggagtggcagcggcaaggcagcccagtttcgcgaaggctgtcggcgcgccgcggcccgcaggcacccggcacgcgccttccccgcaggcacccggcacgcgccttccccgccgccacgatgcccaagaggaaggtgagcggcggccgcggcccgcacacgccccctggagccgccgccggcgccccgccgggccccgcgaggcccaggccccgttgcacccacggtggcgacgggcccgggaggcgcttggagaccggcgggcgggcaggcgagcgctcggcggccgcgggggcgggcgttctggaacgtttggcggccgggggagctgagggggctattcgaacggggcggcgggaagccgtgacgtcacgcggccgggcattgttctcggggccgggcgggcccgcgagtcctgggactgcggcccgcctctattcgtgcgtctccgtctccgcaggtcagctccgccgaaggcgccgccaaggaagaggtgagtgcgggccttctgcggggggtggtgggtttcccgtgagccgctggcctgccttctcttctcgctgactctcctttttctttctccaagcccaagaggagatcggcgcggttgtcagctgtaagtaaagcgagccccgtaaccgttcgttttccgcgggtcgtcccgggtgaggacgctcagtgctgcttttgcctttcagaaacctcctgcaaaagtggaagcgaagccgaaaaaggcagcagcgaaggtaagcctcgaaacgcgcattgggatgcagcggggccttaggctacactgcttcttaatgcggggcttccatt

SEQ ID NO: 39851 - DNA, 1058 bp, Artificial sequence
  DNA replication origin
tgatttaagtgttccaaaactggattgtggtgatggttgcacagccctgtagatttactaagaatcccccaaggcaggtgcatcgcttgagcccagcagtttgagacagtctaggtaagtaaatggtgaaaccccgtctctacaaagaaatttaaaattatccaggcatgatggcatacacctgtagttccagctgactcgggaggctacagcgagaggattgcttgaggcttcagtccaggaggtggaggctgcagtgagctatagtcacaccactgcattctagcctgggcaacagagtgagaccccgcctcaagaagagaagagacgaggggaggggaggggaaagggggaaggaggaggggatggggagggggagggggagggagagggaagggaagagaggagggaagggaagggaggagggaagggggaagggaaggaaaaagggaagggaagggaagggggaagagaagggggaagggaagggggaaaaatatattccattctcagaaaaaaattaaatcattctttccagcagcatatccaattgggtagaaaaacattatttttaaaaatgaggcggggcgtggtggctcacacctacaatcccagcactttgggaggccgaggtgggcagattacttgagaccaggagttcaagaccagcctggccaatatggtgagaccccatctctactaaaaataaaaataaatagcaggatgtggtggcgtgcacctgtaatcccagctacttggaagactgaggcatgagaatctcttgaacacgtgaggtggaagttgcagtgagccgagattgtgccactgcactccagcctgggccctgtctcagaaaaaattaaattaatttttttaaaaaatgaggctgagtatgatggctcacacctgtaatcccggcactttgggaggccaacatgagatgattccttgaggtcaggagtttgagaccagcctggccaacataatgagaacctgcctcaacaaaataaataaaataagctgaggccgggtgcagcggctcatgcctgtaatcccag

SEQ ID NO: 39852 - DNA, 947 bp, Artificial sequence
  DNA replication origin
catttgtctgcatctcagtttgcctcttttggtgcttctctaaaaaataaaaaaggaagagcttaaactcctacatgattcctgtctttgcgctgggaagaaggctctgggttcttttgttcttcaggacagtcccttgtaaagctcttgccatagttctgttccaggggcactgtcatatttatacctaacaaagctaaggggtgtctttacatttttagcttgttagcaggatgcttatatggccttgctgacccggtttaaaagttgcaatttgcaaaatacatactgaaaatactgcacttttacctatggaagttgtaatttatataaggaaattgtaatttatataatcctttaaaaaacttactcatacgaaataacagagaacggggaaataccattaagactgtcatgctcaagtgggggaggggcagactcagggaaaccaattaggaagcaagtaaaataatccacgcaccagatgatgggggcctggaccaaggtggtgacagtggcggttgagagaaatggtagaattgtgaatctattctgggtgcattttgaaggcagtgctgacagactgaaggtgaggaagagaaaaacaggactcaaacaggatgcaagactcgggcaactggaggatggaatttccagcaactatgatggattaagattgtgggaggacaggcttggcttggggaattattgagcgctatcttggacgagctgtgtttgagatgccgtagacatccaagtagggatgtggcaggcagctaaatgcagggatctggtgttcaggggaggggcgagggctgggaatgcacacttggggctcactggaattcagataggctctgagtacaggcgactggatgagttcatctagggattgagtgtagacagaaaaaaggctcaagctcacattcagccgtgaaaactggtct

SEQ ID NO: 39853 - DNA, 1311 bp, Artificial sequence
  DNA replication origin
ccgcggcgcggccgcgcactgcaggcgtgctcttctgttttctccttcgttccttttaaatgaagggaaagaaaattgttacagaccaaatgtcatcaaacttggtgtgaaaacatactcatttataaagtcttatcgctactcacgccacgccccgaggaagttgtgttcctgggtgggcacggtgcggacacaagacttagggaatcagcactggatggaaacatcgcacaattaaaaagaatggcctaatcttaagcaacaacaacaaaacaaactctgaagcaccctgcggcaggcagcttctgcatcgtgggggttgtggaaggggctgatgggcaggatcatgagaaagacagcttttcattaagagatgacaccaggggttttgactttgggaggaccagaagggagtctgtaggtcattgctaaatacagtgaggtaccttaagactcagtaatgaacattattttaaaaacaatatctgtaccgtgtgtgtgtgtgtgagtgcgtgtgtgtgtgcgcgcgtatgtgtgcgcatgtgcacgtgtgttctcacacacaccgcaccataattttccttcgtggttttgtttcgttttttgtttaggtttctgactcttgagggataaatacagcttccaaataatagcaactgaatctgcagtaatcagatgttggaaaattatttttcactggtcctttatgttagcatagcaaacttaagtctttgttatatgtggccacctattgtaaatattaacattacttctcatctccacatcttcctcatttactatttttgtctttttcaaagagatggagatggaggaggagtagaatttaatgaagatacagatctggggaagtgtcatgtttcgttgggtgcttggggtaggcagtggctgctgttgagagtattttacagatgtaggaagtcttcggaggggcatttctaggtaaatgcatgctgattctgcccatctttacatgtaccttttgtggtgtttcctctttaaaacaggtgcgtgtaatatgcaaatttggtttcaaagggagaattttatatcttttaaggaatgattgcatgtgtattaagtcttgtttcctatctcctttcattttttccttctcttttaaagtcagttcgtcttaagtagtttctttgttaggtaaatttaataataataaaaatctgacgtgttcaggaaggagctcagtgtgaggcccatggacgttacctcctggagatgcaaatcggaaagagatgtttcactatgctgtcacctcagaagattgacaaggacaag

SEQ ID NO: 39854 - DNA, 854 bp, Artificial sequence
  DNA replication origin
ttcactatgggaaatcaggtaggcagtggattgaagagcaagaaagagttctaggctggagataaatggaaacatcatcaacatatttaaagccatgagacaaggtgggcccctcggaggactgggtataaccagggaagaaagggggccccacgcagagcccaggatcctccagcacgacactgtcagagcaaagagaaggagcaagcaggggagatggaaaaggcgagcagcaaggaggagggagaccaagagcacccggtgtcctggaagctggtgatgaggactcgccacgtcaagcaggaggagaacaagaactgcccacaggacccagccacagggggtggtgggtgccctgagaagggccatgtgggtggagtgggggtgcagaagtctgatgagacggcatttgggaaagaagggaaggattaggacgaggcaacagacaagtaaaactctcgtgcggggttccaccagaaacgcaacaggatggggcagcgggacggggaagggggtcagggaaggggtcggggaaggtggtggccatttctggtcaggtggaaaatggcagcgtgtctgtgtgctaatggggtgatccagcagaggggacagcaggtggtaggacgagagtgaggccacatcaggagctgtggaagaagagctggagtcagtccaataccaggggttctggcaccacgggggccaagtggcttctgccacagtcacagtagaaggcagagtacggaggtttgggggctgggtgtaggcgtgtatggttgggggagtctgaggaggcaccccagagaggcagtgggagcagccaatgcaatgtgctcccacagctccgtcagcag

SEQ ID NO: 39855 - DNA, 887 bp, Artificial sequence
  DNA replication origin
tacagtcttgacagaggtaatcaagctcaagtgaggtgcttagggtgaactttaatccaatatgagtggtgtccttacaaaaaggagaaatttgggaacaattatactcattcagggaagacaattatctttgcctgttttgtgctgcaataacagaacaccacaggtcatgtaatttataaagaaaagaaatgtattttgtatagttctggagagtgggaagtccatgatcaagctgccagcaggttcattgcttagtcagggtctggcctctgcttctaagacggcgccttgaacactgtgtcctcgggaaggggtgaatgctgtgtcctcacatggcagaggttccaggcctcagagacatcaaaagtgtgtgtgtgtgtgtgtgtgtgtgtgtgtgtgtgtggtgggatgtggtgtgggatgtgggaggtaggatgtggggtatggtataggggagcagggtgtgtgggaaggtagggggctgtggtgtgtggaagtgtatgtgtagtgtgtggtgtgctatttgtgtgtggtgtgcatatgtgtggggtgtctggtgtttgggtgtgtttggtatgtgtggtgtgtggtatgagtgtatgtgtgtgcacagtgtgtgtggtgttgggggagtgtctgggagtgtgtgtttggtgtgtgtttgtgttatatgtgagtgtgtgtgtgtagtgtgaggggtgtctggtgtctatgggtttggtgtgttgtgtggtatgtgagtgtgtgtgcacagtgtatggtgtgcgtgtttgtgtggtgtgtgtgatgtgttttgtgtgggtggtgattgtgcatgtgtgtgtagtgtggaaagtgtcaggtgtgtgtgtatttgtgttgtatgtgagtgtgtgtgtgtaatg

SEQ ID NO: 39856 - DNA, 1920 bp, Artificial sequence
  DNA replication origin
atctacaaattaataaagtaacttaaactttccctgataaagaatttttgcttgcttttatgcataaaaatatacaattttctcttcatgtgatctattaaattttcctctgattagaaatgccatgtatactattactttacaaaactaacaaactttgcaaaagggtgaaaagttctctgaggctctatgagcggttaataccaaatacaactttggagaattcctaccctgtacttgccttgagatagttgttttaacatatttgaccttttgtttcttcatgtgtaaagaagcatacttatactgtgtggggttttttagggaaagaaaatgaaataatatacataaagcaccaattacaatgggaaaaaacagtgttcaataagtggaagtggaggtggtagaggtagtagtagttgtggtcattgtggtggcattcatgttggtgtgggatagtaatggaatgatggatggttgtggtgatagtgatattggtgttgggatagtgatggaataatggatggttgtcgttatagtgatgttggcactgggattgtgatggagtgatggatgttgtggtgacagtggtgttggtgttgggattgtgatggagtgatggatggtggtggtgacagtggtgttggtgttgggatagtgatggagcgatggatgttgtgacagtggtgttggtgttgggatagtgaagaagtaatggatggtggtggtgatagtgatggtggtgttgggatagtgatggagcgatggatggtggtggtgatagtgacggtggtgttgggatagtgatggagcgatggatggtggtggtgacagtggtgttggtgttgggatagtgatggagtgatggatgttgtggtgacagtggtgttggtgttgggatagtgatggagtgatggatgttgtggtgacagtgctgttggtgttgggatagtgatggagtattggatgttgtggtgacagtggtattggtgttgggatagtgatggagtgatggatgttgtggtgacagtggtgttggtgttgggatagtgaagaagtaatggatggtggtggtgatagtgatggtggtattgggatagtgatgaagtgacggatggtggtggtgatagtgatattggtgttgggatagtgatggagtgatggatggttgtggtgatagtgatattggtgttgggatagtgatggaatgatggatggttgtggtgatggcaatgttggtgttggaatagtgatggagtgatggatatttgcggtggtagtgatgttaatattggaatagtaatggagtgatggatggttgtggtgatagttgtgttggtgttgggatagtgattgagtgatggatggtggtggtgatagtgttgttggttttgggatagtgataaagtgaagcatctttttagtgacagtgatggtggtaacatcaaggatgatgatggaagtagtggaggttaaagtgtggtttgttggtgaagtttgtgataaatatggtggtaaagttggaagaagtgatagaggtgcttctaccattaggttaattttatggcagtgatgttgatactggtggttgtaatgttggtgatgtcagtggtagagatgctattgctggtggtggtggtgttcacagtatttttgacagagatgaagctggtggtgatgatggtggtaaagatggtagtagtgatggtggtggcttggctgtgtgggggacctgagggagtggcattgatgttggcagtggtgacagtgacctgcagaggtggtaagcattgattggtggtggtggtcatcatggtggaggtgccagttagtgttgtaattgaaatagaaagataacctagagatgagttagcacactacctttgtaaaaaacagctttattgagatacagttagcatg

SEQ ID NO: 39857 - DNA, 1138 bp, Artificial sequence
  DNA replication origin
gaaaccgtggacaggggggggttaccagagaaaccgtggacgggggggggttaccagagaaaccgtggacgggggggctaccagagaaaccgtggacgggggggggtaccagagaaaccgtggacaggaggggggtaccagagaaaccgtggacggggggggttaccagagaaaccgtggacagaacgggccaccagagaaaccgtggacaggagggggctaccagagaaaccgtggacggggggggttaccagagaaaccgtggacagaacgggccaccagagaaaccgtggacaggagggggttaccagagaaaccgtggacggggggggttaccagagaaaccgtggacagaacgggccaccagagaaaccgtggacaggagggggctaccagagaaaccgtggacaggagggggctaccagagaaaccgtggacggggggggttaccagagaaaccgtggacaggagaggcaacaagagaacctgcggacaggagatggcccccacaggaacagactctgaagggcaggctgccttccaaggaagggaataaagggaggcaacaaactgcagacgaatctgctggaggtccccagacaatatgctcgaagggatgttaaaggtggccttgggtccttgtaggggagaagcagtagtccctgggaatcagaaaatatggcaaccaaggcaacctgtgtaattgccacctatgggagaagaagaatgttccagataaggaagggacagcttcactgtgcctgtgcccgctcagatgacgcctctggtgctgccactgggcatgaccagagttaggggggcaggagatgatgacaggagatacaataacaaggacttggggtgttcagtgtttcctggaaaagagtaaaccaaggaaagtcatctgttgtcaaatcctgggaggactgtcatttggccaaagggttaagaggtgggaggagagacactggatccaggaaggtctattttggtgcaataaatgtaagaacttgtagcagtcacagctggccaaaggcagagctgtgctccctgggttagtgagtttctgtttctcggattgttcaagcatagagtgaatggtcacttgcagaagttctttctgttacgaatgtgaagt

SEQ ID NO: 39858 - DNA, 1463 bp, Artificial sequence
  DNA replication origin
gaaaaagaaaaaagaaagaaagaaagaaaaggaaggaagaaaataaaggtagaagagagaaagagagagagaaagagagaaagaaagaaagagaaagagaaagagagagaaagaaagaggaagggaagggaagggagcggagggggaggggaggggaggggaagggagcggaggggaagggagcggaggggaagggaggggaggggaggggaggggaagggagcggaggggggggggaggggagggaaggagaggggaggggaggggagggaagggaagggaagggaagggaagggaagggaagggaagggaagggaagggaagggaagggaagggaagggagacctgagcacctgtgtcacaagaaatacagtaattactaagagaagtaatttggagtatgaaagtaattaaggttaaatcgggtcataagggtggcccctaatcggatagaattagtgtccttgcaagaagaaacatgagaaagtcagtcatgtaaggacagcaggaaggcgtccatctgcacgccaggatgaggcccccatcagaacctgaccatgctggcagcctgatctcaatcttctaggctccaggactataaggaaataaattgctgttgtttaagccacccagtgtgtgatattttgttttggcgtccagagctgccaaatacaggaaccaacagaggaagtaggtcaactgtgtacatctaacagggaggtcagagagaaactggaccaggagacagccttgggatttaacatttggaagtcatgggtgatcttgaagtagtgaatttcagtagattgtaacaggcaaagcccaaaatactcactactataaactattatctcaaacagtttgccagaagaaagagaaagaatgaaaggagtgtgtgacagagagagagaaagaaaaaagaaagaaggaaggaagaaagtaaagacagagaaagaaagaagtatggaagttagcaaagggaaaggtttctttaaaactgggggacctgagcacctgtgtcacaagaaatacggtaattactaaagagaagctgtctgaagcaacagagggcacagctgatgaaaagaggtcctagaacgccggagcaggtaaggggaccaggagggcagcacggtgggaggctaagctggaaggaaagaggacagctcttcctgtgggagagaacgtggggctgagccatgaaggaggtagaaagggtcatctgaagaaagctgttctcagcccctgcagagtgaaaagttacgatcctttgaacactggagagtaggtgcagcagagttgagaatggggtgctccaggatgctgagaaaaagcttgggaaagacctcttcagctatacagacgcgggcgcaaaaacacctgagcatccagacaatcagtgaagagctggttaagaccgggccacgcacggtggctcacacctataatcccagcactttggg

SEQ ID NO: 39859 - DNA, 1077 bp, Artificial sequence
  DNA replication origin
ttttaaatgtaactttgtctttttttgtcttttaaaaatgtaacttaattttttttacacaaaatataaacatgaatagaaccccacttaagaaatagaaaagtgtccttgaaaaggcccctgtgtgctcctctccaatcacgtccccaccccaccctacagtaggaacccctctcctgaactccttgttaactaatcctcaatgttctttgtagttgtaccacatgtttgtagccttaagtaatattttgctaagatgtgcatgctcttgaactttatgtaattagaatcacagaggaagagttcttctgggactagctttgttctccacattattgctttgagatttatccatggtgatgtgtgtagtttgttcatttattcaacaaataaattttggaggcaaatactgagtgccacacatggtttctggctgctggggatacagtgtgaacaaaacaggcggaagccttcatcttaaggtagctttattctagtgggtgtgggagagcaatgcatcagataaatgaatatgtagactagtagattgtaattagtgcaaagaaactgaagcagtgaagaagagtaattttaagggagacgtggagtttcagataggctagagtcggtctcgctgagaaggggcacttgagtgaaacctaaacgaagtgatagagtcctggggatgtcagcgggggtggaagagggcttttcaggcagagcaaacagcaaacaccaaggcctgcagcagcctgtgtgacaagagcagggttagcaagggagggacaggaaggggagatagggacagagaggatgttggaggtttttgaacagggtggcattatatgacttatgctttaacaagatttatctggctattgtgttgagcatagagctgaaggggcatggggactggagcgagggctccaggtgggagtcattttagtcattctaacgagagatggtgtggacatggggaaaggagcagcgtgctgggtgcatcacaaaggctgagtgtaggattttctgataggttggatttgaggtgacagaaaaagtgagaaatcaaggactgta

SEQ ID NO: 39860 - DNA, 970 bp, Artificial sequence
  DNA replication origin
aagaattgggacctagctccgcctggagaggagcagcctggggaggaagggagaggtcagatgggtctgtagaaaaggaagattagaaagactcagtgacgcttggggttggtactgaggggacaggcaggagggaaagaaggaagatttgggacaagttgcactgggcacagagactaggaagggactgatgtgtaaaagaatgcctggacatcaggcatctcagaccgtttgcctattttacgacaagaattatttagattttgcaggatggaaaaattcaaagtgccattttctggctacttggaactactgtcgagtttgtactggggtcaagtggcattgcagaagaaaataaggcatttacgttttaggtcaggtgtgagttgaagaggttttaagtttttgagaacacaggctaagggagtagaaggaggaatggagggtggaagtttgcccatagtgaaggaagcaagtctagagaaaagagagaatagagaaatggagggaaggggttcgggggttcttaccttccagaaaagtgggaaaggggttggagcgcagagataagaggtcggggagtggaaataagggattggggtgcagagatacgaggttgggccatggaaataagggattggggcacagagagaggttggggtgcggaaataagggattgggacacagagataagaggttggggtgtggaaataagggattggggcacagacataagaggtcagggtgcagaaataagggattggggcacagagataagaggttggggcatggaaataagggattggggcacagagataagaggttggggcatggaaataagggactggggattcttgccccatagaaaagcgggacttgccactaagggtgaaggagaaggggttgaggggtactgcccctctcccagaaaagcagagaaggggtagagacaaggagagaaggggttggg

SEQ ID NO: 39861 - DNA, 2220 bp, Artificial sequence
  DNA replication origin
ttaacccatgtgtcattttactggggaagaaatggagacttggagaggatacgttgctggaaagtggctccaactcccaagtggtgactccagagcctgcaccccttggtcactcggcacctgcctcagcttttcttcagggctgtggagcagtggtttctgtcccacccttctcaggaagggatcttttcaagcttgtctcttccactgtattggtcaactgggcaaacaaagcccccacatttctggagatgctgctgcaggattgctgcaggactgatgaccttctcctacaggatcctgtcaccacaggatcaccccctcagcctgtgttagggccatcttcaaattgtaaaggaaacagggaaataaagacgcttgaggggaagcaccaaggtactcagataacttttctcttttcattctaatgaatgtgtgtgtgtgcagtatgagtgtgtgcgtgtgtgtgtgcgtgcgcgtgtgtgtgcagtgtgagtgtgggtttgtgtgtagtgtgtgtatttgtatggtgtgtgtgatatgtggtgcatgtggtgtgggtttttgtgtgtgatgtacgtgcttgtgtgtatgtggtgtatgtgtggtatgtggtgagtcgtgtgtgtgtttggtgtgtgtttgtatgtgggcagtggtgtgtgtgtgtgtgtgatgtatgtgtggtatgtggtgtgtgtgtggtgtatgtgtggtatgaggtgtgtgtgtggtgtgagtatgtctgatgtgtgtagggtgtgtgcatttgtgtggtgttgtgtttgtatggtgtgtgtggtatgcggtgtgtgtgtgtagtatatggtgtgtggtgtgtgtgtttgtgtgtgggggtgtgtgtgtgatgtctatgtagtgtggtacgtggtgtgtatgaggtgtgtgtctttgtatgtggtgtgtgtgtctgtgtgtgggggtgtgtgtgatgtgtatgtagtgtggtatgtagtgtgcgtttgtgtgtgtggtgtgtgtgtttctatggtgtgtgttttatgtgttgagtatgtgtggtgtgtgtatggtatgtgtgtttgtgctgtgtgtgtttgtatggtgcatgtgtggtgtgtataatatatggtgtgtgtttgtgtgtgtgtggagggtgtgtgtgtgtttgtgtgtgtgtggtgtgtggtatatgatgtgtgtttgtgtgtggggtgtatgtgtgtgtgagatgtgtatgtagtgtgctatgtgtttgtatggtgtgctgtgtgatgtgtgtggcatgtagtggtatgtagtgtgtgcttgtgggggggtatgtgtggtgtgtgtgtggtatgtggtgtgtgtgtggtatgtggtgtgtgtttgtgtggtgtgtgtgataagtagcgtgtgtgggggtatgtggtgtgtgtatgtggtaggtggtgtttatgtgtgtgtggtatgtggtgtgtgtgtgtggtatgtagtgtgtgtggggtatgtggtggtgtgtgtgtgtctttatgtatgtctgtgtgtgtgtggtatgtgatgtttgtgtgtgtggtgcgtgttcgtgtggtgtgtgtgtggtatgtggtgtttgtctgtgtgcatgtgtggtgtgtgtgttatgtggtgtgtgtgtgcacttgtatgtggtatgtgtttttgtggtgtgtatgatatgtggtatttgtatgtgtgtttgtgtggtgtgtgtggtatgcagtgtgtggggggtgtgtggtggtgtgtgtgtgtgtctttgtgtgtgtatgtctgtgtgtgtggtatgtgacgtttgtgtgcatgtgtggtgtgtgtttgtgtggtgtgtgtgtggtatgtggtgtttgtgtgtgtgtttgtgtggtgtgtgtatgtgcttgtgtgtatgtggtatgtgtttgtgtggtgtgtgtgtggtatgtggtgtttgtgtgtgtgtttgtgtggtgtgtgtggtgtgtatggtatatagtatgtgtttgtgtggtgtgtgtggtgtgtatggtatatagtatgtgtttgtgtggtgtgtgtggtgtgtgtgtggtatgtgtttgtgtgtatgtgtgtgtgtggaggtagtactttccctttcctaaggtggggacagaggatgtccagagagcagcttacagatatggggaactgagctgagtgcagtgaggggcctggggaacttagtctgcatccctctccccaaataatgtccaggatatttcttcctcttgctccagaact

SEQ ID NO: 39862 - DNA, 1657 bp, Artificial sequence
  DNA replication origin
ccagctgcctgttttcttgcagcctgcaagctgagaatggtttttgcctttttgaatggtgaaatttgaaatgattctgtaagttcctatgcacaatcctccatattccctcttggccctgaaagcctaaaatatttacttacctggccttttaaggaaaggcacattgcctcctgttatgaaagaacgattgcagcaatgtgggtaagcatccggcggacagggtggaggccaccaaatcaggagattgactcgatttgtcctcgatgccacagactttcgtctcctcatttctttttgcctagacatcctctttcagaacttcccacagggatctcagatcctgcctccacttcccatctccctttctacctctctagcaagctcctctcataatggggcctgatgaagtcactcacattgaggaaatttacaatgtgctgggaaatgctattcattctgagaacctttcatttatctagggataatggctttaaggaaaaggaatcggtgtccgagttttgaattccaagattcagtcagtgtgtgtgtatgagtgtgagtgtgtgtgagtttatatgcgtgagtggggggctatgtgaatgtgtatgtgtgcatgtgcctgagtgtgtgtgggggtgtgactgtgtatgtggtatgtgtgaatgtctttgtgtgaatgtggggattgtgtgagtgtgtgtgtacaagcatatgtgagtgtatgggagtgtgtgtgtatctgtgtgtatttacgtttgagtgtgagtggggaatgtgtgtgtgttgggcgtgtgagtgtatgtgcaggtggtgtaagtgtgcacatgtgtatgcttatatttgtgtttgagtgggggtggagaatgtgtgtgtagtgtgtgtgagcgtgtatgtgtatatttgtgtttgagtgggggtgggagatgtgaatgtgtatttgtgtgtgagtttgtgttgggtatgtgtgtgagtgcgtgtgtgagtgtgaatatgtgtgggtatgatatgagagtgtgtgtgagtgtatgtgtgtgagagtgtgtgtgagtgcttgagaatgtgtgtgagagtataagagtgtgtgaaggtgtgtgtgagtgaatttgtgtgtgggcgtgtgtgagtctgtgtgagtgtattgggtctgcaagtgtgtgtgtgtgtgtgtgtgtgtgagagagtgtagggtgtgtgtgagtgtgtgagagtatgtgtttgagggtgtgtgagtgaatgtgtgtgggtgtgtgagtgtataggtctgagagtgtgtgtgagagtatgtgtgtgagtgtatgtgtgtgagtaaatgtgtgagcagatgtgtgtgaggccgtgtgtgtttgagggtatgtgagtgagaatatgtgtgtgagagagcgtgtaagtgactatgtgtgtgaggctgtgtgtgtgtgagcgtgagggtggtggtcatggtgagctggtggactggggtgctcccgggcttccgaggtgctccgtgcctctctcctgagtcatctatgggatctggagcctggacctggtgagcagttcactcagtgcatccgatgacctcctctcaggccaggcaggctacaggggttgtgaaatgaagggctgcaccggctctacccgctccccactggaactcggttccctccccgggctg

SEQ ID NO: 39863 - DNA, 1349 bp, Artificial sequence
  DNA replication origin
cggtcccgtcccgtccggcagccgcggctcagcgactcggccggcgcgcggggctgcgggcagggatgggcgcgcaccgggaccggcggcggcggggaggacgggaggagggcccaggggaggaggctcgcgggaggggaggaggctcgcgggaggggagaaggcggaggccggggaggcgggcgcggaggcgcagagccgccccagcccgcgccgccaagttgggcaagttcttctccgctgccccctctggcggccgcgactgccccgcagcggcccagcccctcccccgcggccaaggtcacagcggggctcggggggcgccggggtccacctgcgcctgccctccccaccctcgccgggctcaggccgcgcctcttccccgggaaactcgagtcccgaatttcctcggaaagcgccccagcggccacggccaacggatgtgacgaggctcatctgataccggggggaaagtttcgagaacccttaaaggggcagcgagggcctgaactagggccccggccccgcgcgcttgggggtccgcgggggtctattcgcccggcagtggcgggagcttccgggggtgactcggaggtcagcgaggagagcggtggatcgggaaggagcctggagcctcgcgcgcctttccgagcctgcgcctcccctcgccaagctcctccgcctcatttcagtcgccgggtctggctgctttcgaggcgtttcccgtccgctgcccccgagcccccgccctcagtccagcccgttccccggcctcatcccccggcggcccctgggtggttttaaagaggtctcagtggaggctgggagggtggagggtggaaggaggcagaggaggatgcgagagctttggagaattttccctaaaaatcgggggaggtggggggcgtggctgctgctggcgcctggccccagcctcattgcccccccttactccctctgttgcccacagctagctgcgaagctgggcttcaccccagccaccttccccccacccccgcccccttcgccccctccgccgcgcccctgtccctaatgcaggtcagatgctactggaacccgctgcctcccctggcacccagccctcaggccacctagtaagttgctgtcaggatcccaaatcagggccacgagtccaccctgctgtgatccctgcccttctcccccacctccccttctatccccagccagctctctgcggactgtctaattaatactcgtttagccatagacgccaagacgcagaaatgcgttgagtaatgcaagcaacgagggttattttattttagatactaaaggcaggggggacaattagacaagctaaagtccat

SEQ ID NO: 39864 - DNA, 1377 bp, Artificial sequence
  DNA replication origin
tccgccttctcccctcccgcgagcctcctcccctcccgcgagcctcctcccctgggccctcctcccgtcctccccgccgccgccggtcccggtgcgcgcccatccctgcccgcagccccgcgcgccggccgagtcgctgagccgcggctgccggacgggacgggaccggctaggctgggcgcgccccccgggccccgccgtgggcatgggcgcactggcccgggcgctgctgctgcctctgctggcccagtggctcctgcgcgccgccccggagctggcccccgcgcccttcacgctgcccctccgggtggccgcggccacgaaccgcgtagttgcgcccaccccgggacccgggacccctgccgagcgccacgccgacggcttggcgctcgccctggagcctgccctggcgtcccccgcgggcgccgccaacttcttggccatggtagacaacctgcagggggactctggccgcggctactacctggagatgctgatcgggacccccccgcagaaggtagggacccccggctgctgccgcgggcttttcgggctcgttggagggagggggctgtccagagacgcctccacgcggcttagcgtcgcccccaaagcagcagctgtccccgcacagaagagcggggaacgcagaggggctcgggtgggccggggagcgggggcgctcgctcttgagtcgcggaggacggcagcccccgcccggggcgcactgaggggtgtgcgcgagtgtttcagaacttgtgagctccccctccgcggggctgggcgggagaggagacctggaacttgccgcctccaataacgtgatttccttcttgcgggcgacacctacttccagcgggagacggagcggtgggccttgggcgacgggctattatggggaaaatcacctcgtgttcataccctccctcccccccgccccccccccaccccaccaccatgctgtctcattgctaaagaggctcgtggccggcttccaaaggcgcagtaccctttaaaaaggatttatgcatgagctcagctaaaagcaacccggttaagaagtggctcgcttgctgctctgaggaaggagcagcgtctcccctgcgcccgctttcctttctcggagttggtttgtcagctgtgtcctcgctcatccggcggccctgcccctctgcacggagcgatgcatctacacgcgggtgtgcagagtgtgaaaagcattccagctaccgggaaaaaaacaggggctgagtgaggtgtccggggaccaagtggtatcccgattacaacacaaaaataaaatcaaacagctttccttttctcttactctgatgttcatttactaacactttttgtagcaagaaacaaatgttccca

SEQ ID NO: 39865 - DNA, 763 bp, Artificial sequence
  DNA replication origin
gtcacaaaccttcagtttgtaaaaactacatctgtaaagcacaataaatggaagacaaataaaaaaagctatgccagtatttaattcctgagtgtggatgcagagaaataaacacatatcctcatttccaggaacctacaggccaacaggtgcagctggcacccaaaggagtcctcaagcccagtttgcaaggagtacatgaaagtactgtgggggtgatggatggcaggcaacgccagaagcgttttcacagaaacgtggaaattcatttcacaggacctcaggacacaccctcagaccccatgtaatgttcccaggatcccagcaggaaagacccgggagctgcgcgccagggaccagaacagcgaggagaagtcaccagaccagacctcacgtgtgtgtgtgtgtgtgtgtgtgtgtgtgtggcagggggggggttgtcacagccggaaagggtagatggacacgaggggggaacacacggcaggggaggggcgcagcagaaaagaggagatagacacgaggggggcacaccacaggggaggggcgcagcgggaaaggggagatgggcacaaggtggggacacaccgcaggggaagggcgcggtgggaaaggggagatgcacccaacggccacacccagggtctgaaggctggagaggcaggccatgtagaccagatctgcttcctggggtctactggcggaaacttcctcatagactggattcgcgactgcgctgttcccgtgatccactgcgcctgcg

SEQ ID NO: 39866 - DNA, 1201 bp, Artificial sequence
  DNA replication origin
tcatagactggattcgcgactgcgctgttcccgtgatccactgcgcctgcgcgggcgcctggctgggctcggcgggcatggctggggcaccctggcgccatctttttccaccgtgcgaaggcaggagcccgagactgggtgagaggacgcggggctggcgtggggaggggaaggatggacggggcaggacgctgccgcctgcatctgggaccctgagcagcccgagggagtcgcccccgaagggccccaggttgcctgcaccggcggtttcccacgtgcccaggcacctcccgttgcggctgcgcgtgcagtcgcagacagcccccaactcccgtctaattctcagcccctaggagacccgagcctggcacccatctgcactcatccccagacaggggatggggctgcctgggcatggaccccaggctctggcccaaggcctcctggcttgccccggcctgcaggcagcgggtgggcactcaggagcccccgaccccacacgggcgaccagggactgcattcccagcagaggattccagaacctacttcagggggagggtgacgcctggggatgggatcctcctgcttgtccctgaaaacattgggagccatggaggctttcatctggtgccagtaggaacgttccctgggggcagctgaaaggcatctggaaagaagtgaccgtgggtagggagaccagctaggtggatgctatggtcaaccagcaaaggcaggggctgctggagtgaaggaggagaatttgagatccaagaaggaagtgggatcaaaacaaggaagcacacagttccagggagagattggaactgaagggatgacgtgtggaaccttgtgacctccgcaacacgttttcctcctttatttgaccacgtatattttcattgctccaacaatgcagaaaggaaatgtgtacaaaatcatgagtttccaggcttgaacctcttcatctcctggaaccacactccaggtgggtagaggtctgcaggctgaatgagaggggagcgacgttttcaagcactttacagggagatagaaaagaaagtggggttggtgcgggttccatgcagaggtataggcgatatgcccttggcttgaggagtgaggacatggggatcagtaaagggtaaggagcagtcccatgccagcccaaactaccaacacgtggccactcagtctcacttag

SEQ ID NO: 39867 - DNA, 842 bp, Artificial sequence
  DNA replication origin
ttttagcctatgtgttacttctaaatagcttatactaaatgttaactgttttcatgtgcgtccatgtgaagagaccaccaaacaggctttgtgtgagcaacatggctgtgtatttcacctgggtgcaggcgggctgagtccgaaaagagagtcagcgaagggagataggggtggggccgttttataggatttgggaaggtaatggaaaattacagtcaaagggggttgttctctggtgggcaggggtgaatctcacaaagtacattctcaagggtggggagaattacaaataaccttcttaagggtggggaagattacaaagtacattgatcagttagggtggggcaggaacaaatcacaatggtggaatgtcatcagttaaggctgtttttacttcttttgtggatcttcagttactttaggccatctggatgtatacctgcaagtcacaggggatgcgatggcctggcctgggatgcgatggcctggcctgacaactattacctatgttatgtttattattttaagctttattattactattttatttattttattttattttccttccacacacccgtttccaccctggagaggccagatgagccagactccagggaggcctagaagtgggcaaggggaaacgggaaaggaggaagatggtatgggtgtgcctggttaggggtgggagtgctggacggagttcgggacaagaggggctctgcagccattggcacacaatgcctgggagtccctgctggtgctgggatcatcccagtgagccctgggagggaactgaagacccccaattaccaatgcatctgttttcaaaaccgacgggg

SEQ ID NO: 39868 - DNA, 1579 bp, Artificial sequence
  DNA replication origin
caggtggtcctgcgagtccctagccagttggtggaagagagtcccccggggtccccaaagctggctcctagtccgcctgccctccacggcccccgcctgggagcaccggtgcgccttttctctttggggaggaggactgggagtgctgtcggttggcttctttgtttgggggaaatctctgcagtcccgcagtgttacctgaactccttctgcttcttggttccctactgaggtagggagaaactggaaactcgctgagatgccgggaacgatacggccggcgcggcggggaccgctgggccaggctgctggagggcccccgggcgaggtgcgaacggccagtcagtctcggggagggactgctcgcgactcaggccccgttgcggcgacccgctggcggcgatcagggccggggcctcctggacacccggcaccggcaggaacccgcccgggaggagccggtctggctcctccgcttgcgctccgtgccgggttggggggaaggcggggcacctgggcgcttcggtccacctcatcctgtcctgcccggctcggcacagtggcaccctgagtggtcaagtgctccagtctggcagtgggcgctctgctcgagcacgggtccagctgaaaaactgccccatgtccagaaagtttgtgcgccgagagccctgagcgcttgtggcagaggagggccttcgcccgctccgccgtagagcacagcgcggtggccctgaatcctgttcagaacgccctggtggcagccctaatcacgaggaatcctggtggcttgtttgggaaggaaaggatagcacggcggcccgaggtgagccctgtgggcagggagcacccagggctcgccttcgaggctgcgcagcccttccctccgtgcgaacctgtgcagtggtcccgcgggaaagatgagcgcatcgcgcccaaggcaatgcctgacctcacggagctcccagccgcgagaacctcccgaatcatggaaaattacaaaggctacgcagcccagttacaaggcatttggaaaacctaaagtgagactaagtttgttgacctgtcccaggagatctgggaaggtactccaggaagtggggatgcagccagcctcccctgaaggaaggatgggggttgggagtgtggcagggagagtttaccagcgcaaagggccttggggacgcaagtagctaagtcagtcctggctcctgagctgctgctgtgaagggaggacctggtgggctaggtaaccgggagctcccccagaaagtcactggaggttgctcaggacttccccacctttactgagtgcttttgaagaagtaggacctgccctgctccgctacagaactactggacaggtgaggttagaatgaaacctagcaacaccctcgggtaaggacacactaggctggagagttcggggtgcaacctacgggctgagacctctgcctggagatggccatctacacctcggcctctggttatttttaattatcagctggtgagctggctgggcttttgttctctgcttggacatttgtttggtccccagcagcttcccttattcccaccagcc

SEQ ID NO: 39869 - DNA, 864 bp, Artificial sequence
  DNA replication origin
ggttggccgctgtggccgggcccgggaagcgccccagagtcccttatgggtccctccgcagccggggttgagccaggcagggaacccgtcccggacttcccttgggaaacgcctcctcccgccgcccccgcccccgcccgcccagggtgacccgcgacccgcttgggggtgtcgccctggaccctgggacaccgcctcctgagattaaagcgagagccagggcgggccgggccgagtaggcgcgagctaagcaggaggcggaggcggaggcggagggcgaggggcggggagcgccgcctggagcgcggcaggtgagcggcgccggtaccagggtcccggctcggggtccgggctggggaggggaacctgggcgcctgggacccgccgatgccccctgccccgcccggaggtgaaagcgggtgtgaggagcgcggcgcggcaggtgagtgcgcccgagggtcgagcgctggggccagccgggcagggcgcctcccggggtgctgggagagtgctgggcgcctgggaccccttgcgcacggccgagagccctcgccgcccctgttggcttggcatcgcgaggttggggcaggtggtcctgcgagtccctagccagttggtggaagagagtcccccggggtccccaaagctggctcctagtccgcctgccctccacggcccccgcctgggagcaccggtgcgccttttctctttggggaggaggactgggagtgctgtcggttggcttctttgtttgggggaaatctctgcagtcccgcagtgttacctgaactccttctgcttcttggttccctactgaggtagggagaaactggaaactcgctgagatgccgggaacgatacggc

SEQ ID NO: 39870 - DNA, 1216 bp, Artificial sequence
  DNA replication origin
cctgttgtgggtgccaccagcagaccacaaaaggtgccaaaggagggagtgagagggaagggtttactaggaaagtcctgccccacaggaggcttccgggagagcttcccaggaagggagcagtgagccaaggcagcctgggatgggactgaatggggcttttttctgcttccacctcattttaaagcaaatcatgttgatttgtatattatgcaggggaggagaaaacatgcttcccctctacccttctagttcgttcagctagtctacaaattaaattggcatcaaatagatgaacaggagaaaagctgttttaatgtatgtactcacagatgggaatcccacaagaatatgagacttaaagaacaggccaggtgagtgaggggtccagtgcgagggctcacacctgtaatcccagcactttgggaggccaaggcaggtggatcgcttgagcccagattggagaccagtctgggcaacatagggagacccccatctctacaaaaaattaaattagctgggcgtggtggcacacgcctctagtcccagctactcgggaggctgaggtgggaggattacttgtgccctgggaggttgaagctgccatgagccatgattgagccactgcactccaacctgggcaacagagtgagaccccttctgggggaaaaaaaaacacacgaaaaaaaaaaggtgcagcagcccgatgattgaggcttatctgtcactctgagtgacagaaagaaatgggggtttgaggcttctggggagcggtggaggagtgaggggagcgtgaggagaggaggtgtctggtgaacgcaggttgccgtgtgaggcagataaaagtttcccaggtgataaaagttgtccgggaacagctctcttcctggtacagatctgctgactaacaaacatttcctttataggtgcaaatttcctttacaaaagggcattttctcagaggtactctggtgtctgcagttcctcaacataaccagttccaaatcatcaatgtgccaaagaggactatgttggggtagcagattctggtctcctccagtcctacttggggtgatgaattctggtctacggtcctattaaattctggtgaattctgagcccccacaattgcaaacattagaaagaacctctcaagtgcccgggaacagccacgtcttcctggctgaggtgtgtcccaccacttcctcactcccgc

SEQ ID NO: 39871 - DNA, 1491 bp, Artificial sequence
  DNA replication origin
cactttgttgcccaggctggagtgcagtggtataatcctggctcactgcaacctctgcctcctaggctcaggagattctcccacctcagccttccaagtagctgggattgcaggtgcatgccatcatgctcagctaattttttgtatttttggtaaagaaggggtttccccatgttgcctaggctggtctggaactcctggggtcaagcgatccgcccgccttggcctcccaaagtgttggaattactggcatgagccactgcgcccagccctggggctacattttccaagtgaggacgtatagtagcttagctggcagttgccatttttgcttagaggtgcataaaatcatggagcatctgactatgcatgacgtcttagtcttggtcaagcgtggcctgtttcacacgcgtgtgtgtggtgtgtgtggcatgtgtgtgggatgtgggtgtaaggttcgtgtggttatgtgtacatgtcatacgtttgtgtgtatggatgtgtatgtgtgtgggtgtagtgcacaagtgtaatgtgtgtatgcacggggtgtgtgtggtatgtgtgtatggtgtatgtgagggtgtgtgtgtgttgtgttgtgtatgttgtgtgtgagttgtattgtatgtgtgtctgtgtggggagcatgtgtgcatgtggtgtgtgtatggtatgtgtgtatgtggggtgtgcatgtgtggtgtgtgtgctgtgtttatatgtggtatgtctgggatatgtgcgtgtagtgtacatggtgtttgtgtgtgttgtgtggtgtgtgcatgtgtggtgtgtctgtatgtgcctgtgggttgtgtgtatggcgtgcatgtgtgtggtttgtatgtgtggtgtttgtgtgtgagtgtggtgtgtgtggcacatgtgtgtttgtgtatggtgagggtgtgtggtttgtgtgcagtgtgtgtgtgtgtgtgtgatatgggtgtttgtgtgtggtatgtgtacggtgtgtgtatgtgtgtgaggggtgtctggagtgtgtggtgtgtgtgtgtgtgggatgtgtgtgcctgtgtggtgtgtggggggggctgcgtgtgtgtggtgtgcagcatgtgtgtggtatgtgtggtgtgtgggtgtgtgtgtagtgtggggtgtgtgtatatgtgggggtgtacgtttgtggtatgtggtgtgtgtgtatatgtgtggtgtgtgtgtatatgtgtgtggtgtgtgatatgtgtgtgtgtggtgtatggcatgtgtgtggcaagtgtggtgtgtgtgtggcatggggtgtatgtatatgtgtgtggggggtgtatgtgtgtggtatatggtgtgtgtgtatatgtgtggtgtgtgtggtatgtggtgtgtgtgtgggggtgtgtgtgtgttatgtggtgtgagtggcatgtgtggtgtgtgtggcgtagggtgtgtgtatatgtgtgtggagggtgtatgtgtgtggtatgtagtgtgtgtatatgtgtggtgtgtgtggta

SEQ ID NO: 39872 - DNA, 1025 bp, Artificial sequence
  DNA replication origin
cctcatcatgtctgtggtgcccagtgagctgggcatttggcaggtgtaggctctggactcgaggactcctgtgtccagtatctctgtcagccacacccattttgtttgaggctgttttgtcccgtctatggccatgaaccgccggccctgctgtcctcccgctcttgcttctgtccccacaggctggccgggcgcatctccccgtctcgctgtggacctgcagtgggcctgccccaggggctctgcccctcagcacgggggtggcatcaccagccgcagtcaggcctgaccatcacttcggtgcctgggagactgaggcacagctgatgtgaactgtcttccctggggtcacacgctcagcctcttgatcccgtctgttcgctgcccggtgccccaccgctcctgctctccatggcttccgcatgggctggcttcctgtggtggccccggccctggggaggacagcagggggtggggggcggtgggggtaacgggtggggtgcctgcaggccgctgggaagacacacacaaattagccgcatccccttcctagaaaggaaaagaaaatacagccccacactgtggacgcccacttctgtttgtacaagtgagtgtgtgtgtctaagtgtcatcttatgtctgtgtgtggtgtgtgtgtggtctgtgtgtgtgtgtggtctgtatgtgtgtggtgtctatgtggtgtgtgtgtgtagtttgcatatggtgtgtgtagtatatgtgtgtatgatgtgtgtgtggtttgtgtgtgtgtgtgctgtgtgtggtatatgtgtgcatggtgtgtgtgtgtgtggcatatgtatgcatggtgtatatgtggtgtttgtggtgtgtgtgtggtttgtgtgtgtgagggagtgctgtgtgtggtgtatgtgtgagagagacagagagagaagtagggggtggttggagtcagctccgtcctgcctcagtttctccatttccccttgggtcaggagggcctcattggctttggggtgaatccgcaggcccccggg

SEQ ID NO: 39873 - DNA, 1407 bp, Artificial sequence
  DNA replication origin
aggtcaatgacatcggcgctgaccaactcctccaccacctccgagtgcccgtgggcggcagccaggtgcagcgccgtctggttcaggggtccccgggccagcacatcggccttctcctcgacaagcagcttgacagtggccaggtgtccgttgcgggcagccaggtgcagagcggtgtagccgtctgaggtcatggcctccttgccagcgccccgatgcaggagcagcctggcagtgctcgtgtgccccgtctccgcggccacgtgcaggggtgtctgtgccagcaggctgcagacgttgacgtcggagcacaggtcgatgaggatgcgggccacgcggtagtgcccgcgctgtgcggccaggtgcaatggcgtcctcccatccagcgtctgggcgttcacactcacccccggctgcttggccagcagcttgacgatgggcaggtggccctgccaggcagcgtagtgcagtggcagccaggcatccttgccctgcaggctcacgtccacgcctcggcgcagcaggatgcgcacgatattctcctgcccgtgctggcaggccacgtgcatgggcgtccggccctcaaagtccacctcgttgaccgaggcgttcttctccaacagcagccgtgtgctagactcgtccccgttctgggctgcaaagtggagggctgtccactggtcctcatccttggcgttgacactgatcttccgcgccagcaggagctccacgacaccccgcaccctcctctccacggccatgtgcaacggggtggagcccctacggttgctcaggttggggttggcattgttgagcagcagccacttggcgcactcctcttgcccggcctccaccgccaggtgcagcaggctggcaccgctgtccagtgccaggtccacgtcctgcggctgcaggatcttcatcagtttgctggtgtccccggacacgatggcatccacaagcttcttcttctggacgtctgtggtgcccagatctgcagggagaggagaggcaaaggtcagagcgtggctgcacatccagggacgtggcgtctctgggagcctggctgtggcgctcaggtggaggagtgccatggcctccaggctgctcgctggtcacccgactgtgtttgagcgttgtctgtgcctcgtgattaaggtcagtcctagcgggagccccggggcaggctggcgaatgtctcccaggtgctcgttagtcggtttgcaaaataaaacccgctctccctgtcctgcggggtggtgagcccccttggtgcttagagatggcagtgactgcaaacatcccttcattaaagaaagaaggaaaaagggcacagactaaaaagaccaggccagagctcccattcgcctggaagccttggcacctgccacccacggacgccccagg

SEQ ID NO: 39874 - DNA, 935 bp, Artificial sequence
  DNA replication origin
tggggcaggaagagccaggcctcgaacccgcagggcagccccaccgccagcgctgagatccttgtcacagggcccggcctggcgtccgacagggagcgcctgcgttcttgattctctgtgttttttgtctggggacctgtccagacaggctgagtcccatcctcgaatgctcatttcactgaccgtgaacggtagcgtcaggcttcactgccctggcttagaaatgcttttttgtaaatggaagaaaataaaacacaaaacagtctgaaaaaaaaaaaagtgagcctaccagttctgccgacaaaaggactagcctggtgctagaaaacagcattacaatgaaataggtaacctttaagatcctgaattcatcagggttatacagagaaacagaaccaatagtgtgtgtgtgtgtgtgtgtgtgtgtgtgtgtgtgtgatgtgtgtgagagactgtgtgtgtgcacatgtgagtgtgtgaatgagtgtgtaagagtgtctgtgtgtgtgcaagtgtgtgattgtgtgtgagtgtgtatgtgtgagcatgagagtgcgactgtgtgtgtgtgtgtctgtgtaaaactggctcacaggatgatgatggctgacgagtcccacagtctttctgcagggtagtccataagctggagccccaggacagtcaatgtgtgcttctgagtcccaaagcctgaggccaggaagagccaattgttcagttcaagtctaaaggcaagaaaaagccagtatcccagctggaaggccgttgggtaggagagattctctcttacacgaggatgatcagcttttccttcttttcaggcctctagctgcatggacgaaacccatctgcattggggagaacgatttgcttgactctattgatttacatgttaatctcatccaaaagcagcctcacagaaacacctggaataa

SEQ ID NO: 39875 - DNA, 2078 bp, Artificial sequence
  DNA replication origin
aagtagacagaggcaaagtgattacaaactagaatagaggatatggaagagatgaccctagacagcagtgtgaggggaaggaaggggactcgggtcagctttgtgtagctgtgtgtgtaccgcagtgaggcctggctgtctgagagtgggataacggtcccccgagcctgtccccgttggtgatgccacagattcaggaggaagaaggtgttcgttggagtcacactaatttaactagttaagttaaactagttatagtttaactgttggactagttaaacaggcataaactacttacagagattcagaatcttttaggattgatactattttatgactccaagctatggtttttctctttactttgaatgaatgttacattaaaaacaaaacacagaaagcaattttcacttttttcttatatcctaagaagagtgaagctaatgcttctatggtggttctttgatggcgtcagctttcagactgtgtgactaggatactgatgatattgatgtgatggtggtggaggtagtggtggagatggtggtaaaggtgatggtggtgatgggggacctggtgttggtgatggtggtgttggtgatggtggtggtagaggtgatgggggaggtggtggtgttgatggtggtgatgatggtggtggagatggtggtggtgatggtgatagtggtgatagggatggtagtggtgatgccacatggtggtagtggtgctgatggtgatggcggtggtagtggtgatggtggtgacagtcgtggtggtgatgatggtaatgatagtgatggaggaggcggtgatggtggtaatggtgatggaagtggtagtgatggtggtggcggtggtgatggtggtggtatggtgatggtgatggtggtgatgttggtggtagtgatgggtggtggtggtgatggtggtggtgatggtgatggtggtggtggtgatggtggtggtgatggtggtggtggtgatgatggtggtgatgatggtggtggtagtaatggtggtggtggtgatggtggtggtatggtgatggtgatggtggtgatgttggtggtagtgatggtggtggtgatggtggtggtgatggtgatggtggtgatggtggtggtagtaatgggtggtgctggtggtgatggtgatgggtggtggtgatggtggtggtggtgatggtggtggtggtgatggtggtggtggtggtgatggtggtggtggtgatggtggtagtgatggtggtggtggtgatggtggtggtgatggtgatggtggtggtggtgatggtggtggtggtgatggtggtggtgatggtgatggtggtggtggtgatgggtggtggtgatggtggtggtggtgatggtggtagtgatggtggtgatggtgatggtgatggtgatggtggtggtggtgatggtggtggtggtgatggtggtggtgatggtgatggtggtggtggtggtgatggtggtggtgatggtggtggtggtggtggtgatggtggtggtgatggtggtggtggtgatggtggtggtgatggtgatggtggtggtggtgatggtggtggtgatggtggtggtggtgatggtggtggtgatggtggtggtggtggtgatagtggtgataggaatggcagtggtggtgatgccacgtggtggtagtggtactgatgatggtggtgacagtgttggtggtgatgagggtaatgatagtgatggagggggtggtgatggtgttgttaatggtgatggaggtggttgtgttggtggtgatggtgttggtaatggtgatggaggtggttgtgttggtggtggtggtgttggtgttgatggtgatgatactgatgatagaggtggtaatgatgatggtggtggtggtgcttatggtggtgatggtggtgacggtagagagtgcgtccacagcagtctggttgcttttgctcagggtcctttgcgagtgtcacagtatagatctgtgctcagtgtcaatgagagttacactggagtcttcaaagccattgcaggatttatgttaacttaaaacacttacagaccagcctttgtttgcca

SEQ ID NO: 39876 - DNA, 2370 bp, Artificial sequence
  DNA replication origin
  misc_feature (112)..(112): n is a, c, g, or t
  misc_feature (381)..(381): n is a, c, g, or t
  misc_feature (924)..(924): n is a, c, g, or t
gtttgtgtgtatgtggtgtgtgttgaatatgaggtgtgtggtgtgtgtgttgagtgtatttgtggtatgtgtgatttgtgtgtattcgtgtgtggtgtgtatttggtgtggngtattatgtgtgtgtggtatgtgttcagtgtgtgtgtggtgtatgtgtgtggtatgtgttcagtgtgtatttggtgtgtgtgatatgtgattgtgtatttatgtgtggtgtgtgtatttggtgtgctgagcgtatgtgtttgtatgttgtgtgtgtatttgtgtgtgggttgtgtgtggtgtatgtgttgagtatgtgttgtgtggggcatgtatgtggatgtgtgtgttgagtgtgtatttgtgtggggggtgtgtgtgtggtgtgtnttgagtgtgtggtgtgattgtggtttgtgttgaatgtgtgtatttgtgttgggggtatgttgaatgtgtgtgttgtgtgtgtatttgtgtggggtgtgtgttgaatgtgtatttttgtgtgtggtgtgtgttgagtttgtggtgtatgttgagtatgtatgtggtgtgtgtgttgaatgtgtgggtgtacgttgtatgattgtatatttctgtggtgtgttgagtatgtgtgtttgtgtagtatgtgttgagtgtatgtttatgtggtgtgtgttgactgtgtatttgtgtagtatgtgattgggtatttggggtgagtggtgtgtgttgaatgtatatttgtgtgtggtgtgtgttgagtgtgtgtgtatgtggtatgtgataatgtatatggtgtgtgttgaatgtgtgtatgtggggtgtgtgtggtgtatgttgagtgtatctgtgtggtgtgattatatgtgtgtggtgtgttgaatgtgtgtgtatgtggtatagtgcatttatgtggggctcgtgtgtgtggtatgagtacatttntgtggtgtgtgtatatttggggtgtatgtgtggtatgtgttgaatgtatttgtggtgtgtattgagtgcaggtgtatttgtgtggtgtgtgatagtgtatgtggtgtgtgttgaatgtctgtttgtgggttgtgtatgtggtgtatgttgagtgtatctgtgtggtgtgtgattatatgtgtgtgatgtgttgaatgtgtatgtggtgtaattgtgcatttgtgtggggcttgcatctgtggtgtgttgagtatttgtggcttctgtgtgtggtgttatttgtgtattgtgtgtgtagtttatgttgaatatgtgtgtatttgtggtgtgtgtgattgtgtatttgtggggcatgtgtttttgtgtggtgtgttgagtatattatttgtgtggtatgtgattgtgtatttgtgtggggcatgtgtgtgtgtgtgatgtgtgttgggtgtgtatgtatttgcatagtgtgtgatggtgtgtgtgacatgtatgtgtatgtgtgtgtggtgtgtgtatgtggtgtgtgtgattgtgtatttgtgtatttgtgtggggcatgtgtgtgtggtatgttgagtgtggtgtgtgtgattgtgtatttctgtggggcgtgtgtgtgtggtgtgtgtatggtgtgtgtgattgtgcatttgggtggggcgtgtgtgtgtagtgtgtatgtggtgtgtgtggttgtgtatttgtgtggggcatgtgtgcgtggtgtgtgtatgtggtgtgtgtgattgtgtatttgtgtggggggtgtgtgttgagtgtgtttgtatttgtgtggtgtgtgattgtgtgtgtgctgaggaggatttgggtgaaggggggaatatgggcacattgatgcccgcccacggggaaggagttgggaggggccaacaccagggatcctgggggcaggggcggccacattggtcgggtggtcagttgctcgggtggttggttggttggttggtaggtaggtcattctatctgtcagtcagtcatgctgggtggagggtgcaggcccaggggaagctttggactgggcagctttcctgacggaagtggagtcatcgtccccaggtgctgtggggcagggtggcccgggagggaggcggctggcgttgcttggtgatgaaaggtgagctccgtgtctgcttttcaagcaccggggttcccgtctctgcatcgtgagttcctggggtagacagtgtatgacacacaggtgctgttttcttcctggccacgcatccccgtgactctcatgcccgtcacccgcgctttattgacgttcaggccacacgtgcgtgcctgcgtgagatgttatttacctcaaaatcgttgtgtgtttgtttgctctctggacagatgacaagacgttccaatgtgagatgtgtttcagattcttctccaccaacagcaacctctccaagcacaagaagaagcacggcg

SEQ ID NO: 39877 - DNA, 828 bp, Artificial sequence
  DNA replication origin
gcccggctggcgcccggggccagggccaggactggggctgggggtgggaggacagcacggagtctcccctccttgggtcgtctcccacgagctgcgccagtgagaggctgcatttgtgggcgatcatctctgcagctccttcgcatggtgggagcgaggcggcttgtggggcatttccccggtgggcatgcttctctcggtaaatgctctaagtagtgaatgagctctctgttggttggttcctcaggtgacaagctgtttaagtgcgaagagtgtgcaaaattgttcagccgcaaagagagcctaaagcagcacgtttcctacaagcacagcaggaacgaggtgggtggaaacaagcccagggttctcttcccagttgtgtggacaacacagacaactgaccaaatcaccatgttgtaatgagaagaaagaatcccaggagggaggagagtgggcgggggctgtgggggagggaggagagtgggcgggggctgtgggggagggaggagagcggccaaaccctgtgggggagggaggagagtgggcgagggctgtgggtgcccaggtgtccctgagaagggagagtcccaggagggatgagagcgggtgaaggctgtgggtgtcctggcgtccctgggccacctgtcagcccctcgtcctggtcagatgcccacaagcgcagcaggaagagtcaggagaatgggggtgtttggtgcttggagtggggctccctgagtgtggagttccctttctagggcaggtgaacagcaagagcaaacatcctttgtgttcctaaatagagcgggagggtggtggaggtcagagtca

SEQ ID NO: 39878 - DNA, 1529 bp, Artificial sequence
  DNA replication origin
gaccagtctggccaacatagtgagaccaaatctctacaaaaaattaaaaaattagctgggcatggtggtgcgtgcctgtagtcccagctacttgagaggctgaagctggaggatcgcaggaggtcacgagtttgaggctatagtgagctgtgatgggaccattatactccagcttgggtgacagagcaagactgtgtcaaaataaaatgaaagaaaataaatctagtagaaaaaacagaccatgtgcatgacattatgtgaaactgagatagtggtttaggaagagtcagctttttggggggatcacagaggatgtgagagtaattgaagggagcaaggtgtcagggagggtgaggttagggctctgtcttgaaagacggtggaacccccatggtggactgaggggaagtggctgtgcctggggtggacctcgcgtccacagcctggggtgtgttagggggtgtaccaggaagtggctgattctcttatcagacgttgacctgtcccgtgtgctggtgccgaggagggtccaagtatatcccactgtgcaaggctgccacaagccttgccctcttggccgttgaagtgtggtgggagagacatgagatcagtcacacacaggcatggctacacgggtgacggtgctgtgaaggaaatcgcagagcgcttttagaaagcatgccacgctgtggacaggtggatcagggagaccctccctgaagaagtgacgttaagctaagactgaggagtgagcaggcatggcagagagggctggggagtgaggagtgagcaggggagtgaggagtgagccggggagtggggagtggggactgaggagtgagcaggcatggcagagagggctggggagtgaggagtgagcaggggagtgggaacttgcagagagggctggggagtgaggactgagcaggggagtggggagtggggactgaggagtgagcgggcattgcagagagggctggggagagggccagccttggggggcgagcatgtggaaaggcccagaggcaggacccagcttggcgttccgggaagcgtggctggagagggtgggggtggggaggtgaggtgagaaggctgctgagaaaggcagtgcctggtcatgtgcaggagtttgggttttgttcctgggacagtgggaagccagtgaagcttcaggctggcaagcgatgtgattggatttatgttctagaagaactgctctgcagtgtggaaaatgggttggcggcccaggcagaggaggaagagttatctggagaccctttgcagccttacaggtgggagaaagtgggatgtggccaagggaggtagtaaggggggctgcaggtagtgggtgatgggcgggtgtcagagggaggcgagagaggtcacagcggttccaggtctctctgacaactgcgtcctaagatgtaggaggtgggggcagagagactttgtcaggagcatccagatgtttttactttttgacatgttggtttttgggttgcctgttgccttctgaatgaagatgc

SEQ ID NO: 39879 - DNA, 879 bp, Artificial sequence
  DNA replication origin
cccgtgcgctcaagaggttgggatggtgagcggtgacttaaatgatttttcagactccgttcctcatttgcaaagtgtggatggccctgctcagctcccctcacagtgctggtgtgggcagatattcattcattcggccattcatgcattctttccaccaatgtttactgaacacctgttatgtgcccccacgctgtagtgaatggagagagggctgcacctggtggacctaatgttctgggcaggggagtggaggtggtgtagacagaaaatcataaaactctcaggtaagacgatgggaagagcatgaagaaaggaaggagggcaggcaggtggcgggcaggggatggggcacttgggggctgggactagaaggggctgtctgaggaggggccacagtggagaccagtgctgtgagggagcctctggtggaggtgggtgcggtggtgcctgcccccaccaggcagatggtggcaaatgcaaaggccctggggtgggatgagcccaggatgggacaggccagtgtggccatggaggtggggcagcaggggccatgcaccaggcagagattttcttctgactgccttgtggatgccactgaggggctttgagcagtggcggggcagagtctgcatcttttggctgtgtgtggggaatggagctggcatcactggaatccaggccctgcatgattccactccacagaactcggaggcagaaggggagatggggcaggacagagcctagttccagagccaggcaggcctgctgctggtttggttggaaatgcatggtgggtgactggagctactatttactgaggtgcaggtgacctgaggcattcaggggccctgtagagcagacatcttcaaactctcc

SEQ ID NO: 39880 - DNA, 1137 bp, Artificial sequence
  DNA replication origin
gaaatccagccgggttttgactccgatcgccaacggtgcccgcagccggcgaatgtaacaaagaacagtcggcatggcggctggaccggggcggcgcgcggctgccgggcgcggggggcggggggcagcgggcccagggcgcgccggggctcgcgggggcagcgggtgcggcccggggccggcggggcgcacgccggggcgggcggcgggcgcagggcccggagctttacctgcctttggaatgtgcagagcgggatcggatccggactccgggttgcgatccgctccggaaactgcgcagcaccggaagccggggggcggcggcggggcatggcgggacttgtagtccgcgggcgggcgcggggggcgcaggcgagaccctggcgcggccgggggtcctgcgggtgggactgcggggcgcgggcggcgtggacggggcagcgggcgcgcgcggggcgggtctggccggagggaattccgcgcgcggcccccctcccacgtggcacggccctgccgcccacgcgcgcgggcagctccctctccacctctcctcggacgcgtttcttgcggagttggggagtggtggcggtgggtgggtcgagtttttctctagaacaggcctgggacttgcccccactcacggtgacctctggatttggccggcggggccctgggacacgagctctgtgcccgcgaggggagtctggcctggcgggctccgccacgctaccggtgagcaccgggccagccgcggacctggctctccattcttccccgggggcctgtgtggcctctcttgaccccctccaccaagtgtgtgtgccatcacaaaacgtgagacggagaagggacagacttttcaccttagtcctggccgcccatattcagagaggccgactgtcttgttcattgctgcctggcaaaaacctacattcataaagagaagtgatgaaccggggaaaatgattttaaattgatgccacaaaagggctcgtttccctcatgtacgtgaaactcttgtgaaccaataaaaatatatatgtatatagaaaaatgagcaaagtgtgtggatggacagttcgtaggaaattcaatggttcttaagcatatgagaagctattcaactacgctgcaata

SEQ ID NO: 39881 - DNA, 1625 bp, Artificial sequence
  DNA replication origin
caacactttggacaccaaatgtgtgggggtttttctcacaccgattatcagttcttcaactctggtgccaactgggtgtcctacagttcaactccattctgacattactcagacttaacacagatcccaaaggcccagggctaggtcccgcaagacggcccccacttcagacaccaggcgtaagctccgggttgcccccgttcttctgactatctgtagatggcagacttccccaacccaccccactgaggttcacatattttactagagcggctcatagcacagaactcaggaaaacagtttactaactattactagtttattgtgaaggatatgactcaggatcggccacatcgaagggatgcttaggcgggcggagggggagggcagggactccagcagcttcatgccctgcctggacgagccacccgcccggcaccttgatgtattcaccaccttggaagctccccaaacccatcctttcagggtttttatggaggattcattcgctaggcatgatggattacatcattggccataggtgattgaatgcgacctctagcccctctgccctccctggaggtggagtggtgggatgctggaggtggggtggtgggatgcttgaggtggggtggtgggatgctggaggtggggaggtgggatgctggaggtggggaggtgggatgctggaggtggggtggtgggatgctggaggtggggtggtgggatgctggaggtggggtggtgggatgctggaggtggggtggtgggatgctggaggtggggtggtgggatgttggaggtggagtggtgggatgttggaggtggggtagtgggatgctggaggtggggctcaaagtttctcaagtgaccagcccccatcctggtgctatctggggtcccccccaacagcccttttgtcagcatataaaagacacttggccaggcatggtggctcacgcttgtaatcccagcactttgggaggctgaggcaggtggatcacgaggtcaggggatcaagaccatcctggccaacatggtgaaaccccgtctctactaacatacaaaaaattagctgggcgtggtggcacgcgcctgtagtcccagctgcttgggaggctgaggcaggggaattgcttgaatctgggaagcagaggttgcagtgagccgagattgcgccactgcactccagcctggcgacagagcaagactccgtctcaaaaaaaaaaaaaaagacactcttctcaaaagacgctcttatctctcgggagattccaagggttttcagagctttgtgccaggcatcaggaacaaagaccaaacacatatttatcacaggcagcaggccctgcagggctgtggcattttcctaagggaattctcctgggtgcctgccttgcagggtatctgctcagaccgggtgtggaagcacgctcctgcccacggctgctgtgagcaggctccagtgagggctggcttggaggcagcagagcatggcctttaaacttttctccggggctctctctgcattctcttctagtcccaacatgcaccgagtgcatttatttctcctagacttcaattaccttcttacacaagagtaacaagtttctacctatgttgtc

SEQ ID NO: 39882 - DNA, 974 bp, Artificial sequence
  DNA replication origin
cgggccgcggccgccgcgcgtttcctccccgcttgcccgcccagaggcccccggccacgctcctcgccgggctccgaccccgccgcgccccctccacgcccccagcgcgctgtggccgcagccagcgcgtgtcctgagtccgccgttccggcccggggctgccggggaagttggggcgaggcgggccggggatgcgccatggccatggcccggctgggctcgtggctcggggaggcgcagtggctcgcgctggtgtcgctcttcgtcgcggccctggccacggtaggcctgtacctggcgcagtgggcgctggccagggcgcgaccccagccccagcggcgggcggtggagcctggagaggggccgcgcccggggtccgacgcgctgctctcctggatcctgacgctgggcagctggaggagccagtggcaggcggcctgggtgaccgccctgaacgaggaggccgagaggaaaggggtgagtttccgggactgcgggccggggggcggcagatgccggggcgggcggtccgggccgaggtctttcctggaggcgtcgctgcagcccctgacccaggctaagggagtcctccccccagcgcagaccatcctcgagagttaggagagagacgggggagcgaggccccttgacggagagacaagacaaagtgattgattttattctccaaacggcaggtgctccaggccctgggctccgcgagggacaggctggcagttggagggaccgtcagaagtgctcatccgcgccagccagtacctgccttgcctggagtcccggggcgaattcccgtgcccgatcggacacttactgagcttgcacatgatacatgaatagctgtgaccccaatgtgcttccgcctctcatagagctgaatttcaccaagaatttatctccaaagacttgcatttcttggcatataaaaatagtgaccgtttgctgagggccagccgctg

SEQ ID NO: 39883 - DNA, 1625 bp, Artificial sequence
  DNA replication origin
ctcccgactcggcgtctgggaagttcctgggccgctgcgggccgcgcttcctcctgcgcgcgccgccccgggcgtcccgcccgcggcccagcggtggccggaggaggctctggccgcggggcggggcggggcgggggcggtgcccgagggagggggcgcggccgggcctgcgggggccgcagtcctcccccctgctcccaacgcggcgtgcccccgcccccctaaaggcccggccttcccggccccgccacgtgcgcgcgtcgcccgcccctccggcgcctgcccgcgggccgcgaggtgacccgggcctccggattcatcagcccaaccccggcggctgctgtgcggctgcttggcttggctcgtgtgcgcgcttgcacaagtgcgtgtgtgtgcacatgtgtgagtgtgcgtgtgcacagcgcgcagtcagggtgatttcgaggactgccatttgctcgccagcgagacaggatccaggctcagtcctcggaaagtccctggaaatccgtggctgcccctggagccaggggctgggcctgccttagggggcgtgcttctcagaggcaaggaggggctcagcaccaggcccaggccctgccttctgtgtggctgtgtcattcattcagtgtgcgggtggggcgggggtgcatgtggtgtgatgtgtgtggcgcatgtggtgtgatgtgttgtgggtgtggtgtgtggtgcacaggatggtgtgagtgtgtatgtgtggtgcatgggtgtggtgtgtgtgtaagcgtggtgcatgtggtgtggtatgtgtgttgcgtgccagtgtggtgcatgtggtgtgtgtgatgtgtaagcgtggtgcatgtggtgtggtgcgtgtgtggtgtgtcggtgtggtgcatgggtgtgtgtacgtgtgatgtgtaagtgcacagcatgtggtgtatgtgtgtggtgtgtggtgcacaggatggtgcgagtgtgtatggtggtgcatgggtgtgtatgtgtgatgtataagtgcagtgtgtgtggtgtgtgtgtgtggtgtgtgtgtgtgatgtgtaagcgtggtgcatgtggtgtggtgcgtgtgtggtgtcggtgtggtgcatgggtgtgtgtacgtgtgatgtgtaagtgcacagcatgtggtgtgtgtgtgtggtgcatgtggtgtgtgtggtgtgtatgtgtgatgtggtgtggtgtatgtatgtggtgtgtcagtgtggtgcgtgtgtgtgtggtgcacagggtgatgtgagcgtgtgtgtgtggcacatgggtgtggtgtggtgctgtgtgtatatgtattgtgtaagtgcgttgcatgtggtgtggtttgtgtgtgtggtgaacacggtggtgtgtgtatgtgtggtacatggatgtggagtgtgtgtatgtgtaatgtgtgagtgcggtgcatgtggcgtggtgtgtgggtggtgtgtcagtgtggtgcatgtggtatggtgtgtgtgtgtgtggtgtggtgtgtgggacatgcccctgtgccctcctcttgcagagtggacgcggtccttagggagtgccatagaaacatactagcctgagattctccggggcctaaaacaggcctaaaccataaaaaagtgattcccctgttattttctgcagct

SEQ ID NO: 39884 - DNA, 1298 bp, Artificial sequence
  DNA replication origin
gtgtatcttaccaccgtttaaaacagagcttgaccggttagtttaacaaatattatgagtggcttttgttatgggccgggtgtggtggtttgttcactgatttggcaaatatttgttgagcagctgccgtgtgtcaggtgctgggctaggtgctgggggttagtgatgagctaaatcaattctcatgggacctgaactcagcagaggagacagagggactattccacaagtaactgtgtaaactgcatgggtggcagggcagccgtgcagctaggagtagtgaccaagaagagtccaaggaaagccctgcaatgccactggatagtgggcagggggctcaggcaggactgcaatgagcctgtgggttttgttcctacagcaaaagaaaggagtggctgacttggcagagaagagatgaaatcatatttgcatttgaccaagatggagacagtagggggaggaggtgggtgacctggaggctcacctgggatggtgagccaggcccctcagggggtggtgggtgggagtgggctgtagaggttgccatgcaggggtctcccttaggcagcatagtgggtgtgtggggcaaggcttgtgagaaggggccaccccagcaaggataaagcgatgcctgcccacgggagtatcacgttggtctgagatgcaagaagaaagaaacggagaggaccatggagggggctaagaaattctaaaggcaagaaacagtcagggaaaagaaaggattccacggtgggggtggcagagaccgagtgctgagccagcgccaggcgcccaccctgtgggcacatgttataaagcagcaccatgaaatggaacggcgaggctccccaacaaaacagactctagaaactgatggctgggtgtgaacataacaaaacactgggaagggacataattagtaaatcttgggatgaattatcaaatgggaagagaccagtgaagtcaaccaggggggcccaccatgcgattgtccgggtgaggaggggaggttgggcgccttccctggcatgcaggttgcccccatcctgcctccagggctcagggctctgagaggacatggttgcagcatgaagggcatgggctttgcctcctccactgtagggtgggagccagtcctgctgcaaagagccgctatggggttggaggtcacacatgtgcacagacatggcgcctggcccacggcaggtgctccatacagcacaggaataatggcttcgttacacagagccaagaatagggaagaatttgttttgctctaagtgcaaccttcacgccaa

SEQ ID NO: 39885 - DNA, 834 bp, Artificial sequence
  DNA replication origin
ccgcggacctcggacggggggaagggggctcctccaagcggggagacggtcgccggccgagcagcagggctcctggccggcggagggtgctatgctctgcgggaccgccgggaagtcccagacaaggtctgcgggggctctggaggaaaaaaaacgcgctgtgaggtccaggcgtccgcgggaggggccgggggcggggagggagcgtccagcgggcaccgagcggtcacgctccggccaccgggccgaggacggggcggcggggctaggtcccggaccgtgaagggagcggcgggtcgcggcaggtgcggggtccccaaggccgccggccagcttccgcgcacaccccgcggcccgggccgccggcccccaacccctgcccggaacaggagaacgcgcccttctccacgaggcgtttcaaccgctccgcgcgaggggcgcgcgcctgggccaggcgtgtcccctaccccaggggcagctcggccagggtgaagagtgaagcccgtgagggaatggagcatgcgcattcgcgagggcgaggccaagtgctggcagggagcgtgcgcagtgtgaaggtacaatcggctacgtgggaacccgggacatgctcggtgagcgcccaggtcccgcgcacgcgcagaagcgctcggagcccgcaacccgctggtggagaaaaaagaggagagaaatcacctcagagttacgtcaggaaaggccgcgttttgcggggaggctgtagcctcccaaggagccccgcagttctcctagagctaggggcgtgacagttactcaccggtcttcagtctcgaggcagacgccgggcccctttccgct

SEQ ID NO: 39886 - DNA, 1116 bp, Artificial sequence
  DNA replication origin
attggactccctggaggctctgggcatccgctgccaccgtaacacctgccctgctgcctcccggtgtcacaggctcatgacaaggtggaattagacaaggcctttaaagcaaattgggctccttaaaaaagggctctacaaaaaaagggcatttttataatctggaaaaggaaagaaaatcaaggctgggaagtggaataggttggtaattctagagtcttctagagtcttccaaattatctgtgcctgacattggaatgcaggtattttttttcctgaaggcacggggttggtgggtagggagggtgagggcatggggttggtgggtggggagggtgaggagggcacggggttggtggggtggggagggtgaggagggcacggggttggtggggtggggagggtgaggagggcacggggttgctggggtggggagggtgaggagggcacagggttggtggggtggggagggtgaggagggcatggggttgctggggtggggagggtgaggagggcacggggttgctggggtggggagggagctgcaagttcctattgcatttcccaatagagatcaattttgtaccctggaggatggttctgtaatggaactgcctctcaggcctcagtttccaaaaagggaaaagagtgtccctcccctcagtcctggtgtactttggaaatgaaatgagaagatgaggtggagtcagcttggaatgggatgccgcgtgcacagtggagggcttgtgtcgagggtggccggggtgcttgagggctttctggatgcccgtgctggctgctatgaggacttagcttgaggtccgccccaaatcagtttgaaaagggtgtagggccgagccacagaaggtcgctcattccgccattcattctccaccaccactcactgtcactagcattaacccctgtgagtgagaaaggccccagtatggtcttcatgcagcaacttgtatgctctgtacgctctgctgagacatgaagcccaaagcccacagcccagggctcccactggctctacgtcagggacacacatcggaacccagaaccagaatggagccccagcaaccccacattcacaccccacagccacagatgcca

SEQ ID NO: 39887 - DNA, 1141 bp, Artificial sequence
  DNA replication origin
gactagaggtgcataacagctggggggtgcaggaactctggatgtgtagagcagatgggggtacagaacacttagggggtaaaaaaacaactgggggtacggaacagctgacaatccagagcatctgcagaggttcaatatctggggtgaagaacagctggggaactacagaactgtgggtgcagaacagctgagggggcacaaaacagctggggaggtgcagaacacctatggaggtgcagaacagtggggagatacagaagagctggggagatacagaagagctgggaggtacaaaacagctgggggtacagaacagctgggggtgcagaacagctggggagatacagaatctctggggcatatagaacagctggacagatacagagcagctggggagatacagagcagctgggcagatacagaacagctggggatgcagaacagctgggggtgcagaagaactggggagatgcagaacaactgggggtgcagaacagctggggaaatgcagaatctctggggcatatagaacagctaggcagatacagagcagctggggagatacagaacagctggggaggtgcagaacagctgggagtacagaagagccgggggtgcagaaaagctggggtgcagcacaccttggtgtgcagagcagctgcagggctgcagaatgcttggcagggtgacggaacagctgaggggtgcagaacagctatgggagtgcagcattactgggagggtgcagagttgttgtgggggtgtcatcacactgatcggggccgggacacagttctgctaggaggcaggacagcgggggtgggcaacacctcaggggatggctccagcacctaacgcgacaagtaaggcccaaagcctgctcctgaaggcagacctccgccccagctgctgcagacagggagccctaagagatggggaagagagatctgggacaggcaaggggaccaagctgtcttcctaactcaactagaaaccagctgctgggtgcctccgtttccacacgcacaagatgaggatgccgcctgagcattgctagcagcctgcgactccacggctgcaggagctttgccccagaggctcacacaggctatgggtcctattagtcctagtccccatg

SEQ ID NO: 39888 - DNA, 986 bp, Artificial sequence
  DNA replication origin
cagccccaccccccaaggcctgccccagcggctgaacctgaccggagcagtcagggtgctctgtgagatcgagaaggtggttgtcgccatccagaagcgcttcctgcagcaggaatccatccccgagtcctcgttgtacctcagccacccctcctgcaacgtgagccacagcaatggcacacacgtgctcctggaggccggctggagcgagtgtgggaccctcatgcagagcgtaagaccaggagagccaggctcaggatgtacactagggcgcaaggggctctaggttacatgggcctcgatgtgggagggccaggcaagactctgcaccccgaggggaacccagcaaggggggttcaggacagggttgagttctcaaccagggaccagcctgcaccccagaatcggaagggagctgtgagtccacccaggagggactctggtgcagagtgctggggcaggcttcagagtcacggcttaaaactcctccctgcacagacaggatgagaggcagtgggacaggaagaggcaggaaagccaaggagtcctgtgtgatatgagagtgtgtgtgtgtgagtgtacgtgtgtgcatgtgtgcatgtgtctgaatatgtctgtgtatgtgggggtgtgcatgtgtgtgaatgtgtgtaaatgtgtgaatctgtgtgtgcgaatgtgtatgtgtatatgcatggctgtgcttatatgtacgtgcgtgtgtgtgtgcatgtgtatcgcgtgcttgtgtgcgtgtgggtgtgcatgcatgtatgaatgtgtgagtgtgtgaatgtgagaatgtgtctatgtgcatgtgtgcatgtgtgcgtgagttgagcatgtgtggatgcgtttgtccatgtgtgagtgtgtatgtatgggtgtgtgtttggggggcattggatggcattagtcagaactgctctgtcggagggactgtgttcctagcgaacattctctatttcagggtcctggatgggctg

SEQ ID NO: 39889 - DNA, 772 bp, Artificial sequence
  DNA replication origin
gggacattgtcctcatcgggagctaggcaggaatggtggttcctggtcgttggcgggaactctgggccctgggcttctgtccctcaggacctttgagcagtccaaggcattgcattctaaaaaaagggattggttggggtggtgccctgaaaccaccgtggacctgcttggctgagagttctacatgcatgatgatgtttagtcccttagcgaccgcatgggtcaggcatcatcatccacgctctgcggctgagccctgggtgctcggcagggtccatgggagttcagggtcaaagtcaacctgacaccgagaagcagccccgtccctgtggctctgcctcttgaggagccttgagggggtgctgcttctggttgggggtctggacacactccttagtggggacagggcggcctctggcactggatgggtcaaagctgtcagatgaaacccagagtcctggcatggggtgtcaatgtctgggagccgacaaagtgggaaccgggtggacgtcctgagcaggaggctgggacatggaccttggggctgagtaaggagctagccctggggagcagaggccagaaagccccaggggctgagggatgaggtggggaggtggggcataaggtgattccatggtgtggagcctgcttggagcctggagctgggactgagggtggccaggaagctgagggattcacgtggacgcgtcggaggccattgcagagcacaagcttgcctgggaggcacagctcactctgccgagctcattcc

SEQ ID NO: 39890 - DNA, 1344 bp, Artificial sequence
  DNA replication origin
gggcccgtgggcctcctccgcacagtgtcgggtgctgagtgcctcttgtgggctctgggcttcgcgtccagcactgccaaagttgcccaggtttcacgggaagctcgcggcaggccgggcccagcagccttccgggagaaggacactacgcatctgcggccctgcatgcccccaggagcccatgggctccagcacgggggtgggcaaggggcgagagtctggcccctcatctcctggcagatttcaaagtgtggtcagaaacatagctggactgggcaactggctgaagtggaagtcatcattcagctaatgaggcttgatcttttctccatcccctgctactgctggtgtctgtgctggcctggagctcaccccacctcacccgggcagagcaaaggcccttggctggcagatgctggagggtctgtaaacttgctggtgaatgcccggctgtggacacacagcagatgcctgtcaagggagaaggagccaaggagagccctggggattcccaagagctttagggtgtagggaaaatcgcccaggcaggctgattctgcgaggcttgtccctatagcaggagatggcctgtgcgaagtgggactcctgggaaggagcgatgaggactagagggaaggggcagcatgactccacaggctctcacaagggacacagcatggacatgcttctgcctggatgcccctctgagtcgacagagatccatgtgccctggcatcaaggtcaggcaggggagacgtgcagggagtggagtggacaccagaggggcaagcaccacggtgtggacaccgaggggagccatgggtcctgggggtggcctgggactggactgttgagtcttgggtgggcagaaatcgttcccctcatcaaggactgtagatcctcacttgcgacacccaggacaccaaagcgcttctgttactggataaaaggtcttgactgtgtgtcatccaggctctttgtgttgaacaaaaaattgaacagaatgcataaacaaagcaaaaaagaaggaagcgacgaaagacaaagcaacaaaataacagtaaataaagtgcaggtatattgaagctaaagtacacttcacagagtgggagcaggcttgagcaggtggctcaagagcccccattacaatgctctttagggtttttataaagctcaaataatctggtgacacccctaggcaccctttagaagcctccaattagtcagaccctatgaaggattggcctgtgaccaatcagaagctgaagtggaaacttctgtcttgttatcgctggagtgaggatgtggcccgtgtgctgcctaatcttgcctagaactggctgc

SEQ ID NO: 39891 - DNA, 2484 bp, Artificial sequence
  DNA replication origin
catatacagagacacacatatacagagacacacataggtacacacagacacagagaaacacacacacacacaaacacacacatacagacatatgcacagagaaacacacacacagaagacatacagacacacacacagagacacacacagccacatacagacacacagagcctcacacacaggcacacatgccgccctgaggccacacaggccacactttgtacgcagcccccaccttccacaggcctctctgtttgtacaaacaccgccaaacacatccccctcatcagcccctttgagttttcaaaatagttacgatatcctcactccaacaatatctggaggaaggctgcctttccccaattttatttttcttagacaaagaaacaaagagtccaggagacgcctgagagaagacagaggaagtggcagagcgggggaggggagcagagcatccagcagcccagagaaggggagcagggagggggggacccagtggaaggctcagagccaccggtgaggtggaggaccatcacagccacggattctgtaggcggacttgtcaggacagagtggagtgagggtgagtgaggggcagattcagatggctgttcaggggcgagtgtggggagactcgtggctgtgcgggggtgagtcgggggagacttgtgtggctgtgcaggggtgaatggggggagacacatggctgggcagcagtgagtggggggaggcttgcatggctgtgcaggggtaagttggggaagactcccatggctgtgcaggggtgagttgggggagacttgcacggctgggcagtggtgagtagggggagactcgcatggctgtgcaggggtgagctggggagagactcactttgctgtgcagggataagtgaggaggagactcaaatgtctgggcaggagtgagtgagcggtgactcacatggctgggcaggggtgtgtgagagagggagactcacgtggctgggcaggggtgagtgaggaggagactcacaaggctgggcaggggttagtagggggtgactcctatggctgggcagaggtgagtggggagaggctcccatcgccgggcagggatgagtgaggggagactcatggctgtgcaggggtgagtgagaaagggagactcccatggctgggcaggggtgagttgggggagactcatgtggctgggtaggggtgagtggggggagactcctatggctgggcaagggtgagtgagaggagactcatagggctgtgcagggataagttggggggagacttacgtggctgtgcaggggtgagtcggggagactcgcatagctgtgcaggggtgagtgggaggagactcacgtggctgtgcaggggtgagtgggggaagactcgcatggctgtgcagggataagtgagcaggagactcacatgtctgggcaggagtaagtggggtgactcacatggctgggcaggggtgtgtgagagagggagactcacatggctgggtaggggtgagtgaggaggagactcacatgtctgtgcaggggttagtcgggggtgactcctacggctgggcagaggtgagtcgggagagactcccatggctgggcaggggtaagtgagaggagactgacagggctgtgcaggggtgagtgagagagggagactcacatggctggacaggggtgagttgggggagactcacacggctgggtaggggtgagtggggggagactcctatggctgggcaggggtgagtgagaggagactcacagggctgtgcaggggtgtgtgagagagggagactcacatggctgggcaggagctagtgagggtgagactgcatggctgggcaggggtgggtgagggatgaggaatggaggcaaagagcagattgctccttagggacctgggttgctaatggtaagaggctgctgaggaggctcctggttgcagagaagggtttgttttcgccttctgcaagatgggcaggtttgtgggctggagggcaggaggcgaagacacagcctggatgagggggaggaggaggggcttgggaagcaatggggaatgggtcgctgtgagcagagggccctgccagcttcggatggaggggcagtggtgaaggagggaacgtgagtggacagatgttagggctcagtggggggtgcggggtgcagggttgggcccgctggtggagtggaagtcggtcatgagggatgtgccaggtgcccagtcctcagtgcggtcagaggtgagccccaggtcagagtgcacggcctggggagtgtggtgagtagttaatgggtgcgagcctgttgacttctgccattaaaatctctttattttgagataattattataagaagagtcgataagatacactgcactccagcctgggcgacagagcaagactccgtctcaaaaaacaaaaaacaaacaaaaaaaagaagggtagataagatagtagttatcagaaataatacag

SEQ ID NO: 39892 - DNA, 1512 bp, Artificial sequence
  DNA replication origin
tcctgggaggggtgtcaggtcgagcttgcgagtctttgtgtgtttcctgctctccttgaaaataaaaccgttcccggcggacgaaggatgcgctcactcaccatggcggtgccgaccgagaaagcggccatcagacaggccatgccccgggggcggcggcggcggcggcggcggcggcggcggggacgaggcttgagctgcggggccgaggctgcgctggctcccggctcagccgctgcgcggggtgcgggctgcgcttgggctccggctgggatccggctccggctctggttccagcgcgcccgaccccgccccgagcgcgcgattggccggcaccaagggggcgggcgggccggcaggtgcgcgtgctcttgttttgctcctgctgggggcggcggaccaggacccctgaagtgcaggttccgggagcggcccgagccgaggcctcgcaggcggcatgggaaccccctgccaccccggaaaccccgggtcccgaactcgcgggggctgggccagcacgggtgaggctgcggggacaccggacagacgccggggttcccaggctcggaaatccactgcctccaagcctcaagcggctgtgtgatggggtcgaagagggggcgtccagggagggagagtgagggccagggggcttctttcttgctgctgcttcttcccttcccgcccaccccaccccgacggtgttgggcagctctctgccaggtaggagcttgaggactaaagaagagataaccactccaacgcccccaacagcaccggtgtggggtgacccctggcagtgaggcatcgtgtgcactcacacatgtgacattgctgtgcgccagccatggtgctaagtgctgggttacaaaggggtgctgagtgaagatgcccaggcctctgccctctgttcacccccgaacaaaaaaagaaaagcctcattttctgcagacagaggtgtttccagagccatgttcatggaactgtataaggaataacaccagggcacactcccatgtggccccaggctggaatatcagatggtccagcatctctaaagcccttattatatataagtggggccatttcctggtatccatggtgacaaggaattctttactcccagtctcaggccctaatgcttttgttcagttgtttgcatgttgggacgaaaaacaggaatgcatttcttttcatttccagcacacctgggtcccccctcccaaccacacctcagatgagccaggtctctctctttctcctcacctagaaaggaggcacagctttttatgccaggcaggtggacttcacacccacaggtcagatgactgtaaccaaattcagccgctcaaatcgaaggagagaaaggagacacggttatgagtttaagtgggaggccttgcctttgtctgaatggtgttgtctcaagagtcatccagccgggcgcagtggctcacacctgtaatcccaccactttgggaggtcaggagatcgagaccatcctggctaaca

SEQ ID NO: 39893 - DNA, 1087 bp, Artificial sequence
  DNA replication origin
ccctggccctcactctccctccctggacgccccctcttcgaccccatcacacagccgcttgaggcttggaggcagtggatttccgagcctgggaaccccggcgtctgtccggtgtccccgcagcctcacccgtgctggcccagcccccgcgagttcgggacccggggtttccggggtggcagggggttcccatgccgcctgcgaggcctcggctcgggccgctcccggaacctgcacttcaggggtcctggtccgccgcccccagcaggagcaaaacaagagcacgcgcacctgccggcccgcccgcccccttggtgccggccaatcgcgcgctcggggcggggtcgggcgcgctggaaccagagccggagccggatcccagccggagcccaagcgcagcccgcaccccgcgcagcggctgagccgggagccagcgcagcctcggccccgcagctcaagcctcgtccccgccgccgccgccgccgccgccgccgccgcccccggggcatggcctgtctgatggccgctttctcggtcggcaccgccatggtgagtgagcgcatccttcgtccgccgggaacggttttattttcaaggagagcaggaaacacacaaagactcgcaagctcgacctgacacccctcccaggagcgcgtcctctgggcgctgacccagggcaccctagagtggcgcccggctccgatcgctgcccctgcccctccgccagggccacctggagcctcgggatgccccttgcaccggcagagagcacggactaggtggaggggccgggagtggggcgggggcagcgagttgccctacaagttggaccgatggccttgacctgatggcttctgggcggggggcgtggggagctggggacccggagcgcactggggactggggaggggccgcagcttgggccggagggaagaggggacttgaagaaggggagccccgcgcgcgcggctgtgggcttggggaccggggacttctcgcgccatccccaggaacgccaggcaaggtctgggggaacaaaagaggaagctgcccccagagagccggagcctgcgactgcactcccggg

SEQ ID NO: 39894 - DNA, 988 bp, Artificial sequence
  DNA replication origin
gggcgctgacccagggcaccctagagtggcgcccggctccgatcgctgcccctgcccctccgccagggccacctggagcctcgggatgccccttgcaccggcagagagcacggactaggtggaggggccgggagtggggcgggggcagcgagttgccctacaagttggaccgatggccttgacctgatggcttctgggcggggggcgtggggagctggggacccggagcgcactggggactggggaggggccgcagcttgggccggagggaagaggggacttgaagaaggggagccccgcgcgcgcggctgtgggcttggggaccggggacttctcgcgccatccccaggaacgccaggcaaggtctgggggaacaaaagaggaagctgcccccagagagccggagcctgcgactgcactcccggggacaccctctcccggacccactcggggaggcggcggcgaaggcccggggagacccgcgaggggcaagcccggattcctgccggccgcctttctgcgcgcgccggagagagagacgcggtggggacagggatgcgcatttcacttccccgagctccggagagggatggcggggtgtcggcgagttcactgctggacacagttactgtaagtgctgtttccaggggtggtcaggaatctccctttctggttttctggcattaggaacaaacaacaaaccaatcatcaggcccccagccacccacctcaccttatcctagcgcccttcatgtctacgcccagcacaccaacatcgtagaggtagctaaagtacaaatggaaagtcttccgtattccacgccgtgtatctgtgtagttactaccctgatattacttccccgaggctgtaagcccacagtgcatggcacgctccggggctcaccccgcccctcccctgtatttcatttttagcatcctgtatttgaagtcagcagggctcagcaggatttgaccgacagttacctct

SEQ ID NO: 39895 - DNA, 1247 bp, Artificial sequence
  DNA replication origin
aagcctgaatggagcgcaggccgccccgggtggcaacacctccaccctcaggtccacactggcgacccttcctactgccagcgctctcaggcttcctggaccggtgttcctggacctggggaggagaacaccagcacgcgcggggcgccgggatttgcatggcccgggtgatcccctatgcatagggccgcccctgtcccagggaggctgcgaccccgctcggggctgcagctgcctcctcgcgcttggcaacagcgcggggcgcccgcagccaatcgcgccgctccccgcgccgccgctccgccgcggaggttactagcgagcgttgaccggtagtaaccccggcgcgggcggtggcggcggatgggcgggcgctgcacacgcgcggcagcgcgcacccgccccgcccgcacctgcgcgcgcgaggggctccggcagcgctgttttctcccgggcgttgagctcgggcaagagcgcgaacgtcaccctgcgtccacaggcctgcagagtcagcacctgcaccagccagagaaaggacgggcttttttactcagtatggagagcctgcgttagagctgacacttagtgggcagagcccggccttccgggagcctgcacatcaccacgggccaggatgaatcccgccctgggagggaacgtctgggtggaggccaggtggcctgataaccccagggccagggtgggcagaggtgtccagtgcagcccccagccaggtgcggggagctccagacaaaggacagaggccaaagatgcccccatacctgcatccatgaaagaattcccggaacacgtgccccaggaggaggagaggccttttgtagctcctcattgtcagcagggtttggggtttatgtcttgggtaaggaaaactcaacccagcttattttattatctgggtctgagcgattgcaaagagatgagttctcagtggcgcttatagaggcagggagttgggactccaggtgttaagtccagtcctggacctgccccctacctgccagcggtcctgggcaggccctcgttccccctccaccctccttcccttctggagaagatgcccatactgatgtgtgtcccatgctgctccccaaaggcttaatgaggcaaagcgccaaataaagcaaacacgatttgctcagtaaacaccagttatttttaattaaaacaacaacaacaaaaaaaaacacttctcccaaaacagtgggaggagagaaataacaactgag

SEQ ID NO: 39896 - DNA, 1215 bp, Artificial sequence
  DNA replication origin
ctaacgcaggctctccatactgagtaaaaaagcccgtcctttctctggctggtgcaggtgctgactctgcaggcctgtggacgcagggtgacgttcgcgctcttgcccgagctcaacgcccgggagaaaacagcgctgccggagcccctcgcgcgcgcaggtgcgggcggggcgggtgcgcgctgccgcgcgtgtgcagcgcccgcccatccgccgccaccgcccgcgccggggttactaccggtcaacgctcgctagtaacctccgcggcggagcggcggcgcggggagcggcgcgattggctgcgggcgccccgcgctgttgccaagcgcgaggaggcagctgcagccccgagcggggtcgcagcctccctgggacaggggcggccctatgcataggggatcacccgggccatgcaaatcccggcgccccgcgcgtgctggtgttctcctccccaggtccaggaacaccggtccaggaagcctgagagcgctggcagtaggaagggtcgccagtgtggacctgagggtggaggtgttgccacccggggcggcctgcgctccattcaggcttgagcggtgactgggagaccccgggaatggaaatggcgctcaaatgctggtgtggtgtccgcaggggaacggcccgcgggtgtgtggagtctgcgcccctgtggcttcagctgcgtcgggggactgcgggaatcttccagactccagtttaaatcagagaggtgtgtccacgaaaagagtcaaactaaaacatttaaagagatttatcctgagtgaccatggcccgtgacacagcctcaggagaccaggagaacacgtgcccaaaggggtcgggaacagcttggtttcatacttttagggagacgtaagacagtgatcaatatttaagatgtacattggttccgtctagaaaggtgggacagcccaaagggggacttccaggttataggtaaatttaaatttttttctaattggttaagttattatcgatagaaagggatgtctgggttacgatacggggctgtggggacctaggttgtatcatgcggatgaggcctccaggcagcaggcttgagagagaacagactgtaaatgcttcgtatcagacttaaggtctgtgttgatgttaatgttacaggctacgataaggcatgtcagacggaccgccacttcccgtcatggcctgaaccagtctttcagggga

SEQ ID NO: 39897 - DNA, 1844 bp, Artificial sequence
  DNA replication origin
aggaacaagggaaagcactggctatgccctcaaggagctccgaatcctacggttctccagaattctggagtgaacgactcaaactcccctcacatgagaaggttgatttgtcagctgataaagaaagttctggagcagctccctcctgggtgcttctagacagccactgtgccctcctaattagggaacaaagctgctgctgggggcaccactcagagctgcagctttcagagccacctgcagggggcagccctcatcccgagtcttacagcagctgccagcaggcgccctactcccctgagaggcagaggaaggctgacctcggctgttctctagtagaatgctctagaggaggattaatggagggatggatggagggatggatggagaggctgatagagtggatggagatatgggtgtttccaaaattcaaccggatacacagggaacatgttcaaggcaacccccagttgcaaatcccagagtgagtttcaggagtgcagcactggggactcagggtgtggtgaactctggatggagagagggatgcattgagggatggaggaagggatggaggaagatatggagggagggatgggggggatatggaaggtgggatggagggaaggatggagggagagatggaaagagggatggagggaggaatagagggagggatggaggagggatagaggaagacatgaagggagggatggagagagaaatagatggagagataaagggagggatgggtggagggaagaattaatggaggaacagatggagggatggttggagaggcttatggagtgggtggggaaatgggaggaaggatggatggagtaaatgaagggatgagtggagggatgagtggaggggaggattaatggagggatggatggagaggctgatggagtggatggggaaaagtgtggaaggatggatggagtggatgaagaggtgagttgagggatgagtggagggatggatggagaggctgatggagtggatggggaaatgggaggaaggatggatggagtaaatgaagggatgagtggagggatggatggagaggctgatggagtggatgggaaaatgggaggaaggatggatggagtaaatgaagggatgagtggagggatgaatggaggggaggattaatggagtgatggatggagggaaggatcttcatgaagcctcagtctgttcctgaagaacgccttttctagcatgggcctcgcggtgcagggagacctcttgggactgtgtatgcagttcagtggccagtgtaagcacatatgcaagtatgacattcttctttgccacacatttcaacacattctgatttctggaatatttcatccactgtggaaggcagtaagcattgttggaatgtggccaaagtgaggaggctggctggagtctggagctctcagtacggtccttccccagggtcaccgccacgccctacacagctgtctcagcaacatgctttaggacaagaacgcttcaggtggaagggggatggcccccagcacgtccactcccactgccaaatgagctccaagtacgtcctgctaacactgtttgtagtcaccagtcctgtatctgtatgatagcaccgggcaatggaagaataactcaggccagatgctgcagaggctgcgggtgccatggatattctacatagactccagcccagctgggttcccaaaaagctgcctgcaaattgattgactggaatctcctggggagtttgagaaacgcttctgaaggaattggcctggggcatgacccaggagattccagtgggccctgaaatttccaaatcggctctagattcg

SEQ ID NO: 39898 - DNA, 778 bp, Artificial sequence
  DNA replication origin
gtccccactcatctgggttggggggtacttcacaactgtccaggcaggacagaggtggggggtccccactcatctgggtggtgggtggtacttcacaactgtccaggtgggaaagaggtgggggttccccactcatttgggtggggggggacttcacaactgtccaggcaggcagctgtgcctcaggtggtctagtgccccgcagtcaccacccccactccccacctcccatctatggggctggcgatgggggcatcaccccatagaaggtggccttgctgcagcccaggtgggctttactccagcaggtgtttcactgtccagcagggtcctggggggacctctcttctcctttcctagcccctcagatctactcctgctctcatcccctcaactctgaagtgacaggcccgggggacagtgtgtgttgggcagtcccccggagcccacccatctcagggcattcagcctgcaagatgctattcaagggttcattgtggtctcttttcctgaagtatcttatagacactgtgggctgttactgtgcaggcccaagagaaggaaacaagtgagccccgccatccccccctcagaaggctgctgtcacactactgtcaaatctcgctggactttggagaggtgagtgagtggcagaaatgagacaacgtaaagtctggctgaagtcatttcaggagaagcctggttcctggccacccatcctgcctgggacaactggacaggacacatgcaggagtcaggcgagctcaacctgcggctg

SEQ ID NO: 39899 - DNA, 838 bp, Artificial sequence
  DNA replication origin
ccacaaatagctcaagtgtcatccagttataaaacgtttaaagaacaaaaaaattaggtttcatttcctctagactctaggtaaaatcatctggccagcctgtctctgcctctctcctgtctccatgtcctaatcacctcctctcctgaggacagcagtcattggattcagggcccaccctaagtccaggatgattcatctcaagatcctaattacctctgcaaagatgctttttcaaataagggtgcatagtgacagtccaggtggacttccctcctccttcgccttccagccatcagtcttaatctgtcgtttttctttaaaatatttgattcatgcaattcccaggactccgtattttctaccacactatttcccaaattgtgttccatgagacattgttcacggacgtgcctctcactcacaaggagtaggctgtgatggagaggagacagggcgagggttgcagggagtgtggtttaaggtgggacgggagccccaggagggttgtggttctggtttcgtgctcgctcacaaggaagagtaacagatcagtaacgggtcactaacggatgctgctgagtggggcaggggaggtgaggtctgaagcctgcatggaggtgagaacctggagggaagggcgggcaggaaggagaggaaacacggtgcgtggggatgcagagaggtcctggagagatgagggcattcccttctggggatttcatttcctcaatgtcgtctgaccagagagcgggaggtgaggggagtgtggcccactgttgagggtgtgggtgaccagaggggcctggaaacattgcctggcagtgctgtaggctcg

SEQ ID NO: 39900 - DNA, 2002 bp, Artificial sequence
  DNA replication origin
ctgggcccacgaaagtggccacctggagttgggggcacacaggacagatgtagcagaacctgcagcctggcctcctgcagaggaggctcgcccacgccagcttcccccgggcagggccagggcaccttctgggcagggtaatgatgatgcttaatgtggcagaaggtgcagcgttcccgaggtgtggggtcaccatctctgaggaccccccggctgccctgctgtgacgtggcagccccagagcctcctgcagcccaggatgagctgggacccagtggatgtccccaggccagagaggtggggacacaccctcctcaacagactgccgtctgctcctccacagctgtccccgggggggctaagtgcctggcctgtggcaggtgtgtggcgggcaccccttcggtcggggcacagtggaaggactgcagccttcacaggcgggatggacgcctgcctgtcagcacctccgggagggcagcccagagaccgaagcaaccgccgcgactcagggttcacagtgagcacaggtccaacaggggcactgtgagtgtgtcgggggtaggagggtgtgtggagtgtgtgtgtggagtgtgtgtgtggagtgtgtgtgtggtgtgggcggtgtctgctgtgtggtgtgtgtggtgtctgcggtgtgtggtgtgtggtgtggagtgtgtggtgtgtggtgtggtgtgtagtgtgtgatgtttctagtgtgtagtctgtgtgcgcagtgagtggtgtgtgtgcatagcatgtagtgtgtagtgtgtgtttgtgtgtagggtgtggtatgtggtatgtactgtgtggtgtgtgtatgtagtatttgtgtgtagtgtgtagtgtggtgtatgtgtagtgtgtggtgtgtagtgtgtagtgtggtgcgtgtgtagtgtgtggtgtgtagtgtgtgtggtgtgtgtgtggtgtgtagtgtgtagtgtggtgtgtactgtgtagtgtggtatgtgtgtagtgtgtggtgtgtagtgtgtagtgtggtatgtgtgtagtgcgtggtgtgtagtatgtgtggtgggtagtgtgtagtgtgatgtgtgtgtagtgtgtggtgtggtgtgtactgtgtagtgtggtgtgtgtgtagtgtgtggtgtgtagtgtgtagtgtggtatgtgtgtagtgcgtggtgtgtagtatgtgtggtgtgtagtgtgtagtgtggtgtgtgtgtagtgtgtggtgggtagtgtgtagtgtggtgtgtagtgtgtactgtgtggtgtgtagtgtgtgtggtgtgtactgtgtagtgtggtatgtgtgtagtgtatggtgtgtagtgtggtgtgtgtgtggtgtgtagtgtgtagtgtgtgtatgcagtgtgtggtgtgtagtgtgtagtgtggtgtgtgtgtagtgtgtggtgtgtaccgtgtgtggtgtgtagtgtgtagtgtgtggtgtgtgtagtgtgtggtgtgtaccgtgtgtggtgtgtagtgtgtgtggtgtgtgtgtagtgtggtatgtgtgtagtgtgtgtggtgtgtagtgtgtagtgtggtgtgtgtgtagtgtgtggtgtgtactgtgtagtgtggtgtgtgtgtagtgtgtggtgtgtagtgtgtagtgtcgtatgtgtttagtgtgtggtgtgtagtatgtgtggtgtgtagtgtgtagtgtggtgtgtgtgtagtgtgtggtgggtagtgtgtagtgtggtgtgcagtgtgtactgtgtggtgtgtagtgtgtgtggtgtgtactgtgtagtgtggtatgtgtatagtgtatggtgtgtagtgtggtgtgtgtgtggtgtgtagtgtgtagtgtggtgtgtatgcagtgtgtggtgtgtagtgtgtagtgtggtgtgtagtgtgtggtgtgcaccgtgtgtggtgtgtagtgtgtgtggtgtgtagtgtggtgtgtgtgtagtgtggtatgtgtgtagtgtgtggtgtgtagtgtgtagtgtggtctgtgtgtagtgtgtgtgtgcatgtgtgccgt

SEQ ID NO: 39901 - DNA, 1074 bp, Artificial sequence
  DNA replication origin
tcagggactgcctcgagatgtctttggagaaagtgttcctggcttgctgggaaggatccgtgttcagctcccgctgcccagcagcttccatgggaaccttgccctcctggggtctggatccatcgcgacgtgaaggtgatcatcgcccacccccgggacactgtgggggtcaagagaggccccgtggtgagggaggatcatcatcctgggggtcgggggggtttcctcctcagggaggaagatttccagccccggtgctctgcctccggcagactctgtcttgcccacccgctttgtctttgtcgcatgatggaaataaatggaaatggtttccacacacgaatgcactaaactgtaatcacaattttctagatttcagttgtaacaggatcatggacctgagtgacccgcaaagacgctctgagccttgagccagagggtgtgtggggtggggaggggagtttgccacggcctctgtgatcccacagcacagggggcagagctgggggctggggtgggggcaagggcgcaggcagatgggcctgggggtggccagcacggggacccacccagttcgttctgtacaccgaggccacttcctctctcgggttccaaagctcccccgctccctgccatgggcttgggggtcttcccactgcagcccaatgctggctgctcttctacgctgcccaagcccacccctcaggcccggtaccccacagcagagatcaagaggtggctggagggcagtgggggcacggacagcaccactgggcgctccctcttcaggcctctctggaaacccttgctttggaaacgtagaaagccctttctcctgcccccaccttgaaactgtacctaataacggcaaataagttattcagctccccacagctggcaaagtgcaagtcgcagatgctgccacacagcatttcctgacagccctagggcagaccgttgatccattctgcaggtaaaggagttgagatgcaaacacttcccaaggaagcaagaatggcctcctcctccactccctagaaggacccagggcaaccgatccacttgacaacacca

SEQ ID NO: 39902 - DNA, 1854 bp, Artificial sequence
  DNA replication origin
tcactgcagcctccgcttccctggttcaagcgattctcttgcctcagcttccccagtagctgggaccacaggtgcccgccaccacacccaactaatttttgtatttttagtagagacagggtttcaccatgttggccaggctgctctcaaacccctgacctcaaatgatgtgcctgcttcagcctcccacagtgctgggattacaggcatgggccaccacgcctagcctcacgctcctttctgatcttcactaagaacaaaagaagcagcaacttgcaagggcggcctttcccactggtccatctggttttctctccaggggtcttgcaaaattcctgacgagataagcagttatgtgacctcacgtgcaaagccaccaacagccactcagaaaagacgcaccagcccagaagtgcagaactgcagtcactgcacgttttcatctctagggaccagaaccaaacccaccctttctacttccaagacttattttcacatgtggggaggttaatctaggaatgactcgtttaaggcctattttcatgatttctttgtagcatttggtgcttgacgtattattgtcctttgattccaaataatatgtttccttccctcattgtctggcgtgtctgcgtggactggtgacgtgaatcaaaatcatccactgaattccaggggctccattactgtcatctctcctgtgtgcgttgtggacttggcattcttctgtcggaacaggttgctcagcagatcagcatcagctcgtgtcatacacagaactcaaaagtagagcaaggccaggcaaagtagtgggtgtgagcggtggccggagggagtgagcagtggccggagggagtgagcggtggccggagggagtgagtggtggccagagggtgtgagtggtggccggagggagtgagccctgtacagagggagttagcagtggccggagggtgtgagacctggatggagggtctgagtggtggccacagtgtgtgagtggtgtccggaggaagtgagtggtggctggagggtgtgagacctggatggagggtctcagtggtggcagtagtgtgtgagcagtggccggagagtgtgagtggtggtcagagggagtgcacggtggccagagagcataagtggtgactggatggtatgagcggtggctggacggtgtgagccatggccggaggttttgagtggcacccgaagggtgtggccggagggagtgagctctggctggagggagtggccagtggcaggaaggtgtgagcaatggccagatggtgtgaggggtggtcagagggagtaagcggtggcttgagggagtgagtggtggccagagggtgtgagtggtggctgaagggtgtgggctgtggccggagggagtgagcagtgatcagatatgggacctggacggagggtttgagcggtggctggagggtgtgggcagtggctggagggtgtgggtggtgactggagggaatgagcagtggccacaggatgtaagacctgaacggagggttggagtggtggctgtagtgtgtgagcagtggctggagggtgtgagtggtcgttggagggagtgatccctgactggagggactgagcagtgaccggagggtgtgattggtggccagaaggagttggcggtggctggagggtgtgagcggtgtccggagggagtggatggtgtctggagggtgtaccaccaaggacgcctttctgatcgtcctgcgtccatgctcagtcctggatctcctcttccctttctgggtgtgtgtggctctggaagaagctggctaacctgacgaggttaccgccctactgtcaccatggaagcatagcgcctca

SEQ ID NO: 39903 - DNA, 1484 bp, Artificial sequence
  DNA replication origin
ggccacttagtcctggccatgtcttagctattgcaggcgactgcgacatgctcatctgaaagccttttgtggcacccattataaagctcgctggcccagcattgctctggagactttattcctcaccctggctctttcaagatccattctcaaccctgagattataccatggatagtcagcaactggtctgattcctgagtgacgtcctaaaaaggctgaaacacaagccaaaacctgtctttcaaaacttgtccttcctccctcacttttaatattccagaccaagatgacacaaatgttggtaaatgtacatttttgcacttaaaataggaaagaggagaagaggaagaggaggaagaattagtaactgttgttccaaaatggaaagctacccaaatcactgaattggccctgtggacaccaactctccccaaaaagccgacctctacggatggacctggccaagacgctccaggagctgagagtgtggggcacccccgggctgtggggtggagggggcagagggtgtggggcacccccgggctgtgggacagagggtgtggggcatccccgggctgtggggtggaggggtcagagggtgtggggcatccccgggctgtggggtggagggggcagagggtgtggggcatccccgggctgtggagtggagggggcagagggtgtggggcatccccgggctgtggggtggagggggcagagggtgtggggcacccccgggctgtgggacagagggtgtggggcatcccccgggctgtgggacagagggtgtggggcatccccaggctgtgggatggagggtgtgggcgcctttgggctgtgggagttgtggacatcctgttttcaggccaggtgtggttggactctctgaaaatcagatgctgggtcagttgagtgtgcgggatgttattagggagagcctttgggattggaggacactcccggagagcggaggggagaggaaagaaacagagttgattggacagaggcggaggtgtggcctccacaaccttgcttcattccatggggagcactgtggcgtctcggggacccttatcccctcacctaggtcagtgagtgaatgtgggtgtgaccccgggctggcactgacagcagctgaggggacagcccttccctgaagaagggtccgtgtggcacctccatgtccaacccagtggtctttctggaagtccttaatgtgctggggaaagttgaaggtggctaccccgggtgagatcccttccatggcaagcggaggaaagccaactccgattggcctccgtgaaagaatactcatgctgctaagaatttcttggctcatgtgactgggaagctccgggacagcccccagaatggccgggcagcctctgccctctgtcccagctctcctctctgctggctcccctggctggcactctcaggaaccccaggggacttctctttctcaagagtctcatcaacaccc

SEQ ID NO: 39904 - DNA, 1704 bp, Artificial sequence
  DNA replication origin
cctgtctcaaaacaaaccaacaaacaaacaaaaaagaaaaatatgcatgacctcacttatttttggaatctgaaaaacttgaactcagagaagcagagcatataataatggtggttaccaggggcagtaggtgggagaaatggggagtcgctggccaaagagtacaaagtttcacttaggaaagatgagtaagttctggagggctaatgtacagctctaatgtatagttagtaataatacattgtatacttgaaatttgcaagaagaatagatcttaaatattctcaccaccaaaaaaaaaaaaataatgtgaggtgattggatatactagcttgactgtggcaataattttacaatgtattcatatatcaaaacatcacatcctatactacaaattatgtaatttttatttgtcagttatacgtcagtacaactgggtgggggggagggggggtgggaagaagctgtctccatatgaggccgaggtgtcctatatatcctgagcttgtattatcgcctttcaagtgtaaaacctgtaggtgatgggatgcccgaaaggtttgaaaatcaggaatgacaagatcagattttgctttaggagggcaacttgaggcagcttaaagagtggattgcaggaggtagaacttggaagtgagaacgctgttgcacaagtgcagtgagagaggggtagcctcgagccgaaccaatggcaagggccagggctggggagaccattggagagaggggtgggagccacactgggctatcaccgggaatggagagctagaaaagagaggagaaagcactggcacagggggcctgcggagagaaagaaggtctgaagaaaacctggccaaaaggagaagactggagccctgggccatcccgcttgcggaatgaggggccggcgggcttcctggggctgaaccctgcgtggcaaagaagtgggcaggttttctttctgcctgcagaaggcttctcaaatgcctaacaaagtgatggatttcacgcagcccagctcagcaaagagagacacagacatcagagtgttctagaaacaaagcagggccccagggggaaactgcgaggcctagcagggcaggggagccaaacacagggaagaatgccttctccattctccagagggaagctcaacgtgcctggggaagggtgcgaggggcactggcctgttgggacatttacagccaggcctcgggttggttttatccttaaacattgttttatccgggggcaggctttttccccggaaaatttccgctctgcctcactttgctcttccccgaggagtgggctgggagccccctctgctctgaagccatcctgggggtccactgtgggtgttcggcagtagcttctaggggactggccaggcccctccctggggctgcctaaggagaagagttgtttctggggtgacgtgggagcctgtgtgccagggcactggcccgcaagggtaagaacccggcgggctcccgcagcctaacagggagctgcctctgtcacgtgcctgcgaggtgggacacaagttggcttacaagttggttcgacatagccaaatccgcgtgccgcatttccacgctatggagtgctagtcttcatgattgtgccccttgacatgacacaataggaatagaagccgggaggccaagcaaaggccctctttgggggtgggggcgcggcggc

SEQ ID NO: 39905 - DNA, 1310 bp, Artificial sequence
  DNA replication origin
gccggggccggaccgggaggcggggaccccccgcccccccgcccgcacctgcggggcagccggcgctcaggcgccgcagccgctcagcacctgcggcgccctcagggagccgggcgcggggccctgcgcactcggagctcggctcctctccttccttttcttttttttcggggggaggtgggggctggtttggatgttttccgagagccggggacggtctcaagctattttcgcggagggaagtctttgaaatacgacatctagaagagtggccctcggcgacaatgccgggcgttcccggaccggggcaacgctgggattccggggaagtggaggcagagggagcgggcacggggccggcagccgctccacggagtccccggcaggggcgagcttagctgtccagccgggtcccctgcccaccccggcccgggccgcggtgacagctgagggtccagagagccggcaggaggggaccctgcgcattgtctgccgcgatggggacgtgggcgtgcccgcggaattcacctcctccggggaccagccgcccagggaggagccggcacagaacgctggctcggagcgccggcaccctgggcctttgcgttgtttgtcggctgagcagctggttcccggagcccgtgggcctcctggccaatgcgagtgacagcgaccttctgggtttataataaagggcttgacgcgccggaaagtcccctcgccgctggccaccagccttccagcccttacggcccacgccgtaatcctggtgaccgagaaggtacgttcagtctaaggatttgcatttgaacgaaggatactggccaagccccttaccacccccactccccgctaacaccccagcccgcggccccaggtttgaatttccaaaggaggaattgctaaagcctgccctttccgggtctcccttagctctttgcctggaaggtgcctgcctgcctgcctgccggcccttgaacttaaatcgtctgaagttgtgtaagtggataaatattttagacttcccccgttgtttttttattaatcccctttgagagcaagcttgaaaacacctggccccagacctgtgattcaccaagtcattttggacctgcatttacacgttctgtttcatgcagcccacctgtgatgttctctttgttgggggttggaggcaggtaagggaggtggtgcaaatggaattcaggttccttgtacttcagccaaggggaaagagatagtgaccattttcattcatctttaatatggaaagcgcctttaaaagcaaaaagccatagaaagagcacact

SEQ ID NO: 39906 - DNA, 1692 bp, Artificial sequence
  DNA replication origin
ggctcggtgcaggtaaggggcaacgcctgcgtggatgtaaacggggcggcaggctcggtgcaggtaaggggaaacgcctgcgtggatataaacgggaatggaggctcggtgcaggtaaggggaaacgcctgcgtggatgtaaacggggcgggaggctcggtgcaggtaaggggaaacgcctgcgtggatgtaaacggggcgggaggctcggtgcaggtaaggggaaacgcctgcgtggatgtaaacggggcgggaggctcggtgcaggtaaggggaaacgcctgcgtggatgtaaaccgggcgggaggctcggtgcaggtaaggggaaacgcctgcgtggatgtaaacggggcgggaggctcggtgcaggtaaggggaaacgcctgcgtggatgtaaacggggcgggaggctcggtgcaggtaaggggaaacgcctgcatggatataaacgggaatggaggctcggtgcaggtaaggggaaacgcctgcgtggatgtaaacgggaatggaggctcggtgcaggtaaggggaaacgcctgcgtggatgtaaacggggcgggaggctcggtgcaggtaaggggaaacgcctgcgtggatgtaaacgggaatggaggctcggtgcaggtaaggggaaacgcctgcgtggatataaacggggcgggaggctcggtgcaggtaaggggaaacgcctgcgtggatgtaaacggggcggcaggctcggtgcaggtaaggggaaacgcctgcgtggatgtaaacggggcgggaggctcggtgcaggtaaggggaaacgcctgcgtggatgtaaacgggaatggaggctcggtgcaggtaaggggaaacgcctgcgtggatataaacggggcgggaggctcggtgcaggtaaggggaaacgcctgcgtggatgtaaacggggcggcaggctcggtgcaggtaaggggaaacgcctgcgtggatgtaaacggggcggcaggctcggtgcaggtaaggggaaacgcctgcgtggatgtaaacggggcgggaggctcggtgcaggtaaggggaaacgcctgcgtggatgtaaacggggcgggaggctcggtgcaggtaaggggaaacgcctgcgtggatgtaaacggggcgggaggctcggtgtaggtaaggggaaacgcctgcgtggatgtaaacggggcgggaggctcggtgcaggtaaggggaaacgcctgcgtggatgtaaacggggcgggaggctcggtgcaggtaaggggaaacgcctgcgtggatgtaaacggggcgggaggctcggtgcaggtaaggggaaacgcctgcgtggatgtaaacggggcgggaggctcggtgcaggtaaggggaaacgcctgcgtggatgtaaacggggcgggaggctcggtgcaggtaaggggaaacgcctgcgtggatataaacgggaatggaggctcggtgcaggtaaggggaaacgcctgcgtggatgtaaacggggcgggaggctcggtgcaggtaaggggaaacgcatgcgtggatataaatggcgcggcaggcttgatgttggtactcgcttctcagttctgtcctgtggctactcggccctgacactggtcaacgcggcgagcttggcacttcttttccccgctgcttctcctcaggtgctgactgcaaggggcagaatgagtaaggtctttcccacggggttcccttccc

SEQ ID NO: 39907 - DNA, 1000 bp, Artificial sequence
  DNA replication origin
gtaaacactctattccaaggctgtttcttcctgggacagttgtatttttaacacattttcccaagagttgctgcagccactctgtgtgagccccgcatcctaccacagccttagggacagcaaggtcaccagctctagaagctctgccttcagaacggcccactctgcagccagccccatgaagacacctcttgggtgcctggtgttgtaaaatttacccaaatccagagccatgattccaaacctgatggtagaagagcagcattcatttgcttgttcattcattcagcacactcgtattgccaagccctgagaataagcgcagggatacggtaataaaccgggagagccaaatcggccccatggagtcgagtctaggggaagcaatagacgactaacaaaggaacagtaaacagtctggggcaggagcggggggtgtatgattgtgtattgacggtcgtcttcgaggatgggataagggtgtgatggaatgaaccctgcagatctaaggaaaggccattccagaccctagaggaggtccaggaaggaagttcaggagcacaggccacagagggtcactgatttcaccaatttcaccaggatcagggttttccataccactaaggctggagggacaagggacaggagcgtgaaaggagaggcgaggctggtgccccaggaaacccaagcctggtctcaggctggtgaagaggtggatgatggagcgagtggggaatgagtggtcccagtggccggaaagcttgctgggggctgatctggacagatgggaggtgggtgaggtcctgggagcggaggttctggagaccggcgggcatggccaatgatgagccctaggacgtgactctcacaatggggactgaaggggttggagggaggtgccgttggaaaattgcagtaagtgagaagagtcagaaatgggaggaccagagggaaagccacttctcagagaagagtaacaggttcaactttggtccaataa

SEQ ID NO: 39908 - DNA, 1901 bp, Artificial sequence
  DNA replication origin
  misc_feature (1353)..(1362): n is a, c, g, or t
actgccaaacacgtcccttcctctacctgcaggcagcagcagcccccatctccgtgtgaccgggacgcccatccctgccagagggcccgtgcccgtgtgaggggttcaaagcgctgctgtcactggcctctatctctgggaccccatcaccctattgttcctatggctgcttgggagcccaggacggcaagagcaccccctccagccccatcccacggaggaccctggcactctcaggtggagcccttcatgggtgcacgtcgaggacatctggaaaaaagcatcaccagtaactgtgataaagacttcggaacagtcgcactatgtgcacacagaggctctttcaaatcaatgaaagagctctgcaagggtggggcggattccacggagctgccagcgagccagcgagcgtggacctcactggaaattccacgcatgcaaatgaaaagaacggtgcaacaccgtctttctctatcaggagcaaagattgaaaagaactttggggcttttcctccgcaggttgcctgaggctccagtaggtctgcagacagtgcctctgcacccggtttctgtttcctggagggcgttttcttgtttcttcttgattgttctgtttcttaactgcacccgttagtagctttgctgcttcgcgttcacaaatcgctcttcattccttctctgcacacaggacgtagggtggccaatattaccacccccgacgtgatacctacagaacagctttgaaatagaaaaatgcagacacttccctgatcagagcggtaaatattggtagaaccagaaaaattattagtgaccagtgcaaagttgggcatggctaggggtcatgtctgtgtgtgtgtgtgatgtgtgtgcttgtctgtgtagtgtgtgtacttgtgtgtgtctgtgtgtatgtatgtgcaactgtttgtgtgtatgtatatgtggtgtgtatgtgtctgtgtgaatatgtgtgtgtggtgtgtgtatggtgtctgtgtatatgggtgtgtggtgtgtatgagtatgtatgtgtgtgtggtatgtgtatggtgtgatgtgtgtggtgtatgtgtgtccgcatgcttgtggatatgtctgcatgtgtgcatctgtgatacgtttgtgtgtgtggtgtgtatgtgtttctgtgtgctgtgggggtggtgcgtggtgtgtgtctgcatgtgtgcatctgtggtaagtttatgtgtgtgtggtgtatgtgtatttgtgtgtggggggtgtgtgcgtgaaagtgtgcattcgtggtacgtttgtgtgtgtggtgtgtgtgtgtgatgtgtgcggtgtgtgtgctgtgtgtgtgtagtgtggtgtgtgtgtggtgtnnnnnnnnnncgtgtggtgtgtgtgtgtatgtggtgtgtggtgtgtgtggtgtgtggtgtgtgtggtgtgtggtatgtgtgtggtgtgtgtgtatgtggtgtgtggtgtgcgcgtagtgtgtgtggtgtttgatgtgtgtgtggtgtgtggtgtgtgtgtactgtgtgtggtgtgtggtgtatgtggtgtgtgtatgtggtgtgtggcgtgtgatgtgtgtgtagtgtgtgtgtggtgtgtgatgtatgtgtggtgtgtgtgtggtgtgtagtgtgtggtgtgtggtgcgtgtggtgtgtgtatgtggtgtgtggtgtgtgtggtgtgtgtggtgtgtggtatgtgtgtggtgtgtgtgtatgtggtgtgtggtgtgcgtgtagtgtgtgtggtgtttgatgtgtgtgtggtgtgtggtgtgtgtgtactgtgtgtggtgtgtggtgtatgtggtatgtggtgtgtgtatgtggtgtgtggtgtgtgatgtgtgtgtagtgtgtgtgtggtgtgtgatgtatgtgtggtgtgtgtgtgtactgcgtgtg

SEQ ID NO: 39909 - DNA, 1051 bp, Artificial sequence
  DNA replication origin
cgcgggaggcgggggaggggagcaggggagggggcgggcggggggcggcccgcggcgctcagccaaccacagccgcgccgccaccgggcccgggacgcccgggagccgccgccgcgcgccgcagggtctcctccgctcggctcgcgctcgggctcgggctccgactccggctcgcgcgctcctcctcccggccgcccgcccgcccctccccctcccccctcccccctccctcccccgtctctcctctctcccctcctcttcactccctgcacctcccttccccctctttcttcttcccttgactccagcccccggtcggctgcctatctcccgatgccccctggacagctgtgcagagccctgagcgaccccttcggcccggagccgtcgcctccccacgcagcccgtccctcctaagccagcgctgggctgagcgtggccgcgccgctgtggaccccccagccccgccgggaaaactcccctcgctcctctctccctgctgcgaccgccaccctcatttcatttgaatagaaaacgggaaaagttccttctcggtcacccacagccttcccctaactagggggcgtcagcctcctccagctgcgcccggagctgaaatggcgattttatttctgtcctgtatggggccggaccgaggattaccccgccacaagctatctgctggattcagcagtttcgtcccctccccgcttgtgtgaattgctacagggagtgtgggaaaggcgggaggggaagggggctgtgggcatcctctggatctgcggagcagggaagggctgccttggccgcccccagttctcctgggctcctccattgggaatggggttggcggctgggggaggaggctcagatgccgtggtcctggccctgggtgcaggtcgcctttggaagcaagtgtcaaagccagccggagcatgtgctattgtttcgttggaagtgagttccaagccaccgctttccatctgttaagtgtctgggtgctgcttattgagagagtctggtgcacccaggctcctccctccccttcggg

SEQ ID NO: 39910 - DNA, 1345 bp, Artificial sequence
  DNA replication origin
ggaagaataatgctcatcgtgttctgcagtgttccaggcagtgtttacattcactcattcccttctcattccagtctataaagcagattttattatcccttctttatggacggggatgccagcttggggagcccaggggcttgctcgtggtacaggaagtggtagagctggcagtcaatccgcctctcccccgcaaaggtgccacatgccatgtcttccccagggcccacctgcaggctgcttttctggagatcaccccaacctcagcgtgtccactgtgaaaagctaccctgcccacaataacagcctggcctgccatgcccagcgtcctcctcccacccctcctgaagctctcctccacttttcacctgcttccaagagagctgctcccgggacatctttaggaagttcttaggacggacctgctactgttgatctggtgacaactcactttaaaaagacttttgcttttaaaggcaggtctttgatacattctcatctatcgggcagaaaaagtgtgtgtgcatgtgcctatgtggtgtgcatgtctgtgtgctcatgtgcacgtgtgtgtatgcacgtgtgtgcgtgtgtgtgtttgtgagtggatgtgtgagcattggagcatgtgtgtgtgtgtgtgagtgtgcatgctggtgcagtgacatattcaagggagggccactccttcctttggggagaaaggaggctgttacagtcccatgcaattgcagacgcctagtcctggagtcagggacctgggtctagttgtgcgtctgccgctgcccagctgcccagctgcccagcactgattaaataagggggtgaccacctgtccttgaagatgcttcctcctcccggttatctgagtctctcaaagcgggctacggtgggagagggctgtactttccatttcacggggatcaagccgggcacagggtgagggaggcttgttggcttaaatctactgattaaactggccaaatgcacctctgggaacaggaaagactcaagcctggccggcacctgctctgtgcctggctggggcatctctccctggcctccttcagtggagtactccgtgggcagaaaggtgagaagcagctgcaagggcttcctgaaacgcccagctgaggtttgagggatttcctcacaatggcttttccctggggactttagggggagctcatgagagccccttccaagccggcgcgctcattgtccctccctgcccgtcagagggggccacgaacaaagggggtctattctgaacccctctcccgtgtaactcaagtccgctaggaacgctggacattcgagggacttcctatctccgcacagcagg

SEQ ID NO: 39911 - DNA, 1433 bp, Artificial sequence
  DNA replication origin
ttccagagtcctggatgctgagaggcctgggctttagggcaaggcctgggaggggaggtgctgggcagacgactacctggaagaaataggatggggcctggcatgcttcagtggggcctcagtgtggagtgtgacacagcgctgagggacatggggcaggctggtcacacagtgctggtctcagcctggcatgaggacatactgctgcaagtgacggcacatcacggtggcaccccgcccccaagagtcgggctgcatgaccgcagggtgggaagacggggggcactgccaggcctgtctgctgtgggctcagcccataccctccaagctcaaccacttcaaacctcatcacatcgggcaatgagataaggggcttcacccttccggcacgtataggaggcaagccccactgtgactctgcgaagacgggtgccttctgccctccctccgagctgtgtggccacctgcctcgtccccactcaactcctgaaacccccaggggctctgctgacttctctgtcatcttcatactgtgcgtgtgtggtgtgtgtgcatgtgtgtgatgtgtgcgcggtgtgtatgtatgtgtgtgatgtgcctgtgtggtgtttgtgatgtgcttgtgtgtggtgtgtgtgcatgtgtgtgatatgcatgtgtggtaggtgcgtgcatgtgtgtggtgggtgtggtgcatgtggatgtgtgtgatgtgtgtgtgatgtatatgcaggtgtgtgatgtgcatgtgtggtgtgtgcatgtgtgtgatgtgcgtgtatgtggtgtgcattcttgtgtgtgatgtgcatgtgtgtaagtgtggtgtgtgcatgtatgtgatgtgcatgtgtgtgatatgtgcgtgtgtgtggtgtgcgtgtgtgtggtgtgtgttcttgtgtgtgaggcgcgtggcgtgtgcatgtgatgtgcgtgtgcgtggtgtgcatgtgtgtgatgtgcatgtgcatggtgtgtgtggtgtgtttttgtgtgtgctgtgtgtggtgtgtacgtgtgtgatgtgcatgtgtgtggtgtgtggtgggtgtgtgcgtgtgtgtgcgtgtgtgtggtgtgtgtgtgcttggtgtgtgtgtgtggtgtgtgtccttgtgtgtggtgtgcgttcttgtgtgtgatgtgcctggtgtgtacaagtgtgtgatgtgcgtgtgcatggtgtgtgcatgtgtgtgcagtgcgtgtgcgtggtgtgtgtgtgcatggtgtgggatgtgcgtgtgtgtggtgtgtggtgtgtgtggtgtgtgtgcatgtgtatgatgtgcgtgtgcttggtgtgtgtggtgtgcttgtgtgtgatgtgcatggtgtgtacgtgtgtggtgtgtgtgcatggtgtgtgcgtgtgtgtgatgtgcatgtgcatggtgtgtgtgtgtggtgggtgtgtgcgtgtatatgtg

SEQ ID NO: 39912 - DNA, 1038 bp, Artificial sequence
  DNA replication origin
aggggacctcacagaaaccagcaccttgtccatgccagctgggtatctgagagaaactgctttgttttcctgaagtcatttgaaacagcgtgcagagacatttaaactcggcgggaaataggagaagcccaccttgacccttctaattctctggccccaggtgccttattaacaagagacagtatcagacacaccagacaaaagccctcctgagcccaaagagcccaaatgtctggaagctctctgctgagatgccaaaatgcatgcctttctgataaagagacagagacagatgaggtaccatgatatggacatggcagtggacgtggacaggggagcagtggagatggagaagatggagacacacgcagttgaggatacaggcgaagaagatggagacacacgcggatgaggatacaggcgaagaagatggagacacacgcggatgaggatacaggtgaagaagatggagacacacgcggatgaggatacaggtgaagaaggtggagacagacgcggatgaggatacagatggagaagatggaggtagacgcgggtgaggatacaggtggagaagatggaggtagacgcgggtgaggatacaggtggagaagatggaggtagacgcggatgaggatacaggtggagaagatggaggtagacgcggatgaggacacaggtggagaagatggaggtagacgcggatgaggatacaggtggagaagatggggttagacgcggatgaggacacaggtggagaagaggaagttagacgcggatgaggatatagatagatgcatagggtgtggatctaaccgggtacaggtgatgcggaaacggatctagacagcgatgtggaaatggatctagacagcgatgtggatgtgatctagataatgtggctctggacgtagaaagagcttcagatgctctatctatgatcgtgggtgtggatataggcatagacatggtgaagaggagagaatagactctcctctctcatgacaaactgatcgtggctgggggcggcacgtgctg

SEQ ID NO: 39913 - DNA, 1800 bp, Artificial sequence
  DNA replication origin
agggtgagaggacagcgacagagcacaggggagacctcagacaccaggtgctccgcctcagcaccgctgatgtctccggccacgtgtgtcattgttgtgggcctgtcctgtgcgctgtaggatgccattggcatcccgggtctccacccatcagatacaagtagcaggcccttacccctggtgacatccagaaatgtctccagacgttgccctgcgtccccagaagaaaaaactgctctgggcagtgcagagggggaggcacgcacgagctggactggttcactccgtccccaactcattccatcctgcacccagcatgccccgcctcgtttaggggctggaaatccagcagagagcaaggtgaaatttccttcctatgagagaagaccgtccagcggggccagcagcagtgagaacctcaaacaagtaagtgagatcacttcagactgaggcgcacactgaggggaggaagccagtgatgtgctgatggtgacaggttgggtgactttggatggagatggtgaaggggctgggtgactttgggtggtgatggtgatgggtctgggtgactttggatagtgatggtaaaggggctggtcactttggatagtgatggtgatgggctgggtgactttggatggtgatggtgatgggtctgggtgacctcaaatggtgatgatgatgggtctggaagactttggatggtgatggtcatgggtctgggtgacttcggatgatggtgaagggcctggtgatagtgatggtgaagaggctggtgactttggatagtgatggtgatgggctgagtgactttggatggtgatggtgatggatctgggtgactctggatgatgatggtgatggggctggtaactttggatggtgatggtgatgtgtctgggtgactttggatggtgatggtgctagatgactttggatagtgatggtgatgggctaggtggctttggatggtgatggtgatgtgtctgggtgattttggatggtggtggtactggatgactttggataggatggtgacgatgatggggctggtgactttgatggtgatggtgaaaggctggtaacttaggatggtgatggtgataggactgggtgactttggatggtgatggtgaaggggcttggtgactttggatggtgatagtgacaggatgcgtgactttggatagtgatggtgatgggtctgggtgactttagatggagatggtgatgggtctgggtgaatctggatggtgatggcgatgggactgggtgactctggatggtgatggtaaaggggctggtgactttggatggtgatggtgaaggggctggtgactctggatgatgatggtgataggtctgggtgactttggatggtgatggtatcggggtgggtgactttgaatggtgatggtgatggggctggtgactctggatagtgatggtgatggggctggtgactttggatggtgatagtgaagggctgggtgactctggatggtgatggtgatgggtctgggtgactttgctagtgatggtgatgggctgggtgactgtggatggtgcttaaggcaggtggctgggctggcacctagcggataagcagaagctggttctgcagagctgggaaggcaggatcctgtgggctgggcatggtgcgggcgtgggtacaggggtaagttggagaagttggtgaggcataagttggcagggcccagattgggaggccaccatggagaagaaggtgtcttaccaggttgaacctggcagccgtgtgggagaggcaggctggaggca

SEQ ID NO: 39914 - DNA, 1151 bp, Artificial sequence
  DNA replication origin
gccaggagacccccagtgtgctctcaaacccccacccatctgagtggcctggaaaggctggtctgaagacctctcttcccatgtctgccgaccaggctttgctctccagggactttctgggagggggagaacccacctcctgccaacggccctgctggcactccgaggacagcagagggaaggaagccaggggctggggagccggccacacaactgcccagtgcctatccttctcctgtgcccacagatgctgagctgcctggagcacatgtaccacgacctcgggctggtcagggacttcagcatcaaccctgtcaccctcaggaggtggctggtgagtgccaaacccgccttcggttcttcctgggcacgtggtttcatccagttccacaggaatggagggaatggatcaccagggcaccttccggatggcactgcgctccctgtgagcagaggtgacatttccccgggagttctgtgaggacactcagcctgtctctgttcctccttccaccaaaaccttctttacgcccgagctactcctgctctgataagcaaggagtagcttatcagtgagactctgccatcatcaagcaaagcagcatgtcctaaagcagcggtgtgtgggagcgtgtgtgtgtgtgtgggagcgtgtgtgtgtgtgagagtgagtatgggggtgtggatgtgagtgtgtgtgagtgtggggtgtggatgtgagcatgggggtgtctgcatgtgtttgtgagtgggtgtgtggatgtaaatgtgtgggagcgtgtgtgtgtgtgagtgtggggtgtgggtgtgagcatgggggtatctgagtttacgggtgggtgtgtgtgaatgtgtggtgggagtgtgtggggtgggagtaggagtgtggaggtgtgtctgtgtgtgtcagtgtggatgtgtgcatgtgtatatctggatgtggggtgtgtctgtgtgtgggtgtgtgtgagggtgtgtgtgcatgtgtgtatctgtggatgtgaggtgtgtgtgcatgtgtgtatctggatgtgggggtgtgtgagggtggatgtgtgcatgtgtgtgtgtggatgtggggtgtgtgagtgtgtggtgtgtgagtgggtgtgtgcatgtgggtgtctgcctgtgtgaatatgtttggcagc

SEQ ID NO: 39915 - DNA, 1059 bp, Artificial sequence
  DNA replication origin
ccaggaaggtcggagggtgtgaggctgtgagcccagatccccggggggaacaagagatgggcctgttttggacatgctgggggtgccttgaggtgggggccttggcagggggccacaggcagctcagaggccctggggggagctgggcaggaacgagctgtgtgcaaggagcaaggtctcggtggctgggtgcggtgagactgggagctggacaggggcttcacagctcgagggcacagagctcaggggttcctccacaggtgaggaactgggacgcagagtggggacaggagagtccacagccagtgctgcctccagggtcctgaaggccggcagcgatgggtgagggcagtgaggggccccccagggcccagcaaggcaaggcagggagtgcagcacagagtgggagatgctggggtcacgggccaggctgtggggagcaggctctggatggaacagggacagcggtcaccacgacagccggggaagaggctgctcaggatgtgcaggtgtgcaggtgtgcctgtgtgtacctgtgtgcgtgcatgtgcatacctgtgtgtgcatgtgtgtgcctctgtacgtgtgtgcctgcgtgtacctgtgtgcatgtgtgtatgtgtgtgcctgtgtgtgcatttgtgtgcctatgtgtgcctgtgtgtccctgtgtgtgcctgtgtgtgcatgtgtacctgcatgtgcatttgtgtgcctgtgtgtacctgtgtgcatgtgtgtgtgtgtgtgtgcctgtgtgtgcatttgtgtgcctgtgtgtgcctgtgtgccttgtgtgcatgtgtacctgcgtgccttgtgtgcatgtgtacctgcatgcacatttgtgtgcctgtgtgtgcctgtgtacatgtgtgtgcacgagtgtgtgcctgtgtgtgccgtgtgtgtgcatttgtgtgcctgtgtacctgtgtgcacaagtgtgtgcctgtgtgtgtgcctgtgtgtagctgtgtgcgtgtgtgtatatgtgtatgtgcctgtatgtgcgtctgtgtgtatctgtgtacgtgtgtgcatgagtgtgtgtctgtg

SEQ ID NO: 39916 - DNA, 925 bp, Artificial sequence
  DNA replication origin
ccaaatcatgtgggaaacccgtgaagcagaactgaccgctgtgagggctgggagtacactgggcatctgaaatacttcagcccaggaaaacgtccatcagtggacaccgtcggttcccaggtggcctctggaacaggaaagcagtcaccccctcgtccgatcccacaggaaacctcattccactctagtggcagtggctggggctagatccccctgagccaggagacgacgggcagtgcccggacaaggctgtactctgtccacagctcctccactgtggctatgagggaggtttaaaaatctcagtccagtggggggggtcagccccctgcccggccagccgccccgtctgggagggaggtgggggggtcagcccccgcccggccagccgccccgtctgggagggaggtgggggggtcagccccccgcccggccagccgccccatccaggaggtgaggggcgcttctgcccggccgcccctactgggaagtgaggagcccctctgcccggccacgaccccgtctgggaggtgtgcccagcggctcattggggatgggccatgatgacaatggcggttttgtggaatagaaaggcgggaagggtggggaaaaaattgagaaatcggatggttgccgggtctgtgtggatagaagtagacatgggagacttttcattttgttctgtactaagaaaaattcttctgccttgggatcctgttgatctgtgaccttacccccaaccctgtgttctctgaaacatgtgctgtgtccactcagggttgaatggattaagggcggtgcaagatgtgctttgttaaacagatgcttgaaggcagcatgcgcgttaagagtcatcaccactccctaatctcaagtacccagggacacaaacactgcggaaggccgcagggtcctctgcctagga

SEQ ID NO: 39917 - DNA, 924 bp, Artificial sequence
  DNA replication origin
actcttgcttccattatgtctcctcacgggcatcagatgcagatacagatgggcagatggcagcacccaggaggccatcgagcgcgcaccctacgccttgcaccagaaacacacagcttggcaaaacagacctggcaaccagaacaggcctacagaatcagaatctcagggctggggcgtgtctcagtgtccacagacggcctgaggaccagccaggctcagaaactcctgacccagtgcagctgctcctgggactaacagaggaaaagctcaaggtcatgcaggcagggaagggagaggagagaggagagggagagaaggaaagagagggaagggagtgaggggagggaggggagaaaggagaggcaggggagggaagggaggcagaggagggaggggagggaggggagtaagaggagggagaggaggaaggggagaggggagggaggggagggacgggaaagaggggagggaggagaggcaggggagggaggggaggcaggcgaggcaggactgacaacagagaaccttggcccctttggccacccatgctcctgccatgggagctgcctgtgtgcaggcgctgactgccaggcacggcttcttggagcaagagaagtcccctgaatatgtccctggctttctagggtttcgcaggagtggccatggcggtatctgggctcaaatctggctgcctccggctcgcggaaaacagtgtctgctgtctggggagcctgttcctggtgaagacaggaggataatgggatgcgctgttccattgccaacagtgtttttcttcgagaaggggaaaggacatggtactgattgagaacttctgggaacctcggggcaggtgagcagagtgggaggagcttgctggcagcagcgcctgtttcccacccggctggccgcagacctggcgct

SEQ ID NO: 39918 - DNA, 875 bp, Artificial sequence
  DNA replication origin
ggctcacgcctgtaatcccagcacttttgggaggccgaggcgggcggatcgcctgaggtcaggagttcaagaccagcctggccaacacggtgaaaccccatctctagtaaaaatacaaaaattagctgggcatgatggcaggtgcctgtaatcccagctacttgggaggctgaggtgggagaatcgcttgaacccgggaggtggaggttgcagtgaaccgagatcttgccactgcactgcagcctgggcgacagagtgagactctgtctcaaaaacaaaaaacaaaaaaccagaaaaaaacctgcgatcaacttggaaaagacaaactgccccagcagaatgtgggcagaggccaccacatcacagaagaggaagctgaatggccaatgagcagatcaaaaatcaaagatcagtctcattagccatcagagaaatgcccgggagcctcgggtggggcccccacgcccaccacggaggcgtgactgatgctggaggtgacagggtggtgaccatggaccgacacagagggtgggggcaggggttttacagctggcttgtagagtggacaggcatgaggagcaggcatgggagggcggcttggcagtcctgacaaccacgacagtgcgaaggttgaaaggggcttaactgtgagccaattaggatcccctggtgacattgaacaggttgttactatggtgaggttgttaatttgatggtttaaagtgcccctaatgccaagaaacaaatgactagagcacaactgtagcaggttaggggtcccctgtgggcctctctggtgacccacactaggcatcactgtccctcgtctttctgatgtggtggatggacagcacaaattcatttttcagctccgt

SEQ ID NO: 39919 - DNA, 1475 bp, Artificial sequence
  DNA replication origin
gccggtctcgggccattggagtcggacttggaattttggggaccaccacagggcggggcctgcggctgtctgagggtggcatcacaggcatgctgaggtgtggggctggaggaaccccggacagaacaaggagtaggggaatgacagacagaacaagccagccatgtggcgcgcatggggccgggacacctacctcctcctgccgttcgcctgggcttttctggtttttgtacccaaagtggggagtgggggtggggtggactgggggtggggtcaggtgagatgagggtgggggtggggtggggtggggatggggtagggtgggctggagtggaggtggggtggggtcgggtgagatgagggtgaggtaggggtggggtggagtaggggcggggtaaggtgggttggagtggaagtggggtgaggtggggtgaggcaggggtggggtggggtaaaggtggggtggagtaggggtgggtggagtgggggtgtggtgggatgagggtggggtggggtgaggtggggtgaggtaggggtgaggtggggtgaggtaggggtgaggtggggtgaggtaggggtgaggtggagtggggtagggtggtgctgcagtttctgacagggcagtcaggaaaggccccgctgccaacttggtcccccagccaggtggaggacagaatctgcccccaccctcccaccaggatttcctggtcctaattcctggaacgtgtgagcgttggctcccacagccaaagcaactttgtagatgtgattaaaccccggacctgaagcgggggaggctgtgccagactgccctgtgggcctgtatcacctcgggtcctttcgggagggcagcagaggagggcagggagaggcagtggagagggaacgaaggagaggggaggggatgataggagcagaggttggaatgatgggctttgaaccagaggaagaggccatgggcgaggccatgggcaaggccacagaaaaggccaggatgaattttcctgcaggtccctggcaaggaagcagtccagctggcaccttggcttcagttctgtggcagggcctgtgggctcctgacgcccagggctgtcagagagggaatctgtggtgctccgtcggcaattgttacagcaacaacaggaaaccagcgcaagcagagacccggaagagaggggggtggaggaagggcggccgccttatgcagctcaggcgggggctggagagtggggcttctgccctgcagcctgggctctctcagccctggaggtccgaagccgcagatcgcagatcggggtgggatggtcgggttctggggagggtgctgctccaggctgcaggcggtgctgctttcgtgtgcatcctcacgtggcggaacagagcttcctggggtcccttttgcaaggggaccagtctcacgctcccctcatgacctcatcacctcccaaagcctccacctcctaatacctcggggg

SEQ ID NO: 39920 - DNA, 1156 bp, Artificial sequence
  DNA replication origin
tggaggcaaggaattgcaactcagaaatatgttactacttagctgcctctactctattgtacaccttgaaggtgaggttaattaagtcctgttgtggggtttgagggccggaatttaatttttggagttttatttaatgtcaggagcggactgggtaataaaatgtatattgagactaagacagccttttgaccttttagggtctagggctataaagcatctcagggttgctgccgaatgagccatgaactgggctgggtttttcatatttgatgaaaaagagcctaaatgctaactgattttgggagaggtcggataaagaaaagggagcattaaccttgactatgcctttagctccagccacctttttaagaggaaattgctgggcaggtcggggagggctagtcgcagaatgaaactgtaagccagactgggtgtgaggaggggaggtgataaaaggattatggggtgggggagcagaggctgaggaagaattgggacctggctcagcctggcaaggagcagcctggggaggaggcgtgaagtcagatgggtctgtagaaaaggagaattagaaaaactcagtgacgcttgggattgggactgagaggacaggcgggagggaaagaaggaggatttgggacatgtcacattgggaacagaggctagggagggaacaatgtgtaaaagaatgcctggacgtcaggcacctcagactgtttgcctattttacgataagaattatctagatcttgtaggatggaaaaatcgaaagtgctgttttctggctatttggaaccactgttgagtttgtattggggtcaagcggcattgcagaagaaaataaggcatttaggtcaggtgtgagttgaagaggttttgagttcttgagaacacaggctaagggagaaggaggaggaatggagggtggaaggctgcccatagtgaaggaggcaagcccagagaaaagagagagtagagacacggagagaaggggttgaggggttcttgccccctagaaaagcggagaaggggtagagacacggagagaaggggtcggggggttcttgccccccagaaaagcagtacttgccgctaagggtgaaggaccaaggcaggtgtccccgcatggtcagacacctctgaaatgtgggtg

SEQ ID NO: 39921 - DNA, 961 bp, Artificial sequence
  DNA replication origin
attacattttgagatttccaggaaagtttcaggtggaggcagaggctgggcgcagaggaaaatgtggcagtggcagagtgtggggtgagagccacgaagagaggaggtcactgaggtggacagtgggacagagagagggacggggagaggaacaggagtttcagaaacgtcctggacacattgggcagccgtcagcattgctttccattcatggacaaagcgtgggtgcccagaagaggccagaagccagtgcagaagcccaggcctccctgccatcacccggtgctggctgagctgcaaatggctgtgcagagcctcctccatgcctcaccctggtctggaccggaccacagggccctttggatcctttcccaggtcccacgtctgacccacacccagaagcagcgcttggtggagtctgccctgaagatgcacgtccaacaatatgcaaacacccaaaaggttataggctgtgcattgtgtcacaagggagcactgtgcagccgtgacagatgagtgacaatgtagggtggttcccacgacccgctgctgagcacgaagcaggtgcagatgtgtatctgcagcgtgtgctcttcaggtaagggagatggggagagaagcagttactcgggtgctctggaggaaggaaagataaaccaggacctaaagagagttgttgcctgcaggggcggatgggagtggggcagaaagaagggaacgggaatggagtagcagggatggggcggagcaacatttttctaaggagactttctgtgaagcgccccattcttagaatcacagtgatgtttcatagccccccaaaataatgaagatcaaccagattgtgggagaaattccaaatggatataaacagtaacaagcaaacttcactgttcaaaaggaataactttaccatcctgaatccagggtgaaggaaagaaacgagtaactgtgggccagg

SEQ ID NO: 39922 - DNA, 1112 bp, Artificial sequence
  DNA replication origin
ggcgccagcgccatgggtggaggccgtccctcctaaggcgcagccggtgcatttgggaccgggggagcagatcccgtgcctccctggaccccggggtcttgggatcacccggccgcagaggcagaggcttcggctgcacagaaacctggggtggccgcagggaagcagcgccctcaggtgactggagagtgggtaagagaagccccaagaaggacctcgcccatccccgtaggcgtgggacggcacaggccgccaggacccccacgcacagcccagtctgcggggcgcgaccccaaggccagcagcagaggacaaggacggggccagggcaggggccagggttggcagagggcggagggtggggagggcgctctggggaggtcaaggccagggctaggctttcagggccatgtcctggctccccgcccctcggggagacgggggcggggagcgctgtgagcagaggggcccgggtggagaaggtgctgccggccagcgggagggagggcagcgggggtgcagcagaagcccaggtggggacttggggtggtcgaggggacccttgggctgcagggactggggaggggagcaaggggtatggcttaggcaggtgccaggggacggttggtgccctttattctgaagggggatgtgctgcccagggcagcgggacctggaattacattttgagatttccaggaaagtttcaggtggaggcagaggctgggcgcagaggaaaatgtggcagtggcagagtgtggggtgagagccacgaagagaggaggtcactgaggtggacagtgggacagagagagggacggggagaggaacaggagtttcagaaacgtcctggacacattgggcagccgtcagcattgctttccattcatggacaaagcgtgggtgcccagaagaggccagaagccagtgcagaagcccaggcctccctgccatcacccggtgctggctgagctgcaaatggctgtgcagagcctcctccatgcctcaccctggtctggaccggaccacagggccctttggatcctttcccaggtcccacgtctgacccacacccagaagcagcgcttggtggagtctgccctgaagatgca

SEQ ID NO: 39923 - DNA, 1759 bp, Artificial sequence
  DNA replication origin
tgctcagccaggagcaccgctgaggcctccagtgcaccgaggggtgatgtgcagaggccccgctgcatccacggtggttttttggtgggcagcacttgcatgccccgacctggagtggccccagcccaggggtgtctggcaggaaggggtctcgggaccatctgctccagggtctcctttgagaccagtaaggggaagtgcctgccatccgtgagtagagcctcacagagtgctgggagcgcctgtgggtgaggatggggctggcctgggaggacgaggggcttcgaagccacgggaaggaggctggggccacaagcccccaggggggtggatgggaggggctgggcaggaggagggttcccgggccgcctcaagcccccaggggggcagatgggaggggctgggcaggaggagggttcccgggccgcctcaagcccccagggggccgcccctgtgtacctgctgtgcctgcctgagttaggccctcctgtctgcacgccacccctgctggctgcagtgactccatctccagaccgtgtgtgtgtatgtgtatgagtgtgcgtggtgtgtctgtgtatggtgtctatgcatgtatgatgtgtgtaaatagtatgatgtatttgtgtatgcgtatctatgtggtgtgtgtgtatggtgtctatatagtgtagtgtgtgtgcatgtatgatgtgagtggtacagtgtgtgcacagctgtatgtggtgtctgtgatgctgtgtgaatgtgtgcatgtgtggggtatgtatgtacatgtatggtgtaagtgggatggtatgtatctgtatgtggtggtgtgcgtgtgtttgtggtatggtgtgtctgtgtgcatgtgtacatgtatagtgtgagtgggatggtatggtatttgtgcgtatgcatgtatggtttgtgtgtgtggcatagtacgtggtataatgtgtgtgtggtatatgtgtgcacctgtatctgtatggtgtctgcgcatgagtggacatgtgtgcgtatgtggtgtggtgtgtgtagtgtaatgtgtggtgtgtatgtgcgcaatgcacatattgtgcgagtgtgtatgtgatgtttggtgtgcatgtgtggtgtgagtgtatgtgcacatatggtgcataagtgcctgtgtggggtggtgtactgtgatgtgtgatgtatgaatctatgtatgtgcatatatatggtgcgagtgtgtgcatacgtgattggttgtgtgtgggtgcctctatggtgtgtgcatgttctgtgtggtgtgtgcctgtgtgtatgtggatatgtgcatgtatggtgtgagtttagtgtggtgtggcacatgtgtgtatgtggatgtgtggtatgtgagtgcatgatgtacctgtgtatgtacatgtatggtgcggagtgcgcacgtgtgatgtggtgtggtacatgcgtaagtacatgtgtggtgtggtgggtgtgtgtgcatggtgtggaatgtgcacgtgtgtgatgtgtggcacatgcatatgtacgtgtatggtgcacgtgtgtgtagtgtggtatagcgtagcatggtgcatgctccacgctcctctgggaccctcaagcttccctgcctcctctgtggggacccctgggtgacgtcttgctgtagaggagagggcgctgctgtgcaattctggtccagatggttcagctggtgaccctggcctccccatgccaggctcctggaggccattcccaaggtcctggggggaggattgaaaccacgcccctgggtcccacaccc

SEQ ID NO: 39924 - DNA, 1233 bp, Artificial sequence
  DNA replication origin
ccccgggggggctgtggccctcggtgaagcaggtgaccgggcgggctgtggggtttgtcagctccgcagcgtcactgccgctcagcgtatgagtttccactcccagcactcaatgaacagctgagcaactgcaggtgcctccgagtgctgggagaggggatgctcagccagccaagggcctttgccccaggggagtaaaatcggggcatttcctggtgggtgtgggctgggctggagaagctgggcctccgggcaggggctggcatactgtccagacactgcacggactgccagacactcctcacctgggcctcgggcttctcacctgaaccacagggtggtaacccctgcccctcaggtggcattgacgtgacctgcctagtgcacagtgagcctgaggcaacacggccaccaccaggagactccctggggaagaggcccccagacagccaggtgcccatgaagttctgcacaggggccgccgccgtccaggagatgggagggccctgtctgcaccctgtctggaaggggagtggggcgagcgggccacttggcctccctggtataggtaaggccaaggcagctagaactggggacagaatacccgcaaaggggaggggagctgcacagatgaaaggaaatacacaccagcgtcccgttggggtcttcggatgaacaccaacctacacattctgtaaaaccccaggacgccaaagagtagcttttgaggaaaaaacaatcctccggagggtaagacaaacaattcccgccttgcacagaaatcaccctcgtccctccagccagtgtgcagacacttctgaatacccaggattctgcagggacagcaggagggtcacacctgggaaggactaaatcatccaaggaaaggctacttcagcctcactctagtgagcttaaaacaaacctgaaaaagaccaaattaatctacatggggcttaacagccggccagaaagcgtaatattctttaaaggaaccttaacaaaacttcacacttaataatgtaaatctcaccatgttcctagtcaaaaatttactacacagactcagtagcggaaaaacatatcccataagcagaggacaaatcacagatgctcctcgacttacgatggagctacatccgaacaagctcatcgtcggccgacagatcgcacgcaagtggtccacggatcgcacataagtggtccacagtcgacagaaacagacctagatat

SEQ ID NO: 39925 - DNA, 1120 bp, Artificial sequence
  DNA replication origin
tggccatctcagcttcaccaggcagggcccgacttcactcagtctgggttgtcggcaggacagggggcctctctggctgttggccagaggctgctgctcctggtcccctgccacctgggcccctccacagggcggctcatggtgcagtagtggctttctccgggcgtgcaagcagagagtgctggcggggtggaggcccagccttggtgccctggtttccattacattctttcatctttgccccgttctgttagtagccagtcctcaggtccagccagggtgtgggtcccaggaggtgggcaccgtggggagccgtcccagaaggcgccccccacggtccaccgaggactctgggagtcacgaggtaactccctgctgcagggggcccgctgtggtggccgagtcccatgttcctgccccacctggcacctgtccttgttcccccatcacaggctctgccggcgcagacgccagcttcagcagtctctacaaggccacgttcgacaacgtgacctcctacctgaagaagaaagaggagagactgcagcagcagctagagaagaagcagcggcgccggagtcccccgcctgggcccgacgggcatgccaagaagatgagaccgggggaggcgacgctaagttgctgatcgtggcggtcagtggtgtctctcacctcaaattaggaaaagctttttaacttgttcccctgcatcctggcatgtcccttcaagaaggaaaaggtgacatcagttgtgaccagctcagaggatggggctgtcccctgggctctagaaagaacattctgtgtcaccagcacaggctcttgctgggtgcctgtgccccctttctggttgaagggaagccagaccagtggagtggaagctcttgaagcactttcttttcatgtcggaggctgcgtgtgagccggtggtggcggcagctgtctgtgtttctcctgttctcataccgcccttcgtgtccgctgcatcttcctctaggagcatctgtgggctgacgtttctggcatggtggatgttttcatgttgttccgccgtctcagcatccaggtgacgtgctgtcccgcagtagctgctcgccacacaggctgttgaaactcagca

SEQ ID NO: 39926 - DNA, 1062 bp, Artificial sequence
  DNA replication origin
tctcgctctgtcgccccaggctggagtgcggtggcgggatctcggctcactgcaagctccgcctcccgggttcacgccattctcccgcctcagcctcccgagtagctgggactacaggcgcccgccaccacgcctggctaattttttgtatttttagtagagacggggttttcaccgtgttagccagaatggtctcaatctcctgaccttgtgatccacccacctcggcctcccaaagtgctgggattacaggtgtgagccactgcgcccggctaggagcaattttcttaaagaaaaacgttgtgaaagtaaatttgtcgaaggcattggctttgttccagttgttagcattgcttaatttttttggcaccaccttcagcagctggaaaacagagcatatggccaggtaccggtgcctgccaccgcccacgtggcctgccaggctgtcgaggaccctgcgctgctcctggaagctaatgggggtgtctttctggccttctaggaccgtggcaaggaggtgtacagccctgactttcatagcctcggaggagaaggtcttggtggccgacaagtctggagacgtctactccttttcggtgctggagccacacgggtgtggccgtctagagctggggcacctgtctatgctgttagatgtggtaggtgggggacgtggtaggtgggggacatggcaggtgtgggacacggtacatgggggacgtggcacgtggggcatacgctgagtcaatgtctaccctgtcaaggctcaggcacctgtccatgctgttagacgcagtacgtgggggacatggtatgtggggtacaggctgaatcaacgtctgcccggtctgtgccccagcgtttggtggggagaatggggctcccccgtagcagggacagccctctgcagatttgggagcaggggagtggtgggaacaggatttaggaaggtggagcagacagcagggagaatgaagaaggcaagtgagacaggaggtggtcagtaggtggccccaggttggaagtgaaggtgtgggaggagcaggtgcagccacgagcctc

SEQ ID NO: 39927 - DNA, 1007 bp, Artificial sequence
  DNA replication origin
ccagctggcctgtaattggcgcagtcggcccaaggggcggctgttcaggcgcgggtgcgcgcgcagctgctgtggccctgcttggtgcgcccgctgtcaccgccatggctgccccgtgtttgctgcggcaaggacgagccggggcgctgaaggtaaaggaggagccagcctgggctggctgcgcggccccgagcctacgtaggggatggggtgagggggcgcggtgctggtcaggtccgggcctgtccgcgacctctagccgtcctagttgggccgctgaccccgctccctgggcccaggactgaccgccacggggccaggcccggatgtggccagcgagcgtcccgcggttcccccgagccggtccgccgccgccgctgcccgaggcccaggccgaggctggcgtgccccgtgccgacgggcgctcccgagggctgcatgcctgggcggcagactcgggtggacgttcccaggtgatgctgccgcgcggctggggtcagccgctgtgcggctcccgcacggcttctctgaaggacagtgacttctccatttagccaagagaggaaatgagggaactttcagggacctggttaacttggtaacttactgacagccgttgagaagccagctgacatgacctgacctgtgaaaaggagaagaagggctttcttttcggcaaataaaaagctaaggccaaggccgggcgcggacactttgggattttgcctgtaatcccagtactttggaaggccgagccaggcggatcgcttgagttcaggagttcgagactagcctggccaacatgtcgaaaccccgtctctaaaaaatacaaaaaattagtctggcgtggtggtgcattcctgtaatcccagctactcgggaggctgaggtgggaggatcccatgaacccgggacgcggaggttgcagtgagccgagatcataccactgcactccagcctgggggacagaataaataaataaataaaataaggctaagaccacttca

SEQ ID NO: 39928 - DNA, 2424 bp, Artificial sequence
  DNA replication origin
gaaagagttgtggaggctttggaggacagggattgtttgagagtgaggacagcgaagcgcacttccttgacataccgtggtccttgtttttgaaggttttgggcttggcagtcctccttttcttctggggagtaaagaggagagaacgaggacagggaaagaaactggccttgcacgggttgtagggccatttgtttggctactctatctgctaaagcatttctggccaatataggattgtctggggtttggtggcccctgcagtgaatgatggcaagtttctgcgggagcctggcaacctgaaggagcttgctgatgagagcattcatgacaggggtgttgtttgcagttaggaaacccccttctttccagatggacaagtgtgagtgcactacgtggaacacataatgagaatctgaatacatgtccagctgctcgagtgagagctcaagtgaggacgatgagttcagccttttgggaggtggttcctagggggaccagattagcttcaatagtgtgggtgggtgacactatagcatagccagcatgttggcatccttgatgtaggaaggagctgccatctacaaaccaagtaaaggaggcatctggaaggggttggtctgttaggtgtggaaaaggtaagaaaagtttgaacagtgtccacacagaagtgtgcagggtcttgggaggtagtggcttcaggtaagagtgtggccgggtttagacaggagctggttagcacggtgatttggggggtttctatgaataaagcatacagttggaggagccgtggggcagagatgagacttagtacgctgcggtgagctagcatgtctttgatgctatgggctgactaaactgttaggttggcatcaagagatagttttaggctttcaagggtgaggacagcagctgccaccagtgcttggaagcaagcagcccatccgagaactgtggtttcgagctgtttagagaggtaggcaacaacctggagggcgggtcccttagactgggttagaacacgtagtgcgactccatgccgttcgtcaggatagagggagaaaggtttggtgaggtctgggagggtgaggatggggactggggtgacagacttctggagtaggcagaaaggttgggtaataggctgtgcagggtttaaaggctcatggagagggcctttagcagcttggtataacagtttggctagtagagcgaaggagggaacccagagcctgaaatatcccgctagtcctagaaaagagagaatttcttgcttagtttgcggaggcgggagggactggaagagggatatgtggtctgttatgagcccttgggttcatggggtaagagctaggcctagatagatgactgagggggtgcatgtttgcgcttttttaggggatacctgatacccccactctgccagaagtttaaaagagagatagtatgggcattgcagtctttttgagaggggctacccaggagcagatcatcaaggagagtggacggttttagggataaggtacagaggtcatgatcaagggcctgtccaaaaaggtgggtgctgtctctaaaaccttgaggtagtaggcaccagtgagctgatgtgaaaggcgggtgctgtctctaaaaccttgaggtagtaggcaccagtgagctgatgtgaaaggtgggtgttggggtcttcccacataacaacaaagaggtcttgagaatcagggtgcaaatgaactgtggaaaaaagcatcctttaggtctaggacagaaaaatgggtggtattggagggaattttggaaagtaaagtgtatgggttagggactactggacatactgggagtacagtttggttaatgagcctgaagtcctggactaagtggtaagttccatctggctttttaacaggtagaattggtgtgtttaaaagggagtttgttgggcggaggaggtgactggcgaggaggcgagaaatgataagctataggcctacaagagctgcttaggggattggatactgcttctgtgataggaactgggtggggattttaagggtaatgcagaagggggtgtggtgttttgcaactgagggtgtggaagtatctcaaaacagcggggttaaccatggatgggggataaggaaaggttgcatgttttagggtgggaggttgcaggagtagaagaaagttagaagccctggaggggtctgggtggatgcgttgggtactaggggaacgtgggagtggagagtggtgtggagttttgaaagcatggctctgcctaggagtggagttgggcatgagggcaggactaagagtgagtgaaggaaggccgggcgcggtggctcaagcctgtaatcccagcactttgggaggccgaggtgggtggatcatgaggtcaggagatcgagaccatcctggataacacgg

SEQ ID NO: 39929 - DNA, 1016 bp, Artificial sequence
  DNA replication origin
tttcgtcaggaccttgggtgatttctaaaagtttttcatagtttaccgctttatgggcacactttttgagtcctgcaaggagacacacaatcatgtggtctcgatggcagcatccaaaggccccatcttgataatcccagtgggggtcctggctggggactgcctctgtgccagcaggctgggcggcagcttggtgatgaattgtatcagcatgtgcctgagctagggtccagatacggtcccagtcttctggggtgagcgtggaagagaggataacgtagaggtcatgccaagttagttcataagactgggtgaggtactgaaactctctaatataagaggcagggtattctggaaataaaccgagtcttttgtgaattcaagagcgatcagtgagggagaagggaacatgaactctaataagatcttcagttcctgctacttcccgaagggggcattctagcacagacgctgaagtaagggtggggcatgggccaaaagcaatgcctgaatgagtataggcgggaaagaaagaaaagccggaagtggttcctgctgagggtttgaagggggaaggagggttgagttaataggcagcagaggatagataggagcggaaggtggcggggtgggtttacaggcctcaggagagagcggtgggggaggagaatgggtacaggcagtgcaagaattgtcctgaggagaggatggtgtaggaaaagaagtggatactcttggaggcagtgctggctgggaagacaaagaggaggcttagggggttaaagaagacggttgagaggaagaggcaggggctggaaggggtggacagcagttggctggatccaacaaggaaaaagagttagggtcgggaggagaacggcgatcagggcggcgagaatggagggggaggatttgaacaggtgagcaagagcagaggccaggttgtaatctgagtgtgaacaaggcctggatataaggaatttctccccatttttccagccgtcagcaataattgc

SEQ ID NO: 39930 - DNA, 1897 bp, Artificial sequence
  DNA replication origin
ggcgggcggcggccgcgggccggtgtgattgatagggacggcggcggcgagagcggcggcggcggcggcggagcggttgagtgacagcttacctgggtgccaatcttcatcacactgacaagcggctgcagcaatcgggacccgcagtgccgcgcccgcgtccaaccgtcacgccgacgctgggccacgcgacacagcctcgctcaatgggaggagggcgacgccgacgcgcgccgcatcaatattcagagagggggcggggcctgccggagacgggccccgcccctccctgcgcggcggcgggcgcggggcggggcctgatcgctgggggaggagagcgagggcgggaaccgggcggtggccggccccgcctccagccccgcccgcacccggagctaggccgtgcccccaaccggccgcgcccgagcgcgaggagctgtctgccccgccccgaaggcagagcctcccgccttatgactatgcagtaggggcgtggcctcagcgcacgtcttgccccctccgcgccctcggttgccgcccaggagaggtgtgtgtagccgggcgaaaccatttgcctcgagcaggcggggagggagggctgtaccatccgtaaccccaccgccgggcgtcccgtagccgaaggcctccgttctgtgtgtgcccggtttgaatgtaagcccgtgggagcctcgcagccttcctccccaggctctggagcccgggtgggcccgtcctgggcggcacagtggatgctcacgtgcctccccccctgcggcagcgcgagtgcttagcacctgaggctttaccctgggggctgtcttccctctgtgaggaccccagcaaggactcatgatgtccacaggtgcttaggggtggcctctgggctacttggcctcgcttgaccacaccttccggcccaggtgagccttgcgggtctaggtgaccaatgcggcctccaggtaaagggcacctgccttaggggacgcccacaagtgtctgcatttcaaactgctttgaaagaccaccctaaccgaccactgccacaatgtacccacaagtgcagatggtggctttggtctccaagatgtaaggaaagggcgacacattccccactgcgtaggaaagcacacggtttgcctgactggccttcaatactgcagaaacatccatttatgcagtggcccaccgaaggccatcagtgccttgagtccatacacagcgcgggaagggcagctctgtgggcccccactcctcccggaaggcagacaggcccaggactggagctgattgctagagggagcctgggggtaggtctaggcatgaacagctcggaggacatccctcctgtgtcttcagagctccacaccgccaggaggtcttggccaagtgctgtgcagctgcagagccgcctctttcagaaagatgggaagcagcagggtgggcaagagggaggccctgagatacttgcccaaggagggaagttcaaggggacaaaaaaagctcagtattcaagactgagcataatctgcagagcctagtgcaagatccagatgcaagtgtcaataggtgttggaacagagagactccacatgggctgggtaaactgaagctgagacctgctgggccgcaccccccaggagttaaggcgttcttagtaatcggatgagataggaggtcggaacaagacacaggtcacaaggatcctgctgataaaacaggatgcagtaaagaagccggccaaatcccaccaaaaccaagatggcggggaaagtgacctgtggccttcctcactgctgattatacactaattataatatatgagcttggtaaaacacactctcgccagcgccatgacagttttcaaatgccatggcaacgtttggaagataccctacat

SEQ ID NO: 39931 - DNA, 843 bp, Artificial sequence
  DNA replication origin
gggagcgggcacccgcgggggagggggcgccttcagcccaaccggcgcgggggcgcgcccagttggtttcttagtgtgggttgagggacgcggaaatttctggaaggcgccgccgccgccgcgctgggcctgatcgaagcgcgcgctcctaaccgtccctttcggagtgcggcgcgcgccccggcgcggggcgggggcgcgcggagcccggcgcgggcggggcggcgggcgtgagggtcgggggcgcgcggcggggcggggccggggcgggcggcgcgcgtggggccggtcgggtccgcggcctcgcggagtcctcagggccggcggggctgctcggagggtgcggggcgcgcggcggcgcaggcgggaagatggcggccgcgaccccggccccggcctcggccgtggcgagcgggtgggtcggggtcctgggggcggtgggcgtgatggggctcgtggccctcagccgggcgccggcgcgggagcagcccagggccgctcgctgacggcagtgtttggggccgggtgctggggaagcggttccggcgtcccgggaattggtgggaagagccgcttctgtcacacgggtcgtggtaatggatgacaggaagtgccgggcagggtctgggcgccctgtgggtttgcaccttccttgtgagggaaatcgtgtcacttaacgaaaaatgaagaaacgcggagtctgctttatgtcatcctcgtggctctcgaaatgccttatttggacagtggctctgcgacgggaccagttagggcctccgttccgatggcggattcctgacgggaggcccgagggtccgggaatggcggcgtcctgaggtcggg

SEQ ID NO: 39932 - DNA, 1037 bp, Artificial sequence
  DNA replication origin
cccgggaattggtgggaagagccgcttctgtcacacgggtcgtggtaatggatgacaggaagtgccgggcagggtctgggcgccctgtgggtttgcaccttccttgtgagggaaatcgtgtcacttaacgaaaaatgaagaaacgcggagtctgctttatgtcatcctcgtggctctcgaaatgccttatttggacagtggctctgcgacgggaccagttagggcctccgttccgatggcggattcctgacgggaggcccgagggtccgggaatggcggcgtcctgaggtcgggcccagggcaggccaggctgagcgccacggcggggccgcagccctggggggtgttccacctgtgtgtggggttctcttccaactctacgagagtttgctttttaaaacagtagatgatttttccttaggaagtggttcctcttcaggatgaaagaaacccccagctttagttaggtctactttcatgatttttcctggcatactgaaaaataggctttctctaaacataaggaagaatcgaggtgaaatgtgaacctctgccagtatagttattggtgatgctcttgcatttagtcataatttggaagatggcaggctgaccccaatgagcctttcatcactctgcttaatttacttagagtgatttgtgaatcctgtccttgtacacaggcgtacctcagataattcgagttctaatccagaccaccgcagtaaaataagtattgcagtaaagcaagtgacgcaacagttttaggtttttcagtgcatatgaaagttgtaattacagtatactacttaaagtgtgcaatagcaagcattatatctataaaaatgtgcttacgttaattaaaaaatattttagtgctaaaaatactaatgatcatctgagcctttagtgagtcctgcttgttttatactttgacaatctggcctcagtgtggatggctgctgactgatcagggtggtggtggctgtgtcagttacttaaaataagacaacagtgaaatttactgcattgatgga

SEQ ID NO: 39933 - DNA, 1306 bp, Artificial sequence
  DNA replication origin
cacccgcggaccccggtggtgtcttctacctggtgttccgatgctgttttacttggttaacttcttgcccttcgggaatttaaggaacctttactgatgagcttgaaacgtgcgtcctggtgggtggggggccctgcgcgtcctcgaggaccgaccccgagggcgtgtgtcgcgggcccgggagggggcgccgcgccggggcgggactcgatggccgcgctctgtggccgccggacgccgtgcgcagcgccccgcgtgaccgcgcccagagccgggtccgaaccccgagccgaggcgcagaacagtcgccttgcgcggctccggtgcggcccacggccaggggctgccgggcgctctcggggacggggccgactccgcgcagggtggtagcaggggcgccccgcggggctccttcgccaggtcccggaggccgcgggcggggccgtttcccaaacatcgtgctctggactttcagaggctgaacctgatccccccgccctatggctaaatgggggatcccaggcccccgagtctccccccggacctgcagcgaaagacacggacggtgcccatcagctctgggcagaggaacgtgctgcgcctccgcagcgtccccggctcaggtcagagcgatgctccgcagcctcctccggcccgcgcagctccgccgcggtctctgccacgtggggctcacagtaggggagggagtgagacgtgaattagaattaaatgtccactggcaggaactgacacgaagaacaataaagccggcgatgtggggaggggacagggatggagttacatcatgaaggctctggaaggtggcattggaggccgggatcgcgccactgtcctccagcctgtgcgactgagcgagactgtctccagaaaaaaaaaaaaaaaaaaaaaaaaaaaaaaaaatcctgtccagtctttataagaagagagacgtggacacagacacgcggagagaaaaaggccatgtggagatggcggcagagatgagatgtgctgccaccagacgagaaatggcagggatggctggcggcctccacagggctgggaaaggtggccagggcctccctcagagccttcagccagcctgcgggagagaaagatgataaacggtgttgtttttgttgttgttgtttgagacagagtctgtgtcacacaggctggagtgcaatggtgagatcttggctcactgcagcctcagcctcccgggttcaagcgattctcctgcctcagccacccgagtagctgggattacaggcacgcaccaccatgccaggctaatttttgtatt

SEQ ID NO: 39934 - DNA, 1548 bp, Artificial sequence
  DNA replication origin
tcccccctcacagatgcagagaccgcacaggcggcagagtcagatggacgcagcttccacacgggccccacctaggccatctgcgccccagcaagggagacgccagcccagcatgcctggctcagcgcagtgccaccacaggcccgaccctcacccccccgccccggggaagaaaaagtaagagtttcacagagatcagagaaagaaaaggcacgcctcccacagctgagcaaggccatggggcagggctggcccctgtgcccaccagccctcgcaggggccgtcccacctgggagaggcctcaaggccattggctgcctcgacgggaactgcagccgagtggggcctgcagccggggcctcgggcctgtcgcaggtgtggagcccggccgcctgaggacgttctgcagggtgggcagcgctggggacggcgcagggggaccatcccctccggcccaggggctgggcaggacccagtgtgggctgcatggggctcctgagggtggagaaggggtgggaggccaagggaacagagggacagatgtgcgggatctggggtgcgagggcagggctccaactggtctgggagcgtgtgtgggggtgtggtgtatatttgatatgtgtggtgtgtggggggtgtgtgttggatatgtggtgtgtgatgtgtgtgtggtgtgtggggtttctgtgacgtgtgtggtgtgtgtgtggtatacgtgtggtgtgtggggtttctgtgatgggtgtggtgtgtgtggtgtgtctgtgacgtgtgtggtgtgtgtgtgtggtatatgtgtggtgtgtggggtttctgtgacgtgtgtgtgatgtgtgtgtggtgtgtggtgtacaatgtaccgtgtatagtgtgtgtggtgtgtgtgtgtgtgatgtgtctggtatgtgctgtgtgtgttgtatatgtgatgtgtggggtgtgtgtgtggtgtgtgttgtatatgtgatgtgtgtggtatatgtggtgtgtgatgtgagtggtgtgtgtgtggtgtttatgtgatgtgtggggtgtgtggaatgtggggtgtgtggtatatgtgtggtgtgtgatgtttctgtggtgcgtgtggtgtgcgatgtgtgtgatgtgtgtgtgatgtgtgtgatgtgtgtgtggtgtgtgtgtggtgtatgatgtgtgtgcagtgtggagtatctgtggtgtgtgtctgtgtggtgtgtgtgatgtgtatgttgtgtatctggtgtgtgtgtggtatatctgtggtgtgtgtctgtggtgtgtgtggtgtgtgttgtataggtggtgtggggtgtgtatgtgtggtacatctatagtgtatggtgtgtgtgtggtgtgtgtggtgtgtgttgtataggtggtggggtgtgtgtgtggtacatctatagtgtatggtgtgtgtgtgatgtgtgtggtgtgtgtccgtggtgtgtatgcgtgggggtgtgtaagccactgtctcggagatcatttttctcaaatatctctacagatcgagccctgtcgggaggtttttcccggcctctgcgatggctcctccgt

SEQ ID NO: 39935 - DNA, 1493 bp, Artificial sequence
  DNA replication origin
acctcctccagcattcccggttgctggaagcctctgagctccagtctctgcctccgccttcccctcccgtctgtgtcctttccccttaaaggacatcagccattgggtttagggtctgctctcatccaggacgatctcaccttgatgcttcactgaattacatctgcaaagattctgtttccaaataaggtcacatgcccaggttctggggtttggaacttagacacatgttttgggggacactgttccacccatgacaagtatggatgacgtccctgagatcctgtgtccttgcatttggggacgcttcacatacgccattgtacacgttcctctcaggaacctctgaggttggcgggactgtttttgatattcattgcgcatgtgtgtccccgtgggtgtgtatgtgtgagaatgtgtgagtgtgggtgtccctgtgagtgggggtgagtgtgagtgtgtgcgtatgaggttccacatacatatgtgagtgtgtccctgtgagtgagtcccctgtgaatgggtgtaagtgagcatgtgtgtgtgagtccctgtgcatgggtatgagcatgtgtgtgtccctgtgtgaatgaatgtgtgtgagtccctgtgtgtaacagcatgtgtgtgtgtgtccctgtgtgtgagtgaatgtgtatgtgtgcatgtgtgagtgtgttacgagtatgggtgtccctgtgaacgtgtgtgagtgggtatgagtgtgaatgtccctgagtggttgtgtgtgtgtgtgtctgtccctgtgtatgtgtgtaagtgtgtctgtccctgtatgtgagtgtgggtatccttgtgagagtgtgtgattggtgtgagtgtgggtgtcctcattagtggtttgtgtgtgtgtccatccctgtgtatgtgtgtgtaagtgcggctgtccctgtgtgtgtgtgtgtgggtgtcctcatgagtggttgtgtgtgtgtgtgtggggggggtctctgggtttgtgtatgggtgtgtgtgagtgggtgtgtgtgtgtccttgtgagtggttgtgagtgcgggtgtccctgtgagtggttttgtgtgtgggtgtgtgtatgactctgtgagggggttatgtgtgtgtgtgggagtgtggctgtccctgtgagtgtgtgagtgtgggtgtccctgtgagtgattgtgtgtagatgtgtgtgtatgagtgtggtgtccctgtgagtgattgtgtgtaggtgtgtgtgtgagtgtgggtgtccctgtgagtgattatgtgtaggtgtgtgtgtgtatgagtgtgggtgtccctgtgtgtgtaggtgtatgtgtgtatgagtgtggtgtccctgtgagtggctgtgtgtgtgagtgtgtttgtatgagtgtgggtgtccctgtgagtggctgtgtgtgtgagtgtgtgtgtatgagtgtgggtgtccctgtgagtgattgtgtgtaggtgtgtgtgtgtatgagtgtggtgtccctgtgagtggctgtgtgtagatgtgtgt

SEQ ID NO: 39936 - DNA, 1941 bp, Artificial sequence
  DNA replication origin
aggatccacaccaggaagcagccagaggggtgcagagcagggcctagaggccacagctgcagggcaggtggctgtgtcaccagaaccctgctggcagcccttcctccccagggagctgtgtctggagagggagctgtggagaagcgctagggtaagacccaatcgtgcagtggtcctgagcccgcagggtgggtgccctcctaaggtgaggaagggacagcagagccagcccctgctctgaggaccctgtgggaaccaggaggggcctcgccaggcccaagcccccgtcccggctgtgggatgcccagccgcagagcaatgaggaatccaagttgctgctgaacgcccggaccatggtgctgagttctggccgccccagctcaccagcagcgtggtggtggcggccaggaggatggagctcagacacctggccccacacgctgccatgcagcccagcctcaggaggccaccatcctacaggcaggcccccagacagaggggcacgggcacaggcataggccccaggtcccctggccatggagaaggcattgtgtgagtgtgtgtgtgtcatgaggtgtgtgcagtgtgtgtggtatctgtgtgatgtgtgcagtgtgtgtgtgtgtctgggtgtgtgatgtgtgcagtgcgtgtgtgtgtgtctgggtgtgtgtgtgcagtgcgtgtgtgtgtgtgtgtctgggtgtgtgatgtgtgcagtgcgtgtgtgtgtgtgtctgggtgtgtgatgtgtgcagtgcgtgtgtgtgtgtgtctgggtgtgtgatgtgtgcagtgtgtgtgatgtttgcagagtgtgtgtgtgtctgggtgtgtgtgatgtgtcctgtgtgtgtgtgtgtctctgggtgtgtaatgtgtgcagtgcgtgtgtgtgtgtgtctgggtgtgtgatgtgtgcagtgcgtgtgtgtgtgtgtgtctgggtgtgtgtgatgtgtcctctgtgtgtgtgtgtgcgcacacgcgtgcatgtgtgtatagccccaggccctggtttgtctcctcttgccctctggaaagtaagcacagcccccagcctggccatcccctcagggtcgcacctggaacgaatgccacccacagagcagctcccccctttctggagactgagctgcaagctgtgggttggtggaagctcgtggttggtggaagctcgtggttggtggaagctctagcttggtggaagctttgcattggcagaagctctgggttggtgcaagctctgggttgatggaagctctgggttggtggaagctgtaggttggcagaagctataggttggtgcgagctctgggttgatggaagctctgggctggcagaagctctgggcagaagctctgggttggcaaaagctctgggttggtggaagctctggtttgacggaagctctgggcagaagctctgggttggcagaagctctagattggcagaagccctgggttggtggaagctctgggttggtgcacgctctgggttggcagaagcttggggctggcggaagctctgggttggcagaagctctgggctagcagaagatctggattggtggaagctctgggttggcagaagctctgggttggcggaagttctgggctggcagaagatcggattggtggaagctctgggttggcagaagctctggatggaagctctggattggcggaagctctgggttggcggaagctctggattggcggaagctctgggttggcggaagctctggattggcggaagctctgggttggcggaagctctgggttgatgcaagctctggattggaggaagctctgggttggtggaagctctgggttggcggaagctctgggttggtggaagctctgggttggtggaagctctggattgacggaagctctgggttggcggaagctctggattgttgcaagttctagattggtg

SEQ ID NO: 39937 - DNA, 1074 bp, Artificial sequence
  DNA replication origin
ctgctgctcgggtgctttctgcggagggggctcatcacactctccacccatgggtgcattcgcatgtggggcactgctcgtggctgagaccagggtttggctccagtgactatttgtaggtggcctttcctctgtgtctgatccccagctcgtggctgctgtgccttagtggtgttccattccttcctcacggcagcagccctctggtctcagcggagagcaggggacatgtccccccaggacgggctcctgcttgctcccgaggggcgccttggcagggcggacattggaagctgaatgcggaggaagcatccggaagcggcgctcttggcctcagccctcctgtcctggggtgagtcaggatctctgctggggagggctctggggagacagctctggaatcctctctgctgggttcatgcagggccaagcctgggtttgaccttcatgcatgaaggaaggaaagcgggtggaacagctgcggacgtggaggcagtggcgacaacggacttgactttaactggaagctcaggaatactgtggtcgtgctgtcaaatctctgttatctccgaaggggcagcggggaggttcccttgtgtcaggacagacgggaggtgtgcgggggaggccgggggaggcgggtgtctggactggggtctgagcagcgcttcagggaggagggggcctagcagggcaggaaatggccagatgttgttctgcagccccgtggataggggtcctggggacaggagaagcccttgacagtgtcaaatagaaaacaaatctggacgtaagtcacgggggaatgtattagaaaggatattgcgagaaagcgtggggcccattgcaccagggagggcatgcccactttcagagcggggagtgcctgagggttggggaagagtgaacagagggagagagactgagcggtgggaggtggggaaggaaggggcgggaaggggccatgaggagagaagatctgatctgaggccctccttttcacagaggggttggctgtgggacgaagccccttcctagctcctggctatctctttaggtgtcttttgagtttca

SEQ ID NO: 39938 - DNA, 893 bp, Artificial sequence
  DNA replication origin
  misc_feature (1)..(502): n is a, c, g, or t
nnnnnnnnnnnnnnnnnnnnnnnnnnnnnnnnnnnnnnnnnnnnnnnnnnnnnnnnnnnnnnnnnnnnnnnnnnnnnnnnnnnnnnnnnnnnnnnnnnnnnnnnnnnnnnnnnnnnnnnnnnnnnnnnnnnnnnnnnnnnnnnnnnnnnnnnnnnnnnnnnnnnnnnnnnnnnnnnnnnnnnnnnnnnnnnnnnnnnnnnnnnnnnnnnnnnnnnnnnnnnnnnnnnnnnnnnnnnnnnnnnnnnnnnnnnnnnnnnnnnnnnnnnnnnnnnnnnnnnnnnnnnnnnnnnnnnnnnnnnnnnnnnnnnnnnnnnnnnnnnnnnnnnnnnnnnnnnnnnnnnnnnnnnnnnnnnnnnnnnnnnnnnnnnnnnnnnnnnnnnnnnnnnnnnnnnnnnnnnnnnnnnnnnnnnnnnnnnnnnnnnnnnnnnnnnnnnnnnnnnnnnnnnnnnnnnnnnnnnnnnnnnnnnnnnnnnnnnnnnnnnnnnnnnnnnnnnnnnnnnnnggggatggtgatggtgctggtgggagtgaaggtagtggtggtggtgatggtggtggtgatggtgggagtgaaggtagtggtggtggggatggtgatggtgctggtgggagtgaaggtagtggtggtgatggtggtggtggtggtggtggtgatggtgatggtggtggtgggagtgaaggtggtggtggtggtgatggtggtggtggtgggagtgaaagtggtggtggtggtggtgggagtgaaggtagtggtggtggtgatggtggtggtggtggtgggagtgaaggtggtggtggtggtgatcgtgatggtggtggtgggagtgaaggtggtggtggtgatggtggtgatactggttgtagtgatggtagtgatggtggtgatcgtgagg

SEQ ID NO: 39939 - DNA, 891 bp, Artificial sequence
  DNA replication origin
cactgcgtcacgcctgagccagactgctttttggagcctcagtttccttttccgtggaatgggtgctgtcctgattgggcaaagtcatctgaggctgactgatgcacgtgccctcgcacctccagggtctgcccacagcaggtgctcaaggggctggttcccaccgacccacggggcccaggaccaggaggctgtggcctgcctcctataatgcgcccctgtctcactcggccacaaggcaaggcttcactaatcagggcgttgtggcctgaggcctggccattctgtccctgtagccggagactggccccctcctggaccccctcctggaccctctcctcaccctgcctgctgcccccacctctctactccgctcgtttgctaagtccctggatacctcctgcaggcgtccttgcctgtgcccgcctctgcccacctggaaacccacacatgacccattctctgctcctgctgggtccacaggcctgaagggggagctgggtccagacaggtgggggtaagcagaggggaacgagcagtgcctgctgtggctggggcaagggccaggttcaagtaggtcagaggtgccgagagtctgaggctgggaacccggctgcaggccagtggggaagggcagaggcatgacggggtaggcgggggagctggctgataggtatggggccaggagagccctctggaggcctgtggttccagggctggagaacagtcaggtttggggagtgagagggggtccctctgggtgcaaagtcacccagggagattgctgaacatggtgttgcggggaactgaggccgggggctgggctgtgatggggaggtgatggggaggctgagagcagagggggtgtggtggggagaggaggagcttatc

SEQ ID NO: 39940 - DNA, 1245 bp, Artificial sequence
  DNA replication origin
ccataagactgaaaatcaaactccagcaccagggatggagttgtggttacctctgatggaggaggaggggctgggatgggaaaggtcagacccaaacagaagtgactacatttcagcttttgggttggtcattggtgcccagtgttcatgatataatcacaataataatataggccaggtgcggttgctcacacctgtaatctcagcactttgggaggccaaggcaggctgatcacgaagtcaggagttcaagaccagcctggccaacatggtgaaaccccgtctctactgaaaatacaaaaatattagccaggcatggtgccacacacctgtaatcccagctacttgggaggctgaggcaggagaatcacttgaacccaggaggcagagtctgtagtgagctgagatcacccattgcattcctaggcaatgggcaagactccgtcttggaaaaaaggataaataaaataaaataaaataataaaacgacagctgagcatggaccagtgtgagagtgtgctgtgaccatggatgataactccagttcgtgcccctggatctggaatctgtgtaaaccatggtaaaaagagagaggaagaaatgagcaggtgcagcgcgggggttccagggccgtgaagtctgtgcgacactacaatggtgggtgcgtgtcgtacatttgtcgaaatccacagaatgtccaacaccaagaatgaaccccagtgtaaactacggactcggggtggtaagggcgtgtgcgtcaccacagcacagcccaccgtggccgcagaggttaatgggggaggccgagcatggagggtcggggtgtatgagaaccctctgtgccttccactcagtgtcactgcgaacctatgattgcgataaaaaacaaagtctattaagaaataggacagggagggaatggaggaggggggacagggagggaatggaggagggaggaaaggaaggaaatgggggacagggaacagggagagaatggaggagggaggacagggagggaatggaggaggggggacagggagggaatggaggagggaggacagggagggaatggaggagggagaacagggagggaatggaggagggaggaaaggaaggaaatggaggagggagaagctgcagtaaacacgtgttatcccacatcctctacctctttgtattaggggagcggccagctccactgtgacttgcacctctgctctaagtcacaggccctgtcttccaccc

SEQ ID NO: 39941 - DNA, 1241 bp, Artificial sequence
  DNA replication origin
gctcagccgtccagtgcccccagctgccatcacagtggcgtagtcgagctcctggggaaaggctggggccctgagcgggaggaacagcatccagccctgggcagcccaagctccgtgtcatctcgggggaacctaaagctcaggacacagagggattctgcctcccaagcccagctgtgggacgtgagaccttcccgctctctccctgccgggctctgaggacactggacaagcagcaggcctcagctgaagctggtgataagacaggctccgcgtccacactgcctggctgccctccagctgggagcaccgcatctgcccctgtgcctggttctgaggctggagagaagagcagaggggctcggggaagagaaaggcaaagagcccctgagtttgcttccctggggctgctggcctcgtccctaggggctggagcgggtttggaaggccccttgcctgggggtgtgggagtgcacagtactgccgcgtgagagtgtgtgtgcacaactgtcagtgaagtgtgtgtgatcggcccatgggggtgtgtcagcgtgactgcgtgccacgctgtgagaacgcacaagtgtgtctgtaaatgcacgcgtgcgtgtatgaggcggtgtcggagggtgcacgcgtgcatgtatgaggcggtgtgcgagggtgcacacatgtgcttatgaggcggtgtgtgagagtgtgcatgtgcatgtatggggcggtgtgcgagggtgcacttgtgtgtatgaggcggtgtgggagagtgcacttgtgtgtatgagacactgcgaggctgcacgcatgcatgtatgaggcagtgtgggagggtgtgcgtgtgcatgaggcggtgtgggagggtgcgtgcgtgcgtgtatagggcggtgtgtgagggtgcacgtatgcatgaggcggtgtgggagggtgcacgtgtgcatgaggcggtgtgcgagggtgcgcgtgtgcgtgtatgggatgatgtgcaagggtgcacacgtgtgtgtatggggcggtgtgcgagggtgtgcgcctgcgtgtacgggggcggtgtgcgagggtgtgcacctgcgtgtatggcacggtgtgcgagggtgcacatgtgggtgtaggaggcggtgtgcgagggtatgtgtgcatgggtgtgggtgaatgatgtgtgtgggtatgtgatcatgtgtgtcggtgtgaatgtgtgtatcactgtgtgtgtgtgtgtccatgcgtgcttctacccagagacagag

SEQ ID NO: 39942 - DNA, 1053 bp, Artificial sequence
  DNA replication origin
agatcgccaccactcccactggaattctcagggctgtacactcattgtttggaaataattatttttgtgcagtccttagtttccgtaattaattctttgataacagtcccttctataatagctcctcacaaagattctatagaaagcaccaggcggtttcagctgagccggcagcaacagccttttctctgagctcgaggtctaggcacagtcacagcggcagagaaatgctgggtaaagaggccctgggcgttgggaggggcgccagcagagcaaggggcttcccaccgccgcctccctccccacaggctggtcaggcggccaggctacaggggccctgctctgcagaaggcctttccttccagagccctgcagcctctgggagccagcaccggccccaccaagccaatcctcggagtgggtggagtggggcctgggggctcgaacccccagaccgacggccacagcttgtcgtctatggcgctctgtgatgggatggggggactgccacagagggaagaaagagaatcggcccctgccttcccaggggcctgatcctacggggaggtgggacactcacgctcaagggcccagatgctgtaaacacagctgtcccaggtggtccaggtcaggaagaggctcagatgggtcggagtcccacctccacggcggttttggagaacagcccaggggcaagtgagtctgtagatgtatctggccaccccggagactcccctcttccacctgttgggagccagaaagcctccatcttcctgccccgcctcggtctgccactcataaagcctagaccatcctacttcgatattgcaacattgcatggctggggtccttttggttgaagtgacagaatcccaacccaagctcatttcagaaaagaagggcgtttgcaggttgacttgcctagaaaatgtggggtagagtggcttcaggtgtagctgggtccaggagttcagaggcggtcactaggcaccatctaattcagactctaagctcaatcctgcctgtgttggcttcattctcagggaaagacgg

SEQ ID NO: 39943 - DNA, 2559 bp, Artificial sequence
  DNA replication origin
gctgggattccctggctgtgtgtgccatcctggcacactgcaagacagacacctctcagagtctgggcaggaaacagatggcccactcgtcaggggtgtttgaagagatttgtttatgaaaagagcattttcagaggtgtcggcaggttgagggaaaaacaccaaggggcctgttgtagtggaaggcgtgaccacgcccaggaccaaggaagcaaaagaaggaaagctgttgccagaacaggggtcagagccccggggaggggccacctggcaggagggtgtgctcctggagggacgtggtcagaaggtccctcctgtcctgtctgtccttcctgaatctgatgtcctgccaccatctttgattggctgaagccccaaacagaagcccagaggtgaaggagcctagagggagaagtcacctgcctagcgggcagctttcagaagtgcagtacaggtggcaggaagagggatggagagaggaagtggggcaaccagaaatatccagtccttacccccgagagtagtagctaggtggtggtagtgatggtgatggtggtggtggtgatggtggtggtgatgttgatggtggtggtggtgatggtgatggtggtggtggtgatggtggtgatggtgatggtggtgatgatggtggtgatgatgctgctgatggtgatggtggtgatggtgatggtggtgatgatggtggtgatgatgctgctgatggtgatggtgatggtggtggtgatggtggtgttggtggtgatggtggtggtggtggtgatggtggtgatgatggtggtgatggtggtggtgatgatgatggtgatggtgatggtggtggtagtggtggtggtggtgatggtgatggtggtggtggtggtgttggtggtggtgattgttgtggtggtgttggtggtggtgatggtgatggtggtggtgatggtgatggtcatgatggtgatggtggtgatggtgatggtggtggtgttggtggtggtggtgatggtggtggtggtgatgatgatgctgatggtgatggtggtgatgttgatggtggtgatgatggtggtgatgatgctgctgatggtgatggtgatggtggtggtgatggtggtgttggtgttggtgatggtggtggtgatggtggtggtggtgatggtggtggtgatggtggtgatggtgatggtgatgatggtgatggtggtggtggtggtggtgatggtggtggtgatggtggtgatgatggtggtgatgatggtggtgatggtggtggtgatgatggtggtgatggtgatggtggtggtgatggtgatggtggtggtggtggtgatggtggtggtggtggtggtgattgtcgtggtggtgttggtggtggtgatggtgatggtggtggtgatggtgatggtcatgatggtgatggtggtgatggtgatggtggcggtgttggtggtggtgatggtggtggtgatggtggtggtggtggtggtggtgatggtggtggtggtgatggtggtgatggtggtggtgttggtggtggtgatggtggtgatggtggtgatggtgatggtggtgatgctgatggtggtgatagtggtggtgatgatggtggtgatggtgatggtggtggtggtggtgatggtgatggtggtggtggtggggttggtggtggtgttggtggtggtgatggtgatggtggtgatggtgatggtgatggtgatggtcatgatggtgatggtgatggtgatggtggtggtgttggtggtggtgatggtggtggtgatggtggtggtggtgatggtggtggtgatggtggtggtggtgatggtggtgatggtggtggtgttggtggtggtgatggtggtgatggtgatggtggtgatggtgatggtggtgatgctgatggtggtgatgctgatggtggtgatggtggtggtggtgatggtggtgatggtggtggtgttggtggtggtggtggtgatggtgatggtggtgatgatgttggtgatggtggtggtgatggtggtggtgatggtgatggtggtgatggtggtgatgatgttggtgatggtggtggtgatggtggtggtggtgatggtggtgatggtggtggtgttggtggtggtggtggtgatggtgatggtgatggtggtgatggtggtgatggtgatggtggtgatggtggtggtggtgattgtagtgataatgatgggatgatagtggcgatggtagtggtggcagtggtggtgttagtaatgttctcactcttgtaaataaagctggccattttctagagaaagctcatggcatttgctatctgctttccaaccacctgcagaaatcatcatccgtgctccccatttcaatcctgatggggctacctgcatgatcaggggtgcactggaccccaggaggtcagcactggctaggatgagtcctgtcagccctcagctcactgtccagccatggcccacactgctttcactgcatccttgtctttccccgaaccactgaccacaggccacacaccctctgaccagctctgtgcccactgctgaccca

SEQ ID NO: 39944 - DNA, 957 bp, Artificial sequence
  DNA replication origin
ccggaattctccacctggagcacggtccgtgaagagccaggctggcttagggagacaacacgatagcgcctggtaggacggcctcctccgtcagggcggcacctctgtccagggacatcaccaggtgggggtgggctgcaggggctggggaggagggacaggccctgatgagggagaggtgccctccaaagatgaccaaggcgtcagcatctgcctctaggcagggctcccaacctcgcaccccgagtgggctgcaggtcagtggagttgttggtcccacctggcctgggactggacggacccccagcaaggaacctcaggggcacccagctctccttgtggctgggaatgggacccagtgagcacgctctgcccagggtctttaaacacaagtcagtctgtcctcagtgtttaaagccagccccgatgaccagcagagtccccttcccaggccaggagctgtggccccggcatgcgccctccagcctggggagaggggccgtcttggagctcagcaatcagctgaggtggggtgtttgagccgaggagcagagggcgtctgcagaggtgagctgagggaggcaggtcaggctgtcgggggcagttgctgccaggagttgggggcagcctgctggcgggggcacctggacggtgcctgggctgttgactgactcaaggtaggttggaggggttgggggagctgccttcttgggaggcctttgcgaggataaagcgtggaatgtcagagatgactcacatcttctgttcctgggtgggcggggtcggtgacgaagggcggtcgggaggagacacacgtggggtcacatagctggactcaaacccggctctttcccagggaagtgctgcactcacgcctgacgctccctggagcgccctgtagggaccccacgaagtgcaccttcttctcgcccctcctggccactgtgtttctcagga

SEQ ID NO: 39945 - DNA, 1041 bp, Artificial sequence
  DNA replication origin
gtgttcgccgagggggctgccggctcaccactgcctgccttgagtgccagggtcttttgtgaaataatcatgttactcaagttcagtccttgaataaatagcacatttttgcatgtattttgtagagtggcatatgcttcaaagttctaaaggcaccgcagggtatctattctgtgaagccttccttctacccggtccccgcccgcccatcgagacaagcagcatggccaaccgcggtgtgcatccttctgtgcgttaatgagcaaataggcacaagcactgcctacgcctctatgcggaggtgcgggctcaccgctagtgctcttctgcacttttgcttttttcagcaaatgccatgcgtcagagctgtttctccactgccacacagccccagcctttcccgcggctgagtggcagcccattggaaggttcataactatccatggaaatctaggttgagttcaggtatttgcagttaaaaacaatgctaccacacggtgctctgcaatatgccagtatgagtgcatgtgtgtctgcgatggggaggggatggtctcaggggtgcagctgcagggctgcaccagtatgtgtgtgtgaatatgtcagtatgtgtgcgtgtgcatctgtggtggggagggggtggtctcaggggtgcagctgcagggctgcaccagtatgtgtgtgtgaatatgtcagtatgtgtgcgtgtgcatctgtggtggggaggggttggtctcgggtgcagctgcaaattgcatttgcatctgaacttgcagttgcatttgcacctgtgcttgtatttgtgtttgtatttgcattggggctgtcacctgtatttgcagtaagatggggtggtcacactcaggtgggtccgcatgggacatgtcacagaagcaaatctggcctatacctggcttggaggtgctctttgattcttgacttcgctaaagggcagtaggtctgccagtcagggtcctataaggaaaaccagctggtctacatgttccaacagaggagatttaacaccaggaatcagctacc

SEQ ID NO: 39946 - DNA, 1099 bp, Artificial sequence
  DNA replication origin
cctccctgcagggagcacggctcgacacgccgcaccttgatcgcaggcgtctggcctccagccggagccgggacacgtttctgctgttgtaaatgaccccatttgtggccgtctgttgcagcagctgtggggaactggcaccgatctcagggccggaagcacagctgggcacggctctccccagctctctcggtcactgtcccctgtcacaaaccccgtgcaaaacagcctgagggggttccttgctgccctccagggctgtgtctgagtgctgagccagcccctggaggccagggcctcagagcacaggggagccacaggaaggggtgtctccacccggaattggagcaggagggccaaggccttccaggctgaggaagggaacaggatcagggcctcctcctctcaaggtggcccctgccagcggcccctggagctgcaaggctacagggacctggccccaggtggggctcctgtcacccccctgcacggaactcactctcacccccagcctttcctacccctcacaccaccaccctgcatcccaccccaaactgggtaaccccccagcaatcccccagggacacagagaggagtacctgggggatgactgggaggagtgctggggagaggagtgctggaggatgactgggggaggaacagggagaggagtgtctaggggatgactgggaggagagccgaggagaggagtgcatgggggatgactggggggaggttggccaggagcacctcagtggccgctcagaagtgctcagcttcactggtgcttgagcacttccagtgtgcccagaatgaggagcacatttacgaaggcagcaatagagatggtggcagccttcatcagagagatggggtcctgcccaggcctcataaggaggtgcgtgctggcagtgacaacggggacaagaggggcagagatgagacactgggatgcaaggattgcatttgagcccgatgaagaaggaactgttgagagtatcccacagttacagacccagagtgggggcatccccatggctcagggaaccccagcttcagagacacacacagcgtgcaagccacatgagcaggccgggat

SEQ ID NO: 39947 - DNA, 824 bp, Artificial sequence
  DNA replication origin
gccttcatcagagagatggggtcctgcccaggcctcataaggaggtgcgtgctggcagtgacaacggggacaagaggggcagagatgagacactgggatgcaaggattgcatttgagcccgatgaagaaggaactgttgagagtatcccacagttacagacccagagtgggggcatccccatggctcagggaaccccagcttcagagacacacacagcgtgcaagccacatgagcaggccgggatacccctccaccacgtgagcccagcagtcaccagggcattttggaaacagcgtggtcttggtcccgagctgcagatacacaagatgttcccaggggaaaactgagtgaaaggtacatggaatctctagatttttttttttgcaacctcctgtgaatatgtaattgttttaaaataaaaagttaatcagaccagtatggtcagtggtgtgaccatgtgtgtgtatgcatgtgtatgtgtgtgcgtgcatgtgtgtgtgtccgtgagtgcatgtgtgtgatgtgtctgtgcatgcgtgtgtgcatgtgtgtgcatgcatgtgtgtgatgtgtctacatgtgtgagaatgtgtgtgcatgtgtgtgatatgtgtgcacgtgcgcatgtgtgtgcattgtgtgatgtctgcatgtgtgtgcatgtgtgtgatgtgtctgcatgtgtgtgatgtgtctgtgcatgcatgtgtgcatgtgtgtgatgtgtctgcctgtgtgtgcatgcatgtgtgtgcgtgtgtgcatgtgtgtgtgcatgtgtgtgggctgatggcagaatttcaggagcatggctaatctgacc

SEQ ID NO: 39948 - DNA, 938 bp, Artificial sequence
  DNA replication origin
ctaaggaggctgtggcccaccctgcttgggatggcaatggaggggccaagtgtatgaataaccccccaaaccattaaaacatcagcgtccctcaaacaacttcttgagatggggtgtgtgaggctcactacacgtaagaaacataatgaataaaacacaaaggccattacaacccacttaataattcagggactatgaagatagctggcgtctatgaattagaaaataagggaattcttctgggtgtggaggtaggggaagaggtttctgcgtattcattccgccccctgccatgtgggtatctattgcaccgggctggaggtctgggtctcagggcttggggagctgttcctgcacctctgcctgtccccaccaccaggcaacaaggtcagtgtggcccaccagggaaccacaccagggccagcagctccaggccccatctccctgaccccctggccagacctcgggagatgagagagacccaggcctagccagggcgggaggtggggaggggttgggggatcattcagggcacaaggggaggaggagagagcattctggggaacggggtctggggagggaaccaggacagagaggcatggtgacagctggaggtgagtctggcagggacccctcagaggacagcagtggtgtttacccccacagtgcgggcagcctgtggtgaatgacagcagtggggcttacacccacagtgcgggcagcctgtggtgaatgacagcagtggggcttacacccacagtgcgggcagcctgtggtgaatgagtgtgtctgggcctcccccgggggcttcggcacccgcttccctgtttcaccttgtctatctgagcatcggtaggaagatggcaatacctctgctgaatttcatcctctgaaaggcggaaaccaaaccctcagagccaggtgaagccaaaaagaag

SEQ ID NO: 39949 - DNA, 1696 bp, Artificial sequence
  DNA replication origin
tccatgttggtcaggctggtctcaaactcccgacctcaggtgatctgcctgcctcagccttccaaagtgctgggattacagacatgacccactgcacctggccaaggccaatttttagatacccattttagacacccatcccaggctgtgttcaggaaaaagtgaggtggggtgtcaggagctgtgtgagccttgtggtgctgagtggccatgggcaagcccctgccctctgggcctcggctgggacacaggtgtccctcccctggctggaatcatgcccagcatgggcccatccggctccgccctgccccccggcctcacctgagctcaccacacacaggcccatcagggaagcgggactgggcactccctggcacccccgagagccggggccaggcagagaggccacacaggcccacctgtgcccaggtaggcaggtcccgtagaacctggacaggtgcatgacctgggcaggggtgacagcagaaacacagctcctcattaaagagaaaacctcatcctggatgtgtgcgtgggtgtgagtgtgcttacttgtgagtgtatgggagaatgtgtgtgtgggtgtgaatgggtgtgatgtcagcgagggtgtattttgacagagagtgctgctaggtgtgtgagtgtatgtatgaaatcacctctaattgtgcatatgactgctgtgagatgatgttgggtgtctgatgggtgtgtggtgtgtgcgagatgatgtgtgggtgtctggtgagtgtgtagtgtgtgtgagatgatgttgggtgtctgatgggtgtgtggtgtgtgtgagatgatgtgtgggtgtctggtgagtgtgtggtgtgtgagatgatgtgtgggtgtctgatgggtgtgtggtgtgtgtgagatggtgtgtgggtgtctgatgagggagtgtgtgctgtgtgtaaccatgtgtctctggtatgtgtgttatgtatgtgagtgtgtggggaggttatgtctttgtggtgtgtattgtgtgtacccatgttgtgtgtgtttctctgtgtgtccatggtgtgttcacaacgtgtaccagtggtgtgtgtgtccatggtgtgtgtgtgtgtggtgtgtgtccctggtgtgtgtggtgtgcgtccctggtgtttgtgtgtccctgatgtgtgtgcatccctggtgtgtgtatgggtccctggtgtgtgtgctgtgcgtccctggtgtgtgtgcatcccttgtgtgtctgtccctggtgtgtgtccctggtgtgtgtggtgtgtgtccctggtgtgtgtgtggtgtgtgtgtccctggtgtgtgtgtgtccctggtgtgtgtgtttgcgggggtccctggtgtgtgtggtgtgcgtccctggagtgtgtgtgggtccctggtgtgtgtgtgggtccctggtgtgtgtggtatgcatccctggtgtgtgtgtggtgtgcatccccggtgtgtgtgtgtgtgtccctggtgtgtgcaggggtccctggtgtgtgtggtgtgcgtccctggtgtgtgtgggtgtccctggtgtgtgtggtgtgcgtccgtggtgtgtgtgggtgtccctggtgtgtgtggtgtgcgtccctggtgtgtgtggtgtgtgtccctggtgtgtgtgtgtctgtccctgacgtgtgtgtgtatctgtgcacacggctgcccacccacaggctgtcctggccaggtgcctggttct

SEQ ID NO: 39950 - DNA, 970 bp, Artificial sequence
  DNA replication origin
tggctcttcagagaccaggagggctgggctccgggtcctgcctgtgcagctggtgtggcgcctggcagagaagagagagggggagagggaggggagaggggaggacagaagaggaaaggagagagagaggagggaggcagagagggagaagagagggaggcagagagggagggagggagagaagagaggagaaagaggagggagggaggagagaggagggagagaagagaggagagagaggagggaggagagaggagggagggaaggagagagaggagggagagagggagagaagagggagggaaggagagaggagggaaggaggagggagacgagggagggaggagggagataggagggagggagggaggaggtagggaatgttcagtttctttcctcaggggaactgctggggtctcagtctgactcacttttttctaattattattatttcacttatttgaatgtgatttctgttaaaaaaaaaaaagaaagaaagaaagaaacaagaaacaagaaaggacttagaaaaagtactcagggaacccaggtggccagaaatgctccattccccttttgtcctttgcagtgttctggtctggaatgaatgggcttccccagcagattttaggggcttttctttgaaatttgaaggggaaggtaccttcctatgatcacagagcatgttcccttccagccaagaggttaagtggaaagcccggggccctgggttccagagcggggggccggaagactgtgaggctcaggggagaacgcaaatccgtctcagcagaaatgtgccccagaacaaatcagctccaccgagctcccagtgacctgaaccaaatgcgtcgtctttggtgcgaacttcaaggagttctgccgggcaccgacctgggtcaccaccatcagaattgacgcacagaacacgcctgtcacccagaaagctcccctgggctctccgctccgt

SEQ ID NO: 39951 - DNA, 962 bp, Artificial sequence
  DNA replication origin
ggatgtcgggggtggggaccggacggatcgcgggcggcgggggcagggtgtgggagcggggcaggggacggtcctgggatccggatcgagccgacctcgggtggcagggccaggtgtgggagcgggtccgcgcccagaggtgctaaaggggtcgagggtggggacggaaccgacagcgggcggcgggaggcgagtgtggaatcccggctcagggggtcccgggatcgggacggaaccggactcgggcggcaggggcctctatgagagcgggtccgtgcgccccgcggggctcaagagggtcgggggtccgggtggagcgggcggcgggggcgggtccacacctcccacggggctggaggggcccgtggatagagtgggggcgacaggcgtgggagcaggtccctgcgtcccgtggggactgggggctccgcgggcacggatggagccgaccgcgggcggcgggggcgctggtgggctctgagctctgtgcggccccgcaggtgcgcgcggagccatggttatcatgtcggagttcagcgcggaccccgcgggccagggtcagggccagcagaagcccctccgggtgggtttttacgacatcgagcggaccctgggcaaaggcaacttcgcggtggtgaagctggcgcggcatcgagtcaccaaaacgcaggtgcgtgggggcggtgggacccagccggcggggcctccccactggacccggggcgacccgacctttggcgggtggaccccatgcagattcactgctccaggcttgattgtcgtggtgggtaaatagtaaccgtttttagttcggtaaagaaaaataatgctttatattatgttgctgcataatttggacatatattgggagaaagcagagaggataatagcaaaaaaaaggaccaacctaagattgcagtggttcatggactcagagctaaaccctgtaaagtgagcctgca

SEQ ID NO: 39952 - DNA, 1465 bp, Artificial sequence
  DNA replication origin
aaaggcacggaagaccagaaaacagaaaagaaatcaaagcttctgagaggaaatacagcctcggggggtcaaggacacaaacaacaacaaaagacattgggtaacagagaccaggttgaagcacagacttagttatgagggtgccaggggttcccccagtggggagacgggacagccgttccaagcttggccttttcctctgtgcttcctgcctttctctgcagagcgagctccttgcccacgggcccagggaagggaaaacaggatggccatggttggcacagggctgttctgggttttggaagctcagggctgggtcagggtgaaaggtcaagtgcacctgagtttggggacctgttctgcggaggcagttttggctgcagtttttatttggtgctgatgcaatgtttccaaacagccagccaggtgtttgcaaatacctaagaccttttggaagactctggctagggtgggaggggtggggaagcctgcttcctggatgcggggggcagtatttcaagtcacaggctgagggactgaatggtgagtgtgatcaggggcctggtttctcccccaccccgccttttatctttgttcttttttgagacagggccttgttctcttgctcaggctggagtgcagtggtgcaatgacagctcactgcagcctcaacctcccaggctcacgccatcctcccacctcaggctcccaagtagccggccccacaggcgtgtgccaccacacctggctattttaaaagtattttatagaggtgaggtcttgctatgttaaccaagccggtctcaaactcctgagctcaactgatcctcctgcctcagcctcccaaagcactgggattacaggcgggagacacgacgtccagccttgtttttgtttagttctcctaggagcggattaacagggtgttgggacctccaaaaggaaaaaaggcagttgtacactgttcagctgaaaggaactaaaaatattcccccgtattcttggtatataaacctgggacaaagaaaaacactctgaacgattaaggaaaactttgggactcttcatttccttgaaagcctttgaaaaccaactgactcccaaacaacccgtgtgtgtgtgtgtgtgtgtgtgtgtgtgtgtgtgtgtgtggcgattgggaaatctgtggtcagaccctcgggcgaatgaggagaagctcatcctcgtttctccgggccctcctcccaggcgtccgtccaggcaggaaagcctcccgagaagggttccaagttttgtgccaactcccctgaattctcgttcccccttctgtgaagtagtgttatttaacacaaggaaaactgaccctaggctcgatccagaatctaactcccaaatgggtcctcaggcttaaaaaataccttcgcccacagcctctgtctcccctgaagaaaacgttttccgttcggatgaggcatcggccacg

SEQ ID NO: 39953 - DNA, 2808 bp, Artificial sequence
  DNA replication origin
gccaggccccaaacagagccaggggttcccccgggggggagtgctcacttaggaagagcaccatggacagcctggcaggaggtcaccctgtgctgagcaggcagcgctggagtaaaccacctgcctctctgtaggaagaaggaaaccgcatccgcaaacggagcaaaggtccccagaggcagagcagaagcctctgggatgctgcagctttgtgcagacactggggaccaggactggagcaggtgctggccgtgctctttatcctgggcactctgccagggccacacggagcgtggctcccgggagatggagacgtctgagtgtcagctcaggtctcggtgtttccaggtgacatgctggctgctagtgtagagcatggtaaaccatcttttttttttttggttactatttacttatgcaaaataatgtgagtttctgccatttgcaacaagtgtgccagctgcaatgagtcagcgggtggacacaggtgagcatggccagactgtgccagaacatggtgacagacagacatgcttcgaagttcactgtgggaagggacaggtccccagagagaggtgagacggtgcaacgcgagggtgagttcggagtcatcctccagatgtccacaaaggctcgagaggccctgctgtgtgtcaggcactgcgtgaaggttgtgggcacagtaggagggacacaagacaccttctctcgaggaccgttggttccagttgcggagacagtaacagcataagatgatgagtaagaaaagaatgctggcaggaaagtggccatggagggaactgcttccgggcctctccgtgggatttgccaggcgtggactgagcgaggaccttccctgagaacaccaactgctccaggagagagaagaggtggagccccggcggggggcatggggcaggaggcagccacccacaccttccctctctgaatgctgagcagaggctctcagcagaggggaagaagagcagaggccacgattgggaagacagacccagtgggggtccttggcgccgtccacatccatctgcaacctgctgcccagcgcctgcctgcccggggtgtgcacagagcagtgtggtctgtcccggcttcacggcctgacacggccaggcgaggatgacagggaaagggaggcagggacttggggctgttggagccaagctgaggagcaaggagctgcgatgggaagcgggtggcaggaaggagcgtgaggcctgtgggtggaaggtctctggccttggagattgaagcgtttcacttgtgcatctcacagcccagagaagccaagcccggaccatgggggagagaggaggacccccgtctcagggcgggctgaggagacgctctctccacggcttccggatgggtctccctccatctcagctgcatctatgggaaaacgatgaaatgctccctccactgccgggccttctcttataaagcaggtttcttcgaagtataaaaattaatagaaaaggttccatagaaaatcaagaaagtaagtatgtaaagatgaaaacaaaaagcaccggaaatgctcttcatagctgacgttttcttattcactttttattaaaacaggatgaggcgtcctgccttttccagccttatctaggaagtgtcttgccaggtcaccaaatggcaagcagaaccgtaagctgaagttgtctgcctagaattccactgtggcaatgttcagcatcccgactggacagctccgtgcggcggcatcgggggcgcggcggcatcgggggcgcggcagcatcgggggcccttttcatgccattcaaggccccgtggaaacagacaccacagctcagcatgagactgtggccccacctgacctggctcatccatccccagcctctcgtggtccccggccctatgccgacatttggcactcgatgagccatttctccacatttcaggagccttgttttaagacagcctggctgtctgagagccaccggagtcgagactggatgcccggcctggtgcccgtgggccagcaccgcctgaggaggaggggtctctggaggccacaggcagagccactgagagggatctttaagcagagggccccacacacctcctgggacccacgggtgtggctgccatgcagggtctgggagctacagagagtcgggaaccaagggcgcggtggctcacacctgtaatcccagcactttgggaggccaaggatcacgaggtcaggagatcgagaccatcctggctcatacggtgaaaccccatctccactaaaaatacaaaaaattagccgggcgtggtggcgggcgcctgtggtcctagctactcgggaggctgaggcaggagaatggagtgaacccgggaggcagaggttgcagtgaacccagattgcccactgcactccagcctgggcaacagagcgagactccgtctcaaaaaaaaaaaaaaagaaagaaaaaaagtaaaaacaagagagtagggagccaagtccctgggttgccaagtcaatccgtggaagcccctgacttcgagcaggacacagggccctaaggacagccccagcccctgcagtgtggcctgcaatgggtgtcattcattttgacctggctgttgtggttttgggtggtattgttatttgtttgaaaagaaaacacatgggctgcgtatggcatgagcaagtacagacgtcattgggatcggctaatgaaaatgacagagtactctaaagtgacaccttacagggacgtggtgatgtggcaccaggcccagtggcaccagcacaccaccgtctcgctggca

SEQ ID NO: 39954 - DNA, 1192 bp, Artificial sequence
  DNA replication origin
ccccttcctctgcacagacccgcctgccccctccactccgcgtggcccaggggagccaggcctggaaggatgtcgtgggcgacgctagcttggagtgactccttttatggggaaactttggaacttcatctgagaaagccttgtgctaacccagggccccgcctctggccagggcaagacaaggaagccatccacagtcttcaagactgttgctcccgggacggtgccatttcctgtgggagcttcaacactcagaactcaccctggcatgcaggaggctcacatgacgcccttgtcaaagaagctgatgggtgatttagtgaacaaatgattcacgagcaaagaaccaaaatctctccgtgtgtgcctgcatctgtgcttgcgtgtgtgcgtgtttgtgtatgcttgtgtgcactacacgcaagtgtgtgtatctgtgtatatgttttcttgtgcacgcctatggatttggttatgtgcagatatttgctttgtgcacgtgggcatgcgtaggtgtgtgcatgtgggtttgccgtatgcatgtgtgtttgtgttgtcaggtgaatgcaggcatgtactcgtgtgtatgagttactgtgtgcatgtgtgtgattttgtgagtgcttgtgtttgtgtatgcgagtttgtgtgtacatgtgtttgtgtgtgtggatccatgcgtatgcacgtgtctctgtgggtgggtccgtgtgtgtgcacatgtgtgctctcctttaagctcacccctggccaagcctcttggagcccagggctgcccaggaactttgtggagcatttaggggtgtttcagtcaagttggaaacaggctggggagggatggatttgttgtgacctggaggagcgggtagatgacctcacccagttgcacacagagggcgtgggttaggcaccatgtacttaaacttggcattgaagtagaatggacattctggaaggagacgtgacagggattttcacccccacaaacgctcacaagggaactgcccccagggagctgtccagatacccctccaaccctccagtcacccccactcccctggaagcattatccactgcgggcactttgtgtggccagaatggagaaccctgcagcttcttcatgtggcgtttcctctgcccaccctcccagctccagctggcccggtgcctccaggcaccagccctcagcagc

SEQ ID NO: 39955 - DNA, 838 bp, Artificial sequence
  DNA replication origin
acgcggcaggacaagctggtgtctccgtggggtgcccccgttgtccccacgtctcacatacactcgcctgatgggtggccttccccacatccgggaccctggctagagtctgaaaggcggctgcccacgtcccagctgcccctgagcagggaggccggcaggggatgcacggcgagttctctcagtggtcggccgggccccagccccctgggtgctgcgaggggaccctgtgagcctgctgatggccagtgagccgcggtcctctggtcctagccggcctcgggtctgtggtcctccgggcaggacgtgtctggcaggccagaggcggctcctgtgtgcgcggaacagccgcttttacaggggcgtcggctcgtggcgctggcagggcttctgtcgcaccagccctcggcccgcggcaaatgccgaatgccggtgctgggaacggaagtgggaaatgacggggggtgcaggggagcggccctgactgggactgtacggggacgcatgggggtgcgggcacttgagggaggaagcagcagagggaggtgtgtggatgtgtgtgtgtgcgtgactggggtgtgagcgtgcccactgtgggtgtgcccgtgtgtgtggctgtgaggcgtgagtgcaggcgtgaagtgtctgggagtgggagcgggcatgagtgtgtgccacgggcctgctgttgggtccttggaggccacggttgcccctgaagggactgcaagctcttttttgatttgtagttatttgagaagtctatacaggaagaaaattaaaccgcatttactaaatacaataaaattacaggaagacagaattgtccccaaattac

SEQ ID NO: 39956 - DNA, 957 bp, Artificial sequence
  DNA replication origin
acggtgataagtgagtggctggagcaagccgcaaggagcttttgagcgcacaccagagctgcttctgctacctccaggcctctgatggctgcggctgcagacacagccagcctcgcagcatgtaagagtgggcaaggatgacacacgggcacagagagaccaggctgggcttcaggaagcaggtctgcgtgggatggaagtgcttagaaagtcatttctggaaggccgacaccagtcggcactccctgagcgaaaggacttgggaacacgtggatgcacttcttgtatctccaaggaaatgctccctgaggatttgcgacgtggaaatgcaacgggctgtggagtgctgcgcaccccgcacctcgagcagtggtttagctcagctcggggtttgtggcttcagggggtcatagtccacaggagtgccagggggttgggcgggtgggacagaggaggcgagaagtggttgcggacactctgcatgagcaggacacgcacacaccacacacacacataccccacacacatatacacaccacacaccccatatacacacaagtacacacacgaacataccacacaccccatatacacacaagtacacacatgaacacaccacacacacacacaatacggctctgcaaggaaacgtgtgaggggtgtggtgtgtgtgcactgtgtgtgaggtgtgtggtgtgtgtgaaatgtatgtgtgaggtatacagtatgtgtgtgaggtagtgtgcgatgtgtgtgtagtgtatgtggttgtgtgaggtatgtggggtgtgaggaatgtattgtgtatgtgtgatatatactgattgtgtgtaagggatgtggagtgtgtggcatgtgtgtaaggtaggtgtgtgttgtgtatatgtgagctgtatagtgtcgggggggtgtgaggtatgtggtgtatgttatgtttgagatctagtgtgtgtgtat

SEQ ID NO: 39957 - DNA, 1123 bp, Artificial sequence
  DNA replication origin
acacctgtgtagacacgtgcatgcacagacatgtttctgtactcgaagtgggttctgagacagtgagcagcaggcacttgggtttttggccaggagcgctgctgtgctaaggctgggagggcctgggtccctgcaggcgtcgcggccttccttcttacagactcgctctaggtcgcccctgctgttgacacccgtgtcagtgcagacacagccctcccagctgggcagccgagtccgaaggctgcctgcgcgctggcccttccatctctgctcctgcacacggctcctctgcagacctacctcatcgctgtcacctgctctctcccgttccagaagccacccctgagccacgggaagctcccagcacctgctcttttactcccaatttgctcctcctcttccgccctcctcttttatttctatttggagaagtatggaaagtcaaaaagtacagtgaataagagcaacccccatattcccgtcacccagaatgaataacctgttatgtgtgtagggtggtgggaggtggtatgcatgtgtgtgtgaggggtggggggtgcatgtgtggtatgtagagtgtgtgtgcgcgtgtgtggtgtgagggtatgtgtgtggtatatgtgtgtagtgtgaatgcagtgtgtggtgtgtgcatgtatgttgtgtggtgtctgcgcatgtatggtgtgtttggggtgtgtgtggtgtcagcgtgtgtgtgggctgtgtagggtgtgaatgtggtgtgtgggtgtgtgtgtggtatatgtgtgatgtgtgtgcatgtatggtgcgtggagtgtgtggggtgagcgtggtataagtgtgatcacgtgtggtatacatgtgtgctgtgtgtgatatgtgtgcatgtagtgtggcgtgtatgcatgtatggtgtgtgatgtggctgtgatgagtttggtgtgagtgtgcatgtgtggtgtgagcgtgtgtggtataagtgtggtgtgtgctgtgagtgtggtataagtgtgtggtatgagtgtgtggtgtgtgagcaggtggggggcaggaagggatcaagccagcattgttgttacagcactgacttccccataggtgatttccgctgcatcccagacaccccctagctggcccc

SEQ ID NO: 39958 - DNA, 1198 bp, Artificial sequence
  DNA replication origin
aggagatgtcatattttcttgctttttcatgtttcctgtacccttgcattagtatctctgtggtataatggtcatttcttctaagttttttgaatttactttcgtaggagaggacattttcccgaagatgtatctgtggtattggtaggtagggcactttggttttgaatctgggtgtgtgcagtagtgtagtctctgtatgatttctttggctgtaaacagcattaatgatatctatgattttcttaatggcttagggtatggttgttagtggaggctgtggtgaaattttgctgttgacctgggtgccaggtaggccagtcttttggccccagtggtggcagtggtggactgagcatgcctgtcctcaggccccagggtggtgtacactggcaccagtgttagtaggtccaggcaggccagttcttgggcctccaggtggcttctttgggtactaggaatggcagtggtgggttgggtgggtgggtgggttcctgagcccctgagcagcaggtgtggtgtggttgatggcaacagcagttgtggtgtgggtgatggcaacagcagtggtgggacagccctttggggtcttcatctctggtagcttatgctgggctgttttccaaagtgctgatgtttgtgacggctgtgacaggttgggtgggctggtccttggacctgcaggtggcacatatgggtgggtcgcagcggtggtggtagcagcaagctgagtgggcctgacccactctgggagactctgctgagatgctactggtgatccccaggcccctggacagtgtgatctggttctagggagggatggtggaggcaggctggctggacctgccctcaggtcccttggtggggagtgtagttattggctgtggtaagtagcatcgaggtgattcctaggcctcccgtggaatgctcaggtaggggtggccagagtttcattgtgtccctgctactggggagggcagggtttctttccctgggagcagctgtagtcaggcacctagggggcatgggctttgattgcacctcacctcaggcctgcagcagctcatagtggtagcagttgcaggtagtcgactttgaccttggagctcatgaaaatacatggctacccatctgcagggatggtgtgggggatcactccctgtggctcccacctccaccctggtggcggggcaggctg

SEQ ID NO: 39959 - DNA, 3030 bp, Artificial sequence
  DNA replication origin
aagatcacgcctctgaactccagcctgggtggcagagtgagactctgtctcaaaaaaaaaaaaagaaagaaaagaaagaaggataaaaggagtcacttatgaaagatgctgggataactcaaaatctgaggaaaagctatacagcccacctggacagggataaagctgactgcaagccatagggctcctctgcatctcaggtcagcatttatgtcttggcttcagcaactgacaacacagataaattttctccaggtggccaggaacacggccacaggcagctctagagtcacatccaatagtttcacggcccaagaaaggcaaaaaaaacactgttcttcagcagctgaagccagaaaactcctggagaaagactatggcccagctcagagcacacacccaccactaaaatcactgctgtggccacagccatatagctggcactgccaagtctcaccttagccagtggtcagaagggtctgtgctgcgggagatgagggcctgctgagggagatgagggcctgctgaggggccctgctgtgggggatgagggcctgctgtggggaatgaggccctgctgtgggagatgagggcctgccgtgggggatgagggtctgctgtgggagatgagggcctgctgtgggggatgagggcctgctgtgggagatgagtgcctgctgtgggggatgagggcctgctgaggggccctgttgtgggggatgagggcctgctgtgggagatgagggcctgctgtgggagatgagggcctgctgtggggaatgaggccctgctgtgggggatgagggcctgctgtggggaatgaggccctgctgtgggggatgagggcctgctgtgggagatgagggcctgctgtgggggatgagggcctgctgtgggggatgagggcctgctgagggagatgagtgcctgctgagggggatgaaggcctgctgagggggatgaagacctgctgtgggagataagggcctgttgcgggagatgagggccggctgagggagatgaagacctgctgtgggggatgagggcctggtgagggggatgagggcctgctgcaggagatgagggcctgttgcgggagatgagtacctgttgagggagatgagggccggctgagggagatgaagggcctgctgagggagatgaagggcctgctgagggagatgaagggcctgctgagggagatgaggacctgctgagggagatgaggacctgctgagggagatgaaggcctgctgaaggagatgaaggcctgctgagggagatgaagggcctgctgagggagatgaagggcctgctgagggagatgaggacctgctgagggagatgaggacctgctgagggagatgaggacctgctgagggagatgaaggcctgctgaaggagatgaaggcctgctgagggagatgaagggcctgctgagggagatgaagatctgctgtgggggatgagggcctggtgagggggatgagggcctgctgcgggagatgagtacctgttgagggagatgagggccagctgagggagatgaagggcctgctgagggagatgaagggcctgctgagggagatgaggacctgctgagggagatgaaggcctgctgagggagatgaaggcctgctgagggagatgaggacctgctgagagagatgaagggcctgagggagatgaagggcctgctgagggagatgaggacctgctgagggagatgaggacctgctgagggagatgaaggcctgctgaaggagatgaaggcctgctgagggagatgaagggcctgctgagggagatgaagggcctgctgagggagatgaggacctgctgagggagatgaggacctgctgagggagatgaggacctgctgagggagatgaaggcctgctgaaggagatgaaggcctgctgagggagatgaagggcctgctgagggagatgaagacctgctgtgggggatgagggcctggtgagggggatgagggcctgctgcgggagatgagtacctgttgagggagatgagggccagctgagggagatgaagggcctgctgagggagatgaagggcctgctgagggagatgaggacctgctgagggagatgaaggcctgctgagggagatgaaggcctgctgagggagatgaggacctgctgagagagatgaagggcctgagggagatgaagggcctgctgagggagatgaggacctgctgagggagatgaagacctgctgagggagatgaggacctcctgagggagatgaagggactgctgagggagatgaagacctgctgagggagatgaaggacctgctgagggagatgaggacctgctgagagagatgaagggcctgctgagggagatatgaaaacctgctaagggagatgaggacctgccgagggagatgaagggcctgctgagggagatgaagggcctgctgagggagatgaggacctgctgagagagatgaagggcctgctgagggagatgaggacctgccgaaggagatgaagggcctgctgagggagatgaagacctgctgagggagatgaagacctgctgagggagatgaagggcctgctgagggagatgaagacctgctaagggagatgaggacctgccgaaggagatgaagggcctgctgagggagatgaagggcctgctgagggagatgaagacctgctaagggagatgaggacctgccgaaggagatgaagggcctgctgagggagatgaagggcctgctgagggagatgaagacctgctaagggggataaggacctgccgaaggagatgaagggcctgccgagggagatgaagggcctgctgagggagatgaggacctgctgagggagatgaagggcctgctgagggacatgaagacctgatgagggagatgagggagtcccaatatctgcagtccatgcactggagactctggacagccaatgtgtagtgccagtgtgaaagccagcaggctcgagacccaagagctggtgtttcagtttgagttcaaagg

SEQ ID NO: 39960 - DNA, 2602 bp, Artificial sequence
  DNA replication origin
gtgattcattcaacaatctaatttcaaggccacctgcctttctcagctcccaagatttgctgtgcccttcactgtggcagtagtctgccttgggccagaccctgcacattgtcatcaggtggactgtctggtaaacattgctgtagcactcaggccatacctcctctcctccctgcctccttttcctaccattgttccctctaaactgcaagacctcctgctcctcctccctcctctttcctcctgctcacaccattgcctccatggcctcccctccctccagctcacccagccccagtgtgcatcacatttcctgatgctttcaaccttggatcagcccagccatccttcttctctgttcctacagctggggctgttgagtgaggtttgggaagaagctttcttgtgtgcacggactctcgtcatttctcccggtttccagcaccctggaatcctcttctatgtcctttctcagctcccactcatttccacactggtggaggcagacctcgggtgtgatcctcacggcctccctgctctgctcttccttggtaggtgggtgtcccggcaggcggctttacttcctgctctgctcttccttggtaggtgggtgtcccggcaggcggctttacttcctgctgcacagagtcaagggtgtgagtgtggccgcctcagcttggccctcccttgtttattccactcccctttgctttttcttctcacgtgtcagaggcacgtatggcctggatgtgtgtgtgtggtgtgggtgtgtatatgtggcggggcgtggggaaatgaggatgtatttgggtgtggtgtatgtgtatgtgggtattttttggggtgtatggtgtgtatgcgtttgtgtggggcatgtttatggtgtgagtgtgagggaatgtgtgtggtgtgtgtgtatatatgttggggggaggtgggtgtcatgtgatgtgtgtgactgtggtgtgtttgtatatgtgggactatgagggattgggatgtgtgtattttgtgtgtgggtggagatgtgggtgtggtatgcatggtgtgtgtggctatgtgagggggatgtgtgtgtgtggtatgtgtatgttgggggatgtttgtggtgtgtatgtacatgtggagggtatggggtatgtgtgtttgtgggaggtgcgtggggggatatgtgtgggtgtgtgtgtgggtgtggcgtgtgggggtgtgtgggctgcatatgtgggggtgtgtgtatgtgtgtgtgttggagtgtgtgtgtggtgtggggaatgtgtggtgtgtgtgtggtgtgtgtgtcggggggtgggtgatgtgtgtttgtgggctctttcagccaaggctggggcagttagtgcagtcagctggtgtgttgtgtgtggggtgtgatgtgtgtgtgatctgtggtgtgtgatgtgggtgcgtggtgtgtggtgtgtgtctggtatgtgtgtggtgtgggtgtgtgggctctgtcagccaaggctggggcaattagtgcagtcagctggtgtgtgtgtggtgtgtctgatgtgtgtgtggtatctgtgtggtgtgtgtgtgatgtgtgtgatgtatgtgtgttgtgttatgtggtacgtgtgatgtgtgtggtgtctggtgtgtgtgtggtgggtatgtggtgtgtgtgatgtgtgtgtggtgtctgatgtgtgtggtgtgatgtgtgatgtgtgtgtggtgtgtagtgtgtgtgtggtgtatggtgtgtgatgtctgtggtatgtgatgtgtctttgtggtgtgtgtgtgatgtgtgtggtgtgtagtgtatggtgtgtatgtggtgtgtgggtgtggtgtgtgtgatgtgtggtgtgtgtggtgtgcgatgtgggtggtgtgtgtggcgtgtagtgtggcatgtgtgtggtgtggcatgcgagtggtgtgcgtatggtgtgtgagtggtgtgtgtgtggtgtatgtggtgtctgagatgcgtgtgagtgcagtgtgtagtgtgtgtgtggtgtgtggtggtgtgtgtgtgtggtgtgtgtgtggtgtgtgtgctgtatgattgtgtggtgtatgatgtggtatgtgtgatgtgtgtatggtggtgtgtgtatattggtgtgtgtgcaatgtgtgtggggtgtgtatggtgtgtgtggtgtgtgtgtggggtgtgtatagtgtgtgtagtgtgtggtgtgtgtgtgtatggtgtgcgtgctgtgtgttgtgtgtgtggtgtgtgcgtggtgtgtgtgtggtgtggtgtgtggggtgtgtatggtgtgtgtgtagtgtgtgtggtgtgtgtgtggtgtgcgtgctgtgtggtgtgtgtgtggtgtgtgcgtgatgtgtgtgtgtgtggtgtgtttgtggtttgtgcatggtgtgtgtggtgtgtgtgatgtgtgtgagtggtgtgtggtatgtgtgatgtgtgtgagtggtgagtggtgtgtggtgtgtgctgtgtgctgtggtgtgtgtgtgtaatcctcctgcctctgtgttgagccttcctctgggatgtgccctgttgcctgtcatttcttgctccagtatttccagcgctcctgctccactggctcctgtttagccttttgtcttcccaggccac

SEQ ID NO: 39961 - DNA, 1597 bp, Artificial sequence
  DNA replication origin
tagcttattaaggcatttaaagactaagtccatatctttccattttcttttgttcactcatcagctagttattgaatacttatcgtatatggttcattgtaacctgatgcaaagggaatgaaataagatcccttctctccaggagaccttgtggtatatgtggacatattaccacttcagtattaatactttacatgtgtttaagaagatcaaaagtgcttttatatatattatctcatggttaatatagtatttattgaatattgtgttatctaacatatatacatgtatgtagatgtgtgtgtgtgtttatacatacacacacacacacatacatatagatgcagaaccttgagcaacatggaggttggaggcgctgaccccctgcacagtcgaaaagccacatagaacttttgactctctctactgttggctggaagccttactgacaacataaatcgttgattaacacattttttgtatgttagatcatcatgaaggtcttccccctcatcatcttcaaattgagtaggctgaagaggaggaggaagaggagtggttgggttggcattgctgtctaaagggtggtagaggtggaggaggtggaaggggaggctggagcagcagacacacttggtgtaacttttactgaagaaaattcttgtgtaagtggacctgtgcagttcaaacccttgttttcaaggttcaactgtgtgtgtgtgtggcagcgtgtgtgtgtgagcatgtgtgtttgagcatgtgcatgtgtgtgtgactgtgtgtgtgtgtgggagcatgtgtgtgtgggggagtgtgtgtgtgtggggggggagcgtgtgtgtgtgggagcgtgtgtgtatgggagcatgtgtgtgtgggggagtgtgtgtgtgggagcgtgtgtgtgtatgtgggagcctgtgtgtgtgtgtggggggagcgtgtgtgtgggggagtgtgtgtgtgtgtgtgtgagcctgtgtatgtgggatcgtatgtgtgtttgtgtgggggagcatgtgtgtgtgtgggggagcgtgtgtgtgtgagactgtgtgagtgtgtgtgtgggagcgtgtgtgtgtttgggggagcgtgtgtgtggggagagcgtgtgtgtgtgtgggagcgtgtgtatgtgggagcgtgtgtggggggggagcgtgtgtgtgtgtgggagcatgtgtgtgtatgtgggagcctgtgtgtgtgggagtgtgtgtgtggggagcgtgtgtggggggggagtgtgtgtgcctgtgagcctgtgtatgtgggatcgtgtgtgtgggagcgtgtgggtgtgtgggagcatgtgtgtgtgtgggagcgtgcacacgcacatgtatgcatgcgtgcaggcatttgtcagggaacttcacagaaggggataaatttgaaatgggccttgatgaataggtagaaatggcagaaaatgggtgggtttgttttaggacagtgagtaggtcagttgacacagtggagagttaatgtcatagagtagtggggaggtaaagcttaaacgtaggttgggatgtgactttgggaccttgaataccaggttggtgattcattctgtaggtgggaagactggatt

SEQ ID NO: 39962 - DNA, 1139 bp, Artificial sequence
  DNA replication origin
acttgacacttacatcaggggctgactttccttctgctttgcagataacaagtttaaaaccccggctaagccagaagagccaaagagggacctcgccaaggccactcctcgctctctaggccgagaatactgcgcaaattctgggaggtttgggcctggcggctctccgttcccgacccccggcgtggattcgttcccgcgctttctggcgtgaggggtcagagggcgcgccgacgctcaggcgaacggagcggaggcggcagcggccatgggcgaagcgggcgccgctgaggaggcctgccgggttagtgaggaagccctggccgacgccagcgtgtttgaaccgtcgccattcgctcccctcagggcctcgccccgtgcgctcggagacggctcgctgtcgcgtgcttgggggaagcctggagacttcctcccctaacggcgtgggctgggccggagcggggtggagacctggggcgggaggcgacttcgcctccaaacccacgcggggacccggtctgtgaggctgcgcgtggtgggggcactcagtggcgccaaagcgggcatgggagcgtgggatggatggtcactctcttctctgctccgtggaagcccagttcccctccgaaggccctggccccctgcttcgggacttagcgtcaggcttagagagaatctgccctccatcgattttataactgtaactgattgcatgcgatggagaaggcgcttggactggggccagatccgtgttcacatcctgcttccacccgttattaattgtgctgcattgagagtcatctagctcccgtgccttaatttccatctagacaatcttggaggcttggggtgaatagtagatgagatcacgggcggagggcttggcaaacccagtaggaaaccagatgacttccttttcctcctgattagtttggtgctgcagtgataaaaagttgcaggcgttttctttgacttttaggaatagagctcttgtatgacttttctttttcgtggtcttgctctgttgcccagactggagtgcagtggcacgatcatagctcactgcagcctccaactcctgagctcaagccttcttcccgtgtcagcctgctgcgtacaggcgccggccaccacacctg

SEQ ID NO: 39963 - DNA, 953 bp, Artificial sequence
  DNA replication origin
catctcgaccgcccaagtagctgagactacaggcgcgcgccatcacgccccactatttgttatttttttgtagagacggtgtctcgctatgttgcccaagctggtctcaaactcctgggctcaagcaatcctcccgcggcggcctccctgatcgctgggattacaggcttgagccgccgcgcctggccacggtccaggatctttaatcccatttagcacacctcgttgagccagcagcttacctgcgatctccgtggcgtggagtttttaactgtggagcccccgggcccccgggtggagttgagactggaaggaaaggccggcactggggcctgttgagcgggtggagggctcgccttcctccagtgcctgcagaggcttgggcagatcggtgcgcccctaccccggagccctggtgccagtgcaagggcgcccgcgcaggcgtcccgaggcctggcgagcacgcgcgcttccaggggagttgggcagggcgggctgcttgctaattccagagagggaagaaatcttagctttgggttcatctaaaacccgaggccatcctatattttgcggactcagcgggcgtgctggggcaagttaatggactaggtcactccacacgtagcgggggttatctcagttgctccgctcagttgtctaggcgacctcccgaggtgcctgttgacacaaaaattcaacccttaacgtaaaagcgcctgaatccgagcgagggaaggcgcgcggaggcgaggtttccagcaaagactgcccatttgaacgcagtcccccttagtgtagcattcctcgccaaacaggaaaggacccatccgatttattttacttgacacttacatcaggggctgactttccttctgctttgcagataacaagtttaaaaccccggctaagccagaagagccaaagagggacctcgccaaggccactcctcgctc

SEQ ID NO: 39964 - DNA, 909 bp, Artificial sequence
  DNA replication origin
gtcacgacaacacgtggaagccgcattccgtgccggggccctggccctagccccagccccggcccccggcccgccatgtggcgcggctgaccgcggccgtgcgcccacctgtctccctctgcgtcttcacgctgatgtactggcgcagcttcttcaccgctcggtcccggatgcccttctcgctggacgccagccgctgggcaaattggatctcggccggctgcatggcgggggccatcgcgcccgctggagcatccccggccgcgcaacccgcggtgccgctgcagccagccgagcgctgcggagcagccagccaccgtccgcccgggccgcgactgcacagaaggcggcggcggcggcgcgcgggctgatggcgtcacaaaggcgccgcggctcgcagcgcgctctgggagtgagcgcggcagtggccctggcagctggcggagcggcccagcccgtgtgcacgtggcgccggcgctgcctttcggttgccaaaattcaggctgtagacggcgaggttagccagggttaggacttgaccaggaagagacggaaggctgtttgtaaacggtctaggattttttgtttgtttttgagacagggtctccctctgtcgcccaggctggaatgcagtggcgcgatcttggcggtgatcctggctcactgcagcctcgacctcccagactcgatcgatcctcccatctcgaccgcccaagtagctgagactacaggcgcgcgccatcacgccccactatttgttatttttttgtagagacggtgtctcgctatgttgcccaagctggtctcaaactcctgggctcaagcaatcctcccgcggcggcctccctgatcgctgggattacaggcttgagccgccgcgcctggccacggtccaggatctttaatccc

SEQ ID NO: 39965 - DNA, 1088 bp, Artificial sequence
  DNA replication origin
cgtctacagcctgaattttggcaaccgaaaggcagcgccggcgccacgtgcacacgggctgggccgctccgccagctgccagggccactgccgcgctcactcccagagcgcgctgcgagccgcggcgcctttgtgacgccatcagcccgcgcgccgccgccgccgccttctgtgcagtcgcggcccgggcggacggtggctggctgctccgcagcgctcggctggctgcagcggcaccgcgggttgcgcggccggggatgctccagcgggcgcgatggcccccgccatgcagccggccgagatccaatttgcccagcggctggcgtccagcgagaagggcatccgggaccgagcggtgaagaagctgcgccagtacatcagcgtgaagacgcagagggagacaggtgggcgcacggccgcggtcagccgcgccacatggcgggccgggggccggggctggggctagggccagggccccggcacggaatgcggcttccacgtgttgtcgtgacacccagcgtgtgcttcggtttccgcgctgccggaaccgcttcttgctgtgtctagtgcctttttacacttaaggaaacgggttgagggggttccgttacttatgaaagtcacagtaagcggggaagctgagaaaagacccacatgggtccgattccccagccggcatctcgaatcactgggctgccctgatttgccctggtgtccggtcggtgattgccgccttcctttgaccagcacctttacgtgacggggctgcaggagagaagacagacaaaatcactaccctcgaggatctattagtaataaagcaaggaggcaaacaggcaaataaagtagaccttgtgtaagtgtagtaaaggaaatgaaaaccaggtagcaggccgggcgcggtgtctcacgcatgtaatcccagcactctgggaagccgaggcgggcggatcacctgaggtcgggagttcgagaccagccggaccaacatggtgaaaccccggctctactaaaaatacagaattagccgggcatggtggcgcatgcctgtaatctcagtactcgggaggctgaggcaggagaatcgc

SEQ ID NO: 39966 - DNA, 1985 bp, Artificial sequence
  DNA replication origin
agctttgctcttggactgataattagtggcaagtgacatgtgctcataaaaacaccaaattagctcatctgcccacacagtgcctttcacccttgggtggtctcagaagcacctgcagagctaaaaaggagctcagcgccaggctcagtgaggtaggacagggctgggcctaggtgtgtgtatccagttccctgggtgactctaaaatgaccagtgtgagaaccacaggcactggccatctgcacaacagctgggaacgggcaaccagatctttgaaaagcccaagaaaccacaggcaaaaatgtactcaccacaatgacattttcagagtttcgatcagagccctctgtcgagaaggagggtcctggagcccacgggcctggaggctggtcagctctcttccatgcctcccctgctctttcctcttagtgcttgggaccaaaggtgtgataggatggggggggtgggggctggggatggggaagggaccatggatgatggatcaaagtgtggaaggacgaaatccactgcagagagagagattcatcaggcgctcctaagagccaagggcgagagactcacagagtaggatgagcaaagggtagtaagggcagttgttggtgctgcctttgtaggttcctggggctctcacccagcactgcttgtcaccaactctgtaacctctgacttctccttagtttgttaacttcacaatctataagtttgggaaaggacaggagaatttatttcttacaaagggttacagcctttaaggtgatgagacgggagagttccctggagccttttgctggacttgtgataggggtgtggcttgcttacctggcaccacgctctaactccttgtgggaggggaagcacgcaggcgagtgggtgcgagggccaggacaagcgcttttggactccagcctcgtggtaccatctaggggtgtgttacaattaattctctttattttattttattatttttttgagacagagtctctcactgtcacccgggctggagggcaatggcgcgatcttggctcactgcaacctccacctcctgggttcatgcaattctcctgcctcagcctcccaagtagctgggattacaggtgcacaccaccacacccagctaaatttttgtatttttagtagagatggggtttcattatgttggccagactggtcttgaactcctgacctcttgatccgctcaactcagcctcccaaagtgctgggattataggcgtgagccaccgcgcccggccaatgttagctattattaatggacaattatgactaattatgaagtactttcttttaaaagcctagatctctaagtaatgtcttcctccctcagtcctcagcacccgcctggtcgggcattgggtctcaccaagctacagagccctaggtgcgctgtgttaggtcaccaagactttagtctggtgatactgaccccagggccccaaatcaccatgtctgcaagtctggaacccaaaggcctccgttccccggggtggtgcagggaagccgcagggagtgcgtcagctgtggagagcgtaggggtgggaagtgaaggctgtggggtcccccagggggtcaggttcgtcctcgaaggcaggccctccacaggaagacctggttggggtgggatcggacacgcggcccagacccaggcacctgtggatggacggccgggcatgtggccatcggctgggggcctctgcaggccgcgccaccagagtgggcactcagggtccgcaagggtctggggcgcccccagagaagcccgccgccccaggccggtgcggagttgactgggtccccccggccccgtgtctgtcagctcccgcgcggcccctgggaagggacgcggatcggatgcgggctccgggccctgcaggcagttgagagcgcggttcccttgggtatccggggtccggggtcactttcgcgcctccgcactattcccacgcccg

SEQ ID NO: 39967 - DNA, 1742 bp, Artificial sequence
  DNA replication origin
gctctccatacagagccacgtcatccgcggctacgtgggcaaccgggcggccacgttcccgctgcaggtacgcatccgcccgcagcccgggcttacgtaacccgagcccgtgaccttggcggggctgcccgagacgagcctcagttccccgagggaggctcgggagctgcgggcagagcctggcgcgggcgccctggaggcaggcgcgggatgagcctcccgctctgcttggcttgcgggggcggaagcggagggctgagcgctctgcgggcccctgcgggtgggacgggtccggcgtcggggtacgcgggtaggagggagccctgtgcaccagctatggcgcagccgctcgtcctcgccccttcccgccgaccgggccaactgccgcgggggcgggcgggcggtgcggctcccggaggcgaggaaatgtcgcagagccccgaggagtcccggagcagtcacgcgagccgggaccttgccccgctggaacgcagaagcggccgtggagctcgagacgctcgcgcgctcacctcctgggcccctgtgcgtggggaagtcaggaagaagacgccgagtgaggtcacggtgcccacgagggtggattcccctcggcctgaccacgccaggaggtggccgaagggaagagggtggggcaggggctgctctgcaccctctagcagagcggcatccctgcaggtgtttgctctgacgaggagaagccccagagagcagttcgggactgtgcggattggctttagggagccagcttttaaaacgcgttggcccacggcctcctggttgcagctaagtggcccgtggaggggtaggagaggcctgggtgcagtggcgtgggtgtcacgcagggccgaggcagaaccaggacgacgggcacttcctggccttgtcgagtcagcaggagggctgggggtgccctgccgggtcgtgctctcctgtgctgcccacctgcggcctggtcactggggacgggagcaggtatgcctggtccctgtgctgggccccacgggatgtaaagaagggccacctgggcacggcggggcctgcggtgcgggctggcctgggaggaggacaggaagaggggagcagagcttcagtggaatttgagggctgacctaggcgtgcccccaggaggaccaagctgagcagagttgagcgtggaaaggcagggggttcgagtccgaagtaagtggaggtcctgttgggaaggatgcggtgcttcacaggtggtcttacttgagaccctgttccatccagctgcaggcagaccctgcctgggacagtcagggtgcaccggttctgtggctccggctcttaagcactgctctggaccactcctagcttgagggggttgggggaggtcaccacaggctggcggattgcttgggcagagtcagaggtaggattgggcttgggaagaaaggtgcagggtgcctgaagcaggggcagccaggcagtgtggaaccagggggctctgaggacagcgtccactctcttggcagaagtgtgcaggtcctgctgtgtctgtcccgtccctcctcccatccacctcctacttcattgggcaaactgtttccttctttggctcactcgggatcccccagcaatgtcctttgttctcgaactcccagtgactcgaggggtgtcctctgattgctcacctcaggtggagcctcgaaaggatggcgctgctgttcctacctcgggtctccccagtgcacggcatc

SEQ ID NO: 39968 - DNA, 1126 bp, Artificial sequence
  DNA replication origin
aggaggactgcgggctgcgcctgggcaggggatgagcttgtgtcgcgggcggcagggggaagggagtcggagagctcctgcggtccagccggatgactgatgaggttgaaagcacttccgctgcggcccccgcaggaagttcccaggaggaagttgcgaccctttctaagccatcccactggcctggactctgctgggattattttgaccccccagggcagagtgtagccatctgactggctttctctctcggcaggagacggggcgcacgcctgcaggtgggggagccccaatacgtcacacggatgagcggggcaaagcccagccccccaccccgcacccgcccgcccgcaatcctgccccctggctgcggcctccgcggctcttcccaccccggctccgctgggtgcttggcgcttgtttacggagttacaccttgcggtagaggctgagcaggagcttgtccttcagacttcccagcggagacagccaggctgtcctgtggcagcagtgggtttgtcagaggccgggggctttggccagggccggcagagagccccagtcctgaagaaccctcgttcttcgcgtgctgtcgcgggggctccgtaggcacggttgcagcagggtcttggaggccgaaagaaggacggtctgagctgagagaggggagttggccaggcacaggggtttcagagctttacaggattcagaaggtgcccggggttctgcagcccagtgaggagttcacagagtggtgggcgacccagcagccaggggcatcagccgtgggagtgggacgctccgggagtctgagctgcatcctgtgggcgcagcagacgctcaagggctgggtttagaggggtacgtctggaggtgcgggtggggaatgcacatgaggggagctaggagcagaacagtagcacgggccgagcacgatggctcacgccttgttattgcaccactttgggaggctgaggtgggaggatcgcttgagccccggagttcaagaccagcctgggcaatataggcaatatttctccacaaaaaataaaacataaaaaattaaccaggcatggtgacacatgcctgtagtcccagctactcaggaggctaaggcaggagaatc

SEQ ID NO: 39969 - DNA, 1193 bp, Artificial sequence
  DNA replication origin
cccagcctggcagaagcctcctcaggacacaccctccaccggaggggcaggctgctgtgtgaggcactgacctcgcccgcagtggataccacctgcccctcctgaccccagtgactgttaacccagagtccatcaggggcttggtctctggcagacccacccctcagtgcgtacactctggtgtcccgggcagagtacagggcaggcgcccccaggtgcaccccccagatgccgcactgtgcctggagcgtggctcctgatggcagtctcaggacctttgcgccacacgtcctcccgtgcgacggctgctggggaaagccaaaggcgtcccttccagcgggagccagcgactggtacgcaggagggccctcaggggcaggagccatggagccctcctctggtgtgggaattcaggggatcttagccacagggcatggcgcgtgggcgcagagccggccgtgacccacaagtgcgtgatacttgtactttgctattctaggaacccatacatcagttttccttatttgctgaaaaaggcatgcattagaggggtgattcatgtgggaggaggccgggagcccctcgatgtgaggcgtttctcatgggcgaatgtggggtatccatggtggacccccaccctgtgtggatggctgccccctgagcagtgctttgagctggagctgtggtcaggttccgcagtgcaggaagggctcccaggaggctggtggtcccgcctgcaggaagccgacgcgtctgtcctcacacattgatatgcctgtctgcctgggacggacacttcaccctggctacccatcgggccaagggcaggttgtatacacctgggctgaggcctctttctcattcacatctatctcttgctcaggagttgatctaagacaggctctaattgcaccttaataagcttgttggggaggagttgggggtggggacataacaagccctacctgccagggtatccgggtgacagtggccggtggccgagcaccccggcctgaatagctggggactaatgcaggagacgctgggaaacaagagactgtgacgttgtgcggagggagtagccaggggccttccggacagcaatgggggagcaacgcagccgtgagctggtgtgtctctccccacgctcctcctgtacctgggacgcagctcccgcaggaactggcagtggg

SEQ ID NO: 39970 - DNA, 751 bp, Artificial sequence
  DNA replication origin
tacctgggacgcagctcccgcaggaactggcagtgggagtgtgggggccacggaggtcgtagtaaccatccctgacagtgcaggggcggggggctcgcgggggggctcgcggggggctcgcgggggggctcgcgggggggctcgcggggggctcgcggggggctcgcgggggggctcgcggggggctcgcggggggctcgcgggggggctcgcgggggggctcgcgggggggctcgcggggggctcgcgggggggctcgcggggggctcgcgggggggctcgcgggggggctcgcggggggctggcggggggctggcggggggctcgcgggggggctcgcgggggggctcgcgggggggctcgcggggggctcgcgggggggctcgcggggggctcgcggggggctcgaggcgtcccatgtgggcagccgttgggacctgccaagcactgcgcctagtgatctccttcgggtttgagccagtccatggggaggagccgtccaccaggcagcctcagggagagtgggcgggtgtcaagggaagcccacggccccagctggcccccttgtgtctgagcccccatggcttcctctgcctctaggctatgcccactggaagggccaagtgctgaattcagatgagctccaggagttgtacgaaggcctgaggctgaacaacatgaataaatatgactacgtgctcacaggtaggtgccggagcaagctgccgcaggggactacgcaccccactcc

SEQ ID NO: 39971 - DNA, 850 bp, Artificial sequence
  DNA replication origin
accccaggctggtgtacggtaggcaggggcccaccctcgggtctggctgtgtggccccacacgggtggggctggcctgggagcccgggaagggacgtcttagcctccttcctcctctgcacgcctccgtgccccgcctctccgggccagtgaattgtgtctgctgggcctctgaagatgttggcctgctgaagtccgctgggctagaagcgtttgcaggtgaccctggtgtcttgtgtggctggtgtgagacaggaaggggtgtcagtgtgctcgtatagtggggctgctgtgtgaatgcctggggcccaggcagcactgttgtgtgactacactcaccctaaaggcggaaggggcaaggggccacacccaggcagggccaggctagggagtgggggagggcagggtcatacccaggcagggccaggctagggagtggggggagggagggtcacacccaggctgggcccgctagggagtggccaagtctttggggcatctgccttgatcggtctttcgttagaggccaggcagtgctggatccatcttgacgcctggcagaaggggcagcgtcaccaaaccttgcagacaggctctctctggggcacaggtctcccgggtggcaggaggacaggcctggcctagcacatggtttgccacgctgtgtactgttgcccaaaaggagagtgcttgtcggtacagacgtgtgaggcccggattgtgtgtgctcgaggccaggaagaggaagggagctgctgcacctgcttgggtgacaaacagtgatgaatagcacctcacagcaattaggatgactgtcatcaaagacacagaaaatagcaagtgtgagcgag

SEQ ID NO: 39972 - DNA, 1068 bp, Artificial sequence
  DNA replication origin
ccgcccatgcgcacaggcagggagcgcgcgccccctctgtagccttcggcctccgggggctgcagttgcgcggctcggccactgcgcggcggtggcgtgcgcctgggcggtgtcgcgggctgtgacgtcacgccacgcgccggggccaggaggaggcgggcgcaggaggcgcgtgctcagtgtgctgggtaccaggcgactccgggacagggggtctcggccgtcggcgtcatggtttcgcgcgtgcagctcccgcctgagatccagctggctcagcgcctggcggggaatgagcaggtgacccgggaccgggcggtgaggaagctccggaaatacatcgtcgccaggactcagcgggccgcaggttggcgggggtgtgggcggctggcgtctcgggggccggctgggctggtgcgggtgtgggcggcggcggccggagctgggggccctccgagccctgtggaacctccacgtggccgggccgggcaggcggggtccactggcctgttcccgctgttaccggcccacggcccccgccgccgctttccctcgtggtgcggtgactctggtccctctgcgagaacgctcctccccagccccgtaacccctttcctagctcaggcgtcccctccctccagtagaccatgtactcctgctgccctgctgtttgggcacccagtatttttccctcatggcagcatttcccactgtttgcagttttctgttttgcgttaattattggattgttttccgatttccactcgagagtacctctctgagggccgagaatctacttcttgttcatggtaccaggtggttctccgagcgtggtcccccatcagcagtagcatcccctggacatttgttagaaatacacgttctatgccgggcgcagtggcccaagcctgtaatcccagctacttggcacgtcgatgtgggaggatcacaaaggcccaggagtccagcctgggcaacatagcaagactccatttccatcgcaaaagaaaagaaagaaatgcaagttctaggatcccagccctactaaatcaggactggcatctgctttat

SEQ ID NO: 39973 - DNA, 1082 bp, Artificial sequence
  DNA replication origin
agtagagacggtttcaccacgttggccaggctggtctccaactcctgacctcatgatctgcccgccttggcctcccaaagtgctgggactacaggcgtgagccactgcgcccgacccataatgtcctactcttgcctgaaggctctgagccgttcgggtctcctggacacggagaagccacagcccagtgccacctgtccttttctctccgctgctcacaggggccgaggtctgcacacccatggctgccccaggctgcccgccaggagctgccttttccctggccaggctgtttctcagccctgcggttcccaaggaaacgggcttccaggcaagcccgggtggagttcacttttctcccaattggaattcggctgaattgaatccagcctctgctcccctcacctccgcatcctgaatttctgctcccagctccctcggcctgggtcaggttgggtgggtggtgacaccgtattctggcccttggggtttaggtcagaggtgctggggcctgtgtggggtgatcatggcactctgcggagagggagggagccaggccaggaggtcggcttggctggagacagcctggtcccactgggagccctggagcacctggagttgggctggctggggcaggaaggttgtcttttgggcacccctccaacccgtcaatcagccgtgggctgcccttccattgagatgtggggaaaaccttgatgaggtttgttcaaggtgaatgttcgtgaggtgtgagccactgcgcctggcacatgatgtcctactcctgcctctcgcctcaggcaagggtccgcaacagccgggctcagcctctgttttggagggaggaaggaaggaagcaggaagactacctgaagcccccagtaagtgcagtggagaagatagagcaaggtgaagggttggccgtgtggagggcgagtgtgcggtcaggggagggcttctttgggcaaatatttgacagaggcaaagccgggagccaagtggatatttggggcagagtggggttggcggcaggagtagccagtgccaaggccctgcaggggtgcacgggtgtgtagaccggt

SEQ ID NO: 39974 - DNA, 946 bp, Artificial sequence
  DNA replication origin
gggtggaggggaggtggctgatgggtcagtccctccagcctgggtctgggagaacccacagcaggctttgtggggtgcctggttgcctctcacagggaaagtgtcagaggggcagttgggggtgacttcctggtcagggggagagtggcaggagggcctatgtccaggaggggctatgtcatcccctagcacctgctgggcggtagggacaggttttctggccccacaagggccacacgcccaaggccaggacctgacctggggccaaatctccccagtagctcctgtgtccgttcaccacctggctgagctgggctgtgccctggtggtggctgagggtcctggaggcggaagtgcacagggcacagcagctcacccagagatcaggccccgttaaccctcagcaggagagggaggcaggggccggggctgctccacccaaaatgccacccaagtgcggcacggcccagggtgcggaagggacctggtgaccaaggccggcatgtgcccagggtgcggaggggaccaggtgaccagggccagcgcgtgagaataacatgtgtgaccgacacaggcagctggagacaggaaacgcacagggggtcggtgtccctcagacagcagagactgtcacgggccgaactgtgtccctcagacagcaagggactgtcacgggccaaactgtgtccctcaaaaatccgaacgtgggagtcttaactcccccaggatcccagctgtgactgtatttggaggtagggtcttaagagaggagattagattaaaattagattgtaaatcagcaaattgtatcttaaatatatgatctttaagtgtcacaaataccttaattaaaaaaaaataattgagaagccagaacatgaaaagttttttaagttaaaataaggctatttgggtggaccccacccaacctacctgtgtttttata

SEQ ID NO: 39975 - DNA, 1097 bp, Artificial sequence
  DNA replication origin
tcaagcatctgtttaacaaagcacatcttgcaccgcccttaatccatttaaccctgagtggacacagcacatgtttcagagagcacggggttgggggtaaggtcatagattaacagcatcccaaggcagaataatttttcttagtacagaacaaaatggagtctcctatgtctacttctttctacacagacacagtaacaatctgatttctctttcttttccccatatttcccccttttcttttcgacaaaaccgccatcgtcatcatggccccttctcaatgagctgttgggtacacctcccagacggggtggtggtcgggcagaggggctcctcacttcccagacggggcggccaggcagaggcaccccccacctcccgtatggggcggctggccgggcgggggctgccccccacctcctggacggggcggctgccgggcggaggggctcctcacttcccagacggggcagctgccaggcggaggggctcctcacttctcagacggggcggccgggcatagacactcctcacctcccagacggggtggcagtcgggcagagacactcttcagttcccagacggggtcgcagccgggcagaggcgctccccacatcccagacagggcggtggggcagaggcgctccccacatcccagacgatgggcggccgggcagagacacttctcacttcctagacgggatggcggccgggaagaggcgctcctcacttcccagactgggcggccgggcagaggggctcctcacatcccagacgatggacggccaggcagagacgctcctcacttcccagacagggtggcggccaggcagaggctacaatctcagcactttggaaggccaaggcaggtggctgggaggtggaggttgtagcgagccgagatcacgccactgcactccagcctgggcaacattgagcactgagtgagcgagactccgtctgcaatcccggcacctccggaggccgaggcaggcagatcacttgcggtcaggagctggagaccagcccggccaacacggcgaaaccctgtctccaccaaaaaatacgaaaaccagtcaggcgtggcggcgcgcgcc

SEQ ID NO: 39976 - DNA, 1260 bp, Artificial sequence
  DNA replication origin
ccgtgacacaacctcgggcaagtaactcaagccctgttgtgtcagatcacttgtttacgaggtcaaagtgcggaggggatgggaggcaggtgtatcagtcacgtgtctacggcagggacggaacagattactttggtgaatgctctttttctaatttccaaaataaagccattactttcagtttgcttccccagtcctggcacacagacgcgcgtccaggcgcagggtgtagctccccagcgtggagtctgcactggggccccagcctggggcggggcagcaccctccctccaggaaggcctgttctagaatccacactcctggggactttcccacccggccacactgcctttaacccagcagtcttcaggctgctgcagcgcgtccccctggcagatacgccaggacagggccacgcacaggtagggtgaccacagagggcggccactccatgaagtcaccttcagaatatttaaggcccctacaccttctaaggccaaggggccctgttctgtctgaatgtcaatggcatgcagctgctttttagacaatgtcctcaagaagatacttaagactaaccagaaatggatacaagaagcgagttgtaacaggcacaggctaacgccgaactctgtgggggaggaggattggttggaaagagggagggggggcggcaaagaagtggccaaatcaagagagtgctcagcatcctcgggagacccctctgaagctttcaaactgagaagacgaagttcagcaattcctaagcgagtcgagtcggagcagccgcgcctgcaatttaaaagctgcaggatcctgggtccctctagcagcctgggcccgccgcccgccccacctcccagcccccagcaggctctcggcgttggctttcatttttaataagagccgcatgctcatcaccctctgtctggaggccaacagcccacatctttcttctactaagatcatgtttcccaggaaaaagaacccaactgctcaagtattctcctagacaaagcttttaaaattgtgcttttttttttttaaaggtctgggaagccatttataaaagcattttccccatgtcactaaacttctctcaaagttaaaaaaaaaaaaaaaaacactgcaccatttttaactgccttcaaatactaataaccctcctttcctaagtacttgggaccaatgttccaagggtcctggggtggccaggagtgggttttcgcccccacggctcttgcccccggactgacccca

SEQ ID NO: 39977 - DNA, 1418 bp, Artificial sequence
  DNA replication origin
gtaccgctgtcagccttcttgctcgtcacctccatccagggcacatccgcccctctgggtgctgtgagcctgttgccggcgcggtcccgctgctcctccttctgctgccctgcactgccgtggcacaaccctccctccgggtctctgctgagccctccaggcgctcaggtctgccgtctggttgcaggtgttttatagagtgcagctttacgctcccactccagtcatctccacgttggtgtccgtctgtgtgtcctctctgcctttaagttctgcctctgtgtgacacagtttcacagtttctgtgaccaaaacacaggtttagtcgcttgctgctggcagagtccaattaacaagagcacgtcgggtataaagaaagtgactttattccaaagctagcttaggggaagaggtaaagtgagggtaccactttgcttttggagcagaaagtgggaacttttaaaggtggggggatgtgtggcacacaggggaggaggctggcaggtgggggtccgcataactcgtttcgctgccttatctaccgggtggtcgagttggcatcttccccggcagaactgtgttggggtgttgtgggtattgtgggtattgtgggggttgtgttgtgggtgttgtgggggttgtgggtgttgtgttgtgggtgttgtaggagttgtgagtgttgtgggggttgtgggggttgtaggggttgcgggtgttgtgggtgttgtagggggtgtgggtgttgtgggtgttgtgggggttgtagggggtgtgggtgttgggggtgttgtgttatgggtgttgtgggggttgtgggtgttgtggatgttggtgttgtaggggttgttggtgttgtgggggttgtgggtgttggggttgtgggtgttgtgggtgttgtgggtgttgtgttgtgggtgttgtgttatgggtgttgtgggggttgtgggtgttggagttgtgggtgttgtgggagttgtgggtgttgtgggagttgtgggtgttgggttgtggaggttgtgggtgttgcggcggttgtgggtgttgtgggtgttgtaggtggccagaactttccaggtggagagagttagttcataacagcactttgggtgtggatcaattgttgtctctagaggtagccacctggtggctgagggttcccctggagctcctgagcacatggttaggtgagcttgccccatcggcagtgtccagtgaatggaagggaaaagggtataattgcatttctaaagggctatgtaggaagtggggaacagggggaaatggagacaagagaagagaagagataaaaataatttagaaacagaaaaatgggggacacttggttacattttagctttgtgtgtctctgtaaatctagcaatctggcagactgctggcttttttttttttttttgaga

SEQ ID NO: 39978 - DNA, 887 bp, Artificial sequence
  DNA replication origin
gtggtcctgggcaggattattttcagaggcagtggagctagcggggcagagctgtgctgagcgctgagggatcatttgtgtaaagcacctgccactgagtgtgacctcagggttgcccgtgcgacctcagcgtggcccatgggacctcgctgtggtgtgtctcagcaacatcatctttcttactgtccctgttctctgggcctctctcagaccttggggacagcaagctctgccccgtgaactcagaggctgcagctcctgattgtgggtgtccacagtgggcaggcctggcggggtgagggtgggtgggtgtttctgtcgggatgaggggaaggcggggatgaggtgggggtgcacacctgggctgaggggagcagagggaagcagggcttgctggcacattcccagggggctgctgtagggccagtgtcccctcctggggtggcaggaggtggctcctcacggtggccggggtggcccacggcaggccagtgtgcggtcctcaagctgctggtgacaaacgcaaggggcctgctgccctgtcccctcgggcgggcgccacttccttcctgcatgttcctgttccgcattacagattgtttttatggcccccactacgtgagatcctggggcaggggctgtgggggctctagagtgggggtgaacgcacgtctgaggctcatcagggactcagcgtggggccctggggtgggtttgccattgccttttctcgagggccccgtgactggacagcccaactgctctccaggtcagttttcttgtccagacccggggtcagggcggacactggatgagggggagtgtcagtgagggaaacagagaccttttagaaatgatgtcacactgacacctgtgtgctggacctc

SEQ ID NO: 39979 - DNA, 2170 bp, Artificial sequence
  DNA replication origin
tcaggggttggcagcaccgccagcctgactgccagggtttcccctccacacggggggtctcgggtttcccctccacacggggggtctcgggtttcccctccacacgggggtctcgggtttccccctccacacgggggtctcgggtttccccctccacacggggtttccccctccacgcgggggtctcgggtttccccctgcacacagggatctcgggtttccccctccacacgggggtctcgggtttccccctccacaggggggtctcgggtttccccctccacacgggggtctctggtttccccctccacacggggtttcccctccacacgggggtctcgggtttccccctgcacatgggggtctcgggttttcccctccacactggggtctcgggtttccccctccacacgggggttgtagggccgctcagtaggagtgctgccaagagtggaggggggccaccggcttccctgctgaaactgtgagacgtgcgtagaaggaaagggggagccggtggagcccctggggagtcgctccttttgtgcaggaaaccagaacagaaatctttcacgcttcaaatacgcacacgagtgtgggagtgaaaagcattgattcccacactgaggggtttgtgaggcctcctggctctgtttgcagagattgattgtgcagtttggatcttttaaatgagatactaaatcaaataaaaattatgatgccttcaccacaagttaatcactatcaatatttgggtgtatttcttctagtcttttcgttttttctttctggtttgcatgggagagtgtgtgtgtgtgagtgtggcatgtttatgtgtatagtgcttgttgtgtgtgtgagactgtggtgcatatgagtgtgcatggggtggggggatgtgttgcagtgtgtggtgtgtggtacaattgtgtgtgtgtggtgtagagtatggggctgtgtgcagcagtgcgtgtgggatgtggtgtatgtgttttgcactgtggtgtgtgtggtttgtgctacagtgtgtgtggtttgtggtatggtgcttgcagtgtggtatgcaccatatgtgtgagcgtgtgtgtcgtttttggtgtgtggtgtaggtgtggtttgtggtgtgtgtggtgcgtgtggcgtgtgtgtggtttgtggtgtgtgtggcatatgtgtggtttgtagtgtgtgtatgtggcgtgtatgtggtttgtggtgtggtgtggtatatgtagcatgtgtatggtttgtggtgtgtggtgtgtatgtggcatatgtgtggtttgtgatgtgtggtgtgtgtggcatgtgtgtggtttgcagtgtgtagtgtgtgtggtttgtgatgtgtgtgtggcatatgtgtggtttgcagtgtgtgtagtgtgtgtggtttgtgatgtgtggtgtgtgtggcatgtgtggtttgcggtgtgtgtgtggtgtgtggtgtgtatggtgtgtgtgtgggtggtggggtggtgtgtgtgtggcatgtgtgtggcttgtgtgtgtgtggcgtgtatgtggttttgcggtgtgtgtggcatgtgtgtggtttgcggtgtgtgtgtagcatgtgtgtggtttgcagtgtggtgtgtgtggcatgtgtgtggtttgtggtatggtatgcgtggtgtgtgtggtttgtggtgtgtgtgtgtcatgtgtgtggtttgcagtgtgtgtgtgtggcatgtgtttggtttgcggtatgtgtgtggcgtgtgtggtgtgtgtggtttgcagtgtgtgtggcgtgtgtggtgtgtgatgtgtggcatgtggggtttgtgatgtggtgtgtgtgtggtgtgtggtttgcggtgtgtgtggcatgtgtgtggcatgtgtggggtttgtgatgagctgtggtgtgtggcgtgtgtgtggttgtgtgtgtgtggcgtgtgtgtggtatgtgtgtggcatgtgtggtttgtggtgtgtgtgtgacgtgtggtttgcagtggtgtgtgtgtggtttgtggtgtgtggcgtgtgtgtggtttgcagtgtggtgtgtgtggcatgtgtgtggtttgtatgtgtgtggcacgtgtgtggggtttgcagtgtgctgtgcagcatgtgtgtataagcgtgaggcatgtgcggggtgtgcagtgagcagtgccccggtgttcctgtgagggtgtgggcgtgg

SEQ ID NO: 39980 - DNA, 1058 bp, Artificial sequence
  DNA replication origin
agtgtaagtcatcaaaactcatgtttagcagagacttcctctctggacaaaaatactgtaggtgtctcctgtgggcgctccctgaccatcccaggaggaggggtcctaccagtgccaacgccctccccctgtccgcagaactggtcatgctgctggagtggtggtcctgcacggagtgtacactgttcacggaccaggccacggtagagcgctttgggaaggagcacgcagtcatcatcctcaaccacaacttcgagatcgacttcctctgtgggtggaccatgtgtgagcgcttcggagtgctgggggtgagcggggacctggggagggccacgggtgagcaggagggtcccggggagggccgggggtgagcggggacccagggagggccggggtgagcagggggtccctgcagggctgggggtggggtggtgactgggagtgagctgggcggggtcccaggagggctggggatgagcagggtggggtggtcctggggagggctgggggtgagtggggggtcccagggagaggctagggtgagcaccttccaggggaggtgctgggagtgagcggcaagggtcctggggaggatctgggggagtaggcgggtgctggggtgagcaagagggccctgggtgggggaggtactgggtggagcagtgggggtcccagcagaggagctgggagagccttgggtttcccagggaaagggctaggggagcaggggactccctgaggaggtgccggggaggcccctggggtccgagtccctgggtgttcctcctggggcgtctctttgagctcggcagtggtgcctggctggttgaggggccctggcccgcagggcctcagctgtccccgagctgtgccctcctttctcatcatggcctttgcctttgagatgaccccacctgcgtccctgcagaaccacttccgttagctaagctgcctcagatgaaacctaaactactccccgatgctggcagaagaatttcattgcagtcaaagcccctgtgtgaggcagcacccccaggccaccccccggaagcctggca

SEQ ID NO: 39981 - DNA, 1017 bp, Artificial sequence
  DNA replication origin
tggtatgtgtgtataaattataaatgtgcatgtgtgtgcaaaatgggtgggtttggtgtgtggggtatgtgtggtatagtgtgtcatgtggtgtgtgtgtaaattatatgtgtgtggtgtgtgtgtagtgtgtgtatataaatcgtgagggtggtgtgtgtgtggtgtgtgtgtataaattatgtgtttgatatgtgtggtgtggtgtgtataaattataaatgtgtgtgtggtgtgtgtatatgaatcagggttggtgtgtgtggtgtgtataaattgtatgtgtttgatgtgtgtggtgtgtacgacatggggctgtgtgtgtcagggaccacagccagccagtgtgggcctctgggcaggcccctcccctcactgtagacaaagaagcctctgcgcctcggttgttcctcacatggcgtctgtggcaaatcctccccatgccagttgaacctggggccaatgtgaagctgcttttatttactgggacgtgatgttgtcttcatagccatctgctcaccagcatgcggcagaggcttgtgaacactgcatgtgtgctggtgtgtgctgtgtgctgttgtgtactggcgtttgctgatgtgtgtgttgtgcactcgcatgtgatgtgtatgtgctggcatgttgcatgtgctggcatgtgccagtgtgtgcactggtgtgtagtgtgtgctggcatgtggtatgtgtcgaggtgtgctggtgtgtggtgggtgctggtgtatggcatgtgctaacgtgtggtgtgttctggtgtgtgctggtgtgtggtaatgttttggtgtgtgctggtgtgtggtgtgttctggtgtgtgctggcgtgtggtatgttttggtgtgtgctggcatgtagtgtgctggcgtgtgctggcgtgtggtatgttctggtgtgtgctggcatgtgtgtggcatgtgctggcatgtgtcggtgtgtgcactggtgtgtggtgggtgctggtgtatgacgcatgctggcgtgtgcttgtgttgcaacgagac

SEQ ID NO: 39982 - DNA, 1707 bp, Artificial sequence
  DNA replication origin
ctgagcggcgccgcccgcccggccgcgccaggcagctccggagccggttgcgccgcagctgccgcccgctgctgccggcctcagccacttccggcctcggcgccgccgcatgaccatttccggggcgcgcgaggcttcacggggcgggtcttcgccgcgcttcgcctccgacggaagtgcgcccgggccggccgcgcgggaccgggaggtgggaagtgggaggcggagcggggctcccgggacacgtccatcttcctccctcggcagtgggcgccccgctgggccctgcgccggagctgaggccaggactcggcaggcgggcctcgcgcgcggtgagcgagcctggacgctcccggaccagagacgccggcctcgctgccctcgcgttccccgcagctcgggcgtcccgcggcgggccgctgctccccggccgggctccttatcgcgctgggggctcccgcaggccctcgccgctgagtgtccccggcgcgtgccttccgcctaccgctgggctcttcccgtttccctcacgccgcaaatgtttttgtggggacctggccctcggcatttcggaatgccacaaaataaacctcacacttaactgcatatgggcttcttgtgcacgtaaacggggggggcggggcgcgggtgtttctttttctttttttctttggagcagggtcttcctcagttggctcaggctggagtgcagtggcgggacacggctcactgcagcctccaccttccaggctcaagcgatcctcccgccttgtttccccccgccccaccccctccgccagtaactgggaccacgggggcagccaccacgcccagctaatttttttcttttcttttcttttgtcgggatctcactatgttttccaggctggtttcaaactcctgggctcaagtgatcctccagccttggcctcccaaagtgttgagattacaggtgtgagccatcactcccagccataaaatgacaaaaactgtcaaccaaaaataatcaaaagggtcagaatctagagtttagtcaaatgcgaagcttgaggcgcccaggaaacattataaagaatggaagtcagtgttctcaaacgtagaaatttggggtcgtttctatagccagcgtctcgggaagcctaaccgaatttcagcgtcttttctgtataaggcctaatgcatagttacaacagtctgtttagtcgaggtggtctttttctttggggacccactgaagatgaaacagtcctggggtctctgtgctgtctggtctaagtcaggtacaggacaatggagacagctaatctgtaacaaaaatcaccaaatgggaagggggagacctggtctttcttagtcattaacagcagcagtccccaacctttttggcaccagggaccagtttcatagaatgcagtttttccacagacaaagttggggtggtttcaggacgattcaaacacatttcatttattgtgcactttattatttttatgttgtaatatgtaataaaatacaacttcccataatgtggaatcagtgggagccctgagcttgttttcctgcaactggacggtcacatctagggatgatggaagccagggacacatcattagggatgagattctcataaggagcacgcaacctagacccctccaatgtgcagttcacaacagggttcaccctcctaggagaatccagcgctgctgc

SEQ ID NO: 39983 - DNA, 1064 bp, Artificial sequence
  DNA replication origin
gccggacgcccatggacgcctctgaggagccgctgccgccggtgatctacaccatggagaacaagcccatcgtcacctgtgagtgcccggaggcggggagggcgcggcggtcgttgggcgggcccgggccctggcgttatgcacccggcgcccccagaccttcagcccccggcgcgctccgggctgggccgcttcctggaggtgtgaccagggctgcggctgaggcggggccctctgacttttcggggacgccctctgaccttcccgccgggcgacctctgacccctggggggcgccctcgggccggctgcagttggagccggtggaacccggcggactctgcccgggactgggcgcgcgccggcgtcgagggcgaggagcgggggctgccaccgccccgtcccgcccccgttgagccgcgcgcccgggacctgggggccccggcctcttccgccgggcggttttgcccgcgggcgccctttccccgactacggggaagtccttgggggctcgcagagttgcaggcgttggcgaagtaggaacagtttgttgcggggtgaagcgtcaggcagagccgccgggactgctttcgctcctacacacttccccgccgcgcactcaaaccattttacggatgagaaagccgaggctcgggcgcttaggcgagcttgctccccatgaacagcctcccgctcgagtctacactacggacacctggtgcctcttgggtgtcgtgtcctccccgcacccctcctttaatgcatacacaaaggaactgtttttctgttacgggaaaaatgttccctaaattttagaagtgtgactctccagagttaaatacggttaagaacagtgagcttatgggaagtattgaaatgtttgttggttggcttttaggtgacttgcagagaggtgtttcagactgttacgatttttgacctttgacagtattctgtattttcatgcatgtatgcagttagtttttttctagttgtctttcgtgcttggaaaggaagcactctctgttgcaaaatctgggtgcccaggccacagtagactgtatg

SEQ ID NO: 39984 - DNA, 1363 bp, Artificial sequence
  DNA replication origin
tggtctttactttttaatgtgcagtaatggagatcagaaggcaatcacctgttgccctctcttttcattttctcattcaacaaaggttactgagcacggacaggtgccaggccctccttgatgctgggacgccgtcagtgtacagttttttgtgagcttgtgtgacagtggaggagatacaggaaaggaagtgacgcatatgctagggcgagagagaggcacaaggcagagatggtgtggggtgctgtgcgggtcaggaggaggaaaggcctgactgggctggggacttagccagagctgaaggagtttggagagcaagccatgtgggtgtatagaggaagaggaggtgttccaggccatggagtggggcagcgcacaggtcccgaggcagctccctgccacgcacacgtgagcagcggtgaggaggccttggtggtggagctgagtgaggccagagggctggtgctgggaaggggtgggggtgggggacatagattttgcagggcctggggatgtctcgaaaggatttaggagtctcttgaatgtgatgagcagtcgctgactgaaatggggaagaccgtgggtggagcactttgtgggaaaggttggggttcaggtttccatgtgtaagcctgagctgtctgttaggcatccacacaagcgtgctgtgcctgccattggagccagagtcaggtctgagctggagtcctgaatgtgtggtggtcatgctgtgtagatgggctccgtcatggagagggaatagtgagtgtagacagggaagtccaagggcggagccctgcggcctccagcagagagcctcggggagcgagaggaaccagccgtctgaccagagggagccacagtgaggggcgaggggagcaggtggccaggtcctggacagcaggaaacatcccaaggacaggggggtgaccagttatatctggtgctgccgataggtcggggagggttcagaaattaccttagcttttcctagcttcttgtgcatgcgtgaatgttgacatatgcggtcgtcacattggttgttacttagcggagcgtagacattattcatagtgctgcgtgcctttctctgtcgtttaatggctacatactgtttcttctatacattgatttatgtttttgtttttttaaaaaacgtatcttgggcgaataggaggagcttgcctttgttttcgagatgctgcagcagttcgaggacgccctggtgcagtacgacgaactggacgccctcttctctcagtatgtggtcaacttcggggccgggggtgagtagtggcacttcagtaacgcatgcttttcttagtgtggctttctccaacttcagataggcttgaagcagcca

SEQ ID NO: 39985 - DNA, 1586 bp, Artificial sequence
  DNA replication origin
gctggagcgcgcctaagaggcgccctgcagtgtggctccggggtgtgggcggggcccggagaaggcccccgccttgggaggggttgggcctcgcgttcaaactccgcctcggggcggggcgagggcgacgcagctcctcctgcctcctgggccgctgcggacggtggtgcgcgaccccgtcccgggcgcgcgcgctgtgggcggtgcacgccgtcgcttcccggaagtgcgtgctgtgggcggtgccgcgcggacccccgggaagtgtctctgtgggcggccgccgggttgagctgcggcacacgtgcgacggccgtgatgaagttcgcttaccgggtgagcgcgggcggcgggcggtctgttggatcggcgcggctcttccggtggacggcgcctgagctggctccgggcgggctgggggcgcgtggtctgcttttgcggcgtctggccgcgtgggggtcgccggctgtctgcgcgcccgtggcctcggggacgcggggctgtggtggggctcctgggagagctgggacggaggcgccgacggcttctcggagggaacagggacatttgtcggggtcccgggatatttttaacctgagtatggcccaacctaaaggctggagttggtgcagtcggggagggcacagcaccctcgggagggatgaggaggtgggacggggcggggacgcgggcgcgcgcaggcggggtgagaacagcagggacccggggcccgggactggtccctaacgagcgagcgtccaggtgagcggaagggcggggaacccaggtgtgagctctgtttcccgaggccggagggaattcctgaggcggacgccctcagctttgagagccagggaagacttgtcccagatgtgaagtgcaggaggcgggtgagacaggtaataagagggggccgtggagccggcctgggggtctctgaagcgtttgctacagctggccggttatggggacgcctgtgtttcccacagtggccctgaccgttgcgcttccagggttgcacgggccgcctgctgctgagcccaccgtgtactacacttgtcctgtccgaaactgggcatggtactggcccctcagagtgctgctcctgtgtcccctgtgctggtggagccaccgctgtgtgcccagcaccaaaccagaaaccatatccacgtcctcacaggccaggacttcatccgctccacattcctactgcaaggtggcaaaaaatgtgccttggagcctgcctggccgcttaaagtccttctgctgaccaagctcctccctgaggtcctgagggcgctgcccactcacagcttcagggcctggctggtgccttcccatttagattccagctcaggtgacccttccaggtgcctctccgtgaccaccgtctaaagtagcccctgctcccacacttctcatccccctcctgctagagagagaatataaggtgtgcgtgtctgtgcgcatggcagtctccagtgaacgctcgtgctcgtgagttagtaaataggatgctggcttaccacacttctggaagccctgagttctaagcacttttggggtgctgttccattgttgcagct

SEQ ID NO: 39986 - DNA, 1364 bp, Artificial sequence
  DNA replication origin
tgggcgggtactgaggggaccagtgaggaggactcagggctgtgtgggtctgaaatgatccgctccccagtcgcctccgtgttggggcccgggtggggattggggatgagggtgtcatgggcgaggctgcgtccccgccgcaggctgtgtctgtggcatcacctgtggcagggcagggcctcatggcccttgggcattctcagtcctgactcctcacagtggacgcgagaaagacctttctccgtttttcccgtgctatgtatctggggtggcccctggggtagctgcgcggtggtgacctctggcgtcctgcagggggcgatgcgctgctggtcagcctggtctgcaggtctgtgctgcaccacttccacttcaagggctctgtgcacagtgtgtccttctcccctgatggcaggtaagggggacagcttgggggcaggagggttcggccgtgcatgccgacggtgaggcccactgcccagctcgtttccctgggccccgggttgtgacgttgggttgggcacacggcccaagctctggcattggtgacccccttttctggaggagaaggcttggtgcggccaggctgccctccctccagggctgtttcttccctgacttttgcttcctctgctccttggcctccatcctgcaggaggcgggactccagaaggcccaggtgggtgcaggctgagactccacagtggccttagggccattgctggtcttgaatatcaactatgtccgcgttccttccataggaagtttgttgtcacaaagggtaacattgcccagatgtatcatgcccctgggaagaagcgggagttcaacgccttcgttctggacaagacctattttgggccctacgatgagaccacctgcatcgactggacggatgactccaggtgcggcctcagaggcttcgggggagcggggcttgagagaggccccttggacaggtcacccccttgggccctgcagcttcgttccgcaatggcatctcggcctcctttggggctgggcgctgcccacaccatcaggactggctgggtggctgtggtcgagtctttgcggctctgaagtgtgtgctgtggccgagcctcctgcccctgcactgccctttcacctgtttgtcccagaaactgggaatgctgtggttggctcgggcagcgtctgggaggagttaggaaggcagacagggcagggacagcgtctgggaggtgtgaggaaggcagacagggcaggggctgtgccggggtgtcttcctgtgcctggaggcgtctcagctcactctgagaccacgtggggctgtagcggtctccgtgcagccctctggagcttgcacctggctgctttgttatggc

SEQ ID NO: 39987 - DNA, 1500 bp, Artificial sequence
  DNA replication origin
atgaggcccccatcctctctcctgacactcccagtgcagtggggagacagatgacaaagctgtgatacatgtgtactcacagacctcgagatctgtgcagcgagtggcccagggacccctcctcagccagggcgtgctgggaagtcctctctgcagagtgatgctgagagccgagagacaaggggagccagtaatacaaagaggggggctggtcgtcccaggagggagggatggaaggtgtcaggaccagatgtggggagtaggcatgaacccggtctaggcacaggagaggaagggggtggcttggacatatttggaggcaaaacccatagctggcggcagagggaggggcagggagaaacaggtggctgggaccagtttctcatggggatctgggcacatgatggcccccaagacagagacaggaagaagtacgcgtggggggcccagtctggatatgctgagtgggcggtaccccactccaagtgtagtgcacagagaagggctggagttacaggcctccttgggcaggggtctgagacagcaaggagctcagggggagaaagggaaggagcagccttcaagagagcctggaggtcagagcggaagacgtccatccccaggtaatgagggactgggagggacagtcagaccaggtctggggagaagaacaccaggaaggaagaacaggtgggaatggagaagcagctgggagtggtgggggggttgggggttgagtgtggaggagctgggagtggtaggggtgctgggggttgagtgtggaggagctgggagtggtgggggagctgggggttgagtgtggagcagctgggagtggtgggggtgctgggggttgagtgtggaggagctgggagtggtgggggtgctgggggctgagtgtggagcagctgggaatggtgggggagctgggggctgagtgtggagcaggggactgagtgtggagcagctgggagtgctgggggagctgggagtggtggagaaatggagaatgaagaaaggattatcagggaatggggcatgtccacaggtgaagctctggtgacctggacaggaggtgaggaggtaccctggaaggaaacaagagggacagggcaaaggggtggggcatgtggagaccagagagggcttcaggagaggatagcccagactctgatggcaccaacaggaagcagcttggtgaggggccgcctgcccgtggtcagccccaaagacagttctgccacgccccctggtggcagcacctaaagccacaaccacgttccagggtgcacagcctgtgggatgcagaggcctctgggatggcaggacgggctggtcccgggaaccatgcatgtcaccagcgcccctccctccccacgccctgaccttgaacccctggttagctcctgttcccactggaccccttgtccccttccttgatcactttatgcatgcctggcactgccatcctccttcccagcatgtccacacccccaccac

SEQ ID NO: 39988 - DNA, 767 bp, Artificial sequence
  DNA replication origin
ctggcgggcgggggtgtgcgggggtgatggtgagggaggccgtgcatgcgtgggggcagggagtgtgtgggactctctgtaccttctgctccattttgccatgaagctaagactgcactagaaaataaagtctatttaaaacaaaacagaaaaggtgatgttgagggagccctagaggaagacgctggccagcagtaggtgggaggggcctgggagagggcgggcaccaaggtgggcgtgtcaggtccgtgagccttgggcctcgcagcacgcactggcctgctcatgcccagagcccaccacctcagagcccgggcctggccggggaaggtggagggcacccatgaggcccccatcctctctcctgacactcccagtgcagtggggagacagatgacaaagctgtgatacatgtgtactcacagacctcgagatctgtgcagcgagtggcccagggacccctcctcagccagggcgtgctgggaagtcctctctgcagagtgatgctgagagccgagagacaaggggagccagtaatacaaagaggggggctggtcgtcccaggagggagggatggaaggtgtcaggaccagatgtggggagtaggcatgaacccggtctaggcacaggagaggaagggggtggcttggacatatttggaggcaaaacccatagctggcggcagagggaggggcagggagaaacaggtggctgggaccagtttctcatggggatctgggcacatgatggcccccaagacagagaca

SEQ ID NO: 39989 - DNA, 1364 bp, Artificial sequence
  DNA replication origin
caaagccaactaaaatggtagggcagagggaagttttctgtaaatgccactggagaaagtatcacacggccctcgcggtcccaggggctgggccagggcaggctgtggcctcccagggagttttacagatgctggatcacaggggtgggcccatgagaagcgggcggcgggctcctccgccctcagacttgcaagcacggaccacggccgcctatgctggcaagaccgcgatcatgctttttcatttctcagggttcagtaatctgcctgcatctcttctccagcagcagctgcacattacgccatggggcatcaactccgaggagcgcttggcacgcgccttcctcctcccagcctggaatcatcgcccgggcccttccctctcagggcggggacctctctagggaaaggaagggctttccagggcagcccctccagcctgcatctcctgggagggccccagagagggcactgggcagcttcacttcaaatcgggggcattggggctgagcccgaagcaggagggcagcaagggtcctgacattgtggacttggccagggaggggccagtccctctcagccacccacagctacctgtcccgagagtgtgaggattcgggtctttggtgggctctggggaaggggctgcaaggaagcgggcccagaacctggtgctgaggcccaggacccatgcagggacgtggggcaggacagagaggggcagggcaggggcagggacaggggcagggatgcgggataggacaggggtacggacagggatggggcagggacgcagggcaggacaggggcagggacggggcgggacacgggacaggacaggcgcaggggcagggcagggatgcagggcaggacagggatgagggcagggacgtggggcagggacagggacgtggggcagggacagggacatggggcaagacagggacggggcagggacgtggggcagggcagggagaggggcagggacgtggggcaggacagagaggggcagggcaggggcagggacaggggcagggacacggacagggcagggatgcggggcaagacagggagggggcagggatacgaggcaggacaaggagggggcagggactcagggcaggacagggcaggggcagaggcaggacagggacggtgcagcctccgctgctgccctctcggggagcctggctcccaccctcacccagccactgctcctgggcacagagctgaaggggaactggaggctgcggcgttcctctctccgttcccctctctctggtgactcgtgataacgaaccgaccttttggagacattctgtgccctcaacaaaagcggcccctgtctggaaacccccccgagg

SEQ ID NO: 39990 - DNA, 726 bp, Artificial sequence
  DNA replication origin
tgatctccgtgagccaggatctcccccaggatccctatttcccacgggcttttggcaatgggctgctcaccccctccttcccctcctcctcattcatctgccatctgtgaaatgtggaggaggggcctgccctgtgccaggatctgtgccctagacacttccccagccaggcccaagggctgagcgtgaggctggcaggtctgcacttgaggtggatggtgagggtgccctcgcccacctgcagccattgtctgctgagtacctgtggtgcagatggggatggctgcaggggggtctcagctcacgcagtattgcggccatgggtgctggacattggtaggtctctctgagcagagcccgatggaagtgagaagggcgtgcgttaggggagcatttggagagggagccacgggtacagctgccctgcaagctccagcgcccatgggaaaaagggaccgagggggagaggggaggggatagggggaggggaaggggatggggcgtcggtggttgcttgggctcttagggtgggggtgatgcctgcagtcttggtgttgaagggaagaccagggaagagggaaggcaggaggcctgggagagaaagggaagagctgttgggtgctggcggagtggagcgggctcttgcatcactccatcccaggctccaccctgcctgcacctggaggcctccctcacctggctcctctgtgctccagacccctcccc

SEQ ID NO: 39991 - DNA, 1982 bp, Artificial sequence
  DNA replication origin
aagtaatccatcaacctgaagagaagcccactgtccttcacctttggaagttcctacccaccatgggtaagatttctgcatggagaggccctgctcccccaacctctctcttgagtcccctgctcagctggcattccccacctactgtggaagaacattctgggtttctccgtcagccccaggcccaccccttggggagatgactggtgacttacatgtgtctgtctctccagctaggcatggtgccacagcaaggggtgtaaatactgcaggccacacattcccggcacccaggacaggagcaaacaaaaggatagatggttggctggctggatggatgaatggagggaaggagggagggatacaggaatggagggatggagggatggagggagggatgacggagggagggatgggtgggtgggagggatggatagatggaaggatggaaggaggagggatggatggatgaagggagggaggaatggatgaatggagggagggagagagggagggatggacaagaggtagggaaggatggacgggagggaagaatggagggagggatggatggagggatggaggaatggatggatggaagggaaggatggagggatagaaggatggagggagggaggaatggatggatggagggagggatggatggatggaggtagggagggaggaatggatggatggatggagggatggatggatggaggtagggagggagggatggatggatggaggtagggaaggaggaatggatggatggatggagggatggatggatggaggtagggagctagggatggatggagggagggagggggtggatgggagggagggatggatggatggagggagggagggagggatggacaggagggaaggatggatggatggagagatgagggatggatggatggagggatggatggatagatgaagggaaggagggagggagggatgaatggatggaaggatacaggacacaaggtcataggtttgacaaatgtcacctcctcagaagcctccctaacactcacagtttgataagtcccctgtttgattctctcccagagcccaggtcactccaacactgtctggtttacctgccttctgcatggcttgccctctgtctccaattcctggaacaggtcccaccacctgacacctgacatctgtcagggacacatgaatgtggaatggatggatggatgcctgtgaatgaatgtgggatgagtgaaaagtgagtgaatatgggatgaatgaatgagctagtgaatgtgtgatgaatgtgtgagtgagagaatgtgggctgagtgaatgtgggacgaatgagtgagtgaatgtgtgatgaatgtgtgagtaagtgaatgtgggctgagtgaatgtgggatgaatgagtgagtgaatgtgggccgaaagaatgagtgagtgaatgtgggatggatgagtgagtgaatgtgagatgaatggatgagtgggtgggtgaatgtgggatgaatgggtgcgtgaatgtgggatgaatgaatgaatgagtgaattttggatgaatgagtgagtgaatgtgggatgaatgaatgagtgagtgactgagctgaatggttgagtgaatgtgggatgaatgaatgagtgagtgactgaaatgaatgggtgagtgaatgtgggacgaatgaatgagtgagtgaatgtgggatgaattaatgagtgagtgaatgtgggctgaatgaacgagtgactgtgtgatgaatgagggaatgtgtgttgaaggaatgactgaatgtgagatgaatgaatgagtgggtgaatgtgggatgaatgagtgagtgaatgtgggatgaatgaatgaatgtgtgatttgggatgaatgaatgagtgaatgtgggatgaatgaatgagtgagtgaatgtgggatgaatgagtgagtgaatgtgggatgaatgaatgaatacaaagcccccccaccccccaggtgc

SEQ ID NO: 39992 - DNA, 1068 bp, Artificial sequence
  DNA replication origin
gtggcctggagctgtggcctccccaggctacggccagacccaccaggaggaagccccttgcaggctctaaggttaacgccgccaaaccaagtcctgatcctgagaggctggctcaggatgaggatgggcggtggtgtcatgcacaggcacctgaggtccctggctgctgtggcacggagaggcccccacggaaggactccgcaggtgctggagctcgctccctgcatggacagctgcagcctgggcagggataggggagcaaagctgcaggcccggctcatcatggaaattcagaccggtgagccatggaaggacatcgccaagtccatgtagggtgagctggggacagcatggggagtgggaggggggacagtggggagaggggagagcggggtgagctgggtacagcatggggagggggacagtggggaggggggagagcggggggagcctggggacagcatggggagtggtgggggtgggggaaggtggagggagggcagtgcatggaggacagtggaagagggaggcagtggtgacagtggagagggaagacagtggggaggtagaagggaggagggtaggacagtccagcccccattggcaggggcagctggggagagcaggccccgcctttgtgtgccccagggcctgggcctgcctggttaagagtctgcacactcctagagctggagcttctcaatgtcgctcttggaaggtgaccccacactccgctggggataatgcagggggcccaggggtcctccctgggaaaagtgtgctgtgccccgccatagggttcgtggcagaagcccctcccctgagctcaggcctcacctccggccactgaagacaaggagatgcagagaggaggcctctggagtcttgccccttacccctgcacccctgcagcacaggcagggtgtggtggccgtcttggaggcacccgggcctggacagctattccaaagccatagctgccctccccagggtgggtcgcttggtcttaggagcgtccaagctgcagagcccagtagacagaacctggatccagcgcctcactttaca

SEQ ID NO: 39993 - DNA, 1471 bp, Artificial sequence
  DNA replication origin
acgcggggcctgcggggctcgcctggaggtgccgggctggcagtgcgggtccgaggagcgggcggcggaggcgccggggcggccggcggggcgtggacggcagtgggcggcggggcctggcaccgggacccatggcaggacgcacagccgtgcgggggcgggctcgggggcggggtccctgccagggaaggaggaccgcgaacgctggaaggagggagggaaggcgggcgcaccctgcacgccggggcacgggcgctgccccttccactccctggcactgctgatttcctagaagaagggagaaggagggaggtgaccggccgagcgctctccaaggccagctggtgcccacggtctgcggacacgccctcccccacacacgtgggattccccgcagcccggcagccgatccacactggggaaggcggggctgcctgaaccaggagtgacagcttcctcctggatttttgcgaaaatatccaaaatatactcttcgcaacccacgttgtagggtccgcagcctgtgctcccctgggtgaacctgtgaggcccctgaccccagggatgcctcccgcacagctcagagctgggccacaccggagtcacactccccaggtcccctccccattagaagtgtatgcagttatgatcctgccctagagagaaagaatttaaaggtcccggaatgtcatagccctcccaaatgtcttagccctccgccacccacaccttcaggtaggcggccctgtccatgctgggtcttgaggcaagctcggggtgggggtaggttagatgcaggggtgctgagggtccaaggaaaggacacagaggccgctgcttaggcagcacccagggaggggacaagccagaaacagcctggagcaggcaccccccaccctggcccaggaagcccccagatgtcctgaggaggcctccatagacaggaggggccttgtgggctggtgatgaatatgggcactgtgggagacaaatgggggcacagaggagttctcacagctgtcgtttagatggtggctctggggaaatgcttgaaggggctaagggtggaggcagggggcctgctggaggccatcacagccatcttgccagccagaatggtggccccaacagggggagtgggagagagaggaagggccgcctgcagacttcaagagcccctggtggccaggggccgccttggtgcatgtgtgctcacttggcacagacacacctccatgcagactcagatgacagccatcgtgggtggggcaggggtttctgtggctccagggctcagggacagcccactgggaggttcccacaagaccaacctttgacttacaaagcccccaagctttcccaggcagaggccacagagaagagggatgagcgtctcccagaccttggaggtgcagggacatcagagaaggagatgtccctgctcctggggctcttgcttcatggggagctg

SEQ ID NO: 39994 - DNA, 941 bp, Artificial sequence
  DNA replication origin
acctcggggcgcggagaacttgggccgcgggagacctcggagaggagcaacctcggggcgcgggagatcggctctaactgcgctcccgccgcgcccgaggctctgagcgcccagcgcgcggtgtgctggaggcagccgtgtccccgccccgtccccgccccgcccccggcctggctcctctggcgaccgagaccgccccgggacaggaggcggggcgctgcgcggcggctccggaaagttcggctctgcccaggcgtgtgcccgtcggccggaggcgggacagaggcaggtcggcctgtccgcctggacgcggacctgggcgccgtaggtgccctgggaagcgcaggggtggggggtacccggcaggaaggtggccaggggtgctgcgggtgccggcgcagcgagggagggcaccgtgggaggcaagggccgttccccgcgccgcgcacaatgcgccggtcctgcggccctccccgagcaggagtccggggacccaggccccaaggctgggagagcgccaggcccctggccggctgcgctccgatgatctccaggacttaaggcgagtgagctcagcgactgctgaggaatgaatgactgaatgaacgcatgcatgaatggaaggagggagggaaagtgggcgggctctaccctctgggccagccccagcccgcccccacctagccttgctcccctagccttctaggggtgtgaagggcgctggcgcagcctctttgcttaacactggctctgaggatcccccgccgagaaaccgaggcaggcttgcggctctgggctcgtcagccttggcagtggcgtctggcctggagtctggggcagctggtttgggaaaggctgcaccacgcaaccgagggtgggacccagagtccctgctccttccccaccgcacccagcccaccccgccctccctccctgatccc

SEQ ID NO: 39995 - DNA, 1066 bp, Artificial sequence
  DNA replication origin
attgaccggccgggaaccgcgcgcctctgggcctgcggctgaggtccggggctgcgccgcgccgatgagctgacgccgggccgagcgctccacccccagggccgggcgcacctgaatcccctccacccgcgggactgcggagagggggacggcccccggataccgcgtgggggctttgggaggatggggaatgggtcctgggggagcagagcctcccaaattaaggcctcccaagagcgcggccggtcatccgcggcggcgaagggaaggtgccctgtcggtgcgtccggaccccgcagccccccagtgccgcccgggggcggtgggagaggggccgacaccgcagggcccgccgtgctgtggccgagggggcaggtccaggctctgcttcccgggcagacgccggagaccccagcaagccaagtgctgcgggcagccccccccccgcccccccgagagaggggacgccgcgtggaggccacagccaggcaggggcaggaaggcagctgggccagaaggggacactgaggcaggccgaggcggccgcgggggagggtgccaggaccagcccaggaacctcggagaccacggtaagcggtggctggttcagatcccaactccggagctgtgtgaccccagaaagttccttagccccttggtgcctgcatcccctgacgtgtgacatatacatgaatggggctgttgtaagtgaacgcacacagcacaccggcacatgtgtcacaacacttagatgggtttagatgaagaaacagggaaacctttgggaagtttcctgtagtcaaaggaaggttttcgttttccccctcaaccgtgactgtttcttgggccggcaggataggcttttgttctaggggtgtggagagagggccccttggcagcgtccagggccaactgggaaccaagcaggaatcgtatttgtgcagcctggagttcgaggctctgggtgcgagtcgtagtgcttaagcaggaagcagctgcctgatgcccctagccccaggccgccctgctctgccgtttcgagggcgtgggggtcttctgatctcca

SEQ ID NO: 39996 - DNA, 995 bp, Artificial sequence
  DNA replication origin
caggtgttgctgggtctgcccccaccttcacccccgctcacccagccccacagagcctggcatggcctcccaggaagtgacatggcggggaacaggcttagggttagggggaggctgtgcgaaggctggcatgcaggtgagagggcttctgaagagaaagcatgctggaaaagtgcttcggctcagccccacccaaactcaaatccaggggaagccaggccagcaagacctgcaggtgccatgccttggcaggtgccaggcaacaggatcgtgcctcggtggtgacgtgggagatgctggaaccggggaggtgagagggagtaagtttccagaactcactctcaggcaggaggagatcatgactcagctgagccagaaagcgctcgttccacacgaatgcacgtatgagcgaggcacgccaggcgagtgtgggagtgaggggatggatgggcggttggctggaggtcgtgaggtctgggccgcctggaaaggctgttgaggggcgggggcagctgggagaggctgtgggggcagcagaagggggtgcttagccgcagagagggcacgtggggaaaggccatgtgttcaaggccccaaaaggtggggagggcagcccaggagtgcaccgcagggggtgcaagcgtgtgggtgggtgagactgatgcgtgtgtgcctgtgtgattgtgagcacatgtgaacgtgtggatgcaggtggtagtcgtgagtgtgcttgtgtgagcatgtgactgagggagcatgtgggtgtgtggatgagcgtgactgtggggatgactgtgtgtgcatgcatgagcacacaggtgtgtggatgagcgtgaccgtgggaatgactgtgtgtgtgtgcatacatgagcacacaggcgtatggatgagcgtgcaagtgagtcatgtgagtgtggctgagtgtgagcacgcatgagcttgtgggtgtgcaagggaggtggggaggccacacggaatgaaagcctgggggctgc

SEQ ID NO: 39997 - DNA, 866 bp, Artificial sequence
  DNA replication origin
gcacctccaggaagcgagatgcgacgtccaggtcttccttgttcagcaccagattgtccacgaacatccagaagaagggcctggggctgcctggcttgggccgtgcgtactgcaggagccggtggaactggaacaggtaccagcctggagtggggtgagggggcagggctgagggggggccgggggggctggtcatggggacgctgttcaggtgcatctgggcaggggcctaaggaaactggggcttgagagaagggctgagggggtcgaggggacgcaccggcctgggtctgagggatccccctgcccctgtccctccagcagcaatgaagccctgcccagtgctggggccacagaggtgcatggacccctcctcccccaggcaggcctagagtggggaagagacagacaggcaaccccgagggaggagctgacgcagagcgcgtgccgcggcacaaataccgccttttagaggaagctccagaggacacgtgagctgcagtgatgtgggcacgctgggggctgcatggggtcagcgggaggcttgggggcacagggaagcctgcagtgatggggactcttactctgttgctctcttactctgatgaggggtgcatgggtgtggagctagctcagaactcatccagtcggacacactgaatgcgtgcaacttactgtatgtcagtggtgcctcgataaagctgtttttgaaaaatgctgacaatttgcagtttctgccctggcatggaggtgtgaggagagaggagaggagacaggggtggtggggacaggctgccagaactgaagcatcactcactgggaggacggtcacaggtgtggcccaggggaggtgtggcgccgtacac

SEQ ID NO: 39998 - DNA, 1254 bp, Artificial sequence
  DNA replication origin
cgcccagattctttgcccccatagcctggtgacctctggccacccgctgtcccaggtgggcctggatccttccagctcattctttgcctgcgccgtccctcgttccatggcccagtcctccccggggaccctgagcctggaagccccggaccactggaaccttgaacccaccagctggctgtacccggagccgtggcagcagccctgtgagtctctttcctactccctgaccatgctgccttcaagggtgcggctggccaagaccatccccaggggtccctgctgggcctgagggacactgtaggaggctggggcatgggagtccctgaggggtcgaaggctgggcccagaggaaagcaggggctgcagcggccattggccccaggtcctcatgagggccctgccctcccctttttgccccatcttccatgttgtaacagggccaggcaggtggggggcacgcctcaggggacccttgagcccctctcagggctggcactggccttggctgtcctgcccctcatccctgggttgggcaggtgggtgtcaccgcgggggttcaggtggcctgaactagtcaaggtctgctcagcaagctgcttcccgtgctggggtgcatcagggatctgagcaggggctgacggctttctcacatctgtgtccgtgtgtcctgacacagcatccccatggcggccatcccagccctggacccagaggccgagcccagcatggacgtgattttggtgggatccagtgagctctcaagctccgtttcacccgggacaggcagaggtgagggctcatctgcttattggaccagtcacttaggatgctgatcccaggcctggatgaggtctggagttccaggcttctggagtattcatgcattattcaggcacccgggctggggcaggaggttccccacccacagtcttcccccaggtatgggcgtttaacacaccaagataaggtgtgagggcgggatggcaggggacctcaggctcctgtgactttggaaaacgaattgtgatgctcacttcctggccgaatttaaattaagagatcagaggaagaagaaaggggctacttcttatcttcctttccagatcttattgcatatgaagtcaaggctaaccagcgaaatatagaaggtgagtgtttgcatactggcccacaccagacaaaagagacggggcacagtggctcacacctataatcccagcactttgggagaccaatgtgggaggatcattt

SEQ ID NO: 39999 - DNA, 2179 bp, Artificial sequence
  DNA replication origin
ctcggcctctgggtccagggctgggatggccgccatggggatgctgtgtcaggacacacggacacagatgtgagaaagccgtcagcccctgctcagatccctgatgcaccccagcacgggaagcagcttgctgagcagaccttgactagttcaggccacctgaacccccgcggtgacacccacctgcccaacccagggatgaggggcaggacagccaaggccagtgccagccctgagaggggctcaagggtcccctgaggcgtgccccccacctgcctggccctgttacaacatggaagatggggcaaaaaggggagggcagggccctcatgaggacctggggccaatggccgctgcagcccctgctttcctctgggcccagccttcgacccctcagggactcccatgccccagcctcctacagtgtccctcaggcccagcagggacccctggggatggtcttggccagccgcacccttgaaggcagcatggtcagggagtaggaaagagactcacagggctgctgccacggctccgggtacagccagctggtgggttcaaggttccagtggtccggggcttccaggctcagggtccccggggaggactgggccatggaacgagggacggcgcaggcaaagaatgagctggaaggatccaggcccacctgggacagcgggtggccagaggtcaccaggctatgggggcaaagaatctgggcgtgtcccgcgggggcggggaggggcgggggcggggcagcccttcagtgccggtttgcagtgggaggggcgaggagctgcggggggtcacttggggtggggagctaggaagctgggggacgggcagggaaagggaaccctcaggtggggagggttaagagctcagtggggctgggggattggggttcagaggatggggccctcagggtggagtgaggggtggggtttggggacctcagtggggagtggggttcaggggaggggtggagatgggaggactggggatggggcagatgaggggggtttcagtagaggggggcccttggggtggggtgggggataggggtggctgtggggtaggggcagggcgctcagaggtggggtttaggaaggtcataggggtgggcttcagggcaagggtgaagaaagggatgagggtggagggtggaggggtggaggggtggagggtggagggtggagggtggaggtagggcagggcggggggttaggtggagttggccccctgggtggagatgggtgaggattagtggaggtggccctcagggcagggtgggtgggtggagggcggggcttagggagatctgttgggggattagggagtgggggtgggggtggatgctgagttggagatgggggccttcaggggaggtggtcctttggcgggatgggggtgatgatagggtgagggtgggcactccggggcagggctcagtggcgggggtcggggctcagggcaagggtagagacggggtgaaagtaggaatgggggtgtgaggccgaggatgggggtttcaggggaggtggcctttagggcaggataggggtgagaatggggtggggatgggcctcagggatctcagggtcggttgggatgggagtgggggtgggggtagatggtgaggaggagatgggggtgttcaggggaggtggtcctctggcgggatagagggaggggcgttcaggagccgggcttgggagctcagtctggagccccaggtttggggggcagctgtgggggagagaaggaaacagggaaggccctggaggatggggtaaggggtgttgggtggggaatgtcagggcaggtggggggttggggagctgggaggggtaggttcagggtgggggtggaacgtggaagcagggaagggagcaggaaggtggggtgggcagaggggcagtgtgggaggtgcggggtgggttgggaagggggactttgttggagggaggttaggggcttcagagcagggggcggaggaccgccgggcagggctggagccacaggacaattgtgctggtcgaaagtgggagaagacccttgcgggaggtaacccccctgaagtgtgggctgggcctggtgacttccttctgcaagtactgcatgaggggtgaccacacaggggcagcctgatgaccccttggcccctggcccaggccag

SEQ ID NO: 40000 - DNA, 762 bp, Artificial sequence
  DNA replication origin
gttggggagctgggaggggtaggttcagggtgggggtggaacgtggaagcagggaagggagcaggaaggtggggtgggcagaggggcagtgtgggaggtgcggggtgggttgggaagggggactttgttggagggaggttaggggcttcagagcagggggcggaggaccgccgggcagggctggagccacaggacaattgtgctggtcgaaagtgggagaagacccttgcgggaggtaacccccctgaagtgtgggctgggcctggtgacttccttctgcaagtactgcatgaggggtgaccacacaggggcagcctgatgaccccttggcccctggcccaggccagcgtctcggggaggattcgcctgggtgggtgccccgcaccggggctttctccccccacccacagcccagcctctccaggagtgaactgggtcggagcagaggcggcccagtgcctgagccctcctcactggggcagtcaggccgcccagcgggagagtctgaaaaacagcggggcagggggcggggggaccctgaggcactgcgacaatgaagtgtcacatgggatcccgggacagagaggggcggtagggagtgggaaatctgaataaaatgtggctccttggctctaagttggtgtgtctgcaggtttgttcatgtaaccacagtgtccatgggggcctgagggctgggtgggggttgcggcagttctggactagcgcctcaaggtttgtataactttaaagctgttctaacat

SEQ ID NO: 40001 - DNA, 1882 bp, Artificial sequence
  DNA replication origin
gggtcccgggacactggcagcccctcgcttggcctcgggtcccggcggggctgtggggcctccgcgccggctgtgcgcccgcccgtctccccggtctgcgagccacgcgcgccgctgttatacccccgcgaccacgcaaagagcaaaggccgctccgccccggcgcccaatcagggccagggcctcccgcagggacacttccctgtgatggaggcgctgctgtccctccctcgctctcgggaagtctccgggcctggcctgactcacccaccagggcagctgccttgggggctggggacagagactcgctctgtgcgggactcagagaactctcacttccgaatgtggccctgtcctgcctcggcgagggccctgctcgaatggggcaaagccgagacaggtgccctcggcggggaggctcgggtctcagggccctggcaggggctgcccagggtgcaccggcccctcccagtggccggcaagagcctccatggaggctggatcggggtggtgttcctgggggacctccacacaagctgagagcccctactcaggggcccgcctggggctgtgggaggagcccgatggaggctcagtctgatgcaggagacggtacggcagcctgggtgttgccagggagctcctgacctcaccatcttaggctagctgtgtgacgccaggcaagtcctttccttctctgagcctcggttccctcatctttaaaaggggcacactcgcctggggattgaggctcgcattgaccccctccttccttcctccaggtgctttagaaggaaggcggccagccccacaacgggggtcctgagtgtggccctgagtgagagctcccaaagggtcttcctaggaccagtgacagaggctgagggatgctgtggcctggacaggagcttccgggggcatctgggaaggtgtccgggaggggagctgcagtggacaggagccgagggtcccaggtggacgtgagtggggacagtgcccccagtaaaacaagaccaggtgcagaggcctggggcctgcaatgatgctgaggctgtggtggccccgcaggcatggcctggagggggggtggcctcagtgggaggccttggtaacagtccccttgtctgtgcggtcaagccagggaagcaggccctgtgtgcaggctgcagagaaccacgagaggtctctgggcacgagtgttcccactgagccagagaacgagatgacctggccagcatggattagggctgaagggtggacgaaggtaccaggaagcctgaatccaggcagcactgggctgggggctaactgatgcagtgagagacgccaccaagattcccacgtgggcaggcgtgccgtttgcttttgggcagccagagtccaggatggagagcggcagacacctctcctctagaccaggggtcggtctcggtttctcctaccgccttcaggcccagggtccccctgagcgttctgcacgtctgagattgctccggaaaagactctaggggtgtttgggaacaaacctggggaggaaggtggggccagaggtggtggccgaggtggtcagcctggggtcaggtgctggggacgtcatggggagctgagggggagggggtccatctcagtggtggctgtggagtatcaggcagtgcagggttggaacaggctggctcctgtgtggaatgtcctgggagccttgagcggggagcagggccctctcgctgcccaggcctgggcgtctctcactccctgcactgcgccttccgaagaccccgagagggaagccccctgcctgcatgcctgccttgccggtccccgctccaacagacacatcctgtccccagccaggccgggctgctgctcgctgggtttcctgccc

SEQ ID NO: 40002 - DNA, 1493 bp, Artificial sequence
  DNA replication origin
caggccctgctctgacccctgaccccttgcccctggccagggagaagggaggcgctcccactgggccccgctcaccgttcccgagtggaaggcgctgctgctctgcgctgctctccggcttcttggggggcttggccttcagttgagagcctgaatgggggagctgggggcagcctggcctcccctctcagtgggggtgagtgccggtgggcaggggcccgcggtgggagggcgtggagggggcggtccagtgctgggtagtccctttgccgggctctggtttctcatcagtaaaagggaaatgagacccgcccgcctacttcaccagctccggggagctcagccttcaggcaggagggagctgagaggctggtccagtgtgtgggtctagtacccagaggagacccccacagccccaggcaggctggccccacacccagtgggtgggagcccgggtggggagggggcgtgggctcccggggaagcccgggaagactggagaccctggctggcttcccctgcagggagggtacctgggctggcggtgccccttggagtcagggctgctggcgcggcagctcgagcctcttctgaggccttcctcttggtggggagtctgggtggcggtaccaaagccttggggacggccgggggcttcctccccttccggggctggctgaggtccacatctgcagctcaggggcaggagcagggtcccaacctcagggttttctccaggggtagggtgggccccagaactggacaccttggccagacaggtgaggcctggcccctttgcctcttaggatccaagacggtcctggaacatcacccacgggctcctcaaacaccactccggttccagtccagctgggctgagcaggtgacagcagctgccccaggcccccagcatggctgagtccaccaggacccacctttggggaagctgtccaggatgggctgcagccggccatagcgctccaggttgtagtccttgaacagcaccctccagaagtccaggatggctgtggagtcctgggtcagcagccaggacaggagggcgtggaaggcctgggggcagccctccttttccttcagatgaagcgtctcctgcagtggggtggcatgagggtccctgccatggtcccccacaccctgcggcctgcccatctccatcatgactagagggtggagctcccaggcagaggcgctggcgacctggacagctccacgcccatctcctcggcttgtggtggagtcaggtggtggtgtaggggtgttgagggtggggctgggggaacctggaggccattcccttggcttgggggtgaggtgtggggacggctgggggaaggggaccaacttctaacttgtcatcagggacgcccctggctccttgtggggagggagttggggaaggctggaggggcttggggatctggaggggcggggtcctcctggaacttccccggggactatccctggctcacagg

SEQ ID NO: 40003 - DNA, 1120 bp, Artificial sequence
  DNA replication origin
tgctgtacatcccgggtggggatgtgggcctggaccgctggccttgcagaaggtcccccgacagggagacttcagtgctcaccctcctcctccaaagtcagcagaaccacaggcagaaactctggctacctgagcaacagtccggtctgctgtgggaccaccaggatgcaaaggggcgtggtcctccttccatcttggagcctgggtctccccatcagccccatctccccgccacagcgtctacctgactcaaacacctgctggatgaggatcccctccacggcccctcgggctcccgggacgtccccggaggacatggccacagctctctggactgaagctgacatggtctgaatccctgggaaagggaacacccattggggtcacccgtggggaagactgttcccaagcacatactctatgccagaagcaggcagcactgggctgcagagccctttccttccagccagggcaggccaaggaggggacccagccctgccatgtgcagacagcccacaggtaagtgcagagacatgagaatgtgtgtgttcgtgtgtgcacccaagtgtgcgtgtgctggggggtggcagtgtcagcagagctggcacaatggataggaaggcatgaccaatgaccagacccacccccccatgacatgggccctgtattgtgccgggagggacacagagttcctaggctctgccctcagggagatagggggtctctggagtccagtgccctgggaaggaaggagaaggggacaggaagggttcagcctgcatgcagctgggggccagggatgattttctggaggaagctatgtctaggctggtcctgaaggatagggagtggacgggcagagaaggtgcctgagaagggggtcccagaaccagggtgcagtgggggcaggggcgactggcaagatcatgcttagacccaaggtgtccccttcctgggtctggtggtgcagcttaggcccttggaatgacacaccaggccagcacgtccccagcccctaggacagggtctcagagggcaggccctgctctgacccctgaccccttgcccctggccagggagaagggaggcgctcccactgggccccgctcaccgttcccga

SEQ ID NO: 40004 - DNA, 955 bp, Artificial sequence
  DNA replication origin
actggaccataagttcaatgactggtgtccttataaagaggacacgtgggagacagctgtgagaccacagaagcagaggctggagcggtgggtcctgagcccaggaacaaggagcacaggggtacccccataatgaccagcagctgggagacacaaggaaggattcttccctggagcctccagagggagtgtggccccgagacacctcgatgttggcatttctgtcatttcaagcctcccagtttgtgccaatttaaccaacagccttaggaagtaacacagtgggccttgggaccatccagaggtgcaagaccagggccctggctgtgcttggtgttcccagcccatgtccagcaccgaggagacaccgtgtcagggacttgagatggaatgccccgatggcacggtgggtctgccaccagcggccctgctgtgccctggtcagatggcactggtgattgcatggggtcagcggctggccagggaatggcgggcgaggatgctgcaggctggccagggtatggggggcaaggacgctatgctacaggctgtcctggttgaagaatgccgataccctggagggtctcagcagcacaggcagaactttctaaggatgcaaccccatggcccaggagggcccatgcacatggatggaggtgactggggagtgctgtacatcccgggtggggatgtgggcctggaccgctggccttgcagaaggtcccccgacagggagacttcagtgctcaccctcctcctccaaagtcagcagaaccacaggcagaaactctggctacctgagcaacagtccggtctgctgtgggaccaccaggatgcaaaggggcgtggtcctccttccatcttggagcctgggtctccccatcagccccatctccccgccacagcgtctacctgactcaaacacctgctggatgaggatcccctccacggcccc

SEQ ID NO: 40005 - DNA, 976 bp, Artificial sequence
  DNA replication origin
ccccttattctagtgatgaggcacaaggctgagagggggcctgatgacggccactcaggggctggggcagagcctcgcctgaacgtgggtccccactgcacccagagctcttcctcccacagactgccacgtcctgtggggttggaatgggggcagggctcggtgggccgtggggaaggagcaccgggatgtgaacgcagaggaggcctcccgcccccactaagcccggcgtcctgtgcattggtggacaaactcccacctgccctggggggcacagctctgtggcctctgtgctccccagccctgtctggagtgggactctggggtggggcttgggggtgggggccggctacccatgggggcgtgggctgcagcctgggatgagcttggacagggtggcatcttcgccctgggcctctgttctgctttgctgccctcaggggcccagctgtccaggctgggcagcaggtgtggccagaccgggaggcaggtggcagggtgggaaaaccccaggccccggccccacggcccagtgacctgactcagaacccctttccatcttggatgggagaggcttggggtggcttcccttcagggtcagtgggtggaggcggccgtgaaccggggtggcctggttgcgctggcagaggtgcaggctcacctggggatctcccggagcggaggggacaggcaggccaggtggaaggcccgagggcagccgtcacagcagatgagctccccgccgtcccgacacacggcacactcgtcctcattcttctggcacaggcaagagacgcccatgcagactgggctggggtgcagcaccctcctgagagccacctccttcccaaaacagctcccccagcagcatctctgggtacctgaactccccagtctctgccctgctcccatgctgccagggcctgaaattctgccctgaccacctgttccccatccatctggtctccaacagaca

SEQ ID NO: 40006 - DNA, 954 bp, Artificial sequence
  DNA replication origin
attgtcctgccttgtggggggagcagtaatgcccagggccaggagctggagtggaggtctaggagcgtccccttccccccgcagccccccacgctccccccacagccccaggccctgtgcctcccggagcctttctcgcctggcctccctctcctcctgtttcaggtgaattcatccgccccgtaggtcctgggctccttgaagagcccaccctgacccccactccccgctcacctgctgaccctcaggacccacacacagtagggggtgcagggccgaggagtccagccctggcagcggggctgcagaaggcggagccggcaggtgcttgtagacaagagtcgtgtccatgccggctaggggttccccaggtggacctcttacctcctctcccgccgacctaagccccggggggagctggaacccaagggtcagcatcagaggggcagcgggcgcctgcccggcaccacccaggagtcagtgactgctgggaccctgaaacccagggcagcagggtgggggcagaggcctggcatggtgggggcggagggctggcatggtggaaggcgtccacactgagtgggaaaggctgtggcacttcctggctctgtggtcctccctcctcccccgtctacacacggggggccccctggccctcagggctgtcagagggaacactgggtctgtgcacagtagacctactaccctcacagcagcagaacaaggaacacatcttccggggccgttatcaatgctcatagtgccccccggggtggacccgcagccaggagagctgggtttaggcccacaggaaccatgatggggactccactgcaggagaccacaaggaccgggcttgggcatgggggacatagtgctatggctggggcagtcctgtcccacaggactccaggggacagacggacaggagggggtggcccagcctaggagggg

SEQ ID NO: 40007 - DNA, 872 bp, Artificial sequence
  DNA replication origin
gcaaggtgtgggtgggagtgtggggtgtgggtggggtgtggttgtgggctgtatgatgtgggtggggagtgtggggtggggtgtagggtgtgggtgtgggttcaggcctccccgccgaccacgctcactcacccgggccgggaggtgccggctgggaagtggcagcgccagtggaaggcagcggcgcagtgagtacaccgcagcacgtccgtaccatctccgcacaccccgcaacgcgcaccaggagccaggttctgtgggaggcaacagcgcggggtgacgcggggggccgggggaaatgtagctgaacccgaacccgagccctgtgcgctctcccctgggaccacccagggctggacggcgggtctaggcgcaagtgaggagcctcacggtgccacgcaggctgcaggacagcgggaccagtcccatccccaggaggcaggggcgacccaagcaccctcaggctgctgcctgcaagcctggcgcccgcacctctctcctgcttggcgggcctggcctcctttggggctgagtgcgggagtctcctgaaaggcggtgcccacaggggtgcagggaagggaattgaggcagggaggggagggctcccacgtgtgctgggacatcccccccttcattgtcctgccttgtggggggagcagtaatgcccagggccaggagctggagtggaggtctaggagcgtccccttccccccgcagccccccacgctccccccacagccccaggccctgtgcctcccggagcctttctcgcctggcctccctctcctcctgtttcaggtgaattcatccgccccgtaggtcctgggctccttgaagagcccaccctgacccccactccccgctcacctgct

SEQ ID NO: 40008 - DNA, 878 bp, Artificial sequence
  DNA replication origin
tctcaggctcatgctgtgaggcggccacacagccaaccgtgacgtcagccaccaaccctcggggggagcttcctttttaactatatttaagttgccaaaaagaattggtttaaaggggaaatattttctacagataatgagcacatggtcagtgcgtctggtgcaagccctcgaagctggcacccagggtctgccctgagatgtgctcccccaacaccaacccaaggggttccccacccccagcaccggcatgcatggagggcccctgcggcactgaccttggcaggcccaggggccaggcgggcggggctgggggccagcaccccctccacaggggctggggtcacgtctcctgagcaggatctgcagcgcaggcccgtcctgcagcagaggatgaggggctgccagccctgggggggagcaggagtgccacctccggggtatggggtgtggggtgtgggcgtgggtggtgagtgggggatgggggtgtggggtgtgaggaaggggtgtgggtgtgggtggagagtgggagtggtgggtttgggtgggtttgggttgggtgtagggtgtggggtgggtgtagggtgtgggtgggagtgtggggtgtggggtggggtgtggctgtggagtgtggtgaggtgcagggtatgaggtggggagtagggtgtgggtgggggtgtggtggagtgtggctgtggagtgtagggtgtgggtgcagggcatgggtgtggggtggggtgcaaggtgtgggtgggagtgtggggtgtgggtggggtgtggttgtgggctgtatgatgtgggtggggagtgtggggtggggtgtagggtgtgggtgtgggttcaggcctccccgccgaccacgctcactcacccgggcc

SEQ ID NO: 40009 - DNA, 799 bp, Artificial sequence
  DNA replication origin
ggggctcctgcaagggggctaggggggctcctgtggggggtgccaggtgctcagcagcactggggctcctggtgggtggagcagggacagcctgagtttccacggctcaagagcagtgggggccggcagtcctcccccagagtggggagcctgggtgccggctgaggcaggggagggggagtggaggagcaccaggaggccaggggaggcgttacctcgctcagaagggactccaggtcatccctgtgcagagcgggctcgtgactggcagtgtcatcctggaacccagtaaagagaagaggtcagcccaactcccacagccctggtgggggtacagaggccgcagggcctaggggccgcgggggtgtttcccccacactgagatgggaattcttacacccagctccactgggggtgggggcacagggctgcgtgggcatgatggggctggggctgcctccccagggtcctgcccacggccagctgcccacggcccccagacagcctccacactgtgtggcctcctggggaaaacgagggagctcagggaaccagcaaggagtcccactctgagaggggaagtctgaggcccagagaggaaagtgcctggtccatgccacccccgcccccgacaagcaccaccagggccagcccacactataggtgagcgaccagagtgggagaaggtccccaggcaggcacccccagcagagaggagaccatattacattgaaccctgtggaattccccatttgtggccccaaacagccacatcccagctcctccactcgggtgaaca

SEQ ID NO: 40010 - DNA, 1447 bp, Artificial sequence
  DNA replication origin
aatatcaactactccttatttaattgtgaaatgttagaaaacacaccgagagactgcgcaagcacatatgcgtgggctaaaaggcgctaagaagacacctgtgtctacccctgaggcatccttgtgctgacattttgggtcattattctctcccttttcttacagcttcatcacgtgtgtgtgtgtgtgtgtgtgtgtgtgtgtgtaaattcttaaacgtacatggtttagccacaatgaggtaccacctcatacccattaggatggctactataaaagaaaaacacaggctgggcgcagtggctcacgcccataatcccagaactttgggaggcccgtggggtggggggggggggggggggtggatcacctgaggtctgaggtcaggagttcgagaccagcccagccaacatggtgaaaccccgtctctactaaaaatacaaaaattagccgggcatggtggtgtgcgcctgtaatcccagctatgcaggaggctgaggcaggagaatcacttgaagccaggaggcagaggttgcagtgagtggagactgcgccattgcactgcagcctgggcagcaagagcgaaactccgtctcaaaaaaagaagaaaagaaaagaaagaaaaatgcagaaaatagtaattgtttcaaggatatggggaggctggaaccctcatgcagtgttggtggggatgtgaaatggtgtagctgctgtggaaaacaggatggcagttcttcaaaaaattaaaaatataattaccatgtgatccagcgattttactcaaagactcacacagatatttgcacacacatattcatagcagcattactcacaacagccaaaaggtggaagcacccaggtgtctgctgaggaaagcatagatgaacacaatgcagtccatccatgtgctggaatattactcagccttaaaaaaggaagcagatttcggcacatgctacaacatggatgaaccttggggccaccatgctgagtaaaataagacagacacaaaaggacagatactgtgtgattccacttccatgaggtccctggagaagtcatagagacagaaagtagagtggagggtgccaggggttgggaggggaatggggagtgagtgtttcatggggccagagtttccattcaggaagctggaacagctctgcagatggtggtggcaatggttacatgagatgtgaatgccactgaactgaaaagtggtcgagatgataaatttatgttatgtggtttttttgttttgttttgtttttgagacggagtctcactcttgccgaccagactggagtgcagtggcgcaatctcagctcactgcaacctccacctcccgagttcaagtgattctcatgcctcaggctcccatgtagctgggattacaggcacccaccaccacacccagctaatttttatatttttagtaggtcaccag

SEQ ID NO: 40011 - DNA, 1124 bp, Artificial sequence
  DNA replication origin
cctccaccccctgcgccgcgacgcggccgggacccccgcccaccttgcgcgtcgccgccgctggtcaggacgccgatggccttgcccgcgcccgacgcccgcagcttctccaggtccaccgcggccatggcggcggccgaaacacgggcccagctcgcactcccgccgcctgcgccgcgtcgccgtccccgccccgccccgcgcgcgccttccgcccgccccgccccgggcccgcccccggcgcctcctcgcaggacggaccctggacggagcagggatcctgcgccctcggcccgccggggccaccttcccgctgtgcgtttctaaacctgtgcaatgtcacgcgggccctgagcagtgagacccccccctccaccccggtggtctcgaggatgtggccggggaccagggcggggctggccccagtgcggccgcacgcgccccttcgccagcgccgaggccccggtggcacgtctggcccggcttcgcttctccggaggttccttgctgtcggccgcagccaccgcccctccctgccccccaggggccctcagggcgccttcaggcctcagcagagcgaaacccaaacgaggcgctggcggaaagcagccagcactcctccctccctctccctcctttcctcccctcctccctcacttttgctgggcccttggggaagtcttggttccccgggccctgggggtgcagagccggtgttcgggagagccgcctcgtgaccgcacggtgtgttcggtttgtgaaagctcagcgggctgatcgctaggatttgagcatttttctctacatatacggtggaaatggtggctgtgaatatcaactactccttatttaattgtgaaatgttagaaaacacaccgagagactgcgcaagcacatatgcgtgggctaaaaggcgctaagaagacacctgtgtctacccctgaggcatccttgtgctgacattttgggtcattattctctcccttttcttacagcttcatcacgtgtgtgtgtgtgtgtgtgtgtgtgtgtgtgtaaattcttaaacgtacatggtttagccacaatgaggtaccacctcatacccattaggatggctactataaaagaaaaacacaggctgg

SEQ ID NO: 40012 - DNA, 2827 bp, Artificial sequence
  DNA replication origin
cgcaaggtgggcgggggtcccggccgcgtcgcggcgcagggggtggagggcgcctccgccctggcctctccggagcgcccgccgagccccgggacccgggtctcgggccggcccggcctcccgccccggcctcccgccccggcctcctgccccgggtctgtcccccgctcttccccggcgcggtctccggcctacgtgcggccggccacgttctcggcctccgcctgggtcttggcgccgcccgcgccctgccccgggggtgtgtccgactctgggccgcggggcaggacctcccgaggagtccccgaggccacgcgagcggagggcgccggtcccgccacccccagagcctggcccttcctggttctgaagcgacccggggacccggtgcctcccgagggccggcgccaggctgcgggcttccgggacctcctcccggctgggcgggggcggactcactcccggaccgcgcctcctcctcggggccctcgcggccgccttccttgtgggtctagctggggaagagggcggtggggagatgggctgcccggggcattgagcaaagcccagttgtcacccttttcgcaggggtactggggaggcctcaggtggtggggactgggacttggcagagctgggtgggggtccggcctgagggcgtggtgtcctcgcacgctccctcccggaggcctggtcctgcccactgccggcctccagtgtctctggcctgacatgtccagtgtggcacctgtggcacaggacgccacctaccctacccctcaggaggagagaggagaggatttaggagaccagaagtgaggtgctgggttgggaaggggcccagccagcaccccaaggctgtgcagcggggtctggtctgtcttttagagttcagaaaatggttgagaaaatgcggacacacacccccacccagcttcaggcacctgaccctccttttccctatctggaagccaggaagaggcgagaaggaagccggccttgagtgggaccaagccagggaggcaggagtggctcgtgggtgtcactgtctgaaccccggcctgcagagggggctccttcagacctggctgagccaggcctgtggtggctgcccacccgcccttttcacagctgtggcaagagcgggagctgctgcttgttgccggctactggcagtgtcctggagccagtgtggctccacaagtcctgtcctgtgtggctctgggtcacgcctttcctgtgggccaggggtccgtgttgtcgagaggggagggcgttgttcaaggatgtctttttgcacaataacctgtgcaaaggtagctagaagacttgaagcaggccgggtgcggtggctcacacctgtaattccagcactttgggtggcctggtgggttgtgggcccaggtgggagaggaggcccgtggccttggagggtgaactcgggaagctccatcccatgagattagacaagaaaggccccgagtctggagggcagacaggttgctgtggggccagcccgcctgcccaccagggaggcgctttcttggtgaggctggtgaagccccaaagcccacctgtggttccctgaaacacagagggtccccaaccagcttccttgtttgcaaagtgggagcatcagcagtggagggttgggaaagttgagagcctggggtggcacgtgccccccccaccccctgccaccccatgcacagactaaacagagaaggggggctcgctggaggttgctgaagggccagcctggcaggtggttcttgggccagcggggaggggcacccagggtgacaggcggttctggatgctggtggaggatctggagatgggatgcccctcctggccctgtggacaggccggctgggtgggcctcccatctctgtctgagctgggggttccaactgctcagcctggccccagtgcctgatatggagtgggcagcgcttcctggctgcagctgggagggtgcccacagtgcacctgctggccgatcatggcatcccagttgggcctgtgccttcctctgcaaatgtcctcccttcccaagccccgtgcagctgcagcgtctctgtatgtgagctcccatgcgtggacagggaacaggtggttttctgcaagggaggaggactccacacacttccccagttcagggctggggctgattcatggaggatgatctggggcgagtaggatgggaggaactgacattctgggcagaaccagagtcctgtttcatgagttcggaaaagcagtctgcagggctctcccaggccaccactgctgctgccgtgtggctccccatggtgggtgctctgttttccttctcggggccccactgccttcctagaaaggctgaccctggccgaggggaagcctgtggcatagtgtgcccttctctttgccctctatgtcagccgggcagcaggagagtggggactgggaggcactttctgccccaatgctgaagtctgcgtttgttggatgtatggaacagccagcctcaccatcctgccagtgttgcccagtcctgggacttctcgggccttgatttccccttctgtgaaagggggttggggacaagacaggccaccttgcaagttccttccagccagcccacaagtcctgtcctgtgtggctctgggtcacgcctttcctgttggccaggggttggtgctgttgagcaggggagggcgttgttcaaggatatctatttgcacaataacctgtgcaaaggtagctagaagacttgaaacaggccgggcgcggtggctcacgcctgtaattccagcactttgggaggctgaggctggtggat

SEQ ID NO: 40013 - DNA, 1463 bp, Artificial sequence
  DNA replication origin
caagcccaccaggccccctgctgagatggctgtgaccctgggctgacccgcccagtggcacattgactccgcctggagctggggagaccagagaggccctgtggttggacggtggcctgggtgcgctgctcctgccctctccttgccctgcctcagctgctgcctgccagaggtgggcttggacctgtggtgggaccaggtctgcagggagggcgagggagggacggaggcttagcttcggccagctgtggctgagtggatctccctcactgcccccaactccagtgagggtgggggacagggcgctgcactcacagcaccaccttggacgcccagcctcaggcagcaggacttggctctgctgactgtttttggttgtcgggtgcttggggtggctcagctgtctggggggggctcggctgtctgtctcggggggcttggctgtctgcggggggctcggctgtctggggggctcggctgtctttctgggggagcttgtctgtctgtctggggggcttggctttctgggtgtgtgtgggatgcttgctgggttcccgccccagtttcagctgtagcagccgtgctcccatctatgtggggatgtgagggaggcactgttcctttagagacggcgttgcttgctcaagtggagaagctgccagtgtgggcagctccagctccctgcacgctctgtgctctgcccattctaacgtctgtgccccttcttctggatggctgccgggcttggctctggcccccctgttggatcccctggctgctgggtggggagagggccacctactgaacctgagggtgggtctgggtgagtcctggctctgctgccacctgctgggctctggaaggtccctcaccctccctctgggatctcattggattcctgtagtgtggggatggtggcagatactctggctgctacgtgagaacagtgtgccgatccctggggtttctcaaggcgtggcacctcacctcacacctgctccctgctgctgagccccacgccaagctggagagcggatgagaagcatgtgtaaccagggtagaggtcgagagtcctctcgtgggggtctccatgttcaagggagctgccgaggcttgagcaggagcccccagcaggtcagcacctccagcctctgcaagtacaggggggtgggagggcaggggcttttgaggggcacgaggcttggggacagaggacccgcatggcttagggatggatggcatggtatgggtgctgggagggaggcaggaagagcagggctggtcccaggggcaagcacaaactcaggcctgttacacggccccagacctcactcagaaggggaccctggccgctggcgtgggtttcctcctctctgaagattaggtggtcttggctgccccttttgtatgaagtcatggatatcttttgagatgggggctctcgggaagaaggtgtggggtac

SEQ ID NO: 40014 - DNA, 924 bp, Artificial sequence
  DNA replication origin
cgccggccgcatgcctgggaggactccagtggggacagaaggagccacgcacagcagcctctgtggtgtcatttctaggatgttcagaacaggcagacctaggatgcaccctcaggagctggatggcgggctccgctggggccttcgggacgctgaacttgcctgtgtggatctgggtggggtgagggagctcagacaggcccctgcaccaaagcacttgccacaggagtcacgccccgggacacacggactcaccagctgtgcagagggtgtctggagccccctagggggcacccggaccctgttacccaggccctgggatgatggtggggcctcacagtcagcaccctggtcctgctttctgctggtggggtgaaaatcctgctcccagaccacttgctgccggccgccatggggtcccctatctcatgcctgccccactcttgatttcagggctatgagggcctcgtggagggaggtgagaacatcaagcaggccaactggctgagcgtctccaacatcatccagctggtgaggcctgggaacgcggatgcatgttgcacttggactcgcagacagacacacagagacagacctgcacacacagacacacacacagagacagacacgtgcacaaacacacacatgcagacacacagacatgcacacagacgcacacacacacagatgtgcacacacacagatgcgtgcacacacagacccgtgcacggacacacaggcgcgcacagacacagacacgtgcacagacacacacagacatgcacacatacagacacacagacgtgcacacagacacacagacgcgcacacagacacacacagatgcacacagacatggagacagatacacatggatagacacatgcagacacataaatacacagatacacacgtagacacaca

SEQ ID NO: 40015 - DNA, 1337 bp, Artificial sequence
  DNA replication origin
tcccaaggtatcttttagctcagagcctgggcatgagaaggggctgtcccctgcctgcctctccatccactgggtcccttgagcaccccgcagggaatcgggctggcagggccgtgtggctggcactgatgcatcctcctgttccatctccacagccaccagaggaccttcgtgctggaagtgatgggccggcactgcgggtgaggaggggcttcctggcccgctgggtggcccgggtgctgctggggaccgcagtgacaggtgtggcatatttattctagggctcagttaatgccatgggtgtgagagagccgggtgggggccgggagagacagagaagctgtggcccagagtcggacctctgggtacagggaagctcccctcaacggctgggtgggggtcctgagcaggcaggcgctcgctcctccaggtacctggcgctggtatctgcactggcctcaggggccgactggctgttcatccccgaggctccacccgaggacggctgggagaacttcatgtgtgagaggctgggtgaggtgggtgccgtccagcctgctgggggccgcaggtgtcctggtgcactgggtagcgcccctggggttttgggaccagccttgaccaactcatctatcactcatgggttcatcagcagctgcaggtgccccttgggggcgggacacgcaaggagtggggggctacggggctgacctcagtgaggcacctgtggtcctgcccccagtgggcaggaggcggagagggtcactcaggctgccgccgccccaggctcagccccgtggtcagtgtggggagcttggtgaggctgcttactggggtgggactgctgagcctggggcggtgggaggtggttggttgtgagggagtggccccagcaaggtccagacggcagggctgtgggggtggcgaggccaggagctgggccagtggggagcagggccttcccctgagggcggtcggggcccgggggtgggttctaggctggaaagatgtgtcggaacgtggctgtagccacagggtggacaggaggtcccggaagcaggagagggtggggaggctgctgggaggccgagaccgcctctgggagggatgggggggtgcctggtggggaggggtgtgtctggagtgggggtgcctggaatgccgccctctggttcccttggggtggagttgggggctctggcctagaacaggctgacactgccctgtggaccctgagacccctcaactgggacaggtcggccccttggtggggtggggctcaatggtggaccagaggcacgggccattcaggctgtccttcgcccacacccgaccat

SEQ ID NO: 40016 - DNA, 993 bp, Artificial sequence
  DNA replication origin
cgaggactctgtgaaatggtgtctggtgtgccgtcgtgaatgctggtcagacacgtttccatctctgatgccacctgttctggaagcttccgtcagcgtggggggctctggaagctggggtttgcacatctacagaggatgggcatgtggcttggggtagagggaccaagtgggtgtgccagcctgaacccttccccacagagcagcaagatgggcatggaggcggtgatggcgctgctggaagccacgcctgacacgccggcctgcgtggtcaccctctcggggaaccagtcagtgcggctgcccctcatggagtgcgtgcagatggtaagccctgggccccccccatcagaaccgcctggcccctctccccagtccccactcacaggccccactgctctctgggggccccagcactgtgagcaccggagggcagggcctcgtggctggcccagggcatcccaggtctccagggaggggagggatgtgagcacatccctgggtgggacgtgggacctgggacgttccccaggaggtgtgtcggagctgcagggagcctggtgagcatgggaagtcacaggggtccacggccactgagcttctgtaggcagtggtgggagttggggttacgatgggacggaggaggaggggccagtgatcagagcagagccctgggaggagctcaggcaggtgatggggaacactggggtggctggagcagggaccccaggagaggaggtacggggaaggcagaggcgagggggccgggtgtgggggctggtccagccctggctcggtgggtttggaggcctgcaactggggcagagtgccctgcctggagctggagctgctgagaggtgaggagggcagctgggggcagggtagggcctcctggtctcagccagccccagaagagctggccttggtggtgaccgctgttcctagggagaggctgccaggcctgggccagggtcaggagatgccggccagatc

SEQ ID NO: 40017 - DNA, 1191 bp, Artificial sequence
  DNA replication origin
tccgtggcaaggaagctggcgagcgtctgtccctgcctggccaggccaggcagcctgcactgtcagcactctggctgaggctatgggcctgtctgatggcttttgtcccagggcctgagacccttctgtgggcatggggtgggcacagtccccctgtgtgactacaggggaagttgctgagtcctgagccactgagtggctgcaagggccagaggaagcatccgctcctgccgctgagtgttgggcgagaaagcctcgggcaggaaggggttcccacggggagcccagcggggtggggggttcactcggttgcctggccggtgcctggtgatgctgagtggtgcccaggcggctcacgctgggcctgtgtgtccctctccgtgtggagccacagcgccacatcccgggcattgcagcgactgctgactggctcggggaacggccaaggcaatgcctttctgtgatcagatgcaatctggacacgcgtccccgggtgctgcgtgttcatgcggatgtgtctttgactgcaggaccctgcccaagggccagctggagtccattgtggagaacatccgcatctatggtattcacgccctgctggtggtcggtgggtttgaggtgagagctgcccacggacgaaaaagccccagggcacaggagacccaaggtgtcctcccgccgagggggcccatcctgaaaacccgtgtgctggctgggccgatgcaggggccgagagggtcggggttttaagtgctgtgtgtgggctcgggagggcacccgtgtgccagctgggctgatgcaggggccgagagggttggggttttaagtgctgtgtgtgggctcgggagggttctttactttctccggaaagcttcacaaggttccgattaaccccagtgctggggaggggcaggggaggaaggggactcggaagctggaggacgagaaagaagggaggcggaggaggcagaggtgtaggtgctggacggcatcgctgaacgtggtgtcctggcactgggcaagctgtcactaaataatgaataaatgacagcccttcccccttgccctccatggagtggatctggggtcagagtgggttggaggagactcctgaccctccttagagtccagtttccctggtaggcatcctgagatgacaccaggctgactgcctggcccagccccagggga

SEQ ID NO: 40018 - DNA, 1457 bp, Artificial sequence
  DNA replication origin
gcaggggccgagagggttggggttttaagtgctgtgtgtgggctcgggagggttctttactttctccggaaagcttcacaaggttccgattaaccccagtgctggggaggggcaggggaggaaggggactcggaagctggaggacgagaaagaagggaggcggaggaggcagaggtgtaggtgctggacggcatcgctgaacgtggtgtcctggcactgggcaagctgtcactaaataatgaataaatgacagcccttcccccttgccctccatggagtggatctggggtcagagtgggttggaggagactcctgaccctccttagagtccagtttccctggtaggcatcctgagatgacaccaggctgactgcctggcccagccccaggggattgagcaggtgggtcctggcgtccagcacggggcacatgacaggtcagcagggagcagggctgggcggccgccggcagagcctgtccccggcccaccctggcctcggtgctgcccttgacctgccccgtccctactgctgcaggcctatgaaggggtgctgcagctggtggaggctcgcgggcgctacgaggagctctgcatcgtcatgtgtgtcatcccagccaccatcagcaacaacgtccctggcaccgacttcagcctgggctccgacactgctgtaaatgccgccatggaggtacggggctcctggacaccggcctgccatgcccaggcccttgtggggtggggctgagcctacggaggctgctggaggggatagtgtgtggtgagcacctgggagggctgccagggttggggtttgtggggcacaggcccgggtgaaggggctcagctccctgccatagccacttccaggtccaggggggccctgcgttgttcctcgctactgtgatgagctcagatggggagactgaggcgggaatgtccctgcgccccagtgctgggtagtctaagagcagcgcctggcctctgtccaagggtgccagggacacccctgcccactcacagccagtgtgtgtgcaggctgctgtccactgtgccctggggggtggggtcgcctggttgagaacccctggtcctgtggggcccaggtgggaggtgggcccaagcctggtgctgctggctgtctgggtgcgtcagccccaggctggctttggagacacagggctccctgcagggtagccatgccgacggcctacagggaagggtgggcacgtggaggacccccgacccccccttgtcccccagagctgtgaccgcatcaaacagtctgcctcggggaccaagcgccgtgtgttcatcgtggagaccatggggggttactgtggctacctggccaccgtgactggcattgctgtgggggccgacgccgcctacgtcttcgaggaccctttcaacatccacgacttaaaggtgagcccagcccagcccctgctgcggcaga

SEQ ID NO: 40019 - DNA, 1035 bp, Artificial sequence
  DNA replication origin
tgtgtgtgcaggctgctgtccactgtgccctggggggtggggtcgcctggttgagaacccctggtcctgtggggcccaggtgggaggtgggcccaagcctggtgctgctggctgtctgggtgcgtcagccccaggctggctttggagacacagggctccctgcagggtagccatgccgacggcctacagggaagggtgggcacgtggaggacccccgacccccccttgtcccccagagctgtgaccgcatcaaacagtctgcctcggggaccaagcgccgtgtgttcatcgtggagaccatggggggttactgtggctacctggccaccgtgactggcattgctgtgggggccgacgccgcctacgtcttcgaggaccctttcaacatccacgacttaaaggtgagcccagcccagcccctgctgcggcagacctgccggcatgccagcctgggccccagacactcaggccggccagcgcagggcagggcccgggcaggtgggacgcgtagcccagtgctcctgctggccccggatcgccggtcagcctggaattccctccccacagtcctccggctcatccgtgtccgcccctcccgcaggtcaacgtggagcacatgacggagaagatgaagacagacattcagaggggcctggtgctgcggtgaggctgccgtgggtccctggccacagctgcgcgtccaactctcggggctggggtggggctgctgaggagcggctgggcaggagaaggcaggaggggtccttggagagggtgggccagggcggctttcctgggagctgccactccctctcccaggcctggcccagcggggactcaggatcggggggagacctgaactcgttcccgccgactcaggccctgctgcccctctcaggaacgagaagtgccatgactactacaccacggagttcctgtacaacctgtactcatcagagggcaagggcgtcttcgactgcaggaccaatgtcctgggccacctgcagcaggtgtggggcaggggtgaggctctga

SEQ ID NO: 40020 - DNA, 1306 bp, Artificial sequence
  DNA replication origin
ccagggcggctttcctgggagctgccactccctctcccaggcctggcccagcggggactcaggatcggggggagacctgaactcgttcccgccgactcaggccctgctgcccctctcaggaacgagaagtgccatgactactacaccacggagttcctgtacaacctgtactcatcagagggcaagggcgtcttcgactgcaggaccaatgtcctgggccacctgcagcaggtgtggggcaggggtgaggctctgagaggcctgcccctctttcctgccaccatctgtccccggccccaggggtcccagccctcacgggcacccacgggcactcccggcaggccctcgggcacgtgtgcccttccccagtgaggggaccgaggcctgtatctaggtgaggtctcatttcaagaaggggtggggctggggctggagccggggcccgagccagggcattcacatgctgagccgagctccccacccctgccaggcctcccgcggccacttccgccgaacccctcacctagatccccgcatgctccctgccttatggtggccctgcaggaagcccgcgtcctggggttttctgagccagggaggggagtcagggtggctgggcatggggcccgaggtgatggggcccgaggtggggccgctggctgccgatgcagggcccaggagtcacttgacttggccaggggcagccgactgccggcctcgggaggcagcttctggcctggacttggagctggagagagcaggcagggtcctcgatcgggaacagacgggaacggtgcacgggttggaaggaatgggtgttcacaagctgcctgggaggctccccgtggggatcctgtctgcactggcgttggccttggcccaggcagcccaggggagtccagggaaccgggcctcacctgtttccagggtggcgctccaaccccctttgaccggaactatgggaccaagctgggggtgaaggccatgctgtggttgtcggagaagctgcgcgaggtttaccgcaagggtaggtggtgggtgcgacccgaggcctcactttgccctcccctggctccctggggcagggcctcaccatggagggctgccacgtgcctctgtttgcaggacgggtgttcgccaatgccccagactcggcctgcgtgatcggcctgaagaagaaggcggtggccttcagccccgtcactgagctcaagaaagacactgatttcgagtgagttccaccaaagcctcgtggaggcgggtggggctgaggggtggcccagaccttccctgaggcaggtgtgcc

SEQ ID NO: 40021 - DNA, 1034 bp, Artificial sequence
  DNA replication origin
tccgctgctgagactggccgggacccgctggacagcgaggaggaggcaacgtgaggctggagggcagcggggactccgcagcccatccctgtcccccagggtcctcccacggggagtgaatggggcttcccgtgagctgcgtctctgggaagtgagggacagggattatccggggggagtgtctgttctcatccatattctctgggagtgactcagtgcccaggtagtgatttcagtggcaggtccatgttttgcccaacagcggatgtgccagggagcaggagagggggtgagccaggccccgtgccctggcacagagaaggctcacagcaccagagctcgtgaggtgcagggagcccctggtggggggggtggcctagggccacagtgactggaatggtttgtgggcacggccatcagtgcccgtatggccttgggcctgggggccgtggaggggccacagggctgactctgcagtgagacgccggcgcctcccagggcagttggcagcgggtcacgaacgcatttgacagaagctgggcacttctctcctgcttggcagatcacacccgctgctggtgcctgtggtgggggcatcgggatgtgatctctgttaggcatctgccatccggcacagggcctgaccccatggtcaggagctctcccccggcatttgtgtgttcgggtgccccccaccctgcccctgaagccctgggtggaaggtgttacagctggggagccccagggtgccgggagggcgccccacaggtgaagtaagtgccgggctctccaggagctgccatctgtagcccctgacctcccaggagttgcctcccttctcttgcccccgtgtgccaggtgggatttgtatgagcccctcctttgcttggatgcgacccgcagacagggtttgcagaggcccccccggtgccacgagccccctgaccctcacacgcctttgtctccctctcagcagcggcgcccaggatgaacgtggcctgaagccgccttcccggggccagtttccttccctc

SEQ ID NO: 40022 - DNA, 1078 bp, Artificial sequence
  DNA replication origin
aggagagaagtgcccagcttctgtcaaatgcgttcgtgacccgctgccaactgccctgggaggcgccggcgtctcactgcagagtcagccctgtggcccctccacggcccccaggcccaaggccatacgggcactgatggccgtgcccacaaaccattccagtcactgtggccctaggccaccccccccaccaggggctccctgcacctcacgagctctggtgctgtgagccttctctgtgccagggcacggggcctggctcaccccctctcctgctccctggcacatccgctgttgggcaaaacatggacctgccactgaaatcactacctgggcactgagtcactcccagagaatatggatgagaacagacactccccccggataatccctgtccctcacttcccagagacgcagctcacgggaagccccattcactccccgtgggaggaccctgggggacagggatgggctgcggagtccccgctgccctccagcctcacgttgcctcctcctcgctgtccagcgggtcccggccagtctcagcagcggagctgagggagctcagtgtgcagcatagcttggggccgccgtggcctgtgccctctctctctggggccgcagtgatctcctctccctcactcagtgcacgggacagctcctcctccgtcacagctttgggatgaaagacagaagacagcatgagtggcctcacccacgtgcaggccacatgcactgcagctcccgtcctcactgtggcttcaggcacagtctgcttgtgaaatgcatgcacgtgtatccacctccagggacaactcccagagtagcagccggttcctcactgtcccatccccagcctggcacaggctgacacacaacagatggtggagggctgctcaggaatctcaacaccagccttggccagaagcaaatactcctcaaaacctcaactaagacacaatagaaaaaggaacagaccatattgaatttattccatttctctcatatatcaatttccctgaagtttatattattaatatcaataaaattgtctgggagaaaatagtggtgtctgtat

SEQ ID NO: 40023 - DNA, 1191 bp, Artificial sequence
  DNA replication origin
ggcggggctgtggatccagccctatccctgccgctcactgagtcacccaggggccacagggcctccgagcatcaggccgctcgtgtgtggggccatttctgtcacatctcgggagggacaggaccccaggggtgttgaccgagctcaggtgcgtggtgcctgcacgcctgactgcactggagcggagcaggaagcctcgaggccgcggacgcggtcggtacatcacgctgctgcctgtgcctgaggcagaccccatcctggaaagagtcccacagccggagttttgctcttggtaaaatggggcggcctcatagctaggagctgcatgagacctgggaaaccccgagtgaagggatggcatggggaggggggctcaggacggcaggctgcccatgggggcctggtgaccgcccttctgaggcgcctgccggacgcgagtgcagccctccaggcagggggccctggctccgcgcctttgagggcctgcgggagcggctccgcgtgttcgcttgtggaggggacggaccccacgctgcagggtaaagcctgcaggtccccgctccaggcctgctgtttctcttctctgacgcgtccacgttctgtagaatggaaatgaggcccatccccagtgttgccgccctcaagtgggggtttggaaggtccgtgctcactcccatgtcacgtggagctggctcctagtttttgccatgagtttttctggccgctccctgctttggggcaacatgatatgtcccctgagaggccttaattttcctcacctgtgaaggagggccacatcccccacctcccgcactctagcgccctgaggagctgatgtggagcgtcgggccaaggggctgttgctggtggggtccaccccagtccgcctttgagttcagggcctggccttcctacagctctctcctcggcccaggtcctgctgcacgtgacttgtgacatccgatttaggcttctcaggagagggcagggacacaggtcccatgagtgccttttactgggggtggggattgagaggtggccctgggggccctggccacgtccctcgctgactgtgctggtctccgtgcagtgtcaacagcatctccaccctggagcctgtgagccggtgccagcgcctgagtgagctgtacctgcggaggaaccgcatccccagcctggctgagctcttct

SEQ ID NO: 40024 - DNA, 952 bp, Artificial sequence
  DNA replication origin
tcttgatctcacaggcagccacggggtaggccagcccctgcccatcctccgtaatgccctctgaggttggcattgccatgttgatgcccgtgcccagcctgctgcccgccatgggctgaggccagtccatctggtgttcaggcatccccagcgcgggcaccagcctgtcctgcccgagccttgctgaatgaatgaaatgggcttggaggcatgctcatgggtcaaatctcagccctcccatctattggctggctaaccttgggcgaggcatggccctctctgtgcctcagtttcctttctgtaacatggaggtattacaagtgcccaccccacagggagatgaggaggagatggagcccgagtccagaggttgagcaggggtgcgcgtgcccgcccagaggttgagcggggggggggggggggtgcgcgtgcccgcccagaggttgagggggggtgcgcgtgcctgccgcggggctcgtttcactagtcaggcgacacagtgaggctgggatttcaggcctgcctccgaaaggcttacctgacagggaaacgtggagcttgtggttcccacggtggcaggaagcttggggcggggctgtggatccagccctatccctgccgctcactgagtcacccaggggccacagggcctccgagcatcaggccgctcgtgtgtggggccatttctgtcacatctcgggagggacaggaccccaggggtgttgaccgagctcaggtgcgtggtgcctgcacgcctgactgcactggagcggagcaggaagcctcgaggccgcggacgcggtcggtacatcacgctgctgcctgtgcctgaggcagaccccatcctggaaagagtcccacagccggagttttgctcttggtaaaatggggcggcctcatagctaggagctgcatgagacctgggaaaccccgagtgaagggatggcatggg

SEQ ID NO: 40025 - DNA, 2025 bp, Artificial sequence
  DNA replication origin
ctcggagctgcacagcgtgcgcaagctcaactgctggtgaggcggggcctggccgcggccgccccggggtggggggaggagccggggcggggcgagggcggagccggagggaggagccggggcggggagagggcggagccggagggaggagccggggcgggacgagggcggagccggagggaggagccggggcggggagagggcggagccggggcggggagagggcggagccggggcggggagagggcggagccggagggaggagccggggcgggacgagggcggagccggagggaggagccggggcgggacgagggcggagccggagggaggagccggggcgggacgagggcggagccggagggaggagccggggcggggcggggcgggggcggagtggaaggggggaggggcaggggcgagggcggcgaaggagccgcgggtgagggaggggaggaggccgggggtcggggtcgcctgggcccccccccatttcccggcccgcctttgccccgggtgccctgtgggctgggtctgttgtctggggttgccagcagtcactgggaccaagtcgaataggagagagaactgagctttccaggactgagtcaggaaacacgttggtaatcagtactgggggcggccgttcccagggtactcctagcaggtgacaggaagggacgtgggtgcggtgggacccaggcaggctgaaaggcaggtaatgctgagtctcactgagccaaggaagaccaggagcttccagaagagggagcctggagttgaggcctgcaagatctccagggttccctggggactcagcagagtgaccgcgccgtgtcaactggcctcaccgtgcaggcgggtgtgggggtcagcgagagcagacgcttcctcccaggggtgtccgcagactgcccagagtgagctcttccctgttaattaaaaagcttttctctctgccctggcatatctggtgttttggctacaattcccgtgtcatttgctttcaataatgcatttctttgttttgcatggggtggtcagtactcccactaagctgggagaaacaacaaccctgtttcaggcttttaaagtttgcttcataagttgcctgttcaccctttgaacttgacctcttataaagacgcccttgtttatgtctgtcagtgagagaaatgaaccttctgctactcagggaccatgaggaagagttcatctttttgtgtcttacaaatggagcaaccctgctgctccttatctaaaaagtaccaccccaacgtcaaacatacagtttagttgaaaatcagctaaaacaattgtttacacctttgccagttatctgggcaaccttccttttttgccatgccattaaaatcctagaatcttaaggtttgtagggagtcatcggtgatttttggaatttttgtcttcagtgttttttattcaactttaacaaaattaaagtatgtatcttttctctccccaggggcagccgcctcacagatgtaagtattgcctcacagatgtaagtattgcactgatcatctccaaatagcctcaacccaaatgttgtagcttctttcccaagagaatttttaagttgacaaaactgcacctatcaattcagtcccacacttggtactttgttcacttagcggttttcattctgcagaaccactaatggaaaaacaattctctagtgccaggcttattttgcagttcccgtcaacatccctataaatgaaacaccctttgtcacttggtcgcagaggaggggagcaatagtttggaacttgctctcacctggaaaggaatcccaggagggcttgttttactttgttacggggaagttgaaggtctacaccccctcttcttggtcacatctagccttgtacccccttgccgctgccccaaaggcaggcagagaataagccctgctgggagaacttgagtgtgtgcgtctgtgaaagatttttttcttctctccctcattgtctttctcagtccaaaatgtccccaacttac

SEQ ID NO: 40026 - DNA, 2211 bp, Artificial sequence
  DNA replication origin
cacacaaagcctgtttggtggtctcttcacatggacacgagtgaaacccaccaccgcgcccagctaattttttgtatttttagtagagacagggtttcactatgttggccaggctggtctcgaactcctgacctcaggccatccacctgcctcagcctcccaaagtactgggattataggcgtgagccaccgcgcccggcttaatgtacatcttatacatatattttttcttctttttccatcttacacatattgattgatgtctcatgtctccctaaaaatgtatgaaagcaagctgtgccccagccacccagggcacatgtcatcaggacctcctgaggctgtgtcatgggcttgtccttaaccttgacaaaataaactttctaaacagattgagtcctgtctcagatattttggattcacagctgctaagctgctcggttacaattgaaggctcatgggttaggggttgttcaaaggtagtttggtgaacagggggctagggcatggggagtgctgattggttaggtgcgagatgaaatctagctgtccttttggtccttttgtgctgcatggcttctgggtggggccacaggagctgttggcaagacatttagctggatccatccgtgtgagacatgcaagaaacctgcaaaggtacaatagtgatgttacctgcaggagtaattggggaagtagcttatcttgtgacctccagaataatggctgacgaatgtttacatctgcatcttagtggaattcatgctcctctatccttctaggctggtagtgtaaccgcccaatgggttcgccttgcccactgcctagacagaaccgatttatcaaggcaacggaattgcaatggagaaagagtaatacacacagagctggctgtgcaggagagcagagttttattatcactcaaatcagtctccccaagcattcggggatccgtgtttttaaggataatttggcgggtatgggctcagaaagtggtgagtgctgattggtcaggtcgaagattaaatcatagggggtcaaaatgagttctggctgacttctgtccctgggtgggatcacacacatggttgagccagattatccgtttgggtggtgtcatctgctgcatctgaatgcagggtctacaaaatatttcaagcactgaccttaagttttgcaacagtgatgttattcccagaagcaatttggggaggttcagactcttgccgccagaggttgcatggcccctaaactgtaatttttaatctcgtagcttaatttgttagtcctacaaaggcagactggtccccaggcaagaagggtttttttgggaaagggctattatcaattttgtttcagtttaatctataaactaaattccttcccaaggctagtctggtctacacccaggaatgaacaaaagcagcttagaggatagcaggaagatggggtgggtgaggagatcttcccctgtcataatttcttcagttatgatttttgcaaaggcggtttcagtggtctcattagctttacaaaggctgtttagttttgaggaagggctgctatcacttaaactataaatgtctcccaaagttacctttgcttatccaggaataattaagggcagttttaaggccaaaggcaagatgggggttggccagatctccttcaaggccaaccttctctcaccgatacaattttttgcaaaggcggtttcagaacgtcagaacgcctgtcttaatgtaactgtggcccatgtaacgatgtttagagggtcttatctgatttctaaaaggttgaaatgcttgtaagggctctgctggacctgcccgtgcgtctttcctataaatgcgtcttttctgtaaatgctgggagggagggagacaaggaatcaacacagccccagggctgccctgggtttattccaagagtttgaatcgcgtaacttggagctgtgtagcgcccatgccatccacgctaggcctgcgctcagagtcaggcctaggcactcggccatgatgcgcgtcggaccgagcccaccccgctcggttcctgggagcagcagttcagccctcactgggccgactcggggaccgccacctgcacccaccctctgctcgctgcgcgcttccggggtcgcgttagaatcgcgtcagagaagggcgccccaggccgcgcatgagcaggagcagagccaacgtgtcagcggcg

SEQ ID NO: 40027 - DNA, 1718 bp, Artificial sequence
  DNA replication origin
tacctgggcctcgtgcccacaccgtgagaaacactttgtgccaagtgctttctcctctgaactcgagaggactctccatggagattggtacctgccaatcgggttttatggtcgcgtgtcctctcttttatgggaagaatatcgtgtaattgctactgcagcagcgtccgggcagacagacgtgcagtgtgcggttcttctctagaaaggcaggagccgctcccagggcgatgtgggcccggctgtttcatcagagatggtcagcttggtacctacttcaccttaaatgatgttcccacagaggccccgggatacttggaaacaagcgcccagcccctctcgcagatggctctgcagttacgactgtcttataaaatattaactgccttgcggtatgtttttagttaacgagatggctctctagccagaaagcacccagggcaggggcactggatggggctctgctgacatggagcgggtgaaagggagggcgtcttcacctcctttgtctgttaagggggctctaagacacctctctgggggtgttgctgattgtgataggacccaactcctgcagtgggtgctcgtcgagcacatctagttgcagggtggaccgggcgaggactgtaccgtccagcagggcgcagctgcgggtgtgtggggacactgtgtctagttgcagggtggaccgggcggaggactgtaccgtccagcagggcgcggctgcgggtgtgtggggacaccgtgctggccactctggagggcagcttccggccatgcttgtgcagagcacagtgtcctgaagaggtgacagtgtcctgagtgctgtcctacaccaggggctatgaccgccttcccaccactttgcaggcaccaggatggtgggttagtgagatggtggacatccttgggcgcgccagcaccgctggctggctcatctgcggagggccttccagaggcgtgtgctctgggcagtagtctgggcagcaggcctgcacacccagggaggaaatgagggtggcgggtcaggcagtagtctgggggcaccctccctcctcccagatcagaggccacaggacctcttcacttccctggacatggaggccagcagggcccaggaatggcagccgggtatcgcccgctggtggcaaggaaggggcggacagtgtggctttgtggggtgaaagggcgtctgggtcacttgggaaaggcacattcgccttctcaggcatcagagggcagtccccgtccctccccaagccagagagtgggcagcacacagggtggagttagacatccatggggccccgtggccagcacctgccgcgatggggactgctgggcttgatctttctggctgttcctgtcccctccactgtgacacatccagggagcaggccctgagcctgccccagccttggggtcctgcctctctcactgggaatggtccctggcttggggccacatctggggtgctgggggagggggctgcagaggtcttcgagaagggggtcctgggtctcgttgtggggggggtctcactcaggcccaggtccccctgcgactcctgccctgcctttcccgctcccgttggccattcagggcttaaagataatcgcggcactcgccggtttaaaaggagacacgtgcccccaaccctccgaaggcacacatccgcgcgagggtccggttccaggtctctgggggagggcgggctc

SEQ ID NO: 40028 - DNA, 1395 bp, Artificial sequence
  DNA replication origin
gagcccgggtgcggggactgaggcggccgtcccgggagcttgtgaaggttgaggcggggtgcaagggcgcggatcggggtgccgagtgcgtgcaggggtgcggggtgcggggaccgaggcggccggccccggtgctgctgcagggcgcggcggaatgcaggggcgcggtggggtgcaggggcgcaggcggggttcggggcgctggtgcagggcgcggtggggtgcaagggcgcaggcggggttcggggcgctggtgcagggcacggcggggtgcaggggcgcgggtggggctcgaggcgctggtgcagggcgcggtggggtgcaggggcgcgaaggggctccgggcactggtgcagggtgcggtggggtgcaggggcgggcggggttcggggcgctggtgcaggggcaccggtggggttcggggcgcggactggagcacccagtgtgcgcagaggcgcggggcgctgactgggagccgggtgcggtctgtctgcgggacgccttgccgctggagcgaccctgtccggctggcgcgaggggacccggggatgagggactcagccgtcctcgtgcccctgcccgtccgccgggacagcaggccccgcttctggggcgcttacttcctccgtccccgcacccgcctctgcctgcccagtctccgaagcgctggctttcacgcggggatttcagaagatgcccgagcaacctccagagagggcagggaggccacacggtgtaccgagggagtgcagggcgcgcctgtcccagtcctgctggtgccagaggcccgccctgcccagacagaaccttccatttccccggggaatctgctgggctgggctgggctggctgggggcgggtgggcacaccaggatcctctcgagtcgcctggtcctgggctcgcgtgccaacgagtcttcttgaattcggcctaggtgatggtggtagtggtcttcccgctgccacccctgccatgcgggacccccggggctgagggaggggctgctcagtggctaaccctgaagggtagggaatgctgccccaacccacactccctggggctccactgccccctttctccgggaatagctctgtgcagggcttgggtttggaaatccacccacatggggccttgccttgctcaggcctgcttcatgcatctgtcttctggaagctcatttcctgagtgctctcaacactcacacctgtgccagttgcttgtggagaattttagctgtgaaccagggtggcccaagctgttctcaggtgacttgtgagaaagggattgagcctgtaattttgggtagaagaaccccagaaagggctggatgggcccttggaaggtcgttgccaggcctgggttttcagggttctgcacccctgggctgaggctga

SEQ ID NO: 40029 - DNA, 1582 bp, Artificial sequence
  DNA replication origin
gaatccagctgtgtctgagcctggggtctggctgcatccctcccccaaccccccggcttctcccagccccctccctgcagctgccgacaggggccggtggtgtgagggagaaatgcctgtggcctgacagtgagggacgccagggacacagaccctgtactgcagcaggtctgcctcgaagcccgggagcgtccaccatgcaggccacagccctgctcctcccagggagaccagcacctccagatgcctggtggacccggtgggacccacgttctgatggtgacaggcactgtgcttgtgggttaactggaccttctttagtgacaatgccaccacatggttgttttgagggcacctaatggcatttctggatttcacccatcacctttgtgtctctgctaggccaatcccggcggagattgcagaccccgctgggtctcttcagacacagcccgcctagcggaacagggaaagtccgctgtgtacttgggagggtctcctggaggacggggggccagagtgacgacagaacctgggagagccgtgttcagacgggaggcagaggaagctgggcccactgagtccccaggacgggccagggcacaggggccacagagcagaggggatagggcagaggggacaggagaggggacaggagaggggacaggagaggggacaggagaggggacaggagagggggcagtgctgggtgcacaaggacagaagggcagagaccccggtgcaggagctgattagacccgggggaggcagggcccaggcgctacggcgggaattggagtctgtgctggcgcatgtttgggaggcgctcccaaaatcgagaggaagaggaaaaagtgggtgccgtgggggcacgagggctgggggaggtttgctgagggcgatcctggtccccaaaggatggcctgatgctcctggcttgggcctctctgcctccctcttctctcgtgatctgtgccctgcccacatggggaccccttttctgggtctgagccggaaaggtgtgcggtgtctgccgcccgctggggcctctctgcatggcctgtgtgggtcggtgctgtccctgaccactgacacacaggttccctccgccgttttccctttcccgcagtacgtccgagtctcccaggacacgccctccagcgtgatctaccacctcatgacccagcactgggggctggacgtccccaatctcttgatctcggtgaccgggggggccaagaacttcaacatgaagccgcggctgaagagcattttccgcagaggcctggtcaaggtggctcagaccacaggtaactcggaggctggagggacacgaggccccggcgggtggggtgggctgtggaggcagtgctggggcaatcagggccatcaggacccaaaaagtccctgggagccgccgaggctgtgccccagcctgagtcggacccatgcacctctcacctgggcacagctgctccctgacgcccgatgctcccactggcttgcctgtgggctggagatggctcagtgcatggccctgctggtgcccagggccaagcagagatgagaaccttggtggcct

SEQ ID NO: 40030 - DNA, 1095 bp, Artificial sequence
  DNA replication origin
gatggctcagtgcatggccctgctggtgcccagggccaagcagagatgagaaccttggtggcctgggaaccttggtggcctgagaaccttggtggcctgggaacctcggtggcctgagaaccttggtggcctgggaatcttggtggcctgagaacctcggtggcctgggtgcacggctggggccagcactgcaggccatttgtagggggtcagcgagagttcccagtcatcaagctttccattatcgtgtttttccatcaaaatcagggaaggagcattattatttccatctcttcacttaaggcaactgcctggttggagtcaaatcacctcccaaggttgcaccactggtgagagccaggcagggacccagtcctggtggatggtgtgagatcccaggtgccgtgacctggtgccccgccccaccctaattccatggggagggggccccaagtcctcaaggctccctgggcctccctggaggggactgtggatgaatagtgaggccctgaggtgactacttggcaatgttgcgtccggatgggcctagagtcaccctgctcttcctggggtctggggtctggtctttgcctcgcagtggagtcgtaactgagcctgacttggcctgcatggctcacagagtcctcagtttcattgtctgcctggtgagcgtgaggcacggctgcatcttttgacctgtgagtcccacagccctgcttgtaaaatgaccagaccttttctcagcctggtcacatgggactgggtttaacgcaggtcaccatcccacaggctctttctgaagctttgctgcctcaaataatgccatggatttgttcaggtctcacctgctccaggtcttgatgttgcatttttttagctttcaatatccgtgtccttgttgtccgcttcctggcccaaagccagtaccaccttttcaattgttatctttctatctatctatctccatccttccatccatccatctatttatttttgagacagggtctcagtctgttccccaggctggagtgcagtagcacgatctcagctcattgcagcctcgacctcttgggctcaggtgatactcctgcctcc

SEQ ID NO: 40031 - DNA, 2166 bp, Artificial sequence
  DNA replication origin
gccaggctaatttttgtagagacaaggtctatgttgtccaggctggtcttgaactcctgggctcaagtaatcttcctgccttggcctcccaaagtgctgggataacaggcgtgagccaccatgcctggctgattggctgttttttttatttttttgttttttttttggagttggagtcttgctctgtcacccaggctggagtgcagtggtggtggcgctatctcagctcactgcaacctctgcctcctgagttcaagcaattctcctgcctcagcctcctgagtagctgggactgcaggcgtgtgctaccatgcctggctaatttttgtatttttagtagagacggggtttcaccatgttggccaggctggtctcgaactcctgacctcaggtgatctgcccgcctcggcctcccaaagtgctgggattacaggcgtgagccaccgtgcccggccggaggtgtgtttcttacaggggtggctgcaaaccaccagcagcagatggcaggtgggaggtgaggggcatccttcctagggaccaggctgagtgttgggagcgaggaagcactctgccgcacctgggtcctgaaagctgggaggaagagggaaagcaaaatacaagaatgcagagaggtgctgagaaccgcgatcctgagactggggcctgaggaggcggcagggaccgggagaggggcggggcctgctcctgttcccaccccacctgagcgcgtgggaacctcggttccttacacctgatgctggtttgaaagcccctgagtgaggagctctgcgttgttgggggcggggcatcgctgagcctagaagggctcaggcgtcaggctcctgggtgtcaggtgcccctcagtgctgtggggcctgcccacccgtgctccttccccaggggcctggatcatcacaggggggtcccacaccggcgtcatgaagcaggtaggcgaggcggtgcgggacttcagcctgagcagcagctacaaggaaggcgagctcatcaccatcggagtcgccacctggggcactgtccaccgccgcgagggcctgatccatcccacggtgagtgcggccccctagggaggggagcctaagaccaggggtgtgggtgaggtctgactgggcgctgtggggagcaggtggagtgtacgggggccggggtgtgggtgacgtctgaccgggcgctgtggggagcaggcggagtgtgcgggggccggggtgtgggtgacgtctgaccgggtgctgcggggagcaggtggagtgtgcgggggccggggtgtgggtgagttctgaccgggtgctgcggggagcaggtggagtgtgcgggggaggcggggtgtgggtgacgtctgaccgggtgctgcggggagcaggtggagtgtgcgggggaggcggggtgtgggtgacgtctgaccgggtgctgcggcgagcaggtggagtgtgcgggggccggggtgtgggtgagttctgaccgggtgctgcggggagcaggtggagtgtgcgggggaggcggggtgtgggtgacgtctgaccgggtgctgcggggagcaggtggagtgtgcgggggaggcggggtgtgggtgacgtctgaccgggtgctgcggggagcaggtggagtgtgcgggggccggggtgtgggtgagttctgaccgggtgctgcggggagcaggtggagtgtgcgggggaggcggggtgtgggtgacgtctgaccgggtgctgtgaggagcaggtggagtgtgcgggggaggcgggcacactcaggagattgggtgcaactcccggcccacccctgacccaggtgaccccggacaaacggctaacttggctggactctggtatctccctcaaggttgtaagaggggtccacgtgacagtcactcgctgcgagggttccgctaacagagcagagggagggggcgtggccagcaggcagctgggtggggctgagccagggcgatccgaccccgaaccggagcttttagcactttgagtccctgtactcagaggtctcctgcagccgggaatcccactgtgctgtggtccctggcagccagcacccacccccagcttctccgtcaaggttgaggacggagcactcctgcctctgattaactggacgcaggagaagcagttgctttaatccggagccttgagttgggac

SEQ ID NO: 40032 - DNA, 1116 bp, Artificial sequence
  DNA replication origin
gatgctacacctgctcttcccttgtattttggagataggtgacttgttttctggtctcacaggtgcacatatgaagagaaattctgccccagaatggatcagacccagagtcttcagcgtccctgacttaaatgatgacatttgggacttttgagctgatgatatttttgtttgtttgttttgttttgcttgagacggtgtctcgctctgtcacctgggctggagtgcagtggcacaaccttggctcgctgcaacctccgcctcccaggttcaagcgattctcctgccttggcctcccagtagctgggattacagtcgcctaccaccatgcccggctaattttttgtagagacggggtttctccatgttgaccaggctggtctcaagctcctgacctcaggtgatatgcctgccttggcctcccaaagtgttgggatgacaggtgtgagccaccgcactcggccaagcttatgatatttacatgagattttgatcttggagtttctgctgtaacaggtttgtagttggaggggatcattttgtttggtttggtttggtttagtttagacagagtcttgctctgtcacccaggctggagtgcagtggcatgatcttggttccctgcaacctccagctcctgggttcaagcaattcttctgcctcagctgggattacaggcgcctgccactatgcccagttaatttttgtatttttagtaaagacagggtttccaccatattggccaagctggtcttgaacttttgtcctcaagtgatccgcccatctcagcctcccaatgtgctgggatgacaggtgtgagcccccacacccagccaagatctggcaatggtgtgaacatattttgcctgtggagtggacagaaatctttgaggtcagagggaggaccgcagttggctgaatcatggccacccaaagacatcaaggcctgctcatggacccggtaagtgctgctcctcatttccttgtttggaaaagcatctttgcagatgtcagttaaagatctggatatgaaggcatcaccctagatgaccctagtgggacctacacgccatcacgagtgttcttacggaactcttgggggagatttgacacagg

SEQ ID NO: 40033 - DNA, 1380 bp, Artificial sequence
  DNA replication origin
gtgggtgtgtggatggctggatggaaagatggatggatgaatagatggatggatggatggtgggtgggtgggtgggccatgtggatggatggatggatggagggataggtgggtagctagatgataggtagattagatggatggatggatggatagatagatagacagacaggtgataaaatggatggactgggcactgtggctcacaattgtaatcccagcactttgggaggttgatgcgggtggatcacttgaggtcaggagtttgagaccagcctggccaacatggtgaaaccacatctgtactaaaaatacaaacattatccaggcatggtggtgggtgcctgtaatcccagctacttgggaggctgaggcaggagaattgcttgaagccaggaggtggaggttgcagtgacccaagatcgtgccactgcactccagcctgggtggcagagcaaaaagtctgtctcaaaaaaaaaaaaaaaagatgaatgaattgatatgatagatagatggatagatagatagatagatagatagatagatagatagatagatggatgatagatagatagtgggtgggaggtagatagaaagataagtggatggatgaatggttggtaggtgggtgtgtgtatggatggatggaaagatggatggatggatggatagctagacaatagatagatacatgtggatggatagatggatacatggatagatggataggtagatagatagatacatacatatatacatagatgaaacacacacatggatggatagatagatttatagatggatagattatgtagatagatggatagatgcatagatggatagatagatcagattatgtagatagatagatggatagatgcatagatggatagatagatagactgatcgatcgacagacagacagataaataagtagacagatagataggcaggtaggcaggtggtgaggagtggcctgggcttagcaggagggctaggaggagcagcctcgcatgaagctgcactatcgtcagggtgaagatccgttgcccttggattgtgttttccacccaacagactctcacgaacatgatgtatttggtccccatggatcttcatctgcaccatctagggcaagaggagatgtggtggtgtcctggccacaagcgcaggcaggacccaaggctctggctgtgtccggggcctcaattctatgtgtcctggaggaggcaggggttcaggagtcactgtgtgtctcacttagaaaatgcttgttgcagatccaagatatcgtccggaggcggcagctgctgactgtcttccgggaaggcaaggatggtcagcaggacgtggatgtggccatcttgcaggccttgctga

SEQ ID NO: 40034 - DNA, 2134 bp, Artificial sequence
  DNA replication origin
gagagtccctcagggagaagacagtcactgacctattaacatactccactgtgctagaattttgcttcgttgaaagcagctttgatgccatcagataagactggggaacttgaagtgcctggcatgaaacaagagtctacacatgttggtaaaggagttagacgggcgtttcactttctagatgtctccagaacagtgttttaaaaaacttcagtgtgcataagaatgatctagggtgttgctgaaaatgcaggttgtagttctccagggacagtgagatcctgagaaggtcggggctggggtcagggcctgcacctctgacaggctccgccagtgactctgagccaggcggcccggctggggctctgacagttcactgctcaccaggtgcagggagtgagcctccggtccctctacaagcgttcctcaggccatgtgaccttcaccatggaccccatccgtgaccttctcatttgggccattgtccagaaccgtcgggagctggcaggaatcatctgggctcaggtaataagactggcttctcagtctcagcagacacagctataggccagcggccagctggggagtgtggctggagagagtggctggagagcctgaggccaagtgcacgtggaggctgtggaggggtgtggaggggtgtggagggctgtggaggatgtggaggggtgtggagggctgtggagggatgtggaggctgtggaggggtgtggaggggtgtggagggctgtggaggatgtggaggggtgtggagggctgtggagggatgtggaggctgtggaggggtgtggaggggtgtggagggctgtggaggatgtggaggggtgtggagggctgtggaggggtgtggagactgtggaggggtgtggaggctgtggaggggtgtggaagctgtggaggggtgtggaggggtgtggagggctgtggaggatgtggaggggtgtggagggctgtggagggatgtggaggctctggaggggtgtggagggctgtggaggctgtggaggggtgtggagggctgtggagggatgtggaggctgtggaggggtgtggagggctgtggaggggtgtggagactgtggaggggtgtggaggctgtggaggggtgtggaggctgtggaggggtgtggaggctgtggaggggtgtggaggctgtggaggggtgtggaggctgtggaggggtgtggaggggtgtggagggctgtggaggggtgtggaggggtgtggagggctgtggagggatgtggagggctgtggaggctgtggaggggtgtggaggatgtggaggggtgtggagggctgtggagggatgtggaggggtgtggaggggtgtggaggggtgtggagggctgtggagggatgtggaggcttgtggagggctgtggagggatgtggaggctgtggaggggtgtggaggggtgtggaggggtgtggaggctgtggagggatgtggagactgtggaagggtgtggaggctgtggaggggtgtggaggctgtggaggggtgtggaggctgtgaaggggtgtggaggctgtggaggggtgtagaggggtgtagagggttgtggaggctgtggaggggtgtggagggctgtggaggggtgtggaggggtgtggaggctgtggaggggtgtggagggttgtggaggggtgtggaggggtgtggaggctgtggaggggtgtggagggatgtggagggatgtggaggggtgtggaggggtgtggaggggtgtggaggctgtggaggggtgtggagggatgtggaggggtgtggaggggtgtggaggctgtggaggggtgtggagggatgtggaggggtgtggagggctgtggaggggtgtggagggctgtggaggggtgtggaggggtgtggaggggtgtggggggttgtggagggctgtggaggctgtggagggttgtgggcgtctccaacactgggaaggacttggggcacctggagttggagaacaaagaacttagctctaggcaggaaaggaattttttttttttttgagacggagtcttgctctgttgcccaggctggagtgcagtggcacaatctcggctcactgcaacctctgcctaccgtgttcaagcgattctcctgcctcagcct

SEQ ID NO: 40035 - DNA, 1502 bp, Artificial sequence
  DNA replication origin
gctgtagagcactggcccctctgagctctgcagtgggggacaggacccttccccaggcctccctaggcctggcacagcccaggacatgacgggagctcatggacttggcaatagctcggcgctccaaggaagcccagcgtgcaaggggcactcgctgggagccaggccctgccgggggttccagggcgatgctgagggcagccatgcctgggagcccctgctgctccagggaggacacgccgtgtcccgcttatccctccagggagagagggcagacgccgttcccagagccacctgggcttctgcctgccgctcccaggtaggaacatccatggggaggtgaattgcgatctccatggccaccagctcctgcttttgcttcatgttagcttccccccatctgcaaaatgggaggccagagcctggagcaggtggccgaggggtcaggcgctgtccccgagctgctgagggccctgaagcctgtgtgagtgtgcgtgccaactgcacgaacaggaggctgtgtccgccctgcaggcaccacaggcgtctgtttctggaaggggctcttgggaggtcacctggatgcccccgtgagacacaaacttcatgtccttggcctccagggcgagctgcaggcaggtggtcttcccccaggcctcggacacgcgggtgagcagtttctgggctctctcttcgtccttccggtagcactcggtgaagacccctgggcggagatatgagagccccgtcagagcagcaggtcacaatcactgagccctggggacgggtcagagggcaaccactcgggacagcaccaccaggacacagggaagggcacagggcaaatgtggggctggtgtctcaaaacacccaggcccagggacgaggaccccagggagagggcacgtagggctggaactgcctctacaaaaatgacaacagggagaaaactcagacagggaccgagaactgacctaatggactccatcttgcctctaacctccaagctgcccttgtccattcctgggcataggccacactaactttgagaggaacttcgtttatagtttaacttccaaacagagatgatagcggccctttcccgaaacgaacccccttcttgcctgggagcagtctgcgtttgtaagactaacaaagtagccacaaattagaaattatggtttaggagtcacgcagccagaggccacaagattccaaacctccccaactcttcctaggaatatcatcactattggaaaacccaggatattttgaaagcctgcattctgatgcttcactgacgccaccccgactggagatctggtgcaaccagttctgtgaccacacgcagaaacagcagacagcgagaagaacccacttcgacccctgtgatcatgaatagtagacagtgagaagaacccactttgacccgctgtgatttcatctctggcccaaccaatcagtactccccgctgcctggccccctacccaccaaattatcc

SEQ ID NO: 40036 - DNA, 1084 bp, Artificial sequence
  DNA replication origin
cacaggagctggggaatgaatgcccccagggaggacaccggccaggtgggaaccgcaggaccccctgatggagccggcctcactcccactcatgcggcccctttccagcctctctcctgcttcccggcagcaccacccgagctcccatggcgcccggctcctaccgtcgatgtagcccgggatctgcccgaagatggtgaggtaggagtggtagacggcccctcggaacagccagtccacccggcgctcgttgtggatgaggatggcctgcttggccaccccgaaggacaccacccacacagccagcaggaagaggaagaagaagacgtccttcatctgcaggacagagagtgtgtgggctacactctcctggcccccgatgctcactgggcccagaggcaggcccagcagcggtggagacagcactgccactcacagcacagacacggcatgcaggaggctcccaggagcagtcctggggctgcccccacaccctcgtggactgccgacatctttgtgctagcaccacaaagtgcaagaggggtcagacataaccgtgacccaaggaggaaagctcctagagctgaatcagaggccaggaatgagtgcggtcagacataaccgtgaccaaggaggaaagctcctagagctgaatcagaggccaggaatgagtggggatcagaggggagaatgagggaaggcttcctggaagaggtgacgtacaggcaaagatacgagaagggcattcttgggagcccaaggggcaaagcagggacggggaacctacaggtgtgtttaagccccagtccgagccactggcaaggggcctgccctccccgaggcccaccctgggctgcaggccgcgatggagccggtgcccccgcccccttaccatccgcttcacaatgatgatcttgggccccagcgtcttactgatggtaaaaatgtgcatgagccggaggcagaacaggatgaagtccagagagaggatgacgcgcccggggtacagcgtcgccgggatgagcctggccgccgggcagaagcacacacatctcagccacctgctcacagcagcccccagagc

SEQ ID NO: 40037 - DNA, 1125 bp, Artificial sequence
  DNA replication origin
accgtcctccctctcagctcctcccatcttgcttctttccaaggtgcgaggtcagtgttgggggaacatctgctcccttctctccactgccaggccttccgccctgctaggtgtcagcagggcctaatggcccagcagcgggcagcaggaagggctgcccccagtgtcctgctctcagtgtgcgtctcaccatggcatgagaggaggagggggaaatggacacggtgccacctagttatggccgtgtggaggctcctgcagccacaaacaggagcatcctggagctggcaagggatggccaagaccaggccaagtgccctcccccttagagacatgtatgtactcctgcctttccatacctccctcaccttgtctgtaagatggagacacgatagtccctgtctcttggagttgtttccagaatacagtggggtcctgactgtaaagaattgagcacatatgctggaactataaccagggatctgctaacgtggctggtgcttttatcatcacccttacttatgagtagtgggggcggtggtggtgatggtgatgatggtggctgcgatggtgatggtggtggtggtgatggtagtggtggtagtggtgatgttggtgatgatggtgatgtggtggtgattgtgatggtggtggtgttggtgatggtggtagtgatggtgatgatgatggtgattctgatggctgtaatggaagtggtggtgatggtggtggtgatggtagtggtggtgatgttgatggtgatgatggcagtggtggtggtggtggtggtgatggtagtggtggtgatgttgatggtgatgttggcagtggtggtggtggtgatggtggtgatggtgcttctgatggtggtaatggtggtagcggtgatggtggtggtggtggatggtaatggtgatggtgacagtggtggtagtgatggtagtggtggtgctggtgctggtggtggtgacgatggtggatgtggtggtggtgatgatagtgatgatggtgattatgatggcaatagtaatgacgatggtgacaatgtgaggaccttaatgaactagctgatgtcaaagccccttctagctcccattctgagtgaactagatacacgtgtcctgt

SEQ ID NO: 40038 - DNA, 970 bp, Artificial sequence
  DNA replication origin
agtaggagctgggccccttcaggcccccacgggcccctcctgctcacctggacctccccgggctgggctctgactgggattctcaagggagcccctaggaggccctgggtttggggccagctgggagcacggacagcggctcatactcactctcccatggggtccatggcggccgcgtccttcctctctgccgtgtaaaagggtgggtcatagatcaggaactccgtctgtcgcaaaacagggagttttccctcagatttttacccccactgcaaagctgggccaggcaccagggtgaaagggctgctcagctgggtctgaacccgaccccaacatcccaacatgcagggcagaagctccaagctgggcagatccgggtgccaggcagagctgggggctgggcagggccgggggctgggatcagggacccccaccctggggccagctgaagggcaggtggccgtgacttgggggccttgggggtcttcccagagtggggcagggggctaagctggaccctagaggcaaggaggattctatgtggtagagaccaaggggaggcagcggaagcagcagcctggaatgttctggataggccagagagaagccctgcaccaggagggcgggggtctcccaggggccattagccatctctctgtctctgtgtctctgtctctcttccatgcctggcacctggaaaggggccagagccattcaccggggtgggtggggtctaggaccagggcatgacctgggggaatggggccggggggctgggccctgggatggtcatgggaggagcctaagcctcgagctctgtggggatcagtgtgcccccctcaggcccctccaccacctccagctgtgaggcccctgtgacttgacttctctgtgcctcggtttcctcaaatgtcaaacaggggctgccagacgcacagatccccctgtggctgcagtggctgggagccag

SEQ ID NO: 40039 - DNA, 1190 bp, Artificial sequence
  DNA replication origin
acccagcctgcagctactcggctgggcccttggtgggggggtgatccctctgcctgtctgctctgtcccacctgcaacacgggcacacagacacgccttctcctctgctcccagcaccctggagccactgtccacgatccagtacaacgtggtggatggcctgagggaccgccggagcttccacgggccgtacacagtgcaggccgggttgcccctgtgagtgtgccccctgcgggccccgccccgtcagcctttggggtttgcctggggggcaggtttcctctctgggcaaaggaagcatttttctcataaaacaaaatcaaaaaaagcacgtgagccaccgaaaggaagaaaacatcaactcactgcatctccgtagcccccaggactgggcttgggggcgtgggacttgccccctggcctcgggcaggccctgccccatggtccctgccgtaatctggggacgtggatttgtctgtgtacgtggggatggctgtgctgggagaggacgatgcctcagaggatgggcaggggctgtgcggcagggaggggacacggagatgggcactggcaggcttacctggccgggaaggtggcctcgcctggcatcctgttccccacaggatcggcgctgcacccatcacacaggtgaggaaacccaaaataaaggtgtcaagtgtcctgtgagcacctacaagtgccctggaaggaaggagcctgggagtcttggaccctgccatgaggaggaggtggaggaggggccaccagaacctgggactggggggttgccgggatgtggggcatgaaccatggagcagaggaaccaaagggtctgaaggacggggggactgcgtggcaggcctttgcagaatgctctggaacagggtgtgggctcctctgcctggagccggaggttgagtaaggaggtggtaggaggcgatggggcctgagagcagaggtcctggccaggtggctgcagctgcaggcggcccgctctggtgttgggggtatgtgggacgggcaagggcgggtgtttagggaggtgcatccggtggctatgggaagctgacgaggagagcagcaggtgcctggcatgggcaacaaggcgtgagcacctgctctcacgggtggctgccacacaggcaggtgtgtcaggacttggcaggacgtggtgtccatgcgggctttag

SEQ ID NO: 40040 - DNA, 997 bp, Artificial sequence
  DNA replication origin
tgggtggggccggggctctggtttctgagcagcttctggggaggctgcctgggccccaccgtgcaaggccccccggccacagaggagaccgcagagtgagctgggagggctgtctgagaggcctggccaggtgggccctacacactgggcatgttctggtgcggactctgatcgctgtgggctcgggcaggtctgcgcagaggtgtgacgagagctgggacccctgacagctgggcgggaacagggtggctgctgaggggtaacagagaggaggggctgggtggaggcagggaggccagctggaggctgccccgccaggcagggtcagggacggtagcgcaggcctggctggtggccgccggtgctagaggtggtcagctgtcctggggcagccacggtcagctgtcctggagcagccacgcactgccgcgcagactcaggaggatggagtctaggctgtggggagaggaggccatgaggggtgggtcagaggctgcagctctgatggggtctggaggtcagagtggaatggtggaggaacgataccactgtccccactgtggcatggatggtggtggggactgtggtggggacggtggcggggacgctggcggggactgtggcagagacgctggcagggatggtgacggagactgtggcgaggactgtggcagggacgctggcagggatggtgacggggactgtggcggggacactggtgttgggaacgctggtggcggggatggtggcggggacggtggcagggatgctgtcggggactatggcggggatgctgctggggaccttctgtagacgtggatgccgcccccaccgcacgatagcggcagtgcatttcttccttctgttttagtggtacattcacaggaaatcgcccgtttctagaacttgctgtttcatataggacctggtggtgtcagggagaccagcctggccccatgggaagcgtctgtggctcctgctgcccgtggttagcaca

SEQ ID NO: 40041 - DNA, 1307 bp, Artificial sequence
  DNA replication origin
cacctgggggtgatgtgggggtgacatggggtgctgagtgcagcccagggttgacatgggggtgacatgggggtgacgtggggtgccaagtgccacctgggggtcacatggggtgcagagtgcagcccgggggtgacgtgggggtgacgtggggtgccgagtgccacctgggcaggccaaggagaggccaaaggactggggagcagagagtgactcgcaccccagggccatgtctgcacggccagagaagccactgggtgagagtggctgggcagcaagaggaccctgaggccaaaggcccctccgctggggggaggtcccagctgtggaggcagaggccccagagagcacagggcacagcagctgggcctgggccccagaatcccattcctgcccaatgggggcagcaagagcccccggcagcttcctcagggacgcaggcgtctgcacctgcacagaaggcggcccgtgccttgggtgagagcagtgggccagctgctggagtgcagaggagtgagcctgagggggtgagtgtggagctgtgtccctgtgtgtgaatgggtgtggaggaatgagcctgtggtgggggttgagtgtggggctgtgtccctctggatgagtatggagagggtctgagggggtgagtgtggggctgtgtccctgtggatgggagtagagagtgagtctgaggggtgagtgtggggctgtgtccctgtggatgggtggggaggagtgagtctgaggagagagtgtggggctgtgtccccgtggataggagtggagagtgagtctgaggggtgagtgtggggctgtgtccccgtggatgggtgtggagagtgagtctgaggggtgagtgtggggctgtgtccccatggatgggtgtggagagtgagtctgaggggtgagtgtggggctgtgtccccgtggatgggtgtggaaagtgagtctgaggggtgagtgtggggctctgtccccgtggatgggtgtggagagtgggtctgaggggtgagtgtgggactgtgtccccgtggatgggtgtggagagtgagtctgaggggtcagtgtggggctgtgtccccgtggatgggaatggaggagtgagacttaggggtgagtgtggggctgtgtccccgtggagggtgccctctaatgggcagggaccggcaggaaagtgaaggcagccccgggagaggggatgggtcctgggatcttcctccaggatgggcagcatggacattcctgccccatttcgggcatattcacgtttatccacagacgcctcccgcatccccccagtaggcaccaag

SEQ ID NO: 40042 - DNA, 1154 bp, Artificial sequence
  DNA replication origin
gccatggtgtggagcacttcacaacattgtgcagccaccacctctatccggttccagaacgttccatcaccccagtcacccccagctcctccccagcactcccgcatctgcttcccatctccttggatttgccggttctgggtgtctgttatgagtggactcctacaacaggtggcctttgaaactgtcttccttcactgagcagacgtttccaaggcgtttccaagatctctgcagggcaaggacgtgtctgtccaggatgaagcccgcattgggctgctccgccttgcaggcccaggcaggctggcgggggctggggagagctgggccggggtcctgtgtgtgctggaagctgtgctcagagctgggtcagggtggagggcacgaggtgggccggggcaccgctcaggtgtccctcgctgtcgggcttaccctgccctgcccatccaggtgtacaaaggctacatggatgacccgaggaacacggacaatgcctggatcgagacggtggccgtcagcgtccacttccaggaccagaatgacgtggagctgaacaggctgaactctgtatgtgcctggcctccctggaggcgggagtggggaggcagggacgggtatgggcgtggcctccggggagggggttggcagggatgggggtctggattctggcaggctgaactctgtatgggcgtggcctccggggagagggaaggcggggaccggggtctggattctggacgtgcctcgagggcttccaagggagggacctggccgtgctcctggggcccagggccagaaactggaggctacagggtcagagtcttgcccagaaagtgacaaagggggcaccagggagaggccggggagccacctcaggtggccagagctcacagggctggccaggcgaccatagggccctgtgtagttctgggacctgggtcctccagggaggcctcgaagatggcatccaggggtgaggctggcaaggccccctcagcccccggctgccggcttttagctctttatggggatgtggattcccagtacttggattaatcctgcatgctcctaattcagaactgggatgggaaattccataaataaccccgggctttaaatgcgggctaaatagctcccggcaaagctgcacctgc

SEQ ID NO: 40043 - DNA, 1144 bp, Artificial sequence
  DNA replication origin
tggcagaggtctggacccacggccagtaaccgaggagtcacaggccttccctgtggcacctggaggctggattgcacgtggaggctgcattgcacatggaggctggattgcacgtggaggctgcattgcacgtggaggctgcattgcacctggaggctggattgcacgtggaggctgcattgcacctggaggctggattgcacatggaggctgcattgcacgtggaggctgcattgcacgtggaggctgcattgcacgtggaggctgcattgcacgtggaggctgcattgcagcaggagagggagctggagaggggtggggtgggccacatccaggctgctttgtggttcaaacccgccacctgcgagccccttgggagtggcggatgctgaccacagatgcagcttccaggacctcccagccctgctgcctctgagcttcaagaggggcctgaagatctacatttttatcaaaccccaaggtgactccgtcacaaaagttggtgacgggactgattctaagcagggcataaggggtcagttgtgtccttggtgacgctgatggggtgagggggatacctggggacaagggggtggctagagagctttgggtcaggtggaagacagaggcctgtccagggaagggtgggcatcacctcggccagtgctcagtggccaggcagccccaggctccatccggagcctctgcaggggtgccagggcacattggcaccaccacgcaggggaagccaaggaggagggcatgtggatgcctgcatcctggcctggtgggcttggggacgatgctggagcccaggtttaggaaaatgaagacagggagctgatgggtcagaggagaaacttgggggtagggctgaggggctgcaggacatccacaggctgcaggaagctcaccgggggatcgaggagaacttcaggcagccgtcacacagcccctggccctggacgtgtcaggaactttatttgtggaaagcacagaagagccagccaggcctgagatggcagatttaatgtcttgggttttaccacgttcccctcctgagggccctcatggttcacgctcctgtgagctgttgacaccaaaccagaaggcccccacgtccccgcctcctgctcatgccgtc

SEQ ID NO: 40044 - DNA, 1953 bp, Artificial sequence
  DNA replication origin
gccagccctaaaggagccgcggctcgcaccgggcacagaaccgcgccttttctttcaactgcctgaagaaggaaaccgagaaaacagagaagccaagccctgtgcgcgcggcccgcgctgggcgtggacggcggggccgcgcgcggagccggccgggagaggctcggacccccaggacctccagcctttagaccctccggccctaggacccccggaacctgggacccccgagaccccagcactcgcggcggggggatggtcatggggtgggtgggaatccacgctcccagggctgggcgggggctttacctgcgcggcggcggccggaggctgctctgcgcgccgctcccgggcctctcggagcccgccagacccagctccacgcctggcgcggcggccaccccgctgcccctgcgaccgcgcccgcgaccactagctggggaggccgcgactccggcctgcgcgggcgaggggcggggtggggcggggcctggagggggcggggcgaaaggcggagacaggctgtgtcgattccccgcgggggcggggaaggggcggggcatgtaaggagaccggaacgggatttgtggttaggcgggggcggggcttgagggcgggttctgcggcagggcggggcctggaagagatgggggaggggcatgggaggggcatgggaggggccggtggtgcggctttagatggagctggtactaagacccaggtcgcaggggctgtgggcgggttgtgggagtaattgtggcatgctgggggcgtggttgtggggctgaggacgaggtggtgggggctgagggcgtggttatgggtgggggcggggtctgcgcgccgggaggggctgtgggtccagcccctgcccctcactctgggcaaatcccctcttccctctggcatcaggacttctggggcttgaagaccctgggtctgcgggaagcccctgctgagcgtccctcgcctaccccgtggccagtgggtgagtagggctagatctccgcccatctaggtccccttctgctccagctccagcgtctgacatcccaaggaaggaacgcagggtgggggcatttgagccggacctgagccatcctcatggttttcaaaaagtagccttattgtggtgtaattgacagacggtaagccacatatttcaatttggtacgttttaacactcggatactcctgtgaaaccatcaccacaatcagcatagtgaacaccccgggttccctcttggtcatctctccctgccctccctcatccccaggcaagcactgatctgcattctgtcactactgattactttgcatttcctatgatttgcacaaatggaatcatataatatgtactttttgtgtagcttctttcactcagcacaattatttttgagatttgcctgcgtcatttggtttgtcaatgcgtatttcttttacagctgcatggtactccagtgtatgaatgtaccacagtttgtgtccattcacctgctggtgggcatttgggttgtttctggtgttggctcttacagataaagctgatccgaacattgtgcacaagtctttggatgaatgcttttctttctcttgaatagatgtctaggagtggagtggctggatgccacggtagccatatgtgaaactttttaagaaactgccaaagcgattgtatggttttacattccacatcctccccagcacttggtatggtttgtctttttaatttcaaatactctaataggtgtgtggtgatagatggaactgtggttttaatttgcgtttccctgttggccaatgatgttgagcatcatttcatctgtttattctccatctcctgtagtaagcgttgagttcaaatcttttactcacttttaattgggttgtttattttcttattattgagtttgggagtttgttgcatattctggatacaagtcctttatcaga

SEQ ID NO: 40045 - DNA, 1110 bp, Artificial sequence
  DNA replication origin
ggcgctgggcagagacttcaggtactccaggtgcctccgggcatcctcctggttgtggcgcacatagtacacgacgtaggcgatcaccatggcgaaccagccgaacatggtgaccagcatggccacgtctgtggtcctgtgggggacgctgcagaggctggcacccgcatccagagcctgaaccagaggcttccccacaaactcctcctgcactgaggtgtggcaggcgatctcgtccacagagtcggggtccagcttcagctcccacagggcctcctgcagggcgcactcgcagtgcagggggttgtgggacaggcgtatcttggcgctgagtttgcccagggcgtccttggggatcctctggatgcggttgtaagacaggtccagcagccgcaggcccccggccaggcccgcgaaggtggcggagccgatggcctcgatggcgttgtgagacagatccagctccctgagccggtgcaggtgctggaaggccccgtccgggaggtgggagatcttgttggcatcgagcttcaggagcacggtgttggccgggatgtcctcggggacctcctgaaggccccgcaagctgcagaagacagccacagcccctgcgtggtcagggcaccggcagggctgtgggcaggcggcgcccaggtgcaggcagaagaggaggaagagacaagactcccgggtggagaccagcaggagcgaggggcgaggtgggcgcacggtgcccatcctgacctgacctggggacggggacacgcgagcctctgctagggcctggggatggagctggtttccgcaggcaaggccttatccaaccagacatgaaaccgccatcctgccccgctgggagaagcagtgcagtccactctggcagctctgaaagggaagacgcaggagggagcggagagggagggagggtggtcagcactgccggctgcggtcacctgggaaacgcgtccactggtggggagggtgttgagggcccactgaagggtctggggtggggagcacgcctccttaaacagctctgcctgtaacttacttctggagactcccaatgcgcccgggaggagcgtcccacaagtgcagggagctggcact

SEQ ID NO: 40046 - DNA, 1502 bp, Artificial sequence
  DNA replication origin
ctcctacttctcaactcttaacaaaaaggtctctgaaaaggaatttggaggaaacagactattccagtgaatagtgtacaagcctgggagatgcggactttggtgtaaaatgaaggtgtgttcaaagagcaaagaaggagttcgggttttagagcaaaaagctcctgccctggggtccccattaggtccatgtaggcaaatgaaggattgaaacgtgcttagttctgattggttggtacagctgggccctgatgggttggtttccaagccgcgaaccggaagtctttgttagctgtttctttcaaacagtggtggggggcgtgaggggcgtgcggggcgtcgggggcgtgaggggcgtgcggggcgtgaggggcgtgaggggcgtgcgggcgtgaggggcgtgaggggcgtgaggggcgtgaggggcgtgcggggcgtgaggggcgtgcgggcgtgaggggcgtgcggggcgtgcggggcgtgcggggcgtggggggcgtgcgggcggggaggagggtgggggccgctctggctacagtttatcttggcactaacaacggggactgattgggcttcgttgtgaaaaggggggccctgtggtgcgtttacagagtctgagaacacagagttcgtggccactccctcacccagccctgggcaccaggttatgttttaaatttgagcacctcagccatggggaaccccttttgtttgtcagccagggcatagtttaccaatcccaaatctgtaatctctctcttaacaaatcactttctacccaaatacagatccttaagggcagggcctctggttcatttttgtcatctccacctagcggagagcgcggcacacggcaatgatacgggagtgcgggggaagggaagagtgtggtccctttaaatgatacagaagggaggtgctgggtagaggggggcgtggtccccggctagggctccacccccccggacctgggtgaggacaggcacttctgccttcttgccccaatgttgcattttccaagaccaccctggcccgccatgcccccattctgagcctataaaaacccgagaccctagcagggcagaggcagaaactgctggatgctgagaggaacgcatcagtggaagaaaacaagcggctggacgtggagaggacgtcaagggagcatgccggcggaagagcacaccacagacgccggcaggccaccgagcggcaggaccaggcggagtttggccggggcagtcggaggagagctaggccactaagcagctcaactccaggagataaaccatctcccttgtggctcctccgtcggctgagagctgcttccactcaataacactttgcactcgttctccaagcccccgtgtgatccgattcttctggtacacccaggcaagaacccaggatacagaaaggcctcggtcctttccacaagtacctctacttgaggtactcattgacctggttaacacaagctgcctacagacgccaaaactaag

SEQ ID NO: 40047 - DNA, 1051 bp, Artificial sequence
  DNA replication origin
ctcagtgatgagtgaggtgccctccctgcccaaaggagccctggaacgggctgctgcagatgggggaccatggaggggctgcccggggccttgggggcacagaggaagagggcccaaaggcatggaggacggacaggggagttggcagcaggaagcagggaagggtatccaggcagaaggaactgcaggacagacacacaggactgagggagccaggagggctgggcgcacacagagtgcggagcaggggctggggcgggcctacagggcctgggtgctgtggaaagcagctgggcctccaggcaaaggtcactggggagccggaggaggcttttgagcagaacgaggaggtcagatgtatgtggacggctctgagacccacaggagctaggaaggtgtcaggagagaggtgagccaagtgctgtgggggtggggtggggtgggtgccactcctaagatgggaaagaagggtggtggtcttggagacaggcttctggagacccctcagagaactcggtacatccctagggatggagacaggggctttgggagaccactcagagaacctggtatttccctaggcatgggtggcacacgggctgctgtgtgagccctggggaggggcaggtggcaggagcgtagggtggaggtggcggtgctctggccacagccctgaggctggtggagaccctgggttgggaatgcgcgagacgggcagtctggtctggtgggacctgtagcactgcagcctgcctccagggcagggattgtgcccacgtttcatggggtggcagggagcaaactttgagttgcatcttggttggagcccaaggtggggcgtgtatttgttccaggaagagcacgtgtcagctgtgggggtgggcatggaggtctgtccagggcatggcagtggccggagtgaatgctgtgtggtcacctgcctgggtgctgctacgaagcagagctcttgctggagtgcagggccagacaggcctggggggccgggggcggctcagaggctgctcaagtcacccttctgttccctgtaccc

SEQ ID NO: 40048 - DNA, 2175 bp, Artificial sequence
  DNA replication origin
gtccctccaccccatggctcctggcccctggtcggctcctgccccgtggatggctcctgcccctccaccccatggctcctgaccctggtcagctcctgccccaggacagctcctgcaggtgttgctcggcgagcacggctgaaggatgcctggcctggcaggactctgaggactgcaggtgcaccctccccgggtgggtacctacatgtccaccgggaggccgcagtccgtggtgagggagaagacgcctgcggacacagccaggaccagtgtgtgccagcggccatccaccagggccgggctgcggaaggacactcgggtctgccaggcgccggccgtgtcctcgcgaaggaacaggaagtgcagctgggcaggtgacaaccgcaggccgagcagcagcaggtcgctctcctctgccaccaccgtcagcaggtactcgttcctctgtggagagcgggccaggctcaggacggggctgggggtaggggtcgggtgcgggggcagggcagatgggaatggcagaggtgatgagcacaggtggtgagaggagcaggggctgactggaggggcgaggtgagggggcgcggtggatgggaagggcagggtggataggggccttctaattagccctctaatggggagggatggggttgatggagcgctagggctggtgccaggggtggagctggtgtgagggggcggggctggtgtgtgaggggtggggcttgtgtgagggggcggggctggtgtgtgagggggcggggctggtgtggggcggggctggtgtgtgaggggtggggcttgtgtgagggggcagggctggtgtgtgtggggcagggctggtgtgtgaggggtggggctggtgtggggcggggctggtgtgtgtggggcagggctggtgtgtgaggggtggggctggtgtgtgaggggcggggctggtgtgtgagggggcagggttggtgtgagggggcggggctggtgtgtgaggggtggggctggtatgtgacagggctgatgtgtgagagggagggctgctgggccaggggcaaggctggcgccaggccgtagggaccggcttagtcaggagcacgggtccatggtaaaacccaaaggcacccccacacactaggatggctaatgcccaaagaacagaatgtgttatgctggcgacactgtggagaaactggaactcttgcgcactgttggtgggaatgtaaaatggtgcagccactgtggaaaacaggatggcagttcctcaaaaagttataaacagaacgaccaaatgattcagcaattccacttctgggtccattctcaaaagaatcgaaagagatacttgtacacacatgttcatagtggcttactcacaattgccaaaaggtagaagcaacacaagtgtccacgaacggatggatgggtaaacgcagtgtggtccaaccacacagtggaatattagtcagccataaagagggaaggaaatgctgacacatgctgcaacatggatgaaccttggggatgttccacttatatgaggtcactagactggtcacattcacagagacaaaaggtagaatggtaggtgccggggctggggggtgatggggagtaagtgtttaatgggtgtggagtttcagtgttgggagacgaagaagttctggagatggacggtggtgatggctgcacaacaacatggatgtcctgaatgccactgactgtacccttaaaaatagtttcgatggtaaattttacattacgtgtattttaccacaattaaaaaacaagaacgtatacaaatgcggtgtccaccaagacctcagagctttttggcttcctttccaatttgggttatgtgaaacaaagcacttgattatacttatttccaacttagattccattcattcctagcccaacacaattaaagaattgaaagtgattaagcctgaaaggtaaagcaggtatgaaaacagttagacagcatacagtcacgtacggccagagcctgtttcagttgacagtggacagcacaggggatggtggtcctgtaagattgtaacactgacgttttactgtatcgtgtctgtgtttagaaacacgaatacactgtttgtacactgcgactgcctgcagtattcccacagtagcgtgctggaagtagctgctcactgcaacctctgc

SEQ ID NO: 40049 - DNA, 859 bp, Artificial sequence
  DNA replication origin
aggtgcagcaagctggatggcagctagactgctggcagcatgaagaggaatcctcagagcaggtgggcacatagcacacaggcttgcagcaaacaggcacacagcaggactgctggctggaggaagaggcacagcaagttggctggcagctagactgctggcagcatgaagaggaatccttagagcaggtgggcaggcagcacacaggcttgcagcagacgggcacgcagcaggcctgctggcagggggaggaggtgcagcaagccggctggcagctagactgctggcagcacgagggcgtgcaggagctggtgcagcctgattggcaggggctgggctcacaggctgcctggcagcaggggctggacacacggctcactggggtgcagaccagggtcaggcagggggccggggcgcagcagctgagggcgcagcagtggggctcacagcagctctctgggcaggcatccacctgccaggagtcggagcaagcgctggagcagacggacatggtggacgcggccatgctggggtggggaggaggtgagctgcgggaggtgtgagtgagtgagtgtgggagtcagtgtgtgtgtgagtgactgagtgtgtgagtgagtgtgtgagcttcgtggggctctgcttttataccccttctggccttgttgttccagggcccacagcgtccccttcctggttgctgagaggtggcgtgtgtcatgactagggatgtttgtttgcctgtgatgtggcccaggtcataaatctcctgtcctgtctgggctgtagcctgtcccatgtggatccctgggggcaagagtggaggtggacctggtcccagcacgccaccagtgcagtccgg

SEQ ID NO: 40050 - DNA, 1029 bp, Artificial sequence
  DNA replication origin
gtggggcgttggcctgagtcatgtggtgtctgtgggactcagccaatgaacaaggcttttgggccccacaggacctgggaggggagccggacagcagaacgtgccacgaggtggacaggagcttccaggtgtcacacaagagccccccggggcccccagctggggaagtaaagagatccacggggcccagccccccagagccaggccaggccccactctgccccctcccgccctgggtgcggagagtcagcacggagtcagctggggccgcagacgctttattggtgctcagaggcagagggtgacgctcctgggggtgagacccaggtcaggagggcccatccccaaccagcgaccagcgaccagcggagggttgtggtctgcagccaggaagcaccgtgaggagaagccagggctcgcccgcccggcgggaggtcagagaggagccagtgagcatctgagaccccggggctgggcggctgtggctggggctgctccttctgtgctgagctgtgctgaggctgggtgggctgggaggtccaaggactggcagggaggtggggcctgagcccggctggccctgggggacatggccatcagcagctagacttttggcctgaggaaaagctgcaggaggctgggcgggagcacacggggcggcagaggagggacacagaggaggagggtctgcagcaggaggaggtgcagcaagctggctggcagctagactgctggcagcacggagaggaagccccagagcaaacaggtacacagcagatggacttgcagcagacaggcttgcagcagacggacacacagcaggactgctgacacggggaggaggtgcagcaagccggctggcagctagactgctggcagcatgaagaggatgactcagagcaggtgggcacgcagcacacagctttgcagcagacaggcacacggcaggactgctggcaggaggaagaggcacagcaagctggctggcagctagactgctggcagcatgaagaagccccacagcagacg

SEQ ID NO: 40051 - DNA, 807 bp, Artificial sequence
  DNA replication origin
agcagatggacttgcagcagacaggcttgcagcagacggacacacagcaggactgctgacacggggaggaggtgcagcaagccggctggcagctagactgctggcagcatgaagaggatgactcagagcaggtgggcacgcagcacacagctttgcagcagacaggcacacggcaggactgctggcaggaggaagaggcacagcaagctggctggcagctagactgctggcagcatgaagaagccccacagcagacgggcacacagcacacaggcttgcagcagacgggcacgcagcaggcctgctggcagggggaggaggtgcagcaagccggctggcagctagactgctggcagcacgagggcgtgcaggagctggtgcagcctgattggcaggcgctgggctcacaggccgcctggcagcaggggctggacacacagctcactggggtgcagaccagggtcaggcagggggctggggcacagcagctgggggtgccgcaggggagctcacagcagctctctgggcagtcgtccacctgccaggagttggtgcaggcgctggagcagatggacatggtggaggcggccatgctggagtggggaggaggtgagctgggggaggtgtgtgagtgagtgagtgtgtgtgtgagtgtgtgagtgagtgtgtgtgtgagcctgttggctgctggggcttttatatgcccagggcctgtgttttcccagcaggagactcagcaacgccctccacttccgtgttggtgtttggagccgggaggaccctcattatttctgcttcctttgccat

SEQ ID NO: 40052 - DNA, 729 bp, Artificial sequence
  DNA replication origin
tgcagcaggaggtggtgcagcaagccggctggcggctagactgctggcagcatgaagaggaagccccagagcagacgggcacacagcagatgggcttgcagcagacaggcttgcagcagacgggcacacagcagactggcttgcagcagacaggcacgcagcaggcctgctggcagggggaggatgtgcagcaagctggctggcagctagactgctggcagcacgagggcgtgcaggagctggtgcagcctgactggcaggggctgggctcacaggccgcctggcagcaggggctggacacacagctcactggggtgcagaccagggtcaggcagggggccggggcgcagcagctggtggcgcagcaggggggctcacagcagctctctgggcaggcgtccacctgccaggagtcagagtaagcgctggagcagacggacatggtagacgtggccatgctggggtggggaggaggtgagctgggggagacgtgagtgagtgagtgtgggagtgagtgagggagtgagtgagtgatcgtgccaggcctctgagtggtcggaacctttatacccctctgtgttgattgtgctgcccctgcctggcttcgagaagccttcctcttccttgttgttgttgtaggcactgttgtgttagtagtgttggttcattgtttgtggatgttctggtttgtgaggctcctgactggagttagggcttccctaatgtggg

SEQ ID NO: 40053 - DNA, 1107 bp, Artificial sequence
  DNA replication origin
agctgggggcgcagcaggggggctcgcagcagctctctgggcagtcgtccacctgccaggagtcggagcaagagtcacaggaaccaggaaggcagacgcggctgctgtagctcaggtcgctggagcagacggacatggtggatgctgctgtgctgggggttgagctgggggagatgggagggagtgggtgagcgagtgagtgaggtgctcgggtttgtggggcttttatactcctccttggtgcatgttgtccagacaggaggctcagcaagccctcccttccttgttggggtgtacagccagctccaggagaataaacagtagctgtgtttttgtttcccaagagctgttgctcagtttacaaaacttggaattggcctggggcgcatgtgcgtgttttagactcaggaggaagagctgaggggcagttcaggctgtgctgctttgctccccaggcgcacgtggagggtggcatggtccacgtgtgtgccgggctatggggagtgggtgcctgcgggtggctctgccgtgtgtgtgctggactatgaggagtgggtgcctgtgggtggctctgccgtgtgtgtgtgccaggctatggggagtgggtgcctacgggtggctccgctgggccttggttttctaggctgctgaacaagatcatgtgcctctgtgattgaaagcttagggagagaggtttgtttgggttctaagtaaagataatgtgagtcatggtttgtatgctgtaatgtattcttttccttgggctgccatgacaaacagtaccacaaactggctggtcacacaacagaaattccgtgtctcatggttttggaagccagaagtctgagatcgaggtgtggacagtggacagcatgggttccttctgaggctgcgaggggcactgtctcaccccgctcccctcactcctgtgggctgctgctatctttggggtccttggcttacagtggcctcacctgagctctgcctttatcttcacacagcttctccgtgtgtgtgtgtgtgtgtgtgtgtgtgtgtgtgtgtgtgtgtgtgtgtgtgtccaaatctcccctttttataaggatacaaagcattattgcagtaggg

SEQ ID NO: 40054 - DNA, 871 bp, Artificial sequence
  DNA replication origin
cactcattcatagaaacagtcatggctagagaccaatctgagctcaaaaccatgtatccccaggagcactacagaaaaagagaatcaggcgaccaaggggagtttattggggagcaggaggaggtgctgacaggttcaagtcgaggccaagtgacatggggcagagaagctgggagggaggacaggggacccaacaggcaggtgggcccctgctgggaggcaggagctggggagcttcgaggatggagattcctgggagtatggaggggggggtcacctcagcacatgggggccccgtcccaagcgggggcaacctcctaacccgagtcaggaccagttggccctgggggatgtgcacatcagcaactggactcctggcctgagcagaggcctcagcaggccaggggggagcacgcggggcggcagaggagggacacgcaggaggccgggcggcagcagctggcctggtaggaggaggcaggggcacagcaggaggagatgggcaggcagcaggcgggcctgcatatggggcggcagaggagggacacggaggaggagggtctgcagcaggaggtggtgcagcaagccggctgacagctagactgctggcagcatgaagtggaagccccagagcagacgggcacacagcagatgggtttgcagcagacaggcttgcaacagacaggcacgtagcaggactgctggcagggggaggaggtgcagcaagtcggctggcagctagaatgctggcagcatgaagaggaatcctcagaacaggtgggcacacagcacacgggcttgcagcagacaggcacacagcaggactgctggcaggaggaagaggcacagcaagttggctggcagctagact

SEQ ID NO: 40055 - DNA, 857 bp, Artificial sequence
  DNA replication origin
tttgcagcagacaggcttgcaacagacaggcacgtagcaggactgctggcagggggaggaggtgcagcaagtcggctggcagctagaatgctggcagcatgaagaggaatcctcagaacaggtgggcacacagcacacgggcttgcagcagacaggcacacagcaggactgctggcaggaggaagaggcacagcaagttggctggcagctagactgctggcagcatgaagaggaatccttagagcaggtgggcaggcagcacacaggcttgcagcagacgggcacgcagcaggcctgctggcagggggaggaggcgcagcaagccggctggcagcacgagggcgtgcaggagctggtgcagcctgattggcaggggctgggctcacaggccgcctggcagcaggggctggacacacagctcactggggtgcagaccagggtcaggcagggggcggtgccgcaggggggctcacagcagctctctgggcagtcgtccactcgccaggagtcagagcaagcgctggagcagacggacatggtgcacgcggccatgctggggtggggaagacgtgagctgggagctgggggaggtgtgagtgagtgagtgtgtgagtgagtgaaggagggagtgagtgagtgaggtgctcagggctgtggggcttttaaatccctccctggcgtgtgttgtcccgacaggaggctccacaagcttctcttccttgttggtgtttagagctggtggctggagatgcgtcattcatgctggtttatctgtttgtttttccctcattaaacttgtgtgtatgttgcagggccgtgtttcttcatcggttcttattttagccccagaaatgtgg

SEQ ID NO: 40056 - DNA, 1347 bp, Artificial sequence
  DNA replication origin
ggtcagaggtgagacccccccaccaggagatgtcctccctggggatggccagacaggctgggtcctgtcggtgcctcggacgagggcaggtggggacaatgacaaacatggaggaggtcagagagccagccccggcccctccacctggctctctgttctgaccttgtagccatcagtgggcatagtgaggtgggtggggctcagacacgcatgtgtggggagcccctccccaggatggtcctggagccctaggatgaaggctcggcccctgccagctacccggagaaccagggcaggaagaaaacatctctgcccctggaggctctcatttgtcccttcatggggacgtggctttgcttccaaggaggtggacaaggctgtgtcagtttggcctccggccctggggacggctgctgctggctgtcctgggtctgcctggaggggagtgagcgaggcggctgtgctgaccacagggagctccatggggtgggactccgggaggtcctcctgctggtgctggtcgcctctggcgttgacatgcaagggtcatttgctggggcaggaggcagacctgggctctcaaatgcacacagcgacctggcagaaagagtgcagcggctcgtaccactcgcccaacgcggtatcgtggaccacgtctgagtgccagagcggagggtggcagacagagctgagggctatttggagagacctaggaggctgggggtgtggggacagggtcctcggggtcagagtccaggaccacaggaccaggagggagccaggaccctgaaagtctaggcgaggccgcatggggcaggggggcccgcaggcttggttagtgggtgccatggtccctgcccatctgtgttctcgccagcgatgcctgagcaatgggtattccagaaccccacgaatactgggctgctgggctcgagtcctgggggagggcgtggtccccatgtcttactgtggaggagatgagggctgcagggatgggcactgtggtccatagctggtctccccaggggtaacaggaggggtgaggctgctggctggagctaggccccgggtgggctaccccagtcctggggggcagccatgagctggggagggtgaatgtggctcaggggcccagagtgctgccagggtccactttgtcccgaaactcctggccttggttccagaggcagctttcctaagatgggccggggggccatgtgctggggttgggggcccacggggctaagagggagactggccttcagggttcacagaggccagcaccagaaggcattgcttcctgcctcatcccatgcccctcgggggtccacagacaggatgaaaagt

SEQ ID NO: 40057 - DNA, 839 bp, Artificial sequence
  DNA replication origin
ggagctggtgcagcctgattggcaggggctgggctcacagaccgcctggcagcaggggctggacacacagctcacacagctagactgctggcagcacgaagaggaaatcccagagcagacaggcttgcagcagacgggcacacagcaggcctgctggcagggggaggaggtgcagcaagctgactggcagctagactgctggcagcatgaagaatccccacagcagacggacacacagcacacaggcttgcagcagacagtcttgcagcagacgggcacgcagcaggcctgctggcagggggaggaggcacagcaagccagctggcagctagactgctggcagcacgagggcgtgcaggagctggtgcagcctgattggcaggggctgggctcacaggtcactgggcagcaggggctggacacacggctcactggggtgcagaccaggctcaggcagggggccggggcgcagcaggggggctcacagcagctctctgggcagtcgtccacctgccaggagtcggagcaagagtcacaggaaccaggaaggcagacgcggctgccgtagctcaggtcgctggagcagacggacatggtggacgcggccatgctggggttgaactggtggagggtgagggagtgagcctgtgaggtgctgaggctctcgggcttttattccacctggccttgttgtccccgggcccacagcttccccttccgtgttgccgagagctggagtctgccgggattaggggtgtttgttcgcccgtgatgtgggccagctcataaatctcccatcacatctgggctgtgtcccatcccatgtggatccctggcgg

SEQ ID NO: 40058 - DNA, 867 bp, Artificial sequence
  DNA replication origin
ctgggctcacagaccgcctggcagcagggactggacacacagctcacacagctagactgctggcagcacgaagaggaaatcccagagcagacaggcttgcagcagatgggcacacagcaggcctgctggcagggggaggaggtgcagcaagctgactggcagctagactgctggcagcatgaagaatccccactgcagacaggcacacagtacacaggcttgcagcagacagtcttgcagcagacgggcacgcagcaggcctgctggcagggggaggaggcacagcaagccagctggcagctagactgctggcagcacgagggcgtgcaggagctggtgcagcctgattggcaggggctgggctcacaggtcactcggcagcaggggctggacacatagctcactggggtgcagaccaggctcaggcagggggccggggcgcagcaggggggctcgcagcagctctctgggcagtcgtccacctgccaggagtcggagcaagagtcacaggaaccaggaaggcagacgcggctgccgtagctcaggtcgctggagcagacagacatagtggacgcagccatgctggggattgaactggaggagatgggagtgagtgggtgagtgagtgaatgagtgagtgagtccgtgtgttaggtgctcagggatgttggcttttatatgtctccctggtctgttgtcccagctggagtgtcaacaactcctgccccttccttgtttgtgtttaaaacctagagaacgcttattagtgcgagtttcatgtttagtcctatgagatgccgttcagtttgtaaagtcctgagtctatatttggttccgttgacgcaccctcacctacctttggctcca

SEQ ID NO: 40059 - DNA, 817 bp, Artificial sequence
  DNA replication origin
tgagtgggtgagtgaggtgagtgagtgggtgagtgagtgaggtgcttggggcccttggggttttagagaccccccatgtgtgttttctagcagggttccccactgcaccctcctttcctggttgcttttcctggtgggtgtctaggctgtggcacgtgttcctcccaggaacttttagcccagccttggggctgtgttgaattcgctgggttgttcggccccagaagcaaaagtcagacaaaaaatacacccaagtgggcaggcgtgaccggagcagaggctgaggcttgtgcgggcacgtgctgccttagggctgcttggtgtggtcacaccgcagactctgtccgtgcgctgcctgcgctgagccaggtgtccggtgcgcagccgcattgtcacggtgtctcattctcactgctgagcagagctctcgaattgggtgctgaccagggcagggtctcgggttccaggtaaacaaagccaggcttgccccactgatctgagaagagggactggagttgtgggaggtggagaaggaggctgtgaagctctggaaggcacctggcagggaggaggaggaggcagggccaggcagcatggtgagggactggggaaccagggtcgggggctgacaggctgtgaaaggtaagagccctgtggctgcacacctgtgacatttgggccagtgccccagccttgtgtctgtggttgtgtggaaggtggtgtggggtggagaagggaggtgcccacccccaaggcaacatcctggcagagaaaaagaagaattgtaagatctctccccgctttagagacaaaaggg

SEQ ID NO: 40060 - DNA, 781 bp, Artificial sequence
  DNA replication origin
agtaggactgctggcagggggaggaagtgcagcaagctggctggcagctagactgttggcagcatgaataggaatcctcagagcaggtgggcgcacagcacacaggtttgcagcagacgggcacacagcaggccggctggcaggaggaagaggcacagcaagctggctggtagctagactgttggcagcacgaagaagccccacagcagacgggcacgcagcacacaggcttgcagcagacgggcacgcagcaggcctgctggcagggggaggaggtgcagtaagccggctggcagctagactgctggcagcacgagggcgtgcaggagctggtgcagcctgattggcaggggctgggctcacaggtcacctggcagcaggggctggatacacggctcactggggtgcagaccagggtcaggcagggggccggggcgcagcagctggtggcgcagcaggggggctcacagcagctctctgggcagtcgtccacctgccaggagtcggagtaagcgctggagcggatggacatggtggacgcggccatgctggggtggggaggaggtgagctgggggaggtgtaagtgagtgtgtgagtgtgtcagtgagtgagtttgtgagtgtgtgaggttcttggggctctcaggcttttatacccctcctggccttgttgttccagggcccacagcttccccttccttgttgctgagaggcggcgtctgccatgattagggatgtttgtttgctggtgacattgcccagctcacaaatctcctgtcac

SEQ ID NO: 40061 - DNA, 1153 bp, Artificial sequence
  DNA replication origin
ggagctgcttctacccacagtgagtggggcattagcctgagtcacgtggtgtctgtgggactcagccagtgaacaaggcttttgggccccacaggacctgggaggggagccggacagcagaacgtgccacgaggtggacaggagcttccaggtgtcacacaagagccccccgaggccccccagctggggaagtaaagagatccacggggcccagccccccagagccaggccaggccccactctgccccctcccgccctgggtgcggagagtcagcacggagtcagctggggccgcagacgctttattggtgctcaggggcagagggtgacgctgctgggggtgagacccgggtcaggagggcccgtccccaaccagcgaccagcggagggttgtggtctgcagccaggaagcaccgtgaggagaagccagggctcgcctgcccgggggggaggtcagggaggagccagtgagcatctgagaccccggggctgggcggctgtggctggggctgctccttctgtgttgagctgtgctgaggctgggtgggctgggaggtccaaggactggcagggaggtggggcctgagcccggctggccctgggggacatgaccgtcagcagctggacttctggcctgaggagaagctgtagcaggccgggcgggagcacacagggcggcagagaagggacacacaggaggcctggcggcaatagctgggctggcgggaggaggtgggggcacagcaggaggagacgggcacgcagcaggcgggcctgcacacagggcggcagaggagggacacagaggaggagggtctgcagcaggaggtggtgcagcaagccggctggcagccagactgctggcagcacaaagaggaagccccagagcagacaggcacacagcagatgggtttgcagcagacaggcttacagcagacaggcacacagtaggactgctggcagggggaggaagtgcagcaagctggctggcagctagactgttggcagcatgaataggaatcctcagagcaggtgggcgcacagcacacaggtttgcagcagacgggcacacagcaggccggctggcaggaggaagaggcacagcaagctggctggtagctagactgttggcagcacgaagaagccccacagc

SEQ ID NO: 40062 - DNA, 746 bp, Artificial sequence
  DNA replication origin
agcaggaggcggtgcagcaagcaggctggcagctagactgctggcagcatgaagtggaagccccagagcacacaggcacatagcagacggacttagagcagacaggcacacagcaggcctgctggcatggggaggaggtgcagcaagttggctggcagctagactgctggcagcatgaaggggaagactcggagcaggtaggcacgaagcacacaggcttgttacagacgggcacgcagcagacgggcacacagcagacaggcacacagcaggcctgctggcagggggaggaggtgcagcaatccggctggcagctagactgctggtagcatggggttgtgcaggagctggtgtagcctgattggcaggcgctgggctcacaggccgtctggcagcaggggctggacacacagctcactggggtgcagaccagggtcaagctgggggctggggcacagcagcagggctcgcagcagctctctgggcagtcgactacccgccaagagtcagtgcaggcgctggagcagatggacatggtggaggcggccatgctggagtggggaggcggtgagctgggggaggtgtgtgagtgagtgagtgtgtgagtgagtgtgtgtgtgagcctgtcagctgctggggcttttatatgcccagggcctgtgttttcccagcaggagactcagcaatgccctccccttccgtgttggtgtttggagccgggaggaccctcattatttctgcttcct

SEQ ID NO: 40063 - DNA, 1131 bp, Artificial sequence
  DNA replication origin
gtctaccccaggcctggggggcagccatggagctggggagggtgaatgtggctcaggggcccagagtgctgccagggtccactttgtcccgaaactcctggccttggttccagaggcagctttcctaagatgggccggggggccacgtgctggggttgggggcccacggggctaagagggagactggccttcagggttcacagaggccagcaccagaaggcattgcttcctgcctcatcccatgcccctcgggggtccacagacaggatggaaggtcgacagagacagaggggtggagccaggcctgctgggggtcaggactctccctgcagtcaggggtggcatcacttcccacctcaccctgtgcccccccgggggtccacagacaggacagaggttggtgtgagacagaggcggctttattagaactagagggggtgctgcccagggtggaaccaggcctgctgggggttagttctgcagaacttgggtctgggggagtagctggggtcccacaggcagccatcatctgggaaggactgggggagcatcctggtccccaagacaaagagcctgccccaccttctgagggtgtcaaagccagagagggcagagcttgctggggcagctgggaggtcagcccctggtgggaagggactccggatcacatccagggctgtcagcagctggacttctggccagagcagaggctgtagcaggcagggcgggagcacacggggcggcagaggagggaaacacaggaggccgtgcggcagcagctgggctggcaggaggaggcagaggcaccgcaggaggggacgggcacgcagcaggtggacttgcacacagggtggcagaggagggacacggaggaggagggtctgcagcaggaggcggtgcagcaagcaggctggcagctagactgctggcagcatgaagtggaagccccagagcacacaggcacatagcagacggacttagagcagacaggcacacagcaggcctgctggcatggggaggaggtgcagcaagttggctggcagctagactgctggcagcatgaaggggaagactcggagcaggtaggcacgaagcacacaggcttgttacagacgggcacgcagcagacgg

SEQ ID NO: 40064 - DNA, 953 bp, Artificial sequence
  DNA replication origin
acggaggaggagggtctgcagcaggaggtggtgcagcaagctggctggcagctagactgctggcagcacagagaggaggccccagagcagacaggcacacagcagatgggcttgcagcagacgggcacacagcaggactgttgacacggggaggagatgcagcaagctggctggcagctagactgctggcagcatgaagaagaaggcccacagcagacgggcatacagcacacaggcttgcagcagacagtcttgcagcagacgggcacgcagcaggcctgctggcagggggaggaggtgcagcaagccggctggcagctagactgctggcagcacgagggcgtgcaggagctggtgcagcctgattggcaggggctgggctcacaggtcactcggcagcaggggctggatacacggctcactggggtgcagaccaggctcaggcagggggccggggcgcagcaggggggctcacagcagctctctgggcagtcgtccacctgccaggagtcggagcaagagtcacaggaaccaggaaggcagacgcggctgccatagctcaggtcgctggagcagacggacatggtggatgcagccgtgctgggggttgagctgggggagctgagagggagacagtgagtgtctgggtgctggatgggaaggagggagtgagtgagtgtctgggtgctggatgggcaggagggagggagtgagtgagcgtctgggtgctggatgggcaggagggagggagtgagtgagcgtctgggtgctggatgggaaggagggagtgagtgagtgtctgggtgctaggagcttatatatctctcaagggtgtgtgtgttgtcccagcacaaggccccaggcttctttccttgttggtgtttggggtggtttcttgaggatgctcaccatgaaccgtgtagcgtagcttagctcctgaagctccccaggtg

SEQ ID NO: 40065 - DNA, 817 bp, Artificial sequence
  DNA replication origin
ggaggctgcatctgtgtcctggcctcctgtcgggctggtcagcaattcaaccagaaatgactcaaagaagagagcaaagtgcagccgggctacgtggagggtgtttattaggacttccaagcatggtcctacaatggccagaggaggcacagcagcttccaaggaggcgagaccacaggggcctggaatgtgggaagtggtctggaagagccgggggagtgggtggaggcagggtcatctggagcttagcaggagcccccagggcttaggggaagagaggctgtgcacgcatctccaaggaagagacagacaccagagcagccgaggggccagtagtgggagaggtgggggactcatagtgcccagtggccctgggggacatgcctggcagcagctggacttctggcctgagcagaggcctcagcaggccaggcgggaacatgtggggcggcagaggagggacccgcaggaggccaggcggccgcagcttggctggcaggaggaggtggggacacagcaggaggggacgggcacgcggcgggcgggtctgcacacagggcggcagaggagggacacggaggaggagggtctgcagcaggaggtggtgcagcaagctggctggcagctagactgctggcagcacagagaggaggccccagagcagacaggcacacagcagatgggcttgcagcagacgggcacacagcaggactgttgacacggggaggagatgcagcaagctggctggcagctagactgctggcagcatgaagaagaaggcccacagcagacgggcatacagcacacaggcttgcag

SEQ ID NO: 40066 - DNA, 1005 bp, Artificial sequence
  DNA replication origin
tgggatgaaaagtgagccatcgagagatggggtccccccacccccaacccctccaaggacaaaggcgggctgggaagcacccgctttcacgtccgcccctgcccggctttcctagcggaattggcgccggcatcagttgggggttgtgggatcagtgaggaatcccgtggggtcgcctccatttatcagttgtgtggggttgggcgagcacccctagccccagcccaggcgatcagggcgcgaagcccactggacgcggatttgggattaggacgggggtgacagccaggaggaccgcacctgccctccccactcctgccgctccacccctgcccccaccgcaacaccaaggtctccaccaggaagatgggggtggggaaaggacgcggggtgggggggggtgcggggagagaggacacagggtcggaagggtgaggggtagtggcagaggcggaggccgaggccacgcagctgcggggcgcagggaggggcagaggaggggcgttcagatgggaacctagtccagacccgtcggggccctcgtgtgcggctcgttatcctggaaccagagaggctggagacccttggcttgtctggagcggaaccgtagtgtccaatagagtgtgtggggctcagccctaaagctaaacattctttatttcctgatgaccatgggggcggagcgggggaaaagccctggccttatagtttagaattttataaaaggaaaggcgtggccactgacaatttgcgcttcaggagtcccagagtgaccgcctggctcggagcagggaatgagggggtccttaactctgagatttgttttctgagagacaaaggtgatgggtgaggcggctaagcctctgattctctataggtggcggtcattcatttcagaacatgaatggattcagtaaataaacatgatagaaaaatgccacaagccctaggcccattggagtggactggacagtctgttcccagtgtgtccctcagcctcggtcc

SEQ ID NO: 40067 - DNA, 921 bp, Artificial sequence
  DNA replication origin
gtgccacccggctcatgtgcccctcccatgccactgtcaccagtgccaggccctgggagcccaggggtctctctggagcaagcactccctcggggttcgtgaggcaaatgaatgatgtatgatctctaatactgtcagccattctgatggaaagcgctggcactgtggtccctggaagtccattaggactgtggtgacaggctgtcctcgtgaggtgtcccttccttcggggaagcctggggtcttctgaccagaggcctcagccgtcctctgagctctgtgggctgagagttgaggctgggcccatttgagcatcacctggatgtgggcgctgagctggaactgggattttccagggaccaaggcttaggaacagccaagcagttcacaggaggccagagaggctgcagcggaggggaggctgtggcggaggggaggctgtggcagaggggaggctgcggcggaggggaggctgcggcggaggggagggggagttcagggcagctgtgctgggtgcagcaaggaggcctagatcctgagtaggagcaagtgaggggcacatgtccctccaagatggagaaggaccctggggggaccagcacctctgctggggatggagctgtggtgtttctcaaagtggggtcagggcactcccagcccatgctgacctcacaagctggaacccccagggttttgtgtgcactggactttgagaaccctgtccaggaggggtcccttagaggaagaggcggcagggctgagtagggaggggtgccttcaggaatgaggactgtggaggggagttggtgtggacaacccagatggctgtgctggcccttggtggagaaagggacaggcttggggtggggaagactcagaacttggcggctgtggacctggggaggaggagcgggtgtggct

SEQ ID NO: 40068 - DNA, 880 bp, Artificial sequence
  DNA replication origin
cagtaggctgcatgtccagaggccaaggaaatagcctggtgggaacaagttagcaaacacggtgaggacaccacagtccagctgaactcacagagcacgggcaccaggccaacatagtgagtgacgcagctgccctgactgggctgggcatccatgggaggggcagacactggtgcttagcaaggacctgcagggccctgtaccctgagataaatcacagctccctcctgagagcccttctgggtgtcccccatctgctgtggggccacagaggccatgtcatggtggatcatggaaacaaacgtcccacagaggggaaagcagagagagatggggcagctgggatgcagcaagcaacaggccaagcctctctgagaagggacttgatgcagaggccctctgcaggggacaaagttgaagtttccagagaacagccaggggaggggtggggtggagggcagggggagggggaaggacaggtgggggctgggcaggtgagcaggggagggacaggcgagtgggggcaggcttcatgtgttttgtgggcagggaagggtgtctgtgtcttactctggtgtaacaaggagccagggagggtttgaacagggtggggtgcatgatctgagcaccagggagaggagacttgggggcaaaggtgggagcaagagactgttgggaggatctaggatatcctggagaaatgatgcttggataaaaataacacattttaaaggctggacagacagagctgaaggaggatgagatgtggatgtgagggaggagagcaggcatggggagccctcttcccttacacaccactgcttggccaaacagcaggcagaacaaaggatagggatagcctgccactgcgtggactctg

SEQ ID NO: 40069 - DNA, 928 bp, Artificial sequence
  DNA replication origin
ggggagggggaaggacaggtgggggctgggcaggtgagcaggggagggacaggcgagtgggggcaggcttcatgtgttttgtgggcagggaagggtgtctgtgtcttactctggtgtaacaaggagccagggagggtttgaacagggtggggtgcatgatctgagcaccagggagaggagacttgggggcaaaggtgggagcaagagactgttgggaggatctaggatatcctggagaaatgatgcttggataaaaataacacattttaaaggctggacagacagagctgaaggaggatgagatgtggatgtgagggaggagagcaggcatggggagccctcttcccttacacaccactgcttggccaaacagcaggcagaacaaaggatagggatagcctgccactgcgtggactctggtttttctcccactggtcaaaaatgcagcgtgaagagtgatttgggggaaaatgaatttaaaaggtgtcatattccaaagcattttgagtaatagaggaagtttcttccaaatggatgagggaaataaatgatttcccccaaattgtctcccctctcagcccagccctcatccattaaacaggcagcctgcttcttctaacagcccacttgaacagtggagtttgaatccaaagatggaggaagaacctcagagcatggaagacaagagactcagcctgggcgtggcagggagggcttcctgaaagacagggtgcataagacaggttttgaagaaggggttttggggtggaaaaacaagggggacaggagtttcaggcagagaacatgctggtggatgccagagcatccaaaaaggagagtgcaggagattctcaatcaagatatgctcgcaaaggagccgacattcaccagaaagctcattagaggccttaagagctcaccacaaact

SEQ ID NO: 40070 - DNA, 1489 bp, Artificial sequence
  DNA replication origin
agcaggccgtccgccccggcatgcacacggcacacaaggcagggacatttgttggttggttggctcagcatgcacgggcatcgctcagcctgccggagcagggagtagccgggatttggccaagggcttccgagccctgggcagaggctgggctgtgtaccccatccctagacaccaccactgaggacacagcgcccggcctgaggatggtttcattcctggggcaggaggactctgggtgactggcgcggcggggtgctggcaccggtgcggggaggccagcttcgtggggtgggtgactggcgttgcggggtgccagcccggtgcagggaggccagccgcgtggggtgggtgactggcgttgtgggatgccggcccggtgcggggatgccagctgcgtggggtgggtgactggcgttgcagggtgccagcccggtgcggggagaccagccgcgtggggtgggtgactggcgctgtggggtgccggcccggtgtagagaggccagccaagtggggtgggtgactggcactgtggggtgccggcccggtgcggggaggccagccatgtggggtgctgcttgggtggcagtgtttctcctggaatctcctcaccagtggcgggtgggcacagtgcgtgctgctggaggggccacaggccctgtcccaagctggggtctcctggaccagcccagaaggagtgaaatttgagtaactgcaaggaaaggccaagaattccgcagtcagctcacagccttggacgtggcccacaggcagggacggggagacctcgccggcttcagagggtgtcagggacctggaccctggaagcaaaggttaggagcaaggaagcagcgccacccctcacaccccacctggaggcctcggtgggcccaaggcgccgacatggagctggtgaacagacatcctcgctggggccccttaatcaaagcctgtgtcccttgtctggagatccccagtgacgctctgcccagccaaggaatccagggccacccccgtgaggggatccggccttctccttgggctcccttgccccaatcctggcctctctctgaacctgtggctcacagccaggtgagggcacagaaatactgcgaggtctggaaagaagccgaacccgggtctcccccgacctgcctgggcagccgcagtgcttgcagcgggagctcccccaaggatgtctgttcaccagctctgtgccggcgcccaggcccgacccaggcctccaggtggggtgtgaggggtcgcgctgcttccttgctcccaacctttgcttccagggtcctggtccctgacaccctctgaagcctgcgaagtctccccctgcctgtctgtgagccacgtccaaggccgtgagctgactgtgggattcttggcctttccttgcagttactcaaatttcactctttctcgtcaacctgggcttcattcccctgcctgccactgcccctcctcatccactgcccccact

SEQ ID NO: 40071 - DNA, 1093 bp, Artificial sequence
  DNA replication origin
cgctgggcctctgaaggttcaccctgcggggtgcaggaacagacatgggatctccagcggctgcagggaagaggtgcaagccccagccagcagagcctctggaaggggttaggtcgctgcgggcgagggcctgggcataaatgcggcattctcggtttcgatgctcccctgtaactggcatctgaagtttctggtgaattccaagggaggcctcctgccaggctttgctcccttggggaatgttctctgtaagagccgaggccatcacggtctctgcctgcctctgacaattgtcacactcactgacctgtgccttgtgagcttggttcaattatctaacacacacctggtatttaattctaccttttacaaaacacccagccacggtggatcaaggaatcaaatttgcttttaaaaaataccagtattattggaacaagaaaccagctagagatgtgtgtgcggccgtataagcaacagtgtctgagcgactcttatcacctgggcggatggagtgcagcctttggaggaagcgtggctttagggcacagcacgttcacagggaggaagcgggaatgacagcacattcacagggaggaagcggggatggagaggcagggggccagtgtggaggggtcggaatgacagcacgttcacagggaggaagcggggatggagaggcagggggccagtgtggaggggtcggtatgacagcacgttcacagggaggaagcgggaatggagaggcagggggccagcgtggaggggtccggtggtgttgacctctgccaacacacaggggtgcggggacacagccaggctgctgcagggcctcatggggttgcagggagccccacatccatagcaagcaggccgtccgccccggcatgcacacggcacacaaggcagggacatttgttggttggttggctcagcatgcacgggcatcgctcagcctgccggagcagggagtagccgggatttggccaagggcttccgagccctgggcagaggctgggctgtgtaccccatccctagacaccaccactgaggacacagcgcccggcctgaggatggtttcattcctggggca

SEQ ID NO: 40072 - DNA, 929 bp, Artificial sequence
  DNA replication origin
ttcctggctcctgttgccaaaaatcacatctttatgcagtaatctgccaacaaattgttaaatgttagaagtttacaagttcccttttccttcccccctctttccctttgtccctccctcccttccttcctctctccctcccactctccttccttcctgtttctccctctctccctctctttctctctacacttatttactacccatcaggtggccggcattgtgcttggtgctaggataacagtggagaaaacgctcggcagctgtgggcctcgtggatttggggagatggacgatacacaagtgaaaatggatgaagggagcatccagcgctccaggcggtgaggagcggcccagggcgcaccccatgaacccacacagccccgggcgggggggagggggcttcccatctgcagtagctgtaaagggtcgttctgggagcatcacaggcaaaggccgggctgagcagagggtgaggggtccaggagccagtgggccggggcctcctgcagaggcctcctgggcagagctggtggggagaagtctggtgccgtgggctccgtcgggcagcctgggggtttggagcttaccctcctgcgaggagagactggaggaggttgaggagccgcacgctgggactcgggtcttcaaggggtccctcttgctggtgagtcgggttgagggaggaggaggctgggaggctgggaggctggaggcttaagtgggggcgggggcgccagggggcactatggagagggagacagcaggtgcactcaagatggattcggagtggagtccacaggatgggccgattgatccgagatggatgcaaagtggagtccacaggttgtgctgattaatctgagttggattcggagtggaatccacaggatgggccaatggcttggagggggcggagggagaaaggg

SEQ ID NO: 40073 - DNA, 2366 bp, Artificial sequence
  DNA replication origin
atactgagttggggtccccaagaccacccagggcggcgattctccaggaggacagaggccatgcaggtcacggtagtcacggctgtgatttcccacagggaggacactgagcaaaatcggccaagggaaaggttcctggggccgagtccaggggcaccatgctcagctttggaggcctctcctggggtgggggtcacgcaggatgcgcctcactcccctgcaagcagctgggactctgcgtgtgcgatgttggggatgccctgcctggtgatgtacccgggggctggtcacgtgagcagcttctgcctgggctgcgctacaattccagactctcagcagggatgtgagtgttctgcctaaaccaccttgtacaaatagcacaggcccagtgaggcggggttcagggagcccctcggaaatcccagttcccagacgccagccaagggccagcccggccagcgggcctcaggacggccgtccccactgtatggaccctttctgcgcagataaccttgggggttgacagtgatttttaccatttcatttgctctgtgtttctgggttttgtctgctggcactggtttgccacagttgtttgcctgtctggctgagtgccgtccttgcttttcccatgcaactgtctgcttcctgggatggggagggctgctggggtggccagggaagctctagggtctcatcttctgggtgttggggcttttcacccttcctgggggttagcggccccagttcactgcttgggccacagcaagggtggcgtccacagctctgactctcacttctgggattgctgcacctgctggggcttctccagtccagtctctgtgtagatgaggttgctaatttttcagaggagtgctgttctgtaccagtttcttcataggatatggaactgctccagctgcacagaaaggcaccccagggcagccccagcttccctcccctgggcgtgccttgcaccgtggccccctgagctgacaaggtttctgcaggctggaatttgtgctggaggcgagggccctggggatgctacctggacacaaggaggggacaggaaacaggtacaaaaattcggggctgccaaggggcagtgaacacactaaggacaggtggattctggaaaccctgccctggaggggaccgcggggccgcttggggtgggggcagggtttggagaggggctgtgaacaaagccagcccctctgggtgttggcctggggcctggaccctgggctggggggggcaccctgggaggaggtctcgtcgtgctgatgtggcgtggtggccccatctgggagggaatgctgttgggcccaggtcctggctgagccctgtggaagctggaggtgttcagctcctcagatctgtccaggttgtgacccgttgtcacgagagcctggctttgttgaggggacaaagcaaggtgaacctccctgcagaggcaggaaacaccagcttcctcccccaaaccccggcaccactcagccagccatagcctgtaccccctcaccatcccagacacaccttccaggcctcaacacccaccgaacccacccactgggcagtgccaactgtctggtaccccgaggcaggtctggtgcccccgaggcagctggcccatgcccttcgtcatcccctggtgaacatctgtaacccctgcccttggcctcaccccgttgaatgtcccagccctgccctctgctgggtgggcgtactggttcggggatcccataggagcgtcagggagatggggctctccacctttgtgcccctcctgtgcccccgttcccatgcctggactgtgagcgctgctggctgtgtggaacctgacctccagggcccgagctctgacaccagaagtgggcaagtcctcacacgtccgggcatcttcccctctgaaggctgtgaacccagccatgagatgtccgagggcgtgctctgaggagttgaggtgggggaggtgaggtcatttgccaaagccccagccaagaaatggtcctcgccgtgccccgatgcatcgctgaatctgcaaggccccccaccctccaggactgtggcccctctgcctccatggggtgcggttggtggcatgaggcccactgcaccctcctatgcagtgtccacctagacccaggggcctgctgggcagcctccactgctccaccttcccccgcttcaggtgctggcctttgcgacacagccacctcatgtctcttctcgcaccctggtctggtcctctcagtccccccaccatcaggcttattagcccacctgctgcacttggcaaagcctcaccttccactcggggccaggagacaccagggcccggccctcagcaccctccctta

SEQ ID NO: 40074 - DNA, 984 bp, Artificial sequence
  DNA replication origin
atcagacacatgcagggactctcgggccacttcctggtggggctgtctggggtgtgtttaggacatgtaggtgttgatgaggtaggagggagggaatggggttttggggcaaaggaagcagcctgggctgaggcccagaggcaggaggtggctgacttgatgggggcactgccagctcattttggctggagccaaggctgcagggagaggagccccagcagaccctggggattggagttgggggtgtgatgtcctgtgagctgtgccttcgaagggccatccttgcagcagtaaccaatagtgtgatggaagacaaacagagacatcgtggtgttgcagtagcctggagagaaaagagaagggctgagtggtcccagggctaagaggaaggggtgggtttgggagaccttgaaggtacaggctctgggactcctggttctttgtctaccagaggtgctgctctgggttcaggagacagcaggatttggggaatagtttgaggtgtgtgggacaaggggcctccatccacaaaagggggtcagacacgagagtgaagatgtggggtcatttctggatgaggcagtaggtgatggagtaggacggagggtgacagcatagcagggaggggtcttccagggcagtcaggaggaagggtgtgggaaaggaaggcggcaagtccgaaaggaaagagcagacccagcagagggccaggggtcgatgccagagtgaggccactcagctattctctgcagagcctttgggtgccgtggagtggggtctagagggatgtgaggtcagggcctgtgacgcgagtgtgtatcctgagagggctgaggcgtgaaccctcttcatgtgctgagtggagggagccaggccaggggattggagattgggagggaggcagtggctcaggctgtcctcagatgtcagctgtgggttttatcctcatcaactctgctctgaaccggtccccacgtgcattct

SEQ ID NO: 40075 - DNA, 1060 bp, Artificial sequence
  DNA replication origin
gggaccgaaccaaccccgcagagcgactaaggcgagggcaggagccaagagaatcgtagccgcggtcgcgggttgagctcccaccacccggacagcgcgcctcggcgatcgcgcacgcgccacgccccggaagagttcctgggcccgcgacggtggcccggaagcagtccccggtgtcggggcaggaggcacgcgcgcggctgaggcgaggtcgctcggcgcagctgttgcggggccatggcggggaccgcgctcaagaggctgatggccgagtacaaacgtgagtctggggacccgggccgtcagcagcgtcccgcgttcctgctcccgggcccgcgtcgtccggcggggctggggcagggagcctggcgggggagccgggcccggggcctccaccgtgagcccccctgtgggtcccgcggagtgccgcgccctgcgcccgctgcccactctcacgcgtgaagtcgtgaagagaagccttcccagcatcagtaaaggcagcgccggcgccgtgttagttgagagcacacacagttgagtctttgcgggcttgtttttttctcttctattttttcttttcttggcagccttgagaacgtgcagtgagagcttgaggaagaaggcctgacttgctgctgcggaattaggagggaaaagtgtatgcgttaaaaggggaaaggctcgttggtggagctttgaaaggtcagattttggctttccctctaatgaaggaaaagggtttttgaacagtgccacctgtcactcctcctaggtagtgttgaggaaacctcttgagtgctttcctacccggtaaattagatatttctaatgtctgaggagagcgaagggagaaatgagaacctaggaacactcggcattccatcgttttacaccgaatgcccgcttggaagaactgctgcgagaagtcttggaataccattgtgttgaaagcgccaggagcctgagtcgccgatggagacgagatagtagccggctaagagcagggcctgagttcagacccggcctctctgcttgttagctctttgaccttgttcctctc

SEQ ID NO: 40076 - DNA, 883 bp, Artificial sequence
  DNA replication origin
gttgcatttgggcttctttccgggaggtcatttcaactttatctttccacttcctgtggacattctcatctctgtcatgatttttaatttccaaaagttcttttttctttctgttctttgagtgttctttttttctcagtagcaacttattttttttgagacagggtctcactctgtcccccaagctggagcgcagtggtgtgatcatggttcactgcagccttgagccctggggctcaagtgatcctcccacctcagcctcccgagtaggtgggactccaggtacacgccaccacgcctggctcatttttttattttgtggagatggggtctccttatgtggtccaggctggtctggaattcctgggcttaagtgatccttctgcctcggtctcccaaagtgctgggattacaggtgtgagccaccgcacccatcctcagtagcaattgattgttttctgaaggtagtagtattttttacttcccatagaatttgaatcgtgagtgtaggtgtgtgtggtgtgtatgtccgtgtctttgtgcatgtgtgtgtatgtgtgggtgtgtgcctgtgtgtgtatgtgtgggtgtgtgcctgtgtgtatatgtgggtgtgtgcatgtgtgtgtatgtgggtgtgtgcatgtgtgcattcgtgtgtgtgtatgtgtgggtgtgtgcgtgtgtgtatgtgggtgtgtgcgtgtgtgcatatgtgggtgtgtgcatgtgtgggtgtgtgcatgggtgtgtgcatgggtgtgcatgtgtgggtgtgtgcatgtgtgtgggtgtgggcatgtgtgggtgtgggcatgtgtgtgcctgtgttgggagtgttctcctgcctccttcctgtccgttctcctctgcgctcctcccc

SEQ ID NO: 40077 - DNA, 1573 bp, Artificial sequence
  DNA replication origin
agagctgctcccacatgggctcagaggggacccaccagaagcggggcctgtgaggtggcagccactcagtcattctggaattaaacaagtgttttcaacggaactggagcctgagattgaccacatggcagagctaagtgtaaatactgctgagaaaattaatatcatatgtattttattacatttactcttcattaagaggaagccacctacaaaaacataaaggacatttatatttgacctagttttaacaagtatttaaatattcaaacaaccccagagtgggagaactttgacttcactggagtcaaaatgtaaaaagcaaaggtcaccccaaatgccatctggatagggcaggtttccctggagtctgaccacagcaagcagagtgcagacttccatagaggccgcgaccatggttcctgacggttccatcccacttcccgccagtgtctggcactgagcctccaccctcatctgtaaagggagggtggtcacctccaggaccaggccagtatcagagacagcctctttacagagccttcagctctagtcatcttccactgggatgtaacatagaggccgacagtgcacaccaagggcttcggaaaggttctctttttatgaacactggagaatgcgactacagaccctcccgagaaggaatggccagtgcacctgaatgcagggtgcataccccaggactgagactggagggaggcacaccccagcatggcaatgggggagactaaagcccacccaaggctggataaggaggggtgggcgcgcatggtgggggaggcgcaatgcagagaagtgggcgcacaccgtggggcgtgatagggaggggtgggcacacactatagggggcgtgatggggaggggtgggcgcacatcgtggagggggtgatggggaggggtggacgcacactgggggtgtgatggaaagggggacgcgatggataggggtgggcgcacactgggggacgcgacggggaggggtgagcacacactgggggtgtgatggagagggcgacgcaatagggaggggtgggcgcacaccagggacgcgatgatggggacgggtgggcgcacaccaggtggcatgatggggaggagtgggtacacaccatggggggcgtgatggggaggcgtgggcgtacaccggggggcgcgatggggaggggtgggcgcacaccgggggacgcgatggaggcggtgggtgcacacggggcgcgatgggtgggagtaggtgcacactgagggcacgattggggagacacgaaggagaggggtgggcgcacactgggggacgcgatggccgggacacgatgcggagaagtgggtgaataccggggtcgcgatgggcgccctggaaggacggcagtgctgctcacaggggccaggcccctcagagcgcgccccttgggggtaaccccagacgcttgttcccgagccgactccgtgcactcgacacaggatcccgcacccagggcgatgccgggggagagggcgaccccaaccagcaatgactcaggagaggagcacgcaaagacgcttcggggacactgct

SEQ ID NO: 40078 - DNA, 1360 bp, Artificial sequence
  DNA replication origin
gtggcggaggtctcatctgatggtgagcccggccgaaggcgggggaggccgcacttcaggctcagctgggaaatggcagggcctggatttgaacctaagcgtctgagccgtttctgtcctgcctgggaaaggctcagccaactgagcaacgtcgcaaagccatggagacaagtcttcatggaccataacttcacaaaccgtcttctactcaaaaattcactttcttggctagagcccccacttaggagggggaaggctgctgaagtctttcggggagagggtctgagagtcagccccagtcccaggcaggtcataaggtgtggtcccttccttctggaacctggagcccagggcctcagcagaggatgtggaggtgggtggccagctcagacggtcctgggagggggctccgcaaccagccccttccgaggggacgtggcgcctcagagcccacagattgctggccctggaagtgccctagggcaggcagggttcagagagttatcgactccaagacaccgttaatcataaaacaacacgaccgtaggtagcacagacacactaaactccggcaggctgtggatgacggcagcccgcttcagtgttgtggaagtgagaaacacgcagcttagaaatcatgagacacagaacccaaatgtgttaccgctcgaaattacgccagttgctgtgtcacgaagtgatgcgtgactacagtcatggataagggaaaaagaggctcagatgacattaggttttaaaaagccaggctataagacaatggtggtctgaattcaattcatgctgtgtctgtctcccacactgtgacctgccccgaatccttcatgtgacagcaaagatgcaaaaaggctctgtcgcagctgtggggacacaaaggacaccgctggtggaccgaacgccaagaggtttctgaaggacacagccaaaggggatcgaatggacggaggaaccagagctcaggaaaaaccgtggcctaccacgagcacagggtaaagaacccaaatggccagagcccctccggagggtcgccacacctggcgatggtcccaacaagaagactcatgagaaggcagggaactggcaaatgagtaacagcattgctgacatgaaagctcgacccacatgtgactaggagaggggtcctggctgaggacgcaaagaactgcgagacaaagtcacaggactctcccatgatggagaagttaagagaggaaaggtcagggctgggctgggtggctcatgcctgtaatcccagcactttgggatgctgaggctggtggattacaaggtcaggagttcgagaccagcctggtcaacatggtgaaaccccgtctccacaaaa

SEQ ID NO: 40079 - DNA, 1605 bp, Artificial sequence
  DNA replication origin
gcccctcacctcccggacgaggcggctggccgggcggggggctgacccccccacctccctcccagacggggcggctggccgggcggggggctgacccccccacctccctcccggatggggcggctggccgggcggggggctgacccccccacctccctcccggatggggcggctggccgggcggggggctgacccccccacctccctcccggacggggtggctggccgggcagaggcgcccctcacctcccagacggggcggctggccgggcgggtggctgaaccccccaactccctcccggacggagcggctggccgggtagaggggctcttcacttcccagtaggggcggctgggcagaggcgcccctcacctcccggacggggcggctggcctggcgggggctgacccccacctccctcccggacggggtggctgcctggcggagacgctcctcacttcccagacggggcggctgccgggcggaggggctcctcacttctcagacggggcggttgccaggcggagggtctcctcccttctcagacagggcggctgggcagagacgctcctcacctcccagacggggtcgcggccgggcagaggcgctcctcacatcccagacagggcggcggggcaaaggcgctccccacatctcagaagatgggcggccgggcagagacgctcctcacttcctagatgggatggcggccgggaagaggcgctcctcacttcctagatgggatggcggccggacagagacactcctcactttccagactgggcagccaggcagaggggctcctcacgtcccagacgataggcggccaggcagagacgctcctcaattcccagacggggtggcggccgggcagaggctgcactctcggcactttgggaggccaaggcaggcggctgggaggtggaggttgtagcaagccgagatcacgccactgcactccagcctgggcaccattgagcactgagtgaaccagacaccgtctgcaatcccggcacctccggaggccgaggctggcggatcacttgcggttaggagctggaggccagccccgccaacacagcgaaaccccgtctccaccaaaaaaatacgaaaaccagtcaggcgtggcggcgcgggcctgcaatcccaggcactcggcaggctgaggcaggagaatcaggcagggaggttgcagtgagccgagatggcagcagtacagtccagcttcggctcggcatcagagggagaccgtggaaagagggggagagggagaccgtggggagagggagaccgtggggagagggagagggagagcggcaggctcttctttatcctcaggcttcagctcagacatccctcacctgctagaaccccctttaccactttttagatactgcaacaaccctagaacacgttaattcctcctgcctcgtgctgtcattatcacttcttctaattccacatctatttagaactccagaagacattattattgttgttctatgcagtcattgtctatttagatttacccagatatgcaggctttttattgttcttcattccttcctgtacttcatacttccgtccagggccactttccctct

SEQ ID NO: 40080 - DNA, 967 bp, Artificial sequence
  DNA replication origin
agggaggtgggggtcagcccccgccaggccagccgccccgtccgggaggtgaggggcgcctctgcccagccgcccctactgggaagtgaagagcccctctacccggccagccgctccgtccgggagggagttggggggttcagccacccgcccggccagccgccccgtctgggaggtgaggggcgcctctgcccggccagccaccccgtccgggagggaggtgggggggtcagccccccgcccggccagccgccccatccgggagggaggtgggggggtcagccccccgcccggccagccgccccatccgggagggaggtgggggggtcagccccccgcccggccagccgccccgtctgggagggaggtgggggggtcagccccccgcccggccagccgcctcgtccgggaggtgaggggcgcctctgcccggccgcccctactgggaagtgaggagcccctctgcccggccaccaccccgtctgggaggtgtacccaacagctcattgagaacgggccatgatgacaatggcggttttgtggaatagaaaggggggaaaggtggggaaaagattgagaaatcggatggttgccgtgtctgtgtggaaagaagtagacatgggagacttttcattttgttctgtactaagaaaaattcttctgccttgggatcctgttgatctgtgaccttacccccaaccctgtgctctctgaaacatgtgctgtgtccactcagggttaaatggattaagggcggtgcaagatgtgctttgttaaacagatgcttgaaggcagcatgctcgttaagagtcatcaccactccctaatctcaagtacctagggacacaaacactgcggaaggctgcagggtcctctgcctaggaaaaccagagacctttgttcacttgtttatctgctgaccttccctccactattgtcctatgaccctgccaaatccccgtctgtg

SEQ ID NO: 40081 - DNA, 1123 bp, Artificial sequence
  DNA replication origin
caagcctggcaggtgaaataaggctggattgggccgggggcactgacctaggacatagggattactgtgttgcatgaggtacttggaaatgagttcctcatctggctgatagactctcgggctccactgtggccaattagcttgacacgatggccttcctggcgtcctccgtgtgtggcccctgcaccagcggcatctacgtcactcagggactggtcccaaaggtggattcttgggccccttcccaggcttgccaaatcagagccttggggacctgtgtcctggcgagccctccagagggttcccatgctgtgagtgtgagatgcgagttatgtgtgaattctttaggaatcctgctgacacgcagcctctgacccagcaggtcctcggtggggatggacactaggtactccaggtgctccaggtgctgccagtgctgctgctggagggggtgcctgcgaggagcctctggagcagggttctcagctttggctagacattggattcacctggagagtaaaaagaaacactcgtgccaggcccgcgaggtccatgcgttggtgcagggtctggcagtgcaggtataaacactcctcggtgattccatcgtgtagccaaggcggagtcgctgccacagagggtgaagcggaacgctcacggagataggcgctgggcggtttgtgtgcagcctgcctgctctctcccggccacatccggacactccctgaaccaggtcattaaggcgtgggaaggctcacagttccctggtgagatttctgaggcccaagacgttgcaagggagacgggctcccagatctcaggggcgacgacaagaacccggcgtgctggatgccaggtgtcagcactgaacgtgagagacagtgggagtgggcatcgctgtaagccacggagggagaggaactcagagctgcctgagccacagcgatggtcgtggtggtgaatccatcacaaggagacagaggcaaagctaccaagctattgcctgacatctacaggcaggaaaactctaggtctgttggtcaaaacccaactggaatcaccacagtggggcctcctgagcatcttcccgaggtgcctgggactttgaagggggagcctccca

SEQ ID NO: 40082 - DNA, 1613 bp, Artificial sequence
  DNA replication origin
ccgcgaagggggcggggcggctggtgggtccaggtcggggtcggggtcggggtttcggccagggcgctgggctcggcgggcggcctgggcccacggtcgcaggcagcgccccgacggaggctcctcgagggtcacgcccgtttggcggccgcgggagctgccgtcgcggctggggcgcgggcaggggaagagccgtctttgtctttgtctttgttttgtccagtcgctgcggccgctcctcgcgcgtggcctcgggttggccctcgcccggcaggcgggacgcttggcacctgcggcctcccttagcctcactgcgaccccaaacagcactcctcgggttcgatcccgagccgggaagccggctcacgacgtgttcgaggtcgcacagctggtcgggggcaggccgggatggcggccgcaggcccctgcagggtgatggggccgcggccggtgtgtctctacagccgccggcgttcacgccgccactccctcccggccgcagttccacgcacagcagcgaacgctcgcacttatgccttagaaaggaaggcgtccccaaagccaggctgtagcatctgattttgaagcaagctgattgcggttctacgctgtccagacgcgcaggtggcattcttcatcgtttatcccgtctgcaccaggccctgcggccacagtggtgaccgacagccagagctcctatccaagaggagctgagtccccgggaggctgaccaagaaagaagcagtgagggcgcgggggctgggggaggaaagtgcatgacaggagactcagagttccagaaaccggcagtgtttatagagggtggcttcctgtggggctgggcctccagggcctggtgggctgcgggaaaatccagcaggttctaagctggagagtgtcatggttggacctgtttcacaatgtcatgctggcttccgtgtgtggagtttccaggtgaccactagtggtggggaatagtgccaccttaacttcagtttcctgacccttacaattagggttgacctgggcccagcttgaggggctaatacttttctcagctcttgttagcccaggctctgtcagtgtctgtttagcatagtagagcaccttttctttttgtgaccttatggaatgtttattccgatgcaggattatttgtgtttcttcttacctgcctccaagtgtgcttagggtttgtgacgttagcaatgcagctgccttgaagtttgttagtcaaggaggccagtgggactgtactgggaacttttggcccagattgagttctaagcgcaaatgtgcagtgaatacgtttccacaaacagaatgggcgtctgcaggcagagtgtgtgattcactggcaactgtatcagtggctcgggggtgtgtttgcttgcattgtgaaagcgggagtgtcaggaaaacaaccatgaggttttgtttgactgtgattcctcctgctctgcactgctgaagggtgcagagatgggtgtggacgagtggagtggacagtgtgggaattaatccggaactgccattcggtgtgtcagctgaaaagccattcggtgtgtctgcacttggaggctgcacttgcttgcttccacttatggtaatca

SEQ ID NO: 40083 - DNA, 2733 bp, Artificial sequence
  DNA replication origin
ctgccaaggccagccttggggaactgaggctcaaggccagcgggtgtccaccctggctgcacagcagcctccccgaggaacactgaacaccagtcacggcagcccttctccgacagggcaggggcttttaaagccccaggtgcaggctgagtggggacccctgagctgggaagtgagcggtgttggagcatctggccatttctagctcctcccacctgcccaggtaaagtctcccaggcatatacagtaagaggttatcacacagttagaagttcgtttttggtttgtttgtttgtttgctttttttttttttttttttttttaagatagggtctttctctgtcaccctggctggagtgcagtggtgcaatcacagctcactgcaacccccaactcccaggcctaagccgtcctcctaactcagcctcccaagtagctgggactacaggcatgtgccaccacactactaattttttttaatgtttagtagagatggagtctcactgttcaaggctgggtcgccaggtgtgctgtgtgactcttgttaagttaacagctgctaacttaacagcctcaggttcaaggccgatctcgaactgctaaactcaaccaatcctcccaccttggcctcccaacgtgctgggattacaggcgtgaaccaccgtgcctggccacagttacaattttaaagtaggggacctaaagcagatgccacccacatgtgcccatttgcaggtctgcagtggccctggcagtgtggccagctgtgtgacttgcccagacaaactaaggggtttcccaggacaaaggccttcctgtgctagaactgagacgttcaccaactgcaaccacggccagcagcctgcttgtgtccagagctctcaggcaggatctgtgtggagcttggtgctgaattctgctctggggccgtgagcagctttggcacagcccagggctgtttccacacgtccactaaagcagtactggctccctcccctctgagtaccccagtgggaggcagagggggctctgtagacagccagaggggaggtgtagacacagttggaggagaggtatagacagctgggggggagatgtagatagctggagggaaggagtagatggctgaagggaaggcatagacacagctggaggggaagtgtaggcacagccagaggggaggtgtagatggctagaggggaggtgtagatggctggaagggaggtgtagacggctggagaggaggtgtagacagctggaggggaggtgtagactgctggaggggaggtgtagactgctggaggggaggtgtagatggctggagaagaggtgtagatggctggaggggaggtgtagactgctggaggggaggtgtagatggctggataagaggtgtagatggctggaagggaggtgtagactgctggaggggaggtgtagatggctggagaggaggtgtagacggttggaggggaggtgtagactgctggaggggaggtgtagactgctggaggggaggtgtagatggctggagaagaggtgtagacggctggaggggaggtgtagactgctggaggggaggtgcagacggctggagaagaggtgtagacggctggaggggaggtgtagactgctggaggggaggtgcagacggctggagaagaggtgtagacggctggaggggaggtgtagactgctggaggggaggtgtagatggctggagaagaggtgtagacggctggaggggaggtgtagaatgctggaggggaggtgcagacggctggagaggaggtgtatacggctggaggggaggtgtagactgctggaggggaggtgtagatggctggagaggaggtgtagacggctggaggggaggtgtagactgctggaggggaggtgcagacggctggagaagaggtgtagacagctggaggggaggtgtagactgctggaggggaggtgtagatggctggagaagaggtgtagatggctggaggggaggtgtagactgctggaggggaggtgtagacggctggagaagaggtgtagacggctggaggggaggtgtagactgctggaggggaggtgtagatggctggaggggaggtgtagatggctggaggggaggtgtagagctggagaggaggtgtagatggctggaggggaggtgtagatggctggagggagggcagacaggtacccgctttcctgctttgcctctgccctggccaggctccgccgcaggcacctctttggtggggccaccaccgtttacggaaatgcacctaggatttgggacagggcctcagagcggggctctgtatagaccagcaggtgaggaaggaaaagggaaaacagaacctgccccatggtctgaagccagctgtgtgcctgtgtggcaaaggtcagcgggcaggacagggcccacgtgtgcctggccaccttgccagtcgggggaatacagcggacacagtgcccagtttccatggacagcctgtattgaagttttattttttttctatacacgtgattgattaacaatataattaatgggatgtcattttataccctgacaagtttaaatgtaaataaattggcaccacctttaatcagactgatgtcctgacttgcacaggaaacacgcacctaacctcaccaacctcaagccctccctcctcaagtctccatgcaaagactgtgccagtcagagtggagctgtccccccgacgagcc

SEQ ID NO: 40084 - DNA, 1299 bp, Artificial sequence
  DNA replication origin
atctgcaccctcactccctgtgccccctcctgccatcctgacctgcactctcactccccgtgccccctcctgccatcctgcctttcctgggggacctgccttccttcacctgtcctcaaaggtgaagtgacttggccaggattgcacaaaccagacgtgacccaagtctgtccctcaaagtggcccgcaggggttcctgccctggcaggtgggggtctgcagccccaggcccacatgtgggttgtgagctccaggcatgtcacctacaggctcagagacccccgccgcctgcctcgggtcccttcctggtgagggaggagctcccaggtctcagttctgcaagagtcctggccggctgctggccatgcctgatggagtccgccagcggccccccagccccagcccctctgcctctcaggagcctgtggaacatgagacctgaagaagcagggccagtgtcaccaaggtcaccgtggggctgggcctggttccaactggagctgaatgagacagggtcagtgccaccaaggtcactgtggggctgggactggttccgactggagccgaatgagacagggtcagtgccaccaaggtcactgtggggctgggactggttccgactggactggagccgaacgagtgatggggacggtggtgcctggtggccctgggcccctccagggctgagagccgagcaccaggatctcccaatcccctcaaaggagcctcacgcagcaacctgaccgcgggccacccctggggacctgcaactgcaagccttgccccatgaggcatccagcgggagatggcccgggccgtgtggcatgctggtgggcctgcccggtgtggagcagtggtgcccccagggagcaggccgtctgctgcccagcttgatgtggggtcaggtgaggaggggagggaaaggggaggctgctgggggtgaggggaccggcctctggcctccttgcaatgccaagggcatcccgcatggctcatccaccctgctgggcccacaacactggaggtgagatcctccttccgcaccaccctcgcctctgcggagaccccgcagccggagctctggagccggtccccgctgcaccccagcggcctcacctcggctctcatccacatagatgaggtagcggtccatcccgtcctgctgctccagcgtgtaggccacccagcagccctctgagtccctctccttgcaggtcctgcccttcacggggttgttcgacagctgcaggcccggacacgccgcgctgcagttcttcccaaaggggcccttttcgaact

SEQ ID NO: 40085 - DNA, 1501 bp, Artificial sequence
  DNA replication origin
cagtgggcggggtggccactgaggcacgaggacagcaacagagaccaccaagaccacagagaccatcattgtcctgagatatgggaggaggctgggggcagcagggacctgaaggtgaggaagggcactgccaccaggacgtggattggcactgcggtcaggacaggggaggaggtgaccagagcaaagggggcagagtcctgggaggtcagcctagcagctctggccaggcaagcaaggaaagggggacagccatccagcccccgggcaggccgcctggctgagtgccatgtgaacctccccactgggtccacctgtcccccacttctccctgaggtggggtgcccacgcctggcagggggtgtgcacgcccaagaggtggcctatggggcccaggctcccagaagccatcacctgtcccaggaggctctctagccacccatgccccagggctgccagcctgatggccttgggtccccaaggtcagagagaagccagctcctagggtcaaggaaggtcgggcagagaaagtgacccactcaaggccatgggcacgcccagcggggactccttgtgcccctgagatgggcctccatcctctggtgagggggtcctcctgcccacaagtcccctgccttgggtcctccatggccagagagtgtagagtacaggctggcattgctggtgccctggctcaggagcacgggtgagggcttgccgaggggttctgggttccaatcccaaatctccccacctcctgcagaagggggcccccaggatgcctgctccgtggggtgggggaagggatggagccacctgcacccacctcacctgccgacacctgccctgtggggtggggctcggggatggttcaacagggacctgcgcccgcctcacctgcagatgccgcactccaagaagcccttgccatggcagaggctgcggtctctgctctggtcccggcaccggcactcacactggggaagaacctgcacggtcactatgtccgtgaagcccagcgcccggatgacaaacgactgctcctggatgcactctgtggccgtgaccttcacctggaaggtgatctgcagggcagtgctgggctcaggtggggaccctcggtggccagggtggcagcccagctcccaaccctcacctcctggcctctgcaggggtcctggggggttcagcgtggggaggaaggggtgaccaggagcaggaagagctgatgctcagatccgagagccaaagtcagccggcaaggaggtgctctgcccgcactcccgcactggccggcaccaggatctccccggccacacatcagcagagacatgtgacacgcagacagcaaatcaggagaagctgagcacactcccactcagaccacccaacatgagggaaacgttctggtgagaatccatgggacagctgggcgccgcggctcacgcctgtaatcccagcactgtgggaggccgaggcgggtagatcatctgagggcaag

SEQ ID NO: 40086 - DNA, 1162 bp, Artificial sequence
  DNA replication origin
gagtggctgcccacggcctggcatgcatccccactgtgcagggggcaaatgctgtggcctctgggagggcacaggtgagctcgggtggatgcaggtgagggtaggcaaactcgggtgagcaccagggagagatcttaacagcaccccagggccacaggctcccagagcagggcggcaggatctgggaagggactgtcctctcgcggggtcctggccctacccccgcagcctgctggcccttcgctgagcctctactctggaagggaagggacggggccccttggtcagccaccaaaggcctatgtctgtgccctttgactgcagcatggccacattgctcgtggggacatggtcttggctgcctcctccatgtcgctgcagacgccgcacggcccccaaagccaaacacatttactgtctggcccttcatagaaagtgattggggtccttggcccagaggccaagtgaagcctctgagggctgcaaggcacagcagggcgagggccagggccaggagtgccgggtgtgaatgtgggtgagtgtgtgtgtgtgtgagcgcatgtgtgtgtggtgtgtgtgtatgcatggtgtgtgtggtatgtatgtgtttagcattgtgtggggtgtgtgtatatgtgtggcacgtgtgtgtatgggtgtgaatgcatgtgtgtggcatgtgtatatgtgtgtggcatgcatgtgtatgtgagtgcatgtgtgtggtgtatgtgcgtgagtgcatgtgtgtgtgtttggtgtgtgtatgtgtgtgcgagtgtgtgtgcgtgcatgtggtgtgtttgtgtatatgaacaagtacatatagtatgtgtgctttgtgtctggtgttgtgtatgagtgtgaggtgtgtgtgtatgcgtgcatgtgtggtggttggtgtttgtggtgtgtgtgcatatttgtggtgtgtttgctgtgtgtgggtgccatgtgcgtgtatatgtgggtgcgtgtgtgctacgtgtgactgtgtgtgcatgagttatatttgtgtgtgagtattgtgtgtgtgcatatatgtgggtgtgtatgccatgtgtgactgtgtgtgcatgtggtgtatttatgtgtaggagtgcgtgtgtgtgtgtctgtgaggaggggcacataccctttctcccagggtgtggcagcaggc

SEQ ID NO: 40087 - DNA, 1298 bp, Artificial sequence
  DNA replication origin
ggtcaacactaggtctctccacagcctcctcttttagcctctccctccagtttcaaaatgactcctcctctgaggggactcaggctccccaccctgctccccagttcccaccagaaaccccaagtgggtgttccagcctctgccccacaaggcccccatggaaggcagcaccgccaggcagggacctttcctcgctgcccctccctcttccagttctgagtcctgtcccggagatgacctctcaacccagagggacctgaccagaaaggtctggccccctccacccaggaagcccctgaaggctggagggcagccctcccccctccctccccctgttagtttttctttctgatagaaacagcagcaaccgctaggcacctgctaggcagggggctgcacagcctcaggtcagttcctgaaaggcacctttttccatttgtaaatgaggtgacaggtctgcctcccagggatgagcagatgaagggttgggagtgcagagcctgggaacacggagtggcagtggggactggggcccagaggctgctgagtgagggaaggctaggggcagtgaagctggtgaatgaggcaggggcagaagacagggtgggggaacatgcccagcgaggctggtgaatgtggcactgcaggggcagggtgggggacatgcccagcggggctggtgaatatgccaccgcaggggcggggagggcagaatatgcccagtgaggctggtgaatgcgccaggggcagagggcggggagggggaagatgcccagcgaggctggtgaatgtggcactgcaggggtggggtgggcggatgcaatgatgagcatttcctccctggggccagcagagcaggggtgaggctgagtgggtatattactccgatttgggtgggaccccatgcagtcacacgtgggggacgcagggctgacagccttgcatgaccctttcacactttagccatagcaatgccaagcccagagaggctgcaaggccctggggagaacagaggccccggaaggggtggccagctgggcttcactgcagtcctcaccagacaggattgagattttaacgtgttaacttgttttctgtcttttccaaattgtttatggtagccatgcattaattttataatcagaaaagcatgttattataactcaagttaaatggctccaaaacaaaagtacccagaccccagagcctgcccctctctagctggagagagggacgaagtataaggaaaaggaacggaaagctgaaaggacccccgggctctggaacccgacccaagg

SEQ ID NO: 40088 - DNA, 960 bp, Artificial sequence
  DNA replication origin
ccccggagctggcagggagcaaacgcaacggaatacggccggggtcgggcggtgggggtctgggtcggggtcagggtgggggtcggatcgtggtgtccgcggcgggggaggctccgcgcaccggctgagcagctccggacagcgggtgagggaaggcggcttcctcctgcttcgagacccatcctcgtgcccaggggagcgcctcagggaaggaggagccacgttccagggcacctggctgggacctgccgcagcctctgcgcgcagcgggctccatcccccgggccacggattgggagactgaggcaggcgcgaagcccgccgcccagcctccgctagggagaccccggccacctccaggcagttttcctgaagcccggggccaggagaaggtgagcggctgcccgtcgggggtcgcctgcgccgggtggatgcggcggcacttgggtgcggtgggctcccaacctcactgtccgaccaaaggatcgccccggctgggcggggacctggcgcgcctaggccgggaggggacagctggtttcgggcggcctctgccccagtgacctgtagactttggctttggttcagggacgtctggggttaaaaatgatcgtttgggttcccgcagtactgttcgcggtctgagcatctccacaacgcgcacattcccataatgaatttccgagaaccggcacgcgtgcctcccctcttggctcctgggactgcgaggccggatccaatctgtgcgcctctgtgcgcagggacggctgatggcccggttccgcctgtccgtgccccaggatgctacaggaagctcagatgcaaactctttggggctgtgagttcccgcattgggaaactcttgcaataaaaataatcgtgctgtaatccccagggaccattgagaggaagtggtgagggcgggggaggcgcgggaggaagaggctgggggctgaggtg

SEQ ID NO: 40089 - DNA, 1856 bp, Artificial sequence
  DNA replication origin
tggggccggctcctccaggctgggggccgccagctccgggaaggcagtcctggcctgcggatggggccgcgcgtggggcccggcggggcggcctcgggaggcgtccaggctgcgggagcgggaggagcggccgtgcgggcgccagcgccgtgggtggaggtcgccgtccctcctgaggggcagccggtgcatttgggacccgggagcagagcccgcgcctccccagcggcctccccgggggtctcaccgggtctcccgagagcggaggccccggctccgcagaaacccggggcggccgcggggaagcagcgccctcaggcgtcggaggagcccccagaaggacctcgcgcctccccgccgggctccgaccgcctgggttcggtgcgggacggcccaggccgccaggacccccaagcgcagctcagtctgcggggcacgacccagaggccagcagcagaggacggggccggggccgggagagggcggggagggcgctcctgggaggtcaaggccagggctaggctttcagggtcatggcctggcccctcatccccagggaggtgagggggctctgtgagcagaggggccccggtggagaaggcgctgctagccaggggcggggcaggagcccaggtggggacttaggggtggctgaagggaccctcaggctgcagggatagggagggaagctaggggtgtggcttgggcaggtgctgggggaccgcgggcgccctttattctgaagccgaatgtgctgccggagtccccagtgacctagaaatccatttcaagattttcaggagtttcaggtggagacaaaggccaggcccaggtgaaaatgtggcagtgacagagtatggggtgagaaccacggagagaggaagtccccgaggcagatgatgggacagagagcggggaccagaattttttaaaacgcatctgagatgcgtttggcagactcatagttgttttcctttcacggagaaagtgtgggcagaagccagctctaaagcccaggctgcccagcctgcactggcagagctgacggaaggccagggcagagccttccctccctgtcacagacatgagccctggagatctggaatgaggcagatgtgcccagggaaagctgatccgccccgacccagggccccccgggtgcccctttgagcgtggaatcgttgccaggtcatggctccctgctatcgaacaccggacatgggtcgtgtgctgcacctggcagttgcaggaccgacacccgcaatgccttaagaggtgatgactgccttccaggggcctggctggctgacactttgcatggctcctggagaagagggattgagtggagtccacgggtcatggccacgtcctgggtgctgcctctgaggcagggcccggctggggtgagaaggggctggagacaggttcctgccagttcagcctctaaccggtggtcttcatgcctaggaacccactgggggcttatgaaactgcaggtggctgagtccttgccatggggtctctccttcagcaggtctgggtggggccggagactgtaccccacaaaaggtcccaggtgaggcggatgtggcctggcgctgtgtggctctggacctagtccttgggcttgggctggcacccagggcctgggcttgagacagctgtgacgcaggcaagccatttaccccgtttgtggggacattacatcttcctagcttggaacacacaggcagccagggttgttatccacattcctcctccatgttcttctcttgagaacttttaccaggtatgtcaggagctgggctccaccagggagactcaagtggaaagccctcatccttgtcctccaggag

SEQ ID NO: 40090 - DNA, 1668 bp, Artificial sequence
  DNA replication origin
cctcctgagtagctgggattacaggcatgcgccaccacgcctggctaattttgtatttttagtggagatggggtttctccacgttggtcaggctggtctcagactcctgacctcaggtgatccgcctgcctcagcctcccaaagtgctgggattacaggcgtgggccaccacgcccagccagaatatgttctttaaaaacaggcacaattccatgaagtaaactcacattggaatggttaacaggtaaagtgatccagctggctgaaacaataggcattcaccggcatccaaagtacataaagatgagcactttgagactgcgccactgcactccagcctgggcgacagagtgagactctctcaccaaaaaaaaaacgtgagcactttcacctcaagagtcgctaggctcagatgctgaatgcaccctgaaggaactctaaagataccagcctctggagttttcacagccaacagcattcctaggtagactggttgagaacacggctagttggagggtaaaaagaatgacttgtgaatgctcactaggtctttgaatatgtaagtagacacgacttcaagccagttgctcagccttgaatatatcctagagtccatcaccttgggctgtgagtggcttgtgcggtcatctgtccatctctcagctgggcgagaaacttgatgtcctttctgagaggtggccctggctctgcctgggacctgctactcttctccaaagtgcattttttgtgggtgggttttcactgtgggtcctgggcaggtgagtgctggtgcccagtgttggggagcagggtagatagaggtgtggctgctacctggctgggcccggacttggcagccttccttcatggccctcagccacagcctgttccatagtttgttctcgatgtgtcagctttgtgttcccatgagaacaatgggctccttgaggacaggcattgcatcgtacctgtggtctcttccctaacgccccccagtacgcccagcatagacagcacagggtgcaagcagtcagatgagcagggctcccgttcccagcacgggacccagcccgttacctcgctgctatgtttcccacgtaaacggagcaatacccaattctaaagaactgttctgaggactaaatggaatagtgtaaaaaataaattgacatgaagtgaaggtcaattaaaatgcactagcttggccaggcgcagtgtggctcatgcctgtaatcccagcgctttgggaggccgaggagggaggatcgctggagcccaggagtttaagaccagccagacaacacagcaagatcccggctctagcaaaacattaataaaaattagccgggcgtggcggtgcccaccggtggtcccaccttctcgagaggctgaggcgggaggatcgctcgagtcctggacgtcgaggctgcaatgagccgatttcgcgccattgcgctccagcctgggcgacagcgcgagactccttctcaaatatagaattttaaaaaggccatctcgactgccgcgggggtcgcgtcctctccatccccgaccttggacgcaaccccgggcttgggtcccccacgatctagacagaaactcgttgtttctcgtgctccgcgccacccgcgtcctccggtctgtttctcccaggtgcgtcggtgaaag

SEQ ID NO: 40091 - DNA, 3727 bp, Artificial sequence
  DNA replication origin
gcttgtgtgcaggtgtttcccatagcccgccttgaggggcacgaggatgggaattatttgagccgtgcggcagggtcagggttttgggtgttggggaggagccttggcctggggaggcacttagtgcttctggccaggagccggtggctttgtgcactgcccatggctgtgatttctgccttggtgccccagggggattcaggagaaggtgctccaaaatggtgccttggaggttgtccctgaggtgtgttccaggaggctgtcctgtgggaggggcgttctgagctcatcgccgcgggcccccattacagccctcctggagcgaggcctctggccagccgtctctggctgtggctctcagcccagggttctggtgcatattccttccaccgccctgctgtgggttttctgcactgaagagccccgggctggatgaaggggaccatgggacctcacagagggctcagacggagggacaggcctccacttcccctgccctgggatgtgaagcaccagcttggcagggtggcagggcccacagaccctcatgggtgggacctgcagacccttagaggagtagccccacaggcggaggggcttgccctggtctgggggccccagccccttttcttcaggcctccgaggtatccaggcgcctcagtggggtcctttgcatcttggctgctcctcaccatgttcctccctctctccaggaacagttctgtttttttggtgtggtctcctcagctcctgattggctggtgccctgcgtccctacccccaccccaccccgggtttgtgctggggcctgagtgcccatgtcatgcagatactgcatcctgtgacttggccgccacccttcaatgacccgcctggctatggaggtgaggtggcggcctgtgggtgcctgtctgcctggcttagtgcaacaccgccttcccaagatgtgtctcatcgtccgtgccctgcctgagtcaggaatagcactgcatgctgcgtctctggccaaggagctgggtggcccaggggaggggtctaggctgtggcccatcacctggtggacacccgtgtgcccatctgcacccctcctcccccactctagccctgggaagtggtggggcttgttagtccctgtgactgacaagttcgtggcatcgttcctatcctgtgactgacaagttcatggcatcgttcctatcctgtgactgacaagttcatggcatcgttcctatgttttttttcaagcccttcggatcccagctcgccaggaagccacatctgaccccctgttcccttcctgtgccctggagcctgccttacccttacgggcatcctgggagggaccctctgagctctgcagcctcctgctacgggaggaggagggcatgggtgcagggctgaggctggcctagagtcccctccccgccccagctctctaagaccccctgcacctccccagcaggactcagctttgcctgtgggccgggttgtgcatgcaggggctttgcggcagcctgtggaccccatgtcggggctacagctcctccatgtccgctctgggggtggcgagggacctgtggcagagccggggtgagcacccgtctcctgagcctcccccaacgcagtgccacctgctgtgcgtgctgtgtggccagctctagctggcttgtgcaataccagagcctggcagccggccgggtgtccagtggtggctgatcctccagccttgggcacggctccaatccttggcatcggacatccggggagctggtcatgcagcatcgggcgatcgggcatccggggaggtggtcgtggagcatcgggcggtccgggaatctggtcgtggagcatcgggcggtccggggagctggtcgtgaagcatcgggcggtccggggagctggtcgtggagcatcgggcggtccggggagctggtcgtggagcatcgggcgtccggggagctggtcgtggagcatcgggcgtccggggagctggtcatgcagcatcgggcggtccggggagctggtcgtggagcaccgggcgtctggggagctggtcatggagcacgcttagaattggatttctagttctgtgttccttcataccagaaaacgagcccacctgttttcagacaggcacttgggactcaagctcagagacacaggcagggtggggcaaggcctggtatggactcagagccgggtggggctgggggcccctggagcagaggatgttgggaggcctgtcaccattgctggagagggagctcacagcatggtggacggcttgggggcggtgggggcatgagaggcgccggtggtggtacaggattttgggggtgttgcttttctggccagatacctgtggccggtggcacctttgcttgagttttgtccaggcccactgggctcatttcacctacttggcctggcaggctgagctcagctcatgctactggcctggatctcatgcctccaagggagactggagtcaggcgtggagcggtgaagtgtgtgtgtgagcaagtgtggggtccggccattgcaggccagcgccaagccaccctcagcccccgccttggcttcctcccagagcttgttgatgcccaaggtccagagggggccaaggtggcagggcctgagtgtgtgcacacccggccgggctctgacagcacctgggctcagccccaacccccctttgagattggagtgggcgttggaagcagggagaggccaggcagcaggagcaggcatctctgagtctgcaagggtaagagtgcagagaggccagggtcccgagccccgacttggctgctgcttgctcccgctcctgctggctctgtggagcatgcagccctggctccccctcgcacggtttgtggccttgcccgggggctgctcctgatcagggagtggattgtgggccctgggccctgggcccggctgtcaggagtgtcgggcctggcagtcacaccgatgtggggtggatcctagggatgcagcccaggcggccctgcaccatagcctcctccagaggaacccagcaccctcggccgggtggacacagggaccacactgctgtccgggtccccaaagcgcggccccagctccgcctaccccccagaaccctctgtgcagcagcagcaggccagagcgcaccatggagccaggctctgaagccacagaggcctactcttagacgccgggcacagggcacccaccgccgccattgctgctccggcagccactcctgccgcttctgcctgcgccttccggctgtgtacgacctgctgctgctgtcagtggaacacgtctgcgtctgcaggcgtgttggactgggtgacgaggccaccaggctgtggtgcaaggacatcccaagctcctgcacccagcccttgggcagggctggctctcccggtcagcacagagcgctgcccaggtgattgtacctgcttagaccccactccacccccaggcacctgcggtggagggacctgcggtggagggcgcgaccttggcttcctggccgtccctctgccctggtgatctggccagcagagggcagcagagctgtgtccttgtcaggtcagcccaggtgtgggacagtcccgggatagagacgcaggctctccctcctgccttgcacagcggagacttgggaagtcccagctcctcatcagacagtacagactctggggttacagggttgtcttcagggattttttttttt

SEQ ID NO: 40092 - DNA, 1817 bp, Artificial sequence
  DNA replication origin
gaggctggccaagcccagaggaatcttctcctgtgtgttctgctgctgctgtgtgtttaaaccatttttaaggcctttaaatcaaaccggcgactttaatccgatgaaggcttagcctgctgcactgtgcccacgacacgtgtacccagtcgccgccacgtgctccaggacagggaccaggtggagtcaccgtgatcctcaggcacaggtgcagcccacacccgcctgggccagtctctgtgctcaaagttctatgaggataaacccacacacgacgggcgaaccctgctcggacaaagagcagcaagggctcctgaagacactgctagctaagggcctttcctgagatgccccgccccggttagtgattggcacgtgcagcaggcctgggcgagaacacctgtaggcgagagatggtgcccacacagtgccctcgggcagtgagagatggtgcccacacagcgcgctcgggcggctccgggggcagggcctggcttttatctcccaatgttgcgtatttgtctattctgcaatgtgtgcatacgcgctgctttctcaatcatgaaatgttattttctacagaagtaattttaggtaaaagttgatccctaaccttcaagtctcagccacaggcatgacagtgagtgaggcacggtgggcaaagacgcggccgttcgccccgtgcgctgaggactcagcccctggatccagatggtagagctgggacttgaacaggaccggcaagggccacatccacagcctgtccccctgcttcctcccaggctgtgcagcaagccagggccatccatgcccactttccctgcctctctcctacctccctgcgcgatgctgcaagatgttggtcccttggatggctgtgggcttcagcgccaccaggagatgggagcctcctctgcgcccagtatggcagcagccacggtttcatctcaacctgagtgaacaggagccaggccatgagacacaggcacagaagaggctggccaagcccagaggaatcttctcctgtgtgttctgctgctgctgtgtgtttaaaccatttttaaggcctttaaatcaaaccggcgactttaatccgatgaaggcttagcctgctgcactgtgcccacgacacgtgtacccagtcgccgccacgtgctccaggacagggaccaggtggagtcaccgtgatcctcaggcacaggtgcagcccacacccgcctgggccagtctctgtgctcaaagttctatgaggataaacccacagcagttctacagcagccccccgacacccccctttcgcagatgaaggagctgatcgcagaaaccctgaggacgccggcaaggaggtgcaggaggctagaaccccagaggccctggctggctcctgactcccactaagatgggaggaaacagcactatgtctggtccaagtcaaatgcctcagcatggcaccatgtgactgcgtgaccatgggcctgagaagcgccaccaacagggccacgctcccagccggactggcataggccacacctccgacccctggtctagcgtctcaacaacatgtggctcacaaggatgcctggcttaagaaacaagtcattgggctcccaacataccggctggcacggccacactctctgcaggagcgcaggtaagaaggcgcaccactcccagccgccgcaccacgcagccaaggcaggtgacgcacagggagctgcggccaagccgaggccatctgaccccaagcctcgcttccacagagccatctccatgtaacctccccgtcagtttgttcttattttaacttgggagtagat

SEQ ID NO: 40093 - DNA, 1310 bp, Artificial sequence
  DNA replication origin
ttaaaggccttaaaaatggtttaaacacacagcagcagcagaacacacaggagaagattcctctgggcttggccagcctcttctgtgcctgtgtctcatggcctggctcctgttcactcaggttcactcaggcctttgtgggccgtgcaagtctggatctcaccggcttgccgaggtccctgggccgctgtcttgggcttgcgctgctcgcccccgggaagctcagccactgcctttttctatttgccagacagcaatcggcagcttccctggccactcagggagtgactcctcctcatcagagctgtctgctgtcagggctgatgtttaagttgtttctggaactttcacatcagagtgtgtggcctgatcaccttgggcctggcctggggattcccggggccgccttccatcaccagaaggttggccccagggccctccttctcccctgcaggtctggccccagctgcttcaggaccgccctcccatgggggatgctgtgcccagcagaggtcttttggccgagtggacagttggggttatgtggccccacgcccagcagaggtcttttggctgggtggacagttggggttgtgtggccccacgggaccctccctcgtttggggtgctgctatgtgggtgtccgtgtcatgtgctccgggcgcccccctgcctaggagacggcggggcagtgtctgagcatgtgggttgctatttctgaacctggcacttggagctcggtggctggagctatttaaggttcttgacatgttcggttggtggggcctggctggcagcatcctgctgaggccatctgcacgtcactgtcctcatcgacagctggggtgggagggcagctgagtgttttcaaatggaaacttaggggtgagcagggaagggctggggccccaggtgccactgtattctgggtgtggcactcattctgacttgcaggtgccatcctgagactaggaggtccccagggccctgcctctggcagcctcccccttggcatcccacctggtgtgttttccagaccccgcctggcaaggcccaggccgagcctgtgcagcaggctctcctcattcactcctcagacactactcctcatgggaggtggcagcgagtgccccccggctacagggctatcccttcctctgtgggcgcgtggccggcctgtcatgttcaggggccctgggcactgtggttttctgatgtgtgcttgtctgaggtgtaggcaggtcgtggaggctgtcttgcgaggttccctaggtggggcccccagactagctgaacccaccaagagctgc

SEQ ID NO: 40094 - DNA, 1526 bp, Artificial sequence
  DNA replication origin
gtggccggcctgtcatgttcaggggccctgggcactgtggttttctgatgtgtgcttgtctgaggtgtaggcaggtcgtggaggctgtcttgcgaggttccctaggtggggcccccagactagctgaacccaccaagagctgcgagtggctgtacctcccagagcaggacgcctctaggtgagcagcacagccactccctcgggcaccatccccggcggtggggccctgcgtccgggcctcgggagcctgtcctgcaccatccccggcggtggggccctgcatccgggcctcgggagcctgtcctgcaccatccccggcggtggggccctgcatccgggcctcgggagcctgtcctgtgttgacttaggactgaagcagttctctggggcttcttcctttccaggtgggatggggtagtttgggcagatgctgaggacacaggccaggtgtggctcaggaggccaggagtgccctctggccccgcagcctgggttcctcagtgcagtagcgtgaccttggcgctctgcattcagcgtccctgggtcgtgccaccccccggggagctcttggccatgactgctcttccctgcggtgctgctggtactttcctcgctgcaaacctcggccgcaccccaaggccttgctgaagccctcagtcccagtagctgttgatcctttggcattttctgcatcatgaccatgccatgtatggggacggcggtggttctgtctcttgcttctccattcttaggcctttgacgtgtttctcttgccttgttaccctggctgggagctcacaggacagcaagaagccacgctgctcccggggcacatgctacatccaccattggctgcactgcccttggggttctggagggtccttgtggggtgagctaacactgggggtgggtgtggagtgtgccaggagcctgctgctgtgtctgtggagagaatcctgtggggtttggagtccacgtttcttgtttgtatcagctccatgacacttgcaaggccagatcccgtggactctgcgtcttctggccggtgggttgctgaggggagcagaggggccgagcgttgtgtgggtgccgtgcacaggctgtctccagtgctcctgggtacccttctctcaggggccccgtctcccaggccaccttctctcgggaggaatgtcgaacccctggctggggtggatggtgttggctggagggtgggggctgcccgatgcagcactttgggagctccggccgtcggcaggtttgtctgtggttttgaatgtccaccctcaggtcctgggagaagggagtcgaggtgagccgtttgcctttcctcaggactgcggaggtgggcacagggcccagtggtggaaacgtcctccggccctgcagcctgggctcctcagcacagtagcgtcaccttggtgctctgcgtctcagtgtccctgggtagtgccaccccccaggcgctcttggctgtgactgctcttctctgcggtgctgctggtactttcctcgccacaaacctc

SEQ ID NO: 40095 - DNA, 746 bp, Artificial sequence
  DNA replication origin
attgagggagctgggttgggaggggactgaggggactgagggttgggaggggccgtggggcaaggacccaatgcttgggttccacaaggacagctctgccagcccaagccatatgttctccccactaggtgggaaggggagaagtgagagacagagctccaggctgggagggagaggctgtccaccctccagcctcccaggccactggtgctcgcctgctgacccctcaagcccaaagcacatcagagtccaagagtggtggtcagtggggcagacctgcctgccgggaccaagatgcagttcccagagacacggcccgccgcccaggcacgccaaaccccagatcctgggacaggcgcaccgagccccagatctcagggtctcacacctcctgcaatacaggggccagggctccctagagaaacagcaggactggcaggagatgtccaagatgcgcctgggttacctgttggtgctcggcagtgggaaagagctaaaaatacgacccccacgtcaatggggccaaagggagctgggggcaactgcaagaactcccagcggccaatgctggaacagtttcggcaccaaaatcaagtaacgctgtgtgtaaactaaacatccatctgtccagaccaacaccggcgcatgagcgacacatacacggggagaagagacaaagctcctttcccagcaggattccaaacagtctctgtcactgctgtgtcttccaggaggtagagcacaac

SEQ ID NO: 40096 - DNA, 914 bp, Artificial sequence
  DNA replication origin
atctccccacggcctctcctgggccagccttgccccgatgcagaagctctgcccccctggccagccgaccccctccctgtgtccacccctgagcagcagctccctcactgactgcccagagctgtccccggtccccatccttgcagaagccatcagcgtggggcccctcctctaggtgcaccctggtgccagggctctgggcagccacgtgctgggtcaggagacctgagcccgggtccaggacatccttcctggttggggaaacctcgggccctggagctgcaccctcactttaagagatgaactagcagtgggggtgggaccaatgcctcccaaggtcccaaagcagaggagctgcacccagggtggctgcagtgcccatgaggccaggcgcggcacctcccctccccactgcggggaccgtcccccacccacgcgtcccacaccccatcctcccaggcgggacgcacagcctacccagtggggtttccggagttcagggccccggggacagagtgctgggcggttaccgtcatgggccaagggcaagcaccggcagggacgcgactccacgaggcctaacagcaggaagccgaggaggaattggagcctaactccgcccagtgtggaccctcaccagcccccacggcactccctccaggcaggagcagcggcgtcaccaccactcccctcccgacaatcacccacaaagcgcacacaggaggcggaggtccacagcatggggggtcccctcccgacaactgcccacaaagcgcacacaggaggtggaggtccagagcatgggggtcaccggagtcaagtgtcgctcgatgcctgcttcccagccaggagtgacgtggaccccaaacacgggccctgccctggcctctgagattccagctctgcatcctgca

SEQ ID NO: 40097 - DNA, 1335 bp, Artificial sequence
  DNA replication origin
caattcctcctcggcttcctgctgttaggcctcgtggagtcgcgtccctgccggtgcttgcccttggcccatgacggtaaccgcccagcactctgtccccggggccctgaactccggaaaccccactgggtaggctgtgcgtcccgcctgggaggatggggtgtgggacgcgtgggtgggggacggtccccgcagtggggaggggaggtgccgcgcctggcctcatgggcactgcagccaccctgggtgcagctcctctgctttgggaccttgggaggcattggtcccacccccactgctagttcatctcttaaagtgagggtgcagctccagggcccgaggtttccccaaccaggaaggatgtcctggacccgggctcaggtctcctgacccagcacgtggctgcccagagccctggcaccagggtgcacctagaggaggggccccacgctgatggcttctgcaaggatggggaccggggacagctctgggcagtcagtgagggagctgctgctcaggggtggacacagggagggggtcggctggccaggggggcagagcttctgcatcggggcaaggctggcccaggagaggccgtggggagatgtcgtcagccccggcagagcccctgcaatgaatggagctgtggctttgagcgggcagaggggacgggagatgcgaggggctgtcatctgccagtgtgagcaggaagggatggggactgattccttccccagatcagcgcagagctagggttaaaagaaagcgggtgctgagggctattttgggcagacacaaaatgtctgtcattcatattttaagagatccatgaataaaagatgaagtctcctggcccgaggctaagtgtagggctggtctgaggactctgcgtctctgccttcccgccgtcgtctgggtcccatctcactgtgtggacggcagatctgagaaggcgcctggtgtggccttgcgggttctctgttccttttaaggcccaggtcgctgtcccatgtgaacattcggccaggtgggcggctgccttggccggctgaccacaaggagtgcaggcgagctcccgaagattcccacggttaactgagggtgagaagctccgcgggcagccggagcctgcctggggtggacgtcagagatgagagtgtcctggcccgcccgtgcccttagtcaaggcccagcttggtggtttggagatcccaggactaaaggaaatagccagcagcactcaggaaacctcctcagttcctccacctgtccatgggggactgcagtgctcgttggcaccccccgcaggtgcaggcagggcaggatctacggtgg

SEQ ID NO: 40098 - DNA, 1846 bp, Artificial sequence
  DNA replication origin
cgtgcatcccagagccctggcagcgcccactgtggggtctgccgttgaggtgtcacccagccagcaagtctggggctgatggggctgccgccaaggctgagaaacgcggcggcaactcccaagccctgcagactcactccttacatgagagacggctccctccacgggcaaccaaaataggtgcacacagaggagagccgagagccgagagccgagagcctgagccggcagaggcctgcagcagagtggggcgcggcagccccagatgggtgccacggcgacgacccagcatggcaccagctcaccccagccgccacccagcccggcggccactcagctcctgctctaaaccccgcgcagccagccgcacgccagagagctgccctgtggaacacaaaaggtggcctgggtcccctctcaggcacagaagcctcgggggcagctcccagacgggctctgccgcagctgccaagaggccctgagcctggtggcggggaggtggggcctgtacccctccggcctgtgtgccccgtgtgcacggagccttgtgcaaggctggaccacactggccctggtttcctgggcagttgacaaggctctttcacaccccgctggacgaccgcctgggcggggtgcccacacaccagagccacagaggacagtggggctggggccgtctccacagcaggaggcggtcagggctctgctggtcactaaccaccacctcctcctgccactgccaccctggccccagcatggcagctggggctgtccccgtaaagtcagggtgaaatgccccagtcacagcctggacattactagtgatctctggggctaccaggacccaacaaggccccacctggggcaactgaggagccgaggccaggggaaggcccaggccaggttcttagcactgtggtccactgggcagagtcctgggtcagagctggggaaggaaaggagccgtgacagtgacgcttggaagcgaagctgcacggggaggggctgcagggggagcctgtgcctgcgcctgagtttagacactatgggacacgggttcggtgcccctggcactgtgtggctcccatgctgggccaggcctccagatgccatcctggacaaccgtaaacagagacccatagacggggcctcccacctgagagaaaagcccttccttggtttcgtactcaggggagcagccttggggcacggaccaccagctccaggagctacaaggctcatgcccaacatgaagcccccaggggagcatgacccagggaggggaacactcttgcttcccactgggatcttgggatcgaaggatccaagccactcaaacacctgagccctgtccacaggcgccagaaagcaccatggacatgaaagggaacagacctctggctccaaaacacggagtgaacaaggaaggggcctcctgctctcctctcagaagcagcgagaaaccaaactccatctttgatgaaaccaggagacccgttaacctgagctgcttcaaaatgccgcgaccgcaaggacatgggggcaccgaggggtgcgggcgacagacagtctgcaagaggaaaacccgtcgccctgtccaggcagggaggggctccccggaccaggctgtgcactggggagaggcggagagggaggccaggcaggacgatggccacacggagagggctctgctgttcgcaaactgtctccagacaagactggcctgggaagaactcagttcataaacagagaagcagaaaccaaagaggacaaacacaaagatctacgggaagaccctgctcctcaggaggccgaggcaggaggatcgctgcagcccaggaggcgg

SEQ ID NO: 40099 - DNA, 2035 bp, Artificial sequence
  DNA replication origin
ctgctgcctatggctcctgtacgcccgtctgtcccatcggccggggccttggagggtgtccgggctgtctctgtggatgccgtgtctgctcgtgtcagggaagggccaggacactgaacagcagggacacaggctccaacttgcctcggccacccactcgccaggcatccttggcggggctgctggggctatgaaccctgagcaggcagcaaggccagaggaggtcggatcatgggggctcacaacaagaggggctgtgcataggggccacccacatgccctggagccaggaggccccagagtccctgggaccacccccaccccaggcagcctgggaaggctcagggtgctgggcccccgcctgggagctgagagtggtcctgctctgcacttcccagacactctgagtggggtacaccaccacatccagcctgcccagccccgctgcaggacatgggccagcgaggccctgcagggccctgggacggggggagctcgggcagggggagccaagctgggcctcaggggcctggggacgcaccacccccttgctttccacaacctgaaaacaaggactgatcagtcactgattcacagtccaaaaaccaacccccaaatcccagggcttccagcaacaaaggaggacctctctcacttccgggtcagcaagagcttcagggctgggcccactccgcgtctcctccctgcagaaggaccctctgctctccgcccccagagcaaggcagtgggctgcctgggtgtggagcagctgggtagggtgagggcaacgggtggggtagggggggtgcagcccacaggcgaggagcaggccgggggccttgccagggccatctgtgtccctggtcactgaggatggcaggggagactggaagggaaacagacccccaggtggtgaaggccctgagccagcccccacggcagcccctgcaggcctcagtgctcctggatcctaccagggccgcagcaggaactgaggctgaagcaaatcagggcggctggtggcacagctggggccacacccaggcacaattccttcccaacacagccagcagactatcttgtgggcaccagcgcctgctcagggacggacttggggcctccacaactgcagtccccacaaaccctgtgcacggtccaccctgactgcgtgggggctggggcccccagtggagggatgtggcttgttgtcctgaggagagtgggggcagctgtcccagggtgtgcccagccctgtgaatcagggaagcagctcatgggaacggccctggcagtgcaggggaagttcacagagccatttattgagccccacaaccgaccagagggaagggcgtccaccaggctcaggccatggtccttgaggggccggcgctctctacttggcccacatgtgtcctgaggagttgtggcatgcccgctgccctggtcagagctggccgccatcttccagctgcatctgccgggccagcgtctgcccgatggccaccagggggctggctctgtaggccggactggccagcagctcctgaaaccgggtcctttcttcctcgctgaaagaatggagaccacagatcagcaggcaggaacccccggacccctcagcccctcaacacccggaaacgtcagacaccgaaatgaatggcagaggcctggggccaccacgggactgagtactggggcctcggaaacttccggcaggaggggagaggctgccccgggccctcctcgtggccacgtgcatcccagagccctggcagcgcccactgtggggtctgccgttgaggtgtcacccagccagcaagtctggggctgatggggctgccgccaaggctgagaaacgcggcggcaactcccaagccctgcagactcactccttacatgagagacggctccctccacgggcaaccaaaataggtgcacacagaggagagccgagagccgagagccgagagcctgagccggcagaggcctgcagcagagtggggcgcggcagccccagatgggtgccacggcgacg

SEQ ID NO: 40100 - DNA, 1014 bp, Artificial sequence
  DNA replication origin
ggcctgctcctcgcctgtgggctgcaccccccctaccccacccgttgccctcaccctacccagctgctccacacccaggcagcccactgccttgctctgggggcggagagcagagggtccttctgcagggaggagacgcggagtgggcccagccctgaagctcttgctgacccggaagtgagagaggtcctcctttgttgctggaagccctgggatttgggggttggtttttggactgtgaatcagtgactgatcagtccttgttttcaggttgtggaaagcaagggggtggtgcgtccccaggcccctgaggcccagcttggctccccctgcccgagctccccccgtcccagggccctgcagggcctcgctggcccatgtcctgcagcggggctgggcaggctggatgtggtggtgtaccccactcagagtgtctgggaagtgcagagcaggaccactctcagctcccaggcgggggcccagcaccctgagccttcccaggctgcctggggtgggggtggtcccagggactctggggcctcctggctccagggcatgtgggtggcccctatgcacagcccctcttgttgtgagcccccatgatccgacctcctctggccttgctgcctgctcagggttcatagccccagcagccccgccaaggatgcctggcgagtgggtggccgaggcaagttggagcctgtgtccctgctgttcagtgtcctggcccttccctgacacgagcagacacggcatccacagagacagcccggacaccctccaaggccccggccgatgggacagacgggcgtacaggagccataggcagcagatcccacgctccctcggccggggccagcttggctgcccagccccagctccttagagaacgggcttctcgcttcagaggagctggtcacaaaccagtggtcgcgacaaaaccattcctgtggtggagcgcgtgtggggcgcgtgtggggcgcgtgtggggcgcgtgtggagcgggtgtggggc

SEQ ID NO: 40101 - DNA, 1654 bp, Artificial sequence
  DNA replication origin
ttagagaacgggcttctcgcttcagaggagctggtcacaaaccagtggtcgcgacaaaaccattcctgtggtggagcgcgtgtggggcgcgtgtggggcgcgtgtggggcgcgtgtggagcgggtgtggggcgcgtgtggaacgtgtgtggggcgggtgtggggcgggtgtggggcgggtgtggggcgcgtgtggggcgggtgtggggcgcgtgtggggcgggtgtggggcgcgtgtggggcgggtgtggggcgcgtgtggggcgggtgtggggcgcgtgtggggcgggtgtggggcgcgtgtggaacgtgtgtggggcgcgtgtggagcgggtgtggggcgggtgtggggcgcgtgtggggcgggtgtggggcgcgtgtggggcgggtgtggggcacgtgtggaacgtgtgtggaacgtgtgtggggcgcgtgtggggcgggtgtggggcgcgtgtggggcgggtgtggagcgcgtgaggggcgcgtgtggggcgggtgtggggcgggtgtggggcgcgtgtggggcggatgtggggcgcgtgttgggaacagcgtccgggatgcacagagcacagcgcggtggggaggcggcaggggcggcttccacttcctccagcatcccaatcccaccgtctgggtttcttgtgaaaaacctggccgggcgcagtggcgcacacctgtagtcccagcacttggggaggccaaggcagtcgtatcacttgaggccaggagttcaagaccagccaacatagtgagaccccatcttgacaaaaaaatagaaaaattagccgggtgtggtggtgcgtgcctgtagtcagctactggggaggctgaggtgggaggattgcttgagcctaggaggccgtggctatagtgagccaagattgcgccacagcactcccacctgggtgacagggtgatcctctctctaaaaaataaaaacgtaaaaatgttttttgcttcctggttttgaaatgactcttgtctggttgtggctcgcagcccctcttctagggatccttgcgggctcaggggcctctaactcctccctgggtaagcagcccccggcggtgcctgagagtcgtgtggaggagggtgccgcggaagggaggaggatgccgcggaagggaggagggtgccgcggaagggcggagggtgccgtggaaggacagcgacaggtacttggccgggcaggagtggcagcaggtgtcccatcggctgagatggatgcagattgtcccaggaaagtagcccttgatagtatttgcgggggtgccaccccagcattctttgcaggtgcagagcccaaccctcagctaaggccgcagctggggcagggtcatcttgtgacagaagggcgtccaagtgtggggttatccgtggctgtcagctgagcgctcctggccaccattgagagggaggctccaggcggaggatggggtgtgtgcattctctggacagacacctggggtagagcccctgaatcagcagatcagagaggatgactgtaggagcttcaggagcaggaacatgaatccctcggtaatcgatttaaacaagttctacagttgactcggctttcatgccttttagaccctggggccctcggtgcatttttccgagttaaagggttaacacagcagatcaaagct

SEQ ID NO: 40102 - DNA, 1564 bp, Artificial sequence
  DNA replication origin
gatgactgtaggagcttcaggagcaggaacatgaatccctcggtaatcgatttaaacaagttctacagttgactcggctttcatgccttttagaccctggggccctcggtgcatttttccgagttaaagggttaacacagcagatcaaagcttcctggggcctggaggtgcctggcgctggcctgcaggactctgagaagctctgggctgggaccgtggatgccaggctcaaggcccgcagacctgggctgggcacgtcccgggtgcctcagccccaggcccagtgttggcatatgggggactgtggggcacaatgggagacaggagaggcagtgggaggagccccccaccctgccagtcccgcaggaagggcagtgtctggttgcagggggtgtggggtgttggccaaaggaatagcaaatgcctggcccagagtgaagggctcctggctgggatggccacaggccctggggggtctccctcagccccgggcaggcccaggttctccttccaggcgcccgggatctcctttgtccctggctgtcctcaggctgcacttagtgtggccactccaaggggggctgaggaaaccacctctcagcacctaccaggcttctgtaaggcccacacccagcagctattggatccgcctttccccaagaaagcccccggccctccccttcttctcaggcccctcactgagtcagcaatccctgttcccaggagctgtgtgtccgtcaccaactgccgtcctggtcctcaagcaagcagggaccgttcccactgctccggggcaggccccgcacaccctggccagcctcgctggctcctggagctgccgtgacaaacgcacacagtgggggcgtcaggcagcagtgcattgtctgtgtcccggaggccggtggtctgcacttggggtgtcgagagccgcctccctcaggctgcagggcagggtccttctttgcctgtccggctgctggtgattacttgtgtttctgattccagacgcttcctcctggtgccacagatgccggcagcccttggtttcctggcttgtggccacgtcactcgcgtcgctgtgtctgtgacgccccataaggacaccggccatgttgggttagggccctccctgctccagtgtggcctcatcttgactggttccaaatatggtccggctctgaggttctgggggacgtgagttttgggaaatctccagtctagggggtggtcttgggcaccagggttttagacgcccctgccgcaggtgggagggggcctgcagctggagctgagcaccatgggcgtggtgggggctgcggaggtggtgtgggcctcatggccaggagttggggcctgggcagccatagggggctgctgatggccacgaatgggctgaggctgggatgtgaggattagggaaggaaagtggaagctgttccagggcccgtggggtcgtccacgccggctccccttgcccacccggacctctggccccttctcagggtctgatctcccagtgcaaacagaagcacccggcccctgcctttgtccagcaccttcctgg

SEQ ID NO: 40103 - DNA, 1238 bp, Artificial sequence
  DNA replication origin
ggagggggcctgcagctggagctgagcaccatgggcgtggtgggggctgcggaggtggtgtgggcctcatggccaggagttggggcctgggcagccatagggggctgctgatggccacgaatgggctgaggctgggatgtgaggattagggaaggaaagtggaagctgttccagggcccgtggggtcgtccacgccggctccccttgcccacccggacctctggccccttctcagggtctgatctcccagtgcaaacagaagcacccggcccctgcctttgtccagcaccttcctggcctggccacgatgctcctggacactttgggccccggttttcctttcttatttcctcaccggaaggaaagctcctgagagcagggtctttgccctgtgcgtgctgtgtgagcagcaccgggactgtgcacagatgagtgaatgagaggcaggagacagcggggcctggatgggccctgcacacagagcctgcgtgtggtgttcacgggggacagcggggcccggacggggccctgcacacagagcctgcgtgtggtgttcagaggggacagcggggcctggacgggccctgcacacagagcctgcgtgtggtgttcacgggggacagcggggcccggacggggccctgcacacagagcctgcgtgtggtgttcagaggggacagcggggcctggacggggccctgcacacagagcctgcgtgtggtgttcaggggggacagcggggcccggacggggccctgcacacagagcctgcgtgtggtgttcaggggggacagcggggcctggacggggccctgcacacagagcctgcgtgtggtgttcaggggggacagcggggcctggacgggccctgcacacagagcctgcgtgtggtgttcacgggggacagcggggcctggacggggccctgcacacagagcctgcgtgtggtgttcagagggggacagcggggcctggacggggccctgcacacagagcctgcgtgtggtgttcacgggggacagcggggcctggacggggccctgcacacagagcctgcgtgtggtgttcagagggggacagcggggcctggacggggccctgcacacagagcctgcgtgtggtgttcaggggggacagcggggcctggacggggccctgcacacagagcctgcgtgtggtgttcagaggggacagcggggcctggacgggcccctgcacacagagcctgcgtgtggtgt

SEQ ID NO: 40104 - DNA, 1075 bp, Artificial sequence
  DNA replication origin
gggcagtttcgccgggggtggaggggccgtggggcaaaggccaggtccagtcaaaccccaggccacccaggagccatgcagagttccagaggggagagacagaaggctgcccccatcccacaggagccgcacagacacaggcccggccgtgttctccaattaaacatcagggttaattagtcttccgggcccaggggagggggccgaggtggagtaatcacggctgtgccaggaaatccagagctaaggccgggggaagaggggagtgtgctacccactgggaaggcggggaggccaggactctgccacccatgaagggcgccccggccatgccagctccaggctggagcacacaggtcacactcggctcagcggggccctcacgccgcccgtccttacgactgcgtgtggtcaccgccaccatcggggccggtgggggatgccagagcccgagaggccataggcccagcatgggggcttctcctgagacagcagggtgggcgccagtgttgggggtgtgtggggggctgtgtgggggggatgtatggaggggtgtgtggggtgtgtgggactgtggggtgtgtgggagggtgtgtgtgtgcagtgtgtgtgcgatgtgtgagtggaggggtgcaagtgtggggggtgtgtattggggtgtatggaggggtgtgagtgtggggggcatgtgtcggatgtatgtgtgggggtgtttgggggtgtatgtggcgtgtgtgtgggtgtgtgtgggcgtgtgtgtgggggggtgtatgggggtgtatgggggtgtatgggggtgtgtgggtgtggggtgtgtgggtgtggggtgtgtggggtgtgtgggtgtgtggggtgtgtgtggggggtgtgtgtgtgtagggtgtgtgtaggggtgtatgtggggtgtgagtgtgtggggtgtggggaggggtgtgtatgtgaggggatgtgagtgtggggtgtgtggagcggggtgtgagagtatgtgaatcccacccctgaacttggagttcgggagggagaggctcaaatggaaaatagattctgtctcggaccctgtggaggggcggcccct

SEQ ID NO: 40105 - DNA, 1208 bp, Artificial sequence
  DNA replication origin
atctttaataaagtctcataaaccaaaagccagctggcagttccatttggaacatccatgaacacagctgcatttataggaaaacttctccgtcagcgatgctcccatgtgtgacagccgcccccagatgtccttccttcccctccacaccccctcacagcccagggccctggggacaccggtgccgaagggctggatctgatggacaggccaaacccgggccacgggccacagtactgagcaggcggggccctcagggagggacggggctccctgggccagccctctgccagccgaccaagactcaccctcgatggtgccctcgacctgtcctccctcagcagcctgtggcatccagaccagttcgtggcccctaggaggggaaactgagtcccagccccagggtcctccctcggcttcactgggtgccccatggaggagacagccagggtgtgtcacctgacaggctcaccagaaccagcacaggtaggaggacggggcaggtggggacaggacagggttggactccaaagggaggccggcagcactgtgtcccggggatgctgacagtggcccaggaggggtcagatctcctccccagccagcagcagggccgtatgctgggaacaggacctcgtggtgagcaggtgggaaggaggtgggtggagatggtgggtagggctgcctggaagactccccagggatggccatgtgtgttgggagcactgctggaaggatggtgtggccaggaggaagtcccagggacaggggtgaggaggctgggccaagagcctgggtgtgaagaagtcaccctcagcaggctgggcccatgggcccggggggtgctcagggagggtgaagggagatggggaggaggctcaggcctgccaggagccgggtcctggtgggcagcagagggtacggtgcctggcagcgctgaacgggagtgggcgggaggacgtggagccaggccagcctcagttcgggggtcctggggcctgtgtccagaggcgaggcccacacagcggcgggactggtcctgcaggcgcgtggccacagtgggcaggagtgggggctttggggccctggctgcccaaagcttgatgctagcctagggccaaccagaccccacattcagggcataccccacagcgtatcagacatctatagccgtgtagcaaataccccaaaacgtagcagcttaaaaa

SEQ ID NO: 40106 - DNA, 1278 bp, Artificial sequence
  DNA replication origin
acaaacacactttctggaaacagccaggaggagcagccgtctcccaagaggggaaggaaaacaagaggccgctgcggctccactccccatgaccgcctggacctgcagcaggctggtgcaaaggccctggagcagtggccactgctgtctgcacaccagggcccagcccatggccagacctggggccggtgggtgtggactggagcctggggctctgccagcccctcctctggtgccaggctggtctcccgaggcccagaggaggtaaaaacagagtctttaatgacaccaggagccattggccttcaaccactgcctccacagtctgggcaccccagccagcagcttgagggcctggcccaggcagaggctggggcaatgtgggatgctgtgagggctgcaggctctggtgggggcgaagctgccacctgctcagaggccatggcctccgcctcgggcacctgctcccagaaccgccggctgcaggggaacctgcctccatcacccctcaagcccgggccctgatgcagggtgaggggggaagcctcccagaggaagatgcaggcttgcaggcagctggaggtcgtggcctgagctctgctgagactcgcgtacgacattgtgtagaaaatctgctttttaaactcagcctgctgcagagatgaaaggaggctctgtgcctgcggcgctttgccgcccattggagttgggtgttggctttgcatgggaccagtgattctggcaagcttggcctgtcggccgggtctgcagcccttgccggctagggcaaggtgtggaacgggagccaaagacagggtcccagcccaccccctacaggggacccatgttgggaaagacagggtcccacccaccccccacaggggacccatgttgggaaagacacgcgggggctcgggacgggttctgcaaaacttgcgggggcggccacatggggttcccagtatgtgtgacctggggacgcagcggcaaggcagctggcaccatgggcaggtaggtgcagagccagtgaggtgcccagcagcagccccgcctgagcctccaggcccacctgcctcctttcccagcctcagtggggaaggaggagactttcaggcccctagagtctgaccaaggccccagctccagtgcaggacccgttggccaagatgcaggggagagaaagggcccccctctgaggtcctcgggaggctggggaggacctctgggggccgctcagtggtgaggtctgttccgcctgcccctgcctgcccccctcac

SEQ ID NO: 40107 - DNA, 1451 bp, Artificial sequence
  DNA replication origin
cagagctgcttcccaggccagttctgcctacctctcgcccgagacaagccctgtgcagagcagcggctcaccagacagcggcccagggggcccttccgttctcagaaaaggggaataggaacccttcactcttgtctgtccctgccagccagggttccagggctctggggctctgtgcagggttggggctcgcatctgtgtggatcccgggaacctgacaaaaggccaggctgtgcggcaccatcttggccgtggggccagtcctgggcgtgaccagtgcccggacccccgaccgggcagtacggcggctctgcgcaaacgtcccccctgcagggtcaagcagaactgtggtcgctgccaggctgcctggcacctcagcacctcggccctcactgcccacaggaatctgtcaggagccccaccccggccatgagctcggggggctggcgcccctgggctgggcatggcgcccctgggctgggcatggcgccgggcagaggctcatggatctgttgagtggatggacagacacagcccacaggtgagcgatggccttgccagtgtggacctgtgttcctgcaaggctgctttaaattgcttttgataaattgatttcccactgacttgttatattttcagaaacatttcctctgttttcactcatgactgagctttccgtcggccgtggcccccacgtgtagcaggcacctgcaggctgcccatcttcaccacatgtgctccccacctaagcaatgcagagaggccgctgtgggggtcgtccctactcaaggaaaaggactgggctggaggctggagccctgagttagagctccacgttggccgtggctgtgcggtctcctcttgggtagggtgttggccacttctcagggcacccggctggagcctcattcactgtgaagtgactgcagatgtctgaggaagaggcacctgctccttcaggtccctctgctcaccaggtactgggcacctctccggagctggagctctcagtcagcagacacttggcggccagggacggtcaggcctcagagcagagctggaaaacagagggcatcagacaaacatcacgtggctctgcaggacccggggcaggggcctccaggatggagaggctgggctgtgttggtggcaggtggccgggaggatgccccggggacctcacagctgttgttgcacccctaaaactccctctgcccagagtccttagggagtccgtgctgcgcaggtgctggggccgctgtgcggtgctgtccgagtcactgtgtggagcttagctcagcgctttgctttgagatcagccaggcaggaatatttacaccacagtaactggcaaacactgcacatgggcagccgggtgtcagatgggcaccctggcgctggagatttcactggccagacccccacccccaattccacaggaaacccaagag

SEQ ID NO: 40108 - DNA, 810 bp, Artificial sequence
  DNA replication origin
gcccatagtcagtccccgcctggggtctggcgtctgccctgctaactctcctgtgagtgggctgggcacggaggctgaacgactgtgtcagcccctgcccctgcccctgcccctgcccccttaggcctccagggagctgctccagaaagtccaagagccagcaccgcggccagctggtctgtccttgcaagaggccgcgatacagccttgacacccaggggctgagaagggagctggggaggggctggagaggggcttggggaagacctggggagggtctggggagagtgctggggaggggtcagggaggggggctggggagggggttggggaagggtggggcaaggatctggggaagtgttgcggaggggtgggggaggggttagggagggggctggggaggggttggggatggagctagggagggagctgtggagggagctggggtgggagctgtggggggagctggggatgggctggggagggatctggggaggggttagggagggagctggggagggagttgggtgaggggcttgggagggggctggaggccactcaagtcaggacgaagaagatgccggtttgtgcggcggtgcagggagtgccctgcctgctggcgtgcccttgacacgcagacagggagaggctgagtggacttgatcagaacagcccctgcgggcattcacaccacctcctgtggtcacccctagtggaaggaaggcccagcaaggagaccttgacctcgctggccctggggctgggaccggcgccctggacagtgtccactctcccatttccatggaacca

SEQ ID NO: 40109 - DNA, 1160 bp, Artificial sequence
  DNA replication origin
agcgtgggcatcacagagcaccaaggccaacccagggcttcccgcgcaggcccggacgggccctccccccaccccgcccccacccgctccctgtcccagggccccgccccgcctccgtccttcacagcggcgctgcgtgcggcgacatcgcgggttctccgggtctgcgcgtggaccgtgggtctctgcccccgtgggcgccgcctctcaagggcgcgctcgggctcaggtgcggccgccacgcgaagcccctcgcagcgggctcggcggcccggccggtcttacttcccagccatccccccagtaggaagaagcgcgtgtcttcgtttcccgctgccgctcctgctccaggacacccacccccgccgcgaccgcctctggccccggccccctggcctcgcccggcctcgccctcggggggcttccttcgcggcgccctggggcccccgtgccgtcgtccgggcgcttcccggggctgctgggggtcctgccgggtcccgcctggaccaagtgcacgaacggctgagggcgggggtggcctcttcgctgttcctcccaatgaaggccccacgcgagacccaggcccgtggccttcgtggcccgacgcttacccctggcagctgcgtcccaattcccttccttcaaaggctgcatcggtcctgctgtcgtggggcccacatcgtgttcacccatccaccctccctggaggcgccgctgctccggcgtttagccaacgtgaacaacgcggctgtgaacatgggctacaaaggtcttttccagacccgcaattcttctgggtatagacccacaagggggttgctggctcctatggtaattctatttttaattttctgaggaaccgccatactggtttccatagcggctgcaccatcttacactccgccagcagagcgcaagggtttcagtctctccacatcctcacacttgtcattttctgttttgtttttttttttaatagtagccatcctaatgggtgtaacttttccctgcactcccctggtgattacaggtgctgagcatctttacatgtgccaactggccatctccacgtctcccctggagagctgcccactcaagtcctgtccactcaggtcctgtccactcaggtcctgtccactcaagtcctatccactcaagtc

SEQ ID NO: 40110 - DNA, 1052 bp, Artificial sequence
  DNA replication origin
ccggccccggccccgcccttggactcttccccgccccacccccacccgtgggcgagcgagcccggaccgtgaagggagggggcggggcgggggcccggaggggcggggaggggccgggtcctcccgcgcggggtcctggaggtcgcggcacgcgctccctgcaggcgaccctggggcgcgtctgtcccaggcccgggcaggacccccgcccgctggttgtctgcgcggctgccccgcgcccgccgcccccggccgctgtcgcgcgttcccagacattctttgggcccaaggctccgggcgttctggcggcggcgctgggaagaggccgggcgccggctcccacagccgggccctgtcccgctgggcgcgggcgatgccattcgtcacgctctattattgtaggcagcgcaccccggggctcggttcccacactgcgcctgaggcctggggcctgagcgtgggccgcacccgccgacctggggggccctggagggagcggctcggaggggcgccggtgcctgggcaggtggatctgggaaagatgccactgttcctgccacgtcactgctggctgcagggtcctgaggtggtggcggtggtccgtggcctgtgtcagctgtcatgtgccggctgcagggggcggacaggccaagggacccaccccgactttacgattagagtgttgggccaagggtttctctggttaaagacctgatgaccctcccattgacagccacggcccagccaagaccagcactacgcatcccctgggcacacaccccggtgtcaggactcaccatgtgagatctaacctggcgggcgctatttccagccacactggaggtcggagtccagactcagtttcctcacctgggagaccgcatggtagcaccctctccagaggtgtctgcatggcgctccgagaagggcctggcacccctgtctatggaagcatgtttaagttctcccatccacacacagaatgccgctgcctctgctgccacagtcgcatgacacaaaccacagttacgggacctggactctggagaaac

SEQ ID NO: 40111 - DNA, 1411 bp, Artificial sequence
  DNA replication origin
agggtttctgggaagaagaagaaaaaaatgacagaattattcgtgattgggaaatcacttggctgtggcgggtgtggaagctccccagtgtccggagctccctgtgtggaaagttttgtggtgtgtgtgccgtgccctttctggagggttacacaacccaggacggacgcggtgggggcacagagggaatgacactcccttcccaaacactcagaagacagaagaagacgggagccggtgcagcccaggctccctgccctgccgagacctgaccgtgcctggccagcccctgccccagccccaagggactcccacgaggacaccagatcctccgggggtggaggagccctgcggtgcctgtgcggaggggcctgaggctggaggaggcctagagggctgatcctgcctttgccccaccattctgatgttttgttcgatgtggacgttttgcattcacttagattctgcaaaatcttgcgttaaaatatgacttatcttgattcctgaatttttccatgccttttgtacctgaggggactgtcacactcacctaagccctcaccaggccctagtgggtcagaaggcgggagtacagtatctctgtgtgtgtgtgcatatgtgtagtgtgtggtgtgcttgtgtgtgtttatgtggcatgttgtatgtatgtgtggtgtgcatgtgtctgtgggtgtgtgtgtgcgtttgtcatatgggtgtgtacgtggtgtgtgtgtgtgctgtggggacgtatggtgtgtgtgtaacgtgtgtggtttatatgtgtgtgatttatatatgtgtgtatgtgtgtaatgtgtgtggtttatacgtgtgtgatttacgtatgtgtggggtgtgtggtttatatgtgtgtgtatgatgtgtgtagtttatatatgtgtgtatgtgtgtgatgtgtgtggtttatatgtgtgtgtggtgtgtatgcgtgatgtgtgtatgtagtgtgtgtaatgtgtgtgtagtgtgtgtggggtgtgtgtgtagtgtgtgttgtgtgtgtgtggtgtatgtgtgtggtgtgtgtgtgtgatgtgtgtgtaatgtgtgtggtgtatgtgtgtggtgtgtgtgtgatgtgtgtatgtagtgtgtaatgtgtgtgtagtgtgtgggggggtgtgtagtgtgtgttgtgtgtgtggtgtgtgtgtggtgtgtgtgtgagatgtgtgtgtgtactgtgtgtaatgtgtgtgtagtgtgtgtgtggtgtgtgtgtggtgtgtctgtagtgtgtgttgtgtgtgtgtggtgtgtgtgtggtgtgtgtgtggtgtgtctgtagtgtgtgttgtgtgtgtgtggtgtgtgtgtggtggctacagcctggctgaaggttggagtgtgagaaggcggtgtaggagaagccatgtgagttctgcct

SEQ ID NO: 40112 - DNA, 1478 bp, Artificial sequence
  DNA replication origin
attcttccctctgtaagagggcagcggagattgtaaattctaacagtggtggggtggtgagcagtctttgctttagtaatggacacatgtattctgtattcactttcatggtcagatgttttcttaagctaatcttaaactgattaagaatggtaaggtgtggccaggggtggtggctcacacctgtaattccagcactttgggagaccgaggtgggtagatcacgaggtcaggagattgagaccatcctggctaacacagtgaaatgctgtctccactaaaaatacaaaaaaaaaaaaaaattagcctggcgtggtggcgggcgcctgtagtcccagctactcgggaggctgaggcagaagaatggcgtgaacccaggaggtggagcttgcagtgagccaagatcgcgccactgcactccagcctgggcaacagagcgagactccatctcaaaaaaaagaatggtaaggtgtgggtcacaccctagggagagacagtgggcccggtggctgggacagcagctgggacaagccattcaatcacccagggtggcagattcgtcacagacgtgagaggtgctgtggtcaggcaagacttctgcttggccaggtcagggaggacttcctgaaggagacgacattcttacaggaccagtagtcattccccaggtccagaagaggcctgggggagagcctgtgcccagcgggcaggaaagtgatgtggaccccagccaggagagcccagggagccagtgcctgtcactcgggtgcctcagggcttcctggaagggagggcctggcatggcaggggccaggggccagtgagggcaggggagggactggggaggagagcagaggaagacaggtgcagccagatgggagggtcctgaatgccacttctgattctgcctccctcccaccacttaccaacctgcaaaatcctccatgatcttttctttccttttttttttgagacaggatctcactctgttgcccaggctggtgtacagtggcgccatttcggctcactgcaacctccgcctcccaggttcgagtgactctcccacctcagcctcctgagtagctgggactacaggttcgcaccaccacgcctggctaatttttggatttttttggtagagacggggtttcaccatgttggccaggctggtctcaaactcctgatctcaagtgatccgcccatcttggcttcccaaagtgctgagattacaagtgtgagccaccgcacccggccaagcttctgtgttctaatcaaccctgattaaaagctcactcccttgtccccctcctcactagccgccactgccccagcacccctccccattccatgtccccatcccccacacccttccccctccctgcctcccactcccccacacctctccccttccctgcccctcactctccacaccatccctccaactccctccctccacttcccccacactcccccctctc

SEQ ID NO: 40113 - DNA, 1048 bp, Artificial sequence
  DNA replication origin
cctcccgagggcgccgagtccgcgtgggatgcgccgcgctgcgccgcggggagggcaggtgcgccgggacgaggctgcgccctggggaccgagactgcgttttggggaggggacggtgtgccctggagatcggaggctgcgctggggacgaggctgcgcccggggaccagaggctgccccgggtacaaggttgcgccggggaacgggaggctgcgttggcaacaaggctgcgcctggggacggtaggctatgtccctggggagacgctccgcccggcatgggacgctgcgccgggggacggcaggctgcgcccgggatgaggctgggcccgggcaggggaggctgccttgggaggggacgctgtgccacgggagtggagactgcgttggggacgagtctgcgccctggacggtcctgcgtgtccttccgagggcgcagtgtccgcgcgggatgctctgcgccgcgggcggcccgggccagggaagttcctgcgggtgccgggcgtctgcagcgatcgggagcaatctggggcagttgggggcccgaggtgacttttgacgtgttcacatcagaaggaaaattattgcgtggtggatgggtgcgagggaaggtgtcagattgggctgtggacgctgaaacgtgttggagtcccgatttacacgctggaaaacctaacctaaaacgtgttcctgtccaggtttctatgtcggagatctgcaccgtggtgtttagttcccagttaatatttttggtcagcaggtttgggctgttacttctgatacaggcattttacttccttcttactaaccattattgcattccgttctcgaagtataacgaaaagtggcatgatatcaaacttgtttctttaacgtttaactccataattaagatgatagaaccgtagtttttttaattgagaatacaaatatgtatttaatcctctttgtttcctcttaaattttgccgtatgttttattgcttcgaaaggtgccacccagagctgcattttccaaaacgctaggttgtcttaagagcagttgtttct

SEQ ID NO: 40114 - DNA, 1008 bp, Artificial sequence
  DNA replication origin
ccatccagttgacacctttcaataaaaattgcagattaataataaatgatagaagttcatgctttttccttctggtgaagaccaacacatggccctgttttaaagagcagaaagctgcagagccactgccacgtcgcaggcaccatcgaggatgtgtaggcgtctcagggatgttacggcactcagaggattggtttatttttaggaaacaactgtagcagccaagtgaagactctggacaggggaggacagctgttgaatgtgtccacagggcctgaagtaggccacgaaagccccaagtttgcccctgcgttggcacaagtactggggctgccaaggaaaaggcgggggtggaggaactcagtgtacagcatgcctgtgggggcaggcatggcgcccggggtggaggggtggaggagaccgagcctgccccagccatgtgggcctcgcagcccactgggagaggcaggccacaaacagggagacaaattgtggattgcactgtgcgtggagggagagggagcggggcggtggggtgggttggtgccgtgtgagctgggacttgagcagtaaggtggggtctgatgaagccttgcgcgaggacatggcagggagggaacagggaagcaccccaggaagttggagaggctctggtgggcatagcgaagggctgacgatgagcacatgggcatgtgttagagcacgttttttatttataaggacataaccctggctgctgcgaggagaggggctctcagggtcaagagaaggcagagaggctcctgcacaagctgagtggtaacagcagcgcagaagcagacaggctgatgtgtttagcccaactttgggagaagagctggtgacatggggtgtggggtgagaggggagagagaaccaggtagtctccaggtgtctggcctgatggctgcagcgaggtgacaggatttacacatgtgcattggtacacctgctgcccgggatggccaggtgaacaaggagttggccttt

SEQ ID NO: 40115 - DNA, 1292 bp, Artificial sequence
  DNA replication origin
tcagatcatggaaaacttttctcagtttacttctaagtaatcacagataatacatggccagtaatcccaggctggccattcattcaggttttttaaaggatatttaacttttatggactagaaggaatcacgagggctactgcacaatacatggcctaagttccctctgttccttcctctgaatcgaatggatgtgggtgaccgcccgaaggccttcacaggatggaagtagaatgatttcagtagatactcattcttggaaaatgccatagttttaaattattgtttccagctttatcaaagacatgtttgaaaaataaaaagcatccaagtgagagctggtgagaccacgtgctgctggcgtagtgtaggccagacattgacagtcctgacgggagctcagggctgcccagcgcccagcgtgcacgggacggccccacgacagagggagtcagcccgggaggtcaggagcgcggcgggcgagggccctgtgtggaccacctccaccaagctcagagatttgcaccaggtgccttgttgcctccgctcaggatgaaagaggagctgagagaagtgctctgcctgccagtgcagtgcccagctccaaggctctagagggtgttcaggtgggtctcctggggccatggggagagattggtgcagaccttaccccacagcatacacctgccacagcgaaatccagggtgttggcacctgtgtgtccgtgatgagcctaggaaaccagagcaggggcagaggggcgtcatcctcccaccggacgctgggagctcagaccccaaaactgaaacaccgtggcttcggcggggggtgtgcctcctgatgtcaggagccccatccacgtgtgtccacacagatctcgtcgcagcacggcaggaaggggtgctgcttagggctcattgttggggacatgaccgggttcagcggctagaacatctgccccacagcagcctcctcctccaccgaagagggtagttgtctccctgaagcagtcacagcaggcgtctctgccgctccgtcaccacagtggggttttgttcaggcagatcgcgctggggttctgcacctgcagaaggagaggggtctgttgtcgctggctttcccccaagcaggctcttgcacactctagaaaaaacaccttgtaagtctgtgcatttttattgtcttgataaattgtatttttttctaatggggattgggagatggacttcgtttttaaaaatatgtggattttggttaccaagtttagtgttaatatattccatatacataca

SEQ ID NO: 40116 - DNA, 1372 bp, Artificial sequence
  DNA replication origin
agttatgcactggcccctgtgcatttctgggccacgacaccttctgaattgagttctcagtgtcattacaagtcacaggtttctgggtgatgttaagatatcacaaggtggactggctatgtttccaaccctttttcctctagctccgtacaccatctccatccccagcgctggcccttggcagctcagggtaaagtcatgtgaagctctgggtgcaggtcaagggctagtggtggaggtaagaggctctgctcctatggggtgggggtgaggggctctgtgcctatggagtgagggtcagggggtgaggggctctgtgcctatggggtgggggtgaggggtggggggctctgtgcctatggggtggggatgaggggtggggggctctgtgcctatggggtgggggtgaggggtgaggggctctgtgcctatggggtgggggtgaggggtggggggctctgtgcctatggggtgggggtgaggggtgaggggctctgtgcctatggggtgggggtgaagggctctgcgcctaagggctagtggtggtaagaggctctgctcctatggggtggggaggcccctggggtggataagttcagctgtggggaggcagtgggaagctggtttgggtagcgggttcagacttgtttccaggcaagggtatcagagccctgctggatttcaaccctctgacaccccaagtccaaggtcagtaccccaagtccttccagggcagaacctcaaaacccccacaggagtgatacgaggtatggaactgggttcctggacagccagccttgtaggtgtgcagagacgtcctcttcattgtgatgctgtcactaatactgtaaaagattggtcattgttcagtaggagaaaagaattctgtctgcacattacagtcgtaatgcccccactggctctaagaattcctgaaacaaggggctcatctgacctgacgtcatgtgtgaccatggagtccatctcccacggacgtgagctgagggagcagaagccagattgtgtgcccttccccacacgaagagcctcaggtcttggtagagcagcatgacattctggtgtggccataagagggtgtgggaggggcagacgggggagaaaaatggggcaagcagcgcctcctcagccccccaacccaatgacccttaacagccaccagcacccacaggagcaggtgttttaggacagccagtcgagaaggcgaggtaaacatcctctgtgtctagcctggtgacaagtttgagcttatgggacattaactcacaaagcaaagtaactgcagcacgctgtgaaccctccctgaattaatggcaggggaatctgcttcaagcagaaatgggttatctacaga

SEQ ID NO: 40117 - DNA, 922 bp, Artificial sequence
  DNA replication origin
cagccccaaggactgtgggcccaggaggttacaacaaatcttcaccagatgttctggggagggaggaaggtgcatggggtggggaggctaacaaagggctgtgtggggttggggtcctgggggccaggtgggcaccgtggggcccagcagcagcgagcaacccctcgagcactcacctcaacgttctctaccagaccggggacgccaccagaccggggacgccaccagaccgggggctccaccagaccagaggctcatccagaccgggggctccaccagaccggggggctccaccagaccggggggctccaccagaccgggggctccaccagaccggggggctccaccagaccgggggctcatccagaccgggggctgcaccagaccgggggctccaccagaccagaggctcatccagactgggggctccaccagaccagaggctcatccagaccggggggctccaccagaccggggggctccaccagaccggggggtcatccagaccggggactccaccagactggggatgcttcttgggcccccaccacggcagggagaagctgggcccataaagtgcattttgcaagtagagccctgagcccagcccgcctggaaccttgacccagaggactgtggaagacaattaaatgagtggttgtttatgccattaagtttgagggtgatttgttctgaagcagcagctaattgggacacctcaggttataaaaacgagaagcaggaactgctcgggaccttggcgcccgacacctcctgagggattcaagccgagtcactcatccccagatccacttccagcagcacatgaagccaggcttcccctgcaccgatcaccctcctgttttcagaagtgcacgccctgctcctggcaggaatacccacttcctatctgcgagtctcc

SEQ ID NO: 40118 - DNA, 1025 bp, Artificial sequence
  DNA replication origin
ccccagaacatctggtgaagatttgttgtaacctcctgggcccacagtccttggggctgctgcggtccgagtgtcggtgtcccccagaattcacgtgttgaaatcttacaccccagtgagctggtgttaggcctttaggtgagtgatgaggcacgaggctggagccccttgaatgcgattcccaggggtcagcacagcctcgtgcctgagaaagcagacgcagccggggagttgagacacggcgccaacacgatgtgagcaggaggccacgcatagagacgaagtttagtttcattaaatgtctttctctttggccgcgttgcgggaaaaatttctgctgctcacgagtagaaacacaaagcagacagaagaagccacttgctgagggaacccagggaagggtgaacagaggcaggcaggtcggagggccagggaggagcctggcggcccggagctaggggacaggcagggccaccttgtgaaagcagagggagcctgggggcttgggtgggtcgaccctttcttgtgctgcctgtgttcttccctgagtgcaggagagagagggagacacagagagagggagaaagaaagggagagatgggggagaaacacagagacagggagacacagagggagagacatagagggagagacagagaaacatggggagagatagagggacagagaaggagtgatggggagagagggagagacagagagactcaaagagacagtgactgaggggagaggcacagagacaaacagagcagaagggggaaacagagacagaaagagacacggaagagggtcctgggcggggccaggagctctggttttgggggcaataggactcagtacccgaggggatgtgctcggcgtttgggtggatggggggcgggtgagaatgggggaggctgtttcctcagtttggaggctccattgactgtaggagacacagtagcagagagagtgaaatgaaaactaaatcgatctcggaaggagacagggcggaagacgtggctttt

SEQ ID NO: 40119 - DNA, 1015 bp, Artificial sequence
  DNA replication origin
ctgtcctctctctgtcacaggtgtccatgtcactgttcctctagcagatgtggaaagtggctgctcagtgaggactcagcccccaccaacctgactgagggtcacacgacaccatggtggaaagtcacaaagggtaacgggccaagagggtgaggggggctccctgaccctgaggacccctgaggcactgctgcaccttccacggattctgtgtctagcgttgccctctttgcagatgcccctcgtggtggtggcacaaagacctaaaaatgatttctgtaaaatgggtacaaggagctccctgataaagcagctcatcctagacagccttttggagttagcgtaactgtccttcctcatttctagttctcaatagcgaatggcagacctggaggccccatgtgcacctgccagccggggcgagggcagggacggccagccgggcgagggcggggcagtcggggtgagggtggggcggggcagtcggggcgagggaggggtggccagtgggggcgagggtgggtggccagccgggcctggtgtgaggagcagagctgcaagtttcctacagacaatccactgagtgccccagagacgtcactgaaaaacttcccagtgctctgacgtgccagcagtagggcctgaactgtcatccctccacggggctccctgaggcctcaggccctttcctttgcagcaccaggtctgccttgcacgcatcccaggaggaaacacacaggcagcctcctgctgcgcggagggcaacggagagattcatgaggcccctggtcgctctgcagacatttaaaatgacgcttctccttgcaccagctcccagggaaatgtcagcccgggtccacctgacggagggcagctcacccgcctgcatctatcctcaatgcacttaaaatatgaagacatgaaaggtggctggaaaggccagagcgggagcctgacaaacactcctgcttctgggtcaccacgcgggcactgctggcaaccgagctgtgggttc

SEQ ID NO: 40120 - DNA, 1402 bp, Artificial sequence
  DNA replication origin
agccggtgcctcttcacacatctgctatttcctgtggtgttctgggcatggtgtgtaagacccacagaggctccgggtgatgctgtctgctgggtgtgggtccctttccctgttaagcagacaggatgcagcgctgacttcttaggtcagggcggaggtgtgcaggagcccagttacgaactcacccctgcttctcaggtgtggccttgggattttgactgcgaccttggcggtgctgtctccgcagcccaggaagcctgctgtggggaggcttcgcactgagctctcagcctcctgccctcagctgcgcgaagcgctcggcccagctcactgaagctgccctgcctccgggccggcgcggcctgctctggcaggcccctgtgtgtggggtggtgagggtctccccaccagtgctgcaccccgcagcagcatacaggcctgtgtggcctgctggccctgtggctctgtgtacagcgctgtgcatgttacatttgctctggaaacatctctggggtttgcttgttcacgaagttcatgaagtgccgctggagagccagagaccagctgcgcaggagccggaggaacgggcaggccgctgacctgaggtctggagaaacccctggagaagggtgtccccaccagcccatacagcgtgtgtgtggagggggccttgacctccgtgatgtctactgtgcctcaggataaggacccgccatgccctggctagacagtgtgtggttagtaggaatctctcattgttcaccatgtgacccccaggaggtattcgacctgcactggcgtgcctggcctgggatttggtgacggagaggagggctcccagggggacatgcggtgggacaggagcgtggcggctgctgactgtggggtgtggatggggctgcagcaccaggcagagcccctcagggcgccgatgtcgagggcacctgagcgaggggtgccagcaagggggcggccggctggtgggtgctcgggggacggccgtgttggttccatgtaactgtggaactcatttcactcagctgctcctctcagttctccctgactctggaacctctgtgacgccagttctccctgactctggaacctctgtgatcctttgcaggttttttattggcacctcagtctcaacattttcttttcggattcatgaggaaagagaaatcctggggttggaccccaagacgacgtacaacaggttctgcggagaccaagagaaggcgtgtgagcaacccacccactggaagatcacctactgaggaggatcctccagggccgctccccggacccgacaggcgcgggtggatgcaggttctgtcgccgtggagtcaccgtctactgccagccgggagctgggcggacaggaccgtccctcgcagggtcc

SEQ ID NO: 40121 - DNA, 972 bp, Artificial sequence
  DNA replication origin
ggtcgcctgtgttcacagtggtcatttccatactgtttgcctcctcgtctgagtctcctgtagcatctggttcagtgtttccctgggctgaagttaattgttcatcttgcccctttagttctcatgcacagaattcctccatagcaggctgttggcatagctggcctcgtctcagaacctcttcttgtgtcgcattttcccatcattcccggtttctgcccctgtctgccccctgccctgagagttgcccgtgccctggacttgggcatgtccttgttgctgtgttgttgagcatccgtgagcgtccccgaggccgggagcgtgggccctcgtgtgatcattctcgtggggctgccatgagcgtccccaaggctgggagcatgggccctcgtgtgatcgttcttgtggggctgccgtgagcgtccccgaggccgggagcgtgggccctcgtgtgatcattctcgtggggctgccgtgagcgtcccagaggccgggagcgtgggccctgcgtgcagtcattcctctggggttgctgtgggaggtacgcctgggcctctgttcctccaaagacctgcctgcccatctgcataggagatgaaggctggggttagggtgaaacggtttgagttaaatggaaaatgaaagtagagggaatgatcttccccgtggttagcactgtgcacacgcgtgcgtctctgtgggttagtctgtctctctcctgcccgaggaatgctgagcgccctgagccggtgcctcttcacacatctgctatttcctgtggtgttctgggcatggtgtgtaagacccacagaggctccgggtgatgctgtctgctgggtgtgggtccctttccctgttaagcagacaggatgcagcgctgacttcttaggtcagggcggaggtgtgcaggagcccagttacgaactcacccctgcttctcaggtgtggccttgggattttgactgcgacctt

SEQ ID NO: 40122 - DNA, 1165 bp, Artificial sequence
  DNA replication origin
catgcccagaacaccacaggaaatagcagatgtgtgaagaggcaccggctcagggcgctcagcattcctcgggcaggagagagacagactaacccacagagacgcacgcgtgtgcacagtgctaaccacggggaagatcattccctctactttcattttccatttaactcaaaccgtttcaccctaaccccagccttcatctcctatgcagatgggcaggcaggtctttggaggaacagaggcccaggcgtacctcccacagcaaccccagaggaatgactgcacgcagggcccacgctcccggcctctgggacgctcacggcagccccacgagaatgatcacacgagggcccacgctcccggcctcggggacgctcacggcagccccacaagaacgatcacacgagggcccatgctcccagccttggggacgctcatggcagccccacgagaatgatcacacgagggcccacgctcccggcctcggggacgctcacggatgctcaacaacacagcaacaaggacatgcccaagtccagggcacgggcaactctcagggcagggggcagacaggggcagaaaccgggaatgatgggaaaatgcgacacaagaagaggttctgagacgaggccagctatgccaacagcctgctatggaggaattctgtgcatgagaactaaaggggcaagatgaacaattaacttcagcccagggaaacactgaaccagatgctacaggagactcagacgaggaggcaaacagtatggaaatgaccactgtgaacacaggcgaccatctgctctgacaccgagtacttgggacagaagaacctttgaaagccacccgacccgctctcggccgacagtgacgtgggcaggcacctggcgtgtgcgcagatccactggtcaataatcgcaacgcctccgtccttgtagagctccagctcctcccacgtgggttcaaacctcaccatctcgggtaacagcttttttagctcttcatattctgcaaagtagaaggagagaccctttgaaccgggatcctccagtaaggacagatacgtgactctttagcagacagacatgcgtacttggcttctggttaattcgttaggaactggctccaaaggtgcagacacacaactcagctttaccctcccaggaat

SEQ ID NO: 40123 - DNA, 1107 bp, Artificial sequence
  DNA replication origin
cggctggccgggcagaggggctcttcacttcccagtaggggcggccgggcagaggcgcccctcacctcccggacggggcggctggccaggcggggggctgacccccccacctccctcccagacggggcggctggccgggcagaggggctctttgcttcccagtaggggcggccgggcagaggcgcccctcacctcccggacggggcggctggccaggcggggggctgacccccccacctccctcccggacggggcggctggccgcccggggtgctgacccccccacctccctcccggacggggcggctggccgggcggagggctgacccccccacctccctcccggacggggtggctgccgggcggagacgctcctcacttcccagatggggtggctgccgggcggagaggctcctcacttctcagacggggcggccgggcagagacgctcctcacctcccagacggggtcgtggccaggcagaggcgctcctcacatcccagatggggcggcggggcagaggcgctccccacatctcagacgatgggcggctgggcagagacgctcctcacttcctagatgtgatggcggccggaaagaggtgctcctcacttcctagatgggatggcggccgggcggagatgctcctcactttccagactgggcagccaggcagaggggctcctcacatcccagacgatgggcggccaggcagagacactcctcacttcccagatggggtggcggccgggcagaggctgcaatcttggcactttgggaggccaaggcaggcggctgggaggtgtaggttgtagcgagccgagatcacgccactgcactccagcctgggcaccatcgagcactgagtgaacgagactccgtctgcaatcccagcacctcgggaggccgaggctggcggatcactcgcggttaggggctggagaccggcccggccaacacagcgaaaccccgtctccaccaaaaccagtcaggcgtggtggcgcgtgcctgcaatcgcaggcactcggcaggctgaggcaggagaaccaggcagggaggttgcagtgagccgagatggcagcagcacagtccagctttggctccgca

SEQ ID NO: 40124 - DNA, 1105 bp, Artificial sequence
  DNA replication origin
gcgtctccgcccggcagccaccccgtccgggagggaggtgggggggtcagccctccgcccggccagccgccccgtccgggagggaggtgggggggtcagcaccccgggcggccagccgccccgtccgggagggaggtgggggggtcagccccccgcctggccagccgccccgtccgggaggtgaggggcgcctctgcccggccgcccctactgggaagcaaagagcccctctgcccggccagccgccccgtctgggagggaggtgggggggtcagccccccgcctggccagccgccccgtccgggaggtgaggggcgcctctgcccggccgcccctactgggaagtgaagagcccctctgcccggccagccgccccgtctgggagggaggtgggggggtcagccccccgcccggccagccgccccgtccgggaggtgaggggcgcctctgcccggccgcccctactgggaagtgaagagcccctctgcccggccaccaccccgtctgggaggggtacccaacagctcattgagaacaggccaggatgacaatggcggctttgtggaatagaaaggcgggaaaggtggggaaaagattgagaaatcggatggttgccgtgtctgtgtagaaagaagtagacatgggagacttttcattttgttctgcactaagaaaaattcttctgccttgggatcctgttgatctgtgaccttacccccaaccctgtgctctctgaaacatgtgctgtgtccactcagggttaaatggattaagggcggtacaagatgtgctttgttaaacagacgcttgaaggcagcatgctcgttaagagtcatcaccaatccctaatctcaagtaatcagggacacaaacactgcggaaggccgcagggtcctctgcctaggaaaaccagagacctttgttcacttgtttatctgctgaccttccctccactattgttccatgaccctgccaaaatccccgtctgtgagaaacacccaagaattatcaataaaaaaaataaattaaaagaaaggaaagaaacgaaagcattgaagctccataccctttctgacggcatctgtggccacaaacaccttgtcca

SEQ ID NO: 40125 - DNA, 898 bp, Artificial sequence
  DNA replication origin
agcttttccacaggaggcctggtagtgtcagagcctttaatggcaatcgacacttgggactgacaagacctccatccctgtggcaacatccaaatgcatgaaaagacacagggaaagaggcacggggtctcagccagatgttcatcacggcccattctccaggcctcagcacaaaggggaaccgcctgtcaaggacgaggaacggtgtgggcagccacaagcgctaccaccacaagggccgccgcaacactgtcaggatgcccaggaggggacgcccagaaccctgcatcagcaaccagcatgggcagcgagggcactgcgggggaggcggttgcggccggggggagtggggggtgaagacaccgtggcggggggaggcggggtgctgcagggggggcggggggcacccacggtggtggggaggagtgggcggggggcgcctgaggcggggggggggggacgcatgcggcagggggaggtgggggggcacctgcggcagggggagcagcctcagcaggcacctgtagtactcgtgcttgtcctgggagtacaggagctgatcaatacacggccgctcgtccaccttctcttcccaggtcccttctttccacccctctgcgtaactttgcaggacgtaaacctggtcaataaagggcccaccagattctgaaagacaccaagaaaagccaggcagtgtgacagcgatcagaagctcacttacgggcatgcatcagtcaccagcagctgactcttactactgtacaccaccctattcccaaagggagtgtaggaggctcacaaaagcagagacagggcagagcacatgccatgagggcacagggccatcagcgtgcaactgcagctggcggggggtggtgtggagctggtacccgattcc

SEQ ID NO: 40126 - DNA, 1259 bp, Artificial sequence
  DNA replication origin
tgacagcgatcagaagctcacttacgggcatgcatcagtcaccagcagctgactcttactactgtacaccaccctattcccaaagggagtgtaggaggctcacaaaagcagagacagggcagagcacatgccatgagggcacagggccatcagcgtgcaactgcagctggcggggggtggtgtggagctggtacccgattccccggccctacccctgcctggctgcagcaggccccatcctcacaggggcccgtgtgagcccatccggccctcacgccgtggtccaggctgttccctgccaggaccactccccttgggggctcgccctccggccctctgtgaggccactgtcccctacccccctggtttcccacagcgctcctcaccccctcggccaccatctactgcactggtgtcctgcctcccccggggacagaggctcaggtgagcaggagtcgtgcctcttacccacggcccgacccgcaccaagaaggtggcactgtgacgcccaagaggtcagcaattaagatctgctcaaaggcagcaggaataaagcgggagggagcaccgcgcaggtgaagttctggggcaggaacaaagcgggagggagcaccgcgcaggtgaaattctggggcaggaacaaagcgggagggagcatcgcgcaggtgaagttctggggcaggaacaaagcgggagggagcatcgcgaaggtgaagttctggtatcctttttgctcactcatgactgggggctaagggctgcgtggcctaagggcctgaggccacagctgcgggggcttcttttaggctagtgggaggtggtgaagatcctgcacgctgggcgctatgtcagccacatcaggagctcaccgtgtgcagtctcttggcagcctcgccctaggacaggcacccagttccttccccacctcacaggcgaggaaacagctcagcaaagccccaggctggtggatggcaggtaagcgtgagaccagcatatgtgcctcagaagctcattacacagcatctgtcttcccagaccttcccaagcacttggatgcccaaggcccagacctgtccgcttccctgtcaggaaacccactggtaccaaagggaggtaaggatagcatctctgggttcctataacccaatgttcagaccgagggctggctgctagttagacccaatacccaaccacagctttcatcttccaggactcacaagcaaattttaaagtcaactcaggaaaggacgcactccagg

SEQ ID NO: 40127 - DNA, 1055 bp, Artificial sequence
  DNA replication origin
atgggatggggtcagggttctggggcaaggaatgtggcggagtaaggggccagggtgatggtataggggcagggggcaggggccaggagggatgggatgggggcggggcagggatcagggcgatgggatgggatgggggcggggcaggggccagggtgatgggatgggatgggggcggggcaggggctagggccaggaggggtgggatgggatgggggcaggaacgggggcccgagggatgggatgggggcggggcgggagccggggccaagaaggatgggacggggacgggacaggggcaggggcaggggcaggggccggggccgggctggagtctgggggatgggatggggcgggggctgggggcagggtcgggccagcgggttggctgtagtcgaggctgcgtcactgcggcccgggtctgcaggcggggtcgtctgcgaggcccggggcgcagcctcgggagcccaggaagggggccgggttgctcaggctgagcgtgggctggctccggaggcccctgcaagtgacacgggtccaggcctgggtgtgcggagccgggagtcagtgccgggcgggcgctccgcagtgaattctcagggccaagacgagcttcgcggccgccctgtggctgtgggatctccaagcggaccccgggaggggcctggacgcagaggtgtgcacggcccctcgtggcgttcgcaggcctgggcgctgcacgcagcttcactcgcgacgatgggagtatggaaaaccagcgcagagcagggaaaggagagcgccagggacagggtttctgtagcccttggggacttgtctgtgccttggggacttgtctgtgccttggggcgctttgtgtccttcctctagggcagtgatcttaaagtgtgtcctggatctctgagcttttgtagccgttttaatagtagtaccagagtattatacgcctttttcacttctcatgaatgcactgtggagttttcctagaaaccacttgatctgtgatgtcacaacagattgaatgcagaaacgggtatgggaatccagctgtcacc

SEQ ID NO: 40128 - DNA, 829 bp, Artificial sequence
  DNA replication origin
cggacctcccggcctcgcggaccctcaggagcccctgcgtgggctgcgccagggcgcccgcgacagcaccgccgcgaaccacagccacggcctccgggtctgcaatggaacctctagccgctgcggtcaggagggcggagactctgcgcacgcgcagttccccctcccgcccctgcttgccggtgatggcgcataacgcatgcgcggggagggcggagctgggcgttgccgtggctactgggaacgcatttcacgggggcggggcgtggttccggggcggggcgcggccgccggaagtgcgtggccgcccggggccatggcgacactcagcttcgtcttcctgctgctgggggcagtgtcctggcctccggcttctgcctccggccaggagttctggcccggacaatcggcggccgatattctgtcgggggcggcttcccgcagacggtaaacgcgcgtccacggtgccaacgctggggttccaggaccgggcagggtcagaggatgggatgggggcggggcggggtcaggggccagggagatgggatggggtcaggggcaggcccacgggatggagggtggtccggggccagggagatggaatggagcggagttatggggcaggggccagggggatgggatggagcggggtcagggggcaggggtcaggggaatgggatggggtcagggttctggggcaaggaatgtggcggagtaaggggccagggtgatggtataggggcagggggcaggggccaggagggatgggatgggggcggggcagggatcagggcgatgggatgggatgggggcggggcaggggccaggg

SEQ ID NO: 40129 - DNA, 762 bp, Artificial sequence
  DNA replication origin
cccctgagtgccctgtggcctgggtgtgggaacccagagggagactgtgctggtgtcaccgggggccttctggcggtcaggatggctcacagggaggcactggggggctgtggccaacctgtgggacccgtccacccccagggctgctgtgaggcctaaacgtggcaggggctccccgatgtgagtcctacaacgctcagtgtcggatggggggcaggacccacaggcccctctcaatgcaacctacagaggcccctgcaggtgacctcgagggaggccacagagagcaggacccacgtgggggaagagagcacctgccccacaaaagacaaatcaagttgctgccaaggagccggcgagtttggggcggatgaagtcacaggatcacccacagcgaaaacagggaggcggccacatgccccccacctggggagcctcaggggcggccggggccacgggggtggcacgaggcgggtgacaccgggcagcaggcgggggcggcgctccgggaagcagggtccgactggagacgtggggatctcggggcggtttcgggttttactctgctttgcctgtggctgagcagtgctgaagggtggtgttgagctaacgggatgctgaggcggaggaggatggaggatgagggaggagcaagtcctgggggaggcagcaggggaagagcagaggcccccggaggggagtggacagctgcgggtgtggggggcttctgggacaggtgagggtgtagggcggccctctgac

SEQ ID NO: 40130 - DNA, 660 bp, Artificial sequence
  DNA replication origin
gctccaggttctgggcccgcctggagtacccgctctggctgggatggggtcagttccctgcttccgtgggtgtgggccagggctgggcacaggggttggtaaagtttgggcatcttcaaggagaatgctgaggcctcccgagagccccgtgcaggacaggacctgggtggaggcgagacggtgggcgtggctttccccccacgctgtcctgaacgcctcagggattgggaaacagctcagcaagggggaactcgggccctgcccccgactccatcctggggcaccgccagatgctgtgaggctcggccagcccagaggtggcatcagagggactgccatgagcagagagcaccacacagagatccgaagagtccagtccctgcctgaggggagggtgggttcaggggacagggtctggtccgtgaccttgacctgaggactaaacacggagcagggggaggaggggcgggaccgggagggcagaacccacgcgaggaagaggagggcggggctgggacaggagaacccacgtgaggaagaggaggtgggtgttgtgtacgcacaaatatcatacatatgagcacaaatgagccgtgaggaaacgtacaaatctgcataaatgaattcaaaaagccaaagcggccattcagggagagacca

SEQ ID NO: 40131 - DNA, 1010 bp, Artificial sequence
  DNA replication origin
cacattccttcccccgacagggcagggttcctgggctgaggctggggcaggtgtgctgggcctggagctctccctaaggtctccagctgatgtgggctcctgggatctgcaccgtctcccctgggccaccctcgctgggctcatcctaaagaagcctcctccgcctgcccctcctccctcccaaccctcagcctccccaccccccggcacccaccatgagctgagcctgctgtgaggaggggggcagccccaggaccccacacaggtggggctcagcagcttccagtgagaaacccatgcaaactgcctggggagttccggcagcgatgggaaaaggcactgtcctacccagggggctgagaaggctgagccttgaatgaatggcagtgagcagacatcagtggaggtggacaggacactgaggacagagtcaccctcccagggagtcagaaatgaggggtgcaggggagtgggagggaggtgagggggtaaggtggggtgaaggatgtggaggggtctcctgggctctggcctgagctaggaaggggcagggctgggtcaggaagctgggtctgggcgctgtggtgcatcctgggtgactgtgggacgctggaggaggaagagttcccgcatttgcgtctgggttgggactgtctaggcgaaagctcagtgtgaattgtctgctgtgttcccggtgtccaaggcccccaggggctgggtgagtcccaagagggatgtaggccgagcagagttgggcactgaacccccaggctccccttgttgaccacccagccagaaattcccagggcagaaggtggggtctgctcacccatggggcaggcggtctggggatgtctgacgcctgggcctctggccagcaggatgtggacagaagtggccgctgggtggggctgagtgcagagggcagtgcccatctgcagcgtggctatgcgccccacagagtgtgggcctgaagcggggaaaggacccccctcaacacctcaggccgg

SEQ ID NO: 40132 - DNA, 764 bp, Artificial sequence
  DNA replication origin
cctcagccttgagcaatcccgaggatgtgtttgctgaggaaatcattaaacagggagatgagagcactcaacccccaacatgccaggctctgcgggaggctgcttattcctgtggcctcgggccaggtgccccagcgtttgctgcccttggtagacacttgtctggcctgagccctcgggcaccatacaccgacatggttagggcagccagggtcagcccgggcccctgggagagctgagtggagggaccactggccaagcacagagggtgcagggtgcccaggaccaggcgtcacctgatggtcacctgggggaacctgctcactccgccctgctgccctgctcactgctcgggggcccagccaggccggggaccagggcctcagagtggaggggggtcagggcccagggcctcagggtggaggatggtcaggactcagggcctcagggtgggtggtcagggcccagggcctcagggtgaaggggggtcagggctcagggcctcagggtggaggatggtcaggactcagggcctcagggtggaggatggtcaggactcagggcctcagggtggaggcagtcaggactcagggcctgaggatggagggggtcaggcctcagggcactggacagctgactggcttcttcccaacccttttccttcttttcgcccaacataaccactgggaggtatccacagaagggggctcctcaaacactgcctggtgtcctctgtctcagccccaggggaaaggactcgcacg

SEQ ID NO: 40133 - DNA, 1096 bp, Artificial sequence
  DNA replication origin
cagccatgacaagcagtgactgtggttttagccaagagtgggcagtgagggaggggacacacgtggcggatagggtggggggtggcccccacaggacatcaggagggacctaagtgaaggaggaagcgctggcaggccaggcacccaccctcgggggccaactatccagagaggggcagggggagggcagggggagggggctgagagcgggcagaggcagggctggagcaggggctgagagcaggcagtgggagggcagggggaaggggctgagagcaggcagggggaaggggctgagagcgggcagggggagggccggggcaggggctgctgcctcctggaaacgtttcatgttgtccttgcactatttacagtgaggattatttataaaacccaaatcgctttaaagccatttccaggttttacatgaacaaaaatctatttgaaaaaagaaaataataaaataaacatttaaaaatctttcttagaattccctaaatttcagggccgtgtgtgtgcccatgtgtggtatttgtgtgtgtgcgtctgtgcatctgtgtcagtgtgtctgtgtctgtgagtctgtgtgtctgtatctgtgtgtcggtgcatctctgtgtctgtgtgtgtctgtgtctgtgtgcctgtgtgtgtgtctgtcactgtgtgtgtgtgtctgtgtgtctgtgcatctgtgtgtctgtgtgtgtcagtgtgtctgtgtgtgtgtctcagtgtgtctgtatctgtgtgttggtgcatctgtgtgtctgtgtctgtgtctgtgtgcttgggtgtctgtcactgtgcgtccgtgtgtctgtgcatccgtgtgtctctgcatatgtgtgtgtgtgtcagtgtgtctgtatctgtgtgttgtgcatctctatgtctgtgtatgtgtgtcaatgtgtctgtgtgcttgtgtgtctgtcactgtgtctgtgcatccatgtgtctgtgcgtctgtgtgtctgtgcatccgtgtgtctgtgcatatatgtctgtgtacgcacacagctgatcctctgacaccgaggaggagacacagtggggattctgggtctggcaggctctctcctctgcatctctc

SEQ ID NO: 40134 - DNA, 1331 bp, Artificial sequence
  DNA replication origin
cacaggcccagagagggggcacaggcccggggagggggcacaggtctggggagggggcacaggtctggggagggggcacaggtctgggagggggcacaggtccggggagggggcacaggcctggggagggggcacaggtccagggagagggcactggcccagcgagggggcacagatccagggagggggcacaggtccggggaggggcacagatccagggagggggcacaggcctggggagggggcacaggtccagggagagggcactggcccggcgagggggcacagatccagggagggggcacaggcccgggagggggcacaggcctgggagggggcacaggtctggggagggggcacaggtccggggagggggcacaggtctggggagggggcacaggtccggggagggggcacagatccggggagggggcacaggtgtggggaggggcacagatctggggagggggcacaggtctggggaggggcacatatttggggagggggcacatgcccaggtagcacaggcagctgaaggcccagtgggaccctgacacctgatggcagaaaacacgaaggtgacaggctggcaccatggcccagaagggcccccagccctgccttcacctgcaggccaagcttccccccactagccacccccacaggcctctcggctggcatgggacacagaacagagtgttgacaaaaaccaacacaaaggcagcaaagctgctggccaagtctcagtgactgtgaacggataccagggtaacagtgagatgtgtccacactgaaggggctcgggagtgggagtggagccctggaggccccatctttgctgggaagggcacgggggagcatggcccccatcatgagcagagacggagaggagagctcggactcctcactccagggaaggcacgtgggtgccccacactgcacctgtgggactcggccacaccaggaagaccagatgcatttacctagtaatcaagaaaggttcacattcaaccaaccagacacatcatttgaaaatttaggggaaaatactaaaaggaacccaaagacagataaagaacagcactagtgaagacagcaggaggtggggacttggtcagatgaaggcctggctctgaggccagtgcagtgcggggtgaggcagcccagaaacgcccgggagctgccacaagcagacactgagggagggaaccgttcccagccatagctttcttggcacaacataaacgaagaagcttttgaagcctgcaagacccacgaccttctccagtcaaaggccgctgacatctgctccatccatggaggaaccagac

SEQ ID NO: 40135 - DNA, 1060 bp, Artificial sequence
  DNA replication origin
cacagccaattccaggactgagagcttcgctcaggtcagagccaagatccggggatccagccgttccaccactggccacatgttccttggtacccgagcctctgctgcccggggggaccatcgagccagagcccccaggtaggcgaggggcctgggtggaatatgacggaacaaaagatgatggaacaaaatagcctcattatttcacaccaagtatggaagagcagttcccccaactagcatgttctgtgtcatgttccacggctgttggctgtgagcacagcctggccacacaactccatgaataggtgccaccactatccctacttgacagagcaggaaactgaggcacagggaggctgcacagctgagcagcacagagcttggatttgcagccggggaatcagacggcaaagctgtagtccaccagctgcccagagggccacagagaggtgtggggcctaggacagtgcgcctgagggtcccagcctttgggaacccggggcatagcccaggaatgagaagccgagcagatggacagggaggggagcatcctggcagcagaggtggcttagggcatctgagggggtgggggccagccctgcaggccctgggaaggcgggctagtctgggcgcagagcaggagagcggcatggagcggggtctgtgcgtgggttgcccctgcactggaagcagctaggggcagggccaaccccactgaaccttcccagggttcgcagccccagggagatgccttcctcagctcagcttttaatgcctcctccggcactccccattgcagccccaggagtccctcaaggggctatacctcccactccctcatgctcaccagccagaaaatgcaatggaaaaaaggacctcatattcacagttgcaggcacacgcaaacgttaacacaggcaatctgcactgtgtatggccaaacacgagtgaacttttaaactgcagtgtgagctttaggcacttggagggcgggaagccccacatcccctgacccctcacgcgtccatccctctgtcctcatgggcaccgggtgagg

SEQ ID NO: 40136 - DNA, 721 bp, Artificial sequence
  DNA replication origin
gataccctgccagccccctgccatcatccttttcaaactcagactcttgacagtaaagcccagaaaccctgggtggtcccaaatagaagctgcccctcagccatggagctcttggcctgaaggccaggatcagcagcagggtctgagatgggccagcctcctcagaaacccctgcttacttctcccacccaactgagaccagccctggggtacaacccttaagctgggtttggctgtgggctcctccccacgggggtccctcctgatgaggggagagctcaaggtggggttgccacactgttccatgagcaaagccagagaagcccccccaggacccgtggaggtgcagctggaccacagccaggtgctgcagagcctgggggctggactcccctgggacgcaggtgaccatcagcccagtgcaggcgccggcccctcctgcagagagtccgtcccagggtggaagccaggctccttggtgcctcgggtccaatcagccctcgtggggaagggggactggatcaggcagctccagggggaatttgagggaccaagaggatgttgccactggctcaagggcagtgcctgcccctccaccatgtccaagcactgcccagagcagaggaaagccctggaggtggatgccgcccagagggacccgcacagcccacaccaggagctctggtggagggaacagaagcagacacccgcatggacacca

SEQ ID NO: 40137 - DNA, 2223 bp, Artificial sequence
  DNA replication origin
gaccaagaggatgttgccactggctcaagggcagtgcctgcccctccaccatgtccaagcactgcccagagcagaggaaagccctggaggtggatgccgcccagagggacccgcacagcccacaccaggagctctggtggagggaacagaagcagacacccgcatggacaccaccctcctgcagcgctgcccccacccctgcccctcccctgcctcctccccacccctgcctcctcccctgcccctcctcatccctagctgggctgctgcagtggctgatgacactgtcctggcctggaggaacagagacacatcctggaattgtacgctggtctcattgttgtggcccctctagatgcctgcacgggggtgtgggcagagcccactgggctgtgccgttctctccccttccacagagcctgacctttcagtagctgcagacttgttcatggtggttccagtgcctgaacagggagcacaggaaagctgtggggctgtggggggcggggaggggagggggcgtctgttgaaatgttctgttcgagatgggaactaagtaacctccttggcctgaaaatgggcattgggaggaagcagatttggggacggggatgtaaggctgggaggggtctgtgcgatctctgggaagccatgaggctgggcaagatggcccagggagtgatgaggtgaatggcagaaggggccaggcactggggtctccgaccctatgaggggcatgggagattggcagtggggtgtcaggcggggggtgggagagccaggagaagcacattccaaggacagacagaaagaggtcggctgacggccatgactgggaggctggtgggtgacttgctggacagacttcagctgtgggtggggctgggcatctgactgatgccatgggtgcaagcaaagggccgagaggagcaggacaggacggtgggtgtctgtcctccagcaccatgcagagcaggatgtggggagggagggaggggctgggtcttcctgagtccagcggccgtagcagggagtgcacatatagaggaggacacacttggggatgctggatggcggggaccatggaggctccctcgatcttcctcatggaaggggagctgagggtcaaccacagaggtgggggaggaggagggacactgcaggctgggggatggaggagggggaggaggagggacactgcaggctggggggatggaggagggggaggagcagggacactgcaggctgggggatggaggagggggaggagcagaggcactgcatttggggaatggaggaggggcaggagcagaggcactgcaggctgggggatggaggcagggaggagcagaggcaccgcaggctgggggggatggaggagggtgccccatctctgccaatcactggggacccattcccaagtccagggctctgccttgatgagccatgctccaagcaatcctctctggggcttttagatgaaatatctgaagaccagagaaaggggcagtggggaagaggtctttgcagaccactccggagacaggagaggaagagaagagtagagcacagagatgagggggcatcctgcgtggaggtggcctggagatgatggcctggaggtggcctggagatgatggcctggaggtggcctggagatgatggcctggaggtggcctggaggcagcctggaggtggcctggagatgatggcctggaggtggcctggaaatgatggcctggaagtggcctggaggtggcctggagatgatggcctggaggtggcctggagatgatggcctggaggtggcctggagagggcctggatatgatggcctagagatggcctggagatggcagggaaatgccacgtggggggtaccaattattaaggggactagtcaattgccaaagcctccgattatgatgggtattactatgaaaaagattataacgaatgcatgggctgtgacgatgacgtcgtggatgtggtcattacctagaaggttgccgggttggcctagttcagcccgaataaggaggcttaaagctggaggtggcctggagatgatggcttagagatggcctggacaggcctagagatgatagcctggaggtggcctggaggtggctcgtcccctgttgctgcatcctcatggcagccaggggtcttttggaaggcctggccagccactgctgagccacttcccccagcttcatcccc

SEQ ID NO: 40138 - DNA, 1478 bp, Artificial sequence
  DNA replication origin
gctaggtgcgaggggagtgtgtgcatggacagatgctgggtgcgaggtgagcgtgtgcacggatgctgggtgcgaggggagcgtgtgtgcacagatggatgctgggtgtgaggtaagcgtgtgcacggacagacgctcggtgcgaggggagcatgtgtgcacagacggacgctgggtacgaggtgagcgtgtgcacggacggacgctgggtgcgaggtgagcgtgtgcacggacggacgctgggtgcgaggtgagcgtgtgtgcacggacggacgctgggtgcgaggtgagcgtgtgtgcacggacggacgctgggtgcgaggtgagcgtgtgtgcacggacggacgctgggtgcgaggtgagcgtgtgcacggacggacgctgggtgcgaggtgagcgtgtgtgcacggacggacgctgggtgcgaggtgagcgtgtgtgcacggacggacgctgggtgcgaggtgagcgtgtgtgcacggacggacgctgggtgcgaggtgagcgtgtgtgcacggacggacgctgggtgcgaggtgagcctgtgtgcatggatggacgctggttgcgaggtgagtgtgtgtgcatggacactgggtgcgaggtgagcgtgtgtgcacggacggatgctgggtgcgaagtgagcgtgtgtgcacggaccaacgctgggtgagagatgagcgtgtgtgcatggatggactctgggtgcaaggtgagtgtgtgcacggacggactctgggtgcgaggtgagcgtgtgtgcatggacggacgctgggtgtaaggtgggggtagatgacagatagatacagataaacacgggagaggctgggtcacggtgaggccggaaattattcatcagcaggagcttctgttctgggatgggcaccacggcgctgacattaactggccagaaggctgaatcaagacagaggaaatggaagaggaaggggtgtcttccccgtgatagcattcaccacctgtgctgagattgggacattcgagcctccgttgataagtggctctggagccagctcacctgggctcaccggggctcaaaccctggcttcccatccaccagtggggtgttgatggctgaggcatttgaccaccccgtgcctcagttttcttacctcccttagggatctgtcagcatgaaggtggggatggatgtccaaggctgtgaatgtggctcctgggggcgggcccagcagatgccagaatcaaggcagaggtgaggggttggctcaggtcttttggatctgaggggctcagggaggtgcaatcagggaaatcaagtcagcccctggacagaggagttcagagaaggagcagggacagcaccccggatggggagggcgtgcgctgtgaccagggagcagcagagacaaaggtgcaaaccaagcctgatacccagggggctggggaggaggttccgaggagagtgggacgggttcctgtggctggctcggggccaccgt

SEQ ID NO: 40139 - DNA, 1070 bp, Artificial sequence
  DNA replication origin
gcctggcgctcagcgatcctgccttggctgtggcccccatgcctggcgctcagcgatcctgtacccacaggagctgggctttccagagccacttccagaacagcagccgggtgggctttgcctcagcagtggccagctcaggtagccagacatgggccaggcgacctcgcgagggtgaaccagacctagacgctgggcttgggagggggcagtggtgagcggcacccctctctcctcccctggaggctgcttcagtccaggtctccaagtgtccgagcgtcttgcgtgagccgaggtgggccgggcaacacatccccttccctttctgctatctgtgcagggccggtctctgtggttattccagcccatgcctccctcttccccagcgcactcccagtaaagcgccacacacaggccttgcctgggggtgctgggaaccctgctgagatggcagaggtgggtgcccaagaggaacgggagctggacggatgtgtcgggggagagtggagtgggagggaggtggaagcatcgggcttcaaggagtttggggccacaaaatcatgttcctgaaaacagatagaagggatcggcttgtcttggccactttcatccttttttcttgtttctgtcaaatatattcctcggattgcgggggccttggtgtttagagagaggaatggacgcagagtgtccttgcttccctgcctggatgccgcctccacgggaggtgcgggaggtgagcgtgtgtgcaccgacggacgctgggtgcgaggggagtgtgtgtgaggtgagcgtgtgtgcacggacagatgctgggtgcgaggtgagggtgtgtgcacagatggatgctgggtgcaaggtgagtatgtgcatggacggacgctaggtgcgaggggagtgtgtgcatggacagatgctgggtgcgaggtgagcgtgtgcacggatgctgggtgcgaggggagcgtgtgtgcacagatggatgctgggtgtgaggtaagcgtgtgcacggacagacgctcggtgcgaggggagcatgtgtgcacagacggacgctgggtacgaggtgagcg

SEQ ID NO: 40140 - DNA, 1391 bp, Artificial sequence
  DNA replication origin
tggccccagggtttggttcagatgctgagtgtccggtgacttccagacacttcctttccagtctcagggaacccaccccacaaagcgcctgccccaggacctgggtggcgcgtctgtgtcttctcagcatatccggttcttggagcagggagacgacccagatcctgctctctggctcctggcccgctgcccccaagctgtcaccaaggcaggtcatggatgttccgtgtcatggctgcgtgggccgttcgaccacggccacacacgcatagactgaggaagacagagcaaggggctgatcgctgccaagcagtggatgccagtgcaccgtgacaaggagcccagagcctttggtgggcgcctgactgtgtcttcaagttcccgggatctgtgtggacagctgccatcccagtcggccctttcttggttttcttggttttcagagaaggggcgaagaataagggggcagcgtcttctccaccagaagacacacctgcaaagctccatgaaggcaggcactggctgaggaggaagaaggaaacaggtctctcaggagcctctgcccttgcagccagggatgggcaggaggccagtgcctggtagggagcagcctgcgggttcagctcaggtgtaaacagcatggtcagctggaaaatggtccccaaatacgccaggtctcaatccctgtggtgcttgaatgtgaccttatgtggcaaatgtgtctttggggatgggattgagttaggatcccgggatgggggtgatcaactggggtcatccgggtgggccccaggtggcattgcaaggttcgcacaagacggagacttgacatggaggaaaccatggaccacggaggcagagagcaccatgaagaggctgtccacgaaggtcagagcgatgtggccgcaagccaaggagtgcacggccgctgggagccaagagaagccagcaggaccttctccagggcctcagaggggccccttggcctagtgatgctggtttcagactcctgccctccagaccgtgagcatgcgtttccgttgtttaaaatcaccaaggctgtggccatttgtcacagcaaccccaggaagtccacagaatgggaaaggagacgggagaggaggatggctgggctcagctgtcaggctgggctgtgcggggctcccttgggtggtggggaggagcctctgaaagggagctcagggaggggctgcccatggagaaagcactgggtggagaagctgtcggtcaattatctggtgattgcacctgcctgttgccagtcacagtcttcctccaggaggggtcaccgaccacgggccacatccactcctctctgctgcaggaatcctgtccctgctaaagctgatcctggctttatctgccctttg

SEQ ID NO: 40141 - DNA, 1156 bp, Artificial sequence
  DNA replication origin
cagagctgagttatacccacaccctgcaatcaaacatgccccacatcacacctggagtcacgcagaccccaggcagcctgcacaaaatgccaaacaagaaaaaactgcaagaaaaccaccgccacacgcctttctagaacatgcaacctaaggatcaaatcccacaaccaaaggtgcacagagaggtgttggggagaggacaagggcagcctccacactagaggacagagtggggctggcatggcagccgcagggacacagcaggctgtggggccgggggctgagcctgggtgtcagccggctgtggggccgggggctgagcctgggtgtcagccggctgtggggccgggggctgagcctgggtggcagccggctgtggggccgggggctgagcctgggtgtcagccggctgtggggccgggggctgagcctgggtggcagccggctgtggggccgggggctgagcctgggtggcagccggctgtggggccgggggctgagcctgggtcgcagtcggctgtggggtcgggggctgagcaggcactcttaggccgtctacctccgaacccagctcttcccttgtggccatgcaggcttggggaaaatggcctcctctctgtgaacccggtctctgaaatgggatcagaccccggcctacactctctctacctcggctcctgtccgatttctgaggttcagtggattgtcaggttggatccccccagctggttcaggaggcaaacactgttattactgccatttttcagatgagaaccagctcatgaggtcagaggggcgagcatctgccaaggtcctccctggcaagtggacatgggccaggcaggacggctgcagaagctgagtgtgcctctcccgcttcaccacccctcggtgtgaactccctatctatgaatttagaggatgtcctgggtgggttccctggagactcgagcctgaggaaagggttaagtgcaagagcttcgtggggactgtgatccagggagcaggcggagagcagagcaggggacaggcagggtgatgacgagatggagccctgagctgaccggcctggggaccactgggtgtcccatcctctttctaacatcgaaagctctgctcttcacccttgggcttcactgagggaacgaaggggcgc

SEQ ID NO: 40142 - DNA, 1289 bp, Artificial sequence
  DNA replication origin
ccctgacacacactcacacgcacacaggctgacacacatgcacacactgtacatagttacagaaacacacacatgcacacacacagcacagagagacatgcacacacatgcacacaaggtacggtcacagacacacacacagcagacacacagacacacccactgcactgcagagacaccaccaaaccctgatagacacacacagactcactcctccatccacctgagaaacaaaagttttgcagaagtgtgcgatgaccacttctactctatgctgttctccttaatctttttatttttaaaaaatgtgggtcataatcctttacattgatttccttcctcacagtgcaccgcaagcactcagggaaggactccaggtttgaaggcagatgctggtcgggacccgaccaggtggctgggcgggaagaggtgagatcgggcaggattgggcctgggaaggctgaggcaggcagggatgatgccagcagaggagaatcccaagcaggccccgcggctgcggctggagagctccaggggcggagaggaggtgggaggcagcagtcaggttgggaggaccctggcaagcaagcccagagaggagggccgggagggccgggcactagaagtgtgaagtcactgctgcctcctggggctgcttcagaggatgggtggggccacgtgtggggagatcagggagactggagactacgctgtttggtccaggcataggagatgagccctggccgggaagggacagtgtggatgggccaggcggaatcagagggtttcagagaaagccgtcaagccagtgccatgagtttcgcgcacacgaggagggagcaggctggggggtgttgctggtgtgagggctctctggttgcagggagcggtccggtcgggtgggggcacagctgccaggaggaaagcgcccagggcctgcaggtggggctcaggatgctggccctgaagaaatagaaacagggttttcacctgggagggaggaggagcctgggaactggggaggaagaggctctgctgggccgcgccctgggaacagggggacctggggacagatctggccctcgcacgcccctcctgtctcgcgtccgtccctccgtgcagccggggcaggaccctgcaggggccttgcgggccggaggtgccggcttcctcctccgtcccgtcccccccgcggtgactctattcaaatctccccccttcccgctgccccaccggactcaggggctggggtcgtagcccggcgggcagcggtgttcaccttccgcata

SEQ ID NO: 40143 - DNA, 785 bp, Artificial sequence
  DNA replication origin
acgcggcctctgtcgccgtcacggcctcgtccccgcagcgccgggtcccgggactgaccgcgggcggaaggcggcggagcgcggggcgtcgtctccgcgtttccaacctgttgaggctcctcgccgcgggccgggccttgtgcgcctctgtccccgccgccctcaggcctctgtccccgcgcccgccgtggtgtcgggttgcgcggtcccctttgatgccaaccgagcgccgcgcggtccgagaacaatgcccagaagccgctgccccgccggcctcgccgcttcccgtgcgcggcaaacggtgcgcggggcccgtggggaccttcctgcctccaaccccgggacccagttccccaccacctgctaaccggggcctcctgcctccagccagcccagcagaggcccgggggaggcggcggggacgcggaccccaggggagccccgcccaaagggcctgggtgccttgtcgcgggtggaatcccacccgggggtccacgcagccagcgcctgcctccgactcgactccacacctgcttgctacagcgggtgaggaagcaggaaagggggagggagggatgtcgtctggattcctgtaataatttgtttcattgtttccaatcgacttagtcaccaggttaaatagtagcatagacctttcaaaaaagtagctagcttataagtagatgtattgaaaacacctgcttgttgagtcgtagacaattcctcatttactgtgtgaactctagggggtgaaacacgggcggagagcggctgtgagctcacgc

SEQ ID NO: 40144 - DNA, 3410 bp, Artificial sequence
  DNA replication origin
ctggatgagtctgactgggtcaggacttccctgcttgttctgtcctgggagatgttgtccctggccctgcagagccgggaggacacgaggcctcctgggtcacagccaacgcagcctactcctgcccactgctcgcgccggccaaggcccgtcggcaccacctcctccatgaagccttcctgactgcccccatccctctgtgggcagctcgagtgtgcatcttgagtgctgtgcaggttggggtccggcgctcctgcaggcaggcggcgtctgggcctgggggctctcagagtttgaggagcgtgtggtgagggtggcctcgggcctcaaagacgcagcgctgtgggaaccgggagactggctgagcccgctctgaggaaggtggggccaggggcaccctcagctgacccggcgtgcaggggtgaccagccaggcgtggccaaggatggggtctctgggatcaggagacttcagtagcagccaggaccgaggccaccagtttccaccctggcattttccatcttttgaaggactggaaacgattggattctttaacttttttaagttgaggtgaaattcacaacgcataaaattaaccatcttaaagcgaacaattcggtgacatttagtacagccagaaggctgtgcagccatcaccactgcccaactctagaacattcacacgccggagagagggagccctgggccatcacgcagccaccgcccggccccaagaacctgcgagtccactttccacctctggatcggcggttctggacgttcatgcaggtggttcccgcagtgcgaggccttttgtttcgggctcctctcacaagcctcacgtttccaggtacgtcgtggtgttgtgcagacccacaattcatcccttttcatgggtgtgtaatagtccaccatagattctctacgttttaaagcatgttttatgtgcctgaaatgtctctgcactcgagactatagcttgctttctttcttttctttttttttttttaatttgagacggagtcttgctctgttttcaggctggagtgcagtggtgcgatctcggctcactataacctctgcctcccaggttcaactgattcttttgcctcagcctcccgagtagctgggactataggcgcgccaccccacccggccaatttttttgtatttttagtagagatggggtttcatcatgttggccaggatggtctcgatcttccgaccttgtgatctgcccgcctcggcctcccaaattgttgggattacaggcgtgagccaccgcgcccagccgagactacagctttctttaactgcatccctggagggatctgagagtctctttccctgtctcctttcctttggaaaacatttcagccagggctccccaagatgaaaggccagagtcccaggcatgggcgttgcaggtgcacagttgccacggggagctgtgggtgatggtcgctgtcagcgatggctgctgcaggtccctgtgaggaaggggcagtgcccacagcaggaggagagggagtcagcggacgttgattggcagtgcccgcccattccatcattcagtcacccactgtgcacccagcacccaggctcggctgcatagaacatggcccaggaaggctccacttcctgtctcctcttctcccctctccagtctcatgatggggctggaggcatcttctagttttgagttctgagctaatgaacatgctcatgagcaggcggcaggatcccaggacggtggagctgggagcctgactgcgggtgacggacaggctctggcagcccctgtcagcatcctctccagggcatgtgaaagccagtgtgtcctcagctgccagtgccccctccccacctcctctgggcccatgtgcacgggacctgggctcccccaaccaagcctgcccgccttggttcagcagaacggctcctgtctctacagcggtgccaggccaggagtgctgtgtctgtgaagcggggtcatggttttggggccctcatctccctcgcgccctctcattggggaccccccgtctccctagcgccctctcgtcctctcctgcatgtgctgtgtctgtgaagcggggtcatggttttggggccccccgtctccctagcgttctctcgccctctccagcatgtgaagtggggtcatggtttgggggcccccatctccctagcgccctctcgttggggaccccccgtctccctagcgccctctcgccctcgcctgcatgtgctgtgtccatgaagtggggtcatggtttgggggccccctatctttctagcaccctctcgccctctcctgtatgtgaagtggggtcatggtttgggggccgccatctttctagcgccctctcgccttctcctgagcgtgtggaactctgtggtggtcagagctaaggttctgaataggtcgaagcacctccccggtgcctctcaccctgaatgctctgggaggacacagccttttcataggctacgactgacatggcaggaggggcctgcctgccacccgggtcctctgctgcctgctgcttgctggggagggggctcgagactgggatcctgggcttctgctccagctgtgcccaagggagctgctgaggagggaccgggtggggcatccactctgggcaggttcagggtcattcttggtgaccccgggtccggttacaaaggctgatggagcgcgtgggtggctgcctaagtctctggaagcccaagaatgtggagatggcgcgtctcggcccggggtctcgtggctggtctgggagaacttgcctttatttctaggcaggaggctgcactgcaagggagcgtcagtggcccggctggctttccccggccctcagcccgcactcgtccaccaaagcaagctcctttgtggggctgccctgggaagccgggatcacgaggctctgccggccgtggtcaccccatgaggcagggtcagctcgggagcaaggcggatcagatggaacagaacacgtagaccacctcgcccgcccttagtcagctgggccattgaaaatcaagtccgtagaaagacctagaaataagtcccggggtgcccttgcctgttgacgggcgggccgagcaggactgttctcaggcaggcactggtctcttggcttccaggtggtttgtttgctggtttgaggctgggggtgacgctcctgtgcgggaggaggtcgcattccattcatagcggcttatctgggctgtcaggcaggcctgggagggagcctgcctctgtgctctccaagggtgggcgacggacagacagggtgtcccaccccttctgggccaaggacagagggtcagtgtttgcagagacctggggaggcccaggtgacctccaccgagcacctgctgtgtgcagggccagtgctggc

SEQ ID NO: 40145 - DNA, 1039 bp, Artificial sequence
  DNA replication origin
ggtttgaggctgggggtgacgctcctgtgcgggaggaggtcgcattccattcatagcggcttatctgggctgtcaggcaggcctgggagggagcctgcctctgtgctctccaagggtgggcgacggacagacagggtgtcccaccccttctgggccaaggacagagggtcagtgtttgcagagacctggggaggcccaggtgacctccaccgagcacctgctgtgtgcagggccagtgctggctgcagagacagcggagcgtgtgtggacccggcggcccaggggaggggggcaggcaggacccggcggcccaggggaggggggcaggcaggacccggcggcccaggggaggtgggcaggcaggacccggcggcccaggggaggggggcaggcaggacccggcggcccaggggagggggcaggcaggacccggcggcccaggggaggggggcaggcaggactcggcggcccaggggaggggggcaggcaggaccaggcggccctgggggtcaggggtggaggccaggcctagacggcccacaggagggtggactcattctgaccgattcctggaagcccccggaaagtggtgatgttctggagggcccagcagaccccaaggcccccaagacaatcccagctggctctctgcggctctcggtgtctgccatttgagacaatttgggcacaggcagggcaggccgtcgcggacggtctaagccgcgcgcattggtgggggcagcagagcccctgctctcagctcctcggggtacagcgggggtaccaggcgggtgagtgggtgggtggtcactgctcctgccaagggcagccctggtttggtttgcacttgctgccctggtgacggctgctctcattcctgccccattgctaacaagggtgtcataagctactttcccggcccacatcctattaagcccatggagaccctcccacagctgagcctgctgtgggctgcaggccctgggcggtgcccacctcggtccccactggcctccttccagcactttagagcagacac

SEQ ID NO: 40146 - DNA, 1341 bp, Artificial sequence
  DNA replication origin
ccagggcctttgaacagccggtcctagaccaggccctggttcctgtgatgctgacaggctgtggcttgagagcctgggtcgggaaagcccagtcagaggggaagccgggggctggttctgaccctgcatggtttcctgagggacgtgctcagtgggatttgtccctggagcaccaagggctgaaggaaagccactgtcctgctttctcgcagccctggtccccattcttctgtgggtgcaggtggggatggtggggtgaacccgccctcctggggacagatatagggatgccgggatgccgcactgcaggtgtgagtcctgggaagtgggtagggggtcgatgggaggaagagaggaaggtggggtgggggcgggaggagagaagaggaagaagggggtggggggagggaggaaggaagaggaggaaggtggggtgggggtgggcggagggaggaggaggaagtgggggcgtccccatcagagacctcctgcagacctccagctgtttggtccatgggtgggttggttaggtctgggttcagaagccccttcagtgtaggtgctcagctgggccatggagtcctggccttccctctgagcacagacccaccaggaatgggcagcccgttcttagtgaccctgggggctggggagcacccaccctctgagccccagctcggcctccatgtgtcaggtgggaggcacgggcagggccaggctgtgggagtccgggagggagtcagaggttggctggggcagaggtggggtcagggagcaggaagtgagcgtttgcccactggggtagacgctgggtggatggggagctgggagtcctatagggtgaagggtctgccgtgggctgaggcatgttggggcatcccgagtacctatgggccccttggacgtccccccggcgctccctggcacaggtctgctcggagggtgtcggcctcctctgcattcaggatcgtgggtctgtcaattgggacacctatgaacaaatgctcttcccatcagtaactccgtgtgcccctctcttgagcccctgtgagatgcaccctggggtcccagcctcacccactatccttcacagcagagctgtgggtccatggcccaggcagggtggccaattcctgcccactgcagtcggcaagggggacactggggcctcaggctcatcttctgggtgcgtttataaagccagcacaatgtgcagcgtttgcagacagtatcctctgtgagcaagagcatgtttaaagggggctcatttgaaaccctacctacagggctgccatccctctggtgaatgcccacgtgggtgacagtgattctagcccttga

SEQ ID NO: 40147 - DNA, 638 bp, Artificial sequence
  DNA replication origin
agcccttgatttccttgagctgatggtgggcccctgggctgaggagaccctcagccaggaggtcccaggcccagggatgagtgagctgtacagcagtgtcacagcaaagcagccaccctcacccggggcccatccagcgtgtgcagtgggcagaagcctgcgtgagctgggcagggacgagggactgtgccgccgccccattgtgaatctgtgttcattttcctgacttccttcatttcttgtgattttaaagctggggagtggagattctacttcctgctctatctggaaggagagggctttcggttcggcaaaaaagtcgtctttgtgggcgcctgtgcctcaggccacgtggaggccacatggaactcccattggggaggggaccatgggactggatggcgggaaagtgccccacccctgcagccctggaactgtggctggggtggggctgaggctgggggagggggtctggtggggagggagctgaggctgctcaggggactgctggtggggggccctagaaggagggagccgtggctgtggggtccctgatgggagggagatgtggcttggcggggaagctgtggagggagggagctgtggctactggggagctgtggctgggggagtgccgt

SEQ ID NO: 40148 - DNA, 1829 bp, Artificial sequence
  DNA replication origin
agattctacttcctgctctatctggaaggagagggctttcggttcggcaaaaaagtcgtctttgtgggcgcctgtgcctcaggccacgtggaggccacatggaactcccattggggaggggaccatgggactggatggcgggaaagtgccccacccctgcagccctggaactgtggctggggtggggctgaggctgggggagggggtctggtggggagggagctgaggctgctcaggggactgctggtggggggccctagaaggagggagccgtggctgtggggtccctgatgggagggagatgtggcttggcggggaagctgtggagggagggagctgtggctactggggagctgtggctgggggagtgccgtgcctgggggtctgtgactggggagttgctggctggggggcagccatggctgggggaaccctggctagggaggggctggctaggggcgagccgggctgcgcggggccctggctggggagcagctggctgtggcaggagctgtggctggggcttctgctgtctgcatccgttcctgtacatagtgaaggtgggttctattgccaaggttctgcaggtgagggtgtgtgctgttcacaccacagcatcacacaggcactctcctgcacacacactcacacacagacacacaggcactctccacacacactcacactcagacacaggcactctcctgcacacacactcacacagacacacaggcactctcctgcacacacacacacagacacacaggcactctcctgtacacacacacactcacacactcagacacacaggcactctcctgcacacacacacactcacacaggcactctcctgcacacacacacactcagacacacaggcactctcctgcgcacacacacacactcagacacacaggcactctcctgcacacacacactcacactcagacacacaggcactctcctgcacacacacactcactcacagacagacacacaggcactctcctgcacacactcacactcacacacaggcactctcctgcacacacacactcagacacacaggcactctcctgcacacacacacacacagacacaggcactctcctgtacacacacacactcacacactcagacacacaggcactctcctgcacacacactcacacaggcactctcctgcacacacacacactcagacacacaggcactctcctgcacacacacacacacactcagacacacaggcactctcctgcacacacacactcacacactcagacacaggcactctcctgcacacacacacactcactcacacacagacacacaggcactctcctgcacacactcacactcagacaagcactctcctgcacacactcacactcacactcagacacacaggcactctcctgcacacacacactcactcagacacaggcactctcctgcacacacacacacacactcagacacacaggcactctcctgcacacacacactcacacactcagacacacaggcactctcctgcacacacacactcactcacacacagacacacaggcactctcctgcacacactcacactcacactcagacaagcactctcctgcacacactcacactcacactcagacacacaggcactctcctgcacacacacactcactcagacacaggcactctcctgcatacacacactcacactcagacacacaggcactctcctgcacacacacactcacacactcagacacacaggcactctcctgcacacacacacactcacactcagacacacaggcactctcctgcacaca

SEQ ID NO: 40149 - DNA, 1051 bp, Artificial sequence
  DNA replication origin
gggagaccccgagaccccatggaccctgtgctgagggcggcctcccgtggccttgggagtggcatggggagtccctcctttatggagagagccgtgttcccagcagcgtgctccatcctttaaggacatgggacattttctgctggaaatagttgcatatcagaggtgggcgtctgagggggacaggtgagagctgacccggcgccatgccataagctggccctgctcagaggagacctgttggcgtgaagagccagcggcagaacatgggaagctcacggccgtgttctgtagaaggcgccggctggtgaagcagagatggcagatcacggagaggagcagggggaacatgaacagcccgggacgggaaccatggccagagccaccgggcagcaggactggaggacccggtgggggcacctccaggccaggagctggcagccctcgaggtgggttcaagcgtcccgaggcctggaggcagctgctggggcaggtggggcacctgggatgggcatgtgggggttttatgatttaacacaggaaaactctacctgggcatctgtgctgtccctcatcttctggggacagtaggggcagcgtcttgccccattgcttccccctctcccagtacagaaccaaaataagacctcgatgaaccctgaagggcagcaggtggaggagcgtgtgccagaagtagaggtgagggaccagggccacgcaggagcagcctctgtgtgtaggggagctgtggtgtccagaacctgcaagaccccaggtctgggcagctgcagcagattccgcccatagtggggagatgggaaagtctgttgtaattcccagggccatgtgaggcggtgggcagagcttggagcggaaaggcgggtgtccccggggtttgcatcccgggggcaagcagtgaggtctccatcagcctcggcacagcgagagaactgctgagcctcctatgagtgagcgtcccgtggttcccacgcacgataacgtcctagaagtgctgatcttgcccccaggttccagccctgctcccaagttc

SEQ ID NO: 40150 - DNA, 2261 bp, Artificial sequence
  DNA replication origin
ttacaacagactttcccatctccccactatgggcggaatctgctgcagctgcccagacctggggtcttgcaggttctggacaccacagctcccctacacacagaggctgctcctgcgtggccctggtccctcacctctacttctggcacacgctcctccacctgctgcccttcagggttcatcgaggtcttattttggttctgtactgggagagggggaagcaatggggcaagacgctgcccctactgtccccagaagatgagggacagcacagatgcccaggtagagttttcctgtgttaaatcataaaacccccacatgcccatcccaggtgccccacctgccccagcagctgcctccaggcctcgggacgcttgaacccacctcgagggctgccagctcctggcctggaggtgcccccaccgggtcctccagtcctgctgcccggtggctctggccatggttcccgtcccgggctgttcatgttccccctgctcctctccgtgatctgccatctctgcttcaccagccggcgccttctacagaacacggccgtgagcttcccatgttctgccgctggctcttcacgccaacaggtctcctctgagcagggccagcttatggcatggcgccgggtcagctctcacctgtccccctcagacgcccacctctgatatgcaactatttccagcagaaaatgtcccatgtccttaaaggatggagcacgctgctgggaacacggctctctccataaaggagggactccccatgccactcccaaggccacgggaggccgccctcagcacagggtccatggggtctcggggtctccctgccaaagcacaggcctggtgaccccctgggaccctcactccagggagaggactgtgcatcttgtgtgcttctcacagtcactgtgtggggttcagcccaggggaggtcacctcgccctcatccacgcagtcctgcggggaggcccatttgccctgactgcacagtcctgcagctcggctgtgcccttgagtgggtggcgctgccctgttgcccaccgtagctgctgtggggccacagccttgagcctggacactggccatgactggataccaccggtgcacagggtgcacgtgaggaaaccctgcccgttctgtgcccgtgccttgctttttctcctttaaatcccacctgtgagttttatttttgtaactgcagagcatgatgaaaaccgtgaagccacagaggcacacgtcgtgtctgtggggagggcccctcactctctggctgcacatcacccatgtgtctcactcaccatgggtgtccctgcccctgagcccaccctcacctctgtcagctgggcaggcgctgccctgtcagcctctgcctccacttcctccactcctggacatcgtagtctctgtcgccgggtagtagcagggccggaccccttcggatgagcacgcccaggcccaagagtggcagtcctggtgtgggcggtggtgctggtgtgggcggcggtcctggtgtgggcagcggggctggtgtgggcagcggtgctggtgtgggcggcggtcctggtgtgggcggtggtggtgctggtgtgggcggaggtcctggtgtgggcggcggtcctggtgtgggcagcggggctggtgtgggcagcggtgctggtgtgggcggcggtcctggtgtgggcggtggtggtgctggtgtgggcggaggtcctggtgtgggcggcggtcctggtgtgggcggaggtcctggtgtgggcggtggtggtgctggtgtgggcagcggtgctgatgtgggtggtggtgctggtgtgggcggtggtggtgctggtgtgggcagcggtgctgatgtgggtggtggtgctggtgtgggtggcggtgctggtgtgggcggcggtgctgatgtgggtggtggtggtgctgatgtgggcggcggtgctggtgtgggcggtggtggtgctggtgtgggtggtggtggtgctgatgtgggcggcggtgctggtgtgggcggcggtgctggtgtgggcggcggtgctggtgtgggcggcggtgctggtgtgggtggattcctggaggacagctgggtcttgcatccagcacaggtcctggtgcctgggaggtgcttaccccatggccccaaccggcacaagtgtggctgtcacagctggggtctgggtaggtctggcagccccatgggaacctggctgtgtgagcctgccctggggccttccatgagaaaacccagttaaggagcaa

SEQ ID NO: 40151 - DNA, 3202 bp, Artificial sequence
  DNA replication origin
taccaggctcacgtcagccccgcccacacttacctggcaaggcaaaaaggaaagggtggggagatcggggccggccagttacctgcagccggcccaatgagcacacagtacccatcctcctgggtcgggagcgaggcacaggcgacgggcagccggcccccgcccaggcggctccaacacgcatcctgcagggcctcgcagaactggcagcagggtggcggggcgggcggcgggacgctgccgcatggggggaccagcagcaggcagaagaaccaggcgaggaaggggtggcagtgcgtctgcagcaggcccccccacgcccgtgccccggcccgcacctgctcgccgctctcgtggtggaggtggttgggcagccagaagcgtgagatgcccaggtggccgcagactggcagggagggtggcaggggcaggcagcgaccggcgggggcctcggggtcagccccgagcagggcagagttattagcaagacccggccccacagagttagccacgtgggagacccaagcaccgctgtccctggttaaagtggtgactgcgacctgagacagtgcgcccgggagcccagaggagaaggcggagggggccgcgtgcttgcccagggagcccatcaccagggggtgcagaagtggcgtgcgcaggcggacgtcagggcgttggagctgctggctgggagcggctgcggcgggcgagagtccttggctgtctgggtcctgcaggcttccccagggaggggccccgcccagcaaggaggagagagaagctctacctgaagatggtggtggcactgagggccccgtgagtggtgcccagggcctgcccagggagggaggcgatggggtgggtgcaggcaaggtgccagcctcggttgtgtgggcgcccggagagctaggaatgccacggctgggccagagagtggtcccattctcctggggggtgctggaaggcccagcgagggcaagggggcccacaggagtctccaggaccagggtttccgccctggccaagctctcagtggggacagtgtcattccacagctggacgaagctccggatgcctttggccacgttcaggatctcggctccgacaccggcaatgttctcctctggcgcgtccgggctctcggcagaagtgggggtgtcctggccatcttccagcagctctgagggtggctcagggctgccaggggctgtcgctggctctgtggaaccattccggggggtcacgtgtgtggtggtatctgctgtgggctgcacaggcaggggcccctggggctcagggatcgtggtagctgcatggctggtgtcctcattattgaaccaaagccagttcaggttcagcaggttggcccgggcagccgccaggcagcagaagagcagcagcaggatgtggcagccacaggggtagggagccatcggggcagtgcggctggagctgcgggcggcgggagggcctctgtgcctggaggtggggctagccaggctcacgccctcctgccctcccctgtgcaggcttcccagcctctggccggctgtcttccaccccccactcttgcagaaggaaagaaggcaccagccttggaatcaaggtgcccagcacccgggggttccagcacccaaggatttataacttctttcccacggccctgcagcagccccaggctccgtgaggacagagggtgctgtgtgcagtgtccacagggttcccaacgtgctccgctaggctctgccggggcagggctgctgagtctctggattggggctccaagccaggaccccatcccagaagcactgaggcagcggcccccagcccctgctccccctctgacctggaacgcccagaggcgcctggcctggagccattgtgttgtgggaaacttggaaccgaaaaaatgctcagcttgctgcagtgccaattccactgttgcaatggctgcccaagtcgttaaacatcccggggagggtctcgaggggctcagaccctctcagagctgctgtgcctcccctcaaagctggggctttacctgccttggactgtgtccctctcagcccttcctgaccttctgcccaggagacccagcagagacggagcccgggaccagggcaggaatgcatactccttcccggcctcagtctccccgtccacaaaaggatccggttagactggaacattccaggcagccggtaacccacagggatgtgagtggcatgtgagtggctgctgtgcccccccgccagctgcccaggcacagcagtgggtgctgagtgtgccttatgccctctgaggacctgtgtgcagcctggccatcggcccatttcacagatgaagaaaactgaggcatgagcctggtgaccccgctcaagatcacggagcccatcagaggtggagccaggcagtttacacaggcgtgctcactcacacacacgttcacacatgtgcatcctcacacgcacacacccaggtttcaccccacaatccacccaccccctcagtgctctgcacgccagctcccccagctggagtccctcgtcaccctgcctcctccaggctgtgcggctggggttgcagccaccctcccccagggctggggtcagttaatgtgacagcagctgtgacgaaacagccccacaacctgtccccagctgtccccaggtcaggacatgctgtagccatcggtcgattgctgtccacagggcagggctgggctgcttgggacccagccttgtttcaagcagctgagtgccacctccttctcgagggcaggcgcaggcattccacaagcaaacatctgcatgtcagtgaggccgtgctcccaaaacgaatccccacactgctcaaactcgtctcagagatgcccagagaagtctctttgcttgaaaactgactgctgctgctgtgattttatgtctgaacacgcctccggaaagtctccaaacagaaattccagagactgccccctcctccaccagcgcatctcaggaagggaactctgttgtgggggacacccccagccccatcccgaaggctctgtgctcagagggtcactggccagctgggctggccctacattcatgccccccaatatacacctcctgggcagagccaggcacaaggaactgattacgcctagcaatggagggagagcagctccggccctcggggccacacttggaggatggtggca

SEQ ID NO: 40152 - DNA, 1715 bp, Artificial sequence
  DNA replication origin
tgggcaagcacgcggccccctccgccttctcctctgggctcccgggcgcactgtctcaggtcgcagtcaccactttaaccagggacagcggtgcttgggtctcccacgtggctaactctgtggggccgggtcttgctaataactctgccctgctcggggctgaccccgaggcccccgccggtcgctgcctgcccctgccaccctccctgccagtctgcggccacctgggcatctcacgcttctggctgcccaaccacctccaccacgagagcggcgagcaggtgcgggccggggcacgggcgtgggggggcctgctgcagacgcactgccaccccttcctcgcctggttcttctgcctgctgctggtccccccatgcggcagcgtcccgccgcccgccccgccaccctgctgccagttctgcgaggccctgcaggatgcgtgttggagccgcctgggcgggggccggctgcccgtcgcctgtgcctcgctcccgacccaggaggatgggtactgtgtgctcattgggccggctgcaggtaactggccggccccgatctccccaccctttcctttttgccttgccaggtaagtgtgggcggggctgacgtgagcctggtacaggttccccccacatcgaatctctacgttcaggggcccgtggccctcgggaggtgggagagctgggagtgaggcctcctgtgtggggaggaggccggcgtctggacaggaagagggctggatgaaccgcagccgatgtgtccaggtgccacctgggcctggagctccctgagcattttagcgcatttagtcctcagcacggtcccgagataccctgccatgccccgagtcacagaggggaaactgaggcgtggggcagtggcgtgactcaccccagggagccgagattcccgctcaggtgtggctgcatcgaccttgctccggtcactaagctgcacggttcgatgcgcttcctgggagccccagcgtgctcgggccaagggtgctgccgcgtgggcagtgcagagaccctaccagcgtggggaccagggaggtctgcagggcccgtcctgagagggagcctttcatgtccccctccccatcctgaagcacacagcctccctgccacagtgggggccgcttctgggcccaggggacgttgccccatcaccgtgtggcctggccttgttgctggctggacagttgggggcaggaagaggagggaaagggggactctttaacctcctgggggcaggggcagcccagaaaggaccccagcagatccctcctctgtgtccgggagtagacggggcccctgagctgtgcctgccccattcagattctgcttgctatgtgcacctggcagccttggcccagaggccctatccccgcagggtgaggtgctctgtcctcctctgctgtcctccccatagtgccgaggggaagcagccttgctgtttgctctttgggctttgggacagggttggtgggggttagcagctgtgccggacctggaggtgggggtgcctgcagtggaaattctggtggacgcccacccaccaggctccgtgagggatgacgagcttggtgattccccttgagtttcaggccagtgaccgtttctctcagcaaagcccagagcctctgcagaccctgtgtggggcctggggagtggccggggggccacagacagggcagggacaagtgctgacaacag

SEQ ID NO: 40153 - DNA, 1289 bp, Artificial sequence
  DNA replication origin
tgtgcaggagtgggggcccttgtggatgcgccccagaagcatagggctggagctctccgaggcaggggccgtgcccgcggctgttggcatctcgtagggctggagctctcccaggcagggaccgtgcccacggctgttggcatctcgtagggctggagctctctgaggcaggggccgtgcccacggctgttggcatctcatagggctggagctctctgaggcaggggctgtgcccgcgaatgttggcatctcagggcttagatgtcacccccagggcagctggcactgccacaagcagccagattcctgggtcccactcatcctccgtccctggaacacccaaatgcccagcaagcaccagccgccttgcaggcaacccccccggagccacaccccacctggctactgttccccaccaagcatgtgggtagggcagccttgcaggagccgtactgactggagggacccgggtccggtgtcctggagccccgggaggctccagcacagcccaccttgtcctccactgcaagcccacggaggcagacaggacagcggtgggctgggagggctgcagcctgtgggaggggaaacgccaggcctgcacacctgaccctgccctagccctgccagcccgagactgtctgggatcagctgagcactgtgagcaagcttcagcctcagggaaggtgccggtctcctgggagttggggcacagctgcatggcttgggggctggggtccgagtggggctgtgagggcgaggaatttctgcaactgcagctggcccggtcggtggcacagcctgatggggacttttcactgaacatctggacagcttggtagcgtccccgtgcgagggaggccgtgtcccgtgcagggtcctgggggactccatcagcgttcctggcctgcattgcctctggccaggggtgggcctcaagctttatcaaggagccccttcccaggtgtggcctggccgggagggtcctgccccctcttctggcctctcagctcctccccagcccaggctcctcttgggttagccccaactcctgccggacccctatgttgggctggacactcccagccctgggtgaggggcaggaggaggagggggagcccagcctgacccctcgggcagacttcgaggccccgaaagtgggggtgctgggctgtgatccgggcaccagaacagagccctcgaggcccacagaggtccctggctgcatctccagggatcagggagtatgtgcccctgaggggaggggagctggaggggtcctgctgcct

SEQ ID NO: 40154 - DNA, 1351 bp, Artificial sequence
  DNA replication origin
gccaggggtgggcctcaagctttatcaaggagccccttcccaggtgtggcctggccgggagggtcctgccccctcttctggcctctcagctcctccccagcccaggctcctcttgggttagccccaactcctgccggacccctatgttgggctggacactcccagccctgggtgaggggcaggaggaggagggggagcccagcctgacccctcgggcagacttcgaggccccgaaagtgggggtgctgggctgtgatccgggcaccagaacagagccctcgaggcccacagaggtccctggctgcatctccagggatcagggagtatgtgcccctgaggggaggggagctggaggggtcctgctgcctcctgcccggctccatctccagcgccccctccacctcgtcctgggcactgccctgtgtgtccaccccgccggcccacctcgaggagagtgtgggggacagtgcagccgtgctggggcgtggggggcgctcaaagggagggtgaaccctgtggtcagcacacaagcagggaccctgtggagggttttgctgtgttgtgggcttgtccctcaggtccacgaggaagggagtgaggccccctcacacgggagggccggggtggggtagggaggctcccttgctgcagctgccaagagtgagcgagcggggcttgggcttgggctgcccgggacactgcctccaggaagccccctgggctgtctcagtgggactctgtgagtgacacatggagctcaggtcacaagggctgtgggagtgtcaccccacaacagcaacgggtgcctggccctctggactttgctctctacacccctcctgagctctcacaaaccctggcccctgggaccggaggcaggtgatgtttccaaggagtcctacaggcaagcatcctctgacctgggagctgcgtattgttcccgtttacaggtgagaaactgaggcctaggaaggacagacacgtgtgcgtgccgcaagtgtggctagcaaggagggagcctggaggagggcccagcagcctggccccagagcgctcttcagcatcgcagcagatgcaggacaagcaagctcccagccggggagcaccaggagaccagcaggcatccaccctcgtggtgcaggccatctgatgagggcagggaccagtgccgggatggatagtgcctgtgcacagagtggggcgcaactgggcacagctgccaccggggtgctcgggaggcaggtccacacacacgccggccaagtcgctcatctcaaatgcacgagtcccgtgatcttggaaagtggtgcacaggcccctgggctggggcttcctctgcctccacccccat

SEQ ID NO: 40155 - DNA, 1767 bp, Artificial sequence
  DNA replication origin
ttgggtcagcgctgacggtggagagattgaatgttgtaaacgtgtccgagtgtcaacaggaagtctccacccggggacaggggcccgtttcttaggttgtttttagccttccgtgggggctctgcagccttgggatttggtggaggtgtttgttctgaggccgtttttctttgatgccaagatgtccccccgggcacttcactgcgtaagtgctatggtgtgatggagtgatgatggtggcgcactcttcaagctctggatcaggttccggaagctctgtgtgagtcttactgaggtggttattttctcttttccctggaaagtgggctgagagcactccatgtgggcacgagcggccctggctctgcaggactggagggggctgtgctggagggcggggggctggccaggcagccttggatcttgtcctcaggagcccttcaaaggggcagcagagactccaggccctgtgccccgaggagtcaggctgggctggttctggggagtgtctggagcacctgatgctgagcacaggcgggcgtccgtggagtgcacgtgtctgagggtctctgaggggtttgcccttttcttcggagccacggtggccgtgagggatgcaggacattgggtgtggccctcgaggactggcctgtctggagcccactcccccgtgggtgaacgcggctcttggtggagagcccagtttggggagaagggacggtcttgtcctgggaggtgtcagacaaagccgagcatgggactcacaggagacccccagtcaggccgtgtcagggtgaggctgggagtgagggtcctggaaagtccggcttctgggagagggcgctttggctcagaggctgccactgcagaagggatggacgtccccggtcccctaagataagggacccaaggggaggggcggggacgttccacactggtgtgagaacagcggagagtcccagccagaggtacccgctgctctcctgcggggaggatgctggctgcactgtctgtcctgggcatatttaaaggggcctctgttaacacacacaggcctccagaaccatccacacttctggctggcctgattcctgagggggaaatggtctttaaagaagcaagcaccttgatccaaagggaggtggtccagcaggaggggccgccccaccatacccaggaaggttgagctctcgcacccgggaaggctgagctctcgcacccgggaaggctgagctctcgaaatggggttcaggcatttgctgtttgattccaggacatctgagacagctgggcctgtacctcggggagtggaggctgcgccattctctgcccatccagcatcttagggccgggcatttggaagctggcttctgaagggagcccccaggagcttcgtggagaggagacgggacagctttggaaagggcgttgctgtcactggggtccctggggccgccggtgtagcgtgctggtaccctccagcccaggaaggtggcagctgccgcatcttgctttcccaatgacggaatgttctaggaagggtggtgggaggtttctccaaggtgaacgcgggggcagctgggtggctggcacggcctctggcccccaggccgagtcctgtttcctgatcttatcacagccccagcttggacatgtgggaccaggcacttcttatgagaaaaaggatcattgtaacagctgccatctggatggacgatcattgtaacagctgccatctgggtggacggcggcctctgtctgaggggg

SEQ ID NO: 40156 - DNA, 942 bp, Artificial sequence
  DNA replication origin
ggtccctggggccgccggtgtagcgtgctggtaccctccagcccaggaaggtggcagctgccgcatcttgctttcccaatgacggaatgttctaggaagggtggtgggaggtttctccaaggtgaacgcgggggcagctgggtggctggcacggcctctggcccccaggccgagtcctgtttcctgatcttatcacagccccagcttggacatgtgggaccaggcacttcttatgagaaaaaggatcattgtaacagctgccatctggatggacgatcattgtaacagctgccatctgggtggacggcggcctctgtctgagggggatgtgaccgctggcccccagagcccaggctcagcccgttgggacccctctgcccctggcccagactgtggctgcaaagcccgggctctgcctggcacggcaggtgtgctgggaagtcactctgagcagggtctgcccttgagtgggtgctgcccccctcccgtgggcaggaaacgaggtgtgagaactctgggcaccggggctgcgtcctggcttgggctccctgggcgagggatggacagggctccttctgaccctgggctactgagtcgaagtgaagtcaagctccgcctgggcaggaatgagtggagtgagtcacccggcgctgtggggcatttgcacggagcagcggggctggtggggagactgtggcacgttggcaggtacgtcaggcatgcagcccctccaaggggtgattgtggccccgaggggaatcagcatgggggggatggggagatacagcttgtccttgccacatgaagcacctggcccagcaggtgagccggtgaccgacagcgctgggtgaaatcccgcaccgtgtcctcagatgccacgtggaaccccagctgaggcagccactctgggcgacgccccgtagccgaggcttcgaagaacac

SEQ ID NO: 40157 - DNA, 1311 bp, Artificial sequence
  DNA replication origin
gggattacaggcacctgccaccatgcctagctaatttttgtatttttagtagagacggggtttcaccatattggtcaggctggtctcgaactcccgacctcaggtgatccacccgcctaagcctctcaaagtgctgggattacaggcgtgagccactgcacccagctgggatttgatgtgtttatgtggttaaatctggcctggagaagacaccatgacttacaacagcccagtgaaaccttggaaggtcagagagctggaacaggagggagctagagggccctgggtctggccctgggctggggccctgctgggcgtgggtggcgtgcagcaggccgtgtgctgctgggcgtgggtggcgcgctacaggcttcgtgctgctgggcctgggtggcgtgctacgggcttgtgctgctgggtgtgggtggcgcgctacgggccttgtgctgctgggcctgggtggcgcgctacgggccgtgtgctgctgggcctgggtggcgcactacgggccttgtgctgctgggcgtgggtggcgtgcagcaggccgtgtgctgctgggcgtgggtggcgcgctatgggccgtgtgctgagggctgtgttggttgatctctgtgtcaggtccctgcaggcctcaggtgtcaggaactttctctttgggtcttagatgagattccagctggggagaggagaagcatgcttgtgtggtagaaaagaagacagacttgttcagcacaagattttctcagacttctgaattgagatacttgggaaagaaacattcaagttgtgtgactcataatttttggcagaaacaagcacagagctttgggagcagggaggaaaccgaggcttcctcctcctcagcctctccacaagactgcatcgaccctggcgctgccacagatggtgcctgggacccccggccgcagctgggtccaacagagccctccggagcattggttgtgttcctcgtcctaagagtccttgggcgttgttggtcttttcaggttcactttcttgagtcaggtttgtcagtggtcgtctcccgggaaatcatgcacccctcccagctgctgccgttgccttgaacgtcatttccagctgtgtcctgatttccagctgtgtcctgatttccagctgtgtcctgatttccagggcgctgaggctgcagcgtgtcgggaagcattttacatgctcttccctcacagaattcctgtgagctctgtttcaggtgtctccggatttcataactttcagtccgaagtcccttaaatatttacaatgggcctgtggcttttgcactagcgcctc

SEQ ID NO: 40158 - DNA, 1451 bp, Artificial sequence
  DNA replication origin
atgaggccgcctggtgcttgcgtaaagctcccgggacttggggttgggggacttgacctgcagcccctcgaatctgcccgccctcccaggccttggatcgagccacacctgctgtggttctaaacccgtagccctcaggtggcccatcagctgcctcagatgagccaagtctgagggagcagcctccgcccagccgggtgctttccacatgaaagcgcccaggacgcccctgggtctcaccacttcttcctaccatgaggcataccgcacccccagggaggctgcccgagaccccttccctctccgagactctcctgccctttgtgggccccccgaaatctggagctcaagcagcaccggggttgccactgccacctcaggaccgctggtgacccctttctctgtctgcatttagggggtgatcgctgagctgaaggtgcgcagggacccccaggtgagccccatgcactgcctggacgaggaaggcgatgactcagatggggtgagtgacatctggggcacgggtggggtctcccctcaatccctggcacgcggagttcagggccaaggtctatgacaggaaaagtcccaaaatataccacttggggcactgggaagctgcgataccatttctgtgctctcctgtagcacctcagagcccttccttgccctgaactttcccataaaaacaaatacaaagcatgatataaacaccagaaaccaccctccatggcagctggtgagacagaggatgtgaggcagctcagcaaagtgtgtgtgtgtgtctgtgtctgtgtggtgtgtctctgtgtcttgtgtggtgtgtctctgtggtgtgtctgtcttgtgtgttgtgtgtggatgtgtgtgtgtctgtgtggtgtgtctgtcttgtgtgttgtgtgtgttgtatgtgtgtctctggtgtgtctgtcttgtgtgtcgtgtgtgtctgtggtgtgtctctgtgtgtagtgtgtctctgtgtgtggtgtgtctctgtgtgtgtggtgtgtctctgtggtgtgtctgtcttgtgtgttgtgtctgcatgtctgcatggtgcgtgtgtctctgtgtctgtgtctgtgtgttgtgtggcgtgtgtgttggtggggtgtgtggaatcacgtggtacccaaggggagaatcccccagccccaggtgtgaggaacagcagggaattctcactcaggggcccagatcacaacatgccccacgtgaacatggacccacagcctcgctcctgggggcgtgggcaggagacgccgtggacgtggacccacagcctcgctcctgggggcgtgggcaggagacaccgtggctggactgtgggcagtgtgtgaacatccatgttactttcatgctttttctttattttgcccaataagcccgttgtttttgcctggaacatgccagaagacgccagatcgttcacatggcggccatga

SEQ ID NO: 40159 - DNA, 1019 bp, Artificial sequence
  DNA replication origin
ccacctgagaaaacacaggaggggcggggagtggggaggccccagccgcgggactgaggcgcggtgctgtccgtgagagacgggtgcgggaacgtgttccctgcggggaccctctgcagattcacatcagcttcccagcatggcctgtcgggcgccgggaggcctctgtggtgacggcaggcgcggtcctgggtcctggggagccggggagcccacaggcggccacacccctgcggcccacggaaggaagcccctcgcgcacggccctggagcaccctcctgtttcagaggatttttctttatctttcttgcgatcttaagtatttcatttcacaaaccaagcaagtctccaccgggcatctgccggccgaataacaggccacctcccctctcgtcctccagggcgcggccctaaaacccaggctccccgcgccaccccccgtcaccacgccacccttggctggaggcagcagcacggaagattccagaagtgaagaagtcgaggagcagaccacggtggcttcgttaggaggtaagctcttttctggatgtggtgtgtgtgtggtgtggggtgtgtgtggtgtgtaacgtgtgtttgtgtgatggtgaggtatgtgtgtgatgtatggtgtgtgtagtgtgtggtgtatatggtacatgtgtgtgtgatatggcacgtgtttgtgtgaaatatatggcaggtgtttgatgtgtggtgtgtgatgtgcatgtttgtgacatgtgtgatgtttatgtgatgtgtatgtagtgtgtatggtgcatgcatgtgggcatgtgtgtgtgcagtgtgtggtgtgtgtattgtgtgtggtgtggtgtgtgtgttgcgtgtagtgtacgtgtgtggtgtgcagtgcatgttgtgttgtatgtgatgtgtagtgtgcgtattgtgtgtatgtgtgtgatgtgcatgtgtaatgtacatgtgtgtgatgtgtattatgtgttttgtgtgtgtgtgtgtgtgtgtgtgtgtgtggcaggtggggagatgc

SEQ ID NO: 40160 - DNA, 1254 bp, Artificial sequence
  DNA replication origin
tgggccactcactggtgagccctgatgaagcccctctgtgcccgtgcctcctttgtgcccagcactcggtgccagcatgcgtccaccctgcgtgtccactgtgggaagcagcccagcctgggactctggagggcgcagcgggacacgtgggcagggtgtgtggggccccaccccagcccgagccctgtgttctgtttattcccagggcggcctgaaggggcagaaaggggagccaggtgttccgggcccacctggccgggcaggccccccaggatccccatgcctacctggtcccccgggtctcccgtgcccagtgagtcccctgggtcctgcaggcccagcgttgcaaactgtccccggaccacaaggacccccagggcctccggggagggacggcacccctggaagggacggcgagccggtgagtcctcacgtccccccgagtccggcccggtctggagggtgggggcttgggtaggagggggagaggctgcggccgacatgggagtgagctgagctgggatcggggcaggtcagcagcctccttaggcccaccgttgctcggggttggtgctggaaggtggtcagacgtgggaggcggagctgctcagacacagcccttgtgggtgtgaggaggctcctggcgcgggtgcgaggacatcgggggaaggcgtctgccgcctcgtggggacttggagcgtggggtgcatttccatgtagacactgtaggtggcgccggaggagtcatttcccatcactaatggcttctcttgcacacccagggcgaccccggtgaagacggaaagccggtgagtctgcttttctttctgacccctgtgttatctgtgatgtttgcttagaccccagggctttgttgccagtgacactctttttaaacgcgacccagtgaggagactgtacagcaaaaccattttgaaagtggaattttgtaaagaaaagatgagtgtaactgttgatgggaaatagcagttatgcatttgtgttgagacatttgggccacaactaccatgaagaaggaaaggaagtgagaaaaggcagagcttccaaacccttagagggaagacgcacagcaaagaaaaaggaagtcgggcggggcagggggtggtgcaagtcggcgggggagggaagcacggggcgacctgagactctgtgaagtccgagcttcgtcgcaaaacacgcagttcagtctttaaaaatcagcaaacaccgtttccaagcacagtaatgacgtga

SEQ ID NO: 40161 - DNA, 1167 bp, Artificial sequence
  DNA replication origin
tgacctcggccctcccacacccacccatgggaattgctcatggagacgctctctgtgcagtccgtggacccacagggccagagaggtcggaggccttgcttgcggtcacccccactggtcagcacccctagaaccatggggtggccactcaggtgcttccgcacaccccagggtggccccgagtcagcaactgcccgccagctcctagaggagatgaggtgaggaggcggggactggggaggcctgaggcggggcaggggctcccatgtggggtgttcacccctcactcccagcagacagggctcccgacactgacggtggaggcaggacttaccgggaggccaggaaacccggggggaccctcgcgcccaggcacaccaggaaggccggcgggtcctgggacgtcggagctgttcaccccaaagcggcctggctcgccgggcaggcctgggacaccggggggtccgggaggtccagggaagcctcgaggaccctggacgtgggcgaacacagatagtcacagcccatgtggcacccaccagggatgaccaccacccccagaacgggcctcatccccaccccccacaggaccccagctgaatcttgggggtccatggcctgttcctcatgggcacagacatcgggcagcgctgcagtttaagggccactcacccgcagggcctccagatcgcccccgaagccagatccctccatgtcaatgaaggtctgaggaaaagagccggagagacacgttgccctgagctcggccccccgcctggcctactcctggcccctgccccgcaagctgcatatcgagctgtttctacaaggagctgagaaaccacggcccctctgctgcccccagagaagcctgaaggcaggtggatgggggctcccaccacacctgtgacccctcagctcagccaagaccccacgcaagcccctgagggtggagctgatacttctgggccagaggcagtgcctgcttttgaggagggcagaccccgggtcgcaggaagccaagggcgggacttaccagcttgtcgtgtctgaaggagggtcctgggggccctggaggcccttggggtcctgggggccctctctctccaaccccagggtctccctgggaacacaagacaagcctatcataccctgggcacgcacaca

SEQ ID NO: 40162 - DNA, 2828 bp, Artificial sequence
  DNA replication origin
tgaccttcagagttcaaggtgggtccgatgaccccatgagctgggcctcctggtctggtgtgtcactggcctcttctcctggtttctggtcatctgtgcatcattcactccttcctgggcgtcgtgtgtgacgctgagagatccaaggctggcatgggcacatcttccatcttcccgcttgctttctgcctgcctttgcctccacaggccttaaggatgtcccggcccagactcggcctctgcctgcctggtcccttcccaccccagagtgcagccccagcaagagcaggtatggcggcctcctctgcagaggaccctggcagcgagaggggaccctggcggcgagcggggaccgtggcggcgagaggggaccctggcggcgagaggggaccgtggcggcgagaggggaccctggcggcgagaggggaccctggcggcgagaggggaccgtggtggcgagagggaaccctggcggtgagaggggaccctggcggcgagaggggaccgtggcggcgagaggggaccctggtggtgaaaggcgcccgaggctagcctggctctctgggcttctgctctgccagcccccagacatcctcaaacagtggttttctcacattttatccagctgttctcagtggtcttggcaggacatccaagcagccctgccaccctcaatggaggtggggctcaggggggaattcttgtcctttgggggagcaggggtgctgggctcaccctccagacggcctgtcgggcaacgcctccttcccacatgaaaccctggagagtttctcgacagagggtcctccagtgccgacccccggccccgtggaggggagggggcatctcaggacactgaagctgctgtgtctctgcgcagtgcccacctgggtctagcatggaagggcagccatctgctcctcaggaggtgatggggctatcttgctgggcttgtgccctgcagccaccctcgcccccaaatccaggtcctatgaggcccccatcaacccagaaggggcttccttcctcccgcagggtgaggtggtcaccacccagtgagggtccaggacctgcttgtggtggcggctctaggtgtgaccacacttcagtgctggccacgccatggctctcctgcctgggatgtccagagttgctcacctggtggtccgggggggcccacttctcctttggcgcccttgggtcctggagggccctgattccctggaggaagagagacccagtgcccatcaggaatgtgccagggaggactccagggtggtgcccctcctgcccgaaatgccctagtgcctgggggcctggatgggggggcatcagatggacatggggacagtcagggtaggagctgctggagagcaggggcgccctgggtccccgtcagcaggccatgtgggggccaggccacacctgcagggcacgtgctgaccaacaggagggacggggctgcttccaccctgctttggccagagaagcaaaatctcaacggagaacagcaaatgggggccaccccaaggtcaggtcctggacggctgtgctgggagggcccgcaggaagggccaaggtcatcggaactggggcgtgggctgggcgtgtagcactggccttgggccactgggggagtctcactgctgctggcacgggaaggaaggtggggctctggagcatcccttcagagcctgtgtccccagctgtgagcccaggaccctcacctggcaatcctggaggcccggggcggctggactcagcaaacacctgcaaggaacggggagaggcggctgctgagggcgatgttctgaaatggaggccaccaccactcaggggtccccaagcccagaagcaccagcccctgtatgaggccacatagcagcctcccccagtcagagacgggagggaacaggggtacggagagcaggagccacggcctgacgccacttggccctcattggtcacttcaccttgctgagcctgggaaaatgggggtgcccctagcaaccctgggctcaggcccttagcagagccagctggaagcagctccacacccagagagccctccctttcccaggccttcaccttccgtgggaactcagctgctaatccactgcccaccagactggcacatcctagaaggacccccagacgcagaggccaggggagaagaaggcccagcccctctgtggggctctgtgtgacagccaagggtggctgtaggacagtgggtgccctggggacttacattgctgtcgtaaacaggagtccctggagggcctgggggccctggaggtcctggggggccgggcattccctgtggggagggcagagagctgttaggcttatggcctgcctgtcaggcagcagctgggagcagagacagttcagaaaaatcagaaaaatcagaaacctgaccaggcagacctctgaccaggcaaaaccgagaatgcagtgggtcactcgggccacggctccctgaggacaggaactggccccggccccacctcatcccacgctggagtcgtgcacagacgtccctcgggaggagtgaagaggccaccgggtctgcgtctcaggtaaaaaggtgactgaaaatgccccaccctgctgacatcagggagacaaagctcttggctcaaaagacagcagagtggacacctttgggctgagcgggagaacccccagcatggagggcttggagggcatggagggcatggagggcatagagggcatggagggcatggcccaggcccatggatgccctgctgagaatccacaggggcctgttgtatgtgtgtatatgggtgcacatgtgtgcatat

SEQ ID NO: 40163 - DNA, 1202 bp, Artificial sequence
  DNA replication origin
ggtgagcccagcacccctgctcccccaaaggacaagaattcccccctgagccccacctccattgagggtggcagggctgcttggatgtcctgccaagaccactgagaacagctggataaaatgtgagaaaaccactgtttgaggatgtctgggggctggcagagcagaagcccagagagccaggctagcctcgggcgcctttcaccaccagggtcccctctcgccgccacggtcccctctcgccgccagggtcccctctcaccgccagggttccctctcgccaccacggtcccctctcgccgccagggtcccctctcgccgccagggtcccctctcgccgccacggtcccctctcgccgccagggtcccctctcgccgccacggtccccgctcgccgccagggtcccctctcgctgccagggtcctctgcagaggaggccgccatacctgctcttgctggggctgcactctggggtgggaagggaccaggcaggcagaggccgagtctgggccgggacatccttaaggcctgtggaggcaaaggcaggcagaaagcaagcgggaagatggaagatgtgcccatgccagccttggatctctcagcgtcacacacgacgcccaggaaggagtgaatgatgcacagatgaccagaaaccaggagaagaggccagtgacacaccagaccaggaggcccagctcatggggtcatcggacccaccttgaactctgaaggtcacacattcaaaagccacaggaagtctggagatggcagcagagagctgggaagctcagaggtgtcaggatgaacctggggctgaaggcggaacagttggagattgagacctgtgtataggttttggtcgacgtgggattgcttgtccctgggagccagaacgagggctccgagggctctagagggaacagtgtttgcaggcggaatggctgatgctcttccaaagccaaggaaggctcagagcattcccctcattcgaaggatcaacaattagagtgacgagatttctcaacaaaacgggagaagccagaagaccataaatggtttccaaaatatccaagaaagtcaattgccagtgtagactccgacagccagtggtactcccgtggccttcagaacgaggatgacatgcaggccagccactccagacccgagctgtgtcggcagtggagggtatttcagggggaag

SEQ ID NO: 40164 - DNA, 1856 bp, Artificial sequence
  DNA replication origin
aggccaagggaaaggagtgcagagatggggagagacaacgctggcaggaaccggcgtcccagcgacagggaggtcagaggctccctcgggaaccagcgtgggctgccccacatggcatcccaggaacagtggggtcagaggctcccgcgggaacccgtgtgggctgccccgcatggcatcccaggaacagtggggtcagaggctccctcaggaacctgtgtgggctgccccgcatggcatcccaggaacagtggggtcagaggctccctcgggaacccgcgtgggctgccccgcatggcatcccaggaacagtggggtcagaggctcccgcaggaaccggcacaggctgcacagcatggtgtcccatcgtcagtgcaattagaggttcccgtggtctcagcgccctggggagtggtggtagttctcactatattggacggtgaggttggagaggaatgcagagctaacactggtggagaggcaggagggcaggcaggacggcacacacacaggacgtttaaaacacacagagtagatccaaaagaaggcaaaacatgagagaaaaaggaatgcagaacacgtgggatgaatagaaactagggaataaacagtagatttaggtcccgatacatctacaggtgctgtaagtatgacgagggtagatacatccattgaaggacagacattgtcaatgggatatggctaaaccatgtgccgcttacaagagacgctccccgaacgtgagggctggagaggtcgaggcacccagaggctggtgtgggtttgggtgtgtgtggagtgtgtgtatgtgggtgtgctgagtgtgtgcagtgtgggggtgtgggtggagtgtggagtgtgtgcatgtgggtgtgtagtgtgggggtgtatagtgtgggtgtgtgtggagtgtgtgtggctgggttgggtgtatagtgtggaggtgtgagggggtgtgtggagtgtgcatatgtgggtgttgggtgtgtagtgggggtgtgtggagtgtatatgtgggtgtgtagtgggggtgtgaggggtgtggagtgtgcatatgtgggtgttgggtgtgtagtgtgtgagggggtgggggtgtgtggagtgtgtgtatgtgggtgttgggtgtgtggtgtggggtgtgtgtggagtgtggctatgggggtgctgggtgtgtagtgtgggggtgtggtttggtgtgttgcgtgtgtagtgtgggggtgtggtttggtgtgtgttgggtgtgtagggtgtggtttggtgtgtgttgggtgtgtagtgtgggggtgtggtttggtgtgttgggtgtgtagtgtgggggtgtggtttggtgtgtgtgtgttgggtgtgtagtgtgggggtgtggtttggtgtgtgttgggtgtgtagtgtgggggtgtggtttggtgtgtgtgtgttgggtgtgtagtgtgggggtgtggtttggtgtgttgggtgtgtagtgtgggggtgtggtttggtgtgtgtgtgttgggtgtgtagtgtgggggtgtggtttggtgtgtgttgggtgtgtagtgtgggggtgtggtttggtgtgttgggtgtgtagtgtgggggtgtggtttggtgtgtgtgtgttgggtgtgtagtgtgggggtgtgttttggtgtgtgtgtgttgggtgtgtagtgtgggggtgtggtttggtgtgtgtgtgttgggtgtgtagtgtgggggtgtggtttggtgtgtgttgggtgtggagtgtgggggtgtggtttggtgtgtgtgtgttgggtgtgtagtgtgggggtgtggtttggtgtgtgttgggtgtggagtgtgggggtgtggtttggtgtgtgtgtgtgtgtgtgcaaagtatatcctggagt

SEQ ID NO: 40165 - DNA, 2368 bp, Artificial sequence
  DNA replication origin
gtgctgggcagggagggcaacctgccgtggactgggagggctgggtgctgggcagggagggcaccctcctgtgggctgggagggccgggtgttggggagggagaggcgggtgctgggcagggagggcaccctcctgtgggctgggagggccgggtgttggggagggagaggtgggtgctgggcagggagggcaacctgctgtggactgggagggccgggtgctgggcagggagggcaccctcctgtgggctggcagggccgggtgctgggcagggagggcaccctgctgtggactgggagggccgggtgctgggcagggagcgtaccctggcacaggcttggaggggcaggtgctgggcagggagggcaccctcctgtgggctgggagggccaggtgctggggcgggagagtcgggtgctgggcagggagggcaccctggctcaggcccagccgcaggtcctgggtgaccctgctgctttcttccagctggaggcccggacaccactcccacgagggacggtaaggagccttttttctgttgagactggtgggtggtcaggacatgagggggtatgtgctgtcccctgtttgaggaacaacacgtggtcctttggagtcctggagctgaacatgtggctcaccatcagcccctgctgcagaaactggtgcaggacaccccactacctctgtctcagcgctggccccccagtacctccgtctcagctgctggcctcacgagggagcccctctcatccctcaactttcccagttgtgtctgccgctcattgccctcctcaaggtcaaaatccttggggccaaaatccacatcttgtgtctttgccttccctcacccaaagtgccagacacaagaatggatatctctaagagtggtgggtgactgggtgggtgaatcaatggggaggtggatggatggatgggtggatggagaggtgggtgagtggatacgtaggtagatggggaggtggatggatgagtagatggtggacaggtgggtgagtggatggatggtggtcaggcgggtgagtggacgggtgggtgggtggatggaaaggtgggtgagtggataggtaggtagctggggagatggatggatggtggacaggtgggtgagtgtatgaatgggtgggtggatagtgggtaagtgggtgagtggatggtggacaggtgggtgagtggatgggtaggtagatggggaggtggatgggtggttgctggacaggtgggtgagtggatagatgggcagatggatggtggacaagtgggtgagtggatgggtggatggatggtgggcagatggatggtggataggtagatgagtggatgaatgggtggatggatggtgggtaagtgggtgagtggatgggtggatggacaggtgggtgagtggatgggtgggtggatggatggtgggtaagtgggttagtggatgggtgggtggatggatgggtagaaatattttcgttttcctaagtgttgcgtccagctgctgtcggcccctccttgagtagaggtcatgattccttaattggctcaggagtgaggcctgatgtggagcagtgtcaggggctccacagcggcctgtctcctcacagggttcagcccagtctgctctcactcatttgctgattcattctttcattcagccagtcaatagtcatggcccctcctgtgtgccgggtggccatggatattgccctgggtaacacacagcctggccctgtggagcagacagtggggacagccatgtggacagggtgcaggtggatggcaatggcagctgggtcaggaggggctgagggccgtggggaaaggtgcagaatcaataggggcatccggactggggtgcaggcctgggggctgggatttctagggtggaggtcacctctgagggagacagagcaaggccctgggagattagaaggtcgaaggtcgccgtgttgaggtcaggggccctgaattggagccgcggcaaaggagagggcaggtcagggcacgtggtgagtgattgctgcggcttctgagcacggctgggtctgtggggcctgagcagaggtgacccgcgatccggcgccacggcaggcaggactccccacccttgctgctgcctacacccccagggcagccccagagtcgggggcgcagctccctgcttgccagttcagagcccagcccctctcacccagcccagaggaggacacagatggaggaggggcacccggagggtccccccgccgacaggccccacgtctcccacctgcaggacaatgaagtggccgccttgcagccccccgtggtgcagctgcacgacagcaacccctacccgcggcgggagcacccccaccccac

SEQ ID NO: 40166 - DNA, 1049 bp, Artificial sequence
  DNA replication origin
gggaaactgcagataggagcccgcccgcccgccttccctggctggggctctcagagctgctcacacggcactgggaacctaccaggtggggtgcctcaggacgtccttgccgtcaaaggagaagatgcgtgccccgggcttcagcggaccctcagagcctgagaacagagcctcccagctgggaaacagcagctcgtcctggaagagaaaccgtgtgtatgtgtgtgtggtgtgtgggggtgtggatgggtgtgggtgtttgtgggggggtgtgtggatgtggggtgtggatgtgtggggggggggtgtgttgtgtgtgtggggtgtggggggtgtttgggggtgtatgtggggtgttgtgggtgtgtgtttttttggggggtggggttctgcagcccctgggcatgtcctgccagggaacaagcgtgggggagccaggcctggccaggcagcctctgcagaccccaagaggccttggctaaggcaggggaccctgtcccctaacgccaggccacagccgcctgctcccagccctgggtctctgacccctctgctgttggttctggggaatgtgggtgctccccggggcacccagaagccacagcccagtgcacgaaaaggggccacagaataaagccacatgggtgctgtggcagaggggccaccagcccgcatggcactagaggcccaaaggacggttcctgattccaggcttgtatgtgagccctatcacctgtgtggacacttggtccagcagcatgggaccctctgaggggcactgccgggggagcggggggtcagggggccacgggggggcctcatgggatgccctgggggacgtggcagtgcccagggatgcagaggcctggcctgagcctggaggggtgtgacccacccggagcctgccctgaagtcgccagcctaggcgccagtgtctgtaacatggtggcctccagaggccctagaggggagctccccgctgggagttcaccccagaggtcaagtgggggccgaggagcccgcgccctcaggactggactgacccacct

SEQ ID NO: 40167 - DNA, 1403 bp, Artificial sequence
  DNA replication origin
ccacaggagttgtgagccctctagggcagggtgggagccgggaccctcaggtgtagctgagctgtgacattgctggtcatccttggtgctcttgcttttttgaaagatgctttttttttttttaactgacgtagaatgaagaactgcatgtggcttctctgtctctgtggaaaagccatctcaggttggcggcagacacattgtcatcagaggggagcagcggctctggtcctcggagctggttcctctctcccaccctaagggcagccctccatggtcctgtctgtccttctgaagtgtgtccatcctgacctgcgggtcctcagctgctcccacacttgtgccagcccggaggggactggtcccggtcaccgcggacgtgctggccttggtatgtgccaggcttgcctgggctgggcagccttgggggggctgcctttgtggtgggcgctggggaagtacgtcccagcggcctcagggtctaaggagcgctagtgccttgcccacaggtgcgggaccatctgatgtgatgtgaatactcttcccacatacattaaacacacttaagtgagtgtgcgcagggcttctgattcagggccggcctggcctgggggttgagggtcagcagtcagtgaggaggccaggagaggcgtcccagccttctcccgcctccagcccacgcagggccttggtgcccatgagctgagcacccccacaaccctagtcaacggccctatcctgtggggcctctgccacatctcagcggccccaggtgaatggctggctgctcagcacggagagctggggagagaatctctggctggggaggggctgctggagctgctggacccaggggtctcccgaggtggctcaggggagcaggcatcttggggtaccctgggttgaggcagaggctgcacgtggaagatggcccgagtcagtggatggtgccagtcagacagggccatggtcccaggtgcatccaggggctctgtcatggccaccctggggaccctgcttgggggggggtctgcaccagccatttcctgggctcgtagatctagcaggatgtgatgggtggaggtgggctgggcctgtgccatgggctagagcgtcactggggaggcccacaccgccatcagaatcctcctcccagcgcctccccaacctgagggcctgctccctccgcagcctgctcactgcacccactgcctgcctgcctctgagtcctgcactcacccgtccaccaggacagggatggctgtcaggatgtagtgttgctgggagcaagtcaggtcctgctgtgaggagagacctaagagtgttggtgtgtgtccacacacccgtgcatgcctgtgtacctgtgcacactatggatgctcctgcacacctgtgtacaactg

SEQ ID NO: 40168 - DNA, 1944 bp, Artificial sequence
  DNA replication origin
caggcggccctcgaggcaggggtcgtggggatgcactgagggccgcctgcaaagttaccacaggggcgcccgagagtcactggttcacattctgaacaccgtcgcttggaagacactgcaaacccagcttgctgacaccaggaggatggacagccagctggggacaagtctcatctgcagcctcagggcctgaggcttgggcggagcacagagtgcagggggaaggggttgtcactgggctcaggaattcagctgcctgcggggccggggcctgggccaggtatgggtcgctctgtctctgctccagggaggctggccccacagcccccaggctgtcttctggggaaagcggcgggctctgggctggctgcaggcctccgaggcccttgtcctgcacgctcagtgcctgtgctgccttctcctccgcggcactcctcaggccctgggccgggggctgccgcgggtggtggccccgctggcagtgccgcaggccatccagcatggcccccaagaagtagatgatggacaggatcaggaagtacacggagtataactggaactggaaagagaggccgggtgaggcgggtggggagggcctggctgggacactggcaccctacaccccgacgcctgctcccaggctcaccctcctccagctcagaggctgaccctgaacactgcacagcggtcagaggccagccccaggagcaggtgccacagtgctcaccacagcccccccgacctccaccacctggcacaggcctgaaggggggttcccaccatttcccaagaacccctcggaacctggcaggtggcctgcttctgcgtggcctgcggtgtctgctcccgagtcccctgcttggtggtgcttgctgcccccccatggtgctgagacagcggaagggtgcccatgagggccagaacgtcccgcctggcagagcagggtgaggagagccacagcaggtgaccaggagctgatccccagggcttcgcgcccagagcaacccccagcagcctgcacatggagcccgtctccatctcggcagcggaagctgtgctacgatgaccagaaggagcagcaccagcgttggccacatctctcctgattctcgcagctgccaggggcaggagggactggagatgtccctgggacaccagggagggacctgatcattcccggaggtgcagagggttcaggaggctgcagtgccctcaggacatccgtgggcagagcccagtgagtcccgcccaagacccctgaggccccagctccacatccgcaggccagaatccctgcagcccatcggcaccggcacccttccaggacagctgtttttaaagcaaactgaggaagatggggctgacacgcttctccctgctcttctcctacccaagacactgagataaacacctgggaagactctgaaagcaggagcgaggaggacagactgaccaggccctcggggtctggggagctgtgccacacaagggcagactggccgggccctcggggtctggggagctgtgccacgcaaggacagactgtgccacgcagagctccctgggggcttttcttttcacctcagatattttgaaactgaagaaggcagcaggctggaaaagacaacagatgcagaaaaaagagcccatggaagcagctctctctggcctaagacccagggaagggtcagcccaacatgaggaaagacctttcgacaggaatcgccctgctccccgcaaacaccagacctcggctccacccaccatgtcagcaaggaccccccaccctcgccagcctgtaacaaggacccccgagtcccctgcggggtggtgtcagacaacaccagtgggcactagagctttcactcccactggttggtaaagacacccaccctcacccccaaggagtcagcagagaccacagggaagcccaagatgtcaccc

SEQ ID NO: 40169 - DNA, 945 bp, Artificial sequence
  DNA replication origin
gactctgtgcgtgtgctcccctgtagctgccctgtggaggggacccctcacggtgggcttctaagggcccatgggggcttggtgcagggggtggagcagttcttccccagagagctggtcacgaggaagccctttcccttccttagctggtcctggtcctggtgtggccgtggaggctgtgggggagacagctctggggaggtggaggcaggttctggcctgtggttcctggctgcctcttgtcacatagaaaaaaaacacatggacttttctctggctggtttgatttctaggttaaaaagttaactagtggggcattttgctcatggctggacatcctgttgggtctagaggaggtggtgcgggctcatcttgcccccgtgcctgttactgggtgccgagtgtccactctctttcctccagcatggggagaacagctgggccaggagttcaggcttggtcgggggtagagtctggagacgggagggagccgtgatggagcatggggggacagacagggctagagcttgcctgggtttgcctgctttttaaattaagctttatatttgggtaatcttatattcacatgctgtttaataaataatacagggagatccatgtaccccgtacccagttttcacagtggtcacgtcttacagttctgtagcacatcacaaccagcatggcgacagtcaggatccagaacattctatccccacagggatccctcatgctgctctttatagccaaggcccaccctactcccagcctcacgtcctctttaacccctggcagccactaccctcttctccgcttgtatgagtttgtcatttcaggagtgttgtataaacacggctatgcattgtgtatcgtttagggattggctcttttcactcaacactgttctctgaacattcatccatgttgttactgtggctgtggctg

SEQ ID NO: 40170 - DNA, 2181 bp, Artificial sequence
  DNA replication origin
caaacagcagttttctgctttgcacgctgcggcaccgtgttggatttttttgcgatgggcatcaatgactttataactaaaacctttcaggcgttgtccccctggctgcagcaatgggacagcacaatggcagaggccctggccctttccacagtgctggcaggtcagtgggggggcccaagcaagatcacgctgggccttcacgagccagggacggcaagagcccagtgtgggcctcggggagcctggagaaggcggccacacaggagcagaaggggccccgagtatggcaggggcgggagagaagggtgggccgggctgcccatgccgggagactgctgcctgcatgtggggaggatggggaagtacagggccgggcacatccaggcaggatgctgcaggggtgaggccactgacacagagggcccaatgcaagggtcaggagggtgctctcagctcaaacaggctcgtgaccagcataaggcccagggggatgacccacggagggagggagatagggctcggaggccaccctggaggggaagcccaggaaggggtactgagctggggccaaagtcctcccagcgggcaggaaagagggggcaggtccagggagcaggaccctgtgagcacacagggtcagtgtctgagtgtgtcagtgtgtgtggtctgagtatgtggtgggagtgtgtcaatgtgtgggtgtctccatgtgtgagcgtgtgtccatgtgtgaacgtgtccatgtgtaaacgtgtggtgtgtccatgtgtgaacgtgtggtgtgtgtccatgtgtgagcatgtgttgtgtgtccgtgtggtgtgtgtccatctgagcgtgtagcatgtccatgtgtgctgtgtccatgtgtaagcatgtggtgtgttcatgtgagtgtggtgtatccatctgtgagtgtgtggtgtgtccatgtgagtgtgtggtgtgtctgtgtggtgtgtgtccatgtgtaagcatatggtgcattcatgtgagtgtggtgggtgtctgtgaacatgtggtgtgtccctgtgagtgtgtgtgtgtccgtgtgtagtgtgtgtccatgggtaagcatgtagtgtgttcatgtgagtgtggtgggtgtccgtgtgtgtggtgtgtgtccatgtgtaagtatgtgatgcattcatgtgagtgtagtgggtgtccatctgtgagcatgtggtgtgtgttcgtgtgtggtgtgtctgtgtggtgtatccatctgtgagcgtgtggtgtgttcatgtgagtgtgcattgtgtgtccgtgtgtgtgtggtgcgtccatgtgtagtgggtgtccatgtgtgatatatccatgtgtgaacatggtgtgtgtccgtgtgtgtggtgtgttcatgtgcgatatatccatgtgtgagtgtggtgtgtttgtccatgtgtgcacgtgtggtatgtgttcatgagtgtgtggtgagtgtccatctgtgcgcatgtggtgtgttcatgagtgtgtgtgtgtccatgtgtgagcgtgtggtgtgtgtgtggtgtgagtgcctggtgtgagtgtaagctgaggatgaactcacacaggtgcaagctcccgctcctgcctggatggggtctcagcagcccggggcctagagggtggggttgggagcagggcaaggctgtgagcccagcaggcttcagagaggagcgtggagggcctgggggagcagcaagacggcacaggaagggacgcccgaggtcccagggagaggcaagtggggaccctggtcagctccaggtggctggcggggccagcagtggcacagccgctggggcgcagcaggaaggtgggagcacccagcgaagcgcggggcttgatcctggcgcctgcccgcccccggcttcccacccttctggaactcacgtggcgatgggcacgaggaactggtaggagccgcggaacagcacgaaggccgcatagcacagccagatgctgctcgggtggcgcgtgtgcgccagaaggaagaccagccccgcctgcgtggccgtgacgcccgcgatgagcagcttggaccagcgcgcccagcggatcttcacgaagcccgcggcgaaggacgtgatggcgcctgagaggggagggatggggcgttgcagcggccctggggggccacggggcagggggaggtagcgggagcttctgaggaaaggtatccacggg

SEQ ID NO: 40171 - DNA, 1589 bp, Artificial sequence
  DNA replication origin
ctgcccgcccccggcttcccacccttctggaactcacgtggcgatgggcacgaggaactggtaggagccgcggaacagcacgaaggccgcatagcacagccagatgctgctcgggtggcgcgtgtgcgccagaaggaagaccagccccgcctgcgtggccgtgacgcccgcgatgagcagcttggaccagcgcgcccagcggatcttcacgaagcccgcggcgaaggacgtgatggcgcctgagaggggagggatggggcgttgcagcggccctggggggccacggggcagggggaggtagcgggagcttctgaggaaaggtatccacggggcagggggcggggacggggagcctccggggaaggatccacggggcagggggaggtggcagggagcctccgggggaaggatccacggggcagggggcggggagggggagcctccgggggaaggatccacggggcagggggcggggagggggagcctccgggggaaggatccacggggcagggggaggtggcggagagcctctgggggaaggtatccatggggcagggggcgggagagggagcctccgggggaaggatccacggggcaggcggaggtggacgggaagcctctgcgggaagaagcctcggggaccagggcatgcgtacccagcagcgtggaggcagcatctgccgcgccgttgtagacccgcgcactgttggtggtggggtccacctcgttccacaggatgtgcacgtagtagaccaccaggtagtagccggccgagttgaagacccaccagagggaccacaggcgcagctgcggccgccgcaggctgtcccccagctcccgcagcatccgcgccagcactgagtccccacaggccacccgcagggcgtgtcccagcttcccgcctgggccaggattcatgcgctccagctccgaagccgaggtttcgcaccgcccccggtcgtcgcggttgaagaagaggctgcgcttggggcgcttcaggaagagggcgaggaccacgctgaaggtgaggaaggccagcgagatgtagttgagcgtggagaaggagactcggcccacagtgaccagcagctggcccagcacggagctggtgaacacgcccagcagcaccgcagcgcgcgagtagccggccacacgctggtagcgcgcgggccgcacgagagagaagatgtaggaggaataggcgatgcgcgcggccatggtgacgctgtagaagagctccatgagctgcatgtgcgccaccgagtggcccagcagcagcagcagccacaccgacacgaagctgagcccctgcagcagcagcaccggcgtgtagcgcaggtagtcggtgagcaggaacacgggcaccagcacggccaggtaggagtacgacagcaccggcgtgatctcgttcgtgacctgcggacaggcgggcgtgcgccccaccaggtgttagcaatgctgccgctgcggcagacacagcccgcccgaggtgatggctgctgacggcttcctgccccaacactgcctggtgggacccctctccccaacacgcccctgtcccatgtcccactgcatcgtcctctctgaac

SEQ ID NO: 40172 - DNA, 920 bp, Artificial sequence
  DNA replication origin
cagagtccagcagggccctgctggctcatctggtaccaacctccagtggatctgaggtggggtctggtggggcctgtgggcggggccacctgctgaaaatgcacctgggccccaggggaggctccaagcatagggtggctcccacatcagtccccagggaggggcaaggcaagcggcttggcctcacaggggtggggcctcttcctctggactgtgcccaggtgtgcccaggtgtgcccacagcagccctggcccctgccaagacagctgaggacgtttggtgcctgcctgtagtagtctggggcagtgtcctctgaccttgtcctgtaggaggtagcacccccagccccgtgcccagctccacgttcccatggaaggtggatgtgtgttgaggccacaggcatggaagccaggcctggagtgtccaccagcagctcagtggccaaggctgtggagctgggttcccacataacatgtgatggaggaggtgggggtgggcaggctgacagcctgtgctccccctcctgggagggtgcagggcggctacaggggcgtttgcccccctccctgctcctgggttggagtctggccttaaagaccttgctctggggacaagtgtgagatgggagtgcacagcccagggccctctgccctaccccacttcctctctttccccttcttccccttcctgtctttcttcccctgccgggttcccccacgaacagtccctcccacgaacctgctgtccctgatcctgcccttcctttctgtgtcttctgtttttgtctctctccaggaaggatggaagaagcttgtgctggtgtgaatgtgtatgggttacagctgtgttttccatattgtttaaaatgaaataaaaccatgttttgattctattaaaaatagagaagctggctgggtgt

SEQ ID NO: 40173 - DNA, 1854 bp, Artificial sequence
  DNA replication origin
ggcctgagcaggatggtgccctccagcccagcggtggagaagcaggtgcccgtggaacctgggcctgaccccgagctccggtcctggcggcacctcgtgtgctacctttgcttctacggcttcatggcgcagatacggccaggggagagcttcatcaccccctacctcctggggcccgacaagaacttcacgcgggagcaggcatgtgggtgccggggtgccgggcggccgcctgtgggtgggtgggcggggagcagcgtctggaataggcacgtgggcgccgggatgcgggggcggccgccagtgggtgggcagggagcagcttctggaataggcacgtgggcgctgggtgccagggcggctgcctgtgggtgggcggggagcagcttctggaataggcacgtgggtgccggggtgccgggcggccgcctgtgggtgggcggggagcagcttctggaataggcatgtgggcaccggggtgctgggcggccgcctgtgggtgggcggggagcagcttctggaataggcacgtgggtgctgggtgccagggcggccgcctatgggtgggcggggagcagcttcaggggccagggcgcttttcctgttggatgtgtgagcacttgaggctggagcgggtgagtggccgtgtcagctgataatatggtcctggagggaacccggctggggtctcacactcccagcagcgggcaccatcagatggaggggcctggcttcggcctagtaaccaggctagataaaaagtgatattgtgtcctgcagagagagagcctgccccaccccacccgccaggccgtgctcatcggccctcctggtgaggaagcccacgtccaaccctgctgggcacctgccttccacagagacttagtggctatttacctaaagagattattgaaggaattttcattttactcagccatgaggacaaagggtcttattgaaactgttctaataggcttatgcccagtcacgggtctctcaggtcacatgagcggtggaggcgggagcggccgtatccgaagcagtttcctcctggagctgtggggtccttgtccataaggcacatctgcacaggaagagcctggaaaagcgctctcacaggctgccggcccagctggtcaccccgacaccccatcccagggccctgggcctgctcacctgcccatcccagccgctgaccccgtcctctgctcccacatggctgacgctcggcatgcctcttgttccctgtgtctcctggccggaagccggaccccaaccctcccagaccctagaattgtgaaactgatgtgcagctgaggagtgtgctattgggacagtggaggtgctgcccttcccgcgtgcccagctcagagcaccgtgcggtgtgattgtgtctcgtcccacggccagcactgctaaccgccaggctgggtcactttctaggcgaggacagggtcttgccctggctccggctgtcggtggcggggctggggctggagcggcggagccatctccttgacccctcatgaaatgccttctgctcctggccagtccgtccctctccctgccacccactgaccagatggcatctctgctcttagtggagggccactgtccaccgccaaggttatttataggggtgagcattatgtgtggcgtttcccttaaaataacaaaataagaaaagtctctagagcaaaaatgtttaaatcccatctgcctgccctctcatgttgtacattaacggattaaaaagtagattccagaaattaagccattccaccaggccttggatatcatcagagggacgatgggtgcaggtgctctgcgcacctgccacttggtggggccccc

SEQ ID NO: 40174 - DNA, 1084 bp, Artificial sequence
  DNA replication origin
aaacgccaccctggagacgaatgcagaccccagacccatcctcaccccgtagcaccaaactgggagccacccacacctgagctgctccggagtcccccaggccaggctgtcaccacctccagggtctccgaggctgagggaagtctccagccacatggagtgatttaagtgccaatcaaaaccaagttaattaactaattgacttactttattaactaaactaacaaaatttagggtttggggccacactagactcatggcactgctgggcagtacctgtggcggtcagggggcacacctcaccccacaggcctgagggcagcccacgtgcctgctgctgctctagcggcacccaggtggcccagggagggcacaggcaggaacggacgctgctggaggccggggtcacaccacaggtggccagcggcgggtggctgcaggtaccagcctcaggtccccatcagccgcgtgccctggcaggagggcgtgcaggccaagcccacagtgagggaagggcagagggaaaagcaggtgtccttgagggggctgagagcagccagggttgaaacacgcgtgggagggaggatgggatggagccgaggcccagcccctgagcccagggaccccagcatccccggcggcaggttaccctagacgaaagcagctggcaggagccatgagtggacctgacacgttccagatggagcaccccagaccacaggacttcatccacgaggcaacatgcacccaaccttggggaccatcccgccagcacccccgccccacacggccagggcacgtggtggagcagcagcagcacgaagcacactcgagggcgtgtctctttcagtcctgattctgcccaggagaaaggctcctccggtgcgggcaagggcacgtctcaccaccacaaatcgtgcctttcagctgcggggcaaaagcctgtccacttatcagaatcatgtctccaggtgccacgtggccctggttttccattaaggcctcggtgtaaagttctccttcaagtaagtcaaaagtgaactgccataaacaagtgtgtcagacgcccacaccaagccaaccc

SEQ ID NO: 40175 - DNA, 1182 bp, Artificial sequence
  DNA replication origin
gaagctttgtaggtgcaacttccccttggagcagctgtgggtgcggatccagcggagcaatcccgaggcgtctcagagagagcctggacagccgctggagcctttcccgagtgggtccttccaacaccgctacagcaggaaagccatccccctagggtcctgtccatcggaaactcctgtcctggggagtctggcctgcctggcctcaggacacaggccaactaagctggccccgaaatccagaatgcatccagagggaaggtgggataaagtccttggaggcgcctgttggccgccctgtaaagaggtggcctccccctacggagacccgaggatccccgcacagcccagattcaatcagcagagccgaggtgcctctggcccagtgcacctgcctgccctgtccaggcctgggagccaggctgcatctcactggccgcctttgcctgggtgccacctgtgcactgcttgttgcaattgctaattgctttctttccgaaggggctttggtggatttttataattccagatagtacagttatctctgctggacacagatgagaaagagtgcttctcgggtgtttgggcctgcagcagtgatagccggagggtctaattatgctgttaggaaccctgaacttggtcatctgaacaggggtgggagggtgtgcaatgctttcttcttcttctttttaaactagcaggcgttctaaaaaacataacgaacattcttggttagccttccagagtaggagctggtttaaacacggaatgataggtggcgtttgcttgtgttttgattgcgggtctctggccttctctggtgcttggaaggacagggcctgggtggggctggtcactgtggacagtggggccggggatttgcaggggctgttacaaccttctcctgaaggcagggattctctctgcttccccgtggccctcctgtctggtcggggacttccttcagatgccgggaagaggcctcaagctgtatgggactgggctggggtctggacacttggagtctaggcgtcccctggcttggggctgcgtttctatgatggtgaccaagttccctatctttcctcttggaggtggtctgggccgtgatggccaagcctctgtcagtgggctacgttcacggcacataagttgagtatgctggcagcagaggctgac

SEQ ID NO: 40176 - DNA, 1137 bp, Artificial sequence
  DNA replication origin
gcgcccgccgcgccgccttgtgggcgctgtagtcccggagtccgcgtgcgcggggccgggtccgggagccccagggcagccgccccgccgagtcgcaggtaccggtggggaacggggccacggggccgcgtgtcgggggctgcggggtgtctcggggccctggggtgagtgcggggcgcgggccgaggtttgcagggccctgtgaggtgagtgtgggggctggcgctggggtccgcggggccctggggagggtgcggggcgtgggccggggtctgcggtctgcagcctggggtccgcggggccctggggagggtgcggggcgtgggccggggtctgcggtctgcagcctggggtctggggggccctggggagggtgcggggcgtggccggggtctgcggtctgcagcctggggtctggggggccctggggagggtgcggggcgtgggccggggtctccgcgggggtcgcggtggcccgggcgcctggcagaaccgttgctgtgcagcgggtttcccgccgctcgctttccgccgcagcctgcgaatggggtggggagtcccggcccccagcctgccctccgcgtcatcctggggcgccaagtcccacccccgggtctggaggaaagcgtggatccggcgttcgcgcccaggcacgtgttgcttcgggacgggccagccggtgggtgaaccctgccagccacgcgtggggcgggcccctggcacatctccagaccattgtctcctgtgccagaagctttgtaggtgcaacttccccttggagcagctgtgggtgcggatccagcggagcaatcccgaggcgtctcagagagagcctggacagccgctggagcctttcccgagtgggtccttccaacaccgctacagcaggaaagccatccccctagggtcctgtccatcggaaactcctgtcctggggagtctggcctgcctggcctcaggacacaggccaactaagctggccccgaaatccagaatgcatccagagggaaggtgggataaagtccttggaggcgcctgttggccgccctgtaaagaggtggcctccccctacggagacccgaggatccccgcacagcccagattcaatcagcagagccgaggtgcctctggcccagt

SEQ ID NO: 40177 - DNA, 1261 bp, Artificial sequence
  DNA replication origin
cattcctggccgcaagctggatccgggacgcgggtcgggcccacgcgccctcaggggtggccctgggccgccttcgtggggctccaacagggacacgcacagcctgctcttggggaccgcacggccccgaactcggcgcccccgggaccccgccgcccgccctcctgcctgaccgtgacccgtacgggcttgtaccaaggagcaagccggatccaggacgtggcccggggccaccagtccccatcccagcagggacagcccgggggagacccgcgcaggcctcgcagacggcagcgcagtcacactcaggaaggggggcctgggccactctcccaggaaggcgtggggctgcggcagacagcaccgccgaaagcccaaggcctgtgcaggacacggggagaagtggggggcctcagggtcactttcccctggagttacccagggcctggctatggggagggaagccaagccgagggctgtgggggccccaaggctaaggaggagccaggaagtccactgcacagaacagaaggggacggccaccgtggtacccacagctcaagagtgcgggtcccaggcgaggggtgagtctggggcagcagcccctggaatgtaccccttccggagtgtagacagcacaatccgcgacctgcctcctggtgttgcgggggtgctcttggtctcccgcccaccagcagggcaaccccaccaggaagccaacacagggcccttgccctaaatggccgcctgcccaaagctctggcctgggccttctttccagagtcctgagtgtagcaagccacacgaacaaatctcaaaggaacttaaaaaggatttgttggctggaaatgggggatctggggtagcttgcagaatttaagggaacactacaggatggagcgcctcacctggagggaccccctgctttgtgggagccctggctctctcccctgtactggccttctccacgggtgggcagaacctggccctgctggaagacaggaggggcaacgcggaggaggaggggcccttccttccctccaggcagagaggagccagccatggggccagctcgccagggcagcctgctccctttacacgcaggacaggccaggaagccgaggggaagtggggatgaacagcagcggggctcctagaccccttcccacagaaggatggctcccacccccttcccgcctggagacagcaaggcagggagccacagccccaaggggaccccgcaggacccacaaagaccagt

SEQ ID NO: 40178 - DNA, 1054 bp, Artificial sequence
  DNA replication origin
tgagcaggtgcctgtggtggaggctcggggtcagtggaattgttctgtgtctgatgggggtagaggttaatggttgtgttcatctgtcagacatgtttaacaactgcttctaatgggtgcaatttatggcatgtgaattgcacctcgataaaattgttttttaaaagcctgcactgctggaagtgggggaaaggcctggaagcaagtcgaatgctccaagccctctcgtgtctcttgggagacaatccaggcctcagttggttacaagggagaacccagaacagcctcagcctcgggagaaaagggcagtgatgtggcaggggaggggcagggggacaggtagtgggtggtggggagggggacaggtggtgggggaggggcagggggagaggtggtgggtggtggggagggggataggtggtgggggaggggcaggggacaggtggttggtggtggggagggggacacttggcggattgtggggaggaggacaggtggggggtggtggacggtggggaggggacagctgggcgcacactgtggctcttggttgcagatggggtacaggtccagtatgctccagccacgtaggtctccatgtgacctccttcacatcttgtccccacagagaccctcatctctgccccttcttagccccagggcagccctcccaggctgcagagccccgaactctctggcatcttgggaactgtctctccccggccaggctggcacatgcggatgttgcagcattggccaaaagtggacagtgggggtcagtgtggggtaccgcccaccccatcccagcccctcctgggctgctgtgcatcctgctcctgcccacccagcccaggctggcacctcctcctggtctctcccacaccccatgcaccgccctggtcacttctgtggtttggggtgtttccctcctggggaggcgcctcctgcctgatgagacctctgagccccaaagggtcacatgagactgtgtccccaggtggcagctgttggttctctccagcccccacagacacctcaggccctcgtatgccag

SEQ ID NO: 40179 - DNA, 915 bp, Artificial sequence
  DNA replication origin
tagcagttaactcagaaactagaacaggaaaggaacaacaaagtcaacaggaaaaagaaaaaataatgagaaaagcagaaattaattaattggaaagcaattaaaacttgattttttttgtttttttcctttgagatggagtctcgctcttgtcgcccaggctggagtgcagtgtctcggctcactgcaacctccacctcccgggttcaagctattctcctgcctcagcctcttaagtaaaacttgagtttttagatccaaaaggtagttccttgaaagaaaataagaggaacagagagtgcaaccaacccaggcgtagctgggactgtgaagaacaggaaagggactaagacaagggggaaggtagaggaggaagtgggtgttgtggggaggagaatggaggcgggggccagtgctgggaaggttgaggagggtgggggaagggttgtggggaggcggggggagggtggggggcggtggtgggagggaaggggacagaaaggcggaggagaggggaggaaggcagaggagggaggcagggaggggagatgggtgtggaggtaagggaggttgagaaggtggaggagaggagaggggtctgcagactgcacgcccctgcactactgcgtgtgaaaattgagagggaacgccagtcatccaggaacacatgaatactgaaacattcagaagaagacgacgaaatctgcatgcaacaaaaccacggaagcccggggcctgcaaggccaagcctcccggcggggctgctgtgatcctgaaccgtgaatggagagctggctgtggtctccccttggctgggagaactgagctccatcctgcccaaatctccctgtttatttcatgcagttccattctggatctaataagaccgtgtagtcaaggaaattccagctggag

SEQ ID NO: 40180 - DNA, 969 bp, Artificial sequence
  DNA replication origin
ctgtttcaggtgcgttcctcagagcatggggtggaatttgcttttctacaaaaggtgtctgcccgagtgtctgacccactgtctcgccgctccatggggctggctgtgtggtggggactgacggcctcctcaggaggagacagtgatgaccccagggagtgggtgaggccactgtcagaccagagagatctgcgatgggccaaagaagaggctgggctgctgctgctgcatctgtgtctgcccaggggagctacatcctggcctcaggacctccctcccagcctgagcagcaggggtcaggctggtccagctctcaggagtgtcccagggaaagaacaaaactgccctcctgtccactccagggagacccacaggctgtgccaccagcaggcagtgtggacatcggtggctgttgggtcgggggccccagggagagcccctggggagagcgacacccacccggaggctcaggccaggccaggaccgcagccctcgaatgtgcagagaccccgggtcctacccaggcccgggtctcgggaccacgtggaggagggattagcgcgtgctataatccgcagtcaccagcagagcagacagcctctcgcccagaacagggcacccgggacagccccagccccagcagagaggggctggtctcagcgaagtggagcgggtcttagtgggttggggccagtctcatcctggccctgggtgtgtcccagacccctaatgcggagcctgcaggtcattcctggcccatgagtctgacctgacacgggagtctctgggctggtccgcccgtccaccctgtccctgcgtttgtgctgataggaggacactgctcaaaacacacgacggctgtgtgctataatccacggtcaccagcagagcagacggcctctcgcccagaacagggcacccagggcagtgccagccccagctctccgtggcgccccccatgtgctcact

SEQ ID NO: 40181 - DNA, 1681 bp, Artificial sequence
  DNA replication origin
ctggtgtattgtgtgtgtgttaccgagaattctgtgttcggatggattttttaaccgacaagatccacagagccagagctctgaaccagcaatctgggttcttgtgacagtgagcaaagaactgcaaacaccaaaatgtaagcttaaaacaaggttgattgaaatttccagtaatactgtctcagagggtgtgcaggctgatttctgagaagtgacatcagcacctggttacagagctcaaggtgcttctgtggggtgtgagaagtagctgaggtttgggctgagtgacaggctgatgtcatttggcagcttatggtgacacagctaaaattaaactgtgcatatttttacccataattcattaagaaaagcccagtgtgggggggccacatgtaaatgttattacagttttaggtcactgggcacatgctgctctagggatttctacctgtgccctggtttccccttccacaggacatgctggccacaggtttcacttcaaactccgtccctcatggtggagttagggcgggctcggggctgaacttaggtgggccaggggcttaatgacagcttctctgttctcctttttaccctctcccagctgctgatgtgtgtctaactacctaacacgtctatgtggtgtgtttttttgtgtgtgggtggtgtgcatggtatgtgtgtctatgtggagtgttttgtgtgtgtggtttgtgtgtgatttgtgtgtcgacatggagtgttttgtgtgtgtgtggtgtgcgtggtgtgtgtgcctatgtggcatgttgtgtgtgtgtggtttgtgcgtgagttgtgtgtcgatgtggagtgttttgtgtgtgtggtgtgcgtgttgtgtgtgtctatgtggcctgttgtgtgtgtggctggtgcgtgatttgtgcatatggtgtgttgtgtgtatgtatgtgtgcgtggtttgtgtgtctatgtggagtgtgggtgtggtatgcatggtgtgtatgtggtgtgttgtgggtatgtatgcgtgtgtgtggtttgtgcatagtgtgcatggtttgtgtgtctatgaggtgtgtgtgtgtggtttgtgtgtggtgtatctatgtggcatcttgtatgtgtgtggtgtgtgtctctatgtgatgtgttttgtgtgtgtggtgtgatggtgtgtctatgtggcgtggtgtatctgtgtatctgtgtgtatgtctgtggagtgttgcatgtgtgtgtggtttgtgcatggtgtgtgtctatgtgtagtatgtatctctgtgtgtgtgtccatatggagtgttgtgtgtacctgtgtatgtgtgtgtgtgcctatgcggagtggtatgtatctgtgtgtgtgtcttatgtggagtggtgtgtatctatgtgtgtgtctatgtggagtgttgtgtgtgtctatgtggagtgtgtgtgggtgtccatatggagtgttatgtgtatctgtgtgtgtgtgtgtgtccatatggagtgttgtgtgtatctctgtgtgtgtgcccacgcatgcaagggtttctcgggcagggcctgggaggcgcgtcccaggcttggtgcgcatctgccccggggtccccacgcggccgggccctataacgacctggaaatgctccagcgcctcttgcgcgggcgggacaccggaatttcctaaatttcaagccgggcgccgtcccctgcg

SEQ ID NO: 40182 - DNA, 767 bp, Artificial sequence
  DNA replication origin
gtgagtcacctctgatgttctcacaacagcaaaaccgcctaccgatgcatctctcagaaagtctccctgtcgttaagtgacgcatgactgtagcactcagcaacaaaaagggaggaagtactgacgtgtggacttcaggataattctgccaaacgaaagatgtcagatgaaaaagtctacacagtataatcccgtgtatccagaatcctacagcaaactcaccaacagtggcaggaagcagacctgcgcttgctgtagatgcaggacaggtaggagggaggaaggagaggacagagggaggagaggacagaggcaggagggaggggaggagggaggggagaagggaggtgaaagggaggagggaggggaaaatggaggagaaagggaggagggaggggaggagggatgagaaagggaggacagagggaggggaggagggaggggaggggaaggaagggggaggagagaggggagggagggaccacgagaggtgggagggaacgctgagagccacagagatgggttcgggtgtcgtgtcaaaactcaacacgctgtgcactttaaacacgggcagctttaactacatgtaattgtgtatcaattatgcctcactgaagctggaggaaaaaacagaagacaatggaaaagtcagagtaaagagaattcacttacgaaatgccaaccgtttaaaaatactccacaccgaacatgatgagccttttccattattaatgcctcagggagaaatcaaagtccgagccgcagct

SEQ ID NO: 40183 - DNA, 2553 bp, Artificial sequence
  DNA replication origin
gctggtgggactgagaagaacgccgtgctgccgttccggccacgccggtgaagcgcttccggtctccctgctggtgggactgaggagaacgccgtgctgccgttccggccacaccagagaagtgcttctggtccccgtgctggtggggattgaggagaacacgggtacagctccacagctacctttcccgggccagaggctgggcggatctgccccagggaagaccccacatctgctgcggcggctgcagtccggctccttgaggctggtttcctgtcccctccttcccactacgtccccttcccaccaaagcagtgacatcagctccatctagtttgaaaacagaggctggtttgagggctggagccaattagttatcacattaaaatgtgtgctatccctggggaacttcttgcaaggtttcacttcttttcttttttcaaagaatcgcactcttgttggcggggaccagcagaagacggagacgtttttccataaccggctgctgctgtgggagccgtgggctgggaatgcagccgagtctcctctggggcatgtgggtctccgaggctggagttctcagacggtgtgtgtgcatgtgtatgtgctgtggaatctgtgtggagtgtgtatgtgtgtgatgtgcttctgtgtgatgtatgtgtgtgtggtgtgtgtgtatgtatgtgtgaggtatgtgtgttgcgtgtgatatgtatatgtgtgatgtatgtttgtatgtgatgtatgtgtgtggtgtgtatgcatgtgtggtgtgtgtatgtgtgtgtgatgtgtatgtgtgtatggtgtacgtgtgtgtgtagtatatgtgtgtttgtgatatgtatttgtgtgatgtttgtgtatgatgtgtgtgatatgtatgtgatatgtatgtctgtgatgtgtttgtgtgtgatgtatgtatggtgtgtatatgtgtgatgtatgtgtggtatgtgatgtatgtgtgtgatgtgtggtgtgtatgtgtgtgatatgtgtgtggtgtgtgtactatgtgcgtatgtgtgtgctatgtgtatgtgtggtgtgtctaattcatagtatgtgtatgtgtgtgtggtgtgtgtgatatgtgtgtgatgtgtttgcatgtaatgtgtggggtatgtgatatacatgtatgtgtgtggcatgtgtgatatgtgcttgtgcatgtgtgcagtgtgtggtgtgtgtgtatgtgaatgtgtgtggcgtgtatgtgtgtggtaaacaggtgtatgtgtgtgatgtatgtacacatgatatgtgtatgtgtgtatgtgtattcatatgatgtgtgtggtgtgtgtgaatgtgtgtgatatgtgtgtgatgtgtatgtgtatatgtgtggtgcgtgtgcatgtgatatgtgtatatgtgtgatgtgtgtggtgtgcatatgtgtgatatgtgtaaatgtgtgatgtgtatttggtgtgtgcatgtggtgtgtgaatgtgtgtgatgcgtggtgtggtgtgtgaatgtgtgcgatgtgtatgtggtgtgtgtgatatgtgtatgtgtggggtggtgtgtgtgtgatgtgtgtgtggtgtgtgtgatgtgtgtgtgacgtctgtgtggtgtgtgtgtgatgtgtgtggtggtgtgtgtgtggtgtgtgtgatatgtgtatgtgtgtggtgtggtgtgtgtgatatgtgtatatgtgtgacgtgtgtgtggtgtggtgcatgtgatatgtgtatgtgatgtgtgtggtgtgtgtgtgatgtgtggtgtgtgtgtgtgtgatatgtgtatgtgtgtgatgtgtgtggtgtgtgatgtgtgtgtggtggcatgtgtgtggtgtgtgtgtgatgtgtgtggtggcgtgtgtggtgtgtgtgatgtgtgtgtggtgtggtgcatgtgatatgtgtatgtgtgtggtgtgtgtgtgatgtgtgtggtggtgtgtgtgtggtgtggtgcatgtgatatgtgtatgtgtgtgttgtgtgtggtgtgtgtgtgatgtgtgtgtggtgtgtgtgtgatgtgtgtggtctgtgtgatgtgtgtgtgatgtgtgtggtgtgtatgtgatgtgtgtgtgatgtgtgtgtggtggtgtgtgtgatgtgtgtggtgtgtgtgtggtgtgatgtgtgtgtggtggtgtgtgttgatgtgtgtgtggtggtgtgcgtggtgtgatgtgtgtgtgatatgtgtatgtgtgtgatgtgtgtagtggtgtggtgtggtgtgtgatatgtgtgtgtgatgtgtgtggtggtggtgtggtgtgtgatatgtgtatgtgtgtgatgtgtgtggttgtgtgtgtggcatgatgtgtgtgtggtgtggtgtgtgatatgtgtatgtatgtggtgtgtgtgtggtgtgtgtgtgatgtgtgtgtgcgatgtgcgtgtggtgtgcatttgtttgggggagggctgtgcatttctgctctcagcttggcccccagcagccagcagggactgctctcctctgggcccccacacacacgcagtggcgccccagctccacacctctttcctgcattcacgctgccccctc

SEQ ID NO: 40184 - DNA, 1519 bp, Artificial sequence
  DNA replication origin
gtgcatggcttgaatccagcttaccaacattgataactttttgtgcctatgacagggacagatgtcactgccagcccctcatgtcggcagagcaggcactccccatcctctctgtgttcattctatgctggggaagggggctggacactgaaggagtggccgggatgcagaagcagtgcagagtgtgcttctgggagacacccggaaatcagggcagctgtggggcacagggcaagggttaccttgccagccccgaagaggagaggtggctgcagccccacctacaccagatgcctctctccgtccgtcctgggtgtctctttccatgctccactcatgcccactgcccttccagatcacatttccaggaagtgccctgttctgggtgtcaccatcacccaagctgggggcaccttgcaagccttctggccatggcttgctgtctctctgcagggtcccaggcccaggccaggggccagtcaggcagtgccgcatgtgggagctgcctcttcagcagggggacaggggagagggcatgaggggacccctgagctgcttcacctaatccaagtacaaacaccacagcaccaggtaagttaggtcaggtgcacttatgatgaggctgatataaaaaggaggaagcggaagtgggaactatttttagtttctgtatttccctaaccagggcagctggcacagggattggcttcttggtctctgatttccactccagcactttggccatcagaggatcctgtgtgagctcagctgagccagccccaacaccccccagcagcttttggtgggcagtggcagcggtccctgtgcagggcaggagcctggggaagcaggggctgggtgctgctggtccctggaagaaggacttctaccccagtgctttgtgaagaggacatgagggcaaagtactaatttgcccctaggtaacatgtgtgctggggttgtaggctgaggtaagggtatgaattctgcctgaggaaaggctcagcctggagtgtagtcctgctgaaggccagagaccacacactccacccagactccggatctccctccccagcagggggatggaggccctgccgctgggagtgctggtgttatgtggaagggctgggcttctccagggctcctgggaggcctaaacatcttgcaaggttttgacgttaattactattatgattgctttctgtgtgttactgttttccccacactttagccagctaatgtggagctacagaaggccctcgcccctacccctccagatgtcccagcccatgacaagcaggaaggccgggtgctgggagacttcctggggctggatctgacatcattccaagcagatgataacctgccttcccgatttccaaacccacagcaagacaccctggagttatttataaatgcgagcccctgggtgcacttctgacgggaccagcaccctgacggccatgagagggtggagacagcgcaccccgagctcagggaggcaggaaactctggacct

SEQ ID NO: 40185 - DNA, 1149 bp, Artificial sequence
  DNA replication origin
tctgggctggctccgggctgttccgctccgcgccgttttcccggtacttcccgcggagcccgcctcgctgtgcgtccccgcccgggcgtttcttccgcggcgctgagcgcccgccccggcctcgggcaagggcagccggacgccccgaggaccagggcgctggggccgaggcgcgtcctccgcagtcgccgcgcctgggccccgtttccccgcgggtcctcgccggggtgggaggcgcctcttggcgtccgtggggagctgggtgtggggggcggcagggcaggaggtgggggggctgagccggagaaacgtcctcgccccgcccgagacctcagacaccccagaacctcgggccggcagccagctgcaggaatcgcgccctaaagcctggggtccgcgcccgcccgcctcccgcgagcgccaggggctgccgggtcaccgggatgcagcctcgaggcgacgtcacagaccccacgcggccccccgagcacccccggagccggcgcggggacaggggttcgggatggacggaacccacgcagggaacgttccgggccgtctacgccaggctcagggcggccgtcagctggggttggaggtgggtcaggaagagatgtgtccttttgtctccaaatgtcgcttgtgtcattaaaagacaaccttaaaatagaagaaaaaaaaaaaaaaaaagcctgggctggcgtgaggaggggccgtccgcgagctacggaggctgagtcggcggggaagggaatgtggagtggggcggggggggcgcttggcgaacccgtgctttggacgcgcttggcggtttcggggagaatgagaatggaggggagggaggccaaggcctgcagcctggtgggaatgctgggaaggacgctgtggacaggaccttactggaaatgaaccagaagggaaggtgggccgggcgcggtggctcgccccttaatcccaacgctttgggaggccgaggcagaaggatcgcttgagcccaggcgttggagacccgcatgggaaacatcgtgagactctgtttttagaaaaggaggaggagaagggatactgggcggcctctgccacacctggactctgcgggcagggggccagagggacccagggctgctgtgctggagctggagctggcgc

SEQ ID NO: 40186 - DNA, 1205 bp, Artificial sequence
  DNA replication origin
cccagtccccgacggaggccgagtgacggggcgaccccgggccgcggcaaacttcgcccgagccggggcgggcgggggtcccgggctgggtcgcgccgtccccgaccgccgccggcgcctgcggcggcccggggcagcgaggggactcgcgctccctcaaggtgcggtcgccaggcctggcccgcccgcctccgccccctccccaaattcggaagttgcggcgggaagccgagaacgtctcggatgtgggtcagaaaacgtctggactacttgaggcttcagtttcaaaacggcacaaatttcatctcttgattgagaagagatctggggaacaccccggagcggccgcggcggctggagggcggcggggcggggcgcggggcctcctccccctggacggccgccgggagagcgcggcctcacccctcggtgaccctgcggagagccgcgcgcgggcggtggggcgcgcgcaggtctctcttgttgctcgctgtgttttattttaattttgggggtggttagaacgtgtttcttattgtccccacacgtgttctaattggaagtcttgtttcgtgaaagagtttttttcttttttttgcctggtgatgttttccaattccctccgcgccactctgaagtatattactggcataagaaatttgaaagttaaccaaaagtcgggtcctaaatctcgtggctcggggttggttatcttccaccgtccttcagagcagcctggatttgcaggtcttgttagccctccatgtgagccagtagcactcttagttgttgagtgtttgtagagtgggattcgccagaaggaatcttgagcagcagggccttgcggagaggcctttagagattagactgggcaacttatagactccccccatttcaaaaatattcctctggcacaggccctcacatatccctctgaaattgaactcactttcaggggcaaactgttgccctttttcttttctttggactttctcagatgtggatcccaaaggagtgtgcaagggtgcttccctatttaagagaactaactcccagtcctcctcatattcaagaataattcatcatcttaaagcgtgtcagagatacctattttggccccaaaaggagtgtttgtagaacagtggcactctaaagggatcatttgcaagatctgaaaggacctaattgatcatcacacgacagaa

SEQ ID NO: 40187 - DNA, 1423 bp, Artificial sequence
  DNA replication origin
cttccacctgctgcctgcgcttgggaagtgccctgacctctgagcagatgacctctgagcagatgacctctgagcagatggtttctgatggtggttttttttctgattaattgaattacaagtatcctgtggtaggtacagggttttccctttcccttgtccaataaatcttaacttcattctgtgatttttagaaaaggaagaatgcccacagatgtggaggcacagatgccctgggcctcgcagcaagcttatccttaacaacccattctccttcaggccctgccacttagggagaagactgtgggggcagtgcctgcctgtcctctctccattaagcctctgctgggggcctgcctccacagtgctcttcccggtctcagagtggcaggggacacacaggcagggttcttaccaccatggagcttatttctggtgggtggagggagggcccacaaccaaagaaagtgacttacaaacacagcaggcacatgctacatggagagcagggaggctgagcaggagtggctgaggggctgcctggagggtgggcaagggaggactttcggaggaggaggtgttggaactgggtggcaggggggagccaggcatgtgtctaggcaggaggcgtgcatggagcaaagacctgatggaggaaaggaaggggtggggggcagctggggtgaggaagccagtgcaggagatgaggtcaggagagcaggccccctctaggaggtcaggtgtcaccctcagggcagtggacagcatggccccaggccccactgcagaggctcgccctggctgtcgggaaggcactggggtgcaggtttggtacggaggctgcaggtgcccaggcagtgtggttaggcctgctgagatgtggtgcgtgccgaggctgccaatgggactggaaggaggactcagacctgactccgaggggcctgagcaactcaggcaggatgacgtggggagggtcaggtccaaggtaggaggggttaaggatttggtcttggacttcaggtaacagatgtccaagtggcttggccaggtaggcagtggatatgggagttcatgggggagagcaggggcaaggagattaatttaggaaattatcagcagagaaagagagcatggctatggactgggtgggctcatctaggggagaggagcagaggtccaggcccaacacccaggggcctgtggctggagcccagaagagactggtgtggttggaactccaggtggggcttgctccactctatcctgggtgctcatgccccagatctctgtgtgctcaaggagcgttggcagcatcctgacccgccctgctcacatgccccatccctgctttcccctgtcagtgggttgcaggcccatgatcccgccaggcctgtccatctgtccctgtgtcgcagacagtgcc

SEQ ID NO: 40188 - DNA, 967 bp, Artificial sequence
  DNA replication origin
ggacaggaaggggtgggctgatgaagatgggggggggcacccagaggacaatggacaggaaggatgggctgatgaagaagggaggggccacccagaagaccatggacgggaaggggtgggctgaagatcggggggccacccaggaggccatggacaaacaggaagtggtgggctgatgaagatgggggggccatccagggggccatggacaaacaggaagtggtgggctgatgaagatgggggggctacccagaggaccgtggacaggaaggggtgggctgttgaagatgggaggggccacccagaggacaatgcacaggaaggggtgggctgatgaagatgggggggccatccagggggccatggacaggaaggggtgggctgatgaagatggggggtgccacccagaggacaatgggcaggaaggggtgggctgatgaagatgggggagggccacccagaggacaatggacaggaaggggtgggctgatgaagatgggggggccacccagaggaccgcggacaggaaggggtgggctgatgaagatggggggctacccagaggaccgtggacaggaaggggtgggctgatgaagatggtggggccacccagaggaccgtggacaggaaggggtgggctgaagatgggggggctacccagaggaccgtggacaggaaggggtgggctgatgaagatgggggggccacccagaggatcgtggacaggaaggggtgggctgatgaagataggggggctacccagaggaccgtggacaggaaggggtgggctgatgaagatgggggagccacccagaggaccatggacaagaaggggtgggctgatgaagatgggaggggccacgcagaagacaatggacaggaaggggtgggctgatgaagatgggggggctacccagggggccatggacaggaaggggtgaggacaatcccctgatacccttcagct

SEQ ID NO: 40189 - DNA, 1472 bp, Artificial sequence
  DNA replication origin
atccgatttctcaatcttttccccacctttcccccttttctattccacaaaaccaccactgtcatcatggcccattctcaatgagctgttgggtacacctcccagacggggtggtggccgggcagaggggctcctcacttcccagtaggggcggccgggcagaggcgcccctcacctcccggatggggcggctggccgggcggggggctgacccccccccctcccggacggggcggctggccaggcggggggctgacccccccacctcctcccagacggggcggctggccaggcagaggggctcctcacttcccagtaggggtggccgggcagaggcgcccctcacctcccggatggggcggctggccgggcggggggctgacccccccacctccctcccggacggggcggctggccgggcggggggctgacccccacatctccctcctggacggggtggctgccgggcggagatgctcctcacttcccagacggggtggctgccgggcggaggggctcctcacttctcagacggggcggctgctgggcggaggggatcctcacttctcagacagggcggttgccaggcagagggtctcctcacttttcagacggggcggccgggcagagatgctcctcacatcccggacggggcgacagggcagaggcgctccccacatctcagatgatgggcggccgggcagagacgctcctcacttcctagatgggatggcggccgggcagagacgctcctcactttccagactgggcagccaggcagaggggctcctcacatcccagacgatgggcggccaggcagagacactcatcacttcccagacggggtggcggccgggcagaggctgcaatctcggcactttgggaggccaaggcaggctgctgggaggtggatgttgtagcgagccgagatcacgccactgcactccagcccgggcaccattgagcactgagtgaaggagactccgtctgcaatcccggcacctcgggaggccgaggctggcggatcactcgcggtcaggagctggagaccagcctggccaacacagcgaaaccccgtctccacccaaaaaatacgaaaaccagtcaggcgtggcggcgcgcgcctgcaattgcaggcactcggcaggctgaggcaggagaatcaggcagggaggttgcagtgagccgagatggcagcagtacagtccagcttcggctcggcatcagagggagacagtggaaagagggtagaggtaggaggtaggaggtaggaggtaggaggtaggaggtaggaggtaggaggtaggggtagcggtagcggtagaggtagcggtagaggtagaggtagaggtagaggtagaggtagaggtagaggtagaggtagaggtagagctgtcactattaacattccctggtggtccatccaggaattttctacacaggtaggagtgaaatgttcatgccttttctat

SEQ ID NO: 40190 - DNA, 916 bp, Artificial sequence
  DNA replication origin
ggatcccctccgcccagcagccgccccgtctgagaagtgaggagcccctccgcccggcagccaccccgtctgggaagtgaggagcatctccgcccggcagccaccccgtccaggagggagatgtgggggtcagccccccgcccggccagccgccccgtccgggagggaggtgggggggtcagccccccgcccggccagccgccccatccgggaggtgaggggcgcctctgcccggccacccctactgggaagtgaggagcccctctgcctggccagccgccccgtctgggaggaggtgggggggtcagccccccgcctggccagccgccccgtccgggaggggggggggtcagccccccgcccggccagccgccccatccgggaggtgaggggcgcctctgcccggccgcccctactgggaagtgaggagcccctctgcccggccaccaccccgtctgggaggtgtacccaacagctcattgagaatgggccatgatgacagtggtggttttgtggaatagaaaagggggaaaggtggggaaaagattgagaaatcggatggttgccgtgtctgtgtagaaagaggtagacatgggagacttttcattttgttctgtactagaaaaattcttctgccttgggatcctgttgatctgtgaccttacccccaaccctgtgctctctgaaacatgtgctgtgtccactcagggttaaatggattaagggcggtgcaagatgtgctttgttaaacagacgcttgaaggcagcatgctcgttaagagtcatcaccactccctaatctcaagtacccagggacacaaacactgcggaaggccgcagggtcctctgcctaggaaaaccagagacctttgttcacttgtttatctgctgaccttccctccactattgtcctgtg

SEQ ID NO: 40191 - DNA, 922 bp, Artificial sequence
  DNA replication origin
aagcagaggcactgcagcctgccagagtggccccaactgactctgcactttcccaggagcccagtagcagacctgagtttttaatcgaatttgagttttctgacgttgtgtgacttgacccaatgcatccccatggtgcagggggtgaaaagcagcagcaaggcgagtactgggcctgctgaccccacagtttactggaaaagataatcccaggatgtggcaacctggaacagctgccagcacatgtgcagcagagagtcagccgcagcacgcagcacggaggggcccccagccccagtgagtcagccggagcgcgcagcacggaggggcccccaggcccggtgagtcagctggagcgcgccgcgtggaagggcccccagccccggtgagtcagccggagcgcgcaacatggaggggcccccagcctgtctggctgccgctggacgccctgagccaggtaggagcctggaaggaaggtgccgcgtcaggggcgaccgcgctgctcgggctcagtgactggctttgtgaggaggctcttttgggagctgggcagagctccctacttggacagggggctggcccaggcactcctgcagcactcctgcctccagccactctcggtttgggacctgcatgctctctcgtgagtctagggccactccagagctggtgacacagccagaggccagcagcaaggagcagcagcacaggggacacgggcagcgaaaaccacagggaccgacacagtgacgggaagggatgccttcacagggtgagggcgctccacatccccacaccagccagcaacggaaaatcaaatcttaaaagaagacagcattggagaccagcctggccaacatggcaaaaccctctctactaaaaatacaaaaaagtagccgggcgtggtggcaagtgcctgtaa

SEQ ID NO: 40192 - DNA, 1455 bp, Artificial sequence
  DNA replication origin
ggcctgagaaaggggagctgcaagtgcacgtgaggggcgcagtcccgtctctgacggggcgtgggggggggggcggtcccgtctctcacggggcgtggagggcgcagtcccgtctctcgcggggcttcatgtaccagaccgtgttcatgttcacacctgggaggaggggaagcaggcatggtctgtgcggcaggtccagccaacccacagggccttggatgagtctctgcagctgaggctggcactgccagggctgaccccaaggctgtggctaaattgggctcccagcactggccctgtgtcctccgtgaggagatctgcaccccaggtctatgcatggactgtccccacccccaggccccaagctcagctcccttcaacctgtgtgtcctcagggcaccttcactccatccacctgggtctccccatcttagtgaccgtctccactgtgggtgccaggaccctctctacttccatggctgtgcgtcagggccactgtgtgagctggaaatcagcgcagggaactctggagaggggagggagtcctggggaggggagggagtgctggagaggggagggagtcctggagaggggagccgataataacagggaagccccatgaggagggaccatgatggagcgaggactgagtgcaggaaggagggtgttctaggcccgggcagagaggggagtctctagggaggagaagtgccgggggcttttaccctcagggcctatggcagttgtggggtgatggatgaggccttagactaaactctgagagaatgggatgtggagagttgtcttgagcagggagggagtggggaggagggagggggctctgtgttgctggttggaggcatccctggcacctgtcacagcaggggctggagggtggggcaggagctgggggcagtgggggtggaagaggatgcagaaaagctcagattgtgcctcacatggtgggtggggctgctgggcttgttaatgcatgggatggggtgggtcaggagtcgtgctggtcacatatgtcagatgtgggtgtctgaaatccccgtggccacagctgtaggctgcatcccctgggagctggggtgcagagtgtgttctggcctgaggcacatctgcagatggtggtccacagaccccctgggcaagtgcagacagtggggaggcaggtgagggccccgggtgcagacggggggtggggatgaggtgggtggggacccaggccctcacggatgactgtgcctgtcccttctccctgtcccattgcatgggctaaaatgtgctaaatctccagcactggacgggacagagggagggacctggatggaccagagctctgcctgtttctggaacacagtgtggggaggggcgggcaagcctcagaacgggctccattctgagaaacggccagtcccatggggccttggatgccagtggtccgagcat

SEQ ID NO: 40193 - DNA, 2098 bp, Artificial sequence
  DNA replication origin
ggcccaggaatgcaagtgcacccacctacaggcacacagctggcaagggtggcgcaggtctgacctgactccccatggcagctcactcatggcacatggcagtgtgcgtgccctcaggcgccccgcattgccggctacactctggctcagcctcccggaggtggtgactctcagagacgcgccctctcaagcgtttgggaggaagccgggacaatgagctactagaggcgcccccatggtgggactgaggggaaggacccccggaagcggtgaaaatgtgatgaagacagggaggtggccctcactgctcggcctcccggggcagcaggcttccaaactgggccttacttcccccgggccagccctgatttggaaaggaattgtctgggggctgctgcctccactggcactcctggagaccacccagactacacagccggctgaagaaggcgtgagaaatcattcttcgtggggtcttcaaccgggaaagaaggactggccaccaaggccacgggcagggggcagcgaggtgaccagctggagtgaaccccttcccctcaggccacgcagagccagggaccagcttcaatgtcatacagcataaaggcgacacctctggggtcctgtcttcatggaacacagaccacccaccaactgggaaaggcgcacctactgggtgccacctagtacccagggaggctgccatcctcaccatccccttacagagaccccaggagaggcagagattcaatcaataattaccttcccgatgatgcttccaacttcctgcaagaaaaaaaaaatcacagaaagatgatgtcatagagcaggaggaggaaaacactggaggcagacactaccgaaacctgcctaccttcccggtatgagtgcagaagggaccttcccggtgtgcatgaagaagggagaattcagaatctgctggtggggaggggtgtgtgtacaagccaggctgcccatacagaggccctgagccgggtcttccttggcgcccacctgaccaggacagagatgggctgactgtaagtgccccgggggagggcagctggctgcccctgataaataactcagggggcatcacccatgcactcaggctaccaggaaactctggaagaaatgtgtgaaaaataaagcctccttcaattgtgtgacttaaagaaaacttagcactgcaattgctccgtgactcctattccaacggcagcctgttaaaaggaacgctggaagatgctgccacagttctgatggcgagcccaaggcagtttcgggacacacgttccccgctgggctgagtggcccagtatctccctgtccagcagcgggacagagctgacaggtgctactgtggcctgtcacctgaagcggggccagcaatggtgacgtcggtgaggctgtgaggacggcatgcagaggggcccgtggagggagagggaggccgtgaggacggcgtgcagaggggtctgtggaaaaagaggaaggctgtgaggacggcgtgcagaggggcccgtggagagagagggaggccgtgaggacggcgtgcagaggggcccgtggagagagagggaggccgtgaggacggcatgcagaggggcccgtggaggcagagggaggccgtgaggacggcgtgcagaggggcccgtggaggcagagggaggccgtgaggacggcgtgcagaggggcccgtggagggagagggaggctgtgaggacggtgtgcagaggggcccgtggagggagagggaggccgtgaggacggtgtgtagaggggcccgtggagggagagggaggctgtgaggatggcgtgtagagggaggctgggaggacagtgtgtagaggggtccgtggagggagagggaggccgtcaggatggcgagcagaggggtctgtggaaggagagggagaccatgaggatggtgtgcagagggaggctgtgaggacggtgtgcagagggaggctgtgaggacggtgtgcagagggaggctgtgaggacggtgtgcagagggagaccatgaggatggtgtgcagagggaggctgtgaggacggtgtgcagagggagactgtgaggacggtgtgcagaggg

SEQ ID NO: 40194 - DNA, 1066 bp, Artificial sequence
  DNA replication origin
tgggcagtgggtggccgggtccgtatctgggcagtgggtggccaggtccgtatctgggcagtgggtgggccgggtccgtatctgggcagtgggtggggggggggtccgtatctgggcagtgggtggggggggtccgtatctgggcagtgggtgggccaggtctgtatctgggcagtgggtggccgggtccgtatctgggcagtgggtgggctgggtccctgcagtgcagttgtgcttgctcatgggtcctgtgttcctgtctcgcactttgagctgtggggtctgcgtggccagcattgggcttgcagacagcagggacaaggctcaggaaggctgcctggcctgtggccaccacccgcagcccgcctagaggctccgcagcggcccaggctgggaaggtcctgttacctccctgatctccttgatcttggagcctcctttgccgatcagggacccacactggctggcaggcaccaccagcctcagcgtcactgggggcttgctggtggcagggctgttgctcatggagttgatgatatcctaggggagagacacgtgtgttggcagcacttcaggcgtcgtgcagtgagaaagcaggagggcagggggtgtgtcctgacttcccacactcagaagcccacagagcccctgtcatgcacagccgaggacaaagtggccaggccaggccagggaggaccaggagacgtcgctgaaatggatgggcaggctggcagggcacacagacggcaaggcaggatggtcaccgtgccgcagtggggttggggcgggtctggccttggtcgtggagacctggtgggaagggggtgtggacagacaggctgatacaggaagtgtgggtgctggcctaaggggaggggagaatggaggctggagactagctgggggctgggtctgatgcccagagccaggtaaggcagggatgtcggggacaggccacgactgggtgtggagggcacgggggcagagaatggctcctggtgtctggcctagggaaggagatgtgtggttaatgtagaagcgggagaaggctgaggtggggggcggc

SEQ ID NO: 40195 - DNA, 745 bp, Artificial sequence
  DNA replication origin
tcaggtggggggagcactccaggtgaggaacacttcaggtggggggagcactccaggtgaggaacacttcaggtggggggagcactccaggtgaggaacacctcaggtgcggggagcactccagatgaggaacacttcaggtggggggagcaccccaggtgaggaacacttcaggtggggggagcactccaggtgaggaacacttcaggtggggggagcatactagatgtggggagcacatcaggtgcaggggcagccagagctggggtggaagggagcccagagcaggtgaggaggggagacgggggagctggagtagcagggtgggggttgtgcagaactctcagcccctcaggactcgggaggacagaggcacagcagaatccagagccccagctgggcgtgagggggcctgagtggggactcagagccagggaccaggctccaaaccagagctggaggcatcctgtgactcagggcagctcacagggcagtgccatgagcattgattgagcacctgtgtgggcctcacaggaggccctggactctcctgtgatgggaggcgcgcaaagtggcaattctcagttctaaggaatcaagtgagcatgagcctcacagccctgcagatcagcggttcccatcctgcgccttcttacacctgcagcgacccagctcccagtgccccttccccacagtgtgagtcccagttccacccacaaccacatggtcaaggcctcgggctgag

SEQ ID NO: 40196 - DNA, 1154 bp, Artificial sequence
  DNA replication origin
gccgaggtccacaggcccggggctcagagaccagtccagatggacgcagcacacagctgccaggggcccgcccacccagcccagcttcccagcatctggtttccattgtccccacatgggagtcacagagcctggggccgagtgcctgggtaacatctgggcttctcaggaacactcacactccctgggccaatcaaaccccaaagagagggtgcggtgggaacgcggctggtctgtggaaagagacctcatctccgttcagggcctccaggcctcagggccatctcagtgcccaccttacggagctgtggctggaggctctgggatcaggacaaactgggagcgagacgcagccatccctgctctgggctgggtctggggtcccagggtgccagccacagccaggccggagggcccagagcaaggccctcccaggtgcccggcctctggagtccccacccttgggaggcagagaccctcgcgttcagcagggtgacctccgtgatctagggctcctgggctactgccagttccctccccaaacatgtgaccccaaaagcatcaggatctgagggttgtttcagagctgggggaggggttgggtgctcttttgccctcaggagagcaggcccagtactcagtgagtgcccaggggtgaggagggctcaggaggccagcgccgggccatcagcctctgcaccccagggtctgaactcagggtctgagcgagtccagggctgccctgcagtgacagggagggccgagggtggcagaactggtgatggtggctctggagatggcggtgggggaaacgggggcaggcagcctggctttgggaccccaggccccaaggtcacagtgacctgtagcctgctgggtccagatacacaagcaattgtcacagcctagcagctggggggctctaggagggaggctggggctgcacagtgaggggcagtgcggggtgtgggacacggtttctggagtctctgctcccccagcctcgtccctgcacaatcgcaggccccctcctcccctcccactgaagctcactccagacagctaggttgacagctgggtgggtgcccctggaccctgaggctggtgaggctcctgcggacgccatggagggatggtcaggggcgccctctgct

SEQ ID NO: 40197 - DNA, 1327 bp, Artificial sequence
  DNA replication origin
gctcccgggcagccagcgcattcctgctgacgagaatcacttccggcgccgctgacccggcccgggagaccctgttccggcgccgctgacccggcccgggagaccctgagatgtctgtgggcagcagtgggagccctcgggtggggttgccgaggctgcggagggccagggctgcacgagtggcacagctcagacctggggtccctgtgtgagaccccgcaccccgggccggggcccgaaactccctcctctgtgcccccatcatggcttctgggcccaaaaggtcgtggggggaggggcgggctcccgagcactgggtttcaagccccgatgctgtcggtcctgccggccccatgctcagacacccggttcccttcgcagcgcagggcagggcccaggggcttctaggacctggtctcggagctccacacaggccctcccccggcagtggggagctcagctgcgggggctgccccatgtcccgctcacccgccggcatgcagcagttttaacgaggctggggcagtagggaagaaagggttaggatcccttacagaccagcagcccccactccggctgggtcccagagagacgggggcggggggctccttgccactctgcagggagctgaacatgggtggtcacagtcccacatcaccccactcctcagacacccagagggtttccacgcaggaccacagcatctgtagggggccactcagaccctccgtctctctgcctgaccacaccgtggctcagagaaactgctggcatcctgcctggtataccccaggctggatgtgccaggaaagctggggcagtcagaactgggtgcggtcccagctctgtcacccactagttgcctgagctcgggtcgggacacaggctcccagaagctccgttttctcaagttgtcaagagaatgtccactctgtcggtgggagctgatggagggagtaacagtgacagagctggggctcccatgaggccgaggtccacaggcccggggctcagagaccagtccagatggacgcagcacacagctgccaggggcccgcccacccagcccagcttcccagcatctggtttccattgtccccacatgggagtcacagagcctggggccgagtgcctgggtaacatctgggcttctcaggaacactcacactccctgggccaatcaaaccccaaagagagggtgcggtgggaacgcggctggtctgtggaaagagacctcatctccgttcagggcctccaggcctcagggccatctcagtgcccaccttacggagctgtggctggaggctctgggatcaggacaaactgg

SEQ ID NO: 40198 - DNA, 1006 bp, Artificial sequence
  DNA replication origin
catgtccacccccaagcccccatccaggccattcctgcaggagatccttctcccatggggctccaccccccaaccccagcccagtcggcttccaggatcctaggaagcacagagccaggaaaccactgccctggggggcctcccagagagctgcactgcagggtctggctgggaagggccctgcaaccccgcctgtgtgtggggggaggtaaatgcacttccagagaaagggaagaagggggcgagccacatcccctccctggcgacctggctgtcctttctcaggcctgccggcccttctgtggatggggactctgggcccagtctgggatcccagaagcagctgtggggagcaggacttaccccactgtgccagtcgtccacagccctggggggatctgagtctccaggtgtgggaagggagagggtgggagaagggagagagtgggaggagggagagaatgggaggaggggagagggggtgggaggagggagagggtgggaggagggagaggaagaaggatggaggagagggccttgaatgtgcagtgtccctggcagggcctctctgactcctgcgggtggacccgagcctcctcttccagcaggacctggctaagaggggatgaggatggagcatgaggtgggcttggtggaggaagctgtcccgggaggcaggggagggcagggctgtttctggaacctgcctgccctccacccccacccccacccccacccccatcaggaccctgcgttcagggagaggagccccccagtccaccttgaggagccctggtgcctccaaacgtcagcgcggggaaaaggggaattatccaccgctgtcctgtgttagtggttttcttaaacccataaaagtggtggaacgggaaggaaagaccatcccaggaaactgcctttgtccacagggaaagttgcagaggagactcagtgctgctggtggctggtgggagccccagggctgctggcccaggccccgcttctgtcc

SEQ ID NO: 40199 - DNA, 1008 bp, Artificial sequence
  DNA replication origin
gagacacctgggtaacttcaggagagaggagggagggggagagaggagggagggggagagaggagggagggggagagaggagggagggggagagaggagggagggggagagggggggagagaggagggaggaggagaataggggatgggagagaggagggagacggtgaaggggagagtagggagccggagaggagaatgaggacaggggagaagagggagggggagatgaggaaagggggaggggagcaagtgtgagaggagggagggggaaaggagggaagggggagaggaggggacaggagagaggaagaagggggagaggagtgagtgtgagaggagggagggggagagaggggaaaagggggagaggagggagggggagaggagggaagggggagaggagtgagcatgagaggagggagggggagagaagtgagcgtgagaggagggagggggagaggggacaggagagaggagggagggagacaggagtgagcgtgagaggagggagggggagaggagtgagcatgagaggagggaggcggagaggaggggacaggagagaggagggagggggacaggagtgagcgtgagaggaaggagggggagaggagggaagagggagaggagtgagcatgagaggagggagagggagaggactgagcgtgagaggagggagggggagagaagagaaaagagggagcaaaggggacaggagagaggagggggggagcggagggagctcacccgctgtgggtggggcaggttgtggaaatcagccccatgacaacagtaagctcagccaggactgggattcaggatgttttattttcatgctttatgtggttttcatgttctccctgagacataagcatcacttacaatcagaaaagatccctgatgaaagtgcatgaaggaacacaaagcaggcgactgcacgtctatgaacacgctcacggtacggtgcacagagcaggcgacagcacgtctataaacacacttatag

SEQ ID NO: 40200 - DNA, 1521 bp, Artificial sequence
  DNA replication origin
caagccaccactcaccctggaaggccacggccctcggggtctccggctcatcctgcgcggctgtccagcaggcctgcagcagcaggggcagcagagcacgggccgccctcatgtctggggcctgcggtcaccacacagcgcggccagggcagagtgggccgccgccgccgcccagagaccgaggctgccttctgctcccagccagagtgagagcggagggcaaggaggggaggggcggggcgagaggggcgggaggggaggggaggggcgggaggggaggggaggggcggggcgggaggagaggggaggggaggggaggggcgggaggagaggggaggggcgggaggggaggggcggggcgggaggggaggggcggggcggggcggggaggagcggcccatgagtcaccacctccttgctggggtctctccctccagaaccggcagcagctccgagcccagggagaaggcggtttccctggctggctcgccgcggcctgcagttcagttcccgtgtcagggaggaggaaactgcagcagctgaatcaaacgtctgaaaaccagcgtgtcacccagggagagttccttgaaacatctttcggtagtttccaatccagacgtctccatgcgggacgcacgggcaggctcactcgcctcttcccaccaaccgcctcctgcagaggacctcgccgtgagctgaattgttgctttatcagatctccgcgttcttttttcacgtcaatatttcttcacagtatagtcggatacgtatttgccaaagatatttcagtttgtaccgtgggaagacaaagttgctcacaatatagttgttatatatgctgtgtgtggagacagagagacagagacagagagacagagagagacagtgagagagagacagagagacagagacagagagacagacagagacacagacagaggagagacagagacagagagagagacagagacagagagagacagagagacagaaagacagagagagacacagagagacagaggagagacagagacagagagacagagacagagagacacagagagacagagagacagagagacagagacagagagagagacagtgagagacagagacagagagacacagagacagagagacagagagagacagagacagtgagagagagacagaaagacagagacagagagacagacacagagagacagaggagagacagagacagacagagagagacagagacagagagagacagagagacagacagagagagacagagagagagacagagacagagacacagagagaggagagacagagagagacaaagacagagacagagagacagagacagagagagacagagaggagagacagacagagacggagagacagagacagagagacagagacagagagacagaaagagagacagagagaggagagaggggctgtccctgatatcacctgggggtgggctccagatgtggccagatgcatccctggcccacagaaggtccc

SEQ ID NO: 40201 - DNA, 1148 bp, Artificial sequence
  DNA replication origin
ttcccgggagagcctctccgggcccggggctctgtgctgcaggcgctgggctggccgggagggcaggcccagcagagactcggggaatggggcgagagcttgaaggcccctctcctccatcttcggccagactgccccgtggacctgttctttgtgctggacacctctgagagcgtggccctgaggctgaagccctacggggccctcgtggacaaagtcaagtccttcaccaagcgcttcatcgacaacctgagggacaggtaggagggacgccccgtgaccttcctcctgtgcttctgggcctcttggagggaggggtgggggcccaggggaacacgggtgcgacggcctcaacctcctaaggttgggcgagcgttgccctgaccggggcccctcccggcgccctccagagtgaggccggggccctttccggcgccctccagagtgagctggtctgagcctctcccagcgccttccagagtgagctggtttgagaccctgctcgcgggggtggcacctgttcagcagggccgaggtgacagtgaggctgagatgtagggaagagaggctcccgcaggctgaccgagagggctcagcgcactggcccagacacgcagtcctgcctggtgcgcgggagcccctcactaaccacctggaccctggtttgttccgtgggcagtgagagcctctacctgggtcctggatcccacgttctgaaggtccccgactcgggagccaggaggggtgtcgctctgcagccccagggcccccaggcttggttctgggcttgggacacggcaccctctgctccacgttcctccatctgtgcgtgtggctgaggacagaccggggggagaggggagtcggtcctgtgggtgcacagggccgctgaggggggggcatgtagaacggggctcccccactgagacgggtcctggcagtggggacacagcttagccggcgtaggaacccccgtcctccttgaccctgctgactggccgctgggccggagcctcccgccaccagaaggggcacagtcagaggctgccggtaacagcagggtggaccttccagcccacaccgtgcccagcaggagccattggtaccaggaaccctgagcttagtggacatggccaggcccgtgcggc

SEQ ID NO: 40202 - DNA, 1681 bp, Artificial sequence
  DNA replication origin
cgccgtggtcactctgctgaatggatgggagggtgggtggggcagaggtgggcccaccccaggctggggcagagcagacccctgagagcctcaggctcaggtgctcagagggcagcgagggggctgctcagatccccggggtgcctccttcccccactgtcatgctgccccactgcaggcccaaggaccccaccccagcagggccacacactcagggctcctggtctgagggcctgagggatcggggcgcaggtcgcttgctggccacacccgcctgcacagccttccaggagggccggcctcagggccacagggcaagtccagctgtgtgtcagccacggccagggtggggcagcctgtccatctgggtgacgtcgcgccctgggacgggtagcgatggcgccaggggccgcccgcctcacgcccgccgtgcctgttcctggcaggtactaccgctgtgaccgaaacctggtgtggaacgcaggcgcgctgcactacagtgacgaggtggagatcatccaaggcctcacgcgcatgcctggcggccgcgacgcactcaaaagcagcgtggacgcggtcaagtactttgggaagggcacctacaccgactgcgctatcaagaaggggctggagcagctcctcgtggggtgagtggcccccagcctcctgcccacgccagttctcacgcgtggtacccagcctgggctggggttggcctggggtccctgtgcggcttcagctgcagcctccctgttctcttggaggctgcacggcctccctgacccactttgtgggcaggaaagagacggagacagacagagacagagagaaacagaaacagggagaaacagacacagagagagacagagacagagagagatagagacagagacagagagagacagagacaaagagtgacagagggaccaagacaggcagacagagacaaacagagacagagacagagacacagagagagacacagagagacagagacgggaacagagacaggcagacagagacagagagagacagagacagaaacagagacagagggacagagacaggcagagagagacagagagacagagacagagacagacaaacagagacagagagacagaaacagggacagagacagaaagagagagagacagagggaaacagagagagacagagacagatagaaaaagacagaggcagagagaagcagagacagagaaacaaagacagtcagagacagacagagacagagacagaaacagagacagagagacagagacagaggggcagagacaggcagacagagagacagagacagagacagcgaaacagagacagaaacatacagagacagagagacagagagaagcagagacagacagaggcagagagacagagagaagcagagacagggacagagacagagacagaaatagagagatagagacagagggacagagacagagagatagagacagagagggagacagagagatagaagcagagagagagagacaaagacagaggcagagagacagagagagaagcacagacagagacagacagagagacagggacagacagagacagagagaccggaaacagaggcagagagactgagagactgagagagacggggtggttttccccacagcatcaacaccaagcagggctagga

SEQ ID NO: 40203 - DNA, 1331 bp, Artificial sequence
  DNA replication origin
gggggtggtggggagggctcttaccacttgctccacgttatttttctggaaagagaaatggaaacgcagaattactttccacctgcggccgccgcgggcctccccgtctcctgggcaggggcctcacgatcatgtccacgatggtgtcgatggtctggctgatggcctcctctgcgtcgcggctctggccccagtcagccgccgtgaagttgcgccggtacgtgtggtccgtggcgatgatgctcagacgcggctcctgggggcagtgttcagggtgggctgagcagggctgggacccctgacggccggggccgcttcccacagggccagaggggaggctgggctggggcgctccaggctcctcagcaggaggggctggcctctcaggggcaagggtggccggctggagaacccacaccctcccgaggaccaaaagacggtcccagctgccgggggccttgcagccgccactccctgtggttgggggcatctgccggggggggccggtgcctaccaggtggtcgggtgtgatggccaccgagaagactttgacgcccaggtgcttggcctcgttcacagcatcctccagccccccacagggttccttgtagccctccagggggtgcccgtcggtcaccacaatcaggtacttattctccttcaggtgggagcccctggacaggagagggcagcgtgagacctcgagactaggtgggggaactggagggagacccaagcctgtccgggaggtgctggtccctgtctcaccgggaggagccgcctctctttgctgatcctggctatacggtgggggttactgaaaagaacctcaccatgggaaataacgcctgtgggtctcatttctctaaactgctttggaaaatccacgccctcccaggagaggcacccatgaccccaaaggaggctcggttcctggggtgccctggggcgcaaagcccctgaccagtgagtggaggctgagggtggcagggagcgtgcccctccgagatgcccgccgcgtctacccacaagctgcctcaactcaaggctgctcggtcaccgtggctcttgcaggaaatgggtgtgatgagcaaacaacagggcgatccctgaatgccccaaatccaaccccccgaaagggaaagtgggagcagcaggaaggagggcagtatcgcagggcagtcgggcagcctgctggggacgctgagcatctcggccagaagggcgagctcatttaggggagtcgtgtctgtctgtggcttccacagggggccgcactctgacgtgtgtggccacatcccccatgcaccccctgcagacagcggacgact

SEQ ID NO: 40204 - DNA, 922 bp, Artificial sequence
  DNA replication origin
cccgccgtcccctccatctggaccccgccgtcccctccatctggaccccgccgtcccctccatctggactcccgccgtcccctccatctggagccccgacgtcccctccatctggaccccgccgtcccctccatctggaccccgccgtcccctccatctggaccccgccatcccctccatctggaccccgccgtcccctccatctggaccccgccgtcccctccatctggaccccgccatcccctccatctggactcccgccgtcccctccatctggacccccgccgtcccctccatctggacccccgccgtcccctctggatcctcatggtggacttgggtgcccaggaggctttggtcctgccacccccactcccaggccccacaacacatgggaggagcaggagtcaccactcacctcaaagccggggtcgccccggagccccggaggtcctcttgcaggctgcaaggcagaggggacggtcagccaggaccccagactcaggttcccagggtgcagggcgcggggtcaggggtcggggggcacactcacctggcattcgaaggagcagcactgtggggggaaagcatggagacgagtcagtgggaaagccacggacatacggctgggacacagggtgacatgcgacccaggcacatgggcagacggacacacggatggacgcacaggcggacacatgtcccaggcacatgggcagacacacaggtggacacgcagggggacacacatcccgggcacacgggcagacacgcaggggacatgtgtcccgggcacatgggcggatatgcatagggacatgcgtcctgaacacacaggtggacgtgtgggtggacgtgtgcagactcacggctgggggtggtggggagggctcttaccacttgctccacgttatttttctgg

SEQ ID NO: 40205 - DNA, 1127 bp, Artificial sequence
  DNA replication origin
ccatgtgttgtggggcctgggagtgggggtggcaggaccaaagcctcctgggcacccaagtccaccatgaggatccagaggggacggcgggggtccagatggaggggacggcgggggtccagatggaggggacggcgggagtccagatggaggggatggcggggtccagatggaggggacggcggggtccagatggaggggacggcggggtccagatggaggggatggcggggtccagatggaggggacggcggggtccagatggaggggacggcggggtccagatggaggggacgtcggggctccagatggaggggacggcgggagtccagatggaggggacggcggggtccagatggaggggacggcggggtccagatggaggggacggcggggtccagatggaggggacgtcggggctccagatggaggggacggcgggagtccagatggaggggacggcgtggtccagatggaggggacggcggggtccagatggaggggacgtcggggctccagatggaggggacggcgggggtccagatggaggggacggcggggtccagatggaggggacggcggggtccagatggaggggacggcggggtccagatggaggggacggcggggtccagatggaggggacggcggggtccagatggaggggacggcgggagtccagatggaggggacggcgtggtccagatggaggggacggcggggtccagatggaggggacgtcggggctccagatggaggggacggcggggtccagatggaggggatgtcggggtccagatggaagggacggcggggtccagcaggcaggctccggccgtgcagggtgtggactgtcccgggggcgctgggggcttctgagggtgtctctgtccgccctgccctcagccgcactctgttcagaaggacctttctggaggtaggagggtgagaatgtgggtcccctgcttctgtgtggctcacataggatgaccttaaacgttagaattagctgctgataattaaaacttgccatgaggctgctcatggacctcagatttctggcttctcctaaaaaccatcaaacccagcagctgtgggcccgagtcccatggccatttcctgggggt

SEQ ID NO: 40206 - DNA, 687 bp, Artificial sequence
  DNA replication origin
agagaccagctccgaggtcgagcctcactcaccttctccccacggctccctttttctccctacacacccagcggaagaagaggaagaggaaggcttgttagtgctgtgcaaggctgagggcaccaccgggctcgggccaggaaagggggggcacgtaccttcattccctggtacccaacaggtccgaggtccccgggtcttccctggaacacaggaggagatggtgagacacccccggaggagcaggggcaggggccagtcccacccagccccacacccctccctccagcccaggcctggtcaggccgagagaggggccctgctgcacggggcccatggtgccgaggccctccaaggtggagctgggggagggaagtctatggataggatttgggccaaggagccacggcaggggccccggacggtgccggcctgagcaccctgggccacctccccacccagcccctccctggcaggggggcttacgggctgcctggggggctgtgtggaaggatggctgggctgtggcccctccaggtctgctcccacccacaaggaacaggcagtgtgactttggcactcagaacccagccactcttccggaagtttccgaggcctagtcgttccccgcctccagcttcttagggcccccaccccacagtcaggcactcacaggatctccggctt

SEQ ID NO: 40207 - DNA, 1108 bp, Artificial sequence
  DNA replication origin
tgaggctcgacctcggagctggtctctccaggcgcagatgtgccatcctggacgagggtgtccccggggatgaggacagtgtccctgacaggagaccacgtgtcctgcagacccgctccaccgcccctcgccgtcccctccatctggaaggacaaggacagccacccaggcacccagcaaaggcgcctgtgtcactttcaccccaccccagagcaggggtcccccgggcggttaccctctgcggagccgggggtcccccgggcggttaccctctgcggagccgggggtcccccgggcggttaccctctgcagagcggcccctccccatcactgtcagtccccatgattctcagcagtgatgttgtcccctcgggttgggggcacccaagcccctgcctcgcgtgggcctaagccaggcttgccctgccctccccaccccaaataccccctcacacccgcttcctgtctccgcagggctccaggggacccaagggctacaaggtgagcgtgggctgctgggaggggggagttctgcccccacggcagcatgtctgacctgcatctgactcctgccttcgttttcccgcctcacagggagagaagggcaagcgtggcatcgacggggtggacggcgtgaaggtgactggggggagataggatggacggggagggacgaggaggaatggggcgagatggggagggacggagtggacggcgtgaaggtgacccggggagggatggggtggacagtgtgaaggtgaccaggggaaggacggggagggacggggagggatggggtgaggtgatcccggcaggagggacagggaggagtggggtggacggtgtgaaggtgaccccaggggggtgtctgctaggcagggctttccagggagggtgtggagggcatggagggcaccaagtctgacagttgattggcctcagtttacccacttggccgtcagattttctagttttcttcctctttccagggggagatggggtacccaggcctgccaggctgcaagggctcgcccgggtttgacgtaagtcacttcctctcactgatactttaaaactagcgctgtcagcagcacctcgtgtggaccgt

SEQ ID NO: 40208 - DNA, 725 bp, Artificial sequence
  DNA replication origin
ggcattcaaggaccccctggccccaagggagaccccggtgcctttggactgaaaggagaaaaggtgagtgacttgcggcccctggaggaccagggccttcacggttggccaagcgctgaattggaaacctctcctggaagcaagtcctggtccgagcatgtcggccacccgtgcggcctcagaggggaggagctggtggaggctggaggcaggcagaggagcagcggggacagtgcccaccgtggggacagtggccgtggcgctcccgcccagagccttccctgcagcccgagggccttcaggcctccgccattctgtcccccgcacctgccgctcgctcggcacagatgggaccccaccgcgtcactcctagcctgcgagccgcagcccagaatggctctcagaactgagaatgggctgggtggcactgagggtggcgagtgggcgggagggtggtgagcgggggcgggaggagggtggtgagcgggtgggagggcgagtgggcagcgggagggcgggagcacgaggcgggagaaggagctttttcgtctgacagctgagtctgccgttgctggtgttttctctggagtttctttgttgaagctgaagtgttggggaagacaaaggcgaatgctgaccccaccccaaacattcccagacgagctcctagaacccagcagacggtttccaaatctcatcttcaagttcccagattaccctccagg

SEQ ID NO: 40209 - DNA, 691 bp, Artificial sequence
  DNA replication origin
cagagccttccctgcagcccgagggccttcaggcctccgccattctgtcccccgcacctgccgctcgctcggcacagatgggaccccaccgcgtcactcctagcctgcgagccgcagcccagaatggctctcagaactgagaatgggctgggtggcactgagggtggcgagtgggcgggagggtggtgagcgggggcgggaggagggtggtgagcgggtgggagggcgagtgggcagcgggagggcgggagcacgaggcgggagaaggagctttttcgtctgacagctgagtctgccgttgctggtgttttctctggagtttctttgttgaagctgaagtgttggggaagacaaaggcgaatgctgaccccaccccaaacattcccagacgagctcctagaacccagcagacggtttccaaatctcatcttcaagttcccagattaccctccaggccctagatttgagtttgccaatttgccagcctggcaaagctgtgccttctctaatgggaaccaaatcctgccccttagacaagatggcccttggctgggcctcacagggaacaaggttggagcattccaggaggtctttgtgcagggttgtggatggctgagggtgctggggggtctgggctcagacagtgttggtcagagggagtggcctgaagtatgggtgagaggccctggat

SEQ ID NO: 40210 - DNA, 707 bp, Artificial sequence
  DNA replication origin
gcggggagggaaggccggaacagcccagtgaccacctggacagcatgctgtggctcccagcgtgcccgggcagccatcctccccaaggatggcccagctccacactcacggctcgtttctcttcagggtgaagctggcccgcagggtgatcagggaagagaaggccccgttggtgtccctggagacccggtaggaagcgctgtggggttggggggcgttggccaatttgggttttgggggtagaagtgctccagcagctcacgcactgggggtctgttcatttccgtttgagggcctctgtgtttccgtagatctcgggggtgtccctgcgtgggagccggctgcagggggtgaggcgcggcctgggccgggctggtgtggattgttgagagcaggcccagcgcccgggggcctgacgctgagacgctcagcccaggtggagaagcgctgtctgggggcccatccggggcaagggtgcctcacagtgaggaagaggtgttggagcccctgggagacactgggagcttggtcagcatctgtttttctgggtcaggagccaggcatgactgtggctggaggtcaactggggagtgtgaggctatggaggtttccagaatcccagggtgtcaggatgaaaatgcactttcatctcattctaaattcccttctccgagcctctggaatcgctgtgcacgccgcacggcttt

SEQ ID NO: 40211 - DNA, 1285 bp, Artificial sequence
  DNA replication origin
atctgacctcccatgtggtcacccaggacagggccaggtgcagggcacagtgcgtggaagaggccatgcagccagtggcagattgtggggaggggacggcccagggccacgttccaggcttgggaggctgctccagaccttggtagctgaaagtctcagtgggaatgagcgttcagaggccaggacttgctcggagaattctaaccacaccctgcctgttttatatgttcagttttcaaagtaatcaatagccactataagaaaaaaacaaagccactttcaaagggttgtggtaagaggcagtcctgtgagcaggccggctgcagggcctccagggctgtggggcaggctgcacaggggctggtgggtcccatgcctgggggtctgggaatagtctctaggctgctgtcctggaggaggtttcccccaacgcctgagaccagggcaccatgtgacccatgactcacagttgcctggctgaggcaggcacttgttcacctggagcctccctggggcctttcggggcccgggggtgtggataggtggctttggagccacatttgtccatcgggacgttgggctcccagctggccttccgggctttccctgctcccagaacctccctgctcagcccttgccagccttacccctcccctccaccctgcccagcatggggctctccctgtgtggatgccagaagcagttgggccctcagggctggtcccaggaggtgcccccagtgaggtgctctgcagaaactgcccagtctggcctcctgctgtctgtggcacagtctgactgtgtgtggtgaggtccaggccttctgcctcccacttacctggcccagggcacagagacctcctttccatccttcctcctggcccccttttcgtgttcccaaggcaggatctcagggtaccagactaacccctgttgaaccccaagtttggtgagcttctggacctccttgaggcccgtgtgcaaagtccccagtcaagtgtgcagtcctgactgctggggcgttgaccacgaagggtgcaggagcttcacagccaggcctgggtgcttgcacagtcggggtagagagagcaatacactagatgcctcctgtctgcctggtggaggccacggggtcaggatggtgaatgggccaagtctggtagtggggaagttgtaaacatttgaaccaccggacaggcctcatcgggaagcatcagcctaaccacaggccagggacaggcgtctgagcaggcacaggccagggacaggcgtccgaccaggctca

SEQ ID NO: 40212 - DNA, 1507 bp, Artificial sequence
  DNA replication origin
caggacccgcttggggaggcctcatgggccccggctgctggatgctctgtggacggggccagcgcgcagatgcccgggtggtgcacggtctgttgacacaacgctgttcccttctagaacaacgacattgcaccccgaggagtcaaaggagcaaaggggtaccggggtcccgagggcccccaggtgggtggatgtggctgggtgaggccacggtgggctgtgcctgggacgccggatgctggggctggggaatgctggaagaggctgggagagtgggaggcggcgggagggaattttggggagcacgtcatctgggaggccctgggggtgggaggtgccggtcaccagggccaggtggtggccagggcagcagagccgagcccagggacacagcgggtcctcagggtggggcccacctgggatggccgcctggaccaccagtgtgcgaagccccagctgccctcacagcaccgtcactggaggacgaggggctgggtagggagggaccgggcaggggtgggcttgatgaggggcagggccctgggggtgggggctgtctcagctcaggaagcacagtgggctcctcaccctcagagctcctctactccgtttctcggacagggacccccaggacaccaaggaccgcctgggccggacgtaagtggggctctgtgaacattgctgggggcgaccactgtagcttccatcccttggggtgtgggtcctgtccatgggtgctcctgtagacgctgctcacgggggggtgggttgtggacaaagagctggtgccaggccctagggacccgtgacggccatgggaggacccgtgaggatcatagggggatgtgtgaggaccatagaggggacatgtgaggatcatgggggacatgtgaggatcatgggggggacgtgtgaggatcatgggaggacgtgaggatcatggagggggacatgtgaggatcatgggggacccgtgaggatcatgggggacccgtgtgaggatcatggggggggacgtgtgaggatcatggggggacctgtacccatgaggaccatgaggggacccgtgacggccacggggagacccatgactgcgctgtttctatgaccacgtcaggggtccagcccagtagcaggggtgtagtgggcagagccgggcacacctgcaaagaacctcctgcccaaaccccgccctgtgggggccccagggagggtgacctggagatccagcagcccacagtccccgctgggaggggctgtctatggccccagtaccctcgtctctccctccccaggaatgcgagattttggacatcatcatgaaaatgtgctgtgagtatctctgagaagccgtcctcgttagggagagcagggccgccagcctggcctgttccactcctagaagggtgtctccactgttgggggcctgggtctctgggtacatccttgaggaggctcctcagccagcccctaccggcctccaaagccctcccaggcccccgggtcc

SEQ ID NO: 40213 - DNA, 1305 bp, Artificial sequence
  DNA replication origin
tctatgaccacgtcaggggtccagcccagtagcaggggtgtagtgggcagagccgggcacacctgcaaagaacctcctgcccaaaccccgccctgtgggggccccagggagggtgacctggagatccagcagcccacagtccccgctgggaggggctgtctatggccccagtaccctcgtctctccctccccaggaatgcgagattttggacatcatcatgaaaatgtgctgtgagtatctctgagaagccgtcctcgttagggagagcagggccgccagcctggcctgttccactcctagaagggtgtctccactgttgggggcctgggtctctgggtacatccttgaggaggctcctcagccagcccctaccggcctccaaagccctcccaggcccccgggtccccgcacaggctgagagtccccggtgcggtgcagagctgccacgtggggagggcggccggggaggcggggaggcggggcaggaggccggggaaggggggaggccggggaaggagggcggccggggaggcggggaggctgccccaagagtaaaagcctttctgacgtgcgcaggacgcggccctgactggtctaactgactctttctcttctcctcagcttgctgtggtgagacccaggctctagctcctgagagaatggatcccgggggtcggggagcgaggcctgggtcccacacatgtcacaggacagcacatggcactctggtccccgcccgcagctccctgcacctgcccgccccctctggggcctgctccaagccagcagggttcccgggtgttgggctgggccccgccctctttcacccataactgaaataaccaggagcaggcttgggggggtccctgctccatcattctggcccacaggccccaccctagcctggctgagcaacgccagccctgaccagccgccggacagagcagcctttacggggccatgggagggggtgggcttttctggggctgagacggggggaccccaacgtgtcaggtgaggatgtggcagccaaggaggggccagggcggtggaggggaggggccagggcactggaggggaggggcgtgctctgctgacaccgcccccgcctgcagaatgcaagtgcggccccatcgacctcctgttcgtgctggacagctcagagagcattggcctgcagaacttcgagattgccaaggacttcgtcgtcaaggtcatcgaccggctgagccgggacgagctggtcaaggtgaggcctcgccccgcccggctttctcaagcccaggtgcaccccgaccctgccg

SEQ ID NO: 40214 - DNA, 962 bp, Artificial sequence
  DNA replication origin
cgcggagcagggcctggtagctggggacacggaacaggtggctctcgccgtaggccacgtcgtactcggccgtcttgccggtgaccaggacgcggatgtggggctcattcacctggcggcccacgaccaccacgaagatctcgatgcctgcccgctgggcttcctgcacggccttctcgatggcagcgggcgtggcgccctgcgagttgccatctgagaagagcagcagcctcttcttggcagcgccggacgaggcctcgcggtagaagcgggtcacatagcccagggcatcgttgacgtcggtggcgtcgttgataaagtccatggcatcgacggcactggccagggccgtgtagttctgcaggaactgcagcgacgcccgctctgggcgctgctggcccgtgccgctgtactgcaccaccgccacccgcacgtcgtgggcggggtccgtcctgcccgctgtgaggaagcgctcggccaggcgcttggcgaagcgcttggtggtgtcaaagttgtggctgcccacgctggcggagccgtccagcaggatggtgatgtcagccggggaggagaacgtgactgcggggcggggtgggcagccgttagcatgaggccctggtgatgcagccgcagtgggccggccagagagcgtctaagctccccagagagggcacggcacggtggtgctcagccaccggagtgagccatgcacctactctcgtgaccgccaggccctcctcccagagccccgtcctctcagagccctcgccccaaccacggtgccctcctccccacgtgtcccggccgccgaggtactcactggggcaggtgtaatctggacacttcttgtctgtaaaagagaaaagccgtgcagtgtgagcccactgctccacctataaccccgcaaggagatgtcacaggacctcccggccgagcacaggggtggccgtgcccccggaagt

SEQ ID NO: 40215 - DNA, 1078 bp, Artificial sequence
  DNA replication origin
cggcctccagggctgtagggccaaggtccaggccggtcaccagcaggaccctcaggagacggggccgagtcgccgagatttatgtctgcaacggcctcctgaccttggtttcccaaaacgagacagaggccaatggctgccccaagctgaggagaagagcttgctttgagtttaattgtaaagtaactgttaggtgaggattggtgggaaaaaccagctatggggacagaggagagggaggctagtgcggcacaggccccgagagggcgtcttgctcaggctggtgggatgcagcacagaggtgcctagggaaggagctgcgcaggcaggagggagggcgggcaggagggcagggcaggagagcccggggtggggaacccaggtgaggccagctcagggctgagccccagagggccctgcacaggtgacgccagctcagggctgagcctcagagggccctgtgcaggtgacactagctcagggctgagccccagagggccctgcgcaggtgatgccaactcagggctgagccccggaggaccctgcacaaagcaggcagcagcgttgtgtcctggctttccaagcttttccttaaaaaaaatctagcgaatcaggttggtcgggaaaattcgcatcacattttactctgtttagtgatgagtggggaggggtgggaggacagggtttggtgccggcgtgcagggtgggctagcccagcgccaccttcctggagactgtctggtggaagacaccgcggagcagggcctggtagctggggacacggaacaggtggctctcgccgtaggccacgtcgtactcggccgtcttgccggtgaccaggacgcggatgtggggctcattcacctggcggcccacgaccaccacgaagatctcgatgcctgcccgctgggcttcctgcacggccttctcgatggcagcgggcgtggcgccctgcgagttgccatctgagaagagcagcagcctcttcttggcagcgccggacgaggcctcgcggtagaagcgggtcacatagcccagggcatcgttgacgtcggtggcgtcgttgataaagtccatg

SEQ ID NO: 40216 - DNA, 1957 bp, Artificial sequence
  DNA replication origin
ccgcctcactgcatctgccccgggccccgcccaccgcctcactgcgtctgccccgggccccgcccaccacccgttgcctctgacccgggccccgcccaccgcctcactgcgtctgccccgggcccctcccaccgcctcactgcgtctgccccgggccccgcccaccacctcactgcgtctgccccgggccccgcccaccacctactgcgactaccccgggccccgcccaccgcctcactgcgtctgccccgggccccggccaccacccgctgcctctgccccgggccccgcccaccgcctcactgcgtctgccccgggccccgcccaccgctcgctgcctctgccccgggccccgcccaccgcctcactgcatctgccccgggccccgcccaccgcctcactgcgtctgccccgggcccgtctctacctgcagttctgtgaggggcgcttgttcgccacctgaaacggaaatgcagggtccccagcattttcccgcagctctggtggccacatggtgtgacgcatcgagcgaggcgtgtccctgcctgtggcacctgaggggctcgccggggtccccgcaggtgaaggccttcaggaagccccaccctcaccctcgccgcccatccctgctgccctcctccagcccagccctcggccgatcctcttagtcccctagcggcccccagaacagccgtgcaccccggattctgggattcaggggccactaacttctttcttttgaggatgagccctcgctgcctctgccctccgccctcttcttgctctgccccaaaggtggagcctcccaagacttcttcctctgccccaaaggtggagcctcccaagacttcttcctatgggccctgcagtatctcaactccccttccgagctcccaggggtatttcagtaccaagcctagaacctgtggccggcctctgtggttgacctcggtggatgtggccggccccagcccactgaggcctgatctgctcccgaccccaaagcccagggtgttgccttctcagctcctctctgtccacaggtgcagcatggtctccatgtcaccgacgcagacgcagataaggggcatggatggacagctgtagccaagggcagccctggttctggcctgggactggtggtgatgggggttgggagtgagcacgcacgcacacgccccccaacctcctgtgactgctcctttggggcacacggcaggattttactttgtggggaagataaccacagggagaggagtgaaaacctttatttggaaaagtcagcaacatggatatggttcagaaaaaaacacagaaggagcaaaactaacatgaacatagaaagggggcctttgataaaacgtcgaacacatcactattctgaggaaggagaggtttgcgttgtttctagtaagacacagccctctgtggcaccaaggggctctcatgtccagtccaggccccagtctctgcgggagggaggagcagacggggttagcaccgttaatctcgagggtcttgagtgcagccagcgcccctgcgagtactctctgaggtcggggtcagtgctggtcagcagcggcctccagggctgtagggccaaggtccaggccggtcaccagcaggaccctcaggagacggggccgagtcgccgagatttatgtctgcaacggcctcctgaccttggtttcccaaaacgagacagaggccaatggctgccccaagctgaggagaagagcttgctttgagtttaattgtaaagtaactgttaggtgaggattggtgggaaaaaccagctatggggacagaggagagggaggctagtgcggcacaggccccgagagggcgtcttgctcaggctggtgggatgcagcacagaggtgcctagggaaggagctgcgcaggcaggagggagggcgggcaggagggcagggcaggagagcccggggtggggaac

SEQ ID NO: 40217 - DNA, 1789 bp, Artificial sequence
  DNA replication origin
agctacttgggaggctgaggcaggagaatggcgtgaacccgggaggcggagcttgcagtgagcctagatcgcgccactgcactccagcctgggcaacagagcaagactctgtctcaaaaaaaaaaaaaacaaaaaacaaaaaaaatcacccagtcttgggcagttctttagagcagtgtgagaatggccgaatgcacggggaaactcacattcgtggcttctcacatcccttcaggaagagggtcttgggcacacactggacacagcagccctaaggccccttggctgaggtgttttagtaccaaatccagagccttgggctggtcctcttgggttgacctagttggatctggcctgcgccagcccatccaggcctgatttgctcctgaccctgaagcccagggtgtcggagccccagctcctgggaggagtgggaaggagagggagagatgtgggtggccagagagcccccaagggattccagtggggatgcaggggctcagccagcatcgccatcccaacacacagggtgcttggggatgaaccaaggctgggacctgatggtggggtctccgtgcctgggaggcaagggtggctgtgatagggcagggggctgttgcagggggttgcccagagtcctgccagcctgaaaaaagtagttttgctgttgaattgtctgattatttggggccgaggggcctccaggcctgaggcaggacgtgcacatgggagctggggcctgggggccacggagcaggggccgcaggggctgaggctgtgccacgggtgtccggagcctggccaggtgtcagtccagtgggaggtgtgggggccacggtgaccggccgtgggagtgtgtgtccctcctgtgcctcagtttctacaagatgagaggccgggaccttggagtctgcccccacaggaagtgtgaggtgcagtgtgagaccaggagcttccctgggccccgtgggggtctgcgtggtggctgggggttctgcatggcaacccgggccttggtaacccccaccgcccctcctgcctggaatcctggtgacccaggcgttgggggatgggaatgcccgcaggtgaggatgggttgaggttcaggagaaaccccgccgggacttgggaacaggggccccacctcaaggcccccctgaacccagtgtgcagcccaggggtgacccggagaggtccgtgaaggacgggcgcagaggaagggggtcccatagagagcacttgggagagaccctctcaccagggtccctgggcctcctccaggacaggccgctcccctctggtcgccccagcctcctcccagcccctgccaggcatgggccgccggccgtgtgggcacgaggggcctgggcctcgccacaaccctctcaggtgggtgccatggagtccttcacccagcttacaggggaggaagccgggacgagggctcagggccggctcggggtcacctggccgtatacagcgcaaagcaactgggatggggaagagcgggcctgggccggagctgtgtgggggctggggctggaggaagcctctccgaggaccttgcagggtagcctgggcacggggaggctccacgcagagtgtgggcctcagcgccgtgagggaccgtcccgctggccaagtccagcccttgtcgcgccagggccgcagctgcagtgcgaatcccatgaggcagctgagagaggctggcaactgcctcactgcgtctgccccgggccccgcccaccgcctcactgcgtctgccccgggccccgcccaccgcctcact

SEQ ID NO: 40218 - DNA, 956 bp, Artificial sequence
  DNA replication origin
ggcctggcactgcccccacggttctggatcaggattgatggttgcaggggaagaccctcctgacaggcctgagatcccggggctctgtgcctcctgccaaccccctgccttcttgaggccagtgggtcccagctcctcctgcaccaggacaggaggggccaggaagaggcaggagcctgctctgacctaggagtcaaggagccatgctgtggatggtccaggaaggactggggtctctgaccactcagagtatcagggtgacaggctttgccctcctatctggagacttcgtgtgatgatctgaaacaccactcagagcatcagggtgactggctttgccctcctatctggagacttggtgtgatgatctgaaacatcacttttctaaactgggaacaagtgtgggcctgatgggctaaggtttctttcctattttttcaaagttgagctgttctgtgtggggaacgtccagaacaaaagggggtcctagcctctcctcctgacctgggaggccacaggtgagaagcacagtgcggccaccagcttggaggatggttcagggatcaaggcacttcccttcttgaagcaggtgatactgttcggctccgtgtccccacccacatctcatctcaaattgtaatccccacgtgttgagggagggaggtggctggatcccgggggtggcctcccccgtgctgtccttgtgatagtgagtgagttcacatgtgatctgatggctttataagtgtttggaagttcctccttcatgcttctctctcctgctgccatgtgaagaaggacgtgtttgcttccccttctgccgtgattgtaaatttcctgaggactccccagccatctggaactgtgagtcaatggaatctcttttcgttataaatcacccagtcttggccacgcacggtggctcacgcctgtaattccagcactttgggaggccg

SEQ ID NO: 40219 - DNA, 989 bp, Artificial sequence
  DNA replication origin
ggtgtggggggtacccaacgcggaggcaccacggggtgccgggggggacccaacgcggaggcagcacggggtgtgggggggacccaacgcggaggcagcacggggtgtgggggggacccaacgcggaggcagcacgcggtgccggggggacccacatggaggcagcacgggatgccggggggacccacatggaggcagcacgcggtgccggggggacccacatggaggcagcacgcggtgccggggggacccacatggaggcagcacggggtgccggggggacccacatggaggcagcacgcggtgccggggggacccaacgcggagcggactcgcagggcctgtgctttttcctttggaaatgagatctcggttttaaaatagttacagatatccactaagaattcattcccttgaagtccagtaactcctgttagggatatttatcaacaagccagcgtggaatgtaaatatttactcaatctctggaagccgtgtaatcaccaggtgtttgtaaggattcccactgacgggagattagaagggactttggttcgattctctgtgccagggatgaccctgaagaggcccctgaggaagcgaaaccctcccctgcccagctgcagaaggatcgcgccgccgggtctcctgcggtgtggacgggcctctccagtgtgtgccagcctccaatacccccgcgtcacctgcggtgtggacgggcctctccagtgtgtgccagcctccaatacccccgcgtcacctgcggtgtggacgggcctctccagtgtgtgccagcctccaatacccccgcgtcacctgcggtgtggacgggcctctccagtgtgtgccagcctccaatacccccgcgtcacctgcggtgtggacgggcctctccagtgtgtgccagcctccaatacccccgcgtcacctgcggtgtggacgggcctctccagtgtgtgccagcctccaatacccccgcgtcacctgca

SEQ ID NO: 40220 - DNA, 1256 bp, Artificial sequence
  DNA replication origin
cgctccctccacgccttcccctgattgtccgtggctgggccctggattccgttgtctggcaaggcagtcacttcccgggggccctgtagagtgggcagggctgcggctcccggggaaactccatggcacaccccgtgcctttgccgtgcagcctcctgcccaggcgcacccccagcctagtgctctgcgggcctcaggatggaagccgggacagtctctgcggggcctcagggatggaagccgggtcagtctttgtggggcccctgggctacatgcacacacccgggccgacagttcctgtttttccttttctttttaactgggaactaaggaaggtctttgtgtgcccgctgacaaggatgaaattttccagctgaccacagtagaaagttcatcatactgacttatttgttgctgtgaatgcaagataattgcccctgtaccttgtccctaagacctcgttgaaggacaagactgtattggaggctggcacacactggagaggcccgtccacaccgcaggtgacgcgggggtattggaggctggcacacactggagaggcccgtccacaccgcaggtgacgcgggggtattggaggctggcagacactggagaggcccatccacaccgcaggtgacacaggggtattggaggctggcacacactggagaggcccatccatactgcaggtgacgcgggggtattggaggctggtacacactggagaggcccgtccacaccgcaggagacatgggggtattggaggctggcacacactggagaggcccgtccacaccgcaggtgacgcgggggtattggaggctggcacacactggagaggcccgtccacaccgcaggtgacgcgggggtattggaggctggtacacactggagaggcccgtccacaccgcaggagacatgggggtattggaggctggcacacactggagaggcccgtccacaccgcaggtgacacgggggtattggaggctggaacacactggagaggcccatccacaccgcaggtgacgcgggggtattggaggctggtacacactggagaggcccgtccacaccgcaggagacatgggggtattggaggctggtacacactggagaggcccgtccacaccgcaggtgacgcgggggtattggaggctggcacacactggagaggcccgtccacaccgcaggtgacgcgggggtattggaggctggcacacactggagaggcccgtccacaccgcaggtgacgc

SEQ ID NO: 40221 - DNA, 1352 bp, Artificial sequence
  DNA replication origin
catgtccacactacctgtccacagagacactgagggacgggctcaggcaaacatccatgaccacacgacctgtccacacagacactgagggacgcactcaggcaaacgtccacgtccacacgacctgtccacacacacacactgagggacggactcaggcgagcttccatgtccacaccacctgtccatacagacactgagcaatgggctcaggtgggcatccatgtctacacagcctatcgacaaagccactaaagaatagggctcggggaagtgtttatgtcctggtgtccttacttgtaaccttgggttatttaaaacttggatatgggcaagtgggaaagagatggggccattcagcatcacactggggtatggtatgccagcttcttgtcgtgttagtgctgtggacctgtgaacctgtggacctgtggacctgtggactggcagacctgtgagcctgtgaatgtgtggtcctatggacctgtgggtgtctgaacctgtggaccactttacctgtggacctatgaactcatgtatgtgtgaacctgtggacctctggatctgtgtacctgtgaacctttgtactgtagatgtgtgaacccatggacccgtggactgcgtgtgaacccgtgtactgctggacctgtggacatgtggacctgtgagtgtgtggacctgtggatgtgtggacctgtggacctgtgagtgtgtggaactgtggacctgtggactgtggacgtgtggacccgtggacctgtgagtgtgtggacatgtggaccatggacgtgtggacctgtgagtgtgtggacctgtggacgtgtggacctgtgaatctgtgactgtgtgggcctgtggggtgttgggcctgtgaacctgagagtttgtgtacctgagagtgtgtggacctgtggatgtgtgaacctgtggacatgtggacctgtggacttgtgagtgtgtggacctgtggacgtgtggacctgtggacctgtgagtgtgtggacctgtgaatctgtgaccatgtgggcctgtggggtgttggacctgtggacgtgtggacctgtgaacctgtgactgtgtgggcctgtggggtgttgggcctgtgaatctgtgagtgtgtggacctgtgggtgtgtggacgtgtggacctgtgaacctgtgactgtgtgggcctgtggggtgttgggcctgtgaacctgtgtgctcatgtttggcatcatggttcattcagggctccagttctgtgaagtttcgtgtctctctctaggaaaggtgcacggaagcaccgcgctgctgggctcagcttctctgctgtgtagggcgcagggttttgccccacagcctcccccccc

SEQ ID NO: 40222 - DNA, 1516 bp, Artificial sequence
  DNA replication origin
agatcagaggtgcagggcaggaagcaccacattcttccaggactgctgggagtgaccggagtgggcatttccgctcccagccttgggttcctggacccatcaattcttcctgatgggatgcagcacatacaagcgcctgattctgcacagacactgcaccctgaaggagccatccgcccccctgcaagccccactctagtcggggaccccaatgacattgtagtctctgagtaacagattcagactctgcgtccagttgtcttcacatgtctgaacctcctcctttccgtctacagccaccaagttaaataacagcggataattttcttcctgcccatcgacccatctgcgtgtgtgtgcatgcatgcatgtgtgtgtgtgtgtgcatgtgtgtgcatgtgtgcctgggtgtgtgcacgtgcatgtgtgtgcatgtgtgcctgggtgtgtgcacgtgcatgtgtgtgtgcacgtgtgtgtgtgcgtgtgtgtgcgtgtgcgcatgtgcctgggggagtgtgtctgtgtgcatgtgtgtgtatgcacgtgtgcctgggtgtgtgtgtgcacgtgtgcctgggtgtgtgtgcacgcatgtgtgcatgtgcctaggtgtgtgcatgtgtgcctgggtgtgtgtgtgtgcacgcctgtgtgagcatgtgtgcctgggtgtgtgtgcatgtgtgtgcaagtccatgtgtgtgcatgtgcatgtgtgtacgtgtgtgtgcatgtgcctgtgtgtgtgtgcatgtgtgcctgggtgtgtgtgggtgtgtgcgcatgtgcctgggggagtgtgtctgtgtgcatgtgtgtgtatgcacatgtgcctgggtgtgtgtgtctgtgcatgtccctgggtgtgtgtgcatgcatgtgtgcatgtgcacacgtgtgtgcatgtgtgtgcatgtgtgcctgggtgtgtgtgcacgcctgtgtgagcatgtgtgcctgaatgtgtgtgcatgtgtgtgcaagttcatgtgtgtgcctgtgtgcatgtgtgcctgtgtgtacgtgtgtgtgccagtccatgtgtgtgcatgtgtgcatgtgtgcccgtgtgtgtgtgcgtgtgtgtgtgcgcatgtgtgtctgggtgtgtgcgcgtgtgtgcgtgtgcgtgtgtgcgtgcctgggtgtgtgtgcacacgcatgtgtgtgcatgtgtgcctgtgtgtgtgcactcgtgtgtgagcatgtgtgcctgggtgtgtgtgcatgtgtgtgcaagtccatgtgtgtgcttgtgtgcctgtgtgcctgtgtgtgtgtgcatgtgcgtgtgtgtgcatgtgtgtctgggtgtgtgcatgtgcgtgtgtgtgcatgtgtgcctgggtgtgtgtgtatgcacacacatgtatatgcatgtgtgactgggtgtgtgtgcattgtgggggtggggggagtgctgaacgtgccttcgcagtgacaactccaactctaagtcggtaccacagggctcattctcgccttccttccctgtgtgtctaacgcttcctct

SEQ ID NO: 40223 - DNA, 958 bp, Artificial sequence
  DNA replication origin
gccaaaaccctacaagacctataagtaatgccatcttagatcattcagcttcctccaagccttcagctgatgggcaccacataatgagttcagatgcaaccatcagaagagctgcccagcagagcccagtccaaagtgtcaacccacaaaaaaacagcaaattaaatgggtgattttttaagccattaagtgttagaatggtttgctatggagaaatggataactgattcagattgtgatacggatggtggtgacagtaagggtgagggtaatggtgatagcagtagtagtagtgacagtagtggggaggtcttggtgatggtgatgatgatggcaatggtgataatggtgatggggtgatggtgtggtggtggtgatggtggtggtgatggtggtggtggtgatagcagtagtagtagtgacagtagtggggaggtcttggtgatggtgatgatgatggcaatggtgataatggtgatggggtgatggtgtggtggtggtgatggtggtggtgatggtggtggtggttgtggtggtggtggtggtggtggtgatggtggtgatggtggtggtgatggtggtgatggtggtggtgatggtggtggtgatggtggtggtgatggtggtggtgatgatggtgatggtggtgatggtggtggtggtggtgatgatggtggtgatgatgatggtgatggtggtgatggtgatggtggtggtggtgatggtggtggtgatggtggtggtgatggtggtggtgatggtggtggtggtgatcgtggtggtagtagtggtggtggtgatggtggtgatggtggtggtggtgatgtggccgtggtgatggtgttggtggcggtggtgatggtggtgatggtgatgatggtggtgatgatggtgaaggtggtgatggtggtggtagtagtggtgatggtggtgatggtaatgatggtggtggtggtaa

SEQ ID NO: 40224 - DNA, 944 bp, Artificial sequence
  DNA replication origin
gggccctgggtgttggggaccgcgccccgcacgcagggccgacgggggccctgggactcgccccttggtagcagctgccctggggggtgcagggttccccccatcagccccccgacccctcccctaccccgtgtcctgtgtccggcttgctcaggcctcccgcgagaggccccgggtcaggagctcctgcagaaactgccgctcctggggcctgagggtggggagccgggagggcagggacagcagagcctgggcgcggaggttggggcagagcctgggcatgcggcgagccacccctgccacccctttcccgctggaaaccacaggtgggcttggtgctgggccctgggaccaccgtgaggtccccacctgagcccagccggggacagagtgacaggggtccctggtagggctctgtctggggtccccactccccaccctggtcacagtcccccagccagggccggggttcctccttgaggtgaggcgcagccgggttggggagaggtccctgggctccgggacagggctcccttcagagctgtcctggaaggtggcggagcggctgggggcgaggtccctcttctgatgagcaggtttgcaaatgtggtgtgtgtgtgtgtctgagactgagtgtgtgtggtgtgtgcatctgagtgtgtggtgtgtgtctgtgtctgagactgagtttgagtctgtggtgtgtgtatctgtgtgtggtgtgtgtctgtgtctgagactgtgtgcatctgtgagtgtgtggtgtgtgtctgcgtctgaggttgagtgtgaatgtgtgtgtctaagtgtgcctgagtgtgagtgtatgtgcctaagtgtgcctgagtgtggcagccacatggtagccatgagtccagggctcctgcctgctgctcctgagcacagctgacggcgggcaccgtgtgccactcccctgggtccat

SEQ ID NO: 40225 - DNA, 1014 bp, Artificial sequence
  DNA replication origin
cagatgtttagtgggtgcctctgggctcagttttgggtgggatttggatggttgaggcccttccatgtcctccagggctgggtggagtgggtagctgggcgcgtcggcatggaagggaatggagcaccactgtctggcgccccccactgcctggggctgccctggaaacagtgcagaggggagggcgggagagagatcccagcttccccagaccggctcccctgcagagctaggcactctctctccagcctggctccattccctttaaacaggactttgataaggagggagggaggactctgtcaagtgtagggacacagccgtcattagcctggctttcctttctgttgggtgccaggaccctggggcaaacagatccagcccttgaacgtccatcctccctgatgccctgtggcttggcctaagctccagctccaggaggccatcaggacgggcctcactgtgctgctggctccgcagagtggggctggcagcagccgggcagctgggcagaaagggcaccgggcctggttcagagcgtgcagttccaggggtaatgcagggattggagtgccgccctctcctcggtgcagatgggaggagtgtccaagcaccgggactaggggaggcgctgccaggagagggccctgaagggttgctgtgattttgcggcgtctggagtggatgaggtgacccaggccagacctgctcagcctggggcccagggaggaatgaagtccgttcccaaaggtgccagctcaggcagtttgtgggtgagtttcacagcttcaaggacaagcacttcatgctatttaacttgttttagaacataaaaagataaactttttcccaattcatttttaaatgttgcataacctgtgaccaaagcttgataaaaaaaaaagtccctaaaagtaactctacagataaatatcactataaatattactgatggcagcggcagcccatctggtgtggccgctgccatcacactggctgctcagggagggccca

SEQ ID NO: 40226 - DNA, 1313 bp, Artificial sequence
  DNA replication origin
tcagcgccacctggtccaggtagaactcgttctgcagctggctgatgaactgcggcacgaactgcttcatgtggaagagcaggatgtccgtgggggactgcatggtgacgctctccgaggtgtccagcacgaagtacacgtggatggggcagtcggtcttctctgtggggcacaggacctgtcacgagccagcctcaggagggactgctgttggagccccgtttcctggccccgtgcctgtttgtgggtttgacctcactgcccccgaatgccagagcccccggcccccaacccctggcacctgggtactggtcccaactgccccccaaatgcccagagcccccggcccccgacccctggcacctgggtactggtcccaactgccccccaaatgcccagagcccccggcccccgacccctggcacctgggtactggtcccaactgccccccaaatgcccagagcccccggcccccgacccctggcacctgggtactggtcccaactgccccccaaatgcccagagcccccggcccccgacccctggcacctgggcagttgttgtttctctcggtagtgtccggcgagatgacctcctgctgctgggcctggatggcccccaggattccccagagcaggagcacggagcaggtgccctggagcatcttggcagcacctgtggccctgaagtcctgcaacaggggtgggggtcgctcagacacccccagtgcctctcccctggcaccctcccccatggcaggcgcacgcacagcaggtcagcgggattgggggcactgccctcagtcttcaaggaagcggggtctgcgcccagcacacaccgtcaccagcatctggactggggggcttgcgccctcttgccccaccctgggtggggtcacagatgtttagtgggtgcctctgggctcagttttgggtgggatttggatggttgaggcccttccatgtcctccagggctgggtggagtgggtagctgggcgcgtcggcatggaagggaatggagcaccactgtctggcgccccccactgcctggggctgccctggaaacagtgcagaggggagggcgggagagagatcccagcttccccagaccggctcccctgcagagctaggcactctctctccagcctggctccattccctttaaacaggactttgataaggagggagggaggactctgtcaagtgtagggacacagccgtcattagcctggctttcctttctgttgggtgccaggaccctggggcaaacagatccagcccttgaacgtccatcctccctgatgccctgtggc

SEQ ID NO: 40227 - DNA, 1030 bp, Artificial sequence
  DNA replication origin
gcgcaagccccccagtccagatgctggtgacggtgtgtgctgggcgcagaccccgcttccttgaagactgagggcagtgcccccaatcccgctgacctgctgtgcgtgcgcctgccatgggggagggtgccaggggagaggcactgggggtgtctgagcgacccccacccctgttgcaggacttcagggccacaggtgctgccaagatgctccagggcacctgctccgtgctcctgctctggggaatcctgggggccatccaggcccagcagcaggaggtcatctcgccggacactaccgagagaaacaacaactgcccaggtgccaggggtcgggggccgggggctctgggcatttggggggcagttgggaccagtacccaggtgccaggggtcgggggccgggggctctgggcatttggggggcagttgggaccagtacccaggtgccaggggtcgggggccgggggctctgggcatttggggggcagttgggaccagtacccaggtgccaggggtcgggggccgggggctctgggcatttggggggcagttgggaccagtacccaggtgccaggggttgggggccgggggctctggcattcgggggcagtgaggtcaaacccacaaacaggcacggggccaggaaacggggctccaacagcagtccctcctgaggctggctcgtgacaggtcctgtgccccacagagaagaccgactgccccatccacgtgtacttcgtgctggacacctcggagagcgtcaccatgcagtcccccacggacatcctgctcttccacatgaagcagttcgtgccgcagttcatcagccagctgcagaacgagttctacctggaccaggtggcgctgagctggcgctacggcggcctgcacttctctgaccaggtggaggtgttcagcccaccgggcagcgaccgggcctccttcatcaagaacctgcagggcatcagctccttccgccgcggcaccttcaccgactgcgcgctggccaacatgacggagcagatccg

SEQ ID NO: 40228 - DNA, 1721 bp, Artificial sequence
  DNA replication origin
aaggaccccaaaatgccagatcgatttttccacataaaaatctcactggtgtccctggtagagacagctcctctgtcccaggctaacatgtgttccctgtcacagggaggccgaggcgactttggcttgaaaggagaacctgggaggaaaggagagaaaggagagcctgtgagtgtcaccgtcccgaagcccacagcagctgggcagaggcagggaggggccctgaggctgagcgtgtgcatctatgagtacaggagaacgccaggcagcttggccccagccatgagcaccacccccaccttcctaaagggaacggctggctcaggggccccctccctcaacccagcctcccttccagcgtcccctccccagtgaccccccaacatcccccccacagcatcccccacaagggtcccctccctagtgacccctccacaacatccccccagagtcccctcccagcatccccactacagcatcccccaccagggtcccctccccagcgaccccaacatagcatcccctccagagtcccctcccccaaaagatgcctccacatagcatccccctcagagttcctacacacagcattccccaagggttccctccccaatgtcctccccacagttatcccccagaaggtgctctgtgcctccaaatccctagcctggccaagggtttaaccagggctgcaggttggtctggaactgagcacaaaacaagggatggataacgatggatggatgggcaagtggatgggggtgggcaaatggatggatgggaggatgggtgatggatggatgagtgaatagaagagtgggtggatagaagatggatgaatggatggattgctggatgagtgggtgggtggatggataagtggatacatgggtgaatgagtagatgtatgggtgagtaggtgggtaggtgggtagatggatgggtgggtgggcgagtgtgtggttagatgatggatggctgaatggatgagtggggggatggatgggtgagtgggtgtatgtatggatgggttagtgggtgggtggatgaatggatgggtgcataaaggatggatggatgaatgagttagtgggttggcagatggatggatgggtgagtcagtggatagatggatgggtgggtggatagaggatggatggttgggtaggtgatgggtggatgagtggatagatgggtatgtgagtgagtggggggatgggtaggtgggtggatggatggttaggtgaatgagtggatggacagacggacagtgggtggatggatgagtgaacggatggaccgatggatgaatgggtgggtgggtagaggatggacggacaggtgagtgggtgggtggatggatagatgggtaagtgagtggatagatagatgggtgggtggacagaggatgggtggatgaatggatgggttagtgggtggctgggtggatggatgatggatgggtgactgggtggatggatggatgggttagtgggtggctgggtggatagatggatgggtgattgggcgaatgggcgaatgggtggatgggtgggcgtggagttggtgggtacatgataatggggtggaatacccatggattggaatgagctgttttggctgctatttctgggacacccagctctgccaggcccctacccctctggtgggccaggctctgacggtggccactcatggcctttctagctctggtgccagca

SEQ ID NO: 40229 - DNA, 753 bp, Artificial sequence
  DNA replication origin
agtctcagcctcatccttccttccccagggtgagcccggcccccctggagaccccggtctcacggtaggtgtcacatggggcagaaccagtgtccttctcctgccaaaactagacaccaagagcagcaggggtgggggaaggtcagctggcacggtcagagagcaagatcagtggaggaggtcagagggcaaggtcagagagcaagcttggttggggaaggtcacagggcaaggttggtggggggaggagggtggcagcgaggttggtagggacaggacccgccagcctccccgcatggctgcctccacacgtgggctggaatgtcccgggacccccaggccaggaccttgctgtggaaactcttctggggccccggggggactaccctgcctgccgtgtgcattgcaggagtgtgacgtcatgacctacgtgagggagacctgcgggtgctgcggtgaggcactgcccacggcagggtcggggcccatgcaccgggtggagggcgggagtgcagcagggctgggtcatcgctgggtcctgcatgtgcacgtgaccctagggtctgaggtctccccggtaccccccgatgaccctgccacccccccagactgtgagaagcgctgtggcgccctggacgtggtcttcgtcatcgacagctccgagagcattgggtacaccaacttcacactggagaagaacttcgtcatcaacgtggtcaacaggctgggtgccatcgctaaggaccccaagtc

SEQ ID NO: 40230 - DNA, 793 bp, Artificial sequence
  DNA replication origin
aaggactgtagccccgctgaccccgattccagatctctggcctccactgagagccagcctgtcgggggcagccctgggaagctagtgtggcagggagggcccagcccggctgggcgggtgcccgggctttagcagagggccagcgcggtctcggggtcccccacgatgtccctgtgcaccagcttaaaggtgtcaatgaacagctccatccagtcctgccgctctaccccggtggcgaacttggcccgctcggcggtgtagaccagcacggccaccagctgggagtaggcggccgggtcctgcgtgagctccgtggcgtttagcaactgttggatcaggggaatggtcctggggaaggtggcgtccggcccctcttccgtgcggaggaaggtgaccgggggctcgccgccaggccacggtgcatctgcaagggagcgtccagagaagactgtaaggcctgcggtgggcgtcggcctagagctcctcctcgggcagccgctcagcgaggccagagtgaagagcggcatttgggctggcgagtcggtagaggaaatgcaggtggagcgggtgtgtggctcggccttggcaggaggcgtgggggcagtgagcacagggacaggaagctggcagggagctaggagacccgcacggtggcacctttgggggacaccacggaccccgagaaaacctttcagcacaaaacagctccgtccaaacctgtgccggagacaggccaaactccagtagggcttccagtgccgcaggcccgtcgccaggaagaccccagccaccc

SEQ ID NO: 40231 - DNA, 2087 bp, Artificial sequence
  DNA replication origin
ccgctcttcactctggcctcgctgagcggctgcccgaggaggagctctaggccgacgcccaccgcaggccttacagtcttctctggacgctcccttgcagatgcaccgtggcctggcggcgagcccccggtcaccttcctccgcacggaagaggggccggacgccaccttccccaggaccattcccctgatccaacagttgctaaacgccacggagctcacgcaggacccggccgcctactcccagctggtggccgtgctggtctacaccgccgagcgggccaagttcgccaccggggtagagcggcaggactggatggagctgttcattgacacctttaagctggtgcacagggacatcgtgggggaccccgagaccgcgctggccctctgctaaagcccgggcacccgcccagccgggctgggccctccctgccacactagcttcccagggctgcccccgacaggctggctctcagtggaggccagagatctggaatcggggtcagcggggctacagtccttccaggggctctggggcagctcccagcctcttcccatgctggtggccaccgtgtcccttgctgcggctgcatcttccagtctctcctccgtcttcctgtggccgctctctttataagaaccctggtcattgaatttaaggcccaccccaagtccagaatgacctcgcaagacccttaactcactcccgtctgcagagtccttctttgctgcatcaggtcaccctcacaggctccagggtttgggtgtggaagtctttggaggcccttacttagcggcccagctgggctgccgtgcgtctgggatggggctgagggagggtgctgcccaggtgctggaggatgttccagcaccaggttccagcggagcctcggaaacaggccccagaggctggtgagcctcgctgggtgtgggcactaatcccgtgcatggtgactcgtgggcgctcacggcccacctggtggcaggtgaaggcttccggttgggcagcagatagtcctgggggaagctggcagtcctggcaccatgacgtatctgggctggtgtcatgcacagtagggcgaatggccacagctgcctgccagcagccctgatcccggggtgtctgcacccttccagcccaacctctgggtctccaaaagcacagtcgggggagcatccaccaggcacaacctctgcggtcctcagaggactgagcagagaatcccagggtccacaatgttggggagcggcagggatcaccatccaaagggagcggcccccacggcgagctgaccccgacgttctgactgcaggagccctcatccaggctgggctcctgccgggcacggctgtgaccatttctcagggccaggttctcgtccccacacccactgcacagggcaggccaggctggtcttcccactgtggggatgaaggatcctccacaggaggaggagagcagagtccacagacatcccaacagcctcagcctccctgtgcctggccggcccccacagcttccccgtctcctccaggccccacagacactgatgaatggacagagacccccaaaaccagctgccccttgcatgtctgtctccatatgtttggtgacagcagtgaaaatgttattagttttgagggggtttgggaagcccagcggtacctgaggagtttctggacatttaagccggttcctaggtgtggccttaacagggaggctgcccttcctttcactgaatgagctgcgtcactcataagctcactgagggaaccccatctgccagctcgtgcgtgctcagacggcgtccatgtctcaagcgttctgtgaaggctgcggtgcagcgtgaggtcaccctgctgtgttcagagctttgctcactgcctgcggggctggaccgttgcacctccagggcccccagaaaccgagtttcgggtcagggtcctctgtgtgcattcctgggggtccatgtaccagctgtgacgacgtccaggggttgggctgagaagcagacacccttggggaaactggctctgtccctcccctcccccatcccaggagctgaggtcttggtgaggccacag

SEQ ID NO: 40232 - DNA, 1322 bp, Artificial sequence
  DNA replication origin
cctggaataggctgagccctggcccagtgtgactcggatgagctcatcccagagtaggctgatctctggcccagtgtctcgggtgagctcaccttagagcaggctgagccctggtccagtgtgacttaggtgaggtattctagagcaggctgagccttggtccagtgtgatttgggtgagctcatcctagaataggctgagccctggcccagtgtgactcgggtgagctcatcccggaataggctgagccctggtccagtgtgactcgggtgagctcatcccggaataggctgagccctggtccagtgtgactcgggtgagctcatcccggaataggctgagccctggtccagtgtgactcgggtgagctcatcctagaataggctgagccctggtccagtgtgactcgggtgagctcatcccggaataggctgagccctggtccagtgtgactcgggtgagcttatcccaggataggctgatctctggtccagtgtctcgggtaagctcaccttagagcaggctgagcctggtccactgtgacttaggtgaggtattctagagcaggctgagccccagtccagtgtggtgacttgtatccttatccaggagatcaggaaccctgggatgctggggagaggccggggcaggcccttctctagtcctcctctagccctccagaggaagcatggcccggctgatgcctccaggcctgtggccgatactggtagttgttcaagctgtgtctgtggtgccctgtgatggccaccaagcccactcctgtcaggtcagcacctgcctgtggagcctctggttcactgtggggctcctgagctgagcctgaaggaccctggggtctgaacagcaaaaactcactgagatctccacacagaacacaacaggctcagcacctgctgtctccccgtctagtgttaatcatgcgtccacccacagaagaccctcagccatggtgacacttcttagagcactttgggcctggctggggctggagggagagtttgctgatcaaggctgtggggtctgcacaggcggggtcagccagcacctgcagttgatgtcctaggaggtcagggctgggcccgggggagccattgaccctggtgggcgagcgacagctgcagtgtttccctcctggccacaagacacctttgaggtctctcctgcgcacagaagctcgcaagcaggcacgcaatgggttcaaagcctttattgggtcagggcttgctccagagctcaggggccaggtaggtcaggagccttgggatggctgcagggggagggaggccgggcagcctgcggag

SEQ ID NO: 40233 - DNA, 1160 bp, Artificial sequence
  DNA replication origin
cagggctcagcctattctaggatgagctcacccaaatcacactggaccaaggctcagcctgctctagaatacctcacctaagtcacactggaccagggctcagcctgctctaaggtgagctcacccgagacactgggccagagatcagcctactctgggatgagctcatccgagtcacactgggccagggctcagcctattccaggatgagctcacccgagtcacactggaccagggctcagcctattctaggatgagctcaccagagtcacagtggaccaaggctcagcctgctctaggatgacctcactggagtcacactggaccaggactcagcctattccaagataacctcacccaagtcacactggaccaagctcaccctgctccaggatgatctcacctgagctcactgcatctgcaaggaccccatttccaaacaaggtcacatccagaggtctggggcttagggttaggggttggggttggggttgggggtcaggggtcaggggtcaggggtcaggagtcagggtcagatttagggtcaggtttagggtcagggtcaggtttagggtcagggtcaggtttagggtcagggtcagggtcagggtgagggtgagggtcaggtttagggtcagggtgagggtgagggtgagggtgagggtgagggtcaggtttagggtgagggtgagggtgagggtgagggtcaggtttagggtgagggtcaggtttagggtcagggtcagggtcagggtcaggtttagggtcagggtgagggtgagggtgagggtgagggtgagggtcaggtttagggtcagggtcagggtgagggtcaggtttagggtgagggtcagggtcagggtcagggtcagggtcaggagtcaacatgtgaaactggggaaatgcagttcactctggataccctgaaactttgttgtcctttgaaaagactcactcttttcttcatactccaccgctctgtcatctgaccacacagcctgcagctccaggggagtacgtcagttattttctcttcctttcctccttttcccatcccacaaaaaaactacgcaaatgccagcaggagatgcagaagaggcccgcctgttttgctaagcccctgcgccctgagtgtcagccctcagatctctgtgctccag

SEQ ID NO: 40234 - DNA, 1183 bp, Artificial sequence
  DNA replication origin
ctatactctcaaattacttctagatggactattacatgtgacagatgatgtatgaatgtatttgttagtcagcactgcaggatattaaaaagaagattactgtgtccttgagtgaagcagaaaactcaaatgccttattggagagatttcccattctgaaaatagaacatacttgttcatgaaaaaagatgtcatcatccaagacaaatgacaagaatcctacagggagaaaaaacacccaaggtgtgtgtgggtacagggccatcatcactcagcatgaaaggttcctacatatccggccggcagggggtgacagggagggggtgccggggaggggagactgggagggaatgctgggagggaatgctgggaggggaggctgggagggaacgctggggaggggaggctggggaggggaggctgggagggaacgctggggaggggaggctgggaggggaggctgggagggaacgctggggaggggaggctgggagggaatgctggggaggggaggctgggaggggagtctgggaggggagactggggaggggactcaggagggaaggctgggaggggacattggtgaggggacattggtgttggggatggtgaggggacatttgtgaggggacattggtgttgggacggtgagggggcattggtgttgggaccatgaggggacattgtgaggggacattggtgttaggaccgtgagggaacatttgtgtggggacattggtgttgggacaatgaaggggacatttgtgaggggacactggtgttgggaccatgaggggacattggtgttaggaccatgaggggacatttgtgaggggacattgatgttaggaccgtgagggaggagacatttgtgaggggacattggtgttgggaccatgaggggacatttgaggggacattggtgttgggaccatgaggggacatttgtgagggatgctggtgaggggatgctggtgtggtgtaattggtgaagggccaatggtgagcggcagttgctgggtggagctgtgggtagagcctgtaggtagctggaagtcccttccagtgggactgacgttcctgccctgcagggtccgaggctgcacacgtgggagctggcacgagagaggggagcgccctctccctgcagaggccctgggcagctcctgtgtagctcctgtgg

SEQ ID NO: 40235 - DNA, 1404 bp, Artificial sequence
  DNA replication origin
ggtccccgcaggttctcagccgagtggtcacctccccgtgggtgcagacgggcgtggggcctggggccgccccgggaggactgcgctccccccaccaaccccggccagacccgctgagccgcgcccaccctgcaggtacctggtccctgagcgcgggcctgagcgaggcctgggcagcaagtccctgcgcgccttcgtgggggaggtgggtgcccgctctgcggcccccgggggcggctcggtggcggcggccgctgcggccatggtgagcgcggggggaggggcaggggaggcgcagttgttggggggagggcggggagggggaagggcgctgttggggggagggcacggggtggggagggcgcggtggggccgccctgggtggagacgtgggggccacacgggtgggacccccgcagggatcacccgggcccctggctcttcctggggtcggtcccgggccgtctggggtccctgcgacccccacatccacccctctcgcagggtgcggcgctgggctccatggtgggcctcatgacctacgggcggcgccaattccagtccctggacacgacgatgcggcgcctgatcccgcccttccgcgaggcttcggccaagctaaccacgctggtggatgccgacgccgaggccttcaccgcctacctggtgagtggcggccacagcagggctccccgggccccaccaacagcgaacccccagctggggccccagtgagaagcgggtcagcctccggctggggaggggctggggaccaggaggggcctgagggcgtcaccactggccgctgtctggaccttgaccaccagcaccgccctcaccccggcaagtgcttgggcccagcagggtttgagggttcggccagggtgaccccacattcacaggccatggcagccggtacaagggaacaggcccctcccagcaggggagccaggagcccaggcttgggggaccccacagacctggagcaaggcagggcccttctttagaagcctgcaattccaggaaaggaggcctgcaagaatctcaggaacacagtgatgagtgctctcaggcaggccagagacgacccgtttcagccacagcataagacagaaacaccatcttcagataacacccactcaggcaggcagtgaccccacctccctccaaacgggacaggaacatgagcatcagctggcaggatgtgcccacagatgggtgctgggtgctcagagcctagggcaggggccagagagcctgggaaagggcagtgacaaggtcaggatgctcccaagcagttccagcccaggagaggacaggagggaagggcagaaaagagagagagagggaggggagagagaagagagggagagtggggagagaggcagatggcggagagagaga

SEQ ID NO: 40236 - DNA, 1503 bp, Artificial sequence
  DNA replication origin
ctccacatttccttgtcttcttatgtgtgaggccccgtctgctttccagtgtggcgttttgtcttcttcttttttttttttttttttgagatggagcctcactttgtcacccaggccggagtgcagtggtgtgatctcggctcactgcaacctccacctcccggattgaagcagttctctgcctcagcctctcgagtagctgggattacaggcgtgtgccaccgcacttggctaatttttgtattttttttttttagtagagacggggtttcaccatcttggccaggctggtcttgaactcctgacctcgtgatccgtccgcctcagcctcccaaagcactgggattacaggcgtgagccaccgtgactggctggggttttgtcttctttacctgaagggccccatgcctgcggcctgcacaggtctggctgtgcccgtggctgcgtgctgcctccttgtggtgaggctgctttgctttgtgttgtgtgatttttgattgccagtgcatgctctgtggaattttatctatggtaattcttggacacctgggttcaaagttttctcctccaaggagggtttgtgctggcgcttgtggacactgcctcacaggaccccctgaagctgagtttttggcttggagttctggaaccacacaagagtgaattcggtgtcgggtgaggcctgcagccctgtcagggtggcttgtgattaggaattcccaggagatttttttttttttcctgcttcacccaaagggaaggcagggactgggaagtacctcaactgtttcctctggcgggtggctgtttctaattcatccttgggggtgtcaccttccaggggtctccagtcggaccccactctgaaggccccagacctcccccactcatcaggggctgccagagaggggcagttgcccccagggcagacccagctccaggctggcaggcctttccggactcgtctttctggtcgtgtctggtttcgaatgatgtcctgtctgctagcttagccaggcctttaaaatgcccggcatcttcctggggttttctgcggaaggaggctttgccttgtggcttgctggttctatgccacggggaggcactctccaccccgcccggctgctgtccgtctctgtggggtggggtgggggtcgcatagccaacgtgttctgaatgggtttcccagaatgaattctaatcttaaatgggactgtcacaactttattttgaatttaggtaaaactcacttttgtggcatacaagtttatgtgtgggtgacttggggctgttcctcagcttttgaggacttgttagatgtgaagacttggtgaattaaaatctttcccgcccgtcagcgatggggcagtggtgctggggggcggcgaagcatgagcagcagtttgctgaggggtccccagggggcaactcctttctctgggcctcaggttccccaagggcaactcagggtgatggctgtttccagaagcctgtacggggtgc

SEQ ID NO: 40237 - DNA, 1470 bp, Artificial sequence
  DNA replication origin
tgcccccaccccgggcggtcgggcctgggaaggaggtggacctgcccctttgtcctggctggggtggctgggccgggcccctccttcccgggaccccggggggctgttccctcccgtgggggatgtctcaccccagagcgaacttgctcacagctccagcaggccgactgggcgcccgactttggtcccagctcctttgtccccagttggggggccacggccacgggggcgaggaagttcctcattgcttttaacatcaacctgctcggcacaaaggagcaagcccaccgcatcgcgctcaacctgcgggagcagggccgcgggaaggaccaggtgaccccgttcactgaccccatggagccccacccagcccctcgggaaagggttagaggctgagagcctcaggcggggaggtcggtggggatggggcaccggccggacagggttcggcctcccacctgcagaccggcccagcctccgcgtccacaccgtgcggggaccgcgcaggtcggcaggtcaggggcggagtgaagctggggagctctggcctcctggggattttccagggaacgaggcaggacttccctttgttaacatgtggcagcatttccatactgctgggaaacagcgacttccggagtcccaggtgccctcaggggccccccatatccctccagatgccttgggagccccgacacccctacaaaccttcaggtgcccccaggcctttccctccacgtctgcacagcagtggtcacccggtctgagcgtcactccgggtatagatacccggagaaagcgggggggaccacctgcccatctgttccccactcagagaccccggtcccacaaacagccaaggtcctgggacccggcttcccgacctgcagactcagcacaaaagcacagggacctctaagtcctgctttaggccccggccaagggcagaggtcagagtccccccacgtggactcagtcaccccgacaagtgcggggctgaggggacttgtcgggagcggagcagatgggatgggagaacggcatgggggtgcctggggccccacccctcagcattcccccaacatctaggacacagcgtggctggaaggcagggcctaggctgggcgggggcctgccggggtgggcctccggtgtctgacccttggggcctccgtttccctgtggcaagcgaagtttctctggccctccccggccagctcagtgagggacggaggagaaccacagcacccacccaggcacaggctcctccccgtccagctggggaatgcaagtgccaggagagactggcagggccaggcaggatgagcttcctagtccaggctggggaacgctcttcctttgcagccaggacgtctgaagaaagttcagggcattggctggtacctggatgagaagaacctggctcaggtgtccaccaatcttctggactttgaggtcacggcactgcac

SEQ ID NO: 40238 - DNA, 1098 bp, Artificial sequence
  DNA replication origin
ccagcacgctcagcctggtcctcacactgtctcagcaatagtggcgaggatggcagggctgtcacacattaacagttcagagctcgatggagactgctggggaccccactctggctggtagctacaacattcagctcccaggtgcagatgggctggatcctggggtgcgggcccaacctcatgcccggcagacgaggggcccactggcctgagaagctctggctgggtgctgatttctggccttacctttgagggtggcctgtggccacaccggcagtgggctggctctgtggctgggtgctgatttctggccttacctttgagggtcgcctgtggccacgccggcactgggctggctctgtggctgggccaggagctttgggccccaggcctagggctgcagccacacagtctcggccaggtggtccatgcccccttcccctcggtgccagcgagtggatactttcagcaagcctgggataggaagggctgtgatgaaacgcaccaggatttatttcagttgggtgtggtgggatacagacacaggactcctgactttaaaggagagtgtgtcacaaagtactgcagacccagctacttaaaccacaggagggcacgtaccgtgccacacagggccgcccggggcggggcgccgtggcaacaggacgcagaaggcgagaggggagagcatggccagaggctctgtgggggtttccctgggaagagaggccagggagggtaggcacgaaggagcaagtttaggattggacaggttaatttccctgggctccgggctatggggtggtgtctagttgaccaccgtcctgccccagggtgattgagggcagaggaacatgggtttggtgagtgagtcagataaggggtggttgggtttacaggctccaggtgggttggcttgtgccttaaaggggagctctgtttgcaggcaccttttgctgtctctaggaattagccagtcctgggagggcagtctccacctagccagtaaggcccccgagaggtcaaagcattgtaaaccagaaaacaaaaaccatatgagttatacaggaacagtctggtgggcaggtggcattcagc

SEQ ID NO: 40239 - DNA, 1097 bp, Artificial sequence
  DNA replication origin
aagccaggaaggagccgcagccggcaggggccccctcttccccctccccccttcccctcccccgggcctccacgcccacccgctttcccgcccgggacggcgagtcctgtcccagtttgggtttccccgaatgccgagctggggcaaggacttggttctggcggatggttgcgcacccctgccggcaaaatggaaacgcagccccttgttcaaaagcgaagaattcgaaagggcaacagccgcgttacagtgaacccggaccttagggctgagcagtggcaacgcaggcgggagagcgccggggagccccgagaccgtgggggtgctgggggtgggcgagcacaggggagccccggagaccatgggggtgccgggggtgggcgagcgccggggagccccagagaccgtgggagtgttgggggtgggcgaggacaggggagccccgagaccgtgggggtgccgggggtgggcgagcgccggggagccccggagaccatgggggtgctgggggtggacgagcacaggggagccccggagaccatgtcaggtgcaccttgcaccatcccggagcggggagctggggagctgacccatcaattcccctccccctgggtcatctccctgccggaggccggaacagcgagaagacgggccctcagtgaattggcgggaccttggggctgaggagatacccagttccaaagtgccctggaacgaggggcatttaccgtgtctcaggggagtcttggctcatgctgcacaagccagcacgctcagcctggtcctcacactgtctcagcaatagtggcgaggatggcagggctgtcacacattaacagttcagagctcgatggagactgctggggaccccactctggctggtagctacaacattcagctcccaggtgcagatgggctggatcctggggtgcgggcccaacctcatgcccggcagacgaggggcccactggcctgagaagctctggctgggtgctgatttctggccttacctttgagggtggcctgtggccacaccggcagtgggctggctctgtggctgggtgctgatttctggccttacctttgagggtcgcctg

SEQ ID NO: 40240 - DNA, 922 bp, Artificial sequence
  DNA replication origin
aagaatattatgtacaattatgtattaattaaaatttcaataaaaggagatagcctggaaaattactttcaagtgactcaataagaagtagaaaacctaaatgaaccaatacacaaagaaggaaaatctaaaagttatgaaatgattattccccagagggctgcaggcctggatggtctgtgggtgagtgtgccaagttcccaaacaagtcataatcccgacatcatacaaatgaggctggaaccgtagaacaggttaaaagatgctcaattaggtttcaaaatttgtcacaactctgatgtcaaattcctacaaagataacccccagaaaaaaaaaaaaaaaaaaaaaaaccatggccaggccaaaaataattgcacaaagtctcatccaaacatgatcaagaacacacagcacgaggcaggagtgtgcacagagcatgaggcaggagtgcagagcatgaggcgggggatgcacagagcatgaggcaggagtgcagagcatgaggcgggggatgcacagagtgtgaggtgggggatgcaaagagcgtgaggcgggggatgcacagagcgtgaggcggaggatgcacagagcgtgaggcgggggttgtgcagagcacaaagcggggaggtgtgcagagcacaagatgggggtggagagcatgaggcaggggtgtgtgcagagcacgaggcggtggggtggagagcaagaggcagggtgtgcagaacccagtggctgtgcagcgtagcaagataccagatacggtccctggcaagaagctgagatacctccactggtacagagataggctcacaaacaccgaacaagatgagccatttctcaaattttctgttttccaaaaataagaacaggaaggactcttccacagcatccagcctgtgcaaacctccctcctctgggcag

SEQ ID NO: 40241 - DNA, 937 bp, Artificial sequence
  DNA replication origin
aatcatctgacaatccaccaccaacaactagggagcgagtgggcaatctgggggggcctggctgtcctccaggggacacctctccagtggagacacggcgagtggcatcgtggccgtgctggagggaccaggacaatcccgagggagacgagatggggcagctgggaggggaggcagaggactgctgctcccactggcccttcgcgtcactcacttgtaaacctgggtgagaagacctggagacctcgctccccagctgacggggacagatgagccctcctgtgacgtgggaacgatgccggcgcagtgccctcctcctccatcagtggggtgtagggaccgttcagagagcgtttgacagtgtctgtttcaacatttcaaatgcacacagcctttgacccgaggacccaggtgtgggatcccctacacaaagccacagggcgcctgcgcaggccacccacggcggcggcgtccacggtcgcagagaactgggaacagtgctgcctgcctggggcccccacagaaggagcccagtgttcaagtgtgccggggagatctgcagataaggactggtggggaatgccgcgaaatggatcgttaagggggaaaagtcaagttgcggaacagcacaatcccgtgtaggtggaccaaaaagatacacagacagacacacagatctccactaaagttccagagaaaacccaagagaacgttgattgtggctgcctttgcggagggggccggaggcgtggcctgaggcttaaacgttgcaccctccatggcgtttataagtttaccatgagcacgtgttgttgaatccgtaagaaaagcaggtttttactcatcctgttttgaacacagatgctaatgaagtcttggcaacatgcagacattgctggtggtggttcctttgtttataaacttctccttttttgca

SEQ ID NO: 40242 - DNA, 1270 bp, Artificial sequence
  DNA replication origin
tcctggattcaagcaattctcctgcctctgcctcccgagtagctgggattacagtctcaggccatcacgcccagctaattgttgtatttttagtagagacagggtttcactatgttggccaggatggtctcaaactcctgacctcaggtgatccgcctgccttggcctcccaaagtgctgggagccatgagccactgctcccggccttatgtggtgtcttgtaacattttatggctatctattgaaagcagtggacatctccccagaaaacactcgtgcatatgagtttaccccgttatgcattttgggaagtgagaccctggaaccacacagagcccctgctggcttccttgagtgttgtgggaaccctggtgggggtgtcccctagagagctatcagcagggctgggggggtcccttgtgttagatgactttggtgcgggggtggggggtggggggtcaagttaggggaggcaggaagtgaaggggccgctcaagaaaggacagcagcagtgtcctgatgcaaaggccgggggcttaaccccggaagccagtttgggtggtgacggggaggcacagggatggtgagatcaccccgggagggtagacagagataccagagtagggggcagggttagggtgccgctacctgaggcgggccgtagagcacataggttgggaggtgtcctggggccattcaaatgcccgctggactctgcgcctcgcccgtgtgtaatgagcggcagaggaaggactgagacggcagtcagcacagctgccagggcaggaggggtgtgggttccacacgctggtgctggtgagggcgtctcatctgccccacttgggggggccgtcggtcagtgctgccgcatgggcacgccagggtgctgcttgtctttgctggagttgcttggagggtgggttgggaggtgaaaggaggaccacagacctgaaccactccagctgcgaaatgctggaagtgtaacccaaaatgtgagaaaaaaaaacacccttttaagtaagtgggtgtgaaagtgggccaaggcctgatgccacagtcagggagcagggaaggctcagcattgctcaccctcacttaaggatggggctagcatcacataaggcatcacataaggatgggggctagcagggaaagggagagaaaacacatgaggcacacacagaccctgggaagctggtggagctgtgctaacgtcagcagaccagtgatcaaagacccaggccttggggagattccacagacctacagt

SEQ ID NO: 40243 - DNA, 1349 bp, Artificial sequence
  DNA replication origin
ggtggggaggtgggggcggggcctggtgggtgcgggtgggggcggggctggtgggtggggccgaagggcgggggcggggcctctcgcgcgccctctagaggcttgcgtcccgggagcccggcctcgtgcgccgcgctttgaggtgagcctctctgagaaatttgtgaggagggtccagccgcgggtcggaaggaaggacgtggggagcgaggctcgagcgagcgacagcgagtgcgaaggtcgggtggcagggaattgctctcgcgctgcaggatttgcccggacgccggggccgggggtgggggcgggaggccgccctgaggtgaggtgggcgcgggccgtcggctccagtgcgagaccagggggagggcggggcggagcggaggagccgagggcgccgccggcgtccctgggaagctgagcgccgcgtagcttcgccggggggagtggggtaggcgcggtgaggccgtgggcccccacacctggcggaccacaggggccagaagccctggagccccgccagggaagggctgcgtcgctggccaggaccgagcgcggtagagcctcagctgctcacggggtcgctggagttgggggtggccccaggagaaattaaaggtgaaaagccttagcagcagagggaagaggaagatggaggcagagcgagtgaccgaacttggaagggacagccgggcgcaacagggcagggggcgtctgactgttggaaacatggctgacgtctggaggctgcagccagtggtccgtaagtcaggtcaaggacccacagaagaccccagcatgtcttcacctggcccacagaagccctgacatccagttacaactgccccagcctagtgagcatttcggcacccactcctcaattcctacccccagcctaacttcgaaggggcggtgagccacagcaagccggaggagaaagttggaagagagagtggacaaaagaatacccacaggcaccttccccacagtggaatagcggggttttagacaatcaaggataatcacctcttcctatcccagttcagaaacggatgaaaaagacacagcaataagatgggtgggtatcaaaatatcagctttgccacaaattaaaaacctagcttgaaggacaaggcttaaatctgcaagcaagagggcaagctactaaatcacccgttaagtcagacaaacatatcccccagcctctaggccatgaaactgcctcaccaagcactatgcaattgagtgcccaccagaagacacccctccagtcaacccacagaccccagaaagagtacccagaggagcctgagcacactccaccctatctgttctctgaaattcaatca

SEQ ID NO: 40244 - DNA, 1216 bp, Artificial sequence
  DNA replication origin
cctgctgccactctgcctccgtgccgtgtgtgaatcccagcaagtgacagagtccgtgggtggccgtcacctgtcagaataattttaaaccggctcagaggatgaccccacaggaacctgccccttcagggccaccccagggccacaggctgctcttggtatgtggctgcaggaccccagggttgctgtgagacccctgggcaggaattacaggcactcagcttcagttcccttccatctaaaatggaaagcaagcaagcccctttgagagtctttagtcaacgtggattgctgtctgggccagcactgtgctggggaggggcccccaggatggaactgcccagccgcaggagcaatgggcaaggggggatggaatatgaagaagtggggaggggtgggtgccacggggtggtggggcagtggggcaccggccaggggtggcctccctgccctaagagggacgaggcaagcgcacagcccacaccccaggtccaacccccagtcaggatggggcctccggtggcccctgattttactgaacactctgggtagagctttggggcacaggcagcacagggagtgcgggagaggtatgaaggcggaggcggagggaggtgcagctgctggtgagtcaggaagacccacagtcgccatgtccccctggagagagggctggattaaagcccacaggggaggggcacccggatggagcccagagctgggggaagaggaggaggaggaggaagaggagggagggcctgtggaccctgagcaggcacagcaccaagggggtttatggagccacatgggccataggggtagcactcccctggggtttgggtggagggaagagggaggtctgggaggtgggtatccttggggctggcgggaggtgcctggagacatggaggacaaggcagggtagatggagagtgcagctgagagccagccctgagcagagctggcctggcctgtggctatgaggatggggtcctgggctggtgggctggccctcccctcagggtaatagggagccccaaggagagggctctgggcccgaggaagaaatgccaggggaagaccagggaacagaatcttaggtttggggaaaatggaagcagatgtccacatacccccccgcccacagttgctggccacagagatcccagggctgaatctccggctgggccacttcctgtcactctcagaaactccc

SEQ ID NO: 40245 - DNA, 1470 bp, Artificial sequence
  DNA replication origin
ctcctgggctcaagcaatcctcccacctcagcccccagagctgctgagataacaggcgcatatcaccacacctggctagttttttaaatttattttttgtagagacggggtcttgctatgtgacccaggctggtctcgaattcctgagctcaagtgatcctcctgcctcagcctcttaaagtgctgggattacaggcatgagccatgcacccctacttctttagtgggagtctgtgccacagctgtggacacaggtgtccctagttattaaattagactttgtggtattttccccatcaggatgttcacacttccatgtggctaaagctattgatcttttctgttctggctcctgagctgagattttcttaaactctttctggatgaaatctttatttcatcaggctggtggcgtccacggcctcaactttacctccgtgatggaagagggggatctgaggctcccaggtgggccggcgccgccctacaggaaaggaggggtccctgggaggggctgttgccctggtggggttcacaggcccctcactgcaggggacccggagcaagggatgccccctggaatggccccgtgaccagaaagcgagcctgcccagcttccccaggaggagcctgcagtccacactcgcgtagccactccgggtggtggcagggtctctccctgctcccttccatagtcccgccacagcccacagccctgaggaagcctgggggtggagggtgccccggccagggtctctgtgactcacactcagggtgggccaggcgtccacaggctgggggcgggctggaggacagtggcagccccaggtggccacacagcatggtggtggtggtggtggtggtgcacggcaggcagccttggcctggcagctcgtgggaccctcgggggcacatgtggcgggtcctgccacagacgcacctgctgcttaggacgcagcccaggctgctccccacctccactcccgccctgttcctaactggggctggatcccatgtgataggcaggatggcagggtctaagcatcctcccagaggaggctcctcccccgccccaaattgtgcaacccattcctcatctgggctgggactcgatggggatgggggcttcacagccagactgtagacctgagccaggaatgccctttcagagctacacagatgcagaaatttccagaagaaaaaccacccaggccctgtttccttggcctagggttctgctgggggctaagcctacctgcagggctgggggcagggccttgagcatccagttctgcaggaccaactggtgcacctgtgcgttctgcagcagcagcagctccaccatgtctgcagggaagaagcagggggaccctgaataaagtttccgtttttcctatttgttaaagtgatagagcattataggaccagagaacaggtgtgtctgtacactgtgcaggtccccggggcagg

SEQ ID NO: 40246 - DNA, 1127 bp, Artificial sequence
  DNA replication origin
caggcgcctgtaatcccagctactcgggaggctgaggcatgagaatcgctagaacctgggaggcggaggttgcagtgagctgaggttgtaccattgcactccagcctgggcgacaagagcaagactttgtctcaaaaaaaaacaaaaacaccataccaagtgttggttgctcctattaaagcagaattggtggaaccaggcctcagcccaccccgctaaagacaggaaatgtgggaaacattaaaaatactacatcctaagtgatatctagactgaagtacctttccattcaaccatttattcagtgtctggggttaatcatttaaagttctccttggatggatgaatggatgtgtaggtagatggttggctggttggatggatgggtgggtggatggatgggtgggtggttggttggttggttggttgggtaggtggatgggtggatgggtggatggatgggtgggtggatgggtggatgggtggatggatgggtgggtgggtgggtggatggatgggtgggtggatggttggttggttggatggatgggtgggtggatgaatggttggttggctggttggatggttggctggttggatggatgggtaggtggatagatgggtgggtggttggttggatgggtggatgggtgggtggatgaatggttggttggctggttggatggatgggtgggtggatggatgggtggatggatgagtgggtggatggttggttggatggatgggtggatggttggttggttggttggttggttggatggatgggtggatggttggttggttggttggttggatgggtgggtggatggatgggtggtagatactggagacactttcttcaaggacatatgcagatagctaatcacctggctgttcctaggtcccccagcctcctgccaccatcattcagcagctccctcagcagccactcatagcacagattcctcctccccaggccttccctactcaacggtcaggaagtattaaggaaggtaagtgttccatattcatattgttgtgggttgaggaaattatctactgaaagggaaaatgttcctggaagcaggacagtcacttagggccagcttttggctgttcaacatgaa

SEQ ID NO: 40247 - DNA, 800 bp, Artificial sequence
  DNA replication origin
ctcacccttgccgggaccctgggaacccgaaacaaaatcctacgccaccagcccgccgaatgcgccccctcggccgggggtcctgggtcttcagagaagaactcggccgaatgcggtcagaaagcccgcgaaccgcctggacctgcaggccccgccgcttggagctcccgcctttcccgaccgagcccgtgtctgctcgtgtgtctcactgatgtcttaggtctcaaaaaaaaaagaaaagaaaaggtttttagtagacagaagagaaatggggccgtgggttcgtggtcccagggggaaactgacgtcgcatgaggtcgtcgtccctcagcttgagctcagcggaacataagcttgcagaggtggaaaccacggaaggtttgggtgtcttggagctctctggacaccgaagcccggacacagtcccggggtccgcaccgcctgtgacctgtggcgggaccgccggggtgggcgttttctcagctggcgcgcgcgtaggtggaacttgggaaactaactggagcgaagtggcaaaaaaccaagacagggccggtgacctcgcgcaggccgtccttaactgtggagtattccttcagctaacccctttatttcatgtgtccaagtctggtttctgggtttctttgtagtcctccgggcctgttcgtgcgccttcacttgcaaaaggttcgtcgtggagggccgtgtgcttgtttgcagcagtaacgatgcccttcccgagcgtgctggagtggctcctcgctgacgcaagctcaccttgcagcctcctcagcaactgcaac

SEQ ID NO: 40248 - DNA, 1463 bp, Artificial sequence
  DNA replication origin
gggctgcgcctgcgtcggggggggtggggcgcgggctgggcgcggtgcacgccggggcggggtgtggctgcagggcggggctacaggggcgtggcgtggctgcacggagggggtggggcgcggcaggcgctggaccccaggctggatcttccagtggctcccgcgtcctccgggaccgggtggcctggggcgggcggccggtattcgggtggctgcttggtctagggccagtttcctgcgcggccggggccgggggcgtggcgcgggtggcctgcagcgcctccccagggtgcgccttcgcctcgtccgtcggagatgctttccccgcgcgtttctcgcggcgttgcagtccttactgtgtgaaaggcccccgcggcgctcccggccgccgtcttcttcccgcgcccttgggctcgcgtcctgcccgtccgggcctggcgtacgctgccgggaacccacgcggcgctggcgccgggcgccttcaagggacgcgctcccgtctttctcccgccccgggtttctccgtgaaaaagcgctcggtttgatggccactgtcctaggtttcgtgggaataaagcgcgcagagcccatgactcgggggcaggagaaagggagtcccgaaagcgcgaggcggaaccgcgggagcaggccggcctctgcgaggtgcgcgccgctcccccccaggatgttctggctggggtgctggggaagagcggggctcccgggcacggcggacaggggacgcggggctaggccggggaagggctgaggcgggcaggaggggaaggggagcccggagcctgcagggagctgcgaacaggagcagagctcccaggagggtggaggggggagggagggacaagacgccgcctgtagggcgacgcaggccgcagaccaggtctgtgctatatcccgacatggataggtgtggtggaggaggacatgaaaataaacgacatgaggttgactttgaaggaaatatttccttgagagaccattttcttgtgtaaatggccttgtgtaatttttctgggtccatgagcttgtgtacttgtgttatcatttacacaaatgtgtgttccatgcgtttgtttttgtggccacagttgtcttttgagggaacagatgtctccccgtgaaaggctgatgtgggatcgatcgcatacctcttgagtaagacgttagcgggagatgaggctcgcacatagtctcaaactctcggatttgaggactgagcagagctaggctgtgccttctgatgggcgatgctctgtggatgtccctggtgctttggtgagctgtgtcatgaaaaatagaacatctgattccataaaggaagatgtgagattgacctggcttaattaattttttgctatttctgtatcttgtctcagaatctatggctaggaagttttggctgggctatatatttcttcagttgggggaaaattggggcaagaagg

SEQ ID NO: 40249 - DNA, 1229 bp, Artificial sequence
  DNA replication origin
cagcaccaagcggccctgcaggaactcagagatgtacgctgccaagatgcaggagcatcaagcagggcaggcggagctggaggagccgggggagccggaggttctgggggtgctgggggagctacaggtgctgcgggaggggctgtgcaggtgagcagctccacgtgtgtggttcccacaggggtgcctccccggcttctctgccctgagtcttcatcagagcgttcaggcacttacggatacacttggagccgctggattgtgcgtgcagtggggtctgtgctcaaagagtgcagcttcgtgggggcagatgtgtcagtgcacctggccagcgaggcagctgcaggggtgggcatccgggggggggtgtctttggttggcctcccctcctgttggggcctccggagggcagggttctggtctggtctgcaggcagtgagtggtctgtggcgcgaccagatctgtcctacaggctacttggcagctggacgaaacacaaagtggaggcgattcagagcctgggaggtgcgggggtcggggaggctggggctcatcctgggtgtcgcgctaggcagctggggggatagtgaggggtgcctgccagctgatgatggcatagggaggggcatggagagcctgggggctgacaggggaagccacgcttagctggaggggtcatcccaggttggactggtgcaggggatgtggcttgtgtagacacagaagcacatttagttgctcttataaatctgcacacgggctgggcttggggctcatgcctgtaatcccagggcttcgggaggccacagtgggatgatctcttgagctcaggagttcgagaccagcctggggaacatagcaagagtccacttctaaaaataaaaatcggccgggcgcggtggctcacgcctgtaatcccagcactttgggaggctaaggcgggcagatcatgaggtcaggagatcaagaccgtcctggctaacacggtggaaccccgtttctactaaaaatacaaaaaattagacaggcatggtggtgggcgcctgtagtcccagctattctggaggttgaagcaggagagtggtgtgaacccgggaggcggaggttgtggtgagctgagatcgcgccattgccctccagcctgggcgacagagcgagactccgtctcaaaaaatatatatatgaaaataaaaataataaataaaaattaaccaggcatggtggtgcag

SEQ ID NO: 40250 - DNA, 1113 bp, Artificial sequence
  DNA replication origin
gccggctggctgggcgcgaagacactggaaatggggcagcagagtctacagggaggggcccgaccatgaggctgcccccggacagcagaggacaagcagagaaagcatcggagaaacagcgacaacggacgcccagatgcaacagcaccgccagggcaaagatgctgagagcgatgcaggacgtcagagacgttcctgaaaacaccctgaaaaatcctgaggagatgcaggaaaacgagggcgtcaaaggaaaagaaacaggatctcgagtcatgtctccagcaccacttcactggtggaggaagggacctgaagagactccaggccctcctggccctggaggttcccccgcactccccctgtggacacacagagtgcgggggcaacagggcttagaggcccgtggggagatgacgccgccctgagcccggcagcaggcaacaccgcagtgaggacttcacagctggccaaggaaaatccacccccgagcaagggcccaacgccaggaggtgcggcaaataaaacttggctaaatgactaaaagaagatactcacagacaggcttttaaaaaacagtcatgaatatggtatccatacaaggcacaactaaaacagagtattaaaaaagacttaaaataaaaggacaagaaaagatacacgaggggaaaaacaccaggctaatccttcagcatcagaaatttatataaaaaatagaacgggataaacgagaatgacagaaatgaaccaagaaaaggagaggacaaagtgtgggcacagtcataggcagagtttaaaacatcccgtgggaccaatgtcttccaccctggaaaacgccccctgggccaaagaattataagcttgtgggacccagatgtcaacacgagcaccacaggtggaaaggctggggcaccacgaggaggcacgacctgaaccccacatcctgtgaaaggcagcaaacatgtccaaaagcgtccaacccaacgaaggcagtgagaaaccataggagctggccgggcatggtggctcacgcctgcgatcccagcactatgggaggccgaggcaggcagatcacttgaggtcaggagttcgagaccaggctggctaacatggtga

SEQ ID NO: 40251 - DNA, 1866 bp, Artificial sequence
  DNA replication origin
tggccttggcccgcatccgccgcgccctggagcagcagcccctggcagccggggcggcgcctcccgagctgcagtggctccgagcgcagtgtgcccgcctcagccgccagctgcaggtgctgcaccagcggttcctgaggtgccaggtggagctggacaggcggcaggcccgcagagccacagctcacacacgggtgcccggggcccacccacagcctcgcatggatggtggcgccaaggcccaggtcaccggcgacgtggaggcctcccatgatgctgctttggagccggttgtccctgacccacaggtgggctccccccgcgggccatggcagggtatttttttttactctccttttctcctttgatgtcaatgacttctctctgcgctgggcactgggggctgcagttgtcatggtggctcatgacacagcggagaaagggggcctgaagctcgggccagcctgggcctgttccgtgtcagtacgcagtgaagctgggctgaggatttcactgttttgtaccattttaagcttatcgttttaagcttttaaaaacaattctttctttcacataatagggactgtccagtgaaacggagctcactatgtgaggagggtccgcttaagctgcttctctggtttctaaccaaatggtttgtctgtcgatgagcagtgcctgtgtgagatgtggcgagcgagctcttcttttggagctggaggccctgtagggagtcgtcttttaaggcttccacttgtatttgagcagaaccttgggaacttggtgcctaccacccccacaccagctgggtctttgtagagtggctcccactctcagatgccccagtccaccttgctctgtggggtcgtcctgggtcggggcagctttctgctgggtcctcagccccgttcccatgtggcctgctgtggaccaaggtgctcggctgtggatgtcactgccacctccctctggcatccctgctggctgccgtactggttcccagctccaggccacctgaggggcagccccagcaacagcctcctgcatgctcagctttcctctgtctcctctgtcaagggtgatctgcagcctgtcctggtgacgttgaaggatgcacctctctgcaagcaagaaggcgtgatgtcagtgctcaccgtctgccagaggcagctgcagtcggagctgctcttggtgaaaaatgaaatgcgcctgagtctggaggacggcggcaaggtgtggggaggggggaaggcgcgaggtccccccgggagaggctggacacgcggcagcaaggtgtggggagcggggaaggcacgaggcccacccgggagaggctggacacgcggcagcaaggtgtggggagcggggaaggcacgaggcccacccgggagaggctggacacgcggcagcaaggtgtggggagcggggaaggcacgaggcccacccgggagaggctggacacgcagcagcaaggtgtggggagggggaaggcgtgaggcccccctgggagaggctggacacgcggcagcaaggtgtggggaacggggaaggcacgaggcccacccgggagaggctggacacgcggcagcaaggtgtggggaggggggaaggcgtgaggcccccctgggagaggctgggtgcagaacatgtgggtcttgccctgggcagaggcgggtattctgctgaggtgaggagcacagtccgtgcctgcagtgacatgttctctgaatcctttctgttctgtaacgagctgtccataactgttgtgaaatttcgtacgtgcttcatttaagccactctgtagaaacaatcagttgggtttttttcttgtaattgatccaaatggatttaactgtgctcgagggt

SEQ ID NO: 40252 - DNA, 1433 bp, Artificial sequence
  DNA replication origin
tactaaaaatacaaaaattagccaggcatggtggcgggtgcctgtaatcctagctactcgggaggctgaggcagtgaattgcttgaacccaggaggtggaggttgcagtgagccaagatctcaagatctcgccactgcactccagcctgggcgacagagcgagactctgtctcaaaaaaaaaaaaaaaaaaaaaaaaaaaaaattcaaagaaacgttcctgtcatgagggccccaagactgtttgccgcaggagatgcgaagggctctccacacaggatgtatttcccgagagcacatgacaagcacacgaaccaggttcatgggtctcctcagaactgcgggcctaggcccatccttccctgatttctgtggaattaagaatctttcaggctctaaacgccaatgaggtgcacgcagtgtggacccaggaacaggcggcacctgcactcatgcaagaaacgtcccagcgacgtgcgggacactcacgagggctgcgaggggctcgggtgagcccaggtctcagcaggcttcagcaccaagcatgcttccgtgccaccctagagaccataaaacacctgcccagcacttctggtgttagagcctctgggtttcagagcctggaggagtagttggggcacatttagcaaacagcagggaggagggggaggaggaagagcagggtgggtggctgtgtgtccagcaggaggagggtaggtgtctgtgtgtccaggaggaggaggagcagggtgggcggctgcatgtccaggaggaggagagtgggcggctgtgtgtccaggaggagggtgggcggctgcgtgtccaggaggaggagggtgggcagctgtgtgtccaggaggaggagtgtgggcagctgtgtgtccaggaggaggaggaggagcagggtgggtggctgcatgtccaggaggaggagagtgggcggctgtgtgtccaggaggaggaggaggagcagggtgggcggctgcgtgtccaggaggaggagggtgggcggctgcatgtccaggaggaggaggaggaggagcagggtgggtggttgtgtgtcgagaaggaggaggaagaggagagtgggcggctgtgtgtccaggaggaggagggtgggcgactgtgtccaggaggaggaggaggaggagggtggacagatgtgtgtcccagaggagaaggaggagaagggtgggtggctgtgtgtccagggaggctgcgctgggccttggactggaggaggcgaggtgcagacagtgcatcaaaaggtgccatctaaggctgggcgtggtggctcacgcctgtaatcccagcacttcgggaggctgaggagggtggatcacctaaggtcaagagttcaagaccagcctggccaacatggtgaaaccccgtctctactaaaaatacaaaaatcagctgggtgtggtggcgcatg

SEQ ID NO: 40253 - DNA, 916 bp, Artificial sequence
  DNA replication origin
gtgggcagatgccattccctgctcttagttttgggggcaggagctggtctcgtaccatcgcatgtggggtcaggcgcccttggtcagcttgggcaagtgccctctgttcctagttttggattccgtcaaggggaacggccttgcagttcagcccacggcccttgtcccggcgcccatgccctttgtgctctctggggctgggggccggcgctgtgcacatgctcgtgaggggcatgggtggggctggcgctgtgcaagcgcttgtcaggggcatgggcggggggtgccggcgctgtgcgagcgctcgtgagaggcatgggggggctggcgctgtgcacgtgctcgtgaggggcacgggcagggggtgccggcgctgtgcgagcgctcgtgaggggcatgggggggctggcgctgtgcacgtgctcgtgaggggcacaggggggccggcactgtgcgatcgctcgtgaggggcatgggggtggtgggccggtgctgtctgagtgctcgtgaggggcactggtctgttttctgttgtgcctttttggtcttggtgctgggtagcgccagccccacggggtgcgggaagtatttgggaagtagcccctccgccctccgttgtctagaattggggttatttcttccttaagttttgggagaattttccagtaaagccacctgggcctggagttccctctgttggaggcagtttagggtgtgagtgggggtgaggtggcatttttaggatggccccagggctatatcactcctggactctgtgtctcccggccaggtgggtgggccctggaaggaaatgggcccagagggcagaattgagcatcctggttccacccgcagtgaaagcttctagtccacagaacctcctttcttcccgaagcacatacacctcacgccccca

SEQ ID NO: 40254 - DNA, 1469 bp, Artificial sequence
  DNA replication origin
gcgggacaggggcgcggccaggacagcaacgcacccgcgcgggcacgagcgcggatggctccgccgcgccgccgctgccccgcgcgctcctgagcgcccggccggccctacacgggagcgcgtgcgcggcgggaagggcgggtagcgagcgcgcgtgcgcagtgggtctcgggcccgcgcagccctcccggccccgcccagcaacaccagagcctcgcttccattggccccgaagacgcgtcgatgccgctccgggctcccattgggagaggcgggagagcgccgctcccgacaggctctgcgctgggcctgcttgagggtggcgggcttgaggcgggcaggctgcttagttgcggcccgaggcgcctaagtggggatgaccaacccgtgggcgttggcgctgacccctaggcgccgctggtggccccgcgcgcggccctccggccagccccgcccctctcggggctcctccttggtccccgcgccatggcgcgtccgcgttgaccgctgtcttccctttcgggctgtgctgatcgcgaacgctgcgcagtccgtggtggcgtcgaggcacctttctcgtgcctttacctgtgttcactcctttgctttaaaaaacagccctagaagtacacatcgttggccccgaaggagccccagcagccatgtcggaccgcgaggtgaccttggagggcgggaggacggacgaggggcctggcggagctagactgagagggcgccgccggcgtcctgaaggccctgctccccgaatgtgtgggagtgtgtctgacggtgcgagggtggctgtggcggggcctgagcagcgtgtccgtgtcccgatgccgcccgcctgttactgagttaggcaggagtgcccgagtctggcgaacttcagcagttctcgttccagagctccacacgaggttggccaaagctttgcgggacttacatacccttcttcctccgcccagtcctgcttccttccccttcctttcacgggtgttgataccatgtcaacatcctcgtaccccaaactcagtcgcagcgtctgcttctggagaaaccattctgcagcattaaagctggtgagaagatgggattcgaggctgcatcactcaccagtggtgaagtaggagggtgaactagtgaaatggaatccacgagtgggtgaagtatcagacatttcatatatggtgaacgtagtagataaaaggaaggaaagggggattggatagctattgcttagtgccaaccgagactcttaagaatagtggtcagctgaaggcaagcaacaaacagttgtaagccagtgaatctgtcccgttacatatagagaagcttcatttactgcagcaggtcaaagacaagaaccaggcccaggaattaacatccctgtttgactgaactccaaaaatagcaaaacacccaaacaaggcaatactcttccactaagtttggatccctgctaagaa

SEQ ID NO: 40255 - DNA, 947 bp, Artificial sequence
  DNA replication origin
agaaataactaccccagacccagcaaaatcttatcaatctgaaacttaaattaaggataataagattatttaaaaaatggattctaaaagctgaaaatgcatttagatctcaaaaacagagtaagaatcaattacatgcttttcttcaaggactgcaagtcctttctgacactggagaagaacttaactctttcccaaagacagccaaaaggaatatcaggacacaggccttgaaagggataacatccaaatgggaaatgccacccaccacctctgaagccagattactccagtctatttttatcaaccaaccatttatacgactttttttttttactttaaaaaattccatgagggggctaacaactcctaagtgttatgtgctttgcatatattaaggtattttagcctcataacaatccaaaatggaaagtgctggtataaccccactttatagataataaaatgaggcacagggtgcagctcctagagtatgaggcgcgcggcaagggctcccagctccaagggaagtagctgcctgcggacaacgggcgcagtcatcctggtgaagcccagaccaagcccagacctacagccttgagaaaagcggggctcacagcttggggcaaaagtggtcattcctctcaagattctcacacctgtccaaacgacctagtcaaagccagtccttggggtcggatcccattgggggagcagctggggatagggaaaggtctccagaagtttggcaggcgtcccggggtgaggagtaagggtcccaggtgtgaagggcctggggggaggagtccttgtatgggggaggggtccttgtatgagaggcggggcagtggtccctggtttgaggggccgcgcgggtgtcccggggctgagggtcgggagtccggaggggcagcgcggggctcccagggtgaagggcggggtccccg

SEQ ID NO: 40256 - DNA, 873 bp, Artificial sequence
  DNA replication origin
ggccagggactggctgtggtccagccccagcatgcagagaggcctgggacattctgtgtgaggggaggcccctctgtgtgggaggtgcacagacttccaggactgaccatggctttattgtcaggatgcaggagccagggcttggcatggggcaggtgtgggggatgcagagcagggccagcaggcaggatgtgctgatgggggcctggcgtgagcaggacggtgcctcccagccctgagccgcagggagtgggccaccaggactggctgggggccggggtagggagggccctggggagggtggacatctgtgtgggtcttgaacataggatgcccatccgatgtgcagggccagctattggttgggcagtggggacatggcctggggtctcggtgggcgatggcctggaggggccaccctgagcaggacatttggaggagtgctggggtgagtcagacaggaccatgtggtggttttctccagtgcaggcagtggagggggaaggcggagctttgcaggtgagggcttgaggcagttccgacttcagactcccccccagggagactgagggaccaccaccatcattactcaggccaaggaggcccagaacagggcagacggggctgcaagagttcctatggcgatagttgttggggcacagggttggtcggatttgagggagggagggtatgaatctgggagtcgttggtgcggttgtacccaccttcactttccgtccccaggctgcgcctctcctgagctgccgcattctcccctgcacctgtgcgtctggccctcttcacgtcctcctggcctgctgtctgcctctcccctgcacctgtgcgtctgtccctcttcatgtcctccttgcc

SEQ ID NO: 40257 - DNA, 1188 bp, Artificial sequence
  DNA replication origin
gggtgggacgcggcgtggcggtcgtgggggggtggggcacgtgggggcgcgggcagtggggtgggggcggcgcgcatgggggcacgggtggtgtagacaccgcagcctgtgtgcccccttccgggtctcgccaccactctgggcccagcctgggcgtccctccgacaacagccccaacgggaggagctccctgtcttccaccccgcgaggagcaccacagctcttcatggtctgacccaaagcgcctccacggggcgtcggggttcacctgacgtttttggaggtgcctgttttttgggacacatttccccgccagcaccctgggcatgtgtggcagtggagctgccttcagggccctgcaggccttccctttgggtggggttggctaccccgctctggcacctgccccgctgacttcccagcgtggtggccccgcgaggggaccccggctccagggaggtcgcagaggtgcggggttgatggcctggcctggcatgtggtccccatcacaagagtcctgtggtggcccctccagtgccatcaccgggtggaggtgggcagcttggaggccagttatacccatccccgagtctgggggcgtggagggggcagtgacctggggcacaggctggggtgaggggtgtgaccagagtcagggaaaaactggagacctgaggagccccccacttcactgctggccccaccgtggacagtgggagtttgagggaagacagagcctgaggaacttagagatgtttccaacgcaacccagtgcagaatcatagcgttttactatttccccccaaatgtgacagttgtcctcaccttgtaaccttcacagaagcgactccttggacctgattctgtctgtgtacaccacagtttaacagcaggagctagatcaccagcctctgcagcttaggcaagggtgcaggaaggggttgcacagccgtcctcctggcgggccggggagtcgacaccacacgggacctttagtgcagctgtgtgtcccctgagctcccgcatcctctgggccacccagggtgagccgtccacacctcctggaatctgagtggtctcaggagcaagcttgtgtttggcattggcaggatctgtctcactagcgtaactttgatcccagtgtatcccatagagtccctttagatcacagggctgggggtgtatatg

SEQ ID NO: 40258 - DNA, 1434 bp, Artificial sequence
  DNA replication origin
cgcggcgcgccggcgcaggcgcagagaggcgcggcgcgccggcgcaggcgcagagaggcgcggcgcgccggcgcaggcgcagagaggcgcggcgcgccggcgcaggcgcagagaggcgcggcgcgccggcgcaggcgcagagaggcgcggcgcgccggcgcaggcgcagagaggcgcggcgcgccgccgcaggcgcagagaggcgcggcgcgccggcgcaggcgcagagaggcgcggcgcgccggcgcaggcgcagagaggcgcggcgcgccggcgcaggcgcagagaggcgcggcgcgccggcgcaggcgcagagaggcgcggcgctgttggggagacgcggcacagggcatagacgcacgccggcgcctccccggaggggaggggtcgctgggcgggcgggagtgaggcgcggcgcaggcgcagagacgcacgtcgctcggctgagggtggcggggagtgttgcagtcgcacagtcgcgcgccgccgggcggggagcgcgggggtggcgcggtgcacgcgcagagacacacgtccccggcggcgcagagacgagtggaacctgagtaatctgaaaagcccgttttgggcgccccctgcttgcagccgggcactacaggaccagcttgcccacggtgctctgccattgcgccccctactggcgactaggacaactgcagggccctcttgtttacagtggtgtccaccgccccctgctagcgccggggcacggcagggctctcttgctcgcagtatagtggtggcacgccgcctgctggcagctagggacattgcagagccctcttcctcacattgtagtggcagcacacccgcctgctggcagctgggcacagtgccgggccctcttgctggcattgtcgtggctgcacgccacatgcaggcacatggggactacgcagggccctcttgctcccggtgtgacggctgccgtcccctactggccacctcctgcaccacttaaagtcagagcgccagttattaatccccatcagttctgtaaattaaaactgaaaaggagctattactgcggagagctgatgtcccagttattaacttggaagacagcttttcaccaagaggcagtacaaagatggaagataacttcattgaaaagaaatacagagtaaagagcttatagtacaaaaatagggaggagtaggctgatagtgcatgaaaacagcctaagagtcctgtgcagggatttttattttggacttcttcacattcctgcctctgtctcaagtctccgcctgttttctttcgttttcctgctactgccataggtccccgacttgccccacttagccttgtgggacctcctcactgttgattgaggtacatgtgtggtgatcaatccgaatccactctggcaccagcctccttcccgccataccaggcaggctgacagcagtc

SEQ ID NO: 40259 - DNA, 948 bp, Artificial sequence
  DNA replication origin
ccgggtcgggcaaaaagccgcggcgggcaaaaacccgaggcggcgggggtgcaaaaaaccgcggtggggaaaaagccgcggcggcggagggcaaaaagctgcggcggcggggagcgaaaacccgcggcgggcataaacccgcggcggcggggggcaaaaagccgcggggggcaaaaagccacggcgggcaaaaaagggcggcaccggggggtgcaaaaacccgcggcgggcaaataaccgcgacaccggagcgggggggagcaaaaagccgcagcgggcaaaataacagcgacaccggagcgggggggagcaaaaagccgcgtcggcgggggtgaaaaagcctcggcggtgggggggcaaaaagccgggtcaggcaaaaagccacggcggcagggaacaaaaagccgcggcggcggggtgtaaaaagccatggcggggcaaaaagccgcggcgggcaaaaagtcgcggcggcggcgggggggcaaaaatccgcggcgacgcggggcaaaatagtggatctggtgtagaaggccggcacagcttggctttgctggagtgtgatgagataggaaatgtgcagccaaagacaaaaaaagatgtaagtaggcttgactcattgcagctaagaacccagatgttatcttgagggttttaactaataagcagtttaaatcagaatggcacattctgatttttttttatatgttcacatttggcaggcatagatactgtttgaaaagagaaaagtcagtagatagaggtaacaaacttaaatatgtgccgagtctagaaacaagagactagggagataaggacctttggaaataaaatgcaagatttgaaaactggctgggggatgaggaaaaggcaggtctttaaggtcaatccctgttttgctttaagttgttagggggtggttttatcacatattgtagaatacatcatttc

SEQ ID NO: 40260 - DNA, 1465 bp, Artificial sequence
  DNA replication origin
ctctccgccgcggcgccgctgtccgcctctccgccgcgccgccgctgtccgcctctccgccgcgccgccgctgtccgcctctccgccacgccggcaccggcgctgtgtgcctttgcaagggcggagctgcgttctcctaggcacagacccggagagcattgcgagggcggagccgcgttctgctctgcacagaccttggggcactgcctcgctttgggacaactcggggccgcatcgacggtgaataaaatccttcctgtttgcagccctgtttgtggttggtggcagcgatggacaatgcagccagccagagcttagaaaggcatcggggtaagtgcactatccaggctgcactgcgggtggcctgggacgggttgggagccctatctcaggtgtcactgcccatcttgggtggctggttgggtgtgctatctggggctgtgctgcctgcacctggggggtggtttgggggctcaaaccggggctgcactgcctttggcggggagccggttgggggcactatcccagacggtattgctggcaacagtgaggtgggctaagtgtgctatccggggctgcactgtgcggctgtggggtggggggtggcggtttcgggttgagggcactatggggtgctgtaatgcccatggtgcggggaggcggggcggttagggtatgttgggtgtgctattgcggggggcgacactgctggtggtagggggcagggtgggttgggggccatatcaggggctgcactgattgctttagctaggatttcaggtactatgttaaacaacagtggtgacagggggcatccttatcatgttccagatcttagaggaaaagctttccatttttccccattccatgattctagctgtgggtgtctttcctgtagtttttattatgttgcggtatgtttcttctgtgcctgtttctttgaggatttatagcatgaagggatgttgaatttcatcaaatgctttttcggtttcagttgacgtgatcatactgtttttgtcatttatttggttgatatgatgtatcacattgtatgttgagtgactcttgcatcccagggatacattcccacttgatcatgatgaattatctttttaatgtattactgaatttgattcactggtattttgttgaggatttttgcatcaatattagagatactggcctgtagtttccttctttgatgcttttatctgatttttgtatcacagtaataatggtctcatagaataagtttggaagtattccctcctgtttttcaaaatagtttgagcaggattcgtactaggtctttaaattgtttgctgtgaagccatcagcagtgaagacatcagttcctgggcttttctttactgggagactttttctgatggcttcaatctcattacttgttaccaatctgttctggtcttggatgttttcattgtttaacataagtaggttg

SEQ ID NO: 40261 - DNA, 1073 bp, Artificial sequence
  DNA replication origin
cggggtcaaaaggccgcaacaaaaagcctcgacggcaggggcaaaaaggcgcaaaagccgcggcggcggggagcaaaaagccccggcggcggggggaaaacgtcgccgcggcgggggcaaaaagccgcggcgacaaaaagcctcggcagcgcgggcaaaaaaccacgcaggcgggagcaaaaagccgcggcagcgggggcaaaaagccacaacagcggggtcaaaatgccacggcagcaaaaagccgctgagacggggtaaaaaagccgtgggggcaaaaagccgtggcggcgggggcaaaaatcagcgggagcggggacaaatttccacaaaaagccgcggcggcgggggcaaaatcagcggcggcggggacaaaaatccacaaaagtcgcggcggcgggggcaaaaagccgtggcagcgggggaaaaaagtcgcaagaagcctcggcggcgggggaagaaagccgcggaggcaaaaagctgcagcggcggggagcgaaaagtcgcggcggcgggggtaaaaaggcgtggcgacaaaaagccgctgagaaggcggaaaaaagcctcggcggcgggggcaaaatagtggagatggggtagaaggcccgcacagcttggcattgctggagtgtgatgtgataggaaaagtgcagccgaagacaaaaaaagatgtaagtaggcttgactcagtgcatctaagaacccagatgttatcttgagagtattaactaataagcagtttaaatcagaatggcacattctgattttttgtatattcacatttggtagacagtgaagagaggaaagtcagtagatagaggttacaaatatgtgccaagtctagaaacaagagactgggggataaggacctttcaaaataaaatgcaagatttgaaaactgattggctggggcatgaggaaaaggcaggtctttaaggtcaatccctgttttgctttaagttgttagcgggtggttttatcacatattgtagaatatgtcatttcagttttgaacatcttcagttaaattgtcctaacgtatcttatgaatttgattttcttgcctgggaagc

SEQ ID NO: 40262 - DNA, 1402 bp, Artificial sequence
  DNA replication origin
agcgcgtgaggatccgcgcgtcgcctgggacactgagcgagggtagcggccaggtcaccggctgaggacactgcccctgaagcccggtcaggcggtcgcgccctccctggcggcccccgcggcctggcaggacctgtgccccgacgtcgccgacccgcggcgtccgtcgggcgagtgggcctgcccgcgggtaaggcgccggccctgggccgccctcccgggactcgggaggcgccgctgcaggtaacagctgggcccccgcggcggaaggggtcgggggtcggcgcaggggcgagcgcgccccgagccgggtgtgcggccccggcgcacctgttgtagccgcctgggggtcccctgcccgcagttggccgtggacgttccccgccccgactccgaaatgccgagggccgcctccacgcctcctgctccgggagccacgcctcagcgggaggatggaaccctgcgggcagccctcgcacccggggctccctcggagcccgggcatgggccgggcctggggtggtccctcgaacccccctgacgggaagcatggagcaatgcgagccgctgccgtcgtcgctgtcgtccccagtgagccaggagcgcctcctgaatcgcgagagccaagagcacggctttgccatcatccccgtgtcccatttcaggcagggggccctggttggatctttgtcgctggcttcgttttgtgtgtgttgatttgtttcagtccttcgcgtttccggttgagttacggaatctgcccacacgttttgtggccaaactttgtagggctgtgaaaccatgtaacattatctcacacaatagtctttcatactggttttaaaacacagtgatgcagggtttgctttaaggaagctttgaggatcacaagggattattatctggtaggttgtaaaaattcaaacaaccaggagagtgtcataggttccggaacaccgggaggaggaaagaaaaatggagaggagagaaaaaggataagcaagaaagtgcaggggcattaagggtgtgggggctgcaggattgatttggtactcaggtctggagattatggcccctctattattccaaccgctgctccagacagtacttgagggaaatggaaggaagagccattttgggggtcatgcaagtgattactaatcttgccagtataaagatttccactccatggatgacaaggacactaaggagaattactttcctcttagaaagggaatcattgagaggttaattgaacttgagaagcatatattctgtgatggaaactgacatttattatattcttccaaattaggttttccccctcttagactatatggggactttttcagattaattgtcaaaacaagaaggtttacgtgtggatattgacaagcagcgt

SEQ ID NO: 40263 - DNA, 1241 bp, Artificial sequence
  DNA replication origin
gctgttacctgcagcggcgcctcccgagtcccgggagggcggcccagggccggcgccttacccgcgggcaggcccactcgcccgacggacgccgcgggtcggcgacgtcggggcacaggtcctgccaggccgcgggggccgccagggagggcgcgaccgcctgaccgggcttcaggggcagtgtcctcagccggtgacctggccgctaccctcgctcagtgtcccaggcgacgcgcggatcctcacgcgcttcctcacttcctgcggcttttggtccctcccgcttgcagtccctctggttctgcccactccgcctcccggttgtcagggcaaccgtagcgacgccggacctggctgagaggcgttaggagccccggcgttcgcccgcggaggccggggagcagccgaccatggagccccagagtaagggaggcccaggctggagctgggaccggggcaggtgaccgggctggggctccccgggaacgagtgtgggcgccccgcgcgggactccgcaggtttcaacgctcggacacggaaatacggtttgcgtctcctagcacttttctctcttggagaggggagaagggggctacatcctgccaagtctgtatggttgggccgttggcgcccgaaagtccgcgctgggggccgggagcgactggagagccccgagctatgggtgggggagggctcagcgaccccagctttcaccttcctgaaacttcgcccagacagttccatttactcctcctcctactcatgattttagtttggtagtttggttcattaattgtaagtagcccatttttcttctaaaatgtcagcaattaaacacgtcctagactgggtcttgtgtttattagggaccccgtcttactccccgtcccccgccccacacccctagtctgcgacttgaaggagagagagaaaaaaagaactttgtccaagtgtatttgattcattcttaggggttctacaagttaggacactcaaaaaaatgtttgtgagctctttttctgttttcccatgttgctttcgatgtatggcaaacgttgtgcagttttgagttatcagatctaacacgagctctaacttactatttttgttgttgtttttacctttccagggactttgtttcaagacctttctttctcttccccgcctaggttgtcttattgttccttttgttctcaaaataaggggagtgttttgtatggagacttaaaatatctaaaacc

SEQ ID NO: 40264 - DNA, 991 bp, Artificial sequence
  DNA replication origin
cggctcaggacgagtatgtgacccggagcagcaccagggcggggaggatcagaagtggaggcaaagtaaacactccctgacagcgtacttctgtccagaacctgcctttgtcttgacccaaacgctgaatggctgagatttccacttccgagtttctgctggggagctatggcggccgcagagggctgaaaggtgcctcacgcagctgctccctggctccctctcgaggagcccccaaggattcacgcctccctgacgggagtaaagcccgcccgaggcgccggtgctggcggtggcggggctgccggtcgcgctgtgaaacggcctcccgctagagctgcgggctggcgacggtccccgcgggggcgggaagcgacttaggctgccctcgttggcctgcggcggcgcggctggaagcgcgggccactcgtgcgcgggtcactcggggctgtgcctcgtgtgactgtgtgtgtaggaaacaagcaggaaataccctaaaatagaatgaagcaccatgttgagggccgcggacgtcatgagtcctgtgggaatgtgggctgaggtggagagttatggtggcgcgtgttacaggctcaggggtcaggaagaaggctaatcgtggaggcggcatctgtggagggtcttgaacgctgggcaggcttttgcccgatagagatggaggaagctagtcctgtctgatggaggaaacagggcggaggtgtggagggagccatgcagcgctggtgtgaggagccgtgagcaggccaggcctgtaaagcagagtgatgggaaccaggatagagaaggcaagtcggggtcctgttttcgctgaagaatttgaatgaaatcagtaaacaggtgagagggatccatcgcaagagcatgggatgaaacgaggagtagtccacggtgattcctctgcagcggtgggtattattaatcgcgtatgtgacaccaaaacggtggatattattgatcgcgtatgtgacac

SEQ ID NO: 40265 - DNA, 1263 bp, Artificial sequence
  DNA replication origin
caattataaagaaccggagtgcaacagctccccaaggcacccccggattcccgcagcgtgcacgtaattgcagccagacagtaacctcgctgtggcctgtgtcccagccctaaccctgcaccccacttggcactcccacatatgggacaattttcccagctgattgctggaaactgatgaagggaagttatgtggcctcttgtgatgggcggtcccacagctgctctggttggagagagagagagagacagagagacaggggaggggggggagagagtgagagacagggaagagagagagagagagagacagagaggggagagagagagagatggggagagagaggggagagagagagacggggaaagagaggggagagagagagagaaagagaggggaggggggagagaaagagacagaggggagaggggggagagagagagacgggagagagacagaggggggagagagagagacgggagagggaggggagagagagacgggagagggaggggagagagagagacacagagacagagagacaggggagagagagacaggagagagggaggagagagacagagacagggagagagagagagacagagagagagagagacaggggagagagagagaggggagagagagacgggagaggggagagagagagacagaggagagagagcggagagagagagacaggggagagagaggggggagagagacacagagagagacagctctcctggaagatattttctctctgttccaattccagggcatcttttggaagaaaagggatgacactggtggttttgcggaaggtcagtgccagagttgaggaagatgtcattttggcaactcattgtcgagttctccaaaaatcagggaggtggggagctggagtcagggagggaggagaggaggaagcaccagccacccacagtgggaaggatctctcctgtcttcctctccatctgcctcaccgtgaccccatcccttgactttgtctttgcagaggggcatcctgcctttgtccacagctgtttctctctttcttttcttgagagacaatcttgctccgtcacccagactggagtgcaatggagcaatcatagctcactgcaacctcacgctgctggactcaagccatcctcccacatcagcctcccaagtagctgggaccacaggagcttgccaccatgccctgttaatttttaaacatgttttggagagagggggtctcactatgttgcccagagc

SEQ ID NO: 40266 - DNA, 1613 bp, Artificial sequence
  DNA replication origin
atgtgatggaattataagtgtgagccaccacacccagctggctcccacttttaaatgaaaacgtgtggtatttagttttctgttcctgcattggtttgctaagcataccatagctccagctgtgttcctgtaaaggaaatgagctcatacttttttatggctgcatagtattccatgcatatgtggcacattttctttaagggtgcaggttgggaggaggaaatggatcagaaaaaaataacttattgtgtacaaagtttgtacctgggtgacaaaataatctgtacaacaaacccctatgacatgagtttacctatataacaaacccgcacaggtacccctggacctaaaataaagtgtttttgtttgtttgtttgtttgtttttgttgtgtttgtatgtttgtttgagatggagtctctgcctttgttgctcaggccagagtacagtggtgcagtcttggctcactgcaacctccacctcccagaaaaagaaagcaaatacggcaaacagcatcagctttttagaagaagctggagcttctggtgggtggaccatgatggagcttctggtgggtgggcgatgctggagcttctggtgggtggacgatgctgaatcttctggtgggtggaccatggtggagcttctggtgggtaaataatgctggagcttctggtgagtagaccatggtggagcttctggtgggtggaccatgctggggcttctggtgggtgaaccatactggagcttctggtaggtgggccatggtggagcttctggtgggtagaccatggtggagcttctggtggatggaccatgctgagcttctggtgggtgaagcatgctggagtttctggtaggtggaccatagtggagcttctggtggatagaccatggtggagcttctggtgggtggagcatgctggagcttctggtggggtaaatcatgctggagcttctggtgggtaaatcatgctggagcttctggtgagtagaccacggtggagcttctggtggataaattatgctggagcttctcgtgggtaaatcatgctggagcttctggtgggtggaccatgctggagcttctcatgggtaaattatgctggagcttctggtgggtggaccatgctggagcttctggtgagtggaccatgctggagcttctggtgggtggatcatgctggagcttctggtgggtggatcatgctggagcttctggtggatggaccatgctggagcttctggtgggtggacaatgctggagcttctggtgagtagaccatagtgggagcttcttggaggtaaattatgctggagcttctgatgggtggaccatgctggagcttctggtgggtggaccatggtggagcttctggtgggtaaattatgctggagcttctggtgagtaaatcatgctggaacctctggtgggtaaatcatgctggagcttctggtgggtaaattatgttggagcctctggtgggtaaatcatgctgaagcttctggtgggtaaatcatgctagagcctctggtgggtaaatcatgctggagcctctggtgggtaaatcatgctggagcctctggtgggtaaatcatgctggagcctctggt

SEQ ID NO: 40267 - DNA, 975 bp, Artificial sequence
  DNA replication origin
ggagatcaggtgagttaagctggagttgggggggaatgttggccaagtggcaggcagggtgggcctgggcctgagggaagccataggcccctagacttattcctgctgacagagcgccagcggctgggcaggagcatgagcaaggtgggtttgcatctgtcgctggaggagcgctccgaatgcttctcaggacaaaagcaggaggctgccattgttcacaggatgtgagatctaatatggttcaggctggggcaaatcagtgaagatcaaaatccctcatcttccacaatgagggactagaatcaaaggtggatgtgctcccgcctgctcacaaagggtcctcacatgccccagggccctctgctggggcacagtccacattaggtgacacacaaacagcctgagggtgcccagtcgctgagcagccccagacgctgtgccgttaccggcaggcagggccctgcaggagaccttctcctgcccggaccagagaggctgcaggggtgctgtggggagagggccagatggccacaacacagctgggaatggctccagaggggagggtggagagtgcgctggcccatgggaggactcagagaggagttgcgtgtgtttggcgcttgtggacatggtgtgtggcagtgtgagccaacaggccaacgggcagcaagcataggaggctttatggatccccctgaagaaccactgtgtggaggggaaatggccccctgtgaggaaagtcctagcagccggtggagcgcaaccagatgcgggcccagactgatggggtctccatgggagcccaggtgggaggtggaggagaagggagacagtgagaaggttgtcaccaggccctcactaatacccagggagaagcccgtgtgcaaaggaggtgaaggatagtgctttggtttggtttggtttggtttggtttggtttgagatggagtcttgctccattgtccaggctggagta

SEQ ID NO: 40268 - DNA, 828 bp, Artificial sequence
  DNA replication origin
gctctgcctgagttcacattctggcctgcactgccagatctccctccagcctctcaccagctccatcatcctctgaactgccccagaggcacatctctaagaacactaatgccatcactcaaaaacatttgactggaagccaggcacggtggcttgggcatggtggctcatgcctgtaatcccagcactttgggaggtggaggctggcggatcacttgaggtctggagttcaagaccagcctggccaacatggtgaaaccccatctctactaaaaataaaaaactaggccgggcaccgtggctcatgcctgtaatcccagcactttgggaggccgacgtgggtggatcacgaggtcaggagatggagaccatcctggctaacacagtgaaaccctgtctctactaaaaatacaaaaaattagctgggcatggtagcagacgcctgtagtcccacatactcgggaggctgaggcacgagaatggtgtgaacctggggaggggaggggagatcaggtgagttaagctggagttgggggggaatgttggccaagtggcaggcagggtgggcctgggcctgagggaagccataggcccctagacttattcctgctgacagagcgccagcggctgggcaggagcatgagcaaggtgggtttgcatctgtcgctggaggagcgctccgaatgcttctcaggacaaaagcaggaggctgccattgttcacaggatgtgagatctaatatggttcaggctggggcaaatcagtgaagatcaaaatccctcatcttccacaatgagggactagaatcaaaggtggatgtgctcccgc

SEQ ID NO: 40269 - DNA, 1665 bp, Artificial sequence
  DNA replication origin
gattgggtgagagaaaatctctaggccttctctgattggactttattttcatacactgattggttttcctaagactttctttcatccaaacagaacatgataacaaagtccaatcagagtaggcctctgggctttctcttatccaatcctggaacgtgtagtccacgaaccgcatatgcataacttcagtacataaatggtgctgaagaagagtcaggctattccaggttcttctgtgtctgctcaccgagctgctccgagcccggcttagaggaccaggacagactggaggccgtagcctgctgcaccgtggctggcctccctgcagttggtggcgacagacactgtagtgtggctggaaaggtaggaaggggaaaatagtttcgggatagatggaagggtaaagagggtggttagtgccaaaaggaaaaaaggatggtgagccggagaaggcattgcataaagacgatgaggaaaagatgttggggaaaaaaaaattggggggtagatggagggggaaaaacagggtggtgaacaggaggtagagaaggtttcacagaaagatggtggggaaaaagtttttgggtagatggaagggggtaagagagggtcgtgagaggggaacggggatgagcaggaaggagagagaaggtttgcaaaaatatggtggggagagaagaaagggaaagaagactgtgggtaaaaagattttgagtagatggagggggcaaaagggtggcaagtgggaggagaaaagaggttgcagagagggagggggaagagagagtggcgagcaggagggagagaaggttttgcaaaaagacagtgaggagagaagcttttgggtagatggaggggggaaagagggtggccagtgggagaagggtaaagagggtggcgagcgggaaagagaaaaggttttgcgaaaagacgataggcagaaaagaaagtgtagaaagaaaagacagtgggtaaaaagtgtttgggtagatggagggggaaaagagggtgacaagcggggggagaatagaaagtttggccagaggaagtggggaaagaggactggaaaaaggcgatgaggaaaatagtttggggtagatggagggcaaaaagagggtggcaagaaggaaagaggaaagaagagggagagcgggaagaggggaaggctttgtgaaaagatggcagggaaaaattggggaggtagatgggttaaaagagcgtggtgagcaggagtagagaagaggctttgtaaaaagacggcgggaaaaatgtttttgggtagatggagaagggaaagggtggcaaggaggaagggaaaaaagacgatagggaaacagtttttgggtagacggaaggggaaagagagggtggcgagcagcaggagtggggagaaggctttgggaaaagatgagggaaatgtttttggggagatgaaggagcaaaagaggatgatgagagcgggaggcggaaaaaaagggtggccagagagagagggagaaaagacggtggggacaagttttggggtagatgggtggggaaaacggaagtgagcggtaaagtatagaaggctttgcaaaaagacagtggggaaaaaatggtggggaaaaagttttggggtagatggaggaagaaaaagggtggcgagagagggagccaaagacggtc

SEQ ID NO: 40270 - DNA, 1777 bp, Artificial sequence
  DNA replication origin
tagtccagaaaccatgcgcgtaaccccatgtgcatgctgaggaggcctcatgccagtttagggtctctggtatctcccgctgagctgctctgttcccggcttagaggaccaggagaagggggagctggaggctggagcctgtaacaccgtggctcgtctcgctctggatggtggtggcaacagagatggcagcgcggctggagtgttaggagggtggcctgagcagtaggattggggctggagcagtaagatggcagccggagcggtaagagtgcagcctgagcggtaggagggtggctggcagctggagctgctcttgaccggctagaggtctaggagaaggtggggaccgtgcccaacactggcggctgtagccttggccaccgcggctcgcctggctgcagttggaggtggcgacggagactgcatctctgttagagtagtagaaaggtggcagggtaggtgcgctctctgtggctgcactgcccgcttgcggggtggtgggggagcgggtttggtgtgcttttggagctgcactgcctgccgcagggggctggtgggtggcactatcaggtgttgaattgctggcagtggggcaggtttgctgcgctatcagagtctacactgcctaaggtggtggggggttggaggcaggttgtgtgtaccgtcgtgcactgccagcagcgggtggtgggggattaggggcattattagctgctacactggctgatgcagggggcgggtttggtgagctatcgtgagctacaatgtcagcaacaatgccaactggcaggcagtcgggggtgctttaggggagctgtgaaatgttgcattgtctgtgggggaaaggggaaggtggggtccaggggtttgttgggtgcactaccccgggcgttcactgcctgcgacaggagcagactgggggcgctatctggggctatactgcttgtggtccgggtggggggcgggtttgatggggtgctatttggtgctgcaacacccatggtggggataggttgtggacactatcaagtgttacactgccaggagcagaggggtcatttgggggcgctatcagtgttacactgcctgcagcagtctctgggtgtgttgtgggcacaatccgggggctaagcttgtggtggagggggcaggttaggggcgctatggggggaagctgcactgctgcttccagcggcaggttgtggaggtggccacgacagtggtggcctctgaggaaggggcccttctcctcttcccggactcaaggctctagagtgtgaacaacttctgctcgtgttggagcgtggagggtgcacagagtttttgtggcaatcctctgaccaccgcagggccctcacacccaccatggttactcggcccttgccctcttgctctgtgttgtggggaccatctgggagccccaggcatggagtagtgggcaccacgggggctcagggtcctgtgggtggaggagtaaggaatgggaactggtaattgggttgggaggactggctgggtctgagtttctgctgttcttgctccccaaggagctgcggacactgtggtgtctccagtccccaccccaggtcaggaggccagctcggtctaggaggagaggctggactttggagggtgggtgtaagtgccttcgctgaaactggccccagccacccagtgggcagcatgacagggtgaggctctaacactgccactttctgcatcctattgtaggtttttctggcattgtctgcccagctgctccaagccagactga

SEQ ID NO: 40271 - DNA, 829 bp, Artificial sequence
  DNA replication origin
ccgcagggccctcacacccaccatggttactcggcccttgccctcttgctctgtgttgtggggaccatctgggagccccaggcatggagtagtgggcaccacgggggctcagggtcctgtgggtggaggagtaaggaatgggaactggtaattgggttgggaggactggctgggtctgagtttctgctgttcttgctccccaaggagctgcggacactgtggtgtctccagtccccaccccaggtcaggaggccagctcggtctaggaggagaggctggactttggagggtgggtgtaagtgccttcgctgaaactggccccagccacccagtgggcagcatgacagggtgaggctctaacactgccactttctgcatcctattgtaggtttttctggcattgtctgcccagctgctccaagccagactgatgaaggaggagtccccagtggtgagctggaggttggagcctgaagatggcacagctctgtgattcatcttctgcggttgtggcagccacggtgatggagacggcagctcaacaggagcaataggagggtacccatggaggccaagtggtaggatccttggagggtgggcaggtgcatggaaggtgacagcagcgctgattcctttggtgtcggcgcaatggtggcagcagcagcaagtctaggggccaggaaggggaagtaggagagctttggggcccggcctggcctggggtgggtaagaagctgctggttctgtactgcaggcctcagtgacagtggtggaggtgcagccagggcaaggaggagtcctcccccttctcctgtggtctctggtctct

SEQ ID NO: 40272 - DNA, 1208 bp, Artificial sequence
  DNA replication origin
cgctcaccctccaagtcggacgggcccggcgggggtgggcgagacactgggaacagcggccagctccagagggcgcgaggcgggccgcgcggggaggggtggcgcgcgcggttggggggcagtgagggtcgccgcggcggcgcgcagcacggcgggaacatggcgcgcgaaactggcgcgcgcgcctagctggcgggacccttagctccaggtggacgcggcccggaccccgtggatatggagcagtcgccgcccccggcgcccgagccgacccaagggccgacccccgcaaggagccgaaggcggcgggagcccgagtcgccgccagcgtcggcgcaggtgagtgggtgaggggctcgggccgggagactttctttgtgaaactccggcggtgggagccgggccaggcctcagcggctgaggagcgcctgtgaggcgtaaggcgtctcgcagtccgggttcgatcccagccgccagccgtcaggaggcgggaactggtccgcagcctgcctgcctcagtttccacgggagtgtgtgtgggtgtgtgagggtgtgtatgggtgttggcctgcgcacaccggagggggggtcggtatacagtcggcgcctaatgcatgcggcgcctcccccctccccccagtccccgtggggcggaacctggggactggagtccaccggagcagtaggcggcacccgcggggagacaggtgtcggcgcagcctgggaggctcaggtgctacctttgccgggtggggtttgtgaggagtgagctcttcgtccccggaggcgagcaaatctgtcggtggctcatcacagagcgctgttttggaaagcgttccacccacctcagcttcgtgctgtgtttgggccactagtcagggggaaggatgctgagcgacatggactttagaggtggggctcccgctggacgggatggctctgggctctccagcttacccccacccttgcctcccaaacccgttagagcgtaggaatcattgggagcacgtgataaaaatgccacggattgtggctcaccaaagcagggaagcggatttggaacttaggctcccaagttgtgatccgtcgagcttggcaagcactgttttagagagtaggcttcctgcaagcaggagccggttttgtgtatacctcaccatggcatcttggtacctggcatggtgcctggcacaccgtagatgatcaga

SEQ ID NO: 40273 - DNA, 3529 bp, Artificial sequence
  DNA replication origin
catgtcggtctcctggagcttgaccgggttggaggatggatgagaaacgagcaacgtggccctggcgttgggtttgtggctgaggtcgcctcggggtcctgatggcgggacccggggctcatgaggcgggtcttggtgggtgccgagggccatccggcatcctaggcgggtcactgcgggacctccctcgtgtctgtggtggtgggatcccgtggccgtgttttcctggtggcccggccatgcctgaggtttctccccgagccgcccctctgcgggcttccaggtgcccttgccctcatggtccctgtgcccccctccccgcccgcgtatcctctctccccgagcagctcaccggcttaggctgtggtggccccgtctgggaccaaacccggctccgccttgtgtggcgctgccgccggccactggttggcccattgtccatgtccccgggcgtgcgccttcgggaccaggtcggcggcaccccgagtgggcctggtgggcacccggaaggtttggggttggccagcagtgcgtgcagggaagagggttcagggggctggcctcgacagtggcggtggtgggggagccgcaggcccgcggaaggccagtcggccactccaggtgccgctcggggccgccttcatgctcggaggccactggctgtgagaccccaggcaccgcggtccgcctctcgttcgctgcccaaacgtcggggccgcccagcgccctccgcgcatgagtggccgctggtccctcacggctgccgcacacgggtcgggcggttggcctcctcgcacatgggcacgaagggtcgggagtggtgagcccgtcggggggtgttgtgtcctgtgggtggatgggatgtccggttcgccgccccaccacccccctcccaccacccggagctcctccctccctaccccacgccccatcgcccgccctgccacgcccaatctcgcaactgggacgccgggctcatcctcgcgagtcccagaggccgctttctacctacctggttgattctatcagaaccatatgcttgtctcaaagattaagccatacatgtctaagtatgcagggccggtacagtaaaactgtgaatggctcattaaatcagttatggttcttttggtcgctggctcctcttctacttggaaaactgtggtaattctagagctattacatgccgaagggcactgacccccttcacggggaagatgcatgcatttatcagatcaaaaccaacccagtcagcccctctccggccccggccggggggtcgggtgccgccagctttggtgcctctggataacctcaggccaatcgcatgccccccgtggcagcgatgacccattcgaacgtctgccctatcaactttctatggtagtcgctgtgcctaccatggtgaccacgggtgacagggaattagggttcaattctggagaaggagacttagaaacggctaccacattcaaggaaggcagcagacactcaaattacccactcctgacacgggaggtagtgacaaaaaataacaatacaggactctttcaaggccctgtaattggaatgagtccactttaaatcttttaatgaggatccattggagggaaagtctggtgccagcagccatggtaattccagctccaatagcgtatattaaagttgttgcagttaaaaagctcgtagttgaatcttgggaacgggtgggctagcgagccacagcctgtccctgcttcttgcctctcggtgccccctggatgctcttagctgagtgtcctgcggcccgaagcgtttactttgaaaaaattagagtgttcaaagcaggcccaagccgcctggatactgcagcttggaataatggaataggaccacggttctattttgttggttttcggaactgaggccattattaagagggacggccgggggcattcatattgcaccgctagaggtgaaattcttggactggcacagtttggaccagagcgaaagcatttgccaagaatgttttcattaatcaagaacgaaagtcagaggttcgaagacgatcagataccgttgtagttccgaccataaacgatgccgactggcgatgtggcagcgttattcccatgacccgctgggcagcttccaagaaaccaaagtctttgggtttttgggttccgaggggagtatggttgcaaagctgaaacttaaaggaattgacagaagggcaccaccaggagtggagcctgcatcttaatttgactcaacatgggaaaactcacctggcctggacacggacaggattgacagattgatagctctttctcaattccacaggtggtggtgcatggccttagttgctggagtgatttgtctggttaattccaataatgaacgagactctggcatgccaactagttatgcgacccccgagtggttggcatcccccaacttcttagagggacaagtttagccacctgagattgagcaataacaggtctgtgatgcccttaaatgtccagggctgcacgtgcgctgcactgactggctcagcgtgtgcctaccctatgtggcagatgtgggtaacctgttgaacctcattggcaatggtgatcattgattgcaatttttccccatgaatgaggaattcccagtaagtgctggtcataagcttgcatgaagtccctgtcctttgtacacactgcaggttgctactcctgattggatggtttagtgaggccctcggatcagcccctccgggtcagcccactgccctgtcggaacgctgagaagacagtcgaacttgactatctagaggaagtaaaagtcgtaacaaagtttcggtaggtgaacctgcggagggatcattaacagagaagagcaaagccatggagatgccgccatgtccttcctccttggctgactgtgttcccctgtggcgcatgcatgggtggggtcatgccctttgttcgttgcatggccccatctgccccgagagccagagaactcagaagggagagagggggtagagagagacatgcgtgtggggatgaaactgtgtgcttgtcgtggggtgggctggatggctcgccggcctggtgagcagtggggagcggtcccctgttgtggcccccatgtgtgcgtcggtgggcgcgggggtggttctcggcgtcatggtggggtgggggtctcggtgccctccccactggggccgtcatcatgccctgtcgcactgtcttggccccatcccgcccgctcccgttggggctggccaggttcccatcgctgccgctgccaccatcgtcgcctctgtcaaaccatgccactggcccggcccagcctgcttgctctccccagccttcccgctagggggtctcgagggtagggggctggacgccggtcccacccccctcatccgcccccaccatccaggtacctagcgcattctggtgcggaggtttaaggaccccttggggggtcgccagtctgcctgtgggtcaggtgcagtgggccctcagtggagtccgttcaggaggggccc

SEQ ID NO: 40274 - DNA, 964 bp, Artificial sequence
  DNA replication origin
gcaggccccctcccttccccaggcgtccctgtgcgcctctgcgggcccgacgaggggcgactggcatgtgggaactgtgactcaccctcagtgagaaagccttctctagcgatctgagaggtgtgcctttggggtaccggatcccccggcctgccgcctctctctgcgttatggtagcgctgccgtggcgactggcttgcagaggaccctcctccactgcccccttgatggggtgagggggggagagcaagggttccgccagcctccacggtggggacccagggaagctcgtcgcctactgtgtggcccgcgcctcccccttccgagtcgggggaggatcccgccgggccgggccgggccggcgtcctagcatttgggaggctgcgtgagcggtggctgtgcctggcgttcagtccagcttgtgacccattccgctgtgagccggctctctgcccgctcccctgcagagcagcgaccggtgccgacgaccgcgtttgcgtggcacgaggttgggccacctggccctgggaagcatcccaagtggggggcatgtcggtctcctggagcttgaccgggttggaggatggatgagaaacgagcaacgtggccctggcgttgggtttgtggctgaggtcgcctcggggtcctgatggcgggacccggggctcatgaggcgggtcttggtgggtgccgagggccatccggcatcctaggcgggtcactgcgggacctccctcgtgtctgtggtggtgggatcccgtggccgtgttttcctggtggcccggccatgcctgaggtttctccccgagccgcccctctgcgggcttccaggtgcccttgccctcatggtccctgtgcccccctccccgcccgcgtatcctctctccccgagcagctcaccggcttaggctgtggtggccccgtctgggaccaaacccggctccgccttgtgtggcgctgccgc

SEQ ID NO: 40275 - DNA, 1529 bp, Artificial sequence
  DNA replication origin
cacacagaatcctgggcaggaaagttctcagcaggtttaggcctcctagacaaaaagtcaaagccacttctgggatttttttttcaaagagccagtggttccacaaggggccatgggtagttgtggaaatggagagacgtgtttgcagatacatatttgagacaaaacggacagggctcggtcacagttcatgtagaacacgagcagatgcacattaagaaaaccctcccagtatcctaggtgaacagaggtatgattttttgagacagtcgagggagacgcaacgccagattttatggttggatctttattaatatgtagtatctatgaggtatccaagtccagaaatcaactcgccagttctgtacagcactctgtagggagatcaaatctgggatgtctaaagttaagaattcaggtcgtggtaatggactagattagatgtacttgaacatattttgcaaagaaagagagggcgggagatagcgagagccagagagcgggcgagagagagagagagagagagagagagagagagaaagacagagacagagagagacagacagagagacacaaagatacacaaagagagaaagacagaaagagagagacagacagataaagacacagacagagaaagacagagatggacagagacagagagaaacagaaagagacagagacagaaagagagagagacagacagacaggcaggcagacagtcagagaaagagagtaagacagaaggcagaaacacacacacacacagagacagagacagatggacagacaaagagaaagaaagagagagacagacagagagaaagagacagagagagaaagacagagacagacagagggagacagagagaaacagagacagagagagagagaaacaggcaaggagagagagagacagacagacaggcagagaaagacagtaagacagaagacagacacagagagagacaggcggagagtgacagacagagagacagagacagagaaacagacaggcaaagagagagagagaaaaaaacagacagacagggaaagagagagagacctacaggcagacagacaggcagagagagagacagagacagcgagacagagaaagagggagacagacagacaaagagacagacagagaaagacagagacggacagagagagacagagagaaacaaatagagagagacagagagagagagaaagagagagagagacagaccggcagagaaagagtaagacagaagacagacacagtgagagagacaggcagagagagagacacacagagacagagagacagagaaagaaagagagagacagacagagagacagacagagaaagacagagatggacagagagaaacagaaaaagagacagagaaagagacagagacagagagaaacagacagggagagagagagagacagacagacagagaaagggagtaagagagaagacagacacagtgagagaggcaggcagagagacagagagagagaaatagacaggcaaa

SEQ ID NO: 40276 - DNA, 1385 bp, Artificial sequence
  DNA replication origin
aatctacagcccaggctgtagtgcagtggcgcgatctcggctccctgcatgctccgccacccaggttcaagcgattctcctgcctcagcctcccgagtagctggcattacaggcgcctgccccaccgcgcccgactcaatttagtatttttagtagagatgcgttttcgcagtgttggcaaggctggtctcaaactcccaacctcaggtgatccacccgtctcggcctcccaaactgctgggatgacagacgtgagccaccgcgcccggccttaaccatgtatttttaagtcgaggagcttatcagggaaatacgagaagtagggacgccacacgtgacagagagaaacgtttgaaaatgccccttccatccaagtggggacccggccttgacctcccgaaatcatacaccgagtggcgaagcctagcaaggcccgtctgtctagattcctctcggcctctctaagcaggcgcttctcactttcgtggaaggggcagggccctccccggcaaaggggctctgacagactgacagagaaagagacagacatagaaagacagagatggacagagagagacagagagaaacagacagacaggcagggagagagacagagagagagagagacagatagggagaaacaaacagaaagagagagagagacagagagagaaacagacagacacacagagacagacagagagagacagagagaaacagaaagagagagagatggagagagagagaaagggagggagagagagagacagacagacaggcagagaaagagagtaagacagaagacagacacagtgagagagacaggcagagaaagagagagacagagaaagaaagagagacagagatggacagagagaaacagaaagagagagacagagacagagaaagagagagaaacagacagacagggagggagagagacagagagagagagacagacagacagagagacagagaaagacggagacagacagagagaaacagacagagagagagatggagagagtgagagatagagagggagagagaaacaaagagagggggagagagagacaaacagacaggcagagaaggagagtaagacagaagacagacacagtgagagaaacaggcagatagagacagagacagagacagagagaaagagagagacagacagagaaagagacagacagagacagacagagagaaacagcaagagagagagagagacagagggagagaaacagacagggagagagagagacagagagagagagacagacagagaggcagagaaagagagtaagacagaagataggcacagagagagagagaaagagagagagagaaagagagagaaagaaagagagagacagtccagg

SEQ ID NO: 40277 - DNA, 1216 bp, Artificial sequence
  DNA replication origin
agacagacagagaaagagacagacagagacagacagagagaaacagcaagagagagagagagacagagggagagaaacagacagggagagagagagacagagagagagagacagacagagaggcagagaaagagagtaagacagaagataggcacagagagagagagaaagagagagagagaaagagagagaaagaaagagagagacagtccaggcacagtggctcactcctgccatcccagcactttgggaggccaaggcgggcggatcacgaggtcaggagatcaagaccatcctggttaacacggtgaaatcccgtctgtactaaaaatacaaaaaattagccgggtttggtggcgggcgcctatagtcccagctactcaggaggctgaggcaggagaatggcgtgaacctcggtggtgaagcttgcagtgagccaagatggcaccactgcactccagcctgggtgacacagtgagactccatcttgaaaaaaaaaaagaaagagagagacagacagacagaggaggagacagacagagacagacagagagaaacagacagagagagagacagagagagagagaaacagaaaggcagggagggagagagagacaggcagaggaagagaataagacagaagacagacacagtgagagagacaggcagagagagacggacagagacagagagaaagagagagacagacagagatggagagagagacagagagaaacaaacagaaagagagagagacagagagagaatgagagagagagagagacagaaagggagggagagggacagacagagagagagacagatgggtagagaaagagaataagacagaagataggcacagagagacagacagagagagagagtgagagagacagacagagagactcagaaaaagaaatacagagacaggcagagagacagagaaaaacagagacagacagagacagagaaaaacagagacagacagagagagacagagagaaacagacagaaagagagagacacagagagagacagaaacagagagggagggagagagagagacagacaggcagagaaagagagaagacagacactgtgagacagacagagagagagagacagagacagagagaaagaaagagacagacagacagacagacagagaaagagacagatagagaaagacagagatggacagagagagacaaagaga

SEQ ID NO: 40278 - DNA, 1248 bp, Artificial sequence
  DNA replication origin
gcggctgtgggctgagcactcagcctgcactgggcacccaacattttcccggagttcgaggtcctgctgggcctggaggcagaagacctcttttctctttgccttcccttctctgtttcttgctccttttctccctctgtccatccttccctctgttcttccttctctccctctctccctccctgtctccctccctccctctgttctctccttccctctctcccaccatccatacctccctttctccctccttccctccctcccttcctttttctttccctccctccctccctccatcccttccaaggtccgtcctttcatccgtcctttcctccctctgtccctctctctcactttgtctccgttcctttccccatctctgcctggcttccctcccgcctagaaagggcagaaccacggtttgcacgagatctcggggtctacatttagttcccgggcgcttcacgtgatgccaaggaggatggcggggcacgggtgggcaagggagggtggagcggggaggtagtggagttgagctgcgaaaaggagagcaggcctggccgctgcccggatcggtatttcccggggtggaggtctccacctacaccactgaagaacgcgggggagggggggatgtactgtgtgggggagtgggggaagggatgagagccctgcctgggctggtcccaaaccctagccggctgcccgcggacctgcgcatgcgcagtagacggcccatctctgagtacctgggctggctctgaaatccttgggatgctcaggaaagaatgacagccctcctttctgtggagtctctcgctggacttggactcagggatcctagacaggtcagctggaagggaagacacaggtctccatactgaaccagaggttcaccgcgaaagaggagccactgacctgcccccacccggtcccaaccccgcgtcctaaagctcctccagctgagcccagtgttcttcctggctgaggagtggttccagaaaagcaggctcttccaagtccttcaaatccctcagcggctccgttgctaggaaaggttgtgtcctttgctgaaactgtgtcctttgctgaaaaatggggtagacaggagctcatataacagggtggatgcgagtacagatgaagactccagctcctggagcggttgggagggtgcctggattgcttacatcttcttctgacacgccgagacctccatgggcgcgagctgcgtagatgtgcctcggc

SEQ ID NO: 40279 - DNA, 859 bp, Artificial sequence
  DNA replication origin
caccgacacacacacagttacacacgggtgcacgcgcacaggcacacacgcacacacacggacacacacaacacacagacacacacacagacacacacagacacacaaagactcacacacggatacatggacacacgcacacgaacacacacggacacacacacaaggacatacagacaaagacacagacacagcttgaaagaaagctagggagaccgggatggagagatagaaatggggggagagagagaaagttggagggggagagagacagaaggtgacagaagagtgagaggtggagggggaagtagagaaagggagagggtgagggagttgcagagcgagaaagacggagccttggagagggaggctctgctcaggtagacagggcactttgagcaggccggggtgaggtggagggtgcttgggccaggctaagacagggggtcagggccgcccacgcgggaaaaccagcggagccctgagacgtgttttttttttttcttggattggttgattgctttgggggtgcgtttcatagggtccttcctttgtttgcttctttctgtctccttggtgctgtgggccccgagacttgtagagtgcacccgtccgtctggtggaagctgtggcacagagcgtgtccacggggccaggtctgtgtatctctcgtgtcctcgggactacactttacacgaagtcggtggcaatgggaaacaaggtgcacagggatggatttcttcgtggctggcaaagacaatatacttcccccggggaaagcattccatggtttctggagcggaggtcttggctggcgactgtgggacctgctgccccaacttggatggttgcagaggca

SEQ ID NO: 40280 - DNA, 940 bp, Artificial sequence
  DNA replication origin
gcgaagcatggaaaagcagcatcgtgtcttcactctcctttcgtttccaaacaggccattttggagactcctcatgttgcaggaaacaggaatccgtcatcaggccttgatgcctcagtcccctgcccaggctcaaggcacatcaggcggcctccctttcactgacattccaggccttcccccagctcgtgagctcccgagcttccaacacttcgggccggctcaggacagggtgtgcttggaggcgtcagggcccggggcccacagtcctgggatcacctctggtcctccgccttgccgcggaaaaattgatttggatccctcgccgcccctcttgcaaggccccctcttgccccacacacccagagtccgccagggctgcccaggggcgaacagccggcccagccccgtgggccctttttctcataacgcccacaccatcgtcgcttgttccaaagaggacccgcccatggccaacaggacaggaaggctctgctttgccccgcgctggcactagagccccggcagcctgatcctgggaaagaggggctgacagacacccagacacaccacaccaccaccatgagcaaacccacaccgacacacacacagttacacacgggtgcacgcgcacaggcacacacgcacacacacggacacacacaacacacagacacacacacagacacacacagacacacaaagactcacacacggatacatggacacacgcacacgaacacacacggacacacacacaaggacatacagacaaagacacagacacagcttgaaagaaagctagggagaccgggatggagagatagaaatggggggagagagagaaagttggagggggagagagacagaaggtgacagaagagtgagaggtggagggggaagtagagaaagggagagggtgagggagttgcagagcgag

SEQ ID NO: 40281 - DNA, 1178 bp, Artificial sequence
  DNA replication origin
tgagagagagacagaaagagagcacgcgagagccagagagtcagagtgagagaaacagacagggagggagagagacagacagagagagagagagacaggcagagagagagagagagacaggcagagagagaaagacagaagataggcacagagagagagagagagagagaaagagagagagagaaagaaagagagagacagtctgggcacggtggctcactcctctcatcccagcactttgggaggccaaggcgggcggatcgtgaggtcagaagatcgagaccatcctggctaacacggtgaaatcccgtctctactaaaaatacgaaaaattagccaggtgtggtggcgggcgcctatagtcccagctactcgggaggctgaggcaggagaatggcgtgaacctgggaggtggagcttgcagtgagccaagatggcgccactgcactccagcctgcgtgaaacagtgagactccatctgaaaaaaaaaaaaaagaaagagagagacagacagacagaagaagagacagacagagacagacagagagaaacagaaaggcagggagggagagagagagacaggcagggagggagagagagagagagacaggcagagaaagacagtaagacagaagacagacacagtgagagagacaggcagagagagacagacagaggcagagagaaagaaagagagagacatacagacatggagagagagagacagagagaaacagacagaaagagagacagacagagagagagtgagagagagagagacagaaagggagagagagggacagacagagagagagacagacgggtagagaaagagagtaagacagaagataggcacagagagagagacagagagagagagagcgagagagacagacagagactcagaaaaagaaatagagacagagagacagagaaaaacagagagagagagaaacagacagagagagacagagagagagaaacagagagggagggagagagagagagacaggcagagaaagagagttagacagaagacagacatcgtgagacaggcagagagagagagacagagagagagagagaaagaaagagacagacagacaggcaggcagagaaagagacagatagagaaagacagagatggacagagagagacagagaaacagacagaaaga

SEQ ID NO: 40282 - DNA, 933 bp, Artificial sequence
  DNA replication origin
acagcccgggctgtagtgcagtggtgcgatctcggctcactgcagcctccgcctcccaggttcaagcgatgctcccacctcagcctcccgagtagctggcattacaggcgcctgcccccccacgctcgactcaattaactatttttagtagagacggggtttcgccatgttggcaaggctggtctcgaactgccaacctcaggtgatccacccgcctcggcctcccaaagtgctgggatgacagacgtgagtcaccgcacctggccttaaccgtgtatttttaagtcgaggagctgatcaggaaaatatgagaattagggatgccacacatgacagagagaaaagtgtgaaaatgccccttccatccaagtggggacccggcctcgacctcccgaaatcataagccgagtggcgaagcctagcaagtctcgtcggtctagattcctctgggcctctctaagcaggcgcttctcactttcgtggaaggggcagggccctccccggcacggggtgtctgacagactgacagagaaagagacagacatagaaagacagagatggacagagagagacagagagaaacagacagaaagagagagagacagagacagagagagagagaaacagacagacagggagggagagagacagagagagagagagagagacagagacagacagagagaaacagaaagagagagagacaaagagagagaaacagacagacacacagagacagacagagagagacagaaacagaaagagagagagatggagagagtgagagatagagagagagagaaacagaaagagatggggagagagagacagacagacaggcagagaaagagagtaagactgaagacagacacagtgagagagacaggcagagggagagagagacagagacagagagaaagaaagagagagaca

SEQ ID NO: 40283 - DNA, 2138 bp, Artificial sequence
  DNA replication origin
acggccacgggatcccaccgccacagacacgagggaggtcctgcggcgacccgcctaggacgccggacggccctcagcacccaccaagacccgcctcatgagcccgggtcccgccatcgggaccccaaagcgacctcagccacaaacccaatgccagggctaggttgctcgtttctcgtccatcctccgacccggtcaagctccgggagaccggcgcgccccccacttgggaagcttcccatggccaggcggcccaaccccgtgccacacaaacgcggtcgtcgacactggtcgctgctcctcaggggagcgggtggagagacggctcgcagcggagcgggtcacgcgccagagggaacgccgggcacagccaccgctcgcgcagcctcccaaccgctaggacgccggcgcggcacggagggatcctcccgcgactcagaagggggaggcgcgggccacacagtaggcgacgagccgccctccgtccccaccgcggaggcaggggaaccctagctctccccacctcaccccgtcgagggggaagtggaggagtgtcctctgcgagctagtcgctacagcagcgctaccataacgcagagagaggcggaaggccgggggatccgctaccccaaaggcacacctctcggatcactagagaaggctttctcacggagggtgggtcacactccccaccagccagtcgcccctcgttgggcccttagaggtgctcagggatgcctggggaaagcagggggcctgcggtaccaggaaaaatctgcgtgcggcaaccttgaaccttcgcggtctgggcggggggcctggccgctatgcgtgtgcgcaatcccccaagggccccccgtccaccagcctcctttctcctagacaaagcacctccaagtaaatccacacacaacctgtcggaggcagaacggtagcccctcggcggccggccggcgcacgcgtcacctgcccaagcccaccgcgatagctcacactgcctgtgcgcaccaaccagaggggatcacaggacctgcgctcgccagaccaggcgacgcccttccccgcgtggcaggggtgcttctcactcaacctcctcgacccccacaccaacgagctccctcaggacccactcgcggacaccgcggcggcgaccggaggagggggcgctgggggtgggaaccacacaccaccgctggactttgggcacctgagtgataagctggggggggaacgggtggagccaggcgcagtaggctcacgcctttcatccccgcactttgggaggcgagggaaggtggatccctagatccaagccttggcaacatggtgaaacctcgtctctaaaaaaatacaaaaactaactggtttcataacctggactcaaagttaataaatagataaataggccgggcgcggtggctcacgcctgtcatcccagcactttgggaggccgaggcgggcggatcgcgggggtcaggagatcgagaccatcctggctaccacagtgaaacccccgtctctactcaaaatacaaaaaattagccaggcgcagtggcgggcgcctgtagtgccagctgcttgggaggctgagacaggagaatggcgtgaactcgggaggcagagcttgcagtgagccgacatcacgccactgcactccagtctgggcaacagagcaagactacgtctcaaaaaaataataataataataaagagatcaaaattgaaaattaaaaaaaaaacgtagctggccgggcgcaatggctcacgcctgtcatcccagcactttgggaggaagaggtgggcagatcacctgaggtggccagttcgagacccgcctgacccacatggagaaatgccgtctctactaacaatacaaaatcagccaggtgtggtggcccatgcctgtaatctcagctactcaggaggctgaggcaggagaatcacttcaacacgggaggtggaggttgcagtgagctgagatggtgccattgcactccagcttgggcaacaagagtgaaactccgtcccccccccaaaaaaaaaattaagcgcagtattctgttatttttgcttcctaccctgagaagatcataatacagctgttgtctgtctgcctgcctgcctgcctgccagcctgc

SEQ ID NO: 40284 - DNA, 959 bp, Artificial sequence
  DNA replication origin
ccgcgaaggttcaaggttgccgcacgcagatttttcctggtaccgcaggccccctgctttccccaggcatccctgagcacctctaagggcccaacgaggggcgactggctggtggggagtgtgacccaccctccgtgagaaagccttctctagtgatccgagaggtgtgcctttggggtagcggatcccccggccttccgcctctctctgcgttatggtagcgctgctgtagcgactagctcgcagaggacactcctccacttccccctcgacggggtgaggtggggagagctagggttcccctgcctccgcggtggggacggagggcggctcgtcgcctactgtgtggcccgcgcctcccccttctgagtcgcgggaggatccctccgtgccgcgccggcgtcctagcggttgggaggctgcgcgagcggtggctgtgcccggcgttccctctggcgcgtgacccgctccgctgcgagccgtctctccacccgctcccctgaggagcagcgaccagtgtcgacgaccgcgtttgtgtggcacggggttgggccgcctggccatgggaagcttcccaagtggggggcgcgccggtctcccggagcttgaccgggtcggaggatggacgagaaacgagcaacctagccctggcattgggtttgtggctgaggtcgctttggggtcccgatggcgggacccgggctcatgaggcgggtcttggtgggtgctgagggccgtccggcgtcctaggcgggtcgccgcaggacctccctcgtgtctgtggcggtgggatcccgtggccgtgttttcctggtggaccggccatgcctgaggtttctccccgagccgcccctctgcgggcttccgggtgcccttgccctcgcggtccctggccttgcgtctgtgcccccctccccgcccgcgtatcctctctccccgagcggctcaccggcttaggc

SEQ ID NO: 40285 - DNA, 2533 bp, Artificial sequence
  DNA replication origin
  misc_feature (2510)..(2533): n is a, c, g, or t
gagccgcccctctgcgggcttccgggtgcccttgccctcgcggtccctggccttgcgtctgtgcccccctccccgcccgcgtatcctctctccccgagcggctcaccggcttaggctgtggtggtcccgtctgggaccaaacccggctccgccttgtgtggcggcgccaccgccggccacttgttggcccgttgtccgtgtccctgggcgctcgccttcgggaccaggtcggcggcgccccgcatgggcctggtgtgagcccggagggtatggggtcggcgtgcagcgcgcgcagggaagagggttctgggggctggccgcgatggcggcggcggtggggaagccgcgggcccgccgaaggccagtcggccgctccaggtgctgcgcggggccgccttcgtgcttggaggccgctggcggtgagatcccgggcaccgcggtccgcctctcgttcgctgcccaaacgtcggggctgccccgcgcccgccgcgcgtgagtggccgccggtccctcgcggctgccatgcacgggtcgggcgttctgcctggttacacgtgggcacgaagggtcgggagtggtgagcccatcggggggtgttgtgtagtgtgggtgtatgggatgtccggttcgccgccccatcacccggctcccaccgccccgcgctgctccctccctcccacacgccaggtcgaccgccctgccgcacccatcctcgcgactgggatgccgggctcatcctcgcgaggcctggaggccgctttctacctacttggttgatcctaccagtaccatatgcttgtctcaaagattatgccatacatgtctaagtacacagggccagtacagtgaaactgcgaatggctcattaaatcagttatggttcttttgatcgctcgctcctctcctactttgaaaactgtggtaattctagagctaatgcatgccgaagggcgctgacccccttcgtggggaagatgcgtgcatttatcagatcaaaaccaacccggtcagcccctctctggccccggccagggggtcgggtgccaccagctttggtgactctagatagcctcgggccaatcgcacaccccccgtggcagcgacgacccattagaacgtctgccctatcaacttttgatggtagtcgctgtgcctaccatggtgaccacgggtgatggggaatcagggttcaattctgtagagggagcctgagaaatggctaccacattcaaggaaggcagcaggcatgcaaattacccactcccgacccaaggaggtagtgatgaaacataccaatacaggactctttcgaggtcctgtaattggaatgagtccactttaaatcctttaacgaagatccattggagggcaagtctagtgccagcagccgcggtaattccagctcccatagcatatgttaaagttgctgcagttaaaaagctcctagttggatcttgggagcgggcgggcggtccgccaggacgcgagccaccgcctgtccccgccccttgcctcttggcgccccctcggtgctcttagctgagtgtcccgcagcccaaagcatttactttgaaaaaattagagtgttcaaagcaggtccgagccgcctggataccgcagctaggaataatggaataggaccgcggttctattttgttggttttcagaactgaggccaggattaagagggacggccgggggcattcgtattgtgccgctagaggtgaaattcttggactggcgcagttcagaccagagtgaaagcatttgccaagaatgttttcattaatcaagaacaaaagccggaggttcgaagatgatcagataccgtcgtagttccgaccataaacgatgccgactggcgatgtggcggcgttattcccatgaccccgctgggcagcttccaagaaaccagtctttgggtttttaggttccggggggagtatggttgcaaagctgaaacttaaaggaattggtggaagggcaccaccaggagtggagcctgggcttaatttgactcaacatgggaaaaatcacccggcccggacatggaccggattgacagattgatagctgtttctctgttccatgggtggtggtgcatggccttagttggtggagtgatttgtctggttaattccgataaccaatgagactctggcatgctaactagttacgtgacccccgagcggtcggcgtcccccaacttcttagagggacaagtggccttcagccatccgaaattgagcaataacagatctgtgatgcccttagatgtccgggactgcacgcgcgctacactgactggctcagcatatgcctaccctacgtggcagaggcgggtaacctgttgaaccccattcgtgatggggatgggggattgcagttattccccatgaaggaggaatttccagtaagttcgggtcataagcttgcctgaagtccctgccctatgtacacaccgcccgtctctactactgataggatggtttagtgaggtcctcggatcnnnnnnnnnnnnnnnnnnnnnnnn

SEQ ID NO: 40286 - DNA, 749 bp, Artificial sequence
  DNA replication origin
tggggatggctggagagtaactgggagccacaggagagtccctgaggcctgggggtgaagagatgaaagacacaggggtggagcaccgtgaggctcatgagtttgtaggtgattcctgggtgtggggggctgactccagctgaaatctggggttgtttggagagtagctgggagacaaaggagaccccccgagagctgggggtgagctgctgggtgatggcagtaagagcatgtggtatattattgatgaacgtggggactctgaggaatcctcagaggaggacacgggagagcccaatgtcttcattgattgcccatcacggtgaggacagggaaatgggagcttgtgggattctggtgatgacagaggtgagtgtggtgaagccctaggggatggtgaatggtagctccggatccctggtgaggagcttccccttaagcaagagattctgagaggggagaggaagaagctgggtgaggctcgcatggaccttggggagtctgggctgggggaccgttcataagaagagccagacaagaccctactgttcttaggtgcagacatgattaggaaacctgcagctcccaggggcccgtaccaattttctaactcgaagaaggaaggagtgtgtgtgtgcgcgcgtgtgtgtgtgtgtgtgtgtttgtgtgtgcggtgtgtgtttgtgtgtgtgcggtgtgaggtatgtgccccttaagaaaatggaaatcaaccaaccaatgagacagac

SEQ ID NO: 40287 - DNA, 631 bp, Artificial sequence
  DNA replication origin
ccaggagagtccctgagggctggtgaagacatgagagagactggagagtaattgagtgaaattggtgagtttggtggtgattcctgggtgcctggaacggactccctctgaagtgtgggcgtggttggagagtagctgggacacacaggagagtccctgagggttggagataaagacgtgctagagactgaggagtaactgagtgaaattggtgagtttggtggtgattccggggtgcctggaactgactccagctgaaatgtgggcgtggttggagagtagctgggacagacgggagggtccctgagggatggtgaagacatgagagagactggggagtaacgcagtgaaattggtgagtttggtggtgatttctgggtgcctgcaacggactcccgctgaagtgtgggcgtgtttggagagtagctgggacagacaggcgactccctgagggttggagataaagacgtgctagagactggggagtaattcagtgaaagtggtgggcttggtggtgatccctgggttcctggaactgacccgcgctgaaatgtgggcgtggttggagagtagctgggacagactggagggtccgtaagggctgggggtgaagacatgagagagactggcg

SEQ ID NO: 40288 - DNA, 630 bp, Artificial sequence
  DNA replication origin
ggtgatacctgggtgcctggaactgactcccgctgaaatctgggcatggtaggagagtagctgggacacacaggagagtccctgagggctgggggtgaagacatgagagagaccgcggagtaactcagtgaaactggtgagtttggtggtgactccggggtgcctggaactgactgcagctgaaatgtgggcgtggttggagagtagctgggacccccaggagagtccctgagggctggtgaagacatgagagagactggagagtaattgagtgaaattggtgagtttggtggtgattcctgggtgcctggaacggactccctctgaagtgtgggcgtggttggagagtagctgggacacacaggagagtccctgagggttggagataaagacgtgctagagactgaggagtaactgagtgaaattggtgagtttggtggtgattccggggtgcctggaactgactccagctgaaatgtgggcgtggttggagagtagctgggacagacgggagggtccctgagggatggtgaagacatgagagagactggggagtaacgcagtgaaattggtgagtttggtggtgatttctgggtgcctgcaacggactcccgctgaagtgtgggcgtg

SEQ ID NO: 40289 - DNA, 751 bp, Artificial sequence
  DNA replication origin
gtgcctggaactgactccagctggaatctagagaagttttgacagtagctgaaagagacacaagagtccctgtgggctgagggcaaagacctgagagagaccagggaggacctcagtgaagtctgtgagtctgtaggtgattccggagtgtgggaggctgactcccgctgaaatctgggcgtggtgggagaggagctgggacagacaggagagtcccagggggctgggggtgaagacatgagagagactggggagtaactcagtgaaactgctgagtttgtaggtgatacctgggtgcctggaactgactcccgctgaaatctgggcatggtaggagagtagctgggacacacaggagagtccctgagggctgggggtgaagacatgagagagaccgcggagtaactcagtgaaactggtgagtttggtggtgactccggggtgcctggaactgactgcagctgaaatgtgggcgtggttggagagtagctgggacccccaggagagtccctgagggctggtgaagacatgagagagactggagagtaattgagtgaaattggtgagtttggtggtgattcctgggtgcctggaacggactccctctgaagtgtgggcgtggttggagagtagctgggacacacaggagagtccctgagggttggagataaagacgtgctagagactgaggagtaactgagtgaaattggtgagtttggtggtgattccggggtgcctggaactgactcca

SEQ ID NO: 40290 - DNA, 2736 bp, Artificial sequence
  DNA replication origin
cagggagagggtttgagacagaatgaggagtgactaatgtctacagggtttttctctggtcgggggtgataagacgttctacaatggattgcgaattaaaattgaatgtgcacaaccacaggtatagtaaaagccactcaattcatgacgtttaatgggggaatcttatgtggcgcactctcatggagaccacggcagacatagtgagagagaaaaaggtgagtaagtgtctgaaacggaggcagaaacagagagaatgaaaagccctgtgaatggaagggagagcgaaaagggaaaatggtcctatttacaaatgacggatgtgaaactggggttcacatcaacagtgtcactgccaggaaggagggtcatgctagccatgtcacctgtagtgtggcccgcagggacgccgacctgctggagcgtcgtgccagcatgggctgtggcatccacgtgggccagcaggaggttcccgctgcacagctgtggggtgaggatagactgggtggtgatatcggccattacaggggcctcttctgctggcaagagtgtgacagtagcaagtagatggacaggcctgtgtgtgaggacgtaatgcaggaggcgctcttgtgcggctgggtgtggggccctcacgggaaccgtggagaaatggccaggtaactgcgtcatgtgggctggtagattggccagggcttcgaactgaaggacgataacggggagtagctgtcaggccctgggagtgcctgagtgtaagtggagatgggtttggggtcactgagggatgcgtgggagccatccctgtataggtacaggtcgtagggagatagcctcgtgaggcctgtgagtgtctagggttgtcctgggtgcctggggctgactgtggcagaaatctggggaaggctggagagaagctgggagacccaggagagtccctgaaggcagggggtgaagaggtgaaagaaatgggggagggttgcagtaaggtccgtgagtttgtaggtgattcctgggtgcgggaagctgactccaggtgaaatctggagatggttggagagtagctgagagagacagaagagtccctgagggctgggggtgagaacatgagggagacgggggagtaagtcagtgaaattcgtgagttcggtggtgtatcgtgggtgcctggaactgactccagctggaatctagagaagttttgagagtagctgaaagagacagaagagtccctgtgggctgagggcaaagacctgagagagaccagggaggacctcagtgaagtctgtgagtctgtaggtgattccggagtgtgggaggctgactcccgctgaaatgtgggcgtggtgggagagtagctgggacagacaggagagtcccagggggctgggggtgaagacatgagagagagtggggagtaactcagtgaaattgctgagttggttggtgatacctgggtgcctggaatggacccccgctgaaatctgggcatggttggagagtagctgggacacacaggagagtccctgagggctgggggtgaagacatgagagagaccggggagtaactgagtgaaactggtgagtttggtggcgactccggggtgtgtggaactgactccagctgaaatgtgggcgtggttggagagtagctgggacagtcaggagagtccctgaggactggtgaagacatgagagagactggagagtaattgagtgaaattggtgagtttggtggtgattcctgggtgcctggcactgactcccgctgaagtgtgggcgtggttggagagtagctgggacacacaggagagtccctgagggttggagataaagacgtgctagagactgaggagtaactgagtgaaattggtgagtttggtggtgattccgtggtgcctggaacggactccagctgaaatgtgggcgtggttggagagtagctgggacagacgggagagtccctgagggatggtgaagacatgagagagactggggagtaattgagtgaaattggtgagtttggtggtgattcctgggtgcctggcactgactcccgctgaagtgtgggcgtggttggagagtagctgggacacacaggagagtccctgagggttggagataaagacgtgctagagactgaggagtaactgagtgaaattggggagtttggtggtgattccgtggtgcctggaacggactccagctgaaatgtgggcgtggttggagagtagctgggacagacgggagagtgcctgagggatggtgaagacatgagagagactggggagtaaggcagtgaaattggtgagtttggtggtgatttctgggtgcctgtaacggactcccgctgaagtgtgggcttgtttggagagtagctgggacagacaggcgagtccctgagggttggagataaagacgtgctggagactggggagtaactgagtgaaagtggtgggcttggtggtgatcccagggttcctggaactgacccgcgctgaaatgtgggcgtggttggagagtagctgggacagactggagggtccgtaagggctgggggtgaagacgtgagagagactggcgaggatctcactgaggtctgtgagtttgtaggtgtttctggggtgtggggtacagactccccctgaaatctgggcgtagttggagagtagctgggacagacaggagagtcatgggtggctgggggtgagctgctggatgatggcagtaagaacatat

SEQ ID NO: 40291 - DNA, 726 bp, Artificial sequence
  DNA replication origin
aagttgtggaattctgttgatgatggatgtgagagtggtgaagccctgcgggatgatgtagaggacttccacatccctggtgaggagctgccccttgggtctgagtttctgggaggggagagggagaagctgggtgaggcaggcatgaatcttgaggagtcagggctgggggaccgctcatattctcccgagacctgtgagtctctgggggactcctgggtgcatggggctgactcccgcaggaacctggggatggctggagagtaactgggagccacaggagggtccctgaggcctcggggtgaagagatgaaagacacaggggtggagcaccgtgaggctcgtgagtttgtaggtgattcctgggtgtgggggactgactccagctgaaatctggggttgtttggagagtagctgggaggcacaggagaccccccgagagctgggggtgagatgctgggtgatggcagtaagaacctgtggtatattgttgatgaacgtggggactctgaggaatcctcagaggaggacacgggagagcccaatggcttcattgattgcccatcacggtgaggacagggaaatgggagcttgtgggattctggtgatgacagaggtgagtgtggtgaagccctaggggatggtgaatggtagctccggatccctggtgaggagcttccccttaagcctgagtttctgagaggggagagggagaagctgggtgag

SEQ ID NO: 40292 - DNA, 679 bp, Artificial sequence
  DNA replication origin
gtgaagagatgaaagacacaggggtggagcactgtgaggctcgtgagtttgtaggtgattcctgggtgtggggggcagactccagctgatatctggggttgtttggagagtagaggggagacacaggagatcccccagagctgggggtgagctgctgggtgatggcagtaagaacctgtggtatattattgatgaacgtggggactctgaggaatcctcagaggaggacacgggagagcccaatggcttcattgattgcccatcacggtgaggacagggaaatgggagcttgtgggattctggtgatgacagaggtgagtgtggtgaagccctaggggatggtgaatggtagctccggatccctggtgaggagcttccccttaagcatgagtttctgtgaggttagagggagaagctgggtgaggctcgcatggaccatggggattccaggctgggggaccgttcaagagaagagacagacaagaccctactgttcttaggtgcagacatggttaggaaacctgcagcacccaggggtccctactaatgttctaactcgcagaaggaaggagtgtgtgtgcgtgagtgtgtgtgcgtgtgtgtgtgtgtgtgtttgtgtgtgtgcggtgtgatgtatgtgcctctgaagaaaatggaaatcaaccaaacaatgggacag

SEQ ID NO: 40293 - DNA, 1303 bp, Artificial sequence
  DNA replication origin
ctgagagttgggggtgagaacatgagggagactggcgagtaagtcagtgaaattcgtgagttcggtggtgtatcgtgggagcttgaaactgactccagctggaatctagagaagttttgagagtagctgaaagagacacaagagtacctgtgggctgagggcaaagacatgagagagaccagggaggacctcagtgaagtctgtgagactgaaggtgattccggagtgtgggaggctgactcccgctgaaatgtgggcgtggtgggagagtagctgggacagacaggagagtcccagggggctgggggtgaagacatgagagagagtggggagtaactcagtgaaactgctgagtttggtggtgatacctgggggcctggaactgattccccctgaaatctgggcatggttggagagtagctgggacacacaggagagtccctgtgggctgggggtgaagacatgagagagacgggggagtaactgagtgaaactggtgagtttggtggtgactccggggtgcgtggaactgactccagctgaaatgtgggcgtggttggagagtagctgggacagacaggagagtccctgagggctggtgaagacatgagagagactggagagtaattgagtgaaattggtgagtttggtggtgattcctgggtgcctggaactgactcccgctgaagtgtgggcgtgtttggagagtagctgggacacacaggagagtccctgagggttggagataaagacgtgctagagactgaggagtaactgagtgaaattggtgagtttggtggtgattccggggtgcttggaacggactccagctgaaatgtgggcgtggttggagagtagctgggacagactggagagtccctgaggcatggtgaagacatgggagagactgggtagtaacgcagtgaaattggtgagtttggtggtgatttctgggtgcctgcaacggactctcgctgaagtgtgggcgtgtttggagagtagctgggacagacaggcgagtccctgagggttggagataaagacatgttggagactggggagtaactcagtgacagttgtgggcttggtggtgatccccgggttcgtggaactgacctgcgctgaaatgttggcgtggctggagagtagctgggacagactggagggtcggtaagggctgggggtgaagacgtgagagagactggcgaggaactcactgaggtctgtgagattgtaggtgtttctggggtgtgtggtacagactaccgctgaaagctcggcgtattttgagagtagctgggac

SEQ ID NO: 40294 - DNA, 1123 bp, Artificial sequence
  DNA replication origin
gccacaggggatggggctgagggccggttcccgcccctgtgcagctgctgcagggacagaccgcctggcttggccacagccacagggacatttggccctgcttccgagatgtggggagtgtgggcgggctcgggagttgcctggaggctgctgcctgcacgcagaaggtggctgcagctcgggtgcccaggcgggctggaggtgcatggcctggtcggccttgggatcaccagcgcgcccagcgtgagggcccccaggccgtgcctcccgaccactcctccacctgagggagatcggagccatttgtatgggcactcggcagtcacctcgtgtggggttgagcggtggcttctcagttctcgctcctgtgcagctgctgcagcagggcagaatgcctggcttggctgcagccactgggacacgtggccctgcttctatgatgctaggagcgcgagcgggctcgggggttgccaggcagctgctgcctgcacacagagggcgacggcagcttgggcgcccagatggcacagcatggtttgggtggcctctggaatgcgtgcgcgccaggcctgagggtcaccctggtggggccacataccccggtcttcctctgctggagcctggagcagctggaatggccactattccgtcacaggggatagagttaagttttcttatcccacccatgcacacaaaaaggtgactattctgtgaggtaataaacgtgttaattgacttcattcatgccactctgcatccacaagtaaggctttcataacaatgacacagaaaataaatgttgctaaggaggtggagaagttggagccctcatgatctggctgctaggaatagaaaatgatgcccttgctgcggaaaacaatttgttgttcctcacagaatgagcattgggtgaaaaatgaaatcaagatggaaatgtaaaaaatttcttcgaactggatgacataacctatcaagacctctgggatacagcaaaggcactgctaagagcaaagtttgtagtcctaaaaacctacatcaaaaagtctgaaagagcacaaacagacaatctaagttcacatctcagggaactagagaagcaggaacaagccaaacccaatcccag

SEQ ID NO: 40295 - DNA, 1043 bp, Artificial sequence
  DNA replication origin
gagtaagtcagtgaaattcgtgagttcggtggtgtatcgtgggtgcctgaaactgactccagctggaatctagagaagttttgagagtagctgaaagagacacaagagtacctgtgggctgagggcaaagacatgagagagaccagggaggacctcagtgaagtctgggagactgaaggtgattccggagtgtgggaggctgactcccgctgaaatgtgggcgtggtgggagagtagctgggacagacaggagagtcccagggggctgggggtgaagacatgagagagagtggggagtaactcagtgaaactgctgagtttggtggtgatacctgggggcctggaactgattccccctgaaatctgggcatggttggagagtagctgggacacacaggagagtccctgtgggctgggggtgaagacatgagagagacgggggagtaactgagtgaaactggtgagtttggtggtgactccgggttgtctggaactgactccagctgaaatgtgggcatggttggagagtagctgggacagacaggagagtccctgagggctggtgaagacatgagagagactggagagtaattgagtgaaattggtgagtttggtggtgattcctgggtgcctggaactgactcccgctgaagtgtgggcgtggttggagagtagctgggacacacaggagagtccctgagggttggagataaagacgtgctagagactgaggagtaactgagtgaaattggggagtttggtggtgattccggggtgcttggaacggactccagctgaaatgtgggcgtggttggagagtagctgggacagacgggagagtccctgagggatggtgaagacatgggagagactgggtagtaacgcagtgaaattggtgagtttggtggtgatttctgggtgcctgcaacggactctcgctgaagtgtgggcgtgtttggagagtagctgggacagacaggcgagtccctgagggttggagataaagacatgttggagactggggagtaactcagtgacagttg

SEQ ID NO: 40296 - DNA, 787 bp, Artificial sequence
  DNA replication origin
gtggaattctgttgatgatggatgtgagagtggtgaagccctgcgggatgatgtagaggacttccacatccctggtgaggagctgccccttgggtctgagtttctgggaggggagagggagaagctgggtgaggcaggcatgaatcttgaggagtcagggctgggggaccgctcatattctcccgagacctgtgagtctctgggggactcctgggtgcatggggctgactcccgcaggaacctgggggtggctggagagtaactgggagccacaggagggtccctgaggcctcggggtgaagagatgaaagacacaggggtggagcaccgtgaggctcgtgagttggtaggtgattcctgggtgtggggggcagactccagctgaaatctggggttgtttggagagtagctgggaggcacaggagaccccccgagagctgggggtgagatgctgggtgatggcagtaagaacctgtggtatattgttgatgaacgtggggactctgaggaatcctcagaggaggacacgggagagcccaatggcttcattgattgcccatcacggtgaggacagggaaatgggagcttgtgggattctggtgatgacagaggtgagtgtggtgaagccctaggggatggtgaatggtagctccggatccctggtgaggagcttccccttaagcctgagtttctgagaggggagagggagaagctgggtgaggctcgcatggaccttggggtgtccgtgctgggggaccgttcataagaagagccagacaagacccta

SEQ ID NO: 40297 - DNA, 687 bp, Artificial sequence
  DNA replication origin
cacacaggagagtccctgagggctgggggtgaagacatgagagagaccggggagtaactgagtgaaactggtgagtttggtggcgactccggggtgcgtggaactgactccagctgaaatgtgggcgtggttggagagtagctgggacagtcaggagagtccctgaggactggtgaagacatgagagagactggagagtaattgagtgaaattggtgagtttggtggtgattcctgggtgcctggaactgactcccgctgaagtgtgggcgtggttggagagtagctgggacacacaggagagtccctgagggttggagataaagacgtgctagagactgaggagtaactgagtgaaattggggagtttggtggtgattccggggtgcctggaacggactccagctgaaatgtgggcgtggttggagagtagctgggacagacgggagagtccctgagggatggtgaagacatgagagagactggggagtaacgcagtgaaattggtgagtttggtggtgatttctgggtgcctgcaacggactcccgctgaagtgtgggcgtgtttggagagtagctgggacagacaggcgagtccctgagggttggagataaagacgtgctggagactggggagtaactcagtgaaagtggtgggcttggtggtgatcccagggttcctggaact

SEQ ID NO: 40298 - DNA, 1206 bp, Artificial sequence
  DNA replication origin
caggtaactgcgtcatgtgggctggtagattggccagggcttcgaactgaaggacgataacggggagtagctgtcaggccctgggagtgcctgagtgtaagtgaagatgggtttggggtcactgagggatgcgtgggagccatccctgtataggtacaggtcgcagggagatagcctcgtgaggcctgtgagtgtctagggttgtcctgggtgcctggggctgactgtggcagaaatctggggaaggctggagagaagctgggagacccaggagagtccctgaaggcagggggtgaagaggtgaaagaaatgggggtgggttgcagtaaggtccgtgagtttgtaggtgattcctgggtgcgggaagctgactccaggtgaaatctggagatggttggagagtagctgagagagacagaagagtccctgagggttgggggtgagaacatgagggagacgggggagtaagtcagtgaaattcgtgagttcggtggtgtatcgtgggtgcctgaaactgactccagctggaatctagagaagttttgagagtagctgaaagagacacaagagtccctgtgggctgagggcaaagacctgagagagaccagggaggacctcagtgaagtctgtgagtctgtaggtgattccggagtgtgggaggctgactcccgctgaaatgtgggcgtggtgggagagtagctgggacagacaggagagtcccagggggctgggggtgaagacatgagagagagtggggagtaactcagtgaaattgctgagttggttggtgatacctgggtgcctggaactgacccccgctgaaatctgggcatggttggagagtagctgggacacacaggagagtccctgagggctgggggtgaagacatgagagagaccggggagtaactgagtgaaactggtgagtttggtggcgactccggggtgcgtggaactgactccagctgaaatgtgggcgtggttggagagtagctgggacagtcaggagagtccctgaggactggtgaagacatgagagagactggagagtaattgagtgaaattggtgagtttggtggtgattcctgggtgcctggaactgactcccgctgaagtgtgggcgtggttggagagtagctgggacacacaggagagtccctgagggttggagataaagacgtgctagagactgaggagtaactgagt

SEQ ID NO: 40299 - DNA, 1064 bp, Artificial sequence
  DNA replication origin
actcggccatggctctgggagacttctgcgcggagaggctgaagctggctcagaacgatatgtgacccggagcagcaccacggcggggaggaacagaagtggaggcgaagtcaacactccctgacagcgtaagtctgtccagaacctgccttcgtcttcacccaaacgctgaatgcctgagatttccacttccgggtttctgccggggagctacggcggccgcagagggccgaaaggtgtccgtacgcagctgctccctggcgacctcccaaggagcccctgaggattcgtgcctcccagaggtggggaaagccctcccgaggcgggggtgctgacggtggcgggactgccgggctcgctgtggaaccgcctcccgctagagctgcgggctggcgaaggtccccgcgggggcaggaagcgtctcaggcttccctcgccggcctgcagcggcgcgtctggaagcgctggccactcgtgcctgggtcactcggggctgtgcctcgcgcgactgtgtgtgcaggaaacaagcaggaaataccctaaaatagaatgaagcgccatgttgagggccgcggacgtcgcgagtgctgtgggaatgtgggctgaggtggagagttacaggcgcgtgttacaggctcaggggtcaggaagaagcctaatcgtggaggcggcatctgaggagggtcttgaactctgggcaggctttttccctatagagatggaggaagctagccctgtctgatggaggaaacagggcagaggcgtggagggagtcgtgcagcgctggtgtgaggagccgcgagcgggcgaggcctgtaaagcagagtgatgggaaccaggatagagaaggcaagtcggggtccagtggtcgctgaagaatttgaatgaaatcagtaaacaggtgagagggatccatcgcaagggtacgggatgaaatgaggagtagtccacggtgattcctctgcagcggtgggtattattaatcgcgtatgtgacaccaaaacggtgggtattattgatagcgtatgtgacaccaaaaccaccccactcaagctgtgactctt

SEQ ID NO: 40300 - DNA, 1347 bp, Artificial sequence
  DNA replication origin
gacggggtcgggtcggggcagggcggtggactctcttttgccaggaacacctggctggctatagaggggcaagtcttcaccccacccccaccactgggctgaccggcctgggattcctgccttctaggtttaggcctggtgagaggctccacacagcagagaactgccattttttcttggtaatcccgtggatcccaccgccggcccaggtaccagaggtgggccgcatactgcgcacgcaagggtttttgggcagccgcctgggctttgagagcagccgggcagagctctcacgcctttccaccaccccacccccgcacgaccaccccctccgcactcccacaatccccccagaaaatgcgtcctccccagggctgggtggagacccctgtcctgagaaacaccgggcccgcgcagcgtccaggcctgacaacagtccagcggctcgcctcttctctgcctccacgccaccgtcaccagcccacccgtgcccctgccgcctcccagctgccaccatggagcgcttggcggcggaacgcagacctctagcactctttgctggcctcctggctagacctgcactcattgtgcacactggctgacgtgcaagggagcccgctggcctctctatgcccttttccgtcagtgaaattctggctgaggttctccaaacaccttccgatgctctttcatcaaagcctggagaatggttacatctcctggatgatcagttcagaaacatgtcacaatgcccctccctgcggagcctagagaagatttgcatcatttgggtgatcagtgcagagatatttcacaatgtcccctgtacaaaaagcccgggaatgatttacatcacctcggtgatcagtgcataggtatgtcagaaatcctcagtaggctgaaactagacaagggttacatcatttaggcgatcagtgtagagatatgtgaaaattcccgtgtagacagagcctagacaagtgttacatcacctagtgatcagtgcagggttaagtcataaagcctcctgtaggaagagtgtagacaagtgtttcctccctggggtgatcagtgcagagatatgtcacaaagctcctataagcagaaccttgaaaagggttacatcacctgttggatcagtggaaatgtatatcacaaagtccctgtaggcaaagcccagacaattgttacatcacctgggtgagcagtgtagagatctgtcacaatgcccctgtaggcagagcttagacaagggttacatcacctgggtgatcagtgcagagatatgtcaaaacgctcctgtaggctgaacctagacaggagttacgtcacctgggtgatcagtgc

SEQ ID NO: 40301 - DNA, 946 bp, Artificial sequence
  DNA replication origin
gttttagagcctggggctctccctcagggggctttcgtgagccagggagcgagggccgtccctgtgctccaggccagcctggccgtgccggcagaggggatctcccaacctgccccagcacgcggggattttctctacgccaccccggctcctctggaaggggcgctctcccaccctcaggctcctcggtggcctcggcacccaggcaaaagccgggaggactgggaaccgcagcgtgacggcctgctgggcccttgcgcggtgggacagcctgggcccgctcaagcggggccacaaggccaaggtgtgcttgcgatacccgcgtcccaggggagtccgtggtggggctggggccggggtccccaggtcgccagggcagcgtgggaaccccaagccggagcagctccacctcgccagcccacgcccccggaggcctccgcgtggcaggggctgatgcaaggcatccaggtgcccaccgaggtgctccaggagccagggtgctcgtctgcactcccctccggccttctgctggatgagctcctggtgagccaggagttcctgcagcaggggctacctttcctagaaacggaggccccaggggagctggaggccttggaagaggccgcctcgctggaagaacccctcagcgaggaagaataccggggtctgctggaggagctttaggacatggggttgggacggggtcgggtcggggcagggcggtggactctcttttgccaggaacacctggctggctatagaggggcaagtcttcaccccacccccaccactgggctgaccggcctgggattcctgccttctaggtttaggcctggtgagaggctccacacagcagagaactgccattttttcttggtaatcccgtggatcccaccgccggcccaggtaccagaggtgggccgcatactgcgcacgcaagggtttt

SEQ ID NO: 40302 - DNA, 1077 bp, Artificial sequence
  DNA replication origin
ttatggcccctgtcctcggacggctccgcagccgccagggagggactggagggaccgcggctgggacaggctgctgcatcaggcggccctggaccgccgcttccgcccctaagccgccctcgcagcccaggcgaccggtcgccctacccagggagcatcgccctcctcagccggggcccgagcccggcgtgggggttgcaggctggcgccacagcctgaggacaccgcgacctctgcccccaggagcacgccgaatgctaggtggggctgctgtcgcaggctgtggagccgcagccccgctggagggcagggtccggctgggcgtcggggtcctggcagagaccgcggtgagggcaggagcaggtgcactggccgctgcagacgcgccgccaggctcccggacaccgcgggcgcgcccctggtggcagccggctccggagccgcgggagggcggtgcccagtccccagctggcggcagcgcgaagctccttccccgcttgggggagtgggcgtggacctgcagccggagtgccttactaacgaaaaaagctgggattggagttgccacggggggaggtgtgggggcctagggggctctgcctggacattctgggtgtcctcctgcgacctcaggttcctcacctgtctcagaggactgatgggctgctgtggcagggttgtttggaggattaagccagatagtcccagtaaagccccattagcgccccctggcctctggattattattttttattatttttctggctttcttaggaaactttccggaatgcgtccaggtgttgaagcgggaaggctggacaccctcccttggcgttgcggttccttccagacgccccctcttcttaggctgttttcaagggcatgcccggcaacatgtgctctacccaagagcgcttcacagatcttcctgtgggtctaaaaccagaacgctttcttccccgacccctgctcccgtatcaccccaacctcaagtcttttggcacagccggctacagactcgagtgtcagtttaatgcttgttccctaaggtctccccagggctcttaggacggcgtc

SEQ ID NO: 40303 - DNA, 1213 bp, Artificial sequence
  DNA replication origin
gtgtccgggagcctggcggcgcgtctgcagcggccagtgcacctgctcctgccctcaccgcggtctctgccaggaccccgacgcccagccggaccctgccctccagcggggctgcggctccacagcctgcgacagcagccccacctagcattcggcgtgctcctgggggcagaggtcgcggtgtcctcaggctgtggcgccagcctgcaacccccacgccgggctcgggccccggctgaggagggcgatgctccctgggtagggcgaccggtcgcctgggctgcgagggcggcttaggggcggaagcggcggtccagggccgcctgatgcagcagcctgtcccagccgcggtccctccagtccctccctggcggctgcggagccgtccgaggacaggggccataaactctccagagcgggaagccgcaccctggtggcccggctccgcgcccagacctggccgcagctggcacctgacccgctgcatgggtctccagggagctcgctgccaacctggcactgcagcctcggctccctcatacgcgctctggtaggtgctagggacgaccctatgggccagcttgccacgccaagtccccaggccacacccaccctggctccctgggctaggggactggctcctcctgtgggtcgtggggctggcaggcagggactttaggggagagggagggacagagggcagcccctgctgtgtgcgcagcgaggtcctgcacaggcctctgttgcagagcgtgcagcttcagctgggactggattgcaggtggagatgactgtttgtgcgcacacctgggggtgaagaggacgcagcctgtctacctgacccatgaaatggaggagactgtaccacagaagcagcgggttcactgctccattgatgaagcaagtctgggacacacatgtagctaagctgcgacttctgtgccagcggtcccaacacccacgccttcaggaagacacatgtgtgggggttgcgtgcttgtcaggcctgagagtggagagtgggggccagagacactaggtagggggaacccgcccgagggctctgagggatgacgatgtagggagctggtggcagagattgagctggcccaatgttgcagggtggggacagagtcgaggtccaccccgcctcaggtggacagctgaacctgagtagacatcaggccccagatcgacatctggccccaggtag

SEQ ID NO: 40304 - DNA, 1246 bp, Artificial sequence
  DNA replication origin
cactcatcgtcatgcttggagagtaattgtcattctgaaaggagtggaggaagtttcctcctagctcgccgtcatctcgaggggtgcctggaagattgctaatactattcacgttgttaggagaattttttggaagtcatttatgttgcctgaccctaacaatccgttcatgtggtgtggctccatgccacccatgctgcccatcggaccgtccaagctgggacccatcgggaagttggaccggctgcctccaggtggcaccagattaatcaatgtgtagatgttgtcgctggaatttgttgaatctgagggactgggcatagtgggtgttcctggagggccaccaccaccagggggtcccacataggtaccaggtgatgaggaggagtatggaattgagttagcactgttagaattgggctagggtctgccggctcccgggcccatgttaatcccgggcatggcagggccaagggaattgggtggtggtctcatgccactgccgtaattctgtgggctgggactcatgggcaccatgcctcagggagggttcattctctgcattgatccttctatgtgggggtggccttgttgtcgtgtgggatccatggaattgggcagcaatggctgtttcccaggaactcctccggaggaggctggtttcccattctgatcggggggcctggggccgcctgcgtattgcggtgacataaaaggctgactgtggggtcccatcatgctgctaggattgtgaggtggaggctgtgcatgcagtgagggcagtgaccccggaggacactgaaagaaacctggcgagactcggcctcccggcatcccatcgttggggggaatgttgccaagcacggggctccgggcagctgctgcactagaatcaggaaaggcttttgcttcacttgaatgttcacaagtgtctctccttttaggagctgcacagtaaaggtcccaaaatacacaccaccacgagtgcaaaaaccgaggctgttctcccaacgtgatgttttttttttttttttttcccagagaatctccgataagaaggtctgtgcagatttctgtgctcctacctgcagtaaatattcgtagacgtataaagctaacttttccccagcctgcccgtccgagggcaccaacgagcctttgtctttggcaaacatggtttgcagggaagagggctccaagcctcgccacagccgccacagctccggctctcccgagctgcccctgg

SEQ ID NO: 40305 - DNA, 1595 bp, Artificial sequence
  DNA replication origin
aaccctggagggtttttctcatccaatcagaacatgcagtctaggaaccttcatctatatataacctcagtatatgaatgatcctgaagggaaggctgcccctttaaggttccggtatcttcctgtagagctgctcagggcccagcttagaggaccgggaatgggtaatcacaggccgtacgctggaggctggagccgcggtaggacggctcgcctcgctgcggtttgtggtgacggcaacggagaaagcagtgtggtgcaagaggtaggaggaggaaaatagttttgggatagatggagggaggtaaagagggtggttagtgacaaagggaaaagagaatagcgagcaggagaaggtgttgcaaaaagacagtggggaaaagatggtgggaaaaaagtttttgggtaaatggagggggagaaacagggtggggagcgggagggagggaaggttttgcagaaagacagtgggtaaaaagtttatgggtagatggaggagaagagggtggcaagggggaggaggaaagagggtgggagggaaatgggggcaagcagtagggagagaaggttttgtgaaaagacagtggggagaaaagtttttgggtagatagagggggaaaagagggtaacaagtgggggaagggaaaagggtggccagcgggaggaagacagggttttgcaaaaacacagcaggcagaaaagaaagacggggcggggaagaaaagatgatgggtaaaatgtgtttgggtagatgcacgggggaaagagggtgaccaggaggaggagaaaagagggtggcgagagggagcagggaaagagggttggggaaaaaatggaaaaatagtttggggtagatggagggcaaaacagagtggaaagcaggatagggcaaagaggatgagtgggaagggggaaatactgaaaagacggtggggagaactttgagggatagatggagggggaaaagaaggaggtgagcaggagtggggagaaggctttccgaaaaggctgtggggaaatgtttttgggtagatggagaagggagagggtggcaaggaggagcaggggaaagacgatgaggaaaacagtttttgggtagatgaagggggaaaagaggttggtgagcggcaggagtgaggagaaggttttgggaaaagaggggggaaaatacttttgcttagatgaaggagcaaaagatggtgatgagagtgggacggggaaaaagaaggtggccagggagaaggggaaaagacggtgggagaaaacagtggggaaagtgtttgggcagatagatggggaaaagggtggtgagcgggagagtagagaaggctttgcgaaatgacggtgggggaaaaatggtggggaaaaagttttggggtagatggaggaagaaaatgggtggcgagggggaggagaccaaaggcggtcgggaaaagaaggtggagaaataatggtgagagacaaaggttttgggtagatttttttaaatcagattatttgtatttttgcttttgagtagtttgagttctttatatattttgtgtattaaccccttggctgatgcatagtttgcaaatattttgttccattctctg

SEQ ID NO: 40306 - DNA, 2166 bp, Artificial sequence
  DNA replication origin
ctgggattggactttattatcatgttctgattggatgagagcaagtcttaagacaacaaatcacagcatgaaaataaagcccaatcagagtaggcctagaggtttttctctcatccaatcagaacatgtagtccaagaacgcatgtgcgtaacctcagtatataaagcacggtgagagcaacctcaggtcatttcaggttcttcagtgctggtgtgctgctcttcgcttagagaactaggagaggggaccgccatctgctgccagctggagccagggcactggctgtctccggttggtggtggggatggagcggtcgaagggtggcctgcagtgggagcttttcctgccgggcaggaggaagagtagaagggagaggcacggacgcatgctggaggctggagcttgcgccaccgcagctcgcctcgctgcggttggtggtgatgtcggacactgcaggtcttccagagtggtagacgtgccgttgggtaggtgagttttctggggctgcactgcccacctctgggggcaggggttgggtgtccttttggggctcactgcccaaggctgcactccctgtggcaggcagctggttcggggcactctctggggtattgctggcggttggggggggggttggctggctatcactggctacactgcctgcggtggcgggggtggtggagggaggcagattgtgtgcactaatgtgtactgctggttgtgggtgatgggttaggggcactattttctgctccactgcctgcggcagggggtgggttgggtggttatctggagctataatgctggcagtgggcggtggtttaggggtgttatggagtgctgcacttcacttacttggggtgcactatcaggagttgcactgcccgtggtggggttggggggggcgggtttggggcactgactagtgcagcaacccccttggctgggtcgggttgtgggccctgtaatgtgctacactgcctgttgggggtggtggcttgggggggtactggggttatatgcctgcaactggcacgggatgtgttgggtgtgctatcccggggctacactgctgatggcaaggggcaggcaggttaggggtgctgtcaggggctacactgcgtggcattgttgggctgcagaggtggcagcaacagcaacagtggtggcctcctttctccttccagtgaccattcttcttttcccagattccagactctagagggtaatcttctcctgctcatgcaattgtgagcacagcagggcccacacaccccccgtggttccccagcctgtgcctcatgctgcctgttggggagaccacctgggactaccgggcagggattagtgggaatcatgggggactgtggggccagggcactgtaggtggaggcgtcaggaacaggaaccagcacttgggtggggagggctgcctaggtctgagtttttcctagtcctgctcctggaggagtgcagccctggtgggcccagcaatttctggccagctgcacctgaacgggggcactttcagcgaaggcactcacacccacctcaggccccagttcttggccagctttgccagaagtagaagctggactttggagggtgggtgtgagtgcctttcctgaaactggtccttgccacccagtggccagcgtgacaaggtgaggctctaaggctaccactctctgcatcccattctaggcttttctggttttgccctcccagctgctccaagccaggatggaggaggaggacaaggaagagtcacctgtggtaaactggagcctgcatatggctctgcagctggtctcacgagattggtggcagcgacggagactgcagctcgactggagtggtaggagggtgcccgcgggggcaaggtggtaggagccttgtagggtgggctgctgcattgagggcgacagcggttgtattggcatcggtgctagtggtggtatcagcattaagtctgggggctgggaagggggagtaggagcgctgcagggcccagcccgacctggggatggggaggaacctgcgggtactgtaccaggccttggtggcagcagtggaggtgcacctagggaaaggaggagtccttccccttctcctgcaatctgtggagggtgccctcctcctgctggtgactgagccaggcgtga

SEQ ID NO: 40307 - DNA, 928 bp, Artificial sequence
  DNA replication origin
ggttggcaggttttggtcgggacttttctcttcaaacagattagaaacccggagttatctgccagttggtgaaactggttggtagacgcgatctgctggctactaccggccttccctggctgttaaaagcagatggtggctgaggctggttcaatgccggctgcctcctctgtgaagaagccatttggtctcagaagcaagatgggcaagtggtgccgccactgcttcgcctggtgcagggggagcggcaagagcaacgtgggcacttctggagaccacgacgattctgctatgaagacactcaggagcaagatgggcaagtggtgctgccactgcttcccctggtgcagggggagcggcaagagcaacgtgggcacttctggagaccacgacgattctgctatgaagacactcaggagcaagatgggcaagtggtgctgccactgcttcccctgctgcagggggagcggcaagagcaacgtgggcacttctggagaccacgacgactctgctatgaagacactcaggagcaagatgggcaagtggtgctgccactgcttcccctgctgcagggggagcggcaagaacaaagtgggcccttggggagactacgacgacagcgctttcatggagccgaggtaccacgtccgtcgagaagatctggacaagctccacagagctgcctggtggggtaaagtccccagaaaggatctcatcgtcatgctcaaggacactgacatgaacaagaaggacaagcaaaagaggtaaccaggcctgggctgggaggaggtgggatgtgggaggatgatggggacataccctcctggccggggaggaggggagcctggttttcttgcctccacaggcctcacaccaccctggatgtggaaacctcagagagttcagggcacaggcccctttatgagca

SEQ ID NO: 40308 - DNA, 1279 bp, Artificial sequence
  DNA replication origin
gcgtgacagggcaggattcctgccttgctatatccagggtgcagcggggcgggggttcacttctgcaggagtccaggacgtggcagaacgggagtcctccgtgtaggagtcctccggtgctggagtccagagcacagtgaggctgggtcctcccgtgccatagtgtagggcatggcgggacagggatcctgccctgcgatagtccagtgactgagtccgcagtaaggcagtggtcctccaatgctggagttcacggcgtggtggggtcacggtccttcagtgtcttagtccatgggtaccagggcgggggtccacagttgccatagtgaggacctgggaggagtgtggttcctgcctcactgtagtccggggagcagggggcaggggtcctctcttgtcagagtctctggcgcggggtgggggtggggtgggggttttcctatgcgatagcccacggggcggtgaggccaggtcctcgcttgcctttgtcgtgggcgcaggggggcgagggtcttcggtggtggagtcctcggagcggcagggcaggggtcctccagtgccatattccagggtgcggcggagtgggcgacctgtcctgcagtggtccagggcatgcgggagtggtggtcctcctgtgccatagtccaacgcgcggcggggagggggtcacctcggcctgcagtccaccacgcacgagaccccggtcctgctgtgccccagtccagtgcgcggagggacggcagtccttctgtgctgtagtgcaggacgcggtggggcagccgtaacccagagagcgccgtggcagggggtcctccagtgctggaatccagttcatggcgggtcaggggtcttattgttccgaagtcggtggcaaggatcctcccgggccatagtctagggggcgacggggcagggttctctagtgcaggtgtccagggtgcggtggggcaggagtcctctggtgcagaagtccaggacgtaatggagtgggagtactccaacgccagagtccagggctctgcggggcagggttcccccatgccagagtgtagggcgctttcaggcgagggtcttggcgtgcagtagttcagggtgcggtggggcaaggatagtccagatctccatggcgggggttcctctgtgcaggagcccagtgcccggcggatcggggtccctccgtgctgtagtccagggcacggcaagatgtgggtcctctggtgccctatccagggggcggtgggtcagaggttctcccctgtcttggtctagggcccggcgg

SEQ ID NO: 40309 - DNA, 1147 bp, Artificial sequence
  DNA replication origin
acgtaatggagtgggagtactccaacgccagagtccagggctctgcggggcagggttcccccatgccagagtgtagggcgctttcaggcgagggtcttggcgtgcagtagttcagggtgcggtggggcaaggatagtccagatctccatggcgggggttcctctgtgcaggagcccagtgcccggcggatcggggtccctccgtgctgtagtccagggcacggcaagatgtgggtcctctggtgccctatccagggggcggtgggtcagaggttctcccctgtcttggtctagggcccggcgggactgaggtcctggagtccacgcggtagcccaagttgcctcaggaccaggtcctctggatccacagtccagagcacagaggggcaggaatagctcagggcgagccagggccgaggtcctcgggagccacagtccagggtgtggaggggtgggggttctgcagtggcacagcccaggacacagcggggcggggcggggcggggatcctccggtaccttagtccagggcggagccgggggagaggtccttcagtagcatagtctagcgcatggcgttgcaggggtcctccagtgcctgaggccagggcgggtcgcgggtcccactgtactctcgttcagggcggagcaggtctgaggtcttctgcttcagtctagggcgctggagagtgggggtcctctggtgccagagtccatggagccatgggtcggcgtcctgccatgtcttagcccagaacggggagaggcggagatcctcctttgccctagtccaaggcattgtgaggccccgctcctgcacagaggcggtctgttcctctactgccgcggggaaaaactgcaccatctctggcaagcctaacccagcagctgtccttaaaagattcccagttgagtgtggttcggagcagccctgagaagtgtgcccttagatggcttcaagggctctgggcagtgtttaaggaatccagctgacctcagttactccaagcccttttccactcagcagaacttctggccacccgggtcctctatctgtggagcccttctatcatcccagatccccacagggtggactccctctcatcctcacaatctcagctcaggccttattcatcaccgcattcctgg

SEQ ID NO: 40310 - DNA, 1732 bp, Artificial sequence
  DNA replication origin
gggcaacacagtgagacaccccccactacaaaaaacaagaagacccctctttttacccctaattgagaggcgtgactagaaggcagaaagctggctgttgaggtgggagtctctctcttcaggcagaggtagggccgcttcctggggcagaggcgtggatggtgtgtctggctctgcagttcctgatgaagacatactggggtgcccaggctaacctttggcaaaactaggagctgaactcaggagtccctgatgccagcctttctgatgcggtcccccctcccctcccccatgtgtctcgctccatagctccaggccaggagccccaactggctggtggaggatgtcttgctcctcagcagctgggatttgtaagtatttgtaggaacatggaacagatcagtggctgacaggcccaggaagcagacagtccccttcccataggtcaccagcttcacttccccttcctgcaccccatcctgatttgagggagcccaggatgacaaagagggagtagttgagcaaggtatggagtggcagtctctacaggagctcaaaggatgcatttgtccatctgccctgggctcagcttccacactcagagtcactcacatccctccaccgtcgccacagctcacctgtgtgcccacacagacaaggtcacactgaccccaaacgcacactgtttcaactctcagcacttcactgtcacactcgcgtgtgtacacacatgctttctaatttccacagccacatggatgctcacacactcacacctttgcacacacacacaagctggctcacagacacactgggggcccagatcctggtcattccccacaggtcttaataaaggttcatggaaggaaacctgtttcctaaggtagggtgggagtgtgtgtgagtgtgtgggggggagagggtgagagtgagtgtgtgcgtgtgttagtgtgtgtgtgtatgtaaggagcaggagtgactgggtcctgagtttagggagttgggaagaggaaggagagatggagacaagcctggaccaagagccactcagagctgcctggaagggaagccaggctgagataaaggcaaggcaaagaaataagacactgacaaggatcaagccagggttgggtagggactgggaacagagtctgcctccatgagaagctgtcacattgctgctctggtgccctgtgacagcggcaccatctccagctggagactcccctctctggatcttgtcattgtgactttgctttgttggacaaccaggagtggtgacaggcagggaatatggtgcccagggcagctagccatgccacgccagtccagctgccaacccacccgtcactggccatctcatcacctgccagagggagtggggtggtgcagatgaaaccagcgatcagcttggctgcccttgcttcgtagtgccacagtagaggctaggggagcaactggctttcctccccaaaaggcgggcagggttatccacactttgcccaggtccctgaagcctgcggctgagctcggggataacaggggccaagtcaccggtcccagacacctaggaactattagagacaggaaccagcatatgagacaggggctgttaagtaggaggttggagaacacacgtttttggtctaaaccgggggcccctctctttgcccactgagcccgcggcctgcgtggtgctgagactgcctctggccgcgtccgcttgggacaa

SEQ ID NO: 40311 - DNA, 981 bp, Artificial sequence
  DNA replication origin
gtggcccgggtgggggtagcggcaggcctgcggctccggccacggggcaggggcagaaaaacgaccccggcgctgtccgggcatccagctcggttcccgctgcagccaggagactcccgggagcgctctaggaaccacagagccctggaactcacctggcagcctcgcggcgctaaagccggcggagcctgagacagcgcgcggcgaggcggtcacgctccacccccgcgtggcggcaggactcggatttcgcccctggttttaaaattgtgccggtggagcccgggacgctgggaagagcgttctgcgcccctccagtcgcggtctccgccctaaaccgacttccagagccgcctctgctccctggaggggcgcagtggcggacaccggcgtcccacgaagtcgcaggtcctcagtctgagggctgccccgcacgctcggaatgcaggagggtctccgcctcgctgcgctgcccctgggggcggaggcgtgcgctgcaggcgagagaggcggcccggtatcgatggagaagcacagagggctttgaggtcgcaacctcccggttgctgagcggagtcgggagtcaggttccaaagggacagcgctcagggttgtaatcaccacccggcccaccgcttccgcagctgcgagtctagggcggagctgttgggtggaccgagcaggcgaggcgcaggcaggcagcggctccgcctcggaatccgcctcgaccggggcccaggtgcccgccccacctgtccctcggtcaccccaaccctgtttcctcgacccccagcactcctccaggcctagttcgcttcagaggcgcaagacccggaaaacaaggaagaagcgagctcagcctcaatccccgtccccaccccactttcgggaccgctaagctggagaattgaagggggcggaccccggattaaagccgctcccttcccagcctcgccccgctttcctaatgtccgtgatgat

SEQ ID NO: 40312 - DNA, 850 bp, Artificial sequence
  DNA replication origin
gtaatcaccacccggcccaccgcttccgcagctgcgagtctagggcggagctgttgggtggaccgagcaggcgaggcgcaggcaggcagcggctccgcctcggaatccgcctcgaccggggcccaggtgcccgccccacctgtccctcggtcaccccaaccctgtttcctcgacccccagcactcctccaggcctagttcgcttcagaggcgcaagacccggaaaacaaggaagaagcgagctcagcctcaatccccgtccccaccccactttcgggaccgctaagctggagaattgaagggggcggaccccggattaaagccgctcccttcccagcctcgccccgctttcctaatgtccgtgatgatttcgttattggcagggaagagccagactccctgcgctcccaagacggggcgattgggagggggttctggagctgcctggggtcggcccggcggggggtgaccccgggccctcgccggtgcaaggagaacaggtggttcccgccggggcagggaagcgtggacggtgtgggctcaggcgcctggcaggcacacggggcctctaaagcttggtcactgtcacagatcgtgtggttgtttcttccgtccccgccacgccttcctcctgggatggggattcattccctagcaggtgtcggagaactggcgcccttgcagggtaggcgccccggagcctgaggcgggaactttaaaatcagacgcttgggggccgggctgggaaaaactggcggaaaatattataactgaactctcaatgccagctgttgtagaagctcctgggacaagccgtggaagtcccctcaggaggcttccgcgatgtccta

SEQ ID NO: 40313 - DNA, 1394 bp, Artificial sequence
  DNA replication origin
actaaaagccttagataagcatggtgtatcttttttttttcccacgtatattttttgttgtttttttttttttctgttatatgtcctggttcttccataacttataaacttgatttataccgaggaggtgggaaagtgggcggggcagggtggactgacccgggatggggaagctcctctcgctgccccctcggggcgggcctaggccctttggaggatggggacgccaggacactcctccctgaggttgtctggccgcctctgcccctagtgctcagaatcctgcgtgcccctcaattccggaatccctcctgggaccccatgcccactgggcacactgcccctggtactcagaatcccgaagcaccattcggttccagaatcccctcctcagctgctggggtggcggggtccctcctttccgatgtcccccccaacccctgaggggggagggaagggaggggggtcaggtctcccctctgtggcagggggaggtggaggcggaggtggaatcggaagggcgtggaaggcgggggccaggagggctcagccgatggtgagtccaaagccacactggaacttgttcttgcggtgattcaggaaggccccaagggccagcgtcaggggcaggagctggagcttcttctccagcgtggcacccacgatccagttgctatccacagagcctttgaagaggaggttggccttgggcaggtccagctggtacccgaaggagacgctggtatcctgcatccttgtgctggcctgaaaatccacacccacctgcaactggtcactggctttgtggtagtatgttgcgtgcatgcccgcctggctcaacgttaacgttgccaaccagttgttcaatgtgtatttcccagctagagacatgacagtgccctcgtccccaggccgccggttgtagaccagctctctgcccagggccaggcaaggcctgatgctctggaggtagtgggcttcgagaattcttgaacccacgaggacgtctgggttccccagggtgacggctgctgtgagtcagagccccgatactccccgtccacctgccagttcacaaacttcgactgctgggtctggatggccatcttggacctgagaccggggcccagctggtgaatgacctgagcgtggagactgccgctgttgtccatgtcacctaccagtacagggaacgcctctgtgggactcagctgctttgtccccacatacgtgaccccgaagtggtagttggactccccgattgcgctgagggctactgtgtggttcacctggaaacggttactcaaccctttgttgactgtgagcttgacaccctccatctgaatgggaaacagctccttacacctccggtggcactcctggaatgtgcccgg

SEQ ID NO: 40314 - DNA, 1024 bp, Artificial sequence
  DNA replication origin
ggaggtggcggggacgcaaaaagccgcgggagcggggggtgggggggttgtaaaaagccgcggcgtggtggggggcaaaaagccgcggcggggggtaaaaagccgcggccagcaaaaagtcgcgtcggcgggggacaaaaagcagcggcggcggggggccaaaagccgaggcgggcaaaaagccgaggcggggtgggggcaaaaagccgaggcggggtgggggcaaaaagccacggcggcagggggtaaaaagccgcggcaggcaaaaagtcgcggcggcgggggacaaaaagccgcggtggcggggggcaaaaagccgtggctggcaaaaagccgaggcggggtgggggcaaaaagccgcggcgggcaaaaagcggaggtgagatggggggaaaaaaccacggcggcgggggggcaaaaagccgcggcgggtaaaaagccgcggcggcgggggtggggggcaaaaagccgcggcggcggcggagcaaaaagccggggcaggcaaaaagccgcggcggcggagggcaaaatagtggagatggggtagaaggccggcacagcttggcattgctggagtgtgatgtgataggaaatgtgcagccaaacacaaaaaaagatgtaagtaggcttgactcattgcagctaagaacccagatgttatcttgagggtattaactaataagcagtttaaatcagaatggcacattctgatttgttttttgtatgttcacatttggcaggcatagatactgtttgaaaagagaaaagtcagtagatagaggtaataaacttaaatatgtgccaagtctagaaacaagagactagggggataatgacctttcaaaataaaatgcaagatttgaaaactgataggctggtggatgaggaaaaggcaggtctttaaggtcaatccctgttttgctttaagttgttagggggtggttttatcacatattgtagaatatgtcatttcagttttgaacgtcttgagttaaattgttctaacatatcttatgaatttgat

SEQ ID NO: 40315 - DNA, 1332 bp, Artificial sequence
  DNA replication origin
gacgggcccggcgggggtgggcgagacactgggaacagcggccagctccagagggcgcgaggcgggccgcgcggggaggggtggcgcgcgcggttggggggcagtgagggtcgccgcggcggcgcgcagcacggcgggaacatggcgcgcgaaactggcgcgcgcgcctagctggcgggacccttagctccaggtggacgcggcccggaccccgtggatatggagcagtcgccgcccccggcgcccgagccgacccaagggccgacccccgcaaggagccgaaggcggcgggagcccgagtcgccgccagcgtcggcgcaggtgagtgggtgaggggctcgggccgggagactttctttgtgaaactccggcggtgggagccgggccaggcctcagcggctgaggagcgcctgtgaggcgtaaggcgtctcgcagtccgggttcgatcccagccgccagccgtcaggaggcgggaactggtccgcagcctgcctgcctcagtttccacgggagtgtgtgtgggtgtgtgagggtgtgtatgggtgttggcctgcgcacaccggagggggggtcggtatacagtcggcgcctaatgcatgcggcgcctcccccctccccccagtccccgtggggcggaacctggggactggagtccaccggagcagtaggcggcacccgcggggagacaggtgtcggcgcagcctgggaggctcaggtgctacctttgccgggtggggtttgtgaggagtgagctcttcgtccccggaggcgagcaaatctgtcggtggctcatcacagagcgctgttttggaaagcgttccacccacctcagcttcgtgctgtgtttgggccactagtcagggggaaggatgctgagcgacatggactttagaggtggggctcccgctggacgggatggctctgggctctccagcttacccccacccttgcctcccaaacccgttagagcgtaggaatcattgggagcacgtgataaaaatgccacggattgtggctcaccaaagcagggaagcggatttggaacttaggctcccaagttgtgatccgtcgagcttggcaagcactgttttagagagtaggcttcctgcaagcaggagccggttttgtgtatacctcaccatggcatcttggtacctggcatggtgcctggcacaccgtagatgatcagaaaatatctgtagaaagtctaaattattagggatagtgcagcataggagttcttgagacattttcaggagcttcttgagattaatatctgtcagatttgttttacagtatatgatttttctcagctcccaacttttgtgattg

SEQ ID NO: 40316 - DNA, 1441 bp, Artificial sequence
  DNA replication origin
gctgtctgcctcacttgggtggcttggctggcttcctggcttggctggcttggctggcttaggtggctggctggcttggctggcttgggtggctcgctggcttggctgacttgggaggctggctggcctggctggtttggttggcttggctggctgggtggctggctggcctggctggctgggtggctggatggcttggctggctgggtagctttcctggcttggctagcttggctggatggctggcttgactggcttggctggctggctggcttggctggcttggctggctggctggcttggctggttgtctggcttggctggcttggcttggctggttggctggcttggctggctgggtggcttggctggctttgctggctggatggcttggctggctggctcacttggctggttggctggcttggccggcttggctggccggctgggtgggtggcctggctggcttggctggcttggctggcttgcctggctggctgggtggctggctgtcttgactggctgggtggctttgctggctttgctggctgggtggcttggcttctttggccatctgggtggcttggctggcttggctggttggctggcttggctggcttcactggctggccggcttggctggcttggctctcttgccttgttggctggtttggctggcttggctggctgggtatcttggctggcttaggtggcttgctggcttggctggcttggctggcttgtttgcttggctggcttggctggcttggctggctggctggcttggctggcttggcttgctgggtggcttggctggcttgagtgcctgactggcttggcttgcttaggtggctggcaggcttggctggcttgggtgactggctggcttggctggcttggctggcttgggtgactggcttgctggcttggctggcttggctggcttgggtgactggcttgctggcttggctggcttggctggcttggctggctggcttccttgactggcttggctggcttggctggcttggctggctggctatctggctgggtggcttggctggcttgcctggctgggtggcttggctggcttggctggctgggtcccttggctggctttgctggctggctggcttggctggctgggtggctggctgacttggctggctggcttggctggcttgtctggctggctggcttggctggcttggctggctgggtgtcttggctggcttggctggctgggtgtcttggctggcttggctggtcggctggcttggctggcttggctggctgggtgtcttggctggcttggctggctgggtgtcttggctggcttggctggtcggctggcttggctggcttggctggctgggtgtcttggttggcttggctggctgggtgtcttggctggcttggtgggccagctggcttggctgtc

SEQ ID NO: 40317 - DNA, 1215 bp, Artificial sequence
  DNA replication origin
cgcgcgaccgtggccgtcgcgcgaggcccgcgccggggatcccccggggcgacccgcaccacagacctccccaactcgcagccgtcgcgcccacacaacgcctcctcgacggcccccgcccgctcccccactctcggcccctcgcccgccccccgcgcgccgccgctgccactcacgggcctcgctccgcgcatgcgaagctcccgccgcccgcggacgcgccgccgccgctgacctcaccgcccctccccctccccatgggttccctccccctgtgacggggcggccgggcccagccgcgacttcggctccggctccggctccggctcgggagggagccaagctgtggacccagagatccgggatcgggatcgggggactgcgggcgagggcgggagggagccgcggacacacgccgaggcggcgcgggcgcccggcgcagcccggcgcgaggagcaagtgtgcgcccgcagggcgagggcagccggggcttcgctggttcttgccgaggtctttcctcgtatcgcccacactacggggaggaaaaggaatggagtcaacttcgttctaatccaacgccagttacagtttccttattataacgtcatttttttaatccagaaaaggttcataaggatgtaagacgaaaagaacgatgacagctcgagaaataaaacggttagagacaaaataagccaataaaaacccaaccacttgattttaacgttcagtgtgttgtgatgaagaggcaaaaatcgaagtatttctaagccacctctcataacatgtaaaaatggtaaaaggaaaaatggggctagaatccgcctgaaaaatgcactttctcaagaaggacagttacaaatatgggattccggattcctcaggctaatacctaacacttggacgatgatctattctgtgctttccattaactatcgattagtatatgggagtgaaaaaattctagatttgaataggggggaaatagtaagacctatcaaccatttgtgaaggattggggtaaactatcatttaataagcatctactttggacctggcgttaagaggcacactctcatcttgatttcgtttgatcttcacaatgtagttttagtgtaaggtaaaaaaaaaataggctccttttgcagcgatgttgtttgctttcccttctagtagctaggatgttaactttaaactgtgtcttctacttgggca

SEQ ID NO: 40318 - DNA, 893 bp, Artificial sequence
  DNA replication origin
agcgcgcgcaggtagtccccggacggactccgagcgaaccgccgagccgtgggcgctcgggaaactcggagctgtcaaaacgcccgggccaggtggtctcggggcgcgggctgggggcgagaagaaagcggccgggcgagtgcagcttttgtttgtcagcgactcgttcgtggaacttttcctggtcccaaacctgtgttttcttcttttgatgatatattaggaagccatttggcttcttccttccccctcccccaacacccagcaccgcactcccgggctccgaaagcacaagtcctgtgggaacccccagcttcggggaacggcctgcctaagttttggagacgtagccagcgtcccctcgtaaggcagaataccaagagcacttattcagagagagtgcagatgtaaatgtcgtttccctcgtaagtcttagctgtaaggggcttgggaatagggtcgcctgcctttgaccgaccgtactgtagggctggacaccggcttattagaggaccagaaatgtcttcttacagaacggttatttgacggctttgcttgtaaattaagacaccgttttagtgccagcgagctgctcggcttctgtggctctcgcgtgtgccgtggaagaactgtgaatgtctttcgaagttgtagaatggcgtgtgtgcttactcatttcatgagatgatattctcattgaactgtcgggagtggaagggtgcgctgggacgtgaaggaagccagcacgtttatggataggctgtttctttggttcgggtgcattcacttagtaatagtgttgtttggtgatttgtagtaaaaatagtagcgtgaactgaggcatagcagagctgggttgtgggaacccattaagctcttgacttgaatgtgct

SEQ ID NO: 40319 - DNA, 958 bp, Artificial sequence
  DNA replication origin
ggcggccgggactgagctgacaccactcagccggcggggtttgaatgaggaggagcgggcgcggaggggagggggcggggagggagggagggaggcgtcgcggagtttctctcggccttttgtgccatccgccgaggcgccttgagtataaatccagatagtgcagtttttgttgtgcttgtgctgatcaactttatggtgtgattaaatacgattttttttattacgctcttgaaattgtactcttgaggttgcagaatggcaattagatggcagtcgctgatagccatgtagaagttttgatgaacatgcaagttaattttaatttctgatcagttacggttagtgactgtggccaaacatgtgcgtactgattctacatgtgtgctaattccgtgacgtttattcaccagctatgtgtcccgtgcctaatcctgtgtcaggcaccttgttccaggcattgggggcagcagtggacaaggcaacagagtctccatcctgaggtgttacttttagaaaaagatagttacaagcaaataaacaggatggttttagatctggacagaggttttcagaggaagtcatccttgagctgtcacaatgctttgggggtagggtgtgctgggtaatcagggatggcacatttggggtgcctaaggattgctgtggccctgggagcctaggacagttggtcacaattgacttattagagtcagtctcagaagctttcctggagaaagaattgctgctgttttgccaggagggtttccttccccatctgaccacacaagaagaccccttggcctagaatgcctaccctcatctccaggtctcccaggctgttcaccctcccaggcaaagtggaagcttcctctgtcctaagatcgtttcccactgaacctccttcattttccttcactgcagagaaataatcctacaaggtcttgtgtggagagtg

SEQ ID NO: 40320 - DNA, 784 bp, Artificial sequence
  DNA replication origin
gaccagcagggcagctgatacctgcaagggctcccactttcagactgaggccagagtatggcagctgctcccgggtgggagaggcagagagggaagggcaaaaggaagggaaaacatgaagacgaacagccgaaagccacaagaagcagggctggagctccagagactggggtgacaaggaccagggtcagggccccagaaatccggagctgcaggctggctctgctgctctttgctgatgccccttggggggcccttgcctgcctaagaaggcttgatctgagctgggcaaagcagcaactgatgggggaaatacctgcagggtgaggggtgggatggggcagggagtgagggaggaagggagcatgtgcagatggagatggctcagggctgaggggctcctgggacaggcaggggcccgaggcagggcccgggactccgcagtgcaggtggtgcagcacgtgaccttctgtgaaggggcagagcagtggggagggcacagagggaacccatgggaggcaaggccggggagacagccagggagaagtggggaaatgtggccaggggccctgggggcatgccatcagtggtgaaaggaatacaggagcagaaggtgaaggggggtctgctatgcatgggagcagtgtgggaggccagctggaggggcatctgggacgcgggtagagcctgcagggaggacggcctggggtggggctgaggctgtgccaggccgtgtttccctctcacttcgccctcttccttggcgttccagtgccacattgga

SEQ ID NO: 40321 - DNA, 1389 bp, Artificial sequence
  DNA replication origin
gacctgcaggcccacggcgctcaaggtaatagggtccccagccctggaatcaactccctgggtctcggaacgcaacccacacaaacctggaccctgtctctcactggcggggagtcgccttcgcatgcagacgtggagaagtcgcctccacccgcagctcctcccgtggacccaggccgcctcccccacgcccctcccggagtccccagaccctccgtggcgctcctggtaccgcccccactgccccactcacaaagagcctcagcttcttctcggggggcgacttcctcagccagccgctgtacagcacgtggccacttctcgtgcttccgccggcggggccacttccgggccacgaagacaaaggcgcaaatgccgggtcaggtgggcacagctcccgggagggtgagggggacggcagggacatgggggctgcagctcacagtgaaggtgggggagacagggcgagagggcgttgctggaggtggggtgtgagggacggcttgcgataccctgggactgcggggtagaaagcgcagttctaggggaggtcggggtcagaggtgaagctcgtggggagggcgagacccgggcgcaggtgctcacaggcgagggcggggttcaggttccagctgggctttgagttccggttcaggcttccatctgtggttccggttccaatttgaggtggagtttgggattaaagtttagacgaggcctctcgttcagggtttgcgttggggattggggtggggatttgcaccctgggtcagcctgggtgcatctcatcgggaccaccggggcgggggacatgggccgggtggctccttgggagaagagggacagggagcgcagctggtggagaggacaagaacgaggggcgcagctcattcagagggccacaacagagtctcaggtgctgagtcccatgcgccagatgaggaaagacaatggaagagttcaggttcctgctggggtttgagttccagttcgggattcggcccatggtttaccttctgacttgagttggggtttggggtcaaggttcaggctaggacttgagttccgggttgcagtttgggggtggggttaggtttcagagtgagggtttgggcctgtttgtgttgtgtatgtttgtgaatgtattgggatgtcaccgtgtgtacttatgtcacgtgtgtgcacgcatcagtgtgtgcatgtgtgagtgttcattgagtgtggcactgacagccaacccctctcctcccatttatgccccactgtcttatcctggttggggtgggctttacaagttccttccctgggccagttggaggttctcatgttgcctggggagagaagggaaggagagaacaggtcaaagatgagggcagcttggcctcaacc

SEQ ID NO: 40322 - DNA, 951 bp, Artificial sequence
  DNA replication origin
gtggcactgacagccaacccctctcctcccatttatgccccactgtcttatcctggttggggtgggctttacaagttccttccctgggccagttggaggttctcatgttgcctggggagagaagggaaggagagaacaggtcaaagatgagggcagcttggcctcaaccagacccggtgtcacggggaccaagaagccggaggtccttgtctcctgcctctggaggagcttggtttgcttctttgttcacacattgtgtgaaagcacagttgggggcatctgatatgcacaggatctgttcttgcctctgcagatgtcttagagaacaggacagacaaggggcctcttcagtaagccatccccaatgtgcactgcatgtcagcttacaagaggggcacaggggccccatcaggtagcagggaggatgcaaggaagagtgtgtggggatgggggtgctgggtggggccaggtgagtgggtgcctggcttctcctcagagcaaaggaaagtgctgaagagtgtgaaactgtgtgacatgttatgctttatgttttgagaatggattgcaggaacaagcagacatgggggacctgatgagggccaatgggatgtccatagagataagatttggcttgagctggtgggaaaagtggagatggagccacatggaggaaattgcagagtcttgagactgaggagacatgtgggtggatgagatatgagtagtgacccgaccctgaggtggggaatggggggacagccccgaggggaggttggtgaggtgtatttggacctattgggttggagccctaggcagcatcctcatgggaggaccactgggtcctggtcaggcagacatggtgctcagggagacactggatgaggtgggagccatagaccctctgctgatggcaagaatggggttcctggaggtgctggctccctctgcagg

SEQ ID NO: 40323 - DNA, 839 bp, Artificial sequence
  DNA replication origin
acccaggcagccctggtgaggccgcaggagtctgggccctagcgacgcccccgggctcccacaggacgaatgtagacggtgaggccaaggacgccctgctgccctcgggactgtccctccagcccccagctttccgtggttattgggccccctctgcagaggggcaggggagcccaccctggatcctgaggcgccgagcttgagggaccccagagctccagccaggccgctttctttgcggatggtgaagctgaggtcccgaggagggcaggggcaggtcccgggcgctcctcaggcaaagggagccgatttaggggctggggtcacaggaggcgcttctgcgacctctagggccctagagcccgggaggatgagagactgggggcctttcgtccacccctggggctgggcagacgctcagcctgtgcaacccgaagctgcttctgcccagtcccagccgcggcccctttaagagggggtggtgcttcagcctggcgccagggacgctgccagcatgcaggccccgacggaagccgagactgcgcttcgtgcgaggcccgggcagcatcggcggcgtggtcagagcgagtctcggagaagatgtggtggcttccgtttgttggtggaggaggtggcaggcctcggcggtaagtggagggggatgaaccccacctggaaccctctgggtctccctactccttctcggccgctccctgctttcgggccctgacttctaagtgggcatctgggcccgagtcgtcagcgtcggggcggttgtgggatcctggcctcggcagcgtccacacccccgccgggaaggctatgcccctgtccgaccc

SEQ ID NO: 40324 - DNA, 1392 bp, Artificial sequence
  DNA replication origin
ttctctgccacttgggccccagcatggcttccctaagagctaggagctcagagggaggggctgggcaagacagaagtcaggatctttttgtaacttaatcttgtaagtgacatcccatcatttttgtcttcttctattcatattctattgttagaaccaagcctctgggtccatcccacactccgcgaggaggattcagaaggtcgtgactcccagggggtgggatcctagaacacatcttagaagctgcctacgacaaccgctgatttttaagtaacagttacatcctctacatctatttagacttaggatggagaattttagatgtcatctttaaaatgcatgagaggatgcagttttccaaaattcttttagaaacagacaatttgaaggccactgagcttcaggcttcattcagctgggtcgtgtctgcgggcggggctcatagagatgtcgctgggggtcagcgggtgcttcgggcagcgaaaaaacccacctctcgagggcagtggaaaatacagggaaaagccacttgagtgtagactccgtgcgtgtcaaggccaggcagaggcgcacttgataggcaaggaaaagcggacggtggtggtcttgggaggaagagaggagaggcgaatgggcaggagcgtgtggatgcactagggcaggacgggctcgaagcaggaacctaggatagaggcagcgcgggccggcttgggagggtcctccagggtccggagaggagaggacgcaggctgcacgcgtgctaagaaggagactcatgaaatgtgtaattcgctggcgacagcttccgcggccgtggagtgagcctctgggaagtaacgactctcttaggtgcggctgggacacagtctcacagaccaggtaagttgcctgccctccaggaactcaagtgtccccgagtccgagccaggaggctggaagtgactgctgtcccatcctccctggagcccggagctgtccttgtcttgagaaagagaaagcaaagccaaggaaagcagagcgagcagaaccaggcaaaggggtggggacaataaaatgggatatggcccgcgcttccatctactcaggaggcagaggcaggaggatcgcttgagcccgggaggccgaagctgcagtgagctgcggttgcaccactgcactccagcctgggagacagagggagaccctgtctaaaaataaagtaaaataaaaaacaaaaataaaagggacagagactaagaaaacggacttcctgaaatcccaagttgggatttcacgtccagtgacccacaagagaagcaagaagtctgaacagggccaagaatcaagtgagtgggggcggaggattaaaatcgacagttgctgcggcacggccagggtggagggtgcatg

SEQ ID NO: 40325 - DNA, 1663 bp, Artificial sequence
  DNA replication origin
cgggcttagaggggctcagagccttgggcacagatatcgcggcgcctggggaggaccctcggagcggtgggagttgcggtgtggaatacggggggggtgggtggcacatcgcgcggcgcgtgttgcacaacctggcccgccgtcgtgactggaggcgggagtgacacctccgcccgggccgcggagttcggggaaggagggcgcggcgctgggccaggccggaggggcggccagggctgatagaaaggggctgtggagaaggggcccggggaggagccaggacgggtctggacccagctccacgccttgcgcccctcacgtaccccggcggggcacggtcggccctcgggaggcccatcgcgccctcgggagcttccctcaagccgtgcccttcatgccgccgacggagccgggcgagcccacgtcgtccgtgcggaaggtggagtccctcacccgcggcccccagagggaccccgctgtcgtagagccacgcgggggccggagcgctgagacgcggcaccatgtttcggggagagctctgccgagggcggctgagggccacctccccagaggcgcgaagccctgaggatgggcagatggttcttaagacggcgcccttcccgccactcccacccccgactaccaccacctgggtctgggaacccggtgagagcgcagtcggagggtcgaacgtttgtagctgtcaagtcgtagccccgctgcgcccacaggaagtgacccacccgcctgccgggtagtggcctttctgtgagccaggaccatcttaaggaaaaaaacaaaaaaagagcaaaacgccgtgcccctccacaatatactctcctcttccccgcatccccgaggggatctttcctcccctccacctccacctccacctccaccgctgaccccaaggaataatgctcagtatctgagtcagaggatgtaaaacaaagggatatttctccttatgtagttttatggaggatttaccgaaagaaggtggagggtgagtgactatgtcgcagaaaaaaaaaaaaagatgtttttatcgtgaatgatgttgagaaatgtcctgtgacttccactattgggcaaagcaggtccctctgccctgctagtccctcctgcaggctgtgtatgaagcgttctgatatggagggttggtgcgcctgggttgacagccattggtcaggtgcctgcagagtacagggcgccatactgggaactggaactataaataaatactctggggaccctaatatccagagacctaacccatctacgggaggaacaaggcttgaagttagggaactgtctagcaaagctgcttgcacaactgctaagtgtacggaattccaggaaaaagaaaaattgcttccagttggggtgtccttcatggaaaaggcatttgggcagccctgtgggggtagcaggagcattccaggtggtggaaagggcctgagccaaggtccttaagtgggacagggtacggtgtgtggccggaatggagggtctgtgtaataggacagtgagaaaagatgccagaagcggggatgggactctgctgtgcgtggcgtgggagccaagctctgactttcactgcacagtgaagcaactgtaagtcaggagcagaagcacggcctggctccagggagggctgaag

SEQ ID NO: 40326 - DNA, 1937 bp, Artificial sequence
  DNA replication origin
atgtgaaaatagagacaaaggggaactaaagataaggaaataaggccaggtgcagtggctcccacctgtaatcccaatactttgggaggccaaggcaggagaatggcttgaagttggagttcgagactacagtaagccatgatggcaccactgcacccactctgggggacagagcgagaccctgtctctaaaaaagaaaataaaaattgaaaaataaataaagtacattaatgacataaaatatgccaggcacagtggttcacgcctataatcccagcagtttgggaggccaaggcaggtggatcacttgaggtcaggagttcgagaccagcctgaccaacatgatgaaaccccatctctactaaaagtacaaaaattagccaggtgtgctggcacacgcctgtaatcccagcaatttgggaaactgaggcagaagaatcacttgaacctgggaggcagaggttgtagtgagctgagattgtgccactgcactccagcctgggtgacaagagtgatactccatctctaaaaaaaaagaaataaaggtaatacgatgaagccagctcagtgcaggaaacgtgtgctgtgtggttctgtacaactggtgtccatgaacacagatttgttgccccaattcccagcagccaaagcaaagagagacttaccagttactacacgtacttaaggatttacaataaaccagcttccatgcagaaacggagtttttttctggaatagaaacctgaaaagcatttctcccctggccttcctaaggggtgctctggacagcctctccatggcagtgccacagcgtgttcttacccaactagccttacccatcccaactagccttacccatcctcgcctctctcctcagcccagaccagaagagttccaccagcgatccaacgtcacactcactctacgcaaccttaaagggtgctgtcgccaccaagtgcaggtgggtgagtgtggtgtggacaggtgcagggagcaaaacaggtggcaattatagagtggacaggagtgaggagtgtgcacaggtgaagagtggtgtggacgggagtggggagtgtgcacaggtggagagagtggtgtggacgggagtggggagcgtgcacaggtggagagtgtggtgtgtctgggagtggggagtgtgcacaggtggagagtggtgtggacgggagtggggagcgtgcacaggtggagagagtggtgtggacgggagtggggaacgtgcacaggtggagagagtggtgtggctgggagtggggagcgtgcacaggtggagagagtggtgtggctgagagtggggagcgtgcacaggtggagagtgtggtgtggctgggagtggggagcgtgcacaggtggagagagtggtgtggctgggagtggggagcgtgcacaggtggagagtgtggtgtggctgggagtggggagcgtgcacaggtggggagagtggtgtggctgggagtggggagcgtgcacaggtggagaggtgtggctgggagtggggagcgtgcacaggtggagagagtggtgtggctgggagtggggagcgtgcacaggtggagagagtggtgtggctgggagtggggagcgtgcacaggtggagagtgtggtgtggctgggagtggggagcgtgcacaggtggagagtgtggtgtggctggagtggggagcgtgcacaggtggagagagtggtgtggctgggagtggggagcgtgcacaggtggagagagtggtgtggctgggagtggggagcgtgcacaggtggagagtgtggtgtggacgggagtggggagcgtgcacagtctggcattcttgctggtggacaggggaaagcttgtcctctctgtggcaccaagcaccactaccagtcaggattccttgcctggtaaggcactgcccctgcctttctcctgtctggttctccca

SEQ ID NO: 40327 - DNA, 1688 bp, Artificial sequence
  DNA replication origin
gagcccgggcggcaggcagctccgcgccgccctggacaggttccgggactggcaggtccgctgtcccgactggttcgaatgtgagaacctctactcagcagatgaccaggatgccccgtccctggacgaagaggtgtttgaggagccactgctgcctccgggaaccggcatcgtgaagcgggcgcccctggtgcgcgagcctggctcccaggcctgcctggccatagacccgctggtcggggaggaaggaggagcagcagtggcaaagctggaacctcacctgcagccccggggtcagccagcgccgcagcccctccacaccctggtgctcgccgcagaggagggggccctggtggccgcggtggagcctgggcccctggctgacggtgccgcagtccggctggcactggcgggggagggcgaggcctgcccgctgctgggcagcccgggcgctgggcgaaatagcgtcctcttcctccccgtggaccccgaggactcgccccttggcagcagcacccccatggcgtctcctgacctccttccagaggacgtgagggagcacctcgaaggcttgatgctctcgctcttcgagcagagtctgagctgccaggcccaggggggctgcagtagacccgccatggtcctcacagacccacacacgccctacgaggaggagcagcggcagtcagtgcagtctgaccagggctacatctccaggagctccccgcagccccccgagggactcacggaaatggaggaagaggaggaagaggagcaggacccagggaagccggccctgccactctctcccgaggacctggagagcctgaggagcctccagcggcagctgcttttccgccagctgcagaagaactcgggctgggacacgatggggtcagagtcagaggggcccagtgcatgagggcggctccccagggaccgcccagatcccagctttgagagaggagtgtgtgtgcacgtattcatctgtgtgtacatgtctgcatgtgtatatgttcgtgtgtgaaatgtaggctttaaaatgtaaatgtctggattttaatcccaggcatccctcctaacttttctttgtgcagcggtctggttatcgtctatccccaggggaatccacacagcccgctcccaggagctaatggtagagcgtccttgaggctccattattcgttcattcagcatttattgtgcacctactatgtggcgggcatttgggataccaagataaattgcatgcggcatggccccagccatgaaggaacttaaccgctagtgccgaggacacgttaaacgaacaggatgggccgggcacggtggctcacgcctgtaatcccagcacactgggaggccgaggcaggtggatcactctgaggtcaggagtttgagccagcctggccaacatggtgaaaccccatctccactaaaaatagaaaaattagccgggcatggtgacacatgcctgtagtcctagctacttgggaggctgaggcaggagaattgcttgaatctgggaggcagaggttgcagtgagccgagattgtgccattgcactgcagcctggatgacagagcgagactctatctcaaaaaaaaaaaaaaaaaaagatggtcacgcgggatgtaaacgctgaatgggccaggtgcagtggctcatgcttgtaatcccagcacttt

SEQ ID NO: 40328 - DNA, 1302 bp, Artificial sequence
  DNA replication origin
cagcctggccaacatggtgaaaccccatctccactaaaaatagaaaaattagccgggcatggtgacacatgcctgtagtcctagctacttgggaggctgaggcaggagaattgcttgaatctgggaggcagaggttgcagtgagccgagattgtgccattgcactgcagcctggatgacagagcgagactctatctcaaaaaaaaaaaaaaaaaaagatggtcacgcgggatgtaaacgctgaatgggccaggtgcagtggctcatgcttgtaatcccagcactttgggaaggcgaggcaggtggattgcttgagctcaggagttcaagaccagcctgggcgacatagtgagacctcatctctacctaaatttttttttagtcagtcatggtggcacatgcctgtagtcccagctactcgggaggctgatgccagatgatcacttgagcccaggaggtagaggctgcagtgagctataatggtaccattgcaatccagcctgggcagcagagtgagaccctgtctcaaaaaaaataaaaaagtagaaagatggagtggaagcctgcccagggttgtgagcatgcacgggaaaggcacccaggtcaggggggatccccgaggagatgcctgagctgaaggattgtggttggggaaagcgtagtcccagcaaggaagcagtttgtgggtaagtgctgggaggtgagtggagtgagcttgtcagggagctgctggtggagcctggaggggaaggagggaggcagtgagagagatcggggtggggggtggggggatgtcgccagagctcaggggtggggacagccttgtgcgcatcagtcctgaggcctggggcacctttcgtctgatgagcctctgcatggagagaggctgagggctaaacacagctggatgtcacctgagttcatttataggaagagagaaatgtcgaggtgaaacgtaaaagcatctggcaggaaggtgagtctgaagccctgcacccgcgttccgactatcagtggggagctgttagcacgtaggattcttcagagcagctgggctggagctcccctgagctcaggaagccccagggtgcaagggcaaggaaatgaggggtggtgggtcagtgaagatctgggcagaccttgtgtggggaaggggtgctgctgtgacttcagggtctgaggtccaaagacagcatttgaaaagaggctctgaagccagtgtttgaagaatttgttcctgaagtacctcctgggggtaggctagaggcttctggcttcagggtcctgaagaacacattgaggt

SEQ ID NO: 40329 - DNA, 1019 bp, Artificial sequence
  DNA replication origin
tttcccaaccggaaccacctctgcacactcaggagacgagctgaagaggtgggaggggcacagcgtggagggcacctgttcttagagagacatttcttggtgaaacaatttattagccatggttcagaataatacaaaaataaaggtgtggctttatttacacacactcttgaagctcttggcattcagcggacagcaaacaccatactcagagtgatggaattaatagcatttagggtaagcaaggaccagtgtgagactgggcccaggaaatggggagggaatgtgaggagaaacagggaatgacattaaagaagaaacagacaccttggagaatttatgactcctttctctatgtcatgtccagaagaggcaagtctacagagatcaaagtagcctaggggtgcctagggatggggaggttggggtggtgactaaggggggctggatttcttttgggggtagtaaactctaagactgactgtgctgatggctgctgaactgtgactatactaaaccggcatcaaattgtgcagggtcaattgtggattgtatggtaagtgaactgtactccaataaagctgttaggaggacaaaggcagctgccctggagatagtaggcaatgcccatcaggacatttactggcatgggctcaaaggccagcagagctagaattcaaggttcctgaggaatgggagcagatgggaacatgtgctctacgcaggaagagtgcattgtggtatcctgtactctgggcgtcaaacagttatttattggaagctagggaaaggtcacagaatgcatggtaggtgtccagacccaacgaagcccctctccaggattattggagagactgagcccaaaaggctagtggctgggaggcttctgctcctgttctcctttgcctggtcctttgctgctgttgggtggattatgggccatacaccatctgggacacagagctttggtggccctgctaccactaggtaaagtctaactgcaagaaaaaactccgcaa

SEQ ID NO: 40330 - DNA, 1918 bp, Artificial sequence
  DNA replication origin
cgctcggcgcccgtgctgctgctcggggagccgccgcccccgccgcgtctgccgccgcctcccccgcggctggtgctggtgctggtgctgctgtcgccggagcctctccggccgcggaaggagcccccgcggaggaagaggggctgcagccgggcggctgccgggggcggcgggaaggaaccggacgcggaggagaccgagcgagggtggccgagcgccgggcgcattgtcctccgaggggctctggggccgcccagctgttccctccccgccaaccccgggcgggcgaggcgggctaggcggccgaggggagccggggcccgccgcctccccagcagtggggactcgcacctgggccgggcggcggcgagatccggactggagccactggactgggcgagccgggccgggcggcagggagagggggcaggcggtgaaccgagcggaccgcggtgaagacaggcgaggcgggggcggggcggggcggggcggggagcgagtcccgccgggagggagggaggctggcggcggggaaaccaggactggattcgagggggagaggaagcagcgagaccagaggaggagaaagcgcggcgcgctggatcaacgggaagagaaggggcgggggtgcagtgcgtcacagtcgggtcgggagccctgtggcctggaggaagcgggaggaggcgcgggcagccgccagggcgaggcgacccggtgcggggggactcccatggagcgcggactcctaaggaagtcgctgggaatcccaccggctgtaccgcagggcgttagtacctagatggcttcggtgcccccaagcgatgggctcaagctacagggcgggctttgcacctggccttctcagctctgaggcaggcagtgggcagcttcgcctccaccctccgtccagcgcccttcccatggggccatccgcctctccctaaggcactaaaaaccagtggaggagtcaggccatgttggcaaaaagggctcgggcagcagccccagacctatagtcctaaatatccatgtacccagccctggggtcgcgagccatctcagggacgacccgattccagcggatggagaagttccctgaaaacacctgcctgggaggagagacgagggaacgagattgggcaagtggcatccgcccagcgggcttctcaaaggtttttaaagcagaatgggacgtaataggaagatgtgtctagcagagagtaaaataaaggggcatttagaggtgtgggcacctggatgaaaacaaaggctccaaagggatgatggtgagggttacagcccaccacagtagacagagacaccaaggaaggaatgcagtcagtggccctgcgtagacagtctcaggagagagcacaccagctcaccccaggactcatccaaggctggggatggatgtcgatgcagcaactctggaaggcagaaggtagagtgctgcctttaggggtttaagggagaaggaaatgactagagcagttggggctcaaaaacaatctgaggttcaccaataatggaaacatcccattcccagccccatgaaaacaaggcagaaagcttgcctgccctattggcctctgcacccttgtggggcctgtgggctccctgatttcatgacctttgaagctgctgctgcgggctcatctcccctaggtaacagcttgcagcgtgataacaccatgcagtgtgagggagctgtatgcagtggagccgcaggggttagtcaggcctcgcccctaaatctgcctcttaaataagagtccgtttcagccaaacctgccttttccagttccgtggaggtcagtctgcacagccaatccctggtaaatatacaatttagaacctgcaccatctccacctcccccacacacaccacttttggaaagctggcatggtggtgagg

SEQ ID NO: 40331 - DNA, 2097 bp, Artificial sequence
  DNA replication origin
gttctcatacccctgcatcagaatcctctggggagcttaaaatacagatcccagggtatctgcgctggagccttaattcactaggtctcgggtaaaactcaggaatctgtattttttaaaaaacaaaacacctctcttagtggttctgtaactgggtttgggaacccctgctctagcctcttccttggggtgcccagtcagtttattagccagtggtagtgaagcagctaccgggagcctgtctctgggagcctgcggaataatacctggcccgttttaagcaactgttgtgctgagcacgtcctgtgtaccagcggtctgccgcacactctgaatgggacgaggaccaggatgagggcgtaggacttatgaatcaatcaagggcttgtgctggaggcaagaataacaccatgagcagtaaaggagcgtgtgcgatggcgtgtgatcgaaggccggtaagctcacaggagggcgtcacaggtgtggggcgtgtgtgatggcgtgtgatcgaaggccggtaagctcacaggagggcgccacaggtgtggagcgtgtgcgatggcatgtgatcgaaggcctgtgagctcacaggagtgtgccacaggtgtggggcgtgtgcgatggcgtgtgattgaaggccggtaagctcacaggagggcgccacaggtgtggggcgtgtgcgatggcgtgtgatcgaaggccggtaagctcacaggagtgtgccacaggtgtggggcgtgtgcgatggcgtgtgatcgaaggccggtaagctcacaggagtgtgccacaggtgtggagcgtgtgcgatggcatgtgaaggccggtaagctcacaggagggcgtcgcaggtgtggggcgtgtgcgatggcatgtgatcgaaggccggtaagctcacaggagtgcgccacaggtgtggggcgtgtgcgatggcgtgtgatcgaaggcctgtaagctcacaggagtgcgtcacaggtgtggggcgtgtgcgatggcgtgtgatcgaaggccggtaagctcacaggagggcgtcacaggtgtggggcgtgtgcgatggcgtgtgatcgaaggccggtaagctcacaggagggcgtcacaggtgtggggcgtgtgcgatggcgtgtgatcgaaggccggtaagctcacaggagggcgtcacaggtgtggggcgtgtgcgatgacgtgtgatcgaaggccggtaagctcacaggagggcgtcacaggtgtggggcgtgtgcgatggcgtgtgatcgaatgccggtaagctcacaggagggcgtcacaggtgtggggcgtgtgcgatggcgtgtgatcgaaggccggtaagctcacaggagggcgtcacaggtgtggggcgtgtgcgatggcgtgtgatcgaaggccggtaagctcacaggagggcgtcacaggtgtggggcgtgtgcgatggcgtgtgatcgaaggccggtaagctcacaggagggcgtcacaggtgtggggcgtgtgcgatgacgtgtgattgaaggccggtaagctcacaggagggcgtcacaggtgtggggcgtgtgcgatgatgtgtgattgaaggccggtaagctcacaggagggcgtcacaggtgtggggcgtgtgcgatgacgtgtgatcgaaggcctgtaagctcacaggagtgtgccacaggtgtggagcgtgtgcgatggcgtgtgatcgaaggccggtaagctcacaggagggcgtcacaggtgtggggcgtgtgcgatgacgtgtgattgaaggccggtaagctcacaggagggcgccacaggtgtggagcgtgtgcgatggcgtgtgatcgaaggcctgtaagctcacaggagtgtgccacaggtgtggagcgtgtgcgatggcgtgtgatcgaaggccggtaagctcacaggagggcgtcacaggtgtggagcgtgtgcgatggcatgtgattgaaggccggtaagctcacaggagggcgccacaggtgtggaggggagggcttggagtatccctggggcaggagttgcctgtggcttcttggaggggtacagcggagccccaggagatggctaagctcctaagcaggggaagtaggaggttgggaatgggatagggag

SEQ ID NO: 40332 - DNA, 1140 bp, Artificial sequence
  DNA replication origin
gcgcgcgccgcccgccagcaaagcccacgcgccgcgccgagcgcagccacacagccccacgcagccatccggccgtcgccgtgcgcacgtgcacggcgtgcggccccccccccccgcgagtccgtccgctgcacagccaatcagcggtcggcgcgcgcggcatcacgggagttgtagtcctgtaagcgcgcggagcccgtcgggcgcctatggaactcgacccgcaggccaaaggggctccgttgcaaggaagaagtgcggggtcccgccgcctcctagaccgagatcgcggtgagctggccgcggcgcacaatgggcacggcctgggcggcggcgtccgtactatcgccctgtgcctgcggatcccggtaacattgcgcggcaggccccaggccggcctccctcagcttcgcggactgtctgggccgggggtctcaaccttgacttcagggccgggccgctggggcagacccttagtgatgttcaggtcctctgggcccctgccagtcaagggacgctcgtcgcgcgccaattgttaagtctttcattgtttctgtaaacctgctgacgccctcccagcgcatagggagactgcgcacgtgagtccgcccccgcgcgcactgcggagaggtagaggcacgaatgtagtacaaggtacaaaatgactactccagagagggccagatgactaagtcagcaaacacttagggaacacgactgtgtccgctgcgcgtttcccggagtagacacaagggtgaatgaacaaagaatggatttcggtcactgaaagtggagaggtagccgactccgtccgtggaggcccttagcagagctggatctggtagtcccccggtcatgaggggagattctgctggaggaaagaggtctccattcccaccgtttgaaatgtgtaggatgccctcagattctttggcccattcataggtatagctatgctaaaaacgcgggaccctacaatgtacttagcactagcagagagggagtcgaggatatggacagagactgcactagctcacacattagcaggccagggtgcggtggctcacccctgtaatcccagaactttggaaggtcaaggtgggaggaaaacttgagtccaggagttccagaccagcctgg

SEQ ID NO: 40333 - DNA, 842 bp, Artificial sequence
  DNA replication origin
ggcaggggagctctgtgccgtcccgcggccccaccccgctctgccatgggaagccgtagcttggcgctgcccacagtgacgcgagggactccgagggcacccgggccggggtggacacgggagtgggcccgggcgcggccggcagggggcagcagcgccgcgccgcccgcgcagttccacaggtgcgccgagcctggggccatcgcctccctccggccgccgtccccagcgaatcgccgcctgcgttctgccgtttccccgccaccgcagccacccggggcccggggggccgcagccatccgcaagccgcggggcggcgggaccgggcgggccgctagggacgccggacgaagggagcccgcgggcggggtctgggcgcctacatccttgctcccagggaggaagggacaggaaactgaagctgtttccggggctgaccccggccagagagagcagggctcgggagagtcggcgcgtcccggaggcggcgccccctggaggccggtgtgctttggctctgcagcgggggagattaggggtggaggccgaccgatcccactcagccaggactggcaggcgccgggagctcactgggaggcaagtgccgacccccgaaacccactccagacaagcgaagaaaacagctctgtgtcccaggacgagcacatacctactgtcacccactgtgcgacctggaagagttactgaccctctctgggccttaatcagtcatcagaaacacaaacgcgtagataagatggtctttaggcctctcccagctctgctattctgtgaatctaagaaactctagtccctccaccagtccccaccccgggctggct

SEQ ID NO: 40334 - DNA, 1091 bp, Artificial sequence
  DNA replication origin
gagacaggtgggcatcagcatcagggttatcccagagccagctaggaattccccatgcagcagcagagacaatgcccaaggccgtagaggacctgaacaagggaagcacaagtccagcctggctggacttttgggaacaaggccacttggcctaatccaaacacaaataaaactgttttgtgggtcccctgaccccatctacttttcccagagctcgttgatggctgggaaggagttgactgggaaggaggtggctgggcaagggtggctgggcaggggtggctgggcaagggtggctgggaaggggtggctgggaagggggtggttgggcaggggtggctggccaggggtggctgggcaggggtggctgggaagggggtggcgtctctcactgctcacctgacggctcctggttgtgctttcttcccaggtgtatgagctcagtggagagcaccatgacgaagagtggtcagtgaagacttaccaggaagtagctcagaagtttgtggaaactcaccctgagtttattggaatcaaaatcatttattcggatcacaggtgagagagaatattgctgaaaagctcgggttgggaggctgggatgcaggcagagctactaggctgggaggggaggggtgagaagcggggctgggaggccgggagaggcccagcactggtgccaaggagctgtgctgtgcctgtgtgagagcacagtcctaggtaagtgcggtgacccaacaatgaattgctgcctgaagccacttctagttcaggtcttcacccccaaactgaaatgaagaatgtgtgaatttcccagataattctcggctgtgaccccacattggcctggtgactcatttatgagcataatggttttgcctgaatgtttggataattggcccgtttttggtttcaatttgcctctgggttctgtgtgtggttgtgtgtgagtccttgatcacggagacaccctgagtggcactggctcaagtctgcgtgtggggacctccagtagtaccatgtgcgtggcctggcacgtgggtgaaagacccactctttttcccagggaagcacagaaagctttgcagctt

SEQ ID NO: 40335 - DNA, 1343 bp, Artificial sequence
  DNA replication origin
cgcggcagcgccgcagcctccgcgcggtcctcggcgggggcggcggggcgctcctcccgctgctgccgccgctcggcgagtgcaggagccgagggcgggcgccgggcggggggcggcggcgcgggggcccgaactactgaggcggctgcggctgcggctgcccgcggggtccgcgcgctcgccccatcccgcggctgcggcggcggccgcccccagtcccctacaatataatcgagtccccgccggagaaacagatggggctaggggcggaggggccggacgcggggcctgggggaggggccgcccacgaggagggggcggggctgcccgcgccacaacaacaacccccgcccccgccccacccccgcccggacagctgcaccgccagggagggggaggggcggggcgcgcgcccccgggcccagatccgcaggacccagggggcgcgggccgcacccccgagaactctcacgaggcgccctccgccctccaggactttgggactggggagttgaagcactttcccaagggaggacggccaggagctctcccacccccacttggcctgagtggtcgcgtccttttaaagggcccgcggggtggtcctttcggtcgggctagagacagaaacgtgcacgtgtgggagttcagttattattgatgccgagggcagagccggagcaggagcgggctgtccaccctagaaatatgaagcctagagaagtgaagtgctttccacctgtttcttaacgcttttattccagccgagaacggcgcccaaggagctctgaagtggcttttttctccgagggaagaaggcggtggggctgattgagctggaacgaagtaggatggaggctggagagcggcgggaagggtggggtagggggaggcaccaatcagcagccaagcgggaagagcgatccccaaccccagggaatggacacgtgtgaccgccccggagaagacgggctcggaaccctgctactgcccggccgctgaaagagctgcctggaagagtgagcacaatgtgcttggaaggcggggggatggggcagaggagatcgggaagccggggactgtgctcggaggggaggagacccccacgccccggcggagggattgaatgtgctacggccgaagggtgttggagtgtgtgctttagaaatgctaactgctgtagcgcggtggagtactgctaaatcctaagaaaaaaaatcaccccagaaacaggctagaagtttggaaaaactccattgaatgctcagatatttgtattggtcgtcgcacttgcatcctgctggtctcagagggccgcctctgagttcggtggtccacctttc

SEQ ID NO: 40336 - DNA, 1028 bp, Artificial sequence
  DNA replication origin
ggaccggggcgggagtcggccgcggccggcggggagggctagccccgctctggcgggcgggcgcgtggcaggggctcccggaggccccaagctcccgggaggcgctccggccaacttcgggccggtggggaccgggcctgggcgcggggctctggaggtgtggaaggaaagtttgggactccgttattcttccacagcgtccttcctcccgtaatatccagcctctttatcgcggggctcgggagcccttggagttgatctcgccaccattatccccccgggcgagcgcggaggacgggctggccattctggccaggccggaggtgttttccagcccggggctttgtgataactgggccgaaacccgagggtcctggagcgcggcgggtggcgggagcttgcggagcgcggcgcactcggcggccaggcatcggccagcccagcggcagccccctttctcctatttttatttttatttttggaaggagctgagaattagtcgattggttggcaggttgaattgccttctcttctatggcaatatgtgtcgtgacttttcaccttttgcctttggacaaaggtgaatggcaactgcgttggtcagtttttgttttctgttctgcggatgggttcgccgacgcagtaatcaaaattagagccactcttttggaagagcaaatcgttgttgttgcctccccagccccacggatcttactttgtgccattttcgggttgattttaactcgtttatttcagagctctttgcctcacctttatttttagatttagtcgtgtttgctgaaatatcagttgcttcttctgtgaatgaagtgtgggaacttgctctcgtcgcagttaatgaaatcaggaaaataaaaagatcaaaagggttggggatgggagaatgaagaggaatgtagacagatagtctagggccactcactggcttttggcgattcttagttccttaagctgattaaaacaatgtgaggaaatgtgggcttctccactttttaggaagaggtaat

SEQ ID NO: 40337 - DNA, 1235 bp, Artificial sequence
  DNA replication origin
tttgtgtccctgggtacttgagattagggagtggtgatgacacttaacgagcatgctgccttcaagcgtctgtttaacaaagcacatcttgcaccgcccttaatccatttaaccctgagtggacacagcacatgtttcagagagcacagggttgggggtaaggtcaccgatcaacaggatcccaaggcagaagaatttttcttagtgcagaacaaaatgaaaagtctcccatgtctacttctttctacacagacacggcaaccatccgatttctcaatcttttccccacctttcccgcctttctattccacaaaactgccactgtcatcatggcccgttctcaatgagctgttgggcacacctcccagacggggtggtggccgggcagaggggctcctcacttcccagtaggggcggccgggcagaggcgcccctcacctcccggacggggtggctggccgggcggggggctgaccccccacctccctcccggacggggtggctgccgggcggaggggctcctcacttctcagacggggtggttgccaggcagagggtctcctcacttctcagacgggccggctgggcagagacgctcctcacctcccagacggggtcgcggccgggcagaggcgctcctcacatcccagacggggcggcggggcagaggcgctccccacatctcagacgatgggcggccgggcagagacgctcctcacttcctagatgggatggcggccgggcggagacgctcctcactttccagactgggcagccaggcagaggggctcctcacatcccagacgatgggcggccaggcagagacgctcctcacttcccagacggggtggcagccgggcagaggctgcaatctcagcactttgggaggccaaggcaagcggctgggaggtggaggttgtagcgagccgagatcacgccactgcactccagcctgggcaccattgagcactgagtgaacgagactccgtctgcaatcccggcacttcgggaggccgaggctggcggatcactcgcggttaggagctggagaccagcccggccaacacagcgaaaccccgtctccaccaaaaccagtcaggcgtggcggcgcgtgcctgcaatcgcaggcactcggcaggctgaggcaggagaatcaggcagggaggttgcagtgagccgagatggcagcagtacagtccagcttcggctccgcatgagagggagaccgtggaaag

SEQ ID NO: 40338 - DNA, 913 bp, Artificial sequence
  DNA replication origin
agtgaggagcgtctctgcctggccgcccatcgtctgggatgtgaggagcccctctgcctggctgcccagtctggaaagtgaggagcgtctccgcccggccgccatcccatctaggaagtgaggagcgtctctgcccggccgcccatcgtctgagatgtggggagcgcctctgccccgccgccccgtctgggatgtgaggagcgcctctgcccggccgcgaccccgtctgggaggtgaggagcgtctctgcccagccggcccgtctgagaagtgaggagaccctctgcctggcaaccaccccgtctgagaagtgaggagcccctccgcccggcagccaccccgtccgggagggaggtggggggtcagccccccgcccggccagccaccccgtccgggaggtgaggggcgcctctgcccggccgcccctactgggaagtgaggagcccctctgcccggccaccaccccgtctgggaggtgtgcccaacagctcattgagaacgggccatgatgacagtggcagttttgtggaatagaaaggcgggaaaggtggggaaaagattgagaaatcggatggttgccgtgtctgtgtagaaagaagtagacatgggagacttttcattttgttctgcactaagaaaaattcttctgccttgggatcctgttgatcggtgaccttacccccaaccctgtgctctctgaaacatgtgctgtgtccactcagggttaaatggattaagggcggtgcaagatgtgctttgttaaacagacgcttgaaggcagcatgctcgttaagtgtcatcaccactccctaatctcaagtacccagggacacaaacactgcggaaggccgcagggtcctctgcctaggaaaaccagagacctttgttcacttgtttatctgctgaccttccc

SEQ ID NO: 40339 - DNA, 1305 bp, Artificial sequence
  DNA replication origin
ccagactgttcacctttcctgttgctgatccctgcactctcctccagcctccagctccactcccctttgccaaggggctgcttctatggacaggggctgtcccgagtggaggctgggggcgagtggaggctcacccacttccagatccagccctgcgacgctggctttcagtagtgtgcacattggaattacacgagaaaccttttccaaatgcaggccttgggccctactccagctgcctgcatcaggctgttttagggcgggagactgcccagaggattctgacgcaggtagaatccctgccctgaaagcctgcagggatccccggaccctggtccaggccttccaagctcaagggttgcactgccctctggtggctgtgggggagaccaacagctgacccagccttctgcctcccgcctgtcttagatcaggtgcttgaggacgtggctggagttccccactagaccggggtgggggtgggggtggggggtggggggaggtgtctgagaatgtctctgccttctaatccagccagcatatcttctggctcgccctgaactgaggagaaaccccagatccctttgggaaggtccaggaagggcaggagtggacaggcacagctctgctgtcagcactgctgtgggggtgactgtagccccagtctgccctggtgtttttctctcgctcttctccatgccggcctttgcctctagactgagaaaccggggttgactcaagtggcacctgcaaaagtgatcatggcagttcacttagcctgcaggtgacagggactgtgaatctagtccctggcgagcctggaaagaggggcaaggtagaggctctggctgccggggtttctttggtgagtccgttcactcggctggacacagacggatcaggaaagattcctgttgctactcggctggtggccagagggagagaggacgtgtccgtaactgaagcaaggtggataagcttcgggaacgagcgaggcacagattcggtgctgggggagtgatgaggtgctggaggagctgggtgctctgctctgcagggaatcaggaaaactttggggctgcagctccaattgagctgggccttgggggttgggtatgtttggttccttggaaactgggaagagggaatggccatcttttaagcaaaagcccagcggctataaatgctacagtgaggctgggtgcagtggttcacgcctgtaatcccagcactttgggaggccaaggcaggtggatcatgaggtcaggagttcaagaccaccctagccaagatggtgaaaccccg

SEQ ID NO: 40340 - DNA, 2186 bp, Artificial sequence
  DNA replication origin
tggaccggccttcacctgcaggcagggttggggcaggtgaggagcagatggacccacccagagctcttccaccttctcaggcttgcacccccttcctggagccttatccacaccctcagtcctcgctctcactgtgggggagctgcagaggatgcggtttttccacattccatctccacccacaggaggctttgagatggggggagctctcctgggcctgaatgtgtgccgtcctggggccctgcagtcccctgggagtgatgaccgagaccagattccctgagctggggtcttaagggtgtggggagcgcagagggatcctctggcatcaggagttgaggtagacagagctccagggaggcactgccgggaggacgaccctggccaagcctctgcctgcggcccagggtgtgcgtccctgccccttctgcccctcttgcccagggagggaagaggaaatgcggggtcagcagttcgtggctggggtttaaaggcagggatctcccaggacgggcacagggagcatgaggaagcagctcgtgtctctgttcatgagatgtgagagtggtgactgagacgaggggtgcagagacctgccgtggctggggcgaggtgctgttagtgcttctgaggaggttgggcaggatagacggtggctgtcaggtggtctcaaggttgtgcaggagcttgccagagagggaagcggggcatggccccagggtggtatgggggattctagggggagggtgcctgggtgggaaggggtgtcgcatgcccagctcagaggccttgcttaggggtgctcacaggctcggctgacgtgaggatgctgatcgaaggagctgagggtcccactcatttgcaagggggaactgtctgcccaggagccccagcagtgcccaggcccctggactgacaaggatggatgagggtgatggaggcggatggacatttgacactggagcctgccttccaggcagaagggccgtgagtcatcctctctccggtgccaagtggaggggctgagcaggtcctcgacgtgaccgaggactgtgcccgttttttcaggggacccggagcgctggctctggctgtcagcccatgagagacctccctgcagagctgtggcctctggaaatgcttcctgtcgttgacatctggtcaccattctccagctggggctgtggagggcagcacaggcctggagtgtccccgagagcagctgggcgtctgcccctgcccaccccacagggcctcccactcacagggcctaattagcagctccatggctgccatacctggcggaccgccctcagcggccacatatatccttgccccaagccaatgacaggtctgaagaagacactgatggagctgaagcacaggacagagacaagcacctgtgtgccggacgctcacggagcacttgatgtgtgctgactggctcacatcacggtggtcagacgagggtagcatccccattctccagatggtgtaactgaggcaaggagaggctaagtaacttgtccaaggtcacacccgagggagttggacttcagggtctcagctctgagcatcaggcacactgcccagattccccctccacatgtcacacctgttaggccactgggggtaaggagcctttctgtggcctcgctcccctgtgagcccctgggagggaggcagcccagattccaaggcagcgagtgacgtgtgtgggaaaggggaagcttccggggcaggggttcagaaacctcgcagtggggttttccccaagagccactgctggcaggttcctacagccccatccagccccaacacagcctgcctcttttccttcctcttcctccttttctctttctgcctgcgttggtccaaaatggggaagtttcacataaatggcaaacaggccacaaagcagctatttctggaggtgctgctgccttgcagattgaattcttggttggcattttaggtgtttgttttcaggatccttttctgtagaagaagccaacaactaagaaaaggaggaagtggctttgggaggctgagacgggaggattgctcgagcccgggaggtcaaggctatagtgagctgtgattgcaccgccgcactccttgaatcctatcagcttggccagggtgggggtgggaagtggggtcttaaaggggaaagaccagccggg

SEQ ID NO: 40341 - DNA, 1185 bp, Artificial sequence
  DNA replication origin
gcgcccgcgcccccgcggctggagggtggtgagtgcacccgcgcccctcccggggtacgcgccgagccccagcccgtgacccctgcctgccgcctgccccggcgtggagctcagggcccgccgcccgccctgggcccgaccgcggtgggagccagaggaggggaggcggggggtcagagccccaggcctcagcagcgacctgagggccgggtctctcccgcctcccctccgcccgggcgccctcctcggcgcggccggcaggtcggtgctgagggtcgggtccgcctcggaggcggggaaggctttgttgtgtcctctccacgtggcctggggattcaggggaggggtgcggggcgcggggagggggaggggccgaggccagccccggagaggagaaaacccgcgggcctggccgggtgcaggccacccttgccggcggatcggaatccccgcccacaccgtggtctttccagcaccgcagacacctgccggctcctcccgagcggagctcagggctgacaaagcgcggtcagagcggccgcttactggggctcgcccgctccttagagcactggcaatgatgtgcggatcctcgctgctgctgctgggaaactgttgagtggctgaatgaccccaggggaccctgggagagctctgaagccctcagccaccaagtggctgggctggcaagggttcattcattcattcaacaaatacgaatgtgcagcggtgctggggtcatgatggctcggtgggcagcgaggggccgggccggctggaggagcacagtgcggattctgtaagtgggctgggggctgggccttctgcggctggaccggccttcacctgcaggcagggttggggcaggtgaggagcagatggacccacccagagctcttccaccttctcaggcttgcacccccttcctggagccttatccacaccctcagtcctcgctctcactgtgggggagctgcagaggatgcggtttttccacattccatctccacccacaggaggctttgagatggggggagctctcctgggcctgaatgtgtgccgtcctggggccctgcagtcccctgggagtgatgaccgagaccagattccctgagctggggtcttaagggtgtggggagcgcagagggatcctctggcatcaggagttgaggtagacagagctcc

SEQ ID NO: 40342 - DNA, 1549 bp, Artificial sequence
  DNA replication origin
ggctgaggcaggaggatcactcgagcctgggaggtcaaggctgcagtgagctgtgatcacaccactgcactccagcatgggtgacagagctagatcctgtttcaaaaaaaaaaataaagtcatcattctctcatgtatgtgtatattgtttcatttgttaattaaggtataattttacatacagtaaaactcaccattcttcgtgcagagttctcacaaaagtgtacaattgtgtggcatccaccacaatccctgtatagaagaatcccatcatccccggaatttccctggacccttccatagccccccagtccgtcaccccctgaattgttttctggcaccccgcccccctttctttttgaagtggttgttttgcaggaaacatcaccctctctcattttacaaatactgcagacagattttgaagcccaaagcatcatagaggcagcagatcaggacagggaggattgaggcggggaggctctaccctgactgtaagaagcacttgagagacctgcaaaaagccaacaggagaggcagagactgtgggggccaattggtacaggtcctgccctgcatgacagggccagtggcccccacagtgctgaggataaaatccaactgctcatccaggctgctggagcctcctgccttcaggccaccccactggcctcttgcccactgtgccccactgtccaagctctcgcctgccctgggaggggcccctgcagcttcttgtgcccaggtgcacgtccctctcttttcccatctgggcgcctgctgacattgtaccatgaatttgaacaccaccctgcagatgacctggcctcagtccatgaagtttccctttcgtcttctgcagggcaccggcccctaatgccatctgacggtttccctgctcacaggatcttccatttgttagccccccagagtgcccagcccgagtgaagagcatgcaggaaacaagcccctgtcctcgtggaggctacattccgagaggggaggtaggcaacacacacacaaacgactccgtggtatgtcatgctgcgatgctggctgtggaggaaaatgaagtgaggcctggtgaaagccagaggccatggggctgccgaggaggaacagggacagggtaggatttgcttagagcagggcaggtcgcgtgggactctgcgggccactgaaaggaacttggcttttattcagaggatgttaaagcgtgagtgacatcctctgaccttttataaaagaggcaagagtctagggagcccgggtagaagtgagggcgtctggaggagccacagtgggctcagggagtgagcccacgcgagggcgcagagcaactggacgctccaacagggctggtggaagtgccgaacggtgtgcatcaccttggaaagcaggcagtttttaataccatgaagctcgtccagccctatgattcgcatttccactcctaggtatcacactcaagagaagtgaagacgcccacaaagggctctgcagcagcactgccggtgagagctgcatccggggatgcatggactggcct

SEQ ID NO: 40343 - DNA, 1658 bp, Artificial sequence
  DNA replication origin
cctccagcggggccacggtggactctggaaagcacagggtgcttcccgtcgtaagggcaggtgcgtcagcagccgggtccgcgtgcaggcagagcgggaggggtgcgggaggggctggggtcactggggctctcaggatccacactcacacgctccccgccgagggttctcaggagccgtgctgacctggagaagggactgaaccatgggttcacagggcatagccagcttagtaacagaattctcaaagccagcttgaaaccggaccaggaagactgtggaggtttgtgcccttcctaaagtcagacgaccccagaggggcccactcgtgcacagggcagagggcagtgctaccaggaggggctgggcaggcctaggtgccacccgcttggcgtcagctctgccctgcccaggcaaaggttggtgtcccagctcctggctccccaggatgggggatggatcccttaaactaaaatgaatccagccccccacccggcctccttggctgcacatgggagcataggagcaggagagggctgcgcctgctgtctggcgctgtcctcacgtggcctccctctctccacagagctgcagctccggcgccagctgagcttctccgaggactcagacctctccagcgacgatgtccttgagaagtcctcacagaagtcccggcgagaggtgggtagtcaggcagggggcttcacagggcctggggccctgtctgttcattgttgggctttggtggggtagaggagagggagagcaaaccgcaagccagggatggacagctagtggcgcatagccagctgactgctgacccagccctatgcactgaggcggtcacgctgggctttctacatgggagctagggccgttggcatccacagcaagggcttctgatttcttgtgaagaagaaaagactggagccattcctgtgtcacactccccttctctggaggaggcagcctggcattgtctttcttcataggtgatcccgcggggagcagcccaccagccccagggcctggagaacactgcgcagtccagggctgctggcggagctgggaccttaggcacagagcattgtgcctggtcctgcccgtttggtgggtttgatagttagggagggtttgtcgtcttaaaggactggtccaggaactgacctgcagggctgctaggtctgactcagcccctcactttccagagcccaggactttgggtggatccagtgaaggtggagggagaggaatcagagcacactctaacaggcacctgtcagcatacagggtgggcggagctctgcggagtatcatgtcaccccacctccactgtccagccctggggcctgtgctcctcctcctggctgggggcaacccggctgtctcctgcttcctgcctcccttttgcgtcaaaagcttcccgagaatgtagcatgccttcattgcaaggcttctagggcttggacttgagtctgccctctcctgccgtccaatagcccagtcagggcgggccttggtgcgcctgagcccgtcacgtgcccatttggtgaagatggctcctgcagcctgatccagttcctctttaaataactcagcaaaccagacgctttatttcgcatcccctccttggtgcattcgtctcccttggcctttcc

SEQ ID NO: 40344 - DNA, 818 bp, Artificial sequence
  DNA replication origin
gctggcctcaggcgcccccaggccccgcaaggcgtcctcagcaccctcccagggcaaggagcgccggcctgactcccccacacgccccactctcaggggctccgaggagcccaccctgaagcatgaagccaccagcgaggaggtcctctccccgccgtcggactcagggggcccagatggctctttcacttcatccgagggctccagtgggaagagcaagaagaggtcgtcactcttctccccccgcagaaacaagaaggagaagaagtccaaaggcgagggccggcccccggagaagcccagctccaacctcctagaagaagccgccgccaaacccaagtccctgtggaagtccgtcttctccgggtacaagaaggacaagaagaagaaggccgacgacaagtcctgccccagcaccccctccagcggggccacggtggactctggaaagcacagggtgcttcccgtcgtaagggcaggtgcgtcagcagccgggtccgcgtgcaggcagagcgggaggggtgcgggaggggctggggtcactggggctctcaggatccacactcacacgctccccgccgagggttctcaggagccgtgctgacctggagaagggactgaaccatgggttcacagggcatagccagcttagtaacagaattctcaaagccagcttgaaaccggaccaggaagactgtggaggtttgtgcccttcctaaagtcagacgaccccagaggggcccactcgtgcacagggcagagggcagtgctaccaggaggggctgggcaggcctaggtgccacccgcttggcgtcagc

SEQ ID NO: 40345 - DNA, 1216 bp, Artificial sequence
  DNA replication origin
aagcgggtggcacctaggcctgcccagcccctcctggtagcactgccctctgccctgtgcacgagtgggcccctctggggtcgtctgactttaggaagggcacaaacctccacagtcttcctggtccggtttcaagctggctttgagaattctgttactaagctggctatgccctgtgaacccatggttcagtcccttctccaggtcagcacggctcctgagaaccctcggcggggagcgtgtgagtgtggatcctgagagccccagtgaccccagcccctcccgcacccctcccgctctgcctgcacgcggacccggctgctgacgcacctgcccttacgacgggaagcaccctgtgctttccagagtccaccgtggccccgctggagggggtgctggggcaggacttgtcgtcggccttcttcttcttgtccttcttgtacccggagaagacggacttccacagggacttgggtttggcggcggcttcttctaggaggttggagctgggcttctccgggggccggccctcgcctttggacttcttctccttcttgtttctgcggggggagaagagtgacgacctcttcttgctcttcccactggagccctcggatgaagtgaaagagccatctgggccccctgagtccgacggcggggagaggacctcctcgctggtggcttcatgcttcagggtgggctcctcggagcccctgagagtggggcgtgtgggggagtcaggccggcgctccttgccctgggagggtgctgaggacgccttgcggggcctgggggcgcctgaggccagctccatctgctgcatcctgctcagctgcctggccatggcgtcccgcagcgcctggctcttcacggacttctccctggctcgcatgcgctcctcggccaactccttggcttccgcggacaccaagggcagccccctcttctgtggctgcagcgtcccctccagagcaggcagcctcccgttctccttggccaggggcgggtggcgaggcttctcggggcgcggccagcaggacgggggcgtgaagaatttctcctgcaggcttgagtcctcagtcttgtcgtcataggtgtcctccacatcatcagcaaagggaatctcctccacgctctccacaaacgacttccgcacctcctctctggggggctgagcaggctcccgggggggccgcatccaggtggcgggcaaggg

SEQ ID NO: 40346 - DNA, 1973 bp, Artificial sequence
  DNA replication origin
ggcgcctgaggccagctccatctgctgcatcctgctcagctgcctggccatggcgtcccgcagcgcctggctcttcacggacttctccctggctcgcatgcgctcctcggccaactccttggcttccgcggacaccaagggcagccccctcttctgtggctgcagcgtcccctccagagcaggcagcctcccgttctccttggccaggggcgggtggcgaggcttctcggggcgcggccagcaggacgggggcgtgaagaatttctcctgcaggcttgagtcctcagtcttgtcgtcataggtgtcctccacatcatcagcaaagggaatctcctccacgctctccacaaacgacttccgcacctcctctctggggggctgagcaggctcccgggggggccgcatccaggtggcgggcaagggcggcgggaccaccgaggcattgggctcggcctccctgagcttcctccgcaaggtggcgggctcctcgcccgggggtggcggtgggggcgggctggaggggggcgtgagcatggcggagtccgaggtgttgaagctctggctgcccagtgtcttcatgttggaggagctcccgtgcaggcccaggccagagctgctggacagctccctgcgctcctcctgggcgctgcgtagctctctgtcggacggggaccggggggttggcagggacaacggctcgccttccggctttggcaggcccagccttttggggatggacagaggcttgagaaggtggagtccctcatcctggggggacttttcaacggaataggatttgagggacactggcctgaaggcaggcgtggggaagctgggctcgggccccttgctgcggtccacaggtgtgagcccgaggctgcggcggatctccgcactcttcatccagaactcctccaccaggtcgctccgtctgagggcctcatccacagcaagggggctgcccagtctgtccttggtgtcactttggctttggacagggagaggggccagtggggtggatgttttggccggggcaggctggaagcgtatgggggactgggtaggggatgggacagtggcctcggtggaaggctggggctgggagcagatggggagtgggctgggtgggggcgtggaggccgccacgggtggctggggctgcgggctccctggtgagacaggagtcctagcttctggcagggtcactggctgtgatcggatgggagagtgcacagctttcagatccgagggggcatcagctttgggcttctctttggggagcaaaggctcagggaaaaggcgctcctcaggtgatttctcctgggtggcggcagggacaggtgggagttggggcccctacagggaaggaagacagaagccgctgagaaggtgtgggctttcacgaccagcagcatcctcggggagccttctcactcaaagtgcctgcacctgtgcctgctgcaggacttccccgtccttccagctgttattagaacagctccaggaaaaccctttccactttctgctccaggtgttcagtgtttagaaccttagaaccactctgcttagtttagacaaactgggttttcaggatttggttcatctcaaatacatcctatattctttgtccactcacaggaacactggccaaaaggacatagaggaatgcagttctcaccctccaggaggccccagagcgccaagatccctgacgtacgtacagaggggccaggactgtaagaagacttaccacagctatttatcacggtgcattatgatcaaattgtcctccctaggaagctcaaagatgtgcagagattcctgcaccagcccttatatcaccccatccaagagcctcaaacaaagcctccccatttcacagacggctgagcgcagtggctcacacctgtaatcccagcactttgggaggacgaagtgggcagatcacgaggtcaggagatcgagaccatcct

SEQ ID NO: 40347 - DNA, 730 bp, Artificial sequence
  DNA replication origin
cggtagtaagggctgttgtaaaatgtttccttttatgccaactgataggggaattttgccctatgaaacattttttaaaaattaaatttatgtgaaaagagagctgtgtcctagatcacagtatgaaacttctttttttaaactgcagatcacagtttaaaagccactgatgtagaaggagatgtagtttcaaaagagatcagagactgagttgattccggggccatttcaacgtgcagaggcttgggatgggtctgggaccagcaaaggacgcagagaggggctatgaggtcacagcaggacccagagagtagtgtccccttgtcctggaggccggtggggttgtgggggggcagacggtagtgagctgtgacttgtgctgcagacaggttgaggaaaacaaggtttgagaattgatcattggattggacagcatggaagtcattcatgaccttgatgaggcatttctgtggagggctgaggacaaggtctacttgttggaggttcaaagatagtgggagaagagaaagttgtgaacaaagcattgacaattctttcagcgagttttgctgtcaaggggagcagagtaagttagttggagcgggtggggtcaggactgggtgttgaaagacgtgtccttgctgaagacagttcagtggggtgagggaggatcactgcagggaagggaccagtgtgggaggcagcatgcttgagtaagaacggggacagg

SEQ ID NO: 40348 - DNA, 917 bp, Artificial sequence
  DNA replication origin
tgtttacgacacgtttatagggccttgtaggccattattttatatttgcttttatgctggctgagatgggaagtcatggctgaatcagctgaggaaatttagtgaagacagtttaccaattcctgattgtccttgaggacaaagcaggtgtatccgggtgggcggcatgctgtggatgggcacctcagcaggagaaggctctggagtcactgtgtgctcatgctctactcccttctcatagctgggcttacctctgccaggggagatagagggaagggacatgctttgtacacagtgtccacaggatgtgggtcgagagtgacggggcaggggcggggccttcttccctgggtgtggtcagcagagctctctctgataaggtgagccaagacctgaagagcgaggggcactctgcatggctggccagggcagccccgcccagggaggccttggtgagcaggagagaggccatgtggctgggcctaagggtgttggggagggtggcaggatctgacctggggctgggatgtggcagtcaacgtgtctgatgggtgttttaaatggatgctctggctgctttgtggaatattctggagggtgggtttggaggagcagaagtaggggaggctcatgcaatgagcaagtgagagctggtggtgtctcaatgaggatgatagagaagacatggtgagaagtggttggatttggctgtatttgaaggtagaacacagaattttctgaagaacggaccgtgggatgtgacagaaatgcagacgggggcaaggttttgggttgagtgtccgggtagctggcggtgttgtttaccaagatgcagaacactagggaaggaacaggctctggcgagcggcatcagagtgttgcctccagtgctttaagctagagatgcctgtcaaaca

SEQ ID NO: 40349 - DNA, 966 bp, Artificial sequence
  DNA replication origin
ctggctggcagcaggtggttggggaatgttagttcctttccttcctcagcacccctggaagaagtgagtcaggaactggctctcagggcagtggaggaagtgggttggcagggagggaccagggaaatcctgagtctaggtgttgagagtggggcagaaacaagatgtcagatagatggaacttgcctggcaggagtggcttctaagaagagctgttgattgttgaactttgacgataaggtgagggtttggattttttggggatagctttattttggtataatttcagaaaagtttgagaatagtacacgagttcctatttacccttcacctagagtcacgatgatttgcgttttgccccatttactttttcatatttttttcttctctttgaatttttttcccagaacaatttgtaaattagtgaaagtgtctcccttgactcctgaatccttcagtgtctgtttcctgggaacaagaatattctctcggagtctgatagggcacctttagcatagggttcttccataggaagtggcatggtgtgaaggtgtccagagaggatgaaggtgtggcgggcagtgtggaatggtgtccactggagggtggggtggtgaggacagggtactaactggggacggagaagaggcgtggaccagaagacctggtgtgggacaagcagcactgccttctagggaggtaagccatgtggagactctgaggaggcagatttagcttcagccttgtacttgggagtacagagtcagagtttggaggtgcagctgagtctgaaggacactgccggtctccatccttggggcgcacagggttctgtcatgaggataataggtagagatggtctccatccttggggcgcacagggttctgtcatgaggataataggtagagatgagtgtgcccatagtcctgtgtggacttaggagttactagtgacagcagcaggtg

SEQ ID NO: 40350 - DNA, 1023 bp, Artificial sequence
  DNA replication origin
cctccgtgctccggattccctttactctgctttactctccatttttccggggcactcaccctctagcatgctgtgttgctcactcatgcttactgagaggtggagggcctgggctctggagccaggctgcctggggttgagttgtggcttcaccacttgctactcgtgtggctttgggtggattatttaacccctttgccttggtttcctcatttgtatgaacaatacctaactcagaatttttgtgaggatcaaatgaatttatatttataaaatgcatagcataacacctgccatggagtcagtgctataagcgtttaataaatacagcttttattgtccatctcctcccacaaaaatggaagcttcatgaagtcagaaaccctgtttgttttgttctctgacagatccctaagcatttagagcaggacctggggcaaagcagcccatctgtgttcactgaccaagtgactgggtggggcgtggggggtgggggggaggtctgggaaggcgtcagggagcagtgaggtgtgggtcaatgctgtgggtggcacaggccactgggtccctgttccagctctgcatcggtgtctgcgtaatcttggaccagtgtctttatctctccgagtctccagggaggccttcctcgcagaggcgttcgcaggattaggtgaaacactgtatggtatgtgtcgagcgcagtgttggcctggctggcagcaggtggttggggaatgttagttcctttccttcctcagcacccctggaagaagtgagtcaggaactggctctcagggcagtggaggaagtgggttggcagggagggaccagggaaatcctgagtctaggtgttgagagtggggcagaaacaagatgtcagatagatggaacttgcctggcaggagtggcttctaagaagagctgttgattgttgaactttgacgataaggtgagggtttggattttttggggatagctttattttggtataatttcagaaaagtttgagaatagtacacgagt

SEQ ID NO: 40351 - DNA, 1370 bp, Artificial sequence
  DNA replication origin
tctggagcgggtggccccgcgagcggacgcgcgccgagcctcccgcccgggcagtgccgaagccgggagccgccgcggcgcgggcgcctccttccggctgcgcttataaccctgcgtccggccggcggggcgcgaggaagcccccgcctcgcgttcccgtgtggtcacctcccgccggaggatgcgtggccaggtgcgccggctggtcctgagttccggggcagcaggcgcggggaagcgcggggaggctgcccgcttcaggcgggaggcggagggtgggggcttagcccggctctgggtgcggggtcggggggtgctttttggggcgggggaggtctctgtctttaccggagtccgcaggctccgggccgaggctccgccgggtcctgcctccgcggcctggccctcggggcctccccgtcccgctgccccggcctggagctagcgtgcgccaagcgtgggctcctgcgaccctggcaggtaggtggccgagaggaccccggcgcgcctttccgtttgtgggggcggtgggcgcggccgggcgatcgcagccgccttcgcctctagtctcagtgatgccccttccctggctgccttccgaggggaccgcgcttttggaggtctccggggcacatgggaaattcccagctaagaaaccatcttgaggagccctacacggaaccgggcttgcctggcctagcagaaagccagccgcagcgagaccctccgcctggcatgcggcactggtgagccgccaccccgcttgctcagtaggtagccgggacgaaggggtctggcaggcccctcaggcaaggcctctgtgccgcatcccgttaaggggcggggaccagccccgtatcttggctggtcttcctgactctgaatgcagagaaagtatgtccaagagttcaaaccacatttgtgttcttttaatggtgtttaatgcagatgttaattgtgatttatgtgaaacgggttgatgtagaggaatgaaggtcaactgtggacaggtggacagctttttttttttttttccccctaagcttgtttttagtgggatgtgcatggagaggatgacatttgaatatcaggccaccaatgtgtatttggtcccatctgacactttgctccatagacagtcgttgtactccagggatgaggatgaactgggttttaagctgagaaagacatcttcctacagtcgctgccgcctgcgggaaagccccgccttctggttacctggccgcacacaggccagttcattgtggttaccttctcccgtgagcacatctctgcagccctctcagaggatgccgttcattccatatttgattgccagatgtacttctcaggtcagaaatccagcccca

SEQ ID NO: 40352 - DNA, 1100 bp, Artificial sequence
  DNA replication origin
ccccgcgcttccccgcgcctgctgccccggaactcaggaccagccggcgcacctggccacgcatcctccggcgggaggtgaccacacgggaacgcgaggcgggggcttcctcgcgccccgccggccggacgcagggttataagcgcagccggaaggaggcgcccgcgccgcggcggctcccggcttcggcactgcccgggcgggaggctcggcgcgcgtccgctcgcggggccacccgctccagaaccgcccgccggaaccagcccggtgcccgagaccccgagctcgggcgcgagcaggatgcggctccccggggacggttggcgcgggtcggagtcccgaagccccgttcttacctctgcctcatactgcggtgtccctcggcgccggcgtcgctgtggcgggccagtgccgccctgttccgcagcccgagcgtccggcgcggtaggtagcagccggagaagcggcgcagccgggggatgggcgggcacatggaagggcgggggttgtggccctcgggccggaccacgggaccccagcctcgggggcgagatatctcagtacacctcgaaaactggcaagcggcccccgtcctcagggactccattgctacttgcacgctcagtcttgccagaatctcacgggatatgtgcaaaaggcaaagaaataagctgtcgccacgcccttcgtcctctccgtccccctgcaggatccatatggtacattcctcaaagcccaacgggagacgggaaagaactgattggttgggaatcttggaaggggcgagaagccacatgaagtggccaatggagaaacccggtgggcatatcaaagcctgcccccggagagaagagaggatgtatttaaaggggacttgttggccgggcgcggtggctaacgcctgtaatcccaacactttggggagccgaggcatgcggatcacttgaggtcaagagttcaagaccagccgggccaacatgatgaaaccctgactctactgaaaatacaaaaattagccgggcgtggttgcacgggcctgtagtcccagctactctggaggctgaggcaggagaatcacttgaacccgggaggcggaagtt

SEQ ID NO: 40353 - DNA, 1105 bp, Artificial sequence
  DNA replication origin
ttatcaagaaggcttagtgcttggagtaaagaactcaataaataaagacttccagtcatcctgagatacccaaataagaacacaaactcttaattggttactatttggtttaaggcaggggttgcacattgaccatgtgctgtgtgcggttagtaacggtgttttgtttgatcatctcattatgtctgtgccatgtttgaagggcaatgtcacagaaactgggggtgacgggttagaacactctggacacttaaaaggccttaaaagaaggctggagaggggcctctggtcaggcacaccagagtatctgatgagaacaccaagtctgtaatctcatgcccacagaaagctaaccctaaatgccagtaccagatggccaacctaagagagggttctgcgcagggagagcacactcagttgggtggtcagggaaggcttcttgtaggtagtgtttggaagtggcgggaggcgggtggagggggggtagtggggggcgttgttggggcgggtggtggaacacctggtggagaggcacattccagggtagaagacgacggagcaggcaaagccctgggggggcaggaaatctccagctatattcaggaaaccatgagcaggctaatttggctgaagcagagaatttgagttagacagaatggaagtgggcaaagaatgtgtggagtgaagaagagcaggaatcatgtctcaaatctactgagtcaaatatctactgatggaaaggagaagcttgtggggtgagagtgaagggtgcccccgtggcggggctcccctggtagccctttctcctgcagacctatctgtggggtgctcccagcctggctccctcttcgggaggcagacacctgctcagccttgctaatcaggcagcagttaatggggttcacttcctgcatcagcaggtgagggccttggggaaggctgaagaatggcaaggttacagctggcgtcctcaggcagttggaggcccgcagcaggagagcatgttcacggccgggcgcagtggctcacacctgtaatcccagcactttgggaggccaaggagggtggatcacgaggccaggagatcgggaccatcctggataac

SEQ ID NO: 40354 - DNA, 912 bp, Artificial sequence
  DNA replication origin
ggccgccatcccatctaggaagtgaggagcgtctctgcccggctgcccatcgtctgaaatgtggggagcgcctctgccccgccgccctgtctgggatgtgaggagcgcctctgcccggccgccccgtctgagaagtgaggagaccctccgcccggcaactgccccgtctgagaagtgaggagcccctctgcccggcagccaccccgtctgggaagtgaggagcgtctccgcccggcagccaccccgtccgggagggaggtggggggctcagccccccgcccggcagccaccccatccgggagggaggtggggggctcagccccccgcccggccagccgccccgtccgggagggaggtggggggggcggtcagccccctgcctggccagccgccccgtccgggaggtgaggggcgcctctgcccggccgcccctactgggaagtgaggagcccctctgcccggccaccaccacgtctgggaggtgtacccaagagctcattgagaacgggccatgatgacaatggcggttttgtggaatagaaaggggggaaaggtggggaaaagattgagaaatcggatggttgccgtgtctgtgtagaaagaagtagacatgggagacttttcattttgttctgtactaagaaaaattcttctgccttgggatcctgttgatctgtgaccttacccccaaccctgtgctctctgaaacatgtgctgtgtccactcagggttaaatggattaagggcggtgcaaggtgtgctttgttaaacagatgcttgaaggcagcatgctcgttaagtgtcatcaccactccctaatctcaaagtaccgagggacacaaacactgcggaaggccgcagggtcctctgcctgggaaaaccagagacctttgttcacttgtttatctgctg

SEQ ID NO: 40355 - DNA, 1161 bp, Artificial sequence
  DNA replication origin
agcacagggttgggggtaaggtcacagatcaacaggatcccaaggcagaagaatttttcttagtacagaacaaaatgaaaagtctcccatgtctacttctttctacacagacacggcaaccatccgatttctcaatcttttccccacctttcccccctttctattccacaaaaccgccattgtcatcatggcccgttctcaatgagctcttgggtacacctcccagacgtggtggtggccgggcagaggggctcctcacttcccagtaggggcggccgggcagaggcgcccctcacctcccggacggggcggctggccaggcagggggctgaccgccccccccacctccctcccggacggggcggctggccgggcggggggctgagccccccacctccctcccggatggggtggctgccgggcggggggctgagccccccacctccctcccggacggggtggctgccgggcggagacgctcctcacttcccagacggggtggctgccgggcagaggggctcctcacttctcagacggggcagttgccgggcggagggtctcctcacttctcagacggggcggccgggcagaggcgctcctcacatcccagacagggcggcggggcagaggcgctccccacatttcagacgatgggcagccgggcagagacgctcctcacttcctagatgggatggcggccgggcagagatgctcctcactttccagactgggcagccaggcagaggggctcctcacatcccagacggggtggcggccgggcagaggctgcactctaggcactttgggaggccaaggcaggcggctgggaggtggaggttgtagcgagccgagatcacgccattgcactccagcctgggtaccattgagcactgagtgaaccagactccgtctgcaatcccggcacctcgggaggccgaggctggcggatcactcgcggttaggagctggagaccagcccggccaacacagcgaaaccctgtctccaccaaaaaaatacgaaaaccagtcaggcgtggcggcgctgaggcaggagaatcaggcagggaggttgcagtgagccgagatggcagcagtacagtccagcttcggctcggcatcagagcgagaccgtggaaagagagggagagggagaccgtggaa

SEQ ID NO: 40356 - DNA, 1165 bp, Artificial sequence
  DNA replication origin
gctactcgggaggctgaggtgggagaatggcgtgaacccggaaggcggagcttgcagcgagccgtgattgtgccactgcactccagcctgggtgacagagcaagactctgtcttgaaaaaaaaaaaaaaagaagaggacttactaatggattcattgtgagatgttagagaaaagcaaagcaaagagttcagggtgaggttttcgtcctgagcaacagggtagagtggtttcacttagtatgacggaggagactagggaataaatgggtttggagtggtagggaagcaagtcttctgttttatttatttatgtatttatttatttattttgagaccgagtctcactctgtcacccagggtgcagtacagtggcatgatctcggctcactgcaacttccacctcctgggttcaagcgactctcctgccccagcctcccgagtagctggaactacaggcaagtcttctgttttagacatgtcaagtttgagacctgttgggcaccaagagagcacgtagcctaggagtgcatatgagtctgaagctcagctggaagatcagcagaaggtcaaaggtgagagtcattagcatgtgtgtggttcttaaagccctggggtggaggagcctaggaccacaatgtggagacagaagtggtggaaagacccaggacaattagagaacaggaggaggaggcagtacaggaggcggaggctgtagccattgagagaggagcttatgggtcggctgtgggcctggaaggcctggagaagaagcgctttgagagagggtgctgctctgtgtcaagacatgcaagaggccaggggaggcgacatggggtgattccctactgccctggggaagatggaggtcaggggcagcctcctgaggagccacaagaggggatggtggagacatgagccaggcagagtgagatgaggagggagtgtggggaggcagtgcacacaaactgtgggatgctctgcagcaccagggagaaggaaaagcggtgagagcagaagaggaacgtgcctcaagctctttgaacgggttgttgggctgcccctaccccacccaagtctaccttatcagccacattgagaggtgacagcgtgctggcagtcttcacagccctcgctcgctctccgtgcctcctctgcctgggctccc

SEQ ID NO: 40357 - DNA, 1022 bp, Artificial sequence
  DNA replication origin
ccatcaaaaaaaataaaaaataaaagaaatgctatggaagaagtaatagaatatgctatgggagagtttggaagagaaatacacatagagttatactaataaccaaaatcctttattgaccatttatcatgtgcttggcacaattagcttaatcctgagtcttaattgtcaggatcttacattataagatagacaaaaattcaacgcatgctttactaagtaccgtttgtatcagtgggtaaagcactgtgtttggtactctctcaaatgcaaagatgattacgacacatgtactatcgtttatgaatgggtggccaacagaacagattgccgcataggtaagcagaaatctgctctcattctctattggccacaagcaggcatgtcttaggagcagaagggtaggaagatctctaactgtgcttggaaacttggggagttaccacgtctggctaaagtggtattgtcttaaggaaaacctatgaatttgcctgcgttggcttggtgctgaggaaagtggaagagagaggctggggtacacctttcaacatgaatggaactgaccactggagggaaagaacaagaaacagcagtgagaacaaggaacaaagaccatccagcccctcacccacctggggggaagtgaggggagatgggcagggtgacaacgtggccaacatctaaagtgtgaagaggggcttttaccaagtgcccaccccttcccgagcagggggcaaccaacagcatctggcgggtcttactactgggcagaggcaggggaaccctggtatgagttctggattacataggagatgtgacttggacacgtttggggcttaaaagtaggaagggatcaaggggggagatttgaaaatcccggtggaggtgcgaggtatccggggagagggtaaaaacgggaacagtcttcagcacctgcctgtaccaggagctctgtgtatgccatctcatttccgtctccagcaaccaggcgggccttggcggcaggaggcacaggctttggg

SEQ ID NO: 40358 - DNA, 1670 bp, Artificial sequence
  DNA replication origin
gctgcaccccagtcaggagcctttccagcgggtcggaggagaacggaagtttggggagacccgcgcgattcgcctggctgcattttacatttctttctccggcagctggggtcacgaaggctgctctcgccggcggtgttggaacgtggacacgtgcgctttggtaatagggcagcctcccccgcgggcgcagtccccgctgcgagcgcccccggctgctgaggcgggaccgaggacccggagatttgagccgcgggtgggcggggaggggcctttgtgacctgcccgcccctccccggcactgtgatgccggggggcagctgcgggcccggcgcgcctgtccccggcgtccccccctcccggtgtgtcacaacggcggaggcggctgtatctggagcagtcggggcgggcaggcccagctgagaggtgcgcgggcgaggacagcggcagcgatggtgaggcttcccggggccaggcgggctgcgggcgcgcggcaggcgtaggaccgagagccgagtctacgcggaggcgcacggacccgtcttcctggagccgcagggctcaaggccttctgggggtggcagttcagggtcgaggagtccgcaccctcgggcgggaacacccggtgccctttatcgtatgggggaaatagagaccaggggccagttgttccttaaagggacctaagggagctttgcgtgcagacgagggggagggaggccctggggagcccgacggagaagggggcgagattctggggtccccagatgggcagcctgtggacagagtggagagaagggcgagtccggggattctggatgggtggtctgggccggggcgactggggggccagatgcagtcacgtctccgaacccagcctaatgtgacagggcccggaatgtgacagaggacctagggcgccacggtccccccacgcgtggaggtctttctcgcaagcctggccagcggcttgggtttgctgcacgcacagccccagcgcggcggggtcctccgggcgcactcagcagctcccaagtctttccagcggtcagagtcgaaggactttgggagtaagaagtctctgcttccaaaggccaggggaccttcgacctgtttcctaccctggcttagggggatcgcggctgctcccttccctgcccccgcccctggatcttactgaggggcggctgcaaacactcagttcctctttctagggtccccctctccgcccccagtgcccctggtggttaacatttgcccccagtccactttcccaaagcccagaatcccaggaatccctcctggacccctgatctttcagcagtagggagatgggctggaaagattgggggcagagtgagggcagaataagcctatgtcatggccaaggtcgggttccctgggcaggcttgctccaggtgtcagtgatccagaaagcaggcgagaaccccctccgccccgccctgttacgtttggcccgtgcccagggcctcctggctcccccggagctctagccttccagcttcagttttgtcagcaccctccctcctcctagcgggctcccagacacccctgggaactgaaagaacttgggaatattagggagggtggccacaggaacctatttctgcctgaggaccctggtatgaggccacacaaagggcccggag

SEQ ID NO: 40359 - DNA, 984 bp, Artificial sequence
  DNA replication origin
caggcgtttccattcatcctcagagccgactgccaaatcctaaccgggagcgccctcttgggaaaggacagggaagcgcgcataggactttgctttacaacccaggaccaggcccacttcagtaaaaagccagcactaagcaagaactctcagcccctgatgccaggctggcatacaggggaagcctctcaacccgcccaacacccaaggggacctgcggccctggcagaacagcctcgtgttctggcccgcaacactgccggccagctgcagcagtcagataaaccttagctgcaggcaggctgtagctacctgtcggccttaggcacatcctggtgctgggctggtctcatggcatgaattctgggggtgtgactcaatattgtctcagcctcagtggccataggggtacccgtgtaccctcccccaacccagcacagctgtgtgaagagagacactgtttgcttgggggaagaagaggtaagtggagtacttcgccttggaacccagtgtgtccggaattggtgggtgcttggtctcactgacttcaagaatgaagccgtggaccctcgcagtgagtgttacagttcttaaagggggcatgtccgcagtttattccttctgatgttcggatgtgttcggagtttcttccttctggtgggtttgtggtctcgctagctcaggagtgaagctgcagaccttcgcggtgagtgttacagctcctaatacggcgcatctggagatgtccgttcctcccggtgggttcgtggtgtcgctggcttcaggagcgaagctgcggaccttcacggtgagtgttacagctcttaaggcagcgcgtctggagttgttagtccctcctggttggtttgtggtcttgctggcttcaggagtgaagctacagaccttcgcggtgagtgttacagttcataaaggcagtgtggacccaaagagtgagcagtagcaagacttactgcaaagaatgaa

SEQ ID NO: 40360 - DNA, 968 bp, Artificial sequence
  DNA replication origin
acactgccctccagcctgggcgacagagcgagactctgtctcaaaaaaaaaagttcacagggaaaggtaagtatatagtcacattcataacactgtaatattgcagtggtggtgtgtaaatcacttttcactgtagtataaaagttaaaatgtaaaagtattaggcggcccgggcgcggggcagctgctgcggggaggcggggaggcggggggcctggccggacacccctgcgccccctccccgcacccgggcggagggcggcctcttccccctccccctcccccaccacccccggcagccgcctcccccaggacgcaggaggcgggcggaggccgggtccgcccagctggcgacttgcggcatgggccgggtcgaggtgggggggcggtttcgggggctgggaagctggggtgccggggacaggagggtgggggagctggggaaaggagggctggggggccggggacaggagggccatgcaggcagtggcaagcgggcggcgagggctccgtggggcaggtggacggggatcagcgcctggggctgctccgttccccaggcgggtgtcgtggctctggcctccatgcaactccaggtctgcgcgccccgcgctgctggagccccagtcaaaagtctatttaaaaagcagagagaggatgcttccctctgagtggagcgatgaagacctgatccctgggccatttgggaacactagctgcctttcatcacagtcaacctggactcagagaatgtcaagagcttgttggttgggtcaagaatgaatctaggcatgacgtcatagtttatagtcatccttttaaacctgcaaagaagcatttgcaggtttaaagttatttcacgggtactgcttgccaatctttggaggatgtgaagcctgcagagaaataaagtgtcgcccctctgcgcgtcgctccccatctgctagaatgtttctcatgaatgctcc

SEQ ID NO: 40361 - DNA, 946 bp, Artificial sequence
  DNA replication origin
gagcgagactctgtctcaaaaaaaaaagttcacagggaaaggtaagtatatagtcacattcataacactgtaatattgcagtggtggtgtgtaaatcacttttcactgtagtataaaagttaaaatgtaaaagtattaggcggcccgggagcggggcagctgctgcggggaggcggggaggcggggggcctggccggacacccctgcgccccctccccgcacccgggcggagggcggcctcttccccctccccctcccccaccacccccggcagccgcctcccccaggacgcaggaggcgggcggaggccgggtccgcgcagcgggcgacttgcggcatgggccgggtcgaggtgggggggcggtttcgggggctgggaagctggggtgccggggacaggagggtgggggagctggggaaaggagggctggggggccggggacaggagggccatgcaggcagtggcaagcgggcggcgagggctccgtggggcaggtggacggggatcagcgcctggggctgctccgttccccaggcgggtgtcgtggctctggcctccatgcaactccaggtctgcgcgccccgcgctgctggagccccagtcaaaagtctatttaaaaagcagagagaggatgcttccctctgagtggagcgatgaagacctgatccctgggccatttgggaacactagctgcctttcatcacagtcaacctggactcagagaatgtcaagagcttgttggttgggtcaagaatgaatctaggcatgacgtcatagtttatagtcatccttttaaacctgcaaagaagcatttgcaggtttaaagttatttcacgggtactgcttgccaatctttggaggatgtgaagcctgcagagaaataaagtgtcgcccctctgcgcgtcgctccccatctgccagaatgtttctcatgaatgctcctcc

SEQ ID NO: 40362 - DNA, 954 bp, Artificial sequence
  DNA replication origin
gggaacgccgctcttctacctggcgggcgcgcgagggtcggtcccgcaggcagcgccgcgaggtgcttcgcagagtaccaggctgatccgcccgggcccgcatctctgctctaggcccttgggaacgggtgatccacccagcggacccaggtgggggactcggccaggacttcccagtcctcaatcatgagcctgcggctggtccttcctggcgactgcgggatcctgagcgacccagtccgccttgtagcgccaacctcagtttccctctgcagcctgctgcggaggcgaagccaggcagcgcagcctctgcaaggggaggcgcgcgaggcggcgcgggagcgcgcggagcgggtgcgcagaagactggaggaggcggagcgccacaaggaggacttggtgaggaagagtcctagaatggggctggacccagggtggggtgaggcagggcgggcggaagggggcgggatccgggggtggggtgaggtaggaccggcggagaggtcggcaccgccccaggaccccgtccgcaggagcagcacagcaggcagctgcaggagcagtgggaggagctgtcgagtcaggtacgtgcaggagatgggagggcctgtctcttggttcctctcggaagtcctgcccttgtcctcgcccttgttgtctccccgtccctgtctcccctgacactcgttcctccagaagcccggtaaaccccgcccttacaagccccgcccctagctcttctacggaggggaaccgcagagccagaagagcacggagcagcaactcgcagcccaattggtgacgctgcaggtgcttgagcgggaccctgaggtctttagtaggggcggagcagcagcgtgagcggggccgtgaccacctgggggtgtggcttaaggcaggccctgaaggcgtgggcggggcgggggatgtgggcggagcacaatcgcatggggg

SEQ ID NO: 40363 - DNA, 932 bp, Artificial sequence
  DNA replication origin
gttcctctcggaagtcctgcccttgtcctcgcccttgttgtctccccgtccctgtctcccctgacactcgttcctccagaagcccggtaaaccccgcccttacaagccccgcccctagctcttctacggaggggaaccgcagagccagaagagcacggagcagcaactcgcagcccaattggtgacgctgcaggtgcttgagcgggaccctgaggtctttagtaggggcggagcagcagcgtgagcggggccgtgaccacctgggggtgtggcttaaggcaggccctgaaggcgtgggcggggcgggggatgtgggcggagcacaatcgcatgggggcggggctctgagggctagaataggggcggagcgcggagggggcgtggccatgaccagttggggcgttgcttacgactggtcctgaggacgcgggcggggtcatgatcgcctgggggcgggcactgagggccgggggcggggcccggaggcgcagcgggttgccggcctgcggacctcctgacattccctgggtccttctcaagaatgaactggagctggcggagaccaaatgcgccttgcaggaggagaagctgcagcaggtgagggcagaagcgggttctgttggaggagggtaggctttcgagtgtggatggggaagggcctgtcgccccgacgccgccgagtctaacccgggtgtccacacccaggacgcgctgcagacagcggaggcctgggccatattccaggagcagaccgtagtcctgcaggtgcggccccactcagacgccaaggtgcctcccgcctctcctcccccagacctggggcggtaagtctcccaacccaccgccaggacgcctccccgaggcctcagtccgcactctcacccgctccaggaggtgcaggtgaaggtgatggaggctgcggaggagctgga

SEQ ID NO: 40364 - DNA, 1517 bp, Artificial sequence
  DNA replication origin
ttgtgggccagatgcccggaggggcgcgggcggtggggcacccggggcacaaagcccaccgggccgcgccaggcccaggcggcgcgggtctgcggagcgggggtcggcgggcgagcgggcgccggctctttgtgccttttcattagcaatctaatccgaacagcgtcgggcgagctgcgctgcctgacaggcgggagggctcccattatgcaaacggccctgcgcccgcggccgccccctcgctagaggattttgcgatttccaggactgcggtcctgcaccgtctgcggtctcctctcctcttgcctcctccccgcgggaagactggccacggcaggggcaggggcgggcctggaggggccgctcccagagggccgggctctgcggctggtgggctcgctgccctgcccccagacctctcctgtaggcagccgcttggcaggaagagagatgggcttgggggagggggtcggctttcagggggaagggaccggctggctgagggagggggctgaggggccccagcttgtcactctctgtttatcttccaagatggttcatattcacacaggcctgggtgtgtgcgtggttgggggggggggggaatgcctctccctggggggcagtgacttgctgagaggagggaatgaggccagataatgctcccaacggccccacccagaactgcctgggactgcctgtgtaagggagcccagtgctgagccggatgggttggagcggtgttaaagttatttatccatgtcttctcctgtcccccgcacccctagtcttttctagtaggagttgccaagcacatctggaaagctgtgttccccgaccccccactcccccaacagcaggaggggtgtaacccagggaagccacccctctgacatatgtgctggggggaggggcagagccttgcccctaggaatcctgtggcggtgggttgttgactgatgtgggattgctgtgtctcttgtgctgtcggagagctggcaggtagtggaggggccttgggagctcctaggctgaacttggggctgtcctccaaggatccaggatggagggatggagctgggtcactcaaacctaaggcctttctgggtctagcatttattgcttcctggcttctggcttggcttcttttcgtccattctcatctgccagtgtctggactccctgggccttcaggcaggcattttcaggagcacaggccatgtggttggtctggagccctgtgtcaaggagagtgtgcgtgcttggtggagcagggttgctggagtagtgtgaaaaaaagcagatgagctggcctctggagacaaagctgtgtggcaagactgctggtttagtgggctctgaacaccaagaacagggccgggagtctgatacttgggggctgaactgagtcctgtggcccaggattgttgcctggaagtgaacgttccgtcttgtgccattgagactgtgaagatctctgggtcccacaggacgagcagtagacttggaaggctggg

SEQ ID NO: 40365 - DNA, 2125 bp, Artificial sequence
  DNA replication origin
cctgctcctccttcaaaacgttatggaagtcagatgcatactgttggctggcgcccagctggggaggtgtgaacccttgggcatcttgcttttgccgaagtaccctctcaagggcagccttttcctgacacggttctttcctgggcccacactcggtgcgtagatggatgaatcctggagcagggcttttgctggtgcccatgtgctgggagcaattttccttctccccaggctggtcactgactgaaggtggcctgtggttctggggactcttctgaaagagcaggtcctttctacagccctcccaggcctctgcaagctcctgggcttggctgccagcccctgaactcggacattctccttctgagcccaggttggacactggggattgcctccttgggggttcttcaaagaatgcttctaggaacttggcctggggctccccgcagcttccagggttgtgggggctggccttggcactcggaggagccagtgacagcttctgggggcagacggggaaggtgactctgtaggtggatgggtcgccacaagtgtagctaaagggtggagtctctggccatcggtgacacatgaagaagtcctcggggatctgagcaggcactgaatccagggactcaccacagagtgacatggttctcactgagaccttctgccacgtgaggggcacctgtagctgggagaattccaatagggtgctcccagcagtggcatcggcgacctcacaaaccttaagcccatctgcatacacagcataaccggtgacctggactccattggaggacccagctgagtcaatggtcacagggagccagctgaccaccaggacacctggcgaggcatggcgctccaccagcacatccagcggtgggtagggaggtcctgccaagagtgtgtcgaaggtgacggtggaggacatagttccccaatacacctgcagcaagtcccgtggcagccgcacctccacccgcgcccggtagtgcgtgccggggcacaggccctggaaggtgtagcagctcacgcccgctggggtcagggcatgctctcggtcatcaagatataccacatgggggtggcggtggctgctgtagacccaggtgatgttggctgatgtggctgtgacattctgcaggtgtagctgcatgggagccatacggagcacccctttggtccccagaaggggtctggagaggccctgcttccccatgctctgcagcaagcccagctggcaggcttccgtcttggtatccaggatctctgttgctacttctgtcttggagcccaccctgaccatctggcacagccctctgtccaccactccctgggctttcccagataataagctgtcttcctccagagcttcatcctgccccgctgggagttgactggggccaagatcaggggatttggcaggcaggcagcctgggatgtagctgtccggaatctgctccacgaagttggagggcaccagcccccgccggccatcctcaagctccccctcatagaagccatcctcatccatgtccccgaagatatatatgtagtccccagctgtgaggggcagctcaccctcagggtgatcattgggcccctcaaatgggttgtagttatactgagccatgaagatcttgagcttgggggcagcaggagccgccgagccccccatttccagggccagggacacgctgtcaggctccaggtcatccacctcactggctgtgtccctgtccagagtaggggaggacggcacggtggcccacatcgacccctcagaggaggagtttgactgggagctggttttcttggacagaggttggctggcagggactgtctctgaaacttgggggacactggctgactccccaagggcaactgggctctcctcgagggaggcttcccttttctcctgtatgtctctgttgggctgtgacactgcgtagtcttcaggccgtgcgtggaacttgggccttctgctacctttaacttgggactccggcatttgactggtctcccagggctgttcaggagggtgaccaggccgacactggagcgcctgtatctccttccaggaaggatggaggtcacacagggccttctgcgggtcgcg

SEQ ID NO: 40366 - DNA, 1053 bp, Artificial sequence
  DNA replication origin
actgcctctgcaggcgcagcacttcccgctgggactcgcgctgcaggcggtctaagtctctgacgttgagccactgggtgcaggggccgccccttccagtatgcaggtcgctgcagggacccgaggcgacacgcgcctgcaggaggtggcactcctgccgcagctcttcgatctgcttgtccttggccagcggcgcgctcgcctgctccgacaggtcccgagcgcgctggcgggcaaagacttggcacagctccaggccggcgcaactctcgccgggtataggcgcgctcacggcccggaggttggtctcctgcagcttgcgggcgcggtcagctaggcgccgcgcgagcccggtcagctccgcgcgctttaccttgagccgcttcaccttctcgtctgcctggtaggggcagcctgcacgccgcagctgcttgttctccgcttgcagggtataacagcggcgcgccagcacccacaacgccttggccagcagccagttcagctttatcagctcgtggtggcccaggcccgggggtgagggagtcaggacttcgcagggctggctctcagagccttctcctccccgcgggttgctgagtttcctgtgggctgacggtggtggtggcggcgggagtggcgatggtggcggcgagagcctccgggagccaggggtggaggtgtctggtgaggagggccgctcctcggatttggaggccttggggaggctccgggtgctgtcaagcgagcgggaacacgcaggtgcgaagcaatcaagggagctggcgtgcgtggagagcaggccgtctggggagctggagcacgcagaggacaccaggcctagcgagcgggagcgcacaccgacttcagcactcaggctgtctagagatccgagttggcaggcgggtttgggggcgtggcaagagccgctggaggtctggggcagcggttcttccaaggaatgcacagcttgggggtccggtgatcccgacaaagccgggtgcccgcggaagtgcgccaggatgtacttgaggaagagctggcgctccacctcca

SEQ ID NO: 40367 - DNA, 1502 bp, Artificial sequence
  DNA replication origin
gcagctgccgctgctcggcctccttccagcgcagcagctgccggatctcggcctcgcgttcccgctgcatctcctcttgcagctgccgcaactcccggctgcgctgtgcctcccacttggagcgcagacggtcagccagctgtcgccgctcccgctcggcctcctcacgcagctggcgctcccgggcagcgaagcgccgccgttccgcccgccagcctgcccgctccgcctccagctccgcccgtagcttctccagctcccgcctctggttctccagcactgccgccgccgggctggagcagcccggcttcttgggcgacgcgcccaaggggctgggcgagtccttggccattgcggccgcggcccggctggtctccagacttcgcctggcaggcctcagctcgccaacggccgccgccgaccgcccggcgcgccccttccggcgccccctgggggtctccgcgtgccccttccgcctcttggcatgttcccccgcctcctgccgcggatgtctggcccaggcgcctctccacctggcaaggccagggctggactcccacacccctgctcaaactggcccatgtcccttccaggatgcacgggggcttttccggtccctacacttttcctgcttctagcaccaagtcccttgtgaccctccccaggcaccctcccaggcactgtgcagtcccaagcaggccgcggtgccccgagggaagtctgggctgctgctcctgtacttggagaaaggggcagggtgtgtgtgttaaggccacccatggggtgtgggcatacctggtcgtgggttcaggtggtgtatttgggtcaggtggctggaaaatgcagcaggataggcctcaacttggctagacctggactccccaggacccttcagccccctaacagccctgatcacccaactggtcatccaccttttgaggaaaggatgtgcctgatacacatttgtgttactgcgcagagtcggctcagaggaggtgtaagcgaaaagaccctccccagcaaggtggcatagggacccagggccagataggcatgaggggcactgcccaaactggccatctggcctgtctacctcccacatccaggtaccacctggtgacaaacactggagccccagtgtctgggctactcattggcatcttaggtagaggcctcaggatgggccaggagtgagggtgaggcttcagcagaaatgttggaggcatcctgagctgcagaagaaacacacacacacacacacacacacacacacacacacacacagctgcagaagaaacatacacacacacacatactgagctgaaggaatacacacatacactgagctgcagaagaaacatacatacacacactgaactgaagaaatacacacacacacacacacacacacacacactgcctctctgactggtggccacctgtgtggcttgggagctaagaagccctgcttcagtctggctcctctttgcccttcctgtctg

SEQ ID NO: 40368 - DNA, 899 bp, Artificial sequence
  DNA replication origin
cccgcatactgagcacacggagccgcggctgtgcgcgccggtcctctcgcccgcgcccgccgccccggcccccgcacgctccaccagcttcagcagccgcggcacctcggaccgcgaagccgcttcggcccggagctggcggagcaggcgagccagccggcccggggctcgggcgtcttcccggcccggcccattggattgcggccccgggtcccgccggcggcccgtgacgcgccgcagcacctcgctggctctgtacgcactacgcgcctgggcccacgggcggccgggcgtcgccatccgccctgctgcctccaccgccgccagcgcccgggatggccgggagccccaggctgcagcctagccatcgctggggcccaggcgacgcaccgtggagggggcccgcgggacggctttgggaacgaccaaagccctgggggttccggcctgggccgcagggaaccctggcagggctgggtcccgggcagcccggttccccggggaccctgcgggaacaacgacgttgtgggcaggtcctcacaaagggcatggcccagtttctgggcataggtgacatggagcatcgccagccaaagaccaggcaccacccgctagacacgagtcaggaactgagctcacattttacactagaagctactgtctccatcatagtcaagggaaggccaggagtggtcatggaccccacagcccttttcaatggctcagggcgacgtccttccatgtagtccaggccattatctcctcaccctgtcccctagtccacacagctggaggaatccatccaggtggcatctccagccccaagctgctggtccttccatgcgagctcttcagggtctcccttactctccaaggtggcccgcctagggcctctggaa

SEQ ID NO: 40369 - DNA, 1361 bp, Artificial sequence
  DNA replication origin
ccccgggccggctggctcgcctgctccgccagctccgggccgaagcggcttcgcggtccgaggtgccgcggctgctgaagctggtggagcgtgcgggggccggggcggcgggcgcgggcgagaggaccggcgcgcacagccgcggctccgtgtgctcagtatgcggggagccccgcggcagggccacctacccggcgggggtcctggaggtcagcgagcggcggctgcaggagggactcgcggcagtgcgcgaggagctgggcgccgagattgaggcgctgcgcgcggagcttcgagcggagctggacgctctgcgcgcgctgctgccgccgccgccgccgtccccgcctgcccgccgcgagccccgcgccgtcccccgcgccgcgccccgcggcccgaccctgctgcggacgctcggcaccgtgagcgccctggtcgccgcctccaggcccgcagacgacgccccggacggcccagcagaatgcggagcgcaccgagccccggccaggaagaaccacaagaagatgccagtgccgcctggggccccgcaaggtggcggggactgagggcggccgcacaagggcagcctaggcgaggtgcggaaggcgtcgcgctggctactctggtacccccaggacggggcaagtgagcagatcggtccccctcgtgtagcgtggctctgagtcagaagggtgcccgggtgccgccagttagggctccggtactggagggagggggtgggcgcgggacgggcggagggtgggccacgtgcgtctggggagtgcggatgggagccggggtccttgcgagagactgagtccggctagagaacagggtggagcccctttggaccttagagctgggcctttgggccttgggtctgggtcagcctttgggccagggctgggtcagcctccaggggaacagccgagactcctcttccttggggtgactgcacgttctttttctttcaaggtctcagtgacgaggcagggtctccacgcactggaatagtgtcaaaccacacacaagggcacagaacccagggacacagggcggctgagacacgcagctggtgatggccctcaggacggtgtcaaccagtatgtaatcacattccacacggcaccaattggacagcggcctccggtcagcctcactctgactgcaaccccctctcactggacagcatcacctggacacagagcctcacctagtctgtgtcccgtggacacaactttgctttggacagtgacaccaagaatactcacccctttacttagccagaccacaggcagccaccgggacacaaacatctctccagagtcaccctccacacagactccacagcagaactccca

SEQ ID NO: 40370 - DNA, 952 bp, Artificial sequence
  DNA replication origin
catggacactgccctccagcctgggcgacagagcgagactctgtctcaaacaaaaaagttcacagggaaaggtaagtatatagtcacattcataacactgtaatattgcagtggtggtgtgtaaatcacttttcactgtagtataaaagttaaaatgtaaaagtattaggcggcccgggcgcggggcagctgctgcggggaggcggggaggcggggggcctggccggacacccctgcgccccctccccgcacccgggcggagggcggcctcttccccctccccctcccccaccacccccggcagccgcctcccccaggacgcaggaggcgggcggaggccgggtccgcccagcgggcgacttgcggcatgggccgggtcgaggtgggggggcggtttcgggggctgggaagctggggtgccggggacaggagggtgggggagctggggaaaggagggctggggggccggggacaggagggccatgcaggcagtggcaagcgggcggcgagggctccgtggggcaggtggacggggatcagcgcctggggctgctccgttccccaggcgggtgtcgtggctctggcctccatgcaactccaggtctgcgcgccccgcgctgctggagccccagtcaaaagtctatttaaaaagcagagagaggatgcttccctctgagtggagcgatgaagacctgatccctgggccatttgggaacactagctgcctttcatcacagtcaacctggactcagagaatgtcaagagcttgttggttgggtcaagaatgaatctaggcatgacgtcatagtttatagtcatccttttaaacctgcaaagaagcatttgcaggtttaaagttatttcacgggtactgcttgccaatctttggaggatgtgaagcctgcagagaaataaagtgtcgcccctctgcgcgtcgctccccatctgccag

SEQ ID NO: 40371 - DNA, 1948 bp, Artificial sequence
  DNA replication origin
aggccagcctggggctttcagacctgggcgggatctgcccaggccacctgtccttctgctttgggccgctgtctcttggcagatggcctgacacctgggggtggcccaaggatgcctcagaaaatcttgattcccactctacagatggcctgattagccagaggtttccaggccgtctgtccgcctccaggagatggactgggacctttagacatcggtggagaacaggatgctctgtcccttgctgtccagggcagggatggcctccagccgcaagaagtacagcagcacctcgacctgccctcgcggagtggggaagaggagagtggctcagagcggggctcacagctgctggtggggaggtctttggggcccaagctcccaagtccacctcaggtgctagaaacccctgctggtgtcatgaaccccttacagtgggacgggggtggggtggggtcctgacaaggcatgacttgttgggtgaggggtggttatttattttagagatgcacagggccttgctctgtcccccaggctggagtacagtggctccatcatggatcactgcagcctctaactcctgggctcaagcaatcctcctgtgtcagcctcccagatacctaggattacagatgtgtgccccaatgcctgcctaatttttctttgtattttttctggagatggggtttgctacattgcccagactggtctcaaacacctgggttcagttgtcctgcctcggcctcccaaagtgctgggattacaggcatgagccaccacactcgaacacttggggtggttttaagcccccagcaaggtgcaccagcaggaccaggaggtggcctgggcaccccctatcactcccatccatgcaaacctaggcaagtccctgtctctgaatctcagccaccaccacatacaatgcaagtgggaagatgggcaggactgggggtggggcaggcagaggccacctctgtcaggctggggttgcatgggctggaggctgtcttcccatacctgggacatgacctccaaggaccagctgtcagtcatggtgatgggctggctggggttggcagggagcttgctctccttctcggagggccggagcagcgtggggccaaacaccgtgccaaggttgtgcagggacatcttattgactgcctccttctctgccatcctgtagaggaccgaagcagagggtgctgtttcaacgccaccaccaggagagaggcagaggggctgtgccgtgctagagtcctcagggagggagtgacctcgaccctggctgtgctgcaagctgactccagccttggtacttctgggtctcagtggcccaggacaaggggccagctctgggctgatggggaggtcttcatgatgtgcttgggagggaagggggggcggtccaaatgcactgctggccacggccaaagctctgagctctttgttaaggccacagtgcagagggaggagggtggcaaagaggagaggcaggggcgggggtggcagtggtgctagtccttagaagcagtgagttactgcagacaggggtcaggggataggtccgtggtgctgggggtctggtgggagcagaggggcaccccacggcctggagacctggtgtcctgggcagccacaagagagctgggctacctttccaggcggtctagaaggaaaaggaaggtgagcaggttggcctccggcagggacgacaacaggttgagcatgcagctcttctttgcaactgggtctgaaagagctgcaggaggcagtgggtcactcccctgggttacgacaagccggagacctctcccgaggtggtcacatggagcgcccgggacacgagtccttgcgcagtttaggcttgtcatcatcgtcacacccacagcgctggccgccagtgaggaccctgtgaggggcacctgtgtggggtgtgaaccacctg

SEQ ID NO: 40372 - DNA, 873 bp, Artificial sequence
  DNA replication origin
aatcttttccccacctttcccccctttctattccacaaaaccgccattgtcatcatggcccgttctcaatgagctgttgggtacacctcccagacggggtggtggccgggcagaggggctcctcacttcccagtaggggcggccgggcagaggcgcccctcacctcccggacggggcggctggccgggctgggggctgacccccccacctccctcccggacagggcggctggccgggcggggggctgacccccacctccctcccggacggggcggctggctgggcagaggggctcctcacttcccagtaggggcggccgggaagaggggctcctcacttctcagacggggcagctgccgggcggcggggctcgtcacttctcagacggggcggttgccaggcagagggtctcctcacttctcagacgggacaaccgggcagaggcgctcctcacatcccagacggggcggcggggcagaggcgctccccacatctcagacgatgggcggccgggcagagatgctcctcacttcctagatgtgatggcggccgggaagaggcgctcctcacttcctagatgggatggcggccgggcagagacactcctcactttccagactgggcagccaggcagaggggctcctcacatcccagacgataggcggccaggaagagacgctcctcacttcccagacggggtggcggccgggcagaggctgcaatctcggcattttgggaggccaaagcaggcggctgggaggtggaggttgtagcgagctgagatcacgccactgcactccagcctgggcaccattgagcacctctcttagtgatttttaagagctctttacatattgttgatgtgagccctct

SEQ ID NO: 40373 - DNA, 1133 bp, Artificial sequence
  DNA replication origin
gcccactgctgtcccacacctgcatggaaacagaaaccccgccacggagccccctcccatctccacagggcctctagagcgccatgtgcaaggacttcatgggcggggtggggtggggtcaggagcctgctgtgggctggccaggccctggccctccctgtcgcaccctgcgctgcctccatgcacctctcagggctgtcatggcttttcctgtggcttctgacaggtagagtcagcgatgacggcttcatagccattaagctcacagcactggggagaccccagtttctggtaagtgctagaaccttccacctgcagagtctggtgctgtgcgagatctcagggcagctgtgggcatccaccaaaaacacaggtgcccatgccttagaggcctgagctggccacaggggctgtgtgggggactggggtgggcaggggcgtgtgcagatggcattcaggcctgcgtttgcagctgcagttctcagaggtgctggccaagtggaggtgcttctttcaccaaatggctgtggagcaagggcaggcgggcctggctgccatggacaccaagctggaggtggcggtgctgcaggtggggcagccttccccttccccactcctgtggcttgtgagggggtgggcaccgtggggtcacacggggcatggtgggcagtggtcggaggtggttttgggaactcacccagggcatgtggctcactctgcagctgctggggttggcctggtggggaggaggaggtcagagggactctgaacagagaggggagatgctggcaggagggctggagacccagccctgcagggcgtgggcgtgcatcagcagcggggtgggaatagacctgtctatgcagtagaaacaaaccagacatggatcctgttcttactaacgatgtaataaagccagaaacagcaccagaggccaatgggtggggggaaggataaaatatgagtgaatggggctgatccaggccttctcacttctcaaggaaagtgtcgcaaagttgggcatcgcatccagggctgagattgaggactggttcacggcagagaccctgggagtgtctgggtgagagcagcccccaggctgagaggacacgagcatcagccatggttccagc

SEQ ID NO: 40374 - DNA, 1249 bp, Artificial sequence
  DNA replication origin
agcctgctggtgctgcgcttgtgcgcctggcccgcgctgctggcgcgccacgagcaggtgcgcggggtgcaggcgggggcgcgggggcttctgccggtcccgggagcctttacggagcttcctggcctgaaacgggtgcctcccaagcatctcctggagcaagggaagccaggaagggaggcgtttcctgcagtccctctcggacctcgcaaattttcctatttgtcgatgtctaccaactaaaaacaatggtcgttttcatatttacgatatataccacttgtgggaatacagagttatcacttggaatttaaaatggagtattcttcatgttgagacaagagaatcctggtgtagggctcatagcctggaaccccggaattcaaaccccgggacccagcagcttcccagacacggccactctgagaacactgttggggaaaaatgggaagcccctcaaacgcccagctttgaactcacccatggtagctttaaaaagtgtcagggcttttggtggcggtggtggggggcaacaagcagaacactgttttagccgcatcagcctaggggtactagagatgacggttatctccaggtgaccctgggaagagtttgcaaggttccgctttttggcgccagggtatctggtggtgttgatttctcaggtgagactgtacagaggtcgggggctgcacccctggcctcaacaggaggcgggggaaggcgggggacggtgtcagatgagaagcaccgagccacagttgagcttaggtgaggcctcggcgggtgcgaggtgagggcagggatccacgaactcagagtcagatgctgttggcccgaatcccatggggagcgccaaggtcagcctaggacccgtggtggcgggagtgcggaggatggtggaggaagaaggagctgaactggacagatggagggctctgggagggcattgctgtgtgtgcacacaaggatgtcttaaggtcaagttttggtcatagagagccccggccaaggagacaggagggcgagaagggacatcccaggtagaggaactggcaaggtgagggacggcgatgtggaggctttggggagtgcccacatctaaggggcatcccaaaagaggagccagtgctggtggtgctgcaataggaggaggaggcagcagggcagaaatgccaggggagggagtggccagccacaggtccctgcccagggcaaggacgggcatgctaggtggcagctggggcca

SEQ ID NO: 40375 - DNA, 2533 bp, Artificial sequence
  DNA replication origin
acgaaacccatgaaccccccgcccccccccgccccctgcacagaagccccttgctggagcacgatcgcccccatttttcagtaagaaacaggctcaaggcttaagagcgttctgggggccctcttgggcctttgtggccctctctgcaccaccccagggaggggacccaggcctgatgttacccataaccctgcaggggtcccccacctcttccttcctgcggaatgtggcctccaaacccagaagacgctctccgaggccgcctgcttagtatcatcccccactctactaagccagcccccagcggggccgggggggcgtcatggagccagagaacccagtgacacccctacacacaccacacagggtgggggtgttccttctccgtcttctgctcggggggcatccgatgatgatgagctcctaagcccatcccggggtcttcagacaactgccaggctgtccctgcacctggaggagtgctgggagtcagctcagctgggctgggtcctccccaggcccaccctgcatgacaggaccagggtcttgcaggccaacctggtgtcagtctgtaggaccctgactcaaggacggagtgggccagcctgaggtcttgatggctcccctcagagcccaggtccactgatatgaagcagagagacctggtgactgggcagccctgtgctctctgcctgcccctggccatggaggtggccctgagggagatgagcagggcacagggctggtgacctgcctgccttgtccagaggaagtgaggacctcccagagccctggtgctcccatctgatcccagtggcaggcagcttcccagggtggagccatgctggccgggccctctgcctggtgtggaggctgcactgcccacatgcctctggctgccgctctgtggccctcatcaccttggcctgctttatccctatcacccttgtcccagcctaggcttatgagggcattgtggagtgcatgccattcccagccacacagaaggtgaggtggggcccagacacccccagccactctgtcccctggcctcctgaaggggtgggctgtgcacacactgccacctccccagagggtgctggctgccgagtgccaccagctcagcccctgaggtggctcaacaggtcctcccagagccacaccaagatgtcatcacccattgcacagatggggaacctcaggcgaagctgacagagccagtgggaggctgaggcctgacccctaaacaagcattcttcctccagggtccctgcacgcagcagcccctagactaggaactgagctctcaccacagggatgtatcagaccctagatgagtcatgaggcactgaccatcagtctgaggacagcgctggggtggaccaggctccagtctcgggctgctctgtgcttgcagagagggcttgagaggacacttgcgtgcttactatgcaggcgtctcttcaattaccagtgacccagagcggcccactacaattgaagattgtgaccccacaccctatctcataggtttaaagcccctcccacccctcctgcagcagccaaagtgaccattctggggcatgggatgggcatggggggaaatggggagccagggctaacctggaggcttctggcaccacagccctctccagccatcaagtccggctgttcccagctgctctgggctgggacctgggcctccacctccccacctgtctgtgcagtgggagcaggcccaaggcccacagagggagcgctgggggaccggctggtttcctgtgtccgccacctcggtcagcaccttggccagcgccctccccactggaagctgagcccactcctgggtgctagctggaacgattaggtgtgggccagcgctgatagggagttatgggggtgcagaggcagagttgagcagggctaggcagccggtcggtctgctaccagcaaggcacagcccgcttctcaggctgtgcatgtgggagggtttggtaagccacatttttcagggtgtagccaggtcggggggcagcatggggagtggtgtactctctgggcaggcgaccgcggagccatcacccccccagggcccaacgggcaagggagggagggcagctgacggctggtgaggggctagcagggagggcttgacaagggctggagcccctggtcaaggggcacagccagttctatcgggtcacctcatgggaggagccagggaccctgtgggcagagcctggccgtctgctgcccggagtctacaccagtcagttcctaggaagccccagcaggggtgctgggaggacaggccatctgtgcccagctgatgcaagctcccaggctttctggacacgtggccctggggatcaggagtgagctggagactgcagacagctgtgacctcagggctgggcagacctgtcacaccctgcctggactgggtcagcagggccacacgggcatctgcccgaatcgttccccacctcacacccaccatgtagggcacatcctttgccagcttccccagccc

SEQ ID NO: 40376 - DNA, 1661 bp, Artificial sequence
  DNA replication origin
cgcctggatgccggcccggggctgggccggagactggcgcccgccccgaagcgactttcggtccccgacccgctccgcctgacccctatgatgaagagggcgtccactggaggtgagtgtccacgcggcgccagagcccagcaggcggcggggcgcagagcggggtggttcgcccctcctcggagccgcagggcccgtccagggcttccaaggctggggaagcgtagccgggcggccgggagggccaccgcagtgccgcgccaggctggggccaagggcgccccggccccgggagggcggagccggaggcagcaggaaaagttgccgcttcccgggtaagttgacggcgatggcggggccgggggtggcggcccgggggtccccgaggctgggccaggtccggggtgggggccgcgggctggaaggacggggtccggcctcggcgccgcggccacgaaggggttaatgagcgggtttttttgcagaaacgcgggtaccgagagtaggtggaggtatcgggccgcctccgcccccgcctcgcggactgggctcagaacctcccgtttttctgaggtcaggcctcagggggatcaatgggggcgttggcggcagtagagggcgtgggggacaaggttgtcccaacgctgcctccagggcgggcggtgagaggaggcagcaatgcccagacatccgcagcccgagggacattgagaggcttggctgggggaatcaggggtggtggggcaatcagcatcccctccctggcagccttcgtgagactcccccgccccactgggtgtgaggtcccgcagtggggggcaagggagggtgggctccatgtgagttgggcatgccctgcctggagggtgctccccaggtgcccacccaggctgccctgctgatgtccatggtgtcgcaggctgcacacacgtttccttgcacgtgcacatgtctacacggactgcacacttgcacacctctggtgcacatgcgtgccagcgccaccccagtgtacacatgcacgaacactgggtgcacacacggactctgagggtgcatatctgtgtcctcgcccccgcttgcacgcccacggccacacatgcatgtacgcgacatgcctgctgtggtctccacgggtggcacatgctggggcccctttcacaatacccactcccgcacccacatgctcgtctgttgagtggggaggccaggcccacagacaggggcaagacatcctgggccccacctctgcctgcctgcctccgtgtcctgggggtccccgcctcgggcgtgtgtgcgtgtgtgtaacttggtatgcatctgcacgtgtgtctgtgcgcgtgatcatgtgtgcctgcgagcacataggcatatgtctctttgcctccagggtgtgggtgccccttgtgtgcctagacaggctgtggcctaatctggagcagaggccctggaatgtgtgttgggggctcattgaatgcccccagcccagggtgtgaggggcagggtctcccagccactccgcacccaccagggctgaggcagtgatagatgatggtgggctggaacctgtctggtcagggaagacccatttcaggccatgaggtcaacactgtgaccaacaggccagaccctgggcacccttggtggccgctgcagcttgg

SEQ ID NO: 40377 - DNA, 1373 bp, Artificial sequence
  DNA replication origin
agaggccccgcctccagtacctcagtttctccatggtgaggaccttcttggtgaggggttccgtggtgggctcccctacctccggtgttgtgtagggtgctgagcagatggatgccatgctgcatgatgggcaagggtggcccactagcactgtggcaagggccctgggctggggcttcaattggcaggccacacctcctgctcccctggccaccaccagaggctcatctatagagtggggaccagcaggttatccttgtaggttgtgtgagggtgaaacatactagcagaggggcagctgaagcagtggggctggccagtctctttttctaagcctcagtcttcccatctataaagggggtactgttccctgttcttctctactgaggtgaggaggaagtgagctcccatgccgggggtgggaatgggtggccatcagcacctagaccccacctggcagaggggcacgtgcagggcctgccgtggcagaaccgtgacctggatttgggtcctggctcagccacctgctggcagtgtgaccttgggtgtgacaggtcacctctctgcctcagtcttcctcacctgcaccatgggccagtggtcagggattatcggggcacttccaggctgaggctgggcggaattggcccggctttccctgtggagttccgactctggtgcttctgcctcagaatgcccagaacacctccccacaccccaactcagcagagtcctcctgggacctttgcatggccagctggcccctcaccccatccatttgcagaagggacaataaaagcccctagtcaggcaactcaggccacaggtgagtggagaggggacagggcagggatgctgcccagcttgggagaccctcccatagtaccttcactccctccctgccctccccctgttcctcacctgggggtctgtggaacccctgagcctcagtttccctgtgccagggtccttccactgggactggcagaaacgtaggtttgcatggagtgagaagcaggggagaggttgagggagggcctggcccagcaggtctctgaaagccagagggcttgtggagggtctatggaggacacccccacaggggctggggccctggaaggtgggggaaggtcctgttgtcctgggaggctggggactggcccacagcctgtggaggggctggggtttgtttgctgttgctgtgagtgacaggcaggctgtgagggccagggcatgtgggaccgtgccctccgcctccctctgcccaaggacagtgcagccttgtagcactgccctctcctcgtccctgccccagccttgaattcatgctttgtggcacggacggccctgtgcagccggtgcaacaccaggag

SEQ ID NO: 40378 - DNA, 1037 bp, Artificial sequence
  DNA replication origin
gacagcccctggaagctgtgtccccgggtccaccgggatctggcccctgcaggtcagtgcatgtgtgcatgtgttgggggggggattgaggggaccgctaatactgtcctcaagcagctgctgaggagaagactgggtccctctagtcatgttcatccactcaatcactccctgcagcccgtctctctggaaggtgcaggaggaggtgagaattgggcactctgtcaacccctcagactcccccattcctgctgagtcacccgtcctctgggacctccagcagctggctgtgctgatccctagagcctcattagccattctctccctccccccagtcattaaaacactgccaacaagagcgccctgggttcttttccccagccctactggagacgggctgtgtgacccaggggctctgccctctctgagccaagtcttcacctgtgaaatgaagagatctctgaggtccccaggacggatgacagggaggcctggacggtgaagaaggtgcaggagagagtccagatttgcagaaagagctgttagttttgtgatctctgcctggaggtttatggacaggttggaagagaagctgagccattgcaatgagtccagattagggcttgttcctgcaggggctacagatgtgggggctggcacttgtggcagagggttccaaagtcatgggcatagagaagacaggttggcaggagcaagggcagaatgggagcggggtcctgggggtcctgttgggccctgaggaggactgcagaggtgtcggtgaggggtggacaggcaggcgtgtcagcacaaccctgagcccctgagctcaagtgcagggatggccgtgaagcaggtgatggggaccctggcttgagcttcatcggtagcggggctggggtggacaccggggactggcggagaggagatggggtgggggctggtcaaagcagtgtgtccctcagggaacgtggcagagcggggcgcgcacacaggtctgctctccagttcctccgggaagttcctcaaattcagcc

SEQ ID NO: 40379 - DNA, 1100 bp, Artificial sequence
  DNA replication origin
ccccgcataccgagcacacggagcccgcggctgtgcgcgccggtcctctcgcccgcgcccggccgccccggcccccgcacgctccaccagcttcagcagccgcggcacctcggaccgcgaagccgcttcggcccggagctggccgcgcaggcgagccatccggcccggggctcgggcgtcttcctggcccggcccattggattgcggccccggatcccgccggcggcccgtgccgcgccgcagcacctcgctggctctgtacgcactacgcgcctgggcccacgggcggccgggctccgccatccgccctgctgcctccaccgccgccagcgcccgggatggccgggagccccaggctgcagcctagcgaccgctggggcccaggcgacgcaccgtggagggggcccgcgggacggctgtgggaacgaccaaagccctgggggttccggtctggggcgcagggaaccccggcagggccgggtctcgggcagcccggttcccaggggaccctgcgggaacgacgacgttgtgggcaggtcctcacaaagggcatggcccagtttctgggcataggtgacatggagcatcgccagccaaagaccaggcaccacccgctagacacgagtcaggaactgagctcacattttacactggaagctactgtctccatcatagtcaagggaaagccaggagtggtcatggaccccacagcccttttcaatggctcagggcgacgtccttccatgtagtccaggccattatctcctcaccctgtcccctagtccacacagctggaggaatccatccaggtggcatctccagccccaggctgctggcccttccatgggagctcttcagggtctcccttactctccaaggcggtctgcctagggcctctggaaatccctggccatctcaagctgggttttttgttttgttttgttttgtttttacaaacaggatcttgctgtgttgcccaggctggagtgcagtggtgcaatcatagctcactgcagcctccacctcctgggctcaagcgatcctcccacctcagtctcctgagtagatgggactacaactgtgcaccaccatgcccggct

SEQ ID NO: 40380 - DNA, 1254 bp, Artificial sequence
  DNA replication origin
cgcggctgctgaagctggtggagcgtgcgggggccggggcggccgggcgcgggcgagaggaccggcgcgcacagccgcgggctccgtgtgctcggtatgcggggagccccgcggcggggccacctacccggcgggggtcctggaggtgagcgagcggcggctgcaggagggcctggcggcagtgcgcgaggagctgggcgccgggattgaggcgctgcgcgcggagcttcgagcggagctggatgccctgcgcgcgctgctgccgccgccgccgtccccgcctgcccgccgcgagccccgcgccgtcccccgcgccgcgccccgcggcccgaccctgccgcggacgctcggcaccgtgagcgccctggtcgccgcctccaggcccgcagacgacgccccggacggcccagcagaatgcggagcgcaccgagccccggccaggaagaaccacaagaagatgccagtgccgcctggggccccgcaaggtggcggggactgagggcggccgcacaagggcagcctaggcgaggtgcggaaggcgtcgcgctggctactctggtacccccaggacggggcaagtgagcagatcggtccccctcgtggagcgtggctctgagtcaaaagggtgcccgggtgccgccagttagggctccggtactggaaggagggggtgggccacgtgcgtctagggagtgcagctggcagccggggtccttgccagagactgagtccggctagagaacagggtggagcccctttggaccttagagctgggcctttgggccttgggtctgggtgggcctttgggccttgggtctgggtcagcctttgggccagggctgggtcagcctccagggaacagccgagactcctcttccttggggtgactgcaggttctttttcttgcaaggtctcagtgaggaggcagggtctccacgcactggaatagtgtcaaaccacacacaagagcacagaacccagggacacagggcggctgagacactcagctggtgatggtcctcaggatggtgtcaaccagtatgtaatcacattccacagggcaccaactggacagaggcctccggtcagcctcactctgactgcaaccccctctcactggacagcatcacctggacacagagcctcacctagtctgtgtcccatggacacaactttgctttggacagtgacaccaagaatactcacccctttacttagccagaccacaggcagccacctggacacaaacatctc

SEQ ID NO: 40381 - DNA, 1036 bp, Artificial sequence
  DNA replication origin
ggcaatggggccgcactggggagaaacctggcctgaggaagggcctctgctcataccctgtgccctaatggcacaagatggacaggtggtgaggtagagagggtgtcgtgtgcctcctccccttcattgctactctgaatggacactgatcctcagaaccacctggagatttgggaggctgggctgctgttgcctgtctaccgcgcactgcagctgcacttcaactgccggcggtgggggggcccgaggcgagcagactcggagcacagcctggacaggcagcgccaggctatggaggtagactcgggaacaaggtggggtggccggagtgctcccacggaggtgagagagagcaaggtgagggcagctgggtatctcccacatctgtgcctccccccagatgcacgtggtccacagtaacacaaagtaccagagcatggaggaggcaccacgccacggtgatgggctcgagtgcaggccctgctgctggaggtgctgctggcggtgaaggcagggctgtgattctatgtatgtttccaaaaaaggggtccatggggatcctggaagtggacaggccaggcctgtggagtccgtggggggatctctagggtctataggatctgtgggaggatggggcggtgggaatgcctgaatcggcagggccagtggcggcgagaaccctccaccccatttcccagatgccagatgcctcctgccactgggagcctcctgcttagagtaccccagctgagttccctcttcagagactccctcactcagaacccctcgcacttggagcccctcccaggagcaggactgtagcaacaccaacttctgcgccatagtgtcgggcttgaggaaggtgcctgagccaggtgaggagccaccgggtcgttttccggctcaggggcggggggtttgctggggatggcaccagcagggcacagggaggctggttccaatccccctccctctgccgcccggggctctcagtgaatctgatgtccaccttcccgctggcgtcgatgcggcccaa

SEQ ID NO: 40382 - DNA, 845 bp, Artificial sequence
  DNA replication origin
ccgaggctggcggatcactcaaggttaggagctggagactagcccggccaacacagcaaaaccccgtctccaccaaaaaaaatatgaaaaccagtcaggcatggcggcgcgcgcctgcaatcgcaggcactcggcaggctgaggcaggagaatcaggcagggaggttgcagtgagccgagatggcagcagtacagtccagcttcagctcggcatcagagggagaccgtggaaagagagggagagggagaccgtggggagagggagagggggagggggaggggggagagggagagggagaggggaaccatctttgatataaacgagaattaacaaaagatgtgtaaaatttttgagggagaaaaatttgcagttttattaagagacattaaagaagacaagtaaatagtggcagaatgttcttgcctaggaagaccgaatcttttaaaaactcatattgttctgtggattcagtgcatctttaaagctccgtgagttttatgtgaaatgcgataagtcgattctaaaatgttgagaagaattaagtcgtagtattgagaggtcgttgtgaagaagaggaatgaggagggagcacttgccttgcccgtatcaagatttacttcaaaattggctcagggaaatccaaattggccagtgagacagaagctgtcagaaacagacctaagaagcttgaattccagaggtggaattacatatcgctgtgcaaagggcagactcttcaaacacagtgctgtgacagtcggagaaggatgcagttggatccctaactcacaacatacaggaaattcagttttggataaattataggagactatctttaagacct

SEQ ID NO: 40383 - DNA, 1083 bp, Artificial sequence
  DNA replication origin
ctggccgggcggaggcgcccccccacctccttcccggacggggcggctggccgggcgggggctgaccccccacctccctcccggacggggcggctggccgggcgggggctgaccccccacctccctcccggacggggcagctggccgggcgggggctgacccccacctccctcccggatggggtggctgccgggcggagacgctcctcacttcccagacggggcggctgccgggcggaggggctcctcacttctcagacggggtggctgccgggcggaggggctcctcacttctcagacggggcggctgccgggcggaggggctcctcacttctcagacggggcggctcccgggcaaaggggcccctcacttctcagacggggcggctgccgggcggaggggctcctcacttctcagacggggtggcccggcggagacgctcctcacctcccagacggggtcgtggccgggcagaggtgctcttcacatcccagacggggcggcggggcagaggcgctccccatatctcagatgatgggcggccgggcagagacactcctcacttcctagatgggatggcgacagggaagaggcgctcctcacttcccagactgggcggccggtcagaggggctcctcacatcccagatgacgggcggccaggcagagacactcctcacttcccagacggggtggtggccgggcagaggctgcaatctcggcactttgggaggccaaggcaggcggctgggaggtggaggttgtagcgagccgagatcacgccactgcacttcggcctgggcaacattgagcactgagtgaacgagactccgtctgcaatcccggcacctcgggaggccgaggctggcggatcactcaaggttaggagctggagactagcccggccaacacagcaaaaccccgtctccaccaaaaaaaatatgaaaaccagtcaggcatggcggcgcgcgcctgcaatcgcaggcactcggcaggctgaggcaggagaatcaggcagggaggttgcagtgagccgagatggcagcagtacagtccagcttcagctcggcatcagagggagacc

SEQ ID NO: 40384 - DNA, 808 bp, Artificial sequence
  DNA replication origin
ggcagccgccccgtctgagaagtgaggggcccctttgcccgggagccgccccgtctgagaagtgaggagcccctccgcccggcagccgccccgtctgagaagtgaggagcccctccgcccggcagccaccccgtctgagaagtgaggagcccctccgcccggcagccgccccgtctgggaagtgaggagcgtctccgcccggcagccaccccatccgggagggaggtgggggtcagcccccgcccggccagctgccccgtccgggagggaggtggggggtcagcccccgcccggccagccgccccgtccgggagggaggtggggggtcagcccccgcccggccagccgccccgtccgggaaggaggtgggggggcgcctccgcccggccagccgccccgtccgggaggtggggggcgcctctgcccagccgccccttctgggaagtgaggagcccctctgcccggccaccaccccatctgggaggtgtacccaacagctcattgagaacgggccatgatgacaatggtggttttgtggaatagaaaagggggaaacgtggggaaaagattgagaaatcggatggttgctgtgtctgtgcagaaagaagtagacatgggagacttttcattttgttctgtactaagaaaaattctcctgccttggaaaaaaaaaaaaaaacaaagatggttccactgggaaaacagaaaccatgctaagggatttctaacacgaagggtttaatacagaaaataggtgctttcaaaacaactggcaaggctatatagtgtgagcaaaagtaaagtgggc

SEQ ID NO: 40385 - DNA, 1283 bp, Artificial sequence
  DNA replication origin
cgcgcggcgcacctggccgcagcggctcggtgacagtgagcacgagcaggaagagcagcaggaaggcgccgctgtctgccttgggcaccatttatcctccgttcatcgtccccggggcggctggaaggccggaccaggccggactgagggtcaggggaccgtgccaagcggagggtcaggcggagctgaacctgggcgaggcgcggagaggcggcgggaaagagcttcggctgggccgcgggctggcgcacactctcggctgcaacctcaggcaccgactccagctgcgcgcaagatggcggccgtcctgctcggctccgcgccgcgccgccccgccccgcctcccgcccgcgacgcaggcgcgggccaatgaccgtcaagatggggggcggggccagagccaaagccctccgaagagggtgaggcctaaggtcgcgacggcggagggcggggacctaagggcggggactgaggggcgggctctaagggaagggcgggaccatacggagtgaggcgtgccattggttaagcagagaggcagggccggggccggggcctgagcggcggggccaccgaagggagtagggtctctggacgccggttagggacggcgggcgcgggacggcaaggatggacatcgaaaggcgcggggcatggggcggggcgccgaggggtcgcgcgggtggggagcggagagaacgaagtgggaacctggctgggactccaagggtcttcacacctgcaagctcaggtcccgtgagcagcccaaaagtgcgccccaaaggggtctttttaaggccgaaccgctgtggaggagggagggcctgccggttctgagggtggggaaagaggaacaggaatggcctaagagagtgtcaggcaaagagagaccgggaaggccaggtcctggagactgcagcgaagccggctccctggaggacctgcctacacaatggctaggggaaggccacatgtgcaggaaagaaagctaggcagagaggaggctcagcgcccctgcgaacagtgctccaagtgccacttctcccgtcatcaccaacagggtgaaccttggagggcagtgtcggcgaagagtccaactctgtaaaatatttgaagacatttcttctgagccaatatgtgaccaatagcctgggacacagccccaggagatcctgacaagtgcccaagggggtagggccacagcttggttttatacattttagggagacaagacatcaatcagcacatgtaagatatacattggttcagtcggaaaaggcggg

SEQ ID NO: 40386 - DNA, 1409 bp, Artificial sequence
  DNA replication origin
aggcgtcacctgggactcctgccctgggcagtgtgatctcagacaggtggcccactccctctgagctgtttccagctgtaaagctcagagcaggaactcctcctgcagcccctcccacccgggcttacctggctgagctacagtgaggctcccagacctgcttgccagccactgccctgaggaccagcgcaggtccgtggggataattgaggaggaggccccaagagccatttctcaggatgtcccacccgggcccccatcccagcactctgggctccctctccaccatgagtttcttggtgggaaaaatagggtggctccttgaggcctgttggcagagtacacagtggcaggctgctgagaacccctagaaggctttatggaggcctcagcctctcagctgagcctggagagctggacagagtctgcaggggcgagttccctgtatgattatgggccgtgtgtgtgatgggggcgcagtggtgaggcctggtgcccagaggccaggggaggatgcactgggccacaggaggaccccagaggccagggtaggttcctccccactgggcagtgggagccaggctggtgggggatggctctggacactgtcggaggtggtgggagggttggggtggaggcctgaaattaaaccacgtggaagggggctgtgagaacatgaggaggcaggtggacttggggaagagcgcaaggagggccagtccaggctctcactagaccctacttctccaaggggactgaggttggggtcttcccgaggtagagaagtgaccataggtagactgtggacagtgatcatcgatgttgctggcagtggagctcctctgctctgacattctctgtgtccagcacctgcttcaggccccgccctgggggagtgggagtcgcatgacagtcctagccttgggtttgactttggccccatccacttagaggccatgggagaggtaattctgaaagcgcttgtcctttgtggttgcctgtcgtatcctacttgccagtgtcaacttctaatgcaggggtgtcgtcccttgggacaggctgggacggggacaacaagatgtggtcaagaccacacaagactgtgggacatgctcaggctggagtgtggctgggccatccagcagagcctcctatttctcccgggctagagaatgaccacagggtgcggcgaccccggcactgttgaaagctgggtgctggctggacacagggggcctctgatggacagagcacaatgaacgagttgcccagcagggtagggagctcaggagtggctgagaggctggccacctgccctctgcagcctcccacaacccccactggcagccttgtggggctggagaggtctgcccagaccctcagtcccaactgcagataaagcctgcgct

SEQ ID NO: 40387 - DNA, 1759 bp, Artificial sequence
  DNA replication origin
cttagcaagcattttttttgcctctgaccttctccttggaacaaaattagttaccagtagacttaggtgattgctgtactgcatgtaggcacataaccccaacctatataaacagtaagaaaattgtagcactttgagttggtctgctggaattatctccagccttctccctgtatccagttacagtgataaactcccttctttcctagtttgtctgcttctcgttattgggcctcaagaaaatgcagctggacctggcttggttctgggaacagtggtacctgggagggactgccctggaccagtcaggctggcagtggtgccaagcctggtagacgaaagcagctctgtgtttgggagcagaggcggcaggcccctcagggtagagagccgggcaggtgagtcgctgctgctccagcgagcaagggcctgtgtatgggtgggtcggggctgcagtgcatgccagctgggtgcccagggtccagggcaggtggctgcatgtctgaggggtggggcagggcctcccttgggtagaggcggcaggaaggcacccaggcagcagagagcctgggagaagagagggctttttctgaaagtgactggaagtaggagggaagtgaaggagtctcggctttttctctaagcggcagcctgcccctgcaggtgcaagacaggaggagggccgtcccagttgtgttttaagatggtcagtggcagagagagagagacagaaagagtagaattggctttgaggtgagagtgggggccagtgcctttgaccaaatgagaagaggctgggccagggtgggcctcaggatcagcaggagacagagaaggtcaggtcttagtcttgtttgctagactgtgagtggatgggccttggtgctggggaatcctggggctgagagcgcccaggccatgcactgcaaagaccaggcacctgggtgaggagggggttctgaatcacatcagtttgggcctttgtgtggagtgagcagcagtcgcctgttggaaccctgacattgggtagcatttacgtctcgggctgccttttgcacctgcagtgtgaacatcctgtttcagtgctggtgtgtggatttgtgctttgggaaatgtggcatcctgtacatgtctcctcaggtgcgttggactgatgttcatttgtcatccatcacaggcatcctggattcacagggagcagctgggacagatgagctgtgtgttcagtgtttaggggagagggaggaaggcctgttcccaggtggggtttagtcctggaaggtttcaaagaggaagtgatgttggagctggggtgctggggatcagcagactccacagggttgacaagaggggcaggacatgtcagacagatgtgacatcttggccctggcatggctgtgtggacccactccatctggagtacacagggagcaccctgtgtttggaggtcactagggaggattgcagaaacagggcagccaaagtcaggatgctaagctgagaggctcagatgggcagggtgggccgacgtgcctacagtgactgccttccagcagtgacagcctcccagagtcccacccgaagctctttatagcatcggtggttaatagctttagtttgatgctttcctttttcctgggagcctctacggctgaaatgaccaacacttcactcctttttgtcctagaaggggctggctatgaaaatttgcaggccaggacccaggagcatgagacctcccacttaccaccccctgacc

SEQ ID NO: 40388 - DNA, 1149 bp, Artificial sequence
  DNA replication origin
aagacgaacaaaccggcaacagtcaggtggaaagagcatgtgcaaaggcctagtggtgggagggagcaaggcaagttctaaagaagtcctttggaaatgcagagtgcagtgaggtgtgagatgatgccagagaggcagggccaggctgcacagggccttgtagggtatggtgaggtggtttgtcttcattctgaattgaaggggcaggccaggcacagtggctcatgcctataatcccagcactttggaaggcctaggccggcggatagtttgaggtcagaagtttgagaccagcctggccaacatggcaagacctcatctctacaaaaaacttttcaagttagtcgggtgtggtggtgcccacctgtggtcctagctactcagaaggctgatgggggaggatcgcttgagcccaggagctggaggctatagtgagccatgattgcaccactacactccagcttgggtgatggagcgagaccttgtctcaaaccaaccgacaaacaaaaaagcagagccagtgtggtgcaggtggacaagattagagacagttgcagtggtcaaggtgagaggtgacggtggcttacatcagactggtgcagttagagctggagagattctgggatttattgatttattgataaacagtaaaactgacttcctgtcagcctgggtatagtggatgatcaggagagggaggggtccagggaccagtttcgggtgggcggctagctctctggctcatgtgcctggtttgcacagaagagctcactgtggacaaggtgaccttaaggagtctgtgggcttcaaggggacagctggagataaatacctggctcaggggaagtgcctggcttgagatgtaaatgtggcagaaagatgggaattggagtctgagggtaaaagataaaccgggaagagggtgaagatgagaagcgagcgcctgggtgtgagcgtgaaggatgcctatgttaatagcctgctgtggggggtcagcctgccaaggagcagctagagctcaagaagcaaattcaggagagcaacacagccactgagccctggaaggtggcgctccacaagctctgatcggggctcccaaaacaatgacagatggccattcaaccaaggaactcaaggggcctggagcct
